United States Patent Application Publication US 2015/0052636 A1 - sequence listing, part 17

SEQ ID NO: 58089 - DNA, 457 bp, Populus trichocarpa
  Intron number 2 from transcript POPTR_0010s18930.1 (locus POPTR_0010s18930) derived from phytozome v7.0 (chr-ID scaf fold_10; pos 17014873 to 17015329)
ttctgcatcaatcaatcaattcacctggtggtaagtctttgattttacttttcttgtttcttggggctctttagatttccttttaattcttttcttgttggttctttatgttaatgctttcgttctgatttgcgtaactgttttaattttagtcgtatcaattaattacattcatttctttattaatttcgatgcatcaaatccttggttgaattgtgtaattcaagtttctgtaacagcccaattaacgaaaggactgcccttttttttttaatgcatatctgattctgggttttaaggatgggtcatttcttgcttttgttacattttttatttgggttttgatcgttcttgcttgtatgaaattgacaatcttttctccactttatatgtaagtttaatcgttgccgatttgttgacagcaaactttgatattgttccccttcgttcagcttct

SEQ ID NO: 58090 - DNA, 932 bp, Populus trichocarpa
  Intron number 1 from transcript POPTR_0010s07390.1 (locus POPTR_0010s07390) derived from phytozome v7.0 (chr-ID scaf fold_10; pos 8454899 to 8455830 reverse strand)
ttcgtttatgttttcttttatttcaagacctgtgcttgttgtctcttcctctatacccttcgtgaattatgtttattggtcacctgaaatttcagtgatatgtcttcattgtcaaatccataaatatagcaccttggtttttatccagaagaaaaggactagatgggcgtgtatgtgggcgtgtatgtgtctgcatatttatatgcttgcaagtgtttacatttttgttctctactcagcccagcactcgttgtctaagatcagacatttattcactcagcaagtgtttacattttcccccctagtatgtttcatgtgggaaccatgatcttgagaaaattgttactgtaagtgtgaacaaagtaaaatagccggcggtgctacgcaggagttgcagtgccgcagcttgactggacaccagaacctgtttttattactaacactggaaatagatatagatatacatctattgcttacaattaacagtatatttttgggtctgctacgttcctggaaaagagaagtgttaggcattgtcgtcacattctccttcaaacatttcagtgctgcttccagtgattactggaagtgtttatagtcatatttttttgaagtgtatctcgatatattaatggaaatatttgattttctcttatcttattcttgtacattgaattttgaactatgtttggacataatgtttgcgcaggtggctgggatgggaggagattgaatacttagccatctttttctcctttttggggggttttactataaagattattggaaccatgaactaacataacaaatgtgatcacggatcatccgatactttcttctatttaatgaaaatcatggtatactagcctgttgatttgctgattttgttcgggttagacaaaggtgtcatagtgtatatttgtgatagccgt

SEQ ID NO: 58091 - DNA, 647 bp, Populus trichocarpa
  Intron number 1 from transcript POPTR_0010s21030.1 (locus POPTR_0010s21030) derived from phytozome v7.0 (chr-ID scaf fold_10; pos 18463764 to 18464410)
ctcaaggcttcgacgtttccaatttcttccctcaggtccatataaattacatctatcctcgttctctagtttaaaaattgttaaaatcaattggaactgaattttcaatgcaatcgcactaattatgcttacatttttaaattgcgacatgttaatctctgcttggaaataagaatttggatattgaatcttttttgttttttttttggaattttaagttattagctttacttgtttgagtgatgagtagtcaatgattcgcgttagatttagaagaaacgagaaattcgattgcttgggaatctatttccacgattaattacatattctagatgtagatactcattttaatttaattataaaccaaaacttcaggggaaaacatgaggttttctcatttatcatcccattcgaagtttaattttaaaatatatattgttaaaattcttcttataataggagtgcaatccaagactcattgcttctgaaatgctgcgtgctctactgttttactgtgtgttaatcgagtaattaggactgaattttggctcgaggatttaaattacaatttcaatactctatcaacggagaatatatcttatctcatctgctcttctttaatcaaagggaatttcaggttgttaaaa

SEQ ID NO: 58092 - DNA, 311 bp, Populus trichocarpa
  Intron number 4 from transcript POPTR_0001s17110.1 (locus POPTR_0001s17110) derived from phytozome v7.0 (chr-ID scaf fold_1; pos 13978483 to 13978793)
tacctggaaaagaagttgtacaagttattgcgaaggttctgctgcatttcctttcttttatattctgcatcctcaagtatggtctcttcttgagtgaagttgattttcaagttgtttacatgtggttctgaatggaatccttgagatgatatttattggataacaaagaacaaaaaaggaaaaaaactgcatttgattagctagttaatgttgtagaggacaagttggttgtgtaaggctatatggatgtttatgtttttgctctttgtttagtggtgatttaatcaggctttatgatatatgatgccagg

SEQ ID NO: 58093 - DNA, 623 bp, Populus trichocarpa
  Intron number 3 from transcript POPTR_0007s09660.1 (locus POPTR_0007s09660) derived from phytozome v7.0 (chr-ID scaf fold_7; pos 9164000 to 9164622 reverse strand)
ttgtgctcctggtgagtaatgtttggttacttttctggtgtattaatatgggtgcaaaaggtagtacactgatccaaactgtagctggaagtgaatatcctgctttgcataaatttgaaaaccttgatctgatatagaatcttgcacaagtgctaaatggggctttctttgtttttatgggcatgcttggtttttctacaagaaaaaaaaaataatacttgggttgatttgggattgtcctgcttgagtgaagatatcatggtgctttaagctagaagcgtaaagtaggtttaggatggatattgagaggagtcaattagcatgaaatcactaaatcttaaagggcataattgcttggactgtttgggaggcatctaaacagtattactggactagtttttagttgaaaataattttgcaacatgtgtgtctccttgagaaaggagagtagcatattcaagaaacagaggtaaacttcttttagtttggaatctctaagtagttttaaaaaaaacgaatttggattatactccagttcttcatttatatccaattttttgataatatgatggtttcgtaacttgtttaatcatatattcttatgttcaggtgctaagctttgc

SEQ ID NO: 58094 - DNA, 892 bp, Populus trichocarpa
  Intron number 1 from transcript POPTR_0002s13330.1 (locus POPTR_0002s13330) derived from phytozome v7.0 (chr-ID scaf fold_2; pos 9905506 to 9906397 reverse strand)
ctggcaaagttataatcaattatcgcgacgcaaaggtaaatgccaattctccatcttttcttacattttctttcacctttatgggaactgtggttttttgggtggttgattgttcttgatattctcattttattttatgcttcctaagtgattgcagcgcggattttatcttaaaattgccatatttgttatctgaaaagtacttgttatgtggaaaaattacatggcacaagctgttttatgagcaatgactggattttatgcttgccttcttaattatttgatggaagaatgagtgtttcatgctcattgttaccatactgggtgcctatttctcaaaagatcaactcctagtcctctttttggctataggtttttgaatggaaaaggaaaggctatacctttccgtgatttagttttcattttgcttgagagtagccttcgccaatgatgtagttctggtcccttgaagcgggctgacggaagttgcaatacttttttttggatgtacaagtgctctcaatagtaaaaacatgcaccttggtgcctgcaaatctagggcttgtgtgttcaatcaaagtagtagacctttcgaacgaatacatgctttccaatgaggggcggctcaattatcatgctttcttcccaattctaagtgatacagtagataccaaagttccaaagtcacaaatgaggatggcagtttacacacattgcagccctaccgcatgtacttataatgcaataatctggccttttgagttctctgagtattgatgtgattatgccacttttttgccacgttcccccccctgcgttttatacattttttttatgggctttctatttctgtaaaggaatatctccaaggaaatccattgtggcttcagta

SEQ ID NO: 58095 - DNA, 778 bp, Populus trichocarpa
  Intron number 1 from transcript POPTR_0010s19670.1 (locus POPTR_0010s19670) derived from phytozome v7.0 (chr-ID scaf fold_10; pos 17523211 to 17523988 reverse strand)
caccgtcactgcccaaaccccctctattgcctttggtatgcatgtcttcaaactaaaattctctttccttcatcgccgatccacagaaacacgattcactctttaaattctcaatttttggcttagattttgcacttagcgctagactttttatatttgtgatcggtgaagcttttgtttggataatttataattgtaaatattataagcagtgatatacatgagcattttttagatatcttaggaaattttaaatttgtgaaacatttatgtgttgaatattgagaattgttgaggtgaatttataatggtgtctgtattttgttttgttgataggttttgaatactcgctggttgtccggaggaagtgttgaggggagaaagttaaacatgtagttcactcaaggtccactggaaaacttcaaaaactgtggagtatatattaagcttgggtaacaacaccctgggcagccggtgtgctttcagtctgcttccttaagcatgcatgaaatcaaattctatatctgttctgtcaagtcaatgtgtgagatgggttatttggccgttgagtaattaatcagttgagtggtattagatgataagtttattgtccatacaggaatatttagtacctggtgagtccgttcagacaatgagggagtcaatgctgagaacaaatttcttcgtatgatcaagcgtgtgaggttttcaagaaagagcttgaagagacaccttgtggccaccattgataagtttattgttcatgtagctcgaacac

SEQ ID NO: 58096 - DNA, 986 bp, Populus trichocarpa
  Intron number 2 from transcript POPTR_0010s14640.1 (locus POPTR_0010s14640) derived from phytozome v7.0 (chr-ID scaf fold_10; pos 14175995 to 14176980)
attatcattggtaagtgtgcgtaactgcatatgaatcttgataattggtttgataattatgcattttgcattttaattcgtgggtttgagacaattgtgtgaattacgtgcttcactttaatttagtcttatggttaagaacagagatatctcagattgaagtggctgttatttgctgatatctatgagggtgtccaagtttatggggcgcatcagtgtgcgtaactgcatgtgaattatcattgcttgctaatcatgcttttccatttcttttgtggttttgagattaccatgtaaactgggtgatgcagttctagatagttgttttgcatacgagtagaggagtcagtaggcagtgtacttcaatgctgggattagttaccagttcgaatttaatccaaatttatatcttttgggaattggttggaatgtgctcttacctattaataggtttttggttcacacgatctattgtgtccaatgcttgtcaaaaagcattcgtaactaatcgtgtaggcgattttggtttattattaggaattattagctaagctattagaaatgtaccaattatcagggatctggacctaaataactgattgcggattgatttttctgatgtcaattttatgtagcgccatcaaactcctagttttggagatgctaaatggaataggattataaataacatgtacaattaaagtgcttttattttcaaaaccccccaaaattacaaacataaaagctggaagctcttagcaatagtgaagcagtgcagctgacagcatgtgatggcagctgtaaaattgcaatacatgcctaaagttgctgagccaaaacttcagtgggagatgctgctggaaagtctgatttccatagtacgaaattcttgtggttgtaaaatgcattttgtttctcgtcttctttccaacaattagacaagttcaaatattcttacatgtttcaatggtttacatgacaagctg

SEQ ID NO: 58097 - DNA, 933 bp, Populus trichocarpa
  Intron number 2 from transcript POPTR_0001s17320.1 (locus POPTR_0001s17320) derived from phytozome v7.0 (chr-ID scaf fold_1; pos 14137547 to 14138479 reverse strand)
cgctgcgtctgacacaggagacacaattgatactggtatggattgtcatacagttgttttttaattatagttactgctccttgtttgttttgtcccaattcatttgcgtaactcacacaatacatggctcattctgtttagcactagaaagataaatgttttgactcgataagatgatgggttttttcccttgtttatgtaattggatttagttgaagtattcatgaacttgattaaagcagataatatatagttcgaactaacggtttgctccctagtcctactaagatacagcttatgtctgccattttactgaaagatcacttttcttttcttttttaattttggctctgattggagaaagaggatttccagtgatagaaaatattaggcatagttacttttccttgagggcaattcgctttgacagaaaacaagtttcataaactaaatagaaattaaataatcaacattgaacatttggagaaagaggattatagtgggatgaggtcctcaagtttcttattgattccaatattgaaattagccttgtaactgatatcactctgccatcactgtactggtcgctatcaagcatgtacttttagcaaaaaaccaggtaccaaacccactcctaatatatataggcatgcacgcatgcatgtgtgatgataccgattattgtcaaatacttacatttggctcctcctagtgtcttatcatttttgtttgaactaccaggagtggtggtgtgacccaaatttctggctactgattgcgtaattctccattttttgtttggtgaagtggtgttggattttctgagatgtcacctgttatggtggtactcttcctttgtgattattactatattgaatgtttagatatgctcacacattcacccctctgatatagatcacggtgaagccactg

SEQ ID NO: 58098 - DNA, 759 bp, Populus trichocarpa
  Intron number 2 from transcript POPTR_0007s13910.1 (locus POPTR_0007s13910) derived from phytozome v7.0 (chr-ID scaf fold_7; pos 13911301 to 13912059)
gtcctccacaggcaagcttatcaacttatgtcactctacccccctcccctcctcaattgatatgtcatacaataaaggtgaaagcaaaatgtcttcattgtcttccaacatactgattaactttgaacaggctctacatattgacctagtatgctgtttgacatttagagtttattaattataaagagggttggggaatccattactttgagtttcatcagagagttctttctcttggacaagatcattagtgcttcataaattcttcatattacctaacttttagtgaaaaatatatagatatcatttaatttcctatcatctaacttttaaacttatgagaaacagaatcactctttacttttgcatgcataggccactaactgtagtttcactgtgtatgttctctggaaagaagacctcggatccaccatcacttaagtcaaaaaggtcattagagattttaaagcatgtgaaatagctttcttccgattcctctttctggtatgggctgcctttctatgttcattttgtcaaaagaaaaattctaattcccatcttgttcatcatctttgactactacctctctttatcaaacaaaaagatgactcaaaaagccaacagaaatttaaaaacaaattgctttttctttgtgctcgttagcttcttttatgctatagaaaaaagtttgaagctattaaaagataaaaagaactcatgatctcttaaaatatttgttaagcaaccgcaggaagaagg

SEQ ID NO: 58099 - DNA, 669 bp, Populus trichocarpa
  Intron number 1 from transcript POPTR_0001s04100.1 (locus POPTR_0001s04100) derived from phytozome v7.0 (chr-ID scaf fold_1; pos 3231063 to 3231731)
accgcttgaacaagccagctgttaaaagcattgaggtacttttgttttgtttttttacttgaggttccgtttggtgactgagaaaccgagggaaagtgaaggaaattatgtttttaaagttttcttcttttctttgcctgaatggattggtttaagaatttagctcaaactaagcctcatagtggttttatgtggttttgtattccttttattttcatttggtttctagcattttctcagtaaagtgggttaagaatgtaaacgggttttctttaaatctccctttttgttctgtgatgatcatcaaattttttatttttcttgaaattttaatatttggaagcaacaatgatgctttgattattttccgtctctctttctttatctccacatgatgatgtcctttttggagttattgaagcaataaagaaagaaactgcaaatttttattgtttttggcacttcacattttctaagcaacaaagcatgacattaatgcaagcgggactgtggtttctcttttgctttcaattttatgtggacttaactcttaagacgttgctgatatactagcttctagcatgatttgataggactgacaaatttgtggtattgctgcaagatttctcactatcttccttggatttttgatggctatacagagtccag

SEQ ID NO: 58100 - DNA, 571 bp, Populus trichocarpa
  Intron number 1 from transcript POPTR_0010s10550.1 (locus POPTR_0010s10550) derived from phytozome v7.0 (chr-ID scaf fold_10; pos 11054107 to 11054677 reverse strand)
tattgcttactgcattaccagccctcctccttggcgtcagtttctcttttctttctttatcttcacttatactatatatattatgaactatggatcactaccactactacttttttaattttatactagattagtaacccaatgttatgcatttcatcaccccgtttgatgttcttttttaccttccccctgtttttctagttaccacctttttatctgtgctattcctgtctacatcccccctgttttcctgttcccattttggtttatttggtcgctgttcttctttctttttctgtctgttttttaatcctttcatagtgattcctgacccgttcatattgttctgggtgcaaaatcagttaattttgaaattttggtcatgtaggatttctgattttcttttgcttgtattggcatttgttgcagttgctatgaatttgatggagtccatctgcatgtttattttgttttataatccatccttcatttgtttattgatttgatgatatttggggttgtttcaaaaaatgcagctgaggcaattctacttggcttccaacactacttg

SEQ ID NO: 58101 - DNA, 959 bp, Populus trichocarpa
  Intron number 1 from transcript POPTR_0001s16520.3 (locus POPTR_0001s16520) derived from phytozome v7.0 (chr-ID scaf fold_1; pos 13304013 to 13304971)
tgaaccaagaattcctcgtgaaacaagcactcgtggtgggaatctagagtcatcatctctctacatcctagctatgcaaaaaagtcctctagggatcgtccatacatcaatcaatattaatgttgatcataaggaatgatcaaggaatgatcttatcgatattaatatcgtgtataaattgatgtagaatcgtcttttataggtacgtgatactcctatcaacaattaatgacatataaagagatatttataatcaatattaatgatgattgtaaggatcttccttccacatggatattaagaagaaaaaaacctacaacccctcgagtaaaaaaaaaaaagaaaattcaaagttataaatacttcgtgaatgacccaggaaaaaggtttgctatcgtaactctcttataacttattttcagcatttagcatacataaactataaactaggaataaaaaattttaatcttagaatttagtgtttatttactgtaattttttataataaaattattgacttaatcattggaaattccgtaaaatctttcaaaaaaactgttttacattaaatttagctctgtcacctatctctgaaatcttcaattataaaaaaatagaagtgaacataaattcatgatcatccatagtacaaacacaatgaaaaataacttcccttataacattttggattttgaatcatcataacgaagcatattttatctatatctttcaggttcttgaatggctagctaagtacggcgcccgatcttaaatatttaccaaaaaaatttgatggccgctaacaaagccatattagccggagccattgcgtcattatgaccatcaagatccacccccttatcctctctttcctctctctcaactttcctctataaagaaccccaaaccacaatttcattgcaggaaaaaacccaagaaaataaaaacttcctcttatc

SEQ ID NO: 58102 - DNA, 878 bp, Populus trichocarpa
  Intron number 1 from transcript POPTR_0010s24900.1 (locus POPTR_0010s24900) derived from phytozome v7.0 (chr-ID scaf fold_10; pos 20860654 to 20861531 reverse strand)
gttggtgaagatatttttaacagctagtacagaaggtgatcccaagtttcaaactttgtggcttttttgttctttatttcattttcctatgaaattttgattttgtttctgggtttttattttcccttttggttctttttgtgttagcttgttttttttttattatcttttctgtgttttgatttagtaaagtttgaatctttttactccactgttgtattgttttttttttttgaagaaacttttaattccaggagactgattatttatggttatggggttttcctagccttgtgtttggttccgactgtgagtgaaatagagaaaatgcaatgatgggtcttatgtttcttatcgttttggatgatatgttgataggaaaattctttactatctataaggattttgattctttgagggtgatatgagacgaaaaaagaaaagaaaagaaaagaaaaggaaacaaacatttgtagtcaaatcctgtattcaatggtgaaggtaatgaaatcatttaatggcatttactgttgatttctcatttaagggaatctgtgttgtaagttacaagtctccttttgtagtaagccattgatactcaccatttatttatttctgttattattatggcattgggctgccgtttggcaatacaagtttggtggttgttttgaacaacgaatgggtagaaaacgaagaattttgcttttttgttctcgtgggaattttatttgaaatttgtattgcaaagcactttgctttttggccgatcttggatcctgcatgtctcttctttctctgttttttaaagattccttttagaagctctataaatccttttcttattgtaaagttttctaccaatacggtaggttagg

SEQ ID NO: 58103 - DNA, 371 bp, Populus trichocarpa
  Intron number 1 from transcript POPTR_0002s10400.1 (locus POPTR_0002s10400) derived from phytozome v7.0 (chr-ID scaf fold_2; pos 7492570 to 7492940 reverse strand)
ctgtcttataaggccgctcaggtattattaataatcataattttcgttttgtttttgaagtttatcttgttctgtttggtttattttttatagattttgcttaatgtaacacttttgtttctagggtttggataaataattggggggggggggggagtggtggctttactgtaagaatctatgattttcaagcagtatcggtgattttccaaatttttgtgtgtgtgtgtgtgtgtggtgggggggggggggtgtgtgtttagaattgagtgaagagttgtgaattaaaagtttgattccatggaaagtcgtgtctcatttttttttctgcttttcgattgactaatgttgatgtattgtaattttgaagg

SEQ ID NO: 58104 - DNA, 553 bp, Populus trichocarpa
  Intron number 1 from transcript POPTR_0010s05140.1 (locus POPTR_0010s05140) derived from phytozome v7.0 (chr-ID scaf fold_10; pos 6561990 to 6562542)
tctcaattttcttagtgaaaaagtaagtaacgtagttctatttatataattgcagttaaaaactaatatattaatgttgactgtttgttttttactcttctcttggatcttgccattctttcacgtgttgttgtttgctaaccctacaaataggaaaggatatgcagcagctagtcaattttctactgctgcctctgctgcaagttcttgatctctccatttcattcttaatcaattactatagtcttatagatagacagataggtcctgtctttaactttaagtgaaacctttctgctctaacattagttagtttcaaatagtagtagtagtagtagtattaagttcattcttggcagtccttttctatttcaaaattctagtaattaaaaagaaaaaaaaggtgggatttcattcttttgctttgtttatctttcaatgatgatatactaactgggttttgtaatatgagttctaaatggtaatttgattgtatttttcttgttctgtctgccatgggattcaagagaacgcattctttgaattcaggcta

SEQ ID NO: 58105 - DNA, 762 bp, Populus trichocarpa
  Intron number 3 from transcript POPTR_0007s11100.1 (locus POPTR_0007s11100) derived from phytozome v7.0 (chr-ID scaf fold_7; pos 11378071 to 11378832)
aattgccatcaaaggtgttgttttgctgttccccttttatttatttatttgtttgtttgtgcatttaggaattaaatgagtacttcaattgttggtgcatttgtttgtatgtgtggttttttaaatgcttatatttcaagcattgtcaacttcttgggccaatttaattttgaaattggcaatgttattaagctttaaaatagggcttaaggtttctttccagaatgctgaaaactctaaactagtcgtaagatttcaattatttggactgtgttttatgtgatcaggagttcaagtctctcaagttatgattatctttttagctgaagtcaattgtcattgcactacatgcaaagtgtgcatgctttgcctttggtctcctcgcctttggaggtcttaacagaagcatgaccccaatcttctggtttgagctctctttttctctattttgggagaggggtggcttacaaatggtgggtcgagcccagttttgggaccaataaatcctagccattattgatcaaagcatttagtaatgtgagtgcatgtgtgctaaattagattttgatgtgcgtgctaaataagaagttgctctacatgcctccttttgttttgctgaacgattcgggatttcatattctagtagtagttttatgtgggtgcatgcacattatttataattgacaaataaccaagagattcatggagagcttctgatcactgtttctgtttgcttacttgcaggaaacatatttgagacgc

SEQ ID NO: 58106 - DNA, 943 bp, Populus trichocarpa
  Intron number 2 from transcript POPTR_0007s15210.1 (locus POPTR_0007s15210) derived from phytozome v7.0 (chr-ID scaf fold_7; pos 14833141 to 14834083)
tcaagcccagctccgaccttctttggcaatatcaggtacgtactctaaatatcttcttttattcttcctcaaaatttactaacaattaatatatactgctttttttctttccttaaaaaaaaaaaacaaaatcatgtgaagcacggattaattactaaactaaataactactccccatattgattattggagtcttttttttttaattttgtaaaataaaaaaatcataaaaattgtagtaatatatatggcatcctccttaattaattctttctcgaaatttaataacaatatttatcattgcctcttttcttttaatttatgcaaagcttaattctcttaaaataaccactccccttatatattgattattatggagttttttttttttttttttaattttgcaaaataaaaaaaatcctttagatagtactattcaaatacgacgacttgaaaaatattaggatatcatgctttgatgttgacatattaagattactgtagatggacatattaaaacaagaataaaatgatgccgtagatttccatccgctgtcttaagctgattacttcaagtaaaatattatattaattttagtgtgagattaattcaatcggtccatatagattttgcgaaggatttaattaaagtagtcaacctagttaattaattacttaacattaataagacctccgacgacccaaatcaatgactatatgttagttaatgcatgtaattatgtggaataatgacacgtttttaccatgatttgtgtgatacgtactatgatctctcaatcatagtagctaattattaatgttaatattgtcttaaccaccaccaattatgagatggagggaaaagaaatgaacgcgaaagaattaacatgaatgagtgatcgatgcagattctgagggagaaaaacttcaagcaaacaattcc

SEQ ID NO: 58107 - DNA, 937 bp, Populus trichocarpa
  Intron number 1 from transcript POPTR_0001s42780.1 (locus POPTR_0001s42780) derived from phytozome v7.0 (chr-ID scaf fold_1; pos 42806860 to 42807796)
aatctaggttctgggcagattttgttgataagaaggtaaattatttttttgtaaataaatataaagggttcatcttttgtgttttctattattgttcggttttgaggcatgacctgattaaacccacattgcaatttgattactttgaattttacatcgccagtacaattaattagcctgaagaataatatcaaattacggaagaaattaggcatccccagtacaattaattagcctgaagaataatttcacgctttaagacgcaccaagaaaactttaaaaaatgacatatttaatgcattaaagacaagattaggtgcgcagaaaactaaaaaaaatgaggttttccttttacagacatatttaatgcaaaaatgacatactttaattaattaatagtgacaatattgaggttttccaagaatatatcattgatagtgacaaaatgaggttttcctattggtgcgcagaaaactaaaaaaaatgttatcaccatctttgtcgctaaatatttagctgctttgaatttctaacctctctaacaattgccctcctctttagacagaaatggagtactgggaccggaaaataatatagaataaaaaaaattagaaaaataatatagttcaatataaccatgtttttaaatattaattttatatacaattattattggaaataatgatggtttagttaaaagataaaatatattaataaaattttggggttaatgttttgtatttataaattaatttgcatgagatatatattttgatttttaactaaataaccgttatttctaataataattaaaaaaacagtttttttaaactgttctatttccattgaatgtatttgccaaaacattaacctaattatgtgtggtgaccattatattaatttgttatgcaatggtgtgatatgaaccttcaggtat

SEQ ID NO: 58108 - DNA, 791 bp, Populus trichocarpa
  Intron number 1 from transcript POPTR_0010s16130.1 (locus POPTR_0010s16130) derived from phytozome v7.0 (chr-ID scaf fold_10; pos 15155280 to 15156070 reverse strand)
attcgatttccacagaaatctcgcgttttgagtcggtacgtgctttctttttctttacggggttccttaattttcaagacttattatcggtttcttgactttttttgaagtttttttttttaatgtattaaatagtagcttgtattaccctttcaaggaagaaactgatcaggttgcttttcttttttggatttctcaagataattggaccgctaagcttcattgattttgggtgttctggtggcgatttgatcccgaactgagtttttctttgatttttttttttttttttctgttcagaggggaatttggtcctaaatgctgtcgtgaggctattaatgtttaggattacaagttagatacatgccctttactttatggttagggataataggattagagctgttttgtatatgatttgagggtgttcaaccataaattatgggtttccccccttgatttataagatgtatgaatgttagttcatgaagtcaaaggtttgcctaatttaatagacgggtctgaatgaaaacagtattagggagttagaagttgccttcaactggataggttactgatagagttggtgaaatctgtgcaacctatatttgttagtgtgtaattttgggtttattatcatttttttccacatgctttcttgtctgtagtgcagtttatctcttcaaaatgttgtggtgttgtatttcttgctttaagtactgatatcgccaaacttgtacttacctctttctctcttgcattgtaggttgtgagctgcacagagaccctta

SEQ ID NO: 58109 - DNA, 561 bp, Populus trichocarpa
  Intron number 1 from transcript POPTR_0010s04700.1 (locus POPTR_0010s04700) derived from phytozome v7.0 (chr-ID scaf fold_10; pos 5808818 to 5809378 reverse strand)
aaagctttcgagtaattaacaatattctactgcataatctctctttctttttgcctttggtaattaacaatattctttctttttgcatttggtaattaacaatattcgactgcataatctctctttctttctgcatttggtagagggaacagaacaacaaaatcccttgatgtttagaagggtatatattaatattacatctagcctaattgactgttgtcttcttggcatttagataggaatttcaatgaatattataagttgactacatgtttttcatcaaattttgaatggagctccaggtattatcattcaccaatcacatatacgaagcttgatgaagataaacaagtattaatcaggataagtacttgttagtaaatgaccaggttgttgatgtttgtgttgttggtattaatttgatatgaaaaatattggagtttactgtgatcaattagtttcttgatcactgaaacactttgatggttctgccagcaaatatctaacacttgttatcgttcaacatgatatgataggggcacagacgtgagcattgagaac

SEQ ID NO: 58110 - DNA, 534 bp, Populus trichocarpa
  Intron number 1 from transcript POPTR_0010s16500.1 (locus POPTR_0010s16500) derived from phytozome v7.0 (chr-ID scaf fold_10; pos 15442797 to 15443330)
aagaagagcccggaaggaagagtgggtctctctctctctctctatctccctttgatttcatgcatcatccatttcctgggtgatggtcataacagtagtagtagtttggtatgactgaattatttattatcctgaatgcattacataatatgcagcagtccttatccagtcttgttacgttgtgaattatgaatcttgggtattttttatgatgccaaataatatcatcaaactgaaattttgacaggagctgcgggctctaaatttatcatgcaatatcaaagcgaattcgttttgaaagcaagcttttagcgaagcatatcatgagtgaaaaataactctagctttggaattctttcttcttcttttttaatacatctctctttggcaaagattgcgattactttcatatggactcttcaaacacagacgcctgatgattgaaattcatgtcattcattaaaaataaaccaacccttcctttttatcgtgttgataggcacttctcttggagagacctcgtgtcatatctgc

SEQ ID NO: 58111 - DNA, 927 bp, Populus trichocarpa
  Intron number 2 from transcript POPTR_0007s02230.1 (locus POPTR_0007s02230) derived from phytozome v7.0 (chr-ID scaf fold_7; pos 1333982 to 1334908)
attcgaaccagacaggctgcgcaggtgggcaaaattgaataacaaactgttcgtttttctatcttcaacttctctttgcatgatttccccatttctgaagcatattgtagtgctgagtatcgtacggtcagttcaatcaagctatcataggctgcagatggtcatatcatttgtcataataatacgtggttttcttttattcgacgataaatgatatttttataccaattttcagaaaacttagtcaaacaaaaccaagtttcgcttctttaatacattcagaaaaatttaataacatcttctcgacattaacctcaagatttgaattcaaaaagtaaaaccaggataattttgctaagtcattcatttgtttcttctcaatttctttcatcttgtaataacctccattatatattttctcaaatcacaaatctaatctttgcaactgatctcttggtccagatggactttcttggttggaattaaccgtaggtgaggattctatctccccacttcttcatgcttaattaattcttactataatatctctaaatttgtttaccttctctgcaggcgtgctgcagactgtaaccattttcattggtaagaactccccttattgatttttttttttgaagttatgatattggatcatattttattagcagatgcaaaatgataattcctaaatgtcttcttatgccaaacctaacccatgttgtgtgtttaacttataatcaataagaaataatcatgatttcggtctttgatttcccccctcaaatttcacacacagcactacttcaggggacaaaatttatctttgggagtccgtttgtgattgcattcttgatctataaatggcgacgaagacatctatcagcatatgacacggttgaggaattcctacagactcataacaatctt

SEQ ID NO: 58112 - DNA, 537 bp, Populus trichocarpa
  Intron number 1 from transcript POPTR_0007s07990.1 (locus POPTR_0007s07990) derived from phytozome v7.0 (chr-ID scaf fold_7; pos 6471450 to 6471986 reverse strand)
agacagaaaagatagcctttctcctcatatttcaggtatttatgttctcaagcaagctgagagaaataatttttttttgggttttttttttatgaatgaattgaaatagattcttgttttgtgttaaggatttggatagttaattgatggtgagatatcatatcattactctaagtttgtgtaggttttagctttagtaggtggtagttgaattttgagtcttgatgggttgctttgtaaccacttctatctattagttgctttgcttggggggagtgtgttaaagaaattttattgtgtttttctatgtttgaagttcagttgaattctctaaaatttggtaatattacatgtcttaatgaatcccagtttgtaaattgacttgctttttttgttttctttgctgtgtggatttctgttcaattatttgcaatgtatcctttttcttaatttctttgagggttgttgacgcgtttgagcatttttaccattcttttgtcaggaaattttgttgcgagcgaaatttggtatctagtt

SEQ ID NO: 58113 - DNA, 532 bp, Populus trichocarpa
  Intron number 1 from transcript POPTR_0001s28930.3 (locus POPTR_0001s28930) derived from phytozome v7.0 (chr-ID scaf fold_1; pos 27664250 to 27664781 reverse strand)
cagcttcatcacaaaccaaaacaattcggtaagctgtttctctcatgttatcttttcctttgtttgccaactgaattacctttccgaaattatcaaaaaaaaaaaagaagaaaaattgcaaatgaaaacacaacagtgtagtcagcgaagaaagttagttaggtcctttaaagagaactgctgctaaattttgcctggaaaagtttggattctggtttctttctgcagtcgatgtaaattaaatggaaaaaagcttataattactatcattttatttaatgattttagtcgttttgttcatttctttgatattggtaaagagatttcctgtacttttggttttttgctcccaaaaattatttttcttatacagtgattatttagaaaaagaagttcacgctgatgacggattcagtaccatgtaaaagcaagccttgattttagttttaattgaacaagtttattgatttatttattttttttcaaaatatttctaggtcagaggtatccttttgcattggaactcacttga

SEQ ID NO: 58114 - DNA, 761 bp, Populus trichocarpa
  Intron number 1 from transcript POPTR_0002s01120.1 (locus POPTR_0002s01120) derived from phytozome v7.0 (chr-ID scaf fold_2; pos 602169 to 602929 reverse strand)
attgccagctcgagagcatcacttacactgctaaggtaccactccttactttattttttttatccatgcttatgaaactttaggttttgcggttgtagagtgaaattacgagttcgaagcgttttcgtttactgttttgtgaaaccctgggatctagtgcgtgagattgggaaaagtttcgtgggctttttgaaaatttgttaaccaatgttaatgttttgttgcggaggagaggggaaggaagttgtgaccttgaaaccctaaattgagtaggtttttctttgccggcttttttaagtgctttttacaggtaatgatgtgggatgtttttttaatcatgcattgacacgctatgctctccgtgaattttgaatgtatttgcttttaactgtttaaattgatgaaatggttatgatatgatgttaaataatgctgctgctgctgctgcggaatgtgaaataaatttagtttaaagtgaagttaatcagtcataaagatttaaatgagaactttcagttttgagatggatggatggatgcagatgtggtaatgcttaaagattttagagagctgattttaattgcttgccatttggtttttatattgtccgtagcaatcaatgttttgattttcgatcaagctaatcaatttgaattgttgtctctttggtgctcgccgatgcaaatctcttgagattggatgctatggatattgtatctgggtttttattggttttttattttggtcttccacgtgacagg

SEQ ID NO: 58115 - DNA, 473 bp, Populus trichocarpa
  Intron number 2 from transcript POPTR_0010s12970.1 (locus POPTR_0010s12970) derived from phytozome v7.0 (chr-ID scaf fold_10; pos 12896874 to 12897346)
ccattggttacgatctctcacctggggtaacactcttctttgcaagtcatgtttaattccatttcaagcaagataaatgtgatttcattgcagtagttaatttttttatgcaaaacattatctagtaaagcacggagcagcatacttttgattgtagtatatgctgctttgaatgcgaaataaatgttgggacgtttctagttacgattgacctttccgaatatctcctattcaaattcaaactgcttcaaatcgcttgacacagtgaatcaggttttaccttctgagcttgatttaaaattcaggggtttgctgttccaacaaacgctgaattattattttgttctgttcttctttatagggggggatcttaaaattaattctactcgtttgcatgttttgtattttccgaccgtgcaacactttatcctcttgcgttcgtttcatggttgcagtcttcctttgcacggtac

SEQ ID NO: 58116 - DNA, 923 bp, Populus trichocarpa
  Intron number 1 from transcript POPTR_0001s11470.1 (locus POPTR_0001s11470) derived from phytozome v7.0 (chr-ID scaf fold_1; pos 8926979 to 8927901 reverse strand)
ctctctaacggtatgccctgttttcttgttcttgttcttctcccttttcatttaataattttgtttgtacagtctttgttttggttgtcattattgattgattttatctatgctgctgcttttattcatgagatgattttttcaatttcttgattggtttctggtaaataataataatagcaataataagaacaatcatcatcatcatcatctaatgaaagaacataagtgataaagtagaatggaagaatttttttattttattttttgagtgaggctgtgattgctatatacagtgttgatttcgggttaaataaaaaatgatgtcgttctgttcagatttcactgttaatccatgtgcttgtgcttgtgcttgtgcttgtggatctcacatgcgtttcccatcaggtgcgtctgtctttgtattttgtctccacatacaagtcaatgtgcccatttaaaccccctgcttattgatgaatcataaatttatttgtaatgtaattattgcctcatgggcaggtttcctgttagacatttttcatttgcttttaaattgctattttgttactctggcttttataagattttagtacaatttcggtggaaaatgaggggtgataatcttccttcttctggtgagataggtgtactaattcacattacttgcatatgtttttatttcatggacgaatgacggtcctcctagctttggtttctattacatgatgaaatttttgaacatgtgtaaatgaggatgctatttagctgtcaagttgttgcattaagactatttttgttggtttatctgttttttctgcaaaatggtgaaattgttctgtaaagttaacttggtttgtgcagaataggatggaggaatgtgcgttatacaatgtcttattatggtttctcaggttttttag

SEQ ID NO: 58117 - DNA, 409 bp, Populus trichocarpa
  Intron number 2 from transcript POPTR_0010s02130.1 (locus POPTR_0010s02130) derived from phytozome v7.0 (chr-ID scaf fold_10; pos 2457072 to 2457480 reverse strand)
acaaatcatcaaggcgtctgacaaagcaggccgctgcccctcaacttggtgatgagccagaatatgaggctcatggcaatgatgactcatccatgcacccaggcgattttcttccttttgatccttgtacctctgagtttcaagtggatcaaaatcagaaagactttacagaaagcaattgcttggctaatgcaaatgtcgtgcgttcagaggatgttcctgtagtgcctgaaaaggaggtagtgctgtttgacatggataaatatcttatttagttctgacaattgggtttaacttcttttggtttcttcttagagttctaagagtggaaaaagaaaggttttttcagcatcaaattgttcccggaagtccaaaaaatcttccttggcagctggccctcaagttgttg

SEQ ID NO: 58118 - DNA, 897 bp, Populus trichocarpa
  Intron number 1 from transcript POPTR_0010s20660.1 (locus POPTR_0010s20660) derived from phytozome v7.0 (chr-ID scaf fold_10; pos 18148963 to 18149859 reverse strand)
gccatttctggtgacttttctttgtctcttcagttttattttatttttgtgtggagttgagaggttagacctgggaatgggaatgtgattgacttatcttggttattatcttgttggtaaaaatagagagttgtggatttttttattacatttgattttcgttctgtttggttgctgagaaaatgtgggaaaagggaagaaagtgaggttgttttattgtttgttttaatgctgttttggttcctgggaaaagaaagctgagtttaatttggctaaaatggggataatgaactttgtcaagtgaggttttttactttgcttggtacaaatcctgattcctgcttctttccttttctttttttcgttttttaatagtttattttgtttgtatttttctgtttagtttctttcagtttgttaaaatgagccgaactaaaattatttttatacaatttcaagttgaaattaatttgcttctgaaatttaatttcgtgttataatttcagttttcaatgcaacagtgtttacttttcacatttaaggaaaggaaatttagcttttcttggatgcaagacaagtcctttttcccccttttttatttaaacatttttatactgattagactttacactgtcagcttgctgcaatttgcattcaattgccatttgaagcacttttcatttctgtttgaccccttcttgctttcctcttaattgaagtttgagatagtgctcataattagattatggacatgcataaaggctactatttctcgcttcccttcaaagctaataaaagcttgattcaattgctacggtcaactgatttttctaatttagaaaatagtggtgttttactcatggttgttgtttaatcagagtctggaaagctcattac

SEQ ID NO: 58119 - DNA, 735 bp, Populus trichocarpa
  Intron number 1 from transcript POPTR_0001s24100.1 (locus POPTR_0001s24100) derived from phytozome v7.0 (chr-ID scaf fold_1; pos 23472938 to 23473672)
atataacatgtaaagaaacaacctgcaaaacttctacattgcaacatccctttatactccaattgttgcaggacagtcaagatgttgcagaaggacctacccggatacaagacaggttgataaaataataaaactacattttctttcagtggtatataagatgtgaaaaaattgttttccaataccaccatatagcagaaaaacatttcaacacattcaaaataacgttcctcatctcccttgtggagagagagcacggcaatttatgtagtccttgaaaatgaatagaagtatgtcaaatggaaactgattttcagcatggcattactttttagaatatagcaaaagattctgatggggaaccagctatatgaaaataagcttcaatatcttgttttattttattttagtttttttttagtcaattagaattcttcgatcttaattacttttatttaatttcctacaataaacaggatcctactaggctttaggtgccgatttaagaacaccttttccatgatttatgaagactaaatgataattgaattgagaattgctatttgtattagctactaccattctcttctctatttatccgtatgctatgggacttatctcttctctgctttatcttactgtctttcttctatttaatccctctcctataggaattctgcttctcctttgtcataatcatgtacatcaccacattcacctttcattgccattcag

SEQ ID NO: 58120 - DNA, 530 bp, Populus trichocarpa
  Intron number 3 from transcript POPTR_0010s19500.2 (locus POPTR_0010s19500) derived from phytozome v7.0 (chr-ID scaf fold_10; pos 17380364 to 17380893)
tctctccaaagcaatcaccctttaaatacttggaggtttgtaagttcaaatgtggagagtaaattgcacctttttgtcccttcttctctccctgtcgtttcattttgattgatgcattcctaattcttttctttggtaatttatgatatcagttcatatgcatacttgattgtttaaagcttaacagaataccacatgaatatacatgtgtgttgacattttttttccttttcttcatcagaatctccccccatttctttctcgtacatgctgattacttgtttctacatattttgtaatttggttattcaaatatgataaaaggggcatgattaataaatttgtacaatgtgttgcctgcagtaagctgtttgaatattttgatctttggaaactggtgatttttatatgcttcaacaaagctatttgccatcctatttattttatttatcgaatgtaagagaatgtccgatcattttttgcatctcttgacagtttctacaaaatcaaggtttcctagtcagcgtgtc

SEQ ID NO: 58121 - DNA, 391 bp, Populus trichocarpa
  Intron number 1 from transcript POPTR_0010s06420.1 (locus POPTR_0010s06420) derived from phytozome v7.0 (chr-ID scaf fold_10; pos 7801865 to 7802255 reverse strand)
ttctgggaaaccaatccatctccgattggatcttcgtagtggattcctggttcgtttttatgcacctagggcgagcaattatgttcatctatatatttgttcctagcccattaattcttgaaaaactatatttaattatccttgcaaggcagtgtttgtctcaaaaacagcaggaacacgatgtctcttgcaatgagaggtgagatcatgcagtgcgaaactatcaaaccatcctctccaacgcccctttagctaagaacactgaagctctttcctgttgacaagttcattccaatatcgtacacttcattggttttcttttaccccatgaatactggtgatcaccttgccaaagccactgaaaggtcgctgctatcgcttcttccatcga

SEQ ID NO: 58122 - DNA, 862 bp, Populus trichocarpa
  Intron number 1 from transcript POPTR_0010s15560.1 (locus POPTR_0010s15560) derived from phytozome v7.0 (chr-ID scaf fold_10; pos 14733727 to 14734588)
gggtgttttggtctagtaagatactgtacagactagtgagtagacaatagcactgtcatctcatgcaagccactgctctgtatcctctacaaagtgatatcatgtgcatatcatagcacagacagtcatttatgtccgaggctagatagcctgcaacctggagttggtcaggtttccttccaactgtaaatgatgtaaagattctacaactgcacaagcaaatggtgatcttgttgttccttaattttagcattttaggtgatttttattggtttctttgtttctatgggaatggtttttttttttttcatattgtttgtttgtgtttatgactaatctatcagttattgttcggcatatatagctgctgcatcttaaaaatttgcaagtcatgcaccttgataaagatctcaataactctatgaggatattaattgttaagtatatatataaacacttcgttgaaattcatagggaggattgacgtcaagccatcgacatgatattgggagaaaagctcaggggcagctcaggttcaacatagacagatcgcatatatataaagcctgaccaaacctagccaggcctatacaagcagcgaagtgaaagtgaatgtgaatggagtgaagaacagattgatttgtgaaaaacacatcaaaaatataaattaacatgtcatgatatactagtagaagttggtgacgatacaaacagatatagatatatatatataagcatctctcaaagtagagacaccacttttgggatcccacagtacacggtgcagattgtcaacacctgtgtttttggttgtgctccttcaaatattcacttccattgtggctggtttgcctctgcaaga

SEQ ID NO: 58123 - DNA, 801 bp, Populus trichocarpa
  Intron number 3 from transcript POPTR_0010s00410.1 (locus POPTR_0010s00410) derived from phytozome v7.0 (chr-ID scaf fold_10; pos 196607 to 197407)
gagctgtagcctttttccttattcgtgtatttaaggtacaacttcctacataatctaattttgtgcttttggaaatcagtcagctgctatgggagtcacagaacagtcaattaattcatgggtgacatggttctaatttatgggaatgaatagtagtttattctgcgtggttgaacagaagattgcgcatgtacctcttgtttgcctttacaaattatgatttgtctatctttgaatgttatggagtctttaaagcaacgtattggacttgtctttggaaaatgtgatgaatattagtgctagagtttcttaataaccaaatgagatgtgaaatcaatgataaagtgcattatattaatacatattatctactagcctacttatttcaatatgactggaaaaaagaggtgaaacttctcatttttgtcctcatcattctcattgaatcacttgctaggtcctttatacgtcgaacctttttttccaaaggaaaaactagaatagtctgtggattaggtttattctggtgtatgcttgtatccatttagccatacattcagcatgtgtgtggagtttcacttattgtgttttgagctatttctctgtaacctatgttgcaaatgtatggtcacattgtttctgcaaaaatgctcgaacacacaccagatctcctaaaaaaaaatgttatcgaaagctctggacctctgcaacataactacattgcttcctttcggtctctttgagctctggaagtaatattattcctcttttctggctgtgcaggttgtgtctccagtcaaa

SEQ ID NO: 58124 - DNA, 995 bp, Populus trichocarpa
  Intron number 1 from transcript POPTR_0010s21810.1 (locus POPTR_0010s21810) derived from phytozome v7.0 (chr-ID scaf fold_10; pos 18954300 to 18955294)
attgctacggagttttaggtaattccaaaaaaaatgttcattttttttggtgattagttttattaaagtaataataaactgttatgcttgttctgtttaatcttctttgaaagtgatttacttattttattggttttaaatggtgatgttcggttggatttcttttttcttatttgggctttaaagcattggttttttattttcaagtttggcgtttttttttttttttttaatgggtcacaaacaatttgcttgcttattttctgggatgtttttgaatgtttctgtctaattaagttggcagtaagtgtctggccttagctatgtgaattcactattgaatgcagctgaggttggtatggaacacaagatttgatgggttggtgtttgtctgtaaggattttattcatgtaacttcaagtatgaggttttaatgacaaactatgacaacgactattttctttattttgattcaagggagatttgagtcctctggggcgttaatatacctgagttagctttggtctcgctaaatcttgtacttattaatttatttcccatctttacaagtgtgtgcgtgggcgtgtgtaattggagagttcagaaaaaaactaatctgggttgtttggtatgtgtttttttaatgtaaatacatgcatattatattcttttttccacttctagcttgtttattactataatagttaaaaagtgattggatatggtggattgaattgatgaagaactaatcataatttattggcaagagtttattttagttatccttgcttctataccacccttgtttaaatctgtaggtagatgcaggctaggttgataatttcatgaactagagtcaatgatttcaaaaagctttggcaaagcccttcctttcatgataagtagttgtgctctggataatggtatattgcatgagacagagaatggatgagtcatgtcttggttatttcgcttgatggctttaggtcctgaag

SEQ ID NO: 58125 - DNA, 782 bp, Populus trichocarpa
  Intron number 1 from transcript POPTR_0001s00570.1 (locus POPTR_0001s00570) derived from phytozome v7.0 (chr-ID scaf fold_1; pos 457443 to 458224)
gatatcaggtgttccaacatttcaaacctttcgaatattctctgctcaatttaaaaacgtttgcgaattttgtgtgagtttgtgcttgttttagcttacaaacaatgagcagtttcaatgtttgtcttctttattttatctggggattttgtcattgtcaattgtgggttttgtgagggttttctttatttgggattgaaaagattggattttttcggtttgattgggtagcttatgtgttaaaagaggcagcttttggagaagagagttttgcgtttttgttatatttggtaaatttaggttgatctcttctttgagttggagagcatgctattttactgttaattgagttatatgtacgagagtctgagataatatgaaatgaaggatttagattttctttgcaaggggattaatgttagctaagaggtgtcaatgggcaagttagtgactgggtggagagttagagaaagaatttgcggtttgggtgtattactttggattgttaggttggtttgttgagtctagtgcttacagaatatggctgggaaattgttttgatttgaaacattttgaaatatttttacatgaattcggaatgttttgagtatgaatttgttgaattttgtgcatattgcattctgaactgttcttataccggtaatctatgcaattattagctaacagattctgaagcatttattggtgaattagagcctgttttaaaatagtgatggtgttttctgtggtggtgtaggtgaatataattgatacaccaggac

SEQ ID NO: 58126 - DNA, 478 bp, Populus trichocarpa
  Intron number 1 from transcript POPTR_0010s00560.1 (locus POPTR_0010s00560) derived from phytozome v7.0 (chr-ID scaf fold_10; pos 308382 to 308859)
ttcaggccaaccttatcgctgtatgtttttccttttcttgttttatcttttagatgcatgtctgagatttactaattccaagattaagtttgtgtcataagttgcgcttcagattatttgcttggtggtggtgtttgatctccaagaagccgaaatatgacaacttttgtttgcttaagttatcaaaaggtcgaattgaagctgtctgcttattggaatttatggagatagtaatttaacatgatctgaaaaccaatcttgattgtttgattagtagtttagttggggattaatcaagattttattgggattaatcaaaattcaatcaggatgtgttttttttttttaatttcccgtttttacctgggaagatgttggtgatgaatgctgaatagcctgtgcatttagatcagaacaaatctgtttctgagtgtttttcgttatcaaactctgtatgcaggaagcaacacaattgctg

SEQ ID NO: 58127 - DNA, 926 bp, Populus trichocarpa
  Intron number 3 from transcript POPTR_0007s06010.1 (locus POPTR_0007s06010) derived from phytozome v7.0 (chr-ID scaf fold_7; pos 4158756 to 4159681 reverse strand)
ggtgtaaggtgagttcagaatttattcattcagctggcaaggttgatatcctcctgtgattacctgtatagttcttcgaagggcagtttctttttctaatgcttttgataactaccatggacatatgctatcctttggtgaatagtttttgtgctgtattgagcaccactataggtgcctctttcttaagctttgtactgatgctaatacttttgtgtagatcagagatttgagggtatgttttcccaaaatgtcttgaagggaactgaggacctgcttgttgaatacacatgctttgcttcgagttttaataatcaataaacttctagcacttaatttctgaattgatttccacttaggtgaactatacaattctagacctgtttccactgttcctagattgattttggacatacttcctttaaactggaaaaaatggtatatataatgcgggtagattttttttttttttaaagatgggtgctgctaataattctggtttccagatgctcttttctaattcagaagtaaagggaagttcttcttttgcaattactggatgtaatgaacaggaatagagctttgtgctccttctataagaatgacttctctaactgatgctatatctgtgcttaaattgttgtccaacattttatttcatgtcatcctcttccagatttctaatttcctccatgtttgacttttctagcactttcaacttgaaatatcctttttttgtttgattgtgctggttctctcttctggatatattaacgactgcttttttcttataagtttttgcaagttatttctgtttccctgaaaatgaggtcaacaaagaggaagtttctcacaaagcctaatagcaatgagaattgttgctcacttttctttcctaaattattttcagagaccgtactagtagc

SEQ ID NO: 58128 - DNA, 345 bp, Populus trichocarpa
  Intron number 1 from transcript POPTR_0007s06010.1 (locus POPTR_0007s06010) derived from phytozome v7.0 (chr-ID scaf fold_7; pos 4160308 to 4160652 reverse strand)
ttcgttcctttgaaaaaatctcttagatactagaggtgctgctgccgcttgatctatccgtacttccatttcattttcattgaaaatcctttctgtttggttactgatggaagaaaatcagtcaaattcataattttctgtcattaacaacggcgttttcagttgaaagcggagttaaaattgatctactgttagaattgaattcaagttaatgaagcaacttaactcagtcaagtttaattaaaattaaaaatcagtttgattttgtgtaattagcagcagcattaattacgctgactggcttactgactgatctgattgattgatattttgcaggggagtttg

SEQ ID NO: 58129 - DNA, 709 bp, Populus trichocarpa
  Intron number 1 from transcript POPTR_0001s23280.1 (locus POPTR_0001s23280) derived from phytozome v7.0 (chr-ID scaf fold_1; pos 22543717 to 22544425 reverse strand)
tcactatacctccactgatatcccctccactgtcggtctgttatcactctgtttttttttttgttaaaaagaatggttttttggatcttaattctgtaattttttgccctttatgatctgggctgtatttcttttcatcgattaagctatttggtggcataaagatctcttctttttcttcactctctttcgctttttaatgaattgagctgcattttttgatttggtacactgcttatagtgtaaatgaatttgcattacattgagaaaatgaagggttttgtagatgttaattttgcaattttttttaagggtaatggaaattttgcaattttattttttcagtggttggaatttagggttttttttattgttcttccagttttgtggttctattattcaaagagaattaataaatttgtctaatatgtttctttgcgtagtaggtctaaatcccccgctttcttgtttttcttgaattgtaatgaagattaatttgtgaaagaaatcatctctgcttcatcggtgaataaatctggtttcacagtgcttatttattttaattattttgattcccctgtctgatttctaattttgaattagttacatctaattttctaatattctgacgggagttgcatctaattttgattccccatgttgaatttttttttttttttatcttatgaatgtgtttttagatcgaatt

SEQ ID NO: 58130 - DNA, 942 bp, Populus trichocarpa
  Intron number 2 from transcript POPTR_0001s18400.1 (locus POPTR_0001s18400) derived from phytozome v7.0 (chr-ID scaf fold_1; pos 15466482 to 15467423 reverse strand)
acttgtttgttcttggtctttttgataaatttgaggtatgtatgtttaaactgcctcatgttttctttgataaatttttaactgaattataaacttgctagcgagtagtcattgaaatacagaaacgcataattggaatttacagtgtttgcactcggtccttgcctcaatggcggagttgttgtcacttcatgacatttaaccaaaggtggggtgttgtgctttgagaaagggctgttaaatgaatgctttatcaccattgactgttctgttaaatgggtcttacatatgttgcatctttttgcctgactggttggtgttcgatgttagattttgaactttgtgttcatctcgtctcttaggcttgagagcttataacacctgaatgtttttgcgttggatatcttctagctatctaacaaacccgtacagcatacaatagtgcctggcagaattagtatgctgcagttaactgaagtaaatgatggtccatgacttcaactcagttttactaacaagaatcgttctgcaaactattttcttcaattgtttttaatatgttgatgatgagggatggtgaggtttagttttatgtagttttgttttgcttataacacttgctcataaaagtttgatctaacatgcagcacagtcaactatattttaaaaattcagagtttgaaaggtaacaagattttcaatggttgagcatcatctcatcactacaatttttctcctctttgatattcatgggattttgctagtctttagcaactatatgtagctgtaagcatcttaagcttttatgttcttttgtatttcatagtttccactaacccctcgatgtttcaatgcattaaattttctatttaccagatcaagttttacatgtcttcacatttttgggatttctcttgataaacatgaatttttcttagggac

SEQ ID NO: 58131 - DNA, 362 bp, Populus trichocarpa
  Intron number 5 from transcript POPTR_0010s16580.1 (locus POPTR_0010s16580) derived from phytozome v7.0 (chr-ID scaf fold_10; pos 15501537 to 15501898 reverse strand)
tctcttttgcactatttactggtggtttttttaatgtaaagctcaaaacttccctacaatctttgtggttatgtgataacaagatttgtctcacaaactcagtttgtccacaaccaattttcggtatctattaaattgttgaattctcccatcactatatttctgtataaaaagtacatcttcagttttacccccctatgttctgttaatcgttgcttaatatgaaatccttcacgagagacatggctgctttgttacgttatgcatatccttagttaatccctgctgcaatttgtcattcattccttttgttttcttgtataacagccgaagctggttgctgtctcgaataaagttgcttt

SEQ ID NO: 58132 - DNA, 662 bp, Populus trichocarpa
  Intron number 1 from transcript POPTR_0010s09170.1 (locus POPTR_0010s09170) derived from phytozome v7.0 (chr-ID scaf fold_10; pos 10038703 to 10039364)
tggcgaagacgacttgttcgaagcaatcgaaaagtgtaagatacaaattataagctctctttctctctctgcattaccgattgtttcctctatcgatttttactcgcacccccccccccctgtttgtcagtgttgatgatctgctttttgtgtttttgtttgtgtggatgcttaaatcacaactcgaattttacttacttatatatatccttttttctgctcctcaacttggattctcgatttgtatgcacttttcattatttcaatttgaatttgtacacgaaaatcgttcgatgttggtggtaaaagacaattcctctctgatctatctgctgtgttagtatttagctttcaactcagttctaaaaaaaatgtaaatacaaatggcgacagaatattgtacatgtcctgttcttgatttctctttgtttttttccgattcatgagaagattaactaggacatcattgctgagtatttactgtttcaattgaacttgaatttttctctgtgccttgagatttggtgtactactctcgatgaattttacttgatttatcgagaagatcaacttaattatattttgttgctcaatgctcagtctccttgtttgtgaattgtgatgcatctatgcatttcgtgcagtgatcaatcaaggcatca

SEQ ID NO: 58133 - DNA, 656 bp, Populus trichocarpa
  Intron number 2 from transcript POPTR_0010s02480.1 (locus POPTR_0010s02480) derived from phytozome v7.0 (chr-ID scaf fold_10; pos 2865774 to 2866429 reverse strand)
caacaaaggatatatttagagaggaaggtttaccggtatgatgcattctttctgtttattatttttggatggatgatttatttgaatagtgtaaatcaaaattggtacactgttgctgatttaatgatacttgttgtagatgagtatttagaaatctaagccaatgatttgaactttacagaagcagggttgctgaaccccaggcggtttactcccaatttaccaactttatgttttagcttcagtcgaggtgtggtataaatattaaagtgatggaatgtctttcaaatgtaggttccttttctatttttctgaggattggatttttttttttttggataactagagggatccgagcccagaatttgagaatgtgattttttaacttatctatccatgctcttcaggtagtaaaggtaaatgaaacttgcttttcttttagctactaatctcagcggtagatattctacacattgctacataccacagttccttcactccatgccattgtgtatagtggatggtttatgatttccaaatattgttcttgggagttccttctagatattttcaaacactaattttgtgaaggctatctaccattttcctgctttttatccaagatgattgcatgctgtagggtttttggcgtggaa

SEQ ID NO: 58134 - DNA, 986 bp, Populus trichocarpa
  Intron number 1 from transcript POPTR_0001s01760.1 (locus POPTR_0001s01760) derived from phytozome v7.0 (chr-ID scaf fold_1; pos 1281865 to 1282850)
aactcgaacagtttgtcgctctcgcagtctttcaggtctgactctcaactctttatcttgcttatttctcgtctctctctctctacgtatatttgcatgtgttcactgtttatgtgcttgattgcatgattctggatgttagggtttctttgtggatctcttgggttagtttctttggaaattctgtcttgggtttggagaatttgggggtttaagggttttgtggtataattagggtttttagagatactagaagtcgttgcatttggtaatgaggagatttatggtattgaccggtaaattagggttcctacgtgtgtctgtttgtgcgcttgagttttgattttatttggtgctgttacctttttgataatttggggaaatgaagtgagatttgaatctaagtgtttctcattttggtttctgtgttcaattcttgcctaatttaagtaattgaaaatggttgcgttgatgggggcttgttgatgcacttggcaatccagaactgggggttgctaatacttgcagacaatctgatttactgaacaaatttcttatgcttgttgaaataggtttagcactaagatctgctaccaaatgtgattgtctttgtaggtttgaactcatatatgtcaaagcacacaatgattttggctcttaaattttgtatgcatgatatctttctgttttattttgctaatttttactgacttctagtagattttgatatgttcatggttgctcttcaactaagacacagttagcaacctgtcaaataccctgaagtttatgcgcttggtcacactcacacacacttcttttcctctctcattctcatccttgttaccccttcccaattttaacaagtgcttcttattcactatgtcacttatattaaaataattttctttggatttgttagcttatgtgaatcagatacttatattttgtgtttttatatttgtctgttaaattccaggctgggg

SEQ ID NO: 58135 - DNA, 847 bp, Populus trichocarpa
  Intron number 2 from transcript POPTR_0001s37610.1 (locus POPTR_0001s37610) derived from phytozome v7.0 (chr-ID scaf fold_1; pos 36572159 to 36573005)
cttctttaagctcagtatcaaatcaacatattagagtagagtaagtttctattttgatagctctttttgtcttaattatgcttcaatttcatgtttttttatgtagaattgtggttcaatttgttgtttgttgttgtatgagtgtgtgtttttagtgctgtttagtttttttcttttttttagtgtttgttttggtggaatttcactcttgatttttgggttttgtcctggcatgcaattaactttgcatgttgcgtttggttgctgtgaaagtgctggaaattatgggaaattcttgatgttttaatttaggtttttttatttttatttttaagactaggctcacttgggagcttgagttttggatttatttatttttacttaattgagcttaagaaagtaactttggctcaatttaaacttccttgtaaaaaaacgatacgacgagtagatttagagatctgattttttatctatttttttctttaggtttcctgtggtttttgtgcaagcaaacttacgatttttttttgttgtaaatcttgtgtttcgggttttctctaaattgtgtgaagtttagtacttccgcaatcccctggcttgtttttcctctggaggaaagtagcttttattctttcaatttgagctttttgtgtacttttttttttaaatgggagtttaaccattgggctacatgatgattcatgtttcaagatcccctatgtgcatatgaacttgttttttttttttttttggttttcttcacgtgttactattgaccttcttctaattgaatgtgattttcttttttccctgaatacagccttttgttgtccaagcaaaacaa

SEQ ID NO: 58136 - DNA, 664 bp, Populus trichocarpa
  Intron number 1 from transcript POPTR_0001s26710.1 (locus POPTR_0001s26710) derived from phytozome v7.0 (chr-ID scaf fold_1; pos 25731567 to 25732230 reverse strand)
atctgaaacctccgagaataagaggattgtacaaagtgagaaaataaccattgaagattttacaaaaaaaaattgatgaatggaaaatttcaaaaatttctcaaacacagatttatcaaaaatcaaaatatgatattttcaaaatagatttacaattaaaactaaaaaaagagatattcagcttacaaaaccttttaagaccattcaactcctctccaaaaaatccatgcaaaaacacctagctagaaactacaaatatattcatgttggtctagtccaagtcagtataaaaccccttacaaaaaaaggtttaaacacctccattctggttgtccttcgagatgctagattccataatttccaagactcactcctcagttctattgagtctagcctctgtagtggtccagtatcttttgactgctatccaaatattactatatctctcaaagacagaaacatcttacaaagcatgatactataaatcaaaacccataattacaatatgcttgaaggatccatcctcgttgctcttattttcaaaatccattacaaagtcatgttctcagcctttaccagtaaacacaaataccaatcccagaaaggagaaacactccttctccaaacagatctatcccgatcaaacacagtcattccaaaagct

SEQ ID NO: 58137 - DNA, 882 bp, Populus trichocarpa
  Intron number 1 from transcript POPTR_0007s07120.1 (locus POPTR_0007s07120) derived from phytozome v7.0 (chr-ID scaf fold_7; pos 5454936 to 5455817 reverse strand)
caagagtaagtaacccatttgctcgttttgctgatttctgatctgggctggttgtttttttttttttttctaacttatatttagtgatttcactttctgatttttttctaaagctgggttaagcttgctttttgcttatttgcttgaattttgggatttgctagaacaaatcaatgcacctcaagtttcatttttttcattctgttaatataaaaggatggtattttgatatttggagaattagattatgtttttgatgtaaatgctggagtcaatctccaatgtttttggaaactggtaaggaaatgaaagttgcagggcagatttgtatatgtttagtcttttgttcttccagatccatatgcattatgttgatctgaagttcatgacatgagaaaaaaaaagaaggggacttgggttattcgacaattttgttgacgctgtacgggaacaaaaaagtgcacttgtttgtttgcagtttagtatttggatagctttccagtatttttttaaattattattggaagttaatgttttatttggatttttatttcttatttagtttatattattaggtttcgtttcaacctatcactttatatctgccaaaaaagagttaaattcaatttcttggtgttttgctcggtgagctaatgaaattcgggcatgcgaaaaaggagatagtacattagcgtatcaatgaattgtgatgataaatcaacaggagttgctagattcagttaacttaaatactaatcttccatgcatttcttgtatttgttgaagttatcatgtttcatgatcagttgttgagataactcattttggggtatttgggtctgtacagattaagtcggttcaagaattgagcggacaagtgtg

SEQ ID NO: 58138 - DNA, 739 bp, Populus trichocarpa
  Intron number 1 from transcript POPTR_0001s42170.1 (locus POPTR_0001s42170) derived from phytozome v7.0 (chr-ID scaf fold_1; pos 41919965 to 41920703)
tctctctccaagtcggatttgcatctaaataccaggtaaattgaaaaatcttttctttgctttttagtgcctgattttattctttgcagctgttaatgggccatctcgcaaataatgggaaactgggttttttttacattcttagataagtaaattcaagtgggtttggttgttttttagggtttatgttatatttttcagtgttcgcaaagtgtttgatgaaatgaccctgcgagaattgtcattttgttttgttaaggttctagttcttgtaagaacttctgaatgtatgatactatgattttcttttgtcttgtttaatagaaaggcataatgattgtattcaaagtaagcttgtgtgttaatatcatcatgcatattcaaggtagcagtgttttgtacaaattaaatgactaattatatgctgatttatttatatatcacctgttagttgtcaaactggctcttgccttcggaggaatctaagttattggagttagggaaatttcccatctcatagcattataaacaaagccctatagccagtcaatttgcattttcaatctgtttctcataatcacatggaagttgagaaaagtaggcttattttgtagaagaatatgcatgaagaagaaacagaagaagaaacaaggaaagattagggctagttattccattgttaatatgtcacacaattttgttgattttagatttggtttcatacattgaagtagctatc

SEQ ID NO: 58139 - DNA, 774 bp, Populus trichocarpa
  Intron number 1 from transcript POPTR_0007s01940.1 (locus POPTR_0007s01940) derived from phytozome v7.0 (chr-ID scaf fold_7; pos 1103310 to 1104083)
taacgcttcatttcaccggtgagttcatcaaaatttcttctttttcactcttttgtttccttcccttcagtgcatatcattatcatttcttttgtgatctcttagtctaattttgtttgaatttgattatgttatcactgctaatgctgtttatattagtctaggaaaaattcaatgaagaaatatactttcttggctgtatgttatgtggtattgttggctgtctaacatgattgcctctatctgttaaattcattagaaagaaagaaagaaagttatattacttaatacttcttgaaagataaagatgttgatgtaataaggtgatttggtaaatgttatattgggcttgtgtttactttccagttgtagcttcttttttccttccttttttttggataattttgttcaatggtgaaggaaatttatggaagattaagttttttttgtcaaaccatgttcttgaaggcattgacacaatgccattctgggggcaaataatgttacaaggggctccattttgttgttgttgttgaattctgaagcttcttttacagtaaaaaagacttaattgttaagaggaacatgtctctatttggattttctgggggctgtatttcaaattcttattttgacttgatttcctatctttagtgagttttttatcggatctgttttttaattgtgatccttcttttccttctcttttccttgttggagtgtcttgatgatgcagtgaaactaattttgaagttttttctgtaggagtatata

SEQ ID NO: 58140 - DNA, 999 bp, Populus trichocarpa
  Intron number 2 from transcript POPTR_0001s40680.1 (locus POPTR_0001s40680) derived from phytozome v7.0 (chr-ID scaf fold_1; pos 40268356 to 40269354)
aatttgcttaccattacctctccgggtgctctaaggtatagtgagctcatttgttttgtgtcaccgtgttctctctttcaagtcatgcaagaaaaaacctgttttctagggtttaatactcatttccctgtcaagccttgtttctcatcccagtccacgccgtgttaattatttggatgccccttgctagtgaccttacactgaggtgccatatttcatgattagggttgtggtagtgcatcgaagaaagagattaggtttttgagtttctatacagtggcatggcgatgatatagggctagtactgtgtgtgttttttcttttgctcttagattctttttggaaaagcaataattcaagcatttctgatgcaaataatttcatggtagttatggtctcaacaataaatgaatctgcagctgttattcattaaggggctgaaaaaggcatgccattattttttgttagggtatcttcttgaagaaagtacttaatatccatcatctttattgggatttagacagatctcacagcacttcagcatcattaatattcttgtcattcttccagaggctactgattaatagtttcagtctcttgattgcacagttcctatacccacttacatgcttgcttgtgccactgccctttgaattaacaagtttttgtaaagcagtaggatctttttttgagcctcagatttgaatgatcttctagtaaccaaatgttctcgttcaccttttgaagactccattcctcaaagaaaatcatgggtcttggatattatgtcctttaagtaatgttattgtatcttggcttacaaatgatgtaattccaagtgctgtctttcatttttagacctgttgcaatgtaatcacaccaatctttgcaatctgtttgcaatatttaaccttcacatatattatagcattttacgttttaaaccttcaatgattatgatcaggacgagtgggtaatctcccgagtctttcagaagag

SEQ ID NO: 58141 - DNA, 587 bp, Populus trichocarpa
  Intron number 3 from transcript POPTR_0001s25890.1 (locus POPTR_0001s25890) derived from phytozome v7.0 (chr-ID scaf fold_1; pos 24970407 to 24970993)
tggcgccactcctttgtcccttgtgattgcccaaggtctttttcctgctgcttatagccagagaatttgatggtcattacattttttctctcttctttaaaatcaaagaagagattctttgttcgtggtttcctgttatattatgagtagcaaattcttttggagtttgtaaactcttcaattgtgtctggaagacctggaaccatcctgttggaatagcttattgtttgctttggtttactatggaccatcacagcacatttatatctgatacttatgggagcaggtgtatcactgtctcccctactcttcacactgcatatgccttaatcacaggcatttctttttccagtatcatataagcttctatcatgccaataactgttcctgttctattgtcgtcttgcttagagtcgcaggcctatcatcaacattttctgtgtactgctatgatcaagcgtagtttttcaataaatttatatgcacaactaaacattgaaaacttatgtctttagttcatttatctatttgtttccttttcttgttgtctaaacctgcaggtacagaaagccttattgagtggatag

SEQ ID NO: 58142 - DNA, 883 bp, Populus trichocarpa
  Intron number 1 from transcript POPTR_0010s26120.1 (locus POPTR_0010s26120) derived from phytozome v7.0 (chr-ID scaf fold_10; pos 21462655 to 21463537)
gaatctcttcttgctggtatgctacctgcgtacctacctattcctttctctctctttctctaaaccttacgccatatatatttgttttattatgtgaaattggtctttacccatacggtgttcgtggaaatgctcactacgtattatttgatcgaattcaaccttgcttacaactggaatctttgctatactattcccctcttccattgtagtaaactgatttctgaccatggattatcattataataatggttagtgattgaataccagtttgatgttgaaatagatatctagcagtgtagaaaattctcaagttcgctagtgccctgcttctgaatcccaaatctattatcagaatcttttattctcttctaatataaactatcaaaggagggtgcggcctattttatctacaacagctaccgcattcatcagtcattatgtaggtgtctgtcagctactttgattgccccagatttctttgtatctaagcaggagcagtggaccaatgatgccaaaaaagaagtgatcagtagaaagcctgcaatattggggttccttttctatgattttgtaccacccttttacaccgcttagctgcccttaatttcccaagttaagttgagatcatgtctgtgtctagttcccatataaacataaagtaatattcagctccaatttcattttatctatgcactggactaaaatttaaaggttaagacgtgagagatcccaattagttatattagaacattgaactcatttttgtgttcgttcgttcttcttcttcttaataaagtttcgtctttcatccgagaaaataaatatttgaaattgatgcaacacaatttgctggttcttgctttttcagaagctgtagcat

SEQ ID NO: 58143 - DNA, 822 bp, Populus trichocarpa
  Intron number 2 from transcript POPTR_0010s10130.1 (locus POPTR_0010s10130) derived from phytozome v7.0 (chr-ID scaf fold_10; pos 10702694 to 10703515)
gaagtgcttttgcgcttgggctgcttgcagtcaaggtgaattagttcaatcactttgtaaatccgtgtgttggatgtggtgtttggatagtggagtgaagaagattttgattaagaggtttctatctctgcatagagaacttgttggaaaatgttttatgatatgatgattttgttaaaggaatatagctgtgttggtgatcatgtactaagtgaaattagttattttaattccttacaaagaaattagcatacaagaagggattgtttgggtagtcggttcatttactttttcgtatgaacgttgtagttgtagtggcacacatccagtccttgttaggagtatttgtagtatattatgtgaatattgcccacggaatgtcacaagcgaagccatgaaaggaaagcaagggtagcatatggagcacacaatgtgctgaagactaaagtatgtagtattgtatatatactcaagtttgttttgaagaaaaatgtaggttgtgcttggctatgcaatggcaactaaatcaatgtgtaggttcttatgaaggagtttgaggcattaatctaatgtttgaaactgttaaaaataacatttaaaacatcatttgaatgaagcacatctaatgtttgaagcattgaatgattcataaatgttcacgttgtatcccgaatacatatttggttcaaggcttttgaaaattttggttggcaaataatctagatataatgagtgaacctgtgatgtcccccgaatcttacttttatctcctatctttttctgacagccagagcatcagcaactcattgttgacgctggggc

SEQ ID NO: 58144 - DNA, 978 bp, Populus trichocarpa
  Intron number 3 from transcript POPTR_0001s36090.1 (locus POPTR_0001s36090) derived from phytozome v7.0 (chr-ID scaf fold_1; pos 34564392 to 34565369 reverse strand)
caactggtattgtctatcttgactctatcttttatcagctgacatctattgaagttttataatttctgtaagaaagcttgctgaagaaaataaatgattgtgttttatgaactactttcaaactctgtgaaatcatttaggtaatgtataaatatttgtgacatgcagtagcgggaaatttgatggattaaaatgttcaatttttttcctcttcactgagatgataaagaaataaagaattaactagaaagagaaagaattcacgagtgcaaataaattagcaacaaagacaagtgaatgattaattaaagatcaatagttagatatatgcctgttgttactactgtagtaaagggagatgatatcacatccacattgtgctgtcatcaccttcacagccactgatgctgtcacctttacatataccctattgatgccttcttttgttagtgattgtgctttgttttctttttttcttgtaccatgttagaggtggtgcttttcactacgagtactaaccaagcatcttttaaaggatgggtgccatctttaaaacaggtttttgaagggcaaggaaaaagaaatgaaaaacttctttaaaccagcgttatgttttgcagatgaattccataagtgtgatttggaacctggaacctgttaaatacttgggtttcttccatgttgtttgaccaatggatgacagtcaagcagtttaaaagtggcttatcatgtgaaatacagctggaaagcagaatgagtagtataagaacaagtagagtgtgcgtgcttggttttgggattatagctggcagaactctttcttaggttgcataatgtggacaacaatgtttttcttataactatatgactttattttcaaactgtcaatgatttattttgactaattataaatttgaagtgacagtccatgttgtatttgcaggttctcaagtgcatactttttccagttgccccaac

SEQ ID NO: 58145 - DNA, 690 bp, Populus trichocarpa
  Intron number 2 from transcript POPTR_0007s14910.1 (locus POPTR_0007s14910) derived from phytozome v7.0 (chr-ID scaf fold_7; pos 14602272 to 14602961 reverse strand)
tcaacactaaagtatgtgctcctatctgctgttttccctttctgagatttttttttttcattttttgtttgtctacaatttttcacaagagcatgtgcttttttacatggatttttgtggctgagtgtatctgtttgcagattgcaatctaattgacctagattatttttgctgagatagtctgaaacatttccttgcaatggtgatcgcagatactggcaaattttcttatgtccatgcttagttgaagaagaataaatttttctcaaaaattatgagattaagccatcccaacttgactaagcctgaattccaaactagttggaaaatttgcatggatctgccttctccaattaattctgttaagaggagcacactgaggcttaattttctgagacatgaagcccagttttttacttgctatgctatcgctaatgttcagtattttgagagagcttcccttactgtcggcaaacttcatgaattagagagtatttttcatatgctgacatatcttgaaaattcatcagattcccctgaaatgttctcatcttgtgtagttttcaatgaagtgagggatcatagattccctggtcccaaataattcatgaatggtgattggagcttaaaatacatgatcaaaatttatttatatctgactacgttttctgtaggtgggagaatccattg

SEQ ID NO: 58146 - DNA, 688 bp, Populus trichocarpa
  Intron number 1 from transcript POPTR_0010s10640.1 (locus POPTR_0010s10640) derived from phytozome v7.0 (chr-ID scaf fold_10; pos 11104690 to 11105377 reverse strand)
tcaagcatgtccaatttcgtctctccattactctaacgcccttgctcccctcattcttctcccttcttctttcttccttcacaggttctcttcttttcattgcattccatgcactattatattaaataaaagttttggttttcatattccttacaaaaattaatttgtcagatcagagaggcctccgctcaccttccctatcgtcagtgtattcttcttgcttggcctatctgtgtatgttacttcactttgtttgtttcgatgaatctttgttgcttttttgggttttgattggggcaatttgctatgtttgttcagttggctggcacagatatttggggaagctggaattaacttgagctgcttgctacacttggcacagccttattcctggtcttactttcatacttgccgttgctttcaggttattctctcctcttgatcgtgttagagcacccacacctctgctctctaaagagagtccttagctataatagccagctgatgtgtttttcttacttagcattgttactggtcaaagggctctctattttgacaaagtgaacagtgctctcgctacacacagcgagcactgtagcactccttattgttgggatactgtggcagggaagagtgaggttaatggttcttctgggttgtcagctgggaattccctatccccagggtc

SEQ ID NO: 58147 - DNA, 572 bp, Populus trichocarpa
  Intron number 1 from transcript POPTR_0001s08690.1 (locus POPTR_0001s08690) derived from phytozome v7.0 (chr-ID scaf fold_1; pos 6640255 to 6640826 reverse strand)
gcgtctgcgaggtttgtttttgacctttatcactgtttatcgtcttgggattttttataaagtgtggagatgttgtttgtttctttttttcacttcgatggccaattgttcttgtttttcttttctttttggtgtaattggttaaattgttatgttgtgagcatcgatttatttctaaggtttttgctatactctgttcgattgctgagattgaaactaacggaaagcaaagctttttagatcttggatttaatcgatgacaaagtctcatgatttttgttttctctgcaaccaaacagaggtggccgtgtgcgttttaattttttgttttttaaagtttaccaagtcaactgtcttcttatggtcattattttgctaaaaagatttttctaaaaagatttttcttttctgggtgttccttgtatactgttttattcgttttgaccttaaattatgaaaatcgaatattacaatattggtaaatttctggttggtttttgtttgcttctcatttttgaacctttgatctgatcattgacatttcgcatctttcattggctaattccaggaat

SEQ ID NO: 58148 - DNA, 743 bp, Populus trichocarpa
  Intron number 1 from transcript POPTR_0001s00440.2 (locus POPTR_0001s00440) derived from phytozome v7.0 (chr-ID scaf fold_1; pos 336667 to 337409 reverse strand)
tacaggtgaggacatcgattgatcttgtttgttatttttttttttttgagtagttatgcaaaatcacaatttatcccactgcatttttttcgagcatatgttcaatttgatttcatgtcactttgtttgaagctttggtgcgggaaagctggcagataatacattgaaattgaattctacagaaaagaaaaaaaaattacagaatttcagttatgctctgtagaatttagagaagagatagaagaacagtagatattttcttcattagtttatgttgttgcagagtgtttttaaggtagaagaagtgcacaacagatgccaagaatcgtgcagggaagttacaatacagattttgagagatttgatgtagctaaactttaggaatcaatcttcccttaaacaatctcgcaaacaattatctctagctgaacattaggaatcagtgattgtaattttctgatgatattctgcaatcttgttgtcctgctgatatgcttgatgattcacgtttccatttccatcatttacatgcttgtgcaaagtatttctgtacattttgattaaaagaagaagaagaaggaagtctcatgagcaaatcatgtggtcaaaattgaaaattgactttcgctatctgcgtttgaattttttaattgttaacatttctttataggaaaaaatatttctgaatctttactttttctttggtaggcttacattgttggtgagcacggggatagttctgt

SEQ ID NO: 58149 - DNA, 736 bp, Populus trichocarpa
  Intron number 1 from transcript POPTR_0002s21860.2 (locus POPTR_0002s21860) derived from phytozome v7.0 (chr-ID scaf fold_2; pos 18556104 to 18556839)
aaagttgtgggtatttgtctcagcttttcaataaaaaaaagactcatttggacttttagaactcaagatatgggctgaaccccgcataatgtctgggctgcaggacagattcagacttttcttttgttgctaagatttgaacttaaaaacaacagtagtgaatcttggacttttcatgaatgttttagatctaagtcttagctttccatcaagataaaccatatataaattcaaggtctacaacttcaattatgactcaaaaactgaatagtattctagtttgaattgaactagcctaactagattttattctctaagcttagccctctctttgtcttctcaatttcaatagttaacacctcaatcaatcctctgaattgtgagatataattattttgtaaacctacatttaaaatgaacatttattataaattaaagtattttatattatcagatttattattctaaaacatgcttaagttaataaatttaatgatattttaagtatgatgatataaaaccttaatgaaaatgcacttttaagtaccgatcaaaaaacattcagtctagttattgtgttagcatttctcataagtggatagttttattagatatttttggcaagtggcaacatttctatttgtccatcttgatataagagttcaaaatgtaacaacacttgtaaattctcttgcacacagggagtttttcatcttacctagtgccagctgctgct

SEQ ID NO: 58150 - DNA, 192 bp, Populus trichocarpa
  Intron number 1 from transcript POPTR_0002s18010.1 (locus POPTR_0002s18010) derived from phytozome v7.0 (chr-ID scaf fold_2; pos 13902201 to 13902392)
tagaagcaaccagcctcagatcttatttccacaaggtaaacaaacttttcttccggaacactgtttgtttatagatagctggatgcaatcgctctatttttttttctttttgcgtttaaatcgttgattgctgaaactttgtctactgatttcttattttttctttgatttttttttaatggttaaagaaag

SEQ ID NO: 58151 - DNA, 781 bp, Populus trichocarpa
  Intron number 2 from transcript POPTR_0010s17920.1 (locus POPTR_0010s17920) derived from phytozome v7.0 (chr-ID scaf fold_10; pos 16340733 to 16341513 reverse strand)
ttgtccgaagacattttgattcacagatacagccggtatgccctcatcaactacttcttttaactcttattgctcagaaagaggctaaaggcgggtaatggttaccgatatactgaccgaaacaacttataaatccgctaattggcaaaagtcttcatgaaaaccatcaaattgggacccagctcgttggtccgagacatagagaagccagctatcctgaattacattatgcaaatggacttacctcaaaactcaacttcatgtaaatagtaaccgaagagaagtgtcctgaccttcaccctctttttacgccatgcctgcatcacttttatagcttgtagcatagtaaagaaagcaaacagcttctacacaaagctactgacacatggacatgactcggtcatatatcaacctgggtgttaagattggttggttcaattgaaaaagccatcattgatatctattttctgttctattccaatcatccttaaaatatgttgtcaatggaccaaatgttgagtgaataatattttctgtttcaattgctgcaaattcagttaaccttttgtttcttcttgtcgcttttcctgggatagatacgcagaaaccaacaccttggttatccgcgtactgctttctgaattgttcttgaacaaacttttggttccgggaagaattgtgtgacctcgtaactacactttagcaacgttaatgagtaattaagatttaagaagctaactgctcggttctattttgcatccattccccgtgtctgcaggac

SEQ ID NO: 58152 - DNA, 383 bp, Populus trichocarpa
  Intron number 1 from transcript POPTR_0010s08710.1 (locus POPTR_0010s08710) derived from phytozome v7.0 (chr-ID scaf fold_10; pos 9583303 to 9583685)
cacgcgacactgctcgagctaccccactccaattggtttgttgtttcttgaactgggtttttattatttttcaatttctactggactaaagtctcttgaatgatggttttatcctatactgggtgaggattggaactgttgcagttaggtttctttttgtgtttatcgtagaaaacaaggatgattaccatcagatgctgctttgaagtttgaactttctctctgtaaatatgctcaaaacaacatatgtatagtataattctctataatctgaagaagaagaaaaataaccaatgcggtcaagaaatttatctagtggacactgatcttaacttttctttcagatagtaggttatatcaacttgtagatcactaagaagaat

SEQ ID NO: 58153 - DNA, 723 bp, Populus trichocarpa
  Intron number 2 from transcript POPTR_0010s08710.1 (locus POPTR_0010s08710) derived from phytozome v7.0 (chr-ID scaf fold_10; pos 9583751 to 9584473)
atagggacttagagggtgactgggacttgcttaaggtaaaatacattcttgcatagaagattatttgatttgattttggataaaatagttttaatctcttcgttgtatccaaatgtggttctgccattccttaagagcttaatggttttgagtttataatgccaataccatgtgaaactttccaaaagatttttagaaaatgcatatttctatggtatgcatctttcttgaaaggatatagattgcaatgtacaaattgagagtcactcacgtttattatgagcaagtatgtgatctttgataagtttgtaatgctccatcataaaaagatgctgtcagagactagtacaaagtcaatatatatgctttctttcagaaattgtttttcattggaaaaataaaataaaaagtaggggaattagatatggtaaataagagaaattgtaaaaaaattaacaattttttacaaaataaaaaaaagtaaataaccatttgctgtaagtgaaagctatgagctttattgatatcaaatatattgagatttcattacaaaattgtagctacacatttgatgtaattttgttcctttccggttatgatgtgttttgtgggttttgtttaatgggtttttgttggtccttgtacataaataaatggattctctaaaatgtctattatgtttgtgcaggaaggaaatttgaggtccaattaattattgttaag

SEQ ID NO: 58154 - DNA, 872 bp, Populus trichocarpa
  Intron number 1 from transcript POPTR_0007s01790.1 (locus POPTR_0007s01790) derived from phytozome v7.0 (chr-ID scaf fold_7; pos 1034491 to 1035362)
ttctttgagttgccctttgtcttctctacaaaaaggttagaactttatggtcttaatcgcttttttacttaatttctttggtgtttctaattttctggattctggggtttagttactgaaagatttatgtttttgttacaaatcttgtagggttttgtagctacccttcgtgggtttcttgctaaatttacatttgggtagataatgacatgcttacttgtgtggttgttatgtttaaaggtggctcttttggttttggttttgatgatttgttgaatttttttctgttttggtcgtaattggtgtagtgtagttcagtttcttttgcaaatacagtgaaatttggtttgatgggatttctttgctggttttaattatggtgactagtgttgtgtatctggttcttatgtttgaatttgttttcatgtaacagatgtagatttggaaacaatttccctggatattctctcaatataactatatgcaccaaacctaatcacttaaacatgttgatagctaggattagtaattagtccttgaacattaaatgcttgttcaggttaataaaacctcaaagaagatccttttagagaaaaaaatcagtaataaatttgatgataatgtgatatgaagattcttgactctgaaattagcaatcgctttatttggttatgttttgatgggttgaccaagtagtctttagttatttcaatatattttttgttttatgaggtgagggtgtgtatagcacacatatctggcaagagcttgtgtagaatattgccactgattgcatatgtttgatgtttcccattgttgcttttgttttgtcacttttggttatctgatatgtttatgccaaacagaaccat

SEQ ID NO: 58155 - DNA, 1025 bp, Populus trichocarpa
  Intron number 2 from transcript POPTR_0007s01790.1 (locus POPTR_0007s01790) derived from phytozome v7.0 (chr-ID scaf fold_7; pos 1036281 to 1037305)
gagctaaaagagggctgtgaagactcaaagaagtaagggttgtgaattgcaattactttcgtatttttacattagagtgagtaaaggtttaaattttggtttgttttggtgccatgtaaaactgagctcataaaaaaagatttcaagttttcaactttatcttttgtttacgtcaccggaagactattataatgtcataatggctttattcatagaaaatccatctcttaggagatcatatagacaacaggcatgcctagtgaagccctttgtatgcaacctcttcattagtatgtcttttggcatgagataattggcaatatttaacgtaagatgcatgcctgttatgatttgtttccagcatgtggaaggctactttacttgcctaacatgcaaatccattcagtgcctttgtctccaaatctgttatcatcccctcctttttctttcagatacaaatagttgagttttcttccttgtgtcaattatgctcccctgtcaagttatctgtgttgcctaagtatgcaaacatcatcaatcaccactttctccttatatgcttcccaatagttcttgctttggagatttttcctcctggtgaaagtctgtcagacattatctgtttccaagaccttttcctggatttactatatcctcttaactctagaaactaacaatgttcccatatgtttggaatgtctcaataattgcattcaacttacctgtgcttcttgtgcaattagtcaaaacttgaaagattgattatagctccaggatattctttatgtgagagagttcaaaaggctcttgttcatcatccaagttctttataagatttcttccacatgatttcgcttccagatagttacatacttgtcatggtgcataatctattcctatcattgttatttgacttgctggttctggaattatatattgtcatcaacttcttaattcttaaccaatcaatacggttacgaattatattaacagttttcctctggtgatcataataatatttgcag

SEQ ID NO: 58156 - DNA, 665 bp, Populus trichocarpa
  Intron number 1 from transcript POPTR_0007s12370.1 (locus POPTR_0007s12370) derived from phytozome v7.0 (chr-ID scaf fold_7; pos 12696668 to 12697332)
gtaccacttatcgcaaggtttgtttgattttcagtatgtttttgtttctatggatctatacatgcatgcggtagaagtttgtttgtgatttttttcgtgttttctttcttgggtttatggctttttgatctgtttagttttgactagtttttccttctgattttgttttccctgaatctattgactttggagttttggaaaaaggatgtgaagcaagtattccttttttttcccccttccttttttgcatccaaattgctgtcatttgcagttacgtttttgttcttatcactgttttgtttttctgcgatttattggaattttttgccctgctttaatttgatgtgggagtagatttctgtttctggtggattgtgggttacttgtaatcaagaaaacctttactgttaatctaatcttcatttactccagcctgtgtgtaatcagtttcccaagtgtcatgagtagtcccctaatctcatccacactgtaatcaaactaatttaggatggaaatttatgattataattttaacgaaatgtatgttctgcttaatctgtctgcgtatcttttctttcatgtaatttgtcacagcaatgactgatcttgttgtaatgtgcactgtaacagggctgcaagccgcctccaactgagattgcaggcac

SEQ ID NO: 58157 - DNA, 852 bp, Populus trichocarpa
  Intron number 1 from transcript POPTR_0001s10170.1 (locus POPTR_0001s10170) derived from phytozome v7.0 (chr-ID scaf fold_1; pos 7855705 to 7856556 reverse strand)
cattgagacagccaagggtgattgcagagattattgtatgtaaatttctcttctatttatatttgattgaaatctgatatatgctgatttggttttggttttgcttttgcattttctgctattttgtttgtgcatgttaaggtttttttagtcgtcttttatccaggatgtgagttgccttatttttattttattttgtgtagttcttcttttagaatttactaaaataaggattagaaattgtatttgagaaagatgatgctttattgaaaatgactgtgattctctaggattttgtccttcccatacaaaaattatcacgtcgctctatatttttggtcctgctgtttgattctctcctctgggattaaattaacggtcaagtagcaataaattcatcttttgttaatatggagtcgaaagacatcaactggaatgttattctgttgttcacagtgagattggctttgattctgcaaaagatgatggtgtttgtggctcaacatccaccttttggtcttgattttggcttttttattcctccgattttaccttgtggatatgtttggatcaagcctaagtttgataatcatggttctgcacattcttttgctgtacaaattcagcaggttgcttgaaaaacatatacattttcagtttatgctagtaaggtgaatgctcatggaataaaagatttcaagaggcatagtgcaatcaatacatatagttcatcagatttgaaattctagcagctaaaaatactgtctctagtagaagctttgctaaggttaaccttgaaaactttaccttgtggcagggaggaattttacttgggccatctgctttgggtcg

SEQ ID NO: 58158 - DNA, 905 bp, Populus trichocarpa
  Intron number 1 from transcript POPTR_0010s06310.1 (locus POPTR_0010s06310) derived from phytozome v7.0 (chr-ID scaf fold_10; pos 7719197 to 7720101)
ggattctataattggagctataaggaatatccgtattaccgatggcttcttcacactgaaagaacttatcaaggaagccatcatggaccaagtagaaagctcagttcaacctttatatttttatgtgaagtcgtacacccaaaaaatcaacatgcttaagatgcatttgagctatcaaccaccaaagttttgataattcaatgacaaagagaatcctaggcaacatatagctcattttatggagacttgcaatatgtcaaaattgatggtgatctcatggtaaaacaattcattcattcttgaaagacaatgtctttgactggtatattaacttgaagtctggtttaattgatagttgagagaaattggaacatgagtttcttaactgcttctacagtactcgtcgtatgactatcatgattaaactcaccaatgcatgtcaatggaaaaagtagattgtcatcaactatattcatcggcggagaaactttagcctcaactttagagatcggcttaccaaaacttctacgctagatatatgtattcaagtgatgcattgggactacactacatattacaaggcattaaaccaaaatcttttaaagaattggctactcgagtacacgatacggaacttagcattgctgcagctgaaaacttatcattacctatgcaaaagcccatgagaaataagattaaaggtcatggatttggaaagagtgctctaaagattgaggggaaacaatattttgtaattaattatgcttctataaaggtaccaaccaaagtaaaaaaaaaatgatcgtacaacactgattacttttcaaaaaggtaaaagaaataagttaaccttgaaaaggcgataagaaaaaaaatattcattccctaactcagacatatcaaga

SEQ ID NO: 58159 - DNA, 874 bp, Populus trichocarpa
  Intron number 1 from transcript POPTR_0001s22670.1 (locus POPTR_0001s22670) derived from phytozome v7.0 (chr-ID scaf fold_1; pos 21558096 to 21558969)
gcaaacgacaccttcggcagtacgtatccatagctttccattcttcgccacttactcttatattatgttatattttatttcaaattcaattttgaactgattagacagtgaaactattggatttaattttttttccttgctgattatattggtttcagttactgaatcgtgtgttggtttgaatcgccggaaaatgaaattattttacttttttaattcgaggtaaggagcatcctccgaccagtcaaccagaactagtttttcttatcagattcattaagaggaatttaataaattccacttggcgatggctccaagatcataccttttaaattaccaggccaactccttgggtttgaaattattttacccgattttaggacttaattcacaatgagatatgtaaagttttggaaagagagcaatcttgattttatcttcacgcagaaaatgatttgcttagaaattgttgcttctgttgacggaatttacttttgattagaaaacaagaagaagaagaagaagaaaagagttttttgttatgtttgacatttaatgaccggcatgagtttatctccctgtttctcagtggtccatctatggcatttagctgatttgaaatgatgaaattgtggttttcagatggcgactgataatagttatgtgtcactttgttatttacctttagttttcttatatagttatgtgtcgcattgttatttacctttagttttctgtctcttgctgggtcactgcgattgaataactctcacttggtcatgatagagattttctagtttttttcttgctgtctttatggtatattataatgtcttcagggaggattccgtttacgtacttggaggacattcac

SEQ ID NO: 58160 - DNA, 326 bp, Populus trichocarpa
  Intron number 1 from transcript POPTR_0010s18410.2 (locus POPTR_0010s18410) derived from phytozome v7.0 (chr-ID scaf fold_10; pos 16653048 to 16653373)
gggttggctttgtaaagaccgtcattgataacaaggtggttttctcattattcacaccaaaacccactttgggtacaatatctatgtttcttatcaattctcctttgattaacctctctactttttattctcatttatccattggttttgtcagcaccaagacaccctttatttctttttttaagtttcgttttttcaccatttatccatacctgcatctgctgcatgctcgcttgctttctggtgcatttttgtgtgtctacttttgtgagtttttggtattgaactgtaaagttctgttctttgtatcagaaagagcattgaca

SEQ ID NO: 58161 - DNA, 543 bp, Populus trichocarpa
  Intron number 2 from transcript POPTR_0010s18410.2 (locus POPTR_0010s18410) derived from phytozome v7.0 (chr-ID scaf fold_10; pos 16653457 to 16653999)
agcctgtggccttcgagttacttctattaagattggtatattttgttcttttaataatgtcttcctgattgagattgtaccgactttatgttggattttcatttaaatttgattaggtactggattgatagtttgttcttgttggtttgtttcttctttgttttttgtttttaattgattcgtttgttttacttaaggtttttatgtttgaaagtcttgaagctttttggattttgggtaaggttttcatttgtgaaagttggtccgcagttgaaattttgtttctttttaacactgcctctgaacttggctggataccattttaaattattcatctcatctgaccctctagtccccgactcacaattcaaatgaaagaaaaaaattgaagggtggtcgcattgtttgttgaagttgttatatgattccatcttggaattcgttatcacgggatgccttcaatatctttggatgttgatgttaattgtttcaatagccttactttgtgcttggttatatttccagacccttacctcaatactg

SEQ ID NO: 58162 - DNA, 901 bp, Populus trichocarpa
  Intron number 2 from transcript POPTR_0001s42700.2 (locus POPTR_0001s42700) derived from phytozome v7.0 (chr-ID scaf fold_1; pos 42738187 to 42739087)
agcttgttacaacaccgttttttcggtattttaaggtaagggttttctgatgtgttattttggggttatgtgcttttagttttattgtgagatattttggtatagctgcccatggaaaagaaatgataaagattgtggcttttgctgtaattttaatcagaatcgagttaatgatttcttagatatgatggttaaatatcaatgcaactggaaaattagtctgtttggatactggtgatagcctgtcttttattttgggagaacatttttcctgctccaatttctgttttgatggaaacaataggtttaggcatagacagctatctacttacggatggactatgtgtgacacgttgttcaccaaattggcgcctttattgtgctgaattattcgatatgatctgccactatcaattcaatagcggtgacttttagttttattgtaaatgttaaaaggagtcttagaccaaggaccagatacaaaatcacttttttgtattatttctgttgggaatttctttgcatctggcttccattttcttctgtcaaccttggaataatccacctgatctgcgtaaatttcaattttgaccaaggcattatctagcaactgcatgtatcatggtgctgtttctgtattattttcttttgatgcgacttttttctgggaaccattttgatagtggggaagatatatgttaaggttgatgataggatttgtgtctagaagtaatattcaattaaatacaaacattcacttgttccatttctcactgtattgtggatgtgtgccactgtaatagctgattaccgtaattcttttatatattccttttctgacatgagatgcgttttacatatgggaggttaaattgtggtgtgactgccctttctggccgga

SEQ ID NO: 58163 - DNA, 590 bp, Populus trichocarpa
  Intron number 1 from transcript POPTR_0010s22950.1 (locus POPTR_0010s22950) derived from phytozome v7.0 (chr-ID scaf fold_10; pos 19655247 to 19655836 reverse strand)
ctttgttcttgtatactgcactgctggtatttcaggtgggtttttcccttttggtgtctcctcccccataaagtctgacttttgatttctttctcagcttactttagcttattttctagctagactatcttcgttttttatagtttctgtagaggagtgtgcatctgaatgttaacacaaatactttttaccagataatatcagcaaacaagcttagaattggacttctcgtttttaactctacattttactcattaaaacaaaaacttttgacatgaaaatttcacctaaactggctatatattacaaggaatatttcctttcagaaggatttgatataatgggcgtcccaaaaaagaatttttttgctagagctttgataaaaattattattatagcagtgggggactttactagctatcctgtttatatcaaatagcaagttatggtgattttcgtgtgatcttttttttaattacaatatttaaatgtgatttatttggtgaaaccagcgtacgttagccaagagtaacaaaaactctctttgttgtgcagggggtcacattaacccagcagtgacatttgggctt

SEQ ID NO: 58164 - DNA, 435 bp, Populus trichocarpa
  Intron number 2 from transcript POPTR_0010s10490.2 (locus POPTR_0010s10490) derived from phytozome v7.0 (chr-ID scaf fold_10; pos 10987057 to 10987491)
gacaacttctaaaacgctttaaaccagtgagtttatttcttcaaatgtctttcagagtgccatttccccccaacttcttgctcttgtaaaactaacttgacgctttgaattgctctgtcaaagtatccaataatttcttgttaatgcatcaattgtttgtgcttgtgagtttctgttcgtttaatggttgttgccccttaggccttagggtaatttttgtatgtgcatgttaccattcgatattaattcacttgtttagaattatgtttgatggcaatgttatgttttgatgaaacgacttggtgaaggtggattagaggtttgaatcttacaaattcaatgttagaagagagatttcccatttttctgtctggtgatttcaaggtttaattaattaatttcaatatttttcttgcagagggttctcctctatca

SEQ ID NO: 58165 - DNA, 772 bp, Populus trichocarpa
  Intron number 1 from transcript POPTR_0007s10460.1 (locus POPTR_0007s10460) derived from phytozome v7.0 (chr-ID scaf fold_7; pos 10409362 to 10410133)
tcgcctaccacggaccccgcatctacgaggccaaggcatctctctctataagatctttccttttctattttttttatttgtgccctatgattttgtaactgatgtttattttcatttttttttaaatcgactttttgttaattttaggttttgtttttggtggttttagtgtttaattgtgattttgtttgtttgaatggaaatctgtggtaaagaatggaggtgaaagtgatagttgaggaaatttaaggtttttttaacggcttaatgttgaaattagggtttatagaagctggaattttgatttttttagcgtaacaagtttaatttgtcttgttattgcagaatactaacaattactggtttcagggatttcaactgaactaagtaaatttcactgtgatttatagttgctgcagtctccatttttctgtaataaggagcattttagtgcggtggagagtagtgttgttttctatggatgtgacctttcagttccaaagtgttattttttcattttttttaatgaaattaagatgccaagtatttttgagttgccagggaaccacacacaagaatcaagggattttaaaattttgtcttgattttggattttttgctgaagatgagatttgtttttccttggaagcaatgtttgtgttatctaatttctttttacaacatgttatatgtttttcatttctagcattttaacttttttttaatgttcttttaaatcttaggttcaaaaagctgagcttcgtaagaagga

SEQ ID NO: 58166 - DNA, 441 bp, Populus trichocarpa
  Intron number 1 from transcript POPTR_0010s18480.1 (locus POPTR_0010s18480) derived from phytozome v7.0 (chr-ID scaf fold_10; pos 16707340 to 16707780)
gcatacagcttttcttggactgccagatttagcctgttagtattagatagtcatcaaggcaatgaaccacctaccagaagcattaagtgcatcaccttcccttccaattcgacctctcccttgaaaccataattaaagaaaaaagagtacttctcaggtagggaggtaggtacatagatggaagaaacaagaaacgactaagcaaaggtccatgtcttgtctagttgtgtgatgctgtttgattatagaaattaattaatctaatctcttaatatttttgaatcgttttgataagtggcctgatcaaacagttaggtttgtaattagctagtggtgggttttataattatgttttgctactatagttatagaattgacaagcaagtattaattggggagccatcgacgaatgtggtgcagctggtaaattgcccaagaaca

SEQ ID NO: 58167 - DNA, 1012 bp, Populus trichocarpa
  Intron number 1 from transcript POPTR_0001s37200.2 (locus POPTR_0001s37200) derived from phytozome v7.0 (chr-ID scaf fold_1; pos 36161717 to 36162728)
ctcacttcattttgactttgttgctaaagctaaaggtgggttttttatttgattttcttgttagtttcttttcttactttctcgggcttttcagaagggtttcgtttagtgggttttgttttcgaattttgcggtgatgaacctaggtaactgtgctatctttggcttttagtttgtcatggcttgttttggctttgaatgggagagcttttttcttgctttccctgtttcactctcttggattccagtttcgtgtggaaaacgttgatagctttattggaatctggttatgtggcataactgttgattggtctttattactttcagttcagggagtcaagatagcagtagttccactgcaaattctcatttttcacggtttttggcttttgggtctttgagagttgggactgactgctgctctttctggattttggtttctaggtttgtttattggttcttagtagggtttctgtttttttttagtagtccatgtgcaaggtctcatttgtgggggctttttggtttatgggttttgatgattataagttaaatcgacttagattttgttaattttaaggttgggtttggggttctgaagttgttcctgttgaagtttagggttgtcttttgggtttgagaatttttatgttcacatcagctcaagctaggggcttcagctgtttgccttgcttctgagttttgatagttggctgtatcttgtcttgggtctaattggttcatgcgaaaggcctgcttttgtcatttgcctctgaattttgggaacttgtgttttgttttaggtcagatttggtgttagaaaaggtgttttaatatatcaaatatctcttattttgggatataagttttggaattgattgttattgcaggatgtagagtactaaaaatcatagtatctacggtcttttcaaatataggtcttctgttttctaattttaaggttgagttttgattatttttgtgcctttccaggtctattgttcaagcagtt

SEQ ID NO: 58168 - DNA, 807 bp, Populus trichocarpa
  Intron number 1 from transcript POPTR_0010s22880.2 (locus POPTR_0010s22880) derived from phytozome v7.0 (chr-ID scaf fold_10; pos 19630738 to 19631544 reverse strand)
aggaaaaaaaaagaaaaaaagtaccggttcctcaggtaattgatttcttcctcgtcatgtttctagattttctgctacttctctggcaacatccctacatgtattctcagatcacactgcaccgtttgcgcttggatcttttactcgccaaatttttcttgatctcattttcttgagtttcttgaatggttaaatcttggaaatggtttcttatgtgaaaaatcttagttggttttttttatggttcgtttgctggaattggtaggagtgtttgcttggttgctagtgtgtctaatttactctttgtaatcgagattgaattcatagtcatttgtgtggatcttgattgttaagagtaggggatgtgttggatcagtgagatttttcgataagatgggagctttttatcttttctgggaattttggattttgtgcactggttgctatctataaagatgaagaaacaataggatggttagattttgcttgtactcattgatcttcttgaggattgtgagcactgagtaattttgtatgaatatttttttatatagaaaatggattgtcttttggctttttaaaaaagtaatttatagcaattttcttgttttgtaaatggtcatggatttatatattttgttactcgtcgagccttgtatttgtatttgtttgttttgatgcaaatcaaaatccactttgttccttgaagaagccaattgatattttactgcaaggagcatcaggtgctaattttaggtgcgctcatcgtctttttatttcagtacagcattggagatttcacgaagc

SEQ ID NO: 58169 - DNA, 1021 bp, Populus trichocarpa
  Intron number 2 from transcript POPTR_0001s40090.1 (locus POPTR_0001s40090) derived from phytozome v7.0 (chr-ID scaf fold_1; pos 39399712 to 39400732 reverse strand)
aagaaacagagaaccttgctcgtgagtatagcatatatcttttttttttcttgcacatctgcacacatgtgaaaagttctttggtgggtaattgtttgtatcattgttaacattgttgtgtttgagtcttcatggttttctgtgtttatatcactgttaacattgtcgtgtttgagtattcatggttttctgtgttttatcttgctgtgtataagtaatgttaattgactttacagttctctattaaaattaatctactgaatgatgaatcattgttaacatttttgtgcttgagttttcatgtttttctgtgtttatattattgttaacattgttgtggtttagttttcatggttttctgtgtttgtcttgttgtgtataagtaatgttaattgactgtacagttctctattaaaattaatccactgattgatgagttttgaggatcttgaggtttgtttgctgatgaaactgtgttgtcatcggcttgctctgacttaaaataaaggtagcctttaatctcatctagagataagcttttcctttttgatctttagctgaagagagttcctaaaggaatctgtataaagttgcctctttcttgtcatcattttagaatttgactcttcatggtgaaaatcctgtatttcaggctttttaagtcatcatgggaattaaaatatgaggaacaattgtttaaaattaattgtgtttttttttgtgattctatgtaccgaacaagtagcacacatcttacttctagatgcaacttgctcagttgaacttcacactcctttctttgatcatcttcatgtataatgttacacaaaatgatgattatgtttctctaaatcatccccacataagtttttggtgttttagcatgttcctggacctcgctactgggttttagctctctcccaagttgctcttgtttttgttagatgatgtgtgatactttaccactggaagaaaaaatcttcctaaaaccttctggtctgtttgtgttgttttcccacag

SEQ ID NO: 58170 - DNA, 796 bp, Populus trichocarpa
  Intron number 2 from transcript POPTR_0001s41730.1 (locus POPTR_0001s41730) derived from phytozome v7.0 (chr-ID scaf fold_1; pos 41433069 to 41433864 reverse strand)
gccgtgtcttgactgatttcatcggtaagtggtgtctctggattcctctgtctaatgatatgttttcacctttagctttactttcttaggtgtgtcaccatgtaatcagctttactttgcttttagtcttgtagatgtataattatattttagtggtggggttttcccactattttatcctcttgtcttgtgacgatcactaccgactccgctgcctttgttttttttttagctgtaaaatgcttcattatcgggttaacttttaaaaaaaaaacaaaaaatcttgtttcagtactttcgaaaggttcttctatcttccttccattgtctcagctcccatcatccatctttacccccaccagggccaccactaccgtctaaatagtttcttttttgttttttatttatttatttatgttgatatttactttgctgcaattattgaaacttattgttgcccatatgacaagattgtacacttcagcactctttacaagtgacaacgaattcttgcaatttaaggtttagctatttacttaatccttgtattttaagaaaatgaattgattagtccctggctttagaatccgtcggtttgatccctttgtttttcaaatccatccatattattttagttctttcgccaatttcatgttttctttcctttttagttttcttatttgagaaataggaaaaggaaaagagaaactacaagtacgaagcttgatttaattaacgttaaaaactatatatatatgcagctaagtctctcggaatcaagtctccgatcccatac

SEQ ID NO: 58171 - DNA, 745 bp, Populus trichocarpa
  Intron number 1 from transcript POPTR_0010s01570.1 (locus POPTR_0010s01570) derived from phytozome v7.0 (chr-ID scaf fold_10; pos 1777970 to 1778714)
catcaatcctcctgttaattcgctctcttttgacggtatcactcgctcttcttctttttttttctttatttggttcgaattaagttagatcttgtatatttagttcgttttatgtggacgcttttgatattcaagcttgatttcttgttttttgattgggtggtgggctaatttttatgtgtaggattaagattttctttttttatgaattggtggttgtttttgtttcaggaaactggattctgttgactacttggtccatttgatttatcatttcacattttaacttctgtttaccaggataaataaaagataattttaacaatttggtgtgtaatttgacaatttaggatggcatgctgcatcttttatggggtaaagggcctctatcctcataatcttggtgttatgattgttttttcaaagaattaggagactatcctcgaggtttattatctcgctttgaaaaatatttacgtgatttgtgtaatgctacaagtctgttaacttggttctggtttaagctaatgattggaagcatttgaaaattcctttcgggttccaggtgtattcttattctactcaaatttgtgatacaattcgcataatctagacttgcttgatgctgcagttacttatttttcaattaaacgatgttcttcaatgatagtgatcaaatatggaacttatccctattgctttctgtccagtgttgtacagcttgaaggacagtttcgagcaagct

SEQ ID NO: 58172 - DNA, 783 bp, Populus trichocarpa
  Intron number 3 from transcript POPTR_0027s00200.1 (locus POPTR_0027s00200) derived from phytozome v7.0 (chr-ID scaf fold_27; pos 3493 to 4275)
tttgtatctgtcaggcaatcagctgacaggatcaggtataatacacagtttctacctaaatgcttaacatgacattctcttaattatattgtttctttatcaacaaaaatgaggactttatatcaagaaaagaggcacttggaattaggtccaagaggcatatattttattcttattttagcccttttatgccaaaagtgttgtaatatttagattaaattagtaatcagaagttcacttcaaaactctcctataaatatatattttatatttatctttttaaataaaacccacatattggaccggttttcggtttgtagccatttattatttcctctctttttaataatgggttttgtacctttttttaatcaaaatattattctgtggtggaggatattgccttacggtcgtggtgaatggataaaattgggaaagtagttgctagaaaacagaggaacaaattataattactaaattagtgacaactaagcatcttactaactaaatagatagaggaattcagttaccaacggatttgaacttgccatggattattattagaatgatatttaacgattattattcttgttttaattaccgatgggttgacagctggattaggaggtagcttctatggtaaccttttaattatttagctttgaaaccttttcttttctccttctcatatcattttttttctatgcgtttatttccttccaatatgctattgaggaacatcatgcaggtctcaaagacttgtcatcaaggttgaaaaagctg

SEQ ID NO: 58173 - DNA, 679 bp, Populus trichocarpa; identical to SEQ ID NO: 57804
  Intron number 1 from transcript POPTR_0010s21580.1 (locus POPTR_0010s21580) derived from phytozome v7.0 (chr-ID scaf fold_10; pos 18802975 to 18803653)

SEQ ID NO: 58174 - DNA, 1009 bp, Populus trichocarpa
  Intron number 1 from transcript POPTR_0002s23610.1 (locus POPTR_0002s23610) derived from phytozome v7.0 (chr-ID scaf fold_2; pos 21143616 to 21144624 reverse strand)
agtttcatagtcctagaaatctccttttggccctggtatgttgctcctcttcccaaccctaactacaatctagaaaaagtataccatattgatatacccttctcaaatatctatgctttgttttgttttgtatcaggatttttctgtagtcccatcagagcttgtaacaaagtgacaaaccccatttctttctacaaaaaattatgtgtgtcaggcctcagtatgtgtaaaagctgcttaattttatgcattttcatgttgtatattactattgatctttggctttcaattctcttttttggtcaagtcttatgatttagctcctttaaaatattaaataattgactggaaaatacacacaatcactgaatctgatcgcttgttgaagaaagaaagggaggtaaaaggtttactgaccctttcttcatgtttcttcttgcattagaccatttgttttttgatttttttccagaaagtctaaaacgcaactgcttaatttctttcttttattcattgatggtgctggacttttgtcagctgggtagtacgttgcactcccttccttgtctattttctagttatgctctctgaatggtttctcggatccaagtcaagctaaatagcttttttatctgctttcttacttgcccatgtttctgttttgctgcttgagtggtttcttgtatgtgaattttgaaaaattgatgaagttgggcgtcaaaaagctagaacttcatcagcttccactgtttgaaaccgcatgttttttccatcacacaagtacggcaatcacaagcaccacttctgggccacattatgtttcataacaagaccccacattgtttgattataactacagttcttatgtgaaggcgcaatgataataatggtggaggtttctctgtcaggctcatgtctcgtttcagtatttcggtgtgtgattgtattttgttgttgttttgttcgtgtttcaggtgggagaagtaggtgaattgtctgagatatttca

SEQ ID NO: 58175 - DNA, 780 bp, Populus trichocarpa
  Intron number 1 from transcript POPTR_0007s09750.1 (locus POPTR_0007s09750) derived from phytozome v7.0 (chr-ID scaf fold_7; pos 9276105 to 9276884 reverse strand)
gttcacgtcagtttttacagaaactgtatactctttatctctatctcgttacctccataatgcttttgtaatgcttaattcgatatctgggtgaatcttgaattttttttcttctttatatccttttggctctgattattttgtgataccattagttgccctctacgccttttgggattttgttcactgacgatgaactgatctagtaaatctacattatatcattttgtaaggttgaatttttttttgagacaaacattttgcttggtaattattcaggacattgaaaacactagatttggaaattgattttcaagacctggtactaaatatggtttttgtttattagaaatttagtaacacgggatcagttgattggaagcactgtgccattttagtcccttcatgttaaattttaaaacttgttttctgctttctaattttgtgttgtaactttctgaattattattattgatgaaagcaaattgctagaaaaggttttctttgttttgtttggtctttttaaactgttatctattgggcattgtgttgcaagatattttctttttgtcaacagtaaattgagtcccaagtaatcgacctgttatttctaatatatttgactttggggctcatttaatttctgatcggggtcaaatcttagaaactcattgccttttctttttaaccctgttaatcttcatcagaagcttaaattagcttttgaatttggtgttcttatttttatgtaatttgaatgtgcaatttgggtggttttag

SEQ ID NO: 58176 - DNA, 917 bp, Populus trichocarpa
  Intron number 2 from transcript POPTR_0002s06420.2 (locus POPTR_0002s06420) derived from phytozome v7.0 (chr-ID scaf fold_2; pos 4282439 to 4283355 reverse strand)
ctagagtaagtgaaattgaacttcttccttaaattaatggtgattttgaagttcaattattctattttattaccagttggcatgtataaattattgccttcataattatgcattttctttctttcgtttgctgaagtatacttctgcttcacataaatttgttgaagaacatttctgcccctggaggttctaaaagtgccctttgaactaaacgaagggacacaaatggagtttcagagccctgttccgttggatattgaccttctttctcaaaagtcaatcaccagtaaagctgttggattagtcattagaggttaaaaccaggctcttatgtacagtactgtagtctcatcgtgtttttcaacttccatgaattttgggattttcccatatctacttgtattttttttgcagcaacatttcatatttccagtatgggatcagagtcaaatggatactgttgccagcagtatatgttgtagcatgattggatttgggagcaattgctatgtgttctcgggattaatagaaacaagctccgtagtttaactagcaaattcacacaacgaattgtaaagagcttatcttcagcccgaattccacgtattatcgtaaattagctgctcaactgatagaaattttttaatctgctcgtgattctgttagtttttagattttagattgaactatggcttggaatcttgtgttggtcttcttagattagatttcagatattagagcttctaaattgtgtcttcataatagactaaatagtgaagtccaatcaagaattattaggaaaccagtgctaagatagacactagtaattcttgttatacatcaactgatattctgtttatttccctctttttcctggttgaatgtccagacactatcagctgctgatcttcgtgacc

SEQ ID NO: 58177 - DNA, 294 bp, Populus trichocarpa
  Intron number 1 from transcript POPTR_0001s15170.1 (locus POPTR_0001s15170) derived from phytozome v7.0 (chr-ID scaf fold_1; pos 12006257 to 12006550 reverse strand)
gtgatgtatatattatagaactctttctgggtttcttggcttttactttcttttgcaaacactgttttctgggtttgctgcaaaatagccttatataccgaagaagcactcatgtatgcctcataaggcttgaatataaagaacaaatttatacaaagttttgatcttttctacaactgtttttttttttatatctttatataaattgagttttaatattctctctctctctctctcttgtaaattatttctttgaattttaattttcttgactcaaggaaaaaagagagagat

SEQ ID NO: 58178 - DNA, 605 bp, Populus trichocarpa
  Intron number 1 from transcript POPTR_0007s14430.1 (locus POPTR_0007s14430) derived from phytozome v7.0 (chr-ID scaf fold_7; pos 14206756 to 14207360 reverse strand)
acagtaaggcaagtttaacagtctgtctcaacatccatcacaatagtgaccaaatttgattcatctccatgttagtacatcactaactgtacatatatacacctgctctttcccatttatcttacacatcttcaatagatgcaaaaaccgcaaaaggttacagaaaacatcctgatgcaggacagcttaggagctgttctgtatctgacttttggaggctgtttagagatgtattgaactggatttctgctgggaattgtagaaactattaaagtgacactaatagggcctctaggagtcacacctagaggatagaaaaacttacgcttcacacctagaggagattgagtcacccaatcaaaatcaaattgctagaattttatccacacactccattaaaatattgaaagactacgtgcttatttatagagttctagtagttcaaatccaataaagacttggattcctaagtaagaaaataataagtctatgtagaatgggaaaaaactaataagctaattaatcaggaccaataaaataccaaatagaaaatctctgacaaatttccagaattcctagaaattacagaaatacccattgtctat

SEQ ID NO: 58179 - DNA, 794 bp, Populus trichocarpa
  Intron number 3 from transcript POPTR_0002s02380.2 (locus POPTR_0002s02380) derived from phytozome v7.0 (chr-ID scaf fold_2; pos 1346856 to 1347649 reverse strand)
gcagagagaggtttctcttcacaaattgaaattaggtcagtgactttttaaagggttttatccattcttatcttggtttgtacatcattaatatgaaaataatgggaatcttgacgatttaagtatctgctgcaagttctgatttcaatataatactaatagaggctgaatgattaaagattgtctttatatatatatatattcaataaagtatatggaatgcattctgattcaataaagtatatggaatgcattctgaaattaggtgattgttttttttttcaagtgtttttatgcattttttgtttgaattatataacataaatggaaaaaaattgagaattttagaatctgttgcaagatttttgaatatgggatgaagtaagttggggctaaatcattcaatcttttttccatgctgtaatgagaagggaatgctttttatgattttaatgatggcatgaacagaaggggtaatagaatatagtaagacactgttgtccttaagatatcttgttggcacaggagcgatgctcctttgactacaagtggttttttaaaagttttatgagaattgcatataaatcacttcacaaatttcatcctttccaacttttctgtgtgactatcttgattcagatttattagtctttacttaggtgttgatatgtggtgagtttcacatagattatgttgttgggaatgcacttgttcgtggagggctttgtaatgactctacatgttttaagtctgctttatttgattggtgtttgtgattgcagagcaaacagaag

SEQ ID NO: 58180 - DNA, 892 bp, Populus trichocarpa
  Intron number 3 from transcript POPTR_0010s05080.3 (locus POPTR_0010s05080) derived from phytozome v7.0 (chr-ID scaf fold_10; pos 6486643 to 6487534 reverse strand)
tgtacggtgcccttgctaaaggccaaagcccgaaggttagtgtttatttcttgaaataaatatatttctatggtcctatcaatggaaaatgttaataatattgtgtgcaatttgggaatcccactggccatacctaaccaaagatagatggaggcgaggtgaaacccaggaggccaaatttgacttgtgcagggattatggtggtagggggtattagaagtgtattcatatttattttttttaaaaaaaattttgtttaaaagtatattaaaataatattttttatttttaaaaaaatatatttttatataacatttcaaaacaatataaaaatatttaaaaaataaatttaaattaaaaaaataaaattttcttagtcctgtttgtaatgtgatatcaaaaaggcttgtgagcctgttttttcaatatatttgtctgtagtttctgtttgtttttgtgttttaaaagtgttttttaaaaaaattaatttttttaattttctggtttaaaattaatttttttttaatgttttcaaattattttgatgtgataatatcaaaaataatttttttaaaaaatacattttaaaaaataaccattattatcctacaacaaaataacttcttcaaattcctgatcaatgagtagggtaggattaaaaccttgcactgttcgcatcatgatgactcttttgttttcgtttattatcctccaacaaagataccttattcaaattccagatcaatgagtagggtaggattgaaaccttgcactgatcgcatgatgatggctcttttgttttaatttattttattatttttctcaactgattaatcattgcgagacatgggctgagttaactcaactactcctgttaaattaaatgcagttt

SEQ ID NO: 58181 - DNA, 740 bp, Populus trichocarpa
  Intron number 2 from transcript POPTR_0001s15010.1 (locus POPTR_0001s15010) derived from phytozome v7.0 (chr-ID scaf fold_1; pos 11833669 to 11834408 reverse strand)
cttcattgttctgcgggccaacgacaacggtggtaagctaaccgaaatctcattaatataagatccccaaatcattgaagttaaatcttggctgcttaaccatatatatacaactctaagtgttttctgacatgatctttgtcatctgtctctgtcaaagtttgtgataaaacgacagtattcactttggaacactatatatatagttcatttcctcatagaattagctggggtttttttcatggaaattaaggaaatgtatgaatctgaactttatttatagtatttccgtcacctgatatattaaaggaacggaaaacggaaggcacctaattatgtgatgcatgccatgtatatgttatttgtgtagattccgattaacgaatcaatgaactaagatgatatgtatgcatgacttgatcatataacagtatattttttattatttagtcaagtgccgttagtttattggcctacttggtattctattatgtttttctcaaaaagtcgttcataccgtcgaataaaaacaaaaaaataaggtgttatttttttataaatgagtgtactatagaagatgtgtataaatctgaactatatatatagtgttccaaagtgaatactgtcgttccttatcgctagctaggaagtccatttacgtttcggtaaacctagttatcattcgatcacgagtagctgtaccctttaacaggtggaacatttgcactctattcattgat

SEQ ID NO: 58182 - DNA, 394 bp, Populus trichocarpa
  Intron number 3 from transcript POPTR_0001s34130.1 (locus POPTR_0001s34130) derived from phytozome v7.0 (chr-ID scaf fold_1; pos 32270652 to 32271045 reverse strand)
atccaaatgtaatgatcttaatcctatctgtaaagttttgatttttttttttggtacttgatcttttttgtccattcattttgtttatactacccaatagctctgcagtgtttcaatggtgctagttttccaatttaaaaaatgtggctttcaaggtgataacttttgtgcatctattcaaatgcttgcattcagtgcacaactcaaatgaactttgaataacactattgttgaaacaagttggtctcctgttataaactttataaaaattaagtctgtgatgcatttttctcttcctttctttaactttgttttactagtgtagtgttaaagctatcgtacccttgagaatcatacccattatgtattttgcagaccctcaagcagctagaga

SEQ ID NO: 58183 - DNA, 416 bp, Populus trichocarpa
  Intron number 1 from transcript POPTR_0001s34130.1 (locus POPTR_0001s34130) derived from phytozome v7.0 (chr-ID scaf fold_1; pos 32271386 to 32271801 reverse strand)
tcgtcgtggctttgctaaaggcaaaaataaatcaagtaatgctccctttttttttctctgttttatgatttacccatttctgattgatggctaatatgttgtgaaattgtgataatcggaggatctgatatccttggcttgtgctcattctgggttttgcttaatttgaggcagactattctactttgcacttctcgtattgcacttgtgaaagttggtgtttttgggtttgatttttaaagatggaaaatatagtaaagggaacagtttcttggctatgtggagtgtggtttcttttaatttaaagatcccgttatgtgtttgtcgtggttcaatatccccaatttctttatttgaatgctatcaatgtatgtcaaattgggagatcatttcttttcttatttgtattttagagg

SEQ ID NO: 58184 - DNA, 674 bp, Populus trichocarpa
  Intron number 1 from transcript POPTR_0001s22840.1 (locus POPTR_0001s22840) derived from phytozome v7.0 (chr-ID scaf fold_1; pos 21775888 to 21776561 reverse strand)
caatcaggcaagaccttgtttcttggtgagaaacatgttctctatgcataatggatcttctacttttcattttattacagcatattgaaatgttccttggatgaattttaatcagttatagaatttgttcttgttaatgttagaattcaagtaaagaaaaggctttgaatcaagtgtcgatgaaactcatgacagaaatatttgaaattcgtgatggaaattatggtggtgctaagtagtaggctgcatgataacagttattagtattttggcacctgatgatagattattggttatggtgctcttaggatccatttaccatgtgaaatgatgtgagatttatgcaatgtgagagaattgtaccatatgatctccatcccaaattagagttgcaccttattttaggatgtccagaatgtctttccatgttcatcaacatatcctatttattggttttattaaagtttatttagttatgttggttacaaaaaagaatggagtaatagatttaatccctgagggatcgataattcattttcatgctctgtttgttatggtgaaactataggcctttctttttggattgcgcagcatacatgcccaaacacaaagcaacacttattgataacttggtttgtttttcaggaatcacctttgcactctctcgggttatc

SEQ ID NO: 58185 - DNA, 678 bp, Populus trichocarpa
  Intron number 4 from transcript POPTR_0002s13680.1 (locus POPTR_0002s13680) derived from phytozome v7.0 (chr-ID scaf fold_2; pos 10149792 to 10150469 reverse strand)
aattcgagaccaggagtattgaaaggtttcttaaactatctctaacagtatatgtcttctcttagtattaatttgactataatatgttgacatgtttgtgttaagttggttgtttgcatttgtgtttgtctacgtaaatatttgctttatatgtttcattttgagataattctgtgactgacagcatcagttcacttgcattctctttatgtctatgtgttatgacttgcaacatgtgctcattgaggttagagagctacatgcttctttttgttagttgaaccttcattgctattaattgatggatgttcattttggtaggtttaattagcaaatgctactaatcatgaatatttgttgcttgtcttatagtttgattttctcacctagtaaggcgttcatgaatgttctttgttttagatggaggaaacccaagctagatacttaaattgaggaataggaaaatgattctttgaatccaagtttactggatttacccttttctttttcttcgacaagaaagaaaagttatcacctggcagtgaacttgataaaaatgcggtgccattttttccttgctctcagcttgctgcgtctttaactagttttgttcattttaattgctattactgactttagagttgccaatcgctgaattggttgttgacgttcaggatt

SEQ ID NO: 58186 - DNA, 284 bp, Populus trichocarpa
  Intron number 1 from transcript POPTR_0010s04520.1 (locus POPTR_0010s04520) derived from phytozome v7.0 (chr-ID scaf fold_10; pos 5628797 to 5629080)
aaagggcgatatttctatgtaattattttgtttatttttattaagttattttaaattttacaattatataaaaataaattttttaaataaattttcaggtttaccggtacaacatagatttgattggcgaatttgttggtaaataagaccccaggctagaagaaaggtttctgaaattgaatgtcatctttccttagcaaagaatgtaatgctttcttttaccaaactaatttataaaacctgttgtagattgcagaagtagagggaggaattccttttgtgga

SEQ ID NO: 58187 - DNA, 936 bp, Populus trichocarpa
  Intron number 2 from transcript POPTR_0001s07480.1 (locus POPTR_0001s07480) derived from phytozome v7.0 (chr-ID scaf fold_1; pos 5614133 to 5615068 reverse strand)
aacacggggaagaattgctttttgttagtagcaaggtacttcctgttactgtgatatataagctgtatagatcagcgcatgatgaatttcaaaaattctcgtgatgcaattgtttctctttaccatcagctgtaagaagtaatttactctcagttgttcagtaatcggtaccattctgttccaatggtttttctagtgtggtttgttttcttaacatcatcttttcgttgataaagtacagaatattagaaagtgaccatacacttgtgtttgttgaattattagtgaagttgcttcaaaaattcatttcgtgaaaacatggtgctactggagagtgcttgcaactttgtagtgagattggtgctaatataactagaaggtgacaatttgtcttgtaaccaaatcatatgtatatatgtctctatttgtcatccactggaggaatatccatgaatttattatgtcatatgaatttaatatatatgtttgagaccaacaatgaagggtttaatgtaggatttatagcattcaactgtggaaacatattctcatatttcactctttgcagaggggaagtctattgacgtgaaatgcatgatagtcaatttatactaaaagtctaggattattctagatacattatataatctttttaatgaatattcaacctagaagacctaaaatgcataaaaccttcgatcataactcctaggaaaatgattgcttctttttgtgggtttggcatcatataagcttcaggcataataaattgcaatttttatccatcttcaatttaaactactcaaagatgatggcgatcagccatatgtcttagtcatttcttgtgcctgggcttggctaatgcattctttcttgtaaactatattgatggtttatgcaggctatttttaagcctccaaagactattcgtggagg

SEQ ID NO: 58188 - DNA, 613 bp, Populus trichocarpa
  Intron number 1 from transcript POPTR_0007s08200.1 (locus POPTR_0007s08200) derived from phytozome v7.0 (chr-ID scaf fold_7; pos 6767751 to 6768363 reverse strand)
gtgacaccattgacagcgtcaaagccaagattcaggtagacttcttcttcttatcttttttttgggctctagttttaattgattcctttgtgtttcttgttcatagtctttttttttttttttatatgggtccttttgttttaatatatagtattataatttgtttcctgggaaaaactatatttggtcgtgggtttggtttgtctctccatatagagaaaaggagggtttttttacttgcaatagtcatcgtatatttgaatgttgttgattgaggaattcgtagcaaagagtgtctcaaattagttaggttgtaatggaaattagctttgggaaagcctgtaacattgaagttcagctcagaattttcaataggaatgaactattacgagtttactcatgattttcttgtcatgacttgacatgaatctttgattatttttttgtttggtttttggagctctttttctctatcgaaatggtttccctgtgagatttggatatttaggtttatatttttattttttttcgggagttgatgaatttgtgcttaactattggtgatgtgtatggttcaggacaaggaaggcatccctccagaccagctgaggtt

SEQ ID NO: 58189 - DNA, 682 bp, Populus trichocarpa
  Intron number 2 from transcript POPTR_0002s03730.1 (locus POPTR_0002s03730) derived from phytozome v7.0 (chr-ID scaf fold_2; pos 2320135 to 2320816 reverse strand)
tgcaaactggagaggaagttgctgttaaactggtatgttctaaaaggattgttcattttttgtttggtttggattttgaaggagaggagtggttattttagctgcttatgtatttatttgtcgattttttggccaaaaaatgtgttttttgagatacttctctttcactcgtagcgggtatttgagatgtaaaatttatcgttgttcctgtatgatacttctctttcactgcgtagctggtatttgagatgtaaatttttattgcatttgcttttgtagcgtcgaatttctaagatatgatactgaaacaggcaaacagctactgatgtagatttagacgggggcagtttacttctaaaggatttagaactgttattaataatgatagagtgccgcatgcactttgtaaggataagtagaatttacgcttcttccttatcttagtgaaggaaagtaggaacacagatctgtatctaggatgatacaaattacatcgttaactgcatgattgatgtgaaaataaatccttcgtattccttgttttccctgaaagagagcattttgaatgagaatttctttgagcatgcttgtcttcttctctccagtattccttgtgattcttgacccttatttgttctaaatttcaggaatctgtaaagaccaagcatccacagcttcatta

SEQ ID NO: 58190 - DNA, 561 bp, Populus trichocarpa
  Intron number 1 from transcript POPTR_0010s10530.1 (locus POPTR_0010s10530) derived from phytozome v7.0 (chr-ID scaf fold_10; pos 11039813 to 11040373)
ggtgcagtggcgaggaaaagacaacttttgtatcttccttttatattttgcattgcagatctttttactaggctgagggagagagtgctgtctaacaatggagttaaagccttagctattgttattacaaggctacataactgatagagaatgatgttaatcataatcatttaagccattttctatttctttggggccatacaacttgcttaatttcatcaactcctaattcctttcattaatggtttttcgaagtactcgtttcttcaaacatagtcaaacatcctttctttttctgattatataggagccttgcatttgcttgactcgataacattttaataattgactcccacacgaaatatccgacctgacaaccaggaatattatcgtgacaacttccaccgattgattccaacgttctgtgcttgtttggcccaatgtctctatatgctgcctgattgtttgatgctataagtaaaaagcagaagattcacattttatgttaatgctgactagcttgtagtgttggaaccagatatttagtgacttcttgcacaa

SEQ ID NO: 58191 - DNA, 621 bp, Populus trichocarpa
  Intron number 1 from transcript POPTR_0001s05890.1 (locus POPTR_0001s05890) derived from phytozome v7.0 (chr-ID scaf fold_1; pos 4622870 to 4623490)
gaaaactactggaagcagccaaccttcagcatctggtcaagtcaatacagaagtaccaggatatgctcaggttcatgaacaacagaacaagttttgctctgactcgtcctagaactttgaatttaatatttgatttaacattggaataagatgtgtagaggttggtttaataggtaactttgttaagattattaagattaatctcttctatttataatatttttttttgtctccaaatatatcaataatttctccatatatatatatatatatatatatatatatatatatatatatatgatattttaggaacggtaaagcatacacatttcagatttgaaccaattttacacacttgaaatagagaaattattattcgagaaattattaaggatgagctcacattcgttttagcaaaaaaagaatgaacttttccactatcctcggtctgaatcaatagatcactaggttgaccaaataggtcaggctggatattataactaaggacaccactagaaaaattaaaaaacacggacggaatattccatcagtattcaagaaaaaatattcatcagtgtaggaaatattgttgaatgcaagattggcactaagctgttgtcc

SEQ ID NO: 58192 - DNA, 805 bp, Populus trichocarpa
  Intron number 1 from transcript POPTR_0001s33440.1 (locus POPTR_0001s33440) derived from phytozome v7.0 (chr-ID scaf fold_1; pos 31649558 to 31650362)
caatgtgagttccataattataataactttataatgttctttgcaaaatattttttttcaataactttatctttactttagatttattaatcaaattgaatgaatattaaaaaataaacaaaatttttattaaaaattaaacatgtttacatgaataaaatcaatatcaaatataatcaatcaacttagtacaaggtatatacactaacaattgatagctttagcattggtagacaagcttgatctcatctcatcatctccaggacgttgatgccaatctactgtgtcaaaactggaatgaaaattataatctccgtcattaaattcaactgttttatagtgcaatctattgctctcaccaagccttgtaatggattacaatgattacttgagcttggcatgttcaaattcatattcttattgccacagctacagtcttatcatttgcagttaactgctatattacaattttttccatcaatgttatgaatgattattatccatgtgagaaattggttttctaatggaatacaggcaattgacaatgggactttatgaccatgttcatatctatggtgcttgtagtaggatctattgcaaccatcataaaaaataaaaaataaaaaaaacaccctctaggatatttcaaggaggtatatggtttccaggtaaagatctatgatgtactcaagattccaccctgaactctgactgatgttatgcatccatgatcaatagatcgttcccactgtcatcaatctctttgaggccatgaagccgacaaagtgaagatctctatctattt

SEQ ID NO: 58193 - DNA, 711 bp, Populus trichocarpa
  Intron number 2 from transcript POPTR_0001s06410.1 (locus POPTR_0001s06410) derived from phytozome v7.0 (chr-ID scaf fold_1; pos 4906335 to 4907045)
ttgattatacaagcacggttgttaggtatattcaggtaatgcttgaaatttgtgacagctcttaatgtatctaaattggaagcaatgcgaattttggaatttgttttctttgaagtggatgtgtttcttactggatttggtgttcctttaattagaattgaataattaatgggcgcatctatttgtctgtgttaattccactatctgaatttgtagttgttttcttctatatcatgcctttggctaaaaagcttatcagtgttggtgttgaattcatagttggacaggactagtggttttcatcaggtcatagtgctgatcttgaccaagagttaattgcttggagaggtggtggtttttgcacatgaaaaaaaaggaattacaccaataggtttttgttcgcctctgctagtattttaggttttgtgaagggagcgaaataaaagagtatttggaaggaaaagtttactcttaactctttgaaggacttgtgggttcaaactttacacttctagtaatctgacgttgaagaaaacatttgaacttcacagattatggattttctatgatgttcatatgatgcacagtcaatgatttacttgctagtttcttttgcttgcaagtgggtggcaaccccctggtgcctgcatcactagatcttttgttatttgagttacttgtaatcttgtttcagtgttgctgcagactcgt

SEQ ID NO: 58194 - DNA, 583 bp, Populus trichocarpa
  Intron number 1 from transcript POPTR_0001s37040.1 (locus POPTR_0001s37040) derived from phytozome v7.0 (chr-ID scaf fold_1; pos 35863816 to 35864398 reverse strand)
aaacatacaaccacggtttaattatccctgtttaggtaggcgctcattcttttctttgatctttcaaatatctatataagagctgtctgtgcttttttgttgttcaatttgaatgaagaaatgaaagattagtagatatcagagattctggaatctctattaccatcgctaattgggcgtttcttatttgttagtttagattcattttgaaatattttcaattcgggtttttaattaaaatggtgatgaatattataataataatcttcagctcactgatttatttatttgaatttgtgtccgtattagcttggcctctctttaaaaaaccaatcgcttagctttgctgaattagtggttgaatttactgtttctgatttgggtttagttttgagtttgcatgttaaaagcttggttttttgttttatttttctttcatttatattactgcatctaagaatctagtcaatgtattgttgtggattactatcggcaatatcgttatgggttttgaattgaagttgtaaattctatcagatattgatgtggtatacatgccagaacagactgtagttggactgta

SEQ ID NO: 58195 - DNA, 959 bp, Populus trichocarpa
  Intron number 1 from transcript POPTR_0010s24760.2 (locus POPTR_0010s24760) derived from phytozome v7.0 (chr-ID scaf fold_10; pos 20785210 to 20786168)
gtattcgtcatcggggctctccttgcatcttgaaggtaactttcacttctttcttgcttcgtgtttccttggccaccaactatatgtcgtgagagagagagaaaccttcagtatgttttagtttgtgggatatctgtttagttaatcaattttttgaaaaaaaaatatggtttttgttgcttttgtgtgtgtttgatctgtttggttgctaagacaatgtgggataaaggtattgtttttgggtttctttttatgctttggatatttactttcttagtaatgggactgcaaaactgttcttaatattactttttgctgaagaagtgtttttagtaattgatttgtttgctgagaaagtatgagatctggaacaagttttattgattaccttactcatttgaatgaataaagaatcctaagacttaagatttttttcttgaaaattattgttgttttgatggtgggaagcttttgaagtttgatttattgtctgtaatttgatgttcagtttacacttgttgtggattttatttcccatttccctttttttggttagaatagttccgaccactatcaacacggtatcactgtgggtttccagctcttttgaaactggaaaacaggatgttttatctgacatgccccataatttgaatagaatatgttttattttgttattcatggtctttgaggagcttttgtggagctcctctcctcaatgaattatttgaatttaagattatagcattgacaattcaagcagtcctcttgtagctccattgcattttggatgtcatgtcatcatgtgtgaacttagagttaatggtgttttgtctttagatcattaaaaaatgtagtttctcatcttttgcttttatgtttccttgaaaggaaatgacaatcaccataacagtttcagttactcttctctttgcagcagcagcagcttattagctaag

SEQ ID NO: 58196 - DNA, 480 bp, Populus trichocarpa
  Intron number 3 from transcript POPTR_0010s00300.1 (locus POPTR_0010s00300) derived from phytozome v7.0 (chr-ID scaf fold_10; pos 98365 to 98844 reverse strand)
ggaacttctttaagatatccttttatctcaaatttgacttagtcacattcaacgttttggttcagattttttgtataatctggttgtgtatgtgcaagcgaacatgcatatttatgtggttcaatgttaatggcaagtgaactaggttttgttggtagttgaaaatctttctaatgaagagattcaaaggaaattttcaacatcttagggggggggggggggatcatgaatcacttatcatgttggtacttctttcatttgcttcctgggttagtgcttcaactttgtttcgaaagcagtctttttgcgcttttattcttttgagttgagcaatctaatcacatatctataacaccctccagtttatgcccctatttattttatttgtttgttagtttttctgtatggtcacagtagtccattgagttccttgactggagattacgttcagcgtaagagaagattgcgaaaggggggagc

SEQ ID NO: 58197 - DNA, 717 bp, Populus trichocarpa
  Intron number 4 from transcript POPTR_0001s21920.2 (locus POPTR_0001s21920) derived from phytozome v7.0 (chr-ID scaf fold_1; pos 20418486 to 20419202 reverse strand)
ctaagcaaatcttacgaggtttccagaagttgtgggtgagttgtttttcatttgtttctgctatttaatgaactcttaagcctcaattttgggttttgtcctagtagaacatatgaacttggaaattagggctgacactcgccaaacttatttcaacatgaattatctaaatgtttagttcactctaagcaatactcctctttcctttttctttggggtatcctgtgtgtttttgcctctatggacctactcaagtgaaagccagggaatgcaagattttataattgcgttttcctaaccttgtccagggctttattctttatgctacaagaatacccttttcccctttcaatctctcttttaactattgtcctagtcagtcagtgcttattcatgccaatttcatttattcttcagtctcttttgataatgcatgtgactttccagtattgtctaattctcaatatattttggcttaattttacttgtacttttaaccaggcataacttgtgaatatttctcaacttccatttctctctcattctccttgtacctgccctcatgcatttttctagttctgaactttgagaagtttcaaaaggtctgatagatcataagggcatgcttaatgcagctcttacttgattagatgcattatggaataaatgttccttttctgaatttgaattttcaagtgcaggatattacaggcatac

SEQ ID NO: 58198 - DNA, 686 bp, Populus trichocarpa
  Intron number 1 from transcript POPTR_0001s10530.1 (locus POPTR_0001s10530) derived from phytozome v7.0 (chr-ID scaf fold_1; pos 8168309 to 8168994 reverse strand)
ctcttgttaaacacattaaagctcctgttcctcttgtaaacaccggctcctttgtctctgtctctgtttttttaatggttaaagttaatgtttagtgttgtttttagatctgagaacatttaagattgtttatattgttcattggatttatttatggttctattttgtttcagattttagttttagggcatgtttggatgagtttttgtttaaagataaatgatcttatatgttatttaaataagtctgtagcatgttttttttttcttttaagtgataaattgattcaaacttgaagctatgattgaaattggttcagtttttggatttataagaatgaggtcgttacttgtctgcgttgttacttactttaaaggttgaaagtttgtgtaaattgttgtgtttcgatcaatttgtgctaaaacaatgaaaaattgtggagttttaatgaatttgttccgaagctgaagctatgaagaatatttacttttttcgtgatcatttaaaattcaaaatttgtgtaatggtgggtagaaatggcattaccgcttcttatgttatggcttgaatgatttgatttctatggagaagatgaaaatgtcttgataattttatgcctgtgtgaattattggtggtgtttgcatgatcaggtgtggtctttggtgaggagatttgatcaaccaca

SEQ ID NO: 58199 - DNA, 354 bp, Populus trichocarpa
  Intron number 1 from transcript POPTR_0031s00500.1 (locus POPTR_0031s00500) derived from phytozome v7.0 (chr-ID scaf fold_31; pos 348926 to 349279)
agttgctagggaagattacgttgttcactggtaatttttttcccatttcactaatataaaacgagagccttgaagaagtggttgatgtaaattttccttgtttttattggattttttttgtgttattttgaattttaagtcaattttcttttatttttatgattttgatcccatagtctatttaaaatacatatgagtttctcatatgtgatcttaccaaatcgaacccaccaaccacacctcataaacagatgagtttctcaccaaacttgacactttcatgcatcaatgctttggtgtcttctcttttgatcttcgttgttgaagttttcccctcttcatttttgtgcagac

SEQ ID NO: 58200 - DNA, 667 bp, Populus trichocarpa
  Intron number 3 from transcript POPTR_0002s05290.1 (locus POPTR_0002s05290) derived from phytozome v7.0 (chr-ID scaf fold_2; pos 3426473 to 3427139)
cttttgaatctattggaagatatcagcgacaagatgtaagattaaccttacatcacttacggttatgttattttgtgttttattttagcttagctgctattttcgttgaaggtaggaatttggtttgatttttcagaaatttatcatggaaactttcttttgttttggaatttatcaagagatttgtatcactctacggaattgtagaatgggactttaaaatttaaatgcttggagagaggttgattcgagtttagttttagctcatggtttttggttacttttagttttacttctttcaacaagacattgcagcattacgaggttctttaaattatgatttttgtaaaaatatgccgagatgctatttcttcatcgctaaatatcattcagttccagttgaccagcagcttgacacaaacagatcttctaaacgatccatttcttctcctctcatcgttggcctgactgttagtcaactgtgcaatgtcgtataatttggatgcaattgattgaaattgtgtttgtttggttacatctgcatttttcgaattgcatgttgtctgtcggcgagtaattgcttaaaaataagtctcccctgcttctttctaatttgagaaacctttctgcagtgataaggcttattttgtagatctttttgtgagag

SEQ ID NO: 58201 - DNA, 884 bp, Populus trichocarpa
  Intron number 1 from transcript POPTR_0010s25710.1 (locus POPTR_0010s25710) derived from phytozome v7.0 (chr-ID scaf fold_10; pos 21250260 to 21251143)
atcaagagagaccattttgattctgtcgaggtaaatcccttttagccccccttcataattctctatggtactttgtttcacgtgtgtgtgtgatcttttgttcattcgagtttcaatttttgtcccatttgaagctgtgtttcttgatggggttttagtatgggtttagatctttaagcccttttgatggttcacttcatttcccaccttgcattttctttctgaagttacaggctttatggggtttcatttgataccagtgcctcttgtagtttagtgaaacaagatctgcatgttcttggcccaaatgctgtggctttgtgttgcttgtagttcattttttccttccttgtcaaattctcattagcctccggatgctgtttcattcaatctttgttcttctgttgaatttgtgtaggatctttaagatattgtaactgttatattaatctgtttaatctgtgacttctttcttattttcaatttttcattccttcatattgagattaacttaagctgatgtattaacattattgctcttttgggctactgatgatatagaagaagcaaagggattgaatttattttcttcttctaattgtttaggctctcgaaactttctggtattttttttttaaacctctcctctcatgtttgaggtttcaattttgttctttacgaccatctcttggagcaaagttaataattatagggttttataatttccacttcatacttgagccattgtctagtttcttactctgtgacggaacctgtcatccaatcatcatttgccgtggatctatatatgattctccttttcattcttttgtcttttgttttgtaaaggggaaatttccaggagctagggacgtcgagtttga

SEQ ID NO: 58202 - DNA, 416 bp, Populus trichocarpa
  Intron number 1 from transcript POPTR_0007s11020.1 (locus POPTR_0007s11020) derived from phytozome v7.0 (chr-ID scaf fold_7; pos 11284037 to 11284452)
tcccctaggtagccctcacaccatttttggtccaggtatttttagcatatatattattagcatatatattcttatcatagaatttgaccgaaacacttttactatattttaacaaatgactcaaacttgagacctgtttcattagctgtttttgatttaatgatatgctttgtttggaaaaatacatcaagataaggataccgtaattagcacagaaaaaaaaggataagttaagaatcttggcattttttttggctagatgaacatagaaatattgggttttttttttttacaatgaaatgctttgttgtatttaaatgcagaccaaagttgtttttttttttttttaatttgatgtgcttgtttcttgtacgtacgtaggtgaaaatccacagacggtgaagacgagattaagg

SEQ ID NO: 58203 - DNA, 965 bp, Populus trichocarpa
  Intron number 2 from transcript POPTR_0007s05240.1 (locus POPTR_0007s05240) derived from phytozome v7.0 (chr-ID scaf fold_7; pos 3378644 to 3379608 reverse strand)
ggtgagcatatctatttaatctctctctctctctctcacacacacacacacacagaaaaaaaaagttagtttttcttttctttatttatattagttggtccctttgggtcactgcaactcattatttactgcctggcacaagtcatgcttgctctctcacacacaaaaacactaggtcatgccggctcatgaatcattgagagaacaccttgttttatagagatacatgcagattactggaagtaatagtactaaatttgctagtatggtagtggtcaggcataatagtaagcaccatagcaggtccttgattgtagacagcaaattctgatgacatgctctgttgtgaaattcttacctttttggactgataatgagatgaagttcttagctctcttcttaattcgagggtacttgaggagtcctgataatctaagatcatgaatggtcctttacacccttaagtcttccaaaaatgcaaaaaaaatcatgtccaaataaagtgaatttatcagtgatggttcttttgctaattggacaatttgacacaattaagtttggtgctccccgagggcactggaggttaacatttgatttatctaaagatgaaattagatgctctttcacttggtatgggtccaagcatcaggtgcttttctacttgctgtgagccatataactgaaagttgtattaagttttttttttttttttaatccttgatcagtttcttttaaaattagtcatgtggctgttgaaggagttcggtatttttggctttaacattgcatagcagcgatttattattattgctaccataatttttgtgtcatgtgttaccttatattttattagcatcttgcagcactgcattttgatttgatcatgtgctaaaaatgttcttaaactgtatagatagatagataattgactgtatttaaaaccaccatgcagtattaacaacaag

SEQ ID NO: 58204 - DNA, 1000 bp, Populus trichocarpa
  Intron number 1 from transcript POPTR_0007s05240.1 (locus POPTR_0007s05240) derived from phytozome v7.0 (chr-ID scaf fold_7; pos 3379745 to 3380744 reverse strand)
gaggaggaggagaagaagaagaatacacaaagcaggttccttttatacaggttactttgctttctccttaactgccctaattttgcactactttcaatatatagtcagaaagataaagtttgattttttcatggttatgttttctcatgttggtgtttttgttattgaatataggccatttttgttattgggtcactggaaactttgttattttacatgaataccacttgcaaattgcttctttttgttgggattgaaaccctagttatagaagtgatttcgtgttgtttggttgacatttggaatgttttaactgtatttgaaagctaaaagttgcattcttggttttgggaagcatagagaagttcttccaaaatgttggcaaccacagaagaagttacttttaggtatagaatagagccccataaacaattgtttttttaaaaagttaccttttcttttgctaattggccatcgtcttgaagtcttacattgctagtgaaattgtatgacattcccttatgtgggcctgtgatggaactgttaaaacattaaagttttagcaggagcgtcaactacaagtcgtgtgaaactcatgctgttgttggcgaaacttctccggtgattttctagtgtcttagtggttttcattcaaattttggttcaagcattggtcaataggttctctgcaaagttctatgctgatgacatggaaacccgtgacttggaattggtttcacttccaacaacgggtttgtgattatgtgtttgttcctagtaagtctgcaaatgacagctcttgccttatatatattaattggttatttgtgtcctttggaaaaatatgagcaaaagccttttgtaacaattatttagtgtgtagatttgtatatggtaaatggtgcaatcaatttactatggattatattgtatatggtaaaataaaagttttataattttttcagcttggagaggggcattggttttaaactagaactta

SEQ ID NO: 58205 - DNA, 772 bp, Populus trichocarpa
  Intron number 1 from transcript POPTR_0007s03710.1 (locus POPTR_0007s03710) derived from phytozome v7.0 (chr-ID scaf fold_7; pos 2123076 to 2123847)
ctttggtttaccaggttagatttctgaattggatcacttttttttttttagaaaatgaaaatttggttttaatttgttttttggaaaatgagaagtgcgttttggattttgggtgaggggaattgatgggaagtttaaaattttgaggggaattttggggttttgtttgttctaatttgtgattttagggtttgattctggtcagattatgatttttctttttctttttgagagaataaaaggagaattggttttttttttttttttttggggggggggtggggggggggggtgtgggtgttgggtgttgagaattgaaggaaatttgatttttgtttttttgaaaagaatgtataatttgtgaggattaaattgtaaattttatacaatttgttggcttctatgaaaatgggagaaattatgatggtttgagttgtgagttttgaaatgtctgctgaaatggatattaatagaaatagctgaatggaggtgattcttcttcttttttttttcttggcgttttaaactaccaagagggtttttgtttatagctcttcagtttttggataaagggaagatatgacttgtctaaaagccgggttgttaaactttgaaaaatatttaaataaagggttatagcaggatttacttgtgagctttgagtaaatttctgctttaaaagcaaaggttgcaagtaagtggatctgttatcaatatggattattaaaaggtgattcattattgtagaaaaagcatttggatcttgccaagg

SEQ ID NO: 58206 - DNA, 975 bp, Populus trichocarpa
  Intron number 1 from transcript POPTR_0001s17180.1 (locus POPTR_0001s17180) derived from phytozome v7.0 (chr-ID scaf fold_1; pos 14033656 to 14034630 reverse strand)
tcatcattatacagtttccattatacacactacgtttctatttttttaatgttttatttgatctgtgtcttctgttgtgcgacgtggtttggttactctacttgagtgttgatcattcgacttgataggttgtttttgtcaatgtcaatgtggtgttacatgttggatgatgcccattttataagaatgcatgatttttgtttagaatcttcatggctctgtatggggtattcgattttgagattctgagcaaattagaaatcgtgtatattttggacaattttgagtaactttatgtgtgggcgtaccatgtctaattgaatgattcccatttcttttctttttggtggaatgtatgagctcgtttagacaacaaaactttaatttctattgcaactagagaacatcatatttcttgagcacagctaattttctgttcgaggaaaacttgaacttgttatgagcttcaggttgtagattttgatttcaacgtggggtttgggttaatatatttctttctgttctattggaatgcaaagaaaatgaatgttgtaagaaatcaaattgatgctctcatctttgtgcacgtgaatggtctcagcaaattttcgataacaaatgaaagccagtcatttcaattttaatggttaaactattgttgttgtgaaaactgaacaattttttatttcctctttgttttcctccattacctggctatacgatcagccatcatgttttctttaccaagtcttggtaaagagtttcgaacctgcctattgagatgcaatagactgcataataccaagcagccaattatctgcttttcaagcagaaatttcagatctttttaagagtttgtttggactttttatgtcttactatgtattttaaccatgtgcaaagttattgtaaagtataacttctcttgatgtggtattatttcttggcttacaggctttcaaagaagcttgggag

SEQ ID NO: 58207 - DNA, 510 bp, Populus trichocarpa
  Intron number 1 from transcript POPTR_0001s15280.1 (locus POPTR_0001s15280) derived from phytozome v7.0 (chr-ID scaf fold_1; pos 12111092 to 12111601)
aatcctgaatagtaagcttttaatctatcaccatcaaatattttagttaaactccaatctttttatatatatatatatatatatatatatatatataattatgttacatacggatgcaattatgccggatctgaatgtagttaattgattaattctttaacttgcaataatgcaaatttgtttgtttggtctttgaaattcttttggctggattatgttttgatgatatgctggattttgattagttagatccgtgtactttgatttcagatccgttgacttttctttctaatttgttattgaattgattgcaacttgcatagtaattgggaaattattagaagacaagtgttttttttttggtaacaagtaatggttttgattttaataggtaattgcgagaaggcgtgtgttacgattttactaaatggaaagaaaaaaaaaaactatgtgattttgatttatttttttgcagcgattatttgttcaagcttttgcttattggagatt

SEQ ID NO: 58208 - DNA, 927 bp, Populus trichocarpa
  Intron number 1 from transcript POPTR_0001s20890.2 (locus POPTR_0001s20890) derived from phytozome v7.0 (chr-ID scaf fold_1; pos 19123642 to 19124568)
gtaggcttcctgtgctggacccagggtcaagctgaaggttagttcctatcttgtgtctttttggctgtggagtatgatggccagttttgttgtttttgattgagttgttgcgacttggatttgcaaacgtgcagaagttcatattatgatcatattccataaatagttcaatggatttggattgcatttactgtgttaatatctcccttccctcgctggttttaaggaaacattgaacatggaagtgacatgttagaagaaaatgctacttgaatttatgtaaatgtgatgatgcgaaaccctcatcaaaatgtagcagcatttggttcttggtgcctctacttatcctttctcagtgtatgatatgttattccttatgatttgtggtttgttgaagcttttattcaccatagactaaaacataaaaaaaaaaaaaccttccatcaacttgaagttgaagtgttctcgtcttctttttcctccctcgtgtcatttaaatccgtgaaattacaaaccagtactggaaggaactaagggatgatttattaacaatggaaaagtatgtgttcacttcagaattgttacttgatgtgttcgtcatcgatttgcctttatttatcgtatgttctataaatttgctgcgattgccaaacttatttgcaaggaaacatgagcatgaatatctgtaactctgtgagaaaattgtcttccctcaaaccaagaattaaaagtctctatttggctttgttacttgcagttccatagcttcaaatgagatgccatcatttggctttgtttgtctataatgatattagctgacatctagatttactcaagggtgtctctcatgttactggttatttagaagggtttgaataactcccaactggctatggtgaatcatgttttgttgcagtgaggggacag

SEQ ID NO: 58209 - DNA, 814 bp, Populus trichocarpa
  Intron number 1 from transcript POPTR_0010s20420.1 (locus POPTR_0010s20420) derived from phytozome v7.0 (chr-ID scaf fold_10; pos 18019372 to 18020185 reverse strand)
ctacaaaacgtcgtgggcaggtaacattttcatagtggaagaaaacgcacttgaacttgcattaatatctcttttgtgattgagctaatgtggaaagccaaggagttcattaatttttttctttattacttacgctatttttttatttttgacaagcatgatatgaagtctcttgtgaggtaccaagatcatattcgaaaacagagtaatatttcagttttttaaaaactagagtaaaataaggaaatttagaatttttttgttcaaatataacatttctctataaaaaaactagtaatatcttaaaggttctttgcaattttcctttataattttttcaaattaaaaaaaaaacataaacaatactcttttataaacaaacaatttttaataatataagagattgaaattattttttatattttcatattttgttatttgcataaatttaatttttatcaaaaatctaatgtaaagattttttttggagttaacaatataactttttcatgataattattaatttgagtaaaataaaactaatattatacaaatagattatcatgaatataaattattattattattattattataaattatggatttgattttcttataaaaaataattatgatcttaatgtatttcttattttgttttttagaaaaattcatctttgttttcaacaaatgagcacgttttttttttattatttgaaaaaaaatttatattattgagcaacaccctaaccatttgaatggattgtattttgatacagtggtgcatcagattctttgctctatagctaccata

SEQ ID NO: 58210 - DNA, 599 bp, Populus trichocarpa
  Intron number 1 from transcript POPTR_0001s29370.1 (locus POPTR_0001s29370) derived from phytozome v7.0 (chr-ID scaf fold_1; pos 28073962 to 28074560 reverse strand)
accgagtctacttcctggacagttctggcaaaaaggttataactttcactctctatctattaaaaagcttctcttttttatgcaatctgttttgtttggtgataaaatgagaggaatgaaagtgatttgctaaacccagaagaaaattatttggaaaactaattcctgtctcgaatgatattgatttcagtgtatatccgtgcttaaatttatgtttgtttcggaaaataagaatacattgttttcgatagttgagtttttcttgcgaggattaatgttagattctggtgtttctatgttttaattttgaggtctcgatgtttattttagttctggctatctgaatttgaaacttgaaatgaaaggttttatagtgaagataagattatgtatatcccattttgcattgcaggcgactttgtcttccacatgcctgaaaccagtcatctgttagttctttaagaaaactgacatgctgctcccttagagaccacctatgattcggattttcttcaacaatttagaacagcactcttttggttttgtatctgcttactggtaatgtaagtgttgtttggtattacaggtttcgccctggc

SEQ ID NO: 58211 - DNA, 255 bp, Populus trichocarpa
  Intron number 1 from transcript POPTR_0010s23370.1 (locus POPTR_0010s23370) derived from phytozome v7.0 (chr-ID scaf fold_10; pos 19975052 to 19975306)
tcgacttcgataacggtctctctctttctccttttgtatcgtttctttgcttaattttgttatttaggaagagaaagaaaaataaaaaactgcatagaaatcgattttttttttaattctagatatttgattaattatatcaagttagctatttttcttttaaaataaagaagttaaattagcacgaatatttgttttctctagaaatgtcaatgattataatagttattttttttttctttttgtgtgtggcta

SEQ ID NO: 58212 - DNA, 702 bp, Populus trichocarpa
  Intron number 1 from transcript POPTR_0007s11260.1 (locus POPTR_0007s11260) derived from phytozome v7.0 (chr-ID scaf fold_7; pos 11579769 to 11580470)
gaaagtacacgcctttctggggtttttttataaataaaaaaccctagtgcaacctttgagtttttgaaaggtaagggatgttggagaagatcaagagttaattttatatgtagttagaataattaaagattgaagtgggaggatcttattgtatattgtgtactttgggcaaaggtcaggtcgacagtttcaaatttcaagcataaatttcaagagtcctatatatgttcaaatcttgaagtatgtatactggtggtgatttaaaaacgaaatacaagtacacatccagtttagcttcagtaaaatctctagtgaacagagtaaaaaaactggtgctgtaaatgaacaaagtaaaaatgatgacacatgtaatgcttgggccaggaggcaaaaagaatatagacaactaaccatagcttggatggttcgcaccttttttccaatcacgagaggtagggcttaaaccgttgatttaaaccgtccaatgtttcttttttctcatgctcctgtttttcttcaacaaaaatttgatggaatcttcccacttgtgaggacccctcacatgcttatgtcctgaaaccttaatcaagttgcaaccctagcatataaatagtaccacagtgtaggaagaggttaggtcgactttcttaacacttaaatatcacagtagaggaagcagatcataacatacagtctcctctc

SEQ ID NO: 58213 - DNA, 488 bp, Populus trichocarpa
  Intron number 1 from transcript POPTR_0002s04140.1 (locus POPTR_0002s04140) derived from phytozome v7.0 (chr-ID scaf fold_2; pos 2578419 to 2578906)
gcctcaaggttggtgttaagttaatcttatgatttgtgatgctggcagtgactgcatgatggtaaacaacatgctgatcatttcattatagaggaagattcagtcttaaaggtacagagataattggtccagtcagttagtgatgaacgatgggggcacatcttaagaacagttacaaaatttcagatacacccaactggaagcttttagccttttctcttctggtgttgaaatgtgtacggatgacttcttgtttcacaatgtttgcgtcaatactaaattcatatcttgctttgtagttgttgttgtggatgccatgtgaaatgtggtaaagcaatatattttgctcagtgacagccaaagggttttgctggttcgcttgtaagcaaaccaagaacttctcatcaaaatacaaaaatccaacttaattctcccatatgtttttgaattatttcagatttttctccccaagtcgtaacaatttactc

SEQ ID NO: 58214 - DNA, 757 bp, Populus trichocarpa
  Intron number 1 from transcript POPTR_0001s24060.1 (locus POPTR_0001s24060) derived from phytozome v7.0 (chr-ID scaf fold_1; pos 23450868 to 23451624)
atcgagctaggaagcaagtgatcggggtatacagtcgcagttatgtttggaattgtgttagtttttatgattggtgtttaaaaaaagttgttttataaaagtatttttagttgagattggtttggaaaaatacatgtttggttaaaactgtggttgaaattgaggttaaataaaaagtaatttaatgtgtttgattaaaaatgttttacatgactttctaagtgtgcaactatatcaggtaaaatatcatcagaaatataattgagattgcaatcaaattctgcaaatgctacgttatcatagaatcttcttctaatataattatgtagtgtcattaaataatgttaaacattagtttttcgaataaaacacaatgcctgaaaaattttgttggattttttttattttactgggtcggacccagtccaatgcatttagattggggtcggaatccatccagatcatcaacaataaagatgctctccactattcatgtaaacagtggagagtgaattactctccactattcacgttaataataaagaatgaattaattcacatgaataataaaacagaaacataaaaattttgtttttattaaatctaggccacagccgcaatgattatcaaaacttagaattttaacttagtttttaacttaatcaaatgttaatatttgtgaatgattatcaatctcagcagcaatttcaatgccaaacagtccactaaatcatgaaaacctcattgccagtgtaaa

SEQ ID NO: 58215 - DNA, 225 bp, Populus trichocarpa
  Intron number 1 from transcript POPTR_0002s10290.1 (locus POPTR_0002s10290) derived from phytozome v7.0 (chr-ID scaf fold_2; pos 7380679 to 7380903)
agtggttccaatttaacaaggtccaaatccttatgcatcaactgtataaagttcaatgaaagaaatttgattttcgaataatctttatatctaaaaagataaatttatattgtttctctatggtttgattttgatactcggtttgttttggtatatatttgtttttaatttgaagagatgtttggtgtgttttcttccaggaattcagtgaatacactaattttg

SEQ ID NO: 58216 - DNA, 1008 bp, Populus trichocarpa
  Intron number 2 from transcript POPTR_0002s05770.1 (locus POPTR_0002s05770) derived from phytozome v7.0 (chr-ID scaf fold_2; pos 3784063 to 3785070 reverse strand)
aactgaggatttctcatattaaaagccatcttcaggtatgtctctcagatcagctaaagaaaagaaaaaatatgagcagatcattaaacagcaagacaatatgtatgctaagtggaagaattacaagagtgctccttgtgctatcattataggcaaacctaaccatttcattaacttgaagctcgaaagcgattggagttccttttttctttcttgaatctatatgtccgagctgtgcattgcaaaatttagacctaattaatttgatggtatattttctctgcccaaattgatcaattgtttttggatggccccaaaggatatttaatcttgagaatcaagataaattaattaagattacatatataccgcatatgggagatctagagaatctatacacatgatgatggatatgagaaacctaaacctgaaggagagcttgtcttcgttctaattaagctatggttaaaaattgtggctcttcactctattcaaaacaaattattagtgttgcttggtacttaattaacaaaatactaatgctatatgatgatatctccccatctcaggtatgatatctatacaaaaatagctcattttggagattggacatgctgtaaattaagctaaaggaggtattcaatttaaaaaccaggtcacatacgtgcacacatctctaatgttacgtgttacatccacatatggtctgctttggcaccgaattttgctgctataagaaggatagaaaaagaaaaatcaaagacccattattttctgatgcatgtacattgagaggaatctaagatttacgccgacctagttaatttgccacattttgtattgtatctgcatgtgatagcatggaaaagaatctttgttctttttgcatggataatcttaactaagtaaaggcataagggacctgcaggggaaaacgtaaacatacataacgaggagaatatattagcttttccctctatcttcaagattgaaatctggttttgacag

SEQ ID NO: 58217 - DNA, 394 bp, Populus trichocarpa
  Intron number 1 from transcript POPTR_0002s05770.1 (locus POPTR_0002s05770) derived from phytozome v7.0 (chr-ID scaf fold_2; pos 3785087 to 3785480 reverse strand)
tgttgaagccgttgaaagcctcggtggaaaatacagtaagttgtttcggtcggtcgtctgatttaaggcttcttaatcaaagccatgaagaagacactgctttgattaacttaatttcttaaaacgaaaactgtgtatagagtgcttaaagctactaaggaagatcaaaggattcccttttcctttatgatttcaaacaaattatatatatttaaattatggtcaacccttttgttttttgttgccctaaatctgcatgccctaagaaaacaaaatcttgctggatcgatcgtgcatacatggttaagatcaatctgtactcttctccagtactgatttgtatatatgatgttgatgattatgctcagaagcaacgcctaagcgaattctacag

SEQ ID NO: 58218 - DNA, 1039 bp, Populus trichocarpa
  Intron number 1 from transcript POPTR_0010s21120.1 (locus POPTR_0010s21120) derived from phytozome v7.0 (chr-ID scaf fold_10; pos 18533512 to 18534550)
tctctgatcttcaccaccttggcgacaagatttcggtaatttttattcacatgtttcaccaatttactccctcctcacactagaattgcatagaatcattcataattgtttagaattcattgaagtttatagatgaaagatatatatattattattttcatataaaacgaaatcgagctcaattcataaagaattggattgttttaagtttatttatcttcttcttttgcctgtgttgtattcgtggaagtctaagagatcgtttctatttatttattttttaaaaaatttgttattttttcttagttctgttaggttatactacgaggaagagagataagtttcattggttctgtttaccttcggaaaacggaggaatgaattggagtaatttttatgttataatttctcactaaaattgagttgaattttgcaatttgtgaggaagagaaaatttagatttgacaattgtagatatttgtctctcgagaaatgattcagctcacgaattcgtgagaatagtaaatggtgccatttttatgtgtccgtgtctatatagcataactcttgtctctctcttctcggatcaccacaaagttctagttttgtggtataatttctgtgattgcttgtaaaattaatcaaattggaatttttgtaccaaaaaaaaaaacagaaatctcaattacatcctgtgagatcataaactgaagtgcacgtgacgaatagctaatctcatgtctgtctgtgtgaatctcctctggtatgtaccgtgatggctgtctctggaatctgcaattttatttaaatggcaactcttgtgttttgtttccccagtatggtttgtttcaataggtgcagttgatgacttcctcgcgaatcttggaattgtatttaaattacaacatgcagtctatctaccagactatattgatgcattttaactcctgttcttgttgaagattttactatttgatcatatagaatttcgctgattatttgctgctcttgcagttttacaagcgcactgtagcccaat

SEQ ID NO: 58219 - DNA, 975 bp, Populus trichocarpa
  Intron number 3 from transcript POPTR_0010s00690.1 (locus POPTR_0010s00690) derived from phytozome v7.0 (chr-ID scaf fold_10; pos 394732 to 395706)
tatcgagctgtaagattgaaaaaggagatgacaatttgaatgcctccaaaaccagtgcccaccaggaattcttcccagacaagtctttgccattcaaccgataccccaacatccagcacagccctttagattcaattgcttacctgcaattcccagtccagcagttgaatcatgagcaattagagcttgaccagaagtgcagtctttttgagccaaaccaagaactcaactccagaacactagtacccacgatttcaaggtcaatcttatctgctcaaatggacaataaaatccatgcaggtcttccctttcactcaatgggcacattcaataacatccattgggattcaagtaattgcagcagcgaaagtagtgagtttcagaagaagtccttattcgatagcaacgtcttctcatgggggttggcagatgatggtggatcatcagacaagaccttacaactccattccgctgatgctgagacaacagatatcaagtggtcggaatatcacaacacatcatttctagccgaacacaatcaacagacactacactcgtgatgcaccatatcaacgtcaaaccaccagaaatatcgaatagatgcagatggctcaaacgcaaattggcatcactggtggtattactaacaataattttcaaagctcggtatacacgtgattacgttgtaatgacttgtgggataatctagggattaatcagctcttaaaatttattatgcaaacatttgatggcacagaggaagaggacttccattttagaaagaccttagctgtgatttcagagtgtttgttgcaagatattttacagtatttctgtatatcaaaatggcagaatcaaaatgctaatccttggttcttggttggcagaacttgcagattgaagctttctttctttctttctttttattttggaatttaagctaaaagtcacaaaagatactttcttcttctcatc

SEQ ID NO: 58220 - DNA, 609 bp, Populus trichocarpa
  Intron number 1 from transcript POPTR_0001s13530.1 (locus POPTR_0001s13530) derived from phytozome v7.0 (chr-ID scaf fold_1; pos 10606092 to 10606700 reverse strand)
caaaggtaattatttcactgtttctttctcctctccttctcgttttttattttttatttttttgtgttatctgtttattggatctgtttttgttattttctttatgttcaagaaatgaaaaaagaaaggttcttttgtcttgttttagttaaagatatgcgttagtaattctgaagttttaggttatattgttttcttgaaagaaatggagggtgttattcaatggaggattttgttgcagatgattgtttctaattctttttgtttaattttgtgatttttgtcttaacaagagcataaaaatgttagggtttttagctaatgtaaaacgactaaaatgaagtatcaagggttttgccaatgcattttactagatttgtttgtttctgattcttaatggaagttaggggtttaagtaatttaaaatgaatcatcactgtttaggttcaaaatatgaacaatgaatagcttttttttttcttctagttttcattgattattgatttttgaaaagcgaagtgtgctattgaaatgagggttatattgcagatgattgttgttgtttctgcttgcttttttatttgaatttatttcgtgatttgaagagaa

SEQ ID NO: 58221 - DNA, 772 bp, Populus trichocarpa
  Intron number 1 from transcript POPTR_0007s01950.1 (locus POPTR_0007s01950) derived from phytozome v7.0 (chr-ID scaf fold_7; pos 1106648 to 1107419)
ctcaaagtcttgcaagagaaacaggtgttagaaaagtaagctccttttcacttaaacttttcattttatttttattaataatctctgtctatgcatattgcttttaatgttttatattgtgaaatgggtttgctttaaattgtcgagaaagcgaagaattgatgtcaaacttggtgtaaaaggaatgaagatgaagcaaaatgtttgacttttatagtcttcgtaggataagttctttttttattatgttttagattgttcggttgctgagaaagtgagggaaagagtttggaaaagaaagtttcatgtgtagtgttagttatgtggtatggtgatatgcttgatttttaagaaaatgggaaaactttgtgtcagctcttactaatgattcttgaaaggaaaagactttcctttctttaattcaaaattttttacttggaaaagaaagttgtaaatgagtccactgatttatttgtttggttgtttaggaaaagtgagattggaatagttttctatcaatgttttgttgttttgttttggcttcgtttgagaatgagagtattacctagctattgtggaagaactgagagcgtcgttttgaagttcctagttcatttgcttttaatattcaaaatgaaaatgggttgcctgaaaatgtgttacttgaagtgcctgccgatgtaactgaaaaatatgaatacttaagtcttctgtgttcttgtgaatgtgtttgtcagcctgaaatcttattgtgctggctttgtcactgcaa

SEQ ID NO: 58222 - DNA, 525 bp, Populus trichocarpa
  Intron number 2 from transcript POPTR_0010s14760.2 (locus POPTR_0010s14760) derived from phytozome v7.0 (chr-ID scaf fold_10; pos 14257931 to 14258455 reverse strand)
gagcaagttttgcttgactggaaccaaattgctgaacaatacggcaagcttcttttttttcccctttcatttgagttggatatttctctcttcctttttttcccccttttccttgggaaattttgacagtgtagcttaatcccatcatggctttatagagagggaaatgtatcgttaactcttccatttggtcattcttcttccctgtttttttctttgtttagaaggccaagagaaatgtatcttttaaactgtaaaaatcctaataaaacaggtcaataagtgaaacagaatttggcattgttgattgtgtgcttatgtggttgcgtcccaaatgtgcaggtcacatgacgcttacatcagactgttaaccctgtctatatgtgcgtgcgtgcatggatttactgtacgaactgactaaatctttgagtttgttggtaaatcaaaaacatttacttagggttagagtaatatttgtgcattgattaataacagagcttctacatttcatcatatcagtgatta

SEQ ID NO: 58223 - DNA, 1032 bp, Populus trichocarpa
  Intron number 2 from transcript POPTR_0001s07510.2 (locus POPTR_0001s07510) derived from phytozome v7.0 (chr-ID scaf fold_1; pos 5640564 to 5641595)
cttagcaaggtaatattttttttggttctacttttgttttctttttttccagcctttaatttgttaatcctatgctgtggttttaatgtttaattgattattttggtagtttttttgttaatgtttaatccatgctatatttatgcttatgttgatgattttgatgacgtcaatgtgaatttcttcggggcttgtatttggtgtttcgggatttttttgtatgaaattttggatgtttttgttcgtggcttttagtgtgcgatcatgtattgcattactggtgtattttgattgttttggtgaacaatatattcgggtaaagactcttatgtggagctgagagattttgtagtttctttgtgagtaaatccggtgtaaaattaataactaccgataactgatctcttgatagtatccgaattatttgtcgtagcttacggtctttaaattttttaataattagaccagttgaatttcgagcatttcatccaacagcgttacaaatttggaaatgaaatctgtggcggttaacctgtaattgacgggtaggtaatggtggttagatgaaaatttgaaatcaaagttgtctaattatcacaacacttaaccacttttaactactaatcacttaaagagttccctaaggggccctgttagccttttccaattaatattttgtagaaactgcatgaagtgtttgcaagcgcattggcttgtgtttatccacatttgttgtcaacatcatttttatgtgttttgttcatgaactgcatgagcagttttggactttatgctttaatgctcctgttatttgctcgacctttaacatttacttccatcaatctgctatcgttacagagtaaaacagccgcagctgggacttcatccacccaggtatttttcatccttgttttttacctttctcctggtagggtcttgttcttgtatattttttattctttttaattaatccctttcttatgtttatgtacaccagcctgtttctacaccacctaccaccacaccaacttc

SEQ ID NO: 58224 - DNA, 543 bp, Populus trichocarpa
  Intron number 1 from transcript POPTR_0002s03690.1 (locus POPTR_0002s03690) derived from phytozome v7.0 (chr-ID scaf fold_2; pos 2291573 to 2292115 reverse strand)
gcacagattctgacctcggcatctcatattcacaggtgattaattcgtgtttagtactatattacggagcattaatcagttcctctttttcatgtttgacagcattaatatatatattaacatcagtccatcacataatctttcataatcaatcaattctgttaagaattttattcatttttcaatggtgtatttgcaagccaaaaatcaaacacaggatcctgcagtctagtggtgccctcttcttttgctaggagagatcacggtgagttagagctaaagcatagttttccaactacaatgaagaaggatgagatttgggtggtgaaatttgctaaataatccctctgtcgttgtaagaagaaacgaaattaatatacccttttcttttctttcccttttagattgtagcttgtgataactgcatgtagtcaatgcctatcaagtttatgaatctttacacttgcatatataccttagttctatcgatctagggctaatatataagcaacttggtatgcagctaacaagtatagtggaaga

SEQ ID NO: 58225 - DNA, 608 bp, Populus trichocarpa
  Intron number 1 from transcript POPTR_0010s22510.1 (locus POPTR_0010s22510) derived from phytozome v7.0 (chr-ID scaf fold_10; pos 19407502 to 19408109)
taggtcacagagatctgagaatttctgatttagaggtatagatttggagttctcttatttgtttttgatacatttgttgttttgtctcattttgtgagtcttcattgtcttttgtgtttctgggttggtttagaattggaaagttcgaactggggcttatgtcttttgagaagatcttgcaaatataacatctggtttgttgccatttgttggttagatgcagtaattggttaaagttaccatctttattacccgtagctcttgatgttgtcttcttttttcatttccatgtgtaaacgcattcttaattgcagtttattgttgtgtttaatgatagatctaacacaagtgtgggttttgcattttttttagtaacttgaaatgttcttgtttaaacatattttgagggttgaattactaccttgcggtttccttcagcaatttagttattcacttcccttgtttccaatgtgttgaaattttatatggtctttgctacatttctactgttacatatgttgtagattttttactgtgtcttgatgatttgatctcattttgggcttggatttcttgttttagcccgaacaagattgataaattaagca

SEQ ID NO: 58226 - DNA, 377 bp, Populus trichocarpa
  Intron number 3 from transcript POPTR_0010s22510.1 (locus POPTR_0010s22510) derived from phytozome v7.0 (chr-ID scaf fold_10; pos 19408570 to 19408946)
caatcaggattcaaacagcatttagaggatacctggtatgttttctatgattttacttgagaaatttctttatttcttacggtttcttcattttcttagcaagacatgtactgtgtccgtacaagttatctgtcaaaacttccatgtatgacggatctgacttttaggttcttttgctttcttttttacttttgtttttaatgtaatcaaaccttctacttttgtcgtggaaacttggccatacttattggagaacgtaatatacttcttaatctacaccttttcatattcttcctgtaattagttgcatataagaactgctcttgctattcctgctttcaggcgaggagggcattacgtgctttgagagggctggt

SEQ ID NO: 58227 - DNA, 333 bp, Populus trichocarpa
  Intron number 1 from transcript POPTR_0007s11280.5 (locus POPTR_0007s11280) derived from phytozome v7.0 (chr-ID scaf fold_7; pos 11624568 to 11624900)
agtctagaagtaagtgtctgtctctcaaacgtatatatacattaaattattagtttttgtttgtttgttttgattaataataggaggagggttttgtttgtgtcctaaaatttgttacccttttcttggggattggatgaccagtttcaagattctcgtcgtcgttttctaccttcttctctgctctgtgtactcttttgtttgcttgctttctttctttcacactgtttgagataataataaaaaaaactactactaatactaaacaaatgcttctctccttactatgacgcctagctgcagccatttctgtttctgggcctctttgctttc

SEQ ID NO: 58228 - DNA, 300 bp, Populus trichocarpa
  Intron number 1 from transcript POPTR_0001s16230.1 (locus POPTR_0001s16230) derived from phytozome v7.0 (chr-ID scaf fold_1; pos 13037265 to 13037564 reverse strand)
tctgatctaatctaatctaatctaaataaactaaggtaacgatttctaattcctcttcctcttcttcttactatttgttttttaatctatctgatagatttcatctaggtttaacttcgattcattccttatacttttcttttaatcggttttcttgccttttttttgttataataataatgataatctaagtttgacctgattagtggttgatggtgatgatgattttagttagtattataataaatttctgtttctttttatcattccaaggaaataaaaggaggaggtacctgattc

SEQ ID NO: 58229 - DNA, 943 bp, Populus trichocarpa
  Intron number 2 from transcript POPTR_0010s24480.1 (locus POPTR_0010s24480) derived from phytozome v7.0 (chr-ID scaf fold_10; pos 20680068 to 20681010 reverse strand)
catcggcaagttcaacctcactggtcagctacttttttcctccttccatctcgtgcgtggaatgtagttttatctattttattgttgattgccctgagatattattgaatgaatctaaatagggtaattagtatagcattgtcatcatgtaagcaggattgtatttgatacatacatatatgttgtttataggattgattaattgttgaaggaaacagttcctgcaagtggaatttattgtgataaatgtcttgtgtggtcaatgttcctgtaggtgaaagtgaaaataatgttgataattctcaccgcagtcatgattttctggatttttttctctgattgttttctcgtttttctgatggaaaaagagatttttgtttttagctatccatcggaaaaattgtgattcggttaggggatattgatgtctattccctctatgtactgttttgctagcttggtggtcttcgtccacggggctcacaaaagaagttcgataaaggcatttttacatggttttgcaggttgagttattactggtcttggggcttaattttttaatcctgttctttatttgatgaaatttataagcatggactaataatagtttctgcaattcatcaaaaccaggagttttgtttttggtattttcaactcaagtatattgtttctgtgagttttgagtgtccaattgaactcttcatcactcggaccgtgctgtccaatcgagattgctatgaaatagttactgtagatagagttcaatatcagatttttcatgcttgtgtgtgtgtgtgtgtgtgtgaatgaaacatttggaactgagaagttgacttacatatgttaataatcggtagcagaaatgtatgcaatagttcacaagtggctttagaatttgctgcgaaatttacaagttaacagtaatttcagaaatctgagcagg

SEQ ID NO: 58230 - DNA, 528 bp, Populus trichocarpa
  Intron number 1 from transcript POPTR_0002s13040.2 (locus POPTR_0002s13040) derived from phytozome v7.0 (chr-ID scaf fold_2; pos 9703130 to 9703657 reverse strand)
aacacatgtgacacccatcacaataccaaacacatactaaatatgtgactggtaatgcggtgtagattattttttaattgaaaatatattaaaataaataaataatatttattttatttttaataccattacataaaaattataaaaaaaacataaaaaatttaatattttattaggttaaatttttttggaaagtaagttagaatcacaagaacaaaaacaagggataaacagcttaaattcttaaataaatctgcagggccataaacgtatcttctttcacgagcccaaacggtgtgagcaaaagcaatatcaacagcccataaagtcaaacccattgctggccccttctcagcagacagcaaaagaaaagccttttaaaatatcttctggttcccgctctgtccttcacattcccattctcgctctcacactcagctaagcttcactccacctgactcatcaatcgattgcaaattcatggaagaaacagctgcagtactcacagtcaaagagctagttctccgt

SEQ ID NO: 58231 - DNA, 681 bp, Populus trichocarpa
  Intron number 2 from transcript POPTR_0007s02180.1 (locus POPTR_0007s02180) derived from phytozome v7.0 (chr-ID scaf fold_7; pos 1312172 to 1312852 reverse strand)
tgactaaagaaactgttatcgaggctgctaaaagggtatgtctttttatcttctttaagtcttttgatttatggtattttggttcacaagaatcttaagcaatcaaacactttctgtgctgatggaatctgtgctaaaaaaagtttatgctttgtttctgattttaattattatgtggttcggttaccttatcaattttgtcaaagaaaatctgcactcatttagatggctttcttaatgtgatgtcttaattgattgatttaacttgcatgtatcctgattaacattgtttttagatcatgtatattgttttgtttttgttaatttgggtacaagaattgaaaaattgtcagtaacgtatatgtactagatttttggaacatttatagctcgatagcaaatttgttggttattcagttagctttagggtttagcaaaagtttcatgaatatcccagaacttcacttagcaaagtagctgaaaaaggaagattacacctcaagaatgaattctcatgttcttggtacaacttcttgtttggtgcctgtatcaggtggtaatgaagttttatctgatcagtttcatgtttagtgtagcatggtgtccttttcttcttctgtatgatttggaaccttctgtatgcttttgcaggcaaaagaggctggtagcacacgtttttgc

SEQ ID NO: 58232 - DNA, 607 bp, Populus trichocarpa
  Intron number 1 from transcript POPTR_0002s16020.1 (locus POPTR_0002s16020) derived from phytozome v7.0 (chr-ID scaf fold_2; pos 11929339 to 11929945 reverse strand)
ctgaggtaacaaaaacccacttttcttttcttgtcttctcctcttcttttatctaatgctttatctggtaacctgatgaaaaagattgggtattcttacaaaataaaaggaagtggttagtcttttgagccaaattgatgaattaggattaattgattttattgttttgataatgttggtgttggccataggtgaagtctgaagtttagtactgtagcttcttttctttttttaaatcttgggaattatttcttgcttctgagtagaaatgatgaacttgtgcctcaaatattgatcttttttggactttttttaatgatgccaaaagttctttgccattcacctcttttggtttttcaaggggatttccatgcggtctagtaatatgttttacattcttgaagcagtattatctatacttggaaagaaaaggaagcacttctgaaatctcactacaagatgtcttaaagtgaattctattattcggctgttagctcatgcagctagcattcttctatgtttttccacgagctgtactgttcaacttgccatgtttgtttgacaaactgtttgagaatgatttgatttcaggtctttgcccttagag

SEQ ID NO: 58233 - DNA, 785 bp, Populus trichocarpa
  Intron number 1 from transcript POPTR_0001s09760.1 (locus POPTR_0001s09760) derived from phytozome v7.0 (chr-ID scaf fold_1; pos 7501292 to 7502076)
gtccctggacagttgaatcatcggacgttcgagaggtactttttaatttgaaagttgtagtctttcctcaaaatgaaaatttaatggtttaatggaatagtaaaggactactcctgcatcagataaatgacaaaatgaaatctggtttgtagtggtgtgcatttatgatctttactcattcccaccatggaacgagtctgatgagggctgcgttaaggtggaagggatgataaaatttagtgattttgactattcagtttgggccatgtggcttgggaagacggaaaggaataccaaggttcctttcctcaggcaattttagacggggcatacgatttcaacaaaacctatcatttccacagattttggtttggttttggagtggggcgtgttccatgttggaccttttctctgttcaggaagagcacagtgcatttgtcctttttttcgttgcctcgagtttccttaagaaccaatgctgtggctctgtttaattaatcatttgttgacgtgcattgttattttatagtcttgtttttgttgaatcaagatgctgtgattatgtcatcaaaattgtggaactttataaattgagagaaagacaagctgtttcatgctaatttgtcaatcttgaatgcaatcgtaacagcattgtggtttgaattattgcctctagacataaccaaataaatttaaataatacttttcatagatagctctttattgaggataatgcgcttgttgtaacaggtggttttatacagatctggattagttactgctgc

SEQ ID NO: 58234 - DNA, 718 bp, Populus trichocarpa
  Intron number 1 from transcript POPTR_0010s16060.1 (locus POPTR_0010s16060) derived from phytozome v7.0 (chr-ID scaf fold_10; pos 15121556 to 15122273)
gtcaatcaagttgaacccttgaagagcttacactggtacttgactccaaccactctgttttatcatctctcctctctccacagcactgattccccgctcctgcatgctcaatactattttttttttattttgttgccattttattatgttaacctttatcttcctcttagtttgtggaaaaataatttacatattaagcataatttattaatgaccattagcataatgaggagccttagcataatgaggagccttaaacctttttcaagagttataaaattaaaaagaataaaattgtaggataataaatattttatctttttaaaattcaaagaagtttttagacgaaaatatacagaaacacatggattttaaaggttaattgataaaaagctcattgtaaagtattttccaagaaaaaaagacaaacaatatttttccagatattctttgaggattttgtagggaattattagaagactcaaacttatctggaagaacttaagaactgaatttactggtccagtaaaaatgttacagaacttattagttatttatcatttcaaaaatggatcaatatgtattttttcctaaaataaattaccctaacatcaccctcaaaaattatttataacaataaaattccatactaacatctgtgttatattaatgctctgatgcaggggcactaatctgggtattcacgacctcaatttcg

SEQ ID NO: 58235 - DNA, 842 bp, Populus trichocarpa
  Intron number 1 from transcript POPTR_0001s01640.2 (locus POPTR_0001s01640) derived from phytozome v7.0 (chr-ID scaf fold_1; pos 1224407 to 1225248 reverse strand)
aagaggaagaagtgaatcccttctcggtaactttccttctttcctttccgtttttgtccgttctcagatccgcttcctcttggttttgttaagtggtttggtattgctatatttcgatccatgcgaagctagtgtgggcagggcatttatgtttatcgatctggatctgatatggaaacttcttttgtttaaatttacggaagggaacaagtggacattttgtttcgattattttttaattttaatttaattaatataatacactgagctgagtaactgaacatgtacttttagagcttaatttttttaaaaggaagctttaataggattgctggttggttaagtaaatggaaaaatagtatcagagtgggactaattgctgactaaattcctgcatgataataaatttatttcctggggtacactaaattttttatttgattgatgataataacggggaaggaagtagtagtcaagttatgggttcaattgatgcaacacaactgtggtgaagtaagacttggtcaatgaccggtcaaccttagtttgaccaagatttgtcaactgggttctgttaaaccagtcaaatttactctcgcaagcttttagtttttatataccagtccgagtttaaccctggttaaattttggaccaccgacacttcctgttgtccgatttgattagggaactggttttgaaaagaatcagtgtatgttgatgcaatgctcttgtcttttagtttgtagtttcattctgaccttttgttttgttgtggttcatggtgttacttgtggtctttacagaagggctcaagtgttcctgcagtaaaggcacgcattcc

SEQ ID NO: 58236 - DNA, 1009 bp, Populus trichocarpa
  Intron number 1 from transcript POPTR_0001s20525.1 (locus POPTR_0001s20525) derived from phytozome v7.0 (chr-ID scaf fold_1; pos 18489624 to 18490632 reverse strand)
ttgatcctaaggatcgatacaaaactgcatttacagttcctttcggccaatacgaatggaatgtcatgccttttggattgaaaaatgcaccttctgaattccaacgcattatgaataatatcttcaatgcacattcaaattctgtattgtttacattgatgatgttctcattttttccaactcaatagatcagcattttaagcatctacatatattctttcatacttctcaacaaaatggattagttattttcaaatccaagatttctctagttcaaactcctgtctgtttcctaggccattatatctgccaaggtactgtaacacctatagagcgatcattatcatttacaaacaaattccctgttaagatcacagacaaaacccaattacaaaggtttttaggaagtcttaactatgtccttaattactatccaaacattagttgtcttgccaagcctttacatgataggttaaagaaagacgcagtccactggtctgaccttcataccagcatagtccgacatatcaaacagcaggttcaaactattctgcttctccactagctcctaaggtagtcgcgactgatacctcagacttgggttaccgagggattcttaaacaagtccgaaacaacaaagaacaaatcctccaatatacatctgctcattggaatgattgtcagaagaactactccactgtcaaaaaagagattctttcaattgttctttgcattataaaattccaaagtgatttattaaaccaaaaattccttcttcctgttgattgcaaatccgcaaaagaagttttacaaaaacatgtccaaaatcttgcttcaaaataaattgttgcccgatggcaagctattgtaagcattttttatttcgacattacttacattaaatgagattcaaattcaatccctgatttcctaacccgtgaattccttcaaaacaaatcatgatgcctcctaaggtcaaatccaaagataaggggaaagctcctcaaac

SEQ ID NO: 58237 - DNA, 700 bp, Populus trichocarpa
  Intron number 2 from transcript POPTR_0001s40880.1 (locus POPTR_0001s40880) derived from phytozome v7.0 (chr-ID scaf fold_1; pos 40469172 to 40469871 reverse strand)
atagtaacagtcatgatcataacagccacgacaagaacaataataacgtggaagatccagtgtttgttgaggtccataagttgatggaccagctgttgatacagtagagtacaaaaatattgatgatttgagaagaataggtgacagcagattgagaaagcacttggttcttaagtttgcttgcatttgttagcaataactatggtctgttacaatgtttgtatcacgctggcttaattagaaaacaatggatttgtgataagacctgcactgggtcttttttgtttatctttattttcagtagggtttctgaattgagataaaatgagcttcaataattttgttttagccctcaatcttgaaaagtagtgtgctgagctttggttcaccaaaacaaataccagcaacatatcacatatgagaaccttaaaatggtctaggcaaaggctgatcagggaaggctggtgcacagctaatcagttcccaaatgatcatgacgccttgtcagtgattctgtggagaatgagacttttagcctttgtgtattcaaaggagctttgtccatttccttcatacaaccacaaaggattctagaacttgaagctgaaatagtttcgaaccgtgaactcacgcactctctacactacaggacattttcagactagaattctatcttcacgacagaaagtgcccaaatttt

SEQ ID NO: 58238 - DNA, 887 bp, Populus trichocarpa
  Intron number 1 from transcript POPTR_0002s21680.1 (locus POPTR_0002s21680) derived from phytozome v7.0 (chr-ID scaf fold_2; pos 18231163 to 18232049 reverse strand)
agtctgctcacatcaatctcaaagtgaaaggccaggtttgtttttgcttgttgacgatgtctttttactttgttatgggtttgtttctgttttgtctttacatattttttgttttggttttgttctttttccccgatctatttaggttttagctctgcaattagtgttaaatttggggttttttttttccttactgtttaacaatcaggcgttctggggctttttgctcatgtgaagttcgtatgggttttattgttttccgagtgtgtttattatgtgaattaaaataatgggggtgtgggttttctttgttattatgctaataatattggttcaccaattgaggagtaatgctttgggaattacagtgttcttcacaatttgaattgcattttaattgtttcagttctttactaggtgatatgcttggtaatagttagaaagctcttcttttatattttgatttctggattttaaaagggttatgttcaggagaaactccagatgaaattgcgcggtgccactgctatcttgccttctttaggacagttttgtagtggaaaatcaatgctactttcaaagacaagtagaagaatttgaggaacttgtgcttttagtagttgctcaccttgtgtatcctggtcgatgccggtgaatcgtgatttttcttctagatgttgaaaatctattgttagatatttaaatcgttgaataacaagcttgaagttgcatatttagttgaatttttattgtagggttagtccatgctaacacttgttttgatgattcgagatttaaaagcttgccgtgcttgatgattttcttaagagtcctattttttagaacatgctgactaaagaaagacatgttttgactttcaatttagg

SEQ ID NO: 58239 - DNA, 930 bp, Populus trichocarpa
  Intron number 3 from transcript POPTR_0002s13630.1 (locus POPTR_0002s13630) derived from phytozome v7.0 (chr-ID scaf fold_2; pos 10104822 to 10105751 reverse strand)
tactttaaggttattttactttttctctaattttaccttcaagttattatagtttgtaatttgaaatggtttcagtgaagttatttgattttcgaaattttattttcataaataaagtgtgcaggagttttctttactatggattgaatttctgctgttttagtccatttatctgctatattctttggactatgagttttcaatagctatgaatgttcaatgtttgattatagacataagtggcatttcctgctttctgttccgttgtggaaacctgacttctgttcatgtcacactgactatgagttatacgagcagtggaaatttcatgacaaagtcctttttatggtcagttcatggtgattggttgataactagctataagccctgctaataatgcttattagagggaaaaaaagggagatttatcgtaaaaggttggatgtgcacatatttgttttcagtttgctgaaaaactggggtaatatatcccttccgcttctgtaaaagttcccctgctccccatctttatatttttctgctttcctttctttgttgttcctctggtcactggtttgcacacagtgagacatcccattacaatgttagttggttgacaaccttggttcaagaggcctgtttatttgttgagtatcagttggtctcaccctccatctttgtaattgattaggatgtgtactggaaaacaattctctgatatgcactgtcagatacgataattttttgtgtattcttcttgcatgtaatgagaggatgaatgttgaataatagcttgtgcattaaactgtttggggcagctgatgacatcatgcacactaacctcataggcttctttatccagtcaatgacatgcgaggtcataactctatttcttaatttgacaggttctaattgccaatatcgaggaat

SEQ ID NO: 58240 - DNA, 655 bp, Populus trichocarpa
  Intron number 3 from transcript POPTR_0002s12940.1 (locus POPTR_0002s12940) derived from phytozome v7.0 (chr-ID scaf fold_2; pos 9614228 to 9614882 reverse strand)
gttggctctctggtgttgatataaatacccagcaggttttgctttgtgtttgtgcttatggtctcggtattgatattcttaatggttggtgtcatcggtgaacttttcattgatgttacaggttgtcaaaaaatggattgctagatttagtcattcagtgattataattagtttcttgtgtgtgtctgggcttttgagtaggcaataggttgtgttaccttctgaattctccctcacttgggaaaaactactgcctgaaataggacagcttgattacaaaagtctaatgtgaacagtgactgcatgggtcagaaaaaacacccttttgaatgatgctgttggacatggatataaatggactgaggactcttgatttggggagtgccaatgtgacctagaagactaataacacttcaaacgttatggtgtctttctcttacaattctccttatcctcttacaatatttcgatgaaatttagttttgccaccatgctaagattgtattgattgagggaagggttcgtgattgctatgtcttgtatttgactgttgtttgtttcagtaattgttactgcttgttgctactagaattgactgttttattgtgtttgatattcagagttttgaagctttgaatcaacgtgctgtggcagt

SEQ ID NO: 58241 - DNA, 915 bp, Populus trichocarpa
  Intron number 1 from transcript POPTR_0001s37550.2 (locus POPTR_0001s37550) derived from phytozome v7.0 (chr-ID scaf fold_1; pos 36513644 to 36514558)
aattttggtgaagaggtttgtagttggaattggtagtgagccttctgaacttatctcctaagttttatgataatcctttttctgtttgctaagtgcttcactttatttaaatcgtttagaatataatgaaaatggacccctttagttttctaaatcactataatcatgatatgcagactctttttctttgctctttacttgttgcaataatttgtgtcactatatatagtcgtacaattttatgctgctggagctgcattttcttgatattgtctttagttagctcacgagcttttccttacttagcccgccactattatgttgtagagtttcaattactattgtttctgcttgtaatacaaggcagactgttatttctgcttgtaatacgtggcagaacagtcaacaacaatgtgtgtgtgtgtatgattagtagtcatgatgaaatacataactgagacctccatgatttgggtggagaaatattactttgcatttaatagacaggaagagtgttgggaaattagttatttatgcaatttttgtttatgctttgatgttttgaatgtgctatttttggtccgagcttgctccccgttctcatcctaaatgtatctatttttctgtctcaacgagatgctatttgtagatatcaacttcatttatgtacattgaaagacctggaatctgactgatgtacttattggcaattatcttataattaaatgttaatccatttattgccaagagaatgttgaagtaatctataactcttcccaaccaagtaatggtaactatgttttactggcaaaactttttatcttagtgaattatttgttgttgtatttgttctctatacaatatctttaacaatttgcaggttttctaggagctcaatacgcatctgcttttgct

SEQ ID NO: 58242 - DNA, 626 bp, Populus trichocarpa
  Intron number 1 from transcript POPTR_0002s09610.1 (locus POPTR_0002s09610) derived from phytozome v7.0 (chr-ID scaf fold_2; pos 6885098 to 6885723 reverse strand)
tgaagacgttgagcagctgagaaaagccttctcaggtttctttcttttactacaaaacaatgtttttgtttttctccgggcaaacatgtgcccctgtttctatgatctacttttgattctcacgttctgatcgttgtcaaatatagcatttttcttgtttttttaaatagtacatatgattggggacactgtttttggtttgattcaatcttttgaggttcgcatgtttgatctattcacgatcatgatctattcacgatcatgatcatgatatacacacgggcacttttgcaaacacgcatgttcgtatatatgcgtgtgttgtattgagattatttaattcatcttcaagttaaaggagcttcattttgaaggctgattgtaacacaaatagtgctggaatcactcgatctataattgtttggcaaatcaggcttcaaagtcttggtttctttaacaaaagtgtattttattgtatattttgactatttggaattttaaattaaattctaaatccagatttgtgtatttaaccaaaaaaaaaagatagagaggtttccttttcattcaagtgagagtgtggaagtcactgcatagttggataattttaccattttgattgcagg

SEQ ID NO: 58243 - DNA, 597 bp, Populus trichocarpa
  Intron number 1 from transcript POPTR_0010s19720.1 (locus POPTR_0010s19720) derived from phytozome v7.0 (chr-ID scaf fold_10; pos 17562332 to 17562928 reverse strand)
cgttgtcgttcgtttctcttccactaattaaagaggtatgcgttcctctctagcttgttcttagtttccttttttttttgtttgaacaacagttctggtataatttctgattctggttcattagttgttgattggttttttattcagtttttcgtttcccagatgagtttttttttcctttcatgatcatttaaagtattgatttttgctagttgattttttgttagctcgtgtcttaattcgtgtaccgtattatcctttgtgtttgcatatgggtgaagaaaacaaagcttggaactttatagcttatgctttagtttcctagaaaatggaattaagctttgttggtccttaaattaatatcttaaattttgtaagcatcaaccagaagctttcttgttgccaaagtgggcatgctttgttaaaacaagttacttctttatggcaaagagagagagaaaaaaggcttacaatttttgaaacttgatttgaactgttgtagccgttttcttaatctgccaactaggttagtgaggtttgagtaaagtagaatgatttttagttaaataatatgacttttaaatgttggtaatagcc

SEQ ID NO: 58244 - DNA, 688 bp, Populus trichocarpa
  Intron number 1 from transcript POPTR_0002s09650.1 (locus POPTR_0002s09650) derived from phytozome v7.0 (chr-ID scaf fold_2; pos 6912811 to 6913498)
cggcctcatttttggctacgacattggaatctcaggtactcaattcttgctatacatacctgtgtaattgtatggcaagagttcttcatatatattaattgatcaaataaatgagggcttatgagttggttaaataaatgccaccaattgaagattgcacgtagctgttaaaatggaatgaataacctgaatgtggccagagctttgaaacctaaaaagtgaaggcttcaagttactataatcatagggtgttgattccctcctcaattctgttcctcttgcacctgggatatccagaatgttctgattaatcacaatctgacaaaaggtagctactaattcatggaatcacgatagacatgcatggtttcttgacaaaacgtaatacatccttcttacttcttaaacgtaatatattaaagaaccgttttaataaaaaaaattaaatttttaaataagagtttaaaatataatttatatttctctactaccttttcaatctcctaatttgatcttgatcttgcacagcttgcattatcgttctcatgtactgtaggctatgaaaaattaaattgaaatgatgcatgaaaattaaggatattggaaagagctatagagttatatattccgtataatcaaaatttgttaattaatatgatgccgtcaattcacaggaggtgttacaaca

SEQ ID NO: 58245 - DNA, 607 bp, Populus trichocarpa
  Intron number 1 from transcript POPTR_0001s06000.1 (locus POPTR_0001s06000) derived from phytozome v7.0 (chr-ID scaf fold_1; pos 4699247 to 4699853 reverse strand)
ggaagtttgattttcaagctaatttgaggcctaaggtctgtttttgaattgattttgtttctggtttgattttttttgctgaattttaatgggttgttttttttttccttgttgaattctgattggttttgagttttgtgtttggactcgcattggcttctgaggtttggtgatggatctgtttctgggttttgggtttttttattgaattttggtagattctgtgagattttagctttagttatgaataattaatggttaactatatggttttatgtttttttttttttttttttttgctgtgaaagatgtgaacttcgctgatcctggtttgcaagatattttggaattggaactgagtgatgtactcttcttgcttgttgaataggatttggtttcattttatgagttaatttatctgtgatctgtttgctactttggttgatgagggaagggaaatgagggaaagttttaagctttgaatgttctttaaaatgttaatgctattttgattttgagaaatgaaagattaatcaagtgaatcaattgtctgtaagttgaattattttatttgacattttgttggtttgttacttaatttgcagat

SEQ ID NO: 58246 - DNA, 742 bp, Populus trichocarpa
  Intron number 2 from transcript POPTR_0001s17640.1 (locus POPTR_0001s17640) derived from phytozome v7.0 (chr-ID scaf fold_1; pos 14453070 to 14453811)
attggagattctcttcatgtgagtaccttctcaccttccctttcatttttttttaaatgattcttcaaaaataaatatataattatatatgatccttaaaactttaaattattgatcaaacacaaggtgaagggtaactatgtcacaccgataaatatcaagtttttgtaagagttatttatatctcactttattaaattgttctttttagacttatgcagtatttgggaacacagttgaaaccatatttttcaaaaatttgtttttgcttagaattaatatttttatgcttttacattgttttgatatgctaatgttaaaaataatttaaaaaaaataaaaaaatattattttgatgcattttcaagcaaaaaacactttaaaccgcaaccattatcacactctcaaacattatatacacgtttgtgtatgtgtgtatttccccatgcatatgcataaatttaatgttacaagtgatgagttgtaattcaattgaatttcaaataatttcttatagccaataaatcttttatatattaatattttttttatttaacacaccgtaacataacttatctcgatataactttattattatataatgtgttattcaaggactttggactattgggtcgatatgcatatatattatagtgatgcatatcatggaaatgtatactataactttgaactatgattttatgtaggcttgggcaaacggtcgactgcattctccatatca

SEQ ID NO: 58247 - DNA, 870 bp, Populus trichocarpa
  Intron number 1 from transcript POPTR_0098s00310.1 (locus POPTR_0098s00310) derived from phytozome v7.0 (chr-ID scaf fold_98; pos 50758 to 51627 reverse strand)
ggcgctcaaagaaagaggtcttacaccactgaaaggtatgaataagagaaaaattaaaagctcatttgttgttcttgcaggaaaccataaaactaattattatggtaagataaatttttaaaattatttttaagaaactgaaatccacaccgatactgaatagatccaaagatgttcaaatccaatttcaatataaaagtaaaaaattgatatctcttttagtctaaaatatcggtaaaaaaactatttataaaagcaaaaattatttatgttaccagaaacaaaatccgttcttcgattttcatctaattcactggaaagtctactgggtattatataaattatgcatggattttatatgaattatatataattcagttatttcttataaaaaaaactatttcaaatcaatagcttaaattattagatgaagttttaaaattaatataatttatattattctctaatatacatattcaagtgaaagtttttaggcttaaaatttacaaaggtccatactattttgtttttaatttttatcagatagatgaggtggtgaaattcgaactcgtgacaacttggttatcaaaactctaatatcatatcaaagaaccaattcaacccaatagcttaaattattagatgaaatttcaagatataatttatattattctccaacattttcttcatcgagaaggtcatatgttctctacaatgtgctcagaccgcttgtagttcttttaggagtttgtatcagtgagtctctgcttatacatataaagaaattcgttacctgtctgcttaatcactcctagctatttatatagctctatcgattaaaagatactgatttgctcaattttgtttcag

SEQ ID NO: 58248 - DNA, 850 bp, Populus trichocarpa
  Intron number 4 from transcript POPTR_0010s12370.1 (locus POPTR_0010s12370) derived from phytozome v7.0 (chr-ID scaf fold_10; pos 12393000 to 12393849 reverse strand)
gcccaggataagagacaggtatgaatttgatctatgatttttttttatttactactcattgagtttcccaatttgcaaatttatagtttctctgctgaatcttgtgatcaacccattgcaatgtaaagtgcaaatatattttagagcattaaaaatcagatcttggaatgaatcagaaatcattttttctttttccttttttgtaataaaaaatacttcatctttgtataaaacaaaattggttatgttgctgtagagcattaataggaatcagatctttaaatgaatcagaaaccaatccattttttattttttttttgttataaaggtgaatctatctttgtagtgaacaaaattggtgccttgagaagcatccttccttttgagagcagggaaagttatgaaagtatttgttttggttttggtttttaggagagaaaaaaatggtggataagaattttgcttcttatcatcatcactagcgttctaaaattatggtggaagagagtgtgcaaagtttatcaacatgggggagtagtttggaaatcttcaagtcaaaagccaccgtgtagggactaatgtcccactgctggcactttgtgctgtctggacaggatgctaaaacacccaagttctgaagcatcctttcgttaggattgaattctacattctaaaattaactgacctttaatgacagggaaaaggaatctttatcatttgggtgttgtggaaatcttgtttgtggcaatttttatgccaatttgtttctgaaatgtatagcttggttgatcggtgtgcttctctttttaataccatcttcatgaattgtgcacaggacaagagttacagc

SEQ ID NO: 58249 - DNA, 240 bp, Populus trichocarpa
  Intron number 2 from transcript POPTR_0010s01370.1 (locus POPTR_0010s01370) derived from phytozome v7.0 (chr-ID scaf fold_10; pos 1477802 to 1478041)
ctgtggatagagaatatcaggtaacttctgtttggttgctaagaaaaacttaggttttggtttgattgattggaaagttattgctgcgattctgagaaattgaaggaaaaagtgaaattttaggaactgtttggttgctatgaaatgacagggaaaatttaactgtggagtaatttatttatttattttttatgtttcgcgacaggttcttcgggcgcttggtgaacatactgaagttcc

SEQ ID NO: 58250 - DNA, 349 bp, Populus trichocarpa
  Intron number 1 from transcript POPTR_0007s14120.1 (locus POPTR_0007s14120) derived from phytozome v7.0 (chr-ID scaf fold_7; pos 14011338 to 14011686)
caaaactctctccgatcgcattcgctctctatcaggttataacaactttttcttcccgaattaacctttttgtttttgtttattatcttaacaccagtttttttaaaataataaatatactgttaactgattagttgaattatagaaattagtttttttttttttttaatttacagtgttgatattttgaaaactagtttgtttactgttaactgtaagtattgctattaaattttttttttgttcaagttaaggtttgttgttgtttgaatttttaactgatttggagtctttggttgtggaatgtttggtagttattgtagagctcaaaggcgaagataagagtggg

SEQ ID NO: 58251 - DNA, 267 bp, Populus trichocarpa
  Intron number 2 from transcript POPTR_0010s25010.1 (locus POPTR_0010s25010) derived from phytozome v7.0 (chr-ID scaf fold_10; pos 20901711 to 20901977)
cagtttgtttggctggtcctgctaaactccaggtatttcttttcttttattatcataatttttgggctctttttattgatttttgagtttaataaagaaccctttttttccttttcttgattttgtttattggaatcaaaagatttttttcttttaagtgatataatgataatttatatttgtctcttaatggatgacaaggacaaagtctttcagtgattttttgttgttgttgatgttatatatgcaaggtgatagcagattttg

SEQ ID NO: 58252 - DNA, 629 bp, Populus trichocarpa
  Intron number 3 from transcript POPTR_0010s13170.1 (locus POPTR_0010s13170) derived from phytozome v7.0 (chr-ID scaf fold_10; pos 13039631 to 13040259 reverse strand)
cttcagagaaagtgaatactgccttgcattatcaggtttgctggatgcatttctgtaagaaacatattttggaattatagttttttattgattaaactggttctcaattgcctgttaaacgattctcttactatggaaaatgacagttgtggaaatcagaacctacttgacttggacactcgctatttttatcagcatttctctccatgtttaagtggttattatgcttttatgctccacctaaacaatagcaaaaaagaagacttgttaaaatagttttgtagacagagcagtgttcgagaaattgtaacaaggaaattcattccactttcaatcgtgacaatttgttacaagaggcttatttataatgtttctttcaaatatttgattttgaatgtgccctattctgataactgcatatgcatttgatgttcagctactggttcttatccaatttttggatttctaatttttatcaaaaccctaaaacaaattggtgtgaaatcttgtatttccgttattaaatataactccccctccccccccctcccccccactgtctgttgttttatttagatgacattttttctcattttcaggaatatccacctggtgttataatcgtgcct

SEQ ID NO: 58253 - DNA, 929 bp, Populus trichocarpa
  Intron number 1 from transcript POPTR_0010s02860.2 (locus POPTR_0010s02860) derived from phytozome v7.0 (chr-ID scaf fold_10; pos 3350318 to 3351246 reverse strand)
cagctgtgtcagacccaacacccatcgctacaaaggtacttctttctcctctttgcttgcatgtttcctttctttctacgactccaattagcttggatgatgggagtttggttatggttcaagactagcgatgattttttttttcttttcatttcgatgatgttagatattctcgaattcacttgtttgttagccgatatcaagttgcaattaaaaaaatatgtattcaatttgatatattttaaaagatttaataaatattgaatttagaaaattaaaaaaaaaaaaccttttttttgtagttaataatgctgattttagcgaataataataaatattctttcaaaaaccatttcctttcctgaaaaatcttgatggatagtgaatccccatcacattttgtttcgactttttgagggttgcatctgggcttgtcacgtggcaatgggcctacttgtgccttcttttttttttgctatatcagtcctactttacctccatggaaccagaggaggtaggttgcaccgccgggctagaatgggcctgggtgctgtccagtcagcctacagtgcgtttttagacaacgttttataattggaattcatggaaccagtaaagatgcatcattttattattattattactatattttgaacatgaacatggtaatcctatattattgcagtgtctgccatatagttgctcatggcttcatgctagttaatgccaagattcaaaatctgaagctataacactgttaagttagtggttgcacagccttgactgcattaagcgatggataatagatgttactcagctgaaaaaaggcctgccaaatggaatttaatcgcagagttgcaaggctgaaactcatatcttctctgatttacgcagcgagtatttacttttggaaaaggaaggagcgaagg

SEQ ID NO: 58254 - DNA, 633 bp, Populus trichocarpa
  Intron number 2 from transcript POPTR_0002s05360.1 (locus POPTR_0002s05360) derived from phytozome v7.0 (chr-ID scaf fold_2; pos 3495798 to 3496430)
gaagtgctctggctcttggacttcttgctgtaaaagtaaacaaatatcacttgttaatttgatttatcaatctaatctagcaatttattttactgttaaacgtttgcttattcctggttttggattgtttaatgccgcatgatcatattaaggatctccgagcttgctgtttagcattgatggcagttgatgcattaatcaatacatgaaatataacagtataatttattgtgtatggtctgcgctcttttgttgatttgttttagtttttgcacttccgggcaaaaaacttgcaaataggttttgagtgttaaaatttgaagtttgggtgcatgtttactttgttcttttcgttgctttacatatatatcatcaagttttttccatgactgtatttgtattgacaggcctacgcatataattaggccaacacctcttgtatatagcaattatagctaatcatattttcttttttctttttaatttatatcaattttattctgctagaccatgattacatatacaagttttctacaatctgtatggaaatgttatcctttctttaccttgatcctgattttataattttcctacgtgctgttcattagccggagcatcaacaactaatagtag

SEQ ID NO: 58255 - DNA, 640 bp, Populus trichocarpa
  Intron number 1 from transcript POPTR_0010s18100.1 (locus POPTR_0010s18100) derived from phytozome v7.0 (chr-ID scaf fold_10; pos 16457511 to 16458150)
cacccttcaacaaattgcttcttctcactctaaaggtatctctctgtatgtctatgtattatatatccaggtgggtgtttgtgtttttgctgtggcagttctgccctttcttttcttttcatttttgttattgctgtaatgggctgcattgttcttttttctcgtttttaagtaaagctgcaatctttgagcttttttatggcaattggacttctttgaactgctttcttgattttttttccggttaataagttcttcaccatttgaattgactaaaaagggtaattgtttctttatcactttgtttctgcgtgtatagagacttcatagggttgtgagtttgcattttcagttaactgaaaagactaattgggctattaagacttgaaaccatcggtggcatcatttgggcaattgagctttatattgttttgtgtgcttgattttattttcttctcggtaatgcaacattttgcgcttgccattcatgtcattttctatattctgtgcaacatgtggaagctgttataagggttctcctagttatcattggttggttctataatgatttctaaacctttttgtaattgatctgtgttcggcaggaattgcaaaggttgtgttaaaaaagggaaagaca

SEQ ID NO: 58256 - DNA, 863 bp, Populus trichocarpa
  Intron number 2 from transcript POPTR_0001s29790.1 (locus POPTR_0001s29790) derived from phytozome v7.0 (chr-ID scaf fold_1; pos 28400915 to 28401777)
cctgttttcgggagctctctctactcagaactcaggtactcttcttccctacaatctcttgaatccttttccatatgcctttacctgggtcttttttatccttagtgtagaatcatagccattagatctggtgaactggttcactttcattctctgttaattgtttctacctgtctccggtcctccatagtagaaaacagcaaactattatttagtccctgtatttttaataaaataattaatcaatccctctgggtttaaaagccctatatatattgagtgtctatattttgtatcttcttataacttagtccctcccatgtttgatcgttaccattttctttctcctagactgcccttctttactagtcaatttttataatctcaccagctacaaactaaaccaaaattcgatttaaaagggcagttcggatattctagaaaaaaatcacaatcaattttggtgaaagatgtcaaagaagtatgatttccaagactaaaaggaataatttataaaatcatagaaaacacaggagctaaattgtataataatcttagtcaattttaacttacaactttcacatgagtgtgttttcacatacgtggtaatttcaggtttttttgtttgtcaacttaatcattaatctgaaaaaatgctcgatttggtttaggagttaattttttttaaaaaatttactcgaaaatatattaaattaaataatatttttattaattttttaaattatttttaatattagtatattaaaatgatataaaaatattaatttgaattaaaaataattttaaaataaaaaataaaacagtcctttagcttatataatgtactgtatcatgtcagatcc

SEQ ID NO: 58257 - DNA, 954 bp, Populus trichocarpa
  Intron number 1 from transcript POPTR_0007s01530.1 (locus POPTR_0007s01530) derived from phytozome v7.0 (chr-ID scaf fold_7; pos 856057 to 857010 reverse strand)
cgctcgaggttagtttcattttactatatattctagtaaaaaagcttttgttctcatttatatctgtcagtgttgcgctatttcgatgataaattatgtatcttgcctagcaacctgttttccatttaaaaaccctgaaaaggagagggagggaagaaattgtttgctccgtgtgagaaaaaattgttgttcatgaataagttcctcccttttgaaacctcttgttctgcttcttccatttctttggatgggagtccagcctgtaagtacttggtatgttgttgataaaaaaagttcttttttcttgctattatgttttagaactataatttgctgcattttgatcaagaacattagatttatcatctaggaattcatttgttgtcctcaatattctgcatcatttaaggatgacaagcaaaattgttgcatatgatgggaataaatgtttaatgtcccggtttttgtgtttctatcactaaaacaactactgatacaagctagtttagtgtatggaagtctacaccttttggttttattgaagcatattagttttaaaagttcttcacttttatcacctggacaatttttgcatcttgaaatttatgcatcgatgattaaagcttgccagttgtttcatgtgacaaccatctgaatcagaatccaaactttatgtgaaaatatatgctggatggcactgttaattcttgacttgactttttgcaggctgtgaacttaaggagcactgcacctcctcgacttcttcctcaggtatttatctgcaacttcctttttctttttgttggatagttctagcattcacacgcaatggaaagggtgcaaaacacatgcctgcaatttgataatgaaataaaatagtaaacaatgagaaggcctagctctgaacactttcaatcagcactttgtctttgtctaactgaaatcattactttt

SEQ ID NO: 58258 - DNA, 828 bp, Populus trichocarpa
  Intron number 1 from transcript POPTR_0010s19220.1 (locus POPTR_0010s19220) derived from phytozome v7.0 (chr-ID scaf fold_10; pos 17198376 to 17199203)
aagcaaatcgattagggttttggaattgcaggtgaaattattattattattattatctaaaagcattttttttagtatttgttcataaatgctttgtttttattcacaaaaagttactcgtttctttgcctcttgttggttgtgtagaaaataaaggaaaaacaacaaaaaacgaaattgtgaaaccagggtttcttttgtgttaaatggatttagaatttcttctttgtttgatttctgagaaaacgcagggaatgtcgtggttagctgaagtgaggttattagcagtgtagagtatgtgttagtttttgaaactagagaaagttaagaagaaaaatgttttagttaatttatttcttagattttatatttaaagtgttgttagctgtgaaacctaactgaagtaagatttcaaaacttatattatttatttcatggatttgccttcttgtgatagttgaaacctcgatttttaatttatttatttctcagatcttttgacatttaaagttgctaggattccattcgtgtacttgcttaggccaaaaaaggaacaagacgagacattgaatcagatcgtaatttatactgtaattttagttttcattctgtggttttttggtaattaattaactacttggataactaagttaagtacatccataattgcttcttgttgtttcatgaatgttgtctttaatttttgactgagtagatgtttaaaaatgaaatgcactgtcaattgctaaggagaatagggaattggatgattttcttgcaactttagtgtcctgatgtcctgtaattttgtggtatttcaggttagtg

SEQ ID NO: 58259 - DNA, 926 bp, Populus trichocarpa
  Intron number 1 from transcript POPTR_0002s22900.1 (locus POPTR_0002s22900) derived from phytozome v7.0 (chr-ID scaf fold_2; pos 20006073 to 20006998)
agcgtagtcctgaaacccctaaaacatcccccaaggtactactccgattcaatcacctaaaataatctagggcttatgtttccgatccgatctctatagagttaagtaatttagttgctgagatttgtttatttatttttgaagaaaagataagggtagggatgttgcaagcaagtgagagatgttttgatctatctttatgtctgtacattcaaccctaacatgagattgtctttatttttcttcgatttgcgctgtaaagatgtttaatcttcgtgaacaaaaaaaaattgtcaaaagatttattatcatatgcggattaattagtagttgttgctatcgggtgggaatactagttcaaattgatgatatggtactttattggtggttccacgttagtctggtcgtttggtgccttaaggtcctcaactttcaatggttgtttggttgtttttactgctcttgccgttgattttgtatctttgtattaggggtaacgtgacctctgtgtgtcaaatgggtacaatagattataaaaaagatgcaaaaattttcttttccattgttttttcttgtcgattttagcagcacattgaattacccatttcttttccaaggctgatgattgcctttcctagtggcaatccaagtttttaggatgcactatagaaagaaagatacacgtggttgcctaaaaccatctccatcatgtagattcattatattacaattcccttttgattcttgtaattcaaaatttcagaatcttttttttttaaacatgaacctaacctgctaaattagttacaaatttgtttacttttttcttttggcatttgaggaaaataaataggaaagagatgttaagtgctttttaagttgtgatgacagaatccacgagttgccgtgcgatcaattgatacata

SEQ ID NO: 58260 - DNA, 564 bp, Populus trichocarpa
  Intron number 1 from transcript POPTR_0010s17040.1 (locus POPTR_0010s17040) derived from phytozome v7.0 (chr-ID scaf fold_10; pos 15787945 to 15788508)
ctgattcaccggggtttggactcttttctcctcaggtaatcaagtgctcatatactgattgcatcagctgtttattaactctctttttttgtactttatttttgcccgagaaagtttttgtcttttttgctttttttttttttttttaatttcaatttgattactgagaaaggaataaaaaactagacatttcaaacattgctactaatcatcaatgaaatgagagaactctttatttatttatcatttatcttccacctttctttttctctttttttcagaaatgtgtttgcttatttgacctggattactttccatgaggattttaagcagaaggaatgctaaatgtttagcctctaaatgatttagttactagcagtttcaattgttgacacctactagaactaaaattgcattgtggtaaagctctgtgtgtgtgtttttttttatttccttcccctctctgtgattaatatgcctctgcttaaaattgaatgcctgtagttcttttttctatctattctggtgttcttatgatttttgagatgtttttagggctttgga

SEQ ID NO: 58261 - DNA, 633 bp, Populus trichocarpa
  Intron number 3 from transcript POPTR_0040s00202.1 (locus POPTR_0040s00202) derived from phytozome v7.0 (chr-ID scaf fold_40; pos 145447 to 146079 reverse strand)
atcgcacccttttacctccaggtatattattattttcatattcaatgtaatttaaaaatattatcttgacataatcttacttattgattttgtatatagatgaatggtgggtgctatatgaaacttgtgctccaaatctccaaaagctagctatatttaggatgcgagaggaattggagtatttttgagcacatccactctaagaagagaaatcgattggagcatcacagactcaatgacctagtttacgtccactacaatttgaggttaaaacaaaagtattttattttctctaattctttaaaagttatttatattattaagtagcatcattaatacttatactttgcttttgtagaaattattggaaaggacagaattatgatccaattaattttgaggcattttctaacactgaaaattaggtagtagaagataatccatcatctttaacaaccgaagaagtagaaatctttcaccatgatttatcaaccatgaccattcaagatactttaaatgaaggtaatagaagatttgatcctttagttataactttgtttaaaaatgaatcattgtttaacatgtaatgtttattggttaattatgtttcaattgtagatttgataaatataa

SEQ ID NO: 58262 - DNA, 513 bp, Populus trichocarpa
  Intron number 1 from transcript POPTR_0002s00730.1 (locus POPTR_0002s00730) derived from phytozome v7.0 (chr-ID scaf fold_2; pos 329997 to 330509)
tgaaccctgggagcttccaggtacacacatgcacacacacatactagcctattgcttctcgattttaaacgaatgtgctacgtttacatgtatgattcattttttcttcatgtcaagatgcgtggcaccaccaaaagaaactgatcagaatattccctttacctttaatttgatgctataacttagcttgcttgatatatataagctagtagtggtagtttccaaaaatattatgtcccttttctttgcttttctacttgaagatgcttctctcttttcaggtgaagctaggttagctataattaactatatgagtttaagctggatcatcctatatgttaagaaatgcccttcttttcttggaagggaacccgattttttatatgtgatatactttttatttataaattaatgtgtacacacatagcttttaagccattcacttctgacaaaatctatatttcattaatatgagtttgagtggtggtgttggttttcttgttgtttaatcag

SEQ ID NO: 58263 - DNA, 902 bp, Populus trichocarpa
  Intron number 2 from transcript POPTR_0010s15290.3 (locus POPTR_0010s15290) derived from phytozome v7.0 (chr-ID scaf fold_10; pos 14619326 to 14620227 reverse strand)
attcttcaaagacaaaagatcttttgatttagaaggtcagtgagaacttcaattttgaagatctgaacttttttcttttggttgattattgtttttttccttttaattaattgtgtttggttctatgagatttataaataatgctctctctttttatcaatcttaccttggggactgagtattagacatccaacctattgtttgagctgttcaggtcttcttattgcactgtacttgtggcaacctctttctacatcatttttgtgcatgatgcatgattgaatgctgacatggattatgggattgtgctgcctatactttgacatgcttgcaaacttttgtgcagcctgaatatagtttgaaataacttggtgcttagctgaattcactcttccatgagtaataaaaccaaagcttgtacgatgttcttttatagcctttcacagaaaacgctgtgagtaagccttatcatggttgatggtgctgttgaggttagatatctgagcagaactgtccgaaaatgtaaatatatgcaatcttatatttgattttccttgtacatttagataatcaaatatgttatttctggtaaaacattttgaacttgtccagtatgcacgtcctatttggaatttaaatgcctcgggttctttggttgattctcatgcccatgccataaatttctaggaagttattcaacctaaaacattctatgtagaatgcaaaatcacttcaagttctttaatgtggaatcatcaactcaagttgtagtttggtatttttcatgatggaaatgagaaattaatttttttataacttcttcatttattgcccatgcttttcatccatgtctgtagaggtactaattttgcttatttgtctttgcaggcctcaaaaactgt

SEQ ID NO: 58264 - DNA, 388 bp, Populus trichocarpa
  Intron number 2 from transcript POPTR_0002s21420.1 (locus POPTR_0002s21420) derived from phytozome v7.0 (chr-ID scaf fold_2; pos 17899886 to 17900273)
aaggtaatcttcaactcgggaattagttaattatctggaattcgtcaactttgcgtcaaggttttctttcttttcatttgcttgagtaacaacactctgtccaacgtacacttgattagatagactccttttcttccttttcttgatagtgagtgcattaatacaaaacagtcatttaaaagatgaactctgaaaagtttaatggctgtttaaaaaaaataaaatatctgctttacaaatgatataaaaaaatataaaataaaatacctccgtatattatatatgtatataatgttttctaaattgattgacgataaggtaataaaacaaacaggacatgtaataactacgaacagtaaaaactagtgttgtttccatgtctggtagg

SEQ ID NO: 58265 - DNA, 846 bp, Populus trichocarpa
  Intron number 1 from transcript POPTR_0001s44450.2 (locus POPTR_0001s44450) derived from phytozome v7.0 (chr-ID scaf fold_1; pos 44869329 to 44870174)
aatctctcacatcgaaaccctagtcaccggatcaagtaatatctctttgttctaattagttgatttcatcttctttttattttaatttttagcttacttattaattgtccgcgttaattctgtgaatcttgtttagttgattgcaagctataatctttgtcttgatagatcgcctttttttggtgtcttaattgatgggttcttcttttcttcattttttgaagttaggtattttgtgtctgttgtctgattagcttattggcttgtgggagtgatcatatctatatgttcaattaggcagttaagacctgtatttttgttgaataaagcaagctctgttttacatcaaatgggtatttgtgtttttgtttgtttgttgatgaatttgtgtttagaatatggatgcgattagtaatacgttatgacatgttctagttagagttttgtagcttgtattgttctgtttggtgacaagcaacttattaatctaggatcttgatttttgatgtggttgacaactttgttatgtgagttttctctatcatgattgattagttcataaacggccttacctgcttgccccagtgtgagcagggagtaatttattgtttccatttatttcttgtttatttaggtgatttcctttttttatggtgacaatagagcgacttgtttttgtctcctaagaaatatgctgtgattttggaaaggataaaaaaaaataatttattttcctagtaaagttagtcttatccttttgagtttttaatagtgtttcagtccctgttaatatggagttatttctattcaggtttgagcttttaggttgttgggcttccttgaaca

SEQ ID NO: 58266 - DNA, 947 bp, Populus trichocarpa
  Intron number 3 from transcript POPTR_0002s14540.1 (locus POPTR_0002s14540) derived from phytozome v7.0 (chr-ID scaf fold_2; pos 10805630 to 10806576 reverse strand)
cgagaatcagggagaaatacccagacagaattccggtaaggtttttttttaccttttctctcatcaattactgtcgattgggcttgagctgctgttgctccttttacatgatgatatgaggctgtttttgcttttaacaattgattgaagcttcaatctttcattttgtgactgttgggcgagggtgtcttcttattcttctcgaaaacaaggtccttcaatgaaattgggggatttgcttgaagttttaagttttggcacgaaatgattgttgggttatataatgaggaagaacttcctaaatatttcgctgttcattttagagagcagaacacgaagtcttgcgtttatttctcttgttgaacgaagcttcttaaatcttggaacaatttaggtggcaggacttgccttaatcttgtatgttttgatatgggatttcggggtgcttggataatttgaacctgattgttgcattgggctgaaatttgtggttgagtgtagttcagcaccttattcatctattgaatgttaattgcatatgtgcaggacgggatacatggtgctcaatttgcatgccgaatgacattgtttgctcaaatcatgtcactatagagagcgattgacattgcggccaagttgtttgcccaaaatttgattttgtttttgcttaaaattaattttttgtgtgtttttgcattgtttaatgtgcagatgtcaaaaataaattaaaaaaacattattttgatgcatttctaaccgaaaacactttgaaaagcaatcattaccgcaatgccaaataggagcttaatctataaattctaccattgataacctaatatctagatgcagtgtcatttggtacctttctcgtcctggttagcctgtctagctactaacacttttaacttttaggtaattgtggagaaggctgagagaagtgatattcc

SEQ ID NO: 58267 - DNA, 631 bp, Populus trichocarpa
  Intron number 2 from transcript POPTR_0010s00710.1 (locus POPTR_0010s00710) derived from phytozome v7.0 (chr-ID scaf fold_10; pos 404450 to 405080 reverse strand)
gcgctggctgaggtttacgatcctttaacagacaagtatgttcatttgcacaactgcaatatttatttgtgatgttgtctaacacccctgataattgtttagtgactactggttgcttcttattaaacaccaggcttttgcatgctttatgatttgagtgcatggttaattaccaaaagatgatctgtgtttttgttaatcatctaagctgtcatggtcctcctttttctttccatcattttctctagtcttgcctggaacgtttctattgtcaaagtttacaaatttattagctgaaaatttgattatatcttctttttttgttaaatccatcaccattacagtttactgcttaggtttataatgacattccccaatcaatcatgcatcttcattaagtcaatatggatatttgctttggagtattatgcatgtacatgcacagaaaaatctatgttaaatggctgtcacccttgggggggggggggtggttgtttgtgattgcgttaattccatgaacaatacttagtccacagtacctcatttaagggctaatggaattaagatcttgttcaaattcatctttttctagtgcaattggttgctggttatgacatagcagaaattgcag

SEQ ID NO: 58268 - DNA, 621 bp, Populus trichocarpa
  Intron number 1 from transcript POPTR_0002s07720.2 (locus POPTR_0002s07720) derived from phytozome v7.0 (chr-ID scaf fold_2; pos 5294177 to 5294797)
actctttccaagacctaggcaacaagctagccgaggtatttccctctctccctcattcttcttcttcttcttcttcttcttcttctttctttccctgaaaagtgcaaatttgacaatattattgcggaacttatgctattattgaatttttttgtgatatttcagtgtttatgttacaaaagatttgaaatttatggttttccggacataatgcgtatgcaacatatgtgggttgtgtggaactttttgatatcactgtttacttatttggaatggcagtgaggagtctctatgatttgcttgttcatggtaaggaacgtttactgcgttacttgatgctaatctaccggttttttccgattcctgctgttgtattttctgcagttatgccaataatgccaagttattgaattatctcgtttctatttctgttgatggcatgtctctgatgtgtgtgtggtgtctgttttctagcatctgtttcggtataagacaaattgaagaagaaactctatttggaagcacaggctcgagtttattctatgctttgcttaagtacataatgatgacattttaagcaacagctggaatatattttttgatttgctatctctttgaagg

SEQ ID NO: 58269 - DNA, 766 bp, Populus trichocarpa
  Intron number 3 from transcript POPTR_0001s22550.1 (locus POPTR_0001s22550) derived from phytozome v7.0 (chr-ID scaf fold_1; pos 21452388 to 21453153 reverse strand)
tgatagttttggttgtcggccaagattcaagtgctgtaagtacctttaatcttgatgatacaccattgtcaaattgtgaccatgttacgaggtgaggttatctgtgatcatatgcatgctagttttacaatatggtctattaaacgtgcacatgtgtagtaaaatatatctgaacaattgaagtataaggttcacaagcatgtttttttatcatgtactcataactcaaactcacccagccgtctcatgtgccttgctactttcagcttttgcaagccaaaaaaagttaaaaagagaaggaaaagagaaagatcggcttcaattatcaacctcgaggtctcttcatctataatctcccattattcctatttctacatcatgtagagctgtaaacatatttcaatctcatatgtcctgctcatttcagtttccccttcactagcccctctctgtctactcccactagtcatgttctatggaaagactttgtccctttgtttttcatcataacccatgctgtccatgtttgttgtgaagctccttgattgcagtctctagatatcattgtttttctttgatgagcatttctcagatgttgtgttgtatatttctgaaaaaatactttttgaaactttgatctcctgaccaagtcgcgttgtttgtgcttcagtttgatccaaatggaaggaaatgcttgtcaatggatgggtatagagagattggacggacagttcatagtcaagcaaataacacgtggcgggtgcct

SEQ ID NO: 58270 - DNA, 776 bp, Populus trichocarpa
  Intron number 2 from transcript POPTR_0002s14220.1 (locus POPTR_0002s14220) derived from phytozome v7.0 (chr-ID scaf fold_2; pos 10548291 to 10549066 reverse strand)
tgattgaatctgagttttgcagggctgtttgtatttgttttatctacttttataacctttgactcgttaagcaaactatcttaacattttctaatgtgtcacacgtcgaattttgatttttttggattgtccacaatttgcttcttgcaatttacttgcatatcatggtaactgaatgaacggatatctaagtccaatgagcatgcaattaatctctttctaaaatctgtacatgggattaatgctatgtggttgtctggaaatgctgcagaaacagctgaagaacatggtaaataatttctagaattgggagctaagtatgagaattggcttatctgttaattgtttttagttattatctagagcttcatcagaatatatgcacaatgtatagtcctttcttttctatctgtgtttgttgagaattgaagtctgatggtctgttaatattgtacttgtctttcctcctctatttatggtcaactacacttttccaagcagcatgttctctctttatttcctcgaatcatttatctgtgaagttatttagctctggtgcttgatggctgtaactacttagcttctattttttaagttttctagtgctgggtaatatggctttttagaagccttatatagtactgcacttagtaatttctatatctataactttgccaaaatgtaatgtcactaatgagtagcttgtttgttgtgaactcacgttttcttttgatgatgtagcttgataccactgttcttcaataccaaaatcaaaa

SEQ ID NO: 58271 - DNA, 843 bp, Populus trichocarpa
  Intron number 1 from transcript POPTR_0001s18230.1 (locus POPTR_0001s18230) derived from phytozome v7.0 (chr-ID scaf fold_1; pos 15302644 to 15303486)
ggtgcacccctcgcatccgtcaccttccaggtagggcacaacctttttctgtgcatacagtataggctatagtcttatctttccacgtttattttatgtttgcataattataatttgaatacagttttgttataatcttctgaatattttattgttgggataccttggaattggatcgcatggaggattagcaccttatcatgattatgtcatgttttcaatcgtgtttgtcctaaggataagagagtttggtttagattttgactccgccttttattttattttatttggatattgaagttgatggtaggtgaaaaaacttggtgagattttggtgctcttatgatgaccagcatagtcttggattgtcttgtttttggtaatatttttctattttttggtagtttaatgtaaaaacttggtgagattttaaaaaaatattgttttaatgtattttttattaaaaaatactttaaaaaacaaactattatgatttggaaagcaactcctgtgaacgaacgaatatgctcttagtactttaagataagaacagaaatgtcattctcaggaatttggctgccaataacaagccctgcttacgtgataatgttggtggtagcttatcatacctcctccatacttgctctcgtataactcatggatcttatttcctgattttgttttccaacttgcaaagcaagctttgtgacttttcacttccggtgctaaagaaaaattgttataagaactcagacccgaccaactagttaaatagatgatcattgtctttgcattgcttatgctcgttctggcacactgacaatgttgttcgcggtttgcaga

SEQ ID NO: 58272 - DNA, 667 bp, Populus trichocarpa
  Intron number 1 from transcript POPTR_0001s37780.1 (locus POPTR_0001s37780) derived from phytozome v7.0 (chr-ID scaf fold_1; pos 36868897 to 36869563)
ctgccatcagaaaggcaaaacctcattctgctgaggtaattgtgattcatcttttttggctctaaacagtactgcctcgtgtttttggttttcttaaactttatccaacctgccttccacaggctaaactttacttgagtaactatatgatgtatataacactgtcttccctatagatatctatcttgttgtatggatccatgaacacttgcaagcaatgtttagtattcctaaacaaatagattcaggtgagtcatatttgtgtagcttggagtaacacaaaggttagtagtagtattgttcctcaaaacatggtttgataaaaccttacaaataggtttgagttattcatcatgatagttaaggcatgcttatcttttcccctctttccctgtgcattcatcctctaaggttagaaataggtaaaagacaaatcataatgtatccctttctattgctgctcaagataatgaatatgcaaactaaagttgttgtttgatgaaaatattgataattattctgattgtattttttaacatcatctactgtgaatttttaatgtgcagagaatttatattttcagtgttgctcttgtttgcacaagtgactaacttattgtttctttactgcagagggtattggccaaggagacacagcttcacctggc

SEQ ID NO: 58273 - DNA, 763 bp, Populus trichocarpa
  Intron number 1 from transcript POPTR_0001s29310.1 (locus POPTR_0001s29310) derived from phytozome v7.0 (chr-ID scaf fold_1; pos 28034490 to 28035252 reverse strand)
cgctcttgagcagctcaaggcttctgcaattgacagtgagttttccctttttgttgagttttgagtttcgattatgtggaattggataacgcgtacgcgcgcattttattacgtggtccaaaacggccgtttttgtagcttgcaaaaatccactttctatttagaaacatgggcttgaaaccttgtaaaagtattggaatttagctttattagagaagaaagagatgataatggtggtggtgatttgagtattgtgcagtaagaataatgatgtggaaggatcttaaattgatttgatgacacaagaaagtttcaatgttgttgttatggatcatggaggattttttttgggttcaaaaaattatttaacttaaaaggatcgcttaattttgtgtgtatttagattaattgtttgcttgtatgggtgttggatgattgcgatgtcattaactagcaaaaaaaggttctaccaattttgaagaagcagtgtcttgtgtcgcccaagcgctgaagttgttgatagttgataccaaccttcttggttgtgttgacaactgtttgttgacgtcctttaatggtcttaataaaatctctaatttcctttatctgtagctatactttcaggttttttctgtttttattttcttgttcttacatgccttcttgccaaacctacctggcaattgttcattgatgctaattgctgaaacgttaatgcctaatatcaggatatacaaaggaaaagagcagcattattgtcatt

SEQ ID NO: 58274 - DNA, 534 bp, Populus trichocarpa
  Intron number 1 from transcript POPTR_0001s19530.1 (locus POPTR_0001s19530) derived from phytozome v7.0 (chr-ID scaf fold_1; pos 17240284 to 17240817 reverse strand)
tattgttaagtctctcgagtcgactctcgctactggtaattaatttactttttagacattttttcgttaatatattgatgggcttttgatgattttttatttttgattgttgggttgtgtttactttatctatgtttctaatcaaattgagaaaaactgggtctgggattttgctgattaatgtttttttttctgagaaaaaagtggtatagggttgtagcgaattcatttgtcttgggactttggatatagtcttggtatgattgattagtagctattttgtgaaacgggcagtttaacattagaaattactaccccgagagctttatagctcgctggattctgtttttggattggtattaagaattacgtctgtagaaatctaaccataagttcatggaactggttactcttcaactctgccatgagaatgtgtgaagtgttcattattggatggtgggctttcactgattcttaggtcatctgccatgataatgttttgaatgattgctaaatgcaggtaatttgcagaag

SEQ ID NO: 58275 - DNA, 688 bp, Populus trichocarpa
  Intron number 3 from transcript POPTR_0031s00460.1 (locus POPTR_0031s00460) derived from phytozome v7.0 (chr-ID scaf fold_31; pos 310008 to 310695)
acaatacccacacaagttcctgctgcaaatcctgaagaagaaaaacgattacataaaattcaaataacataactgcacttaactctatttttctcaaggcagaatctcataattctaacaaatacccacatcagccctcggattgctggaactatgtaagttcttcaatgagaacatttatatgttttctaaaccagggctgaagatgactagattttcaagaatgaatctttgtgtgtgatttcgtgtcaaccctcttgcagtcatatctccattttccaataaaatgcatatcttagaaaatgtaccttttccatgatgcttgaagtggtaggtccaaagctttgaacctgcaacctcttcttagttgcaaatttttaccattttgtttgtttgtttgtttatcaccttgtagaatgatggaaaaggatccatatagctgagcccaaatagtttgggatcgaggcttggttgttgctgtgtatgatcatttcaccagacaaaagctagccctggcatttacaaccgtcgatcatttatattatcgtaatcaaataatggctgtttgagaatgaaaacaagtgaaaaccatggattgtttagcgagtttaaccaccttttttttcatttgtcagtggttatatggctcctgagtatgcaatgcgtggctactaaactaacaaagaaa

SEQ ID NO: 58276 - DNA, 484 bp, Populus trichocarpa
  Intron number 2 from transcript POPTR_0007s13260.2 (locus POPTR_0007s13260) derived from phytozome v7.0 (chr-ID scaf fold_7; pos 13378883 to 13379366 reverse strand)
gcagaaaactaggccatcaatcaccagaatatcaggtgctgttgaatgatcttccaggcaatgacttcaatgccattttcaagtcattggcaggcttccaagaaaatctgaaaaaacaaatgggagatgggtttgggccatgtttttttgccggagtccctggttctttctattgcaggcttttccgtgccaagagcctgcattttgtccattcttcctacagtctcatgtggctgtctcgggtatggcatcgttatatgtcactagttacagaggatgcatcataaaatttccggcttacacgcccttttacattcaaataattccgtaggcaagatagcaataagcaagtctaattattaaagggataaagaaaataaaacaagattatatagaattatgtttatggtttcaagttttaatttataattttttcttcgtgattataggtccctgaagggctggagggtaacaaggggaacat

SEQ ID NO: 58277 - DNA, 354 bp, Populus trichocarpa
  Intron number 1 from transcript POPTR_0010s06930.1 (locus POPTR_0010s06930) derived from phytozome v7.0 (chr-ID scaf fold_10; pos 8160480 to 8160833 reverse strand)
gtgatcaggtactgcttttagcatatgagtttctctgatcttattcaattctacttcttcttgtcttattataagttgacgtctttttttatatgaacttgtaggtttttctagtaattaagatgaatatcatgtttaaattagactgcaagccttgctgaagaacaaatttatgaccaatttctgaagcttttatgattaagaaaaagctcttttttttgttgcttctctcactggcaagagaaagaaaccacaaataagattttgattcgttaagggctgaaacttttttctgataatgttccacgttaatttttaggttaaggtcagcaatttggttgggaagattgtggg

SEQ ID NO: 58278 - DNA, 608 bp, Populus trichocarpa
  Intron number 4 from transcript POPTR_0010s20710.3 (locus POPTR_0010s20710) derived from phytozome v7.0 (chr-ID scaf fold_10; pos 18189046 to 18189653 reverse strand)
ttttgaaagctttgagacagagaggtgaattattacatggtttcccctcatgtttcctaatacgtacttcatgtagacattcatgtgcaatctatgagatccatataaccatgttccctattttacaacttgcaataaataaaacttcaatgcttttgattttcctgcacttaagtctttttgagagttttaattatcaaagctttgcattgtcataatggttgattctcctgaaaaattgaaggtaatagccagaaactagactttggaccagagagcttgtcatgtgattttgatttacaatttgttgtgaataattgacttagccaaaaacttatatcagaaacttcagtaattatattgtctttgactcgctgaatctgcccactgaaataagttactttattctggccaatgccaacaatgagcaggtttataaagtgaaaagtgattacgttgaagggtaatttcgttttttatgttttcattttaaggatagatgaagagttgtttggggaataaatcactgctcttagttgttgggttgttcttttatataacatcgttgttttatttcattacaacttacaaaattgatgtgcaggtgg

SEQ ID NO: 58279 - DNA, 957 bp, Populus trichocarpa
  Intron number 2 from transcript POPTR_0010s08110.2 (locus POPTR_0010s08110) derived from phytozome v7.0 (chr-ID scaf fold_10; pos 9046028 to 9046984 reverse strand)
tacagagtggagaggaagtggctgttaagttggtaggtgttaccttcttagaaattatatgctatcttgttttatagattgttgtttcttgattcatgtattgctggataatagttagactttcatttttggttatactggatgactgatgactatgtttgattccatctgttagaagcggtcatttatagttcatgatagggagttagcttttccttctcttttcctagatgttcttttagttttgataattttagatagttatttaattaagagagtttatgaatttgattattcaagcgggggcttctcttggtgtcataatagcaggttaatgttttcctcaattattttgttatgtttatgttactgaatgactctctcagcagcatgctgaatgttgctctatcctatgtttttaaaaccccaaggatccatgaataaaaaattgttaagttttctgttattgttggtgattccttttaccctgctctgactagcttcagactgaggtttatttgaactgttcggaaacatcaaatattgtattttaggtgttggaatctgctcattggaggtttaatgtgtaatgatcagaagaatagaagaatgtttcttttcatttgattatgtactgttatggtgagcaaaagatactggaaagagttttgagtttgcagttggtgtgttcttgagctttggactttgcatgctgtacttattgagggaaaaagcatgccgtggtgttgagcctacccaggaatttttttgactggatgtttaatatgaaaatctggccttttctgttcatttaaatccatgtaatcatttagattcatgtttacattttttttatgttataatatagtgcaatttgcacttttgattttgtagctgatgcatattcttatgatttccccaggaatctgtgaaaaccaagcaccctcagcttcatta

SEQ ID NO: 58280 - DNA, 935 bp, Populus trichocarpa
  Intron number 1 from transcript POPTR_0010s06810.1 (locus POPTR_0010s06810) derived from phytozome v7.0 (chr-ID scaf fold_10; pos 8071236 to 8072170 reverse strand)
gagcctccctgacccgccccgattatcccggcaaggtttttcttatcctctattttttaacgaaaccctaatttttagctgttggttggttattactattttccctctcgaaaaataataattacaattggtttttctgtttttggagcgtttctgttttgtgcatccgtggtcaaatcgtgttttataaagttattttgtggtttgttatgattggttggctgtgtgttttctttttttaggaaaatgaaatgatattatgactctcgtttctgtgttgcttttcctggtaaaaggatttccaagtcattttcgaaatcaatctttaagaaaaatatttcgattctgatttcatttagtatcaggcaaggtcttttctttttttttttctctatgcaatgtctaaatctattcgtgtttattgtttttaaattcttttcctctgctttgtgatctttttatttttatttttttgtgttcttgaggtttgataaagtgtcttaatcaaatgatattcttgtttcttttttcttcacagaatgatgctacatgtgtcaattcatgtttgaggatgttattatatttatttaatatttgtttcctccttttttttggaaaaaaatttgaatgatctcttatctcattttcttaattcgtttctggtggctgaggtgtgttgagtttagaagagagtttattcgaatgggtgggtttgctaattcgtgctatcattttaatggtcttcaagtcagttttttttggattttcttatccaagaaaacgggagtgtgaattttggcttctacttctatttaatgatgccaaattgtgtgtttttgatttggaaactacacaggagggtttgttttgccttactaatgtgtttcgttcttgtttcagtcgatataaatttgtactgtaattctccacggtga

SEQ ID NO: 58281 - DNA, 384 bp, Populus trichocarpa
  Intron number 2 from transcript POPTR_0002s03700.1 (locus POPTR_0002s03700) derived from phytozome v7.0 (chr-ID scaf fold_2; pos 2294360 to 2294743)
tcatcgatcaaaacagggtgggcttttcttctctgttcccctacctttcccttgaatgtatgtagataaagcttattgtttctttatcaacacttgatgataactaaggatgttttgaatactttataagaaataatttagtatgtattgaatgctcatatggctgtgttagtctgatagtatttttaacttcttaaaaggttttattattttgggccagtagagtgagagaacatttgtttttttaaaaaaaaaattaataattgcttagcatttgtttgcattttataatctgttttgatgataagtctaagttatgttggctgatggaagggtgaaagcttaaagatttgtgatttttgatgctgttataggctctagttg

SEQ ID NO: 58282 - DNA, 675 bp, Populus trichocarpa
  Intron number 3 from transcript POPTR_0001s27680.1 (locus POPTR_0001s27680) derived from phytozome v7.0 (chr-ID scaf fold_1; pos 26539432 to 26540106)
gcgttgatagtatggctactttcttctcactctcggttgaacttctgaaatcctagtttgtatttttattttatttttaaaaatctctttattatatatgggaaaaacagtaagaatataatgtttttatgttgatttatttctcatcaatttctgggaaaaaaaaattgcctaaaaaacatggcagtctgttaaatagcgttttgttttctcaagttgaaataatgtaaaagattaaatttttgaaaaaggaaaatacactgcctttttcttctcattctcagtaatcaaacgtgatgtggtcttcctggactggttgcactttctttggccggaaagctgaatgaatctcaaaagttttactctatgcaaggctgactttagaaatgttttcccattccttttcttctcattgaattcctcacgttgtcggagaaagaaatggaagacagcgcagaattctggaacgaaagtggtcaatgcaattgaatgtgtaattagccctaaatcttaatttaatgacaaaataagtaggtctgcttttgatttggatattgactacgtttctttttaatctttagttcaatatctatgactagttaattttcttatgttcatctctttaatattgattcattgctgaataactctcaatggttatcaggctttgctgta

SEQ ID NO: 58283 - DNA, 801 bp, Populus trichocarpa
  Intron number 1 from transcript POPTR_0001s12980.1 (locus POPTR_0001s12980) derived from phytozome v7.0 (chr-ID scaf fold_1; pos 10065423 to 10066223)
ctggatagacctgttacggtatgtgagatctattcacaatcttattattgcgcaacttgaattttatttttatagacgcgttctttttttgaactaattttagttttcttttaaaaaataaattgatctagaaaaaaattgctcggaactgtgtattttgtctggcctgtttagtagtaaaggtttcgagggtttttttttgaaaagttgaaggtggtgtccttggatgctgctgtttgtgttattgaaataaagtctttacctttttggggggttaaaaggtgaaaaaagagtcgtttacaggtgcgaccaaatactgaaaaaagattgctatgatcatctcactatctgtagctttgactttatttttggactttctctggattaaggtcacttgcggtgaatagtctctagagattaatcaccgactcttatttctgtggatttgaagtggcatttgactaactatggagtttatgttgtttttatgggaaaatctgaattcgtatattggtttagatgatctaacatgctttttaacatgcctagattcttaatgcctcatccttttattgaatttctgcagttattatttaattcagtttttttattcatgtcgctttcccttatttcatccattgttagtttactgatggggaaactatatagcatgtattggagtaaacgtcatataactcaacgtgcctactaatacaagactgtgaataaagcaagattttgctaattggtttttgacaaatgtttatgatttcttttatttcttctctcgtttcagacacc

SEQ ID NO: 58284 - DNA, 1014 bp, Populus trichocarpa
  Intron number 1 from transcript POPTR_0010s17050.1 (locus POPTR_0010s17050) derived from phytozome v7.0 (chr-ID scaf fold_10; pos 15795919 to 15796932 reverse strand)
cttgccggaaaatattcctcacggccgggtactacttttcactttccttaattaccatgccaaatattctttttgtttcacttttccctgttttttctgctcttcaccgtctatgtttcccagttttttctttctcgttttctttatttacatggttttgctttgtaaattgtaacaacattggcagcaacccccctcgtttccttttcttgaataaacgcatgtccatggtggagtagttttatacgatcttctctctctctctatgcttaatcattgcgttatttttcttttttagtttaatcatattcttgactcggttaaggtttcagctttttttgttttggtgggggtggagttgttggagtttttgtcctcaaagagtcaagattgtctcgagtattcaaattagtacttttttttaaaaaaatttaattttcaattgcatttccccttgtacattccttaattcaagtttgattgctatatcgttttcgatacctaaatgacttagcatttagtgttttttttaatgtcaacgttgcacatttctaacatcaacttgttttttgttctctttgataaggacttgttttaaaacaaaaagggaaaaaaaggacttgtttcttgttggttttgtttagtggatgcttagccatcaaaattatctggatttgtttgtctgctactatcttctttgatgtgaactcataacaatcccttctcatattttgtatttaggatttgtttgttctctctttaatgcacgaagtttgagtctagaggatttcttcagagaaaaaaggtagaaattttaccacaaaatcaaccaagttgtttctgtttttcttccatgaatttgtttgttggatagtgatcatgctgttttgatcagaattaggaggattcaaattgatggtgttgtgacttgtgagtgctcttcaagtaatatggattttcattccctctttttcttcaggtatttttcagtggtggggttaggcggtgtgaatt

SEQ ID NO: 58285 - DNA, 571 bp, Populus trichocarpa
  Intron number 1 from transcript POPTR_0001s38430.2 (locus POPTR_0001s38430) derived from phytozome v7.0 (chr-ID scaf fold_1; pos 37546610 to 37547180)
gtttactggtgcgtgcgtcctctcttttattcattattaaattctcaaacaagagtcattttaatttagagattaaaaataacaaaaaaataattgttatttaagaatgaaaaataaaataactcgttttaaataataattattttatttcttcattgtaatttaattttcaaaggagagtctttttatttaaatgaaaaatatttatttattattatttaaattggaaaataaataatcaaaaaaataataattcttaaacataaggctagaatttacaaaatccattcctagaaattaaaaaacatatatggctagaaaaacataagttttacctgtgaatttacaaattgttatacatctcagcctaacaaaatctaaatcaaatataaggctagaattaatattttaatattcactgaaaaactccagggctaaaaattaaggcaaaaacttcaatttaaactccaggactaacaagtagattgccagctgatgcattttactcttcttgttgtcttttgtaatcttcatagagtttagagtcactacggatttgcagacaagctac

SEQ ID NO: 58286 - DNA, 901 bp, Populus trichocarpa
  Intron number 3 from transcript POPTR_0002s15680.1 (locus POPTR_0002s15680) derived from phytozome v7.0 (chr-ID scaf fold_2; pos 11717079 to 11717979)
agctagcatatagattgaagaaatcaggggaaaaggtgagattttgcttgcttttgttgcaatgtgatagatgcctttacaaagagagagtattaggatattgaaatttgcattatctgtagagctgaattgaagataatattgatccaagtttctggcaactgatttgacatcccagggaaaaagtgctcattgtgataaggactcaaaaggtttatgaatatgttgttgaattttggctcttgacgatgctgttttaccaaataccaatactatctgttgattccactggtatggattaagatttagatttattttggagaatttgaaagttgtagccttttcttggcttgcaattaaagtgcatggtctatgtttcagaaggacttccttgttcctccacacaaattccgtaatgagttgtggatgtagagaaatgcatgctgtataatttttctttcaaaagacaacatttattcttccttttggctgtatcctactaccctgggttaaactggaacactgtggaagaaaatttagaactgccctttatttgaatgttgtgttatagatctgctggaaaagcattatatcaattgctcgaatatatataactatcacaggagcttagtaaattgatattgactcctagggatatgaataaagttattactttgcgaatgtagaggagggtgtaccggtgagtgcagtcagaggacattgttcagggatcttactgcagtacttgtgcacatgtgatttattttctttccattttttctcgtttggcttgaattgttgcttagtttatccttttgtcctttctgaatctcccaaaaagagagattgtctcgttcacaaaaggtctttccttgggcttttgctatcattccagatactg

SEQ ID NO: 58287 - DNA, 1003 bp, Populus trichocarpa
  Intron number 3 from transcript POPTR_0001s01820.1 (locus POPTR_0001s01820) derived from phytozome v7.0 (chr-ID scaf fold_1; pos 1319458 to 1320460 reverse strand)
agaagcctgccacaacgttacaaggtatttattaactgggttttcagctttgttatcagtttctgctgcagaggcacaagatgatttgtgattagctgtattgttcaagctacttgaatggatgttacaaggtcatatcgcttcccctgcaaataaggatagccattcatgaacctaaatctgttcgtgtatactgctacgtgcctctcttttttaatgaactcagtttgagggtagagttattgttgaaggtcagtagaagcacgcgtgcaaaaagcttggtggctttgttttataactccttaaaattgatttagtttcattctttatagtatggcactttgtggctgttatttattatggattttaagctgtatcataatatatctggagtaacttgaagcgcctacttgaagcttgcagcaaaaccatatgccaacattctagttgtgtgatgcaccagcaccaggaatgggggaagacactagattaagataaagtatatgacaaagtttccctggttttactatcaacatatggtttgcattaccataaaggaagttttattccaaaaaccctataactcattactccctttaagaaggatttctgactgctggaaaaagaaaagaaaaggatttttttttcttttcaaaaacatggaatgctatgatttgataaagtaatgatctcttagtgaccatcatgtcctaaaagggattgggcatcacatattatcagcaaacaatatgtggttggagcatgctctggtcaatgtcttgtagtttttcccttattttggagtgtctagcatctatacattatgttttgtaggttaagttcacgggtaacatggttaactttgaattctatctgatacttctaatgtgtgctgtaacagctacttttggcccatgcattcttaaactttatgaccccccctccttctcaccagtctttaccaattttgtttaggtggatatcaaggttgcaccaggaactc

SEQ ID NO: 58288 - DNA, 394 bp, Populus trichocarpa
  Intron number 2 from transcript POPTR_0010s22160.1 (locus POPTR_0010s22160) derived from phytozome v7.0 (chr-ID scaf fold_10; pos 19169246 to 19169639 reverse strand)
ttcaccgtgcgccaccttctcctctaacataccaggtgcgtgttttcttatatagcaaattggctgctcaattatcatttaggttcttctcatgtcacgtttcctttctggatacatgttcaatcactttaatttcgctaaataaacatggatttgatagttaattacgttttggtttgcgggtttttcttttgagggattttttgttcatgctttaatgcagagtgtaattcaaattgtggatttcttattgttttttgaattgcattaacgtcgccttcagctgttttttgtcagaaataactgaatttatgagaataaatgcatgaaactgaaatgagataagctttttatttgaaaaattatttcaacggtgatcttaatcatcacagtg

SEQ ID NO: 58289 - DNA, 736 bp, Populus trichocarpa
  Intron number 2 from transcript POPTR_0001s24800.1 (locus POPTR_0001s24800) derived from phytozome v7.0 (chr-ID scaf fold_1; pos 24049579 to 24050314 reverse strand)
aattggaattcgtcttgagcaagaatttgggttctgtatgtattttgcctctgttgttaattttgttcaaatcatatatctgtctgctttagccgacaagtttccacgaagattacaactttttccaaggggcatgtgtttgagaatgtgcttaagataatctcgaattaattctgtatccttttgcatttaattgtggaaacaaattgcttgttttgattctttcttgggggtgtagcggcacaggaaacatagagcatattggattttcacctgacttttttgacgagttcagaacataattgtgtgtactgtactaaatttgaatgctgttaaatatcttaatcttgtgctgtttcctggtttgagctgaaaacttttagaaggaaattgtggaaatcttggggttttatccatggaatgtcactgatgattctttgtgtttacagtgccaagaattcaaaatgaattatttattttaattgcttgatgactgcagtcatatgctaggaattctccatagcagtttaatggattctgatcacagatgttccataattgtgcgtgatgaatttatgaaggatgataatgtaaaaagaaataacaagcattgagaaagaatgcccgagctaacgaatggaattgcttcacttcgttcttaagttatactttcaccattcaaaattataatttattttttcaatcaccgttattacagttcgaattgggttggtct

SEQ ID NO: 58290 - DNA, 872 bp, Populus trichocarpa
  Intron number 1 from transcript POPTR_0001s08390.1 (locus POPTR_0001s08390) derived from phytozome v7.0 (chr-ID scaf fold_1; pos 6402064 to 6402935)
ggcctgttaagggagattatccactagcttccaaggttctttctttcttatttctctatctagtttgctttaattcatttttttgattgaaattatacatattcttttagcttgaagctgattgtaaaacgtagcctgaccagaatgctaaatttaattaaaccaacaggtgggtattatagtgatgatagtttgaaatattcttattctgagaaatcatgaatgatggtgtgtaaaatcttgattttttctgctgatattaattggaaatatttgtcaaagaaatataactgaatcttttgctacagaaataatagatagattgactctgatattggcctgaaaagaaaagcaatgctcaaaactatagatacagtataattttattttattttcaaaaaggaattcggaatgaatcaaatctctccaagtaggatgcgaacctacgaccagtcagttaacagccgaccgctctaccgctgagctactgaggaacaacggcagattagatctcatagagttctgctccgatgctttgtttacgcctatgtagttgaaatactaaggagattttgatttcaatcctcggcacagcaagactagcctacctagcattgcacacaaacttttcgattatttgccccaatggccctattttgcactagccttttgctcttccatcctgtacatcactttcgcacctccaccgctccccgtcttcttcagccacccataacctctccccctaatctaaccacctcttccttgtgtgctcccaagcccaatcttatccttgtatgttgaaaacttccctaatgacgtccaacctcgtcatttctgatatgttttttctccctttagctgtctggttg

SEQ ID NO: 58291 - DNA, 756 bp, Populus trichocarpa
  Intron number 2 from transcript POPTR_0001s02910.5 (locus POPTR_0001s02910) derived from phytozome v7.0 (chr-ID scaf fold_1; pos 2303999 to 2304754 reverse strand)
gactatattggttagagattttgtgactccctactttctcaaccatttgtttttcctagaatagcaatttcgattgcattgtttaactttcgtttcatcctacttttctagctaaaccagtccccatctttatcgaaaaaggcatctcgagtggtccatatctttacatagtctgtattgaaatatggtttcggggtttataaattataaaacggatactaattaattgtacagtttgaaatgacagtgactgatatctgtaaattgaaaccattttcttgcaatgatcagtgatcaaacgtgttaccgacaaactggtttctttttaaatgatggacaaaagcaagaagtcctctttacttgtatggagggacttcttcagacggtaaacagaagcagtaaaatttaattatgtttaggcattttcattgtcagtgtttcacaactttatagatcaattagtggaaattggagaatgttttatagtaattgttttttcaaactttggtcagtttgttattgcgaatttcaacatccttctaccaaaattttaatttggatcttttacaattcaaattacaactttaggatgatgttcataccacaatgtatgatattaaagctacatcattttttcttgctctactttaaatggctatcacttttgtgtcctgtaatgttacagtgatgcgttctctcgtgtttgaatctctctgcttaacctcaccatacctttttcagtttatacattctgca

SEQ ID NO: 58292 - DNA, 837 bp, Populus trichocarpa
  Intron number 1 from transcript POPTR_0001s02910.5 (locus POPTR_0001s02910) derived from phytozome v7.0 (chr-ID scaf fold_1; pos 2304954 to 2305790 reverse strand)
ctgtgagtaggagtactgtgcatgcacaatacaaaagcttatgtagagatcaaaatatatgatgttttattccattttgtgtttttggaatagctgaggtatgttgcattcactttgatgtttccttcatgtgatctactggggttttgtgatgactttgttgctactgtgtgcatgcatgtccggttttagtttatacatatataaagagcatcttgtttccctttaaagaattcccagttttggtttcaaactttgttccctttctctccttgttccttcctttctctgtctatgctttggattttcctgtgttcattgcagagatcttacatggttctttttgtttatgtgttgttttatagaactagcacaaaccaagaagatcttgatactttgatcaatctttctgtactgatagctgatactgtaaatggcatgtgctgtcttctatcagttcttttatccgtgtccttttctaatgatctatatagtggtgttaaataaatgatccagccatcgcaccatgactgatcaagattctttcttgattttttctctctttgaagccaggcattagagtctgaacattgttctgtattcagtggagacttgttatgtggggttttttaaatgttgaatttcttgggttttttttttaattctcttcaacttgagttttttgttgcttaagcaacaataatagtttcaattaatgggctttctttgttcttttttctcttacattaattactcagttctttgtttggcttaacagtatagtataccagatcaagtagcgatgaatttgatgtgaaattcatgttcatgtagatc

SEQ ID NO: 58293 - DNA, 978 bp, Populus trichocarpa
  Intron number 1 from transcript POPTR_0010s09190.1 (locus POPTR_0010s09190) derived from phytozome v7.0 (chr-ID scaf fold_10; pos 10055266 to 10056243 reverse strand)
tctggggctccgatcaccccggcatcgatttcactgtaagctgtttagtctttcatttcagttttttttttaattcatttattttgattttacttaggggttttcaatcttgctatgtttcgtatcagttgaaatattttggaaattgaattcattatcgatataatttggtggtattggttttctgctatttaattatcattttagatttggataatagaagtgagaagggcaccaaggagggttaatgatttaattaattaaaaagaacaaccttgtatggtctgacgaatctgtcaagggatgtaaaagcaggttccttttggattgatgattgtcaatcgttgttgctggacacgaatttctatataaccatatcatgaatgtaaaaaatagaaaaactcttgagattttagctagatcctaggaacttgttcgcaaagtgctccctctaaccaccggggtcccctccagcttccccccaccgtaaacgatcactaaaaaaagagtttttacgctttgctttcaaccggccctagagctcgatcacagagcgaaaggcctcttttagaatttaatagtagtgcaaaaaactcctgttctgtactagtttgccagacaaagcaattccatgtattaatgggaagtatctctcggaaaaccttagtcactgtgattatttgatcattagcaaaaagggagtccttcattatcctccaccatgtgaacttcattataataagctgaagtgctctgtttgatttcgcgtcagaagatggtgcaagcatcttctctgttttaaaatgttatgcaccttttgtttacgttcattgtggactaatttgtgaacaatcatgcaccttgttatttatggttttggaattattttaatattgttgctgttcattccaatttctttatcttgatttctgctgtcatgcaggcaacatctcctggagataatacggtgcacactgt

SEQ ID NO: 58294 - DNA, 826 bp, Populus trichocarpa
  Intron number 2 from transcript POPTR_0007s00730.1 (locus POPTR_0007s00730) derived from phytozome v7.0 (chr-ID scaf fold_7; pos 368607 to 369432)
aaagagcaggtatggattttggtgggcattgcaattctctataatttatttgttggtcaatgttatgcttgagatctttactgtgtctctagttttattgaaatgagtacagtgatgaaattagtttatgttagaacagacatgttatgctaatatgtatccacaaatattcacttataatagggatgcaaataaattttgttcactatgagcaatgctgaatttagcttgttatagatatataaaaacatatcgaagcttgatttgagacttgtttagcgaatatccaagttcaaaccagctttggtcagttgttttggccctcaaacatttttgaggatgggcttggattaaacttggtacctggcttgtttatagttgttaactactgattgatattggttgcattcatttgaaatttcaaatgaaaaataaaataaggatgcatgttactttaccaaaggatgcatgttttctttgcattttgtaagctttcatgtatcctagtcggatattgaaaaagtttactatagttctttcttcatataattacttagtttaataacaagggcaacctcaagctccttcccttaacaagctgaagctaggtttgagagctagattttaggtctgtttgagtttgaaatcaacaagctttaaccaaccaggatgaacacatcaatgcttggcttggttggactggttttcaccccaattccatatgcatatgcaactttgcttgtgttcagggtttttcttcttttgccccctttaaccacacatgttgctctcttgtcaacttaggaagcattgaaaaggaggctaa

SEQ ID NO: 58295 - DNA, 965 bp, Populus trichocarpa
  Intron number 1 from transcript POPTR_0007s00920.1 (locus POPTR_0007s00920) derived from phytozome v7.0 (chr-ID scaf fold_7; pos 491699 to 492663)
gcgtttgtcccgtttcatactattctttaaattcccatcttcaattttctgtattttattattatattgcctgttgccttgtaatttttgtgttaaagttttgttctttgctttgatttttgttgctttgcataatctttagtgtttattgaataatttttgccaatggattaacattactgtttctattgttgattttctattgtggatttgtgagcatgattattggcttattgatattcataagatgccgggaaagttggatgctttggggcaactaagaatatgagttttgtaagcatctaggttagtttatttaattgtatattctttttgggatttgagtggtagttaattgatttggcaaacactaattgtaagctccttcaactattttatcatcctggtgggtggttaagagtaaaagtgtgttttcgccattgtacttaggatggtgtataatgttccttgaagcttatcttgttgctgtatagccttgagctgctctgatgtgatgctagtgtgccatacaggttgctttttgcttgttgaattgtggttctgtttacttcttaaacaatttttgtttccttgtaaaatattttaacttgcattgttataagaccttttcaaggatgatccttagactttgatttcttagagataggccatcctaactgttgggaatatgtcattaacgcttatatgtcaaaaaaagaagaaaaagaactaggcatgacagtatgactaggcatttttttctgtatctgttgtgcatgcttgtttatagtattaagcgcaataattcttcttctatagttttttgggtgctgtaattgtgtgtgcgtgtaaagaaataaagagatacgggtgtgcagttaagtgtagtttttgtattttgaatgcgtcttctttactattttttattttcatggaacatttctgatgaggcgagtcgcaggtgg

SEQ ID NO: 58296 - DNA, 688 bp, Populus trichocarpa
  Intron number 1 from transcript POPTR_0001s39290.1 (locus POPTR_0001s39290) derived from phytozome v7.0 (chr-ID scaf fold_1; pos 38495916 to 38496603 reverse strand)
ctgggttcctccttgttgcctcttactttattattgtgagttggaaaagaaaaggactgaatctttacttgcatttaaattgatttatgttttgggttgtttttgttgggttttggtgattcgttttattgggtttttttttatggcttatgtaattgaattccttttgttttagtgattcaggcgttacattttatgccctttttgtcttttctagttatttgtataatatttatgcatgtttatgttgcttgagctttttttctgattctattcaatttagattttgtccatttaattttggttcattttttgtgtaagaattaattttccagtctgccattgtgttggatttttttagttattttgttctaaatttcggtcctttctgggtttaatttgtaattcctttcatttcttttaaatggttaaaaatattatgtgggattttgatttctcttttctctttctccaatcttatatattattttgtatttctaatgtgcaagatctgaatagtaaaagttagagattacttttagcaaccgattgtttacaaaacaaaatgcctgatttagagggtggtttatcagtaattgcaattttttttttttgttatttaagaccttgttcttaataggattcagttaatttatgctgttagggaactgcagctacaaaagtgaaa

SEQ ID NO: 58297 - DNA, 987 bp, Populus trichocarpa
  Intron number 1 from transcript POPTR_0001s25920.1 (locus POPTR_0001s25920) derived from phytozome v7.0 (chr-ID scaf fold_1; pos 24997437 to 24998423)
caggtttgtctccttcttatgctgactgaatgagcactgatacttttattctctatttatgtcaccgatcgctctctataggacataagaccgaacaagacacactccgatgaactacttcactcgacagaacttatttccaaagttatttaagttgcaaaactgttgttccaacagacagtacaaatgtgcatctaacaaagcaggtctcaatccaacatcaggatcttgtgatgtgcttaagcatgcaagaaaagtagtttatggctttcctgttcttgtgttggctcaaagcattttcttcatcaaaagggaataggaatacaagtccatgacaaaaaaagaagaaaaaaacccacctatcattgttgaggtaaatcgagtcccatatcgaaatcgctagtgctttgactgatcactggcgacaatttggagtattctgagtaagtttcaagaacgcttagaaatatttggtcattttgctttaagatctagctcctctatgtaacagggtagagttcaagctgcataataatagcgcccagcttgcttgaaaactagtttttctgtagtgtagtatacgtggaaaagtcgtatcgctataattcaagtctaggtaacttcttccaagaagagaacaatgattatctagccacaacactgataaaaaacaaaccagaagtgtatgcgactgcagatccaacaacactatcatcaaactgtctttaagctaaattaggtgtttgaatttcttagcagctccagttatattgcatgctttcttctgataacattccattttcatgtttgaccaactgactcaagcaggaagagaatttcgaactgtttgagctccatttcaattgcttgttggggcagaatgtcaattttctgtgttgtggccttgtgggtttccttgaccctttcctctttatatccttgtcagggcaatgaggcaatgacaagcacatttggattatgcaggga

SEQ ID NO: 58298 - DNA, 336 bp, Populus trichocarpa
  Intron number 1 from transcript POPTR_0001s28330.1 (locus POPTR_0001s28330) derived from phytozome v7.0 (chr-ID scaf fold_1; pos 27128471 to 27128806)
gctgcttcctcaggtactgactcgtgctttagtttttcacaaatttttgaggtcgtgtttatacttttgcaactgagaattgtaattgaccaagtttggaatggatttatgaacttaatatttagaccttgcctttctaataacatacaggcgcaaaacaaatacgagaaatcaagtattaactcaaacaaaaattgacaattcacctattaacaagcataaaatttgtaactgagaaacaggctatcgagtttataggtggatatgtatccccgtaacagagataattaattaattaattagtcttatgttctttgcctttgttgtcgttgaggt

SEQ ID NO: 58299 - DNA, 1064 bp, Populus trichocarpa
  Intron number 4 from transcript POPTR_0010s00790.1 (locus POPTR_0010s00790) derived from phytozome v7.0 (chr-ID scaf fold_10; pos 495619 to 496682)
ctaaagctgacgttgccttcaagcttgtcttggaggttagatagactattctcttcttatttattgatacgggtagaacctggcatgtatagttacatggattactactatttcaatgaagatttattgcttaaattggtttatgtaatcaatcagatgagatagatattagataattcttatggattaatgatggagatagtcatttgaatcaaattgaatttaagaaatatagaatatggatagatgacacaaagtcatttgcattttgggaccatctgtaggcactgactgaacttggttatttaatttcaaaccaagatttagataactaccattagattctactgttagagtagataaactcgcaccagtaatcacatcaaagctagcagcccgtaaaataaatgctcatgaggatgaaatgcaatatttgatgactagtaatggttctgtactatgagagttgccctgtgtgacatagccataaagccatggcagagtttgggtgacagaaaggggccctggctggtttcccctgtaaaaagaaaaattcaccaaactttgttttcttcttgttagtttttccatcttttgatagttctctcctttttcttccacctttaatacaccaagctttgttacttcactttgcttcatttctttctgggatagctttccatcagtcttgttccgttttccagaatccatggctgccttgaatgttcttgccgcaatggcagcaatggcatttgaatatccctgattgcggccatgacattcgtggaagtcataaactggccgattggaggaatatggggcaagattgatgaactttttcaaaaaaaatcacaacacccttcatcattcttttagtaattaagaatcaacataaaatttcatggaacagttctgttttttttttttttttttaaaataaatttcaatgtttgtgtgtctctctgtatatatgtatgcctgtatgttcctttcagcatcctcagaaaaagaatacgctttttcttgcaggcttattcatatctctcagataatataaagagaag

SEQ ID NO: 58300 - DNA, 767 bp, Populus trichocarpa
  Intron number 1 from transcript POPTR_0002s13860.1 (locus POPTR_0002s13860) derived from phytozome v7.0 (chr-ID scaf fold_2; pos 10269071 to 10269837 reverse strand)
tcagctgtctgtctgtctctcaacaggatttcgcggtacaagattcttattctttctttgcttttttttttttttttaaaacggtgcgttttatttatccattttgtttctttctgtttgttctctctgtttctgtttaaatgttgttaggggtttattccttttgctttgttaaattcctttttgggatttcgagatgtctcactgcttcagaattttggattctattgctgcgtggaattgaaggattttcaggtaaggagtgttgtgacgttgctgctactggtggtaatgggaataatcgcaaagcaagttcaccgaatttcccatttctttattctagttgattgtgaatgaagttatagattttccgtttcttatttttattatcgagtttttagttgcttgatctagtccgattttgcgattttctcttgttttttttgttcagctgcttgtacaaaaacggttagtgattgtgtatctattttggtttttgacgtttttggccagaaaattcagttatgcatgaatgtattgttcaaatatctaacatttaggaaatcaaatgaatggaagagatttagtgaccccgaattgaagattagctactagattgggtcgcgggtgaagaattactatgagaagaaaattttgattgatgatatctgtatttttactttttttttttttattattattatgcttaagtgcctaatcgactctttgatctccatttgcaggtctattggctgaaggatccttcc

SEQ ID NO: 58301 - DNA, 919 bp, Populus trichocarpa
  Intron number 2 from transcript POPTR_0010s16780.1 (locus POPTR_0010s16780) derived from phytozome v7.0 (chr-ID scaf fold_10; pos 15646753 to 15647671)
gcggaaaaccgatttttgttctattaaaaagagtgagaagatgatgataatactgaaattctagtctttattatcttcagagttcaggcttggttcattttggctgattttgctctttgaatataaataaatccatcagcctagggatcagcactcaacaaatttccatgttctctgactcgctgcaatagcaatccgtagtgcatcatgttaggttgagcaatttgtatgtttaagtcatcaacagggccttttcctatatgcctctacgaagataaatctgtttcggttgaatttgataacaccaccaaggatttttccaaacaaatctccatgcaattattgagcatatgcttgaaaggaaaaacacagtcttggaatgcaacactttttctatgcccctaaccagatatgcttggcgtttggtccatgctattatgagagaaaatttatgttggcatcagttcgattcaataacttggttgaagtctctgttttctctctgagatgtgagaatttatttagaaagaaagcaaaccatgatgctatgctgcgtacctaaggcttagtattaaaattctataaggataatgtcattttatttcaactgtctgcctggcaagagaaccctcaacaaagaagggaactttttattttgcttgaacgttcaaaacatacacattaccttataatggattaccctcgaagagcatactgattaccctcgaagagcatactgattaccctcgaagagcatatctgattgttttaaaaatacctttttttccctttgattcctttgggtcttgttactgggattccttccacagacatattattactgtcagggataacttctaatgattttatactgctattgtcagggagagaagctcttaaacaatctcgggggcatctt

SEQ ID NO: 58302 - DNA, 757 bp, Populus trichocarpa
  Intron number 1 from transcript POPTR_0010s06140.2 (locus POPTR_0010s06140) derived from phytozome v7.0 (chr-ID scaf fold_10; pos 7569611 to 7570367)
tgctcgctcttgcagctggttacacaacatccaaggttggtttcttagaatttcttggtcatttttaatcatgcaaatttcattagaggctgggtttagaatgaaaatattgggttttgagttttggtagttatttttattttattgaatttagggtttggttttgcattttgatttgggactttaaagtagggcttgaaatgataaacgggtgaaacatatcataggttgctcgtgagttcattgtaatatgtattttagtagttttattggaacgttcaagctacctaattgaatgtgaataagtttacttgtttgtattttccctgtcttgatttttgggggatgacttatttgacacatgcagcaatctatggtaaatgtgtgtgtgttcttgaattaatcatttaacaaaaatacgcaagtcaagaaaagccattgacatgtatacctgtcttgaaattaatgatttcttgcagctaaatttgaaaacataaacattaaacataaactagctggtgttctaatttatgttgcttagggttaagtgctttgaattggtggcacgatgtgttctttgagagagatgattctgatttttttgaggaaaaaaagaagaatgtaatactaatatgtttcttttgctctcctttttagtatttaactgcaattgaagttttcattttaatcttgctcttaagttgtatgattatgatccttttcctttgagattgacctacagttcttttagtgtgag

SEQ ID NO: 58303 - DNA, 795 bp, Populus trichocarpa
  Intron number 1 from transcript POPTR_0002s14820.1 (locus POPTR_0002s14820) derived from phytozome v7.0 (chr-ID scaf fold_2; pos 10986498 to 10987292 reverse strand)
tcctcgcactggtcagtgaaattatagcaagattaagctgaaaacagtttttctttcggctttcagttttcagtttgttattttgatgatgtatttatgtgatcagatcattagaagttccattgtttatccgttttatgctacaagatagagtatgaaaggcttgtttatccgttttatgctacgagatagagtatgaaaggctcttataattctcttccccagaaagtcgtttgttgtgaaggcattttacgttacattatccaaatccttctcttcctatcttttcatcccaaatatatataaaaaatggttttctttaagtgaatttgaaagtgctaaatgattattgacatttcttgggagttgctatattggcaatagcattgaagacgtatttggcataagaggtttgatggtttgtggtttgattgattaattatttttccttttaaaattggatcatcaagagcttattaaaatttaaattttgttgttatttatctcttacaagaaaaggtttagaacttcatttgccgtacttaagaaaataattgtaagaatcttgtcttcttgtgccccttgtttcattggtagaaattgtagtgttctctgagtaattatgttaatgctcttgttccagcagtaacattcaatcggcttttctgaattcatttactgtttagctgagttgtgcagttcatggacctttttcttttatgcttggttttgatgaccaccaaaccatgaatccattttttgttttccagtgtttaggaggatagaccataaaaa

SEQ ID NO: 58304 - DNA, 753 bp, Populus trichocarpa
  Intron number 1 from transcript POPTR_0010s22660.1 (locus POPTR_0010s22660) derived from phytozome v7.0 (chr-ID scaf fold_10; pos 19483662 to 19484414)
atttctgggttttaattataacatcagcgcaagaggtatggcatcttaaagtttcttgctttctttcggttttttagatccttgtttttgacgttttttctggcattgtttggtgttttgctttatttcattataattgagatttgttgattccagagggttaatggtttgctaaagttcgataatttagaggtttaaagaaaaaaaactttaatggggttttctggaagtcaaatgggtttcatttttttccgggtaaagacagttcgataaatcttaaactctgtagctcttgtaataaaaagctttgtgtagtgatctgttgagatattagatgatgtccggttttatttagttgtattctttttttaagagttatgttcagtttttataattgttggtatataattgaaactgtacctgtgtgttaatgatgcttgtctctttgttaaagtttagattttgatagctagaacttctgatttgatgaattgtttgtgtttactgggcatatgatctcacgctttgcaatcaaaatcttgtgtgtgtttcttcagtttctgagattggttttacaatcttgatcggtggttggtatgattcagagttgtggtcaatttttattcttaacgttgttttgagagtttgatttcatgtttggaagtttatcatttcatgttcataagatgatgaaggcatttatctttatgctctttcctctttttgtgcaggtaatcttgatttctgataaag

SEQ ID NO: 58305 - DNA, 294 bp, Populus trichocarpa
  Intron number 2 from transcript POPTR_0010s22660.1 (locus POPTR_0010s22660) derived from phytozome v7.0 (chr-ID scaf fold_10; pos 19484547 to 19484840)
cctgtaagttttctatttttgctcagttttgcttaaatataagcttcttcatctcaattaggtattggttcaggtgttgcctcatttattataccttgtgcatttcctgagacccggaaaactgtattgttgctcggagcttgcctggcctagtatgaaaccaatagattctgaacctgggcttgcatctcacctgttacttaatccgatgttttgtccattgcacctttgaaattggttaattggaatggaacatgcgactaaaattttgatcaatcttttcgctaggtgcgc

SEQ ID NO: 58306 - DNA, 836 bp, Populus trichocarpa
  Intron number 1 from transcript POPTR_0001s01370.1 (locus POPTR_0001s01370) derived from phytozome v7.0 (chr-ID scaf fold_1; pos 1000470 to 1001305 reverse strand)
ccggcagcaaccacgagacgcatcaacttcttctggtacaaatttttctcctttttttcaccaaaatcccacaagaattttacctcagattcgcttctttatgcaattatatttctggctattatgtgtcatgttatagaattatgtcattgctgattttattttatttttggcattaatttgttgtgctctaagttactgtattttttgtaatcagaatttgagattgcgatgtggttaataatgagaggtggcgaggtttggtttttgagattacatggttgatcatggtgattagttcgtttatttatctttttgggaaattctgattgatttgtgtatcaagtgatgctctttatgaatggtgggttttgagttttgagtttgtcgtgagaatccatgaaacttttatcaagaaaggattgggctgttgttaattttagctaagttatggttttattgttcgcaagatttatgatcaaagtagtaataggttaatttaattccatgtgatttaatgaagatagaaactttgcaatattcataaatacagagtgttagccttttctgttacaattgggtgtgagatatttgtaattttccatcttcttcttttttgcctgtcatggtagagcggatgttgttcattttacactaagtttttcgattatttgctgccatggatgggtagaataccattttttaatttctgatttcatggagtactatggattttaattattttgactgtgattggaaatttcatttatttttcaccttttccgttaagttctcaagtggggtttttttctatattgtttccagaaaaggaagca

SEQ ID NO: 58307 - DNA, 487 bp, Populus trichocarpa
  Intron number 1 from transcript POPTR_0001s35590.1 (locus POPTR_0001s35590) derived from phytozome v7.0 (chr-ID scaf fold_1; pos 33935649 to 33936135 reverse strand)
gaggaggcgccgctggtttaaaggttaattgtttttttaaccaaattttggtagcgtaattatatgtcccttttcttttctttgatcaccatttagttagttagtaattgttgaaacatggagatgaattatagattgttgcccccatttctttttgtttctaaattaaataataataatggtggtggtggtggtggaggaggagaaggattagatgtaatgtgagttttgctttaatttttgataaaatagttaaataataaaggtgtttgaaagtgtgaaattgttatttttaaaatatttcttttaaaaatatgttaaaataattttttttaatatcaaattattaaaataataaaatataaaacaatatatatatatatattaaatcaatttgaaccgcaatccgaaacacgcacgaaaaagaggcattgatgcacctactgtgagttactgctattatataaatagttttgcttgttgtagc

SEQ ID NO: 58308 - DNA, 847 bp, Populus trichocarpa
  Intron number 3 from transcript POPTR_0001s09800.1 (locus POPTR_0001s09800) derived from phytozome v7.0 (chr-ID scaf fold_1; pos 7536899 to 7537745 reverse strand)
atcactgtcaggtttggcaccaagaacaatgttttggctttatatcttgcaactgttttagtgtgaaacttgatagcttatctaagttcttgcttgttgtttcattagattttctgatcacatagttcaaattataaaatttttagtctttcttttgataaagatcacagcagcaagaaagggaataaatggtaccataataattattaaaacttggggatgctatccctcaacttattgcagtatgaagtgcttggctttgttgcaaagaaattcaatgagaacaattacaaatttagaatcttaaagcagccatcataacttatagtctttataaattaggtttccacttccctttctggtgcttctttgcacaaagataaatgagtgcttgcgttgactaagctaatgtatgttaatgagtttcttttgattctgcctgttgcttagtgtatggaaggataaaatagctaatgaactgaaaaacattgttacatactctttagtctagagtaattaataagaattccagcttatgtagatgttataggcaaatatatagtacttttgatttctgaagttcagagaaaataaagcaccgtcttcatctaaagtcttttactgtgacaatactaaaatttgaagagtcatttgtcaagatgttgaatttgtaccggaacagtacctatgtcaaaaactggaatttttttatcttattgaattttagggtaaatatgttatgacatgctcaaataacattgactttgacattgcatgtgggattgatagattctcaatgaaaccttttgcagtacttcttgtatcagctattacgaggattgaaata

SEQ ID NO: 58309 - DNA, 792 bp, Populus trichocarpa
  Intron number 1 from transcript POPTR_0001s09800.1 (locus POPTR_0001s09800) derived from phytozome v7.0 (chr-ID scaf fold_1; pos 7538206 to 7538997 reverse strand)
gcattgtttggtaagctttttctatttctccgttttttgatttttattctttttttttattgtatatttgatattttgattggttcttttagcttgtataggaaatgggttttggagggtttttagttttcttttgttaatgggttcttttggttgtggtttctatggctaaagaagctttcttttattcaatctgtgcatgttgttgcctaatttgattataaattaggggtaaatttgctgaatatttgtgtagtcttctatctcatgcacacagctgttgcaggcgtgttatcgacctcactttgtttactagactattgatttttaaggctagcatttctgttttccaaaaagatcaagactttccatggaggaaggagaggaaaatagtacccacagagggacttctgaatagcacctaatgtataattttgtgctttataaaatggtctagagagtatctgttgcaattttctgatgttagtttcagtttgtttttctgggatcatgatgaattgtgggtaagtttcgcgttttataccatgtaggagttgccagttccagttatacttgttggtcaatatgcatttttcatatccttaatgctttgtttccgtatgtgctatatttttcctagttggaacataaggtaaatataccttcttgatcctcctccgcttgttggaaagttttcttcatgtccataaatcagactagtttattgagtggtgggaagagtggttcttaatgtacatgctcttttcagtgctgctgtgaattcggaaacac

SEQ ID NO: 58310 - DNA, 382 bp, Populus trichocarpa
  Intron number 2 from transcript POPTR_0010s24810.1 (locus POPTR_0010s24810) derived from phytozome v7.0 (chr-ID scaf fold_10; pos 20820491 to 20820872 reverse strand)
atataatacctcatattctcaacttgtgagtactttcttttctttactttgcttttgattctatctgtttttaatgctacttcggttagataaagccatgaatcaattgtttttgtttgaaatcactgccattaaatttaaccaaagaagtggactgagtctcagtctgcgaaagctgtcctgaggatacctctacctgtaaaactaaaaaggaaaaacaatctgtgatgtttaaatggaaatataatgaaagggaaattcctgctttccatgatgatgggtgttcagatgatcgtgaaattctgttcttggtcatcaagactgactctttattgatcacttcaagatgttcatcgaggttctttaattgattgtttcagat

SEQ ID NO: 58311 - DNA, 970 bp, Populus trichocarpa
  Intron number 2 from transcript POPTR_0002s09930.1 (locus POPTR_0002s09930) derived from phytozome v7.0 (chr-ID scaf fold_2; pos 7120492 to 7121461)
aagaaagaaggaaaaggaaagttcacttcttccaggtgtgtaaaaaacatggcccgatttgccattttttttcttctctctgtattgtttataagaaaatgaaaaactctggctcgcctgttactttggtctgcaatgtaaaaaacacagtcaagtgttttcaccagccaagaacagttttagctcaaacctcaccacccatcatgttttatgtgaggtagactcagcggacactataatgtgcttggatttatcaattgatgcatgcattagtatgtagatgaggtctcttgcgtttctgtctcgcgagtaaggttattttcctttccaagcagtttctttttgagggtttatctggatggatctgtgaaggtgctttaaatgttcatttttgtcttttagattttttagtgtcttttgccagattttcttgttaagagtagattttaagtaatttgttacgattaacccaaaatttggtccttctttgttattatcaaggtagcttttgcttctaatttcttcatttggttagtccattcttttctcttgctgttttggcgatttatttttttcctctttcctcttctcttacttttgccttgcatgcactctctattgcgctcttacaattctgtaattgtcaatttcttgttcatctttactggtatctcgtataaagattacatctttcattatctctagcgaaaagtagatagtaagtagagatcctcaacttcttctcatagtttttatcgattctttgaattttgttcactttccaagcaatttctcttaaaattcctggagacgaatccttttccattaaaattcttgaatgagaccaaacgtcattttcatgcttaaataggttgcctaattgttgattttttttcccacttctcatatttctttttctgtagagacaaatttatctaactactggtttaattgtatggagtcaggttac

SEQ ID NO: 58312 - DNA, 505 bp, Populus trichocarpa
  Intron number 1 from transcript POPTR_0007s07040.1 (locus POPTR_0007s07040) derived from phytozome v7.0 (chr-ID scaf fold_7; pos 5368584 to 5369088)
ttatcttacaggtatcatcactttctaccaaccggctgttttttctttctttttttgccttgaattgttatagtgaatcaagaagctgttttgttagagtatcttgaaaaaattatttagaagagtcaaattagtaatatagttttttgaataatataaatatagtattttttttcatatatacatttcaatggaaaaaaatcatttaaacaaatatttgtattttaatatatttgatattgatataattatttattaataataattaactaatacaactacaatcaaaatttttttacatcaaaatatattaaacaaattttgagctctattcaatttagaaacgccaatttgggtccccagtataactatcttaaagttaaaaatgagcgataaaagccaaaaaaattgtccttttattttagcttttcccctgaagatgttcttattcttgaattcttgattttcaggctttaggtagctgttcaaatttccaatcttttct

SEQ ID NO: 58313 - DNA, 844 bp, Populus trichocarpa
  Intron number 1 from transcript POPTR_0001s38490.1 (locus POPTR_0001s38490) derived from phytozome v7.0 (chr-ID scaf fold_1; pos 37644027 to 37644870)
ttgtacccctcgtgacatgagttagatacaacagctccactctgtgtttctttcacaacaacattattggtagctcgttttgtcatcatggaatgcatattctttgtatactctaaattcttttcgtgtttttactcaccactcgaatacattgtgttgaggattcaacgagttctattttataatgtttgtgattcaattttgataatatattgtgattgatttagtgtctttgttatttcattagtagtttctttatcatcatcgtctttgttgtcactactttaaaggatttgaataatagtataccattcttcataattcttaaattatcaatattggcgacatttgtttttgagaaagtaaagaaaaaataaaggatgctttgactgtatttccaacgtttactaactgaaaagaaaagaaaaaagttttaagttttacatattaagtgtgacaaatttaattttcagaattaggaggagaaatgagttggatgaaatttaaagtcttgaaccatttatcaaaagttcaaggagcataatttcgagtttagccctccaaggagaacgacctagattcttcactaaatttttatgatccatttttcaagcatttccctctcagcttttttattttgcttaaattcctggtttgaattttttttttttatcttcaatagcaatattttagttaaactatcactacctcattcttccatactatataattggttttttttttatatctcttgattaatcattaatggtaaatagaggcttttggcttactagaatggtatagtgtaggttggtgactttgctattgacaatcgagcaggcat

SEQ ID NO: 58314 - DNA, 850 bp, Populus trichocarpa
  Intron number 1 from transcript POPTR_0002s26090.1 (locus POPTR_0002s26090) derived from phytozome v7.0 (chr-ID scaf fold_2; pos 23064806 to 23065655 reverse strand)
tgctatctctcaaggaacagattgagaaagacaaggtttttccttacaccacttttacttttctatatttaacttggattcgcaatttttgttatgtctaattcaagcttaataatttcgtaatggattctagaaatcttgatgttttctcttagttcctcttatcctttctttggttgctgtatatgtggaacatttgccgtgataaatctcgatttttgggtaacatgcttctgatttttgtaattgagacctgataaaatgagatttgctacagattagtccattatttgagtgttccagtgtgagagctggtcagccgacattgcactgagcaggttgctttgcctgtttcttttctcccttgttaaattcaacaccaagcaaagggaccattattcttttaagtttgcatgttaagggcccaacttttctctactgttagtgttcttagatggggttgtgacagttttttattgtatgggaagcaatttgggtatattacagttaatttatctcacttctgtttcccacaaattttttaattgatgcctcctttgtgtttcgaatagtggctaatcggtgatagttaacaaggttataatgaaatatcaagtgaaattaatgtaaagttggcagccgcaacaatctcgaatcaaatgttttatagcctgtttattgttgtttacattttcttttgttcttcattcgacaaaataaagtacaacatgggatcattttaaccatgtgatgccatgacatgaaagtaaaaatccaactcactggcatggcaatggctgctggatacatatgaacataattttaaaagccagttgtgctttgcaggaag

SEQ ID NO: 58315 - DNA, 663 bp, Populus trichocarpa
  Intron number 1 from transcript POPTR_0010s06260.1 (locus POPTR_0010s06260) derived from phytozome v7.0 (chr-ID scaf fold_10; pos 7681400 to 7682062 reverse strand)
ctttgtgagttaaatttatgtttttttttcgacttctcttttgatgatgagatgggttgtttttgtttatttttatttcttcttgggattttaagaatcacttgttctgttatgatcaacaagaacacaggttgttttgttattaatttgaggaaaagaggataggaattttgttgtagttggtctgtatcttcttgctttttatgatcaattttaatctgtgctatgctatttttagattttttgagcttgtagaacgatgttttcaagtgggagttaatgtatcagttgagttttatattagttaaacatcaaaaaagattggtatatttctgtacagtacacacaaagaatggattttggtgttggtattgcaatgtctgcctagtcaattgcagctaaagtgagcaactttgactaaaatttcataaaattccaagtgctaataagcagagatagttgggaattgggattctttctcttataatgtcttctctgttttcagaaaaaaatgagttgaaacttttaaagtttcgttcttcttttggtgaccagtattatgcttgggccaaatagtgtgactcaatttaactaattttattacatgatgtgaattatggtgtattagggctgctgcaattccaaaggacaagggtggagcac

SEQ ID NO: 58316 - DNA, 608 bp, Populus trichocarpa
  Intron number 2 from transcript POPTR_0002s25880.2 (locus POPTR_0002s25880) derived from phytozome v7.0 (chr-ID scaf fold_2; pos 22896880 to 22897487 reverse strand)
ctggtacctcttctcgttttttggtgatttgaattttcatggtcttttgttttttttgatggacatgagctgttcctataaaaagcccacacttgttttttttttgtttgtagaacctgatttgatttgggtagatgtgcgtttagctttccatgaagggttttctttactgtttatatttaatagttggtgccttagtgggttcactacttcacttgtattactctactgggtggctgcttttttttttttttttttagatttttcatctttttttgctttcaatggatgcatacgctggcttttttttgtctatttttttcgattttattcaggggttgtcgggcacgaccttttttgaattgtttagtgtttctgtttttttatagcagaaatgttgtgtatgttgaatggaagtaaacacatgtattattgtgaatttgttgttgagggtaaatgttttttgtaggatgaccagtgttgaaaatgagcacgggaataattatttattatgcttggaaatttttcttaccaattatggtgctgtctttcctcctattgtaattattcattgaattgtttttgctttatttctctccagcaaattc

SEQ ID NO: 58317 - DNA, 445 bp, Populus trichocarpa
  Intron number 2 from transcript POPTR_0001s26650.1 (locus POPTR_0001s26650) derived from phytozome v7.0 (chr-ID scaf fold_1; pos 25640124 to 25640568 reverse strand)
cggtccacatcagtttgggattgggtgttttccaggtacatcatctctaaaacgactagaggaatattttctcactgcatctcgaggctttttggcagcacagttttgttcgtggaggctgcgagtccaacatggaagttctaaagattatttgtggctaaaatatgattggagaagtcgctgtactgcttgtttcttattttttttaggttgtgtattgaatttcatctgctcgatttctatgtgtgcagtccttcttcattggtgggggaacctaaccaaaatccattcttgctggtttgaactagaaacccttaatttcaactgccttcaatataagcaaacagatcaaagttgcctatcaaacatccactactagcctcctgctctttgagtgatttctttgtttctatagtctgaaattgtgcattgcaggtaacaacag

SEQ ID NO: 58318 - DNA, 804 bp, Populus trichocarpa
  Intron number 2 from transcript POPTR_0007s03330.2 (locus POPTR_0007s03330) derived from phytozome v7.0 (chr-ID scaf fold_7; pos 1935388 to 1936191)
caaacccagttgagattgtgtggggctaatttgaagtaagttggtgttactttctttggttttgtaaaaaggtgctccttttgaatttattttatttccttattgttgtttaatttctgttgctaaatcaacaattagctcgagttttaattttgattgttgctagttgctattttaatttattcagctgaattgatttgtaatcaatctttatgtgatcacaatttgaacttagaatatctgggatcaaacactagccacagcaggctttatagggatcttcaaaatggccagttaaagttgcaggtggatgcatgtggttgtttttataaaaagtattattcttccagtacttagaaaaaaaaaatataaaactcaatatagtatagtgcaacgtaattagccatttaatttttttttttttgagttaaaaacagaaattggcatgtcattttttttttactctgttatcccttagttaaaataccgaggattttttttttcccgtgaatgatttatctagtgatgttgaggatgttactacctggtgggtgattttctgatgatttgttttagtctttttaatcatctattttatttataggagagtgtatagtttatgcaaaaaactcctaccagcaacctttggaattgagcttaagagacaaagataagcatgtctttgtttcgatacaagttatctgccatgtacttaattaggtggtggcatatttgcttattcttctacaatggtttgcaatgttttcaggacaaattcagatttgaaattacaggcttccaggg

SEQ ID NO: 58319 - DNA, 374 bp, Populus trichocarpa
  Intron number 1 from transcript POPTR_0002s06100.2 (locus POPTR_0002s06100) derived from phytozome v7.0 (chr-ID scaf fold_2; pos 4088063 to 4088436)
cgaatttttcccatttttagatttcaaaagtaaaggtcttcttctccttttttttttccttgccccatccctcactctccttgaaaaaatccattttctgtaactttcaagaaataataataattttgtaagaaaattctccccgatttcctgctattctttcaaactaataaaaaattatctgatttattttaagaatctcaaaattttagagtaattaacattcaattcaaccctttctcggcaaccaaacagtgctttcatctctatttctgtatgaatgtgtagttaaaattgcaacagtatataacttttcctctctgattttgttttttatttaattgttgatatttgtgttattttagggttaagca

SEQ ID NO: 58320 - DNA, 426 bp, Populus trichocarpa
  Intron number 1 from transcript POPTR_0007s10190.1 (locus POPTR_0007s10190) derived from phytozome v7.0 (chr-ID scaf fold_7; pos 9938375 to 9938800 reverse strand)
aaggtgagttattttggaaaagggagtttgatcgtcataaattggttctatccacggctgatgacctctcattgtattataatgcttatatatataaggaaccctgtatgtattcttacaacactggaatgcgatagttgaataaaatattacttggacgttggacacgatgtgtaaacatgtttaagatggatacgatgacatttcaaagtctttgctttgagcttgaaaacctatatgagttaaaagcatccagaagaatgtgtgtttttgaaaaagttgtaatgtttctttatataagcattgggtgcttccaatagagaagtttaggagagatttcaacattcatgagaaactattatcaggtattttactgaagtttttaaatcagtttgtttgctcactatatatttaaaaaaacctgaa

SEQ ID NO: 58321 - DNA, 820 bp, Populus trichocarpa
  Intron number 1 from transcript POPTR_0002s08460.1 (locus POPTR_0002s08460) derived from phytozome v7.0 (chr-ID scaf fold_2; pos 5902850 to 5903669)
cctcagctagactgctgcggtcgtatgactggcatctatttttttccatttcctgatcatataacacataataaacaatcgaagaatgcaataaatcagacacagaaacaagcattagataacaaatttgaaattctacgtaggtgaaccacgtacaattagagtgctggtaaattttcaaatctactttgatgaaccacaaacaatctacgtagggtcatcgttcccatcaggagttgtctaaaaaagtgcattttctcaagcgcagcaaagaattgcccacatatagctcatctctagataacccttccatgcaagcaacattcaaaatcaatcaacaagccttccaattaaaccctagaagagcagggcataaaaataaaggagtattacacacaccatcaccatcattagtattagtattagcataagatgaagaaggagcatccactggagtcgtgccacagctacaatccgatttgtgtttttgctggtccagtgaagaaagtttaacattttgattaaaaattaattataatttcagagaaaagggctcatttgttaactccattgattctttaaggactcaattgagatttactatatatttggaaggctaattggagggctatccaaaaacattagaaacatggactatactccaaaaaaaaaaaatatatatatatatatatatatatatatcttaacgcaaactgaaacaaaggccgaacgaaatatttatttcacaagagaattaaaattgctcgtgcttgataggtggttgtcttcttcatgtccacttgcttatttagtgccttct

SEQ ID NO: 58322 - DNA, 613 bp, Populus trichocarpa
  Intron number 1 from transcript POPTR_0010s25940.3 (locus POPTR_0010s25940) derived from phytozome v7.0 (chr-ID scaf fold_10; pos 21368248 to 21368860 reverse strand)
ctttgctaaatatcaggtaagacccatctttgcattctctctctttttttttcaaaattatatgtcttctattgttttacgaatgatttttgtgtaaagattgaaatctttttgtcttgataatgtaaagattgatcatttggtgttgaattattactgaatttgttcatttctgtgagtgtgcaaaatttgagctaacttcaacctttttctgcaatctgcaatccattggtctaatgaaaactacatgatgttttttgcgtgtctaatctttagctcactgtctgctatatagcacttttttgcagaatgaaaaattatgagcaattaattgtctagaatatatgtttagagatttgattaaaattttgttgtatatatgcacttttaatgtgtgttgatggaaagtttggatagggttcttttttagtataagattattttcttgctgtgtataccatgagatttggatatttgatgttgatgactgtcttccttgtcatctttgacttggcatttatcgcatgatgttgtgttatgtaaccttatccggtttttaatttgcttgcaggctgcgtagtttctgctgagatgttctgtgcatgttgcaggt

SEQ ID NO: 58323 - DNA, 1042 bp, Populus trichocarpa
  Intron number 2 from transcript POPTR_0001s23300.1 (locus POPTR_0001s23300) derived from phytozome v7.0 (chr-ID scaf fold_1; pos 22575460 to 22576501)
ctccttgtgattctagcgcctagctaggtatatgtaattaactgcatttgatttctttaatgaattattacgctgtcaactctggaaattttagattatttaggtcatgatttgcagtcggcttgattcactttatgatgctgttgttggaacatagatctggtttattttttttattttttccctttcctgtgatacgataaaggaatgcttaagcagccatgcaagaagtcaatggaactaaaacttgtaagatgccagtagaatttcatctagaagataggaaataagagaattttgtggacctcatagctgtatatcaagtgatgcaccttgtttttggagttagaacaacatgttgggatgagtttttggttggatgtcttttgcaaaatcaactcagattctgttttattcaactgggtttcttgtggcaggattactttaacgtctatttaaaatgaaagcctacagagaggaaatattagtgaagaaagcattttacttttatttgtttttttccccaattccttgaatgacaagagtaaaacttaacccactcgttaagtttacgagcgtatgtttggtttgcaagcttacatatgcggcggtggtttttcgactgcaactctagggagtggtgttcttcaactgcatcttgtctaattgaatttgaaatagtgattcgtcgtaaacctttataatataaattggcatctaagcaaaaaataaatagtgattcattcaccaaatccttctctggagaggcacaagaccgtttagttgtgaaatgttttgcatatattataaccctactcattatttcttattctagtttatatcaattttcttatcctggcatcttgtagtctacattttaccctttaagttacgtcattgtttcagaaaaccatcgatggtgtaaagtagctaaaatattgttggttcaatggcatcgacgtcaagcatgatgatgccagcttttatttgagtactgacgaagcttttttgattcaggtgactgaagactgtatagtttgct

SEQ ID NO: 58324 - DNA, 619 bp, Populus trichocarpa
  Intron number 2 from transcript POPTR_0001s38040.1 (locus POPTR_0001s38040) derived from phytozome v7.0 (chr-ID scaf fold_1; pos 37081015 to 37081633)
cgatcatactctcaaaggtacgaactctttttcttgtttctcttttattttgttcttttgggctgccaagaaaatctgagacaagttacgaaaagaaaattcgattctcttgaatgttgatttcatattagaaccctaacaagaaattcagaagggattaatattaacaagaaatccaaaacaaagttttctttttcttcttttggaaggtgacaagcttttgggtgattctcatagtagtatttttgtagctaaaatatgagttccatataatatcagttgttgtgcttttcatgtggcatcaattgggttagtgttttttttccttttttgttttattttaaaccttgtttcaattagcctcaacaatttgtatttgctctgtaacaatatcatgtgaagatacttggtcccttttcttgagtgttataatttatggaatcagtttgaaattatattggctattgggataacgattggtttgtggttgacttcattggatgcctttgatgtcataggtttttttaaaaatattgcttttggtgatggattattcattttgagatcatgtttaatgcgaacagctaaattttctggcacttcctctgttacaattaaa

SEQ ID NO: 58325 - DNA, 521 bp, Populus trichocarpa
  Intron number 2 from transcript POPTR_0007s13450.1 (locus POPTR_0007s13450) derived from phytozome v7.0 (chr-ID scaf fold_7; pos 13532461 to 13532981)
ctattttaaacattgctcgcttagaggtaatcacctactctattgggtatctgttctttattttatttttttaatatttctttgttgtttgtctcgcttctggattgattttgcgtgttgaaaagtgtgtttgggggatattatttgttggggtagaagaaaaattgctgcttgattataaagttgttggcgtttagtcctctttggttatttcgaaagagtgtgggatcagctatggaaatgattaatagtgtatatgtatgataatgatgttgttttgagaaatcaaatggggtgtaaaatatggagaagctaaattgttaagaattaaaattcaattttgaaggaacccattttaatttagaaggtctttatgcgagtttgataaataaaagtaatagattgtgattaagtttggggagcaaatttttaaagtttctttctgttcgatgccttattgtgtgatcgaatttttgctaacataatgatgcctttgtgttggcagggattaaaagggcttt

SEQ ID NO: 58326 - DNA, 420 bp, Populus trichocarpa
  Intron number 3 from transcript POPTR_0007s13450.1 (locus POPTR_0007s13450) derived from phytozome v7.0 (chr-ID scaf fold_7; pos 13533008 to 13533427)
ggctcaactgtttcctggggtttgtattttttcttgtaagtctcgagtttgatagcttttgattgtgtgctagtatgtaatttgtccttgctttcaccaaccgataccaggtagtgctttggatggtttttaacatgccttttctaacattgaaaggattctttcatatcgattaatattgtttgctttcttcgtggtttttaatttttagattttaggacttccataaaaagacttcttagtgatacttatctgcttcacagacggtgcattatcggtaaaccctaaagggttcttccatcatgatgcatttattcttgttatgttttaatttttgtctatcatatagatgacttgaaggtgttttttctctttctatttgtagttatagtagagccaaacaaaggtattctaaaaaca

SEQ ID NO: 58327 - DNA, 307 bp, Populus trichocarpa
  Intron number 2 from transcript POPTR_0001s13950.1 (locus POPTR_0001s13950) derived from phytozome v7.0 (chr-ID scaf fold_1; pos 10992935 to 10993241 reverse strand)
gaagtatttcaacgacaagtctattcctgctttaggtaatcttctttatttgttttctaattttgcttcaaaatatgtatgagtcggtgaatttctatggcattatgagatcacaaagcagagatgaagatcaagaaattgatgcctatggatgctgagtctcgtagactgattgattggatggagaaaggcatgttgtttttacatctttgaattatttgctgttttttggttttactgatttgtttctttatcttgtaaatatttttcttgactctatggcccttctcctgtttgataggtgtct

SEQ ID NO: 58328 - DNA, 570 bp, Populus trichocarpa
  Intron number 1 from transcript POPTR_0001s13950.1 (locus POPTR_0001s13950) derived from phytozome v7.0 (chr-ID scaf fold_1; pos 10993269 to 10993838 reverse strand)
aagctgagatcacccagcaggactcgcttcttctggtatacatatctcaacgactcacaatccaattttcactttttttgagctcttaataagttgtttttataattttttttaattatttgtagtagagtgtacttgtttgaggttttattctactaaatttcgtgtgatttagccttttggaagcacattttacactagtttttttttcttcattttcttccattaaatactgtgtttgaagtttctgtttgtataaaatttgaaaaatctcttttcagatttattctacgtaatttttctgctggatcaactagaccaggttacaaaacgctttatgtttctcaaattcgaatcgtagatgaaactcggagctcaattttggttttaaaccgtaaatcatcatgaaatctcacaattatctgatcattaaccgcgagatcgctcttatacctttatgttatttggtttctgttattgaaaagttgatctagtgttatttgatggtttttcttctttatttgttgtggaacagacaaggaacctgctccgtattgctatattcaacat

SEQ ID NO: 58329 - DNA, 536 bp, Populus trichocarpa
  Intron number 1 from transcript POPTR_0001s28170.1 (locus POPTR_0001s28170) derived from phytozome v7.0 (chr-ID scaf fold_1; pos 26932896 to 26933431)
gcggccgcctctctctcgatcaaatcttaaggtcttgttcattaattttttttttcaaagtgaaatcgaatgtgtttttagtttgattgttgtttgttatctttaatttaatttagttggctattgggaggacatatttgtgttttaagcttagagaacatgatgtttgcctttctaattgccaatcactagttggaaattactttcctctgtaaggttacagatagcatcaagatcttgtggatggcctgcattttattaggctagagaggtggatttagttttggctttatcagcctgaggttaccactttaactgcaacataaaaggactgtaaaggaaaactaagcataagttactattttgtttaaaacatgctcatattgggaggatatttcttgaaattttttgacaccagggggcctattttcttgtccattctaaaactctaacttgattttctactgatctcatcaggcgtagaaaattagtttttgataagcgtgttatgttttttttttaatgttattgtaggt

SEQ ID NO: 58330 - DNA, 959 bp, Populus trichocarpa
  Intron number 1 from transcript POPTR_0001s07400.1 (locus POPTR_0001s07400) derived from phytozome v7.0 (chr-ID scaf fold_1; pos 5570432 to 5571390 reverse strand)
tcagagctaagtttcctcaggccagacttggtcaggtatgcatgcccccttcatttttcttacatcatatctacagtttttttttaaaaaattgttcgattatctctatcattttccccattcttttttgatcaactgaaaactacaatccttcgaaaggggggcatctttttatctggttttaaacgtatattctcctaatttaatgcttggtaaaatctgttcttcaataatttagcgtttactatatgacaggaaatattttttttcttctgggatgacagaaagtacgttattatactgctaatatactcctccaaattagtggtctaagaataacatcaagggggaaaatcaacgaaaacctatttgcgaaaaggggttggaaaccaataaaaagaaatctataagacatgatcatagattttttttattgaagtaggtccaccatctcctatctcagatatggagccatggactccacgtctccacccggtatctgagctggacaaagccgacgggccggctctgttatagcatacagggaccgaatttaatactcttgaatcgacattaattagtctctctttcttcattaaagttaataaatgtgtgcaatttagatagaccttgtaggttagttgtgtcctactcagtgattacaagtattaaaacctgaaaaataggttatattcttagcctttcaaggatgtgtttatttttacgtttcagtttgtgttttacggtattaaattgattttttttaatgattttaatatgataatataaaaattaaaaaaatatattttaatatgttctgatgcacttgtcttttggatcattcccatgtcttgcatgcatgaattgtgctttaatgcatccaagattttaatgttaaaatagaaaacatgcatatcagagcaaggctaatcaatgatttaatttgatgtaatagggat

SEQ ID NO: 58331 - DNA, 437 bp, Populus trichocarpa
  Intron number 1 from transcript POPTR_0010s23260.1 (locus POPTR_0010s23260) derived from phytozome v7.0 (chr-ID scaf fold_10; pos 19869001 to 19869437 reverse strand)
gcacagcagcttgtggaatctgttatcattgtttggtgtgtggtgttagtttgttttttgggttttgtttgaattggtgagatttttctttagtcagtcccgtttctgcatctgggtcaatcttatattagtgaaatagttagagaaaaggaccaagtttagattttttttagtcttctagattgtcattaaggtgtcttaattcttaatgcttttgttccaactggtaagattttggtttcctttggtagatttcagaatcaagttgatttggttaaagagaaactttggcgaatgggaatgcatgctttagatctttgagggttttgtgctgttttttagttgaaatttaagaaacaatccttgctcatctatgataatttactgcatgacaatgggtttatatggtcttattaaaggttatttgtacttgtagg

SEQ ID NO: 58332 - DNA, 816 bp, Populus trichocarpa
  Intron number 1 from transcript POPTR_0001s40480.1 (locus POPTR_0001s40480) derived from phytozome v7.0 (chr-ID scaf fold_1; pos 39926004 to 39926819 reverse strand)
tagtgcatactcttgctgcttctccaaggtctgttttgattttctctctacctttcttcactcttagtttcttattgcttgctaggatgtaaccacagtggtcttttatcctttaccctgttcttgaggttctgcttctgagcacacaacatgttatttttcttctcgtgctgctacaagttattacttcttatccttttcttttagctgttcaaagttagaggtttttgtttatcttgcgtcttttgagtgtttcaaaacttcaagacagaaaaaggagctgcaaatgtttcttttttacagcgtgcttgattaaacaaagcgttaatagtttcttggtttatactttacaccttattatagttatagttacttcggagataaattaaagatatgcatgttctttttctcttttatatatatatatatataccatacgtggaatcccacttgaagtttgatacactttgctggtttcttttacctggacttctacaagtatttctttttggttcatactttatcaacaattttacttttgttccttttcttttagtttattcagttctttcggtgtgtctgttctttttgtattaattgtaattttagatgcgctggtgaagattctttcagcatgagtatagtgtaatgataatacactattagttgagagttgtgttgggaacccatcatgtgtttgtgtttttttccttgcactgaattctttacatggcctcttgtgtttattgattggtagtaatttgttaattcttaaatacagattgtttaagtgggaggatttaacagttgatttta

SEQ ID NO: 58333 - DNA, 1056 bp, Populus trichocarpa
  Intron number 1 from transcript POPTR_0001s13890.1 (locus POPTR_0001s13890) derived from phytozome v7.0 (chr-ID scaf fold_1; pos 10951805 to 10952860 reverse strand)
gagatcccttcttctgtttctttctcatctgaagtgtaagtagtgcttgtttattcgttcttgcaagtttcaaattgaaaagaaaaaaaacaaagaaaatctgtagcattatttcctttgttatgttattggaattccacagttataggcttattgctgagagacaaagggttttcatgtttgctgtgatagcatatttttgtaccttcatgagtcttcctttaatatgcaaatggaaactcaaagcttgtggctttaagttcactaaagagcttaaagacgagaaatatgtggtgggatttctaaaaatgaggaaacacattttttcccaatacttaaagtggacttttcactgaaagaaagaagaaaagaaaagaaaaggatcccctttttttttttttgacagatgggattccttttcttttgcttctacctttcttatttggttgttatagcaatagtagtacattccacttagtcttataagatacaatgttaagtttgttttgtttttggtttttattctttggtctataaataatgggttaaaagtggtgaattagtggatgtgttgggggttgggggaggtaagattcttttgaacacattaggtgagtagggtctagtccaggggcctacttactgtgattagcccaagcaacttcaatgtgaattattgcttacttttgttgatggtaaaaagatgaaaccagctccattttaatacaagttagatatactgagacaattgagatataaagagagagaggagagagcatttattaggtgtgctgggtggagacagtttgttaggtaacacactgagaagtcatggttgtgtctaggagaggtaaatatgtacaaaagtagagaaatttgattgatttttgtagttactgtgcttgaaatctgtgaattgattgtggatgtttgtgtttggagattgattgatttctgcaagaaactttactgggttataaagagacctttgtttagtagatgcttcttttacttggtttagtttaggtttgcctggtattttgtctgagttctctg

SEQ ID NO: 58334 - DNA, 267 bp, Populus trichocarpa
  Intron number 2 from transcript POPTR_0001s15090.1 (locus POPTR_0001s15090) derived from phytozome v7.0 (chr-ID scaf fold_1; pos 11935574 to 11935840 reverse strand)
tactaatccaacactctctccttctcaccttcaaggtcactacattttttttaattctaagtagaaaatgtatgatagttgttatcaatttgatgaacttttgttatcaattattttttttgaattatatcattttacaaaagaaagcacgaattgagccataaatttttattttattctaatcagaaagcagtcaattgaagatgaaatacaagcttaatttgtttcttctttttacagacttgccaggtttcacacgcagtgttt

SEQ ID NO: 58335 - DNA, 971 bp, Populus trichocarpa
  Intron number 2 from transcript POPTR_0010s11440.1 (locus POPTR_0010s11440) derived from phytozome v7.0 (chr-ID scaf fold_10; pos 11715794 to 11716764)
tggctgttgggagggaggcagctattgaagttcaggtttgtctctacaaatattttcaggcgatcataaatgtggatcaacttgacattttcccataaattagtcagaggcatagatggactaagttacaagaatttaaacatgtctaaacttttcctgcttccccttttattatcctgataggcaagtgtgcttggacctagtgggatctaacctgctattgtagtcctgtgagtgaaaactgattaaatctcattaccatccatgatgtgatcaactgtttccgttttgtattttacatataacactaactagtacaaacgttttcctctccagcttcttcttagttttcagtttccatggtagttaactgcaaaatgctatgcacactgctttctgttcactcgacccttgtttaattatatgcctcaaactggaattttctgttgtgaagatgccagaatgaagcagaacatttcatgtttcttaccattcagcttttatttatgagaagttcaagtaaagctagacttactaaataaggcggaacaagcatgggttgtgtcaaaattatgtcaatttttaagtataataaaaaggcattcatgtatttaagtgatccttttctttgttctgaaaaaatgtacatttgctatattagtcttcaatctgcagctccaaggttctaggtttaacacatgtagacatgcataaactatagactcaattgtactttaatgcttgcgatctctcccctacttaattgctcgtgtccacgacgctttcacctgtatggtttgatctccatggcccatctgatcttcctggcttcttaatttatactatatgctgctgttatactcttcgaactttttttgcctctcgagaattaaataaatctcatggtgacagaattctgatgatgattttgatcgaatggtgacaacctttatcacattatttttgccagg

SEQ ID NO: 58336 - DNA, 474 bp, Populus trichocarpa
  Intron number 1 from transcript POPTR_0001s23970.1 (locus POPTR_0001s23970) derived from phytozome v7.0 (chr-ID scaf fold_1; pos 23355166 to 23355639 reverse strand)
aaactcagtacggtaacggtaacggtaacgcaaaggcaagctttctctcccttgtgcttctgattctttgatttactattaattaagcttttttattatttttttttaaaagaaagaaaagtagatgggtttgtcaagttatgatttagaaacatacatttgtattttgtgggatggtttgacatcaagtcttgttttcttttgggaattttattaatttagggcaaaatcaagtagcagtagttattccatgaattaactttgttgagaaaaatggagtaaaagtctacttttgtcttgaattttattaatttatatttcgttttcaattcgggaattacgtgaggtttaaggaatgattaacttaattaattgagtttgtgatatcctggaaattatgagaagaattcaaggttttgattatgtgtgactgtgatctttatgcatgtacaccttgttctatgttgtagaaac

SEQ ID NO: 58337 - DNA, 820 bp, Populus trichocarpa
  Intron number 1 from transcript POPTR_0001s28430.2 (locus POPTR_0001s28430) derived from phytozome v7.0 (chr-ID scaf fold_1; pos 27219800 to 27220619 reverse strand)
agagaagcaacagagtctcaaatcgattccagcaggtacgcgtcttcctactcatcaatgttcttacatttaatttttggtttatctaaagcttcttttggtgggttttccgtatcactcttgatatttcagtatttggtgtgctcggtttcgttaatttataagctggtttggtacttattggttttaattacaagcttggagtttttgggtttccataggagcaacttgtcataataaaagaggatcttgatgtcatcttaagcttctttcttgaaaagctgagagttccaatcttcatgtcctgaatcaaatattagcttgttcaatttaattagaatgatagtttagttaggtttgaacctgaaaactggcactagcttcactagcctgatagctcctgcaacggaaaagcttggatctgcttttgtaatttaaggtcatagaatgtaatctgttgcttctggttgtagctgatgctaaaaagttagcatgactgcttgagtatataggtatggggtctattgttttaggatgtccatttgaaattttattcattttgcttttttatttttgatttagtttgcattttatatgccgatatgagttgtggaaattctccggttaatctcagaacaacgaaagaggatgttttgtttgatgctgtcagttttctccctgtgaatatatagtttatttttgttatgaatatgagggtgattttcgtttttaccaaatgcaatataccccatgctttgacgtccatttacattgtggtagtcacaggtacacgcagtaactctaagatcttgaagagatc

SEQ ID NO: 58338 - DNA, 507 bp, Populus trichocarpa
  Intron number 1 from transcript POPTR_0010s23280.1 (locus POPTR_0010s23280) derived from phytozome v7.0 (chr-ID scaf fold_10; pos 19885201 to 19885707 reverse strand)
taaagaagcagcaaaaactttctttctctacgtacgtaagactttttactctaagaaccctctttgtttggttccttagaaagtcgaggaatcttgataacgtctttttcttcgcagtttgcgaatcatcctttgtgttcgttctctttttttcactgtaaagtatgttaaacgttttgttgcctagacaggaaaatagaacctcttacatagaaaggaaactccattacttttgcctttcgttttctgtatttcctatacaacgaaagatgactagaaggcggagtagactcccttttgaatatttcaaacgcatattgccttgaaaattatattaatttccaaacttgcttacattctcaaatttagattttctttcggatggtcattctgcgtttgctttttcatgcgtttatttctgatttatgtttccaagattttgttaaccttaacagtttttatttccttttaggttattcagtaaaaaaaaaaaaacttgtcagaaca

SEQ ID NO: 58339 - DNA, 875 bp, Populus trichocarpa
  Intron number 1 from transcript POPTR_0001s23490.1 (locus POPTR_0001s23490) derived from phytozome v7.0 (chr-ID scaf fold_1; pos 22898053 to 22898927)
acagtcgcaagatctactagtaaaacagggaatagaaaaacaggggggataagctgagatagttatttatgctatcattttatccttaaattagtggtccaatggaaattgttcattgacattgaagtttggctgtttcttcttcttataaaaccacaagatgaaagctatactctctcatgatatgatttgtgatccagcaattttgcttgattgatttagtcataactcaattttgagtttccaaaaaaaataaaattaaataataatttaagaattgagttaagacaacacaaattgaaagtttgatgactaataaagatgcaattataaagttggaagtcaatttgaccaataattagaagaattgataagtttaaagacttacttaaactttgaattagcttgattaatgcaaccaagggtttaatcgaagaaatatcaaagttcagggtcaattgggttacaattacaagaaattaaatttcaggaaccaaaatgaataggcattgatactataggggggttaatttatttttctagtggtaattttgaaagaattaaaagtttgaggagtcaattaaggactgaattgattaaatttgagatcaaggactattttgtaaatgactcagaaatccaggaacccaattgcattaatccaggagcgaaattaaaaaaaagattttcagttagaaaacaaacgccgtcgtttctaaaccaattattcatcctcttctttctcatcctaggggagaccggctcaaccaaaactgcactaaatctgatccaaaatgtggatcaaatttatcttctaccaaacctgctagtggcctcagtttctctcgcccacacggtgcttctccgatgtaagg

SEQ ID NO: 58340 - DNA, 232 bp, Populus trichocarpa
  Intron number 1 from transcript POPTR_0010s09420.2 (locus POPTR_0010s09420) derived from phytozome v7.0 (chr-ID scaf fold_10; pos 10255373 to 10255604 reverse strand)
ggtctcaactttgggagtttctggcattctaaaaggtttatttttcttctcttttatggttgattgaatttgtttcgtaattatttttagatagcaattttttaatagcttgtagagtgtgatttcttggtttttgaagaatattggttttttttcttttgagttgtttatgttgttgttcttttttatttctctaaatgtttagcagataaattggatccatcccggccac

SEQ ID NO: 58341 - DNA, 657 bp, Populus trichocarpa
  Intron number 2 from transcript POPTR_0007s14790.1 (locus POPTR_0007s14790) derived from phytozome v7.0 (chr-ID scaf fold_7; pos 14529928 to 14530584 reverse strand)
ctcagctactctcaactccccaagtatgttgcttttactatgattattagctgtgtcaactgctactcgagtaatgtttattgagaattacggagtttagttattttgaacttctagcataatccttccgtcactgtggaggttgttttgttcatctgattttctattttcgtaatcatcttccttcctaatccgtgcctcagttcgttatgtacgtattgcgaagatggtgaacatttttgtgagaaggtttgatgattttgatttttggtctctgatacaatagaaaacgcaagggattgttgttcggtttgtgtcacaggagtatgcttagtgaatgttttggaaatgatgatagcaagcaatttgttttttctatgagggttgaggctgttttcttgccttgcatttaaccattgctctgcagaaacttggaaggcaattaggggtgcttgggccaatcttgactgctatatttttatatatgtcaataagtgcatggtttaattttggcagttattggttcttgtcattagttaatttcaattccatgtgatattaagatattatctacctaaattgtgtcgtgggcaattaacttgattacctgcatcactaaatgttcatgtactcttgcagatagtggaagcgagagca

SEQ ID NO: 58342 - DNA, 261 bp, Populus trichocarpa
  Intron number 1 from transcript POPTR_0001s19120.2 (locus POPTR_0001s19120) derived from phytozome v7.0 (chr-ID scaf fold_1; pos 16534527 to 16534787)
tgagtgctggttaagaattccgctaacttacgaaggtatgtagcctagtacgtagtccccttctcttatcttttggttatcttttggttaatagtgtatttgttttctttgctcatattcacacggttttgaataatgttttttctgttttgcagcttgttaagccttgctgtttcacgttcctgtgaagttttctagttttcttgcttgtttcttgtgtcaaaagtcaaagaacaaggtggtttttatctggtgaaaatt

SEQ ID NO: 58343 - DNA, 717 bp, Populus trichocarpa
  Intron number 2 from transcript POPTR_0001s19120.2 (locus POPTR_0001s19120) derived from phytozome v7.0 (chr-ID scaf fold_1; pos 16535260 to 16535976)
gccaatacagctgtgcccaacagctctcagaaaaggtactccagctttttaaccttctctgtctcagtttgtttttttttttttttgtagcttttttgacagaggataatcattcacatgtttacttggctagatgtgtggtccttgtcattgtttctttcaatttctgccagtatggtcttactttcacttcttaaatttgattgatgagctagtgcaagtgataatttctttttcatagtttaaaattttaccaccagttcactgctgatacatgttgcctgttagcttagtttgtctatcgaaatccttaactcttatccttccaatttggtccaagttctgcttttcttgttttttcttttctttacatggatgccttttaatgaagttttgatcttatctcgttcactattatttattattttgcactttcttgaatgaaaactctttcttccttttccttttaaagttcacagtaagtggggctccttaagaatcttcaatctgctcaatatttttaggttctttttcttagtcttttcttatattttagactctgaagtactttgattgtaactcttctaaaatatactatcaaataattatgtttttttaaaaaaaatatgagttgcatacttatttcttgtctacttcactctttaatgctccttcaaaacagaactgctcctggtccagttgttggttggcctccaa

SEQ ID NO: 58344 - DNA, 888 bp, Populus trichocarpa
  Intron number 2 from transcript POPTR_0002s24850.1 (locus POPTR_0002s24850) derived from phytozome v7.0 (chr-ID scaf fold_2; pos 22085824 to 22086711)
tcgcgttgccaaggcgcttcgagaaggaaccaaaggttattatcccaacaaattctaattttgtttccacacctgctattaatttaatcattaactctcatctgaattaaacacacttggcgaggaaatattcatgcttgcattccagccctaaacaatagttgccactacatggttgtattttgcttttggcgtgtaagaacttgtctttggttggttccttggctctcttttttaaccctgttagcctgtgtgatgactgatttatttttctctcatggagtttaaggattctcttttgaggcattctttgatgaggttcagtttgagttacctaagttgtcttgttcatatatcattccattttaatgtcgcatttattgtcctttttttcttggtttaagcaaaaacaaatgtgtatgacctctaaattctatgattggtctcaagttctcacaaccaactccacagtagcaccctggaactaggcaggctctggtggtaggattgatcgcggtctgaagtcgatcctttgttcataaattgataataagtaacaaatacacggatgcatcgacacacttcctcaataagaaaatggttttgttctatgcgcggcttagatgcactgacttataagctctaaatggctccttgtgtagtgtaaaatatcatctgaaattgtgtgatgattctgatgcagaatgaagagaaagaaatgagtttttggttcaaaaaattgtatgtggatgtattatttattgtgattgcttcttaaataggattaatttggagatggaagtttgactttgctaagtactcattgtggcaagttctttatcgcatttttcaggctataaacaaaaggcaaaggacattgttcaaagt

SEQ ID NO: 58345 - DNA, 546 bp, Populus trichocarpa
  Intron number 1 from transcript POPTR_0007s14450.2 (locus POPTR_0007s14450) derived from phytozome v7.0 (chr-ID scaf fold_7; pos 14216547 to 14217092)
gcgctgtttcgatctttttctcgtgaaaatttaaggtaattcctgttatttttcttgtcgatttcagttttttttcttaatgtatttttaagaccggtctctttttttgcatggatttggctcctatttcatcgattctcgcgttcttttttcaattgtgtttcactgtaataattttttgtgtgaaattaataattaaaaaaaccagttaaagatgtgtatagatctgatctatcttccatgttttgtggttgaatatttcgtaagtatgtcaaatctggtggttttggaggtaattatcttatgcgtgttaaatcttgtttgttttcggagctgattgaagtgatctggtttttgtgaattttgattgttgaattttgattctatgaaattcttgaccttttaaaagctctaagacaatgtaacgagtagccacgccttggttatgagagaattttggcttcttattgagcccgtatttttttctctcccaatttttgtgtattttcagcaacaattggttttgattagagcaactttccgttg

SEQ ID NO: 58346 - DNA, 753 bp, Populus trichocarpa
  Intron number 1 from transcript POPTR_0007s05420.1 (locus POPTR_0007s05420) derived from phytozome v7.0 (chr-ID scaf fold_7; pos 3510672 to 3511424 reverse strand)
gtttcaaggtctttctttttttctttttattgcttcaagatttatgaatctttttttaagttagttataattgtagcatcatatatttgcatcgaattaagtggtaatgcaattgaagattgtttcgtgattgaattatattttgtaagcaagagttactaatagaggtcaatttttgttcactaactttgttaaaaccggttatcagaaggattttaaatagagcactgatttgatttatgcgtgtctttttgtgtctgtgttctgcttaattgtacaagcagaaaactactgcagtttttcttttatactaaataaacttctctgatgattgtctgttttggaatcatgtatgtcaaattgcagcaagaaaacaaaattgagaacatttcgggctccgaatctttattaagagttctctatgataattgctcaacttaatctttattaagagctctctatgataattgctcaactttcttagaacatatagttttcttaatggaatttatttatggtttctctaaaagttttaaaagcctttagttatgtgatttgaactgtgtgcaaacgggttgttaatttaactttcaagtcccttacactgtgtatctcatgtactggctaatgatccatgtatatgtattaatttattagctcttttttgttctaattaatgaattaatatttcttttgcatcatatttgttctgaaacaggactcttgtagcacctcttgagaggctgaagctgg

SEQ ID NO: 58347 - DNA, 805 bp, Populus trichocarpa
  Intron number 2 from transcript POPTR_0001s33100.1 (locus POPTR_0001s33100) derived from phytozome v7.0 (chr-ID scaf fold_1; pos 31329389 to 31330193 reverse strand)
acgtaagtgaatatatgttgattttctaacacatgaatataagcataattgtacaaacattcattcattgtcaccttcttctataaatatttcaaggtactacaaaaaatttgttgccacctacctaattaaagtcattcaccaaaagttttttttttccacacaaaaaacggataagaagtttaaagaaaaataaaatacttttaataaaaacagttgactgaggttaaaaacagtttacctgtaaatggactcataatgcaagctcttttatttgtttttatattttaaaagtatttttaaaaaaaactgaaatttttttatttttttgttttaaagtaatacttttttgtgttttcagattattttgaagtgtagtgttaatgttaaaaataatttaaaaaaaaataaaattattttaatatattttcaagtaagaatttttaaacatggttaagaatagctaaaattgacagattctatcgatttacgtcctgcattcgtgcaaatttgcttcacgagaaaagattctcccgacaatataacatgtagaatgctataaaatgcagataatagtgtatataccgcaaagcagccggtctctcttcttttggtttggtattaaactttatatactccttttcttttaaattttcttggtttaatttttgctaaaaaaatgtttgattacattctatccaccaccatattgtagaaacaacgttctttaaaatagctaaacacctctagctttaagtcgtcccacgagttgatgcgaggatgaaatttgtatccattgcaggtg

SEQ ID NO: 58348 - DNA, 787 bp, Populus trichocarpa
  Intron number 1 from transcript POPTR_0010s24490.1 (locus POPTR_0010s24490) derived from phytozome v7.0 (chr-ID scaf fold_10; pos 20687687 to 20688473)
gcggtacgtcgcgattgcgtttcgctacctcattacctgcgtgtagtttaattatcttgtttattgcacatttcgtgtttgaatttcttgtttttctttcaagaaccctaattctggtttgcttgaattggggtttttttgttacaagagtttgttttatacctaccagtgattgaacgaatgtgaatttgattaatttgatgttattagctgaaatttgaaatttggttttaatttgattgaatcacagtgtttggcgtgtttaattggtgattagaggcttaattatgagtgtcattgattttcgagctactagcgtacttaattactctagaatattgggtttttgtggcattgattttcttgttaagtttaaaactgtgaaagtttgttcctttttctaactggggtttagcgtgtaagtggtaaaatggtgaagaattttacgcactgaacatgtttagcttcagctctacttgaatttttttttttttttgtaaatttaatttaattttaattttaattttgggaattacaaaataagcgattggtggttttttgttaatgtctttgttatcttttctttgaaatttaattttaatgtgctattgaatgaagaaactttttaaacgggctttgactaattgaagttcattggtattatagattcgacagctggtttataattttggtggtaatttgtgattttgtcaagccattcttgatttttcattgttgaatgtctgctttagagatagttgctggacttggtgaaataagcagctga

SEQ ID NO: 58349 - DNA, 866 bp, Populus trichocarpa
  Intron number 3 from transcript POPTR_0010s24490.1 (locus POPTR_0010s24490) derived from phytozome v7.0 (chr-ID scaf fold_10; pos 20689424 to 20690289)
ataagcgagttcgctcttctgtagcagaatcaagggtttgtgcacaaatacctcctttagatttgttctttatacctgtccaaaaaatattgcatctttcatgttgcagttatgatcttgtgaatgttacattattctgtttataatccaaaaatgcttgtatcagcatgcttataagaaggggtgttctcatctttgtacctgcttaaagatatattcctatatattgaattccctgagttctttctaagctataaagtgatgtgttattagtatgcgagaaaaatgaggcagtcacatattcatttactctaaggggtgtttagagccaaggaaccagttcagtcttgttctgaatttagtttggactatatttatttgatttcttttgtcatgaagattttttctgcatcagaatttctatttctgctgtacatgcatgatgtgggggtttacaataatggagaataatggttagacacaacagcaaggagaaagtagcagtagaggttcttgaagattttaaattcctataaataaccaaatagcccttcacaatatacatctgcccctggttgaaaactcatgataagcagattgttgaattgttatggaggtccccatttcctcttaagattaacatggtagcgtgctttaatttgcttcatctttctgtaaatttctacaatgttcaatgggcatatttactctcttgagacattaaagttctaatactgccttgattgctgttgtttcccattgttatgtgaatatctgttgtttagtaaaggcaccgatattacctcatcaactgtattaattaagtatgcttgttttcctctttcctctctgaaatctctaggctg

SEQ ID NO: 58350 - DNA, 433 bp, Populus trichocarpa
  Intron number 2 from transcript POPTR_0010s26020.1 (locus POPTR_0010s26020) derived from phytozome v7.0 (chr-ID scaf fold_10; pos 21406307 to 21406739)
aggtattattgttattatggactagtgtgtttgtttctgttttggttttcacttaatctttaatggtcattaccttttgatgacatgtatgaaagatgccaatacagagtttgactatgcttcaagcattgcatataagtaagcaattttatagttggtgtactaataggagtgctctcaaaattatttgagaataataactacttaattggaaaaaaaaatggagtatttgtgattgtttcagatgtctagtatccaaattgtatattatggtttgctgggttctaggtagaacaggggagaagagttgtgtgtttcttctttgaaaatgctctttgatttcttttccaaccaacattttctaatctttcctttttggaatggtgattgcatgcttttgtgccttttgctgtttactgaattacaggtcttg

SEQ ID NO: 58351 - DNA, 1053 bp, Populus trichocarpa
  Intron number 1 from transcript POPTR_0010s18110.1 (locus POPTR_0010s18110) derived from phytozome v7.0 (chr-ID scaf fold_10; pos 16464137 to 16465189 reverse strand)
tggtgctccaagaaggaattcaaagcgacccaaatgtgattctcttctttacttctcgtttttttttttttttctattttgggcaaattcatgtctgccctcttgtgatcatggtgttagttgtgtttttaaattgcaaagttttgaaccctgtcctaattttcttgcttagtttgtttcagagactcaggtatttgaatgtttttgggatcactagtgggttttataggcatccatgtggaggtttatgcatatttttgatgggttcttgttattttgattcgctgttggttttgttgcatgagagtggtcgtgtgagctcttttttgattattttgtttcatattaagaatctaattttctttatattgatcatttagtctttccgtttttggaatagccttacctggtttttttaattcctcatcaagatatatttggaaattccccttttgaaagagaaatacggctattaaactttgttagcaataaaatgaactaaattgggtttgataaacaagatattaatgaaactcagctataacatgccatgagataattggacatttttccattacacgaataagaattttagtaattttggctgtattatcattacatgcatctaagtctaagcatgtatgctcatgtgatctacagtaagattgaaaacagaatgttttccagtgttcagaatagttgcctgactgcgtaattgttatcctgcaaagcaagatagatggatgaaaacattttaaatttatagggatgtattgtatttgccagagcaaaaaatctgcgatttttggtcattttattaaaatgcacttgtaatcttattgtagtgtagctgttaaaaaaaacaagaaaagtaaaaatagagagagcacagctgagcagcttctttatctgatgtttcaatcacagctcacaaattgtttttcactacacgagcacatatgggtaatgggtgtacatgtgatttttatggaactaaaaatgtttcgttttctttcagattcaaagtttactcaacaagaacttcctgcttgc

SEQ ID NO: 58352 - DNA, 766 bp, Populus trichocarpa
  Intron number 2 from transcript POPTR_0010s11270.1 (locus POPTR_0010s11270) derived from phytozome v7.0 (chr-ID scaf fold_10; pos 11572686 to 11573451)
acagtttcacttataatctgtgccaggttagttctttctcttcttagattattcgcatggcattcgataatttcgaaatctcttcaatgttaatttgttttctgggttcttctctgttttaaagattttgtgattgtgtggatctttaattgtaccccctgtttggttgctgagaaaatgcattatgtaaatggaaagtaaatcacagattttgtttccatagaggaatgacatttctaattgtgtgtgtgtatgtgatatggttttcatcatttatagaaaccaaaaactgcacacgcaacgcattccttgtttgtttaacagctatgactgcagcggtgagcttttgtttaaatgacgtggcaaaaagtctcaagacattgctaaacatagaaagaaactctttaatttgaacattttcttcaaatgacctgactattgtcaacaattgagaatagcaccagtgatttcacttcgaagtggacattgctagtgactccacatgttaaaaagaatcatattcattcctgtgatatgtcaaaggaaagctataacaagtttccatcaaaattatagttctgggagaaaattagaaactttgtaaagtctttaatcacttctgcaaaagtgtcagtgtctatagttttgcatgattaattcttttatactgctctgtttgattgctctccgtctctctctcatcaatttgttgaactgatttatagatcaaaacattgaactctgttgccttttgttgttgaagtat

SEQ ID NO: 58353 - DNA, 450 bp, Populus trichocarpa
  Intron number 2 from transcript POPTR_0001s08470.1 (locus POPTR_0001s08470) derived from phytozome v7.0 (chr-ID scaf fold_1; pos 6454407 to 6454856 reverse strand)
ctttagccatctcacagaccataaacaattctcaggtaatcctgtttttaatatcatgtttcttttttaaattaagagatcaccaatctgctaattccaccatatttcccttttgagttggaatctttgaattgtgtaaaaatagagaaaacaggggagcctcgggaaggtctttttctttttcttttttttctttttaaataccatggcacaagaaagaaagggggataaaaaaaaaaagggcggggggctctgaatcgtggggttagatgaaatataaggggaagcacaaaatctcatgtataaatcatcagggtctgaattttagagaagataaacagaaggaagcagggtatatacagagagttgcttgattttgttgatatttttcttgatcaaaaggttagattaatgaactgaatggattgggattttcttgcagttgcaggg

SEQ ID NO: 58354 - DNA, 493 bp, Populus trichocarpa
  Intron number 1 from transcript POPTR_0001s24000.1 (locus POPTR_0001s24000) derived from phytozome v7.0 (chr-ID scaf fold_1; pos 23380699 to 23381191)
ggaagcatcacttgggactgttgggatccctacaggtacaaaattgattttcgaattcaatgtgcgttgagtgctgtttaataaaagattattttaaaaaaagaacaaatagttgtgattcatcctacatgtatcggtatgaaagtcttatatacttataggctgatttatttttgtttttagctgaaaagttgaagcatgttttcactaatcatctgagctatactctttctgagctttcagttactagtgcaatggactcgtggagagaatctcattttcataagtgctgattcttctgtaaatgaatttagagggcgatttacaactggatgatatggaaaagtctttttcttccaccactagagtatccataaatagcttcaaaagcaattgatttttctgatgtttttaacagcatgggtgcaaattgtttagctaatattcaggcaacttaggcgccacttgcaactagtggagtatttgaaggagg

SEQ ID NO: 58355 - DNA, 506 bp, Populus trichocarpa
  Intron number 1 from transcript POPTR_0007s00290.1 (locus POPTR_0007s00290) derived from phytozome v7.0 (chr-ID scaf fold_7; pos 77118 to 77623 reverse strand)
catcagaaaccaaagcatttctatcagcatcacaggttactaccttgtctacccctctcttttgaattcatctttcatgatgtttcactattcttttctttctttttatactttcttaataactcatcgtaagctagctttaatgagtttcttgaattgaacagtgtctatttcaaaaaacaatctttatgatgacccaagtttcttttcttttttttttattgctatctatgtttaacatgagtagtacttcttaattaaatcatgttagcctttgaacatgtaatcttgtaaagaagaggagaagatgagatctatgcagcacatatattgaatctttctgaaatttatatcttttttttttttttggattgatgtgtatgttggcttctggttaatagaatcttggttaaagatgatgaatttcttgaaactgattgaatcttttctcgttttttatttggaatccagttgggttattggggacgacgtttcttaattggtac

SEQ ID NO: 58356 - DNA, 773 bp, Populus trichocarpa
  Intron number 1 from transcript POPTR_0002s13210.1 (locus POPTR_0002s13210) derived from phytozome v7.0 (chr-ID scaf fold_2; pos 9838684 to 9839456)
gatatcttgccggggttggctgccggaaaggtcagtttggttgccagaacgtactaattaccaaattaatttaccatatacagtatgccttttctttttcctagctgcccaaggtcaaagattagttcgccgatcacatcatatggtccactactcttgttaaaataatagtgattataactaaatgttctcaacatttttgttttgattgaaaaggtcatgtgtgtataaacattaaggaggtgtttaaattaggagtaattaagaagtcattaaataaaatgagttcatgctcattcatcgaaatggagttatcagcttgaacgtataatttttcttgtttgctatccttcttcggagttcaaagaaagaacataatcaaagaaaggtatcttttagtttttgcgaagtgtttagcaagacgagtcttgttcaattgatccagctagagtcaaacacaaaattctggtctcttgaccagagtgggcgtgctaacagtacatagctgtttcttttgctaagctataagcactaacaggatttatctcatagttgagagtgatatgattaccaatgcccctggcaaaaaagtactagttagtggccccaatggtattttgactctttagcattgatatacccaagtcaagtcgtcaaaacctaaagcgaaatgtcaatgacaacaaccttgaatgcattaaatagatatggctcctagaaattctttggagtttcacaacgatactttctgctttactaaggtagttttctcg

SEQ ID NO: 58357 - DNA, 177 bp, Populus trichocarpa
  Intron number 1 from transcript POPTR_0001s36880.1 (locus POPTR_0001s36880) derived from phytozome v7.0 (chr-ID scaf fold_1; pos 35643428 to 35643604)
gcttctctatcagcaatttggctttatcgtgggtttctgcttcattattactcaaattcagtcaaacatattgtgttcttcttcaatatatgtagaactttgagaataattttttgttttcttgggttcttgcgtatagcagatagaggattaaggggcagtatttctgctgatagc

SEQ ID NO: 58358 - DNA, 571 bp, Populus trichocarpa
  Intron number 2 from transcript POPTR_0001s36880.1 (locus POPTR_0001s36880) derived from phytozome v7.0 (chr-ID scaf fold_1; pos 35643615 to 35644185)
ggaagccacgtttcaatcattttttccaggtttagcttttctttcttttcttttgtttgttaatgcaaatgtattgttaactgtttgaactctacattttgagtttctgggtttgattaacaatagaaggaatgttgatgacgtgggctgtcgtctcaagcttgaaaattagtctactgaaagcgcaggaaccttctttatttctgatttaaagaagggccaataataaatgtgctgttgctgctggatacctttttgcttcaaagttcagcgaagagtctaagtttgctaatcttgtagcaaatattgaagcgttgagtgagttttccaaggaaatgcctacacctgagagttgtagcaaatataatgcaaatagcgctagtctttattcgatgaatagactaactgtaatatgtttaggaggatttgtctaatgttagagtccaaatcttcatagtttagagatgcttcattcaatctcatctgccatttactgatggtacatggaataatttcgattaacaattgccatgcagacgccatttataggctcttttccagctggaacttt

SEQ ID NO: 58359 - DNA, 366 bp, Populus trichocarpa
  Intron number 1 from transcript POPTR_0007s07450.1 (locus POPTR_0007s07450) derived from phytozome v7.0 (chr-ID scaf fold_7; pos 5805733 to 5806098)
ccgaagacttctacattgaggtactgattaaatgtgttccttttgatgtacattagagcactattttcacataaaaagcttcttatgaaaacttgttgcctcaacatttgaattgttgttcatgatgaattgagagtgtgacattttgaagtaatctacaaactgaaatatgagtgaaggctgaccaaactttttccatggctatagttttaaaggaggcaaaatgaaaggcttcctaaggtgctgagtgaagagtttagaagttcttatttgttgcattctatatatagagtacaattttctggtttcaaatttcttgtttgtgcactgagatctggatcattgtgtgccttgtttgaatcagaa

SEQ ID NO: 58360 - DNA, 581 bp, Populus trichocarpa
  Intron number 3 from transcript POPTR_0007s09640.1 (locus POPTR_0007s09640) derived from phytozome v7.0 (chr-ID scaf fold_7; pos 9148856 to 9149436 reverse strand)
tcgataacactggcctagtgtgtaagttctgcttgtcattcttgagtttcttgtatcaagttgtttgctttatcttgttgtaagaaaaaagtaataaggcaactgagtgcttgaaagaaagattttattttgatgaacattttggatatctctagtcaacaaatagatagcacttttcttactattcctttgattttaagatatgtatcttatatgtgaagctcatcatttattcagttttcgcaagaatgttgacttaagattgtcttaacccaatcttcaattcattcattcatttcttatttttatatatatatcgcggcgaagataagtttatcatttatacagattctggaggacccttttgtaagaacatggttgtatggttaaatgtgaattcataatggcagttggtatatgcaccacgatcattagttgtttaacgtggtttttgattggaaggaagactgaaacttgaatgcttctgggaagaaacttaaatggtataaactttagattggttatctttgttgctttcattataatgttgttgttatatacaggtcagtggccatctgaag

SEQ ID NO: 58361 - DNA, 576 bp, Populus trichocarpa
  Intron number 2 from transcript POPTR_0010s19860.1 (locus POPTR_0010s19860) derived from phytozome v7.0 (chr-ID scaf fold_10; pos 17647051 to 17647626)
tcaaggaagtgagcgaggaagttgccaagtacaaggtgcaccaagctaattctaactcttcattgtttcgtatgattgttaatttacgttgttagtctcttattatgtttggtttttagtctcttttttatcctaccttccgcaccatcacagaagctgtctggctatattatttcgtgttgttaatgatttttagttaggcttttgctttttggctatgtcaacgaagttaggaagtctaacatatactaaaactcccagttttggcttgggtttgttgcgatttaaataagtcttagcaacttgatggtaaagaacaactttacaattgctgaattgtcctaaatgctatgcaataatggttttcgctcaaattataaatctgcggctaagtgcatacgagaaacaaaatgtctttatgaattatagttttttgagtcgagagaacaaacaaattgttgtctggtaattgatcttatttccatttaggtgggttgtgaccttttctaatgcaccccacccttctaacttgttcaaacaggttggagcacctgctcgtgttggtctggttgcacc

SEQ ID NO: 58362 - DNA, 690 bp, Populus trichocarpa
  Intron number 3 from transcript POPTR_0001s46430.1 (locus POPTR_0001s46430) derived from phytozome v7.0 (chr-ID scaf fold_1; pos 46819722 to 46820411 reverse strand)
tactcagcacttgttcgcgggggaattggctagatgtatggctcttttgttgtgaaatttagttgaagtttttcttttatttgtgtttttaagtatttgttgtttttgttagacgtggaatgagttagggtttatggatgattagctatgaaagtgaattttgtttaggtgaagaatgggggtgaaaggatgtggttttaccgctgatagaatgactacttgattgttcacggaaaggtctaaataatgtgtttgaccttgtgaagtttttggcttgattagatatgaatgaagtgatagtaactcggtcagccgttgaaattgttatgattgatttattgcgtgatctttttggaatttatttttatctgaatatgatattccatcttgagtgcattaagatgtaaccgtgtgaaattatcgcatgaacccatttatggtcttttgaggccttctattggtgcttttgatttggtatgttaagtgaccatgtgtggttcacttcctaagaagggaaaaggcatctttacatgttgggattttgggtgctttaaatcttatttttaggttattttaggtgtatctgtggatttggtaattctgataggctattgtaatgctattgtgtttatattacccgatcttcttttcacagataaccttggagaagattgccctgtctttgaaaac

SEQ ID NO: 58363 - DNA, 449 bp, Populus trichocarpa
  Intron number 2 from transcript POPTR_0001s16840.1 (locus POPTR_0001s16840) derived from phytozome v7.0 (chr-ID scaf fold_1; pos 13656752 to 13657200 reverse strand)
tcaatttcagcttctcgcaacccccacctagagaggtaagtggctatccgttggatgataaacctcctccccttacttgttttttgactcttgaccattgatcttcaaatgatagaacttgcatggactcccttatttcattgccttctctcccactacctgattttcagtattactttggaatagtgtttgctcggtcgaaatggagcaagttttaatattggtaaactatcttcatttttcctcgtgtacgatatgattcttttaacacatgttagctgtagatggcgcaatcttttttgtgatcagttactatatttgttttcttcatctcatgtagaggttcaagaaatgatgcctaacataaaaaaaatatataatgattcctaacatcttaaagttaccaatcttcaggttttactagagttggccagaaataggaacaaaat

SEQ ID NO: 58364 - DNA, 771 bp, Populus trichocarpa
  Intron number 1 from transcript POPTR_0001s16840.1 (locus POPTR_0001s16840) derived from phytozome v7.0 (chr-ID scaf fold_1; pos 13657424 to 13658194 reverse strand)
tgttccttgggatcagccccaatctcatttccaaggttagtgcctcagttgtctcgccttcacttttgaatcgatcccatctaagtatttcatttttctgtttcgttttttgaaatttgtttgaagcagccaaaacccacttgttaatttcagatgcggtttagttttttattattattatttatcgacgaattagtgttctttcttttctctgcaaagaaattcatttactccatattgacaagcttgtacttacaatcttgtagcattttaatacttgcccgacattagacctagaagatatatatatatatatatatatatatatatatatatatatatatatatatatatatatatacaatggagaaaatcgcccccagcatgttgggttttgttttgtgggttatatccttcgcttgaatacttaaacaattgaaaaggcacgataacagcataacattcaaaaactttcttaagcctttgggcagtcttaaagcttacagcaggtattctgcgttacggagatttagggtcaaacctgattatccatgtgatggacccttgtacaagcacacgggtctctgtttgcaagctgatttagttggtacaaggttttaatttttcggttgtttggttgatttcgtataagacatatcctgctgggcaaaaaggatgtgcgttgtgttgtgttgtgttgtgttgtgttggttctgtctttggaggtgtctaatgttggcttgtaatgcatgttacagacaagcagagagt

SEQ ID NO: 58365 - DNA, 715 bp, Populus trichocarpa
  Intron number 2 from transcript POPTR_0010s15000.1 (locus POPTR_0010s15000) derived from phytozome v7.0 (chr-ID scaf fold_10; pos 14414984 to 14415698 reverse strand)
cagatagaacaagtagtatgtattaaaatttttgttaataaatttgggttatgtttagcttataatgctggaagctgtctgtttttgttattattgtcatgtccaagttaagcttatgatcgctccatccatggatatgtgtgtgtgtgtgtgtgtgtgtgtgtgtgtgtgtgtgtatgaacttatgaacttcaagcagaaagtgttaaactggttgtggaatagaaattattaagcccagatattcttcagtatgctcccatagcatccggaaaatgttttcttttttgatagatgttaattgaacggttcatggaaaagtgatgtgacttattgaagttcatctctttttttttgtttccaaggaattttacatagaataacaaaaagtgattcaatttccacattctatcatattttaaagtgtctgaccttattttggttttttttccttttcctttttgtacattcaatttagttttaccatggcgcaacatgccttagtttttagtagacacttgcagttgtaggaaacctgttcatttaatgccattgattttcaccatctcaatccagatttctgttgttgattattatgctaagattgccaaaccttcttatgttattcctttgatttatttggaattttgctaatgaccacaagtattgtctttccttttctttccagagaaaccagccatcttaaggcaactta

SEQ ID NO: 58366 - DNA, 419 bp, Populus trichocarpa
  Intron number 2 from transcript POPTR_0002s04710.1 (locus POPTR_0002s04710) derived from phytozome v7.0 (chr-ID scaf fold_2; pos 2951032 to 2951450 reverse strand)
atctcgctgggaaaaagccccatcttatcccgccggtacttcccccctcttaaaaaaatggataaactgtgtttatgtctgtttcctaaattgcataaaatatatatattttcttccttttctgtttggttcctggaacaacaaactctcccatacaattaaccaaaaaaaacgaaacatctctatctcatatgtcggaaacaagaaaatcgttgagtttgggaatatttttttattttgtgttgcgatgcgttttaggggggaaaaatgctgaatcacgagtttagggaagaacttgcgaatgcacatcaatatgaattgtaatcaaagcagctacatggaataaattatgggaaataatgtatacttttgttctaaatacaggggaatacgaatatatagacgtgatcatctcaggc

SEQ ID NO: 58367 - DNA, 348 bp, Populus trichocarpa
  Intron number 1 from transcript POPTR_0010s11760.1 (locus POPTR_0010s11760) derived from phytozome v7.0 (chr-ID scaf fold_10; pos 11933907 to 11934254)
ataacctgggccgccgccaagtagttgggtgagtcttaattttccttttctcatcttttattttctggattttagcgtaactgcgtggccccatgagttttccttctcgatgacggcggcctttctctctttgtttgatagcagaagagttttttcttcttctgtttttttttttgcccttttctttggcgtggcccccatttatgctcgcttgtccttcatggacattatatgttgttttcgtttccttttgattccttgattcaaataaacaaatcatgattaagttgcttatattaattaatcagaaatatctcttattatgttattgaatgtttgaaatttcag

SEQ ID NO: 58368 - DNA, 539 bp, Populus trichocarpa
  Intron number 4 from transcript POPTR_0010s20150.1 (locus POPTR_0010s20150) derived from phytozome v7.0 (chr-ID scaf fold_10; pos 17858360 to 17858898 reverse strand)
ccaccgaacaggagagggatagcattgaacaagaggtaagtcatggggtataatagtctgtcgggtcactttgtcatatataattggagacactatagaaatgctgcagatcggataatctttcaactgtgcttgatagaggaagtagctgttggtattatttaagttgttttttcattggtgttgtttctaaccagttatcttcttttgatgcctggaactataagtgagaatgtgaaattaaaacattagtcccccaagtggttgatagatcaatgagccttggctgcgatagattcctaggtttaattcgatgacatatttactgatttattgtcttttttattgtgtttagtgtatcataaattccaagtatgttcactaaagcagcatttgaaaataggctggattaatggatcctttttctttttgccattttgtcttctctatttctatctgtccttttgcttgatggtatttgtttttcctcagcattttctgcaacatcgatttctgcaggttactgcatttattaaagc

SEQ ID NO: 58369 - DNA, 641 bp, Populus trichocarpa
  Intron number 1 from transcript POPTR_0010s20130.2 (locus POPTR_0010s20130) derived from phytozome v7.0 (chr-ID scaf fold_10; pos 17843964 to 17844604 reverse strand)
ttcctgttgtcaccggggttgttattgctagtggggtaagttgcctgttttttttcttatttatgttgttaatctgggattttgtttcaataactgaattgggtttcttgattttttactgttattattgtatttttgatgttcctccaaatgggttctcttcgattggtttctagctgttttagttgattttcttttttcatgtgtattttatgctagcttgggaagaatgggatttgtttttctatattttcagctccttatcacgaccgagaattgcatttctgttgctgaaatcaaataaatctccagcatccaaatttcataatgtattttggattccacagcctgttatgttgacttttagttgttagtaatttgtctcccaaaattcttgaggagttcagtattccattggatttaagaagttttcatttatttattttggtttgaaaattatcttgcgaatttggtcagcttcattacttctcttcggttttcttttctttttgagcttaggcaacgtttgtggtgttgtgttatgaaaatggattccatttgagctaagtgttttaactccggtctgtctttgttgggtggaaatagggtgaaccaagttttcatctatttgggtttataat

SEQ ID NO: 58370 - DNA, 406 bp, Populus trichocarpa
  Intron number 3 from transcript POPTR_0001s13270.1 (locus POPTR_0001s13270) derived from phytozome v7.0 (chr-ID scaf fold_1; pos 10361693 to 10362098 reverse strand)
ggattatatcctatacaaccaggttgcttattgaagtttatgtagcttgttgtgaaacctgcaacaataatgaagaatcaaattatgcagttattaatcacgtattcaagtaactcatgataaaaatgatattttcccaaaacaattgaaaatcaagtttgagaatcttgatccagaattaacctgtaagtaagaaccatatttattggaattcatgaattaacaccacaaggtcagttatatcttgataagttgggttttcttatttgtcataacaaagaacatgtttgcttcaaaccaaacacatgtttatttcataaatccatgccttccttttagttttcttgtttgtctaagataattaattgtagcttttaagaatctttttaaaatataaaaacccttg

SEQ ID NO: 58371 - DNA, 737 bp, Populus trichocarpa
  Intron number 1 from transcript POPTR_0001s03480.2 (locus POPTR_0001s03480) derived from phytozome v7.0 (chr-ID scaf fold_1; pos 2807618 to 2808354)
cctttctaaccaccaacccgtcaaagcaccgttaggtaatgtgcttatctgattcttagaatctggggtttgctttttcattgcattcaatcctcttttgggtgtctttttcatttttttaatgaattatcaatagagaaatcaaggctgtgatttgagtttttgttttatctgctgcagctgtgtaccttgcattgaaatcctagttatggcttctggggttctcttaaagctgcttctttgtgattatgtatgatgtttttaatttgtctgtcagtttacattgttgatctaggcaataattagggtttgttgcaggagggcttgtgggtcgataatagaaatgctaattcagctaaagaaatcaagatttttgcgaagctaggaccttcctttgtggttcctgtaaaggaaagattgattgggcaaaaaatcatttttttgtacctcaacgtggttcactagcaatgttttgctgagactaagtatccattcaacattacggacattcttttcgttctttggttttaatttacatgaatttagttctcatggtattagtaaagttttaccgtacttgatggaatgacttcaaatagaagggcctttgtaagctggagtaagtgccattagtgttctcttttatttctttatcctggataaaaaaaaaggatggtgatgagtatactcacactttcatttgcctgatgtgtaccagcattcaggggttgttatta

SEQ ID NO: 58372 - DNA, 955 bp, Populus trichocarpa
  Intron number 2 from transcript POPTR_0007s06950.1 (locus POPTR_0007s06950) derived from phytozome v7.0 (chr-ID scaf fold_7; pos 5319888 to 5320842 reverse strand)
gctacctacggttatagttttggtatgctcctaatgacaatctactcaaacaaatcttatcagtgtctgatttttgcataaccaaactgattatgtattttgtaatttaagccaagcgcttaggacaaggcttgctggttttgatcttgtccattcttttcattagaatgtgttttggatattatattcttgtgtagtactaagaaatgtaaaatgaatacgtgcatgtataaattgggcagggatatgaatccagacatcactatatcatttccattggcctactattacatatctgcattacttttttatgctggatgcctgcgcattattacctacccacttagttgtattgtaaaatgtaatacaattttgtggaccaaatctgggataaatatttaatcgcacttttttccacacaatgctcataatcaccgacttcctgaagcatgaaaatggggtccaatcaagctatcattttgctcacattgtacgttcttgctacaattccttctattgatacatatgcacatggaattgcccatacataacactagtttcaaggagagtgcataatacagcttgggacttctaaaaacaataattaagttgtttataaaaaaaacaataattataactaagttaattaacagcgtgatattatgcaatcacctgatgcatacatgtttgtcaagtaatatcataagaattaaattgatctattattgtttattcatgtggttcaagttgtaaaactggaaaattaactgcgatccattttgtatgtaatatgaagaactcgattatcaatttcaccaaggagtgaggataatgcctcctattagctgataaaggagtcctgggcattctgattttttttttgccgtgcctgattttttaaatctaatgctttcttgcagctacaacattaacgggtctgcattttgccacaaca

SEQ ID NO: 58373 - DNA, 749 bp, Populus trichocarpa
  Intron number 1 from transcript POPTR_0001s06280.1 (locus POPTR_0001s06280) derived from phytozome v7.0 (chr-ID scaf fold_1; pos 4837270 to 4838018 reverse strand)
tctctgtttctctccgctccattccgcataagaaggtgtgcttattgctatcgttgttgttgttggtggtgctgttgttgttgttgttgttgttatcatttctattatttttttgagtatttccatcgcttttatgatgtggggttttacaataataataatatagtatttcttataatttatatttgtttattttcatggggtttttgcgtagaggacagaggagttgtaatgtggcaactttttattgcattattttataccatttataaagtttatgccttttgatttggtttctaagtagactgtttaaaatcttgtgttttcattatgttttgattcattaaaggacatgaccctttttgaagagaaaaatgaaatgaaaaatgggctgttgcatatgcacgccaaatggtgtttatgatggtttgttgcatttttatgacttatccttggggttatcaccctttttgttgggcacgttacttggttgattgtgacaagttttggggttgcaaacatattagtgcaggttatacagaaatgatgaagaaatggatttcgaattgaattttgtcgatcaaaacctgagttggccttttattttcttaaaaatctcatgcttggagtaacatgtgaaggtggaattatgagacaggagcagccctagtttaagtactttctattaggcaaaatttgtatggaaatcctggtcatagttttcttgaactgttctgcagaccctggtg

SEQ ID NO: 58374 - DNA, 954 bp, Populus trichocarpa
  Intron number 6 from transcript POPTR_0002s05830.1 (locus POPTR_0002s05830) derived from phytozome v7.0 (chr-ID scaf fold_2; pos 3834075 to 3835028 reverse strand)
cctggtgcagctagagcttgggtagcaactttacagtaagttttgcctttgctttatggaattttcgatgagctgaaggatatatttctgttactatgcttttctatgattataaatgtgttttttgtttttttgatatgtagatttgttgattattcatgtaaagtttgaaataatttttgttctgaaaatcaagagagcaacagcgttctgctggtctatgtcttaggttatgtgaacattttaggagtctttttgtacttccacttgcgagggtttctttcaccccttttccatggacatgatctatattataaaataaattttcacgagccttatgctggtttgagattttgggattaaatatacactgcttaaagcattatttttttctcccctaccagtatacactatgtttgaataaccgtaacatcttggagatgatccattcattgggctttttagagcttccaagaaaagacaaatataacaattgagcatgttcaacattagagcaactttcaaattttgtgtcccctttaaaatatttcatataggctgtatgttgaagtcattccctgtcatgactttgactgttcggaaactgccctaaaagttaaacaattggcttaaaacatttctcaccaacactggtagaatctaagaggcaagtacttctaatgcatgagaatctaacagcaccccttttttcttcatcttaggttcctttctctatctgtaattttcttttagttggcctatgtttttgtgatgatgttcagcaactaatgtactttggccgatcttactaggttcatatgagttccattttttccccattattcagattgatgttgaaatttatattacacatggcttttacctattcttaattattttttggcctttcaatgaccagtgctactcagttggttctaaaggctcacaaagagg

SEQ ID NO: 58375 - DNA, 469 bp, Populus trichocarpa
  Intron number 2 from transcript POPTR_0002s15370.2 (locus POPTR_0002s15370) derived from phytozome v7.0 (chr-ID scaf fold_2; pos 11508432 to 11508900 reverse strand)
acggttttccgcttcagagataggaccagaagcaggttttgtgaaactttggtaacttttggctacttcttgttagcttgggatttctttttccttattaagtaatcatggaaaatggtgggagtgggaagaaactaattttagacatcaaaatttatgttttccgatgcttccatcctgaactaatgagaacaagtcacactcacacagttgttttaggttcagtttggagttttattgttttctcaggctccataataatatattgaactgtcaaaatttgagtttttttagccttggtttttatctcacgaaccaaacacgatgggcgtttttatctagctgctcagattccttttccttttcttttgtattcatacacattgaaaagttaaaaatgctgctatattgagaaagttattaattatctgcagtaactgcaatcttgggcattatcactgctatcaac

SEQ ID NO: 58376 - DNA, 517 bp, Populus trichocarpa
  Intron number 1 from transcript POPTR_0001s05880.1 (locus POPTR_0001s05880) derived from phytozome v7.0 (chr-ID scaf fold_1; pos 4619082 to 4619598)
gttagtaaatctagtccaacctaatctcaggttgagtaagttaatccaatttaagttgatttgaaaaccaatccaaaacaataatgttttaatattttattaagaagtcaaaatgttatttcgggatttaaaaaaaaaaagtaaagtaggttttgatcggttatgctatgctaacttctacttagtttaatttaaaatttagtttagattaaatcccgattctatgagtgccctaaaaggtggtttattaaaaaataacttttgaatgcggtcataaaacatacaattggtggaagaactaaattaaaataaatcgaaaaatccagggttataaagaatagttaattagttttgttaaattagagggactaaattgtatttaactgtatacccaagtgaaacgggtgcttgccacgtgttttctaacatgtttttaaggtagtgagtaggtgtggattgacttccattccatgtaagtaaagcaaacgagattgtgttctgtctgtttggttctgtc

SEQ ID NO: 58377 - DNA, 804 bp, Populus trichocarpa
  Intron number 1 from transcript POPTR_0010s13980.3 (locus POPTR_0010s13980) derived from phytozome v7.0 (chr-ID scaf fold_10; pos 13685884 to 13686687 reverse strand)
gccgggtaatttcctttttacctctttttgatgcaagaatcacattaaagattcataacctctgtgctacttcttgtttctgacttgggttggttttttatagagttacgagtcaatggcatttttagtgattttcttattttgttgatattgatcggttgtttggtatataagatcacctgggttcttgtcaatataggtctttgtatgtggtgtgatgtcgatttgattgctttgtttctagccttctaggttttttggctggtggagctgactattacagctcaccgagtttatctgaactcaataattagtttaatttgaccaagggattcaaatggaaatctttttttttactgtcagttgttatccgtgtttgcgttgtgggtgaatgcagtttaattacaactgctgtgtgtgtattacgaccccttttttagttaatcgtgattattattgtgtgttgagtgttggtgtccattgatggtggggttatagaaattacatttgttttttgttaataacgaagctgggaagagaaaaaaagtaatcttggtgctaagattatttcagtttaacaagtccttttcttctcttttcaattttgtctgcttcgctgattgtttcagtacttgtatgctaactgtacttgcagctaagattagccagtatcttaccaggttataatttattacaggttcagagagactagtgcatgttctcaataatctttggtgccagcattttgctactgctcttggttttgattcattttctttaatttatccaggccttggctggtgg

SEQ ID NO: 58378 - DNA, 697 bp, Populus trichocarpa
  Intron number 2 from transcript POPTR_0010s00290.1 (locus POPTR_0010s00290) derived from phytozome v7.0 (chr-ID scaf fold_10; pos 92046 to 92742)
ccactccagttgtacctgctcagtttctgcccaaggtaattaatgagacttttatgggtttttgttgatttttggttttttgtaaaaaagtttaggtttttatgctttttgctgtgtgggttttttttttattttgcggcctaatttgccttaatatttgtttaaggttttaaattgtgaagaacatgactaatttaatggattagattagggtttttaattagttaattaaattgggataatgtagggttatgacttgagttaattaatcaagccaatgattgttgacaccttttaattttgaacggaatcatcgataattaatcagggtcttcattataaacgacttcattggacaattaattagctttttttttcaatttgatttactatgttgtttgtttaatgacatgtgttgttttataggtgttattattgattgaaggtcttaaattctaaaggtttagggtttagaattcagtttattactctagaaacaattgttgaaaatgtttaattttgtttccaagtaataattgttatggttttgattttagaggaatctttgggaaaattgttttcgcttttattgagtttgctttagattgaaaatgagttgaatgtctttattttttagtaagatatgcatgttcttttaatggtggtgtttgtgggttgtatagacgagtgttagaga

SEQ ID NO: 58379 - DNA, 763 bp, Populus trichocarpa
  Intron number 1 from transcript POPTR_0001s25330.1 (locus POPTR_0001s25330) derived from phytozome v7.0 (chr-ID scaf fold_1; pos 24472936 to 24473698)
cctgacttggttcatatcacaaatttagtaaactcgtaaaatcggaccgagtttaccgattttgcacgagttagtccgattttactggtttcgagtttttagtccaatttagcatgttagatacatgttgactcgtaaaaagattttatgaattaactcatgattttaagaaccttgattcccattactgtttttgtagttaatgttccctttcgtctcttctttttcttaatatattttgctcattgcaatctttttcttaatatattttgctcattgcaatcttttgttgaacgagaaagctaaagtcaactagggcttgactagatggtgttcaccaaggaaaaatagaagatagtgggaaatgagggagttttgattggcatcatcattgttggtattatcagatgaaactcatagttgttgttggggctgcctcattcttttttcattttcctttaccttcttttgcgttgtgtttgtttttgaacagaaagacactccaaaaaaaataaaaattgaactaaccttcactaatactgtgagacacttttccaaatttaacttactaattattgggtaattgacaactatgtagcatctagtgtagggaagttgtttatttttactcttaagtttattcatgaatatcttctatgtacagtcatacttggatttagcaactttggcattttctgatactactcttggactttttttttttccagggaaaacaggaaaccgtatcttcttattgattttt

SEQ ID NO: 58380 - DNA, 487 bp, Populus trichocarpa
  Intron number 1 from transcript POPTR_0010s25970.1 (locus POPTR_0010s25970) derived from phytozome v7.0 (chr-ID scaf fold_10; pos 21379707 to 21380193)
cttctcactctctgccctccttttgttattctactgtaagcccttttcctttgcttcttctacatttgaatctgataatacttggtagtttctttgctctttttttgtatcggttattggcaccgtagatatactaaatgaagctgctatcttttaaaaactttgtctgggctgttttagatcttagcactaaccttttcagattattgcttgtcaaagtccgattctttttggatgctaagtttattagcctgcttaacaaatctctagatcgctgctttttttcttgcaaaatttagagaaaacatcatttttactattgcagtattaaaagctatagatcttgatatgtctcgagatgataatcttttgatttttttggcggtgtcattttgattagtgtattggaaaatgcatggaagaaaaggggggatgggttcattgatgtaatggggttcataaaattagaatcttctacctaatgcag

SEQ ID NO: 58381 - DNA, 974 bp, Populus trichocarpa
  Intron number 2 from transcript POPTR_0001s01500.1 (locus POPTR_0001s01500) derived from phytozome v7.0 (chr-ID scaf fold_1; pos 1117312 to 1118285 reverse strand)
tttggggctgtcggtttgctatcagagaaaacaaggttggtcatttataatctcactgtttgtggattgttttttactttattaaaaaaatattaatatttgatattaatagctatctgtttaatcgaggtaaaagagatttaaacttttcatatctgggattggttggtttcattcaattgaatccgaggcagaatagcataggacttcaatttttattttctatgcataagaaaatggtgttgcataaggccaaatcatatgattgctgtgcctgtaccataattaacatttaacttcgtcatcctcattctgcatgcccaagaccatagtgttcttgtgagtctggtctatactctgcagccatcgtgatcattcatgttgacttgtcctgaagtttggacagtctgaactttaaaacggtacatcctgctggaggcaaaacgaggtctagataagagcttatttgcacgaagcaactactttgtgaaagctaaatgtgtggttagcaatagttcgattacatacccgtgaagagttaaagtggataataaagatgcttttgaattatatagcaatcataagctcacaagaaactttaaactttatgaatttcgcatgatgtttgttataactttcacggttttgttcataggatcatgaacacagaaatacattttcttggtaggttgcagttacggataatgcaataatggcaaaaacatgtgcttaacattttctacacggttaatttaggtacatggaagaccacttacaaccatacataagagagattagttctgaatgcacagttgcacactgacatacacaccagaaatttaatttctgttatagttctcaaagaggaaaaaaaaagatgttcagtagacttctctgaaggagctttcttgctgatttaagtttcaactgtttgttcagatttctacccttgccagaaggagtcctctgtttgg

SEQ ID NO: 58382 - DNA, 629 bp, Populus trichocarpa
  Intron number 1 from transcript POPTR_0001s01500.1 (locus POPTR_0001s01500) derived from phytozome v7.0 (chr-ID scaf fold_1; pos 1118665 to 1119293 reverse strand)
taagtacgtaaaaattatattatccaatatactactgcacttttatagttcatgtaccaacgtggtaacaaacaattcagtacatattctttttactctctctctctctctttcatttttctattttcatgttcaggggaaatgctagattttgatatggactttttgccagaagaaagaaatacgattttgccatctgttttaattttgacttttaaagcgggattgattttacctgaagtctgattgtttcctgagaaaatttatttcatgagttattgacaggctttgcaacaattttttttaagactcgcatcgacagatctgcaatgagctgccgtttctgttttctctttgtttgttttgtcaaaaaaagaaaaaagaaaattattttgcttgattttctcctcaacaaaacagagcagacacggaaacccatttttatttatctaccgtgaagaagcttcctttgctttgaaaaagtcttctacgatgaaaatactgtcatagaaataaactgggaaaaagcctgctttattccaaaaatactcaaaagtctaaaactcttctttcttttccctcattttgaatcagaacccatttgttgaatcaagaagacaaacaagttg

SEQ ID NO: 58383 - DNA, 603 bp, Populus trichocarpa
  Intron number 1 from transcript POPTR_0007s07670.1 (locus POPTR_0007s07670) derived from phytozome v7.0 (chr-ID scaf fold_7; pos 6032810 to 6033412 reverse strand)
tgtctgatccaaattcacgtttggcttacgataaggtcagtttgttattatccatacattagagaaactaaggttgaattttccgaccgtggatgtgttgtgtttctgtggtctatcatcgacatagaaacgataaaatatgaacagattttaaacgtgcatgtcgagagttgtggcccaaccatggctaatgagttcttatcttggcccgataggtttttgatgtcttagggcttgcttgttagtgcaacccaaatgaacttttttgaggatttctaacatgatgaacttttttgagttcttatcctggcccgattatgtacataattaatctcaagctctaacattattaagtcaccatagctacaagaccaccccatttgttttatcatgaagcacttgttaaagagaaattctagtcaaatttcttaaattacggtcaatttaattacgaaccaagtttgtagcaggacatgattgagtcattctttaggaggatgaagcaaagtgtaatgcaattttagattcttgtgttttgcctagatgtgagaatatctctttatttgattttcttgttcatttgctgtacaggaacaggcaaag

SEQ ID NO: 58384 - DNA, 805 bp, Populus trichocarpa
  Intron number 1 from transcript POPTR_0001s32470.2 (locus POPTR_0001s32470) derived from phytozome v7.0 (chr-ID scaf fold_1; pos 30798126 to 30798930)
ggaagattgaacaagaggagtttcgaaagcttctggtaatatttgtgtttttaattttttattattgattttttcgaagatttaagtaaataatagattctcggaatgccctttcgaaaaaaatggaaactgtgtattttgatgtttaactatcgattgcatctgtaaaagaaataatgggttctttttattgatgggctgggaaaggaattgaataaaaaaattgttttgattaagattgtttggttggtgtttttagggtttttttcagggtattggtagcaaatgtggagcatttgatgccatcttaaggaaaacctattccttctgtgtttattttttaattgttattgttgattagggtttcagaggtttgagcaatgttgggttttcagacaaaatgtgtttttatgatggtcttaagctgcatgctttaaatggtcaatggcatcaaaagcagtattagtgattagtaaacaggagatagtctaggtagtacgtttacaagctagaacaatgcaaaccaggttaaggactttgatcaaattggatgtggaacggtggagatgcttttaggtatacacacgtatgcagatttgtggtgatagagtgcatttttgaaactgtaaagattccataaaaccagatgttcattcctgaatgttttacacattctacttggatattcattttttatgctactatactattaagtatctgcggaggctgaagggatttgattgaaaattttccgtggttttgttggatagtgtcaaaggtttacatcgacaagctgcctttcaat

SEQ ID NO: 58385 - DNA, 719 bp, Populus trichocarpa
  Intron number 1 from transcript POPTR_0010s01430.1 (locus POPTR_0010s01430) derived from phytozome v7.0 (chr-ID scaf fold_10; pos 1556508 to 1557226)
gtgacgattattatattatcagattccaggtttgttttattgttattttaatgatgggttcttgattttcagaatcaaagttgctttcttgactgcatactgtgttttgtgatgtcaaattgtaaacttgttctagcaaatctttcgccttttctggattacatggattatgttagtagattttgttggtatgtttactatttgaagggatcatttgacaggtatgaaaagatcaggcatttgcagttgtttttttgaattgacctatcttttcttttgttacatgaagtgtttaatcatcaagttttagacttttgattgttatgctaataaatcttcgaccctttacgtagtataggaattggattatcatctattttatattttgtttactatttgcagtgattatttgattgggatggattagattgggctttttggtagtaattagctagtagctacgaatttgaccagctgttctagctgaaatgattatttaacagtataattttagctgaagcttaaataatcattcatggcatcagacaactttgttatctaactgttcttgagcacacttgagaaagtttttaattttggtcttgtatagtttatcataattgtcttcttatgaagatgtacaaaacccattttaattgaggaactgctcgattgtttttgtaggagcctggagagattgaagctgagtttgcagagat

SEQ ID NO: 58386 - DNA, 431 bp, Populus trichocarpa
  Intron number 2 from transcript POPTR_0001s15910.2 (locus POPTR_0001s15910) derived from phytozome v7.0 (chr-ID scaf fold_1; pos 12755206 to 12755636)
ttcaaggtattccaaaattagtccttttactctttcagtttgttcaattcagtccttaaattattaattattctatgttgcatgcaatttgaatttggtggactttcaaattaaaaaacaaacattagaaatataaggtctgaagtgacagctccttgcattgtgcattccttgtggcttacattacttttctgttgaaaattcgttgactcagagaagtcttctccagcggttttctattttactgctacatggtgtgggccttgtaagttcctcatcaatcatcgctttgttttgctttcgggcattgtgatttctcctatgtagatgtttgtgcacaatacagcacgtagagcttcctgtttggtcatgttattgagtgttcatctcctgcaggcaagtttatatctcctgtaatcgaagagctgagt

SEQ ID NO: 58387 - DNA, 889 bp, Populus trichocarpa
  Intron number 3 from transcript POPTR_0001s15910.2 (locus POPTR_0001s15910) derived from phytozome v7.0 (chr-ID scaf fold_1; pos 12755653 to 12756541)
caacaatatataaagttgacattgacacggtatgaaagtttcatgcttcatggtgtaaaaatgatacttctattctcacgaaaaagtttctctcttgattctatatcatgggattttctttctatttacatcttaagagaatcgatgaaaccaattaaaatgtaatcaaatttacaattttaattttaatacaccgccaccaccacaaacaccataacctaaattttggtggctgatagtcattattgattaaaaggtgtaatgaatagcattatttatgaaacattagtctctgcgctacagaggcacctaagatgaacctgtcctaatggtcaatggcttgaatctgtctggggggatttgtggagctctttgttgtgttcataacctgggttgagataattgaaaaggaataggagcgtaagaccatggggaaataatatttgaaggcattaaacaacatcaatattatgcatgaaacattaggttgtgtgctttaggtttatctaagataaaagttaaaactatccctgtgatctgaatgacccactgaaaatggtcaatggtttgatctgtctgccacattggaaacatgggatggtgtggattaaaaatgaataagagtatagtagtatgagcacattggttgaaacaatcaagaaatcaagacttagttttgactgttgagtattcttatttggctcacaggaaagcctatcttgtgatcattatagcaatgtgacatagctctggtcttcatatttcatagatataaagcaaccttgttaaagggccaaatttcttcctgtcttatggtagcatagatagtcatgaattcaaaatggtagggactaatgttgccggcctcccttgcaggaaggtcttcaaa

SEQ ID NO: 58388 - DNA, 1034 bp, Populus trichocarpa
  Intron number 1 from transcript POPTR_0001s36230.1 (locus POPTR_0001s36230) derived from phytozome v7.0 (chr-ID scaf fold_1; pos 34764287 to 34765320)
gcctcaccagattcactctccaagcacccaaaaatgtaagaaaaaaacctattttttcttttccttttgcaacttttttatgttttatagtaaattcatctgttattttcttgaggttgatataagagtgagtagtttatagaaactgggttctttatgtttttttagtatcttttaagtgtttggtaaatttgtgatgggtttgtttaataccgtgggaaaagggaaatttcgaatgctgcaagcaagaaaaatgcttacaagatgtgtttgaatgtcaattttatagagtcaatatggtgtttgtatgatagtttaagcttatgagcttgcttatgaaaatggagggcaaagtatggaaaaagggtattcgaatcgaccattcgatgttaagagaaggagctttatgagggcatcttgtggtcaatcggtttttctaattgatgaggaataattaacttaatatgcactgaactgacattattattaacttaattacatgtttcctgatgtttgaagaacaacttcaacaccattgtccgatttggttgccgtagccacaacatggctgaaactaaagtttgatccttacctaggtgatttgttttgtaaagtctttgttcatgatggtcacctatgcatttgaagatatgctcttggtactattctggatggcagacaatgtagcatagagggaatacatattgcctgacatgctatgtatgtgggtgatttctaaaaggatcctaaggtagtgcaagtgtctcttgaaaacagggcacattattcgtttccttctttgttaaatgtttcataatatcaaatattgatttgaaggaggatatttaaattcaatactaactgaatatcctttaatttttgtttaaatgcgggtaatgatattcagtatcatgtttctgttatctttttcaaggttttttgtgaccatgtcatttcttatattttgtctaccatatactcatatagctcagttgtgcttatgttctctttgaatctccaggtagaggtggaat

SEQ ID NO: 58389 - DNA, 932 bp, Populus trichocarpa
  Intron number 1 from transcript POPTR_0001s12690.1 (locus POPTR_0001s12690) derived from phytozome v7.0 (chr-ID scaf fold_1; pos 9839195 to 9840126 reverse strand)
aaagtggattttctctgagaaagattactatcaaggtttgctttgcttttctttttcgcattttcatttcttatatccattttttttttgttgctcttatttatagaaatctaatgatgattttttttttcattcatagcacttgacttgctttctgttgtgggttttgctataaagtttgcttatcatctttttctttcttagaaagtacagagattgcttttcttttgcgtctgtgtctgtttgtgttgacctcaaatatgaacgatgtctgaaatcaatacactaatctgagcgtggatgacctactcaaggcttgactgtggggggacttgttctcacgcgccaaaactgaatatatatgaactacgcctgatgtcttggttaattgaatgctaagcaaactagtttggttgtgcttggttctcttttagaattcaatgagcatgttatataactgtcagtaaaaatctgttactgaagaaaaattataggggacaaggacagtcatcagcctaggttttttgaacttggtggatgggtaatgataaaggtttgctctgtgtgatgtatgagattaatttagttatcaagctaacaaatgtaacttcattggtgtcgaggggtctgtctacttgtgatttttgtcacgaaggaaaattctaatgtgaagggaaaatatgtttcatagagttgcattgtaatcattcttgtacattgtttcagctgtaaaaactaaaggctgattctggtacaagaatctgtatggtattagaaaattctgcctataatgattctgtataaacttgaatatgttgcaggtgtcatgatttactttatggctggtttagtctttttgcaatttatggttctataatggcatccattttgtattaggtgtctggaagctctcgaaaagcgagggacacgat

SEQ ID NO: 58390 - DNA, 630 bp, Populus trichocarpa
  Intron number 4 from transcript POPTR_0007s10340.1 (locus POPTR_0007s10340) derived from phytozome v7.0 (chr-ID scaf fold_7; pos 10197793 to 10198422 reverse strand)
aaaatattctcgggtcagctttcacgacaaccgaggttaaattcttttcaaattatctggtttatttgaaagtgtgattgcgattgttttttaaagtattttttatcaaaataatatcaaaataatatttttttttattttttaaaatcaacacatcaaaattatctaaaaacactaaaaaaatattaatctgaaacaaagaaaaagttaaaaaaattaatttttttcaaaaacgtttttaaaataaaaaaattcagaataatttaataaattctcttgcattttttttttttaagtttgagcctataagatcaagataacaaacatttttaaccactgaacaacctctcggggtttctaataaatatataatattgccctgaccaacatcgtcttcttcttttttcaatgatgcagcgtttatcttgatttttgttctcataattgtgagatatatgacttattctgaagaggggaatgaagttgaaataagaacaacggagactgaccaactattgccaagcaaagcactgtccttattattctcatacgggacatgtaacaaagatttagaatcaggaaattgcagtagcagcagcagcagcagcagcagcgacggcaagaacggtt

SEQ ID NO: 58391 - DNA, 585 bp, Populus trichocarpa
  Intron number 1 from transcript POPTR_0001s11880.1 (locus POPTR_0001s11880) derived from phytozome v7.0 (chr-ID scaf fold_1; pos 9209463 to 9210047)
tttttgcagagcgaggtcttcataaactgggaaaggtatgttatatattccctatagtatcttttacacttgagctaggtgatattctggtttgatttttcttccttcaatatttaaattttttggttcccggttcccaaattgaacatcctcagtatcactactaaaattgttcttttgaacacatcttatttggaccaaaattcaaactgaagtgaagataaatttgaagttatgcactgccacagcatgtagaaatgaatgtacgaaatgttgctgattgcagtactagtgtgtggtataatcgtacactgctcattaaattaaaaacgttactatttatgaacatgtatctcttcttcctctccaagaaaatttatcagcttttacacacacacacacacacacacacataaaagttgtttttgcatcaattgaatttttaagtaaaaagaaagagcttctaagcagagaggtgatgtttcttcatttttaagaggtttttggtgcataattcctaacttcctaagggacttggtgattttttttgtttggaaattcagttcttgaggaatacggagcaag

SEQ ID NO: 58392 - DNA, 962 bp, Populus trichocarpa
  Intron number 1 from transcript POPTR_0001s46970.1 (locus POPTR_0001s46970) derived from phytozome v7.0 (chr-ID scaf fold_1; pos 47309259 to 47310220 reverse strand)
tccaggtaataacttttaatggttcttttgttgtttggattaatggtttttatggggtttttgaagaagttttagtcttggcaggttttgagtttagtttcaatccttgtttcatatgttgttttagttggaaaatacttgggttcttgaagagtattagttatctagtggtagttaaggttcatgaatttttgtgggttcttcttcgttttttatgtttttttttcctattctatgtttgcttacaaattatctgtttggttgaaattgagagaggagattaaactggggatttatgtctgtttttggttaattaataattgaaatgccaaattatcccataagttgattttaatctcttttttttttggagaacttcttttgaaatttctggttcttgaaagttaaatgtgatctgtcttgtgaatttctgggtttggatagtacaggttagaatgagatttgacatatcatgtctccccattgatttttaggagaatagaacttttatttgcatgaaaaatcactcgatttcacctggtaactgctgcaaggtaagaaatgtgagaaaaggaaaagggaattgaaataaatagagtcatgcattagacattgtcacttgataaggggaattaaggcactaaagtagtaaagagtaatacaattagcttataccactatgagctgttagattatttgttagtttccttgggaaataagataaggttaatttgttgttttaactcttcatgtacctattcaaatttcattacagtttttgacattccattttaggctcctggatatcttgactgtttaaagaggactcgctaatggatgatttttggaacttaattggatatattaattttcgggttcagatcctgtgtttgtgtttgattttgatagttgaatcttttattacagttaatagagaaggatccaagcaaggctgtttccct

SEQ ID NO: 58393 - DNA, 319 bp, Populus trichocarpa
  Intron number 3 from transcript POPTR_0001s18740.1 (locus POPTR_0001s18740) derived from phytozome v7.0 (chr-ID scaf fold_1; pos 15870291 to 15870609 reverse strand)
gtggaggtatatatcactgatagagcattttcttgagggattagttaatcaaaattgacttcaattttatatgtttttagctcttttctctctcttctaatttccccttctttcacatcaagttaaagcattttttgtgaatcaacgaggtctatggagcatccttgattcaaatgtcaggatcaaagaacaaaagcaatagcttattgctagactaggcttaagaggaaactccccaccccccctggctaacaatcttttcttaactccttggctgttcttaggttatagaggggaaagagctactgagtcctcgtac

SEQ ID NO: 58394 - DNA, 649 bp, Populus trichocarpa
  Intron number 1 from transcript POPTR_0001s06600.1 (locus POPTR_0001s06600) derived from phytozome v7.0 (chr-ID scaf fold_1; pos 5073452 to 5074100)
acacagttaaaggacaagttcaagagaatatgtaagcaatacacatgcatgcgcatgatttctcatcttcggatgggttttgatcattctttccattgccaatcacactgcttaatttcacgaagggaagaagagagctggagagtactgtacgtagagccagtacaccatgcatgcatgtctttctgccattaattatacatgatagctctgcttaattacacatgatttgatttgatttgaggatgcaacttaaaattcatataatgggatcgaagcccatttcatctcctattggaaaaaaagcactttgtctatcatattcatatctgtgttttttaaggtaccggggcattgcggtgagaattttgaattttttttaagagttttaaattaataatctttagtgtttttttattgttttaatgtattgatattaaaaattaaaaaaatattattttaatatattttcaaaataaaaacacaatattaattaacaataatatcatgcttctaagtgaaagtaaagaaaagcttcaagaaagaaagaaagaaagagttcggtgtatttgcctaaatcctatgatcatatgttttcatttttcttggctgatgcgcaggtgaaaaatccaaaataaggaaacgttac

SEQ ID NO: 58395 - DNA, 761 bp, Populus trichocarpa
  Intron number 1 from transcript POPTR_0001s20800.1 (locus POPTR_0001s20800) derived from phytozome v7.0 (chr-ID scaf fold_1; pos 18999827 to 19000587 reverse strand)
gctttatactctctcttcatctcaaggttcttcctagcttatagcttataatacctacctccctgatcactgtttactgtctctctacctcttttatttctttctgtttctactttcattctttaatttggtcaagaaatcttctatagttaatatacatatgaaaatgagcaccatttcagggtttctacaccatcttgacagcttagaggaaggtttcagtgtttatattctttaaacttagcgtacatcatggatcgatgtttgattcatccactattgtatttttcattcacaagtagtcagaataaagatttagtataatgtaatgttaatacaaggatcatatgattcttatgtagttttgtatctttgtttcaaagaacgtgagaaacgattgtgattcattccataaatttcatcatcttccaccacttctttttcttcttcaagagcagaaattaagggaagtagcctcgagaatggtggctgaaatatttttctattttttacagcttagacgacctgacgagggtagttgtttgtgattagtgagtgcatttattttgtcataaatgtaactatctactatctgtgggaagtgtcgtatatatcatatgatcatcagtaccaatgtgttaattatttgatgtttaaaggtaataactactcgaaaattgggtgggggatatctttgattgacatgaaaattttgttacaatgcagctgggcaccattactctgaatttaggtatccgttc

SEQ ID NO: 58396 - DNA, 780 bp, Populus trichocarpa
  Intron number 5 from transcript POPTR_0010s05030.2 (locus POPTR_0010s05030) derived from phytozome v7.0 (chr-ID scaf fold_10; pos 6336300 to 6337079 reverse strand)
acgggtccactgccaggtaaccacttgttgattatgtatatttaatttccatcggcattaatatataagttcctcgtctgattccttacatgttgggcctgcctggtaaccatttgatcattatgtatatttaatttccatcggcattaatatatacaagtacttcggtccatatacacaagttgaattgtttaaatatagccccagtcaaagaaaattaacatgtagagcataatttaagcatttccaacatcttgggatagttaattaggcgatcccatatgatactattgcaataatgttaagtttttaatgattggaaaattgaaagtcagtgtattcttaacaaagaagctatcaggggcaaaaacaaaaaaacaaaaagttggttatttggcatgttcctgcacagagcttttcttttccttttgcccatcacctgtgcgtttcgctttactacagaggacctttaattttcgctttattaaaaagtaccctcggttttcgctttatttaaaaagacccactttagtgtagtctttctctctcttatgttccgacattttcgaggaagaaaatatgggtgctgctgaattatagacaaaactatggaattaatttagtattccgagattgtaatagtctaccttgtctgcacacacatgtatatatatatatatatatatatatataggacatattattctgattattctttctcttttgctctggtttgtgtatgtagtgacttcatagaaaattgggtgaagatctgctcag

SEQ ID NO: 58397 - DNA, 849 bp, Populus trichocarpa
  Intron number 2 from transcript POPTR_0010s05030.2 (locus POPTR_0010s05030) derived from phytozome v7.0 (chr-ID scaf fold_10; pos 6338012 to 6338860 reverse strand)
tgtacggtgcccttgctaaaggccaaagcccgaaggttagtgtttatttcttgaaataaatatatttctatggtcctatcaatggaaaatgttaataatattgtgtgcaatttgggaatcccactggccatacctaaccaaagattggtggagggccaggtcttcgaaacccaggaggccaaatttgacttgtgcagggattatggtgataggggggtattagaagtgtattcatatttatttttttaaaaaaatatttttatataacatttcaaaacaatataaaaatatttaaaaataattttaaattaaaaaataataatttttacctagtcctgtttataatgtgatatcaaaaaggcttgtcagcctgttttttcaatatatttgtcttgtagtttctgtttttttctatattttaaaagtgtttttaaaaaaattaatttttttatttttttatttaaaattaatatttttttaatattttcaaatcattttaatgtgctaatatcaaaaataattttttaaaaaaatatattttaaaaaataaccattattatcccacaacaaaataacttcatcaaattcctgatcaatgagtagggtaggattaaaaccttgcgcactgttcgcatcatgatgactcttttgttttcgtttattatcctccaacaaagataccttattcaaattccagatcaatgagtagggtaggattgaaaccttgcactgatcgcatgatgatggctcttttgttttaatttattttattatttttctcaactgattaatcattgcgagacatgggctgagttaactcaactactcctgttaaattaaatgcagttt

SEQ ID NO: 58398 - DNA, 1000 bp, Populus trichocarpa
  Intron number 2 from transcript POPTR_0002s03040.1 (locus POPTR_0002s03040) derived from phytozome v7.0 (chr-ID scaf fold_2; pos 1889866 to 1890865)
ggtgtcttttcggagacacctcaaggtgaggaggatctggtttgtggatgatttttctttttaatgaacatgatttttttcatgcgtaaaaaattgtgcgatcctttaattggcgagccctttcactggtgttgatttttgaatcctttgtaatttaccttaacttgcgataatgatcttttgtcatttgctattatgaactcaagtgtgttgcattgacatgaagaccactgttgaacattgcaatttgcagaaatatgaacaagggacttctcgttctatgtacaataaaattgttgaagaaaaatcgtgaaacaccactgtgttctttgcatgttttggccggggaagataaattcttatacttaggttttgtgagtgtttgtcagtgatggacttgtgcattgtcttaacatgttcagttttcaacgttgccctgtgaatcatagttactttcaataatcgtgttgatctaattcttactagaaagtgggaccgtaatattcctgagtaaacatcagattatattgaatattaacttgtgttaaagtggttctctgaagcttgatttctattctttctgtgttttgcatcttggaggaataacacgagggtttcttcaagagcagttgctgcttccagaaagagtgttatagaagttggagtagaataagattttactttgttttaaataagctttgatacctggcccgcattattgttttgccttctcctcatgaattaccctgtatcatggttgtcaagtggctttatgcatgtttattgtatatgaacataacactcttgaaggtacttgtagttcatgaatcacgagtattcaaattggatgtttcaaacagatgcatcctacacgtctttgatataatccatgatcttatgttctgcactgtgatatttacttttcttcataccattgttatttacttcttgtttttgatttttttaatgatcttttcaattatttatagggagggtttcc

SEQ ID NO: 58399 - DNA, 845 bp, Populus trichocarpa
  Intron number 3 from transcript POPTR_0001s27630.1 (locus POPTR_0001s27630) derived from phytozome v7.0 (chr-ID scaf fold_1; pos 26509351 to 26510195 reverse strand)
gggtgttcaagtcaagctcactggtggtagacaaggtcactacttttttcacttttcttcttcttcttcttttttaatgtagattttatggatatggatttctggattatgatttgtttttgcattgtttggtattgtttgggggtgattaggttaaataaaggaaaaatgagaggacgtgtagtgtatttacttaaacctagtgtgatgtgcaatactgtaatcttcaacttttcacaatatgggtgtaaatggccagacaagatccctattgtttgagttttagacaccaggtttgtttctttttgttagtatgaaagcggataactagaatggactatggaaggagctttcaaaattcaacagtggaaatcactttacatttttcggggggtaatatttgatctttacagatgatctctttttttgcaattagagatctgctagcctttattttctgtctgtagattttatgatttttggttttgaattagaagatttaggatgcggattcatagttggtcataagaacataacaagttggagcacaagccatgcttcaaattgtatggtgtagatgggtgtgggacagatttttgagaataagagcgtggttgttgagttaataactgagtttgggtataactaagaaagaataactttgtgtaattcttctttgtcaccagcaaatatcttggcagatctttgaaatttttttattctgccactaaatttagagagagcttccagatctttcataaataaaacattaacactttctatctgtggtgtgcaagactaaactgttgctcttttgggttcagtgacagggactttgaagggat

SEQ ID NO: 58400 - DNA, 816 bp, Populus trichocarpa
  Intron number 5 from transcript POPTR_0001s24150.1 (locus POPTR_0001s24150) derived from phytozome v7.0 (chr-ID scaf fold_1; pos 23518830 to 23519645 reverse strand)
attcctgtcgtatgttaatttcctgcgatgaattataatgttactgtttctgtcatttcggatcagtttagtaacaagcattttaatttatttagctctagcgtgtcaattttgctttctgggttgactgttctaacgtcgggctttagtagtataaattgaggatacagctgcagggtttctagttatgtaatagttttgtgctaacatgcatttgtctttgcctttatttgtttatttatctatttttcttttaagaatgtatttcctgaagaagttatctgatagagctgtgcctgcagattaggatcagtattttcgttgaagctttttttgtatttctttcctgctaaataatcatttgatggatgaaggtgattctatatcgttcttctggatgcaagaaatcattctacaatgaacttgatccaaattattcccagaatgcttgtcatgtatgtgcatgtcttctcttttcttagtagctggggggtggaggtatgccaacttgcagcctgaagtcctttaacactggcaatatgtaattctttctgctgtacttctcaataaattatccttttgggaccaacttccttcaattacttctaagaaatatcttggaaacatttgttatggtggatataagaaattaatacaaaaatgcattagagaatgactgcatggattggtttcgacagaatgctcaaaatgtcatctttctgcattttttggcttgtgtacctttcgctgtcagttacagttttagttttaatttcaactttcaaagtgttgatttctcatcttttttgttcaggt

SEQ ID NO: 58401 - DNA, 664 bp, Populus trichocarpa
  Intron number 3 from transcript POPTR_0002s14930.1 (locus POPTR_0002s14930) derived from phytozome v7.0 (chr-ID scaf fold_2; pos 11046187 to 11046850 reverse strand)
gagccctacaaaaggttttgggggctaagcacctggtgaggtttcatgaaaaataaagtgatacatttgttgttagttctatttaacttgaggcgactctctctctctctcttcaaattgattgaatataaaacaatctaatgctttagttctgcagaatttttcccacctaaattatattagaagcatgttgtaattgattgaatgtatccttgagattacattagttcccttcctttgagatcttactatatcttgagatttttcctttgaagttttatcagggtgttagttatttttcagtgtttgttttggaaagtgtggaggttggtatgccccaagtcttttcaggattatagtccaaattgaaaattgtaaagattgccgcatggaaggagttggagaggttcttgtttggaggaagagactctgagagctatgtaatttgtgtgcctttatatctgttaagaatggtggtgttttgtgtaactttcaagtaacaaagggccatctagaagtgtgtgttcgtaaatatctatgattttgtggtctaatggactcccttttgctgtgtttgaaaagaaattggcttcttgtttggcatggaacctaatatctgttcttaatcacttaacagatctatcaacatcaacacaacaagcag

SEQ ID NO: 58402 - DNA, 743 bp, Populus trichocarpa
  Intron number 2 from transcript POPTR_0010s09340.1 (locus POPTR_0010s09340) derived from phytozome v7.0 (chr-ID scaf fold_10; pos 10198843 to 10199585)
gcttcaagaaaatctcacaggtctccattctcttcttgtatcattgtcatataacttgaacactgtttgcttaatacatatgctcggtgtggaagaagtaatacttgaatgttcttttgactgctttctattatagatattaaagtcaacaaaactttgctgattcaagaaaaaaatccaattatcataaatctcatacatgggcagtttcttccttattagttaaagcctcatcatcaactgaaggcaagtctggtttgaatcgtaacaaatgcatgagtattctttctattgcgatgcacataagagcctgttctcaattacagctagctggtgtgcgcctgcatatgtttgcttgtgttcatcactatcctccaaccaattaaaccttgaagtcgactgtccaccatccttcacatatctattagttatcccacgttaatttctctgaatgcaaaagatgccccggatttagtttccataaaataattacccatccacatcattcagggcatgtttaaaaaatgtggttatggaagtggataatcaaatagcacatcatgctttgttctgcatcaagaacattttaaatgcacaggctcatattctaattgccataagttctaaaaggtcacagggcgtttaaatactgttcatcaataacaaccaagctgctgtttgcatatatcaatgactgatttatgggccacattctcaatgagcatggatttgtttcaacagat

SEQ ID NO: 58403 - DNA, 261 bp, Populus trichocarpa
  Intron number 4 from transcript POPTR_0010s25120.1 (locus POPTR_0010s25120) derived from phytozome v7.0 (chr-ID scaf fold_10; pos 20959116 to 20959376)
agatttcacaacttgcggtaagttctgacttgtcttgatgtttttaagtttttttgttagaaacaaattggaatgtatcagtattttgaaactaattgctaaatgctcttcatttcttttctttttagaatagattagtcagaattaacaaacagcctttgcctagtgaaagagaaaataaagcaaaaatcttagaacgagctagtattagttaatgaagcttaattcgttcttgcagatccatttctggcaagaaggatt

SEQ ID NO: 58404 - DNA, 478 bp, Populus trichocarpa
  Intron number 2 from transcript POPTR_0001s15030.1 (locus POPTR_0001s15030) derived from phytozome v7.0 (chr-ID scaf fold_1; pos 11863155 to 11863632)
ctgagagtaagttcagttgattggatcttctattatatgtgggagaatatataccttccttatatgccatattttgaagaatctggccgggatcctttatcttaagtaaacccactttgttcattttctcatcgtatatattatagatcttttttcgttttctttttcatttagttcttttcatttcatgtttcagagaagtgagagagaactcaaaagagaaaaaaccacaattaatccctgcttttttgttctaagaaacagaaaacctattaaattatattggctggagttaaatcaagtgagattaatttagggtttaaggatttcttccccgcaccccccctaaaggtggcttgtatgattttgaccttccaatctctgataatctaatctaatctaatctaatatgtactcgcttttctaagaatattaacttcttctttttttgcagtaacaccctccactggcaccgtcc

SEQ ID NO: 58405 - DNA, 725 bp, Populus trichocarpa
  Intron number 4 from transcript POPTR_0001s15030.1 (locus POPTR_0001s15030) derived from phytozome v7.0 (chr-ID scaf fold_1; pos 11863917 to 11864641)
ccgacaccaacagcagacagaaataccgaaccaatgtaaggatcttcacatgtttgatatctgaaatacgtactgcttatgacctggaggtttatctagtttttattttatttttatgttcctctacaaactcatatataactgttgcttttaactgtgggttttgtttctcacaaatttgaaacacagccagaccgaagtcccatgttgtcccaactggtactaattgtcatgcactgcaccatgaattaaagcaccaagacaagtcggctccaatagaagctatggattttgaacattacaagtgtctaagtcatgtagggagtgtatttaaaatcatctatagaaaataatttgtcttaattgatgaagaacttggtttgatatgattgtcgaaaaaaagaagagaaatttagatcaccatttacctatgggcttgttgtttagtgatactaaatgtcagctttcatgtttgaatgtcacttttatcataattaaactctaattaaattggaacaaattcgttaatacacacacacacacatgtatgcaatagatccatcatatcgcaggctgactggaaaataggatgtggtcttgcaagaatttattactatacatttcttcagcaaattctaatctccatggttttttttttcatgtttttttctttcttctagatttttgaaacttaaagaaacatgatcatgttggaaaccgcaggg

SEQ ID NO: 58406 - DNA, 993 bp, Populus trichocarpa
  Intron number 1 from transcript POPTR_0001s16480.1 (locus POPTR_0001s16480) derived from phytozome v7.0 (chr-ID scaf fold_1; pos 13269363 to 13270355)
tggaattcccaaccctcggcaacttcacgtacaaggttcatcctcttccacaactgggatctcaagtccttcatgtgtcaagtgtagcctgacgagtgtaacctttcatagtgttcattcttgatttacgcaagactcacattggatttctgttcatttttatgtctagtgacggttcttattcagacagcttcatcttccaaattagctttggtatcttggttaatgtaggaaatttctttgggcaactgttggtgtaatttttatttagatgagacctgcgaggatgtcataaatcaaaccatctatgtttctttgttgaactattcatttttgtggttcagatttggtccactattctttctttttttcttaattttaaggataatcaattaagtgggaagttagcttttgattgtttgactgtaggggcagaattaattaggattttatctgtgtaattcacaatcactaatagactaaagctcttcaacttgggattgcctccactgcgttctgaaggttgtttcttgctgtttctctttacttgaggaagatcacactctgcacaaatttcaaatcccttgctacttcgaattccttcaaatgcaattgctgctttaagatttcttcagtctgcgatcatttcaatgcctaacacgtcacatagtacttgacttggaacaacagatcagtttggagttattatattagatcatgaagcttcttgttatttgatttttttgttgtttttggctatgtatcgtgtaactcttgctacttgatgaaagttgatgcttgctgttagaaaaattttgcatacctacccatgtcagctcccgcaaattagaacttgtgaatccgatgttgttttaacttcacctcctccattgtagcttcactttttgcttgtcagttttcatgccttttgcttgtagttcctgataaattaaatttttcttgtaggagttttctctggtaacctgtcattgg

SEQ ID NO: 58407 - DNA, 627 bp, Populus trichocarpa
  Intron number 3 from transcript POPTR_0002s01970.2 (locus POPTR_0002s01970) derived from phytozome v7.0 (chr-ID scaf fold_2; pos 1049669 to 1050295)
gtagtggcattaaggtcaccggaaagcgaaagaaggtccgttcttttatggctgtagctcttttattgtataaaaattgagcaactttcctaagaatttagcgaattgtatgaagaaattggtaaaaactagaccttttgaaaatcccattactaggagcctggttggttaaattgatggggataatggaatttaaatttctaacatggttgaaagcattaagatttttttaattttttttgaggttttctagatgtttggatgcttagtgataatggaagcccaccatctaatttggatttatagtgtcattcactgaaacaataagatgatcaaatctaaaaatcagttagtttccacttcttttagcggcactgtttcattttgtgcacattggtttcatgggtttcgtatcattggaagtgcaatcggccagttttacatagcagaactggaaatctgagctgattgcattgagaggtaatgtgactgctttggagggaaatgcttctggagaccagtcggatttctgttttgtaacgatgcagttaggataaggagttgattcatcttcttatatacttgtttagcaaagttttactaacaacagagatcttcttttgcaga

SEQ ID NO: 58408 - DNA, 430 bp, Populus trichocarpa
  Intron number 1 from transcript POPTR_0007s01870.1 (locus POPTR_0007s01870) derived from phytozome v7.0 (chr-ID scaf fold_7; pos 1085343 to 1085772)
aacaatatccggttagttcttgtgttcctatcgttaaactactattagtattcatggtttgagctttgacatcataaagtattaaattctaagagtcacattggccaagttaatcactggggtcccaaagttttgtattgaggtccataaggattaaattaatatcagctcaggaacttaaagaacctataaacctatatttttgctttcttttgatccaaagaaccaggcaactaagaggtatgcattcttttgaaatgctattgaacttaggatgcaatatattcacgctaacaaactctgcttgtgcacatgtcaaaggctgaaaaatctctatgatgcacttgcaagagtcttcctgtaatttatttttggcttaattttgcactgcaacatgcattttaatgctttttttcttttcttttgcaga

SEQ ID NO: 58409 - DNA, 637 bp, Populus trichocarpa
  Intron number 1 from transcript POPTR_0007s08250.1 (locus POPTR_0007s08250) derived from phytozome v7.0 (chr-ID scaf fold_7; pos 6839762 to 6840398)
ctgctctcgtgactatacaaggtataattcttcaccttttcctttgaaattgtacatggcatcttggttttgtttggtttggtggaaagtaacttactttttgtgaaagattaggaagagattgtacgggtgagtttttgtttttgtgttaatgttctgggcttgtaaagaaaacactttttaaaaaaatcttttagatttttcggttttgaattggttcttaatcgggaatctggcttatttttctgttggagtatgttaaatttatgtacttggctacgattttcctaccaacagttcattttgtatgttgccagaaagctttataatcataatgggtctggatttataattcgccttatagtttatcccatagaatggatgaccatttgattgcatgggagagttagtaaatcttagaagggatttgactgtcaattattacaaattgtttgtaaatttttcaggtcggaattgaagcttaaagtttatagtattagttaaattttgagttttttttttttttctagattctgattttcattttatggttctttttttctttttactaaaagtgcatgctttcgtagcctattttgatcttgatgtgtattggcaaatctgtttgcagggtttt

SEQ ID NO: 58410 - DNA, 539 bp, Populus trichocarpa
  Intron number 2 from transcript POPTR_0007s08250.1 (locus POPTR_0007s08250) derived from phytozome v7.0 (chr-ID scaf fold_7; pos 6840697 to 6841235)
agacttaaagtgtgagtcttgacacattatgttgtactctatctcattttgcttaaactaaatgtttaacgtctctgaattttcaatttgtattatatgaatgttttttgggtagtccctttcatataaaaattggattaaaatggaatctatatttacaagttaagataatttcctgttccctttggttggtcagcgatgagaacatgctgtgtttatgcttttatctcttaatttttttgttagatagtagtatatggggattaccaatgttgaatttatagagtatttgaatgaagtataacaaagaattcaaaccagaatgcacactatttgatggcgagacagagaaggtagagttttaaaaggagtaatggttcttctgtttacactacataaatttttaagcgggtgatttgatatattgttgttatactgcacattgaatgcacagtattcttcgtaattacgtgtgagataaatcatgtattttttgaaatgcaggccccaggtaacaattgctactgcaataattttct

SEQ ID NO: 58411 - DNA, 722 bp, Populus trichocarpa
  Intron number 1 from transcript POPTR_0007s00450.3 (locus POPTR_0007s00450) derived from phytozome v7.0 (chr-ID scaf fold_7; pos 169349 to 170070 reverse strand)
aataagctcttaaatcaggtagttttcaagttgtcgaatttgtttttctttcttcaaatttagggtttgtacttaagttcactgatttaattaagttgagcttagattatatgaaaagaaatttcaagttattcttattgatttttgcaaataatggggacttaagatgtaattacaatgctattggatatggtagaagtcttgaatattgtgcttattgtgaacatgaaaaacagaatcatcacgaacctagtttacaatgtactggagtaaagctctattcggtattgcattttggctgcttttgatggtgtttttcgaggttcatttgggttgtaaagcttcaaactggatgcttttggatggttttgatatgcgaaaagcacccaaaaaagcatcagattgatacattcttgcaaaagcacctgacccacattaccaaacacacactaagtgctgccaaataatctagttagattgttgatgaattgggtttgtttgatagtcactaatagatacatggggtaaattgtagtactaggaaggaataatgagagaggtagtgggcagacaataggatgaattgaagtgttagaaacatgatttaagaaacctatggtttcatgttgagtactgtaaataactgtctttctttttggtttggcattcactcataactatttgcaggtggagtactatttcagtgatttgaacctggccac

SEQ ID NO: 58412 - DNA, 404 bp, Populus trichocarpa
  Intron number 2 from transcript POPTR_0002s08220.1 (locus POPTR_0002s08220) derived from phytozome v7.0 (chr-ID scaf fold_2; pos 5700715 to 5701118)
tcattacaaacacagggtttgttcgcatgttctaagttcatcgttcattgcttcttcttttttccggaatttctactgttcttctccttaataataggttcaaaattagataaggtttcaagattgcaacccttcatatcttatctgctatatcttaaaatgccataaaacaagcaaggaaaaaaattgatgttgtatgaccgcaaaaaatgtaagactcaaattgcaagttttttttcagaatgattgtacattgtacgtttattagggaattctgtaaggcatgtgaaagtccgattggaatagagtaaaatcaaaatatcactaactagtattaatgtcgtctttcttgttctgggtttctggcaggcagataattcaagaagaagaaatattaacaataa

SEQ ID NO: 58413 - DNA, 969 bp, Populus trichocarpa
  Intron number 1 from transcript POPTR_0007s05130.1 (locus POPTR_0007s05130) derived from phytozome v7.0 (chr-ID scaf fold_7; pos 3320022 to 3320990)
attgggtacatcaagcttataaaattacaactagaatctcaaatgaattttttcttagtcaataatataacttatcaacaagcctacatatatattcaacaataaataatttgtatgtattttaagatttaaagttgtgctcaatataagatgctcgattgtctttttactgaatttattatttaactcttgtaattattaataaattatagttataaatatatcaactcgataatgatactgaatttttttttttatggtgccccatgcatgaaaatcacaacgattatacatggagtgatgcaaataatacatcaaactctcaaagccaaaaatcattgccaaggtacctatctaagcaaagatatcatatgggtttcttatggacgataaaaaaaaaccttagcatttatgcacgatatgactacttgattttattgttcatagccagggattctcaccattcatgattcaccgaagataataataaataaattatttacgctgtccatgcataaaaatcaaattgggccaaagctgatttctattagtacattgacaagctactagtcaatatattatgttaatattttttcaaataaaaaacatatacaccctcaagtgttataactctcagaaaaaaaaaatattatgttaatattttttcaaataaaaaacataactctcagaaactatctaacaaaaaaaaattattcggcttttattaactaattttaaaaaaacaaaaacatgtgtaattctatcttttgtttctggtagggacctcaagtgtaaaatacatatacacccttagaaaaatttaaattttttacaggtccgggctctacgagcctcccattgtgtctgcgagcctcccattgtctctgccctgattggtgtctaagggtgagttataagcttcttactttttaagaaaggagatattctagggaagagaggaagccaggc

SEQ ID NO: 58414 - DNA, 939 bp, Populus trichocarpa
  Intron number 1 from transcript POPTR_0001s00790.1 (locus POPTR_0001s00790) derived from phytozome v7.0 (chr-ID scaf fold_1; pos 642337 to 643275 reverse strand)
gcaagtatttgcaggtaatgagttgttttaagtttttttgattgctttcgaggcctggtaatggttgtaaggtattcaattattgcagtccttcagggtacatattaacaattacagaggttcttgaattattgcagatgaacttctgttgtacatccattaaagctcgtacatgcatttttagcttttccaataatttgcattgttgatatgctctggcttacgaagttgaaattgatagtgaatcatttgtatttaactgcctgtctggaatgtgccacactcacgcgcttaggtggtgttttgcattatcatccaatcatatttttgaaaaagatttagcttcaaattattattatttttttttagatcattttaataaaaatttaaaaaaatatatattattttggtattttttcgaataaaaaatactctaagaagtaaccttaattagaatttcgaagacacttaactagtgctgttggatttgaaattagtgacagtactgacttttgattactgttagatgcatctgaatgctagattctccgcagcaatgatgaatgcaacaaaattgtaaaagaaattgatgcaattctattaataacttagtctaacagtcacaagaaaaatcctagtgtagatttagttcgacagggcaaagacaagaaaagcgaaataattcaatggttcaactacacaggaaaagaaagcctataattttacagtgaagcttatttgatggttgatggactggcgttttgacaattacttggattgaataatctacttggcaaacacctataattggaagactatgctgtagccagttgatgtttatgggctatcattgtataatgaagtttacatggttgagatatcaatggttgcgtgtacttcattattttacaggaaggtaaagtttttatctctggaagg

SEQ ID NO: 58415 - DNA, 661 bp, Populus trichocarpa
  Intron number 1 from transcript POPTR_0002s06200.1 (locus POPTR_0002s06200) derived from phytozome v7.0 (chr-ID scaf fold_2; pos 4156891 to 4157551 reverse strand)
agcttgaagaaagcactcaaatacagatacttagggtgtttatttcctttacaaggccttggccaaaacaaagcttcttctgcaataggaggttactctaaaaatggaattgggttcaattagccgtcattgaagaaaatgctgacatgcctttagtaaatttcctgaacttttgcgtcgtggattaacatattaacagatgataacgagttcttagatataagaccatctgttgactgctttgacatcataatcaaatgaaggtaaaaacctgagagaggaaaaagggagcagccaagaaatagtctgtagctcacatgtcacgacagtcatttagctttactaatcaagaatcagtcagttcttcagtagaacattaggtgtatctcttgcccatctcttgattgtctttattgtagatctatctgctatgccaccatatagccataactttatataatcattcaacgaattatctggtttgtcctctaagatagatagtttgccttagtttacctttttgctcacaaattaggtttctatgccctgtttcttttctcctacagcagtaatttgtttgtctacatcatgctgtctaaatgatttattatttccctttgtttcagattagtaattgatcgagaaactgggaaacctaaag

SEQ ID NO: 58416 - DNA, 504 bp, Populus trichocarpa
  Intron number 1 from transcript POPTR_0001s30180.1 (locus POPTR_0001s30180) derived from phytozome v7.0 (chr-ID scaf fold_1; pos 28724934 to 28725437 reverse strand)
gatactagaagcagcagactttctgtgagttcttgaacttcttcctttgcacctttgtcatataactggtgaaggttgtggtctcaagattcagtgacttctcaagaagaatgaatcatggattacggatagttatcattaaacaaactggagcacaaagctgtgtaacaaacttggctgcatatttcaaacttaaaaaagtagaaattcaaaatgtttttagcccaattatcaaatatactagggaaacaatggaattcttcctattttccaaattcacaaaagatttttcgccaactaaataattcatgtttaaggagtaattactgaatcaacttgcgattcaatgatttaaaatcttgtttttgtcatatgaaatggttgctttgctctagtaacgcgtgctgctcaagaagttctttaatctcttcattacgctaatattttagtataactccatgctgtctctttatggacagatttcgccaattaattcgttaaagt

SEQ ID NO: 58417 - DNA, 621 bp, Populus trichocarpa
  Intron number 1 from transcript POPTR_0001s10100.1 (locus POPTR_0001s10100) derived from phytozome v7.0 (chr-ID scaf fold_1; pos 7825496 to 7826116 reverse strand)
ggagtggagtgacaaatcatttttctcgacaattggtgagataccatgctgagaatttataatcatcagaaagattgtaacacttgctggaaacaattatgtatgagacttggttctctatcctgatttgagtgaaacatcaagaactgtactatttaagcagatttttggatctgcatatcaatttacaaatgtttccttgactagactgtagaggtggacttggtctcaatgcgccagagctagcctgaaaataatacttagccacaaactgaggggaaaaaaaatatagtcgttgtttgcttcgacatttgagtattgatggcactatccccacttcgttgatgaaaatcgtctcctggattgtgtgtgtttcagccgaagggacaattactcggagtaatgatgatgagctatttttcgtcctccaaaaaaaaaaaagaggccatattagtaatgtagagtaaatgataaaacaccatgaaaacgaagttcgtttggtatatgatctgttagagaaaacaggattggatgattttattcctgttagtattcaaaatgcgtgatgccttttcttcttgcctaggaagactgaatttggattatattatatttgtatac

SEQ ID NO: 58418 - DNA, 539 bp, Populus trichocarpa
  Intron number 1 from transcript POPTR_0010s16890.1 (locus POPTR_0010s16890) derived from phytozome v7.0 (chr-ID scaf fold_10; pos 15692568 to 15693106)
atattaaaaaccttttccaatccctaccctaaaaggtacgtgagtatatcttctctcggattcatttcctttcatattttctttcacgagtcgattaatttctgtcgcgaaatttaaaaattaggttttcaaagcacaaaacttgacttggaggtgacattgaatgtctttgttttttctttcagcttcaatgctgtctgttgctattaattgtcttaattaagccaagtagttgaattggatggatagaggttggggattttctgctgttttgttacctatgagtaatattaccatgaattgtggaattgggtcactaggttacgttatgcgattttcttattcaatttttaatgcaaattttataaggaattttaaggagttaaaatgtaaagaaaaatgtggtattttgctagttttgataggaattgtgatcttattttcatttatctgtacatgtgatgatttggattttgagtttgatatggtgtttttctgtttcaggaaaattatttgattagtgtgattttgtgttaaaa

SEQ ID NO: 58419 - DNA, 97 bp, Populus trichocarpa
  Intron number 2 from transcript POPTR_0010s25610.1 (locus POPTR_0010s25610) derived from phytozome v7.0 (chr-ID scaf fold_10; pos 21203752 to 21203848)
ctctccaggtcaatagtctcaaaatattatttgatttcttgattttttattgtttctgctgtttaagttttttcttttctttttggatttttaggac

SEQ ID NO: 58420 - DNA, 776 bp, Populus trichocarpa
  Intron number 3 from transcript POPTR_0010s25610.1 (locus POPTR_0010s25610) derived from phytozome v7.0 (chr-ID scaf fold_10; pos 21203894 to 21204669)
gctaagaagaatctctttgttaaaagaggtgaggttctgatacagcttgagttgatattttttgttctgtttgtttcgtggtcacagaatttgaaacttaaaaagttttaaagaagttttcaattcatgaaaagctttagtatcgtgatacttctgggtcttggattggacttagaaagttatctgtgatttgctactgtagtttgttttcataaagtctgaactaagattagaacggtgatgtgtgcttggtttaatttatcaaaaaagagagggcttgtagcacattgatacacttgcaatgcaatggggagctgggatttggatgagtcctagctggaacctcataaatgtccttggggaatggaattgtggaactaacttaatgaaattttctttgtaactgcttaaaactgtcatttccattaggatgcttgattggtggattttaaccctgggcttttacttccagatggatggatcatggataacttccttgatctgcagtgtcttcaatagtcatgtcatgacagtacatgcgcatatcaaaacatgcatacagtgatgaaacctgggaaaagcttgaattggaggttttagttatgcctgtaatcagcatcactgtgtcctatttttttgtatttaaattttttgattgctggttgttggtttgcaatcatgttgatgagttgaatttgataatgtctcaacattgctgtaggtttgttatcttttgctgatattttgttaatctacaggaatagttgctgattcta

SEQ ID NO: 58421 - DNA, 803 bp, Populus trichocarpa
  Intron number 2 from transcript POPTR_0001s33550.1 (locus POPTR_0001s33550) derived from phytozome v7.0 (chr-ID scaf fold_1; pos 31753984 to 31754786)
caggttgagtttctgttcttctttttttaattgaatttcttagtatcaaatttttttctgggagcgaagctagacaaggaaaacgaaaggaaatgccaccaaattatagtttcagtctttcaaaggaaatgacagaaaatggattttttctttccttgttttttactggttttgaaatgaaaggtttttttttttttttttttttttttttttttttttttttaatacaaatgagatttttttttaaaaaaaaaattctacaagtttctttgggtttttggttggccaaggatgtagtttaaggttcagttttatgaattttatagtttcattgatttgttgtttggtttctgagaaaagggaaggaaatggcagaaaaaaggtttcaggtattgaatactgcttttcaattgtgtttggtttctgagaaaagagaaggaaaagaaggaaatggattttttattttcgggcggggaaagctggatatgttttggattctttataattttctaatcagtttcacttgttttttggttaatgaaatccacagtttgaatagtaccttttaagtaatattcccgcgtgttctataaacaaaaatggaatcctggccgtctacaattgacagttgattttttattatgcttagaaaaacagaggaaagacatttttttttttaaaaaaataaaagacagttaatatacttttctttgttcaattttatattcagataacaatccaactagattggttggtttattgaataatatgttatttggtgatgtatgatcaggttggttttg

SEQ ID NO: 58422 - DNA, 193 bp, Populus trichocarpa
  Intron number 2 from transcript POPTR_0002s00720.1 (locus POPTR_0002s00720) derived from phytozome v7.0 (chr-ID scaf fold_2; pos 318494 to 318686 reverse strand)
agaaaggtattagctaacaagagaaaactattaattccttcatggttcactatcaaattattaatccaggccaaacagtcttcgtttttgtttgattttccagagatgaatgaatagcaataagcagtaccatttgatttatgtctttggtcttgcaggaagaatcagaggtagtgaccattagtggatacca

SEQ ID NO: 58423 - DNA, 361 bp, Populus trichocarpa
  Intron number 2 from transcript POPTR_0001s45840.1 (locus POPTR_0001s45840) derived from phytozome v7.0 (chr-ID scaf fold_1; pos 46334897 to 46335257)
cttcttatatcatctacaccgtatgaatcttccatctaaaaactatctcgcagtcattacagttttgagttttcctatctgatacactatcagtgtttcttgtaatcttcatgctcactttataggttattcaagcctgatatctgctttgtcagttcactgtacccaaaagtgaatctgtttgttgttaaaattgtaatttactctattcttacacatggagtgaagaattatggattgttcagttctaatgtaggatatttttttgcatgtttgcattttgctcttacattacttattattcttccccccccccccctcccttttttttcctgggtgatcatcctacagatattctaga

SEQ ID NO: 58424 - DNA, 952 bp, Populus trichocarpa
  Intron number 2 from transcript POPTR_0007s00860.1 (locus POPTR_0007s00860) derived from phytozome v7.0 (chr-ID scaf fold_7; pos 438094 to 439045 reverse strand)
tcctcatcaacactttctacaagctggagtgtgaggtaggcaattttgtaccgcataattggactttacaactatttgtacttccttttcagtttctgggaaaatctcattctttttcaatttccatcccaaaccaattaatttcatcaattccatcccaaagctatcttagacaatttgtccctccattcaagaactgtaatgtgcttttttcttttgtgtctttcggctactggaggaggcaaatatacatcgtctaatttctaataggtctgggatgaaatgattaaaattaatttcatagggatggatttgagaatcaaacaatattatcttagaatcataatgaggtcttctctactcttttgctttctatatctattcgtttgccttgatttttaattttttctagaaatgtattcaaacctatccacatcggtctgcatgggtattgttgagttttatacttgattaaaaaagatgaaattgaatggaaaaaaaaggcaaaacaatgaaaaaaaaattgtattgaaaaaaacagagtgagaagctttttaattatggaacttcataggtcgtatgaacagtgaaggtagattaaaaatatcaaagttttttagatgcttacgcttagggtaatttctactcggcatttgaatctagtgagacacggtggtacataggtcattatatgccataaagtcgcatctctaagcacatgtcaaaaggagaaattataatgttggcttctttacatgttggtggccaatcctatcaagatcaaataattgtgaattgtaaatgattaaaatttaaaactcttagcagtaaaggtaacagaatcatgaatatttagagataaataatttgaacttgttgtgtttttatgttatgtaaattaagggtccaaatctccacaaatattttgttgttcgttcaggtagtggataca

SEQ ID NO: 58425 - DNA, 486 bp, Populus trichocarpa
  Intron number 1 from transcript POPTR_0001s21340.1 (locus POPTR_0001s21340) derived from phytozome v7.0 (chr-ID scaf fold_1; pos 19753878 to 19754363)
aggaggaagatttcgtttacttggattctttttaggtgagttttactccgcgagatccggtttggtctgtggtttatggcttgtttggttgctgagaatttgtgagaaacgaagagtaacagtccaattattatgcttgttttagatttaagatttatttttattttgaattttgatatttttttttattatagtaattaaaaaagagttgagaaattcctctggtatgtttatatattggattcagaaagaaaagatttgcgtgtagttgagtaaccagtaaagcaagactaatccctgattaattctctgctacaaactggctaggttaatggtatttctgtaagtatttaactctaatttgttgagttctggtttgaaacagatgcgtgaagaatctagttctcttctgatccgaatacacagaaattgactgttagtttttcttttcttttttggagggggcattaactttcaacgaagaac

SEQ ID NO: 58426 - DNA, 632 bp, Populus trichocarpa
  Intron number 2 from transcript POPTR_0001s21340.1 (locus POPTR_0001s21340) derived from phytozome v7.0 (chr-ID scaf fold_1; pos 19754445 to 19755076)
aggtagggattcttttgaggttaatttttttttccaaatagtatagttttgtgatgcctttatgtgtgtttgtggtatttgatcattcttgtatgttgtttcaggttaagcccattatgcgaaaaataaaaaatattcagctattcagttttagaacaacaattggtcaggacggatttgtctgcatttagtaatctattaacgtactcagaatcacagtctttctggcttcttgggactttttttttggcctgaaatattgagtgaaaacataccctttgcaaccactgacagctattcatttattttggcggtttgaaatttatttgcagctatcatattatccttaccgtagagtttctaaattccattaattatgtgaagaagctctcatattgggatcaagaccaatcatctcactcactttttattgggtcaatactcctgataatatgcacgtcttctctggccaataaataattaaatgcagcgcaatcttcagtttttgttcttgtctcataccaaattattaacttccattttctatgtgtttttattgtgtttctcatgaagatactgatggctacagtgtgtttctaataatctatggcagcttgaagataatctgtggg

SEQ ID NO: 58427 - DNA, 389 bp, Populus trichocarpa
  Intron number 1 from transcript POPTR_0001s19480.2 (locus POPTR_0001s19480) derived from phytozome v7.0 (chr-ID scaf fold_1; pos 17157046 to 17157434)
aggtagtaatagaacctggtagagtttttgcagcttttgaaccgagttttgtttctcaagatgcttaaacatgcaaataaatatgtatccatgaaggtcctcttttgtgtctgtgctgtatgatgcttgtgtctgtcttggctgatgctggtattaaaagtactaagttggaacagtgtttgtgcataacacttctgtgatattaattttattttcttttcttttttcttatcttttttttttaaaatttttgaggctgaagtttacagtttttttctctgaagaatttgaattcttaagtaacattcaaatataaaatcttcacctcatatagatatgatttttgtgtaacagacgctttattttgttggtttagggattggtataat

SEQ ID NO: 58428 - DNA, 162 bp, Populus trichocarpa
  Intron number 1 from transcript POPTR_0001s14730.2 (locus POPTR_0001s14730) derived from phytozome v7.0 (chr-ID scaf fold_1; pos 11601795 to 11601956 reverse strand)
ccctctctctctctctctctctctctctctcgtaggtactctatattttatttttccttgcttctcttctgttcattacagattctttgaatctttacttcttcttcttcttcttctttttgtttagcttctgattaactctttgtttatttgcagaaagca

SEQ ID NO: 58429 - DNA, 815 bp, Populus trichocarpa
  Intron number 2 from transcript POPTR_0001s18680.1 (locus POPTR_0001s18680) derived from phytozome v7.0 (chr-ID scaf fold_1; pos 15817939 to 15818753)
agaacagcagtgctcctgctgcaaagtaagctggcgttgattgcctttctgcttttggagttattttctttgttgtgttgtcttttggttcgatactttgtgtttgttactgtggccaatatttaattgctgtccgaattgtgggatagaggaagaaaatcaaaccattagttccaagaaatgcagcagtgagcaaatcaaactatattagaatgttttttttttgtcttgggaaagataaatggaatcactaacctcagttttaatcagagggttgcatacagctcagttgagtgtaattaacttggtttttggggggacctaggaatgaaaggggtgatcttaaaatctgatttctctttcccttcctaatcttgtgctccttagatttattttcttgaaagttttgtcttttccttcttgaatattgttcaaactgatttctggttggattttttttccccttgaaggggttgatgactgtatattgcttcatgtttaactttttgcttatgctgtcgctgttatgggatatatatcatggttgaaacttgtttgttgagtttatattttcctcccatataataattgagaggtacttgcataaactgttgaaaataaatagtgggtatttcttcatctttgtggagtttctgcgtgcagtttatttcttcattttcaggcttgatttttctttcaatcaaaagcgttcaccttttccttatcttgtcttggtcaatcatatctttatatgttagggtaactttgataaattgctgatccaaaagtttctataacaggacacaggtggtagg

SEQ ID NO: 58430 - DNA, 750 bp, Populus trichocarpa
  Intron number 1 from transcript POPTR_0001s35430.1 (locus POPTR_0001s35430) derived from phytozome v7.0 (chr-ID scaf fold_1; pos 33757089 to 33757838)
tgctgaagctgctcgtaacgttgttgggattatcggtatattttctttcttcaaccttctgcaccctttctgccactccacctgaatatacaaccttctcagattgatttctcgaaaactagctagggttttacggtttctcttctgtttgtcacgcttctcatacagttttgatgttttgttcttaggaataaaagctttaatgtcgacgtccgtttttctgatacacattatatatatatatatatatatatacctttctttttcccttataacgttttatgaatctactttaaggtcttcaacaggcattgtttatacgtcccggtggagattaactttgtttatacgtcccggtggagattaacttactaaaaaataaaactcattgcatagtttggagattaattttgaaaaaagatataaaataggtacaaaaatcataaacacaatttcaactttgattggtatttcttttccttcattcaaataaagatattaattaatggagaatctggcaaagattgtctggggaaggggaaggggaaggggaaggggaaggggaaggggacggcccttaattactctgtgtacttgattaattaccctacgcattcatgattttttttttgggaaagattaggaatttatattgcaaattttattttcttcaaggaaaacacgatttcccatgaagatatattctcctttttgtaacgttttgttttttttttttttttttggcaggga

SEQ ID NO: 58431 - DNA, 843 bp, Populus trichocarpa
  Intron number 4 from transcript POPTR_0002s09960.1 (locus POPTR_0002s09960) derived from phytozome v7.0 (chr-ID scaf fold_2; pos 7146002 to 7146844)
ggaggaaaccggtatggtgaaatatttgatttttggattcagtgtgttactttgaatggatatagtgaggattatgtactctggtaaacataagaagtccgtggtgacttttacagcaatattctttcatcttcacactggctcctgtgctgccaaaagttgctattatgaactccaaattattgttactatctatactacagttatacagcttaactatgaaattactacaatgtgcataaatcatcagcattcaccagctacggataatgctgcattttcattcttttaactttcatcataccgaggctaatatgactagaaatacatgtgctggatgctgcaacatgacttctggtgttgtcaccaatagggcaattatgctctggcaccgctatcaatgacccttttccttgtttctggccatttgtattctgaaactggtttactgtggttacaagacatgctagctagtgtttcaagaagtgcctaaacggctgtccttttatccttaaataagagtgatgaaaatatagtaaaaacctccactgtcatagatgtttatttattcaaccattcttttactttttctgagttggctattgtcgataatcacagtggtgtttttctccctgggatttgttgccaacttatgtaagaagtttggtgtgtaaaaaactggaaaaacttgctacttgtttgtctatggcagatgttctttgattaattttcaaacctttttggttcttatataaataatatcttttaattgttttctttcctggggcattgcccaactatttaccaggttttgcttgctggattggctgatacttggccagc

SEQ ID NO: 58432 - DNA, 664 bp, Populus trichocarpa
  Intron number 1 from transcript POPTR_0001s01470.1 (locus POPTR_0001s01470) derived from phytozome v7.0 (chr-ID scaf fold_1; pos 1095896 to 1096559)
cttctttcaaatatcacaatttttagcgtcttcttcacgtgttgaaacaggaaacccaggtttagtccttgttgcttcaggtgctactgccagcttgagcatgaaatgggcttactcttatagcacctggttgattgtcatttgagattgtggaattgcttcagttcatgtacatatatatatatgtgactcaagagtttacttatttacgtctatttttcccattacatttttctttttcaagtgaacacaagttcttggatttggtaagtatgagacaagttttagggttcttgagacaaaaagaacacaaggattttcttggaatagtatgatttatttggaattattttagtaaatcagagtcactcctctgttttgtttttttgtctatcattaaaagggttccaaacaaattattaaggaaaaatcaaatcaaatcctaatcaagcatgaaatccgtttattaattgtaaaatatatgtggcatttaattaataataattaaaaaaatccgagtcctttactgaggatgaatttcgttacgaaatcggataggaatttcacaagaatagtaatattcactaattccttctataaagaaaaacgaaaaaaaaaaactattaaattctctttttttgcgcagaaatctaggaattcgatc

SEQ ID NO: 58433 - DNA, 944 bp, Populus trichocarpa
  Intron number 3 from transcript POPTR_0001s27960.1 (locus POPTR_0001s27960) derived from phytozome v7.0 (chr-ID scaf fold_1; pos 26793722 to 26794665)
ctgcttcaggactctcaagttgactactcctagctgtaagtgcatctttggcgtttatctaaagatattatttatactcttttttctgtgaaaaaggttgttattggattttctgaaaacttttgcacaaatttagattattgtcaagtaactcgtaatggaagtttggattctatgtcaatatgctcacctgggcaaggttttgggggtggggttttgttatctgattatgtgaaatgtgtatgttattgaagcaatgaaaataagaaagtggattaaagttccggtatgatcatttattgtctgattttctttgctctcaagcccttggtgcaatatcttgggcaacgggcactttctcattttgtttggtgctcggcattatttttcaccttttgtccgtgcctttgtcaggtctctgttgtatttatgttttgtagcggttcactgcttcccgcatttatgttagttgcttactttatatctttcggctgggaagctttatcttacaattcacgtcttcttgaatgaggggatgtaggctcatgttgctggatctcacatgaatcttctcagatgttattctctaggagctaagcatttgcttggttgataagtggaagcaccaaatgttgggtggcagctttttatgacattaccgagtctgagataatttgattaagacattatgacactgatgtaaccttgaaaagagaagttttagtgtttttatgcatgggaatttgtttgtttgttcaccactagctctgtttttttttccctgtggcgttgatgtggtcttttgacatgaggattgtttgtgtttttcaactgcttgtctttgcatcctttctgcatcacaacaatgatttaaatgctgggttgacattgaattattgatttttgtgacagttggtgacctgaaccatctgatctctgcaaca

SEQ ID NO: 58434 - DNA, 709 bp, Populus trichocarpa
  Intron number 3 from transcript POPTR_0002s25310.3 (locus POPTR_0002s25310) derived from phytozome v7.0 (chr-ID scaf fold_2; pos 22423931 to 22424639 reverse strand)
taaaatcattcctgtcaacagttttctttgcgctggtatgtcctctgtttttgcttcttgtgaagttgggtgttgatgattgatataaaatcatatccaatttcttatgttggggtttaaatataatgaatgaagacatgtcaataatctactttgatggtcctaggttggcgaaattcgttgtcgattaagttctgacctacacaaaaggcctaacgatttgggcactatctcggagagagactaggtgaaacagacatgtctgtgaagaagcgggcctggacataaagaccctatgaagcttcattgttccttgtgattggcgccgagccatcagtgagataccactgatctatgggtcaagggacagtcatgaatgtgtatgtgtgtgactgtgtgggtacatttgattgggttgtagagagatgttggcttttgttgccgagttttgatccgggtgccagaaaattatccagtcccagagaatgtgcatgtcttaaaaaatatccgttgatcaaaagccttgttgagaaatgaaattttatgtgcttttcaattttcactgctatacacttatactcttacaaccatctggacaaactgtttgtttctgccagggggggaggttggttggttttactgaagcgtgtttgagcagtatgtttttaacgttgttaagtattgctttcttcttgaataacaggctacg

SEQ ID NO: 58435 - DNA, 515 bp, Populus trichocarpa
  Intron number 1 from transcript POPTR_0001s01720.1 (locus POPTR_0001s01720) derived from phytozome v7.0 (chr-ID scaf fold_1; pos 1264230 to 1264744 reverse strand)
ccaaagacctagaaattgatcgcctaaaggttttttcttttattttgggaatttattttatttgcttctttctttggattcatattttcttcctttggggctttatccaatatcggaacttgacagagttaacgttactttagattttttttttagtgatagatgtatgtgatacaatatctttctcaagggaaaaaagaatgaaatttctgattcagttttaatggatttttcaatctacagagagaattgggacgcgcatcaaagcaccttaccgatttggcaagtctttttctttttcccaccctatcacaatgtttcaagtgtttatctatgcttgattttgtttttctttttacccatctacttattttcttaattatctagtctttcaagctattttcattgcttttgcactgaattatgatttttcattggtttgtttatttgaaagtttttatcttttttaatggggttctgttttgatgaattgctaatccatttcaggaacaaga

SEQ ID NO: 58436 - DNA, 580 bp, Populus trichocarpa
  Intron number 1 from transcript POPTR_0007s11400.1 (locus POPTR_0007s11400) derived from phytozome v7.0 (chr-ID scaf fold_7; pos 11771855 to 11772434 reverse strand)
aaaaaggtgagagcttttattttggaggtcgtggtttgcttagtgttaataactctgttttttttttgttgtgaatttaagggtacccattttggctttattctgtttggttatctgggttttggttctttggatgtataattgtatgtttgatcgctttggttagtgttgttcagtgtgttatcgttgttgtttttggagaaataaagataccattttgggttgtatcttgctcttatctagaaatttgaagtttgtgattttagaggccggttggtactgtcacttgttgtgattcataaaggagggattttttttcttatcattttaggcgttgtctcatttaatggatcttctattgtagaattaacaatcccctcttggtttttctcttgtttaggtgcttagttgtttatgattttggagttttgttgtttttgatttgttcacttcgtttaattggtaattattgtcattattggggatggatttttttttcttttttcagtgaaatcatgtctttttttttctttgttcatttgtaggttttggctcaattaattaggtttcatccaaaggc

SEQ ID NO: 58437 - DNA, 572 bp, Populus trichocarpa
  Intron number 1 from transcript POPTR_0001s01400.4 (locus POPTR_0001s01400) derived from phytozome v7.0 (chr-ID scaf fold_1; pos 1044077 to 1044648)
tgcatccaggaacccactggagatacctcctgtaagtaataactgatcatttatactaggagcagctgtagcttttgtatctttattaattattttattgtttgataaagggtttgtatttttatcttgctttggtttattggcgcctctaattttccaaatcaagatgctgtgcctttgagacttttggcatggcggtagccggtatgaatatgaacccaaacttataagccgaatctagttgatccaagattcataaaattaactcgccccctcacaaaaaactaaaaaggaacatagaaaaaaagacaaaaaaaaaaaaaaaagttataagaaatgacgctgtagctaacaaacaattttacccggttacggctgtaattataactgcagtgctctctctctctttttctgagtatttccatatgctgcatgtataaaacttagcgtgaaaagaaaacagcagcaggaccacccccatcagctcatttttctgatttgtcttgtggtactgtccgaattcaacagtcttggatgcagcaaaggcaacgccaaaggcacaacttgataac

SEQ ID NO: 58438 - DNA, 965 bp, Populus trichocarpa
  Intron number 1 from transcript POPTR_0010s08370.1 (locus POPTR_0010s08370) derived from phytozome v7.0 (chr-ID scaf fold_10; pos 9310810 to 9311774 reverse strand)
accaccactaacttcttcaattccacttctttctggtattatattattcgctctttcctgccctattcatatactattctctaaatttaattttgagctggtatttgagttcttttcattacatataggctttacttaattaggattggaatttaccatttcaaaattgaaatatttctagacaataaataattacattagaagaacttgatgatgcattaacttgactctcttaatgatctttttgttgcttattgcctgcaagaaactcataacattacctccttttcgtaagaaatttagatttatatatatatagtaatactagctatcaattggatatcaaactggcatcgagttcacagctactctgttatgaatggcttctgctggagagataacctcattttttttttcttttttttttgttgaaaagagagataacctctttacttgtttaccatcaacaaaatgaatgaattgaatgctctatacaagtaaaaaagtctcaaaacttcgtttgaaaattccgtgctggtgatgtgctttccctatagaatagttcactaaatctatcattgcctcgggaaattgctgaatcattgaaacatgcccaagctatatgataatttgcattcttgttactggtgctgtctttctataaccttgtcacctgttgatgctattttttaagttcccacaataatttgtctccaagtatgttctaccagttgttcaaccatatttagaccaatctgttgtggtaataatgagccttaagccatgtattattatttcttaactctgttgactgtattaacagcatcttttgagaggaaaacggttaaacagtatattatgtatttttggtttgatatactgatcatcacacagtcgcaaagtgcctaagtcattgccaattacaaacgttttttccttgttcatgcagctacctcattgcttcg

SEQ ID NO: 58439 - DNA, 903 bp, Populus trichocarpa
  Intron number 5 from transcript POPTR_0001s37290.1 (locus POPTR_0001s37290) derived from phytozome v7.0 (chr-ID scaf fold_1; pos 36277956 to 36278858 reverse strand)
tctgcacgtgagacttgtaatgtttgatttacaaattaagaataaaatgcgttgtcttataattccgcgtctctaattaaagactaaaatttttaataataatatgtttatgttttggctagatggctttgttggtgattctgtcttgtttattttctttagaagtggcacctacggcttcagtctaaaactttataataaaagtgacgttatcaaatttgcattatgttcaactaggatgtctgtcatgggaatttttattaaccactgttcgttctgtactgtgaattgtttgttaacaagttgagttggtaatcaaatgagattgcataactttatttccattatgatctctttgtgcagtgaccatcactcaaatgcaagtgaagtgaacttcaaaattctgattggtattaacatgcttatattttatgcaccgtttactctcagtcctactggaatgagaaatgcattctttgtcttatcatcaggtttgttgaagattaagattcaaaatgattatttcatcataaagatcctttcaagtagaatatagatctactgtccctcaattaggagctagtttgaaacgatggattaagtacttttaagaaatgtgttgaagctagttcagatgctcctttgctgttttttataattgaagttgcatcacctttagggtttctccttctttctttctccttctttattcccccccccccccttaagtttatggttcttaacacttgtcagaagaggggctaaaattttagttagttgttgtcggaaaacttttaaattttggaaaaactacgtgaattgccaagccatttattgcctgtgatttctactgtgagagttttagaacatttgtttatctaaggatatcatgcaggactagta

SEQ ID NO: 58440 - DNA, 505 bp, Populus trichocarpa
  Intron number 1 from transcript POPTR_0001s47520.1 (locus POPTR_0001s47520) derived from phytozome v7.0 (chr-ID scaf fold_1; pos 47673942 to 47674446)
aaaccctaatcctaactcaacagccaacactgccggtaataaaccccgtcgtttccaacataataagtggtttttatttttctgaatcgtacttgctggctttgttttatttgcgttatggggtcactaaataaaagtgatttatttttgttgtgttttaatgggttttcctgttaacatatctggtatttgtttggctactgagaaaatttaagggatttttactctgatgggttttcatttccatgaaagtgattcgtgcctcagtttggttgctctgatttgttttttcctgtgacccttttagtgatcggaagagaggagtattttagaaccatttaaaaaattatgggtttactattatttatataaagtttttgtcttctgcggtttaaaattaaagccgtgtatttgttcgtatttgattggatgattggttgtggatgacatatgttgctgacaatattatactaatatatgtttttgaagcttcagagaatttgtg

SEQ ID NO: 58441 - DNA, 867 bp, Populus trichocarpa
  Intron number 2 from transcript POPTR_0001s10920.1 (locus POPTR_0001s10920) derived from phytozome v7.0 (chr-ID scaf fold_1; pos 8477188 to 8478054 reverse strand)
acaaaggattctcagtaagtttgtcacactactcaatttccatttaagattaagacaactttgatggaaatgtgctacatatggtcgtgtgatgtgggctagtatttatcctgccctacaacatatgctcaagttagtggtatattgcagtaatgatcatatggctgacaaggccaattcactgaaaaaatggaagattgaaattgacctgcaataaagtttctctaaactgtaaacatgaagaaaaaaggctttagataaggccacactatttagtatttacatctccataaagtcatgcagaattatcttgtaaaacagtaatccctatgaaccatcctttataggctaggcagcagcagtgtctcttaatgttgtttaataagattacggtgaacaagtaaaatctgtgtgaaaatagacatgaatggaggtggaaaagcatgtatgaaataatgttgcaaacagtactcctgctcgcttttgagattctaaaaagctaatcactaaagctattgaaaaagataagaaaatatgtaatgttatgccatgtacaagagtttttagctattggagcctaacgacttttctttgagttcttattcgcttataggtctagttttagtgctatcttttcagtcctttttgggttccctggcttctattattttgatgtaaattgcacaattctatcaaacttttacccgactctgaaattgaagactctgattagatattctctttagctaaagaatggctagcaaatatttagaccagaccctctgtaataattaataagccttaaccaagaaaaatgccatggtatcgagttccaaaattttatcaaaaatatcagaatttcagctg

SEQ ID NO: 58442 - DNA, 286 bp, Populus trichocarpa
  Intron number 1 from transcript POPTR_0001s26110.1 (locus POPTR_0001s26110) derived from phytozome v7.0 (chr-ID scaf fold_1; pos 25194621 to 25194906)
ttgtcgagaaggtattgtttctctgttattggtattctcttatgttgttatcacatatttgcaaaagtaaaaacaggtgcatcttaaccatttagaaataacaaatgcatttatggaaaaaattggctcctttctacagatttttttttattaaaagcaggaatcgatctttatgttcttcaatgtatttaatgcaatattctttctaattctttgaattgtgcttgtttctttcctatctcaacactgattgtttatgttttcttcaggatttcttggaagattt

SEQ ID NO: 58443 - DNA, 745 bp, Populus trichocarpa
  Intron number 2 from transcript POPTR_0001s26110.1 (locus POPTR_0001s26110) derived from phytozome v7.0 (chr-ID scaf fold_1; pos 25194943 to 25195687)
gaaagttgacagtggtaagctatcagtattctttgggtttatttcgtgtctcaaacttttcttgcatttgtcttttttgatatcagcaactatattttctttttattgtgttaatgctattattgtcctcagataactgttcttcagatcatgatggtggtgaatatttaactgtataaatgatgagataggaaggaaagtatggcttccttgtttcttgttcttttttactggacctaggggagggtggttgaggttaaattctactcattttctatgccattgagaatatatgaaaaagggtgcttaataactcctgagagaatttcggttaagatcaatgcagttgaaattggttttaacctattgttatgaaatttgcttatttatgagaatttttattcataacaaatttcattgcagacagaaaatttgattcaaaatggatgactgtcaggttcatgttctcacaccagttaatgaattggagtaattcctaactgatggccttcattgaaagcttgataacattgaaagactacttcatttatggtgattttcttcttaatgtattgtgaaaatttgcgattagattatgtggctattttctttcattaaatgcaatattttgtattctgtattcaaaaggtgtctatacggtcctttatttttcttcatggttataactccagccacattacactttccagtacccagacctcatctcttgtttgaagctcagctg

SEQ ID NO: 58444 - DNA, 657 bp, Populus trichocarpa
  Intron number 1 from transcript POPTR_0001s25210.1 (locus POPTR_0001s25210) derived from phytozome v7.0 (chr-ID scaf fold_1; pos 24401462 to 24402118 reverse strand)
gcttccatcatcgaatctggctggctggtacttctctttcttttcttttcttcccctccttttgtccgccaccaacaccttgttttttttttttttttttaccgggagatttgatttctctggatctgtatgtttcctgtttactagcaatgtgaactcaaacacatacgtatagtttttgaagctttactacataagctaagtgaatgtggaggagctacttgcatttttttttcagatcttttcgtgcctcaatggagacggtttttttttgagaaatagaataaaataacatttttgtgatggattttacattgctctctgaccattgtgagattgatatctctctaattcaatttttaaccactctaagcttttcttgccaatgtttatctaggtctggttattaattacatgtggggtttttagtttttcggttgtattagtcagtggaagaaacatttgactgattttagtatcatatgtaagcatgaaaattgcaaactgtgcctatcgaactattagtcttcaacttcaaaatgagatgatggaaatgtgtttgtttggtcgtatactgtgttcctgtaagcttataagattaatggttttctttttgatgcagtatttgatcacgcacttcagtgattttcagttggc

SEQ ID NO: 58445 - DNA, 946 bp, Populus trichocarpa
  Intron number 1 from transcript POPTR_0001s12270.1 (locus POPTR_0001s12270) derived from phytozome v7.0 (chr-ID scaf fold_1; pos 9501773 to 9502718 reverse strand)
gaagttcctagtggtccaaatcccatttctaataggtgaagggagaccaaaccggatcagtacttaagctcaaccttctttaattatgttttagtttgtgtctgtttcttcttttatatttagtaaattaggttttctttcttagtgcttatatatacatttacagcaatgtgagatcaccacagtttattcttataattattagtatcccaagcagtacctatccaccaatcagttagccatgatgatatatgtaaatgatgataatgatatctggggggggttctgttgatgtagaatagtactcatgattatgccacacttcttcttttgtttgcttctctaaattattgctgcaaattacccttcaagatttatatcttaattgcttttactaactcctcattaattagtttttattgtctattaaaagggatatagatttatctcccccacaaaaaaaaatccatccaattcatgaaattattcagtcatctccattagaccaaaagatcaaagaagaattaatgagtagggacgtaatttatggaagaagccaaaaaataattctataaaacctcaaaataaaaaaaataaaaagtcaccaacatatttaaagattatctgtcaggagttaaacaaaaaattacttgtgtttttttatgcgaaaaaaaggttttgcttgtgcttgtttataaaaagcgtgatgttcctttaaaaggcctgcccttctctctgaggtactggaccataaattcgatcactccgaatgtaccttatagatttgaatacctacaagctacagctctattgtttttttcctggtatataaaatgaaaagatatataggtagggaacatttagaaatttcatgcaagcattttaaattcttcaagtgttttgtgttttttaatagaaaaaatcagaaacaactggagaaggagag

SEQ ID NO: 58446 - DNA, 458 bp, Populus trichocarpa
  Intron number 3 from transcript POPTR_0001s44040.1 (locus POPTR_0001s44040) derived from phytozome v7.0 (chr-ID scaf fold_1; pos 44501534 to 44501991 reverse strand)
cagatacagcagttgatcaatatcaccggtttaaggtaaattaatggcttccatgttgtaattgaccttctcttttattgttttattcaatttgcctgtaaaacaggcaagactttattattatgttgatgaacttgttcgttgatgaatgaacaatagtgggaaaagaaatcaactccagatcaatggttagggacagataattcatatgatgagaatattcaataagattttcacatatgcatcagtacattaaaataatcatataattatggtgtgatgatgatgtgacaaccaccttaagaaaatggaaaatacgtaaagaaattgtaagaagacaagtggctttgagttaaaagacagaaaaaaaaatgtttcttgctcaaatgcttttatgctttcatcaaaagagattaagaaaaagaaaaacataaattttacagggggatatagatttg

SEQ ID NO: 58447 - DNA, 938 bp, Populus trichocarpa
  Intron number 1 from transcript POPTR_0001s09660.1 (locus POPTR_0001s09660) derived from phytozome v7.0 (chr-ID scaf fold_1; pos 7367063 to 7368000 reverse strand)
ctgagctcaaagaagagctcaattctcagtacaaggttcgtccgccgtccttctcctttccctctttctacatttctataactttatttaaacaaatgcttttttatgatctcgatctctgatatgaggcaattagggtttccatttcgatctgccttattagatctgtttatatttgacttagatttatcgtttggactgtttgatttcgttgaattttctgtcgcaactacaatttcattggaggatcgtcttatatatattttttgttctttttgatgagaaatcgaagggaattagttcacaggactcaaatcgaggttgtatttcctctggtatgcttttttttatttgttggtatcagggagaattgacatggagctcttagggatcgatcatgtgatgcaacttctccgttttggatatgatctgatggatgaaatctattctatggttttgatgtttgacattatgggttttaggaattccagcgggtttggaagaactgtgttccagctagaatgcttttaaaaaggttatattatacaatgtgaagattttgtgactgataaagtggtttatcgaccttggtttttatagtatagtggatgattttgaatatctcaatatgataagatttttagctaggcagattctgaacacttttgacggggttttcttataataatggaaactatcctaacaatatcccgtgcaatattagcactgagatttatttttttgctagtgctcgtttatgtagttaatggatcagaaaccagttgcaatatgggagtattgtgatgttccattggtttatcggatattgggtttattatatcctctaattgtaataaactatattgaattttcttttcactagaatcagtgtgaagcttctcctcttttgtatcttatcatgcaggataagagaaaag

SEQ ID NO: 58448 - DNA, 490 bp, Populus trichocarpa
  Intron number 1 from transcript POPTR_0002s13950.1 (locus POPTR_0002s13950) derived from phytozome v7.0 (chr-ID scaf fold_2; pos 10345292 to 10345781 reverse strand)
gaggctgaaactattcttcaaacccaggtagttataaaatattattgctttcttttggttttgtgttttttgttacgtggatagttcttgtaattgaatttggaatggaaatgcttgaatttggggatattttgttacgtggcttggattctcttttctgccattttagatgcacatgtaattaggcttcaaagttttaatcttcgatactgcttgttgttgttcttcttcttcttctttcactttctcagtatgttttgtgatgcgattgcttttgtatttgaatttgcaataagtggtaaatagaattgcttgaattttgggaattgttatttgtctcaagggatgttttctttcattttagttgcacgtagaatacaggcttcaaagtttcaaactttgattgctaaattattttttggtgttttggagtttaaagtgatgagaagtcgtgtttttttccctttcaggaacctgtgataagaccagt

SEQ ID NO: 58449 - DNA, 781 bp, Populus trichocarpa
  Intron number 3 from transcript POPTR_0001s34240.1 (locus POPTR_0001s34240) derived from phytozome v7.0 (chr-ID scaf fold_1; pos 32376771 to 32377551)
gcaccgattgcctccattaccggcaccaaggtacttgacttgagcaggaaatccatgaatgttgaacttactttcttatccaatctggggatcagaattttcaactgcttatttcaagtccgtttcattatcaagctaattcctgtttctagtgttttgaccaatgaacctctttcatgtgcctgtatttgtgtgtttactaccttggcagctaatttgtcatgttttgagagttgttgatctttttatttagagaaaacaagtgttgtcatcacattcctgagaaaaatctgatagcctgtaatcatcagattctttcaaatattcatgtgatgtgcatgttcatctatgcaggttgaatgattccatcgtaaccctgttcccaaacgccaatttatcatcattttcttgccattttttagttattggttctgtattggagtttctttaagataattggtttccgttaactgatttttaatatgtataatgagctgcggtaggtttggtaccacaataggcctttgtctggattaactcctttatgcattgcaacatcaatttagcttttgatgcttaggtaacagttgtgatctcaaaggatcaaatttatttctgtactagcaggacctaatgtagtttggcattgacattagagaacatgaaagaattgcaactgtgaaataggagatgtgtctactagcagtctatccaaagctgaatatttcaaagctatgtactcaatgccttaaatgaatattattaacatgagttttcaggt

SEQ ID NO: 58450 - DNA, 649 bp, Populus trichocarpa
  Intron number 2 from transcript POPTR_0001s34690.1 (locus POPTR_0001s34690) derived from phytozome v7.0 (chr-ID scaf fold_1; pos 32942849 to 32943497 reverse strand)
gcgtcgataaaggagtcacttctgttgtcattaaggtaacaacgattatcaatattcctctcttctttattacactaccacttacttaatttgttcgctaattatgtttttccctcttcttttttacctattaattatatgggcgttaaaagtgcttttccactagaatcactagaataaaatcctcccctcatccctccaatgctcaagtcaatctctaactcctatggtgtggctttggaaaatggtttgcttgagatttggaactgattattcatgactctctatgatcatgtttgtggtccgcatttaaaatgaatcgcttccctgtggtgcacttgtctgagtgctcttctgatatggctgagccattttggtgaacgtctgaaatctagttggtgcgttattgaaatattgtaagttgattttctttggttatgctttctctgttgagttttgatttttgaatgaactatgctcgtgaaaagcggatgctgtaatttgaccttttgtgttatgatttctctgctgacttttgattctccaccctactgttttattagttgaataagattaaactgacaatttgcaaaaccattttgatatgtaaacaggggttggctgaccataaggattcactgggtgcacc

SEQ ID NO: 58451 - DNA, 804 bp, Populus trichocarpa
  Intron number 2 from transcript POPTR_0010s15400.1 (locus POPTR_0010s15400) derived from phytozome v7.0 (chr-ID scaf fold_10; pos 14665341 to 14666144 reverse strand)
aagtggttcaggtattaggaaaatgttgtgtggtcccgcaccatgtgatggggggaccaccacattaattaaggaggcagctggctgcctctttggtttaaattaaatgaaacggttactgtagatggcagtagcaaatttgagaagagaggagaagaaaaccgagagaaagaaagaagaggaggcagcagagcagtctgtcttctttcttcgatttccagttcgttcaccgttggatcgggctgagatttggacagcagcttctagacacgttactcttcattctgaacggttggattgaagattggtggtgtggaagctggtcgttttgacagaaaacggggctgtcagtgttgtgagcttttctctatcattactctctttaatcttgttgtaatccgagaataagtagttcttgatgatatatatgttgtagcccttagttgaatctgaggaagaacaattgtgaacccattatttgtgatagtggaagtttttaggtggactccggtcccgtggtttttcccgcatcgggttttccacgtaaaaatcttggtgttgatttgtgtgattgttgcattatatttgttcattgtttgattctgtttttactgcacaaagagggaaaaaggattgggacttgtgaattgtgaattgtattccgctgaattgatcaagcggcacgatgaagtggttcaggtattaggaaaatagacaagcagcctctatcttctccatcccatgctctttagcagcattctaatcaagaataaattttacctggtgcaggcaaaggctgccaag

SEQ ID NO: 58452 - DNA, 822 bp, Populus trichocarpa
  Intron number 1 from transcript POPTR_0001s30540.1 (locus POPTR_0001s30540) derived from phytozome v7.0 (chr-ID scaf fold_1; pos 29016580 to 29017401 reverse strand)
tcggttttaatcgagagccttgttctaccgataaggttagttcacatctctaatcctcagtcttctgtttttctccctctctcttaactgaactgaattggtttggattggattttgttttatcttattgggtgtaaaatttatggaattagaattttacggacttaatgattgttgatgggatatttggagtttaggcttacccgaacctcttgaattagttgaattgctggtgagcagagaaaaataggttcaagactctactgaatttgataccactggctttgttgatgatgaatgaaattatgaaacaaaaggatcgtggtatgattcgggaggtaaatttggcgtatgcttgaatttagatagtatgttaggtatcaaattttggcaaaatgtgtaatttgaagtgaactgaattttgtaatatttactgtttttatatttttacagggaaaggagagcaaataagaaccactatagataattcattagatggaactgttttttgtagaatgagattgtacatcgtgaattttcaatgataaactccttgcgtctcattttgcaatgtaaaatggttctttaagttatttggtttgtgatttcgttttcgttttactagtaagtcatggtagttttgtagctagacgataaccagcaggcaggaaaaccaattggcatgttgtattcaagattatttgcagttggtctttgattaatttctatctttttcttgaagaattcatatgatattcgtaatgattgagagcgtatgttctttcagaaatcacttctttcagaattgatacaagagataga

SEQ ID NO: 58453 - DNA, 971 bp, Populus trichocarpa
  Intron number 2 from transcript POPTR_0007s05410.2 (locus POPTR_0007s05410) derived from phytozome v7.0 (chr-ID scaf fold_7; pos 3502308 to 3503278 reverse strand)
cctccaagtaatattttgtcagcattgctttcgttgattaattgttcaatgaacctttccctgtagttgcctttcataaacttccatgtggataataagagatcttttttgtttttagctagttcgttctagttattttcttctctttcatgagaatctactatgaaatttgttttgcatctgatccatgtggcaagattccttaaaactcctaactgctttttgagtcaaggttaatgttttgcaatattgcaaacttatctctcgtggacagcccgaggataatggtgtcaagtgtgggtgagagaccatagaatctgcatatctttgatagattcatttcaatagttttatgtttctaagattgaaatgattttcagatcattaatcaagagttcacctgtttttcttttgtgtttgaacctatctgtcgggtttcaaattggacatcattctcacaagtctacagcagctgaagcataaaattgcaatcacatttattctaaatcaacgatttggtttggattttttttttgtcctgtcatgttattcaactttaaaggaaatgacagaactacttgtttaagctcacttatccaataaaatattatttttttcaactccagtcacttatcaaatacaattgtatttgtttgaattccaagtttcagtgttttcttttatctagggaaaggctcctgcaataggactcctccccatttcttgtctgattactaatggggctagaagttgcattttaggttaggagaagctcatagatggcagtataatgtgtagcttgagtgcttctgtcttattgtagtgtttgtgcgcatcaagtgtgttatcttctccactacgggcgcacaggcctccatttgattaagttcctattagtaaggtacaattgtaaacatatcttggctccaatttcaggtggttcactgttcctctttgatcgcaaagtgctc

SEQ ID NO: 58454 - DNA, 714 bp, Populus trichocarpa
  Intron number 1 from transcript POPTR_0007s05410.2 (locus POPTR_0007s05410) derived from phytozome v7.0 (chr-ID scaf fold_7; pos 3503357 to 3504070 reverse strand)
tgacactaaacggtaccctcttggtaaccagctaggtaagagagtttcaacttcttctttttttatttatctttttttccgcactttgatttaggactattcgtttgtacagtgtattatagaattgtgattttgggaatttatgctgttgaaggttttcatttttgtttttgatggctggcttgtatatattttagatgaggaagatgttagcaggactaaggttctgatctgggcttaaagtttgggtttttatgggtgggttttacttgtagaacaaagggacaattttttaagcattaccacttatttaccagtgcaacagttcattaaagataatttatctactaaacctagtgataatcttggtgttctttttgggagggtctgagcttttgaagaggatttttgctcaagatgttatcattaattgataactggatttcaaaacaacgataacgctggattaagatttatgttttattgttaaggggatagatttccatgctatatcagtccccaatttcttctcttatacagtcttgaaggtggtttagaaatggtggcattaactatcatgctttatattctcctcttgtctttgtttgtttttacacttgatgttgtgaagttaccgatgatgtgcattttaaaaaaattgtcatccgctggaatgcagatattcagcaaatactgctagaagcgcagcatcga

SEQ ID NO: 58455 - DNA, 628 bp, Populus trichocarpa
  Intron number 1 from transcript POPTR_0002s05630.1 (locus POPTR_0002s05630) derived from phytozome v7.0 (chr-ID scaf fold_2; pos 3703580 to 3704207 reverse strand)
agaggtcatagtggaagttgaattggtttggtcaggtgtgctttgatttcatttcccatatatttcctacttgtgtgccttttaaagtccactttgtttgattctctctgcttggtttctcttgcaggccagaagaatgtcttttttttgccccttttatcttcttctctttcgactttccttttcttgacacaactatttgtgggtcttcgagtttctttagtccttcttcaaaagactgcacctttgttttcttgaggattctccaatgggtcttgttttcaaaagtttccctctttgactggtgccgattttgtcttcttctttttcaagcagggtgcttcgtgttgctgattctttctttcagtctgtctttatgatatgcatacagttcttgatactatttaattccatttcatgtttatttattattaatttacctgttggtgtgttacatggtttctcctcgtgtttttttttcttttttctttgaccattttataagacttagataatgacacagagcatcatacccgttagactgataataattattaatactttttgtcaaatattttaaacttatcttctgtgttgtgtttaacaggatatctgtgtcttctcagcc

SEQ ID NO: 58456 - DNA, 345 bp, Populus trichocarpa
  Intron number 3 from transcript POPTR_0027s00390.1 (locus POPTR_0027s00390) derived from phytozome v7.0 (chr-ID scaf fold_27; pos 190328 to 190672)
tgtcatagttattattatgtttttgagcctggggattttgtttctctcttccaatattggtttttatttccttttctgttgtttgttttgttaatattcttttgaggtgagagcttggtagctttttcttgacgtgtcgattgacaggatctgttttctacttcctgtttatttatttatttattttagttctacactctatatgtgtgaattggtcttcctaaaaatttactaaccagttttactccttcaaactaataacctggcttataacttcagcactcattcaagagtgaagtttttccagcagcaacgtcgctgctttatcttgttgcctggtagagt

SEQ ID NO: 58457 - DNA, 885 bp, Populus trichocarpa
  Intron number 1 from transcript POPTR_0007s10280.2 (locus POPTR_0007s10280) derived from phytozome v7.0 (chr-ID scaf fold_7; pos 10117585 to 10118469 reverse strand)
tcattctcgtcttccggcttgcattcaacagacaggtaaagatattctccttttatttgatgatctatcttagggttttctctttatcttttattctttaacataatccagctgctgctgctgctcaattcgtcaaatgtttgcttttttagggtttccaatttagactatcaaggcctaaccttcctccatctctggtctctgtttttagagttttgactattttgatccactgcctttttttctttgttttttaagctcaaatgattaattctgcgcttctatgccatcttcactttgtattaatttgaaacgcttttaggatgccaaagcttttagtaaataaaaaaaaatagcaactcagattcgggaaagtttttgtcagtgttataattgaggactgaatggacggggagtgttagcaaagcttcaatctgggcttaaagttatgcttgtggaagcttgaaatgcaggaggtgtgttttatttattggaaaaggggggttttagctgttattgtcttcgaatggttaagttagaaagtggggttggattgagtattacctatgttattcgattttaagtgtactaaaagcttttgatattttgaagcattctaatcaaatcgggtctaacttccccatttggttgattgatgggtgcaagctaggcttcttatgctaccttgatattatgaattctagtgatttgaatttcatttcttttctcccataaaattccgatgcattatgttttttgttccttccttgggctcatatgtctcagtaatttcaacctatgaatatttggtttctttttgggttttgaaaacagcatgtttaaatttcagttgagattggggttgcgcgaatcaacacagatcct

SEQ ID NO: 58458 - DNA, 417 bp, Populus trichocarpa
  Intron number 1 from transcript POPTR_0001s47130.1 (locus POPTR_0001s47130) derived from phytozome v7.0 (chr-ID scaf fold_1; pos 47437732 to 47438148)
ttgcttcacttcccttgcgcttccaaatttacaaggtaaatatcctcaaagatttctgcttttttgttttctcaattcatcatgtaattgtatgtgttcttattcactttcttggcattcaactattaccagaatgaagtttatgtgacttgtagtaatatgaaatgcttatgtttctgtgcattatcaggctgtaatagtatagtggtctgttcttgatcattttatttcatcataaccagttttaggattttgggaacacaagattttgcttgatggttctgctgcttgagtgcttgttaatggaggacaattgactagaatgctataatactatgtttaacatagaaaagaagtgtaatgacagcttaaacagctaagtggttcacattgattgatgatgtaccagacccaagg

SEQ ID NO: 58459 - DNA, 757 bp, Populus trichocarpa
  Intron number 2 from transcript POPTR_0001s23040.1 (locus POPTR_0001s23040) derived from phytozome v7.0 (chr-ID scaf fold_1; pos 22102769 to 22103525 reverse strand)
tgttgatattgagaatcaatactacaattctaaaggttctttcttttcctttttttatatattttctattgcatgggtctttaatttattattatttgttattgttatttggtgcataatcgagtgtttttcttgataatcagtaatgggtttcgttggttttacgagaaattgatgttggatgataatgcttgttgaagtttatctgtgcaaattattggtttttttttctcttaaatttgggttggatttgattaaaaaaaaaaaaaaactattttttctaggtaaggttagtagaaatttgggtgcttttgaagtgataacctttaggatgtttctttgggtactattgtgtttaaattaagcaattgggtctcaaagaagtttcggaatgatttttcagtcctgaaagggtaattatagtcacaaagtctcatcagcctgcatgtagataaacaagtggttgctgtatgttttgcttttatcattgtcgtatttcaaatcatgatttttttcccttctcgttattatttgttttcttggttgaacactttgttgcatgatatttatattctttagtaggtttaattaggtaacatcgatgtagctttatctgctaatttgtgaatagcagtcttcatgtagtcaactattagttgttctcatcaggtttttgtacctgttgtaattttgcttttcctttattttgtttccatgcgaaggtttggttgaaacagatccagaaggagcacttgca

SEQ ID NO: 58460 - DNA, 568 bp, Populus trichocarpa
  Intron number 1 from transcript POPTR_0001s11170.2 (locus POPTR_0001s11170) derived from phytozome v7.0 (chr-ID scaf fold_1; pos 8670338 to 8670905)
ggggttttttggtgctttgatcagataaattccatgtaagtttgttccttttttctttgttttgcactttttatttactttttttttgtattttactttttttcccctcaaggaaaaatgtttgcatgatttttctttgggttatcttctctctcaaagttttgatcttttcttgaagttggttttttgggtttttagttttatatgcagtaattgttgattctccatatctgaatttaatgtttacaatcttccaataattttttcaaaaaaggagacatgaaactttttctttttctcctttttttttccccttctgtttaaatttgtaacttgaagcagtagaggaaagaaaatggctttattggtgcagcattttagcataatatgctgttttatagtaatgaaattctctcgagacggactagatttgtaaaattttcacctttactattttgcctgtttttggaagtagccatggcttgaatcttgccatatatttgtatggcaatgatattttgcttacagttaaaattctcttgtttgagatgtgaccaggttgttgacc

SEQ ID NO: 58461 - DNA, 662 bp, Populus trichocarpa
  Intron number 1 from transcript POPTR_0001s17450.1 (locus POPTR_0001s17450) derived from phytozome v7.0 (chr-ID scaf fold_1; pos 14240578 to 14241239)
gcttctttctcattagtgctagcaagggtatgcctgctctctctttatttttcttaaggttttctattgttttaagcagtgaattttatccattttcatttgggtatctgctgttaactgtgattttggattccgttaagcaattgggtttccattgaatagtcattggtcattgaggttgttacttcatttctgttacttatgccattgaaatttgaattgttcttacattcatctgatttagttgaaagcttggtctaggttttgttgactgctgtaagatgtgaatttgatactgatttaattgtattttagatagtatcagtgatctttttgttattgtagattcggaatcgagatttcaacattgatcattgttatttctcctatttactatgccaacaaagaatcaaatagtcgttatgtttatcccttgttccaccacttcttccaaatgcaagataaccccaaaggactgtggatcattttattgtctctttgtgctaatgtgaatgtagtcatgaaattactgaactaggatttgcataatgattgattcgtcatttgttaactgaaaattggggttgaacctcttttcattgagaccttgtaattcctcacttcaaaataacgttatcctttgaaattcagattcgagtccc

SEQ ID NO: 58462 - DNA, 1049 bp, Populus trichocarpa
  Intron number 1 from transcript POPTR_0001s28120.1 (locus POPTR_0001s28120) derived from phytozome v7.0 (chr-ID scaf fold_1; pos 26910039 to 26911087 reverse strand)
tcactatctcgtcactttcctcaaactccaccgccgtccgcaacaaggcaaaaaccctaaacctatactcgcttgcctttaattttagtctttatttcttttttggagactctggtgcggttcttaattttattttaatataatttcttgttcagttggagttgaattctattacactcactgaaattgatacttatttttttttttgctagtagagaacgaatggaaatgtttaaataggttttggaatcaaatgctttaggttcttgaaatttgtgatgtgcgtgtggtgttttttttccttcttgagagcaactatctcgacatgagcgttattgcttaaggtatgagagagaagggttaggtttttgaagaattcgcattgcttaaaggttagggttttatgataattggagtattgcaggacaatatattaaaaaaggtgaagttgaaaaacgttacacttatacattgttatatgctgcttgtggattcttgggtgcgtaatgttatacctagatgggtcttgttttgggaattgattggattttggcgtgcattctccactcatggaacctttgaatgcataacaaagcggggaagccaaatctatttgactaaaaaattgagagaccctatatctgtcttgttttaacccaattagactaaaaaataattaccaaaaagaatacagaatcctggattgattggaacctttgagaattataaaaaagaggaggaagaagcagtcaactcactaaacaaagcctaaagtagcgtgatgttggattcaacatcggaggtcaaataaaccctttccagtgcaattacaaaaatgctcttgttcctaaaagacctgtgccacttggaaaatttaggatttcttaagaccttaaagtgatgttcaaaatattatttgcaaattctgtaagcgatgaattcccttcattacttatcacaatgcctagtttaccctctccttctcttccttgctggatcggaaattgttaaagcgtgtttgttgtgtcaggttcttgaaattttgagtc

SEQ ID NO: 58463 - DNA, 536 bp, Populus trichocarpa
  Intron number 1 from transcript POPTR_0001s17020.1 (locus POPTR_0001s17020) derived from phytozome v7.0 (chr-ID scaf fold_1; pos 13850447 to 13850982)
tcaactcggaaattagcttctctgtccttcctgtgagtttccaactcgctatttcccttttttttttcattaattttatataatattttctcctgaggcccagcctcaggagatgcaaatttgtttcccaaattatgcttggttttaagtgatttccaattgagcttggaaatccaaaattttcgcattgcagttgcattttcttgcacataattaaagaaaacataatttttttcttttctgaatttagctttatttacactcgattaagctgcagagggccatttttttttttctgattagggttgctaaaccatgaagtaaattggttttgattgatcacatgtggaatttagggactaattgaattttgatgatatcttttttggaagcttaattagtttagtttttatgtttcagttatgttttgatggataaagtttaaaatttggagaggaaaataattaactatctattgtgtcttttttgtttattgttttcttgtttggggttttcagttattgtatttgagttgc

SEQ ID NO: 58464 - DNA, 818 bp, Populus trichocarpa
  Intron number 1 from transcript POPTR_0010s23090.1 (locus POPTR_0010s23090) derived from phytozome v7.0 (chr-ID scaf fold_10; pos 19769191 to 19770008 reverse strand)
aaggtttcgtttttatttcttagacgtgaggtcctggtagatatccagcagcctgcgtcaattaaaaaagatacatcagagtggagaacaccacagtgcatatattctttaagaaaatggaaaaaaaaaaaaaaggaaaataggagccaggagttgttgtggttataccggtcttgttcaccaccaaccacagtcgtggttctcatccagggagggtaggtgaagacaatgagaaaatcatagagagatcaagcttacaggctttacttaatttgtcaaactcttggataagctacacgtgtgcttggtgagagcctcactccatacacataatatggtcaaagtgaacttagtcaagcttattcttggacaaattattggaaaaaattgttttagttaaaaatatattaaaaatatggagtaatactaaaaagataataatttaatattttttaaaataaaaaaaacttttaaaacatattaaaaaacagaaactaaaatacgcggtgatgccgttggaattaaaatcaagccacaaccctcaatttgaaattttttttttggattcgagaaaacaccacctcccggaaaacacactttgtggacccaggtgagcgagtaaaaccccggttgtctcaggctcttacaagaagtgcacgccctaactcgaactcaagacctgctatgcagatctcaagccctttgccatcaaactacgccactcaatttgaaattaaaaaccctaatcttacttaatacatcccttgttgaaattgcaaacaggaagaggagcatacggcgaaaccaagaaagcaggg

SEQ ID NO: 58465 - DNA, 985 bp, Populus trichocarpa
  Intron number 1 from transcript POPTR_0010s08980.1 (locus POPTR_0010s08980) derived from phytozome v7.0 (chr-ID scaf fold_10; pos 9750838 to 9751822)
agagttctcagagaatcaagccggagaagcaagaggtacctttcttttttgcttttagtttcttttgttttatgtggcttggtgattatattgaagcttggttgctaagaaagcggaagccacagctttagtggttctagttttcttttttaatcttttgcttgttggtcttatatgagcgacaatgtaatcttcccgtctccttttagtgtttttattactccatccattattttgatattttcctgtctgccatcatagaaccattcagtaattactccacatatatgtaattttcaccagttgggttattatatttggtttttctaaagtgggttcctgccagttcagggcagaaatgtgatttttggaagttggagtcggtttttctgcttctgggcatgttattggatccggcttgaactcttaggcggtttgattggtatcatttaacttactaatgtgagttgccatatatgtatgcacttggtagtcacttaaccttgcttgctatgcctctaatccacttctgtttctggccaatgaaattatgttagttgttggttcttatgtgatatgcccaccgctagatgaaagaaagaagaaaaaatgttggttgtttctgtacatgtgtgcactttaaagtcaagatagattgtgttcgtgattttggtggaatcactgtttgtatttttatttttcttctttttgagatgaaaccgtaaatatcagcacttggctatttggatgttatttagtctcgtatcattgtttccaattttatttcttttacagggtaatgcttgtgggcttctgatgtgtatgtggatgcgggatttagcagattatgcattgaataatatgtgattgatgccagtttgtcttggctgtagtttcattacaggatttggcttaagagtatataatggcattggaactggtacccataggaaccattttggctgtgttaacgagccaggttctt

SEQ ID NO: 58466 - DNA, 961 bp, Populus trichocarpa
  Intron number 1 from transcript POPTR_0002s09240.1 (locus POPTR_0002s09240) derived from phytozome v7.0 (chr-ID scaf fold_2; pos 6552408 to 6553368 reverse strand)
gccaaaaggtttacaaatctttttcacctttattattggttaacttgaatgcttcttgaattacttgtactatctatgtgttttgcctctttgattaattttttttacgctgtttgatgcgtgtacttcttggtttttgattcattgcttcgaaactgagatagctttcattttttaaggctttattcttgttctttatgattgtatgtttctaggaatctttcattttgatacttattgatacttcttatctttgccttgtagacattgagtacatcttgtttaccttttaatggccttaatgtagttttgcaagttatttacgagttagatgattttatccttattttcacttctccaacgtgcaacaattctggtaatttcggggtctattgggacattaaagactctggaagaaatggaaaccaactagatttagataatttacttgccaaattggttgaactaaagaaaaagtaagtgctgtttcaaaaataatttgctggttgctgaaaggaaacctgatgtcaagaaaggctgatgctgtccttgttagtactctgtgatttccggtaaatgtatgaaaaagaacgagaatggtcacaatgccaagttttgaatgttgaagtttgtaatttttagcttttccattattaatggattaatctaaacttgtgttattctaatattttaaagcttcctattctgcattttgtggtagtaagcccatagtttatgtggatggtaattggaaaatatcttgctctttctctttccctttagtttgcacttgtacaaaaacgggtaaagggtaatcatttagaaaaggcacttatagaagtctttcttgccctaaatcttgaaatgttgtgtggtttagtgtgattgccaaattgcattttgatgtccaattgacttgcattttctaatatgatcgtgtctcacttcacagacaaggaaa

SEQ ID NO: 58467 - DNA, 620 bp, Populus trichocarpa
  Intron number 1 from transcript POPTR_0002s06210.4 (locus POPTR_0002s06210) derived from phytozome v7.0 (chr-ID scaf fold_2; pos 4161763 to 4162382 reverse strand)
tttacaagtgggatcctgaggagttgcctggtatgccatccttttgaagtttttatttttattttttatgggcgttgacttgggttttgttcttgtctgatttttgagggttttgtttggtttggatttgatcggaggatttagggtttgatttcaggaattagggagttgatcaacgttaattagtttgtgtatcagaaataatgatgtgggttttctgtggatttttgtctggtgagttttttttttttaaatggtttggaatggttcgttgtgatgaaattggtttgatggaatcattttaaaagtaaatgttgtttcatttggttttggtacaaggcgaacctttttttgactgattttgagctccccgtgtgtttgtttggctccttgagctttggatttgattttttttaagtgtaatcgtatatttcttttgggtttgtatctcttgcactgcaaaagtttatatcaatggtttttgctgtgaatttattttttgtttgtttagttttttttcaggaggtttgagttagggtttggaagattgaattatctattgctaaaaaatgaagtaatgatcttgcagggcaatccattttgaagactggggataggca

SEQ ID NO: 58468 - DNA, 546 bp, Populus trichocarpa
  Intron number 3 from transcript POPTR_0001s11290.1 (locus POPTR_0001s11290) derived from phytozome v7.0 (chr-ID scaf fold_1; pos 8739116 to 8739661)
atttattctcttgtttacctggctccttatttgaggtttattttttatattttcttttagttttatagtaccatgcttacattatttctcataattctggtttttaatgtggtagttagttttgtttttattgatgctttgttaaaggtttataggggatgctgatttgtagtgtaggtttatctttgttggtcagggatcgattttgggatgtgaacatttgggactggatgtccacttacgccgcgtcttgctagtttggttatgagtgttgtttctttgaatgcaaaatgcaaactttgtgttgagtttgaagagttttctttaatgttgtttctttcgccaaatgttaatgttaatattttagtttgattgaaggatttgtaatgtgaacagtgtgagtaagacaatttcagacttgagatattacactgcttgatgctgtaaaaaaataatctgttgcgaccacttaacaacagttaatttggattggatacatgaatttgattgtatggtttttttttaatctggcttaatagatcaaat

SEQ ID NO: 58469 - DNA, 546 bp, Populus trichocarpa
  Intron number 1 from transcript POPTR_0010s21750.1 (locus POPTR_0010s21750) derived from phytozome v7.0 (chr-ID scaf fold_10; pos 18905931 to 18906476 reverse strand)
aggtactgcttgttttgaactctatcttgtattgttcgttgtagttttttcttgttgtctaacgatagtttatactacgtctatgtggctttctctgtcccttgttcttttatacatttcagggtcttgaattgttgaaagcttctcttttgtcgaaggatgctctctctgctgttttccttccaaagctgaattaaggacagagatggcgagccagtatcgaattagaaaaaaaggagttgatgcgcgttcttcaatttctaaatttactatgtctgtgaggaagtaattagaaaataagttggagaagtttaattttgttcttggactgcaatgatgatcattcatcttccctttgaagatgcttgactttttcttttgtttttcttcgttgctttattatgcttttcttctttcatttatctttcattgttgctttattttgagttttgtgcaatgagaatgcgatggaatgagtagtttcccctcctcatctacatttctttgtattatacgaagtcaagatttttatattataaatcagaa

SEQ ID NO: 58470 - DNA, 515 bp, Populus trichocarpa
  Intron number 2 from transcript POPTR_0001s38100.3 (locus POPTR_0001s38100) derived from phytozome v7.0 (chr-ID scaf fold_1; pos 37154775 to 37155289)
ctgaatcagaaagcaaagcaatcaagtctcggaaggtatagttttggttgtctgaagcctttttaattctgcttgcattccatattgtgttttgtttacctaatttattagaacctaaaatatagaaggcttgcatgaatctcttgctgttattgttccacgactgctgctcctcttacatattattttcagacattttattcctttcttactttaggtcaataatgtccattggtataattttcaaagacctctcaaatgtggctcataggaagcttgaagatgatttttcattggtaatattctggagtttcttgaatgatccgatgcccatataaatgtgattctatgattacctgattggatgtctgacagtcctgtgattatacatgtttagttttaggctattctcctctgtttcctatcatgttacaccccggtttatgtggcactatgtcctctacggcattagatgtttcatgacaactcaaaattattcttgcagccatacttgc

SEQ ID NO: 58471 - DNA, 377 bp, Populus trichocarpa
  Intron number 1 from transcript POPTR_0001s04030.1 (locus POPTR_0001s04030) derived from phytozome v7.0 (chr-ID scaf fold_1; pos 3194166 to 3194542 reverse strand)
ggtcacacaacaccatatcagcacactctgggaaggtatgttcctagataatttgttggaaaagaaatcttgaatctgcttttttccgatgaatgacttgatgcaggtaacttttgtgtgaaatgagaagaaaaggtgataataagttcaagttttacagatcaaaattctatattatcttttgtttgttatcaactgttcaaatttttgaaccctgaaagaattcctgtcagttaaatggcaataccatcatagatcttgtcttcagtgatttaatgtgttccttgaagaaattaagaatgttggattgcgtcataatcctaattttttatgaccatgaaggaaaagaggaggtgaaagtccatccaactgtgaat

SEQ ID NO: 58472 - DNA, 826 bp, Populus trichocarpa
  Intron number 2 from transcript POPTR_0010s20240.1 (locus POPTR_0010s20240) derived from phytozome v7.0 (chr-ID scaf fold_10; pos 17916929 to 17917754)
gaggcccacctaggcctctcagacgttttctccaggtaaaaacccacgaatctaatggttaatatctgacattcttatgagtacttaggatttcattcactgattttcatggctctgtacttcttaattggcttttcctgactgttagtactgctggatgctacggttacagctatccaacttctaatcttttggggtttccttagacttttcagaagaagaaaagggccggcgcatgaattttatgttcacatcaattcatcaattttccacttgagttccatttcatttggtttttctaaaagaagagaaagggccatggcatgatttttatttttgactttactgtgggacctagcctaccaaatttctcaattatcagggctgttgttttccgctttggccaaattttgaggggggggaaagtctcaagtataatagttcttaataatcaagaaaaatcattgaagttttcagccaacttttagataatcgaggcccaaattctagaagggtaaaacaaactgttgtttttaaacggagcccagtaagaaacatacaggccgtaagcccattaatggaacccaatcttttttaaacagtcatcttgcatttttttccccattgaatctcgcaatttttatattcagaacatctttctttctttcttttttattaatgatgaaatgaacatgttgccttttgttccttcagttctatgagcatgaccttccatgatacattttcatcctgctttcacagattctcatattttaaatgataatcaacagggtcttgatccaaaatctacggccaacttattctc

SEQ ID NO: 58473 - DNA, 783 bp, Populus trichocarpa
  Intron number 2 from transcript POPTR_0010s13790.1 (locus POPTR_0010s13790) derived from phytozome v7.0 (chr-ID scaf fold_10; pos 13526665 to 13527447)
acggatagccgagatccttgacaggggaaacacatgtgagctctactatctcattcaatttttctcaatctatatgcattaattgttggtattttttattttatttttcattggaagatttattgtactatgggtactttacgggtcagtgctttgacattaaaagtttttttttttaggtttcaaaaatatttttaaaatttattttttttgctttaaattaaatttttttgtaattttagatcagatgtattaatattaaaatatttgtaaaaaataaaaaatatatattattttaatatacttttcaataaaaacacttttggattatcggcctgtgacactgtatatcataaccttatttatggctcatccaatctacatccacaactactagagtagggtggttaagacttttttgagtttaagatttatttttcaagaagaggtgatagtaggcgataggtgggtgaagccgccatgtcatccctccttgcttattagggttgaatccctgtcaatctgtaagaaataatttttgataaatcccttaatcacaacgcgaattgcgtatttttagccagaacttaaaagttgtggtttatgaaaattgatgcagggacgatccatgcatgttcctaaaaacaaaagggatgttgttttttaaagtaaagtaaagcatcaccagcatcaaaatctaacaattccacagtaccagctggtcgtatgtatcttgttgaaaacaacagctattcttacattccttccgtttgaatgagcagc

SEQ ID NO: 58474 - DNA, 638 bp, Populus trichocarpa
  Intron number 1 from transcript POPTR_0002s16640.1 (locus POPTR_0002s16640) derived from phytozome v7.0 (chr-ID scaf fold_2; pos 12451391 to 12452028)
gggcaaaaagccgtgaagaacagcaaatatcccaggtttgctagaaattaacttaatattaagctattctaaacaaaaagaaaagaatccttgcatcatataacattgcatgctatgcattttagattttacatgtaacccaattactaattagtccgattgatattttatgtgagcgaactaaagtttctcattgtgtaagatcaaatatgtatataacgaacctcacccaagaaaagatcaaagacttttccataaaaatctagctagctaggcctaacacattaaaggctagggttagggttcggaaagaacaacaatcatgcatgacagcagcagcagcagcaggaattgtacgaaagagtattgtatgtattgagttgtctgaattgtgtggatcacagcccaagctcatcctatttcttgcggtctccatattaagtgtgtttattatacaatttcacccaccttttctaattacccttaattactgtttttcatatttacacaaaacattaattaatgaattgcttttatatattcaagtatatattaattatttaataattttgtgaaatgttttgcgttgattttattttattttgccaaaggagttactaccggtgcacgcatcatac

SEQ ID NO: 58475 - DNA, 593 bp, Populus trichocarpa
  Intron number 1 from transcript POPTR_0001s33850.1 (locus POPTR_0001s33850) derived from phytozome v7.0 (chr-ID scaf fold_1; pos 32006757 to 32007349)
cacctcgtcacccttccctccaaatcaattccaaggcctgctatttctctctttttcactgccaaacaatcatgcatagcttattgtttttctttgcttatttctatctcttgttctttttaattcaataattttggattctatttgtctgctttgtgcttctactccatttcctgatgtgggttttgttaattttcacatttgagacattctatggagcatttgagcttaaacttgtaacttagaggaaaattttgtgtttatgtgtgatgatatgggtggtacaataatatagagcttttgaaatcttaagtgattgaaagtttgcttctttcaattgggtttaccttcaagatttctggggattagctattttgcttcaggacggcttattagaagaaattttctttttatttcttttgatcttaattgtaaaattaaacgaaatttgaatgctttctcgggaattttccttacaatctcattgcattacgtttgtaatatgttgtgggcatgctgttactgtatcgccgagtttctattgcatccagtgatggtatttttgtattttacactgttgcagtatcctttca

SEQ ID NO: 58476 - DNA, 715 bp, Populus trichocarpa
  Intron number 2 from transcript POPTR_0001s00600.1 (locus POPTR_0001s00600) derived from phytozome v7.0 (chr-ID scaf fold_1; pos 513383 to 514097 reverse strand)
atcaaaggattcaaaggctatcaccaaaagttcaggtcatgatcaaaatcccatcaagcctcttgtttcagtttcttggtatgcgcctcacaagaaccaccgtcaaattgctgggtttcactcagattaattatgctatgcctagccagaacacgaacaccttctcataactgatcaattccctctttaacacttacattatgcatttatgcccacaatttctttatctgataacgaagttatccaaaatatatagcccatatacttctctccgagacactggcaatttttgaatccaagacacgcaccgattccatacagctcgagcaagtccttaaccaacacagcatttttgtccttacaaatttgagaagctacttttctttatgaagctattctactatatatatttacctttttgagattttattatactaattaagaatgtagtaattaagtaagattgttattttactactgctcttcgccttgctataactacagccagtatcccagtatattaattgcttagtttctcacccagttttggacggaaaaatcttctatatgatccattattgtctctcatgctgtttgtttgatcttcttatagtcattaattagttgtatcaattacgttttcaaacagtactattttctgatagggatggaacatgcaggtattcagattcttaagtctcttaacggccttgtg

SEQ ID NO: 58477 - DNA, 774 bp, Populus trichocarpa
  Intron number 1 from transcript POPTR_0010s12730.1 (locus POPTR_0010s12730) derived from phytozome v7.0 (chr-ID scaf fold_10; pos 12705972 to 12706745)
gaaactgtctcctcatttggtaacacctctttctctctctcacaaacaaatgcacacaaaaatgcatccactaaacaaacacatcatgcaaaggagtgcatgtgtaatccaattagtggtgttcttttctagagatgagtgcatctcttttatctcatcattatcccttgcaacatacaacttgttaaattcatcgaggcccacggtttctaatgtagtttaagttggggaaaccacagtgttgattgtacactattaaaacgagtgtagagatatactgtgattaaggaatagccaattgtttgagaaaaaaatcctcgtggcccaaattttcactaagcagcagaacaactatctatggccatttaggacccaaattttttctataatactggaattgaagaagcaagtaaaacagaaacaaaaacaggattttgagagggcaattgcataattgttctagaagcatttttgaatctggagttagcttttgatatgtttaatcttttctagtgagatagttgattaccaggtgtcccatatggtctcaggaagtaaacttgacaatgaaatatgcaagttccctccatgaatgcttgtttccaggtgtagactagttttacaaggttattcaggtcatcttatgcatcgacatgattgtgtggtgattcatcatgccttttaaacagatggattttgatgctccttatttcttccttccctataatatactcactagcagggtctcgaaataaagacctcaaacctttagtc

SEQ ID NO: 58478 - DNA, 583 bp, Populus trichocarpa
  Intron number 1 from transcript POPTR_0001s26260.1 (locus POPTR_0001s26260) derived from phytozome v7.0 (chr-ID scaf fold_1; pos 25319418 to 25320000)
gtgggcctggcccccagcgatgtcagtgaaatttaaaccctagatactttttgcttgttgtttaaattctagggtttcagaattatttgctattttgtttttgaaaaagtagggttttgaatggttctagtgaattttgaggtggttagttgtaaattgacattgagagtaattaacactatggattgcttgatgtaaggatgccttggagttatcaacttgcatctactaataagctagttctaaaataggttgaaaacattccacagtgtgctaagaatgttgtccctccttggggattctcctaaactaattttattttttttaattttattgttggagtagtaatttatcagatacgtctccactactatttaaataactgtacccttttattcttaatcattccatagagcaatttgtgaataattctgatgctttgaaagttctgattgtgtgatcagataatgttttgttgttgctagctgatatctcttgtcatttgtttaaaaaagtagttttccttttgttctgaaacttgagatggatgataattgttccatatatttacagctgttgaagg

SEQ ID NO: 58479 - DNA, 1018 bp, Populus trichocarpa
  Intron number 2 from transcript POPTR_0001s26260.1 (locus POPTR_0001s26260) derived from phytozome v7.0 (chr-ID scaf fold_1; pos 25320093 to 25321110)
atttgaatcttgatcgccgcactggttttgttaaggtaagaaaaaattttcctcttcttttgaatcttatttccagttgttttgttctttttttatgttgggtgtccatattagtgaaaaccactgttaaattgagctcaaaacgaagatcaattttactacaagttcctctgccatgctgaattttggtttggagcatttgttctgaaccatttcacatttcaattggaacccaaatcagaaaaaatctgatcgattcaagattcgctcaaagcaatctcactggaccagttgctctttgcacaaaaagcgagtatggtgctgggctttttggtgaggaactgagacagtgttggttttgatgattttttactaccgcttgctgttttcactcatggttcatcatgtgagtggattttattaaatataattgctcacagagtagagaagttgagtgcttctgtttaggattctgggtggcattggttgctctgctgtttttgttggatatgatagctgtgcatgtgtccacatattggttgcgtgattttgttgtgaaggaaattagtaacttattaattccaagtttttaaatgcagctgatgtttaatgaaataatgtgaaggtcaaagtttagccagaactagtttctgtgctaaggaaattccacttcattgtggtagtcaatttcaatatttgtaaaatacacgcattccacccagaataaaggatcgtaacattcaacatatatggagtgacatgtaattatgtttggtaaatagcatgttattgattcaattggatttgatgtggtcgaattcagtgctatattatttttctgtcttccttcctcacaaaatttcatttcttgattactgagatgatttcatgctgttatattggtcatgaaaattgacaataacattggcctgttgtctttgttgaaaaattctgaaacaaatattcttgcattaagttgacacatatttattttgcaagggctacgcgctgatagaat

SEQ ID NO: 58480 - DNA, 693 bp, Populus trichocarpa
  Intron number 1 from transcript POPTR_0007s11210.1 (locus POPTR_0007s11210) derived from phytozome v7.0 (chr-ID scaf fold_7; pos 11503787 to 11504479)
gctgagtatatttgtgtattaaacaaggtgcccactgattctcacttccccctcttttgtatgagtagaataatgggatttccttaaaatgctgctagatttttttttaaaattttattatctgggtagtgttgaaggatgctttttttttttttagtttaattaattttagtggttatatttgctgtagaaaaggctgtttcttcttataaattgttgtttcagttttgtaagttgatggttgtgtggaacatgttttgaaatgggtttgttgaataatgcatgtaccgatctgggtttttttcgtggttttcctagttgtttatatttcaatttctaagcttattcttagcttactgttctccaaccgacacttcatttgttcttccttttataaagatcatttattttttccttttctggctgtttatacgacatagattctatggttttggtgctttctgttgttaattgtttatggtgaaacattgttgttcttttgaattatttctattagcacagtaatttcttcacctgccaagctaagatcaagactggaacgataattttactttaatttcagctgctccttgttctttaaagctagtttgcatactatttcttccattattaacaagtttaatttgctctttaacaggatacgataatcataaagcctgctaagaaaactcc

SEQ ID NO: 58481 - DNA, 963 bp, Populus trichocarpa
  Intron number 1 from transcript POPTR_0010s15430.1 (locus POPTR_0010s15430) derived from phytozome v7.0 (chr-ID scaf fold_10; pos 14674669 to 14675631)
aatcggaaatctccgtcaaatgaactcaaagcaacctgcaattgcagctttgtgaaaatgtctcctctacaactggtgagattatcggtttcttgacaggtagcagatttttttttgatactgcattcgatggaaaaagatactcaaaacagaaatctggatcttaaaacaatccaggatcttaagttcttgtttaatcccccccgccttctcagcaggtaaaaaaagtttgcttgcatgggtttgcttgatatactttttggcaaaactttagacacgctatgtggaagcaaaacctcacaaggaaaataaaaaacgtatgttttagggccatgtaccttgctgttgtggctgtagagtttctcgaggaattacttccaacaaggagaagctgacctagcccttatggtgtttactcggccactaccagatgccaaagtaaaaggtattcatttgctataatgttgagtttagtatatatagaccatactcgcgagatataaaagaatccaaatgacttggtgaatgaaaggaatagattattagtgtttgcattccaagcagaaaggcatcctcgaaactgttgcagaaagcgtgtggctctattcaaaataaagttaaactgattacttgagagcaaatccaagaatttagtgacagttctttaccttttattacagaaatttgtcccaaggaaacgtgtgtgaaaatataaaagaataaaagaaaagaaatcaagacaagcagaaaggcatcgatgctctttagaagagtttgtttaataataaatgtatccacttgattgtttttaaagaatgcaaaaactcacaacatggaaacctgaggttctgctttgttgcttgaaccaggggagggggtgaaagcagaaacctgcatgatcatgatatgctggaattactgatactttgactcttggctgttaatagtatcctgttggggaga

SEQ ID NO: 58482 - DNA, 762 bp, Populus trichocarpa
  Intron number 3 from transcript POPTR_0002s03300.1 (locus POPTR_0002s03300) derived from phytozome v7.0 (chr-ID scaf fold_2; pos 2023510 to 2024271 reverse strand)
ggtgtgatcctgacggctcaaccttcaggtaaaggtttgctattttgtgcttgttttgtttaatcttcttttaggtgaaaataaattctttttcaaagctgaagttccattctaatctgtgtgccaaattgttccagaaatccacgtgtgcactttgatttgaacagaaaaaaagtgacctatttcatttgctaagcaataggatcttgaattcttaagcacttccctcctattcacagaaaaaaaaggagtctgacagtgctagtcaatcatgtcaaaaaagtggaaaatttagacatccccgaccacgtctatctgcatcttattcaagttttagctgctgatcttcataatgtagttctgacatttatggttttcaatctcattatatattttctttacttctaattgctttgtagcacctgcactcgacattttctttagctgatttttggaatcaagtttctagtccatataaactctgtactatttttgggtacattgatatcttactagtagggcacagaaactttcaattcatccctggattggcagatccacctgctgtttgctgttagtggacttcagttatagcgatgctgtgatggagttccttctacttgtttacttcttttttcttgcgcattgctgcaagtataacagtttttgggactgtgttcttttcctgcttgcctttgaggtggtgtcttttaacactttcattttcttggtgcagatttatccacggaaagcaattaccct

SEQ ID NO: 58483 - DNA, 810 bp, Populus trichocarpa
  Intron number 1 from transcript POPTR_0001s29450.1 (locus POPTR_0001s29450) derived from phytozome v7.0 (chr-ID scaf fold_1; pos 28122364 to 28123173 reverse strand)
tatctgctctctcccgcagctgtctcctctctcaggcaagtctctatttctctctcttctatttttttatcgcactctctcccgcagctgtctcctctctcaggcaagtctctatttctctctcttctatttttttatcgcactggatccatgtgcacgggtctgtttgtttgagctactgtttttagattcgataccttttgctttattttcttatatccctctctattattcctccgtttccaaaaaagaccgttggttagggtttcgaatttctcgacttttgtttgcagcaatgttactcctttagtgacatagggtttaaatgttttattgtatttggattattaggttttaataaatacatttattaagattttcacatggactagagtggaaaatttgtaattatttaatgagttttggcttccgaagaagctgttagtaattcatgatatagcagtgctttgtgtgcgtggtgaagttgcaatcttgttagtttttaagttaacttagagtgctgattgatcacaccgtgagtattttgcttatgctgaataagatggattcctagaattggggaaagtagatccctgcaagaattgggctccatataatgcatttttttcgatgacgaggagtgtgttttcagctgaatgcgttctgttttttcaagattgtttcttgtacactatcattattaaatttctagcctcaatgaaaaccatggataataggattgttagtcaaagttttgattctttagatgttcatacagcgtattttcctttgacccatcaataaagaaag

SEQ ID NO: 58484 - DNA, 673 bp, Populus trichocarpa
  Intron number 1 from transcript POPTR_0001s26420.1 (locus POPTR_0001s26420) derived from phytozome v7.0 (chr-ID scaf fold_1; pos 25452044 to 25452716 reverse strand)
ccagacctaattcgcttattaaagctgtctctacggtgagatttctcccactgccttttttcttcttgtttatgatttgttttctgaatttgatggtcaaaaggaaatatagaaaaaataaaggataattaatttgtttagttttgatctgtttggattgagtcttttttttttccttatcgaatgctgcttatttgaatctcgcttctctctgtttgatgctgaggaaagagataacgtcaaaagtaaggagaaaagtcttgtttgttttcacttttttactcttttcaatccggtcgtgtcctttctacgatttaaaatatataaaagctaaacttcaggtgccgtacatcgaaatatcttcagaatcatgtcatgttgttgaatttctttgtaaatgtgtggtgctaagtaaatttgggaggaaaaggaaggtgtttggaacccgcgaaatggaaatgctcctgattcaacataattataattaggttttccttagtgaacttgtttattagtaacattaaagaattgtaaggcagtttcttgaatagaatgagatgaatgttgatagttattgataaaagtttgtgaagttcttttcttttcttttttgtaatttgcacgatttttgtgggcagccagtaaagccggaaacagagacgaagcgtagtaa

SEQ ID NO: 58485 - DNA, 752 bp, Populus trichocarpa
  Intron number 1 from transcript POPTR_0010s00460.1 (locus POPTR_0010s00460) derived from phytozome v7.0 (chr-ID scaf fold_10; pos 232217 to 232968 reverse strand)
atctgggctaccgtaaacgagtgatgtactacttctgctaatctgttttctcaatctatcatcatcatcgttaattggcttttgattcttgtagagattctagaataggttgtctgtagagatgatttttggacaaatttattattgtctctgttctctttctttctacattttcaatcatctttaataagttttcctccaattgtttactactacttgttaattcaaatttagaggttatgccgcccttcaaactgctatgccttttcaagccaaaagttgtttgaaaccgtgtagacaaacgtagcctcgagaatataagaaacttgttaatgatttgtacttcttggggttttattgagataacattgaaaatttaagttgaagttggagctgagtttttatggtttagtggcacttgaaaatataggaagctagacaacacttggatgggacaaaccgtgatgataagtgaagaaaggatataacattatcttctcatcatcttgtttgattgaatggatggaaatgcagctgcctctctgtctgctttctcctcctgcctgcctttgtctgtttttattattatttctccgttattttatgcttgccattcacttcttggcagatgatacatttgagtttctgtttacactctaattgattcatcttatggctgaaatcagttaaagttgtgtttcttcctcctcagggtagcgttcagttacagattgcagtaacaaccttcaaag

SEQ ID NO: 58486 - DNA, 404 bp, Populus trichocarpa
  Intron number 2 from transcript POPTR_0002s02550.1 (locus POPTR_0002s02550) derived from phytozome v7.0 (chr-ID scaf fold_2; pos 1444654 to 1445057)
tgctctacgttcaagttagttccttttccatagccactaaatgtttctattttgagtcatgatgttatttgcttgcaagccttaataagctatactcagagcacttgaagtggaagaaacttgaaatttatgctgattgtttgggggtatttaagttccagagtttggcctttttctgtcattgtcaaggctttccctgaaactggaatcttattattggagaaaaaatcaaactaatctagtgagccatttgatcaaggtagtgatgaatcaaaatgtgagctgcaaccattcctagagctatgctagtaactttatctttcatctgcagaatcctggatatgaacaatttcttatatgattagctatcatttgggaacaggttggtgaccctgaaattgatc

SEQ ID NO: 58487 - DNA, 692 bp, Populus trichocarpa
  Intron number 1 from transcript POPTR_0002s08940.1 (locus POPTR_0002s08940) derived from phytozome v7.0 (chr-ID scaf fold_2; pos 6318457 to 6319148 reverse strand)
actgctggagagaccaaggaggcggtggtatagaggtagtagaggtcgaagctactgaacacgattggggttacaaaggcggtaatcaactatctcaaattggtttctctacattttttctgctgcgatcacgtgccatgtgtgatggttgcctatgtaccctgatgtggtgctatgccattggtgtcaaataagtgtggtttccaacaaatattaggaatgatagtctgagggccttgcctatggttaggtcattagttccgataaggattaaagcatttaattggtctgtttaggtgcacgattgactatcattttcgtgcatagtaatttgaactgggatcgtgttggttcgttgttgatatatttctttcgtgattgatgctttctttttcctcgtttatattcaacgagtctctcaccattatgtatcctgtacatcttggactgaagattcaagcactatctggtctccttttggtttgtcttttcctccctgctgctaatgtatttgctagaatggttcttctgatgcatgcatcctgatctggtgaaacatgattcaaaacttcaaactgacgaaaattattagcactttcattcaaaaagaatttctagcctttcaaagaaaaaagaatttgctgcactgaccgcgtcgacttccagcccgttctttcttgcttgttgcttag

SEQ ID NO: 58488 - DNA, 780 bp, Populus trichocarpa
  Intron number 2 from transcript POPTR_0010s17720.1 (locus POPTR_0010s17720) derived from phytozome v7.0 (chr-ID scaf fold_10; pos 16205762 to 16206541)
taactggacaacaattcaggacactaaaatcccatgtaagcctgttggtttctaacttcaatctcagtccttgcatttttttttcttctaaacttttgtattgttgtctataatttatttaagaaattttcttttgtgaatggaaggattagctgcatattgttcataaataacctggatgtgaaaagtacactattcaatttctaaagggtttaccttgaataggcaaaaaagtcgcggttgcttcagtgttcttgagttgcctttattcagctcttccttttcttcaagacggttccagatgttattcctatagaactttccgagtcagcaattcaattaaagtctatttagaactgtttcttgctagccatgcactagctattatcactctttgtgattatgtttaacctatggtagagcttcatattttaaaactttgagagaattgtgatatgagatgttacaaaatgtaaccattagccagaccatcaagatacatgtagcagtatgttgaaatgttctctcccttctccttacttctttgattgttttgatgttatacgaaaatatcttattgctgtccctttagtttcatatttgccatgtacttccatatgttgagtattcaaaacttttaagtagaagctgcctgtgttaaatagagcattagaatcatgtagaatattagtctgttttttctattatgtctttcagtctaaactgtttttcattgtttttgcagatttagtcaataccattgacttccctccagttcgt

SEQ ID NO: 58489 - DNA, 509 bp, Populus trichocarpa
  Intron number 3 from transcript POPTR_0001s06030.1 (locus POPTR_0001s06030) derived from phytozome v7.0 (chr-ID scaf fold_1; pos 4716252 to 4716760 reverse strand)
ctgttcgacctctaatcagagatagcttttccgtaaatactttttatgatttttcctgtcttcagattttaggtaattgtgggcactgtaaaagagagcatgtaatcagatgatccttctatctgtagtgcctactctgcactcaaatattattggacttgtgggtggcatgtctaggattaaaatgtgggagtataatttggaagtacatatagtagcactttaggtttatttgtgtaaacgaggttgctttatgtcacatattgactgttcccttttttagttttgaaagtttgattgatttttctgaggtaatggaattgggttatgggatcagtaaccaatcactactttcatgtatttgacgggattgcttgtagtggcacactaactgttattgagtttatgctacaggagtttcttctaaacgatagagggtggggcttatattttctttttgctgttttggtttagattggctctgctgttggtggtacaacaagtgcatt

SEQ ID NO: 58490 - DNA, 647 bp, Populus trichocarpa
  Intron number 1 from transcript POPTR_0007s05260.1 (locus POPTR_0007s05260) derived from phytozome v7.0 (chr-ID scaf fold_7; pos 3386395 to 3387041)
tgaactgacttggaactcagtttctttaccctccagtaagtcttaatttcttttatttttaatccttatgtttctcctttcaagatttgagatattatcaaccttaattagtcgttaagttttgatcttttccttttttcttttgctgaattatcatgagtctataatctgctaaagtgctaatgatggatagataagtatcagatacctttacatgcatgaaattggtagacattggttttgcaaaccgactttcttcttttttttacttaatggagaggaatatgccaaatgttatttgtcatggagcataaaggggcatcctttctcgtaggaaaaaaggacaaatttgcaaaagtgaaagttcgaagacatttttattgtaaaccagaaaaagaaaatgcaaagctgaagcctagagcactgattgtgtgctaaggtgtaatccagtgcaatcctgcaacgcagggtcaaggactcgatatgttttactttttctatcccaggttaaggactcagattcaagcccttgtctgtgaaagtggggaatagccaaagtgctaattataaatgcatcttttgtccgtatgtagattcttagtgtgaatctcaatttattgctcactgattttgcagggaagctgtgg

SEQ ID NO: 58491 - DNA, 808 bp, Populus trichocarpa
  Intron number 1 from transcript POPTR_0001s29410.1 (locus POPTR_0001s29410) derived from phytozome v7.0 (chr-ID scaf fold_1; pos 28100158 to 28100965)
tcgatcaaaaagaaaagaaaaaggtgacaaacctatcgacaagatttcacatctcacagtacaatgataattaaataccatgacctgactatcacatgatatgaattatcgtttgatatttggtctagaggtgttcatttgatagccaggaaaatacagatgacagataagctatactgcgtaataggctttgaaaatctactcttacaaggatcgtaccggtgagtttcctctgagaaaggctccttctcaatgaaatcaagctccggttcgtgttcaatgtatagttagctggttatttcaaactatttattatcataaacatagaaggcattctctgcaagtcatcattaatttgcaaatattgctgacttcgagatggataatagcgaggaagctcgagcttgaaacctcttgaagatggagaaacattgagtgccggtgcttgttttttttttcccagaatcttactgaggaaatgcgagttctgaatacgactaaagaaaagctgatgtaacgtaaagggccgtgaagagtgattggttgatgattttttactcaattattataatcagtgagagacacacctctttcttaatcaacaacctcaattaattatatgctacttccgcataggggaagcctatcttcattccataaagcgatatacgaggaattaaaaacatatgaagcacaagtgggcgtcccgactacaaaaattcaacccatctcctggaatcttggaaatcatatatccttttcatatttttcagcatctcggaaccatcttcatagcttgccactgtgc

SEQ ID NO: 58492 - DNA, 988 bp, Populus trichocarpa
  Intron number 1 from transcript POPTR_0007s12800.1 (locus POPTR_0007s12800) derived from phytozome v7.0 (chr-ID scaf fold_7; pos 13054696 to 13055683)
gagagctctctttgttttgcttcactgctcacaaggtttgttaaactctacatttcatgaccaagtggcttttttttcatttggggtttgttgtgtgtgagtttggtggagatctgttgctcttgttaaactcacaaggctgtttttgtgttttttttccttaatgtgatgtggagcacattgttctagtttttttttttttaaatgattaggttatttgagatctgctgaattactctttggtgggtttttcatgttttgataagtcgtttagttttggtaagtcttaggttgtaatttctttgctcggtgattactaagattgcctgtgctgtgtagaggtttggatattctagactgtaaaaatattcagcgttttgggttcaaggaactgaagtaatctgaaatctgttagtgtttgtgtttgtatttatgtttagaaaccaaagtataaggtttggttggatcagggcggccattgtgtagtctcggtgatcagtgtttgattggatcatggattctcccattggtttgctgatcgataaaatagatcaatacactactaccaattttttagaagataaaaataaacagaataagaaaaggttgaccaacgattcctattctgtctgccattagatcgtgtgtggtggaatacagcctatcgttcatgaaagtttttttgttggcaagtttaatttttctgtattcaaatcaagataaaatattcaatattgttggtctgtctttgagtttgctacaaatcctgcgttttttaggtggaggttgtatttccatttcgatttaggccttttgagaggctattagttcagctgcaaaataaattggttggaaataattatccttaacagacttttatgttgaagactacttaccataggttcaactctattggcaaataattatccttaacagacttttctattgaagattacttaccataggttcaactttattggcagtcaac

SEQ ID NO: 58493 - DNA, 1019 bp, Populus trichocarpa
  Intron number 1 from transcript POPTR_0002s02130.1 (locus POPTR_0002s02130) derived from phytozome v7.0 (chr-ID scaf fold_2; pos 1162868 to 1163886)
ttaaggttggtgttttgctgtctccctttttgttctttcagttgtgttgcattttcttggttttgtttggtctgaaattcttaccttttaagattccatgtttggacatttatgactgttttttgctattgattagtggttaagacatgtaaatgacagggaaaagaaatcatgggactgttttaagctttagcgatgttgaaaacgcggatcaggccatgcatggtcaattttttttttattttttgcagttttatggaaccaatttggaatttaccttattgactttttatgtaccttcatggttcgttttgtaaacgttttgattgaaaagaggactggtgccaaataccatgacaggttggtcttgttttatagatttttgtctatttggattgaccgttgataggttgtggttttgattagagtaggagatgatcatgtttgggactccaaatacaaaatattgcagaatgtattaagtgttagttgttagagggcgtggaaatttatagatttgcacattccaacatgttttcatattgattatacaaggaagatgggtgagaatttcatcacttcatctgagtttataagtttggaaaatgtagcaggaaatgttactgtattttcattaaaaaattattttaatttaaaacttaagttatttgatgagattttaaaatataatttatattattttttaatatttttttaagtaaaaactatttagacttgaagtttacatagattcatactactttatatttaatttttatcaaataaatatttatattatcctctaattttctgttatgtattgcgacaattaacattttcatgttttgaaattcttgcacaatttatgcctaataaactgtcaattgcgggaggaagaaaaaggatatgtcatgccttctgccaaggggttgttatatttatcatgttttttgagtgattggttgtgagttctgatttctccaggatcctgtactccgtcctttgattgaacaagactc

SEQ ID NO: 58494 - DNA, 567 bp, Populus trichocarpa
  Intron number 2 from transcript POPTR_0002s10450.1 (locus POPTR_0002s10450) derived from phytozome v7.0 (chr-ID scaf fold_2; pos 7537855 to 7538421)
tttcaagagcgggccgctttttatttcatccaaaggtgtgtgttatatttttggttttacgaattttctcacgcttaattacaaatagcaagatatgcatggaacggagacaaaaaatgttgttgacttgtgttcaatcgactacagtttatgatgatattcttttttgtgattttagtttcatcccagttggagctggcttgtttttggtttttatttcgattttgtagttttatcctgctatgctattgtactgtcatagaaagagataatacacagagagagaagatgggggtgcgagttctttaatctaaagaggcatttcctaacatacttgattagacaccgcagatattactaaagaggcatttcttaacgtgcttgattaaacactgcagatattatgtatacagatagtaacattgtcacttttttgaggatccaatcaagaaaaccaagccttttcttttgagaacaactgtaccgtgagcatttgaatgtgcatttctgaggatctttgttcactctggggttatattttttaaccctgtgttgtacaggaattgg

SEQ ID NO: 58495 - DNA, 484 bp, Populus trichocarpa
  Intron number 2 from transcript POPTR_0002s20570.2 (locus POPTR_0002s20570) derived from phytozome v7.0 (chr-ID scaf fold_2; pos 16652742 to 16653225 reverse strand)
ggtcgagacttactggggcaacgttaatcccatcggtgcgtttttgctcttcttttcttaaatttaattaattgattgatagccggtgatcgatattttgtaacaggtgttgtggttatttatttttaaatagcattgaaataaagcctgtggctaacatgtgctgcctaggttacaaataaaaagacaatgcagacctgttgtctttatttatttttacataaaattaaaaagggtggcatcgcacggtggcggccggtgtggaagtggggctcttggatcttagatccggtgttggtagttttatatggtcaaggagtagcccgtgactgacgaggcaattaatcggacggttattaactaattaaaagatatgtaaataagagaaaagtagtgattaactcgagttttgaattttctgagacagacagatcttgacaactgagatgtttgtcgttttttacaggtgtcaggagttgttacg

SEQ ID NO: 58496 - DNA, 442 bp, Populus trichocarpa
  Intron number 1 from transcript POPTR_0001s04720.1 (locus POPTR_0001s04720) derived from phytozome v7.0 (chr-ID scaf fold_1; pos 3654488 to 3654929)
cctgtctttatactctaaaccctcccagcaccactgtaagactaaactctctctctctctgtctcttttttaagcacccccataagtgaatttcagcttcttgaaaactgtctcttactttcttttatatacatgctgttgaatcttcttggcttgtgaactttgtttttattgcttaggttttgctttcctagtttagttcttgttttccagtcgtctatagttcagttcttgtcagcatgtatgagaatttgccacatagtaactataattatgtgagaacttaaacatgtttgaactagcttccatctgtttcctcatggtgtttttcgtagttcaattgatggatatcagtgtttgctctcatgtacggtttgttggtagacaagacagtgttgttctaactatgatgtctgtttttaacatgtatacatagtactta

SEQ ID NO: 58497 - DNA, 496 bp, Populus trichocarpa
  Intron number 1 from transcript POPTR_0010s06280.1 (locus POPTR_0010s06280) derived from phytozome v7.0 (chr-ID scaf fold_10; pos 7693479 to 7693974)
cgatgtaaggcttacaattttattcatttccttactcctatgctcattttgatattttatcagtaattggtaaagaaccctgctttactttcctggacttgtgtgattgccttcttctgttcagttgaggtatgtgggctagaaatttttcataaacaaagatagagttggtgaatttgaatatgaaattgggttatgatggatgatatgtgtctttcgcctgtgcttttctaatttggttacaagtgctgtaattggaaatggggcatatccattaacaatgtttcttattttctaatacattgtgtttcttattttcttttcgggattcgtttagacacaaagtttgactttgatcatttttctagtttgcatttattcttcatgtaatattccttttctatgcttgttgtgaactgttaagggttcattaaattgaggtttgataggggtttttgcagggcggctgctctcccagtagattgtggtgggaatt

SEQ ID NO: 58498 - DNA, 817 bp, Populus trichocarpa
  Intron number 1 from transcript POPTR_0007s06450.1 (locus POPTR_0007s06450) derived from phytozome v7.0 (chr-ID scaf fold_7; pos 4810147 to 4810963 reverse strand)
cttggtttaagcgtgctggtcaacaacagattgaggttttatttccttttttgatcatttaagagaagttgtgcttgatcattttgtttcataggaaagaaatgggtcttagagttttggtggttcatagaaattatgcgtgccaggttgctagctagtttaactgctaaagtcgcattttactgcgcaatctggcttgaaatttagctcatacctgggctgagagggtgaaggaaagggaagagcaagcatcaatcatctctcaatttgtaggaaagaaaaagtatttacaatcattgtgtgttgtacattgtaattatgcttgccatgggactagttagtcatagttgtatgcctggttcgtagtttatcctttgtatcacagatataataggatacaagtatggatggattaccagagaagtagagattgatggtcattttaggaaatgtgcccccccagttggctgtttatcaacagattgatactttttagggcatgtggttagttgttatgctaggtatgagactttgtgatagaagaattaccctaactttagttgagcaagattgcgagctttttttgtctctgcttatgttgtctttgcatgtatctagtcctgtattgtcttactagtggtcattgaaagttatttggatagcatttatattctcctatttatttcaggcttcattatgatgtcatcacatcctgtcgagcacatgtgctcttcctatgaaatatgggttctgaaacactgccctttttgtatgacaatacatgggtcttacaggtttctgttgcacctggtgggag

SEQ ID NO: 58499 - DNA, 498 bp, Populus trichocarpa
  Intron number 3 from transcript POPTR_0010s01390.1 (locus POPTR_0010s01390) derived from phytozome v7.0 (chr-ID scaf fold_10; pos 1492009 to 1492506)
tttagtcgagctgggatatttaagtgcagttatatgttgctatattttgataaagagtttctaggctgtactgtggattctgtaagttgtcaataggcagtttaactcattgattatgagttttataaatagatttggaacagtcaagtacaaaaccctgcttgttttttcaggaaaagtattaattgttgcggaacacggattattagaaattcaaaaattaaaggttcttcattatactctttctcataacttctcacatcagaccaacccactaaaattcaactagggattacaaacaaggtcgacgtcaggaagaataaagagacaccacaaataaaaaattatattctcacaggaaagccatttaaggcttataatgagtagttttgaagtccaaacgatctgtggtaccatcccatggaaatgatttttaaattggttttataaatttttgaaacaggcagcaggatcaatcagagggcacatctgtccaga

SEQ ID NO: 58500 - DNA, 608 bp, Populus trichocarpa
  Intron number 1 from transcript POPTR_0007s13180.1 (locus POPTR_0007s13180) derived from phytozome v7.0 (chr-ID scaf fold_7; pos 13310875 to 13311482)
ggcgtctcctctccttcagctccttcgctatcaaggtaattttttagctgtatttcttttctctttctctatccgtgtgcaaaagttgatgttaagatttgcgtcagccgtttttcagctaccaaacagtatcgttttggttttctatttgatatcaaaatcgggcttcacgtgctttgattgtgtagcttagcttaaaagctgggtggattttttttaaaaaaagtttttgtcatctagaaatcttatctaagctagaaatggagcattaggttctatttattattttttttgggggggtttcttgatttgattgtatagtttatctaagtaattgtgtcgaaagcttgaatttttgttgaattaagctaattttgtgaatatgtagtttatttttgtgattttgtaatcaatctaagctaattttgtttaatttccactaatttccccttaattaccaaatttaacttttattattagctatttagcttctattatggattttatttggaattgatttgttgttaactaagttgtttaatctctaaatttctagttactgaatttaattcttcatttgatgactgttgttgtggtagtgtagaagg

SEQ ID NO: 58501 - DNA, 818 bp, Populus trichocarpa
  Intron number 2 from transcript POPTR_0001s13330.1 (locus POPTR_0001s13330) derived from phytozome v7.0 (chr-ID scaf fold_1; pos 10424319 to 10425136)
gttacttgtgacggtgataatcgggttacccgactgtaagcatcttactgtatactaatcttccagcatcatgtttcttcttgttcttgttgttttatttttgttacattttatttgaccctttgtgcatgtatgcttaagttcgtagtttgtgtttgtctggctgttatgtcatgaaaaattatcgccaacttttttgcttgtcaaaaccattatttagcctataaatagcctagtatccaattactttagttaatccaccaggaaatctaattaggcactagagacaagcccgacttctgaccatattcaattaatttccacgcatgcatctcgtatatttgtacatgataatctcaaggacggacgaccttttcaaacatgatgtttaaagattattatagtactatatccttgatttttgttctttttcacaactcaaaatctttgaaacagattgtgtgactctgatgtaataataaatgagaaggcagagagaaaaagcatgacaatatttgtaattatgtatatacatgcacatgtaaattcaagagtagaataaattttgctcctttgatgtttgaatcatacactgtatttcatctctttgtatgcaaatatattgaccttaatttacccatgactgttaaggaattttttttatttgtgtttttttaattaattcctatggaaataataattaacacgacaggaataatcatttgtttaattgtcaccgaattaattaactcaaacaaaattataggagcaataaattaatggcgagtaaattaattgttgttgcagagaccttggaa

SEQ ID NO: 58502 - DNA, 837 bp, Populus trichocarpa
  Intron number 1 from transcript POPTR_0001s32210.1 (locus POPTR_0001s32210) derived from phytozome v7.0 (chr-ID scaf fold_1; pos 30620725 to 30621561)
aaagattcacttggtaaatcttatctcttactttctttctgtgcttccctttctttttctttgcttatattttttgttgaactaagggatccagcagaaatccaactaaatttaacccacagagattaattttactgtcagtatattatctgctttccaggtcctagcatgctactgttctatcttgcttctgtttttcccacctcctctggcactgataatttataattgctctttattagtctgtcaataataattccatctttttataaaaaatatgatacaactgttgtgatgctatcactttcatgccatgtgacctagactccagaatttttttcattatagtgtgtttcattacagttaattgatccattgatgatataccagaacaagctttgctagactgagaaagcaggctgtacaattccatatattagaactatgatatccgtttaacttatgagctacatctaggtcttcaaaagaatgggaatgaatcacactcaaggaaggaattctctttatagcattttcattcatttccttttccttggtttttcaatgttgcaatgtttcttgaacaatttctcagcatggagttaggggtcccttctttggataaaactagaaatccatcatcatcagagaagcaatagagttagacagaggggaaagaagagattaaattgtgtttaaaatgtaaaaagacctttgtgaaacatgcagataatacgaatcttatggctcgtttcctttattgagcctgcattttgattcctcctcgtgtcttgtttttaaggaacttctcaaccttgcccttctttgaagtccttg

SEQ ID NO: 58503 - DNA, 834 bp, Populus trichocarpa
  Intron number 3 from transcript POPTR_0010s10960.1 (locus POPTR_0010s10960) derived from phytozome v7.0 (chr-ID scaf fold_10; pos 11363895 to 11364728)
agtttctaaagttcccttcaaaggccattgtccttgtttgtacattccttaactatcactctcttatattttgggctgctgttagtctaattaatttgttatctgctaaaactaaatgagtatacttatgaaggtagactggcatgtgaaattatttagtaccctcagctctgtgtattgttcctccactcacaacaaaaagaggaactgccttgatagctacaatggagggcaactaccatgataactaccaatgcacagggagtatctaatactctatcgacttacacatctatcaaccacaacaagcatgattggtgttatcagaatacttgtcatattgactatctggcatcaatctcgtaaatgcttcatagctgcctgctgaaataagaaaagattcaaagacctcaactttagaaatcttgtctgttcaattggagtatttgtgcaacactgatgagaaggggaaacaattttagtgcatcaaatacgagatgtagtcagaaaatataagcatgtgaactgagaaatttctagcttgcccaaatggattttgttaagaaagtgtatcctctgaaatataatctttcaagtcccaccttgcccttttcaattcttaatacttttgcgtatctcttcaacgtatgccattataattccaacacttttttggaaataactgggtctgtgaagaaaactcaactgtaggatccgattttaatgaataaacggaaaccagaaaaaattatatcatgctaattgcttcctcattctcaactagaaatcttacaatgctgtggttttttcccctctaggtggctagtgcaggat

SEQ ID NO: 58504 - DNA, 442 bp, Populus trichocarpa
  Intron number 1 from transcript POPTR_0001s44490.1 (locus POPTR_0001s44490) derived from phytozome v7.0 (chr-ID scaf fold_1; pos 44886913 to 44887354)
ccctaaagcaactttgaaaggtaacaatcctcacgtcttgatggacatgttttttcgttcaaattaagcattgcacttggtttatctttatgctatttagatagattctgttcatacagagagcttgtttctttttcttctcttgtttcccgaccaggccaaaaggcagggacttgaatctgagttcttgccctctgaagcaaaattatttcagataaattttatatgtttttccatatcatgcttcataaatgtcatcaaaagtctacaatcaacaatgttatcaaaagtctacaatcaacattgctacaattttcagctgtcatatatatatatatatatatataaacccatctttgatatcatgtcacaaattgcaacagaagtttccttaaaatcaatattcatagtttattttcttttccttctaggaaaaacctat

SEQ ID NO: 58505 - DNA, 519 bp, Populus trichocarpa
  Intron number 3 from transcript POPTR_0007s12520.1 (locus POPTR_0007s12520) derived from phytozome v7.0 (chr-ID scaf fold_7; pos 12812669 to 12813187 reverse strand)
gatatcatctccagttctggcaattcagagtccaggtaaaaacattttggaactaaatttggaaactttcaaacattcttcttcaattttgtcggttgtgatttttgtcttaatcaaacaagaaaaaatctttgttgtttgttgttacctccctgtctctctttagatcttggagtttagtagttttttgtctgttactgatgtttgttgttattgtaagttaaatggcattgaatagatttgtagagctaagaaagccagaaaaataaggtcttgaaaaatattttgagattcaatttgtgcaatctttggcaagggactcaagtgattcaaaaactaaaagggaaagagatttgggttagtttagataaaggttactattattgactctgccttttcttttaaagttcttcataaagaaaagctcaactttccatgtctgtttgataagtgccctcttttcgtgtctcctttttttccttttaatcttttcaatgttgcattatgtagagttatcag

SEQ ID NO: 58506 - DNA, 773 bp, Populus trichocarpa
  Intron number 1 from transcript POPTR_0001s11850.1 (locus POPTR_0001s11850) derived from phytozome v7.0 (chr-ID scaf fold_1; pos 9181733 to 9182505 reverse strand)
accgtctcgtgattcgtgatacgctctcttttaaggtattttcactacccttttgattgttctgtttgttttaagaaattcgtggtgaatttctgtaacgagctatgtttggatgctgagaaaattggaagaatgcaacttgtttgatctttttctttttttcctaatttcagtggtgtgtattgagctaccctttccgtttttctttttggtttctagaacttcgtggtgaattttgtgtttggatgcctagaaaatttgaaaaaaatgggaagaatagaaagttttgtttgatcttttttcttttcttgttagtgtcagtggtgtgtggttgagctagaacgggaatctgatttggtattacgttaagtcttgtttgcctgatatttctttgtctggttactgagaaagtggaagtttgtttcttagtttctcgtgaacttagtgtaatgcttgtatttggatccttgggaaatgcatggaaagtataaaagctttgatcattttctgttttcttgttagtgtcatttgtgaaaattgaactggactggttaagtaaaagggcaggaggatatttgatggtacaatgcgaggttttgattaaattatgcttatgtcttgtttggttactgagaaaattttgtgggaaaaaaatttctttgtctgctcaagtattaaccactgagttttattaatcgaggctattaaatatgggattcttttgtgagatcttgcattgttttttatgatttgcaggttgtgcagttgttttc

SEQ ID NO: 58507 - DNA, 766 bp, Populus trichocarpa
  Intron number 3 from transcript POPTR_0001s43350.1 (locus POPTR_0001s43350) derived from phytozome v7.0 (chr-ID scaf fold_1; pos 43396273 to 43397038 reverse strand)
tagctgctgcaatagattccataaacaggtatctttttttcttcttctaaaaatatgtccagcattagttatttgccaatttgaacttgaacttccatttgcattggttgtgttatttagctctttatacttttcattttgtttgagttgcgatattgatcatgggaaattttttaccatatgaggtgatgtgctgttgtgtgcttgatgcggaaaaatattgggggagttttagaatttcttctgatgaaggtgtatgcaggaagttcccttgatccgaattttacttgtagatatggttttggggacatatttggtagtggggaatgttacggctagaggcagaaggggtggttcttaagttgaactctgagaaagcttatgactgagttagtttgagtttcctgatgaggtttcctgaaaggatgggcagtgttaagagggaggaggtgaattaacagcaattgctgttgggtaagcttggttttctagtttgcttggacttctatttatgggttgacttaacttacatttaatgagattggttggtcctagtgctttgtggatgatgccttattcttttatttgtagttgcaatttcttcagttatcatttcaagtaggtcttagtgataaatttattggttgttgtgtaaaatgcaatacaaaatgtcatataatttaattcaaagaggaaatgtataccattttgtttttcttttgtaacttattacatttgtttttgtagcattctttcagcggaattt

SEQ ID NO: 58508 - DNA, 746 bp, Populus trichocarpa
  Intron number 1 from transcript POPTR_0001s15330.2 (locus POPTR_0001s15330) derived from phytozome v7.0 (chr-ID scaf fold_1; pos 12168807 to 12169552 reverse strand)
gttggtgaagttgtcttcaatacttctttgacagggtaagatttcttcatgttctttataaagaaatgaattttaattttctttgtttggcctttttatggtattatgtccatttatcatgtggagtagtttacttaattgagtcagtagaaataacattgatgtaatccagtttttttttacaacggagagtttccctcatttcaaattattaggtttggaacatttaaaagtgggaccactccaaatttgcatagttagattagaattgacatgttcaccttaatatcgagctgagcttggatatccactttttgaagtggtagaacgaagcaagataacagtcatgtcttctcaccctaggaatgctattctgttatatggtttagatagaaagcccatacaaatcaatgtctgaggcacattaagggacagacaagcgcattttacaattggtgcagagacattaagcaaaggtatatatgatgccaatttgaaggccattcaaatggaaaaggctgactagtttaagtcttaaatagttttgtaaacactacacaccgttgtatgtcaattcaaagttttttccctaaaattgatgcagcattaccatggtagcttcccaagcctgtgaagtacactgtctgtttcaattgtaaaaaaattgtattatccattattgaagtgaaacatttctcatatatattcacattataggtatcaagaaatccttacggatcctagtt

SEQ ID NO: 58509 - DNA, 868 bp, Populus trichocarpa
  Intron number 1 from transcript POPTR_0010s20400.1 (locus POPTR_0010s20400) derived from phytozome v7.0 (chr-ID scaf fold_10; pos 18009501 to 18010368 reverse strand)
cttcacatcaccaggctacaaaacgtcgtgggcaggtaacattttcatagtggaagaaaacgcacttgaacttgcattaatatctctttcgtaattgatcagctaatgtggaaagccaaggagttcattaattaatttatttatttacttacgcaacttttttatttttgacaagcatgatatgaagtcttgtgaggtaccaagatcatattcgaaaacagagtaatatttcagtttttaaaaaactagagtaaaataaggaaatttcgaatttttttgtttaaatataacatttctctataaaaaaactcattttttttttatttttacttagtttgaaaaacacatattaaaggttcttcgcaattttcctttataattttttcattgtttttcaaataaaaaaaaacataaacaatactcttttataaagaagcactttttaataatataagagattaatttttttatatattttttcatatttagttattgtcataaatttaatttttatcaaaaatctaatgtaaagatttttttggagttacaatataacttttttcatgataattcttaatttgagtaaaataaaactaatattatacaaatagattatcatgaatataaaatattaatattattattataaattatggatttgattttcttataaaaaataattatgatcttaatgtatttcttattttgttttttagaaaaattcatctttgttttcaacaaatattgagcacgtttttttattattatttgaaaaaaaaattatattattgagcaacaccctaaccatttgaatggattgtattttgatacagtggtgcatcagattctttgctctatagctaccata

SEQ ID NO: 58510 - DNA, 345 bp, Populus trichocarpa
  Intron number 2 from transcript POPTR_0010s21740.1 (locus POPTR_0010s21740) derived from phytozome v7.0 (chr-ID scaf fold_10; pos 18903124 to 18903468 reverse strand)
tctccggctaaaggtacgtttgtttcttactctctttttgctaactgttttaattatattcacacgtgttaatctgtgtgatagtggtggcctttggctttgttgtgatttgacgttgttcttggtttatattcgctaattcattttgatggtttctagccgtccctttttgttttgaaaccatgttgcttgtttgttcgttgtgaatttatggtttgatgaaggaattgagctatgaggtgctgattttgtaatctgtaaatggaaagtttttgcttcttttacatctcttctagttgaggaatttattgactgagaaacttattgtctacgccattgcagctg

SEQ ID NO: 58511 - DNA, 981 bp, Populus trichocarpa
  Intron number 1 from transcript POPTR_0010s07300.2 (locus POPTR_0010s07300) derived from phytozome v7.0 (chr-ID scaf fold_10; pos 8413820 to 8414800)
atctcattcagaggactcaccgtggtgcatctctctcctcttccggactcgcacgcacgcacactcacacacacgcacgcttgctcatgcacatatattattgcatcggtgtcggtgtttttcgatgtctattaacactgctagattttgatttaacgatcaattttacagtttcatttgaatccagtgatttaagaatttatgtcaattaccgtcattagactattagatttaaatttaacgatgggtttttctactttatttagattaaatttatgtcgatgccggcattttagacagccttttcacgattgcatgcactgtgcaaatctcggagattcagacattgacaaaccctctagattccctttatttcatgccatgttgtcttaagactgattcttgagggggtgaactatatcctcgtcctaagctcactctacatctagtgcatgtccacacactaattatttgtgcttttatgcaatttctttcaaatattctagttttatcgttcaatgtagcagaaacctgagagtttagcgcatagcatacgctgctagaactggcatgctccaccagttccttttgtcaaacatcctaaaaagttgattggagttttccagcaatgggcccaaatttatgtttttgattctcttgatgataaagtattactgtgtatatgtggtgacaagtggctggcatcttttcacttataaagtcgttactgttttagcacgtcactgtgataaaacttctgggacttcctttttcgaaaaaaggagttgaacattttcttttgctatccataaacatgtggaaacgaaatccaagattacagaccaccacgacagggagttgtccctcttctttggtcaattgatcatgctagtatatactaattaagaagctacgacagtacagagaatataatcaatgaatgacacactgatttatggctgcaactctgttttgcagaag

SEQ ID NO: 58512 - DNA, 798 bp, Populus trichocarpa
  Intron number 1 from transcript POPTR_0001s10950.1 (locus POPTR_0001s10950) derived from phytozome v7.0 (chr-ID scaf fold_1; pos 8488234 to 8489031)
cagttctaaattaaattaagaacaaggaacactaggttggctctctgtctccttctctcatggtttacgtctctcctagcctgtcatttttatgtcatttctggtacactcttcaataaactttcgaaaaatctcgtgttctgtgttttttttctcaaacttaactatgtgattatacctgctgaagtacgagtgttgcctggaatagtgttattggtttcctttttggggagcatagggatcaatatttaactggaaagatcaatatgcagagttttttggtctctatacaatttcacgtctttgaaatatattttctctgaagttttctgatcttataatctctatagtccacatgctctctgatgaaaggtttgcaagctcgaaaggggggaaaagagagtagtagaaaacaaagttctgaatctttagctcatattggtttagtttcagaattacagtcctcaactcaaccaagctatatggtaccatgttgtatgttgagttgattaagaattttggttgcccagatttcaggatattctttaatctcagattcttattggtttctctttggtcatcctgtttccatttgagtgccatagagtcattagttggaaatattttatgcacttttaatgtctatcctcgtaactatattttgcacacttgtttaagagtcgggggcatgtggtgctgtggaggtggcgttttcatgaagtaattagagttggtgggtcttaaatgttgatgtggttttgattaattggcagctaaaaagagccaggtttcattgtc

SEQ ID NO: 58513 - DNA, 677 bp, Populus trichocarpa
  Intron number 1 from transcript POPTR_0002s08720.1 (locus POPTR_0002s08720) derived from phytozome v7.0 (chr-ID scaf fold_2; pos 6121272 to 6121948)
taccggttctggccaaaaaatccacctctatacaggtttgaagcattttgttaatctctcttagaatattttttcttaatttcgttcaccattttatttattttttagaataattacatttcaccattttttccaaagtcggtaacgtccaaaatcgaaagggtttaaaaatgagaaagcagcctaccataataaagtctaactattcatggaatgagaagaaaatttgcaaagataagatagtcctttatttatttattttaagaattgcaacagtaagtttattttgattaacgaattgtctcaatttgtttcgacgttgtgttagttttctctcgtcttcaaaaattgttttagcattaattggcatatcgacgtgacggcatctttctctgcatgtgaagaattttaagagacattttaggattatatatatatatataatctagtttttgttcttgaatgtaaggaggaggattaatgcattcacgtgatattcaatgtaattagatttctgtgcaagttcatttaaaactaacaattttgattctaaacaaaggaggaagttggtgctggcatgcaagaatgtcaatagaaacatagcaatgttaatttgtttcgggggtcatgttttcgttgcagggaagccaacgaggaatacgtaaagtatctgcacg

SEQ ID NO: 58514 - DNA, 641 bp, Populus trichocarpa
  Intron number 3 from transcript POPTR_0007s13950.1 (locus POPTR_0007s13950) derived from phytozome v7.0 (chr-ID scaf fold_7; pos 13937538 to 13938178)
tttggtgaggaaggcatcgtcttcttcagctcttggtgagtctcggacttgctttatctctctatttccttcttgcagtagactttctgcattgaagctttgaatagaagttagaatgttatataaacgtaaattaatccgctctctttactcagtgagtgaagaatgatttgaacaaagatatctactgatgaaacagaaaagtaactagctttcgaatgtgtgtgaatgttcttaacttcaaacattcgagggttcgtttcattatccatggtccagatagagaaaagaaaagaatcgcaggtttggtgctttttttctctcctaaacgttttgtttagaatgaaattaacgcgatgcgaggctgaatggtagctgtttgatgtggtttttaatgtgatgtatattgttcagagatgtaattttgcaatgttatttgttgtgtctttcccatcccttttaaatttgtttgagaaaggctaatcttttcatttggtatttgcatgggtgttgtttataatggatgttatttgttgtgtctttcccatcccttttaaatttatttgagaagcgctaatcttttcatttggtatttgcatgggtgttgtttataatggtcaatgcagcaactgtaaatccaa

SEQ ID NO: 58515 - DNA, 172 bp, Populus trichocarpa
  Intron number 3 from transcript POPTR_0007s08070.2 (locus POPTR_0007s08070) derived from phytozome v7.0 (chr-ID scaf fold_7; pos 6560907 to 6561078 reverse strand)
tggcgtggtaagttttcacttcccatattatttgaattggtgctcttgtcgttgtctacacattgtccactcaactttgatggtaaactttatttgcgttcttttttttttctctgctgtttctttgcttttaatagcttgtcggaggtgtggatatagtgcaacagactct

SEQ ID NO: 58516 - DNA, 502 bp, Populus trichocarpa
  Intron number 2 from transcript POPTR_0002s20225.1 (locus POPTR_0002s20225) derived from phytozome v7.0 (chr-ID scaf fold_2; pos 16168567 to 16169068)
actttagtagagtatccgtaagaactgatcgcacccttttacctcaaggtatattattattttcatattcaaaataatttaaaaatattgtctttacataatcttacttattaattttgtatatagatgaatgatgggtgatgtatggaacttgtgctccaaatcttcaaaagctagctatacaagttttacttcaaacttgtagttcttcataatacgagaggaattgggatattttttagcacatccactttaagaagagaaaccgattggagcatcacaaacttaatgacctcatttacgtctactataatttgagattaaaacaaaagtattttcttttctctaattcttcacaagttatttatattattaagtaacatcattaatacttatattgtgtaccttaagtttgattttgtagaaattattggaaatgacggaattatgacccaattaattttgaggtatttttttacattgaaaattgggtagcagaaga

SEQ ID NO: 58517 - DNA, 953 bp, Populus trichocarpa
  Intron number 2 from transcript POPTR_0001s00610.1 (locus POPTR_0001s00610) derived from phytozome v7.0 (chr-ID scaf fold_1; pos 523042 to 523994 reverse strand)
caaccattgcattgttggtgaattttgtattcaatgtatttctactactcaatctttgtctcaaggtgagttctttcaactttttccaaatgggttctggtttataactattgattttttaatatttatcttcagagatttatgtagtgacttgagcaatttgtgtaggaggatctacttaagttttaagttctgacacaaaaatatggtgaaatacgattcttataaatttatactatcattttctacagtttgcatgcttgctaggttgttattgcatgtctaatggtgtgcatattgtgtctaaaggaacaaggctattgctttagaatagaagttagcacataaattgctgcctgaaagaaatgggatgccatcttgttcttgtatgtttataagcagaatgataaattattgtgcacataggatgttttcttttggtcttttatgatttattgcttagagaaattgaggggagtttcaaagtcagatatgtaacaggaagcccttctgatttgatcacctttacttgcactacttgatgttatgtcctcgctgtactttttgcttcattcttttccagtaaaatcttcttatttgaaaaagagagatgagctttatacaaactcaaggctactggaactaggaaaagatattcttggaatccatggactgaaaatttgaattcaagcttcaatatcttgcaagtggcatcactaacatacctagcattgtttacattaatcttctataagtttcctgccttttttttatatagtgtctagcccatatcaattgagcgaaatagctcaaatatggaattgtgtgtttgattcctcattggttatcatatcgatgaacttgctttccttcataaatattgctttgatggttcttgttttgttgttgaacatgcagactattttctttggagagttatattcttctgaaac

SEQ ID NO: 58518 - DNA, 519 bp, Populus trichocarpa
  Intron number 2 from transcript POPTR_0002s20730.1 (locus POPTR_0002s20730) derived from phytozome v7.0 (chr-ID scaf fold_2; pos 16823210 to 16823728)
ttcgacacaggtcactctctgtttttcttttcccctccaaagagaggttgattttgagattttgcatttgtagtgattttactattggattgaatcttaaaatgaatttcattgaaacaaaaacgaaatctttttcaatggggtggtggattcatggctgaataaatcatgattttcttgattgagacaaaaaaaaaaatgttgggtaattttagaattcttgaaagtagctaaaatttacatatttattctgcaaacacctttgcgcttttctgattgacgtcttctgagcatatgatttcagcaagggagttcatgatggatgctgtcagagcagacaagaggttttagattaaatgaaatatcagctagagatattacactgtagagacatgaattatgtgcggcgtttcttgacgccatggttcttaaatcactgcttgtcatctttagtagacttatcgtgatgctgaccggtagatttcaaccaggtacaagccagacataatcaaaggggac

SEQ ID NO: 58519 - DNA, 456 bp, Populus trichocarpa
  Intron number 1 from transcript POPTR_0010s13610.1 (locus POPTR_0010s13610) derived from phytozome v7.0 (chr-ID scaf fold_10; pos 13420566 to 13421021 reverse strand)
gcacttttgacatcgaagttaaacctggagacacggttcgcatctgttctttaatttttctgtttacgtctgcaattctaattcaattatctagggtttttcttaaccattaatttttaattacgatttgttcttcttcttgtgtcttgtaattgaattgcctaattgtggaattgaattaagattcaaaattgttgcgattttttttatctgtatcagttgttagttttaatttaagctgctgcgtgttttcggttgtgattttgggaattgagtggactgatgctcctattgtgtgaattgaggttttctttccgttgtttttgtcggaaatatacctcccggtttgtgttagttgcttggcactataatttgatttttttatttttttttgtcttgtttgttcggtttttttattgcaattcggttttattttatgctgtgtacaggttgctg

SEQ ID NO: 58520 - DNA, 967 bp, Populus trichocarpa
  Intron number 1 from transcript POPTR_0007s06700.1 (locus POPTR_0007s06700) derived from phytozome v7.0 (chr-ID scaf fold_7; pos 5085292 to 5086258)
acagtaatttatcttgaacttggcatctcaaaactctgttgtgatatttgcctctgtgatttacatgacattttctgctcgctgtatattaagtattctgctggctgtctttttgcaccatctgaaatccgaactactttcaaatgcaaaccagctattactaacttgctatagcaaaccatacttttgagtgtggttctattcatataccaacatacactagagtaaacctaactagatttttgcttagggctcttttcatccataactatatataaaagcacaacttttttaaaaaacttttgattgattattataaatttaatacaatattaacattatagcatatctccaatagtaatatgtaaattccacctcactctaattaagggaaaaaataaacattgaagatattcttaaaaaagaaattattaaaacctaaaaaataaagtaatctcatcttttcattgttttcctgtttctaaaaccctaaataacataaaataagtttcttaaatcactcctaacgtatatagtatatcattagcactttattttgcagtttgtgccaaaaacctagttcctgtaagtgtgtgcagatgagttttcttttatgcatgtgcttgtacaatgtcttgggatgggctattacacaaataagctgcatgtgaatgttgtgcacatgtgtgtttttgtaagacatgagccaggctagtttctttccttaacagcttcatgtaggattaattagttttgctgcttctgtagccttgtgcagaatagaaatcaagccagccaaacagaagtccaaattttatcaactttttcgtcagatgtgatgattacatgaatatagatgttgatatgtaacttctgaattactactagtttagtgcgacacattgtttaactttttatgatattttaagctgctctgaaattttaattgttgtttcagtcattggag

SEQ ID NO: 58521 - DNA, 924 bp, Populus trichocarpa
  Intron number 3 from transcript POPTR_0010s19050.1 (locus POPTR_0010s19050) derived from phytozome v7.0 (chr-ID scaf fold_10; pos 17082110 to 17083033 reverse strand)
gatttgaagtgagtttttttgcctctttgaaggcttattaattgctatcctaatttgttgctattaacttgtgaatttatttcttattaataactaatgtcatttttctgctttcaactactttatgttgttctgatcacaatttttaactgctgcttattgtatcctaaataaacgtggattgattctattcttcatgctatcagagataaattgaagattttatttggctgcccttgcactgagaaagcttgactaataatttaaatcctcttccattccaagagaagttgagatttaggagacatagtaaccaaactagagatcgattgtgctatctctctctctctcttgttagaaaattatgtaggtaatgcatcgatcatcttgaaactcagttacttgcctctagcaaaattgttgaaacttgatgtgggatatatggatttggacttccagcttaaaaaagtgattagatgcttcattatgggctgcatataagcttgttaagatcattataggcgctgtcctgatagtagccaatgctttcccagaatcacaaaactaacaactaatattagtcctgccagtatttgccctagcaggcaaacgatggtttcagatttgatttttacaccaactcacctttgggattcaggtgtttgcaaaactatatttgcttcttagcgtaatgcttgacagaatgcttaggcgatggccttttctgtttttagtgttttccttatgctagtttgattatatatcatggcttttgttttctcgagaaggcttgattcaaagtctcattttggttcgtttgccattgataatgaatatttcattttgatctatacctgtttgcgtctttctgatatgaatctttcttgtctattgttttgaaatcatcaaaggcattgatactag

SEQ ID NO: 58522 - DNA, 639 bp, Populus trichocarpa
  Intron number 1 from transcript POPTR_0001s26380.1 (locus POPTR_0001s26380) derived from phytozome v7.0 (chr-ID scaf fold_1; pos 25412163 to 25412801)
agctggtgttgcattacttggacaagaaagtcaagggtctgccattgcctatgaacaggattattaatgctgatctctatcaattcgatcccgaggatcttgcaggttttattttcactataaaccgattgaagtattgattatatttatatatacatgttttaattttgatactataattacaaatataaattttatctgtttatatgaacagctcaatatagtcatcatggagaaaaagaatggtactttttcacaccgaggaacagaaagtataaaaacggaactagaccgaatcgagcggcaggtggtggatattggaaagccactggagctgataagggaatcacgtatgaaaaacgtgttattgaagctggtaaaaaaatcacataccagaaaacgcttgttggacacaggaaggcgctcgtttattatgccggaaagcctccaaagggtgacaaaaccaactggataatgcatgagtttagattggatgattccccgcttcatgtcagaaataatagagacgacatgagggtacatggatgttcttctctctccaattgacataacagcatttgcttattcttaacatggttattaatcagattttttttttctttgttttggtgcagctgg

SEQ ID NO: 58523 - DNA, 211 bp, Populus trichocarpa
  Intron number 1 from transcript POPTR_0002s25080.1 (locus POPTR_0002s25080) derived from phytozome v7.0 (chr-ID scaf fold_2; pos 22273042 to 22273252)
ctggtggactggattccaggacgaaaagaaaaaatgtaagcttgttttttttttttcatttttgttgaaaaaataacatcttttccgtacccttttctggattttgaagatttatttttgagttgggttttttctttttctttttggaaaaattagtagcattggaaatgaaatatttactgtgttattgtttttttttctctccagattc

SEQ ID NO: 58524 - DNA, 883 bp, Populus trichocarpa
  Intron number 2 from transcript POPTR_0001s14610.2 (locus POPTR_0001s14610) derived from phytozome v7.0 (chr-ID scaf fold_1; pos 11458747 to 11459629)
ttctatttccctcccctggttattgctctcaatccctgccatcattttacctagcaaaaaatattagccagaagtttcatcaccacctagaattggcaacatagcatttttctggtgatcatttagcgacaaaagcagctagaactgtgttttttcccgtaaagaaatcgaagcatgttacacaaacgaaactatgttaggcactgagatgggatgattgcgactcgcatgccatccataagtaactaataatatttaaacaatactgagcgcatacttaataaattgatctcaacaaaaaaaaaaattagtatactaaattatgaaagaaattgggagaccaattggcaaagagcttttgacttttgggcaagtacttttggatttttgtaacattttttttttaaatcttcaaactttcatgtagctagtatgattttactatacctcagcgaagttattgtaatttacccttgctgaatttaagacaggctttcaagcgcaagtaatcccactcttgaaatccttctgacaggttcaaatgcttgatcgtatagatttcttgccttgatttaacttgattgaaagagttgaaatctgaaaagatgttatttgaattttttcatttcatatgatttatagcttgatctgaagaactggtgatcagaacgtaaaaaaaaaaacaaaatcttgtatgcttcaggccatgttgctgtttaactctgctttcacgagtagcatcagaatgaatatggaagcctgtttactcagttgtcacaaatttgcaaactataattcagatattttgtgcgttcactttctaacagcaaccttttttccccctcaatgcaggttttttctctgtatattacaggacatctta

SEQ ID NO: 58525 - DNA, 887 bp, Populus trichocarpa
  Intron number 1 from transcript POPTR_0001s34910.1 (locus POPTR_0001s34910) derived from phytozome v7.0 (chr-ID scaf fold_1; pos 33138981 to 33139867 reverse strand)
atctggtaagtgaattacatttttgttagattctaatatgttcgtgtttatttctatgttggatatgtacagaaaaaaggcattcctctcttttagagtaactgcatggttatgtcttgttctattcattactttaggccttctgctgttccttttctgaagatgcttgtatgctccctacatcagttatgcacatgtctgcattagctcctatcaataaacaataaaactaatgctccgtctgtttcatgaaaacaagtgatcttggaaatcaaatttcatggaaaatttttatggtgtttagtatgcattagaaaataactcttttttttttttatatatatatatagattgccatttttcttttaaataatagaattaatctgacaggatgtgtcttcttttttataatatatggttaatacaatgtaacataaggtctttactgttcatcaagcttttgggtccttgttggaaatgtgttcccattgtgggataagatagggaaaacaaatctgtcctagtaaagcactatcttttttttccttgactggagaacaaattcattggaccaattttccttagttgcaccaaacattggtatctcaggagaatgttccccataccagttaattcttcatgacctagtccagtggttcattttcagtccgctattcgatttataacaataactaagctggttaaaatcttcattgaaacatgaccttaagaactcattgcatgactatacatgtcttccatcaggttcattttatgtgtcattgatggttgtttctaggttgtgcatcactagatcacattgagaattgagcacgaagtactgtattggcatcatattaaacattttcccatccaactgatacagg

SEQ ID NO: 58526 - DNA, 634 bp, Populus trichocarpa
  Intron number 1 from transcript POPTR_0002s18510.1 (locus POPTR_0002s18510) derived from phytozome v7.0 (chr-ID scaf fold_2; pos 14402526 to 14403159)
ttctcatcggtgccatctttacctttcagtctcaggtacaaacttcttttttctcaaaataaaaataattatgggaaacccgatcatcttcttttcagttttaatattcatctttgtacaaaattatatttccaatcttggtggatatcggattttacacttgttagagagcccgatagacacgatcaagcttaatttgtgtttctcgattacatagaaacaacaacaaatgaccgtatctcataacaattaggtagaaaaaagaagaagaagcagaaattgtgatgtcaaatcgcaccatcttcacctgcagagaaacaaacctcaatctctgaagattatgaggatggatgagacgatttctaaaattgattgatttttttttaataaagaaatacaacttcatcatgacattttgcttactgaacaattttgattatattcttggggctttttattttattggaatctgcgaactatttttttttctggatattaatgtattctgttcccgttgttggatgtcccgtctttatgtgttgaatttcggaagttactatgttagagttggattggttaagcaatgcgactgtctacaggttattgcagtggaaccagtctccgatctcaagct

SEQ ID NO: 58527 - DNA, 435 bp, Populus trichocarpa
  Intron number 2 from transcript POPTR_0010s19880.1 (locus POPTR_0010s19880) derived from phytozome v7.0 (chr-ID scaf fold_10; pos 17662577 to 17663011)
acgaggttgtaccctacaatccacatcaaggaaatgtaagtttctgtattactacttgcctaatttactgatcattgtgggcgtgaaatacactataatttaatcaaacgaattttctttaatgtgctttatactcaattgaagtgacacagacgcgcactcaattctgcacttcaatatttaaatgataatcaaactcaatttttttaaatttagaaataaaaaattatggtctgacaattttcttttcgtatttaattataaattattaatgttgtttttcaatttaatttcctttatttctggcatcgtgtttataatttctatgcgtatatagtaaccacaaggcttgaaaatttatgtttcgtaaaatattattcaccaatttttgtttttctagatttttcatcgtgcagcattggtcgctggggcggt

SEQ ID NO: 58528 - DNA, 959 bp, Populus trichocarpa
  Intron number 1 from transcript POPTR_0001s01930.1 (locus POPTR_0001s01930) derived from phytozome v7.0 (chr-ID scaf fold_1; pos 1409414 to 1410372 reverse strand)
caacaactgaacaaggtatctcatactttttttttcctattgtttgtttggttgctgagaaaatggaagaaaattaatctttacattcgtttagataggtatgattttagcagagacgtgttaaggcttgcttcctctacttgtcctgttttaatattattgcattacttgcgatttcttggagttttctttttttggtttgtttgtgtggctgctgagaaaatgcaaggaaaaggaatattaacctctatttagcagttcctcctatgcttatttcttctttatattcttaatttcaatcttattttcccctatttttctcaatttgttcctttttctttcgttttctttaacgatatgattaaaaaaatcttttgatgataggaattatttggtagcatataattgtttaaagtccgtttaagaaattcaatttcaaaaaaaaaaaaaaagaaagggaagaaaagggaagcaaatacaccctgcatattttactccacaggatacaaggcttgtttagtttctcctctaatatgtgtggttgaatagcacataatatattcatatgtatatttctacttagtcataaagtaactttttattatttaattctctaacctactaagcttgtatattttctgctccaaggttgagtgaaggcaatagaataaattatctcatgaaaaagaaaaagaaatggctgttgacttgaatagcgctttgatttctttagcagaagaggttgaggatattctatcagccattttttatgtaatgcatgatatagcgtgtcttgaaatttaaacaggttggagaattagttttagttgaaaggatttcttttgaaacttcacatgtggttcacttttagttgggctaggcggaggattggttttcttgtcttacaatgaatgtgctctgcagagttactgtcgggaatcaggaaggaatcagaagca

SEQ ID NO: 58529 - DNA, 756 bp, Populus trichocarpa
  Intron number 2 from transcript POPTR_0001s20590.2 (locus POPTR_0001s20590) derived from phytozome v7.0 (chr-ID scaf fold_1; pos 18583707 to 18584462)
agggtactctatagctctgcatagataatctgctctaaaacaccatatactcttttggggcataacccaatttttccttttgagaaaaaaagtagcccttctgttaggcttacagcgagtaatatagctagcctgttttgtttggtgatggcctgatgctgtatgagatagtttttgaatctacattttttggtcaatatgcctgttcttagttgttagtaagtgttagttaaaagttgttgatatttgagaggtgcaaatctgtggccataacaggagtttgctgcttctctatattatcaggcaactagtttttctttgctaagggggatcctggacatgggagtcgtcattttccatatcatgttgcgggccattaagttgagctggaaaaaaaaattagaaaccgttatttatttttttatatataatcatctatcatgcttgtcacaaaattatatgttctgaaccacatctgaatgcattgtgaactgctaaatttcagcttcctttttagatcatttaggctcatattgtcttgcaaaatagctcttttggatggcttggaatcagtaattctttagcttggtgaatgagtttggtttttgcagttaactttttgaatcagtgaatgagagattcaagatgcttaatgcttgttattattcttaaagcctttggaaaaattatctcctgtagcaaatttatctaggcaagttgcttgaggtgtttagttgaacacagggtattcaactg

SEQ ID NO: 58530 - DNA, 596 bp, Populus trichocarpa
  Intron number 1 from transcript POPTR_0001s46120.1 (locus POPTR_0001s46120) derived from phytozome v7.0 (chr-ID scaf fold_1; pos 46578316 to 46578911 reverse strand)
gctaatttcgacactctttctgttgctttcaacaggttcttgattttctcctctttttcctattttttttaagaaagcagatattagactaattaatcaatcttcctttttcaaatttaatccttctttttagtcttctttggcctacaatgatttatttcttgatttcttgaaattggaaattgtccatctccaaggctagctatccagccaaggagctagaaagttggtaccatatgattttggatactgccaaagtctgtttgatttgcttttgcttttttaaagagtgtcttggcagaacttttcttgatcttttggcaatattttgttgttggtgaatgaaaacttattgatggcgatgggttctaattttcttcattagtattttgcatgggttaaccattacccgcctattttatatttatctaccacaacaagttttgcttttctaatgttcttgtctctgtcgggaagatttttatattccaaaaggaaaattatggttgaattttttatttcacacgggcacagatacttgacgtggtggatgatatgcaggtcaagcagatttggaaggctacaaaacattaaat

SEQ ID NO: 58531 - DNA, 721 bp, Populus trichocarpa
  Intron number 2 from transcript POPTR_0002s04980.1 (locus POPTR_0002s04980) derived from phytozome v7.0 (chr-ID scaf fold_2; pos 3200130 to 3200850)
ctttgctgttggcttaacttgtgcctttactgaaggtatataaataagattttatttttatttacttttgtggccaaaattagatgcccttttgggttttctttatgctgggagtcagaaatggtgagccctgctttttatgtctgaaaaattttgagtgtgtcccaagagtcgtggtttcttgatattgcagctcttctggggcatatcaatttaatggtatcgtgacaaatttatcaagggaactaactgtatgaacatacatgtcccaattgagtggaagtgaacaattcagtaattttgggctcgctattgattttcttgttgcatttgttggttgttcttgattagaagagttggaatattttgagaaaaaaacaaattggatggttagggcaacagttttaggagtgcacaagtctttcttgtatttgatttatttaggtaaagttgataactatgtggagttttttcttataagctgttggttttgcagatgttcaaatgaattgggattgacatctcgtttctgtctagatatctctcttttctttttcttcactgattcgctttgtgtttctatagattttccttgaatacgctattggaattgttggcaataagttatcgttttaatatgttcaccagctatacatgtctaaatgttgaaattcttttgacaacaggaaaggtgattctggagtccgcgattctgacaact

SEQ ID NO: 58532 - DNA, 861 bp, Populus trichocarpa
  Intron number 1 from transcript POPTR_0010s14720.1 (locus POPTR_0010s14720) derived from phytozome v7.0 (chr-ID scaf fold_10; pos 14232948 to 14233808 reverse strand)
tttcatcatcggtttttcttttcttttctttccaggttagttttatttcttttgcaattgtaatgagaaaatataaatagattcgattgagggaacattcttgtattatcttttgttttaaggtactctttttccttatttttttccgaaaaaaatagactatagaatcttttgttttcagtttttttcatgtttaatgtagttgttttacttaggtaattaatgttatattatcaactaaacaaatatttcgttatgtagtattttcttgcattcagatgagttttttctcgatttatttctcttgaaaccagttgttaataatggattaattcataagaatgttgataatggaagctaggtacattcaagattctatgcatgttgaagaaaatggatggaaccccattggtagggtgaaatgggtgtgtatgaatccacacataggaatcagatctattaattttaatgaaattaagtgactttcagctatttagtctgcgatctaatagttttaaagtgtttatattattgatgcccttttgtttctgtttttttttcagattcttgaggtttaataggaatggcttgcttaatgtagcaccgagggggacgtatttttcctggtcactgtttttttctttgtgggtggtgatttcagatttttgagctgctgatggatggagttttgatttgcagtttataaattgatgattgactgtgaactagatttttttttcctactaaatctattgcgattggctttggagtttggggcttttttgggagggaagaagctctcttccttcattgccgccactctcaccttccacatagatagcagggatttcattccatttc

SEQ ID NO: 58533 - DNA, 746 bp, Populus trichocarpa
  Intron number 4 from transcript POPTR_0002s22080.1 (locus POPTR_0002s22080) derived from phytozome v7.0 (chr-ID scaf fold_2; pos 18786668 to 18787413)
ttgagggagtgcatacgccatcagattgtggcaaggtaatcattactaagctttatatgatctgggaattgcttctttgactccgtaaaagcatatcagcaattgttaatcaatgatcattaaccgtgtgtttactgcctaaggttcagattttgttcctgatcagtgtattcggggacaacggtggaaggtttatagttgaaatgaacgcaggattaattctttgctgtagagaacttgagtgctagtcttgttgttgattattttaaaaagtatgactgcgagtttctgagttcctaggcatacttggccctcctaaacgcatattatcgtttggattaaaattcaaactagtaattagtatgtggttttgtcttacaatcatgcatataaaaaacttggttaagaaagctcatgaagatatgcaatgtctccaacatcgaacagtaggagttgcagaacctaggaggtaattaatcactagcttttcttacagcatatatgttttaccagttggaaaacttgtaccaaaagattatgctatgcattttgtgcgtcttccctcaaatagagaaagttaaataaatttaagatatcataggtgaatgccaaggttggattttcgtttttgcgtttatattgtgtatatagccaaaccaagctggcttcagaatagtctaaaatggcttcctgcattagcacaaataacgtgatagatcttaataacctttattgatttctcaggt

SEQ ID NO: 58534 - DNA, 692 bp, Populus trichocarpa
  Intron number 3 from transcript POPTR_0001s40040.1 (locus POPTR_0001s40040) derived from phytozome v7.0 (chr-ID scaf fold_1; pos 39348197 to 39348888 reverse strand)
gtacaggacattaagaccatcaaccctgacacgttgtgaatggttcatcaaactaaaactcaatttggtttcttattaaattattcttatatttgatttaagctagtaaatataattacaaggtgtaaaaaaagagaaggtaacatgctactcctggaccacgaaaggtacccaattaatacctcgtagatgacgagagaaattagaaaatctctccctcatcgagaaaagtgcgtggaccggccagtttgcaatgtccattgatgccgctcttgatattcgtattgtgcgagtttttcctgggtttacttaatgtggcagtggacgaggagtgtttctattgaaaatgaggagaaagaggacgctggatatcgactacttttaagagagcaaagccaaattttataagattctcaattaagccttcagattattttatgatataaaataatcataaaataagggaagaacgttgaagttttttagagtaaaaacgtgattttaacaaccttgactaataatcactcaacttcttactttactagttaaattaaataataatttaaccagtaatcacatgggaagtgctgagtgtatattcaggacctcctgcgatttctttcaaattcagacaatggggtttctttgaaggacctttcaaaggccatgctcctaacggagaattgagttct

SEQ ID NO: 58535 - DNA, 589 bp, Populus trichocarpa
  Intron number 1 from transcript POPTR_0001s40040.1 (locus POPTR_0001s40040) derived from phytozome v7.0 (chr-ID scaf fold_1; pos 39349199 to 39349787 reverse strand)
aaggatttgtttgtttttatgttttaaaaatgtttttgaaaaaattaaatgtttttatttttttcttcacttcaaattaatattttttgatgttttcagattattttgatgtgttgatgttaaaaaaaaataatttttaaaaataaataaattattttaatatatttttaaacaaaaaaacactttaaaaaataactgcaactagactttcaaacatacttgaaaaccaacccaacgaagtggttaataaacttaaaattttcgcttcaattaggtctcatattgaaattttttttaaaaaaaaccagaagttacgtctgtttttttatatatatataaaagttatattatttgatacataatttaggtcttcgcacaacttagaattggtggtttcaatgttatgtggttatcatgcatgcaccaagcagaagaaacaagagtgtcttttctacatgtggccatctccagccccatatagaacctcagaaaattaaaccttagtagtataccattcgggaaatttatatggctactgaagaagtaggtacgattaagaaagtaggagataaatacagatctttcttgc

SEQ ID NO: 58536 - DNA, 845 bp, Populus trichocarpa
  Intron number 1 from transcript POPTR_0010s22470.1 (locus POPTR_0010s22470) derived from phytozome v7.0 (chr-ID scaf fold_10; pos 19377507 to 19378351)
tgtttggagccagcaacatcatcaagtttttgcaggtaccataagacgttctttttgtttccatcagtttccttataggacaagtagccttcctccataatatttgaatttaagagatttgaacattaatagaaatttgtttaatgtcttttcatccctttttttcgtccaatgtataagcacaatgcagttcttcaggtttgacttgaaacaatttttccaaaaattgatttttcttcaaccgctatgatatttttttaagaaaaagttcgatagtggacatttgagggcctttagatttttaaatggttttaactttttttttaattttttttttatctccaaccattttttgctttctctaattaaacaaattaaagcaaagcagctagctgcagtgctgctgcacctgctttatggaaaaaaatgatcatgagaggttgaattggggaatcactatttccagacagaaccaaaagaaaaagagaggagggtttggacaattagttaccagcatattgcacaaagaagtcaaaaccaaaaaaaggtgtccatattagaggtcaattgatgtgctagctacttcttcccaccacaattgtttatagttatatagagaagtcattccacaccacaacttgcacatgggtgcaatacgcatcaccaacccccaaagggcaagtttgggattccatttcaaggtcaacatattgtcatgttaggaatcacatcagatttttgcttaaaacattgcttggaccgctttcaagattcaattttgaaaactgatcagtactgttaccaatgtgaaaaactgcaggaactgccagagtcccagagagcag

SEQ ID NO: 58537 - DNA, 744 bp, Populus trichocarpa
  Intron number 2 from transcript POPTR_0010s22270.1 (locus POPTR_0010s22270) derived from phytozome v7.0 (chr-ID scaf fold_10; pos 19234713 to 19235456 reverse strand)
cttctccatcaggtcgctccttgaattcacagccttttccatctttgtctgacaagtttgaaaatgttgagccttttctttaagtaatttctgtttaaattaatgtaatccatgatagcatgtttgtgtaccttggtagcattttgttgtatttatgagagcctgtgtaaggtcttgaaataaagttggattgctttaaataatggggggtaactgacttgacaatttatttttctcatggactaatacttatgtttcgaatcagtctatcgtggtagataacaattttgatgcaggggggacaaactaaataaaatttccccccaaccagaatacttttttgaaatctctttcacaggcaactaaaactttgaagcttcgtgagtggacatgcttttgggtgctgaatcaaaatttatgttattttagattggtttaggctgtccttcaagttttcctgttagaatcgtgagagtatagaggacattacaggactgctggtctttcattggatgttggtttttgataagacatgatatcaaatagctgttctccacgttcccaatcctaaaaaatgtgcctcaagtagcttgcttgtggcgtttaaagtttctagtgatttaagcatttgtgcacgtgtttttttcttgtaaagcaagaaaaaaataaacttacataattgtttatgtatgttctgttgatttttcttctaaaaaatgcagggaggctgctaactgcactgat

SEQ ID NO: 58538 - DNA, 691 bp, Populus trichocarpa
  Intron number 1 from transcript POPTR_0010s22270.1 (locus POPTR_0010s22270) derived from phytozome v7.0 (chr-ID scaf fold_10; pos 19235543 to 19236233 reverse strand)
ccctagagaagaaaggcgtccttgctaagatccgggtatcaaaccttcaatttcctttttataatgataataaactgaaagtacaatggttattttgattgtaaaatcttaattctgttgtctcaagataattaattgagagcaaaggtactttttcctggctggatctcgtccagtggtaaaacaaattggattttctttaattggatgattgttcttgctctggatcttgttttctttgtttgaaattaggttcttttttctcgtagtggatgggaggagaaacgggtatttttatattttgtagctagggttttgtgttccatgcaagatcaaggcttttgtagtctaatgtgaagcaaaaggtctcaatttttcagtgaattagatggcttttccttcttcctttttgtaaatttttatgcgctttatctgttgtctcatgctaaatttttgtccaggaagtgttcaatgaagcaattctttttcgttttttatcctaaattgtgtttattgagtcaaattaaattgaaaatgtagccgggcacagtaatcactactgggctggtcacttggtcttgtttcgccattgtcgatatagtttgtagtttcctttttataaatttctgtatcttacttgtctactctgttggtaggctgaactcagggcaagtgtttttgaggcaattga

SEQ ID NO: 58539 - DNA, 853 bp, Populus trichocarpa
  Intron number 3 from transcript POPTR_0010s24580.1 (locus POPTR_0010s24580) derived from phytozome v7.0 (chr-ID scaf fold_10; pos 20723011 to 20723863 reverse strand)
ttatcactccttctgtcttgtctgacagattgagggtatgttccttttgcccttcactacttttctcacatgctgttagtcttaattgttcacattagcctttatgctctgtgtttttagtataggctttttttgattgagaatgaatcttgtgttgttcttggaaattacttatttaatttggatctgctaccattgagcttctattgtgctgagatagattggtgcatttcataagaggcacatcttgctccaaaaagctttttatttgatgttttcttgtgtttcgcgaaggctaggttaacatcaaaatgtggataccaattaggatattgtgaagttatataatcttttgttgaattccttgtcttttggcacgcaacatcctacaattgaagttttatattcacctgcaacacttttatttgaagggaaaattaagaagattagcctgagattattcatcaacgtctcattctgggactcatgaacattgaattaagctctgcttctaattttgtttcttcaattatatttcttttctgtttccttttattgaatgacggttgagcatgatggcagatgaaatgaataagatggattcccgttgataattcaatgtgatatcataaccagccacttctgatccatcatgcgtaccttcatttcaaaatgatctagattcctgcctctgagccaggatgctcttctttctttattttttatccttccactaaattatgatgatctggtgtcttcattttttatcctctaggcactggttttattgacaggtttgttttataactgaatttcagattagtggctctcttgcacgcaaagcaatcaagga

SEQ ID NO: 58540 - DNA, 598 bp, Populus trichocarpa
  Intron number 1 from transcript POPTR_0002s14190.1 (locus POPTR_0002s14190) derived from phytozome v7.0 (chr-ID scaf fold_2; pos 10513474 to 10514071 reverse strand)
gtctcggtgtcaccatcgattcctctaaactcaaggtgagtggtttattttccttatttccttttctatttataataaggcgtcgttttaaattagagattacaaagtaatgattgggcatataagattgatctgcggtgatcatgatttttaagtatatttgctcagatttaatcgatatcaagtattttttatatatataatttttaacgcgttcaattcgtatcctcggatcagctttcttgatttgaaactaattccgtgtccagtcgggttttagttaaaatcaatgaaacagttaccaatgtatatgatacatacaatgaaacgaactaagataaatttatataaaatgttcatggaattgatgacgtcatgacggctttgattaaattttgttgggatttttatttttattttctggaagttcttctcaaatgaatatttcctcatttggagttctatatcttgttagtcagtgttattgtatcattgattgtagttattttggtgttcttgttgtttgaatggatctctatttgtttgaaagctttttcgttttgactgtttatagtgcattttcaggtctctattgagt

SEQ ID NO: 58541 - DNA, 967 bp, Populus trichocarpa
  Intron number 2 from transcript POPTR_0001s07440.1 (locus POPTR_0001s07440) derived from phytozome v7.0 (chr-ID scaf fold_1; pos 5590230 to 5591196)
ttcaaggcgattattacattgctcctttgttcttggtaatttccgcttagctatctttcttcttttttagtgtggtttatagttcagtttatgtagtgcgaatgagaattactaatactgtttgatatcttggctttcgaatggaagtctgtatgaggtgaaatgtgatgtggtggatttttaccccaaaagttttaacgatcccttgtgataccttcgagcactaatagtgtaaacaaaattgccccgatattgcatttagatacaaggccttttgctcatgctctagtggaaagaaaggggtgaggtcaaccctgtgtatttgtatgtattgttcgtttgtggagagcttagcattcatgttttttgcaccatcttatgtttgttgtctttcctttctgatgaaaattatgcttgtagagtaaggtcagggtgaaatgtatatgtgctggattttaagccaaagtaagttccaattatccatccaagccactaaagaactgggatttttaagaagtcaaacatctcacatcattgcatttataccaatgtcctttagctcttgctctagtggaaagaaaagggtgaggttgatcgaggttttatttttgaatcttcaatatcaagagaaagttcttgcatttcaaactcggataaactctctcaactcttattgcaagttgttgttggagctaatgggtgacatgtggaatattgtccctccagattatctgtatgtattgtccgtttgttgaaaacatagcattcattattgttgcacttggcttgattctcaacagaagaaatatttttggagaaatatagaatctgcggttgctttctttttattatttttcctttcatcttgatttgtctatgctcatgaagttcatacgttcatcaattctttatgtctgctttgtttgtgacaggataaagttggtaagttctgttgatttgagcaaag

SEQ ID NO: 58542 - DNA, 812 bp, Populus trichocarpa
  Intron number 2 from transcript POPTR_0007s00880.2 (locus POPTR_0007s00880) derived from phytozome v7.0 (chr-ID scaf fold_7; pos 448604 to 449415)
ttgcagaagatcagcgaatcttccagctttgaaaggtatggtacattacttggttactattttagttctgcttggttgccgaggaaattctaggaaaagaaaatgaagaagcaattgtagaagactctgaagttcatttcttattgcttttatggtttctgttttttttgtctatgtataatgcttgatttttctgtccagatattttttttatttcaatttatttttgttctgtgcataagaaaatgcaatttttagtaaaaaaaattttcttattatcttttttttgtgagagctggagtgctttaaagcagggttgaatgaacactgaaaaggtttggactttttattaaaagaattatgttattttaatcatttttaatatatgctgctttctttattctttttacctttattttataatcatgtttattctttattctattattttctgcaactgattccttttcctttcgataacattccttaaacttttgatttgtatattgtttagtttggcgttctttgtgaagcaatcttgggccaatagttcgatgcatgacaccatcttcaaacaaaaattaggcagtctatgtatttggattagtttcatacatgactgttataggattaatatttactgtaaatgccgaatcccttctcttttgctttttttttattgattttatggacccttttctgcattttcgtttaatttgtttttgctgtccaccaacaattatacattgtttgattgtttaatttaatttcttgcagatcttctagcaagactttacttttacacagcagaa

SEQ ID NO: 58543 - DNA, 723 bp, Populus trichocarpa
  Intron number 1 from transcript POPTR_0002s22260.1 (locus POPTR_0002s22260) derived from phytozome v7.0 (chr-ID scaf fold_2; pos 18957946 to 18958668 reverse strand)
tcttgcttcctttcccatttcttgcttaaatcttggtgagttttctttttcttcatttgtttattttctttaaatcatgtgtaatttgtttttgttagtctagagtgtaaatttgttattaattgatgagtttgagttgataatggataatctgaggttcgatctttgtgcatttgtttctggtgttaattagttgaatttggtttttaatttgaggaatttgagctgatgtgtctgcttctgggtgcttactgtgaaatgggatattggtttgtttggagctgtggtgtaatgaaatgggttttcaattttgaactgtgactgtttggttactgagaaaattgagtgaaatctaatgcaaagttcctacattttgtttcattgctgaaagagtgaagagatcaagcattgtatatcttatttttttgtagccttttgatttaatgttcttaattagtgagctcgaaagttagatattttaggttatgagttacattttttattgtttccttctgtttttcaagtattgttacttgatatcaaatcttgtgagactaaattaaaatcccaacaaattgtgtctgcatctgtaatcctcacgagaatcagtctcccgcattcataaattttggacttggtcattttgaggtattactctggcattctcttgaaatacaacaaagaccctaaatgtttctgacaataatttgtgcagataagcaa

SEQ ID NO: 58544 - DNA, 635 bp, Populus trichocarpa
  Intron number 1 from transcript POPTR_0001s31800.1 (locus POPTR_0001s31800) derived from phytozome v7.0 (chr-ID scaf fold_1; pos 30168589 to 30169223 reverse strand)
tcaactaccacaagagcagctctctctggctcccagtaagtttttttttttttaatgttttggtggttcttttaatggcttatcatgttaaagttttctacttttgattttgcttgctctttcatatggtcaatggttcctttgtttgatttacatttgttttgaatgataaatggttatccgttttggttgtgctatctgtattagcggtgtttggatcagttgaccctttgtgtttgattttatatttgtgtataagaaataggttttctgtctttcgttatgctgttatcagatcaagaattcttcatcaaatatgattttaagaagaggagttagagaaaggagagactgagatcactagaaaagaatcatttttttttaccattcattctggtaaagttttgattttaagaagaggagttggagaaaggctagttcacatgaacaatactttctcatgattcaaaatttggattttctttagttccactctttagtaatccaatggagtatatgtttgttgcattttgataagtttattgttgtgttgtgaatttttgcggtaatggaactgctctgtctattgatttttgatatttgaaatagttattgactgattttatgtgcaggtc

SEQ ID NO: 58545 - DNA, 805 bp, Populus trichocarpa
  Intron number 1 from transcript POPTR_0001s13540.2 (locus POPTR_0001s13540) derived from phytozome v7.0 (chr-ID scaf fold_1; pos 10611140 to 10611944 reverse strand)
ttccctaaatccggagcgtttttggcaagacgaaggtaagaatttattcccaatcccaagctttgttttttctgtctaatggtggtgattagagacaaaaaaaagtatccgggtattctgtgaatctgtgtttatcttctacagttctgctattaattagtttgcttctgggtattctgtgtttatcttttactattaattggtttgcttgtgttctgttaaatccatgacgtaaagaacaacaaaataatcatccaatagttgtaggttgttaattgtgaacatctccttaagcacagttacgaactttgcttggatcattgattgttgcgttcaaaggcatgctggatcagaaatcatgaatctaatgatgattgtctttcttacttgagtttttgataattataaaatgttgggttttttctttcatacaatcatgcgactaagaaaccatgaaacctgtgaaacttagattgcataacaattctttctatttttaacttgggagcagaagagattttgagtaaagagtctgtttgttttgttagaatcttcgagtttataacctaggtttttgcattgaatagaagcaagaacagaaatataggaacatttgctcttttttttcgggctaatgtgtttttttactggaattccaaggaattaagatgagcagccactagattttttagtcatgaacgttagcaggacaatatacatgcataaccagtagatagttgttttccttatgaaagagtcgtttctaaacccagttttcataatctgcagaaagatagagaatgta

SEQ ID NO: 58546 - DNA, 293 bp, Populus trichocarpa
  Intron number 1 from transcript POPTR_0010s13280.1 (locus POPTR_0010s13280) derived from phytozome v7.0 (chr-ID scaf fold_10; pos 13141616 to 13141908)
aggttaccaacaatctcactgctgttattcacgaggtattcgatttcttctccttcttcttaactgcattcactggatttatgtttgagggatgcgtgggtgggttagaatgtgaagatagtcttaactttgagtttctgaaataattcagagctttattcaaagaggagcaacgacaaacctctgtgtggtgttttctttttttcttttgaaattttggtaaaattacttctctattctttttttttattatatgttttcttttgttgttttcaggctggtgtcacagaggg

SEQ ID NO: 58547 - DNA, 320 bp, Populus trichocarpa
  Intron number 2 from transcript POPTR_0010s13280.1 (locus POPTR_0010s13280) derived from phytozome v7.0 (chr-ID scaf fold_10; pos 13141912 to 13142231)
taatcgaacaattggaaatcttctttacacggtacgattagataatttgaagtgtacaagctgtacaatggagtaaaagtagaaactgctgtttgcatcacaacttcgtgaaatttttagtttcctagtggttggttaatggttatgcctttgttcattcttcttttctcttttggaaagtaaaatctggctatctgggttccatggatttatttgctttcaatccaaagctcaaaggggttttcattctctatattatactaatgtgaagcacggttgcttcccgtgcgcttaacaggttgctactaagtacccagcaa

SEQ ID NO: 58548 - DNA, 950 bp, Populus trichocarpa
  Intron number 1 from transcript POPTR_0010s18960.1 (locus POPTR_0010s18960) derived from phytozome v7.0 (chr-ID scaf fold_10; pos 17035339 to 17036288)
ttgaaaaggtttaatctgttttttttctttgagtgcttatttttcggttctttatgttgttttcgtttctgggttttccttgtttactttaattttattgttgctagcgttgtattgtgttctggggttgtacgacacagccattgatttgccatttcaaggtttttgtgagttgtaaatgagaaaatattggattttgagtgttatgctgcctttggttttaaacaagggaaaacacaattcggatcaggttgccggtatttcttttccatttcacgcttgtttgtgtatataacaattgggttgtgcagattacacagtattccgaggcttctatgtttgtttgttagccgaggaaattaggaatatgaacagaagttagagctttaatattttatagtccctattgctgttgtttatagattcttctctttgcagttagcagtcagattgggggatggtaaatacaattttgatttttgggaggtcactgaaagcctgatggatatcagaaatttgcgttttaaattggcaattagaactgtgaactatgctagattttctcaatttagattaatctccttcgtggttgatttttgagtttagggttggaaaacatcttcttaaaatcattcgtttctaactgttacacaatgccaaagttttcattgtctcctattcaaaacgaaagagagtgtttagtgatgtattttcagtgtgacagtctcatagtatgtataggataaaggcttttcatttcattgttaatcctacattcctaccagcgattctgagccttccacttgttattttatctgcccagtcgtctcagtcgtcagttttctatttcctctctttatctttttggttgtgattttgccattctaaatggtctaatataaaatcgtgtttaagggaagtgcttggattagtagagcttcaaaacgtcg

SEQ ID NO: 58549 - DNA, 887 bp, Populus trichocarpa
  Intron number 4 from transcript POPTR_0002s06330.2 (locus POPTR_0002s06330) derived from phytozome v7.0 (chr-ID scaf fold_2; pos 4219725 to 4220611 reverse strand)
tactattgcggcacgaaaacaagtatgtgatttgaatttctggtttctagaattacgctctcatgctggagtattgttaaaataaggaagtaaggctgtagcccatataggatttggaagttattcccgtttccatttcccccccatcagttctgctttcgcagtggtggttgttcaaagcttgtgtcttgcgtgtgtgtgtgtgttgcttttgtagaagcagataagcatgtgcttaaccactcatgacaattcgatgccctgaatcagtaacctttggatcatggtaaaaagtaagctccaatgtttataattcaactcaaacattttagttttgtatctggcaattgtagccatgacgctaagcatgctgcagcttggttttaatttttctgtgcacacccctttgcctgatgatggaagcctgaatgctactgttcacaagtaaaaactttattccatgtgtggaattcataatgtgttgaagaggggaatttttctttgaaactggaggttttccttcatagacaccaacagcagtctggatggtgatttactgtttaaaagggtcgaacttcttgatgggcaaactgctattttagagttttactgctctgattcttaatcccgttctaactggacacaaaacaagttaggaatctgttggaaggaagagaatatcttccataccaccagtacatgattctttgaaatcttttttttttttggttattatgttttagaagtttattcacaactcatataaaatagattcaacaagctctacagatctcacccgctttccctttttgtaatagttgctcatgcattgacaaacagacttacttataggggtgtggaacaaaagacaaaacaatctgctgttg

SEQ ID NO: 58550 - DNA, 558 bp, Populus trichocarpa
  Intron number 1 from transcript POPTR_0001s02030.1 (locus POPTR_0001s02030) derived from phytozome v7.0 (chr-ID scaf fold_1; pos 1530709 to 1531266 reverse strand)
ttctaaagatcacagcaaacatattgttgttggtggtattaattctcaccatgtcaatttttaactcttttccgtttcattttgtttgaagcttcctctttccttttttgttttttcttgacagcttctttgattctcattcttcatggcggtttctgtaactcatagttacaagcctttgaatttcattttttccacaacttattattattagtttttttttctcttcatcaagtcaaaggtattatatacgtacgttgttcaattgggtgttagagaatcgtcacgacattctcttgcaattcaaacctttctcttagaagattttaattaagctttcatatttcagcttctttcttttagcatttatgtcttttctgtggggttctcgttgttttaatggtgttacgaaagccataattaggttcgattgaggttcttttgcacacaaggatttatctttttgctcgcacatattttcatttttgggtacacgctggtctttaattcttgataaagattttcccctttatgtatgacaggcacgacctaatttat

SEQ ID NO: 58551 - DNA, 964 bp, Populus trichocarpa
  Intron number 1 from transcript POPTR_0001s14420.1 (locus POPTR_0001s14420) derived from phytozome v7.0 (chr-ID scaf fold_1; pos 11310184 to 11311147)
ctcaggtacatatacatgatgatgacttggagagatacacacaaatttcgttcactttttagatattcatgtgggaggctttccggttttcttttgtggagttcttgattctgggatttttttgtttccttggaaagtttttggtgttcgataaatggcgttatgttgttgcagagatagttatttatttccttgttttgatctttttttcctgcactgcaccctttgatcttgttgttgtgctactgaccattcctttagtagcgcgggtggggttccattttactgaatcagtactgatgcagtgatttgggcattgatcatggtagaaatatactatctctgtgttttttctttttcggatctcaacaggactgaaagtagcttgaatttggtgtcagatagttggggtttttctacttttggattcatgtttgtttcttaatctggaagtatcttggtgtgtcaacttaggttgtttctattattattttcgtggtattttaaagacatgtcagtcattgaataacaaaataattatttgattaatttaacaagataaaaatacttacaaaatgttaaaatctgttaattttgtttataatattatttgaattactgtaaacaaacgtaatctaggtctaagtaagtttcaatccaggaattaatcttttctgaatttgttttctgctgagtttatgttgcaaatttgctaaattaagaaaccgcatctctttataattagtaaagggtcttgaagtaatatttcttgaaaggcaattttgtagttttgtgagccttaggtgttttttcagcaattagtttcctccttgatgtcttcgttgattgtctcgtttgctcgtttgaatataagctgccgtgtcttcttgttctgaaacttgtgttgtgttttttccatgtatatacagctagttgagaaggatcctgaagcagcaatagcttt

SEQ ID NO: 58552 - DNA, 535 bp, Populus trichocarpa
  Intron number 1 from transcript POPTR_0010s21340.2 (locus POPTR_0010s21340) derived from phytozome v7.0 (chr-ID scaf fold_10; pos 18663557 to 18664091)
ccgtttcgggtggattttgaagcctctctttttaggtaattttcgaatctccttgattttgtctttttaattctaaatatttttttttcttctttttgggattatggggttctatttttggtgaatttgattgctttcaatctgtaactttattttcttactattatcagagaatttgtattagattctagggcttaacgagtcgttactcgttttggattgtttttcactttttggttcttaataagtttgaatagaatttagagtatcgattttagagggtttttttcatctgggttttcttttaaatctgaagttttcactttatgtttcttcatttcttgtttgaaaataagagatttctcttagaagctattattttctttgttttcttggcatccaggtagtgggtttttttttttttttaaaaaaaagtgtaaagagtgtattagactattagtagttagaagtggaaaagggttttgagttttttttgggttaattttttttttgttttgatttttccaggttgccg

SEQ ID NO: 58553 - DNA, 539 bp, Populus trichocarpa
  Intron number 1 from transcript POPTR_0001s35890.1 (locus POPTR_0001s35890) derived from phytozome v7.0 (chr-ID scaf fold_1; pos 34325714 to 34326252 reverse strand)
gctcctaggcctacatgtatgtattgtgaaaaggactatgcatgtcatactatacttaatgggactagtaacatgtggaatcatctaggtgtatgcaaaaattttccttttgtgattgactgataacaaaaactttagttttagaacccaagcctataatagaggggggtgataatggagaggaaaatcagttaactattaaggcagttggttatttttttgaagagtgtaggaaagccctaggaaaaatgattatacttgatgagctaccttctaactttatagaaaaccaaggatttaaatcattttgtcaagtaatgtaacacagatttgatgttccttctcatttgatgatttggagagattgtttgaaaatttatgtagatgagaagaaaaaattaaagaaagttcttaagcatcaacgtttatgtttaacaactgatacttggacatcaatccaaaatattaattatatgtttttgactgcccattgaattgatgaaggttggaacttgaataaaagaattctaaacttttgt

SEQ ID NO: 58554 - DNA, 1034 bp, Populus trichocarpa
  Intron number 3 from transcript POPTR_0001s21380.1 (locus POPTR_0001s21380) derived from phytozome v7.0 (chr-ID scaf fold_1; pos 19809801 to 19810834)
ctgagtttccaattatactaggtctctctctccccctatataataataataataataataataataataataataataataataataatagtaatagtaataagatcttaataaaaaaacattaattaacatttataactcatttatataaaattcttttaactcacatgtgttgattcatctatatgttcttctgattaacatatgtgtgctcatttttacaggaatttatggtttaatgatacttgagatcaatgtgatattgatttttgacgaagttatccttctagtttaattggcataagttttgaatttaattgttataaaagttatgattttatgtttttgatattttataatatttatataaaatttatttcctttctttagcttttgagaataaaattaaaactcatctaaaaataaaataaaaaaagcccaaaaattaaaaacaactcaacgtacaataataaaaaattagctactttattttttttatttttcgaaataaatcaaaaatatttccaatgtaaataacaaaattaaaaaaataacttatagtaataaatgaatataaagttgtcaaaaaaatttgaacaatttgtttttttgagtctttaatcaatatttcttttttctttttaaattgaaaccaataagaagctaacacgtgttcccctccccttaaaaaattaaaattaatttaaaaataggtttattacagacagagagacctttgctgagaactcagtctctcaaattaaaactataaaaatatctctgttaaaaattgattctcaatttattattattattggtgctgttgagggtggatgaaattaattgctgccttaatatattgttcaattgaagaaaatctcaattaaaagaagaatcgaatgatgatgaataagacgcaataaaatagtttgggacacttgattttaattgctggctgcaagtatgagtgtgtgtgtgtgtttgtataatgccgaggctggtttttacgtacgtaggagagtggtggaagaaag

SEQ ID NO: 58555 - DNA, 662 bp, Populus trichocarpa
  Intron number 2 from transcript POPTR_0002s19060.1 (locus POPTR_0002s19060) derived from phytozome v7.0 (chr-ID scaf fold_2; pos 14967211 to 14967872 reverse strand)
cagcatcaggtatgaactttttttcttctctcattttttccctagaatttttaattaaagatcagttgctctacattcatttccgtacagtcacaattgttcaattattgctaggagtactatgatttccgttttaagagcattggttgtcgttgtacaccttttctcccttcttttttttctttgggtgtggaccactgagtttcactctgaggtagaggcagcctcagtgcgaccgaactttttttccttccaacgaagttatctagcacccattttgagggacacattgaggtagaaatctcagagggacccgtggagtagttttctgagagcatggttttttgtttttctaaggggatcccacgattcttggatttgacagttgaggtaggggatccaacgattcttagatttgacagttgaggtagtcctcccggaattagaacatttgtggcctcctaatggaaattccaagttttaactgttggggtctccttgaggactttgttgtttatctgttcataaatttattaaaccttctacatgggatatcctttttgttttgttttatttgacttaagagcatttattaaaccttctacatgggatatcctttgcctacaggaaagacgtttccaacattggatccgaggacaggg

SEQ ID NO: 58556 - DNA, 806 bp, Populus trichocarpa
  Intron number 1 from transcript POPTR_0001s11360.1 (locus POPTR_0001s11360) derived from phytozome v7.0 (chr-ID scaf fold_1; pos 8808416 to 8809221 reverse strand)
attgccgttctctgggtgagcaacaaactaacttgtcacggcaattttcttttttctttttttttttaaatgcatgcatccatttatccatatccatgtgtaagcatatatatgtttttttcaaggtggcgttttgttactcttaagagactgagataattgagagatcagaagatatatcttttgcccttttattaattttttaaaaaaattattctaaaaatatatttgtttttatgtttttttttgttttctgtactttatatatatatattatcctggaatattaacccaacataatctaaaagattctagtttatgtaaagaaatgtgactgtatatatatatatatatatatatatatataatatgacatgattatatactatatggtgaataaggtatcaatgcgccatatatataaatataaagtgcaattatcaatgttttcttatagattaaaatttagttagcattcataatatacaagtgttgtaggatacctaaaatccgtatcagtgagtagataaaatcggcatcattaaactttacattctatatttaccagaattactgtttcgagcaataaattttacattatcgttgatatgatgtttgtttttgatacttatctctgtcttccatgattggtgttttgagaaatagcccaaacaagagaatcaaaagtggaatcttagctgagcttgcaagctgcttatattcccctctttcttttcttggcatctgttatcataccctaccgtaccattatgttctttgattaattatattgtttggtgcaggag

SEQ ID NO: 58557 - DNA, 484 bp, Populus trichocarpa
  Intron number 1 from transcript POPTR_0001s26830.1 (locus POPTR_0001s26830) derived from phytozome v7.0 (chr-ID scaf fold_1; pos 25832419 to 25832902)
cccgtaattatcccttcctttatctttcttttaagacttgttctttttagtattacttttcgacatgattcttgttttttcttctttataccgaaattattggactcgggcactgattattttcttttgtttctttaaaagaattgaagttttgttttgaattagctctgtgttgttccatttttttgtgggctgaactggaacgctattttggtagaagaagaaaaaatgtgagaaataaaagaagttgtattcattaaagtttgcatgtactgttaatcttgatgatattcatacctattgtttcttacaactgtaaaattggaaaaacttcatcgcacgggcatctcttatcaaatgaacctgacctctgcgaaagaaaatggggtgttcctatcgctgtatattttgagacatacacgcatgtatgcatgcgtgtgtgtattcgattacgcatctgatgggattgttttgcgttgtagtt

SEQ ID NO: 58558 - DNA, 890 bp, Populus trichocarpa
  Intron number 1 from transcript POPTR_0007s03490.1 (locus POPTR_0007s03490) derived from phytozome v7.0 (chr-ID scaf fold_7; pos 1984755 to 1985644)
aatcaatcctcttaaattaccaggtaacatctcaacccagccactcgagtttcttatttcagctcctttcatatatcatttcttccttccttccttccttccttccaaattcaaatcgctgattttgtctctttgttttccttttaaatttaactgtaatcttatgttttaaaatataattatattttcttcatgcaagaatccaagtacggttggttagtactaattattccaacgaatttaattttctatattagtatttttggcttaattttgtaaatttatcttcaatttgttcatttttcgagatattttgtggtttctttttcgaattttggctattcttacttcccgccgtattttgtaggtttgtgttagggtttgattttaggttacttacaagagtttctttatcaattgaaaattgaaagttttagagaacatttatttatttcatgggagaattccagtgcggttattattcgttatttcaacgaattttaagtatttttaagtatttttggtgtgattttatgattttctcttaatttttgtgttttgtagctaattctggttcccattttcgaatttttttgatgatgtgttcttttttttcgtgatttttgtttttagtgttttattggtttttgctaggttttggttttatctttgcttttataagttcctttttcaatttctttggcattattttagctctttttttaaattttttgccatatactttctgttttccacgtgaatttttcaaatgaaataaaaactttttattaaataactgaaatttaattgattattcatttttttttagtttaatagctaaaaattgaaattttcattttcatgattcttggcagaactgcctttaaaac

SEQ ID NO: 58559 - DNA, 473 bp, Populus trichocarpa
  Intron number 2 from transcript POPTR_0007s03490.1 (locus POPTR_0007s03490) derived from phytozome v7.0 (chr-ID scaf fold_7; pos 1985667 to 1986139)
agtcgggaagtgcttccggtggtgagttggttatttaacgtcataacattttgtaatttgattgttttatgcttattggtatagtaattattggtagaattgtgtataattgtggtgtttgaaggttttctatagttgtgtcatctttgtcaaggatgatgaatagccctgttgttttgtactcagacatgtgatagatataggtagaatcatgatggtcacagtgtatggacagtttgtttaattgcaatctttaatctctgttcttaaaggctgtagtttaagttggttttgttactatagttagacaaccttgtgaaacacaaactgagattatcaaactggttttgttaaaaaaaaaagatgtgtctttaacacattcaaaattagttccttttcgttttcgttcttcgtgtttttttttaactccccttgtgatcatcctttctaatgtctggatgacttttggacag

SEQ ID NO: 58560 - DNA, 546 bp, Populus trichocarpa
  Intron number 2 from transcript POPTR_0001s47270.1 (locus POPTR_0001s47270) derived from phytozome v7.0 (chr-ID scaf fold_1; pos 47523449 to 47523994)
ttctgctggagatcgcaaggctttgactcatccaggtaataaattcaaactctatcttcagtttttagatacttttctgtttataacttgtttttctccaataaagatggaacacgtgcagttaaccatcttgaatttcatacttctgacccttgatttgaattctaagttgtgatctacaaaccattacaaagttcatgagctgcggagtgaatgacgtagatgatctataccctcgatcgaatgttctaagttgtgatctacctaccaatacattatttatgaattggtgaaatggataagcaaatgaaaaatatgatcgtaactgtgataaaccataacttgaatctgcaaatgatatggtaattagtgcactgggagcatactatcctatgcatatgtatgttttgccgctgaggataaggcagtttcttgtgtgttttggtattttctgacaaaatgctcaacttcatgttactttctcagttttattttaaatgtattcctgcagaggtaacagataagcagctcaagaacaacgaggat

SEQ ID NO: 58561 - DNA, 688 bp, Populus trichocarpa
  Intron number 1 from transcript POPTR_0007s07110.1 (locus POPTR_0007s07110) derived from phytozome v7.0 (chr-ID scaf fold_7; pos 5433850 to 5434537 reverse strand)
aaaccccaagagagtttcagccagcgcagaagagggtaatcaaagtagtaaaacataggcaattaagtgattattttagggaaaactggagattaattttgcactctacggataacaattaagttaaatgtttactcttgatgattatgtgctgcattggtgtggacaggatgatcacgaaaattcaatttttgctggggggatttttattttatttgttttctccttgtttcgttttagtatcgttgtgcctgcttgttgcgtaagccctatccctaactcagaacgttgaacgtatggtgcacaagcttctactcgtttcatacagtactatgcttgaaaatcccagcaacaatatgaaatattctaaacttcagggaattaattttctcattggaatcgatttgaagtgaaaattccgacttgaaaatcaattgagaaaagaaattgatcatggactagaaccttgtgattcaaaggaacacataatcaagcaggttatcatggaatcacaaaaaactataggcacattgcgatattatatattgctgtgaagattaacaaggatgaaagaaactcaacgttcaaggctatgcaatcttcttgtaggacttcagaactcactcctcaactctagttttgatgagtttttgattcattgctagagcagcactctttcgctccaggc

SEQ ID NO: 58562 - DNA, 896 bp, Populus trichocarpa
  Intron number 1 from transcript POPTR_0098s00230.1 (locus POPTR_0098s00230) derived from phytozome v7.0 (chr-ID scaf fold_98; pos 10678 to 11573)
tggtgacagaggatctggatccttttccagagaaagtgagttccactgttactttttgtttacattatcttgttgcactaaatcaagaagtttactagacttattattctgtaaatttgctttctgagtgctgagcattttatacgatcatgtgattggggaggtttgattctcatataattgttgtcagcttatttgtgagccaaaaagtattattgaatagaaatgctttcattctttattgtcggcttgaaagtgaattattacctgagttttcttctccattttatttaatttacgaagcatttcatgattgtctttctgactttattgagttttttctataagcctgataatttgtcagatatttttagcaggagtccttacatatgtatgcaggtcagaagtcattcccatcaataagatggagtggcttcttggctaaacttaatttatttatttttttggtttctgctaaccattttgagattgatttagtcagtctcatgaacttctggtacatccatcatatcactttgcggcaattagtatgaacaattttgctgtgccagatggttgcttgtcccccggtttcttaactgaaagaagtaataagatattttgggtatatgcgcacttctcatcacgtgctggcaactattgcgaatgatttctgtggtgtttcccagtgtgcaaaataagatgtagctcctataactttatttgatgattaatattgatatatttccactttctagtataccatatatagttattaccatatataatttttttaggtcagtgttacttcaatggcggtgtctaagtataccttctgccatgatatttaatagcattttctttttcaggctcatctgccactgattgggcacaag

SEQ ID NO: 58563 - DNA, 643 bp, Populus trichocarpa
  Intron number 1 from transcript POPTR_0002s09360.1 (locus POPTR_0002s09360) derived from phytozome v7.0 (chr-ID scaf fold_2; pos 6670831 to 6671473 reverse strand)
gtccaaaactagccccacaagttgtgagggtaagagcctactaaatttacaggttcatgatttcccgtcaatctttagcttccaaaaactataacgagctaagcacaaggcagaagtctctacagtgcttttggttgactggatgttcctagaatcgatcaccggaagtttctgtttttggtcaacaacgattaatttcgaaatgaatatattaagattttcatcactactcgaaagtctatatctgccatctaaaataatgtaaagattgtttcagtaatctatatctgtttcttaaaaccgaaggcattgtagaaaagtattatcccatttcacctttcgcgtgccctggacgagttgactttgaatcttttaatttttttttttgctgttgaatccttcatatgtggatcagatccaagcgtggacttagtatagcagatttatgtttttaaaaagcctagaagatttagttaagctgaattttacctcttagaacttccattagtgtccaacatttacttggataacgactgcatgtgacgtgaagatgtagtaattaaagccagtcacgtagaaaataatcgatgtactaactgatgatgtccataacaggatcactggagagcattcattgttgaag

SEQ ID NO: 58564 - DNA, 574 bp, Populus trichocarpa
  Intron number 1 from transcript POPTR_0001s26920.1 (locus POPTR_0001s26920) derived from phytozome v7.0 (chr-ID scaf fold_1; pos 25910567 to 25911140)
gaacaggtcaaaaatttggcttttagttcatttgttttcttaagtcttttttcttgattgtgcaaacgaaaaattagggatgttagtcattagattttgattatttctaatggatgaatgaaatgctttgattaggttctatctctttagataaattgttggatgaaatgcataaattttgagaatttgcgattttgttgtttttggaatgtttggtgattttcttatcagtgttttatgtagaatttggaagtatatgtggaatgtaattgaactgcagatcaatcaatagggtggatgcattaattgatacccatttctagtttaggtacctttaagttattttttcttatgttttttatttgatcagtaaaatatatgtaatttattgtgatctgattgaaattttttgagggcattttgacatttgatttgcattttagctctacacggctatctttagtgattagatttatgttcttttattgtcatatatctgcattttatcatgctcgatttacaatttcttattgcttaagtttgcggaacaggtgtttggagcagagtacgtgtc

SEQ ID NO: 58565 - DNA, 192 bp, Populus trichocarpa; identical to SEQ ID NO: 58150
  Intron number 1 from transcript POPTR_0002s18010.2 (locus POPTR_0002s18010) derived from phytozome v7.0 (chr-ID scaf fold_2; pos 13902201 to 13902392)

SEQ ID NO: 58566 - DNA, 661 bp, Populus trichocarpa
  Intron number 2 from transcript POPTR_0007s15120.6 (locus POPTR_0007s15120) derived from phytozome v7.0 (chr-ID scaf fold_7; pos 14761551 to 14762211)
gaagaaggtgggctgcatttctatgtaccgccctttctttacccaaagctcataataattattcacataacttgaagatgattctgctgtcattatattgatgactatgccagaatccctacgcattttgattgagagtcacgcatggatagccttgatgaattagttgaatgaacttttgaagaataggataaaaggagccttgtagtttgatcgactcctgcagctctatccagtgcatggtcatatcccacggagtgatattaagtagcatcgctaggaatcacttcaaaaaagaaaataaataaataaataaaagcagctttactagaacatgatgatgctcaaaaaattcaaggtttcaatatccatttagcttttacatagaaaggggttgaatcttgatgtatttcaaaaatccaagtttctgaacacttggtatgaagctgaagaatagaagcttttaacagatctattgtcacctgcaactgtggtttttgtgactattcttcttttgacaaattatgtttgctgtgcctcttttgcgagctactgctgcaatcttgttttgtgttttctagtttctcaaacatgctctattgttttttttttatcgtattcttcaggaaaggtttcttggttacagcaataattacttctg

SEQ ID NO: 58567 - DNA, 682 bp, Populus trichocarpa
  Intron number 1 from transcript POPTR_0001s18630.1 (locus POPTR_0001s18630) derived from phytozome v7.0 (chr-ID scaf fold_1; pos 15679975 to 15680656)
taaaaacgtactcaaccttgctgggtctcttgaaggttaacacctgctagcccgcgcctcgacttccctcttcgactttctgtttgaagaaaattgaaactttaatcttaattaattcaccattatgtacacttttattaatgtacttattgggttaaaggagtcatcaatgcagatttttcctgtcatttctttatatattgagatttatagcactttttaatggcctgttggatattatgcttagttgggtttcaactggttgctagttgaatcagtggttgattattagtcttaaagtagcccatcagatgtttattgcttcttaaagagattggattatcaagttcaatgtctatgtgtatgtatcgggtttctgataaaatgaagtagaagaaaagagataaaaattaaagtttgatgtctatgtctgtgtggatcgggttgctgataaaatgaagttgaaggaaagatataaaaagtaaagaaatgtgttgttattagggttatttgagactggtaagttatttttttacaggtcttaaccaggttagtcttgattgtttgttttcttttttatcctactgtttttaacagaagattttgataggccatggtttagggttttccctaattaactgttttattgcatatgtcagggattgaatttaactttcaagaa

SEQ ID NO: 58568 - DNA, 762 bp, Populus trichocarpa
  Intron number 1 from transcript POPTR_0007s05490.1 (locus POPTR_0007s05490) derived from phytozome v7.0 (chr-ID scaf fold_7; pos 3575652 to 3576413)
ctgagcaacttcataaagcttttgaaggtgaccctttacatgatgaatctatcctttcttttcgttatttttttttgtagagattttttgtggattcctctgatgttctatttgatgctgatcgtaatataaagtgtcattctttattagataatttggcattcagtggttgaaaacttgagcttgattcataatttcttgaagaaatggttggtttgactttgtgagtcaaacatgacatgaatggtatttgatcttgtagatgttttgtttggtgtttgatctctatgcagatctacattgttaagttaccgtgtcttgttcttgagaaataacacaaaaggcttttgaaggtcgccttttacatctatttctcttaaaggattgatttcttgaaccagtggttggcttgactttcgagcatgatggcagggtatttgattttggagttcctttttgcttcgtgtttgatctctatactgatctgcattgttaagctcttgagtcgtgatctgcagaaatgagacatgagttagctatctaacgttaatggtgttttgtaaattatttgtcttgatcagttttcaactaaccaatcatcattgcagaacataatggaatctttgcaaattatttgatgttgatgttgtaatctggacttaaaaaattgatctacatctatttttttgtgatgcattgccctgctgcactgaatttatcaacagtaagctgttttttcttttcttcctcttcgtttgcagg

SEQ ID NO: 58569 - DNA, 1010 bp, Populus trichocarpa
  Intron number 1 from transcript POPTR_0010s00430.1 (locus POPTR_0010s00430) derived from phytozome v7.0 (chr-ID scaf fold_10; pos 204825 to 205834)
gtgaaatcaaagacaactttcgagctctctcgtatgctctctctctctgttaaaattaaaaagtttgctaatttgattgaaaaatcagtgctcttcttctttagatccgcaactgggcggggagagtttgtttgtttgttagtttttctttttgaattactgccttttgtttctgttatgttatttcgcctaattttctgtttccatatatatgaattgagagagatatgcttctgagtgaaattttcatgttttttatttggttagacgggcatttaattagaaagagtggacttttaagaagaaaaaataaatcagtcttctttgtggaggttagctacttgaatatggcttcaaggactgactgttttcttgataaattggcattcaacatataacaagtagctaaagcagaagcaatttgaggtggttttagccttccacgatacataccaatcttgatatttcatccaatgaacagttatgtaacgcagttaagctataaaatggattagtatattcttgcaaagataactgtattatttcatgaaaattattatgggttttggtttttgatcttcagtttcgttactagcagtcatgtctggggatttttttttcctcccataacaagcagagtgtcagcttagctttgtgaataatgtatctatgatcgttcttatttcaaaaaaggatcaaaatgttgttggatatttcctgtcttctgaaggagcagtttggatgtcttgacatctgatgtgtagtttattccattcctcatttctatttcgtgcctgggccttaaattcactagttgtagttgtgatagttctttcttttggtctacatactgatttttatttttatcacccaaagttcccatattgcacatgtctttttgttcgtatacatggatgggatatgcatgtgacttcttcgatcactcttcctggtatattgctaaatgatagtggcacttatgataattcttgccttttttatttacagaa

SEQ ID NO: 58570 - DNA, 538 bp, Populus trichocarpa
  Intron number 1 from transcript POPTR_0007s13860.1 (locus POPTR_0007s13860) derived from phytozome v7.0 (chr-ID scaf fold_7; pos 13865367 to 13865904)
tacccaacagcttacaaatttggtgagaaattgattatcgcattttaagtttgatttgatttgattttcttggtaaattgcatctgcagttctgttgttatcacagatgattaataaggctgtcatggttggatatatcttcatcacatctgctgtcatctatcaatgtgtaaatcactctattcagctgtataagaaacgttttgcttgaaccttctcgtgattttggaaattgcaatatggttttgtctctttttatgtgttcctatttcttaattcatacagatcttaatgctgactctttcctgagttttggccttcaccttttctctttcgcttctacaacaatggtgtaacgttgctggtttatattaatgcatttgttttgcgtgttcactgctgttgtctttaggagcatatttatggacgtctactttttgcatcacggaatgttttcaaatattcatcccatccatcttgtttctttaatttgttggctctagatagagtatttgggcctggttgctcgacaaggcaa

SEQ ID NO: 58571 - DNA, 828 bp, Populus trichocarpa
  Intron number 1 from transcript POPTR_0001s43220.1 (locus POPTR_0001s43220) derived from phytozome v7.0 (chr-ID scaf fold_1; pos 43276611 to 43277438)
gttcacagtttctgcaaatcaatttactcctcagggtcaaaggaatttttcaatgttgcagttgagatatgatgggagcatagtagattcccatagtaatacagcatatgggggcataatatgcaaaggaagtaacacagatgctggttgcgtgaggtggtcatgcaggagcaatagtaacagttttgaattgagatcaggttcctttaattctacagttcctggcaagctcgacgataattctagtcttagcattagtgattgcatggacatctgctggaaagattgtcaatgtgttggtgttactcccacaggcaataatgccaacaatactggatgcttttttcggtatggaagctttacacaaggcctgagtggaaatgacattcaacactacatcattgttgatcaaggctcttcaggttagcttttctttcgttttctggttaccaatttattgtaaagatatcaacggtcctaatgatgccaagtgtcaaaagattagcaattaatattgttagaatgctgttagtattgtttgttagaaaagagaatctgttagtattatattgagtgaatattctccgtgtggtatctttccaatactgcatatataaactgaggatgagtaatgtaaattcttaagcaaaagtaatagtataacagtgcatgaatttcatcttctgcttctctgtataacagattcattctctgttcttcttcctttctactctctgctccttcatctctgtttcatttatatataaatatcactgtctatcatttataacccaacaatgtaattatttttaaataaattcccagtgg

SEQ ID NO: 58572 - DNA, 798 bp, Populus trichocarpa
  Intron number 1 from transcript POPTR_0010s16720.1 (locus POPTR_0010s16720) derived from phytozome v7.0 (chr-ID scaf fold_10; pos 15585073 to 15585870 reverse strand)
tcttttctggagtttgaattcaacttattgtaaaggtatattaccattaattagaaattgttacccaaaataaaaaacttcattttatgttatttgcgagttgtgtgttgatgaatgtttcttattttttctcgtccacgcgtgcactgttttaactgaacctaatcctaactgtgtctacaatgaaaatgcctataatgattttgtttgttaaagttaatgctaacagtggatattgtgtttgtgtggacggttctcttgagggtcctgctgttatggttatagtttcattgcctgcgtgtgtttttggtctgataagtaatatttctgatgttcttaagtcttgtttttgaaccatcaaagctaagctgatttgaatgtaacctgatttttatgctgtcgcttacttggctatttagcaatcctgtactgaatatgaaactacttatggacgaggtcctttgcatgtctcagtttatagtactcgtttgcatgtttgctaatgtcttggttgttagacttttttccagccattctcaattgtgtgattaaattttgagtgagcttgatgttgtatctttgtatgcatatggaaattttcttgtataatgcgatatttgcggactcatcagtgaggaattatttttcggttgcttttggataaaatttcttcagttctgtccctcttcgcttgtcccatggctgagatatgttgtgttttgctgcaatagactattttttgttaatattttcgctcaagttgttgtacaaccttttgccgttgtgtttcaggcttaa

SEQ ID NO: 58573 - DNA, 585 bp, Populus trichocarpa
  Intron number 2 from transcript POPTR_0001s14870.1 (locus POPTR_0001s14870) derived from phytozome v7.0 (chr-ID scaf fold_1; pos 11678964 to 11679548)
tcaaggtatgtaactgtttgaataaatgataattttaactcaattttgcttgtgttttcctgttttattagcttttatagttatagttgttagagggtaacttgtaattctttatttttgggtttttcgtattggtgataatgctgttgcacatttgatatgctgttttttgctattgcttgtggtaattgtctacatggtggattgatttattcttaagagctgcggatggtttctatgctgtagagattagtcacatttcaactgatcatcttacaagtggatcttgatctctttcaatttcttagcttccagtatattatttaaagtttttgtagtgtttctttgaattattttgcttttgccagaggccctctttttttttatatatagaaaaaaaatgatagaaaggacagtgtgttgaaaaacaactacacgaatttagatacatcactgtaaatgtattggttatttccttgtagccaacataatggtggtgcattgtgtattttatttattttgatgtatctggattttcttgcttctgcagtgaagagactcctgctcctgttcctgctcctgctg

SEQ ID NO: 58574 - DNA, 641 bp, Populus trichocarpa
  Intron number 1 from transcript POPTR_0010s23570.1 (locus POPTR_0010s23570) derived from phytozome v7.0 (chr-ID scaf fold_10; pos 20109259 to 20109899 reverse strand)
taaaacggtgaggcctttacagccttctgctacaaatcactagaaacccaacttgtgttagctcattttatggttttgcatcatggtttttttgtagtttccaactttcagcctactagctagagaaaaatgctaacttgggttttgcttctggtgtttatggtagtttctgttttcctgattttgaacaaattcttacctgggttgttctcattgctttaggatctctcttttgcagtgattttgagctggaaatggaaaataaaaccacattttcttgatttgccatattttctcagcaaccaaacaggggacagtccaacaaaaccccgtctgggttctgttcattgaagggttctgtctcacgggtgcctctcattttcaactctttaccgatctacaacaccaaaacaaaacaaagttgtcatttttcttgctgtcattgcattttcccgggaaacaaacagagcataccctgtttcccctgtttttttaaccttcctttttaccccaagtcatttcgctacatggcttattttatcttccccaattttacattttcttcaagccaaccaaatgttatttccatacttttatcacattattgatatttttttatattttatcatgcaggagagtca

SEQ ID NO: 58575 - DNA, 648 bp, Populus trichocarpa
  Intron number 2 from transcript POPTR_0010s13620.4 (locus POPTR_0010s13620) derived from phytozome v7.0 (chr-ID scaf fold_10; pos 13436926 to 13437573)
cttcggaggaacttcaagcttaacaccgttgctcggtgccttcatggccgacgcgtatgctggccggttctggactataacagttgcttccataatataccaaatagtaaacgccacccctcttaatttcatgcgtatatatcatgaattgcttatgttttggttatcatgtgaaagaaagtcatgagaacctaataaatttgaacagtacctaaactacacgaatcccctttattgatcctctaaaaaatgctaattatggatgagcaccctatcctctagcaattaatttagatgcaaaatatgctggctgcagcattaattcacacttcaaaagtttgttgtatctgttgaattcgagattccggtccaggtttatgtcaaataaagctcaaaaggtgtagaccttttgaaattcatatcttactaaaaattgactagcatattcttctcctcctccttttttttcttcttcctcctcagggcatgataagcttaacattatcagcaattcttccacatctaaggccaccgccatgtaaattaggagagcaagtgtgccaagaagctgatacagggcaactagcaatcctatatgcatctctcctgctaggagccttaggatcaggcgggatccgaccgtgtgtc

SEQ ID NO: 58576 - DNA, 829 bp, Populus trichocarpa
  Intron number 2 from transcript POPTR_0010s02100.1 (locus POPTR_0010s02100) derived from phytozome v7.0 (chr-ID scaf fold_10; pos 2422721 to 2423549 reverse strand)
ccgtatcaagtaatatcaaggtgaaacattttggttgcatttggtttttatctttgtttttaaagatgccgtgtttcttagatactggagacagcttattcactgtaaatgattctgggattgttagacatttattctcgtctcgtcttgggtggatttattaaattatatcggttgagatgataattaatactaattgagtttgcgagaaggcatgagttttatatactttctttatatagttagattatgatgtgattcctttttaaatcttgattttggaagtgatgtccatgtacctgacaatcgacttctaccatgtcattcagttattaaggttccactggcatggctaggaaataagatttatttgagttttgcaacttgttaagtcccagttttctcgtttcatactaaactttagtttgaaccctgcattatcaacacaaatgtgctcctatgttgaaaaaattaaacttaaatagaataatatttgatgtcggtgactgcttccttcatgaatatgttgttactagataatctgtagtcaagtaccatatggcagcgagttggtcgcacaatttgccattggattgccaggttattttatacggtctcttttctgatttgttcttggtctctctctggtttacctgttcttaactttttttgtgttgtttttttgcttatctggtattccaccagttcagtttgttatgtcatcatcatagttgtggcaaaattgcaactctttagttgaaattcttctttgctcaactttttgtggtggatttgtttctctgacatattttttcttaaaccaagggcc

SEQ ID NO: 58577 - DNA, 310 bp, Populus trichocarpa
  Intron number 2 from transcript POPTR_0001s18770.1 (locus POPTR_0001s18770) derived from phytozome v7.0 (chr-ID scaf fold_1; pos 15913800 to 15914109 reverse strand)
gcataaacgtttggcatatcaggtatagacaaaccaaactaatgcattagcaatatgcttcttctttttttttttttttgttatataacctgaaaaaagttagattaattcattgttgcttgtgattaagatcattgtttctataatcataattggtcatttaattcaaatattgtgctcatatgttgttctgcacttgaacactcagagataatttaattgtttagcggtggaaccctctttatgaatgtagaaaacataaaatttcaaacaagaatcgttgactaatatggctgtcaggtagctgttt

SEQ ID NO: 58578 - DNA, 507 bp, Populus trichocarpa
  Intron number 1 from transcript POPTR_0010s24060.1 (locus POPTR_0010s24060) derived from phytozome v7.0 (chr-ID scaf fold_10; pos 20454940 to 20455446)
ttttcaactgactcggttacagatcggtaagctcagtgctgtgcatgaatgttttatttacagttactgtttattttttatttctttgacccccacaagtagagtgattgcatgtttgttgtcgcatatcacaggaagatttcttggagattttattgaagtttctgtggtacccgtaatcttaaccaaggattaaaattcagttaatttatgcagatttggtcaatcttgttttgaaaaaaaaagttaaatgatattttttttttgttttattatatactgtcatcatgtgtttttcatgttttacaagaaacagatggatacaggtagtctgaaatttagctattaagaattatctgtgaaatgatatctgtacatttataacatagattctaattacggtttctattagtcttttctatgtgattcttcatgtttggcatgttaggtaggaatttatttgagtgaaaaatgtgtttggggtttttggcaggaaaggctcaggca

SEQ ID NO: 58579 - DNA, 959 bp, Populus trichocarpa
  Intron number 1 from transcript POPTR_0001s40960.2 (locus POPTR_0001s40960) derived from phytozome v7.0 (chr-ID scaf fold_1; pos 40534589 to 40535547 reverse strand)
gggtaaagctcaccaaaataaaatcttgtggtactagagaaaaccagactctcactgactgagcaatattgattaaacatgcatcgaaaccttttacaggaggctacataaaacctgtaatgtgaaaactgctatagtgcatgtatgtggcggcactacagccccactctaataaattggcattactctatttatgaattttctatcgctatagcagaacacatgacttgctacttgctagattgtttttatcttgtttcatgacaaactgtaaatacttgttgggcctagttttaaaatatgtggtcagctggagtttttaacctggttggaacttggaattaaattattttagttctcaaggactatttttttgtataaatggtaaatgtatcaggtttacagtcaatagattgttggtttgagaatggagagcagttacctagaccaaatatgttgagctttgttggatagactagggccagctggttacttttacctgatttaagctgcatatttcatagttttcaaataccattatctaatttacggtaaaatatctcgagtttgcaaccaacaagttgcagttttggggcttgagagcagtcacttcatacatgcaatgtaggatattctcagagttcctttcctagttcctagaatcctactttgagaaacacagtgggcttcttattttctataattctgttcttcacagttgcctcttcaccaatcttacggagattattttatggtaacaaagcaaatatgcttgtagcaaaagttatttttgattggcatcattaccattaaagcgtaatttactcttttccaatgagttctgtaactgaaggtatagtgctcttgaattgatcatgtcccctttgtgtttttatttttttattttttccccccatcttctatggatacttttgcagtggtgagaaggctacagctga

SEQ ID NO: 58580 - DNA, 1056 bp, Populus trichocarpa
  Intron number 1 from transcript POPTR_0007s13510.1 (locus POPTR_0007s13510) derived from phytozome v7.0 (chr-ID scaf fold_7; pos 13562008 to 13563063)
cccgtctccgcttctgcctctcaaacacagccccagtgagttcttatttattttctttaaagggttctggacaaatttgaatctggatgtgtatttttagtgatttgttttaaaatgatttagttgatactgctatccctttttcctgtggaaatgctgcttttgggagtttagaacagaagggtttccattagaaatgggtttttttgcgtgaagggtgatagaaatactaaagatttatggctcaaataatcaagcttatgctggaaatgtaattcaattacctctggtttccattgaattctctttgaagcaagttttttgaagtgaagggctttgtgaagatttaaacttagcttctcaatgacaagttaatgtctgaaagggaaccaaatcatgattgctttccattgaattctcaaggtttctcaagtgaaagtaactgtaaagactaggactttagagcttaatacgaagttaatacttgcaatataattcaatttcggttgctttcatttggattctacgtgaaacaggttcctttactgaagggagctataaagattgaagctttagagcttaatatttaataaacaagttaaggactgaactgcaagtcacatctatgcctgcttcccctcctattttctttgaaactggttttgttctgtgaactcgctgttaacatcaaaactttaaggcttaatagctgattttatgcttaaaaggcaattcatttatcattggttttgattgaattctcttcgaaacaagctctttagcaaaagttgctttaaagattgaaactttagtgcttgataagcaagttcatgctagaagattgctattcaattttatgctccttaaaacatgtttctttggtgaaggttgctgtaaagattgaaaatgtagggttaaaaatgaaataaatgcttgaattgcaattcagttatgaatgtcgggcattgtatttaatagaatttgtattgaatttattctttcttttttaatttctgtcaagatttgtgccagctatagaagtcccaccagatattg

SEQ ID NO: 58581 - DNA, 440 bp, Populus trichocarpa
  Intron number 1 from transcript POPTR_0001s32690.1 (locus POPTR_0001s32690) derived from phytozome v7.0 (chr-ID scaf fold_1; pos 30974063 to 30974502 reverse strand)
acctctcagaggtctcggaagaaggaattgtttgggtgggtggactatttctggcatttctgtctacaggggtattacttgctcctggatgctgtttcttatctctttcacctctctgacctattttcttgtatgattttcattgtgatgaatttggcaatgataaatgaatgagttataatttaggcacacaggaggtacctggcattctccttgtttcatggatgatgcttagagtaggcttccatgtcaaagttttgatttgtcttgtttgcattttgttctcaagttttgggtagtaaaagggttgactatattttacatgatttacctatgtgatggattcctgtgtttctctgattcttttgagatgaatgatttcatatctctttccataattttcaggagaaggagagagagaagaagcccaagaaggagaa

SEQ ID NO: 58582 - DNA, 1008 bp, Populus trichocarpa
  Intron number 2 from transcript POPTR_0001s24760.1 (locus POPTR_0001s24760) derived from phytozome v7.0 (chr-ID scaf fold_1; pos 24015566 to 24016573 reverse strand)
tatcgtgccggtatcgtccctgttgcctaccgccggtcagtgcctttttaactccctgtttttgccctgtttatatgcctctggacttgaactgttttagttagcacatggaaaatacgagtacatctttattttctctaacttttacacgacatcgatttttggttttagattttgataaacactaaaatttggattcattcctcagtgaatatgtgctaattttaccatttagtttaattgcaatttctcttccaagctagaacagaaggtcaagagttagaaactagcgcgtgctagctagctagcaggaaaagctgtcgtagcaagaagagataggtttgtaatgtaatttggcccaacaactacctttattgccccaaaacaatagctctctgaagccatgaaaatacacactcgagatgttggcaaaagaacatccacgataactgcgaaaaacacctattcttggtgggtctttatcgcttttgccaaccaattttctacctttgaattcttgttgagatccaaaaatgtgttaactgaagtcaccaaacagtttatgcacgggctgatgttattaagagatgtcggtgggttagttagacctcaacaactttctcttgtgtccttcacttattttagccacgggaccgtttatggtcaccttcggcgatttgtttttactcttatagccccgctttagtactaaaaatacctatgcacccttgccctattcgtttctacagaaaggtggatagccatatcttattacagcactttttcttagtggatcaaaacagtattttagtgagaatcaaaacatttcgtcaaacaccaaaacccaaaaatcacacttcccaaaatcctagacttccatgtttgtgttttttttttaatgcctaggttaggcttgctgttttccttgactgccctttttgtaaatttgttttattgtcgcattgacggaagtgtcctaacggcattgagcctcctatgcagagtgcc

SEQ ID NO: 58583 - DNA, 665 bp, Populus trichocarpa
  Intron number 1 from transcript POPTR_0010s19320.1 (locus POPTR_0010s19320) derived from phytozome v7.0 (chr-ID scaf fold_10; pos 17267996 to 17268660)
attgtattggaggtgtcattgggtaagtctctctccttttaaatttttattttcctgtcttgtctgttaaatttgctttgcttttgttttatttatggtttttaagtgttggaatggagatattttaattttatatacattatttgaacgagaaagaacaacctttgcatggtattcgttgttttgtttcgtgatttaaaattattactggattagagtttttaactcttcttttagggtttagatactattggagaattagaagaggagtaattgaatttgatcaagttggcaattgggggatgttagcatatgggggtttagggttttgatgaatatggagtttaaggtctacttgcttgcaatggattcatttagctaccaaggtaaatgtgaacgattacttgatcagctacataaacttccagagtgagttttttgcctgctggatgattgtattgcgtattattgggtggaggataggcttattaaagtttcatgttagggctactgatttgggtagacaatgaggaatgagattctgcactagagatatttcaaatagaggaagtttagctagaatcttattcacattttcctttttcgtttgattgtctcaaatgacttgaaattgtttatttaaatgctcgcttagatatcagata

SEQ ID NO: 58584 - DNA, 444 bp, Populus trichocarpa
  Intron number 2 from transcript POPTR_0001s20980.1 (locus POPTR_0001s20980) derived from phytozome v7.0 (chr-ID scaf fold_1; pos 19206899 to 19207342 reverse strand)
tatcatcaacaacaactgtcctgtcaggtcaagtctgtttcgttgactctgtatttgtttctcatggctaattgtttgataagagaaatttagatggatattctttttattattattattattattattaatatagatgtgtcgttaacttgtgcatgcctcaattaattctataaatcctgaagttaatgaccatataatttttcaatggtcctgagaaaactcaaactcataattattagaaaataaatttaaaatctaaccagttaaactatctctttaatttagatggatattcatagtattacttgcttttgtatgctgagtaaattgtcatgttaaatggatcctctcttacttaattttcttccgtcgaagagaatttcattttctctttgttttttctcagttggcagaatttgtcagatttcctctaaagaaagc

SEQ ID NO: 58585 - DNA, 654 bp, Populus trichocarpa
  Intron number 2 from transcript POPTR_0001s18370.1 (locus POPTR_0001s18370) derived from phytozome v7.0 (chr-ID scaf fold_1; pos 15417204 to 15417857 reverse strand)
tgcctgtgctttccctgctgcccgcaagaggaaatgtatgtgttttttttcattttctgcgtattgaactctgaatcaatctgggtatttatctggaagtaatttttcttttgctttcaagtcaatgctctcttttcatattgatctgatatcgtttttttcatctttgtatgtgtgtgttagacttctatatgtatctagccttaagtgcttagctgtttatctcgaaccacttttcttttctttatagccaataagcaagtcttgtgtttgtgaaaagaatatgtatatttgtagtggtatggctgtgctactccattatctgtaaatagtagtgttgtgtatagcttgtttatatgggggaaaccatgatgttgtaaggtgttcaacccagagcccctttctgcccatggttaaagattcaagcccccttacctgccttttgatctgtgtcagcttcccgtgtataaatttatttgcattgattaccagtttatgaagataattgtgagggctgtcattttcgtttagcttttaaatatgtaacttctgcttgaacttgtatagtttggtttgtgaacaagttggtggattttatgttcttttattgtggtttcagacaactggagtgaaaaggcaatccggagaaagaca

SEQ ID NO: 58586 - DNA, 573 bp, Populus trichocarpa
  Intron number 1 from transcript POPTR_0001s33460.1 (locus POPTR_0001s33460) derived from phytozome v7.0 (chr-ID scaf fold_1; pos 31657152 to 31657724 reverse strand)
ctaagctaatcaggagattgaacccaccaaggtacttgcttattctttgggtaaattttctattttctatggattttgtttttggttgtttggtctatatacgaaatggactgtttttgcttgaagatgactttagagagaagtttacactctttgcaagttattccttttttatcagtcttttcctccaatttctttctttgttttgttggtttgaagagaagtgatcaagaatagaaatgaaatagaaaaatcaaatgtttcatgttgaattatgacttgacatctaccatatttgtggattttggaagagaaaaaaagatctcctaaacagtagtaattttactagtttaacataattttcttttccctttattttctccaattttcttgggaattgaatagagccttcaaatccccaccccttttttcaaaactaagcaattctattcaaattgagcaaatttgagacattaagagtgagatgttggtttcttcttctccttctgttttttttgttgaataccatgaagatttttaatttgctttactgttgcagagttgtgattgaca

SEQ ID NO: 58587 - DNA, 782 bp, Populus trichocarpa
  Intron number 1 from transcript POPTR_0010s20050.1 (locus POPTR_0010s20050) derived from phytozome v7.0 (chr-ID scaf fold_10; pos 17806733 to 17807514 reverse strand)
tggtcgagtgcaaggtccgtctttataatttcagggtaagtttccattctctgctacatttttgcaggagttcacctctagcgatggacgagggctgccatttcttattttgatagttaaaaaagagagggtcatgcttaatgtttcattagctgtgatgacaaattaaaagataatttcgttttttttattttattttatgcaaaagggccaagtgcctcagaaaaatcaagcattaatccgaacaaaacaaactttgctatatacgagcatgcatgatcaaatgtgagaatttatgtatgaaatttaatcaaaggagattcttgtcgcccaacacaagtttatctctacctgttggtgtcattatgcaatcataaaaaaatattaaataaattagatttacgtacgcagatgaaaattttctattgattggtgtaataagctttcgtatacattattattggttattgaaaacgaattcttgtaatgtgattagtttggctcatacgaattaaatcaatgtaagaatttttcacacattacatacacacaccaatctaaatttaaaaatcattctctagcaagtaattttgacatggtcgaaatacaagttcttagggtagtatgcccttttccttgtctcttctatccccttcaatgaaaagtttgcaaacttctttggaactggaaatcgagaacttgactgtgaaaaccactgtttaattatattggctgctctgcgagcaggtagtcctgacgaacacaacaaagctttgttcaac

SEQ ID NO: 58588 - DNA, 685 bp, Populus trichocarpa
  Intron number 2 from transcript POPTR_0001s30140.1 (locus POPTR_0001s30140) derived from phytozome v7.0 (chr-ID scaf fold_1; pos 28693047 to 28693731)
tatctgctttccagagcatcaaatctgtgtggtaattatatcggactttgtgataaaaaaaacttattcctgcattacggtttctacttgatgacgaagaaatatcttagtgtaacgagactgttttcacgagaaaggttttattcttttatatcttagtctgacatgataacgaataaggagatagaaggcgaagaaagggtgtgaagaagtaaaagttattggagttcagcaggcagtactagctaaaagagaggaactataggagagatgatgcgattagggcagaagaggaatcattgttggcagctaccaaagtgaatgcctacccagtacccattcattaagcatgaaattatggatgagatgacaaatcgtccatccaaaaagaaaaaagaataaagaataaaagagctataaaatatcaacgtgtcttctgaaacttttggcatcaatttcttggttgaaaactgtctgaggtttggttttattagaattagatgtttttgattggttaaagtcaaaaacatatcatgaaatcaacttttttcaggactatagatgtgtgcctgtttgtatttgcatatataatttaaaaagaaaaattctgtaaagctcactgtacggcttactggcttacactatgctaatgttgtcactgttttcaggttcgtacatactctga

SEQ ID NO: 58589 - DNA, 810 bp, Populus trichocarpa
  Intron number 1 from transcript POPTR_0002s09730.1 (locus POPTR_0002s09730) derived from phytozome v7.0 (chr-ID scaf fold_2; pos 6973403 to 6974212)
tggggctactcagctcttcttcaaccacttatgttggtctctatctatcttttcgttagactttgttttaaattattacttttgttccatggggtttgaggatcatgtggtttgattgactcttcgtaatataatattcgtttcagcagatcctttttgggtttcgatgttttcgttccttttttgttcactttccctttgtagaattttctggtattattgggatttggattattgtgttgtgatcgataaataattccatgattattgcttgaggttcgtgtggattggaatagtctcttgcgatggatttattgaagttgtgattatacatttgttttcgttgactaattgattattgagcaattgcttctgtggtgatataaattgtcatgaatgctacggggcatcccataaccatgtgattctactatacccattttcttttcagcagtttgtatatggttccctttgtatatttagattggtcagtttctatttgaactcgcttcaaattaatttagtaggaagggccttagctaatctagttttgttgattcgagtctttcttgagttcgtgacacgtgcatccactgcattaagttgccatctactagcctttcatcccgacatacgatggcaattcatcatttccttatctatttttcattccaacagaagttggaaattcccaatgcatcaagtggcaattcactgtctttcatttcaacatttgttgccaattcgtcttttactctcaattattgtttttcagatcccctgtcgctggttagggatcatcgggcaaag

SEQ ID NO: 58590 - DNA, 665 bp, Populus trichocarpa
  Intron number 5 from transcript POPTR_0001s07110.1 (locus POPTR_0001s07110) derived from phytozome v7.0 (chr-ID scaf fold_1; pos 5404687 to 5405351 reverse strand)
tttaatttgcctcaagatctccaaaagtgagttggatactccttgtggatttggtttctgttagcgtttgctttttttaaatccgcacttgcattatggttaaatgttatatccatacatttgcttgtggcacattgctcctctatttgaagaacttaatgccttttgtctggttgaaataatttcccacccgattctgtgaagaaagaatattcttgatcatgctctcttctaccctctgtttaaatcggagaaaaagatgctgattttgacaatttcaatttcaatttcaaacatggactgagcggccaaacacttcataaaaataaaaataaaaatacaaaggttgattcattacatcatagtgcaagcattttttaccgtgtcacattcaaacctgtttttggtattcaatttcagtttcacatctgctaattgccactccgatatttttagcttctctggcttctttctggacccatcgtgttgccactgtccaatttttgttaacctttttgctatactctattagttgttacaattaagagagaggcatgccataattaattggttcaaaaaaatattttttttacaattactctagtttgaaccatcctttccactcttaaaaagtttaatatagtttgatctgcattgcagatttg

SEQ ID NO: 58591 - DNA, 695 bp, Populus trichocarpa
  Intron number 1 from transcript POPTR_0001s07890.1 (locus POPTR_0001s07890) derived from phytozome v7.0 (chr-ID scaf fold_1; pos 5980507 to 5981201)
gcgcctctgcagatcgctctctgcttttgctagcggtacttcttttattcttttctttcttcatatgattttgattttccgtcatctatgcttctttcgatctgttctcatcaataaatcgaatgtctctttcaaagaaatctatcattttttttttaatttctcactcatttttgctcaaaagaattaatcttgactattgattcttataagctcgtgtatgtttccttgcttcacagtccggagctctaggtatggatatggtgatttatgttttgtttggttgctgggaattgaaaaaaaaaagatgaaaatattgaaagcagtcctagagcttgatttgattggtttggatatagctacttgataggtgtaacttaaaaacaatttctctaatgggtttactatgcttctgaagcccctaatggagtcgctgaatggctaaagatattaattgttcagattagcaaatagcttgattcaaggttggctgataagccgcttatatcaagaaaaactaggattttatggtggggctttgttcatcctctggccttagttgaataaacattatgtcgagtggaaaaccaaaggtcgtgtagccattttggttttagaatgttaatttgtattctcttagacatcgtttgctagttgttaacaatttttcttaacatacatgtttagcagcaaca

SEQ ID NO: 58592 - DNA, 763 bp, Populus trichocarpa
  Intron number 1 from transcript POPTR_0002s21790.1 (locus POPTR_0002s21790) derived from phytozome v7.0 (chr-ID scaf fold_2; pos 18393474 to 18394236)
tgctgtgtcaaatcactctgctgataacattgaaggtaggtagtagcatcatatttatgtgtactctttccttaaggcagtgaagatctgcctctttttttttattttttcctttttgggtttttctaaagtgatgtgatcatggtctggtagtttgtttttgttgctgtcatcaacaattacagatgcatattttagctgtggatggttgattatggaacatgttacaagttactggcctcctttttatttcttgtctggaaaaaaactgtaattattgatttgtgtttgtaatcgtattagatggtttaggcaagttgtaactggctttgttatcaatttgttgatcactggtgggtttttggtatcaagagttttgggggcgcttgatgcaatcaatgtataaattgatgaaacgaagcttttgcggattcctgtttctttattgtgattcctaatgttgctggaattggaaagtttgttactttctttgatgttttgtgtgttttagcaaattattaattaatgtgggtttctttttacttttctgttattgtagtaaataatttgatctatattatgtggttccttttagtttggaaagtccaaacttgttacagacttttgctaattggtttctcatgtggctttgtggacaggtgctctagttaatgatgtaatacttaggtaggctgtgaggggttttaacttgattctttggcctttttatgtgttgcagaagcattttggcgtttgaagatac

SEQ ID NO: 58593 - DNA, 547 bp, Populus trichocarpa
  Intron number 2 from transcript POPTR_0010s24820.1 (locus POPTR_0010s24820) derived from phytozome v7.0 (chr-ID scaf fold_10; pos 20827382 to 20827928 reverse strand)
cttctcggcaggttggtttcatgtattactacaaattttgctttcttgttctatttgtaaatcactatatatttgattgttagtgccgttactttccctgttttagagtatgttttgattttttcatgatgtctacttttgcttatagctgactcacccattgagactagcttgatcaaagtgtttttgtgctttcccattcaattgctagactaaggtatgttttgtctcaaaaataggattctaggtcttctttaatcagcataacggaattagttgccattctaaaacttccttcgacatacccaaaggtcgtttttttttgttttgctgccttaacttttttaatttctcaaggtgaaaacttgatgccttgtcagaaatttaatgggttatgtcttttctcaagtactaccttttctttgatgatgcatcgattttgatgtttggaatcttttactctttggatgcacatttcttgcacgtgactgttgatatcatcatcacttcaatatttaggcagaggctaaaatactaaagggaccgc

SEQ ID NO: 58594 - DNA, 630 bp, Populus trichocarpa
  Intron number 1 from transcript POPTR_0010s24820.1 (locus POPTR_0010s24820) derived from phytozome v7.0 (chr-ID scaf fold_10; pos 20828004 to 20828633 reverse strand)
cgtcctactcaggtaagtagatgcggaaatttttttttgttgggttgagttttgtttggttcttgagaaaatgatggaaaagattgggactttggggtttttttggtggcaaactgaagaacccatatgagataattgatactagttgttggtgtttagtttggttttctaattgctttgacttgttcttgctgttttctgtttgctgttgatgtgctgtttgttgtttggtttgtgaggaagtggaggaaagctgaaagatttggcggtttttttcatcgtaggttgtagaacccagatgagataaatggttagttgggtgattcagaagagaaaattatacgattcttgattggatcctggttgccagtgtttatttttttatttgtaattgaattgactggttatcctttctgggtattgatttatgatttgctgtttagttgagggaatttggatcttgagtattaaaataatcactgttgaagaattccagatggatgaattgactagttattggaggcaattaaattatactgattcgattggttttatctgttaaaaagttgggtttagattgtttttattgaatttggctgtgcttaatctggactttgtagattagaacgc

SEQ ID NO: 58595 - DNA, 1028 bp, Populus trichocarpa
  Intron number 1 from transcript POPTR_0001s02020.1 (locus POPTR_0001s02020) derived from phytozome v7.0 (chr-ID scaf fold_1; pos 1500056 to 1501083 reverse strand)
tttgcagaaaatagctccagaagcttcaagatgtaatggctcttcctgagttcagtttttcttctaattttgattataagaacatgaaaaattgaacttctggagaccataaaatcctgctgttttctgatccaaattgttgaaagctgtcctataatagttcttcctaaacattgttatgtgaaaaagtaatgtggtcatgaaaaagggtcatttaagacaatttcttaaaaccttgtttacaatgatgctgatgtggtcttgctggtccatctaccactgtaaattgcatggaagaagacctgcttaaatagaggtttatgtgaaaatcttaaaattggcttttggttggcatatcttctctgtacaaagcctggatatgtctataatataaaagcaagccggccatgctgtctattagtttttttggtttctttttttagtgaaacaatcttcttgtctttacttaaataactgtgtggatcggaatagttctattttctaaaaaatgaagaacacctgaattcttaaaattggtttttggttggcgtatcctttctgtgcaaagcctggatatgtctataataaaagcaagcaggccatggtgtctattaatatttttggtttcttttgttggtggaacaatcttcttggctttgcattaataactgtgtggatcggagtagttctattttctaagaattgaagaacacctgaattctcaatgttgagctaccagaatgagaagctgggcacatctgatttatgcattcgctgcttcatataataatgtaacggacacattctttcttcttttttttgtcaatgtcatccgaatgtcaagtggaagcactctttgttctcatcataatacaatcctctgtgaaattacactcgtggaaattataaaacttagggagcactgctgctttgttgtcaccaatgacaggtttctgcagccatgtttttctcaatcaaattaatatgattcatatcttcttccatttttttttctaatgtacaggtat

SEQ ID NO: 58596 - DNA, 565 bp, Populus trichocarpa
  Intron number 3 from transcript POPTR_0010s24550.1 (locus POPTR_0010s24550) derived from phytozome v7.0 (chr-ID scaf fold_10; pos 20712889 to 20713453 reverse strand)
tagagggaatactcttcgagttcattgcaataaaggtgaggtttaattgctattttttttgggtttttgtcatgtttgacgagttaaagttattaacttggttctatttggaatgggaattcaatatcatttctaaattttcaatcttcttaacgggttttctttaaaattgtagagttttgtatatgctaagttttactagaaaaagttattgcgatttatttcttcaatgtttttcttttcttacactggacaggaatgcaatcaatagttgaatcttgataagtcttttagttttttcaagattctgctcttatgtatcttaaagcaaccaagttagtgtagatgctaacgtggatagtttagttttaatgggggccaaatatgaactttttacgtttttgaattggagttcctttattttttattttttaatctttgtaactgttttatcatggatgcaatacatttcactagaaaagtagtagtaatttatttatccagtagttttattttagcttgatatgcagggattcaagtagtagcatccagtgataaagttaca

SEQ ID NO: 58597 - DNA, 706 bp, Populus trichocarpa
  Intron number 3 from transcript POPTR_0010s11040.1 (locus POPTR_0010s11040) derived from phytozome v7.0 (chr-ID scaf fold_10; pos 11422425 to 11423130 reverse strand)
ggattccgaggtaactggctagttattttttgcattattattgttgttgttgttgttgttgttgttatataggacagccaggggatatgataagctccctggagtgatctagaagctacagaagattgtttcttacctgatgttcttgaggccaaaaggcttagaaatatttgtgtggacctatatttgttgagaactcaaatttaaattcaactctacaagagcagttcaagattttgtgctgtaatagtcccatactgggaaagtgaaaaggcaccctttaccactgtcctggggattatctgattttactattggttgttctggaagacttgtgtattttaagagcataaaatcaaatgttaaaatttctatttgcaaagtaaagaaaagattgaactttttcgctctttcaagtttcatgcatagtttttgttggaatgttgctcggatggatattgcattagagaacctaaaagagagctgaagagctctaatatttgtgttaaattgttctattggttgagatattgttttgattgaagatataagaaaacaactacaacttttgaatttttcatttgcattttaccacgagctctgacattttgcagtattctgtttgttggttggtttgatgtttgagtttatactgtgtctcttatttgcagactggaaaattgttgaaagagtcagacccagaagt

SEQ ID NO: 58598 - DNA, 709 bp, Populus trichocarpa
  Intron number 1 from transcript POPTR_0010s10010.1 (locus POPTR_0010s10010) derived from phytozome v7.0 (chr-ID scaf fold_10; pos 10613269 to 10613977)
acgttggggtttcaggttattaatccttccgtcctcccctaactcttcatttcgttttcatttttttcttaaagcatgctcaattctactaagaagtttctgtgcattctttggacaacattgatttcagtttttttctctcctgaaaaaagcttaaatctcttttagacttgatggcgaaaactccttgatggataaaattaaatgagacatttagagttagagtttgtgtatattttccaaaagagtgagggtcaactcccgccaaacagacgggaaggttctgtttccttcagaattactataatatccccggttaatgggggcagaacactggggtactttaggaaatacagtgatcctaaccgttggcgtgaggagagagttcgctagagttttggcagctgagagagcactgtttggtggttggtatcgttactcaaacaccaatcaaagtgtagaattttccccgtgactgattttgcttcccaaggacgcgccaccactatttcctcataaaattatttttttaaccccttttatatttagttgttttttaaaaattcttctaggccctttaatatttaattttttgaaatctttaagatccttattgtttaattggatataaaaaaatttgatgatgttattaatttatggatacgttattaatacatgatgatgatgatgatcaggtggtgttacatca

SEQ ID NO: 58599 - DNA, 710 bp, Populus trichocarpa
  Intron number 1 from transcript POPTR_0002s13050.1 (locus POPTR_0002s13050) derived from phytozome v7.0 (chr-ID scaf fold_2; pos 9710701 to 9711410 reverse strand)
tgttagggaggtaagatcattttgtacatgttttttttcatttctaaattggatgctagtttttttttattatgaacacttgtattcattgtggaagagaaaagtactaaacaaatagctgaaggcagttgcgtcagttacaagcaggataaacatttgtgttctctgttctctttcttttgtttttattttttagtgattgataatgagcctgtagctcaagatcttggattcaagtcacccccttgtaatcaagaacgcaaaccaagtgatgaaactacaggtcatgactgcaaggataaggctaatcagccctttgaatatgtgctcatccgtgacaacaaatttgagtaaatgatataaagatggatattgagatagatgaaatcgaatgtaatgggtgcatttggtatgatatatttcctatagcaagtcaaaattcacttgcacggtatcaaatcacttcaaggtaacgtgatcaagttctgtttctgtgttccctgaatgatgtcagtagggtaatctatatatttgcgatgaggttaggatttggagtcaatcttaagaaacctaaatattgtgacgttgtttgattgtcgaattgcaaatttttcgtatataaaagtatgtcactatgttgatcttccctattgatttggctatgaacaccatcaggaatagcactgatcacattgctataaagtctgcca

SEQ ID NO: 58600 - DNA, 739 bp, Populus trichocarpa; identical to SEQ ID NO: 58138
  Intron number 1 from transcript POPTR_0001s42170.4 (locus POPTR_0001s42170) derived from phytozome v7.0 (chr-ID scaf fold_1; pos 41919965 to 41920703)

SEQ ID NO: 58601 - DNA, 422 bp, Populus trichocarpa
  Intron number 2 from transcript POPTR_0001s31360.1 (locus POPTR_0001s31360) derived from phytozome v7.0 (chr-ID scaf fold_1; pos 29695529 to 29695950)
gagaaactaaagaaagaggaggaagagaagaaaaggtaaatatcttatgcatgttcttgctgacatcttattaatattgctaatagcttagtgacgtgagttttaaatttcttcaatttttatccctattttatccaattgggtttttgccacttttcagtgagcaggttgatatttagttctgacatgtgacaggttagcttctatgggtttttgaattagtaagccactgcttattctaacatgcgttgtttaatgaataattattttcttgtttatgtgtgcttcctcgaagtggaaatctgcaatttacttaggatagtttttgcttgcttattgaatgactcttgctgttatttttgtttttattttcgtacacactatcaggcgtcaacaagaggctgtactaaaactattagagg

SEQ ID NO: 58602 - DNA, 765 bp, Populus trichocarpa
  Intron number 1 from transcript POPTR_0001s20710.1 (locus POPTR_0001s20710) derived from phytozome v7.0 (chr-ID scaf fold_1; pos 18817205 to 18817969)
aaaaacaagcaagacgaggtctgtatactattcttctctctcactcactaactacatagctgatgacatagcacatttttaatattatattattatattcgcttctcttctgttttgtttttagccagagcgaagggagaaaaaaatctcacagagacgcacgcatttaatattcggaacaggattatcccattttttttgttctcatcttcgaaaaatttgagcgctggttggtctcttcctaagttcaaaatttttcttcgttttctttcgatttaaaagctggatttggtgctgtttttttgtgtgcacaaaaccgctcttgaagcagttttttgttagaggttttcgtcgcttcttcttcttgtttgtggtgtgtttttggtctgaatgcgttttctgtttcttttcttttaaggtttcagtttgaagcagaaagctttagcagcattttctttttgttttctttgagaagcttagctggtattttgttgccttttcaaatcttatcaaattgtaacaagttttggatctaataataccttggatctaataataccttgatatacatatatatattgtttttcttttaaattttggttccaatcaatacctacttttgtgtttgatctgcattttcttttgcactttccgagcaaccaaacaggaaaagaatttgatgctaatgtaaaatgtttcgacactgatctttggtttttttattttgcaggaagtctacgtgagcctgtttgatttcaaaaggtg

SEQ ID NO: 58603 - DNA, 887 bp, Populus trichocarpa
  Intron number 2 from transcript POPTR_0010s11100.1 (locus POPTR_0010s11100) derived from phytozome v7.0 (chr-ID scaf fold_10; pos 11463470 to 11464356)
atcagggcgaaggtttgagcagctaatccatcttgttgatttgcattctattctttgtgttatgttcaagttctgccccagctgtcttcttgtctttttaactttttcgtgtgtataactaatatattagtattaaagatgaatgatgtggtttttcgtgtctttgattccttctggtttaagttttatggtttagtccctccccagaattttgtttgcatttggatggatactcttcttttttttcctctcttttcgtgtaggggttcttttttagttctaaaattcatctcttctacatgttcacttatatagaatctccttttaagatgtattttgattctattgatgtagctaaacatggttagtttacgttcctcctaacatgtgcggtttgcaattgaaaaaaaaaagaagggctcattctgtccattttaatctttaaagtttgaaaatgttttctgctcattggatcctgctgagatatgaacaatttgtatggataataggaagtaaggattgagcagatgttcaatttatagaatgaagtacggatttcttttttgaggagttgccagaggttggtagaaccatttgaattgcactttgttgttcaaaactgtgtggtagattggataactgctatatgattgtttgtctatataattttttgcaccttgatttctttcactttcaaggtgcctatgcaagagttatgtttttttcatatgtaattaccaaaacttttgattgctctgttacttcaagatggtccttgatctgccagaatgaacataaaatagttgctagaaaagtatactctcataacagctaacaactgatcgtatgcaggtggaacatttgctctgtactcgttgctctgtagg

SEQ ID NO: 58604 - DNA, 809 bp, Populus trichocarpa
  Intron number 4 from transcript POPTR_0796s00210.1 (locus POPTR_0796s00210) derived from phytozome v7.0 (chr-ID scaf fold_796; pos 4802 to 5610)
tttccttggaaagacgtcgtctagatcaattcacagtaagatgaactattttccttattgatttttttttttgaattttttctggagaagtcatttttggaggagaaactatgtgtttttgggatctgcacacttcttgattataacctttaagagttccaaatggtttggacttgagtaggttgaaaaaagacatacaacctttgcaagaatgaagttctgcggaatatatgactcatgcacttttagattcattaaattcataggtggcatagctactgagatcaatgtagtcaactatgtctctcctagaacttggatagctacctctcattttggtctcaggttcttcctatttgtaggtcatttatggcacgtaggaagggcacgtaggaagggctcgtgcagctgctgctggatttgaaaaaggattttgagcctgttttttccatgactcctcttaactagttaagaaaagagactaatagttgaagaaggaatccatttgattctactatacatattgatcgggtcaatcatgtcatactttgagagtctgcctttttccttcaaccttgagcttgttccttaatttccatttgaagaaatacatgccatttattttttatgaaatcttttgaaactggcacgggttgttagacctaaaaaatgggctgaatttgtttgctaacagccaatttcatctttgcttaatgttgtagtgcaaattctagctacccatctttctctatccttttcctattcaagaaacttatcatgagttcactcttcccaggtccttgttagga

SEQ ID NO: 58605 - DNA, 730 bp, Populus trichocarpa
  Intron number 1 from transcript POPTR_0001s07830.1 (locus POPTR_0001s07830) derived from phytozome v7.0 (chr-ID scaf fold_1; pos 5925845 to 5926574)
ctcgtcttggcaataggttagatctcttctccatgttatctccttgtatgatgatgatgacatgcatcaaagcatactgtttaaatattttggttgttttattaatggtgtctggtgggtggtgtgtcttcgtggacatgtttttctgctaacatatgcggaggacgttaaaaatatttctactgtgaaggttaagagcttgtcttctatcagaaggttgaaagatcaatatgcactgcattttgaattgaagtgtttgacacggtaattaattaacttgtagaccattgcatttgaagaaaatgctcctaatcgtgaccttaattagatttccaaaagatattatatgcttgattgtgataacatctcagattctgcacaaccaatggtatctgaaacaaaatatatcttgttgtattcttatgaccaaagaagggaaaaaagtggaatacatgacagggccataaagtttcaataaaaagtgtcatatggatttgcaagttggtataaagtgcaagaataattatgccaccgatcatggtattataaattattcatcatttcttatagttcattgcctgcttatattactgcttccttaagatgcaagtgatggataacttttaatgaatttttggtgtttgattttgaaattgaagctaaatattgtgtgttttttttttttaattaattaggtggtccaagattgcagctagattgcctggaagga

SEQ ID NO: 58606 - DNA, 858 bp, Populus trichocarpa
  Intron number 1 from transcript POPTR_0010s12440.1 (locus POPTR_0010s12440) derived from phytozome v7.0 (chr-ID scaf fold_10; pos 12479162 to 12480019 reverse strand)
ggtaagatcactgtgcatttacttctttgccgtacgtgtttaattgattatatggcctgttttgatatcataattacttaactgcaggattcctagttttttttttttatatatatatatatatatatacacatgtatttcttttctcttgttctttttggtgaattgaagtttttagttaattacatagagtctccttttgtttataatcatgcttactgcttatgagggttctaaaagcaatttcttgcctctgagataatcaaaatccccaggaaaaaaaaaatatttcgacgtggatggttgacgaactatgttggcgaactatgttaaaaccctgatgaatagaagaggaaatatataaaaacatccacttcccggtctgaaatccaacgtcttggagccgcatttaatatatatatataggactactgttctttgttttgttggctatcctttttgcatcataggctatccttttctgcatcataggctatccttttctgatgatactatgtataaattcataaaaaaatcacaaagttgttcgttttccaccacaaaaattcgatgcgccaaatacaggcatcatgatacaatgctactattcgggatttggaagagtcactaggagtttttttctttttctttttctgaaaaaagaaccaaattcgatgcttattagaatgctcctagttggcaccgtccccagtgtctgctagaattgttgcctcatctgaataggccttctctcatactttattttttctaaaaaagcaaaaacccattgcattgctgtattcttgactatctttggtggcagaaattccacagagacctcccccctacaccagtgta

SEQ ID NO: 58607 - DNA, 244 bp, Populus trichocarpa
  Intron number 2 from transcript POPTR_0001s34750.1 (locus POPTR_0001s34750) derived from phytozome v7.0 (chr-ID scaf fold_1; pos 32986907 to 32987150 reverse strand)
aagacttcaaggagaaggtaattaattttcaaaaaaatgctcttttccaccaattccttttttaaagaatttaatttgctcctttttagcaaaagaaacaaaaataatcaattcatttgttaaggggaaaaaaaaaaaaactaatcctagcacaatccccgatttagttgtacagagaagaacgttatttaattttgaatctggtgaagcaggctgttttttccaaatctgtggtgcctgcatc

SEQ ID NO: 58608 - DNA, 801 bp, Populus trichocarpa
  Intron number 2 from transcript POPTR_0001s38950.1 (locus POPTR_0001s38950) derived from phytozome v7.0 (chr-ID scaf fold_1; pos 38199640 to 38200440 reverse strand)
atctccagactcttaatcaaaatcttcagtcggtgagtaaccattatagattttttggtgttgacatatgttaggacatgattattgcacacttttgagtcatccatgccagatgtgatacctgctgaattttcatatcgagctttatatcagttgatggtgttttatggtttgttgactctgggaacacaaatgtggttttgcttgaaaatgctatctagcattgctgtgtttgtctgtggctgtggtagttgtctttgcatgtaacttatttcactgggaatcgcaatatgatttatttgaatgttaggacaatgcttaatctctgaatagttaatatttgcttgtagtaggataaggtgccactagatattttttgtattttagaaaatagttgtcagggcacttacaccatagtagatctatgcagaataaactcttacaaatatattaaccattgttcagctgattgaccactacaaatggtctgagttgatataagttggcatagcaggtagtcggtaagaatttaaagtcggcaccatgtccacactgtggtacaagtaaacatggttattttggcacaagatgagctaacaaaaaagggtcactacataaggatttttacctgcttccgtattctgctattgtctgttttctattatctgttgccctttatatagctgaattgtgtaccattttgcaccaaatcagaatagtttctttcgttccttatatccagttcctgtatttctgatgaagattctctcgtagattgttggtgcagaaaatccagttttg

SEQ ID NO: 58609 - DNA, 663 bp, Populus trichocarpa
  Intron number 1 from transcript POPTR_0010s03990.1 (locus POPTR_0010s03990) derived from phytozome v7.0 (chr-ID scaf fold_10; pos 4791272 to 4791934)
ccttaaatcagattcatcagcatcttccaagtaaggtgacaagtcttttacattaaaagtagctgaaacattgtactctccaagaaggtgaaccttctaagcattatcattcacacttttgatagcccaaaatggtctatcaactctcggcattaatttggaattttgattggttaggaatatgcctttgctaagatgaatcaaaacaagatctcccgactcaaatctgaccattttcttccctttattaatatgtttggcgtaatttgttgtcttttccttaatatgagattgaacctgtccagggagttttttcatcatttatgcctttttaaccctacccatagaagtcctctcattaatcataataggcaccagatcaataggaacacaagggttaaaaccatacattaggataagaatcaatgactaaaaagaagtctataaataaaaagggaactagataacagaactcgtacaacaacttatggtttgtgttacattgccttattgaacttcaatcgatatgaaatcttaacccaacatttaacaaaatgtctggaaactctaggtaaatttttattctgatctaaatgtcaggatgagatttacgtcttttgttgtaaaactagacaattaggaacatcacaacaaaaaccgagt

SEQ ID NO: 58610 - DNA, 377 bp, Populus trichocarpa
  Intron number 3 from transcript POPTR_0001s20650.1 (locus POPTR_0001s20650) derived from phytozome v7.0 (chr-ID scaf fold_1; pos 18658383 to 18658759 reverse strand)
gtattaggtaagtacttgtctttagtcttcattaaattactacatctatatatattcagttttttattgctgctaatttatgatctttttatacataaaatttggagaatgtcattgcccgttttcaaacaaattcaaaaaatattctttaaaaaaaaaggaaaaaaaaacgaatgggatcaagtggatagttttctccaagacatcatcccatgaattgtagaataactaaattgcatgagatcacttttcaaatgggatctgttcataggataatattttttagaaaaaaactccaaacgcgattatcagcagtaacctcagtatttttgttgctcaacttcgaaacagcattgggagttttggtgggggtggaa

SEQ ID NO: 58611 - DNA, 637 bp, Populus trichocarpa
  Intron number 1 from transcript POPTR_0001s18910.1 (locus POPTR_0001s18910) derived from phytozome v7.0 (chr-ID scaf fold_1; pos 16088192 to 16088828)
tccgagtgaaggaggttgagtacattcaagtagaggtaggtcccttttaaattctttaagttcttatttttgtacattatgtttattcatcttttgttctctctatttcttcaatttattttaagcttgtttatattcagctgagggtgtgtttatttgtgtttagcttgaatatatctagttagtgatgttgacttcaaaattgttgaagcagtgttagtccatctataactttacttccaccacagaggacctgtaatctttgtggaatatttcaaggttatatggtttgtttgacaagtgggttgtttgctagacatatgccttctgtcatacctttaattctgaggcagtggtggacactggagcaagcttttcaatacatttttaaattttgttgagtgtggatttatttattttcattttcaaatttctacatatttcttttattattattttatttgttttttgaagaagatggttttcctgctggaatctttgtctaataggtgtaccataaaaatctcaataaaagattccttaataagtgattcttgacgatagatttaaatttctttttttgtttgaatacatatatacaggtgaagataataaagtgtctagtgaaaaacattgt

SEQ ID NO: 58612 - DNA, 822 bp, Populus trichocarpa
  Intron number 2 from transcript POPTR_0001s05610.1 (locus POPTR_0001s05610) derived from phytozome v7.0 (chr-ID scaf fold_1; pos 4330004 to 4330825)
gcatttcttgttcttcataaatttgagaataagaggtaaacaaaaatctctcccaactcttcttctcttcccaatttcttcaggtttttgtataggatgtgtttgcacttcagcttagatatcatgtctacttgtacttaggaaggggtcagtagaagaactctccctcgcaagttaggggaaggggtaggactcattttgagtcctgtcttgctacactaagaaccagcaaggagagagagagagagagagagagagagaggaggaggaggaggtagttgggaaggataaaggactagaattgatatttttgacctaatattatgcaagcttttctctctaaactagagagctgaatgttactgaggattctttaggagggttaataaatgccaaataaagttcttagcactgtcctttgagtgataattgaaaggatcggtttcttgtttatgaagtgtgattaggcccacatatgccatttatttcctcctgctgttattattacagaatcaatatgcttttgccatatacagctgttttcagaaacctgacatgacgttgatccagcttagccaagttattttggaagatttaggcagtgtgtggttaatattctggaacaaaaacacggggatagttgggacagaaaagacatatcttcttcgtatattccgtcactttatttttatatcttcctccttgttgcttcaaccaaatacgttttttttttttttggttgtaaaacacaaaccaaactgtcagaaaattaattttggtttcagtacatttttaaacgaaatctatctgtattctttaggt

SEQ ID NO: 58613 - DNA, 511 bp, Populus trichocarpa
  Intron number 1 from transcript POPTR_0010s23280.3 (locus POPTR_0010s23280) derived from phytozome v7.0 (chr-ID scaf fold_10; pos 19885201 to 19885711 reverse strand)
aaattaaagaagcagcaaaaactttctttctctacgtacgtaagactttttactctaagaaccctctttgtttggttccttagaaagtcgaggaatcttgataacgtctttttcttcgcagtttgcgaatcatcctttgtgttcgttctctttttttcactgtaaagtatgttaaacgttttgttgcctagacaggaaaatagaacctcttacatagaaaggaaactccattacttttgcctttcgttttctgtatttcctatacaacgaaagatgactagaaggcggagtagactcccttttgaatatttcaaacgcatattgccttgaaaattatattaatttccaaacttgcttacattctcaaatttagattttctttcggatggtcattctgcgtttgctttttcatgcgtttatttctgatttatgtttccaagattttgttaaccttaacagtttttatttccttttaggttattcagtaaaaaaaaaaaaacttgtcagaaca

SEQ ID NO: 58614 - DNA, 766 bp, Populus trichocarpa
  Intron number 3 from transcript POPTR_0001s44520.1 (locus POPTR_0001s44520) derived from phytozome v7.0 (chr-ID scaf fold_1; pos 44917755 to 44918520 reverse strand)
gagagttcttacgtattgatttcaatcttaggtaattttatgttttttatttttcattatttaaatcttgcccatgtttcactctctgcataggaattctttccattgaattaaagttgtttggattgagcatatgattgtttcattttaagctgaggtctagaagagtaatattattttgggatttaccctcgtacaaatgcataccaggagttgcgtcgctgcatttggtgcacagtagataaacaggatgagtatcatttctttgacctatggtgaagatgttttttgtttttcgataagtagaggggagttggtattatgtacatagctgattgcagtgtccggacatggtgatacctagttaatgtagtgtttagcttttgggattttgtcaggatttgtgatgttaggctgcagttgttgttcaagtgacaatttttttttcaacttcttttgtttcagtttcatctaagaggtctggttttatattgcccctcatgtgcttaactttgaacttgacctataggtgtgaacctagtttcgactgtcaatctgtttttgtttcctcttcaaagcttttaggtttgtggctgatttttttcgctgtaatgcttttgtttcctcgtcaaagcttcaaacctctaatgatgctgtaatgcttttcctatgtaaagttcttggctttacataagtaactgttaatcttgtattaaactagctgacagataaattttctttttaattgtagctttccttcactctc

SEQ ID NO: 58615 - DNA, 701 bp, Populus trichocarpa
  Intron number 1 from transcript POPTR_0001s45570.1 (locus POPTR_0001s45570) derived from phytozome v7.0 (chr-ID scaf fold_1; pos 46074976 to 46075676 reverse strand)
cgagaaaaacggcttttttgcggtacaaaaattatataattgcatacattcttcataactttcgaagtgtttattcttaaattaactccttttttctgttaaaattagtttaatggatgataagattaccaccactactagctagaaagcaaaaaagataccaccacacctagctaaccttacacaggaaatcaactactactagctagccttccacaagaaagcaaaaaagataccatcacacctagctaaccttccacaagaaagcaaaaaaagatggcaaccggcaataggtgttaaataatacaaggacagaaaaaaaacaagctgcagacaacaactaccatctagctagccttccataagaaagaaaaaaagatatactactactactagcttcaaggaaatacacctagctagccttcaataagaggatggcaaccagcaatagccaataggtgtcgaccaaataaggacagcagaaaacaagctgcagacaaccagcgataataataacataagccccgactttgactttgattatcttgtttgccactcctcacaattcataatatattcttcgtgcagttaaaatctccttttgttgtaattcgatatattataattcagatggtgcatatgatatgctggaatgttataattctaacattaaatgctacaccatgatcaggtcaagaacc

SEQ ID NO: 58616 - DNA, 363 bp, Populus trichocarpa
  Intron number 2 from transcript POPTR_0001s07660.1 (locus POPTR_0001s07660) derived from phytozome v7.0 (chr-ID scaf fold_1; pos 5796363 to 5796725 reverse strand)
ctggagggctgtcctgtaaggtaaagaaagttttcttaatcttcatctgattgaaaccattataagggaattcattaaaatctaaaaaacacagggattggaggttgacacaaaaaggtaagatcttcaggtttaactctgtaatcaaagatatcttacatgaaaggcaaggttggcactttgacggggtaggttttctgggttatttcttttttttttcagtgttcaaacttagtctaacgttccctctttcccctttacattcagaattgtggaattcacattctgatattagtgtggcatatttacatttttattcatcgttgcaattaggttcttgacaaggaagcttttcagaagcaa

SEQ ID NO: 58617 - DNA, 265 bp, Populus trichocarpa
  Intron number 3 from transcript POPTR_0007s12900.1 (locus POPTR_0007s12900) derived from phytozome v7.0 (chr-ID scaf fold_7; pos 13104734 to 13104998 reverse strand)
gagctcgataatcttttgaaggaagaggtatttgccagttttaagtttctttgatgttatgttttgtttgaaaacaatggcctttatttgtttttctattaatgcaatgtgtttctcatgtcttgctcttgttctttttttttttcactcttttgttcatttgtttttttcttttcttattcatctgctcttttcttgtgaatcctctaatttacttgttcatctgtcagaggctatcaggagcatctctactaatatttgcaaa

SEQ ID NO: 58618 - DNA, 747 bp, Populus trichocarpa
  Intron number 1 from transcript POPTR_0001s02380.1 (locus POPTR_0001s02380) derived from phytozome v7.0 (chr-ID scaf fold_1; pos 1796031 to 1796777)
aagatttcttcaacgctcatattagccccttacaggttactggagttttttcttgctttcattcttcgtcccccccccccccctttactatatacctttgcaattgatttagaagaaagatgcctttcaatggcattgttctttctatgtggtggatgcgaatttccgttttcttagagagattaaagctggaaaaacaaaataaattattataatttaagaaatgaaaacgatcctcttttttccccaaactgtttttttttctttctttctagcatctacctagaattaatagaataataggcgatatcatcttcttcgaatagatccacaaaaatcaaagcacgtcaagcgtgaagtaatggaaatttctttggtcttttgttcatcaatataaagaaacggagggaattgttgaagggctcgaggacagttcctgcttcttgtcccctccccaacacatatttaatatcaatcatataattttcttttttttttcaaaattgtaaatttactactaaaatgttaatatactaaacttaattatgaagttcctaaagtttatttcgaaataaacagcgtttgtttcagtgactctaaagaaagaataacctttatctacagctagcgtgtgaagcatagaataataaagttgattagatctcctctaccatgcgatatcttctttatgccttatctttatttttatttttattttcttttgcttttttatcgtttacagtcagg

SEQ ID NO: 58619 - DNA, 392 bp, Populus trichocarpa
  Intron number 1 from transcript POPTR_0001s14280.1 (locus POPTR_0001s14280) derived from phytozome v7.0 (chr-ID scaf fold_1; pos 11231011 to 11231402)
cttcttcttctcacaattttgaatccactctttctgtaagtttcaagaatttgatcgctactagatccagatgataatttggttgtttccgatttagttgctttattgcacctgtttttttcagaagaatctcagctgctagttagatcatgcaagttgaaggatggatttgtaatttaggattttatgaaatctgttgccttatgttcttttttatcagtaatctttttgaatttattcttgtgtctggcttcgtttcttaatataagttggattttcatgactttaattaatttctttatataaatcggagcagtgttttttttttatatataaaaaaatggattttgaaatcaggcatccgcttgtttggctggagatagcgctgcgta

SEQ ID NO: 58620 - DNA, 969 bp, Populus trichocarpa
  Intron number 1 from transcript POPTR_0007s15350.1 (locus POPTR_0007s15350) derived from phytozome v7.0 (chr-ID scaf fold_7; pos 14918988 to 14919956)
gtggtggatctattgaatcgcgtgacctctgccctctgtcgtgtatgcaatgtgagtcatcttaaaaacccggactgctttcccaaatattcaatgccccttgtaagatcttgttgggctttctctttgctgttgccatagaacaactggtgttgaatatcatctctgttgcaccccccgcgcttcttgtctctcgtctattgttgctttgtttgtgatgcatttgttgatggattttttacatgtgagagcttcgaagtcttgcagtgaaaatagcgcctagcttctgattttgagtatctacctgcaataataatctgtttgatgatttgaactactaggaaaagcggagttaatctgtggggtattataatggtctttgatccatgggccaagctccttcacatagttgaatgcaaatcatattttgcttgagcaacttaaaaagctttgcacagtgcattcttattgtttatcctctgccgaccatgcttaataaacttgttgaaattgtcccaattcatgcctgtgctggctgctggcaggcatgtttcaactgctcctagacattgtttgttcggtactattttaatcctgttagtatctgtgaaaacacaaattttcaccaacgagaaccctaaatccttgttgctaatgtacttctttgccaatcatgttagtgtgtagttcttttctggaaatgcttgttccatgccacttagttcttttctggaaatgcctgttccatgtcacttggtgattgcacctttttcagcatttagtgattgcatctttgtctatgccaccttagaggaatctctttttggagtgtgagtatgtacctgctttaaattaattaacagcatctgactagtgaaaacaaacactgtaccatcctgcatcagactggtctaatttttctattgtatgatggtcctacaggatccgcctgaggactctgttgttacc

SEQ ID NO: 58621 - DNA, 464 bp, Populus trichocarpa
  Intron number 1 from transcript POPTR_0002s03550.1 (locus POPTR_0002s03550) derived from phytozome v7.0 (chr-ID scaf fold_2; pos 2213135 to 2213598 reverse strand)
ggtttttatgtttttctctctatttggcctttttaattattatttttttcattttcttcgatttgtttttattactcggttcagctctttttccctgcacactattaatgaaataaataaaatttacaggaggtttccgttaagcgattgggccttgcttgatagctatgatataaagcccggcaagtgaaattcaataagcacgactccaaaacaattggagtcattttgtaatcgatataaattgtgatccttggagagcagctgagtgtcagggaccattttgtaatttaataatggatcaaaacccaaatttaccctccaaagtctcggctacatcccactctaccctcacagtatcatttttcttaaaaaccccacagacaaacaccgagctaaatttctctttcctatcgcagtgaaaccaacgaacaataaccacttgatcaaacaaggagtaggag

SEQ ID NO: 58622 - DNA, 628 bp, Populus trichocarpa
  Intron number 2 from transcript POPTR_0010s13760.1 (locus POPTR_0010s13760) derived from phytozome v7.0 (chr-ID scaf fold_10; pos 13506155 to 13506782)
ctgacctggttgattggttcattcctcttgtcaaggtcagacaacttccttttgctgagtttgtaataatgctaattccatatgatttaattaattgcatctacctgcccagcataatggtttttcatttttttttcttaaaaaccctgttcgtctttgctagattgttatatttacttcggttactcatgcctgtcctattcatcacatattgctatttctcatcttagtgagagttaccttttattttgctttttttttttgttgctcttccaaagatacgaagattacagaaaaacgaaaaaaagagacaaaattggaaactaattagtttgaatgaattgcagtatggaacgaccatttgattcttccatagttccaatttattcaacttatatcctaaatgtgcatttactctgtggcctgctatggcacttgtatttgtgtttgtatgcatgtttgggaaagagagatttcactcatgttttgaacccccgaggagtgtaatatactgtgattttggatgtgtcctatttgtgttaactactgatttactttattctcctgctcttgcctaccctcattaccttattgttaaattttatctccagagactggcagctgggga

SEQ ID NO: 58623 - DNA, 630 bp, Populus trichocarpa
  Intron number 1 from transcript POPTR_0002s17220.1 (locus POPTR_0002s17220) derived from phytozome v7.0 (chr-ID scaf fold_2; pos 13005871 to 13006500 reverse strand)
aagccttgccttccattgccgtcgttggtggccaggtaccatctctaatccaatctattctaactactaataataatttcagctcttcatttcaatgaatccacccaccgctttcttgtttatattctaaattggatcattcatcttcttctttttttcatgtggtcatattggcggttgtttgatttttatttcttgaatcacgttattgtttatttctctgatttggtttgattgctttgcgttttagtttgctattcaagtaatatatccatcaaaataattgtttttaattctaccgtgatcattttctttatttttcttctttttggttattttgaaacattagctttacacatagatttttttttcataattgaatgcaaatcagacgaaacctataattactatcaattttaagatgtttgggttttttatttttttaagtgttcattttttaataaagtgatgtttttttatttgatcagcttaaatgcgcactacttccacaaaatcttttcaactatttatttggaatttctacccttttgaactatttgttatttaatcatctaaacgtgttaatggttcatagagttccgggaaatcgtccgtgctggagagcattgt

SEQ ID NO: 58624 - DNA, 716 bp, Populus trichocarpa
  Intron number 5 from transcript POPTR_0001s32530.1 (locus POPTR_0001s32530) derived from phytozome v7.0 (chr-ID scaf fold_1; pos 30842557 to 30843272)
tgaagtgttcgttggatttaatttcttcacagcgggtaatttggaaatctttgagctatattgttttaatatatttttatgcctgatttaatggaaatgacagcaattgataggtttttgttgaattgatttgaatttagactttttgatactttacaagtgcttgttgtgaaacaagtgacttttattgttatgtgctttctttttgttcgcggagaaaagattcgctgataataatgttgtggattgtatgcttatgcttaattttatggaggtaaaggccacgataatgactgcaaaatgtttgatgacataaaatttttgatgatacaaaggggttttcaacacaactaattgtagagtaaatattgtctggttaataaataaattagtcttccttattatgtgggattttctattcgtttttgaatggatagtttggacttttgtggaaattagtggatatcatgtaccagaaaaggtgaaattaaatctaaagactaagggggggaatgacaaaaattcactgcaactctgactgtgtaagtgaaacattatccttgatggtgttaaacaagtttcttcagcaacagttttactgtgtaattccatgtcttctatcacttcacttttcagattatctgaagaactaatcacaacccttagcatctcatttttacccaccttttggtaggatcgagagaaagaaaaaggag

SEQ ID NO: 58625 - DNA, 658 bp, Populus trichocarpa
  Intron number 1 from transcript POPTR_0007s02630.1 (locus POPTR_0007s02630) derived from phytozome v7.0 (chr-ID scaf fold_7; pos 1546923 to 1547580)
tcaagatctcaaatctcttctcttttaataccctggttggtctttcaatcccctttttttctttttttcagtttttgcttcgatctgattgggattttttttcttctgattaatgagttttcagggtttagtgtatttgtaaatgtaactgaaatcgtgggatgtggtttgattgttgaaaatattgataattaatggcgtgtgattttagggtaatttaattaattcttggtttaaatagggtaaagattgaagcttttggttgtagtaggggttgagttttgttgaatttaataattttttcttgcttaaaaagggtttgttttctttttctttttttgttcaattgtttctaattagttgattggtttaatttgtaattctttttattttttattttttctcttgatgggattttttcttctatcctcatttgttcttccttttgagataatgttgaagatttaacgatgttattgtgaaaattttatttgaagtattgaaatttcatcaaatgtatattaacatagagattatttcttattttaagaaattagaaaattaaaagaatagttttatttgtggtattgaagtgtactcacacgggatatatttggtatcaggattcacgatcagttggggctgttgcggggcttgc

SEQ ID NO: 58626 - DNA, 582 bp, Populus trichocarpa
  Intron number 1 from transcript POPTR_0010s17010.1 (locus POPTR_0010s17010) derived from phytozome v7.0 (chr-ID scaf fold_10; pos 15766600 to 15767181)
gatcggaaacattgaagttggttggtgtgcttgtccattaaaagtatgcccaaattccagtgccaatcatgcacacttgttagtaaacaaattatcataattataacaatttcaggtgacatcttggacaccacgagtaaaaacaagacaattccagttggttgtgtacttcccttggataaacatttttcttcttctccacttcccctccttacatcctatggtttcctttattagggcaaattaattaatttaagactaaaagcacagttggttctgttatctccaacacatcacaataaccagccacgcataggtttccttttctccctcttgtttcttttgactttcaaacacctcctttatatatatatatatatatatatatatatatatatatacccccaaatgaacggcgagtgtttaaattttgaaaacccgatcctcaatccaataatctcctcgtttcttcttgggattccgtcagtacccgcttattttatttatttatttattactccccttcaaaattgcttcatttatttttatgtgatttgattgtgcagaaacttcgattatacg

SEQ ID NO: 58627 - DNA, 265 bp, Populus trichocarpa
  Intron number 1 from transcript POPTR_0001s23370.1 (locus POPTR_0001s23370) derived from phytozome v7.0 (chr-ID scaf fold_1; pos 22702122 to 22702386)
aaaatattagaggtcgatttgtagtgactcttcaggtaaacgtgtttggtattgtgatgcacgatgttttttaaaaatgtttttcaattaagatcatgttaaaaaaaatgttttttcatatttgtttttattcttgatgttagaaccatccagaaaacctaaaaaaaacatcaattatttttcgagcgaaaaataatttgaggccatcaatgtcttctttcatttccttctttttcaatgactttactcttcatgtttgcagttg

SEQ ID NO: 58628 - DNA, 417 bp, Populus trichocarpa
  Intron number 1 from transcript POPTR_0001s05510.1 (locus POPTR_0001s05510) derived from phytozome v7.0 (chr-ID scaf fold_1; pos 4232785 to 4233201)
ggaaaggaagagaagggtccctaagcccataagaggtgaacccattccttcctcaagattttgggcatgagcaacagctgccttctgggactaaggcatggaagaaaccagcatctaaaattctaagccactttttctgtgtatgataaaaaaatggtacaggccttcatctggatgaggcctgtcatcttccactcccagagaaatggtgaaggcccgatactccaacatgtctagatgaaaattacttcctcttttgattacttttttatgtagactttcgagtaattgttatcagcttagcaattttctcccataaaattggattagatagacaaaggtaatggttctagagataattatcttcttcaatttattctagtgtcatcacaggcaatacaatttcagaacctcgtg

SEQ ID NO: 58629 - DNA, 552 bp, Populus trichocarpa
  Intron number 1 from transcript POPTR_0007s09790.1 (locus POPTR_0007s09790) derived from phytozome v7.0 (chr-ID scaf fold_7; pos 9312878 to 9313429)
cgtaaaaccaatcaggtttataacttttcttcttcaatttctacactatcattccttcttcctttctttctcttattgtaattgtataggctatgattacagtatctacagacgttggacacttggacatatgggcatgggccgaagggattttgaaaacaaataataataaccgattcggacaatgctatcgaatatgatatgggagtccgagcaacatagggtatacatgtataatccttaattgaatcattgatttccattggtgtatactaatgagatgggcacctatgttttttatacaaatatttggtttgattatctttatcacattacgtccttaatcagtaactttaatttgtcatgttggtgaaccgcttaataatgcatcagtatttttttttttttttcccaatgtaatttgtggagcttgaaaatgaatgccttttgttttgtgaaagtgagatatatatgctcacttttcttttttcttgttttttctcttatattatattaggagaaattaaggattgctgttctggtttccaaagc

SEQ ID NO: 58630 - DNA, 531 bp, Populus trichocarpa
  Intron number 1 from transcript POPTR_0007s15130.1 (locus POPTR_0007s15130) derived from phytozome v7.0 (chr-ID scaf fold_7; pos 14768433 to 14768963)
gaaggaggtgccttcctcttcttcttctctatacgcaacaccccccccccttttttttttacttaatcgacaaaacaatacggaaataattatataaccatcttgaagatgattctgcaatcatcctggtggatcacttctttccatctgtagagagggtctcatgatgtgtgtgttttactcccttgtctgtcggagaaaggtgataacttaagccaaaatactcatgattggaagttggaaatagatatttgagttgtttcctctgaagttgttgagtgacctttcacaacaaaggaatagaaggaaccctagaagatcaggatggaaaagaaggttatatattacaatttccagccaccttgatctagcaaccgtggtttttgtgactcttatttcttgtcaaacacatatgtgctaattgctgttatttggggaatattttttatatacatgtacataatttagtctctgaaatgtgttttttgttattttttttccttcaggaaaggattttttgttacagcaata

SEQ ID NO: 58631 - DNA, 948 bp, Populus trichocarpa
  Intron number 1 from transcript POPTR_0007s04230.1 (locus POPTR_0007s04230) derived from phytozome v7.0 (chr-ID scaf fold_7; pos 2554205 to 2555152 reverse strand)
cacttcgacaacctcgtgttatctcggagatcttggtgagttttatcttctatgattcgtataaaagggtaattaacctgtttgcttcaatgacgagaaattccacctgcttccgaaaacctgcaatgaacataacagggaatatggtttcagtccatgtttatgccgtcacctatcaagcattagttataacaagatcatgagattacaccttcgtcgtttatatcatgttccaaacaccatgcaatttgcttagttttgtagaggaagttatagcaagaacattttaatacgtaggaaatttcttgcctccgattctaataacagtggcagtacagttacagcaacaaacttcattctagagagtttctgtatctggttctatcttatgcaacgatttgtagaatgcatgacataataacaaaggacgcaagtcatcaagccacagtttaggatttgtagttaacaactggaaatcttttgcggaatcatacttgccgtcattgtttgtgaaaaaagggtctaagctggacagttgggaaaaaacaataatctcatcttcaaacctgaattcactagaaaagatagtataaaaggcatgaaaagggccattcttttgatgtcaaagcctctcttttgcacccgctctgtattgtaccctcacgttcatatcatgcatctggcatatcagatttctcgaagagacccaagacacttggtatgatccttcaaatgtaaggtaaagtgtagagaaaatagaaggtaactgtgtttcatgtgggtacgagtctggaccaagtgggagcatgatagctaaaagctcatgaattctgttacaaatttcctttattgttgatcgatgttttgtctacgtatctactaataatatagatgtcctgtataatgttcacagggaggagtgatattgggcccatctgtacttgggcg

SEQ ID NO: 58632 - DNA, 763 bp, Populus trichocarpa
  Intron number 2 from transcript POPTR_0002s12730.1 (locus POPTR_0002s12730) derived from phytozome v7.0 (chr-ID scaf fold_2; pos 9481667 to 9482429 reverse strand)
tggaattgattatattacagtaatgcctgcccccccccccccccccctctctctctatatatatatatatcaatttgattcagatcattttcatataatacaattgtattgttctcgtttctcatcaaacgaggcaggtacttgagaatcatacatagtgttgttatttcgtaggtgtttatgcatatgtagctcccaggtaatttatagtgctaattacataaggacattttctagaatgaaggggggaaattatttaatagtttgtattgtatgtttttgcatctttgagacatggaaaacgggacttattttgtctatggtcgtctgctaataaccaaactatctgcaaagcgcgattcttgtaaaattcattggttaagttgtgaaaaacatgaatagcagtttcttcaaagagctgggggtgatctcttttcatcttttcgactgtaaagcaaaattcacacatgcagctgaagaatgctgctgatagagctaaacttttggtgttgaaaaaggtcatggttagatttggttggcattatctaataccatttaagacagattcagatatgtttctaaatataaaacttgattgtttgcattgttaaccttttaaacttcagaagtgagttggttgtcttcattggggttgggaattgtgattgtgatacatgttttccagccacatttgattgctaattctgtgggttttgtctttgttctgccaggttgggtatcatcctgattttgcggactcgcg

SEQ ID NO: 58633 - DNA, 549 bp, Populus trichocarpa
  Intron number 1 from transcript POPTR_0001s13830.1 (locus POPTR_0001s13830) derived from phytozome v7.0 (chr-ID scaf fold_1; pos 10904167 to 10904715)
cccccctcaagaagctgttctcaaagctatttctggtttgtctacttcttcttctttggccttttgggtatttgaattgaatttgtctggcattttaatttttaacatgataaactgcagccatttagttaaatggatttaagttccaattataattagactgacaattagtttgttagaaacaagggaatgtgatgtactgtaacctggggagtttgtttctctgttactacatttcttctgactgtcctatttaattttttttattattattattatattttaattcatgatagccaaatgtgttttcccaattatgtatttattgtattttattagtactgctattttggagagttccgggttaattgaatttgttgtgaagtttttatatgccaaaggttaatggatatcaatgctttcagctgattcttgttgtattccatttgttcttggtataatttgtgtgaagcatacagtcacgtattgatagagacttctgttgatgatacagaggtatcaaggacagaagggagggttggacaaacc

SEQ ID NO: 58634 - DNA, 519 bp, Populus trichocarpa
  Intron number 1 from transcript POPTR_0010s09250.1 (locus POPTR_0010s09250) derived from phytozome v7.0 (chr-ID scaf fold_10; pos 10110530 to 10111048 reverse strand)
tcacagtcggtgagtttaattttatatatttaatcaaacatacgcagagggggagagagagagagaataaagacaatatgtgagatttctttcttttttccttttggctctctttgagtctttgttttcttctctcttgataatatactaatccactctgctttgtctttttttgacgctctggttttatatctattttgataaaatcttgtttctggtttatttatatcgaacagatttgcaaaatttatttcagtatgatcttgttttgaggcctatacaccccctctctttttttctggttccgtcacacccccgactatcgattgaattatttattttcccgttctttactcttgaaacacacacgagcagagactctgtctctccttccttcacagtcactactacctgcgatcattacttataactatctcaaaaaatgaagcacccatttttcaactcttggggtctgttaatgcagcaggaggtatctccacgcacttcaggcagactctc

SEQ ID NO: 58635 - DNA, 981 bp, Populus trichocarpa; identical to SEQ ID NO: 58511
  Intron number 1 from transcript POPTR_0010s07300.1 (locus POPTR_0010s07300) derived from phytozome v7.0 (chr-ID scaf fold_10; pos 8413820 to 8414800)

SEQ ID NO: 58636 - DNA, 516 bp, Populus trichocarpa
  Intron number 1 from transcript POPTR_0001s43640.1 (locus POPTR_0001s43640) derived from phytozome v7.0 (chr-ID scaf fold_1; pos 43863627 to 43864142)
aacaattttccaggtggttcagaacatatgtaagtactatgacaaactcatcatgtatcattgtacttaatttcattacagaattctcatttactgttcattgttgtagtttgttgctacccaattttgacccatgtttttgataaattttcaaaaaaaagcaaaaaaacaatgaaaaccccaaaaaatgcatttttgatatgtttgcatcgtttttagcattttcaatgtcatctcagaagaatttaaattttcaaaggtattttgaacacgttcaacttttaatgtgttaattttacaatcactgatttttcttgttgggtcaacattgatattgcttgctttcaaaaatacaaaaaaaaataattcaaaattgacaaaaaataaagaagttgagggaccaatgtgttttggggaccaagccactttgcctataaatagaggtcacaacacacgcaaaaggaggagaaaatttttacaggggaacaattttaagacagagaaatttagggcaac

SEQ ID NO: 58637 - DNA, 781 bp, Populus trichocarpa
  Intron number 1 from transcript POPTR_0007s13120.1 (locus POPTR_0007s13120) derived from phytozome v7.0 (chr-ID scaf fold_7; pos 13283245 to 13284025)
aagcttggtatggttattttgtgctcttaaagttagcttttttaagtttttctggggtttttgttttcatctacaatgtaaaaaaaatgtgtgcagtcattgtttttctttgtttttaagtgtcttattcctagtgtaaattctgttttcttttagtatttttcagccttttcaaagctaagttgataaatatatattgcgcgtgcgcgtgcgcgtgcgcgtgtcgatttaaagtgtaatattggagattacggtatacgggaagttagcatgaggtaaactatatgaggtttaattttgaaattttagcttcagtgatcatagatcgtggtgtgatcacgcatatgttggtgctttgtgaagttcaaggctggatgatcagatgctctgaggagaaatttgtgttattttctgaaaaatacgaggtttcttttttccatggaattgagcattacttttagtgtatgcaagcatagctagaagcttcttcaaggagattgtgccctttgaaaaattaggagttgtgtttattttgaaaatgattagttagtcatgaaaatcttgatgctttggttgcaagctgatgtggttgctggctgtttattttatttgatttcttgaattgttttgtgggttctgtatgtttgtttccatcgagtaaaaagtgatggcatcttatttggtatatcccccagcaagataaaatctgatagtagaatttggtttttctgtttactcattcataggacaccagaagaccctgaatatctatcagaagact

SEQ ID NO: 58638 - DNA, 732 bp, Populus trichocarpa
  Intron number 4 from transcript POPTR_0001s25300.1 (locus POPTR_0001s25300) derived from phytozome v7.0 (chr-ID scaf fold_1; pos 24470715 to 24471446)
cttctcgagagaggttgtttgagagaggtatgctttgtttgttttcctgcttaattttgttgtagatttctttccctcacatgcgtttctagtggttgtgcttgtttaattttttccaggcagatagaaaactttgaaagaaattagttactagtcagaagatgaaaattctgttgatgaataacgaggtttttctatcaaattttgtaaggttcctgatttctgatatgtgttcttttctgggttaattaaactggtaatgaagatatcttaaagtgatctagagttctgtattaaagtgagaaaaagagaagaaatcacaagcaaagaagctattttcaagttttttagatatgaacaataatccttgtatttactgcaatagctgcctctgtagagtgagaagccccagcaagaagtaattctacctcttaaaataatttaatcttaactgtcaaaaggaccacagtaaaataaccagtaaaagagataagacaggataagccttgattggaaaagaaaaactcaactagtagcctgccctatttgttttatcacctagctttcctcccttactacctcactgttcatgaccagaaaaactgtttgatgtcgaaggatctatgcattttcattcccttttgaacatctacagtggaattgcatgaatatcatgaactcttgtgtaatttttttggtattgtttaattcccttttatcttgcagcacgtg

SEQ ID NO: 58639 - DNA, 755 bp, Populus trichocarpa
  Intron number 4 from transcript POPTR_0001s16570.1 (locus POPTR_0001s16570) derived from phytozome v7.0 (chr-ID scaf fold_1; pos 13334696 to 13335450)
gcaagcagcaagaaaataaagatcaggtacgattctcccaaacacatgcattttgatgttgcagagacacagatagcttgttttggtacttgtttttctttaaattctgccaatttttgtttttcttaactagatcaagttgcaagtaaattacaggtcgaaagactatgtaaggtggaaattatcaaaatgcaccagcagcacatgatgttcttgaaatgaaccgtatgcaataattttttttctcccggcgtaaacaaatggaagtgcaattactttatgaagatttccaggatatcctgtgtctgattctgatcgatacatacgagaaaataaggtttccttacaataacgtgcttcgtttgttgaatgcacaaggccttgctctgctgcatgaagatgtaaaatgtcgattaagtggcagttgttggtattagcattgcaggcacgcccggccacgccttatcgaaatcgacctgatgcactttcatcaaagccagaggtggccgtttccaaaaaggctggttgttctcaaaaaaacgctttcattcttgtgcacgatgctaaccacatagaaaattgtctttcttcttgatgcaaaaaaaatgatctgttatgcaatgccttaaaaaatgagtcactaacccactaatcgaagcaacagatattataagaaaaccatgcaaactctttcatcaatctcagcatcacaatgcagctctctcttttctcattgtttgctatattccaaggga

SEQ ID NO: 58640 - DNA, 902 bp, Populus trichocarpa
  Intron number 1 from transcript POPTR_0010s10160.1 (locus POPTR_0010s10160) derived from phytozome v7.0 (chr-ID scaf fold_10; pos 10730204 to 10731105 reverse strand)
attttgacggtggggcccaagagagaagccaattggtatgttttctcgagatgcccttttggtttcgggggttttggggtttgtttaattttgtgaatttgggtgttttttggggcaacttggatactctgttggggattcatgtcacaagtttggaaatttggagtttttgaaggggaatttatttatttatttattttaggattttgtggtgtaaaggagaatttcgaggttagggattttggtgtcatgtcaattttgtgttttcttctctgcatatgtgaaattgcttcttgttatgtatggaaatattatggattatttaactaatattgcattccttttcaaccccaatattgtgattgtgtcaattaagttatgcagggtagagaattgttagggttaggtttctttgtggttgccagctaggattttgttttgtcatttttaatctttggactagatatgtatgtttggtgtctttgtaatggactatcaaagttgacagtatttattaaagatatacacgtttattgttgaaaagtcctgtggcttcccttttcttttctacaatggtctcactggtgtgttaccttgtttaaagactaacatgtggacgagttttggttttcttttctgatcttctgataggccttttattctagagttttataatctcttacattgagaaacaagacgtcaactttttattttcccaaactgtacagtgtttctttccaatggagatttgcctgttaactgctctagctgtttgaagttgatattgcaattgaagtctgtaattcatgtgttaatttgtcatttctgatctagcttctggaatatggatttaacataacacagcagggtaaccctgggatttccatcagaactgatttgat

SEQ ID NO: 58641 - DNA, 907 bp, Populus trichocarpa
  Intron number 1 from transcript POPTR_0001s41020.1 (locus POPTR_0001s41020) derived from phytozome v7.0 (chr-ID scaf fold_1; pos 40659021 to 40659927)
atactgtcttgaagttctctctatctctataacaggtttattctattttttgatttttttattaacaaaactaattatttacgctagttattgtctcttttcttgttcctgtctttctttaatttgttcttgtattggttcagctgtgtttgtgtgtgccatcatccacgccatggccgttacgctattctttttgtttttttttcttttctgttacagtattttctgggttcatttgtttctttcattgattcaatgattcaaatcctgaatttcctcttttgggatttgcttcttatttgtgtgatctctgtttttttttttttaaaaaaaaaagaagaattaatgaaagaatgaatgaataaataaaggtaggagttgatgtggtatttatgataacaaaaatgatttgagtggtttcttttttatcgattgtttcattgaagtgaacatggttgtcaaatgtgaatcaaatgtttttttttttttttttggaatttaggatctgtagtaacgttgcttgccaagattttagcattctagacagctgaataaaaaaaaacttttttagttgtgaatgacttgcttgataatgtatgcacctgattaaaaaatgtgaagaatttttagctaatttgtttgattcacttgttgatctttggtcgattgtattgatgcatcgtttgtctcttataattcttggtgtttcttttatatatataactgtttctttgtcttcctatgtctatgtggtggtattatattttatttctacatcatttgatgcgtattttgtaatttttttattggttttcgcaagctgcagtttctttgttaatggattgctctgttgtttttttgtgatttggcagcctagactggttaaaggccaggttttgggtttttt

SEQ ID NO: 58642 - DNA, 872 bp, Populus trichocarpa
  Intron number 1 from transcript POPTR_0010s23290.2 (locus POPTR_0010s23290) derived from phytozome v7.0 (chr-ID scaf fold_10; pos 19894026 to 19894897 reverse strand)
ctgctgtccctccacatcaagaaccactcaataatgtaagtaatatacaagcaagcatttaagtttcttctcttttttattgtaaatgtctgaatagtgatgtgttatgtgtccttttattggattttggattgattgatgagaaaattgaggaaaaaagaagaaaggtgaaatcttgagtgtcattgtttgtggttgtgatttagtttataaagttatattatttggttttgaattggctgttgagaaataaagggaggatatgcttatatatttaggtgtgaagttctgttatttgtgtccttttgttgctagaattcggaggaagtaaacccatgcctacattgcaaagattgaactttgggctttctgggctgtgctagtgtttgatgatttaattgtaattggttattgtgaattatttaggaacatggtggttttagtgaatgatttatcttttgttggctcaactttagcttcctgttggtttccttgataatggatgaaaagaagactgaggatttggttcttttttcattttttatggaaggataattcaactttagcaactagttattttgggttcaattcagtgaaattgtttgatttttgcatcgtcagatgctaacaacatcttgcctcaatttgttttgttttctgcagtttctttaaagtctaattagataatgtctcatattgattgtgctcttagatctgttccgtgttttgaaatctaagtatagcatatccatgtgataataaggtccataacctgtttttttaatgcaattttctataaatgaatttcttactttgtggttaactttggactgattgataattaatccttgatagagttcacaactgaggcg

SEQ ID NO: 58643 - DNA, 573 bp, Populus trichocarpa
  Intron number 1 from transcript POPTR_0001s37140.1 (locus POPTR_0001s37140) derived from phytozome v7.0 (chr-ID scaf fold_1; pos 35964136 to 35964708)
tgtgaaagcggtcatactggcatgcaatcggtcttttaattctaattgtggaaggattgtatctggtggaaggattgtatctgtaaaaagtacaaatagcatcatatgttggtcgttctatactgggcaaactatgtttttcccttatagatttgtcaatgtttcacctctaccctcacagtttaaaatttctgaatgctacacctatagtctgaagaaagttctaattttcccctttaatgctaaataactaacaaagaaactttttttcatttttttcttttttcgcactcattttccctctcaaatccccaatatgttataatatctcacaaaaacacaaaaaactaaaaattctcaaaccaaattcaaaaggtaagatatttaatggttaagggcaacattggaactttccaaaactagaagggtaacattcgaaaattttaaactatgagtagaagtgaaacattaatgaatctgcaggggcaagaagccaacaatgtttacctttttatattttatcatgtgtacttaactagagatcttgattcatgtcttcttctgtttgaaggt

SEQ ID NO: 58644 - DNA, 321 bp, Populus trichocarpa
  Intron number 2 from transcript POPTR_0010s08850.2 (locus POPTR_0010s08850) derived from phytozome v7.0 (chr-ID scaf fold_10; pos 9648714 to 9649034 reverse strand)
tgcagcacatcaaggcaattattacttccgaggaggttcgcggcttctgttttctttctttttctttgctttttaaattttgtgattttggaaattaaatcttttgattgctgaatgaatggatttttgggttttgggtttaggagatattattttatggtaggtataaattagtgatcagttgtgtttgatactatttgctcatgtttgaattcatacttcccccttcctttggggcaaaaaataataataaaaatcgtgcttgtagcttttggttgtttcttttaaatatggaacaggttttgcttcgagaccctttgg

SEQ ID NO: 58645 - DNA, 914 bp, Populus trichocarpa
  Intron number 1 from transcript POPTR_0001s14240.1 (locus POPTR_0001s14240) derived from phytozome v7.0 (chr-ID scaf fold_1; pos 11181262 to 11182175 reverse strand)
gtgggatctctgctcttaccaggtatatatacgtgtacacacacacacacataatgtatatgtatattcctttttcttgtcaaaaaacaagattagctcttcatttcctctgtctctatgtttgttttgtgtgtccttctgggctaagagaaacaaagctttccctgtcctttttctctcttcattatgttctggttaaaattctttagttagttttcattttttggttttgcaatcaaaatctcacctgcatcccttggtctctatatgggtatcttttggactaaaatctgatttcaactgtgaatttttttaaaccccaaaaattttgctacacgcagttctcttctatgatttttgtttcgcgaaacattctgtgcgaaaaaaataatggttactgtcgtgtaatgaacttcttttgaggcagtaattgagaatttttgatatactttgttaccgggtttgaaaatctcatgattattagaaaagaaagctacattatatggtattttaatggaattctgtcaaaggaaaaagattaattagcagaggttcctttttaaggtcttaattactctttttcaccattttggttctctgctgacttctctgtttcttgacacaactcctttaatgcccatttccacaaaactaaacagagttgctttctcttcattaatggagcacacatacttgacagagagagctggagagagagagagagagagagagagagagagagagagagagagagagagagggagggagggagggagggagggagggggggagggggggagagagagagagaccgtacaattccattgtttttacttttcccaacgacattttgggtttttgtttttgttgtatttacaggagtgtggaaacagagaaggtacagagctcaagca

SEQ ID NO: 58646 - DNA, 747 bp, Populus trichocarpa
  Intron number 1 from transcript POPTR_0010s16210.1 (locus POPTR_0010s16210) derived from phytozome v7.0 (chr-ID scaf fold_10; pos 15205819 to 15206565 reverse strand)
gcttgattgttcttctctcttctctggtaattaatttaattaattatttcacactctttgcatatcttttgcgtgctcctttttattcactttgcgtccttcaagtttctattatttattccttggaatgatctaaataagcttttattttaagctcacttaaagagttatctttcctagtatttgattgttggagattaaagatagctttttgttttttgtttttaatttttattgaattaaatatttaattggtgagtagatattttccattattcactttttttcttggggttttttgtatgaattggagagttttcttttcagtattttgtttctgtttgcgtgttttaggcttttcttttcaattaattcgagaagtttatttggtggacttacttatttagttgagtgttggcttggctcttctttgataattattgagatgccctgattttttttggggtgtaatcgacctgctgaattggtctctccttgtttcgaaattaataggcatatgtggtatgatttctatgctgtcttttctttgcgagaaagcaggaactgaaaaattgaagaatatattgctgcttgattttttttttttttttataattgctttgtgttatttcagtgttcaatatatgctagcttagtctcgtattgagttttggattggttcctacctacttggtcaatgcttaagatttgttatctatctatttcttcaggggtggcagtcttgga

SEQ ID NO: 58647 - DNA, 257 bp, Populus trichocarpa
  Intron number 1 from transcript POPTR_0007s13390.2 (locus POPTR_0007s13390) derived from phytozome v7.0 (chr-ID scaf fold_7; pos 13500664 to 13500920)
gattctggtaatttacaataatttttttttggagttgtctgggttaagtattctgttgggtttgatttaaaagttcagttaaagttataattttgattgaagagaacacgtgaaaggttttaacttataattctttattttggcttaatgtgattgtctgtgttatgatttagagctgtgcattagtcgtgctggacttggtttttgattctgatgtgttttaattgtttggttcagatttaaagagcttatcctca

SEQ ID NO: 58648 - DNA, 897 bp, Populus trichocarpa
  Intron number 2 from transcript POPTR_0010s11970.1 (locus POPTR_0010s11970) derived from phytozome v7.0 (chr-ID scaf fold_10; pos 12095271 to 12096167 reverse strand)
cacttactccacaaaaagttagaggtgaagtttgatctgtcagttatgcgaaagaatggcttgcattttgaaacttgatctgtcattaaaaactcgtgcgccttaaattttggatatataaaacaatttttaattggtagaacaaaatggcctggtgttgcatgagcttacttccttttggacttgtatttcatttttcagcaggggtgtaaattgttccattacttcttgaaaaagtttgtactcttgataaccatatcacagttgatgatgtgatgtgatgtgacaatgatcaagagatgtagtttaaaactttcacaaattcaataaggttctgttttggtatcaatcagttttgctgattgatttaagtattttttttaatttttgactcaaaggaaagtaataaatatgtttggctagaaataacctttgacttaatgtgaaaatttgtaacttattgattctaacctataataccttccttcttcagaaaagttgctctgagtcatttcttgccaaacacgcttctaacttaactcatttttgtcataagtgatctgtgataaataacttaaattttgaatcatgattcaaagtcaaagttactttttattagtcatgctaaacggactctaatttttaaccatgtctgtgcatgaaatgtgaaatatgaagttccgtttttaattaaaagtttttcaaggttactgaactatccattgttgttcttttgcatgcattcccacagtcagagacatttgatcaccacagtgtctgtcgaatgcaatactgttgtgcgtgtcctgctggacaacttaatttatgtctgatattttgtttttcatcccttttgcttaccattataagcaggtgccacacttgttgtttctggtg

SEQ ID NO: 58649 - DNA, 767 bp, Populus trichocarpa
  Intron number 1 from transcript POPTR_0010s23250.1 (locus POPTR_0010s23250) derived from phytozome v7.0 (chr-ID scaf fold_10; pos 19861607 to 19862373 reverse strand)
gtccgaggaggaaaagttttgctgacattcttcaggtagtggatttagtaatttgaaaatttgagcttatacaagaattagcttgtcaactgtttaataatactataagaattggtaactgaacatttgcgatttcatatttggttcagccatttgtccaagaaatcatgctgaaggggttttttctttttattatggaaactattgaagcctgttttggctatcaaggacaacatctttgtgctagttgcaacttttaaagttgaagactatgaatgaagcaaatttaatctagtaacaacttttattatcattaattaagcaaccattggtacttcagagaagtgtcaaatctgacttttaatcgattttaaagtttagcattgattaagcaacaatttttttgattaagaggagggacttgatggacaatgactttccatgcgatattttgtttttctctatttttaaagacacaatgccgagatgacattctaaaacaaaagatttgaagttcttttcatagaaaccatcttcatttttatgttccctatacttgaaaagcagttttagtgttgcccattgttattcaaccaatttagttggattcaactgacatgtacaccagcaaacgctaggtgatacattctgttatctcttttctatgataggtgttgcatttcatttcgctcgttttctacagttgacaaatggcattcttacatttttcaggaaggacttgatcagtccacttccataccaggtca

SEQ ID NO: 58650 - DNA, 741 bp, Populus trichocarpa
  Intron number 3 from transcript POPTR_0010s10300.1 (locus POPTR_0010s10300) derived from phytozome v7.0 (chr-ID scaf fold_10; pos 10845179 to 10845919 reverse strand)
tggccaggttataaaattaatcactagtattattttcatatgctgctatttacatgatctcttttctttccccatgttttgtactacagatttgttaccatttgcgaacaacatgcgtccgtgtttatggatttggttttttaacaagattttttctaaaactatcacagaggatggtcctaatcagagatactaatctgattgatccagaggaaggaaaatcccaagtaaaatttgatcaccatgtggatgaataggatttctggaaaactagaaatcggattagtgtaactttcctttgcctgttttccattatagacatacagaattgctgaatagtgaatcaaatcattttagtttctagtctttttcctgttcttcactttccttttccacataagttgcaaactggcatagttcaatgctacattgctaatcttccatagtttgttaagtactctgttgcctgatttcatcgtttacataaatcttggttgaattagaaatcgactgggaaaataaatcaggtggcatacttgtggctaagttgtagatcccaaactcatgcttgttattatgttggcggttagttgggtcatgagtaggtggtctatgatttctgtttgctcctctctgtagctctctctcttctccattttatatttgctgatgagctgacagattgtgttaactcatcttcaattctaggggcaatgctttctaacatgttcctcaaagcag

SEQ ID NO: 58651 - DNA, 490 bp, Populus trichocarpa
  Intron number 1 from transcript POPTR_0001s31990.1 (locus POPTR_0001s31990) derived from phytozome v7.0 (chr-ID scaf fold_1; pos 30426650 to 30427139)
gggcgcgcttgggtttattgccgcagatatctaaggtggcctgcttctattttatttgttttgtgtctgttttttccgtggcgtttgtgtttttttttttttttgatttgtgggaaatgaagaaaaagagaaaatgagtatgaaactgaaattagattctgctttgttattttgttgagaggaaatgctttctgtatcttggggtgggagatgatgaaaggtttgagattttgaaggttttttctgttcggttttgtttggaggtgttgcatgtgtaatctttgagatttgatgaaagtttgaatttgaaatgatcatacaaaataatggctgataatgtgaattgcctgatgaatttcgtatagtgacttgcttgcttaggcattgctctaactccagttcctggttatacatttctctgaacgggcattgcatgctttattgtttcatttttccagcccttctggacaacaatttatatcctgcaagg

SEQ ID NO: 58652 - DNA, 707 bp, Populus trichocarpa
  Intron number 1 from transcript POPTR_0010s07900.1 (locus POPTR_0010s07900) derived from phytozome v7.0 (chr-ID scaf fold_10; pos 8877224 to 8877930)
tctccgacttctccactccgctaactgccttttaggtacgactcgaaacaaaccttcttgcagtatatttaatttaacttatttttctattatctagactgaatactgttttgttctagaaacaaacttaatcaaggtgagtttagtgtaggaattttaagcaagtttttcgaaaggtgatttgattctttgttaaaacacatgcattagtgactaatattaggaataatctgtgtgttattttcagatttattggaagtatcttcattctccgttaaacctgtatgtatctggaagatttttgatataatgcccaacagtagttaatgtgttaggcttcatggatttttcgggtgtcccactgaaaaatagtatgataaatggatgcataatgttaggtgcctacctcagagttgttacttggtattgaacctgtaatctccctccctgttattgttttgtcccaatctgttgtcagaagggtttcaattgttaaaacacatggattagcgactaatacttgctttatggtggtgcatatctttcctctgggctcaggatagttatagagcgactgttttactaacagccagagtttcactggcttttctgcatgctgcacgattttcttacttcaaggcatgcgcttttttccatgctctcctagggctgcagaattcactgtttttagttagttcgtatcaggc

SEQ ID NO: 58653 - DNA, 743 bp, Populus trichocarpa
  Intron number 2 from transcript POPTR_0001s45710.1 (locus POPTR_0001s45710) derived from phytozome v7.0 (chr-ID scaf fold_1; pos 46267957 to 46268699 reverse strand)
caggttggtacttatacttcttagttcttgctctagttataattttgttggaacccatcgtgtattgtgtatttttcccattttgatcttgcttgatttgattggattttgacattaattgactatgaaaatcatgagtctgttccatgtcataaacttgtgaattttctcctttcaagttgaaacccatcgtgtattgtgtatttttcccattttgatcttgcttgatttgattggattttgacattaattgactatgaaaatcatgagtctgttccatgtcataaacttgtgaattttctcctttcaagttgaaagttccagtgtgcttttacatgcactttttttttggaactcctagtgatcccctggtattgatttagcgttgtacaacattagatactgaaatctaaatctttattggcgtattgggacgtaatttgctgctttccttaacaccacatttcagggattgacaaagtagcatcatccagcttgtgtttgtagttcagcgaaccagaagtatcatttgtcttataatctcatccatcatcatggtttcatattctagaagggaaaattgttatataatttaattgctaagattaaaaagaaaaccagaaccattagagagaaaagtactaagatgaagagagacatggaactcatcacataagcaataactaagattaattcattattcttcagagtttgccagcaggagaaggaagaagttctcatag

SEQ ID NO: 58654 - DNA, 757 bp, Populus trichocarpa
  Intron number 1 from transcript POPTR_0002s06040.1 (locus POPTR_0002s06040) derived from phytozome v7.0 (chr-ID scaf fold_2; pos 4024555 to 4025311 reverse strand)
aaagaggagacgactaagccaagtgagcttcttatagcatatctaacgggaaatattatattaaaaaaccaaatgaaaaaaatcacttttttaataatataaatatagcttttttgattatatacattctaatggtaaaaagctatttagaaaagtcaattatattttaatatattttatgttaaattaattttaatataattatataactaatttagatatattttatgttttagaactttagagatagttaaaaatctgatatgtattcagacagtaaacagttggaaattggacagtaacagttcaaagtcaaacagtaacagttggaaagtcaaacagtaacagttcaaagtcagacagtcaaacaataatagttggaaagtcaaacagtaacagttcaaagtcagacagtaacagttcaaagttaaacagtaacagtaaactttcacgtgaattctataattaaaaatataaaagatgtgagtcatacaaacacttgtatattgagatattgtttgcctcacgcattagagtgagaaaatgagttgttggtcaatggctataaaaataaccgttggccaacagttatttgtttttgccatttctacagtgaaatgtagaaatggctcttcacgtaataaataactaaaatagctgtctgtttgcctcacgcgttggagtgcagaaatgaagaaacaaaagctaaaagtataatttttaacatttggctctttatttggctttttcgttggag

SEQ ID NO: 58655 - DNA, 377 bp, Populus trichocarpa
  Intron number 1 from transcript POPTR_0001s06510.1 (locus POPTR_0001s06510) derived from phytozome v7.0 (chr-ID scaf fold_1; pos 5012214 to 5012590)
gtaggcatcggatattcgccttggtttgtcaaaaaatttagtgttatttttgaagaaaacaaaactcatttttctaatacatcctcttaggtttgactaatttccaagattttataatttgttcttggagttgtattctctcagacaatttttgaaacacaaaaaaaaacaaaacataggtgacgcctcaaaagttgccatggaggctctacggctactgccaaacctgtcgaccaacggtttcagtttcagatcgtcaattcctgtaacggcttgctttgtgtacgtgaatcaagtcatccattacttgttgtatcataaagatagcatacggatcatcgttatttcacgtattaaatcccattacaggagagtat

SEQ ID NO: 58656 - DNA, 800 bp, Populus trichocarpa
  Intron number 3 from transcript POPTR_0010s06460.1 (locus POPTR_0010s06460) derived from phytozome v7.0 (chr-ID scaf fold_10; pos 7823541 to 7824340 reverse strand)
tgcaggtttgatttatttattctcatttttatgcactttagaaaagtttggtgctgcttttatcggtgttcgcgaaggagaggcagagttatagagaagtaacaaatattggaaggtttagttgcatgcatgatgtcgctacgggttgaatttgaagacaatggtcaatctatagatgcgtgtttgggttacatatggtaaaaacaatgtcaagtgtccatcattaaattgtttatagtttagaatctaggttttgattcttgtttttcagtttttgacctcattcatacaacctaaatgtcagattatcttgattggatggttgggatgcatggtaacaatggaaaggttcttatgggatgttctttactgttttacctagttcaggctgttaaaatgcatggagcctgttagaaaaaaaagaggaaagtagctacagaaaacgttttaatggtgttctacaggtggtttgattcatgatggctgcttcaaaatagtcagaaagatcaccgtggcaggaaatggtgatcggtaaggttgcaagcagtgcttctcaggataaatcttaaatcagttgcttttagttggtgcaagtcttttttagtcggcctgtcaacaagtttagtagtgatgctcttagcatttgtgttagagcagctcccataatcatatattttggcttactccggttgtaaatgcaacaatgtgatattgctaaattaaagtgttgaaatccaatagttttgattgcatacagaaatgaacattgtcttgtttcatgctgatcagtaaacgtgaag

SEQ ID NO: 58657 - DNA, 748 bp, Populus trichocarpa
  Intron number 1 from transcript POPTR_0010s24140.1 (locus POPTR_0010s24140) derived from phytozome v7.0 (chr-ID scaf fold_10; pos 20500755 to 20501502)
aggtttctaggtactatgctttctttttttcatgccatataaattctaccgaatccttttgtgtaatatccttttccttttagtgtttcttattctagctagctacttcttgcattgctgatactggattaggaaaccctaatttggttttgtcatgaagtgaacaatatggattttttctttcttttcttttcattgtgtcaagggctcaagcttaatttgaatcaattttaattgcttatttgatattatcttctcttgagatcattttgtgatttccttttaatggccatttactggtttttgatatcataatctctttcctaattaagtttctgttatgaacttcctgggagcaattggggtattggaagtgctagctagctagtctcttcttcttcttcttcttccccctcctcctcctttgagagaggtagaaataactagttaatgaagttaaagagagacaagatcataacttaagtggtgggatcttcattaattacatgccaagaagaatgtttttgagtatttaatgctttaattactaaaaaatgatggtcaataaactaattaataaggatttgtttttgtgtgatagtattattagtatagacagacacggaatttctacctaggtttttctttactttgaaatttgtacttgtctgcctgtttttacatataatactgtttcttattctagtagtaatattgagtcattttgactttgctgataatcaggatc

SEQ ID NO: 58658 - DNA, 935 bp, Populus trichocarpa
  Intron number 1 from transcript POPTR_0001s27890.1 (locus POPTR_0001s27890) derived from phytozome v7.0 (chr-ID scaf fold_1; pos 26745998 to 26746932)
aaatcttgttgtatcttatcaacaacagcagagaggtaaaaaaccggttcttgggttttggtttcttaatttcttttctgggttttgtttctttttgtgtttctactttattttttgaagttcatacggttctttgtggtttggttctgttttaggtgtgatggtttttgatatggcttagataaaaatcacttactgggttttgatttttatcattcttttgagggtattgtttccttttgcttgatttttgtattttgatgggttctctagggtctggtctgatcatcacttctttctttggggtttggttcctttacaatatgttgatgtgtgtgattatggttttgttgtattacaatttggtttataacaggaagaaatttactttaaagagtcctgtactgaattttcaaactgggttttgatttctgcttctcttttgaggattatctcctttctttgcttattttattcgattatctcgaaatttaaagaggtctcttgcgggttgatagaatataaatgaaattactttaagatttatgtatcaaatttgcgtatttgatttctgattatctgcgtaaatgaaattactttcacatttctgttttgatattggtattatggatagattattggcatgaatgatttcatgaatatctttcagttctttctttgatgtattgattttttttttactgtcctataaggtcttctcctgaacttgaggctgatattatcgtattttaacgatgggtgtctttcatcaattttgtacaatcttttcaatcttcttgatgttcctcgttaagtctttgcctcgagttcttttgaaataccttttctgtgtaaaccttatattgtccgagtaattttatttttcttttcttttagaagaagcgaagcagaagacttttgtacctgcagaggga

SEQ ID NO: 58659 - DNA, 938 bp, Populus trichocarpa
  Intron number 1 from transcript POPTR_0001s09520.3 (locus POPTR_0001s09520) derived from phytozome v7.0 (chr-ID scaf fold_1; pos 7264942 to 7265879 reverse strand)
ctgacactgtaagtttatatattttcacgtacactgtaagtacaaagactaaagcttctgccttccaatttcgagcttgaatttatttatttctttttttgagcttaaaaggactgtctcttaagtgaattttgatgtttcaagagtttctatgtttctttcaagtgaatctggagatgggtttttaattttaagcatggttgtttcgtatattttgctctttagtttttttttttttgtttttgtttttttttggttagtttgtgatgttcaaaaagttaggacatttagatctggtgttgatagattatgttttgggttgctaaggttgagggggctatgttagtctgttttgaaaactggggcattgaagaacggatctaattcaataacagttgttgagtgcatgccaaggtctttgtggtagtgtgaaaatggtgtctttgtcttcttgaattttgttgaatttgacctggagtggactataactgtattagaattcaagattttctcttccagtgtggattagacattagttaggggataaaatgaggggccaaggtgataatttccacttgtaaaagaagcgcacaagaaactaagagttgcaaatcatacacgtggtatgaccacggtgatcagaggaatttattcatgaatttggaatcaactcaacaaggattcatgtcaagataagagttaaatcgttaaaattgtcataacagtcgatgcatacaggtacttaaaagtcatcatgcccacattttaatcatggagtttggttccacaaacaaacggggaattttccgccatgctgtttttactgattatggaattctgtgccttgtttttttcttttccattttgaatgtgattttagttctgcattttatgcttgggcaggtatctttgcatagctgctgataacgaaacgctaa

SEQ ID NO: 58660 - DNA, 568 bp, Populus trichocarpa
  Intron number 1 from transcript POPTR_0007s03180.1 (locus POPTR_0007s03180) derived from phytozome v7.0 (chr-ID scaf fold_7; pos 1834895 to 1835462 reverse strand)
ggaaatttgggattaggaagtaaagcattactctcttttttcaggctatatagtttattttttgaattgggaaaatagaaactttgtgttcaacttggttttgaaagtgatatctgattgacttgttgtattgcatatgtgcatgtgctgttgtttttattggtgtgaattgtggttggcaattgtgaaaagaagggatctttgagactgggaagtgcagtgtgttggatttaggggaatctgtgcttgctggaaatgctggtgccttctgattttcctggaatgtattagaaggtactggtacttcaaattagaaaggttgaaacattggatttttgaaaagatcagaactttacacttgaccttttcaattcttttttaaaatttctatgatccaaatgggaaataaaaagatttggcaagcgaaaaacataaactgacggtagttcttactgttttgtgtgattagcgagcaaactgtgatggagggaatgcaactttatatagattaagatttttcttttaaatgctgagaaattctctcctgccttgcagttgcgattaggca

SEQ ID NO: 58661 - DNA, 570 bp, Populus trichocarpa
  Intron number 2 from transcript POPTR_0001s12700.1 (locus POPTR_0001s12700) derived from phytozome v7.0 (chr-ID scaf fold_1; pos 9845647 to 9846216 reverse strand)
acagtatcttcttcttcactaatttgtagctgttatgcaaaaataaaaataaaaaagaaaccctaaagttggctgttttttttttaaaaaaacaaattcagtttcttttttgctctctgtgagtttaagttagttgattttgtcataactaattgggaggtttatagattcaaattcaacgcgatctatgtttttgaagctgcctgtatcatagtttacaccttaatttcattagatgtcattgtgctgcgcctctgtttttgacattgttgagtcttgttcttgtgggatattttgttcctgtgttataattagaagttaagagatatttttttatataaagttaatatcttcaaataacgaatatgagctaatatgattatgtgatacacattttatttatacagtaagtacattttaaaattttagcttttcacttctcttagcatgtctaatggtacttgaaatcgttttttggtgaaactcaaatttcactgtttcttcagaaatttgttgaatgtatgacattaagaaagttgttcatgattgtaaatttggttgcagatacgg

SEQ ID NO: 58662 - DNA, 908 bp, Populus trichocarpa
  Intron number 1 from transcript POPTR_0007s04470.1 (locus POPTR_0007s04470) derived from phytozome v7.0 (chr-ID scaf fold_7; pos 2764988 to 2765895 reverse strand)
tcatcaatcatttccaaatccagagaaagtaccaggtatcatcttcttttcttaccccttactctctcacacacatcacaacatttcaatggctgtagtttctgggttgtctttgcttctcctttaaattcaaccatccctgtttagtatgattatagcccaggtcaagttgatatgttatttagctgaaatcctttactgggtgcatgaaaaatctcttattattgattgattggtgtggataatgggttcttgtttgactattcctggatcttcttgattagcgatacctgcagttttcttgctttagcaattaaatttttttatgatattcttgtttgttgctattagttggtattttagaaatttgggtttggcttcctcttttctatagaaaagctgaatgacggctatgagaccttgcctttcaaagcttagaattagcttgaccagcatgtaatggaaaggtgtgtgcttttgagtatttgtgctattgcctgtgtgtgtgatcctaaaagcaaactggaaaactgaaatcaattgaagatttcaagataaatttcctttttcttcatggttgagtgaagatctggaaatgcgaaaagataatatgctgaattagtaactgggaattttgtaagagagacaacttcttgagatttaaagtgatggagggttttttagaaattcttgcctgtatttcattgacctgtactgatatggatatgattatggttaatctctttgagcttgttatttgatttggtggtaataactttgcttctttgatggtacttgcacattttatttttatttccttctatggaacaaaatatacaatcacttggtgaactttgcattgttttcagtttttcaagttggtgtgtagtagataacaatctaaagaa

SEQ ID NO: 58663 - DNA, 412 bp, Populus trichocarpa
  Intron number 1 from transcript POPTR_0007s09310.1 (locus POPTR_0007s09310) derived from phytozome v7.0 (chr-ID scaf fold_7; pos 8668117 to 8668528 reverse strand)
agcctggtgaacagaaatctgaaggtaattgcttttctatttcaagttttaaaattgggtttcgtagtgtttgttattttcttgttgatattatggtttatttgtttattgattgagtaattgaatttggttttattggtttgattgatacaaaactagtaaattttagttgtaatttggtgtaagttgtgaagaatatgtgatgtcaattctctcaatttctcacttaatgctgtttcgctgtatgttacataaaagtattgagaagtcggtggaagctgatgttacattgttttgttctatgtttttgcatgcgagcttcaagatcttgccgttcatagtgtttttttttcttttttgtgtgtttgaataaataggtaagcgcaagttgtttacgaaagaggaaaaggtt

SEQ ID NO: 58664 - DNA, 1007 bp, Populus trichocarpa
  Intron number 1 from transcript POPTR_0001s21065.1 (locus POPTR_0001s21065) derived from phytozome v7.0 (chr-ID scaf fold_1; pos 19360153 to 19361159)
atattataagatacttcaaagtcaaaaaagaaaaggtggggataaagcttgtattgtattgcatatagacaggggcagggccttttataggagggctggagctaaggtaacaaaaaaaatttaataatccactttccttttatcttttacatagcaaacctaaacactgcccactttcccttgcaacactaattaattagcagccattagctgcctacttaattgctagccagtaaatgcctaattaatttcgcttgcaacactaattaattagcagtcatttgccgcacttaatttcccttgcaacactaattaattagttatattttactgcaaacctatctaaatataaataattaattggttcacatgtcttctatgtaacttgaggttttagtgttttcttctcaacaatatacaattttatcttggattttgaagaagaatgtatacagagagccgcaagagtgtaaaatcatcaggtaagaatttataagccttgacttttcattttaaattcaatgtttcacatttattacagtagattgttagtggattaaaccatagactgtaccttagaaatagacagatgctaacacactagtactaataatttactggttatttcaaacttaagttctccaaatctcctagtagtctacatcaatagtttatccttgtatattctgcatgcatttcatgaatattctattgtggcattagtatcttttcatcttgcacctgacttccctaatcccttttacttgaatagattataaattataatggaaaatcaaggaagcaagaaggaaaaactatgtttgcattctttaaaccaaacgaacaaacatcaaccagtaaaggacattctccatccaatgttgatgtctcaaatcatagtgaacaaccccctttcaaatctcaaagagttgaaattgatgttaatactcttgaacgagatcctgggttacgaattccagtgtgaaaacatcctattaatcaataag

SEQ ID NO: 58665 - DNA, 404 bp, Populus trichocarpa
  Intron number 2 from transcript POPTR_0010s24840.1 (locus POPTR_0010s24840) derived from phytozome v7.0 (chr-ID scaf fold_10; pos 20836180 to 20836583)
ccacaggtaaattcagaattgctttttgtttaatgggttttatttagtttttgaaacccatgtatagtttgattagttttctttgaaaataaagatggcccagttgttttttcttttcatctattgaagattgtagagttatgtctattacagtgttaaggattatttaatattagttaactatgttgtacaaattaatgctgacaggagtcttatgttagtgatttgtcatgttagttcgaaagttgaagctgtctatattattgtaatgattagtgaaagattttattttgtggtacaataatgtatatgaagttagttttttttttttccccttcagaattttctttgtggatgcaggttgttaatggtgttttgtgtgactgtgaaatagggtggtattg

SEQ ID NO: 58666 - DNA, 817 bp, Populus trichocarpa
  Intron number 3 from transcript POPTR_0010s24840.1 (locus POPTR_0010s24840) derived from phytozome v7.0 (chr-ID scaf fold_10; pos 20836632 to 20837448)
aaacaggggttagctcggcggaagtccttgctgaggtttggctttttatgtccttttttatttccctgttttttggtctttaagccttgaggaattgattagcttatcttaagcaaatctttggaggagaaaatgtagtccttctttgaaagttgaaactaataaaaactattgaaatttaccaactttttgtctgatttacgctggctttgagatttctaaaagtttttttttttaattgtttgccaacatgttaggtttaaacttgttatcttccatggcactactgatttttttgagtaaaacttaagcctggtgtcttatggttgttcacgtgctgtacactgcacagatatgcaatcatcagtagcaagatctagtgagaaaaacattcccacccaagtattattcagccatgttgtcaatgcctctgaatgaggggggtctgattcatgaaagtggacgtggatttagttatcgtgaatgcttagtctcaatctggattcttgattataatgtgcactctagtgatttgctttgtaaattgttataccatgggatagccttgtaagaattgatggacacggttcgagatctatgcaatttgtatttgtttctcacattagctgtcactgcagatcgatcaaccatgcctttgttggagctaatatacttcctgttttcagcctttgcatccattcccgactctgcatgtttctgttcaaattacttagggagtggctactgtttcttgttgagcattcagtggtaggtttactaacttgattgaattttcagacgccttcttggttgacat

SEQ ID NO: 58667 - DNA, 638 bp, Populus trichocarpa
  Intron number 1 from transcript POPTR_0001s05560.1 (locus POPTR_0001s05560) derived from phytozome v7.0 (chr-ID scaf fold_1; pos 4268282 to 4268919 reverse strand)
ggccccgaattgcgagcttcggggtcattttgtaggttagtttctgtggtttttgctgatgatcatgaatttagtgtaaattatgttgttaacacgtttatctttttcacaaaaatctgaacattccaaataagggcccttgagacacttttgtgaagtacaaataatcgatatcacagttcttgttctgaaaagatcacctttttcaatgattcttcttgcctcccttctctgtagtttggctaaaagtaatatttatctaaattttgacttgttatggtacaagaagccaagaatatatatatatatatatatgtctactgttcatgggttttcttccttagtttcttggtaaacaccctctgcaaattattgccactgaaaagcttgtgatggtttaataagaaccatttaaagatgagtttatgataatccctaataatgtttttcttcttgattgcagaactaaggatatgcttttatctcgttatgataatttttgtgtaaaattggattcctttataatttaattttattttccattcttgtggtgttttgaaaatagtagtccatatagtttatgactaacaaatttgatttggcttgttgaagggcactacttgagtgcatcagcacag

SEQ ID NO: 58668 - DNA, 852 bp, Populus trichocarpa
  Intron number 1 from transcript POPTR_0002s24170.1 (locus POPTR_0002s24170) derived from phytozome v7.0 (chr-ID scaf fold_2; pos 21595165 to 21596016)
gcacttctcttctccaggtaccacctcctcctcctccctctttttttaaaaaattatacatggactgctgtgattagtcgtaataataatgatttcgttgctgttacttgatttggtttaatggggtttctaggttttggggcatgctgtatctgtgtagggtttttagtatttttattgcttgtttccttctgttttctttctaatctttttgtgttttcttaggttggttcttatgattatcattttgttgaaaccccagttgagcaagcattgaagagggttttgatttttgtgcattctggttttctctttaatgggcatggttgtgtgtttttttgcagcaccgagcattttctgctgtggatttagttatcttctgacctgatgataagttgcaatcatacgcaataacatgtttgatagagttctaagaactcggagtgggttcattttgctcaaatattgatgcttttagtactaaattggtacttttggctaattgatgctaatgttacctagcgattataggcattgtcttgatcatttgcaagtgaaaaatgctaaacaaattggttccttaaatagaaaagtgcaatagtcatgagttgaaaatgatttgataactttcgttataacgatttggctttgtccttttcttttgtttttggtataatttattggccttttctgggatttgttcttgcactgcacttgtctttattttcttcattcaggtactatgcgtccataaatataacaatttggtccaattattttcattgcatcgttattagggtatgttgttgacttctgtatgatggttgtttgtgatattttaccaggagaaac

SEQ ID NO: 58669 - DNA, 714 bp, Populus trichocarpa
  Intron number 1 from transcript POPTR_0001s21110.1 (locus POPTR_0001s21110) derived from phytozome v7.0 (chr-ID scaf fold_1; pos 19454512 to 19455225)
cggagctcaatactttactcgctgctcttaatacggtacgccatcaatgcatgtaaaacttgtaatcaatggggattaatgtgtttctggtattcttttccctgggtcagatttgtgaaggatgcgttcgtggtatttagccatggttgattttgatttttttaaaagatttgataattaatttgtaagcatatgcaaggaataattcttgtaatcaatagattttaccttcgttttttggcaagaagggcatcccaggttgaattttgctttagaagttaatatgtggttgtaggcgtaggggtagcttaactgtggatataattgcagcggattattctaaaggcctgtttggaaatgcacgactacaaacgccaaaagcatcattgataccattcctattcttaggtgaattttcttaaaaaaaaaaagaaatctgattttttttagtgtttttatatcaattttatgttataatgtgaaaaataatttttttaaaaaataaaaataataattttgatatattttcaattgaaatcactttaaaaaataactattacgatacactataagaaatcaatcctaggtcaagttttaaagcagcctttgtagtctaatataatttgaggagaggatagacgaggagggtctggtatttacattctctagtaaataaacaccttgttgtgtgtgcatgatcaggtatttgtgggt

SEQ ID NO: 58670 - DNA, 663 bp, Populus trichocarpa
  Intron number 1 from transcript POPTR_0002s00820.1 (locus POPTR_0002s00820) derived from phytozome v7.0 (chr-ID scaf fold_2; pos 382573 to 383235 reverse strand)
gcaactccccgttcatacttttcaggtgcatttctttctttctttttgctttttttttttcagattatgagtaaaaatttaggctttatttggaaattttttcttttttgcattaaattactgtagtggaataattttgctgtactacgagagaaacccaataaaaatttgtgtttgtttctattttagagtgtccaaatttgaaggtaatttttttattagtaatggcttggtttatgagataaatgggttgttgaagtttggatttttgagccaagtgtggttgagatggcttgatgtgacctcgcgttaccgtaatttgcataatcttgttctactcatgttgcccattttctaagaaaagcaaggtgaatcaagccagggagggacctacctgtgttgttgtggtaagaaaacaaagttaaatgctaatggttgaagatcatatgagtggatattgattagtagtgttttgcaaaatgttgatggtatagatggtttatgcatgatggtgtgtggtcaaatgagttttgaggtctttggttctgtatattgggaaggtttgtgaacaagcgttgttgtttgttgttaaattaaagtactgatgttgaaagtttctggtgcacagattgtggctattacagttttcttcgtgctgtctgt

SEQ ID NO: 58671 - DNA, 989 bp, Populus trichocarpa
  Intron number 3 from transcript POPTR_0010s23560.1 (locus POPTR_0010s23560) derived from phytozome v7.0 (chr-ID scaf fold_10; pos 20096901 to 20097889)
acagtgaagctgattccaagaattgattttcaagcgttggcacaaaaatttgtaaggagacttttaaatagcagagctgatatcctctgcctgtaataatatagtttagaattttgtttgttttgttttgggtcttcaaggttaatggtggtttcttgcattatgttccaatggtaaaatagacataaattgattatatggtagtttgaaagtgattcccctgcttctaatttgcaaggatactattgacagttaacccatccacatatctatattttcaaacctgtgttctattctgaagacattgtttgcagaatataacatgcacatggtggcgagtttgatgctttacttgtgatttatatggaaagcattttttgatcgatttgccacccagggaggtggacttgcaaagaagaaagctgccataccagctccaagattgatcagctcaagtgaacttgagtaatttccaagtcccagatatcttagtttatttaacttctaatgtcatgacttctgacatgcaattatatttgacttgtatagggagttccggcctcttattcaatatagacgtgaccgtgatactggcaagatgtttgaggttcttgatggcttgatgctcaaggatggatatttatataaaagagtatctatagattctttaagctgcatgggtgttataccttcagaagaggagttgttgaagttcaagccttctgagaataatgaatcagagaatttggaatggcttgcgcagatttatgttggacagaagaaaaaacaggtaattggaaatgagaaaggtggtgataaaggagaaagctcgttatcatctgggcagaaatttgaactgtacaatcttgtgtgttttgggtaagttctacaccaattagtgtttttttgtgatctgattatatgtatttatttacaatgacttcgtattattggcttgcagccgcaaagattttggtcttgttgttggt

SEQ ID NO: 58672 - DNA, 497 bp, Populus trichocarpa
  Intron number 1 from transcript POPTR_0007s08270.1 (locus POPTR_0007s08270) derived from phytozome v7.0 (chr-ID scaf fold_7; pos 6858945 to 6859441)
aaaatgtgagtaggtggtcttcataaaggcttaagtgagagaaagtttgtgaccttttttgttgttgggttttggctgtttagtttatatatatatatatatatatatatatatatatatatattttaaatgaatttgatggtgggtttttgtattttgttggggaaggaagataaaagattgatttcttttttctttttccgttttttggttttgaatttgttgggggaaaagaaaggaacagaatcgctattacatatatttcaaatgggagtttgaaaaaaaatggggtattttgtttaatttgattgatttttgatatgggttttagaaaataaatggtgggttttttgttttattgggaaggggatagacaatatatattttttctaatcttatttggtgattattagtatttgttaacagaattgaatctgatcattgttttgatattaaatgaaggtgaaactttcgaaggaaaaggattcattggcaat

SEQ ID NO: 58673 - DNA, 890 bp, Populus trichocarpa
  Intron number 3 from transcript POPTR_0001s02570.2 (locus POPTR_0001s02570) derived from phytozome v7.0 (chr-ID scaf fold_1; pos 2051452 to 2052341 reverse strand)
tcgccttggcaggtaaaccttttctgtttgtttgctgtaagtttttttttttgaaaaatagtttttatggaaaatattttttcttaaaagtgaattattttatgatgtttgtagtgttataaaaaatgagttagaatttgattttgtcgcgaaaaataaaccgaaaaataatttattaatattttattttttctaagtttattaaaagaacaaggattgagtctaccagataaaaaagttgaaggatgtgaaattaaaaaaaaattttaattttataaattatttcaaataaaataaatagtaataaaaataaagaagatcaaatatgagagataaaaaagttgagagatgatgaaataaaaaaaaattcaatttcataaatcatttcaaataaagtaaataacaattaaaagaatgagaatcaaatctgatagataataaacttcaattaaaaaaatgataagagaaaataaaataacaataaaaaaaatgagaaccaaagttggtataaaaattaaattctaagggatgaaattgaaaaaaaaaatttaataataagatatttttgaattttttataatttctgaaaagtgttttccgtttaaaataaaaggaaaacatttttctagaaaccaagataaattctgttgatcaacttttctaataacaaacgaatacagaaaatttagaaagtagtttttaggaaactattttctataaaacaaataaaacaaatggggccttagaaaatgttgacaattattatatatatatatatatatatatatatatatattttatcactgtctttatgaggtaagatgaatttgattcaattttggacccaatttgcagtttattttaattgttgctgcaagttccgtgggaga

SEQ ID NO: 58674 - DNA, 265 bp, Populus trichocarpa
  Intron number 2 from transcript POPTR_0001s02570.2 (locus POPTR_0001s02570) derived from phytozome v7.0 (chr-ID scaf fold_1; pos 2052425 to 2052689 reverse strand)
gcccttctttttatactagatgtatgcttttactactccaattaatttcttcctcaaaaataaatatactatttagtttgttcatcattctttcttgtttttgctgaacttgagctggtaattgaataaacttttgaatgtttttatttgacgggcagaaaattgacaagtggaatcctgttatttgttggttttagttaagtaatgaacccttttgtagttttcgaatgttgtttgtttgtttattttttgaaatggctacagg

SEQ ID NO: 58675 - DNA, 694 bp, Populus trichocarpa
  Intron number 3 from transcript POPTR_0002s05710.1 (locus POPTR_0002s05710) derived from phytozome v7.0 (chr-ID scaf fold_2; pos 3753685 to 3754378 reverse strand)
ttccaagtgcaaaaaccctcggagagtgggctggtgtgagtatctcgtttacgttcttttttcaatcattttttctttgttttagtttttctaaacttatgttttattgtgattactattgttaatggtagatttgattgctcgaactcataatcgtaacagttcaacttgagcagagatttttatatgatagctagaaatacaatgtgtattttttcatgaagagggggttaaaagctagattatacagaggggaacattaatggaatgtgtgactgctgtacgaaattttatcgtcatgctcttataaaatcgggaataaagattatgatagattttaaatgctctgatttcttgaattataaatgtttttgtaagtattgtgtgctctcttatgttatccaattatattcaattgaatgcggcctagtcaataatatggtattgttcaatagaatgctcattaattccttaaaactttttatttctttgttgttattgctgttaatattctggatcaccttaggcttctgctctgtaaaactgtgacatggtctgttaaggttagatatataacggatgccaattgttgctcttgtaaaatttgctatgattctccctatcaactgatttatctgatatgggtttttggcgcacagttgtgtaagattgactcagaggggaaggctaggaa

SEQ ID NO: 58676 - DNA, 947 bp, Populus trichocarpa
  Intron number 1 from transcript POPTR_0001s12940.1 (locus POPTR_0001s12940) derived from phytozome v7.0 (chr-ID scaf fold_1; pos 10035928 to 10036874 reverse strand)
agaaattgaaaggttgcgcacggagaggatttcaggtggcattcttttatctccttaatgttttacttattaatggattttaagctgtagcctttttacaatgctactgttttagtttcattttacaacttgaagttctgcaagaatacgatatagagaatgggggctttctgtacttgagttatagatatggcccgggttcgagatttttggcatctgtagtaatgaatcagaatggcacatgaacttgaagagtaaaagtttgaacacattttggttttagctatgtgcaaattaattaattcttggagtttttgggaatttttttaatatttagttcagggctctggggatctggattgtttcttatttgatttggattcgaaggaaatgttcatctgattcaccaggactcttactaagcctttttcatggacccgggtatcttttatctcatttaattgatagaaaaagaaaaaaaaatcatgttagaatttacttctcatcctggagaaccttgatggaaggggaagtctgcttgctaatctttctattatttttttagatatttgcttttttcgtatgaactattctttatgtgccgtttaaaattcgtcgtgtttggatgcaaaggtgtttatgtgtgcttatgatgatgcgtttttatgctttatgaaccacaacagctctattatgaacattgtgcctgccagtgaatgtttttttctttgcttctgatattgcaaagttgtggtcacttttacaagaggctgatatccatccttctatgaacttttttttttgtttctgcgaaaatggagtcttgttgaattgtgaggaaatctaatttgtctaaactcgcttgagctgtttgctttattgactctgaggcatggtattgataacaaaatgtgttttgggtttcaataacgcaggaagcgctgggg

SEQ ID NO: 58677 - DNA, 473 bp, Populus trichocarpa
  Intron number 1 from transcript POPTR_0007s13820.1 (locus POPTR_0007s13820) derived from phytozome v7.0 (chr-ID scaf fold_7; pos 13849618 to 13850090 reverse strand)
ggttcaatcagacccttgatcacttttctccattcgtatttcctctctctcttgttttcttttgattttgttgtttcggctgaaatagaaactgggcttcttgtttattgttaaaaagttcctttctttattgaatatttcaagtttgatcgttgttgccatattttcataatctaagtttacttaagaaaatgtgataattgggttcttataattgatgaatgtgtaaactaattaatagtctagtgatgttaatacgtgattaaatgattcatggtgtggaattgtaagaattagttgaagtgatgttagtgtgtgattgatgattttgttcaattaaagttgaagttttggataaaattctgtgtggttttgaagaatatgaaatgggttttgaaggattggcattgagtgttaggtttggtttggtatttgcaggaccatcataagtttccgcaaagatactacgagtt

SEQ ID NO: 58678 - DNA, 752 bp, Populus trichocarpa
  Intron number 2 from transcript POPTR_0010s11560.1 (locus POPTR_0010s11560) derived from phytozome v7.0 (chr-ID scaf fold_10; pos 11775914 to 11776665 reverse strand)
ctcgtggaaaaactaagaaatatcttctcgtccaggtttgatagtttaaattcctctctagattctttcaaggtaattatcaaatgttaagttgtgtgttttaaatggtatatttgtgaatcattatgggagccatgactcacatgctgcatatttttctaggtagtatttagcaacccttacacacaattatctattctaggcataagatacatccagctgatgttcgtaagcttataccaacttagccaaaaaaaaacaagaagaaaaactctatcagcaataaaatagactgtagatgctgattcaagccacttctaacataaatgtagtgtttgtctctggctatgaaatgactcctccatgaaagtgtttattgttttatatctcaaagtttggaaaacttgagagttttgttcctgattttgatactgtgaatctgattagaattctgaaatgttttaaattccatttcatgctggataactgatgaaagttcgacgtacacaaagatttcttgctgaatgaattgtgctacatgccaacaacttcctgtatcgtataagatttggtatgaattcatgatgagtagattgtagaaagttcaagccttcattttttgaaataacaactctcaaatgctgtggggaaaaccttgtgtatgtatgttctatttattgagtttacaaattgtttattttgtttattcgtgtactagttgtttaacaccttcttcctctttcgtttggtag

SEQ ID NO: 58679 - DNA, 729 bp, Populus trichocarpa
  Intron number 1 from transcript POPTR_0010s11560.1 (locus POPTR_0010s11560) derived from phytozome v7.0 (chr-ID scaf fold_10; pos 11777159 to 11777887 reverse strand)
gataacattttgtttgatacttcattagcaagtgagtgaacagaagcaatacatttgcttcttgaaattctggatttaacttctaccttttaggattgctgttagtttcaacttacaacgctcttgtgttgatttttatgtctctgaaacaattcacatgaaaaatcagttaatggagagggaaaaagatgcatctttcttttggttttgtctacttttcttatttttaatgacccgtcttaaatttgtaatggtgttaatatatagtcaccctgatctattttcttcttctccaagaatctgggttgcctagagagctcatgatcactattaactttcctattaaattacacatgtatttgaaaatcaagctgcatctaatcagttgttttcttttcttgaaaaccaatcaaatgtattcttaaaccccatgagaatcatcggctttctacggtaattgaaaaccaacaaactgtattcttaaatacacactctgtatttattctgttattatacaaacctctcatgtcattcccatgcacagtcactgctttagcatatgaagaagtaattttttttaattaacctcaaggcatgtttggaaaatttccatgtatgaaaattccaaaaattccaaatctgattatgttccaatcaaaattgaggtactgtacgatcatgcattactaattcagtgctctatgaactgcagtaaaagttgactagaca

SEQ ID NO: 58680 - DNA, 594 bp, Populus trichocarpa
  Intron number 1 from transcript POPTR_0002s10660.1 (locus POPTR_0002s10660) derived from phytozome v7.0 (chr-ID scaf fold_2; pos 7740987 to 7741580)
gctggaagaaaacctccaaggtgggtacttttgtcttcttttattcatctgtatatgtttctaagaattaatggtcttctatatggtctctttcggtgatctagaatctagattggtgcataactagtcctgtcttcttattggtcaattgtccgcaacaacatgccaggttcctttaagttttccgtttggagatttgctaggttacacaagggaaaggcttcattcagtcagaatatatatgtgtgtgtgtgtgttatgttcttgattattttacatgctcaatggcaactaactaactctatgtttattatacaaacgaagagatcgaaatcaattctgcttccgatgatcccacattgtttaagattaatcgtgcatttggttaccaattctccgtttttttcacaaaacatgtgaagaaaattataaaaaagcaagaaaccaggaaaatgacagagataacattttcaaatatgtcaagcttagactatggttgtataagaatattcaagtctgttatatattgacatatatggctcttctttcttttgtttttgatttttagtttaacacacttttgatatgacagat

SEQ ID NO: 58681 - DNA, 731 bp, Populus trichocarpa
  Intron number 1 from transcript POPTR_0007s07680.1 (locus POPTR_0007s07680) derived from phytozome v7.0 (chr-ID scaf fold_7; pos 6048741 to 6049471)
aaagttgctctcattagaattggcactagaggaaggtactcaaaaggttttctggtcaaatctaaattctgggtttcggtttgtttgttaatgtttgacttaattttgtttaatacttggatttttttggtgtatgagtgaaattggcttctgggtttttgggagatttaaggttgctcttttctggtccatgtgcttctatagactgtcgggatgttcttcaaattaatgatctttgcactggaagttctgttattgaattggctgttattgatttagattttgacttggtaaaagaaattcggctgtgactctgctgatcagtttaatcagagatgcagtttaagttgattttaactcagtttcatcttctagattagcttgtctgtgaaatgtggttttgattttgtctctattttaaatgtattagatatcggtgttttattcttgaatctttgtatgttttggttatagttatacaaaagctttcatttttgtatgtttttgcacttaaattcaatgagttttgttagaaaatgatgcgtttgacattactttgtgagtagatataggtaggtccaggaccttaacatgctagttgaatggcaaagacagttagattttgtttctttttatgatcttgtgccaaatattttggatttagttatgttgttctgcttcttgatcttctttctaaatgtttgacagcccgcttgcacttgctcaagctc

SEQ ID NO: 58682 - DNA, 1014 bp, Populus trichocarpa
  Intron number 1 from transcript POPTR_0002s16850.1 (locus POPTR_0002s16850) derived from phytozome v7.0 (chr-ID scaf fold_2; pos 12606930 to 12607943 reverse strand)
tctcactctcaggtatatccttgctcttgactcgagtgaatggacacaaagaagaaagacaaaaccaagcaaatcccaattgaaaacaaccgttgtcaattattacataagtgttgctctttggcctgcaagtttgacaatttactcttagtaaatgtcacctgaaagagggaacctagtacattatttaattttccaaaagcagcactgatattagggggttctttctcattcgcaaaagcagcactgaaaggaatcaatttagcttgaatagttaatttttactctaagcacagtatttttttcgtcgaatttcctgctagagcaatgcccttctagatctttttttctgtttagggaaaggaaagaattattgtacaagacttgaaataattattttgaaaggaacctgaaataaaagcatcagcaagttgaaatgggaataagaacatatttgctggatttatcttagtaactctagtattgcttttgatttccccactgtggtttgtggctgttttttatcagatggtattcgtgttttctcagagagttgggtagaataaaaaaaataggcggctatgagtattcttgatagctagtgaacagtaatgggagcaggaaaaagaaatatacagtggatctgatttaatttacctttcatagctggtgcttatcaactgcactgaagtcaggactgagcaagatatgtacctggaaacatatgtagctttcttctttatttctcttcctttctaggatacacggcactttgggatatgcaagtcttagaaacacattttgggaatatttgagggctaaaaacacatttgcagaccatgtttgggtggcttttaattgtttctgtgtgatagtttaaggccctctaaatttttaaacttaatgtctaagcatgactagttgctcctgtttgagattttgaaattatacacttaggtttccagttccttgcaaacagagtcccacaggtttgctccactccagatcagagcc

SEQ ID NO: 58683 - DNA, 811 bp, Populus trichocarpa
  Intron number 1 from transcript POPTR_0001s34570.1 (locus POPTR_0001s34570) derived from phytozome v7.0 (chr-ID scaf fold_1; pos 32780073 to 32780883)
tcctcctctttcagaataaggaatcgcaactcgaggtacgtactacgcttctcaattaggtttttaattttactgttaggtttttattattaatttgatttcaataatttgatgcatggctgaatgatagaagctcgcagtataagcgtagacaaatgaagaaatcttcttctacagaggattccgagagtcatcaaccacaaccacaaccacaacctcaaccccctcctacagtgtttagtgctgtaccaaatgatgttactggcgctagcgtactcctagattcggaaactagtaccagtgtagatgtggagcggattgagcaactcactgatgcacaaaatccacaacgtcttaccgtgccccaagaagccaaatctttggtcttctttctctacttatgcaatcgtattagccaatttgtttttgatcgctgcttcggtgtaatatagtttaattttttttttttaaatttgttactctcaggctattgatgttaacatagaggaggatgagaagcattcaagtgcatctgatgaaatgaaacaattggtattcctttttaccatgctccttaaaaaaataaagtacttcacaatctgttcttaggctatgtagtttatattttttaagtgactggggcttccatgcactttaggatatccatgctggaactctgttgcttgagttttggtccattactgtctggatgattattcaagtgtcgaattcacattaagtctatgatttcaaatttgttcctcaatttagttttacttttcttgtttttgatttacttgaatgagagaca

SEQ ID NO: 58684 - DNA, 787 bp, Populus trichocarpa
  Intron number 1 from transcript POPTR_0007s10240.1 (locus POPTR_0007s10240) derived from phytozome v7.0 (chr-ID scaf fold_7; pos 10085943 to 10086729)
tctccagcttacaatctcggtatctttctttttgtttggtttccttttactttctccatgcctgtctctgtctatttgctttaatgacttttgtttctgttgttcttgcttcagtataaggggactaaattgttaaagattgtgtagcgttgggggttgggggtcaagttttcgtatcatatatatggttatatggagttgttgaaaagaagcaaagaagatactgaaaaattcttggccagagaattgagttttgatagatttcgagctaatttatgtcaagaaaagtttgaaatttagcagaagggtgttcctttgtggatacccacaagaacgaaaacaaaaaaatcatttatatctttttttatttattccaagtttaatatctttgcataataaaccactaatatatataaagcttacccttcctttattctttctccgtccagtgtcctattaagtccattatggaaagttaatttgttagcggtgtccggcaaaatttgatcttcctctgctgcctttgatgcaataaatctagtctaatatggtcgaaacttaattcacgagtagtttgtaagcttaaaaaattgtaaatttcattactacatctatgaaactcttttgtgtggacatgcaacttcccatcagttaatggtccgaaggatttgatggcttgatggacggcttggtgcatggctcttttgttcacaaggtctttattgttgacctttattgttttctacttgtctttttggttccaggtaccttgattcttgcaagaagc

SEQ ID NO: 58685 - DNA, 817 bp, Populus trichocarpa
  Intron number 4 from transcript POPTR_0010s23710.2 (locus POPTR_0010s23710) derived from phytozome v7.0 (chr-ID scaf fold_10; pos 20206822 to 20207638 reverse strand)
ggtagcattattgggaaaggagggtccattataaagtacgaaaacttcctttatattcttcttacaatatacatttaggcgagggctcgaaaagtaaaaaaaaggaattatataatttattttgtacctggaaattttatttggatgtagttagttagatgttgctaactgtctcaaagcaatgcactaatgttggtctgtgaggaagtgtatttaactttatgagaaactgtagcaaccctccttggtgttcagagttccatccctggaatgaaatacaaattttatatatcgatgtatatttcctggtactaaggaatctgcaatcccctttgtttgagggctgtggcaaacttatggatgcatcagtccattaccaagaattatgcattgcattgatttggacatagacctcagtttatgcgttctgattcatgtgccacaccatctgagctacttctgttgttttttacttgaatgttgaatttatagtaactcacatggaactttaatcattcaatttagctagatgcataaagtgcatacatatgtattataaatgcatgaaatttggtcctttattttgtttttcatcctgtctttgctgattgtgatgctctgtcaggctatgtttgggtcttgttcttgtattatggctgtcaactatttttcttgtgagacataaaatggggaattttaatttcttattttgtttcctgtaagattgtctagaagtttaccttcaaatcaaatcagagggaggaagtgtataatgctgatatctgcctttactgcaggtcatttattgaagagtccc

SEQ ID NO: 58686 - DNA, 432 bp, Populus trichocarpa
  Intron number 2 from transcript POPTR_0010s23710.2 (locus POPTR_0010s23710) derived from phytozome v7.0 (chr-ID scaf fold_10; pos 20207990 to 20208421 reverse strand)
gagatctcctccaccgcctgcatcgccgccttcaggtttctctgatctaatacgagcgtttttctgcttttttttaaaaaaattatttttccacacaatgaataacgatagcggttttgttattgtatttttagtttacattttgtgctaggattggctgctatgaggagttggttgttttatttattttttgctaaatttggatgtttttgacttgaaattgaaaacttagccctagatttctgagaagaggaatttttagttttaagttctgtttggttggcgaggaagctgtggaaaatgaaggaaaattaaatttaaagtctaattttgaccttgaaattaatttccctgctttcaggtcctgcggttctaatatttgcgttttttttttcagattcagaagagaagccgacttataccaggtttctc

SEQ ID NO: 58687 - DNA, 567 bp, Populus trichocarpa
  Intron number 1 from transcript POPTR_0001s29590.1 (locus POPTR_0001s29590) derived from phytozome v7.0 (chr-ID scaf fold_1; pos 28213969 to 28214535 reverse strand)
ttgaggaatccaggagatcgtaatttggtttctatgtgagttttctgattcatcattaccttctgtttttcttattaacttgttttggtgtttggttgatgagaaagttatcaagggaaaacagggagggtaatttttcttttcttttgttgccggggacgaaacttaattattattgaatcacttaattggtttttgttttcagaagtagaaaattagacataaactgactgaaaggatcgttgaatgtgtggtcaaatatgcaaatatagtcttagaaaactagaaatcttcaagactttttcgaatcccaaaaaccttgttttgacggcaactatgttagcaaaagctgtttgattctgtttgttttgatgtggattacaaactgtaaatggttatctcagaataaatttctgtcccttgcataaagaacatttcaagtttctagaatttggatcttgagttttgttacattagtcaatattttgctgtcttgttcgtgatcattgttgtttataagttgggaatgattttttattgcttacattgttgttgcacaggccatca

SEQ ID NO: 58688 - DNA, 802 bp, Populus trichocarpa
  Intron number 4 from transcript POPTR_0010s17780.1 (locus POPTR_0010s17780) derived from phytozome v7.0 (chr-ID scaf fold_10; pos 16248419 to 16249220)
actggccttgtccaatgtaagcttctgcttgccagtatttcataatttgtttgctttcttgtgctattcaatgattctttagtgccatgcctcttgctatgttagtctctgaccgtgatcaaacttggttcatttcctctgtattttgctctaccattaaatgaagtgatgggtgatggtcatgtcactgtatctcattatacaatctaaagcactgaccagcaggagaagattgtgaggcttagtctaaactaagcagaatggataatgccttctgtaatattttttttttgaggtggatccaaaaattgacactatgagcatgaataccagctggatatgcaatggactgatttatgatgcttgatttgatgaagttcgttgaagtgtagctcccatgtacctatgctatctaactaacaagtgatgagcttaagaaaaatgggtttgtgctgatggcatgattgtgtttgaatgctgaattttgtggaacatgtgtatgtgggtgaacgctccaaagttccttgctgttcagtcgagggtgcgtagttgatgctactttaatgtactgattctataataagattagttggtaaatgttgtgcttcagacttgttcattgtaaaaccatcggtggtgctattatcttgaagaagatatgtgggtatattctttgttggcagccagttgacaccttcaaattcatattgtaggcaatattcagcctctttttctctgtgttacttgtgtttcttttttgtttttctattgcaggtgtggcaatatcaactgggcaaaacgc

SEQ ID NO: 58689 - DNA, 1031 bp, Populus trichocarpa
  Intron number 3 from transcript POPTR_0010s13890.1 (locus POPTR_0010s13890) derived from phytozome v7.0 (chr-ID scaf fold_10; pos 13596682 to 13597712)
cagctcagtgatcttcctgaagtggattgcctatagatctctcaaagtctagataatcattgccacttaaagacactttctcgatcatccaaatgctaagcctttgccgcatccatttttagcaatgtaagtttttctcgattgcaaattttatccctcatttctggctgtatctcttgtacaagcttatatcttgagtacaagcaatttattcaaataggacatgaacattatctgctgtgtgatcaagagagaaaaggagatcagcacagaggcttgcaaagcatctacatggacttaactgatatctgttttaagtgacgttttttgccctctccatagggggtcttctatgaaatctttatgcccatccaaagcattacatcattatgccattctcatggaagaaagtatgatttttctttgcttgtaagaagaatgtcttatttctagtgctttaaaaattgaccgtgcaagaagacaagctagagaattggaaagttactcttcgctctttcagtgaaaataaattccaggttgtttctctttgtgtgcacgtctttgtgtatcgcatgcctgcttgctaagagtgccttcatgcgtgcgtgcattcctgcatatatgcatgcttgtcaattgaggcagcctaaacacttgccaaaagcatagagtaacttttcttgattggagtcttttctattgtcagattagcagagcatggcttatggttccattttcagattagaaaactatggttatgtcgcataaacaggatggtgtttaggcttctaagtcttgccagtgcatgtgttctctctactctgaaccttcttcttgacattgttatgaccaagctatgcactgttacttttaaactagtttgaagctttgcaaccggacatgcaatgctatgatacaaaataagctgtcttttcttagtgatgatgatttaaggcatctccacattcaaacacaaacaaaccccacatctttcaggtcacatatctagaacctggtcagagttttgaaat

SEQ ID NO: 58690 - DNA, 892 bp, Populus trichocarpa
  Intron number 1 from transcript POPTR_0001s19140.1 (locus POPTR_0001s19140) derived from phytozome v7.0 (chr-ID scaf fold_1; pos 16564297 to 16565188 reverse strand)
cagtcaaaattcaaactgtctttagaggctacttggtgagtggatttttgaatttcgattttgaaattgatatttatctgggctcaaattttaagttcaaaagttggttttctgatcttggtgtatctggtctttgcagttcctgctctgtttggttagatttgtgtatttttctttgcacagtaatgaaatgtttctagatttgtcaggtttttttacattataatgttaatggcacaaatgtttttcttggttcatgttattatgcataacctttactttaaagctgcgaaacacgagggtaacgaaacagtacatatgcttttgacatgcttaagatgagttgctttgaagatccttttcaaatattattcaaatgttactatcagtgtcttttttttaaaaaaaaaaaaccttcatgttgacatggtaatgaggctgatcaatgttggtacgaaaccatgctttccttgaactgtacatatgtgccttccatcatgtgctaagacaagtagatttaataggtaatggaacagtgcacacgttttttagggtcaatgcaatgttcgtatgttttccaggtttctctttaactgggccattgatttgtttttgttcctttcattcttcattttggcggatttggtgcactttcctgaatctgaaatttgtatttgaaactttgcctttctgggttggaccattgattggaaattctttcccttttttgtttcacttgattcctccatccagttaccttctatgattgatttgagagtaattttaggtaattcattgcaatgtgttttgtagactaattgctctttaatgagttaaattttgatttaatttctcaggctcgaaaagctcttcgcgcattgaaagggctggt

SEQ ID NO: 58691 - DNA, 517 bp, Populus trichocarpa
  Intron number 1 from transcript POPTR_0001s13550.1 (locus POPTR_0001s13550) derived from phytozome v7.0 (chr-ID scaf fold_1; pos 10614771 to 10615287)
attctttcatttgtatctataggtgagctctctctttctatcttcttcttggtttcgaacgagcaatccctttgttttaaggttcttttgtaagtattgtatcatttccgtggtttcgttttgtttcttcagagtgtaaaacctcagtgctatctttatcagatgaatattaacttttgatcttcgtgtgttgctttgcatgtcagtaatgttaaatgtttttttatcctgttttagtacttttcttaaccttttaggttggataattctccaattgtagcttgggttgctgatcatatattaatagtcgtttttctatttaataaatcccagggtcagcctctttaattttatttgatttctgtacagacaatcatttttcatctgattgttcatcgacatttcatgctaattttgctcaagacatgttcattgcttccattctttacatgccctgttcttattctgagttaacaaacttataatacagagaaatttataccaatctgaaggagga

SEQ ID NO: 58692 - DNA, 738 bp, Populus trichocarpa
  Intron number 3 from transcript POPTR_0001s01810.1 (locus POPTR_0001s01810) derived from phytozome v7.0 (chr-ID scaf fold_1; pos 1314487 to 1315224)
agaatttcctctgttttcaaatcatttgatcgaaagtaggtcttgtattttcttcaaagtctaattatgctgtgttatttactaagaacaactctgaaaaagaaagaccaccttgtattgttgttaaaggcattcacaaaaccgttacatttggcttcagtaaaagcattgcatcagatatcaaatgtaaagaaatttcacctgggagctacaatgtgtttatttccattttaagtattgatatatgcccgcatctcatccaggagtcttgacttggtatgcttggtgtttgagcaaatagcccttatccaatatggaatttgagaagagttcatgatggtttaggcccttcttgtgcaatcaattctttctgtcacaactcactgtcccattgtatgtcttcataatagcatagtttgctggattaccttggtgaatttgatagtatggagttttattacacaggtcgaatttcaggaagtatgttcttgggttttgacgtggaatgcaattgattggaggtggatacttcaatgcttagtgaaagatagtaaatttgacctattattttaataactttaatgtataattagatcttctcattcagtttaagttagaatgaaaaataattgatttatatctttaatgtttctgtgagttcttatgtgcttttcctttgttggtaaatgaaagtgagcaatgaaatcaatttgattcatggtgcaggatctctcagta

SEQ ID NO: 58693 - DNA, 413 bp, Populus trichocarpa
  Intron number 1 from transcript POPTR_0002s08810.1 (locus POPTR_0002s08810) derived from phytozome v7.0 (chr-ID scaf fold_2; pos 6193147 to 6193559 reverse strand)
caggtagcccaccattccctacaacttttgatacatattcaaccaactaccatttaattattattttcacatttacttatctattagtataattttgacttatgataatgtttcttgagaaggaatttgattttcatccttatagttcattgtattttttggaggcaaaagaagccaagaattccttttggccattaagcttcggatttttttctttttccaatatctattggttgcttatgactacattttttcaatactactttttgactaattttaacttttcaatgcccatcacacacgtatcttcgcatgcccatcattaccaaacactaaaacaagtccttaactccctgatttttggttcaaatttcacagtatctgaactgagtccagaggatacaagcaagaac

SEQ ID NO: 58694 - DNA, 580 bp, Populus trichocarpa
  Intron number 1 from transcript POPTR_0010s11370.1 (locus POPTR_0010s11370) derived from phytozome v7.0 (chr-ID scaf fold_10; pos 11671144 to 11671723)
gggtgggtcgtcttaatccaacggcgcacccatgtgaaaaaatagaaagcaaagacaaaaataaatctcgaaacccagcccaatccaacccagcaaaagaataccaataagcagcacatgccatggaatggatggacagtcagtccacaccgaccctggcgttgacgacccttttatttttttgtgcgtgtcaaagtgttgattcttccttttgatccattctattctaaattttctaaaaccaccaccctctctcccttgtgacagttcatatcttgtaccatttcaaacttcaacggtcaaatattcaaaacccccttcaaagctaacacctctctaacatcatgtttcattatttatttcattcaacattataataactcttaagtttccaatgttgaacaaccgtgtcaatctaccacataaaactctcatctatataaaactcccatctaactaccctttcaattccttagcacaaagcacatacattcattcttcctaccacgaaaaaatcccaccaccaccattccttctttcttaagttagttgtttctagttcaacatcaactttaggtcc

SEQ ID NO: 58695 - DNA, 540 bp, Populus trichocarpa
  Intron number 2 from transcript POPTR_0001s03840.1 (locus POPTR_0001s03840) derived from phytozome v7.0 (chr-ID scaf fold_1; pos 3105630 to 3106169)
ttgaaggtgatatttcattgtaatggctcattgttatttcttggttcagctatcatgtatgattatcaactgtagctttgacttcttgttctgttagttgctatattcactccaaaattatcccttcttagaatagagtaacaggctctttaatccttcaagtttgtaactgtaaagcgagattgggatgggagaaagctttgtggtcttttcatctcataggaatagtatcacagcaaaataaagaaggctaaacacctacaggactatcctcctacagttcaaacaacttgttttttatgaatcataagagaagaaagttgtagtaggggtaccttttgagtgagccccttcggagctgaccatctacgaaactatggcattttaactcggatgtgaaatatgattttccatggtaacagtctattcagatctgcatgtctgtaagcaagcacatttctgtatgctgtataaggtgtgtcatgatgtttgtagtttgcttgaagtgtttcattgatgtcttaatgttcattgcagaac

SEQ ID NO: 58696 - DNA, 379 bp, Populus trichocarpa
  Intron number 1 from transcript POPTR_0010s04340.1 (locus POPTR_0010s04340) derived from phytozome v7.0 (chr-ID scaf fold_10; pos 5416311 to 5416689 reverse strand)
ctcactatcttatctgttgttgggttagttgttttttttgccatcatcatggatgctgatagatagaggtatttaaaagtaaaaaaaaatgtgtttcttttctttctacactcaccttaaacccatttgaaaaaataatgctgttcgaagtataattagagccacattaattgagtttcatgaataattaatttattttgatcattttgattcttttgtatttctttttgttaagtttggctgatgaaattcgtaatttatttataggcgattaattatgttgtcatacattagtgttcgtcaaaagcacaatctctttcagaaaaaaagaaatcaagtccagataattaatgtcatttgcggctttatttgcaggaac

SEQ ID NO: 58697 - DNA, 822 bp, Populus trichocarpa
  Intron number 1 from transcript POPTR_0010s19170.1 (locus POPTR_0010s19170) derived from phytozome v7.0 (chr-ID scaf fold_10; pos 17155828 to 17156649)
gtgtcaaggtacttcttttcttatttatcttttttgcaattctttagctgaaatgggtttttttttaagttaatttattagtggaacgagtttagttattgaaattatatgtgaggagattctttatttttggacttttttttctgaattagcaggacactggttcggtaaatatggtccttttggagtttatatgtgaaaagattttttccttttggattttttttttaatcgtaaggaagctgctttggtggtgaagttgtgaattctggttcttttgtagtttaccaaagtttttattattattttcagtctgcagtgatatatgaaattgaagaaagaattggtgtaataatgtcacatagggtaggcttctgcattggttattaatggtttaaatcttgtaaataacatctttagtttattttaatttttaaaaatggttggttgaatggcaatgtgcattattggtataatctttgatgtacaaatttcgacttttttgctttgagtgccaagttaagaacttgttggtagaaattaacaaccttttgcattgatctcacagaaatctgaatttgatatatcctagattcaatttttactttcatggaaaaaacattagcctgtaattgtaaaacaaaatcacttgttttcaatgggagctcagacactatggtatttttttccttggatactttggttttgcctatattattctcgcttgatgtactgttataagtggatggctgaaggaattgatgcatttaattttattccttgttccttttgatggaaggtgttgggcacttttataacaga

SEQ ID NO: 58698 - DNA, 777 bp, Populus trichocarpa
  Intron number 1 from transcript POPTR_0001s09500.1 (locus POPTR_0001s09500) derived from phytozome v7.0 (chr-ID scaf fold_1; pos 7246401 to 7247177)
acttcgttttggtaaatggtaacatctaaaatgctgattatttataacgacccagttcttgctttgatggtttctcaaccgggttttgattcttttctcttttcgttgcttggattttgtgtattttgtttgttttttttatggtttagttgtagcttaaaattgtataaatttttaattggttattgttaactatatatatatttttttaacatgattacatgtttttgatgttttttgttttgtttctgttttacaattttgtgtgatctggagctagtaatgtgatccctcaaaagttggagtttgtaaatttgtgatcttgttgaggttttggttctgtgtatttggatttggtgcctgatttgccctctagggttgaattcgttttgcatgttataggaaagtttaaaagtaaagttttgaagatggtttctttcctttttatgaccataatttagtactggtctttttctctcttttcggctctcttttgggtttcttaggttacatcaaatgtgcttatattatgagctataattgggaaaagcatttaatgatggaaatgtcaacctttcttttgatttaggtcattccattggagccaaccgattgttatctggttttgtcggaaagttgccttcataagattttacggggtctgcaattgtactttagttagctctagactctgattgaattcatattttttatctgttaacttagtggctggttttgttaggtaaaagttcaaacttgggtcggtggagaagagga

SEQ ID NO: 58699 - DNA, 557 bp, Populus trichocarpa
  Intron number 2 from transcript POPTR_0001s24660.1 (locus POPTR_0001s24660) derived from phytozome v7.0 (chr-ID scaf fold_1; pos 23919266 to 23919822)
cagacaatcattgctggtgttgctccggttaaaatgtacgtgcctaccggtcactgtgcgcagttgataccgtctagatcctggcccagctaggttttatttcgagctcgtttggagctggttttttttttttatcaagacaagaaaaaaaattgcacgtcgttttttggttaaaaagttagattcgggtgcggattcatggttgacttgtcaatactcagtctaaatgttataatatataaattatatctttaaattttatttaaaaaattaaaataattttttttatatgataacaaaattttaattattatttctatttatttagtaaaaaaaattaaaattaaaatattataaactttgcaagtttaaataaccttttattaaaaactatattaaaaaataatataaattatatctagtatttaaatttttttgattgaattaattttcaagtagttgatataatatgatacggtattacttaatttcatggatcacagttccatttgaaagggataaagtaatgattagcagctactggtactgcaggttcc

SEQ ID NO: 58700 - DNA, 691 bp, Populus trichocarpa
  Intron number 1 from transcript POPTR_0010s06370.1 (locus POPTR_0010s06370) derived from phytozome v7.0 (chr-ID scaf fold_10; pos 7744975 to 7745665 reverse strand)
ctttcttcactggaagcactcccagacattccgaggttaaaccagtaatctcatacttacattataagagcctgtttggaaactttatttacaccgtgcttttttaaattttgatttttttttcctgaaagttattatttttttatatcgttttaatatattaatatcaaaaataattttttaaaaaaaacaataatattattttgatgtatttttaaacgaaaaatactttaaatcataatcactaccacaattccaaaaaacacctagccatgtgcaaactggcatgaaaaactcttcctacccaaggaacaactccacctagatcacccagctgccaaccctttaaattctgggagttagacacctcttaagtacatgccacccacactataacagttgtggcagagaatgattttatgagagacctggccattgcttcctcgaagaaacttcgtaaagctaacgtggatgcaacactttttttattattattaatataggtgttcggatcagtttgcacgcacctcgactaatcttacgagccctaaagttaataaccatgtaagcttccagtgaccctgagatttgtgagactcgaactagtaaccgttagaaaataattcagaacctgatcaattaagctagatcctttagtatttgatgcaccacatcttaattacaaggatcg

SEQ ID NO: 58701 - DNA, 558 bp, Populus trichocarpa
  Intron number 1 from transcript POPTR_0010s21070.1 (locus POPTR_0010s21070) derived from phytozome v7.0 (chr-ID scaf fold_10; pos 18492993 to 18493550 reverse strand)
aaaaattaaagacaagatcatcggattttactacagtaagtaccttcagatctaagtaaaacttttcttctttgtctctcatcgtaaaagttatcgttgtacaggtaataacctaatcttttgtttcttcttcttcttcttcttttattttttctccaaatctcattaaagaagcttaaaaccctagttcacaattaagttgttgaaaaccaaaattgaagctggaatagtccttataattggggttttttagttgatactgtaaaaagcgaaggtcgattgctctttctgattggtaaaatttgtttttttatctaattcattcaagttaatggactcaactagtgtagttaacttcaattgattatgagactagcagaaaacaaatggggggattagaactaaattttgttttatagtttgatttttgttttgtttttacttttctttactaggtgcacaacgggctggcttaagttttgttctttttgttgaaaagatgcaatttatgtgttagattgacataaattatgacgtggttgaattgataggtatata

SEQ ID NO: 58702 - DNA, 658 bp, Populus trichocarpa
  Intron number 1 from transcript POPTR_0001s30440.1 (locus POPTR_0001s30440) derived from phytozome v7.0 (chr-ID scaf fold_1; pos 28902125 to 28902782)
catagtgagaattctctccctccctccgtcttcctgttcaattttctttcttaatttttttttattaggatgttcttctatgttgttttcttttagttaggtgttttcttattttaatgatcatgatcatggtgattctcttaaaccatgaatttgtttgtggccttttgctttctttaacttttagtctagtggttaaggactcaaggctgaggtccatgttccatagaaaagaaaattgagtttttattgaatgaatcatgtattagcttgttctttattttgttctaacttcccttgtgtgtgcgagtgcggtaggatgtattgatgtcttttctattcaatagaatgaaattcgatgtgggaggtttaggtttgcttttgtgggattaactgtgttagtggtaggatgataagatgtagaaaactgaagtttaaaacctgcattaaactgctacagatatctggttttattgaattggagcttccttattctcatattcccccaattgaaatagaaactagagaatatgtgataaaaatagcaattttgacagccgatggtgtggactgaaacgacctgtaggcaacagacttctgtctctgtatcattttctgtctaagatgttatctttgattgcagaatttgctaaggagc

SEQ ID NO: 58703 - DNA, 586 bp, Populus trichocarpa
  Intron number 1 from transcript POPTR_0010s07930.1 (locus POPTR_0010s07930) derived from phytozome v7.0 (chr-ID scaf fold_10; pos 8892244 to 8892829 reverse strand)
cttgtgaacgagcttgtcaccaagcttagaaaacggtgagttcaactttgtctttaatttctatgtgcttttattattattattattattattattattattattacacacgaatgtgatactctttatcacataaatttgtttaacagtactaatgtgatgtacatatacattttaggaagggttatttttatcatccctatatatcataggtcacaggctcgtatatgcatgcatgaatttgtggtgattttgacgtttttgatgatatttgtgaggaactacagcgtatgttgaactttaattaggttgttcttggacatgaatacttatgatgtaatatgtagcctagcggagaagagttgagactcgacagaatgttcccttttaaaattccatgttagactcttgttaggtacaaacaattccatagatcatcagacttgggcaaagttagtcgggccttagctcggatacctgtgctaatccaaaaaaaaaagttctctttctttgttaaatgttttttttttcttttatctctgtggtggcaggaaggtggagggttcacaggcaactgctcttctga

SEQ ID NO: 58704 - DNA, 978 bp, Populus trichocarpa
  Intron number 4 from transcript POPTR_0002s20930.1 (locus POPTR_0002s20930) derived from phytozome v7.0 (chr-ID scaf fold_2; pos 17151712 to 17152689 reverse strand)
ttctgcttattctaaaggaaacaaatctcataaaggtattctctcattcgaagtagtgctgtatctacatctctcttgagattggtggagtgccttcttattcaaaaactataggtgaattcagcccttctatatttgtttgtgttgggagacagatcgaagaccgagatggattggcaatgaaccaaactaagaaatgaacaaaagcctacgtagaataaacaatatgcgtggtttgacctttgacatatattcacatgaaactgtaaataaagtaccaattacacctctcagtgagctttcctatttgggtttctcgcactcagcaaccattattgaacatcataggaaaggaaaatgctaaacctacaaacacttgataccaaacttgcacaagaagtgactcggcatgcagcccagccatgttctatctgttattgctgggtgatggaaataagatggagaacccaaccatgacattagtgagacatggctgggacaaggaaaaaagttgaagttcagagacagtttttcattgagttgactcaattaactcgcacatcagttttagctctgtttttcttttcagaaccctcacttttgtggctagccatcctgacaagccagctcagcttgtaaggaaagtttctaagcattattcatgagtatagcagcaatctgtaggaaattcccagcttgtgcatgttgagttgctaaggaagatgactacttgcttataaaccttgagtatgctgcatcatgtatgcttgggttacggactagatctgtttttcttttttgttttatttataattggtgagctggagctgtattgtttaacttaattttctggcagccaagttgttcagtctgctgctttatgtggctttgtacaaggatgatgccttagttcctcaaccgtgagtaccttcatgacctgcaggtatcagaggcaaagccaagccaaaatttgctttc

SEQ ID NO: 58705 - DNA, 1020 bp, Populus trichocarpa
  Intron number 1 from transcript POPTR_0010s02340.1 (locus POPTR_0010s02340) derived from phytozome v7.0 (chr-ID scaf fold_10; pos 2691482 to 2692501)
ctctcgtggtgcgtgaatccctgttactctgttagggtttcctttctttcatttcatttatgcgagtttctgtgatgcggtgttgtgcacattttttaaagcttgattttcttgagagttttaatcttttcgtagttaaggagcttggatgttcattttaggagaatatacaatattaggattcaacatgtctttgtaggtttttttttttactctggggattttaaattcaaatccatgctcaaggcaagcagctatctgaagctcaaaaggcttgggttgtgtgcatcttaagcttgttgatgagactataagttttctgcttgttttcagttgaattaggtatccttaggagacatttagcttgggttttaggtttcgataatgaagaccttgaagtcctaaattgattccttttcaacttcttcatgttggttggatgtattagaaaaatgtacttgaagtcctaaatttaccatgatacatagaatgctgcagttagtggaataatgatgtagctttatttcacctcgtacaacatggggcacttggatttggaaggactatttgtgttggacagctttgccacattttaagaacaatgaaagtctgccatgttctataacatcccaaggttgtatttactttaactgtcacacggttattcacttgagctataatagcatggaaaattattggttcatttggtatggagtagtgatggcttgctccttaaatttttgttccttgccaagtagctatgaaaataaattacgcatgagacagtcagccaaatatggatattttttagctttcttgagcattttttgtacttgcttaattattttaacttcttggtgatgctatgtccttgatttcttttcatgaaaaccaagaacttagtttagtttgcatgattaagtaacaaaattttatatatccacttactgtattttttgtatgatgtactggaaaacaaaactaggggactgttcattgttcaggggccttggtaccaat

SEQ ID NO: 58706 - DNA, 603 bp, Populus trichocarpa
  Intron number 1 from transcript POPTR_0002s16990.1 (locus POPTR_0002s16990) derived from phytozome v7.0 (chr-ID scaf fold_2; pos 12753355 to 12753957 reverse strand)
actgttgtcgtgttaacttccttctcgttaagaatgtaaagttttcctttctatctctcacttaactttttctttttttcgctcgaagattagataagatctacattttactatttggctttgattgaattgcttataactgatttttatgttgggatttgtatatggtggttttctttttatggaaaattgatgggcaacaaaggaaagggggaaatctgatgaatctaacttcattgcttatattcttagggattttttttttctactgtaatcaaatccgatcatcagcattattatgaccagagtgcagaaatcttactaaacttcttttcgtcttttagcaaaagaaaagcagtcttttcgaatagatccatcagatggaagtgtgattgtgtgtataaagcacttgtaaaattttcaatctggatacagtgagattaggcggatggcagtacaagaatcttccaagtctcactttcaccccttcaatcaaatctattgtttcttgcaactatcctgccgtgctaatgctgttttcatttttcagatttcacttttcttttaaagtgctaaaaggagttgatagtcttgttcacagta

SEQ ID NO: 58707 - DNA, 686 bp, Populus trichocarpa
  Intron number 2 from transcript POPTR_0010s08360.1 (locus POPTR_0010s08360) derived from phytozome v7.0 (chr-ID scaf fold_10; pos 9303654 to 9304339)
ctcgcggaagaggtattctttttcttgcttttttgaattttcaaacatacttggtattgttttgtttgtcgaagctgaaaactttgaaattgaatgcaatgcttttgaatcgttcatagagcatctttatgtgtttcactatttactgatttatgcttaacaaactcatcttgaatagatactccttttatgtgacatacaagcaactgttatagctagacaagttcagctaatgaaatgaacacagttggcgcttcttctttttttcttcttggactgccgcattgatatcattgagggagttccttaaactatctcaataatgtaaatagactgttctcgtgtctatgatgatcccctttttgtaaaatccgatatgccttgtaacttaattatctacagcaaaaatctttttaaaaattgacttctaactgattcaggctttgagatttgaaaagtgtaaaaaataagatgcgtggacaatttggcactggtttacttttgcttatatcaatttgtggttgctcaaaccttttcttcttaaccttgtgaagcctgtagttttgtgattagaatgcgttcacctagctttacttattcttttcctccttgtgacacacgcggcgcacgctcatttttttctaaagcacaattatgccaatgttatatagggaacgaagtgattt

SEQ ID NO: 58708 - DNA, 935 bp, Populus trichocarpa
  Intron number 2 from transcript POPTR_0002s25050.1 (locus POPTR_0002s25050) derived from phytozome v7.0 (chr-ID scaf fold_2; pos 22249801 to 22250735 reverse strand)
agaggccccaaagtgaccgcaagatttctgtcaaggtatacatattgataagtaatgacattgaatttatgttctttgtttggttaatgaagctggatcgatgctcagagttgtcttatgcatggctaggttactgttcgagtatttttcttgtagtgttctattctcagatggatttggggtttgcccagtattttgttgtgcttgtcaagttgtctttcgatttattgtatgtcttgctctgtttgtctttgaatttcagaaaatgcatgttgtattttatttgtattgtacatctatgatttggctagaatttaaagctaatgatccgtgtacaataagccgatgctctggattgacttgatgaaggaagcatggtaaggtacacggaaattgaagttttgggtcggcatgtctgctccctctgatgcctctctttggaggatatgatttggaggcctggtttagacccacattttttctgattctacttgtttaccaacggataggtcatattctaaaaattgggagctcaagagctgtacttttttaagtatattgtctcctggtctgcaacagctttatgtatgttcagatccatgactagggctgttgtgtttttgttaattgtaccccattaacaccatcaaattacaactatggaagtcctaaggggctggggttgatattggtgatttaaatttgaactgcacaaaaaaatgaaatttgatatctgtactgctattgaaatttagatttacatgttgaggtatttgtatgttcttgttttgtctttttgatgtttgttttttcttttcaatctagctcttcaaaaagctttatatggcttcttgatgtctcttacacgatatgttaaatgcttattaatgtttgtggcagacaaactggaggaggcccaagggtattgattctag

SEQ ID NO: 58709 - DNA, 439 bp, Populus trichocarpa
  Intron number 3 from transcript POPTR_0007s07000.1 (locus POPTR_0007s07000) derived from phytozome v7.0 (chr-ID scaf fold_7; pos 5348661 to 5349099 reverse strand)
atatctatcaggtaatcccttaataacaataacatattgcgtttttgtttgtagtttatttaaggtcgaacttgaagagagagtgggattgttttcttacgatttatatgaaattgatgtcttactagaaaatcttgatgataagatccatttgtattttctgcttttgaagtcttaacttcatttttctcttttcttaaaagtatctgtaaattgaagttatgttgcttgttgattctgttttgatttatcaagttaattaaaatggatttttcgaagctttttgtgagaagtttattaagttcaaaataattaaagccaaaactctgttcgtgttaaaaagcgagtagcgatttctgctgtgagcatatgagcttttccatacgtgtctcaattttctgattcacattagcttaattattgacattgaaccagatag

SEQ ID NO: 58710 - DNA, 747 bp, Populus trichocarpa
  Intron number 1 from transcript POPTR_0007s12660.1 (locus POPTR_0007s12660) derived from phytozome v7.0 (chr-ID scaf fold_7; pos 12911904 to 12912650)
aaccctctaacaagtttctacgctctgtaacactggtaacgatttctctctgcactactgcactgaatcataattaatcattctcaacactcttaaactacttttatgatcatttattaattagacaaatcatgattgcgcttattagttttgtgtgtttttctctctcgcataatatctgtttggttgctgagaatgtggagagagaaaattgaagatttcgaggttttttttgttaagaaatgttggtgacaaaacagagccttttaaagtagcaagcatcgcgattgtgttggattttctagtcttttctttgctgggtttttgatttagtggatttttctcgctttatggttaatggggtttgctttaatattttagagtaaattgaaattctttgttattgctattttcgattgctggtgggttttttagctttgacttttgagtgatatttttttttttggtgaactatgaataaaaggctagggttacattgtcaggattttgcaattgagatgtaaatgtgttttgaaatttgacctgaaaccgtatttttttgtcattctgaatggaatggttgggtgaacttgagtaacctctagttgatcataaatttacggaagccaatttgaattgtgtgtgcgctcctacgtgcccatgacggatttgttatgtgtgtgtttgataaaatttgaggttttgtatggttcattaagtggattaaaatttctgtttgcaggtaaa

SEQ ID NO: 58711 - DNA, 711 bp, Populus trichocarpa
  Intron number 1 from transcript POPTR_0007s07730.1 (locus POPTR_0007s07730) derived from phytozome v7.0 (chr-ID scaf fold_7; pos 6140442 to 6141152)
tgcagccgaagtctaccgcttctccgccaacagtaacctgctccctctctctgattatctatactataacatcttttttgtcgatttttacatctggtttttctgtttctttcatttttgaggccgtttacggtataacgatggaagcttttgttttgttttgttatgattgaaactgcgatttatgaagtttagattcattggttttaatgtcatcttctttgttagagatttagttttgtgaatatttgtttctcgatcgttattgtctagtgagtagtgcgtgttgttagagatttggttttatacacattttacttgaagattagctgtgtatctactgatttgtgtgtatgaaagttctgatgttagtgaaggtttggttttaagatgaatggaaacttttgggaatggagggcttgtgggattggaggttacgagtattatgagttgcgtgattgagatgaatgggtggacgagagagacatagccggtggttttagctgacttttaatatagtaagagagaatgaatttaatgtttgagttcctgcttgtttgatggaagcatgtttcagttgcatattgtatttgttatggtacttgagaatttttctgtaaggtaatttatttattttctttgttattttgattgattaatgacacgggtattacaggtgaacgttcctaagacaaagaagacctactgcaa

SEQ ID NO: 58712 - DNA, 1019 bp, Populus trichocarpa
  Intron number 2 from transcript POPTR_0007s07730.1 (locus POPTR_0007s07730) derived from phytozome v7.0 (chr-ID scaf fold_7; pos 6141266 to 6142284)
ggggtcagacaaagccagtgtttcacaagaaggtttgttttcttattccttgcataaacttggtatacttaaaagtccctcgaggatttagatcaatatttgaattttgtttgtcactatattgtaatttgcatgtattcgatggctgtaaaaaatactgctaaatgtttgattgtgaagtcttgatagtgtacatgttatcactaccatagaacatccttttgtggtttcagagtatatactctcaggaggcctatgatgattaaatttgcctacattgtctgatcatctaatgaatgacagagacatataattagttctgaggcttcctcctttctttccttgtcctcatggttgatattaaaatggaaagcgcttgcattgtacttgttataccaccataaattatatttttgctatttctgaattctctttttagaggcctgtgatgatttgaatttgcctacattgtctgattgtctaacatatgacagagacatataattagttctgaggcttcctcctttctttccttgtcctcatggttgatattaaaatggaaaacgcttgcattgtacttgttataccaccataaattatatttttgctatttctgaattctctttttagaggcctgtgatgatttgaatttgcctacattgtctgattgtctaacatatgacagagacatataattagttctgaggcttcctcctttctttccttgtcctcatggttgatattaaaatggaaaacgcttgcattgtacttgttataccaccataaattatatgtttgctatttctgaattctcttttttagaggcctatgatgatttgaatttgcctacattgtctgattgtctaacatatgacagagacatataaactagctctgaggcctcctctttgttcttcaccttgcatggatatctagtcttcatgcttagttgaattttgatattgatatctcttttgttaacaggcaaagacaaccaagaaaattgtgttgaggctgca

SEQ ID NO: 58713 - DNA, 384 bp, Populus trichocarpa
  Intron number 1 from transcript POPTR_0010s01700.1 (locus POPTR_0010s01700) derived from phytozome v7.0 (chr-ID scaf fold_10; pos 1890905 to 1891288)
ttggtctatcaagatcttctctctggtaattttttcttttctgctcgttattttcttagacatgtgaaaagtataattgtgttggattttggatctaatagtagtgttaggggtttttagctagttctctgcgatctataaagaagaaactgagatgggttttttttatctggtctgattaaatttctagtgtttgtttcttgatgattaaaaattttgtatttatttgatttgattttaaattttaagcaaaactcatctgtttttggtagctatagacggtgtcagtagtgtttagcacgtggtatcttgaattatttggattgatttgaccaatatgctgacgatagggttggtgtggttttttgtgatttttattaggtg

SEQ ID NO: 58714 - DNA, 602 bp, Populus trichocarpa
  Intron number 3 from transcript POPTR_0010s21790.1 (locus POPTR_0010s21790) derived from phytozome v7.0 (chr-ID scaf fold_10; pos 18932385 to 18932986 reverse strand)
gtgcattgcgagggttggaggtatgtgtgattactttgttctagtgattcgttaaatctaaattattgaattcaaattgaatgaacatgatttagtgcatgataaaaaatgataagaacttaatttcttactgttttgtttttttcatctaatccaaatcattgaattcaaaaccaatggttagttttggaacatgagagcatccaaatttaagcaggtagagattaactacattttttacttcaattcatccacacacacagtaaatgcatggtcattaagaataaacaccacaaataggtcaaattctctgtttacttttactctcttgttgtgctcaccttgacctctgaaaacctctttgccattactaaaaaaatccagcgttgaatttttgccatcatgagttcatctttattgcatggctatttgtgatagtctatgaagctgcatgcttgtgatttcattgaatgtaaatattgaactaactgctagaaaagaatgatgagtgtatgagtggttggagttgtgtatgataatcatccctttcattttctttgctgtgatctttcagacgttcagccaactttgtgcatttgatt

SEQ ID NO: 58715 - DNA, 561 bp, Populus trichocarpa
  Intron number 1 from transcript POPTR_0001s22210.1 (locus POPTR_0001s22210) derived from phytozome v7.0 (chr-ID scaf fold_1; pos 20858154 to 20858714 reverse strand)
gacaacgaccagcgagtctactttgttccttacaggtctctctctctcaactactttatctgatactttgaagggtctacattttacaaatctagaccaaaacagagatgcctgcctccttttaatttaatctcttttttttgaattttaaatcaatcaacttcaaaacttaagagggaataaatgaatagaaatcttgattttgaatctcaaaagaagtagcaataggaaggaatgtaagatcaaaggattcaaattctgttcttgtttttttgggaaacagtgtggggttactaagtagattgtttttgtggttttattcgttgatttatggagtgggtttggttccattttgagtttgattcaatttatgaaatgggtttggtttggtttgggttgggatttgagttgtttaaggattcaatctcgaggcttgctttttagatatgatttttcggaagagaagaaggggaatcttttttttttcttttgtttaatgttttcatgacgtgggccggcctgcattttgcaatttgatttgggtgattaggtggtggaagg

SEQ ID NO: 58716 - DNA, 930 bp, Populus trichocarpa
  Intron number 2 from transcript POPTR_0010s04280.1 (locus POPTR_0010s04280) derived from phytozome v7.0 (chr-ID scaf fold_10; pos 5296222 to 5297151 reverse strand)
gagatatagtggtatgtatctgagaaccacaaggttcatgattttttcccatctgatattcttttgaaaaactgagtgcaggcttcaatttttgtggtctatttcctgtccaggtgcttacaattatgccaacactttgcaagttgcaattgtacatagagaacacacccatttagcaatagagtagttgcatgttatgtttcaaaattcttctttgataagctagattagcagttctgaataataaatggtcttttggtggtttctaactagatgatttataaatagcctatcgaaatgtagctatcttctgcagattaaaatgaccaaattgtgtttgttttgtctgagctggatagaaaatggtcacaccttgcatttggcaatgcaatttatttttccaaaagtattatctaaaatatcatcgtgctagtctatttctgacattacatgcataaattttctggagtctatatttgtgaaagattttgcatgtttcccaagtagcttaagtcatggctttgttaaacagaatgtttgtggaggtatttgtggagaattaacaaaaaattttcagtggctcagttcaattgctaatatgtggcaaaaagtgattaaaacagtattttgagccttgtaatcattatgcttttgttattgtacatgcaaatacacttttttcttggtctacagtctaatgatgtagacatcttttattttcagtaaaatcatgtgaaatgatgttagttgataacatgttagtgaggggatgtgatcggtcaaatatgttttgtgcatcagtttggctgctttcttaaacatgtgattatgatgctatagttcctatctataccatatttaacagttgttaaggtactgattcacattccatttctttgtttggaaggatgcaggtgcttttacaggtta

SEQ ID NO: 58717 - DNA, 983 bp, Populus trichocarpa
  Intron number 1 from transcript POPTR_0001s22320.1 (locus POPTR_0001s22320) derived from phytozome v7.0 (chr-ID scaf fold_1; pos 20933604 to 20934586)
tgggactccttcttcggctgggagtgctggaatcagtatgtttttggttttattttttatatcggtggttttaatttctttggttgtttgattgtttcgtgctcagttaataatcttttgcttgtttggttactaggtctattaagaacttggtcatagcttactgtattctggttaaatgggaagaaactggcattaggattaggtggttatgtgaactccagggttgtttaaattcagtgcaatttagatgtggtattttgcgtagtttgttttccattttggtgagattgaactaattttttctgctattggttatgaagttgttttaggtgatatgtggtccatattctttctggtaataggaagcaaatttctttatggttctgaccttcccagtagcctggctgttctttcactgagaaattgaagctgcgaaatcatgagtggaactgattttactgtttcttttagttttgctataccagcggcatttgagttctactgttgttagaattcaacaggcttgtgtaattatttccttagtctgtgttgtgctcaagatgctcatcttgtcgttgtcttgaatggcaatgctttaatggtgtgcgaagcttttaatttgatgcctaactcaaagtaattaacaagtatttcctatagtttgtgatttgaaaatgcacaagtctagttgaatggatatttagttttcctgttgtattggttttgatatcctaacttgtatggtatccctatactcagtactaattttcttgattccgagtagcatatggttgccatttcattctttgtgtcagtctgataaccattgttggcattgaactgaaattgcatccagaagaaatgaatgaacacatgataatggatcttttctctaccgagtctcatagtgataatgtgtcatgaactttcattaccttcatgatttgttataaacgcaggactagcaggcgccaccgctg

SEQ ID NO: 58718 - DNA, 347 bp, Populus trichocarpa
  Intron number 1 from transcript POPTR_0010s22360.2 (locus POPTR_0010s22360) derived from phytozome v7.0 (chr-ID scaf fold_10; pos 19316385 to 19316731)
aaaccaccctctcctctccctctttctttctccaggtaatacctaacaacctcctcctctctctctaaaaccatctcacctagggttttgatctccttcaattccactctcttctctactttccgtctcaacatacgtatacttgtccgtttctgtaggtgtatacgtatagaaacgtgtcgtgtcgtgttgtatttgaatttgtattatacgtgttatttagggtttagtttaattagaattgaattagaataatttgttttggtttgtgattagcatataattgctttgaattttgaattaatgcggtgtgtttttctgatcaatgtggaggttttcttagtgag

SEQ ID NO: 58719 - DNA, 679 bp, Populus trichocarpa
  Intron number 1 from transcript POPTR_0001s26540.1 (locus POPTR_0001s26540) derived from phytozome v7.0 (chr-ID scaf fold_1; pos 25520364 to 25521042)
tcaaaacggtaagcttttattgttgtttgatgcatttattagctctatatttattagctccccctccccctcctcctctattttggcctgtagatgatgaaactcagatgtcaataatcatgaattcatgtctgtgttccaaatatgctgctgttacaatgtcttgaagcgtaaagcctacttaaataaaactcatcaagttaaaaaaggaatgcaactcaaaggaaattaatatgctgaatgtagaagactatggctgcataaattattagctaattaaacatggtgtcacaaacatttccttttgctagtagttgctactataaaaataataaacttagcaatcaactgaataacataatggatatcaaatcaaatgatcgtttataaatcataagcttagattgataaatttttacagaaccgtagtacgtatctcaattccctctttgatttgcttctggaagcatgagatatacagttacagttactgctggattgtgtgatataaaatttccctgttcgttgaaataaaagttatctgaccatgaatttcaagaacattgataactattgacatgcctatgttaatgatagtgctttgtaattttcttttatgctgatcaagatgctcctgcctgcagcaactactcaattatttcacatacaaagctgtaag

SEQ ID NO: 58720 - DNA, 347 bp, Populus trichocarpa
  Intron number 1 from transcript POPTR_0001s00330.1 (locus POPTR_0001s00330) derived from phytozome v7.0 (chr-ID scaf fold_1; pos 198617 to 198963 reverse strand)
acattacactgaacctcgtattgctcaaataccaggtagtttttttattttttctcttgaaatttatactatttaggattggttatggttttggttgttttgtcgattgaggttagtataattcaaagaagaatgctcatgtttgggttgacaggtgttttgtttttactgtggaattatgggttgttcttgatgattaagctggtttgaatggattgaaaccactttctgcgagtgtttgttttggattctatgctctgtcacgtttcatgctttgtgtaggtggaactctagaaacgaactaatagagtgatctttttacttgtcttattttcagggatcagttc

SEQ ID NO: 58721 - DNA, 360 bp, Populus trichocarpa
  Intron number 3 from transcript POPTR_0002s08955.1 (locus POPTR_0002s08955) derived from phytozome v7.0 (chr-ID scaf fold_2; pos 6335023 to 6335382 reverse strand)
cttgcttctcgtgagttagaaaaatgggcagagagggtgcagtcacttgtggaaagttttttttttatttctttgatatttttttttcattgtcttatgttggttttagattatttctcttctaactttttgctttcttttttccctttgtcatgcatgtttcttttcggatgcttgggagggggttgtgatttggtttattttttttttaggaaggtctccttccttcattgattcaggctttgttaccgtgtttttgagttctggtcgtgattcaagtataattagaaaattcctttttatcacttttttatgggttttttttcctagttaaaatctattatcttaactgattggttc

SEQ ID NO: 58722 - DNA, 154 bp, Populus trichocarpa
  Intron number 2 from transcript POPTR_0001s01090.1 (locus POPTR_0001s01090) derived from phytozome v7.0 (chr-ID scaf fold_1; pos 859596 to 859749 reverse strand)
gtttgcttctgtacggtccaccaggaaccggaaaggtaagtagtttttaatcattttattaatccaataaattgttctctttgattctaaatttatttatttatcttgttttttttcttccgcagacaagtttggtacgagcagttgtacgcga

SEQ ID NO: 58723 - DNA, 687 bp, Populus trichocarpa
  Intron number 3 from transcript POPTR_0007s06660.1 (locus POPTR_0007s06660) derived from phytozome v7.0 (chr-ID scaf fold_7; pos 5053459 to 5054145 reverse strand)
aatcaagtatcccagtaagttatattgctactttcttggtatattaccgcgctatgcaacgctttcaagttttccttgtgataagggattatatttgcttgagtagcttttaacttgtattgaggtgagcataaatttgcaaactgacttcctaagttgaatggcatgagttgatttcagagggagatgatgcaagaatcatggaaagtttcttctttcttttgtttgattaagctgaatgagcaaatatctttccaatctcttccttttttgttgaggttatctaattcatcttaatgacagcgagaagcttatgtttatgtagctgctaatcccagatttcctctttcctcaattatgatgagtcggttgtttattttgatatacaggcttagtctaaattgtgaatgtaggaactaggaggtcaatgatgcaatgttttgtggtaacctcattgtaaaaattaaatactaccagtgcagtttgcccctgctgggaaaaagaaagataaataaataaatccaagatctgcccccagtggtttctcaagcaaggatgaaaactgtcaagattttgcatgctctaaaactaccttttctattagtaaatgtgtttatgtattgtttgtatacaagtttacgtgatgtctgtgtttgcattgcagagtatttgagaaatcactgcagt

SEQ ID NO: 58724 - DNA, 687 bp, Populus trichocarpa
  Intron number 2 from transcript POPTR_0001s02270.1 (locus POPTR_0001s02270) derived from phytozome v7.0 (chr-ID scaf fold_1; pos 1725110 to 1725796 reverse strand)
ttgacaggtatgctgttgttttttacagatgtttgagatgtaatttgctcttttttttcatgtgaaatcaattaaggtatctttagattatggatttgtttccgtgttgtttcaggacatatttatattctgatagttagttttgatgtccattctcatgccgttattctagaatttcacctgatcaatgttaccatatctgcttcctttgttcatctgatataaaaaatttagcaagtacttgttccagtttttcgaggtttgtttcaaaatccttacaaaatctatgatccctagcttttttgtatcataatctggaaaagaattaattagatgtccgtaagcaaaatggtacatacacatgcttcttctattgattaaatgtatgaagggaaacttgaagtgaatgatcactctgaggataaaaaaaagatgccttggtaattaactgaagagaaaccagtgcatgcctttgagttgcatcactaacaaacaaacctaattaatttaattatgtatgtttacttactatagggtagttcactgctgggatcttctcttgcctataaggaccttctgtttaattaaacttcgtgttgtgattttggttgatcccttatatcaatttctatttattttcatagcaatgtcactttcttatgaagaataccatgtgttgcagtgttc

SEQ ID NO: 58725 - DNA, 941 bp, Populus trichocarpa
  Intron number 2 from transcript POPTR_0007s07630.1 (locus POPTR_0007s07630) derived from phytozome v7.0 (chr-ID scaf fold_7; pos 5988661 to 5989601 reverse strand)
tacagttgcatcttcatctggacttactgctggaggtattacagtgagatctagttttactaatttatgatcatgcatatgatattctgtgcacctaaactcatcaacatgaatcatattggtaaaggaccttttacaatcttaggactaaattaggaattttgaagggatagatttagatgagaaaagaagagaatttagttgataagagaagaggataggatagagaagctgcgaagagaaagagagaacggaaatttctatgtttcattcacatttcaccgactcacaatcagtacattgattctatgcattttaacctggactcttagaaatagaatacaccctatccatgtcttgccacatcatcactagaattggtttgttagttcttatagttgagtatgtttaccatttgttacttcttaagatatcaatcaaatgcataaaaaaatgaaataaaaacattgatttgaccagcatcatatgtgtaatcttgttgtagctgtaactcttatagaaacctttgtttgtaggataatctgatgaagaatccatctcttaataaaaatgcgaacattatctctaagttcacaaacagtcaatctcagcttgttctaatttttataccttttatttttttggttgcctgcatgtagggtcatgtccacctctgtatgcttgtactttccaatattagagtaaaagtaaaatttacgatcatcctgtacattggattcacaatgaacattctttgtgatcctgagaaccttagggttactgaccagctcaatcagtttcaattccaatagtattataatttcatctgtttatgaatcctggatggacttcatttcgtgcagagtggtattttctttggacttattgtctttgtgatcttgtgaatctcaggacaccaagaagaaagaccaccaaaagca

SEQ ID NO: 58726 - DNA, 807 bp, Populus trichocarpa
  Intron number 1 from transcript POPTR_0007s07630.1 (locus POPTR_0007s07630) derived from phytozome v7.0 (chr-ID scaf fold_7; pos 5989607 to 5990413 reverse strand)
ttaacaagaattgtcaaggaatcactggaaagaatgtaacttctcatcctgaacaagctattgaatatggcactaaaatggtttataaagtttcttcttgtttctttgtttttttttcttgaatgtgtttgtgtgattttatttcgtttttttattggttttagttggtggagtggcgttattttttaagtttgataatgggttttttctgttttggtctctaatggagcagaatcggcatagttgctcgtatagatgcatatttgtgatggttttggaggtggtttggtttttcatgtttgttaatgggtttctgagtgttttgttgaatgaactttagttctattattgcaaattgtgcagtgaatgcaagtttctgtgcaaaacaactaggttgctttgcaatgtagttatgaagctaatacatcatttacatgtaacaaattgctgtactgtcagaaatatgattgagttaaaagttccagccatcaattttttaggatagcctataaaagtgtgtagattatattaatgtttcatgaaccttctcctgatgtcaacctactggtggtttttgtgcttgtacatggaatgtgcagctctattgagttttggtcattgggcattgcaaattcttataccttgatgagataacatatatgtttatcattgtgttggatgtttgcacgctatcaactttattttagctaagagatatgttctttttattaagagatatcttcattgccctattgtgactgctgctcttatgattctatgcaactgaaacaggaaagcggtactaaa

SEQ ID NO: 58727 - DNA, 1010 bp, Populus trichocarpa
  Intron number 1 from transcript POPTR_0010s06490.1 (locus POPTR_0010s06490) derived from phytozome v7.0 (chr-ID scaf fold_10; pos 7839278 to 7840287 reverse strand)
aaagataagcgcaaccaactcaaactctctttcaggtatattatcaaacactttgcttataacacagctgcattttcatgttttagagaattgggtttctcttattgcttgttgtgataagttttatttatgcctcggagattttattgcatgggtttgttagtatttgattgcaaaatttataagctatgctaaatttgctgggggttgaaagctgtaagcttttgggatggttttcagttaaggatttgcttatttgtggttggttggtgtattgttgaggattatctatgcagtgaatgtagatgctaaagttgtttctgggaattgggaaagcaagttttgattttatcattctgactttgcatgaagtgtctgcttgttagcatggttacaagcgcaaggctccaatcattgcagtaaacaatggcacttgatgtaaagaagatcacatgtttaaaaatgaaaccctcaactgatttttccgttcaatgtgcctaaggtgtttggtaattctgctagaacaggctaacctttgttttagcttgatcctcgttaagcatcaagaataaagtgaaaggatatggcttttgttaggaagagtgaattcagttcttttccatgatagaaaaatcaggtacattccgttgatttatttatattgttttctggatgcgaggctggttgactacctagtaagaggtgaatatgcttcatttcttgagaaggggatacatcttttttgctcgttgattacttttgacaaccttcatttgtaatttatcaatggcttcttatgctgtatgagaccaagagggtggttgtataaattatgaaggaaatgcatgctctgatttttatgaactcatttactcttgctacttcttattgtaggtttattatcctgcatggaaaatttattgttataatgattattctttttttacccaactttttgactaatctttcatgcagagtgcggccttcgcaggaccaatccaccaaataaa

SEQ ID NO: 58728 - DNA, 792 bp, Populus trichocarpa
  Intron number 1 from transcript POPTR_0007s04170.1 (locus POPTR_0007s04170) derived from phytozome v7.0 (chr-ID scaf fold_7; pos 2512918 to 2513709 reverse strand)
ttcttgaagaaggtgctgttattttgggttctcaggtatttttttatttttattttttattttttgttggttttgattgtatccattgataaatgagttcttcatagatttctaacatgaagcttatgtcaatggatctccaataatttgatgacaacccttttttttttattctctgcaaaatgatgtttatttatttatttacaaaacgttggtatatagtcaaggtgggacattgggaggtcttaatggaaacacaaaaagctttgtagatgtgaagagaaagaatgcccctttagttgattttttttttggattgcaaaggaagaaatgaactttggcatgcttgaatatctgtgtagttaggccatggttatcatgcttgcggctactcttttagcctttttcttacaaaaagagaaaacattgttaggcagatgctgatgtgctaaaggacccgcatttgagcatccatcaaactgcatgccaccttgtctagattctctgatgtgtatttttggttacttttacaagtgcccagttgcttttctttactgcaaaaaaataaaatagtcactgcatatgtgattcaaaatttatcctcttgtgcttgatacgtcagcatgtaattgagtcagcatgcattatgtagttatcagctttttttcctgcttcgttttgatcattattatagtagtaatatcttttgccagcatcaattccatcgaatgatctttcgatgtacaaagagctgcttcaattttatgtttttgattgataggacccgaagga

SEQ ID NO: 58729 - DNA, 649 bp, Populus trichocarpa
  Intron number 1 from transcript POPTR_0010s24630.2 (locus POPTR_0010s24630) derived from phytozome v7.0 (chr-ID scaf fold_10; pos 20741159 to 20741807 reverse strand)
aagtggcaaagtcttgcactcccggcaaactccaggtctttctcttcctctctctaattaattagatcagtaagtagaatttcaaaacctgtcgtttaaaccgaatcaaactgtctagtgttgtaactaatacctagaatcttacatcttttacagattctgtttggttgctgagaaaatctaggaaaaatcgggtagaaaatttgtggttaatgcgtgcttttactctttatcttctttaaatgaaaaatccaaacatgggtttcgtagttttggttgttggataatgaattccttcggtttctttgcttgtctcgcttttttttttctagtagccaaacacagggttagggttgaattctgtaaactgatgtttctattaggtaggtttcacttaagattagatggatacttgtttgcatatgtgaatttgatgtttccgttttaaatctgaggttttgctgactgttggagctgtatttgtggccaactagatatgtttgttgcatgaattttatggttaatctataataatagaataatttgtgaactggttttttttttactattgataagaattttgtgttttgttgctgaggtttgaatgttgtctgattttatagatactttgaaggaataattttgagag

SEQ ID NO: 58730 - DNA, 567 bp, Populus trichocarpa
  Intron number 2 from transcript POPTR_0010s20700.1 (locus POPTR_0010s20700) derived from phytozome v7.0 (chr-ID scaf fold_10; pos 18181775 to 18182341)
tcagaggaacaatcttgggctataagaggtaataactatagtttggagcttggcttttatactctctgtaattttaatttgtacgtctttatgatttctccgagaaatttgaataagaaaagaaagaaattaaggttatttagatcagggggtttgtttatttagaagctgttatgttaattgaaatattgtcactggatttcatagttatagttaaagttggcatttgctagtttctagaaaacgctttgatctttgttcaaaagataagcaaaagaaaacatgtttttttatcgatgacagttcaagatttgcggttttagcttgcatttgtttatggaaacgaactatatccgaatttccagcaattttaattgattgacaaatcagggaaaagaatatgatagactggttggaattttttgtgcgagtttctgtaaatgaatattgtttgtcacaggaaatggaacttaggattttgtttttgttatgtggatttgtctggagattaaaatgttattttggtggttaggtcgaagtccaaccaatacccaaacacatctctga

SEQ ID NO: 58731 - DNA, 871 bp, Populus trichocarpa
  Intron number 1 from transcript POPTR_0001s16600.1 (locus POPTR_0001s16600) derived from phytozome v7.0 (chr-ID scaf fold_1; pos 13377764 to 13378634 reverse strand)
aatcctctacgagaaagcgccaggtaattttggcaacttaatcaaggagcaaaacattgagtgagaattaaaataaaagttgtatattgattgtgtattttggttgatgttaggtttcgtaaggaatttcattcaaatctcagtttagcttagttcaataaaaggcactggttactttcttaggaggttaattttttagattgtaaattcttaatttcttttgttttatgacattcttattgcaattgatttgaaggttagttatatgctttgtttttgttatcattgtttggattgcttccgtttgttaaagaaagtagggaaggtggatattttttcacatgtcagatcttttcagtatgatgttgtaggaagtaaagcattgattcttgattctgttctctgccttttatcgagcttcttacttgccaagcagactgagaaacttttcaacgatatgcgatttaatgaacggaagaggttgttgatgtgatttatctcaatttctggtaatttcacaagggcttaagagaaagttgttgccaaatgatatgtcgcacatggcatttctcttgttccttttcttataatctaagagatggtaatgaaaaattaaaataatttgcttccctggttttcagtgttattagatgggttgtttgtcctttgcttccttaattattatttttcacacgttctgattcatagcaatggtgaaactctttgttcttgttgattgaaagcccttaaatgacagggtgtggagttaaggggtggtatggatgtcatattttatgctttgctttggtttttctagaccataacctgtaatgttctgtgaaatagggtgacattgttgcgggtgctttgg

SEQ ID NO: 58732 - DNA, 660 bp, Populus trichocarpa
  Intron number 1 from transcript POPTR_0001s16710.1 (locus POPTR_0001s16710) derived from phytozome v7.0 (chr-ID scaf fold_1; pos 13498310 to 13498969)
ccattaaggagttttagtttgatctgctgcttctggtaataattgttattcttcatcaggattttgttttcattttagtcgcctgtatatattgctttttcatgcaaagcactaaagcatatggtcttgtttttgttagcccttttgctgtatagttttgttttttttctttttctaggaaaaatgtttttgttttaattttctttacttgtattcatctttcttgatcgttttaaatgtttgtgtcttttctttctccttgctatggatgttttaagagctgtatttgtatgattgaaggtgttgctgccctgttttccttgaacagagaatcgaaggaaaaccaaacctaaaggctttcttttttgtcttttttttccacaacttttctagacgctgagctgttttcaaaacccttttttggatgtccagctggtttcctaatgcattctacgcgcaataatcaagcctttttttcctcatgttttagaaacaaagaaatcaaatttagaaaacagagcatttcacaactctgtcttttattacatcgattaagttgcaagtagctggcatccaagttgaaatgaaaacataatataaattgtgtaaccctttattaatggattaacgttgtttgatgaatttatagggtaattggca

SEQ ID NO: 58733 - DNA, 850 bp, Populus trichocarpa
  Intron number 1 from transcript POPTR_0010s07430.1 (locus POPTR_0010s07430) derived from phytozome v7.0 (chr-ID scaf fold_10; pos 8482208 to 8483057)
gtttttattgctctagtaagatgtatttgacgagggtgaaattgtagtagaggttgatgattcgtggctcttgcatgaggactaatagttatacttcataacatgtctggttctgggatagaggagattcttcaaggccagaggtttttatagagcaccactgcatattgctgagtatcgtggtgactgcaactgcttacttgctcgacaaggatggtgaagctgtttggttaacatgttggtaattatggtgaaactgatgttgtttttgcattttaaactgtattttaaaaatacttttggctattttaatatatttatgaataaaacacaacatctacctattttctaagaagcctggagtacatcttcgatgtcaccgtcttgacccataaaattctgcccaatttggactcgtcatcctcctatctccttgtaattgatggagagagaagggcccaccaaatccctattaataaaaaaacagcagaacaaatcaagccatcatcaggcataagctgcctagaatcacgcaatcttacaatattcaaaaccctttcctgcactcttctagatttctctcttcccttgaaaggttcatcatctttcttctttcagcaaccttaaactggggttttcgcttatgttgcacctcttgtttccaactcacagactgagtcattataaacagcatggacattaatcctagtaacttcttaacctcttagtaatcaagaattatgtttcctttatcaattgccagtcaaagtccagttaccaagttgtctccagataacccaaaaatacaaatattcccttctaataagttatctcgcttgaaaccagttac

SEQ ID NO: 58734 - DNA, 795 bp, Populus trichocarpa
  Intron number 1 from transcript POPTR_0001s19440.1 (locus POPTR_0001s19440) derived from phytozome v7.0 (chr-ID scaf fold_1; pos 17114711 to 17115505 reverse strand)
aaagtggaaaagcggtatgctatccctgacttttcctccctcttataaagtggatgcacaattcaatttcccatgttaagatttgatgatattcccaaaatgtgcacttaatagactgctctaaaccatagcatctaaaatatttagtatctctgatgatgtatggtttcttggtggctgagctgtagcagtcatcctgttcgctaataatgcttccctacctgagctgtagcagtcatcctgttcgctaatattgcttccctacctgcgttagagatgatatcccatttgctcaatttcaactaatgatacaataatgtttaatcaagtttggactggatgattaaataacattattcttttccccccagtgctagcccttggctgatgaaattttattttaggtcaagaaatatgaatcaagatgaaccatcaatgctcttagacgtcattaattcatcctttcattgagttggctatttcacttgattaaaggcatttagtaacatttgaggtcaactctgatttagattgttagcactgggatggctcgatatattgattgtcatttttactggccgctctaaatcacagacctaaaatgttactaaatgtttctaaaataatttgaattctctcatacatcttttgctggcacatctcaatagatgtctatcatagagaagggttcatttttagatagaaattgcattccaatttctaactgaacctcttttatgctaaaaggtaaataacatgttgagtcccttctgcagaaaggtgcagtagcagtca

SEQ ID NO: 58735 - DNA, 762 bp, Populus trichocarpa
  Intron number 2 from transcript POPTR_0010s10690.2 (locus POPTR_0010s10690) derived from phytozome v7.0 (chr-ID scaf fold_10; pos 11140745 to 11141506)
atatttccccaggtttgtttttctgctggcattttttttattcagtagtctgaatgtttacatgaaaaatggtagaaattactgaagaatgcgtataacagtcctatctgtattttgtgaattatcattataaaaggattgtatttctactagagctggtacttggttattgacttgttatgaagttttctgtcttcaactgtagaattaacttcttttttcagctagaccacagctttgttcatacataccaatatgatttggcagtggtaacttgcatttatgccaccatcttaggaatcccaaagcctttgaatgctcaatgaagttattgtctaatttatattgttttttgatctgtcaggatgtgttatgattctgattaaatatggtattactatcttgtaatccaaatattccttctcaagcctgtaaaagaacattggatgaagattgtctagaaatattcaccacaataacattcctgggaatatgagattccatgaaaaacacaggattgcttgcaatcttaaattccaggcttgttgcatggcaagatagctgaaaaataatggatgaatgtcaagttgattagtataggattagcctacaatcatttactttggtggcaatcttatctggacctcattcatgcacacacacacttctatccatgtcattaggaccttgacatgtaggtcacaaactatatattttaatcagtgaagcttttactagggcatttggggccctggaggaaca

SEQ ID NO: 58736 - DNA, 544 bp, Populus trichocarpa
  Intron number 1 from transcript POPTR_0001s44140.1 (locus POPTR_0001s44140) derived from phytozome v7.0 (chr-ID scaf fold_1; pos 44617927 to 44618470)
accttgctgctgttcttgaatatctagctgccgaggtaataacgcctttatttctttcttcaattttgtgtctttgaagtgttttggcgatggttttgtgtgattccagttcgtgaatctagggttctttaatttgggtgatttttcttggaattagcttgttgtctttgggaattatggtgttaattgtgtttttgaaggggtgacaatggtcacacttgtgactttgtttggtgggttgatctcgatttttcggaatctagggtttgaacttgttcccgagtctaatttgggttttcaagctttaattaaatatttttctaatttgtaaaatttagttcaagtttgagtactggaacttgattttgtgttaatttttcaatgaattcggggttcaaaattttatgaatctgaacttcctgttttgaatccaaaattaggtcatgattaattaatctttttattttttatttataaattggttttgtatttgatgggttttttctatgttgtctttgctttcaggttcttgaattggctggaa

SEQ ID NO: 58737 - DNA, 942 bp, Populus trichocarpa
  Intron number 1 from transcript POPTR_0001s01190.1 (locus POPTR_0001s01190) derived from phytozome v7.0 (chr-ID scaf fold_1; pos 934686 to 935627 reverse strand)
ttcatattggtgctagaaaaggtgatctcaaacaggtaattattgtatcttcctttctttttttggctttatttattttctctcactcttttttgttttgctctggagcttgttaagtttgctacttgttgcgactctggtgtttatactttatattgatgaggagttgtatagtttatatattgtttatgttaatggatgcccaatgatttacttgagtctttttacgagttgttgtttgccagggcaatatgacgggaatttctttataagctgcaaaatagtgttctttctttctttcaaagttgtaaccttgtctttagttactgactttattttagtggattggagatcaaaaattcgtggctcaatgaggataaagtgtttggattcttgaattagttagttaatccccgctagttattttgaacaattattggaaggttctggtctgattattggtagctattttggcattgaacaactttaattagctggcaccctaaacaccaagatgagatctttcgccatagaagtctccttttcatttgaagtaatttgagaaaaaaaagtccccactctccctttatgcctatgcctacattagatcttccacaatctgctacatacacatgctttcctgtagttgttggtacaataatctgttctatctcttccattctaggggtggaaaattagatagaagaatggggttcctcgagagccagttttttattttgtttatgttatattatcctctcattttaactttatttgctttgcatcattgtgtttgtgtatattttcacttacgcaagcttctgtgtaaatatcaagaggcgctcttttgtactgaaggaagctgtgcaaagaattagactgtgggtaatgagtattgtttgttgattgaagattttttttaacaggtgaaacatttactcg

SEQ ID NO: 58738 - DNA, 1029 bp, Populus trichocarpa
  Intron number 1 from transcript POPTR_0001s32720.1 (locus POPTR_0001s32720) derived from phytozome v7.0 (chr-ID scaf fold_1; pos 30999143 to 31000171)
atactaaaaccctttgcctcttttcttcttccaaggtataatctttaccttctttgattcagtcctagtttatatctcaactctttttgtttccctttctcctttgacaatatgttttcttgtatttgactgtttgatgctggtgttttatgtaaaaagttatgtttttaatgatttttttggatcatgcatagtttgttttttagtaaagcttcgctctgtctgtcttatctctaatattgttttgttgtgtgctaaactgggtttgttgggttgtactcttaaaggtttttgttttgagatttggtttgtgtattttggttttgggttatgttttgttctctacacttaattctttgtctttgcttaagcctcagtttatagatgaactctttttttcccctttctctcgagactttatttttccttgtacttgaatgtttgatgctggtttttatttaaaaagtaatgttttttttatgatgttttatggctcatacatagtttgattttgttttagtaaagtttcgttctttctgtcttcaaggattttgtttgagatttagtttgtgtgttttggttttgggttatgttttgtttgccgcgtgattgattctgtcttgtttataagattttttctctgtttgaattgtgatttattttttagattattaatgatagccttttagagtgttttttttttaacctgggctgcttatggagtgtgaatggtgtgggtgcaggctcagctaatcttttagagttttttggttgtctgaatgatttttgtgttctgaataatccattttgttcttgtcaatgttttcggtttgtgtttttttatttaaagttagctatttgatctcttaagaaacaatgaatataaaaatcgacatcattatttactgtggctttgagatattgcatgattatgaattggcttactatgttttgagcttgtttgggttacatattgttaatgcttgatactgatgctgtgatatccctatggtttagtccataattgaa

SEQ ID NO: 58739 - DNA, 958 bp, Populus trichocarpa
  Intron number 1 from transcript POPTR_0001s29110.1 (locus POPTR_0001s29110) derived from phytozome v7.0 (chr-ID scaf fold_1; pos 27893766 to 27894723 reverse strand)
aaaagaattattcatattggagttatgtaatgagaaattttcttaagggtaaaaaaacgtggggatatattagtggaacttctgtgatacctagaaatatcaataagagttatactgctttgatagatacatgagaagcaaacaatgtaaagattattacttggattaacaattctgttgagcattctatagatacacagttgataaagtataagacatcaaaagaggtttgagatcatttgcaaatgttatttacgcaatcaaattttgaaaagcagtatcaattagagaatgatatacgagctcttcaccaaaaaaatatgagtattcaggagttttattatgctatgacatatctttaggatcaattagctcttgtagaatcaacataattaaaggcatatggtacctatattactcgtagagaggagcaacaattgatacagtttttaacgacactttatagtgattttgaaggaattagacgttcaactttgcatcgttctccactaccttttgttgacttagttgtcagtgagttattggctgaagaaatacgtcttcaatcttattctgaaaagagaattctttatacttctaatctttctatgctagcagtaccttctaagtcattctctaataattagaataagtcttacacaagggttgcttttgatgagtgcaatttttgtaagcataaaggtcattgaaaggtttagtgtcctaagttgagataacaaaatcaagcttgaaagcctgacaactagtcacaatctaatgttcatagaccatttcaggcaataaaccaccataccacaatactacaacaatagtttcattaggttctttcaccgatcttggtactctgactaagcaatttcaaaagtttctctctttacaaccacaagttatgtccatttttttccctataggtcggttgcctcatagttctttaggt

SEQ ID NO: 58740 - DNA, 913 bp, Populus trichocarpa
  Intron number 1 from transcript POPTR_0001s12930.1 (locus POPTR_0001s12930) derived from phytozome v7.0 (chr-ID scaf fold_1; pos 10026020 to 10026932 reverse strand)
ttgacaaacacccaaccttggaggacctcctttgtgtaactattattccttcactttttttatctctctctcttttctttttatctgtgtttatttggcggtgatcatcttggctcttgcttggtttcgccttctgatctttttatacgtcgatgatcaagcgtcttctttttctatgaatatgtgatacagttactacgctttagaccttgctttaatgtatattctctagccttctaggggcttgaggtacctgtttatgacaattatttagtatcattattgaggcaattagtttagggaacatgtcttcttcattttctatgccgtagaaagtatatcttaagaagtattaacatgtacaaagggatgctagttattgcttaatctttgcagccgcgggccttataataaatacattgtcgatatgttcttatatcatgaacttttgctccagctcttattcaatccttttgaaatgatttgccatcaagtaaattggtccatctaattacaagcatttgtttcggattttttttgcgtgaatgaacatgtgttaatcctgttaaacacaaaaaaaaattacaacatgttttgatggtgttaaaactgctgactaactgatctcgaacagcgcttttaatggattttggagtttgtagctttgagctagcatagaagatatcagattctgcgatagtggataacaaggaagagttaattccagatatagaatttcttggttttcgagctgtagctgaatgaattaaaagcaatgatctattatctttaattcatggttgttgctggttatttaatcctttcctctttccctttgataattgtggactttgttcagttgttgtttaacaagatctctatcacagtgtcaggtgctctcaatccagtggaa

SEQ ID NO: 58741 - DNA, 1061 bp, Populus trichocarpa
  Intron number 2 from transcript POPTR_0001s15590.1 (locus POPTR_0001s15590) derived from phytozome v7.0 (chr-ID scaf fold_1; pos 12449975 to 12451035)
acaaggctcgccgcttgggctataaggccaagcaggtaacactttgattaccatgcttagtatgggtcatgtgtttctgagatctcagttagatcattgactgctatttcaatattttggcttttttatgggttttgagcttcagttacatttgaactctatgagtgttctttttggttagattttgttaactgattgagtttaaagccctttaatttttttgtttgtggagtactctttgaatcctttcatctgaattgtgtagtgtaataaagtatttttatgtttggtagttttacgttttgttttgtgtttgaagttactggcttttgtgttttatgatggatatggaactaagtttagaggtatgtttgttttggatgatgacgtgtgtagttgtgtgccgctatgtttagatacgtaatcagctggtgctcatgttattgttgtcattgcttaacaatgcggtttctcatttgcattgtgcgattattgctggttaggttgcgtcttgatgtgtattcattcttccaaaggagggtgcttacttacaatgaaggaatgcttcctgaaaccagcaatatcaaaataacttgttttgttcaaattttcagcttttcttaaagaacactaaatatttgtgatttgatagttaggtgatgtttataacattgatgtttataaaaatggagaccagtaatgctgttctaggtagatgggaagaaattgtttagaacttaaattagcaagctgtattttttcagaacttgttttgttcaaattttcagcttttcttaaagaacactaaatatttgtgatttgatagttaggtgatgtttataacattgatgtttataaaaatggagaccagtaatgctgttgttaaatcaattggttaatgttgccattcttactcttgttccttcacctcatcttaacttcttgtttttgaagtgtgcttggctgcacaaacaattgtcaattgttttgtatgtctgcctggttactgaaaatagtttttttcagggctacgtggtttatcgtatccgtgtcaggcgggg

SEQ ID NO: 58742 - DNA, 435 bp, Populus trichocarpa
  Intron number 3 from transcript POPTR_0001s04950.1 (locus POPTR_0001s04950) derived from phytozome v7.0 (chr-ID scaf fold_1; pos 3804490 to 3804924 reverse strand)
tctgttatcaaggtatagctcttgtatatgaagacttttggtcatgtttacatgtagaagatctttcagttttgtagaaaaaaaattcaggaaaatacagtattaccagaagatagatttccagataaatgatgaaagctattttgtagatgtgctgagaagtttttaaatttgtcttctcttttcattatctataataatgataattgtacattcaggtattattttgattggtagtttataatgttatagttatgttattctttagataccttaacaattatattatgtttgatgctattcaatagctattcaatagttattatagatgtgatgtgtttttatatatatatgtctgctaatatcatgtgccttctttgtccttttgagaaaatttcagcaaaagctggcaaaaagggagggtggaaccataga

SEQ ID NO: 58743 - DNA, 780 bp, Populus trichocarpa
  Intron number 1 from transcript POPTR_0010s21570.1 (locus POPTR_0010s21570) derived from phytozome v7.0 (chr-ID scaf fold_10; pos 18794820 to 18795599 reverse strand)
tattccttatcaatcccttgctagctatcaaccaggttcagtgaatctccatccattataaactttagaaaatatttctcaattttgcctgatcttggagttctctttccaccctgctaaccatctcagtttcctatatcctccatttaatggcttgtttaccttgtttagtggcaggctatcaatctgtatcctctacctgcagcaacatcccacagcagtcaatgctattgagcaagggagtctctattacagaggttcaaatggtaaacaatacaccgtttcctgttactaatttatgtgtgatgggagaaagatttgaagtaatattttctagatgttcttgtacgttaaactaattctggcttaattattattatatttatacaatgtaatgtctctagttcatctccggcctcttaataaatcttgtcatattttgctaaaccactagttaatgatcatttgaaaagattagtgacaatcaatgcatgaacagaaaacgattgagtgaataaaatagaaaacaggtctagcttgcatatccctcatggacaataaaattcattggatgttagataatatatagagcagtccttgtcacatatggaccggaaaagaatatattatgaagaacttgatggataattttttgttgtggccatccttatggacttgcctgcactgcaccaccaaatttgatttaataacagtctgtagaacagcaaagtagagcatcaatctcctaatcttacccttgttcttcaggactttcaggcc

SEQ ID NO: 58744 - DNA, 589 bp, Populus trichocarpa
  Intron number 2 from transcript POPTR_0007s00300.1 (locus POPTR_0007s00300) derived from phytozome v7.0 (chr-ID scaf fold_7; pos 83070 to 83658 reverse strand)
acgacgaggtactttaattgttagattacttgtttaatcagtctttttccatgtgctgatgtccttggccacccaattgttgtttctgtactgttatatcagacattttattggcttgattcaaaatctggctcgacattgttttaatttgattttcaaaggcttttaaaggtctctgcatgaaatgttggttgagacacggtatatttgcatctgtaaattattccatcttctcctgccttgctagtcaatgacgtcatgaccttttcccgaggcctaatcgtgtaccttattctaacataattggattgcgtatgttaactcaaccgtgcagaattgcttgagttgctacaatcataacataccatcaaatgaattcctttagtttttaagtaatggtaatgtatgaccacttctaacatgacaatgcgcaaggtactatagtgggattaagtgccttcaactcttcatgtttgctgttgcacattctgttatgatattgtgttttttcctgcactaaaccgtgtcaataatttttcctaccttgtatgcaggaataaaaaacagacagcatctggagttgtttctt

SEQ ID NO: 58745 - DNA, 755 bp, Populus trichocarpa
  Intron number 2 from transcript POPTR_0001s12520.1 (locus POPTR_0001s12520) derived from phytozome v7.0 (chr-ID scaf fold_1; pos 9715184 to 9715938)
cctctggtaagtgatgaatattggtacactatcgtccctgcattgtttttcaagttcttatgataaaatagcaaaggatcttcgtggttgctcttccttcaaactttggttgttagaatcctctcattcctttcttttttcctgtcccttttaatcttaattcatagatgggattaatgcgttggccttcatgctctggctggtgggtatcaccaggacagttttttcatgttgataagagattatctgtttggtttggtcgtcagcggtgattggattttaattggcttggtcaaatcttgcattttgcaacaaacaaatttaggctgtgttattattacctaaaacgtgacgttttgaaggtcacttgtacggattttgtaagtggagctaagctcttggcagagaaagacgaagctgcttgttattagcagctaagcaatttggtatccttagcttttctatgtttctcactcctcaccctctaaacctgtacaattggtaatttcttcttgctgagtatatttcccttcttggaagtgaaagcaaatatcataacaataataaaaaaaaaacttaaatttgggctgattctaacaacccttcattcattttcatttcaaaaattttaaggccatggttacttctaagtatgtagattcttagttattattttgaggtcagttgtccatgtattttttgggctttctcgtgagccttattcttaagttgctttgttatgcagctttttgtca

SEQ ID NO: 58746 - DNA, 223 bp, Populus trichocarpa
  Intron number 2 from transcript POPTR_0001s44820.2 (locus POPTR_0001s44820) derived from phytozome v7.0 (chr-ID scaf fold_1; pos 45213104 to 45213326)
ctgatcacctgactgggctcctccggttggttaaattcccttcgccatttcttttcttaattcttgggacatcggatttcataattaatcttgctaatgctagctcttacatggagggacacaaaagttaacgaactcaaaataaaagaatcaagatgcactgttgataattaattttctctccatcgctttgtttcctattcgttgtgttgccagcaaggaa

SEQ ID NO: 58747 - DNA, 710 bp, Populus trichocarpa
  Intron number 1 from transcript POPTR_0002s12750.1 (locus POPTR_0002s12750) derived from phytozome v7.0 (chr-ID scaf fold_2; pos 9493346 to 9494055)
ctggtcacgagtcagtcgagttggctcaattacaggtactgtcttcttggatttgctgttgcaaatttatttgtttttgcctgctttttttgttgattcttagcgcagttttgataccttttttatttacttttttcttattttgaagagccaatatagcagtgtgtgtatgatttctttttctttttctagcttataaactgtaaagcaacattaattttttttctttcaatatttaaaatcgcaaagaatatatatatgtttgtttgttttttaacactcttttcattatgtttgtgattcaccgatatatggttctgatgtccttaattcttataatcatgaatgttgagttaaaaaatcatttgattattacgacataagatctttgctttttatccttgaaaaaataaaatataaaagttgtgattgtttttaaggaaattgtgctaagaaagtaggtttcatgatctgttgatttctgtggaagttattattgcttgttttgttccttcaacctaagaaggaagatggttcaattgtttaaataacaatctgttggcagctcgtgaggatattttcttaccacaagattaaatgaagaacatcatacatgggaattaaacgatcctttctttttctttttctttttacttttcaatgattctaattctaattataatgttaactatacatgtcaggattcaccg

SEQ ID NO: 58748 - DNA, 822 bp, Populus trichocarpa
  Intron number 4 from transcript POPTR_0002s06640.1 (locus POPTR_0002s06640) derived from phytozome v7.0 (chr-ID scaf fold_2; pos 4463899 to 4464720)
agcatctaaacaaattagttctgctatttctccaggtaattcgtttttcagttttgtatgtgcaatcagcacaacactaaagatgtatttatttaaagttgctattatgagaaaaacaactatatcataatttcagtgctcatactgaaactttgttttgtcgtgatgaaccaagagagggccacaaaaggaaattttaacacaaaaaaagaaaaaaccaaatactacgtgttgctttaatcttgttattttatacataatgacgttctggagcttcttccggaagaactagccttggaaagggaagatgcggcaaatataagaggcgcttcacaaatcacaagttttctcaaagtgagcttgggggtaataaactgataaaaatatattcaactgtccaaaatgtatcctagtacctatgtctcccaaacaaacagaaacttagtcttgttttgacactatttttgccgtcaaggattgattattctaaggtttaaatgtcttatatttattggtctttggacataatggatttttcaataggcgctgtcggtaagagcctgtagagttcttttggaccttggttgggtttggttgtgaattatcttttagctaaagttttattgagtggtgaaaacctgatttctgatggcccaattcctgcaattgcctatagcgtatcttggttttccacttcagttactgatatggaatgaagctccaagttaatttatttatttttgtatgctcgtactaactctaaaaccatcccccttttatcctgcagaccaaaatactactgcttttaaagaggtcgcaatt

SEQ ID NO: 58749 - DNA, 788 bp, Populus trichocarpa
  Intron number 1 from transcript POPTR_0001s15720.1 (locus POPTR_0001s15720) derived from phytozome v7.0 (chr-ID scaf fold_1; pos 12539062 to 12539849)
ctccgcgcatacaacacaggcgctctaaaaggcatgttttatatatatatatatatatagtttactatttttgcttcttctttttatttgttatttgttatgagtcattgttgtccatgacatgctgactcaaagttggcttgtttattgcaagatcttgtctttagattcctagtgttcttttttttttccagtaaatttaatttggggaaggagaagatcttttgaattttggtgtgggttcggatatgaataagaagattttaagttcaacttcatcgatggaatggaaattttgggatctaagagttgattaatgatggaaaaggaaacatatattctcttgttgtagggactaggaataattgagttcgcttgagctaattaccatgaaggtttttattagtggtaagggctaattgtatgtgccacacaataaactctaagaaggtaagtgatagaatcaacgagttttttcaggcactggaaagggaatgatatgatggcaacaacaagataggctgtttcactttgtcttgacctgatagtttttccagtttctggttttccttcgaactctcagcggttttaaaatgaaaaacataggactatcgtaatgatcctatgaatgataggtagctttaccacaaaaatgatttctgcaatcaatgcagttgtgattttatacggtcaatatattgaataatgcaatgatcttattcatctttttgaccttctggcatttcatttcagtgcatctgaaaggaactcagtcatttcagggggtc

SEQ ID NO: 58750 - DNA, 859 bp, Populus trichocarpa
  Intron number 3 from transcript POPTR_0002s19200.1 (locus POPTR_0002s19200) derived from phytozome v7.0 (chr-ID scaf fold_2; pos 15125493 to 15126351)
gaaataggccctggcgagtctcgcaagtttcctcggtaagactagacgggcccgacccaatgcattttactatgatttctactcattgcttcgtttacttgtatttccatattgatatccacccactacttctaaaagttcgctgcctttacttgacttgatgcatctaatattgaatcaagttatgtcataataatatgtcgaatgaatagctagctcattgctgtttgttattcatgcctcttagcgttcttgtttggatactgcaggcctaaatttgatgatgacccaccttattagcaggataaatttgaatcttactcgagtgttgttttagtctttctagatagagaaggattccaggaatttcaagcttggcactctacttttagagcttgtgtcattcttgggatgattaaaccattttcgtattgagttctagctaccacagttttggaattgggtgattgagagagcacaattagaagaaaatataagtttggaacttcgtacaattttcattggatcttgttactaactgaaagtttctaatttggactttatctttcttgtatgcagagaaactgagatgcttttaagttacatgaattgatgattttgtacaatctcataattgcaaaaaacagggtgcaagttttatttgaccatacggatttctgagttcattattgctgcagcattttgggtcatatcaacccttttctcttgtgctccacaattgaacttcttaagactctttgctaggcaacttagttgattacagttagttctaatttctactattttttttttttaaaatgaaggctctgttgaaaattggtattcgtggtgttactgt

SEQ ID NO: 58751 - DNA, 835 bp, Populus trichocarpa
  Intron number 1 from transcript POPTR_0001s21270.1 (locus POPTR_0001s21270) derived from phytozome v7.0 (chr-ID scaf fold_1; pos 19663422 to 19664256)
gcagactgcttttcctatttctgtttttggtgtggacaaagatctcttctcatatttcagcatatgcaaaattttcacagatgaaaaagtttatactgaattggtgtagtacgtttataattctgtagaatcagttgatgagttacttggtcatcgtgcagtggccagagaaataggggaaatgtttctttcaccatttggtctagttcagtttatgctagtttatttgagaggggtgtctggtttgggttagagaaaaatacaagagcttctggagaggatatccttatgaggaagtactagtaaagtataatatgatactgactaaattgttccgtgggtttgtagactcagtaatgtgattttttaggggattctttcaactgtcttttgatgcttgaggataagaatctgcttcgttattattattattattattattttttaatttagtgtaggtgctcatactttgcttgtacagggtgcactagtccttttttgggcttttgtttttcttttgctaataagtttattaataaaaggcacatgataaatctttttttattgataagtaatgaatcctacactttctgcctcgttgccttttaggttccaatctgatgaaaccagttccaagttccatacattgttgctatttttcaagtgaccaagattttaagccaactcagagcttcatgtatagacttattaatttcgatagcctttaatctccattatgaggattggttttgttattcatttgcttaacatgtttctacccttgttgtggaatacggttaacatccttgctgcttgaatggttgtttatgtacag

SEQ ID NO: 58752 - DNA, 307 bp, Populus trichocarpa
  Intron number 3 from transcript POPTR_0010s08660.1 (locus POPTR_0010s08660) derived from phytozome v7.0 (chr-ID scaf fold_10; pos 9547972 to 9548278)
ctgtgggtaacatatttggtcgctggtgagttattttgtcaactattaattttgttttctataatcatttttcacacacaattttcaaagatatatcaagctttcatttgtgtaaactcgataataactcctatttgttgctcaataaggctggttgtttgtgtttcaaagtgatcattaatttgatttttttgttcgtgatctttggattgaaatgttcgattttaagcacatatctatacacctctctttatttttttgggtttcatttttctgtaattttacttgtgttgtgtcttctgcaggg

SEQ ID NO: 58753 - DNA, 687 bp, Populus trichocarpa
  Intron number 1 from transcript POPTR_0001s43080.1 (locus POPTR_0001s43080) derived from phytozome v7.0 (chr-ID scaf fold_1; pos 43165846 to 43166532)
gttcctaggaatccaaagcaatctcacaacccaaggtactaaatttcttgctccattttgtgtttcttttcatttcagtgtttggcttgtcttggttagttaaattggttgcattttatggtttgtttttgttaaattgctgtacttttatgttgttttcttgtctagtgaagaaaatttaggtaattttgtttgtctttttgttgtatgtgctaatgttgccttcttagcaatccataccaatctcatttaatggggtcctcttgttcctttctgaaggttttctatggaaattgtgcaagtttgtgtgtttcatacctcattggataaggatttatttaccaagcttgacttaatttttctccccttttagttttacattttttttcatgaacttttctctcattactagatgaggaattgaccactgcctccatttattgatgatgggaatagataggatcatatagagtgaattaatgagttcttaactagattttacgttgtttttttgtttaatcatttgtccgtagttcacctaacagaatcaatgattgtgcttgaaatctatgcttctcccttaacagtttctcccttgagttttaatccttttggcgaagatgaagaagttgagttaaacgtaattaattaataatgtttttgaatgactttgttgtgttcttagga

SEQ ID NO: 58754 - DNA, 959 bp, Populus trichocarpa
  Intron number 1 from transcript POPTR_0001s03970.1 (locus POPTR_0001s03970) derived from phytozome v7.0 (chr-ID scaf fold_1; pos 3162117 to 3163075)
agtgaagtttctccgaccagagaaacctccatgtatgttcttttactatgctttccattcctttttatcccttctctttcttctcctcgatggagaagtatggagaaatgctcatgaaattaaatgagcactttctatatatgcagctaattctggatatcaagctagggttttaagttctgatctttccctatccttcttagattctattatatatattatcaaagctactatgagatccatccatccatccatccaatgtatgtgtttctcttaaaattcgaagcaagacttctttcttcctcttcttcttcttcctcttcctcctcctcctcctcctcctcctcttcttgaattagcaatagggacatgatttgatctcgagaactctttcatctcactacttgtaagcaatactgtgaaaaaatctttctgattatcgaagaaagagctaagttagtgtttttttaattatatttattggattccatccatatatatatatatagatctagatctttaagagctaaaaacacagtttgattattttttctctcccaagattagtttgtgttgatttcctggtgcatatataattaaatccaatttcctggtgccaaaaaatttatttatttttttaagggaaaagaaaatgaaatctagcctcatgatgtaaacacagctagccgtcgcaagctcgtcgatatcaacgtccccaccatgattattatatgcaataatgcactttcagttttattaagatcgatgaactcttcactactgcggtgattgtttttcattctttagctaacaataaccattttgctttcagtacttgatgcttcaactatatatatatatatttatactaaagcaactaattaaatcactccatgctctatatatgtacaatcattaatcaagggaaactgaggaggacaaagaagagcagcagcagc

SEQ ID NO: 58755 - DNA, 958 bp, Populus trichocarpa
  Intron number 1 from transcript POPTR_0007s03070.1 (locus POPTR_0007s03070) derived from phytozome v7.0 (chr-ID scaf fold_7; pos 1768788 to 1769745 reverse strand)
tcctcatcaacactttctacaagctggagtgtgaggtaggcaattttgtaccgcataattggacttcacaactatttgtacttctttttcggtttctgggaaaatctcattccttttcaattcccatcccaaaccaattaatttcatcaattccatcccaaagctatcttagacaatatgtccctccattcaagaactgtaatgtgcttttttcttttgtgtcttttggctactggaggaggcaaatatacatcgtctaatttctaatgggtctgggatgaaatgaataaaattaatttcatagggatggatttgagaatcaaacaatattatcttagaatcataatgaggtcttctctactcttttgctttctatatctattcgtttgccttgatttttatttttttctagaaatgtattcaaacctatccacatctcggtctgcatgggtattgttgagttttatacttgattaaaaaagatgaaattgaatggaaaaaaaagaaaacaatgaaaaaaaaaattgtattgaaaaaaacagagaaaaaagctttttaattatggaacttcataggtcgtatgaacagtgaaggcagataaaaaaaaatccaagttttttagatgcttaggcttagggtaatttctacccggcatttgaatatagtgagacacggtagtccataggtcattatatgccataaattaagtcgcatctctaagcacatgtcaaaagaagaaattataatcgttggcttctttacatgttggtggccaatcctaatatcaagatcaaataattgtgaattgtaaaggattaaaatttgaactcttagcagtaaaggtaacagaatcatgaatatttagagataaataatttgaacttgtgtttttatgttatgtaaattaagggtccaaatctccacaaatattttgttgttccttcaggtagtggataca

SEQ ID NO: 58756 - DNA, 933 bp, Populus trichocarpa
  Intron number 1 from transcript POPTR_0001s40970.1 (locus POPTR_0001s40970) derived from phytozome v7.0 (chr-ID scaf fold_1; pos 40536782 to 40537714 reverse strand)
cttctatctttgtataaattctcaagctttattagtcttttattattttgtgccatttatgtcatgtacactgtgttggtttttgcaaagttagagactttattggttgtttttcatttaactactcgtttacttaaatgggcattcttgtttcccatgttaatgatgttaatgtaaatgagaagttcataatttgtaagtaggtactgtgttagggtgaacatttaaggatttggttgttggttttgaggtaattttgttgtttgactcaattgcttctcaggttatttttcatttttgtataatttttgttttggaagttgaatgctatgattgcttgcaagttcagtatgtttggtggtagattgagtttgtgggtggttttgggtttttttttccctttcatgaacaaagtatgtccaagtttaaatcttgcggggttgttttagttttattgtgttgcatttctccttggcttaaatgggatacctggtttttggtctatttgtctcaagttgaatttgtactttaggatttcatattggtggtttaagctttgatgatgatttattggcattttggatcatttggttaaagtgctaataatgactccttcctgaaactgcaacgttttgctggaacaatgtacctttgtgcaatttgcttttcgttaaagaggttttgatggcaggacaaaacctacatcatctatttcgttcacttcatgtgtggataaaatgcaagcatttttttaagtcataaatggttgggaacaacatcctagagatcattgctttttatgcaattatttgtgtttgccgagtaggcgcactttcttacaatctccttcccttttttgctactttactcgtcattttgggtgaacattagttttcttatcttctttgcaggctattgctactttggggacct

SEQ ID NO: 58757 - DNA, 493 bp, Populus trichocarpa
  Intron number 2 from transcript POPTR_0010s15150.1 (locus POPTR_0010s15150) derived from phytozome v7.0 (chr-ID scaf fold_10; pos 14498885 to 14499377 reverse strand)
tcgtatcacggcaggggtgcgctgcctctttactggtatacatcttctaatcttggatgatctatccatgctccccatgccacaccaatttctatatttccctcctcgaattcacttaattgataaatacaaacagtaagaaggcatcaaagcaatattcggaaattccaaaactcattctccattaaccatcctccacgtgcaatatcacttccatgaaaacatttaaaagactatattttcttgtagtatatttaaagtaaattctttggtaagtagtattttctaagaatagtaggttccacctacctacctacctaccttgaagcagaaattttgtacaatcaatctttgagtgtacaaaaggtaatcttcagattttggatggcgtatgtctaccatgacagtgtttaattaacctggcggtcttctcacaagctcaagcattcgtttatttttgtatctgctgcttccatttacaggaactacaact

SEQ ID NO: 58758 - DNA, 625 bp, Populus trichocarpa
  Intron number 1 from transcript POPTR_0001s34220.1 (locus POPTR_0001s34220) derived from phytozome v7.0 (chr-ID scaf fold_1; pos 32350160 to 32350784)
aaggtactaaccctttccctatttttttttttgataatcaaagtaattagaaaaactatgctctattggatttctcttttatcgttccaaattgtcaagcttcgaggatttatattgatattaacgaatcattcaaatttgaagtaactttggtagagaagtccatgggttttttacatctaaggatgatgaatacggctatgattatgatctttctggacctacggtaggttatttgaagcagctttgtttatgcagatagttttccaaggggatgaaataagttgctaaggtatcctattggatgcatggtaggaattttggtaatttgtttgtaatgatgtgattatttgtttgattatggtaattagctgtttgaggaattggaaaacaactatgagtgtgtctataatttgtgtgtttttggatcacaatgaattgaaataatgaaattctcttggatttgtttgttctatgtagtgttagtacttgtatttgttaaaaaaatatgagatctcaaaataggagtagtgttatttttccgtgttatggattattgtttcttttctgatgataactacaaatgacagagtggaaagagaaggaggaagggaaagaggtgaca

SEQ ID NO: 58759 - DNA, 520 bp, Populus trichocarpa
  Intron number 1 from transcript POPTR_0001s24070.1 (locus POPTR_0001s24070) derived from phytozome v7.0 (chr-ID scaf fold_1; pos 23456725 to 23457244 reverse strand)
cattaaacgcaaagatcaaacacaactaacttcaggtagctaaagtttgcatgaccaaagtttttatcttttttaattttgaaatgtaacccccccctttgttttcctgttttgttactatcgttttaataattgttttcagtcaattgatatgttatagggtttcttttctcttgaaaatcaattacaatggactgcaacgcaaagggtttcttatgtttttaaatttgtgatcattttttttctttcgctttaatttgaaaaaaaagaagaataattttcgattttgtttatttttttgctaaaatgggtttgctaaaatgtataatcgtttaatttgaaacatttctctaaatgaagagaggtaattcttcgttgttgttggggtttatgttttgcatacatagcacaaaacccttctttggtgtacactatttttttttccttgtcgtttgtgtttgctttcagctttcatggccgtcccttttgattgtttgttattcttttctttttagggtcg

SEQ ID NO: 58760 - DNA, 458 bp, Populus trichocarpa
  Intron number 2 from transcript POPTR_0001s38760.1 (locus POPTR_0001s38760) derived from phytozome v7.0 (chr-ID scaf fold_1; pos 38001177 to 38001634 reverse strand)
ttggtgactcattacaggtacatcaaaactgctgttttcaatactgtaaaaaacaagtttctgctccacaaaaccagtaccaataaaatctaacggtgtcatcccaacagtttgcccgtctaatttttctactcttctttacatcgacaccttagtagacattgaggcgttgaagggtagccctcagacttcaaattccttctatttttggaagaaacatgatattagcttagctggagatgtatggaatgatgtcaggtgactttaagagcgaaaccctcttccgtacacgtttaagggatcggctccaatgtcctttttagtgaaattgtgtgccatcgtaatagtcaaagtcaactaaaagagtgggaaacttctgattttcttccttccttccatacattgaatgtagtgatttaatggagtaaatcttggtttggtgggtggctttgcaggtt

SEQ ID NO: 58761 - DNA, 683 bp, Populus trichocarpa
  Intron number 2 from transcript POPTR_0010s09260.3 (locus POPTR_0010s09260) derived from phytozome v7.0 (chr-ID scaf fold_10; pos 10130394 to 10131076 reverse strand)
tcatctcaagtttcttccttgcatagttcctgactgtgagttctctgtttcttcttttctctcctgtcattaatcaataagtacatatttgttcaactacgagtcctgtgcgttcactttaatgatttagctagctgtggtttgtccatgtcgggctatacatggtgattggtaaaatatgacaaaaattatgtgaaattgaagatcaccgagtaagaacagagtaaaaactgtctagaaatatgtgcaagactttgtcttagtttaaaggaaggagggaatattcttttcaaaggagtggaattaactaaaacaaattaaaaaaaattctgaattgggaaagcaaattttattttttttgagttggtaatttatgccaatcacaaccgtccttaccttgtcaaggacggttgtcttgctgagatgaattaaatttactagagaaataaaaccgaatgcttgtcaagatttgatgccgatggtgatatctgcctacatcatcaagtcaaggattaggttattgtttatcttcaaaaatgttggataactagacagaaagattaatgcgatccatatcattttcgtatgattaaatttcgtgaagaactttttttgcagctctcacacttctgaattctgattgattatctgatccttatttccttaggtaccttgaactcgtc

SEQ ID NO: 58762 - DNA, 664 bp, Populus trichocarpa
  Intron number 1 from transcript POPTR_0010s14170.1 (locus POPTR_0010s14170) derived from phytozome v7.0 (chr-ID scaf fold_10; pos 13846136 to 13846799)
tcgacaaacttgaacgcaacctcactctcgctcaggtcttctccttctccttctccttctttctttagttactgtacgtgagcgataactattaactttaaaatcgttttgaattttttccttttttatatatttttggtgttcgttttattattttttggtgtgcggatgttgtcatcattgatgctatttccgcctgtttcgtttttgcatggttttgtttggttgcggagaaaacagagtaggcgaaattagttgctgttgttatttgtgattgctttcttcctgatgaatattctttcggtgattatttatttatttcttattacgtcctaatcgttttttattttataccgtgaacgttaatctaaggaaaaaaaactaaaaataatttctgttcctttacatatttgctagttggttagtgttttttttttttttttatatatatatgaatttatcttatacatttttccttagtttggcctcatatctgttgtggaccgggatgaaaagaagatatgaatcaatgaattttattttttatatttgtattaccataattgatatttagattattgagaggaaaatattaagagaagagttttttgtttttcgtgggggtgaagagtgcttgtaatttgagattggcgggaatagaaga

SEQ ID NO: 58763 - DNA, 733 bp, Populus trichocarpa
  Intron number 3 from transcript POPTR_0001s03460.1 (locus POPTR_0001s03460) derived from phytozome v7.0 (chr-ID scaf fold_1; pos 2796383 to 2797115)
gaggttagcattgaatgctgttatgtatattaatatcttttctgatatctgtcattattttgtgaaaaccttctagttttgttccctttccagatgctaatattttataatattttttcactttctttacgacaatggtatacctgaccctttaaaaataggaggtttgaattagatataagcatttctttttcttatttgttaaaggggctaggttagggagactatttatgacctgaagtgtatgcttatgtggtgagtcagggctttagaaacaaggattaatactttgagcatgttgaaagggattagaattggtggattgattgaaattggaatttgttttaaaatttcaaagaaggattcaagaggtatattgctggatttctgccagctacaaatactgtaaggtgtaaagatccatttataacatattcaaaatatttagaagaatcagatgagatggatgctggtagggtggaactagtggtagcatcagggtcgattcataatcaattattcttgtgctggtggctcctcaagcatgcatcaacttacccttcatattgagcaaggttcatcattttagttattggttatggtgattatcatagttgtctaatgcaatgcttgtaatcatttcctgggctagtaaaatgcagtctgtgtcattcttatcaatttctattgttttgcaggccaagcagtggctaagttctgtgctaaatatctt

SEQ ID NO: 58764 - DNA, 778 bp, Populus trichocarpa
  Intron number 1 from transcript POPTR_0001s13290.1 (locus POPTR_0001s13290) derived from phytozome v7.0 (chr-ID scaf fold_1; pos 10384840 to 10385617 reverse strand)
ttccttaccattgggaacagtgtttagatttgaaggtaaacagacccttttagatttgaagtcactttctatcgattacagttacaataaatggagatcttgtattttggtttcctttttgttttgttatatggtgtcttttaattcttcactgtctttcatttactgatttgtatttaatgctttctttctgctctcacctcctcccacatatataagattaagaaatagggtttccttttcctttttttcccccctagaaagaaccctaaaaagagaataatactttcttaattagttttggttttgccccctttgaatctatcccaagatttggtttgcatttctagagtgaaataaaaagagaaatcatgtctaggtaaaatttgttcctgtaataatgaatgttcaattttgtttacataaaaaggaaagtgttttcagggtttggtattgggtaggtacattttgatgaagatggtcgagaataaaaaaatggaaatacggcatagtatacttttctgcttttactagttcatgtcactggatgtataggcagcagaaaaacattttctttatgatggccattaattcaatagctaaattatgatggtcattgcttgttgctttttcttctttcataaattatattctgatcatgaatcgtatctttgtttatggcgttactctttttttttttttttgctttttcataaattacttttttttttctgggtgtaaatgcagacaggggaggtatactacataaactggagga

SEQ ID NO: 58765 - DNA, 884 bp, Populus trichocarpa
  Intron number 1 from transcript POPTR_0007s13110.1 (locus POPTR_0007s13110) derived from phytozome v7.0 (chr-ID scaf fold_7; pos 13270388 to 13271271)
tctctgtaagcctctatctttttctcttcttttaatggttttaaacattccattttttttcttttatttcaagtttggtttgaatagctggttttattttgttgatgctttttttgatggaatctggatttttttgtgctaaaaaataaagggtatttgttagattttcaaatgggtttttttttagcatttatattttagtgtctgctgcatgtggtttcagggttttgtttgaccattctggtcttgcgtgtgtgttttctctttctcttttgttttctttttttttctttttgagtttgcaagaactatattttgtgtttttcttggttctttgtttgatttttgcgcatgtagactgaggttttgttttgtgtttttgttcatttttactgattttgaattttttttttcgagtgatttgctttaatcatctggtgattataaagtaatatgttttgtggcttctttatttgttgtgattttttgcatgattcagagttatgtagctgaaaaatagagcaaaaaataaaatttgtactaggttttcttttcctctgaaaaagaaaatgctccgtctctcttctgtgatttctgggtttgctttaatatttggtgtttgaattcgtatcaatttgaactttgttatgtatgtgtgtgtacaatttgtcctagtcaacatcttgctgaatcttatttgacctgtttatttattcatttcattcattatgaaaaatttatttttctcaattgagtaattgtatttatgcctttgtttgtcttcactagctcctcctaatcaaaatgactgtgttttatggcggatgattacggttgtgttatgattatggttgtgttttgttttacgcagcaacactgaaaac

SEQ ID NO: 58766 - DNA, 902 bp, Populus trichocarpa
  Intron number 1 from transcript POPTR_0007s14620.2 (locus POPTR_0007s14620) derived from phytozome v7.0 (chr-ID scaf fold_7; pos 14363585 to 14364486)
ccagccggtcttttaacaaacccgaaccggtccaggtcccgggtcggccgggtcccaggtcgacctgccggtccggccgggtttaataactatgcttctagctagattcaagtgttaatgtgatcaacatgattactacttgtagaacattgaaaagatggagaagataagaattatttttttgaaaaaaaccaacattcaactattcaatataaaatatacgtagtcaagtctacatatttattaattaaattctttcaaatgtatcaaaccaaacatatacagaagaatatattatttcttgataacatgattactacttgtaaaatattgaaaagatggaaaaggaaatttaaaacatacatattgaaacatttgttaagtataaatatttaattaaattcttctaaaaataccaaaccacacaatataaaaagtatatttttaaaattatatatatatatatatatatatatatattaatgtggatgtccgagtcagcttgtacatactttgactaatctcacggggcctgaagataacgaccatataagtttctaatagctctgaagtttgtgaaactcaaactggtaatctctataaaataaattcataacttgaccaattaaatatataaattaataaaaaaatatacaagttaatccaaaaatattcttcccttgtaaaaaggtagcagtcggaatggattattgttgaaatatatataaaaaaacagtttacgttttattttaataatattaaatattataaaattatattacaatattaagaaaaaatgttagaggaggaaaaacgcgaagaatcacacacacaataaagaggaaaaagtccttcacaatcacacagtaaaaaaacagacaagagagtgagaaagaaactga

SEQ ID NO: 58767 - DNA, 1009 bp, Populus trichocarpa
  Intron number 5 from transcript POPTR_0002s17450.1 (locus POPTR_0002s17450) derived from phytozome v7.0 (chr-ID scaf fold_2; pos 13207181 to 13208189 reverse strand)
ggtccaatcccaatccggcaaagcttcaggttctatccctttatcccttacattaaatcacattttattacaagatgtctttccatatatatcattggtgttaaataaagaagtcaaacggtaatgtgccattcttggttttaagaaaaagacttctgatgctgaatgttaagtcatggtttgttatatatattccacaaattagaattttatgagccttttaatagtgtgcaatgtatgagagagaatatgttagaaagtcacaaacagggcaatgagtgatgacatctatttaagaagagagcccagcatgagagggtatgtgttaattggttttgtcacttggaagagttaaacatagtgcaaaacatttttttcagagtggccagtcctacttagttttgcaagatgacattactcaagtaaacaaccttgttaagttatgacagtcacgaaaaagtttgctttggatttgaaccccccctttttttaccttgttagttctttatgccttagactgaatcctgccaatgggttgctttggctgtttgaaagtaaaaagggagggttcccagctcgatgtacctcattgtctgcaagttgcaaacgttacccttccaacaaagaaaaaaggaccatttgtcagtttcatggcattactttactataaatctttaatgaaacacaagattatcttcattaacatggtgttttagtttcaccactacaggtaacccatgaatcataaaacagaattagttgaaaatcacatgatgtccacaagacatctcctgttagaaatggcaaaacaagttttgaatgggatggtgcttgtagtcttatgctgaaataaggctttttttaattcaagataatgacttctaatgtgttatgcaattgaattttccatcttttagcattcaatttcctggatctgcttagagtttgctcatatctttaaattcatgatgcagcaaagagagaaattgtggtttgctagtgctataaa

SEQ ID NO: 58768 - DNA, 768 bp, Populus trichocarpa
  Intron number 1 from transcript POPTR_0001s07840.1 (locus POPTR_0001s07840) derived from phytozome v7.0 (chr-ID scaf fold_1; pos 5933964 to 5934731)
tgtggcgattctctgctttcatttttttctcccaggtcttttcattcgcaatccttatcttcttaatctcattatttacctttagtaagtatcgcactaactgagaggatagaaagaaatcaaaaccctagactacattgattgaaccatgattatcgaattatgttcctatcttcttcttgaatgtgattccttgatgttgttgggtttcaattgataaacatctttttttttgttagaattcaattcatttcgccatttacgaagtcaatacattataatgaattgtgtcttgcacattatccattgtcgtgcctggtgggttgccttcgattcgtgtttaaatgtacgttcttagcaattgattagatggaattccttgttcctttcaagtcattaacgagccccccccctagattcctgcaatttgaaagcataattttatgttgcatatgcttaatctttccatgtgcttttggttgtctttgataacttgacttcagtttgtttctgtgttaaccttcttctgttattgtatcttcttttctatactggattcatgttgcctgtcaaccaaccaagaaatttcttaagcagttccttgtaagctgcaacaacaggccaattactagttaatgtcttgaagaaagttctcatatatatttaaaaagagtaggcaggagtttgaattatttgtttctaatctagcacgaacttctattgatgttttcaggtttctttgttatatttttggggaattgctgttat

SEQ ID NO: 58769 - DNA, 328 bp, Populus trichocarpa
  Intron number 1 from transcript POPTR_0002s12120.1 (locus POPTR_0002s12120) derived from phytozome v7.0 (chr-ID scaf fold_2; pos 9000261 to 9000588 reverse strand)
agaggtggtgctgtccaattaacaatcatcacaaagtaatcaaaggtccctaggaaaagagagcctttttctttgattagataatggaatcgttgtaatgtttaatcatgacagacacccatgtggttgtttctcacaatcttacagctatatttttttcgacaactagctggaatgggccccgccactaataattgccccattgtcttctattttgaaattcttgtatatgtaactcgttacgtatccatcagtcatcatcacttgtttgtctgctttttgtttgattacagctttcatttaaggactagcaacggagaaaggtaaa

SEQ ID NO: 58770 - DNA, 820 bp, Populus trichocarpa
  Intron number 1 from transcript POPTR_0001s33710.1 (locus POPTR_0001s33710) derived from phytozome v7.0 (chr-ID scaf fold_1; pos 31891665 to 31892484 reverse strand)
ctggcgcaattattgtaaggcagcgtggtaccaaggtctggccttaatttcctcaaaatttagcagttcacctttgttttgcacctttgtttttcttaaaagagttttgtttttgggttaagtttgtagttgttattagttataagttcgattcgatgggaattaaattgatttttttggcaatgcttgattttgtaataaggggttttgtgttagggaatttccttagtaatgtgatatgtaatgtagaaaaggggaaatgggagagcaagaggtctgtattttggactgtcaaggtcaaagaaccgagtattctgctagtctccagctttcaccaacatggaatccactagtcaccctgtatccaaattatcaaatccatgactgtaggaaccctcattgtaatggcggtccatatcatagtaggtcaccggtgaaaaagatttgcaaggcaaaaccatatcaaattagcgaatcttgtgttctcttttctgatttgctgactctatatgtttggttcgtctaggaagagtgggttggagttttgctctggagggtgaaagctattaactctgaatttagggatcatggaaatgatttccttttggaataagggaatttaaatttgatcactttgagatgactgctctaagcatattgaaaaatgcgaaattcttttttctaatattgctgtttatggaacatatctgctctgctgttccccactgtcattcaatgtgcattaaatagtgttgtggctagtttttcatgctaccacatttgagtatttgcctacattttcagtttcatccagggaaga

SEQ ID NO: 58771 - DNA, 485 bp, Populus trichocarpa
  Intron number 2 from transcript POPTR_0002s13960.1 (locus POPTR_0002s13960) derived from phytozome v7.0 (chr-ID scaf fold_2; pos 10353093 to 10353577)
ctcgtccatcatttgatttaacccctgtacaggtattttttttgtgcctgatcgatctaaagctagttttctttccttgtatctctttttcaaagggaaaacaagcttactaggaagaagttttcatcgacaatattttctgcatctcctggtgccttcttttgttgttttttccacacgtgttttatttgtaatgtaaatccaacatttgttccgtttgtggtggactataacaaaacactgaatattttttcctcctcctttttgatagtttctgtactcatctgttgctttcaaagtacatgtaccctgttaatattcatcctctgttgtcattaatgttaaaatctgctgcaccagcaatgccaaatgagaattatcaaagacaccgacctccattttttaactactctttggcttttctttagtgacttactatcctcgccaattaaattattatcttctctttgatgcattcaggagga

SEQ ID NO: 58772 - DNA, 482 bp, Populus trichocarpa
  Intron number 1 from transcript POPTR_0002s19620.1 (locus POPTR_0002s19620) derived from phytozome v7.0 (chr-ID scaf fold_2; pos 15567257 to 15567738)
aaattttctttccctttccaccatctccgttacaggtcaaccattctctttttttactaattttgttttttccagaattgagacacggatgtttgccaattacccgatggttttgccattattattattatcagtgtttctggattaactgaagagtaataaaggaaaaaaaaattgaatctttgaactattttttgttttattggatactaaacccgtattggaactatcttttttttttttttttgctttttataaaagtaagtttttaattgcaggttggatttaagctcgattgaaaatactctgaataatcttttttttttagaatggataattgctattagtaagctagaatttacctcttgcatttgaaaaatgttccatgtgtgccgtgattaattactcaagaaattcaaatgtcctcgttttctacatgtactgcagcaaattgcgagagttaggtagtgatagaaaggcaa

SEQ ID NO: 58773 - DNA, 612 bp, Populus trichocarpa
  Intron number 1 from transcript POPTR_0010s02450.1 (locus POPTR_0010s02450) derived from phytozome v7.0 (chr-ID scaf fold_10; pos 2840417 to 2841028 reverse strand)
ttcgatttctttcaaaacccagaagtaaaaatcaggtatttctcttctctcgctctctatcgatcgatttgaatttggtcctctcgatctcttttttcttttgatcgttactgtatgcatgttaaattgatttcccttttaatttctctgattattttatttttgttgataatttatttttcaagcctccgattttcgtaattcgtttggaaatattatgacttttagtgttaggatacctcctctgatcgtaaatttaaactgggttttttttgggaaaattagggttttggctctaaaagagggatttttttcagtaacattattgtaaataaattagggtttcatttatttattcctggtgagattaacttccagctcgttgtagcttgatattgactatttggttacaaatttgcctttctttttaagtagaattttaagtgaatgttgtttagattgtgaattttgttggtttgttaaccgtttgatgtttcgttgctgttcataaaataaattgtggttttgtgttaggatgtgtagtgagatatatgatttgtgtgttgagattttgcagatattggtattgggaatttggaattaagtttttgg

SEQ ID NO: 58774 - DNA, 1026 bp, Populus trichocarpa
  Intron number 1 from transcript POPTR_0010s24400.3 (locus POPTR_0010s24400) derived from phytozome v7.0 (chr-ID scaf fold_10; pos 20628865 to 20629890)
tgaggccttgcaaaaccctcgcgaacggctctcaagtgagtttttttttctctaattttgattaacatgtgttaattgtttcatacgttagttttgtatgagagctgtgtgagatttttctttttgtttatgcatgttaatgggtagagtagcgagtgatttagctaaattaggtggtgatttagctgcagttggtttttaatggatggggtggtgttgattttgctgggtatttcgtgagtgatggtgttttttactggttgtaacgtggttaatgtgtgaatttcacttgtggatgattatggatgagatggaaattgtatgttgtacctttgaagagggcaatgcttctagaggtatgatgatggcggggatataagaatgggaagatattctactacaaagcttggagacgtttgtgcttagaaattttcaggtagttttagtcagattgcttgagagaggagatttgggtggatgattttcttaataatcaaactgacgtgtaggaaagatttatgagtatttgcaatggaaagcaagtaaactggattcaataaaagaagtcttggttttgacttggtaagaaggggcgtggctgacctacggactgcttttttttggtctgtgtgtttgtgtatttatttatttattattatttatttatttttggtctgttgttgttgttgccgtcccatttttattttgggagggaggggtgcagaggagatgggctggggttttcagtagaatgttaagttggtttcagcccaaatttggggcctgcagttattttttgaattgggttttatcaggaatttagatttttttagatgcagttgataatgatcttatgagttcccagtttctctttttgcaaaaatcagtattatgagaactgtagggatgacctgctagttatcatcattcacattgtttttgttttctttatgtgatttaagtattttatatatcctgctttttcattcaagtaaattcatgtatatcttctattcagttttgcgg

SEQ ID NO: 58775 - DNA, 577 bp, Populus trichocarpa
  Intron number 2 from transcript POPTR_0007s08020.1 (locus POPTR_0007s08020) derived from phytozome v7.0 (chr-ID scaf fold_7; pos 6508362 to 6508938 reverse strand)
aaggtacctgctagttcttttttatagaaaagcttctcatcaaatttataagaagtaggtcatgcatttcatttcatcagaagaattgttttttcatttgaatttctcacacatatgtaagactattctgtgcacccaaaagatgaatgtagttgtatgacaatattttttgttttgtggaaagaatgctaaaaatgattccattgttgtctctttgagagtcttaggattaaaacctcatttttggctaatagcaaacaatttttgcctccattcaatgaagaagcaaaagaaaaagcatcatgatcttaatttaatttttttttaagtttatgtaaataggaaatgttccttgatgcctgcattaataaatttcacacttgagttatcaaaagaaattacacccttcatctctctaaactggtcatgctatgtaattatcagtctatggtttctgttcatctcatggaatattttattgtagtctaatacattttaatacattttaattgatttttttacatcctaaacatggtcacacatcattctgtcatacattgttatattcaggtgttgg

SEQ ID NO: 58776 - DNA, 712 bp, Populus trichocarpa
  Intron number 1 from transcript POPTR_0007s08020.1 (locus POPTR_0007s08020) derived from phytozome v7.0 (chr-ID scaf fold_7; pos 6509075 to 6509786 reverse strand)
ataaaaccccacaaatctttacttctctcttccctgtgagtgactatctgttgtttaagtacctgggttttgcttaattctatgattatttatctggttttttttctgctttcgaattggtggtagtgttgagttgttgattgattctggataatgggttgtcgatttagtggtgagaagtagggtttttgaattgtatatcagcagttttagtgattggtttgggtaaattttgtgactttattatgattattaagcttgaattacttgtgtggaattttatttgtgtatcaagatgagaaaccttcaatctattagtgttgaatatatgaactgattttaagtcttaagcgtgctaaaattcaagcattgttatcaactgtagttatataattgttttagtttttctaaacactgtatttttttttcaatttttttttgctgcatagtgaaggtctaaatgaatttttaatctctgctattctgaaaagaatcgtgctttgttattgtcatgggattctttacctgttaggtgtattgtgctgtgtaattttttgtgcacttggtaaaagtacctagcttgatatttgttttattgcatttgcattattgctgattacttggagcatactgaccgaactttaatgtgtttttcttttgtttcacattactttcaggggagaacatttcagaaaagagctgaccccatcca

SEQ ID NO: 58777 - DNA, 477 bp, Populus trichocarpa
  Intron number 2 from transcript POPTR_0007s14130.2 (locus POPTR_0007s14130) derived from phytozome v7.0 (chr-ID scaf fold_7; pos 14022309 to 14022785)
caggagaagaattcttgggtaagaaatgatgacccagaaaatgtcagtgacttatgcctttgataagatcttcttgatgatgctgaagttggtgtaatctaatatgcttttgctgttaggcattaaagtagaaagaaatcaacataaaagttacacccatgtggaatactaatgctgtgtgaattttcttttacctttttaccaacatccactcagatcttgccttaatactcccatcacaaaggcagaggtagaatggagatttacagccttaaaaagtttcttgacaatatctatagttatggcataaacttttctggtttccttggaataataaatttgaacaaaacagcttctttttctttgaattaagcctgccattttcctttcctgtaaacaggatacggggcagaaaaggtctaaaaaaactcttttgtttgcttcatcaggactgttcagcaccagctggtggtagca

SEQ ID NO: 58778 - DNA, 907 bp, Populus trichocarpa
  Intron number 3 from transcript POPTR_0010s14100.1 (locus POPTR_0010s14100) derived from phytozome v7.0 (chr-ID scaf fold_10; pos 13792326 to 13793232 reverse strand)
tgggtttaatctgcatatccttgttcggagctcaggtttgttcttcactcctgatttttttactcttttttttttttccttttcttgctcatttggaaattgaattattagtgatgtcgttgtggtgagggtcgtcatttcctgtaatcatcactagataaggccattgtcgccgtggaccctcacgtgtacattcccttaattcaaattggaaaagcaactaagctacattattattgattattcagttatttattagtataagcaatattattatcttttactaactaatgacaaagcattttgtaattcaataacgttaccctttcggaaatggatgcttttgagggagaagcatgcggtggaatcattgtctttttatgcttttgggctacgagaaactcagtgattttggaccagaaggaagcccaataactgtcccaccatgacagcaaaacgtaacgaagtatctatgtttattttcttcttgaagaacgtcagtcttctcctaatactgcttttgaccgcctttgactggacaaaagaggtgtccgaagtctgatctgagaatactcttgatcataaaataaaaaagaagagaaaaatcccagttaaaatccttagactttaagtggattgaagtttgggcaaatagtttcaaatcttgattggttctgcagcagtgaacatcagaaaagcagcaaaacgagggatgaaaatggcccctatgagtcagttaactattgactaatgattgtttcgtggcgttgttgtttcgatttgttcaagaatgaaattggtgcgcggaaccatccaggactgctttcatgtattggaattactattcatttggttggctaatgttgtgaattaaagattttctgctggtttcaatgtgcagtggttg

SEQ ID NO: 58779 - DNA, 855 bp, Populus trichocarpa
  Intron number 1 from transcript POPTR_0002s08650.1 (locus POPTR_0002s08650) derived from phytozome v7.0 (chr-ID scaf fold_2; pos 6060439 to 6061293 reverse strand)
acgagtcaacccagaagacccaacagccgttacaagtaatccgattcctctttttttattaatattttcttagctaattcatgcgcgcatagcttattcttcgtatgggttttgttcctttttttttttgtgatcaactctattttcgttgtggttttgcttaattcctcagaaccaggaccaaaaccattttgtgatctgtcgatccattgtccaattttgtatctctgtgaagattattttgttaattttttttagcttcattttccaatcaaatgatttgcctgggtaatggttaatgtttgaggagcataaaaaaagagaactttttagctagggcaattagtgggttgctattgttggaaagctttgacaattagatttgtcgtgctcttgattcccaaagcaaagttggtgagaagtcttgagtctctggttttgttgtttataatgtaagcctgaatgtgatatgctggagttaattgttttggtcggagctgaaatagagttagtattgtggtaaactaatgaaaacactctggttgttcaccgggcttccttgaaaactcgatcacaacttgtatagtggtaatacatggcatgaaatgtactgcttgatttttctcgaaccccatgaatatttggtcaagcacgatggattccttcagcttaagtcaatccactatatgaagcaatactttcgttctgtcatgtcttgatgaatagttccatatcaaattaatcaatgacatgccttggaaatggaatctttgtttttggagtccctgttttccttctaatattttggcctccttagcaggttgcaaagcgtctggagaagttcaaaaccacaat

SEQ ID NO: 58780 - DNA, 679 bp, Populus trichocarpa
  Intron number 1 from transcript POPTR_0001s28680.1 (locus POPTR_0001s28680) derived from phytozome v7.0 (chr-ID scaf fold_1; pos 27456166 to 27456844 reverse strand)
ttgaagaaactgctaaacgacatatcttcgaccaggtcttaatttacctcctctctctctcgcgtaatttttataagacctaaagtgctcgcgcaactctttttttttttttaataaaaataaagaggaagtgatgcgatcgtgcctaaaaaagaaatgtagctgtttgtaaggtggagaagagacaaaaccaaaagccaaacttttgttgtcaattaggccttaagtctaaaatttactcttgcgggctgctgcaatgtggagtggtagtaacccagttgctcccatctttgcgcggccgttgtgtcagccggtgttattttcgcgtttcttcaaccatagaaagaaaccgcaaaacatggtcttgaccaggttattcctgctttagttttagcttgatctaagtaaggtaaacaatacctgactcgttgcatcaaattttgattaaaagctcaatatatattttaaaaacttctgctttttgatggattcttaaagggttatattcatttatttgcttcataggatattttgtctatgaatcaaacctgtttcttgaaatgcgggattgaatcttaatcctctctgaattttctgtttgaaatctcccatcttgtccagctatttagagattgattgtcccttttcttttcttgtttagaaactgaataggaagctt

SEQ ID NO: 58781 - DNA, 925 bp, Populus trichocarpa
  Intron number 1 from transcript POPTR_0001s46400.1 (locus POPTR_0001s46400) derived from phytozome v7.0 (chr-ID scaf fold_1; pos 46792035 to 46792959 reverse strand)
tgatcatcttttggtgggttcttttcatttatcttgtgactgcatgtccctaaatttcaagccttttcttcccttttaattgtatgtttgtgtatagtatatgtagatctttttgtgttcttgggaagcttgtaattgttattgctgtttccaggtgctattttgatgttaaaaatgtttttgtttgagtaaattgttgctttcaaatatttgagctatttttcccttttttgactgactggccctcctttttttttgttttttttgataaaggtgtgatatttaggattttttctgtgttttttgagatgggttttgattgattggtgttcttggatcttggggaatttgaatattgggatttggtttgttcttctatctgtaaaatggttttttttccctcgttgttagaaacgtgatcatttgtgtttcttggttctctacggtggacattctgatatcagaattttctctctctaaatttctggtatcagacatgccctgacaaacaattgcaatgtttttgtctttaattattattcccatttttctacatgaagaacggagtttgaaagtattttcttctttttactggtccatttggatcttgaaactctccacctttctctctctttttactggttttagattgtaaagatttgaatttgagtggtgaatttttctggttttttgtttttccacatttgcatagtaaaatttgttctacttttagtatttaaccttttactttctttgttttgttttggtttcaaatacttgtatagggcccagctggtctttcttttgttctgattgtaccttttcctctcttggtttcttctgtttcaaactccatcattgctaattgtttgaatttgatttcattgcagcagactggagcagaaagccactgatacagaagctt

SEQ ID NO: 58782 - DNA, 641 bp, Populus trichocarpa
  Intron number 1 from transcript POPTR_0001s15410.1 (locus POPTR_0001s15410) derived from phytozome v7.0 (chr-ID scaf fold_1; pos 12249298 to 12249938)
tgttagattttctcaagagttcagttcttgcagaggtaagtggggatgatgacgaatcgttggtattagctctagaagaacatgtagtgctgttagattcctatgtttttgtctatgttccatgatgtttttggcaatcaagcaggtatcatgctccgagccattatgttttcctttgaatttcccttttgagtgtttactgaggttggtctgttttttttctacctgatgcttaaacaaagacccaagtgttagcacataattataaatggaaatcgagtctcaattcattaacttacagccagtgccggccagaagcaagcccccacttaacaaaaaaataaacaaagattgttaaagattttacttgtcaaatattcataaaaaaaaaatatatatatatttcttaaacattttgaaagtttcaatttataattttgttcaagacaccttcaccttaagccggctctgcttacagcatgtactaatttcttgcttttgctttctaatttggcatggtcggtgattcagcatttcatcaatatagaggaaatttcttctcattaaaaatgagctaatgagtgttttgcttccatggcttcttaggttcaggagtatttacgaaggcttcttattcgagc

SEQ ID NO: 58783 - DNA, 633 bp, Populus trichocarpa
  Intron number 2 from transcript POPTR_0007s03690.1 (locus POPTR_0007s03690) derived from phytozome v7.0 (chr-ID scaf fold_7; pos 2112350 to 2112982 reverse strand)
cggaggaactgccgttttaactagaaaggatcctagtaagaaatctcttgccttcaccttcttttcgtttactttactttatttagttgttcgttcttttcttgatgatgtacagaagaatagagtagaacttgattcctttaatgaggaacttcaaatttatgcatcaaatatgacctttggtttctattaattttgatgagaatgatatttggaaaaaaaatgggaacattttgagtgttctctgcaatatttaggcttcctttatgtttcttcaagcacgccattttgaagtaggactctcactttatcttgcttgtagtcataggaaaatgttgatcagttttttattttgaagattagctaaccagcaacctagccaaagaattattagatactctgatctgcagtaagtttatcacttagatgcatagttgtaggacccgatccagagttgacctggctcaggctcgggttgcagatcgtgatcaacctgactcagcctgagctaggctctcagtaggtagatcatcaatttgaactgccaagccgacccgttgagatgaaccaggtatgttactaccaattcgattgggaccatgactaatctacaccatttttaatgtgcaggtc

SEQ ID NO: 58784 - DNA, 589 bp, Populus trichocarpa
  Intron number 2 from transcript POPTR_0001s36580.1 (locus POPTR_0001s36580) derived from phytozome v7.0 (chr-ID scaf fold_1; pos 35238028 to 35238616 reverse strand)
gcctgcgctgttatatcttgcagcttgtggtgttggtattgagtcagtcttcctcttctttgaattaaattttcatttatcaccagcagtgactagttgcaaaatacttatgcttgatttacgctttcgctgatgtaacattatactttagtagtttatctagaaaaaaaaaactagcaaaaaagtggtttggtaggaggttgggagcatgggggagggaaaggggttgttactcaatcatggagatgaatatggtaaattttgatttctgtgtctaaatgattttcttgcccaaatgattgaagttggtttctcaatttgtagcatcttctatgtaaagtcatgaagatggttaaaaattcctcttttatcatctggggtgggcatcaaatgggtcttgtagcggattgatatatatgtctgtgtgtttatatcatgatttcaatatctatttcttaagtagttgattggtccaagttaagtcctaacacattttttatatgctattgcagtgcttcttatttccctttgcttcttatttgttaatgctctgtgtttttcattgtaggtcaattaggtgttgttgacc

SEQ ID NO: 58785 - DNA, 587 bp, Populus trichocarpa
  Intron number 1 from transcript POPTR_0002s17380.1 (locus POPTR_0002s17380) derived from phytozome v7.0 (chr-ID scaf fold_2; pos 13146413 to 13146999 reverse strand)
agtggtggctgcttcttgccttattgctggtatcggtaagttttcttcgtcaatttgtttttcaattccgtccttcaattaatttttaattaatgagactatggttcgttaagattagataagattaattagtgaataaaatgcttaacaatcaatttcatgttggtgggatttccatgtgaactgtaccaaaacagtattagggacttagggtttctcatttcaattttcaattctttttttctaaaatttactttaattgaattggtatataatgtttacggtttgattgaaattcacagtagaattgtacccgataaagctttcgcgtagcagatgatcacgttctgactgaatattccttgagttgccaaattctaaatttgcagtaactgtaaatattctactgatccatgtggtgttcttgcttataaactggagagaccttatgcaacgacaacatactactttattgtactcgatggaggcttaatatttttggaaaatggaaaaaatccctagtgctttctttaaactttatcaaaatttcaggtctcttccttccagctgtggtgaggcccattctg

SEQ ID NO: 58786 - DNA, 592 bp, Populus trichocarpa
  Intron number 2 from transcript POPTR_0010s09670.1 (locus POPTR_0010s09670) derived from phytozome v7.0 (chr-ID scaf fold_10; pos 10388908 to 10389499 reverse strand)
ccacggactgcatttggtttgattttcggtccagagtatgttttttatctttaattttttgtttgcaattctttttttttttctctttgcttttgtttattagaacccaggagatcccgtttcttattctttacatgttgtctgcatcgaaaatggggagctaaaattaacctcctgatgattcaaatcaagcacaatcaattcgctacacgcaaagcaagattctacctccagtgaagagtttttttcctttttacttaattagtgaaattgtgactcttaaaccattggtgtataaatgttgcatgttttccaaatgacccttgaaaatagtaaaaccaaagagccttaaaagtgttcagcttaaatgtgaataaatttagacttgaagaagtgtacgggctacagaatttctaagttctgcaatagtagatgatatgcaacgatatgattgctcaaatgatattctttaaaaccgtactgtatggatgacattaacgtcttctctttgaacctagagatgattcagccatttccttgcattagttgattcttatgttatgttgggattcatgtcattgtgatgatagtt

SEQ ID NO: 58787 - DNA, 955 bp, Populus trichocarpa
  Intron number 1 from transcript POPTR_0001s27640.1 (locus POPTR_0001s27640) derived from phytozome v7.0 (chr-ID scaf fold_1; pos 26510996 to 26511950)
ggtatctcactcattcactctctcatcatttattaaaaatggtctagatctgatttaagaacagtttaatttcatctttaattattgttaattttgatttattgattggttctattttccatgtttcttttcttagttattgatatgttcgctggaccgtgtaaaccaactaatcttggttagattggaaagctgagggtatttattttattaatcagcaacgaaagagtacaatacttaatggcaatgccctgtgattgcaaatcgaataccttagtgaatatgttaagataattagaagcaacaaaagttgggggggttgcgtataatacgagatctgtttatgctcttgtttgctattttctctttttctatttttttctagatggagatgttgcgtgtgactgacttgcagctttggttgttattgttgttttttagcttttcgcttgtgatataaatatgaaaatgttttctttatacttgtttgtgtttagatgttggctggattgttgttattcttcacagcttaatatgataaaatgattttattccctttccaatttgctatctctcttatttaggtttttgttgtatgatttgttttcccttctgcgttattttcttagcatgtgatgtgtacgcattttcacagtacaatgcagggtattttgttgaaactaatggtgtactttgtgcttttgaatgcgacacccagggctgttcaagctgtaaagtaacgaagtttaaacctgctagatgaataattggtgcaattgaataagttttctgaagttgtgttcaaagcctttttaaaaaaacaaagttgatttctcattgctaatctagatttatagatttactgatgtgatatgtttcgataatctttgaactaaattttgtttgatttctatttgaagcaccttcaagaagaaggctccaaaggccatcaagg

SEQ ID NO: 58788 - DNA, 833 bp, Populus trichocarpa
  Intron number 2 from transcript POPTR_0001s15860.1 (locus POPTR_0001s15860) derived from phytozome v7.0 (chr-ID scaf fold_1; pos 12700057 to 12700889 reverse strand)
gccaggtgtttgaacggactatctactgttccttttctttttccttgttctgtaagtattttggcaatcttatttcttctttgaaaatggtagattacatctcgattgtttgttttagcatccaatcctcatattctcatatctgtttatgtggctatgcttttttcacatacagtggaggacggtataaaactcaatgttcctgcaaatggtgctgagtagtaattgacactaaatctgttgtgtcgtgttattccttggcaactgtgtttgtctagctaggattataacaaacataggctatccttcagaaattagtattcattggcacctttgaaaactcaacagaaatcagtaacatcatcagaatgtgaatatgtttcacgaggctgcactaaagtcttgaataatttgctttagtttttctattgacaggcgggagtaatttcctatgtcgcagactaattcattacactggctctactggaaacttgaatctggccagctgaaaataattggtacgtgttccctcttcctgcggaagctgcatgatctatctaataatgaagcagcaccggacagcactcgtctagttccaactggcttggacacagatttttgttgtcaaagcacaacaacatcccatacattgtgacgcaatatcgaaagagataaatctgctaatgacattggccactatctcgagaggacaattggtttagttgttgcttgatttaggattcatccagctgtcagaacccttcaagaatttttaatttgacttttggaaacgtacagacagccaaggcgacttaaaactgctcataaaggca

SEQ ID NO: 58789 - DNA, 840 bp, Populus trichocarpa
  Intron number 3 from transcript POPTR_0010s05940.1 (locus POPTR_0010s05940) derived from phytozome v7.0 (chr-ID scaf fold_10; pos 7369713 to 7370552)
cgagaatagctgacaattacaagaccctggatcaggttggttggaccataattacttgtaattttagtgcttctatttatggctcctatggtttaagacttctaagggtgttagtggcacactgaaaaaaattgatagtactctttcactttaatcaaaatgttgtgggagcattaacgaaaactaaagcacatggaaaaatactgttgctattttcactatttatcatcttacaaattgtataatttttttgggggaggttgaattgaaaaatagagtaatatatgtaatttatttaaaatattcattttaattctttattgttttaagcgattttaattcttattttttagtttttttttgggtgaagaagagagaaaattcgttagattttagctcagaaagataaagttgttattgaaaaacattttggctaccaaaagattgagtagaaataagactagctacttgatgcttataatttactcagagcttcctcatatgtaagcacacaaatgtgattataaaatgtggtggattcttgtggttgaaccattggtgataaaatcccccctgttaatcaagttagcagctaatgcggatttctatggcaacattcctatgggggcagctggcattgacacttcgatctttaggataaggaactgggaaagaattagtgcttgtttctatctataccagatgattttctgtaaaattctgtagatggccaaatgtacgtgctagataattttagtattcaacatgctgccaagtactaaacaaagtaaatcactgcacacaggtgactgctgctcttgctcaagctgggttagagtc

SEQ ID NO: 58790 - DNA, 609 bp, Populus trichocarpa
  Intron number 2 from transcript POPTR_0010s24670.1 (locus POPTR_0010s24670) derived from phytozome v7.0 (chr-ID scaf fold_10; pos 20757135 to 20757743)
agaaggcagagaaagagaaacagggtgctgacaaggtaatttaaattttgtagcttgatgatgtttgttcctcatttttaggtcagaataatcgaaacattgctcctattacaatatttgggccgttatgttcgattgttgtttaagcatgattagaggtgcagttttttgtcaatggaatggagcaagaagatgtggctggtttacttatgtgtttcaaaatcaaaattccctattatcaccaacattgatgtttaaagtaataactaattactgcttgaatgatttaaatattagttgagtaattgaatctaagtacatagattccctgttatgagttcaattcccaacaccatttcgttgatgtttcatgtcaccgattgccaaatgttagcaaatgtatacctttttcctctcctctttgacatagaatgagcacctaagcatatgaatcgtagaatggtggtgcggcattgatctcctaaattaccgttgcagatttctactttatttatttgtttggttattcaagtctgcctttgaagattaagtttaatcgacttcaattatgtcttcttttcagagaattgaagggagccagaaagcctg

SEQ ID NO: 58791 - DNA, 668 bp, Populus trichocarpa
  Intron number 1 from transcript POPTR_0001s01740.1 (locus POPTR_0001s01740) derived from phytozome v7.0 (chr-ID scaf fold_1; pos 1277048 to 1277715)
gtagaggtggccatagaagaacccaaagtgcccttgtaagaacaccctcttgtttttgtgctcttctttctatctaatattatttgaagagattttcttgctttgtttcttatttggattttatttatttatttattagtactactatgcttaaaagccatgtagcttgttaaggttccttgattttatggtagtgctttactttagaaaattggaaattggtttcttatattggttgactttgtcatttggttctgtattttgtcaagctggattttaattgttcttcaaattgtgattactttctctagctttatcggttattttgatgttggcttaatttatactgatatcctttgttttagtgaatatgattatttgccttgttgatgttatttttatcttgattacctgatcttggactattttcatcaaatttcagtcactgtttgatccttaaataagtcaattttttagagtgtcttcacatagcaatcggtacagtgtgttgcttttttcttttttctcgatgctagttcctttctttcttttatgttttgcatttcccttatgcgttctggtgtttttatctgcgtttacaattttttttggcactttttgtcaaattgtacaagtttgatgtagttagtggcttgatgggctgcagg

SEQ ID NO: 58792 - DNA, 719 bp, Populus trichocarpa
  Intron number 1 from transcript POPTR_0001s04670.1 (locus POPTR_0001s04670) derived from phytozome v7.0 (chr-ID scaf fold_1; pos 3622287 to 3623005 reverse strand)
ctttcaagtacattatcttgtgtgtacgtaacggcttatgttttggaataatttgcagcttcaataatgttgtcttgaggaataataaatagaactcatttgattttgttttctatattacttttattattttcattttattacatttaaaatctattaaaaaaaaagctattttgagaaactaatttttattttaatttctcatttttagtttagcaatatgagaattgatttaagaatttatataatgatttaagatttaagatttaaatgatttttagttaatagtaacttatttaactagtactaacacctgagtttacttaaattgatgatcacatgccttccttcccatgggacttgggagactcaaaatctggcttctagattttgtgaatctgtacagaccccataagaaattagagcatgggacaagagtcagagatgcaaatagtttttaccactaaattaacaaggtagtggatagtatgtccataaaaggacaaggatccatgtattctattctcccacacaacagtcactcctcgatcgagcctcagtgttttggccaggacttcaagcaagcatcattcactaaagagctgttcttcttctactcataatggtctcagctccaagaccaagaccttcaactttcaccccctcggaacaatggctcctaatgacagccacattactcatctgtggattcttgggct

SEQ ID NO: 58793 - DNA, 351 bp, Populus trichocarpa
  Intron number 1 from transcript POPTR_0010s14430.1 (locus POPTR_0010s14430) derived from phytozome v7.0 (chr-ID scaf fold_10; pos 14044642 to 14044992 reverse strand)
ttgttgaggaatcgtgttgtggctcaggtatgaatccttactgtagtcacgtaaatcattttattaatgattaggttatgtaaatttgatttttgttatcgatttctttgaggattaattgagtgaaaatatcgagaaaatttggtgcctacttcagatctctcatttgcacaagcatagctgattagagttcttttttctcgaagatattatgagcttgtgcagagacttaaattgactacaatgcaatgcaatgcaattttctctttcgtttattttttttttgacgatgattttacatcatgtgcatgtgcaggttttggagatcggcattgtagtgcactcagttgt

SEQ ID NO: 58794 - DNA, 361 bp, Populus trichocarpa
  Intron number 1 from transcript POPTR_0002s00230.1 (locus POPTR_0002s00230) derived from phytozome v7.0 (chr-ID scaf fold_2; pos 21757 to 22117)
ccgaggctgagatcaagaaagcttattacatcaaggtaattgccaaatttcaatttcaagaaattacttcactactcttgctttctttctcagtagaaacggatagatctcgttttctcgccatccatcatcatttatccattcatttcaactggctggatccgttacgatgataatgacgcttcttcttctttttaaataaacccatagaatgttttgattgcttacttctctattccattcaattctattattctagtgtagactagagctgctataatcttcactaagagtcatttcctcttttttttgtttaattttcctccgcaggcacggcaggtccatcctgataaaaacccta

SEQ ID NO: 58795 - DNA, 771 bp, Populus trichocarpa
  Intron number 1 from transcript POPTR_0010s08170.1 (locus POPTR_0010s08170) derived from phytozome v7.0 (chr-ID scaf fold_10; pos 9114489 to 9115259 reverse strand)
agacacggttttgggctaaatttgctgaagagaaggtgattgattattgcttagcattcgcttgattcgttaattgcttgatttttaattttattagtatttgatatatttaattagttaacattttgtgtcggaaagatatttgcgatgccagtttgaagagagacacaagtatatagaattaatcatattgaattctatcaaaattaaaaaaaaaatcatatagaattaaaaattattttcttttttatttttctcttttctccttatatctatcattttttattatttatttaacatcgtgaaattattctatggttcggcaataaaagggatttcttaaaaatattatttttgagtggaacacgttagtgattacactttgatttttctttctttttgtaatgttagccatcaggactttattgcaattaaaatccaattttaaacaaaaatttaaacgtagatgagaagagtggatgtgagtctgtcatgtggtattatatatttttaacatctctatataaaaatcatagaaaagtataatttttttttaaaaaaaaaaaaacatgcattatcaaaaatatatgagaattgggagataaataacctaaaataaaaggtccaataaatctcaaagatttgttatctccatgaatttcttgattgatcctcgcaacaatcaaatgtgggtgtgcgattaaacattatggttttgattctgtaatgccaacatttcaattaatttcctattttttctgaagattctgg

SEQ ID NO: 58796 - DNA, 694 bp, Populus trichocarpa
  Intron number 4 from transcript POPTR_0002s02260.1 (locus POPTR_0002s02260) derived from phytozome v7.0 (chr-ID scaf fold_2; pos 1255946 to 1256639)
aaacagtttttgaatttcaaccaggtgaattcacatataccttattacggaaattttatttatttatttaagaattttaagattgtttattattctagattattttatttaagaatgctggtacttattatctagtagttaaatttaaattttaaaatttttattcaacaagaatttgttaggtttttcaagattgagtttatctcttttattttactttcttaaaaatggagttttatctctcttgatttgttttttcaaaatcgaacgtgtagtatctcatgtcggtgattttgatctctattctactttaattttcttattttgatgattttattctcttttatcctgcatcaattacatatcaagcctaaattttttatcatgctgattgtcgttcaagctatatcaagtattttagagccaagttgcacttcaggcccaatccaaatggaaccttgagaaacaaatgaagttaggaaaggtttccttcttgttttcgttttcctatctaagctccttggcattttaatcaccttggctaccaagcaagttcttgttttgggcaccagcctttactataatgttttgctgtgcaatcgacaacagaaactatatatgaattcagaggaacaacttatttgattatgatcttcttggattacaggggctacatacaggctaaggatttcaa

SEQ ID NO: 58797 - DNA, 656 bp, Populus trichocarpa
  Intron number 2 from transcript POPTR_0010s18930.2 (locus POPTR_0010s18930) derived from phytozome v7.0 (chr-ID scaf fold_10; pos 17014873 to 17015528)
ttctgcatcaatcaatcaattcacctggtggtaagtctttgattttacttttcttgtttcttggggctctttagatttccttttaattcttttcttgttggttctttatgttaatgctttcgttctgatttgcgtaactgttttaattttagtcgtatcaattaattacattcatttctttattaatttcgatgcatcaaatccttggttgaattgtgtaattcaagtttctgtaacagcccaattaacgaaaggactgcccttttttttttaatgcatatctgattctgggttttaaggatgggtcatttcttgcttttgttacattttttatttgggttttgatcgttcttgcttgtatgaaattgacaatcttttctccactttatatgtaagtttaatcgttgccgatttgttgacagcaaactttgatattgttccccttcgttcagcttctgaacgcgtagttcattatagtctaggtttgtgatgtttgtgcatatgacgcattgttggtatactgtagagtttgcatttcagttgaaagatctcttgcttcttgtcatttcacactaccttttcagcttcagttaatgaaatatctcgttttctgttgtttaggtttcaaaactagacaaaacatagagtattttgca

SEQ ID NO: 58798 - DNA, 537 bp, Populus trichocarpa
  Intron number 1 from transcript POPTR_0010s13860.1 (locus POPTR_0010s13860) derived from phytozome v7.0 (chr-ID scaf fold_10; pos 13573628 to 13574164 reverse strand)
tctctcacccaatcacgtctttaaccctaaacccggtacttattagttattactctttcttcccttaactacttttattttactcgaatttatttctctaaattcaattttataacgaccatcagttattacttttggctacggtttacgagctgtatttcttgctgctatttgtttatctacttgtacaagaacaaacaccatgctagctagctggtcgttgcagtttgttactctccagctgcttttgttttctttcgtgttgaataattaataattaattaagaagggacagaggatatcagttttctgagttttggtggggattttgaattcaaatttccgtaaatctcatttcatctcttttatgaatcctggtttccggcgagatgttcgtgttttaactggtggtattgagtagagtggtagttgggtctcgggtgggatgtctttaggacataaacttggttgccagtatttattatttttccgtttttttttttgagtaggtgacaagaactctgtttgtagaggacc

SEQ ID NO: 58799 - DNA, 527 bp, Populus trichocarpa
  Intron number 1 from transcript POPTR_0007s13020.1 (locus POPTR_0007s13020) derived from phytozome v7.0 (chr-ID scaf fold_7; pos 13212284 to 13212810)
gtaggagagacaattcaaataagaggaaagcagaggtatgtttgtttaccttcactccaagttcattcaattcaattctcaaatttgatgcatgacttcacacattccatacaaaaaaattaagcaccgcaacaagaaagaagtaaagtcgaattggctagtattatagggaagtggggttttctcaggaatattttatgattatgacctcaataagaaatcaaatcttctcaggaatagtatctgagcttattagtataagaataggagtacaaaatggatcttcagttattgtaattcaagagagaataagctttccttcgtgcttctgggaaaaaaatgtcaatcctgtacttgaaggcctttgaataatcagagtggtttatcttttaaacataatctttactttatcaggttgatgaacttggtcagctaagtcatgatcattgacaagtttcaacttctctgcatttttcttgtctgtatgttcagtttattgcagcagaacagagtgacgataagattaa

SEQ ID NO: 58800 - DNA, 549 bp, Populus trichocarpa
  Intron number 1 from transcript POPTR_0001s39530.1 (locus POPTR_0001s39530) derived from phytozome v7.0 (chr-ID scaf fold_1; pos 38755755 to 38756303 reverse strand)
ctaccagcgtaaaactttgatcatgtaggtcaagtttcctatgcatgtggctatatatttggaaattttcttgtcatttcgcttacgaatttctggatctcattccagtccagtactcaaataagtgatgaacatgcatttgacattttttttcttctttatttccttctttttttggtcgggttgagccgtgagggttttcttgggctagatttaatcttcttcttcttcttcttcttcctcctcttctcgccggggctatatcaatagtttcttaaccactcagctgataattcagaaatcattttcatgtgtttgccgaacaaaaatatgtttttagattataaaggaaattttgaaagagtttggtttgtttataaaaacaaatgactgacagcaaatttaactaggaattatttaaggtctttctttaatgattatcgttagtgacagtcacttgatttagatatgaaatctcactaattacgtccatgtcattatcctttaatttcttcttgtgtgtgatcagaagtgctggacgtggacctg

SEQ ID NO: 58801 - DNA, 1014 bp, Populus trichocarpa
  Intron number 1 from transcript POPTR_0010s25260.1 (locus POPTR_0010s25260) derived from phytozome v7.0 (chr-ID scaf fold_10; pos 21022314 to 21023327)
ggtcaacgacggaagagcactagctagctcccggtgcagcactctccttcaaattaatacgccaacaccaagcaataccctcttacagttctctcagccacttgttaaatcatccgcagtttcatgcgctttcagcattgttgctagctagtcaagcaccactctcttcctttcaatctattcgagcgatttaagcaagcacaacaatcttcttatttatttatctctttaatttcataatgagttaataataacccatgcatgcatgaagatgacatatatgtcaaaatacacaaactaatatatatatatatattatgaaaaaaagaatagcaaaaatggttaaggaatcaaatcatatccttgatgcaagcctaacctatcataatcagggggggggggtaatgtaacgaagcatcagttcctgcctccaccaaactgagagacaagcacatccgttacagcaaatagaatttacacgacttttttcttctttttacctttttttttactgggtttttatataaatttaacgtgtttaaagtagtttttgttttgaaatattttaaaataatatatattttttattttttaaaatttattttttatatcaaatatcaaaacaatctaaaaatatataaaaaatattttaaaacataaaaaaaatcaatttttttaaaaacaattttctatcacatgaacaaacagtctcatggaaaatccttctatatatgaattgatgcattaactcccttgagtttgaatttgagacgataatggtagctgtctatttaggtgcagtgatcaatatcacggattttagaggatatcacaaacacaaattcacaagtacccattgctaattaatatccatctgatcacctgtaaagaattcagttctgccatccttcaatattcaagcgcattggcgtggatgactctctggtcaacgacggaagagcactatctcctggtgcagcactctccttcaaatacgccaacaccaagcaatac

SEQ ID NO: 58802 - DNA, 911 bp, Populus trichocarpa
  Intron number 1 from transcript POPTR_0007s03300.1 (locus POPTR_0007s03300) derived from phytozome v7.0 (chr-ID scaf fold_7; pos 1913862 to 1914772 reverse strand)
ttcggtcaaccatctcttgagctgcaggtaattagttttcatattttagcttaccaagtttttgaatttgtactcatatgaagattgctcttcatatcagaggaagaaatgaataaagggtaaacaacaattcttttcttttttgcttgctgaccaactgtggattgaataataagtgcatgactagattttattataactagtttttctttgttttctcattattttccattaaattattttcttagccggttgaattggttctttgacatggtatcagagttttgatgaccaagcggtcacgagtttaaatctcatcatccctatttatttgttaaaaattaagcacaaggtagtgtagatcaattcaaatttcaagcctaaatagctttcacttgagtgggcgtgttagagaataatataaatttcaagcctaacaacttaagcattttgggtgaattggttatctgacactagcttttctttcactcaaatatgtctgtttttattgttgaagagaagtataatttgttttgctgcgtctctcacatatgttgacttagatcgtaagtctatttgcatgctatagtgttctttatccaaatcatgcccttatgacttagatcataaacctcagcctctgaatgataactcaggactttgaaataggatgtgcctctgaatgataactcaggactttgaaataggatgtgatatatattgattttatagtttgaactcgtaaaatggatgatggcttgcaactttacgctagataatctgattcagaaactttgaaccaagttgaagaaggaggagatctcatttcaataatctaacattattaaattccataagatagcatgtttatgcattaaataaaggcaatattcttttatccttttagcctg

SEQ ID NO: 58803 - DNA, 775 bp, Populus trichocarpa
  Intron number 1 from transcript POPTR_0001s28090.1 (locus POPTR_0001s28090) derived from phytozome v7.0 (chr-ID scaf fold_1; pos 26882290 to 26883064 reverse strand)
actccggtattcttcttcctgagaaaacctccaaggtcatccctttctcttcactcctctcctctcttttttctcctttcgtttcgttgttcctttgagtttctcctgcatcattgaaactgtagcataaaattacactgatacgctactcggtaaattggggctgggtttttggcttgtgtgtgatgttcttttattatagattcattagttacttggctaatcataaccaaactaaattaagcccaagatttatctttgttacaagagttgttttcaattgcattttgaatttcaaaatccactcctatcgctcgaatctggaattgtttcatacattaatacgatatttaagcttcagtttaattgctatcagtaacagctaagtggtatagctcgaattttaaagggtttgttgcggttgggaagttcttagttttaatatccgtgaaagagaaattggaatgaaatgcttaacattcaagttctcacgaccagtgttagtttttgttccttttccctttttatttcattcaccttgataggttagcatgctcaacttatttgtatttgtttcttgccagttttcataattatgctgtccaataaattaaagattaaatgtttttctgttgtactgtgatgtaaatgtacatttattcattcgttttattggtggatacatggggtgattactgattgttctttcctctcattttttttatgcttcacaattccagctgaactctggaaaagttgttgccgtgggtcctgg

SEQ ID NO: 58804 - DNA, 480 bp, Populus trichocarpa
  Intron number 3 from transcript POPTR_0001s11320.1 (locus POPTR_0001s11320) derived from phytozome v7.0 (chr-ID scaf fold_1; pos 8762330 to 8762809 reverse strand)
cttagaccagaggtttggccatttctccttggaatgtaagttcttgtttatgtgcctgtttatatttgattttcttagcatctacatgccagagatttggttgagttgggtttcttatctgcttgatttttccttctgatggtttatttataattaagcaaaataacagctttttatcagtacattctgtcattaaatttgggctgtcacaaggtgctctatctgtatatttggaaaaatcattaatggtaggctaggaacaatgtaattgttggcaacaaatttgctgaatgcaaacattctcatagaaaaggtctcaacatttataatttttctatttggaacacgcgcttgcaatttatgctattatttttctgattgtccttcctaggaagcttttttctttttgtttgtgttcatttgttgtgaggatgcattagcactgctctttgtattcatgccgagttattttcaacagct

SEQ ID NO: 58805 - DNA, 615 bp, Populus trichocarpa
  Intron number 1 from transcript POPTR_0007s09620.1 (locus POPTR_0007s09620) derived from phytozome v7.0 (chr-ID scaf fold_7; pos 9101671 to 9102285)
aacatcaaccgtacatttggtttataaggaaatgtatattatttttctttaaagtgaatggcaagtgtactaaccatgcaaatatatttgtatttgtcacatcttaaattaaatttataattagagatgacaatttgatttaaacctgaaaaatactcttccaatcatacactaatgagtaagtttattttttttaatagctacattacggtaatcagcaagaaagtatggatttaattagatataatataaatatttaaatttcttagaagtttaataataaattaagtatggatatacagaaacgtaatccgtagattccaatcagcatcctacttgtatttaagtttagatataatataaatatctgcaaatacatttcgtaataattaatgactggttaaatatgaactttccaggaagctgcatggaagcttcaccgacttccgtgtttgttgcccaccactcatggctcttccataaatattaacaactgacaagaataccacattcaccaacaaaccattagggtttccaccattataatggatcaaattcaccgttttagtagacatctgttgaatgctaatttgccaagacaggaggaaagagcag

SEQ ID NO: 58806 - DNA, 302 bp, Populus trichocarpa
  Intron number 1 from transcript POPTR_0007s00970.1 (locus POPTR_0007s00970) derived from phytozome v7.0 (chr-ID scaf fold_7; pos 527036 to 527337 reverse strand)
tcctccctatcaacccgcgtttctcctccatcgtgctctttctttctttttctctagtttggtgccctttattttaatgcacaaaagagaaaatttgagttgttttttctccctaaatatctcttatttctacaaatttgcatgcaagttcaaagaaaattttcaattccatattaattgaagtaacatcaatcttgaacgctgacctactaaaaaaataaggggaggaaataataatagaaggccttaatcaacttaaaattctttgcatactttatattaatgtttgcatatataaagca

SEQ ID NO: 58807 - DNA, 335 bp, Populus trichocarpa
  Intron number 1 from transcript POPTR_0007s08390.1 (locus POPTR_0007s08390) derived from phytozome v7.0 (chr-ID scaf fold_7; pos 7156495 to 7156829)
tctcctattcactctttcgccgcctcctcgtccctgtaagctctctcttcccttcgctccttcatcctcttgtcttctctatctagatctgctagtaaacacatatataaactatttttgggtgcagctaatggctatcattattagtgttaaatatttattgatttcttttattgccttattaacaactgggttcttaatgtatccttggttttgtgttgagtagatcataacatgattgattggaaaacattttgatgggtttgatgtaacactgctgctgtttctgtgtttgtgcaggttttgtcatactaattaattttttaggagctaga

SEQ ID NO: 58808 - DNA, 356 bp, Populus trichocarpa
  Intron number 2 from transcript POPTR_0007s08390.1 (locus POPTR_0007s08390) derived from phytozome v7.0 (chr-ID scaf fold_7; pos 7156919 to 7157274)
ttgatcgtaggatttcgtttgaatttatgtgatttatcttcttatcgattatcgaaccatttaaattggatgcgtatactttatggttttgactggaaactttggtgttgttgttccttaatcaaatctgcatgtgctttcttgagggtttttttttcctggcagtggttatcttttttatattctccaatatattagattactattttttttacgtctgtgctggtatttatgtgcttattttacttctgtttttaaaagtttgtgctttgatgtgtgaaattctttgttgggctggatttgatctttgttcctttgcaggaaaatcaactctcactgattctcttgtcgctgct

SEQ ID NO: 58809 - DNA, 386 bp, Populus trichocarpa
  Intron number 1 from transcript POPTR_0010s21680.1 (locus POPTR_0010s21680) derived from phytozome v7.0 (chr-ID scaf fold_10; pos 18870928 to 18871313 reverse strand)
ggggttgtagaggcagcaaaagtggccggagaaaggtaatattttgaagcattccccattcccctgtagttaaatcgggttgttattcctgcttgtgtttgattattggtgcccattttcttcaaatcaggtttttatgttttttctttgattatggtattcataacgtgtttggtaatgcaattgatcaatattttggataattttttagttgggtttgaaaataggctgttgtattaggaacagggataaacaaatggtgctattttagataggattacactctctatctccaacatgatggttgttttgaatgctaattctgtttcgtttatatgtctaatgcttttgcagtaaaataagtgaggatattgctgacagagttt

SEQ ID NO: 58810 - DNA, 969 bp, Populus trichocarpa
  Intron number 1 from transcript POPTR_0001s44110.1 (locus POPTR_0001s44110) derived from phytozome v7.0 (chr-ID scaf fold_1; pos 44582443 to 44583411)
aacgcctatcacttccttctctctcctttccacaagtacgcttttatcttctatatatataatgctctcgaatttcataatttgttggttttttatattttatgtatgaaatcctaaagagattttctatagcgcagaatttgcttctttgtttgctatactaaaatgggttttgcttaaactggagtttaattgctcgtttagtagttggttaagaacttcatagccaaaacctatcaatttgttgtgatttttgtctgaaactacaattttttttgtaattttggaatgttgatgataatttccacatgaatttggcaaaagtgaaaaaaattgaagttatgattactgtttttgtttctcggtattgaaatgtttgggctctttgttgatatataactattactgtattagcacaaattcatgttcttttcctgttttagcaacactaggatgtgagatatttatagaagaagatggtggccagtgaaatttttgatttggtagcttaacaataggtgctggtaagattatgaatattagctttttgtgttttgtatttgtctgttgataagctgtgtcctgtttatatgattgcaatcttacaattaatttctacttcgctagagtgatgatttccaatgtttaacatgtctggggaataaatgaggttggcagtcaagtaaatttgtaaacttggtctctgtcacagcttcgttcaatgcattacatttatttgtttgtatttgtataattaactctgcgagttcattttgtcatacaataagatagcttcaatgttgttttgtgatgtgcttactgctagaaattagtattcctttcatgtcatcaaacttgtagattgctgttttatttactgtaatataccaaatttcgatgatacctgccacagtcacttgatagatcgttctgcttgctttacatgcaggtcaagtcaccagagaagcc

SEQ ID NO: 58811 - DNA, 363 bp, Populus trichocarpa
  Intron number 4 from transcript POPTR_0010s11090.1 (locus POPTR_0010s11090) derived from phytozome v7.0 (chr-ID scaf fold_10; pos 11453813 to 11454175)
catttttgaaaaagacaacatccctcactcttctggtacctctctctctctctctctcacacacacacacacacacacacacccccaatcagctttttctttcttttgtacattaatgatgcatcgtcggtttcttcttcttcttcttccttttcttcttttgtttttttttggttttagggtggttgggtatcctcgggatatattttgtatacaccgagtttaagtccacctctcctgatcagtgttctttacttttcaaaaattctgattgagtaataagtccattggtcacacatcgattataatttatggctaatattatggttagcttcttattgttattagtgttttgtgctttag

SEQ ID NO: 58812 - DNA, 466 bp, Populus trichocarpa
  Intron number 3 from transcript POPTR_0010s17950.1 (locus POPTR_0010s17950) derived from phytozome v7.0 (chr-ID scaf fold_10; pos 16374366 to 16374831)
caacctgtggtaggccttattccctcagctgatcttgaaataaaagctgtctatgcccttcctgttcattgtttttcagtgccttgaaagtgggtgattcgaaatcaggcattcgaatcctcaaaacctcaactttaagtcttcgttactagatcaacgtccctggaaacaattgtccataaaacactccagcattggtgcatcgtttagcagaaacactcaaaattatgcaatgcttcctttgctgcctttttgcctcgagtggctttaatgaaatatgacctttaggtcattgaagaaggtacaagtgtggtacacaatagtaaccaagtccaatgagagtgtatcaatcacaattgcgtatttaaggttatcaattgtttaagccttcttatatatatattgtgctttttcactgatccaaggttcttttttttttcagggaatagttatttttgcatcagta

SEQ ID NO: 58813 - DNA, 647 bp, Populus trichocarpa
  Intron number 2 from transcript POPTR_0001s24290.1 (locus POPTR_0001s24290) derived from phytozome v7.0 (chr-ID scaf fold_1; pos 23619642 to 23620288 reverse strand)
ttatctcattaagcttctcttgattggcgatagcggtatggctcttttatcttcttgttttcttttctaaggatcttatagtttcaatccctgcaacccatttctcttagttttctttcctcttttttttttcctttccaatttcttaatgtatgcttccacttgatgcaaagttgacctgtggtgtggcagattttttagtttttctcatgtaaattggaatccctgatagaggagagacagtaacattcaatctgacatgatgttgtatctgtcaggattcggtaccatgtaggaggagggagagaacatgcttgctgcctaaatagattgtcggcagttaagctctttgtctacctccccttcccataaacatccgaagaaaggatatagatctaaacatgttgcctactttatcccatgtttctttattcttgtgatttaattgatgtcattatgcttgtcttttttttgttttttttggagtgggtgggggtgggtgggaaatgttacatccttcactagatttaaataactgctaaagtttaaatttattctgcaactaatattgtgcttgagatttgattgttcttttgttgtttgccgtcacaggtgtgggcaagagttgccttcttttgcgtttctct

SEQ ID NO: 58814 - DNA, 495 bp, Populus trichocarpa
  Intron number 4 from transcript POPTR_0002s26400.1 (locus POPTR_0002s26400) derived from phytozome v7.0 (chr-ID scaf fold_2; pos 23375804 to 23376298 reverse strand)
ctaagtgtgtccaaattgctcgcttgtatctcgaggtattgaatttctcatgcatgcataggatatgtgatgaactcatcaatagtcaacaacttggtagtcactggacttctgtggatattgtttgattttatatgcttattagaaattaaaggcagttgtcaagccagactgttggctatttatatgaaagtgaacacattcacccatcacctttgttggcttgactgccgtagtacttgccattattcttgcttcgggtgcacctgctcttatcagcatgtgcacttgattttcttctaaaattttagagtgagaggagtggtttttttttttttttttttttgacatcagtccacatctggatgaaactgtgcctccaagttccaaaatctgagtttattttaatgcaagttgagggaattttctcgcttataggtctcataaaacagtttgtgatcgctactgttatttcccgctgtttatatatgcagg

SEQ ID NO: 58815 - DNA, 748 bp, Populus trichocarpa
  Intron number 1 from transcript POPTR_0007s01700.2 (locus POPTR_0007s01700) derived from phytozome v7.0 (chr-ID scaf fold_7; pos 985940 to 986687)
gctaccctcccttgctccagggtggggttgcttgcttccatttcttgtttactcaagacccatttgattttgttgaatgttttgtactttagtgttggtttaaactttaaagtctctttctttatgggaaatgagtgatcttgatgtctgaacccatttgagagattggagaatccttgcttctgttttgttttggagtattatttgcttgttttttgtttaaagttttcatttttaacttcttttaagaaagcccatttactgttttgtactagttttgatagtggaggtagaaggaatggtgaaagttcatttttcttctcctagtggtgatgtaggttttttaccagaagtttaattggttggatagtaaagaatcaagtgatttgatgtaatgggcactttgttttattttttgtggaagttgaggagaaggcataattggtgaattgtatgtagacatatgagcttttgaagacaggaaatcatcttgagaagctgaactttctgtatatattttttggcctttctaatgcaaatgatttcgtccatctatcactttccatttgctgcatttggtttttcatagcaggagatgattttccttctttgtggaataggtttggtgtttatttctggtgatgtagtggatatatacttgctaaaactgtggagattgagatccaggaccttatatttgtttctcttacattgttaggtgaggagtgggctttgcatattgccaggc

SEQ ID NO: 58816 - DNA, 568 bp, Populus trichocarpa
  Intron number 1 from transcript POPTR_0001s38240.1 (locus POPTR_0001s38240) derived from phytozome v7.0 (chr-ID scaf fold_1; pos 37329337 to 37329904 reverse strand)
ttcacacacccacccattcttctcttctgattcaggttcgcttttcttttctttcattattattctgtttcttttcatttctagggtttgtggtctcgtttactcccatcttttttctctgcttctgatacttcttttcctttgaagcaaaacagtgcttgcttttatgttaccattattctgtgttttgttactgccaaattttatggaaaaaaagaagaagagagaaatccttatgtgaggcttctttatgttgtttttgggtatttttttttattcaaaagaatgggctttgatttttatataaaaactggaacgtttaaagaagggtactgtccatttggggtgttaaatgccttctgtgtgtgagaatgaattgaagttagcaaagagaaagtaaaaaaaacttcgatttctaatgctttatatatatatatatatatatatatatatatatataatttcagttaattcttattatcctggctgtgtttttcgtgtgcaatatgggttaagggtgtgttctaattagatgcatgattggtgtggtgcaggtttgaatttagaa

SEQ ID NO: 58817 - DNA, 515 bp, Populus trichocarpa
  Intron number 1 from transcript POPTR_0001s32150.1 (locus POPTR_0001s32150) derived from phytozome v7.0 (chr-ID scaf fold_1; pos 30557673 to 30558187)
ttttggcctgagatctcaactagtgtgcctataatgtaagtctttcttttatagattgaatctttcttgggttttgtttggttaggtttaatggttcttcttcttcttttaaattgattttgatcatttttttaataggatcttgaatgaataagagtgttttatgttgaaaattagttaaattgatgtgttttgtgagtacttgtgtgttaatttagttgaaaagtttgaatttttgggttcttttggtgaattcagtgattcttgagtaaagaagggtttttgtcggtcgtttaggagatggggttttagtgttgggacttgggtgattaggatttggggtttacgagattgaggggatttgaagttttgttatttgttggtattgacttgagttctgaagtaactttcccttgttttttacttgtaatgtgattttggatattaatttgcaatgtgattctggatattaattttccgctttccttcgttgttgttatccagagagagtttgt

SEQ ID NO: 58818 - DNA, 594 bp, Populus trichocarpa
  Intron number 2 from transcript POPTR_0001s32150.1 (locus POPTR_0001s32150) derived from phytozome v7.0 (chr-ID scaf fold_1; pos 30558212 to 30558805)
atcagagacaacttgctgcattgcttgtttctaaggtattatatttcaccatatttcacattactaggtttaaaaaacaattactattcttttttttaatcttattccttctccatcagtccttctcctcctgtatcatatggtgaaagaagagggaaaaggtagagaatggagtgtagaagttaacaatgtcaaactatccaaagtctactttcttatctgtaaatcttttaagaagttgtatcgttgccaaagtttcagcgaatgtactattaggactgagaataatttagtttagtgtagcaaaagtttcagtgaaagtttttcttttgttctcttgataggaaaaagttactactcatagaagaactctccttagttaatgcacgagagataagatgttatgggtgagaaatgagatgtgcagttgggttgaattcggttggttaacataatccatagaattgtgaaacccttgtttgtaactgtttaaagaaggcaattttgagtcttgggccattgaccacctttgtgttgtattaaaatggattttactgtttcttcttcaggttttctattatttgggtgaactta

SEQ ID NO: 58819 - DNA, 483 bp, Populus trichocarpa
  Intron number 4 from transcript POPTR_0001s16700.1 (locus POPTR_0001s16700) derived from phytozome v7.0 (chr-ID scaf fold_1; pos 13483587 to 13484069 reverse strand)
aaagttcgttaccataaattttctgcatgattatttattttctaaagtatttcattccaataaaagacaagtggtctgtaaggataatttactctccttctcttatataaaaaaaaacccttcatgccagaagttttggcgcgcaaattacagaggacagaatttttcttgtcactggaacaatggcgtgccaaaaaggaggagaatatggccaccaaaagctaataaactgaaagtaaactaatgaaggcacaaaacactgctaatagaaaagaaaatgttcttgttagaggaatacttgcctacttttgttgttgtttcattttggtgccatatatatgaactcaaaggaccaaacactcttgtctctgaagtccgaaccaaggcttcattattaaagtttcaaatttatgtgactgctcctacttcatgtttgtgaatctgtcaggctttcaggaaggaagtgatattcttaattgatat

SEQ ID NO: 58820 - DNA, 1019 bp, Populus trichocarpa
  Intron number 4 from transcript POPTR_0002s07410.1 (locus POPTR_0002s07410) derived from phytozome v7.0 (chr-ID scaf fold_2; pos 5069413 to 5070431 reverse strand)
aatctggaagccatcaatctgttgtaagtttcactcattcctgtttagtgtgaaattctcaactccacagtgcctctcccagggttaagttttcctctcttttttgttggcaacttttaaatgttggctacaaaggtttagtggctttgtttcttgcattcatcctctgaatgtgcttttcttatgtatcgccactgaactagtatgcactagaacatgtgaaataagttaggcatcaagctttcaaggcactagtctatttctaaaattctactaggttagttgctgttgattgcggctcactgaagcagagtgaagctacaggaagtttcattacccattgcattacatgatggtagacacccattacgtgtcctggttgaacccctacaatggaaacgtttcctatcaataaaaaataatacaagtagactgatattgtaaacaacttctgaacacatcttttcaagttcgctggattaactggatttttctaatgtcatggctgcttttgagcacacctgatgttatgtaaaactagagagttaaaattctctcataaaagtcataattgtgacatttaactcttaccagtgtttttcttgatctgatcaagtaggattttatgctgtagtacagaaatgatacttatttgtagtgtcaactgctgctgttgatttacctggcttctatgtctgttgtttctccatgtgtatacaagtattgtgatgagttgtgtaatatcattaggcactttgctttttaattcttactaataaaatgcagcaaccatagtagttaagttgtacttgggctgtaattctatgttgaactcccccccaacccacacacaaaacaaaacaaaaaagaaaaaagaagaagaaaacaggactaaatacaattttattaggtggaccatttgacttggcgattcgtgtcggctcaagtgtctatttggtcatgaaatctgcacatgttttggatctgagtttttattggattttctgcagatttgtgaa

SEQ ID NO: 58821 - DNA, 482 bp, Populus trichocarpa
  Intron number 2 from transcript POPTR_0007s02410.1 (locus POPTR_0007s02410) derived from phytozome v7.0 (chr-ID scaf fold_7; pos 1416866 to 1417347)
aaaacaaaagaaactttttgttgtttacatttcaggtaattttattttctgtgttttttagtgtactgtttctaaggaattatgctatttttagttaaagtctatcccgaagaatctcaaccgttggatttggaggaccaagtgatggctgattcaatgaatgagattttttttcaaaaaattttaggctgaagttagggtttctctgaagggagtaattccgtgcattgattggtgtttagtgttgtagtttgttaaaagtttgaacagttttgaattgtgagagatcagatagtttcccagctaatactttgaaccggggattgctaattgctaatagtggtgtgtaatgtaatagctaatagtggtgtaatgtaacagagggtgaaattagggtttctcggaagtgagtaatattttgagggtggttgttaattgttttgatataaagtggaagtgctagtgtcgattttcaggtgaaa

SEQ ID NO: 58822 - DNA, 682 bp, Populus trichocarpa
  Intron number 2 from transcript POPTR_0007s09950.1 (locus POPTR_0007s09950) derived from phytozome v7.0 (chr-ID scaf fold_7; pos 9512800 to 9513481 reverse strand)
taattaagattctcaaacccgtgaagaaaaagaaagttagtagatttgttttgttctccctctcttgtttcatgtttgaagtgatgtgttgttgttcgattcttttttagaatagtaatcttagcggttcttctagaataattttgtttatcccttatgttttgtggattaataaatcatttaatgaaggtcttattgtgaaatgttttttttttttttaattgttcatcaaagagaaaaacagaccatcattcttaccatagatatgttgtaaatctctatgtctggtggacaacgtttcatcatgttatttacttacacttgctgatctttcatcccttattagctattgctttgcactttctgaactttccactccttgttagctaaccacactgtagcctcaagttccttcgtggttcccctggattatgacccaaagcaaccttgagatgtttgagtgatagcttatgcctgtgcttaatcttcaaagagaagttttcttcgtgcatgtgatttagtacacagtatagctacccttttcttctctgttttggttttactattttttgtcttgtgggcctagtctacactttataggttgcctttttttggtgactgactttgttttttcgtacttgatgcagattaagagagagattaaaatactgcagaatctctg

SEQ ID NO: 58823 - DNA, 987 bp, Populus trichocarpa
  Intron number 3 from transcript POPTR_0010s01870.1 (locus POPTR_0010s01870) derived from phytozome v7.0 (chr-ID scaf fold_10; pos 2047334 to 2048320 reverse strand)
ttctaacagatcccagtagtatgtagtagcacatgtgttgcttcatttccttatttctattgttccttcaactcattgcacgatcaagttccctgacttgctccttcagctcataggatttggaattgcataatgttattatgaatttaatgttgtagccctcagtgatgtcctactttcagttcaatcaaaccaaacatgtcatatatttaatagaaactattcatagaattaggaattgcgtaacttctgattggatactgtccattattgctttgggttttatgcattgaagtcaattatctattcagtttgcatgtatcctgtcacagcaatggcagcatgatcaataatttggacaaaaataagatgaaaaacaagtgataaatttggtcccaaattggtcatatggcttttgcaagaataaggtaagacagagatggggtcttcttttgaaggggctctttgatggtaagttagtatctgggtttggtgatgagaaaaggaagaaaagtttgcagacatttaatgaagagaattagtgttctaggtctattatggaaggggggaaaatttgcattcaggttgttgatggtggtggtaggtgcaagtcattatttctcttttcctggtattgagttggtttattgacaggaaatgataaagcagttagagagggtggggcagggtggttgatggttggtcagttgaatgaagatttagaattcaagtattccagtaagttatacaggttcccattgggtgctactcaaacctggtgtcttccaatctgtttcttggattcagggaccctgcgttcttgggtgttgtcatcgaatggtttgtctagtgtcatgtcatcatattagagattaatgctgatgaactctttatacttgcaatccttgcattgttgtccccccactatatcattaactttgctacttaataaagcagatcaaataacgcctattcccactgaagtcg

SEQ ID NO: 58824 - DNA, 589 bp, Populus trichocarpa
  Intron number 1 from transcript POPTR_0001s05440.1 (locus POPTR_0001s05440) derived from phytozome v7.0 (chr-ID scaf fold_1; pos 4178487 to 4179075 reverse strand)
acttttctgctcaagattaccctgtttttacccctgtaagtttcagcttattttgaattttcttcactggttaattacttattgttattcgcattttaacattatttcaaaagggtattttttataattaattttcttttgttgcttcattgttttcttgctatattttgcttcaacatcaaataggagctttcactcttgtgattgaactggcaaaacaacatgatttatgacaatatatattatgactgggacattatttgttacaatcttgttatatgtaatagttattttaatctttaatagattccttaattagattttcctaattttagatttttctttcttagaacagtttgatcatttttcacagtggaaaaaaaaatctaaaaacagaatctttattgtttaacgaagattacaatttgtagcctcttcaatgtttcccttcatggattttaactttgattttcattcctaataataataaaaaaatctcttaactcttggataattgctacttttaatgtatgataatggaagttttactgcaaatggtaatgaattctattgttttttctatagagct

SEQ ID NO: 58825 - DNA, 549 bp, Populus trichocarpa
  Intron number 1 from transcript POPTR_0010s09970.1 (locus POPTR_0010s09970) derived from phytozome v7.0 (chr-ID scaf fold_10; pos 10563177 to 10563725 reverse strand)
cagcttgttagtgctgttcatcaagacccaggttagcctgctccctccctctgcctcgcttaagtttcttgaatggcactattgcccaaaagatttgagggaaagagaataatgtagtgaagcttcttgaataaagataaaatgacttttttttaaccaaacagcaaataacttcaccgtcatcctccagccactgttcacttctctctgttgccagacaaccgagaggaaaaaacacacgatggagaattttctagtagtttcactccaaattcaggtcttcggggaaacaattgaattgtgttttttttgtagctgaggatttatttgtttgtttattctgagaaagtgatcgctaaggatttactagttacatgcgagattaagaaattataattgttgaagttagctttgaatattctttcttgtttaatcttgccaagaaagtttgcaataacagaatcaaaatcaagtttgattaggctaaaactgggaattttgtggtgtttagcagatagcttgcgagggaagcttggaaaagtagcagac

SEQ ID NO: 58826 - DNA, 765 bp, Populus trichocarpa
  Intron number 1 from transcript POPTR_0010s17640.1 (locus POPTR_0010s17640) derived from phytozome v7.0 (chr-ID scaf fold_10; pos 16149924 to 16150688)
agagtacggagaggatcagatcctatccacaacaggtcttgatatatttgagttgtttcttcaaacagaggcaggaagagcaagtaaggtgacagctaaagaagaagaatagcttctagcaaagcagagaaaactagacagtggtgaatatttcttttggagaactctaacgaggaagggttgattggttttgctttttattttattttaagagtttgtctttttatagagagatgtgtatagaaaagctattagagaaaatgttcacagagccagtatcatctctgtgctacaaattgagatcataatcaacctccaaagaacacggcatagatgatggtatggctcgcagaaaggaaaaagacagttttttctccccccctcaatctttcttagaaatttgcacctgtttgcttggctatatgcttctttgcagattatagtgatattccttcattaacaaagtctgttcaaaagtctaacatagagaggcaagatactttgattgattcaaacttaacccttgacatgtcttaacccagaagatcaacaactccacaacaaaggtaagcactaattaaataaagttcttactcggtcatacagagaccagaagcctcgcaattgattttatgcatatttgtgaagaagacatacagtttttcttggcttttcattcagaaatactctgaaactccacaccttatttaatgtgacataaacagggcaggtcttgtatctacctagagaagctaagaagtcata

SEQ ID NO: 58827 - DNA, 571 bp, Populus trichocarpa
  Intron number 4 from transcript POPTR_0002s09630.1 (locus POPTR_0002s09630) derived from phytozome v7.0 (chr-ID scaf fold_2; pos 6900345 to 6900915 reverse strand)
cggagcgaatgtgagtagttaaaacacttttaactcggtttgagtttatataatgtgggagaaaagggttaattggatgcttgcttggtcgattattgtggttatattgaataagttatgattcttctagcatccacagttgtgttgtatttggttggatgagagaattgtattatacatcataattgaattatacttgacataatctacaatttggattaggtaattaattgttattgatcgaaatgagcactattttgcttgtaattagcaaataaccttgtatattactctattttaatttcttgttttcaggttattttagagggaatctttctatttgttccttttcacttctttgaaattgttatctttctattcacctgggcatacttttttctccgtttccttgttttcaatttcaaatttctacttctgtttgctgtattgttatcttgcaatagattttttttcaaactgattagaaagttgcattttcttctttaagtaatcgttatgccaaggtttttcaccttctaattcagttatgctgtttttattttcagtcggg

SEQ ID NO: 58828 - DNA, 894 bp, Populus trichocarpa
  Intron number 1 from transcript POPTR_0001s38010.1 (locus POPTR_0001s38010) derived from phytozome v7.0 (chr-ID scaf fold_1; pos 37065127 to 37066020)
gatttggaacaacagaggggcagtgaggaatccaggtatttctgttaaaagctattcatcctgtagtgttactacatctatgctgaaaatatatatgttcaagcgttattacataatatgatgtgattagcagcatgctttaaaatgaaatttggttgagaaggaatagatttctagcagcttgaagaacaggaaaaaggatgcttgttctctgtataatttagcaactagcttcagaatcattatagtgtttagaattcccctatggctgtaaatcttaatttcctacatggtattgggtggtgctttttaatctcttgaaacttagctgtcggagagatcataagttttattttgcttattttagttaccacgaccaaaaaactgtagtttatgtgtgactttgatgccttgggataagaattattggccattgcaaatccttatgtttaagattttgcctttaaattgaacagcttaatgtcaccaaggttgaatcagcattttttttatggttcttcgaccactactctactagcaaaactgaatttgcaggtggaagagagtactcttcttctttcttatcagcatcgagagaagaaactgttgatgcctaccccactcaggcatccgttttaccaccgaggcaggatatctttggccaatctacagtttggctaaatgagaaattttcgggaaaaaagagagaagaagaatgatgtgatcttcaagatagtttaggaatcattgcatgatctagaattcccagatactttgaaacaatacagccatgaaaagtttttcatggctaatacagccatttataaatatataatagaaagataataatattcgttggacttatttgtacgcctactgattgatttacagtgt

SEQ ID NO: 58829 - DNA, 731 bp, Populus trichocarpa
  Intron number 1 from transcript POPTR_0007s07890.1 (locus POPTR_0007s07890) derived from phytozome v7.0 (chr-ID scaf fold_7; pos 6361093 to 6361823)
tgttaacaatttataatctgattgaaacctcctttgtgtgtggtttccaattgaataataagagtttatactatacttgtttgaaataccattagtggatcctctaaccttgacaattgttgttatcattgtttaatccttacgttaatcttccatctcaaagttctcatcaactttttcttcttcttcttcatctttattattatcattattaatagtattattggtattattattattacttctactactagtagtattactattgttattgttattgttatcgttattgttattgttattgttaatactattgctgttgtattattgttgtttataatttatacagttaacctccctgtggttcgatcccggtcttgccgggttatttattacttcgacactcctgcacttgggagaagacatcaatcttttggtcgtgtcacatcactaataaactaaaagttttaaagtgttttaaagtgcagatataacatatatcaatatgagagtattgttgggtttactttaacattgcatcaatttcttcttagtctttggctattgatgtgttcccattttcttcttttcatgcttttattggtgatactacctttttcaaatgaacctggattatttctttgcaatgccacatgtctatttaaaaactttgattgctcttcatcttatttttagggtattgagaaatttaaaaaggctactcaagaggt

SEQ ID NO: 58830 - DNA, 1020 bp, Populus trichocarpa
  Intron number 1 from transcript POPTR_0010s12070.1 (locus POPTR_0010s12070) derived from phytozome v7.0 (chr-ID scaf fold_10; pos 12158319 to 12159338)
ttgtttgcaaccactgtttttttctccaagtaagtgatgcattacctcctggaaaccagaattcaaccacaatcgtcgtagttaaaaattaggagggagggtttttttttcttttgctaaaaatttaattttcaagctattttttttataaaaaaaacctaaaaaacaacattaaaacctttgtaaaccacctaacaaccctaaaatatccaataaccacccagaaaaaaatccaaatcaaccaaataaaaaaaaaactaaattgatctcatgggctcctgcctattagacttttttttattttatatggaacaattgacatattatctgtttttttttttttccaggcaagtgatgcatcacttgttgaaaactaaaattcaaccacaaccatcatggttaaaaattaggagggggttttttatttttttgctaaaaaaacaatttttcaagttattttttacctaaaacaaaacttcaagaacattgtgaaaccttttacaaagcacctaaccttggaatacccaaaaaccattgagaaaaaaaatccaaaccaactaaataaaaataaaaattaaattgaactcgatctcatttctgtatatattttgagaaaaaaccactaccatcaaacttcatttaattaatagagctcattagtacaaaaaataacaattttttatgctaaaaagtggcaaaatcgatgacttttccttttctcttcattttcatgcaactttccctctccgctctctgatttagaagctaaaattcaaagaaaatgagtattttattaccaagattgaaataacaaaaaatacagggaacgtggagaaagaaaaaaaaaagtatgagagtgaaaagaaactttcccctaaattttaaattgatcatgggcttttttcatgttttacactcttcccttgtttctcagttttatttattattaataaattttgacaaagtggtctttaatttgggctagcaaggggggcccaaggaacgttaggcctgggcaag

SEQ ID NO: 58831 - DNA, 723 bp, Populus trichocarpa
  Intron number 2 from transcript POPTR_0002s11500.1 (locus POPTR_0002s11500) derived from phytozome v7.0 (chr-ID scaf fold_2; pos 8551392 to 8552114 reverse strand)
tgtttttgctcctctcatctcattcaagcgtgttggtaagcatactcactgtaataatacgacattggctatggaaccttgaattatgtaaatatgcttgagccccagaggactttacaggttcagtggatactgagacagttgattggagttcttagttattgctgtataaggctgtcgttgcaatggaccgagttcagcaatttgacttgattattattttttatttaataactaaaaaagagtcaaccgtgttattttagtaaattcaaggttatcttgccaattctttggcacagcagatttctgtttttgccactgaagcattacaggatagttggcctgtttgttttattagctgaagaaaataatatagaaatatggtatgtatacattgctgtcggagcaattgttttcctcagcatgttccatgcaactgtaaagcattaggagccttgatattgagtaacaaagctaccttcttgcttctaaagaacaattttctacttttctttatattctaagaatgcccatgctaatcatgctagtacatcttatataggattggtgatatgctttgatgcgcatggggcatcaccttttattttttgtaattatatcagcttaacaactatgggaaatgaagactaatttttgttcccttttcttcttggtgtggtgatactagattcattaagatacacatcagcgttgtcggtgggt

SEQ ID NO: 58832 - DNA, 556 bp, Populus trichocarpa
  Intron number 1 from transcript POPTR_0010s11500.1 (locus POPTR_0010s11500) derived from phytozome v7.0 (chr-ID scaf fold_10; pos 11736709 to 11737264)
cgaaaggaattctccaaagccaggcgctcaaaaaggtctctcttcccttctgtccctccagtgcactgctaatgtgtgattgtttatgtacaaatcaacctttgatttggtctgatatatagtcgtccgggcttctcctggttcatctctctttctcgatcacaatttttaatatttaaatttgtaaaacatgtggaactccattggttcaaatggtgaagtggcactagcatgttagcctctgcgagatcaatggctgaaatccccgtttccgctgtcccaggctatgcttccattgctaaataaaaatctcaatatgaaatgcaacgattgcatgttcctttttcagagcatgattaaaaatcatttttctttattgctatagttattattaaatacaatcctagatatatagaggggagtttaagcctcaagaaacgtttttttaagaatctttttaattagctcttacttcttaattatcccttttcttcttttcttttcttaatttgttcaaatcaatgacccgaattttcccgtttatgatatagtacat

SEQ ID NO: 58833 - DNA, 187 bp, Populus trichocarpa
  Intron number 1 from transcript POPTR_0001s23250.1 (locus POPTR_0001s23250) derived from phytozome v7.0 (chr-ID scaf fold_1; pos 22523610 to 22523796)
gaaccccaagactccaataccttcaggtattctttcttttctcgaaaggcccttctgtatatcttcttcttttttgttttttcttgtttgctttaatttaattgtttgtatcataaaataataattatccagcaaatcaaatgaccatttttttttgatttacaggagttggtgaaccagtttcaga

SEQ ID NO: 58834 - DNA, 985 bp, Populus trichocarpa
  Intron number 2 from transcript POPTR_0002s06880.1 (locus POPTR_0002s06880) derived from phytozome v7.0 (chr-ID scaf fold_2; pos 4626597 to 4627581 reverse strand)
cttaacttaccatcttttcctttgccttagccctggtgagcttctttcactgacattttcgctgattgtcacttatttttgtaggacctgctttatttctaatgccaatgtaaatggataatttactgtctccagtttcttttcatcaaagtatttctctgctgtaatgcatagctctgctgtttattcttcctgagaatgaatattatgtttcgtgcagttttccaaattgaccagctagaaggatggttctttctgttttttagtattttattttctatatcgggaagaaaccggcatggttgttgcaagttttatcagcaatccaaatgttttctgatgtgcatttgatgtctactctctctctctctctctctctctctctctcacacacacacacacacacaggctcgcactcactgacactcatatatacatgtccaagagctcactgtaattatgtgttcaagcacattgtaaatcttcttaattgaatgtttgtgacaaagtaatatcattgtgtattatctctgttaaacgtgtcttacatctctgaaagttttttatggaatgaccagttgctcttatttacgatgagtttgtgcatgtaactcgcactttgatcttttgaaaaggaagtttcttattgccaaaagatgcaattaggtcttcctgggaagcacatttctatcttaatggatacgaatgagtttgttccttgaaatagctgttcaacaaacttcttgtgaatctcatatcttttggaagctatgtccactgtgaatgctgttgtaaacatccctttgagctttcttggatagtttcttttttcttttctcttttaccagttatttcatattcaatccaagttatcagttcctaaagatgatatttttctacagttttcccaattttctatattgtcctatacaatacgaatatgttggtgattagtgacatgcctatgcagctttgcttgttgaaa

SEQ ID NO: 58835 - DNA, 768 bp, Populus trichocarpa
  Intron number 1 from transcript POPTR_0007s06170.1 (locus POPTR_0007s06170) derived from phytozome v7.0 (chr-ID scaf fold_7; pos 4328169 to 4328936 reverse strand)
gatctgctctctctgtgctcagatcttcgttcctggtatgcttcacctctttgactctcttccttgcgtttcaatttctctgtatgtttcgcttctttttgagctcggttttgcactttcgtactgaaaatgaaagtttgttctgttaatatcttgtttacttgccgttttgagtttttttagctctttttgcctcaattctctagttttcaaatgattttcgagcaattcctcgtgttttaggtgccgttatgtgaagttttgctggcttttgcttcaatccttaaggttccgttgaattttaatgcgttctccattaaaaactgcttgttctacgtcaagaacaaccaatttttttcacttgctatgcaaacttgttgtttttctgctcctgttacgattttcgtcaatagctagcttgatttggtgatggtttttcaaatttggaagttgtgtgtcgccgacaagggattatcatgacagaaagtggtattttgtctaattttgattaagtatccacaattccacatgaacgaaactctttttctttaacattccttcttagcacgctgtgtagcctttttcgctgttaaacccaacattcttttaatacacgatttttttttataattacgattcagtttttttttttaatttgtcttttgtgtggcgtgagatctgacggctgaaatggtttctagaacagatctaacggttacggatcctgtttgtgcaggtgttttatttctctttttttgacgcacgcaa

SEQ ID NO: 58836 - DNA, 1051 bp, Populus trichocarpa
  Intron number 1 from transcript POPTR_0001s19110.1 (locus POPTR_0001s19110) derived from phytozome v7.0 (chr-ID scaf fold_1; pos 16479013 to 16480063 reverse strand)
agctggtgcgctgtattatattcctctgaattcaggttagtcttatgattcaatggcgttattttggttattccttatgtgtaactctttaaatgggctttgatttttgagtgatgaattttggaaatgctaagattggaaatctgttttctgtttgctgcttcattttggatattttgcttatgtccatagaagctgctatcacagtcacaacaatctctcagcttctggttttgacgacttaatttcttcaaattactctttaatttctctaactttcctttcaacctaaatacctagattattgtaatggtttaggcattacagattggatactctgtttgacaaggatgccaaatcaacataatggaaaaaaaaatcatttatgctagcagaagcgtgggatggagaatggcaagtaattggttgctggtgcttaacttgccaacgttattttttgtttcgtgttgtgaatactagaagcaaaattcccatgttccatagcgcaactccgtgaacaattatttaaattaaagtattacatacatgccactctgcttatgttcttttatccattgcctctgcaaactgggcttttatattgttttcttttttgtggaaatttaataggtgaagtttccttggtttttttttttttttttgtgtattgctcctgttcctgcacctccggatgacattttctcaggtacggattagtcccttaataaattcacaaatgaactgtcttttgtccggatgacattttctcaggtacggattagtaccttaataaattcacaaatgaactgtcttttgtagcacttcatcaacacatatgatatgattctgagtgtacggtgtgcaagcgtgtatgagagagagttatctggcctataattgtgtgtttacccggcttcatctgctgctttagtttgaaaaagcaaaaccaatatcatggtatataattaaccagaacatataaaagtgcaataatggcaaactactttagtctaaaacgcattgcagatctttcaagcacattacctgctgt

SEQ ID NO: 58837 - DNA, 745 bp, Populus trichocarpa
  Intron number 1 from transcript POPTR_0001s41510.1 (locus POPTR_0001s41510) derived from phytozome v7.0 (chr-ID scaf fold_1; pos 41128337 to 41129081 reverse strand)
ccaagttgctcacaattgaccataattactggcatgtaagtacaatcttatattatgtgtatttagaacaattcatccttgtttgctatgtaaattgcttgtggctttgtttttattgctttcatgctctttatgaaaattgtttctgttcattatggttggacaacgcaaaggtatctcattttttttcattcattcttttaggaatgttcttcatgcatagcatttatttcctttttcttggcgttggagcaagtttgattctgtttcttgtatcacctttggctttgaatttgtgtcctctggctcagagttacgcaattaagatctgatttcatggaagctgaaggttttatcaggggactaagaatgctagaaaccttttttggttgtggtaataaaagaagtttgggacttgtggcttacttagattaaggagtcaaataattcttgtttcttgtacagaagattcgttagaacctttgattcatattctggttgtctttaactcatttattcaaaccattttggtgtgatctaaatttaagttgttgcttgctattgatgttaacttctctttctttctcatttccgtaggcattgctggatgacataattggatgcgttttatattttatttttatttttgtgcattgctaaattcccttgttgtttatcgattacatcttctacatctaattttcacttttctaataggggtggactctctttgagatactaagat

SEQ ID NO: 58838 - DNA, 856 bp, Populus trichocarpa
  Intron number 4 from transcript POPTR_0007s11290.2 (locus POPTR_0007s11290) derived from phytozome v7.0 (chr-ID scaf fold_7; pos 11653266 to 11654121 reverse strand)
taaatcttgcttgccatacgcgccatcctgtcctggtaatttatttatagtttatgcaataaaataaaataaatcccattttatctggtaatccaatgaatcagtgaagaggatctatgaacattcacattataagcttagggatcatccatggattgattctcacattcaacactagttatttgatgaccccaagaataaagtgatggagaagagcagtatactctttgtttatcaaacatgaaaataagcatatatttctcaatcctgctgatggtgctagcgagggagaatagtaaatatgatagaagtacacagagtcatggtttgagcagaagtagttgaccatataagagcaactgctttgcatagtccttttagacatggagtagagacaaatactgatggagcttagagactttgagatgccagcttgtgtttgaatgtgtagctatgtatatgtttctgttgatttgttctattatattggcggatggtgaagatagctgtacatggacttgcataatatataagttgtggggacagtctacatctcaaatgtttccattagaaaagggggagggctgtattacgaagttcacatttgatttttattaacaatcagatcattcacatttggattgtaaagaaattaatggataaaatcttctcaatcaaatctatattatcagatcaaattggattcagacattgctgaggtctgatccagtgcaagtcctgattactgcttgtgtctgcctactgaatgctgtgtctaagctttaagcttacttacttcatgttcagtagaagttctaccaactgtttggtttaattttgcattatttcttccagt

SEQ ID NO: 58839 - DNA, 677 bp, Populus trichocarpa
  Intron number 3 from transcript POPTR_0007s08410.1 (locus POPTR_0007s08410) derived from phytozome v7.0 (chr-ID scaf fold_7; pos 7228174 to 7228850)
ttaagcttttgtcgagaagtgtccctgctcctcaggtaagatgagctattttttgtttggttttgcagtatggttatctatagttgtgattgtgctgtcctttgttgttttgagggcatttgttagtgcaaatggtggatttaaatggcatgaactatctgtgtttgaatgtttgtgtcaaaactaagcaatataatcagaagtttttttttttccttttttttgaagcctgtatagactttgaaatctcaaattacagttgcccaagccgaaactgcttttgcagctcaacacatctggataagctaaacgtataagctcaaaggaccaaaaagagtttttttctttgtatttgtgtattgtcctcattgattctatttttatgtttatttcagtttagtttagttagtataaaagaagaacagaaaggtttaatggttttggttcacatccaaccaaaaaatttgcttacagggtagtacttgtgctcctgctgatgtgtctcccgttctgactatacagtacatgtgggctggggtactaaaaacatatagacagtgttttagggggttaggctgaatctatatgatgcatatttctcatttgggatagttttatattggttttacaacagtgattattttaattttttattttacaggctatcaaaattttga

SEQ ID NO: 58840 - DNA, 817 bp, Populus trichocarpa
  Intron number 1 from transcript POPTR_0010s22620.1 (locus POPTR_0010s22620) derived from phytozome v7.0 (chr-ID scaf fold_10; pos 19456916 to 19457732 reverse strand)
tttcgcggctaaggtttaagcgaaactttctgcaggtcagattcttcgatccctatctctctttgctttctattctagttctattaagggttattataattgtgttttgctggttaatctctaattaaatctctaattaagttttgttagtttttctggtttcgttgtcgaagattttaagctgtattatgtttaaaatttgactgttagtgcctttgtaattctttttatttttttatttttttacgcagatctaaaagatatcactagtgtatttggattccgtgttagaacttaaatgataattgttcctgcttgacagatatggatattagaaattaattgttgttgttgttatgatcttctgaagaaaaatattttttttacatatatgttgacctggcttctcatggatgatatttagatgttttactcgtctgttgacgagataatagactagttaaattttcaggatttgaaatttgtaaatttgaaaagctgcaactgtttatcagataatggatagttggtgtttttgttctctttaaatggatgttgcactcttgaagaattgttatataaacagttctcactgtactgctttgtgattttaatagcaattttattataggttgaagttttggaaatttaattactaaaatctgtcaataatttaaagctactgctatgatttatcctctggatgttgactttattctttatttcgagtatgctctcatcgtgtatttttagtatggcatggatggtttctaacattatgtttttatgtttaacagtttaacactaagacttaagc

SEQ ID NO: 58841 - DNA, 264 bp, Populus trichocarpa
  Intron number 1 from transcript POPTR_0001s27100.1 (locus POPTR_0001s27100) derived from phytozome v7.0 (chr-ID scaf fold_1; pos 26048311 to 26048574)
agcgttttaccccagttcaccggttcgttccaattgtaagtatttcatttggtttctgataattttgaattcttttttctgcgttttttttttgttgttgttgctgtttagatatacgtaaacaattaaaaaaggcgtcaaattcagctaaattagttcatttatcgcttcttttatatctacaaacgattgaagaactgtagctgatcattgttgtacgacttgccaggaaatctatattgcttgagctattttttatatata

SEQ ID NO: 58842 - DNA, 1039 bp, Populus trichocarpa
  Intron number 3 from transcript POPTR_0001s27100.1 (locus POPTR_0001s27100) derived from phytozome v7.0 (chr-ID scaf fold_1; pos 26049113 to 26050151)
gcttaaactcactcgaactcatcctgatcttgcaggtataaaattgcaaatttgttgtcaatgtgtttctttagtctttttctgtatccttcaggttttaatgtggaattcttaccagtaacttaacatatagtctggatttttttttacttgtcgcgtcattgctattttccatctttaaagcctttgtattgagttttcctcaaaggatttgttaatatccctgttgtagctcatcgtgtaagcatcaattgagaagcatgctcgcaccttgagattcttctccttgtaatttaagcaagtgtggtcttaacatgattccacactaactttgcaaacatgtattcatggcaaaatatgttttagttgatgcaaattaactgaactggtatagttattgggggatgtatcacaatcatgatcaaaatccactttgagtttgaccaccttcacatgaaaatatgagcatttgctgtaaatgtatgttgtggatctttctgtttcaacaaggctttaaaacatttctcatctgcatctgtacttgcatggttatgtgtgcaaaacaatgatacttgcacatcatatctcaacatattttgaagacatttgatggtcaaatttacatccatgagctgtttgattatagaaaaatgtcattatggaaggcgccttaagtctagttacatcagtatattgtttgtggatagtttttcttttccttcttcattttcctcttaggaaggagttgtctacatagctaagttctaacaagtaggcatttgaagatcattctttttgaaagttttaatatatttccaaatcgtgctccttacttttccgccttccctcttgttgtgctttagtgacaacaagatttgctattgtgaagtgcttcgctctgtgaactaatgaaaataacatctgattgtttttttaatttcacctatgtgacaactggaatgctattcagctttcacttcatgatttataaattgtgtttccaggattgaagggacagtccaacaagaggcttatttcc

SEQ ID NO: 58843 - DNA, 477 bp, Populus trichocarpa
  Intron number 1 from transcript POPTR_0010s16370.1 (locus POPTR_0010s16370) derived from phytozome v7.0 (chr-ID scaf fold_10; pos 15334849 to 15335325 reverse strand)
cctgaactggaaccttaacagatcaccgtttcctggcaagttcttgtatacccttttgttttgtttcagtttgtttacctgttaatcagtaatgtttctagtacttattgagctataaaggtagtgactttatctgtttggcctgtgatgtttttttcctttctgtatgagtaatttaagggctggtttttgtttttgggttttgaggttacaagagctgtaattgaggggttaaggccatgtaggtgactctttttggatccatggatgtgcttgggatttcttgggcacagagaggatgactaggactgagttttgggggattaattttagtgggaatttaagttgaagcattttctgatttcatttctgttcttttctttgccgggttaattcttgtgcaagttgtgtatctttatttggttgaattgggttcttggtgcttttgtttttgtggggctttgataacttaaagaa

SEQ ID NO: 58844 - DNA, 609 bp, Populus trichocarpa
  Intron number 1 from transcript POPTR_0001s39440.1 (locus POPTR_0001s39440) derived from phytozome v7.0 (chr-ID scaf fold_1; pos 38615862 to 38616470 reverse strand)
ggtagattccttatattccctccaaagtaacgatgagactaaggatctttatcccatcaacgcagattgaccgctggaaatcagacgaaaaccccctatttatttagggtgtaataatattatggctgctaagagaagaaatcgttttgcagggctagctatacaagaagttacataaaaaagttatattcttctcgcacaattagaagcccttttagatatcaagattttgaattagcagtggtgtaatgcaagaacagcagcctgtaaaaatcaaataaaaaatgccaaacattagcacagagatttgctttcgccgctaatctttgcttgcgaacttcgttcttatacttcacaattaattaactaacaaaataaaaaactcaaacgatttggaaggtaaaattcctgatggattgttttttttttgaagaatttaactgttttgtatgtctttgataataaattgtctggtgagataactcaaagagttgaaacgttgaacttggtgaagattgatgttgcaatgaaccaatcgaataatatctcaagccttccaagacttgtcacatagtgactttagtggttcgataccagcaaagtttagtt

SEQ ID NO: 58845 - DNA, 1009 bp, Populus trichocarpa
  Intron number 1 from transcript POPTR_0007s04110.1 (locus POPTR_0007s04110) derived from phytozome v7.0 (chr-ID scaf fold_7; pos 2464815 to 2465823)
ggtacaaggtgatccctttactttccttctttttgggtttattattgcattttgttttgatagttcttttaatttggataaaaagagtaatggtggataatgaagagttactctgatcattttctcatacatttttttttgcatttgaggctatagttttgttttaagttcagtttgtttgcccagaaactgatgggaaatgcatgatgttagaatatattgattggcacacctatactggctcttaacaatcttgaaagttttcgttctttttcttgccctccttgtacgtaactagaggattaaattcaagtaggtagcttgaagtatggcaaaattagaggttgagtattctaacttgaatctgacaattgaaatcacatgtgctaaacttggctatttttcatgtatactggatcctgttgtgcattagctgatcaggcagtgctttctagagttatgttgttaatgttgacggtgatatgtgaatacagcagaaactcaattgtttcaaggcttttgttgtgatgtagcttacttgatcttaactgttaactttctatggactagtgcattttgcacaactgagacaattcatttctttttgctctccccttttctgaagagaagaaattagatttagcaaaaggttcaatgggaggctagaaatatgttgacaacctgtggagggctattcattctttgtttaatttttgtattccttctaacctcccttgagttgttgagcctgattgtataaagaactgaactttccacgctagaactctggaatctcaatagacaataccaacatcgttccttaatgatttggagttgctatgttctgttcctttcttacaatgcctatcatgtaccaatcattttttaatttgtggtttccaactttttttttccttggatgaacctatggtttccaacttcagggaaatggaattaatgctgtgtctatgttgaaggttaatttctttggattctcctgattctcttt

SEQ ID NO: 58846 - DNA, 972 bp, Populus trichocarpa
  Intron number 1 from transcript POPTR_0001s15340.1 (locus POPTR_0001s15340) derived from phytozome v7.0 (chr-ID scaf fold_1; pos 12172134 to 12173105)
ctgtaattgccccacatgtaatacagatgtaagtgttctagtaattacagttttcagttaccagtgatggcatagtatattcaatttggtgatataacgtaggtaatgtaaacataaggaagctataacaacatgactttttacttttcgttcttctattattgggtacttaggcaggaaaccccattaaatgacctctaataattagagaattcaataataaaacgtaggattttgatcgagttatgcttccttaacaagtgatcagactaataaaaaaatttcttatcctagttgatttaggggaagtttgatttttcaatccatatgtggttaagaaatacacatggctttcagtgttcgtactctttattactggataacataataatttctatattccagagagctaagaaccttaagtgtgggagataaataaatgagttgtagccttggaggttggatgacaagagtttgcctcaagctagcataattaggtcaagtaattacgttagaaacatgtcataactactcgagattcattgactcgtagcaaaattcagaaaacgggttctatgaagaaatcttcatggtctttaaccaccttaatttagagaataggctgagttggagaaagaaatgttgaggattaaggagtttgaattaagaaaggttggaaagatggtctgatgaatagactttgcaagaaatgtaagctgaaagcatgggtttcacttggaataaaagccaagcttggcttttaatatatgaagttgcagatatacattatttcttcatgtttgatgcggaagtaatgtgctgctatggttgtaaaggctttacactgaaaattgactaaaataaataaacttcgttgaaaattagccatacgtttacttcatcttcattttgcttggttcatgccattccttttgatttcttgttaattgttgtttgtgtaggcttcagata

SEQ ID NO: 58847 - DNA, 502 bp, Populus trichocarpa
  Intron number 1 from transcript POPTR_0001s03090.1 (locus POPTR_0001s03090) derived from phytozome v7.0 (chr-ID scaf fold_1; pos 2427962 to 2428463)
ataaattcgataacacctactaggtaaaacccagatcattattatttgttttacctcggactcagattcatcttgttctaaatctgtttatttttttgtgcgctgatttgtattgttgttttgacataccttttgtttgggttttgaatttacttattctttgaaaaattgcactatcgtataaatgaacatgataattttttgtgaaatctttcttttacagtcaaggaatttcgattattttcggggttctttttttttttgatatagaatgtggtgttttgttgttagaaaatcataattctgctttgttcttgttgatgtataatctcttttttttttaattcttgcctcgtttttctttttctgggaaatcagttagatgaggtggccgctgttgtaggtacctatagtttgtttcttcatgattacaaaagtatttagcctgtgctgctgatcgaacttacatgtatcttgaattgatgaacaggctaccattggc

SEQ ID NO: 58848 - DNA, 1013 bp, Populus trichocarpa
  Intron number 1 from transcript POPTR_0002s00480.3 (locus POPTR_0002s00480) derived from phytozome v7.0 (chr-ID scaf fold_2; pos 183453 to 184465)
gaatagagagagggaggagaaacaataatttgaagagggagtgttgttttggttggactaggagtggagatgtatgctggcatttttctcctattggtaacgattctaggctctgatgtttggttttcatgttttcttgaacttcgaatatttgactctatgtggtgtccctgtcgaggattcgaactattttagtttctaccttagctatgttggtgattatgtccgttaacagttattagtttagtgctaattcatcttgctgttaaatttgtttgatggattttgtgttttttatggttatctatcatttagtattgggtttgctctgaactgaattgtaaaactgtgggcttagtttgcatattaactttactggcaattccaaaagtgattttttcaaatttatctcagcatgttgtgacctcttctgatgtatgaacctggtatatcatggatacttgagtggttacttggggcttgttagcattagctcaaattacttgctgtatgttgtttattattgaccagttcctccatttgacatgcgaattgtttttatgcaaaaacatgcaataggcttattctataacaaagatattttttattacaacccacatcatgctgtaacggctttgctgtaccttttatttaggctgctgagaacctgggtatggggaatacaattgttttagcatttaaataagaaaaccctgggaggttgctggtcagataaataagttctatatatttgattgctacactgggcttgttatcagctggtgaaaatccgtggttgtgatttgagttagagttaagcacttgtcaattggatgaaatttgtagctgatcaaaggaagcctcatttggaatgctgtgtatttagagcattggtgaatgaatgtctaagtatggactctgatgtcctgctaaaatcttttccataatctgaagtgaaacctttttgttttcatatagtgggaaggccattgtggtgggttcaagaaactgga

SEQ ID NO: 58849 - DNA, 814 bp, Populus trichocarpa
  Intron number 1 from transcript POPTR_0007s11950.1 (locus POPTR_0007s11950) derived from phytozome v7.0 (chr-ID scaf fold_7; pos 12295299 to 12296112)
gcttgcttggagaacatctatagtgtcacttcaaggtatgtcaccacatttatttgaatgaagtattagcaaatgtgtcctgtttattggtttatcaaagcaaactgtcagctctcctgtcctgcttgctttactgactcaattagacatgattgctaaatttaacttcgtgactgttagttgtttttgcgtgaaactgattttaattttctttttcgggggatgaagaaatgcagcaatgggaattaatatttgatttaactgctaaataataatagaataaatactaatattcttaaataatactaaaaatctagaataatcattcaaagtttaattcacattgctgtctttcttcattcccatctataaatttctactaacatattaaggtatagtcatgtccattatggttttaaattttcttttattttatattttgacattcggaacatctttatggatgtatagcttttcttttatttctaatccttagatcttaattccttgtggaagtataactaaatctgtaactatgggatgaactcttgtggcttctataatcaaaagctatttccatgcccttataaattgcaaggttgcaatgttgctacgattctgttactaactcttgtggttttgcataaattctgagcagatgtttttttttctgtgcatttgagtcaccttttgatttgcattgaaacaaaagagatttcagacattgatatcataggacttttttgttagttacacttgacactttcatccttaaacagattcaagaacttaccctgggccatttgtagtggtt

SEQ ID NO: 58850 - DNA, 953 bp, Populus trichocarpa
  Intron number 1 from transcript POPTR_0024s00450.1 (locus POPTR_0024s00450) derived from phytozome v7.0 (chr-ID scaf fold_24; pos 205386 to 206338)
gcataaggtctgatcatcattcactagtctcgattcaggtgctttctttctcatttacaagtgttttcttttatgctttttgacagttgtaacgtatgtatagattctttatatacttatctctggtttattgccatgagcaaaatctggatttttttttgttttttcttgaattaagcttggtttaggagctagttttgaatcctagttttgggttttctttgtacgcatgagtttaaggggttattgtaaatttcctcaactttttacctttgcttgcatgattggatgatacagagatctgggtgttcttttattgtaaattaggtttagttagctgagcgaccaagttttttgtacgggttgttgtttagtgtgttttgtttttgtgggatcattcatgagaattgggaattataaggttttgatttatctttcgcagttggtcatgagttggctggtttaatgaagttttagagagtttttatggtttcagtgtgtgggaccctgaaatatttttttcaaggcttataatgttccatttcttcaacaagccatggctttaccaaaatgaaatatcctttagattaagagatgctagatgacgtaaaacttattcccttttctggagtttagtctaattaaaaatctaaaaaagtgaccacagctttcaatgctgttcaaaagtatgaaatagaagaatttgaatagtttctatatgaagttcttgtatgtttgcaagttcaccatttttatcacatactgtttactttgcaatgtaaacttggcggggcttaagtaacaagtaaatctaaaatcatttcttattttcagtgatttatatatttcttccctcctttttatatactgcacattttcattgaaactgatttctctttcctgtcttgtttccttgagcaagatcaactttcactgaggcaggtcatttggag

SEQ ID NO: 58851 - DNA, 878 bp, Populus trichocarpa
  Intron number 3 from transcript POPTR_0010s13990.1 (locus POPTR_0010s13990) derived from phytozome v7.0 (chr-ID scaf fold_10; pos 13698876 to 13699753)
gcaccgttaaaggtacgtcggtctgcaacttttgtttttccggccaccggaatgaatttagtttcctttcttggcgaggatattctgatctgcaacttttgtttttccggccagcggaatggatttagtttcctttcttggcgaggatattctgacgactaatatagaacagctaaaaaagcctcgcctaacttatcattaaagccaataacaacaataaaaaaatctactataacttgtcatcaagaattaatctcaaaaccatatcttaaggaaactatctattccctgatgcactcatacatacaattagattcaaaatcttactacgtttcttcagatctgcaatgatgacatgaaaaatatattaacttattagtcgtactctagaaaattctaaaaaagatgtaactcaattgattagattctagatttgttttctagagattaccggttcgagtctcacaaatctcagagtcactgaaagcttatataattgttaatttcaggatctgtagaattaatcgaggtatgtgtaaactgatccgaataacacgttaatttttttttaaaaaaaccgtcaatagatgtgagtgatggcagcaaaaacgtaacaatgatgttatttaggtgagagttcacgagattttttatggagcttggcaaaatgcaattacccacttttcgtgaaataagcgaaaaaaaatgataaatagaatttgactaagagcttgtaatggcgaaaaataaatctaataattgtagtggatttaatgaaaagaaaatacgggggcttgtgttcagtaatgaaataagaataactatgtatcatgattcttgcagcttactttgttgctggcactgatattgggaaattt

SEQ ID NO: 58852 - DNA, 526 bp, Populus trichocarpa
  Intron number 1 from transcript POPTR_0001s37570.1 (locus POPTR_0001s37570) derived from phytozome v7.0 (chr-ID scaf fold_1; pos 36544934 to 36545459)
gaattaatagcctctctgaagctactggttgtgaagtaagttcaagatatgctcttttgcttcatattatgatccagttcttccattatttccatttctaatatgttttcattggacttgtggcattgttgtatctgtttatgaatgaaatacatgtcgggggtatgtgcttttgatcaagctatgtttttttctttgaattatggtcttgattatgggtttatggtgttttataaacaagatatatgtttgtggttgattatggtcactttttaactcacactctttgatacttctctcgaagataagcttttttttttctttcaattttattaattgtattttcctatgttccccaaattgatgctcaataatttttcttcattttctgaagtggttgttcatgcatatttcagggttgatttatagtacttaatagattcatggttattgcttttggtttcatttgttcttgatttttctttcttcagattcttgggaagtgcgagtttctgaatccaggagg

SEQ ID NO: 58853 - DNA, 821 bp, Populus trichocarpa
  Intron number 2 from transcript POPTR_0001s37570.1 (locus POPTR_0001s37570) derived from phytozome v7.0 (chr-ID scaf fold_1; pos 36545465 to 36546285)
ttaaagatagggttgctgtgaaaataattgaagaggtaaattacttgaatgcttttgtcaactaacaattatgaaaactttaagacaatgaaaactttaagacaaaaagcatagttttggtgatattatcaattaattaggaatttaggataggagatatgattgttaatttcagacatgatgatggatggtaatggttgtggcttgtaagttcagtgtgaccgatcacaaaatgtaagttaatatgaaacttctttttatcaaaatgcaatcatgagaacagaaccgaaatctaatgttttttgtactatgagcaaaccacagcactacgaattcaaacaagaaatttagtgccatatagagcttaagctggagttaacagctcaggggtcatttaagtacttccctgtcttaaatggcgggcacctgaagtttcttctttaaattgaatttaggcacatacagaaatccttgcgatgctatttatgaatccaaaatctgtgtgaaatattgaaatctttggtttctacattgttcagatggtgaagtggaattactcacaaggactactaattgaacgaaacaattgtctgctcatattctattttttgacatttcaataatcccatttgttaaatacattatatattgtttttgtgtaaaaagaagccctaattagcttatgcaaaactttaatgtcacaaagtaattaaagcttgtagctggcattattttgttatcctctgttacactttctatatgtttggctgcttggctctttgacaggcactggaatctggccagctagtttgtggtggagt

SEQ ID NO: 58854 - DNA, 523 bp, Populus trichocarpa
  Intron number 1 from transcript POPTR_0001s12120.1 (locus POPTR_0001s12120) derived from phytozome v7.0 (chr-ID scaf fold_1; pos 9390626 to 9391148)
acgcctcggcttgatagaagtaagttgattcccaagcattgattttaccgactaggagaaaaccaaagtagtactgcatgtgaactgtaattaattctccctacgtcctgttctttattttccaggaactagttagagtcaacctgtattcgcgtcagactacataatcatatctgaatatctgtttatgtgacagtggagtatgttctgtttcttgttctctataagattactgatgctcttactcgatctctgttacaatggcgcttttatctttatgggaaaccttttgatttgttaccttctcatgcttagctttttatgttcttttccctatgttatccttatctgctcttgctttgaggtgcccttacatgttcattctctctcgccatgggtttctccattgttcctaatgtattcctttgctaggttataaaaaataaaataaaaagggggtctttttgaagggttttattcttctaaactttaatcgcagctggaataaacacatctacactcg

SEQ ID NO: 58855 - DNA, 728 bp, Populus trichocarpa
  Intron number 1 from transcript POPTR_0001s15290.1 (locus POPTR_0001s15290) derived from phytozome v7.0 (chr-ID scaf fold_1; pos 12119872 to 12120599 reverse strand)
gcttcccaccaagcctgctccccctgcacaagctggtgagcttcgatttactaaccgttgtttgtgttgattaaatttgttgctcttggttcattaacgaagaaatttgctttggaggtgtttaaagtactgagtttttttttttatttacgttggtttttgttttgtttttatatttgaatgctagaacatgaagggaaaagtggtaaatttattgaaattgttaattgaatagttgttttaactttatttttctttgagtacccctaatagtgttaaattgttctggttgttgagggatgaagggaatagaagagaagggaggacatgtttattgaatctgttggtgtttcgttatttcttgaatgttggtttgtcagctgatcacctgtttgcttacttatccctgtaatgtttgttaatggtggagttctagatgattgtttaatcttgttttgattgttggaagataaaattgttgcttgactccacccaaatacccctgttaggtatctcctggccattttctctctatttttgataaatatttaacagagtatttcttttgtgtttttaaaattactttcttttgtcaccttttattgcgttctttgttatttcatggattggtagcacaggctgacaggtggcactgattaatgttggagttgtatttcgtgttcataatactggtcttttatcttctcaaccagtgagggaggcaaaga

SEQ ID NO: 58856 - DNA, 606 bp, Populus trichocarpa
  Intron number 1 from transcript POPTR_0007s08010.1 (locus POPTR_0007s08010) derived from phytozome v7.0 (chr-ID scaf fold_7; pos 6501112 to 6501717 reverse strand)
ctcgttcaaaggccaggtatgttcagtgattttgtttaattgtattaatgataaatggttttcatattgcgaatgcaatattgttatcttagtagaataattattccgaatcttctttataatcaatggcgttccctggaaatgttattgaatgatgcatttgacgtttagctattctcgtagtttggactttgtagattagtaggaaagtataaatagcaaaaaaccatcactaattttcattgattaaagtgtatgataaagtttcaagtagggttttaaatattatcttacttgttaacgcgctttcaacttccctacactttaaactctggtacgtaatcggatctggtgattcatgtcagttatgtagcctaacagccatcacagcctttgtctctttataaggctcaactttccagactcccccttccattcaatctgctaacttaaattaaatcatctaactatatcttaccaactttaaactgcaatctctacttttacttcaaatatcaacattcgactcttcctatcaatgtgatctaggattgtttattgaagatacgattttgatcaaggacatatgctcttcttgcaggtttg

SEQ ID NO: 58857 - DNA, 362 bp, Populus trichocarpa
  Intron number 2 from transcript POPTR_0001s35930.1 (locus POPTR_0001s35930) derived from phytozome v7.0 (chr-ID scaf fold_1; pos 34389204 to 34389565 reverse strand)
ttcgtggcgaaggggtatcattccttggctcattgctttgttaatttttcgttttttcatgattttgtggattgtattttggtttataatgtgagtttactccttattttcatttggatgtcaatgtaatacagtagaatttacattatgtttgttttttctataggcatttgattgtatgatgtttttctttagattaattgaggtttcaattggtttctgaatcatgtatttcttgttggattatatgcatttcttcaaacaattggccagcttatcatgaaggcctttttttttgggtatgtttttctcctttggcatgctcaagtgtttcttcttatttaggttctgtttttcagata

SEQ ID NO: 58858 - DNA, 188 bp, Populus trichocarpa
  Intron number 1 from transcript POPTR_0001s20660.1 (locus POPTR_0001s20660) derived from phytozome v7.0 (chr-ID scaf fold_1; pos 18726278 to 18726465)
actggtaatttcctttgattttcttaatgggtttttttgaatatattgtttatgattagatatattggttggttgataatcagttccttcccagtagagaagaagtgttgcgttgggctgcagcaatggggcatgtttatatctatgtgttaagaactgattgattgaatgaaatgaattggcagact

SEQ ID NO: 58859 - DNA, 679 bp, Populus trichocarpa
  Intron number 1 from transcript POPTR_0001s32500.1 (locus POPTR_0001s32500) derived from phytozome v7.0 (chr-ID scaf fold_1; pos 30817056 to 30817734 reverse strand)
ggcgaatttggcacctcactcgcaagaagaagcaggtcactctcttatacgtgtttgggttgatttacatagagagatatggaattgtgtttgtgtattgtgtaatcgggtcactgtcaagaaatcttggttctcgaagagcccctataactggctcagttgccattttgtgtgtatcttttttttaggggtgttgatcaagaagttgattcgtagaaatatagctgtagcttaaaattatgaacataaccagtgtacttgatcacgggaggactggatcaatgatgtgtgtttatgcttgtcatagtgtgtgttcttgaatggttgaccatgtcctggctgtcttgtttaagcacagccatattccatattttggttcccctgcttcattctatatagttttcttctctaatcaacctgacataactgcatgctaccatgtttttgatctaattccttgtgtgtgaattttttggaggggaattctagttttttgtcctctacgtgtgggatcgtgtggtcctgttctggtccttgaactcagctgccatgctactgaaacaagtctgagaataatgtcatttaactttttaatatgataaatttgtatcaagactaaaatttcatgtttatgttgtgaatagttggagtgggaggaactacagcggttggcgaatcg

SEQ ID NO: 58860 - DNA, 1042 bp, Populus trichocarpa
  Intron number 3 from transcript POPTR_0001s02230.1 (locus POPTR_0001s02230) derived from phytozome v7.0 (chr-ID scaf fold_1; pos 1682813 to 1683854)
gaaatcaagccttccatttgtgcttggacaagctggtaattgaatcatactgtttacgatattgtcatgctgtttctttaaatttctgttatggattgtttagtttcagctagttgttctgtttcttgaagcaaaaatttagtgggagaaaatatatgtagaagctgaaagctagaaactagaaacctgaaacgaatcagctagttgttcctgattggtttttgagcctttctcaaggcgtggtttttttttttattgtttcttatagtatctgagaactttctctgtgcactggaattcatgccaatagaataaactgaagcccaaaatacgcatagatgttggagactttggcccttgctcgagtgcgcattgaaatgcatttgtgggagattgtgttcactttatgaagtgaatattggtttatagccactctgggcgtggtagagattttgaattgattgccttgcttgatgaataatttgcaggactacttataatatggatttgctttataggccatccaattgatgatcatccaaagtggattgggaagttaaaaagttatagttttagatgatcacgtggataaggcaatgaattatatgcccagccatggcaaggaagcaagtttgcatcacaatgaacaatacttagagttttagataggattctactgtcccccattactattattctctgtttctcccagtcttctactcttatcctgtgttcaacgtttagtgaagaaataaaggcaaatgctgatgatctgaaacatgcagtttgtagatcattagcactttgggaaggtcaatgagtgagtcctacaaacatgtgtgaaataggatagggaattatttttgaatttgtgaaaccacagttgtcataaccgcctaaagtttttaaaacttgaaaaatgtatcattgccttattggatcttacagaagataattaatctttccttgtgagttttatcttattttgtcactttctgtccttgcagtactcgcagcagccctttgctggaacaactttcgg

SEQ ID NO: 58861 - DNA, 543 bp, Populus trichocarpa
  Intron number 2 from transcript POPTR_0010s23530.1 (locus POPTR_0010s23530) derived from phytozome v7.0 (chr-ID scaf fold_10; pos 20077553 to 20078095)
gaaacgacaaattctctcatcttctctgttgaaatgtaaaaaggcacattgcagttgcattattttttcgttcaaaaaaactaaacaattctatgttgatatgtgttatataatatttaaaatcataacttaaaaatttttcataaattaatattgtttttgcttctgtagtggagccacaatgatgacaatcctagtctctggaacttttttagtctttaaaaaatttaaaaatagataaataaaaatttgttgtatatattaaaaaaaatatttttaatgagattaaaaataaaatcattataaagcagttttaaattataaaatctcgaaaagaacaattataatgtaaggttttttattttagaagtattcttaaattaattttacttgacttgagatagtatatatatttcaaattaatttttttatataacacatatttatatagcatataatatcaaatatttattaataatttatcacttcatttaaaaaatcctaggtaatggtagttctgggtctgtgcacaaaggaattctc

SEQ ID NO: 58862 - DNA, 807 bp, Populus trichocarpa
  Intron number 1 from transcript POPTR_0002s22220.1 (locus POPTR_0002s22220) derived from phytozome v7.0 (chr-ID scaf fold_2; pos 18891309 to 18892115 reverse strand)
cgcaggactgtgaaaagtgctccccaaagcatgtgatgtttctggtctccagctagtaactaatatcagtattatactattactagttcttacaaatcaagaaaagtacctctttgaatgcactgatactttcttaactagttccttcaattttggtcattttcatataggtaggtcggtaggtctgtaaatattcttgaactttgaaagagagtaagaaaatcactaatacctagaagtcactctgtcttggaagcaagttgtctttgttttctgatttctcatcttctaaattcacagagaaaaaaagaaagatttcccatctattgctaccaagttgtttagcagtgtcactagcagcatcgagcattgtagctacacattctctagcatgctagcttctactatcagcacgttgtttatcaagacatgtttatttgaatagtggatggtgtaacaaattaatggcttcggaagaggcataatgaactatctttacgtgaactgactctgatcttgaactgttctgacttgtagacttgtattgtcattagagcagtggtttatgatgtttgaaaagttggaacaattaacaatcagagaaaaagcaagtcaccaagagcatgatctcttagctctaatcttgtacggaaatttccttcaagaaattcttaacttaaagaaaggggaccgtgagactgagccttaggaagatgttcaccaccacattttacagcttgtttaggttcatttcaaaccaagtaattgcaataaaaagctgaccacatggctgattataaaacaggt

SEQ ID NO: 58863 - DNA, 983 bp, Populus trichocarpa
  Intron number 2 from transcript POPTR_0001s35600.1 (locus POPTR_0001s35600) derived from phytozome v7.0 (chr-ID scaf fold_1; pos 33941154 to 33942136 reverse strand)
ccccctactccctcggagattcccttacatacccggtgattcacttctttctttatgtggactttgatttttatatgtaatctgactcagacactatcttactgcttgttaaggcttttgattgcacataaattccgccatatagcctaatccacagggaaattgttctttgtaatgttagttgattgcatgattttcttcttttaggtgcttaatcattattttgatttggatttaagtttgtaacggtgtggtgttgcatctaagaaactttggaaacgggtttggtgttactgtggaccatctcaaaagaatcgtttccatataaatattaaatattagttgtcaatatttaatattaaatattagttgccaatttgatacttttatgttcctttgtttagctttcagaatgcggaacttggaaactggcatacctttgtcattttttttatggtatatgacaatgcaaaagcaataatctttacttaccatttcaaacgtttgacttcagttcagtggtgtcaaagttttgggaattcgtgttggggtgctgtttggcaggaggtttcctttccatggttactctgtcagttccagtggcttgtgggttctttacttggtctcgtttaagcaatgtaaaagcttaaaaagagggttccttgttaagattagatggttgttgcagtcactgctctaggacttgcaccatactctctgttcaatgaactgccccatatgtcaacaaagatctacaatttttaaaacaagatacaaatggagaaacaactgatctaaactttatttccagcacccttctgaaagatagcttgtaatccatgtggttaacattctatcaatctcatgctgatatattaatttcatagttttagcaatactgtgtgtttgccaagcacgcattcacacacacacacacagcattcactttttggctgaagaaacctttgtcgcaacaggcactg

SEQ ID NO: 58864 - DNA, 429 bp, Populus trichocarpa
  Intron number 5 from transcript POPTR_0001s28980.2 (locus POPTR_0001s28980) derived from phytozome v7.0 (chr-ID scaf fold_1; pos 27735515 to 27735943)
agatcaaggcagttgcagcagaggatagggtaaggccactaatttcacttgcatattgtttatggatccttatattacttgttcaagtcaaatgaatgtaaaaacacacctgaccaatggtagtaggaaaggtcttgataatgggagctcgatcattgcagcaaccgcatgcatcactcatatttccttctattcatttgattgatttatgtttttgtgaaaagaagtccaacttatgaactaattctatattattgtagaagagtggttgttaagtgtcatgttgtcgaagtacaggtttttattttttggcaatcaaattaactgatttcaaccatatgaaataaaaagagaaaaaaaaagaaaaactttatcaagcttttgattcatgcagctgaagttcgagccaccaaatcttcaagttccact

SEQ ID NO: 58865 - DNA, 333 bp, Populus trichocarpa
  Intron number 2 from transcript POPTR_0001s28070.1 (locus POPTR_0001s28070) derived from phytozome v7.0 (chr-ID scaf fold_1; pos 26870873 to 26871205)
tggtgtctggaagagtggaagcatttgtgattcacagtattttcctgatcatcagtatagttaccaataaggtgattccataatggaatcagaactgtaattttatttttctcttaaaattagatgattgtagtcattattgttgtttaagtacataaagtccccacgttcatatctaggctgttgcatttgtgtgttggtccaccatttaaatttctagcgtttcagaactgtgctacaatttgttcaatatggatgtttctgaatcatgttcttttatctttgattgggaaagtagttcttgaaaggtaccctaaaatttgtgaagatcgt

SEQ ID NO: 58866 - DNA, 955 bp, Populus trichocarpa
  Intron number 2 from transcript POPTR_0010s21190.1 (locus POPTR_0010s21190) derived from phytozome v7.0 (chr-ID scaf fold_10; pos 18566057 to 18567011 reverse strand)
agtggctgatctgcaagaggctattcataagcgaagtaagttccttattttgcttctctcattttgtaaaaagatcgaatctttggtgttaaattactatcgggaccttagtacggtgtgagtttgaattggaggtgaagaagcgaaactcttattataatttaatttacaaattttgattagataggaaatccaacagaattcaaagtctgctctctctctctctctctctctttgatttcatgtcccgggtatggtttggctgtagaaaagcatgaattgtgatgcattgtctgagatctttgctcctctgttgcaatttcgatttttggaattggcatgctgcttctttctgctttatggttgtgttaagagtttgtagattttgcttagggtgcgaatatatgttctttctaacagcaacttatcaaatatactaacttaatagctgaaaaactagacttgtggtatgtatttgaagaagattctgtctttggatttgagtttgcttaattatttatttactttctttgtacagtaggctcaccactcatttttattctccaaatcatgttgggttttatattgagtagtttctttcatgcaaaaagcttctgaaagttattttattttatgtttcacacatcattacgatgaaactcgcaagatcagagttgcaaatatatcatttgcatatgttcttgaaaatcgtgaataagagatcttcaaagcatgagattggctctgaactttgaattttttgttgccaaattttaaatttatgtctattttcttttttactcgagcccctactttccttaccaaggaaccatatgtaaagaaggagtgtttgtgtgtgtagttggagcatcagatgcagttttatttcaataacctttcttcatgtcttacatcaacagccaaaaaattctacccttcaagacagcggctgacc

SEQ ID NO: 58867 - DNA, 274 bp, Populus trichocarpa
  Intron number 4 from transcript POPTR_0007s00430.1 (locus POPTR_0007s00430) derived from phytozome v7.0 (chr-ID scaf fold_7; pos 153220 to 153493)
cttttttcactcaaagacgtgccagaaaatattgtgtaagaagctctgtttctgaatgcttttgcccatgttgtttatatgatgttctgactttgtaatcaaatttttaatggagggctttgattacggtgccaagaaggaggaacaacaaatgctgttagaggggattgataagtgtttcttttggaatctagattgccaaataattgtaggattgattttagttttcatgtcttcaggttaagaccaccatcaacatcaagttcaagaaaga

SEQ ID NO: 58868 - DNA, 701 bp, Populus trichocarpa
  Intron number 2 from transcript POPTR_0010s16600.1 (locus POPTR_0010s16600) derived from phytozome v7.0 (chr-ID scaf fold_10; pos 15513234 to 15513934 reverse strand)
ggagtcaaaaattcaaaccaagctcagttttggaggtaagtgccttttgtcaaactctactttttatgctgatcaactttagcactaaaagttactaaaaaagaagggaaaaaaaaactcgcagcacaaaaagtcttctgtgctttggatttttttgctgtggcgtgcttgactacaccttttcctattcccattccctcaaatcatggcactcatggcacctagctagagtgtgtcaaattggccaaagaaagaaacaaaaggtcatctaaatggtatatccgttcttcattatttggtatatccgttcttcattatttgatcgcctggaaccctgaaaagttgctcacacatattttcttttcctctcttatttttgccttgtaaatgtgctcctggaagattaaacaaatttcgctcgtgggacacttgcccccacaaaagtaaacgaatcccgaaaagtcaaacaaataactagcttagcccatcctcaagtagatttcctgcttgttatcttgtaaccattaagtcgtatttttgtgctcgacgcgagtactttttctcatcgctagcctccgttcttttttcttcttttttatccgttctttatttacaccgatgctagttacatgtcctcatctttctcaattttctattgccatccaggaatcttgctcttgtggctggtactttctatttga

SEQ ID NO: 58869 - DNA, 923 bp, Populus trichocarpa
  Intron number 1 from transcript POPTR_0001s37000.1 (locus POPTR_0001s37000) derived from phytozome v7.0 (chr-ID scaf fold_1; pos 35819972 to 35820894)
atcttcgtgaaaacgcccttcttgaactctctaaggtaacaacagcattaccaagtagatggcttaatttttgtttcttagggaagaaattgagaattgaaaaattaggattttgtttgaaaccctcataattatgaaaagagaattcagtgtctttaattgtttttatttaagaaaaaatagttaatttcatgagaattattcttttgtaaaacagctataataaattactatagacagttgaataggaaggaattgtatgattattggcttcaaacagatccgtcactagctcggcaccacccatgatttgtggttattactccattttatgcagctgaggaagaaaaaggccacccctgaactagtgaaacttagaattcaaggcatattcaaacttttcatgcaatagaacattttataattaaacaggatgtgagtttttctttttaaattggaggcccattatcgttggatgctacctgatagtttgttttgcataaaaaggaacctttaccttggttggctgtatacatgtgagaggggaaagtttatcatttactttgtacaccagttcttttctatatatatatgcttaaacaagaaatagatacacatacacagctggaggtggtccatgtgcaatagcttcatttaaatttgttgtgtgcggatcttaccattttttctccttgtgtggttattccatttagttgttgaacattcaagtgctgccattataaactagtgtctgcctttgctttcatttttagaacaaggatttatttcaagaattggctcctttcgtgtggaattcttttggtactattgctgcactcatacaggtatgcctaataaacttgtgtttgtttttgttttcatttatagaagagagaattatttcaagatttggctccattgtt

SEQ ID NO: 58870 - DNA, 1040 bp, Populus trichocarpa
  Intron number 1 from transcript POPTR_0031s00300.1 (locus POPTR_0031s00300) derived from phytozome v7.0 (chr-ID scaf fold_31; pos 132117 to 133156 reverse strand)
agccaaaacaattaggtgtagaaacaaaattcgaggtaaaaaacaagaaaagaaagtaggatttacctttcaagcaagaaagacagatggttggactccaaatgagatgattcgattcaatcagaaacaggaagcacagatcatcagaaaggtttaagaaatttggtgagggaaattaggaagccaatggtatactgagacagatcaagcagaagacaaagtcaatgttgcagtagctagctacaatgatagtagtatggtcagatcaatgacaattaattattgtattgtttaataagaaggaaggaacagctttcctaccaaagattatattataagatatagcaagttgcttttaacctttaattatatgcatgtgctacattttgctttcacttgcgaatttctcaagtcattcacattgttctaatccattaaaggggtaaatatagtaatattggtttttgagagttttaacttcttatccttctcctcgtatgcgtcaaaggggtttcatcttcttaagagattagcatgtaacacatttagaggtattgatacagttaagtgagaaattccaaaaagctggctcacgacaatggccatggtttggcttgtttggtcatgttattcaaatagaaactctgcttataatcttagagcctgttacctagtgtaaagaccatcagtagcatttgaaaattaagaggccatgatcaggagatgagaaaaggaagagagagcatcactgactacacaactacaagaagcagcaaccattttagtcaaatagaaacattttgatctgatttgtcttaatatcagatttaactacaatctttcatattaaaaaaacaagttatacaaggaaatggcaaatataaaatcggatctgatacatgatctcaatactgttataagagggcaggactaatgctcagttgctactgtttcctagttagtaaaacctgcactggatggtcttgtgatatttgttcctgaaagatccagaaagacattgcaaaggtgccttttacggg

SEQ ID NO: 58871 - DNA, 380 bp, Populus trichocarpa
  Intron number 1 from transcript POPTR_0002s17420.1 (locus POPTR_0002s17420) derived from phytozome v7.0 (chr-ID scaf fold_2; pos 13183956 to 13184335 reverse strand)
aagaaaggaagggaaatcagcaagagaacagcacagtaaaacttgacagtggtagtgtagatggtttttgggtctctgtttctcccttttttcgttgtaaagcttgttgtcaaaagaaaacacctgaactgcttcatcataagaagtatcttccaagccaccaccaaccaccaccaccaccaccgttaataatcaagctctttgtgtcagaaaagaaaaacccattaattttgctactcaatttatccaaaaacatgcaacgtgaatcaaaacgtggccactttcagctctccattgaaccgtagaaactaaactgtattgtggattattgctttatattgtaactatgttgggcctagtctctgcaaaaaccacaccca

SEQ ID NO: 58872 - DNA, 817 bp, Populus trichocarpa
  Intron number 2 from transcript POPTR_0002s08640.1 (locus POPTR_0002s08640) derived from phytozome v7.0 (chr-ID scaf fold_2; pos 6049364 to 6050180 reverse strand)
gccttggtgtttaccatttcaggtgatttatttcttgacctctgatttatttgcttatactttctggattttgttttaggtttttgtttcttcgagttactgttttaaaaagccttttggttcttgaagttgggtttttttttttttaaattggtgttttgtagggtttaccatctaatttactatctttctgagccccgcttcaatttttcagtgtgaagctgggtttctgatcttactgttttttgctgtcaatgattaatttagtagaagtatcttggatttaaaattatggttgaaagatgggaaatttggtaaattttcaggtgaattcttgaattgaactatacttctgtttttctatttcctaaatttgtggccgtgtatttgacttttctcttgtggtttgttttcaagcatgtgatgttgaattgttgcggggttcctattttagaactgttcgtgatttaatgaaacagtggaaattggagtgtggagtaaatttatgatatatcaagtattccatttatggctattttgacttgtatctgacgaacagcagagtgcaggccgattatggtttgtaatcagctatatctacggattaaattttaattgaattggctgtttctgattcacaggttttcattttccatggatttgttatgatttcctgttcctttttttgttgtgattgtgtgtttcttaaattctactcttcaaagcaaattatggttttatttatttttattggtatacacactaggagctcaatattgatgaaggaatcgattgtgttgcagaaacggagatagat

SEQ ID NO: 58873 - DNA, 395 bp, Populus trichocarpa
  Intron number 1 from transcript POPTR_0007s15120.1 (locus POPTR_0007s15120) derived from phytozome v7.0 (chr-ID scaf fold_7; pos 14760136 to 14760530)
taacattaaaaaaacaacaacagcaacaaggttaggtgggatccatcccacatacgcatagtataattacatcgtcgggacaaccagcacaagacgacgtcaacgcgagcctttagaaaacaggagggggaattgagaagagtcaaactcaaaccccactaagcctggaaatcttgcataacaaaacaaagaacacccctatcattccctgcccacctcgaaagattaaacttttcttttatcttttattgtttggctgtgaatcacaagataaagtttcgttttttttttttgattgattgattagtttcacaagatgagcaaacaggtacgtaagacattaaaagttctctcatcgagggccatctgtatctctatcattcctcctttctcca

SEQ ID NO: 58874 - DNA, 679 bp, Populus trichocarpa
  Intron number 2 from transcript POPTR_0007s15120.1 (locus POPTR_0007s15120) derived from phytozome v7.0 (chr-ID scaf fold_7; pos 14760610 to 14761288)
tagaagaacaagaggataggtctgcatttatcaaggtctgttcttccttctccccatttatacatctgggtgtaagttcttgtttcattttcttaaagaacagactttgcattgcttgactttgatgcaacagatctgtggtatctacctcatcgagaagaaacctgtgatttagctattagtcatttatatttcttgttaatatgcagccaatcaatcctatatttatcgttttgtaatttattggtttgaagaaacctgtgattaaaaatggtgactctttgttttttttgaaatgttttatgataagtttgcctataatataacattatgtgtcgtatacatgcatgtgcttttcatgatttgcttaggatgcacccagaaactggatgagacatgggaagtttctactttcttttttcttaattcaattttcttatgccttgaatatactggaggccataatctgctgaatttgattgcaaagtttgattcttgctcaaaggaacatacaaaattttcaaagcttgatagtatttagattagtgtcttcaaatcattttcaacatcttgatctatgtggtcttaaggtgttttcaatcataatatacaactatcaatttagctgcaaaagttcctaatgtttgtattaattagcttagtttcttaatattcttag

SEQ ID NO: 58875 - DNA, 494 bp, Populus trichocarpa
  Intron number 2 from transcript POPTR_0007s07860.1 (locus POPTR_0007s07860) derived from phytozome v7.0 (chr-ID scaf fold_7; pos 6297297 to 6297790 reverse strand)
tgtcctcatcggcttcattctctttgtaatatgtatgtcacagtaatttcttctttcaaaccgtgtgtctcactccttgcagtgaacatgtttttaagcatttctttttgtagaacttttaaaaagaggaatgaagcaattttaactttggaaagttaaaaggaagttttctaactagcctgaacttctctttttctatttgctgttatccttgttgcaaatatcatattttctttcaacttgcatttgatttttcatcatgaactaggatcttcgttttcacaaaatcaaatttcatcctaaagactgtatttctctttattgaactatacgaggatatctattgatttcagaattaatccagaaacatttttcatcaaaccattttctgatttactgctttttaatatcactgaagtttttatctatctcatcttaatccaatttctgaaagtgcaggtggtggtgtgtgggcagtgtaccctgtcatcttc

SEQ ID NO: 58876 - DNA, 797 bp, Populus trichocarpa
  Intron number 1 from transcript POPTR_0007s07860.1 (locus POPTR_0007s07860) derived from phytozome v7.0 (chr-ID scaf fold_7; pos 6297951 to 6298747 reverse strand)
gttgactcgaaccttaacaaggttagttttttttccctttttcttggtttgatttcattttttttggctattgtctatgttagaaagattttaaatattgattgaaacccagttgctagaatggattttatgttgttattctgttagaaagttttgatcttgacataaatatagagtacataagagacgtcagaaggagaaaattttgtaggtaaagtacaaatatttatcaaattattttgttgcttttgactgaacttgtatcacgggaacaaaaaatagattggtgatttaaaaattgttgagatagagattaaaatgatatgcatgattcacaaggtttactttgcatacttttgataaatactgccactggaatttgcatgtaatataacatcgagtagtttcttatacaggagaaggatcctggttatcattattgggaaagaagttttattggaaagggttttaaaattttgagagacataaagaagttgagtgctagtgatggtgtttttgaagttttgggattgaaatataaagtgggctaactgattcaagactgttgaagtagttctagtttggaaatggtttgtctaaatggaatatgtttgtgcagttcgtttgaccagaatttggtaaagatcgtggtacttttgattaagtaaatggaaacttttaagatgttgtttttgttgtattacgcagtggaagagaaaagtaatgctgttgtttttcatttggtattcttttcttgcatacacaggagcatttagtaacagtggttagcgaggatc

SEQ ID NO: 58877 - DNA, 549 bp, Populus trichocarpa
  Intron number 3 from transcript POPTR_0002s10780.1 (locus POPTR_0002s10780) derived from phytozome v7.0 (chr-ID scaf fold_2; pos 7826256 to 7826804 reverse strand)
gggtatcatattcttatcgagttctattgatggatgtaaattaaaaagtttagttctttagtgttaaattgcttctggtaaagggttttatggggtttgattttaaatgagataatttggttaactgtgtgagtttgtcgccttgtttttgaggattttttattttatcctagagcatataaattggtcattttctttctggaacactattaattacactttcctagttttttttttttgtctagagactgttactggaatgatattggaattgtttgttttcatgtatgtccagtttatgctaaaagggtggggatgaacattgttactcacattactgggcagcatgagaacttttttagtatatccttttatctcaaaatttgactcttaacatttaacattttggttctggttttttttgcataatctggattggtttacacacaaccaaacatgcatgtttatgtagttcaaatgttaattatatggaaaagtgacctaggtaatgttggtaactgaaaatttgtctagtgaatctctaggctc

SEQ ID NO: 58878 - DNA, 663 bp, Populus trichocarpa
  Intron number 2 from transcript POPTR_0007s00210.2 (locus POPTR_0007s00210) derived from phytozome v7.0 (chr-ID scaf fold_7; pos 18283 to 18945 reverse strand)
cctgctgcgaagaaggttaattttttcttcattctattttcttgtttcttttcgcttggcttcaaaatttgagttggttttatttttttatctttaagaaaaaagaacttctataattaatcagtgaaaaactacacacttgacttggtaaaaggtgcgcacaaggctgggagaccaaacatgggattcatttagccgactcactcaagccttccacccttttaacaaactgttcttccatggttttagttttagcagccccaatactatttgctgtaccactgcggcgattttttcttctgtaattcctattccgctcccatccttttcttttgttttttattcttgagattcactgccatgcaatttaggatgtttcagacttttttttttttcctttagctatctctaatgatcaacaatacataatgtgtattcaattaaatggtctagagagagttatagaattcctttttctcaacttgttggaactttcttatagctggcggtgctcttttagctgatcttttttcccgtgtatgattttcagagatgtgctacattggattcatcttattatgatttagtcgttgatgtttttcttatttccatatcttttgtttattagaaccttgatcaacgaatcacccttgcattcaacaa

SEQ ID NO: 58879 - DNA, 513 bp, Populus trichocarpa
  Intron number 1 from transcript POPTR_0007s00210.2 (locus POPTR_0007s00210) derived from phytozome v7.0 (chr-ID scaf fold_7; pos 18965 to 19477 reverse strand)
gatctgctctcttgacttctcccggtaagccacacgcaccctctcatattcctccccttcttctctttatccataaaatagccgttgatattaatcttctcttgttggcttgccaagacaagatgagatttttatatttacagtattccttttggattttccctttttgtattaaacattcgctctgtttgtttgttttggtaattgatttatcaataactggatcaatgaattaactgttttaactgccttccattgccttgttgtaatgatatttttttttttgtgagtgataaggatttcacttggtttgatttctaggttttatttttccaactacgactcatttgagcttgccttcaacactctgaaaccttacaccctattattattattgttattacaattaaaaaaaaaagacatttttatttctagattctgactcattcttatacttttggatgctctatgtatgtaggtattgcgttctttatattctgtattctgagcagt

SEQ ID NO: 58880 - DNA, 333 bp, Populus trichocarpa
  Intron number 3 from transcript POPTR_0002s14570.1 (locus POPTR_0002s14570) derived from phytozome v7.0 (chr-ID scaf fold_2; pos 10833288 to 10833620)
ctcagaaattattcgactctgcatttgttcaagtaagcaataaatctggatatgaacatgatcaaattcaagaaacataagggaaaacatatagatatcgcaatcttcgtggcataattctatgctgctcctgtccgtgtacgcatttattactgtttatatggtttctttcttgttttgaattttgatacgcagagaagatttagctactgcttttttaatgccttcctttcttgaaaaagcaaattgcacctaccattttgaccatgaccgattccaattctctgtttttttccagtcctatactacaaacagtgcaaaagtgatattttt

SEQ ID NO: 58881 - DNA, 607 bp, Populus trichocarpa
  Intron number 2 from transcript POPTR_0007s05090.1 (locus POPTR_0007s05090) derived from phytozome v7.0 (chr-ID scaf fold_7; pos 3285992 to 3286598)
atcagaaactgtatggctctctctctttctaatatgttattagttttgttatctcgtgtggtgcgtttgttttgaaatttttgaatttgatgtgaattgtgagctgaacttaatgaagttgagcttgttagatatgggattatagtataggtatgggaaagtttgatttccttttttttcgatttttttttatcttaaatggggatttgggtttaacttatttgtgtttgcatcctaggcaatcaaatatcatggaactaagaagtggtgttgattttctttgggggcattataggtccttaaatttgaaatctttggctttttatgattctcgctttgggttgaaccttataggcgagattgggtttttcgtagaatacgttttaggggaaaactatggcttagttagcataatgcataatgaaacacggtttatatagtgtattccgaaacgtgtcttttatgcctggccttatttcctctgtgaattatcatttcactttcttcatcttagtgaacgtatgtcaaaactttctttttattttttaatttttcattcttttttatggcagccgagcgttctttgacaagaggatctcacaagaag

SEQ ID NO: 58882 - DNA, 408 bp, Populus trichocarpa
  Intron number 1 from transcript POPTR_0010s00830.1 (locus POPTR_0010s00830) derived from phytozome v7.0 (chr-ID scaf fold_10; pos 526501 to 526908 reverse strand)
tcctctcgtgaacctatagggaaataatattatcagtaggtttcttgttcacttttcttcttctcttatttgttggccttttgtttttcgactatatatcttatattgaatgcgatatatactatataatgggttctgtttggttgccaagaaaatgttgaagaaatgaagttttaactattaggtatatatcgtagtaagtttttcatttcaccattcgggacgttgaggaggttttgtttgtgatgcttgtttcttcaaaatgggaaaagagaaggagccctttcgtttattgaatgtagatttcaagtttgataattgaagtttggaatcccaggtattaatataacaatatatttttgttttttttgttttttttttttgaagtgtgcgtgaagatcagcttgg

SEQ ID NO: 58883 - DNA, 979 bp, Populus trichocarpa
  Intron number 2 from transcript POPTR_0001s02370.1 (locus POPTR_0001s02370) derived from phytozome v7.0 (chr-ID scaf fold_1; pos 1791032 to 1792010 reverse strand)
aagctcaggctgctattgataagttcaattctcttgtatgccccttttctttgctttccttttgtgtgtgtctttcttttatttgcttttctttttttcagttgttactatttgttttctgtttgcgatttgatttcctaacttcagatggagcttgagagactgtcttttgtttagtgttatcatagtatgcgttgcatttttggtgtacttttccggtagtcggtttcttaatcaaaattacataactttttttctagttgacaggttcaaatgagtttcccttttaagggaataggatgatactttttccttgttcatttctatcaattaagttttctggtgagttattttgatgctgggaggaatgctaaagtatgagaatctatcggactgcggttggtgtgctctaatttaagagaaacttctatcttcattgtttaatggagctacttaaattctttatggccagtgtcctctgcttatttttgaggttccagtagctttattggattcggagagttttttttttttttttgaaaaaaatgaagtagggatccagatcatttggcttgactaatcctttggagtaatgccaaactcccccacctgcatggttaggagagagttgttttctcgctgatagtcaaaatgttttaaagcttaaagtcctgaagctttggggagttatggttatctatgaatgtcttgtttcttgagtagcttttgtgtcgatttccttctctttcaccatctctctattgtacattgtttttgcctttcccaatccttgaaatgctagtttgatgactttggaaaatattcaacactgctcatcgtagattattataaatagtgtacaacttagttaccattttccatattatattggatatttccagagacatgcatgctttttatttttaggattttttctgttgcaggaagtgtcggggaggattatcagggtggaatttgc

SEQ ID NO: 58884 - DNA, 643 bp, Populus trichocarpa
  Intron number 1 from transcript POPTR_0010s07940.1 (locus POPTR_0010s07940) derived from phytozome v7.0 (chr-ID scaf fold_10; pos 8899158 to 8899800 reverse strand)
aggtaaaagaattatatcttttccccctcaaacagaatttaatggaaacacttatggtgatcacggccacttgaaggaatctttaaattgaacattaaaagagttaataaatgtataattcttcatgttgaatctgtaaagaagacaatggaaaaggctacgcaatgaactgttacctgcgacccggaatttatctgttttgcacctcttaggcgtggatacagggatttccttatacgttatggtggtcaaataaaatttcattttgccgtgaatgaaaccataggataaccattttggggttagcatattgtgcgtgcgcacatgcctgtgtttggagatgaagcatataatgttttgaccccattcaaggtcaaactatggaggcgtcaatcaaagaagtattaggagagaggaaaggtagagtctatttggggctttcaccagaggcttgcatttttcgtaggtctcatttataagatttgatgctttgtttctgttttacttgacacagcttgctgcacttcatcaaaattcgtgtttttgttgaattttatagtgtaacttcacaatacttcatgaagctaagcggccatctaattttataggaagctagagcattattgggaaggcttgagtatca

SEQ ID NO: 58885 - DNA, 953 bp, Populus trichocarpa
  Intron number 2 from transcript POPTR_0010s15000.2 (locus POPTR_0010s15000) derived from phytozome v7.0 (chr-ID scaf fold_10; pos 14414746 to 14415698 reverse strand)
cagatagaacaagtagtatgtattaaaatttttgttaataaatttgggttatgtttagcttataatgctggaagctgtctgtttttgttattattgtcatgtccaagttaagcttatgatcgctccatccatggatatgtgtgtgtgtgtgtgtgtgtgtgtgtgtgtgtgtgtgtatgaacttatgaacttcaagcagaaagtgttaaactggttgtggaatagaaattattaagcccagatattcttcagtatgctcccatagcatccggaaaatgttttcttttttgatagatgttaattgaacggttcatggaaaagtgatgtgacttattgaagttcatctctttttttttgtttccaaggaattttacatagaataacaaaaagtgattcaatttccacattctatcatattttaaagtgtctgaccttattttggttttttttccttttcctttttgtacattcaatttagttttaccatggcgcaacatgccttagtttttagtagacacttgcagttgtaggaaacctgttcatttaatgccattgattttcaccatctcaatccagatttctgttgttgattattatgctaagattgccaaaccttcttatgttattcctttgatttatttggaattttgctaatgaccacaagtattgtctttccttttctttccagagaaaccagccatcttaaggcaacttaatgctcatggcttgccgcaggatgcagtgcacggggaggaaaatgtgagatccactttgtgacctcagttttgtgccattagtatatcaaaatatgagtccattatctatgattctcatggctaaattatacgtcctgaaaagtagacaactgagatgttcctacaagcttgttatatctaattttgctgtcttttgaactcttgtatatctaatattgcttaaccctgatacaaagc

SEQ ID NO: 58886 - DNA, 647 bp, Populus trichocarpa
  Intron number 1 from transcript POPTR_0001s02710.1 (locus POPTR_0001s02710) derived from phytozome v7.0 (chr-ID scaf fold_1; pos 2138568 to 2139214 reverse strand)
ggaattgccaggtaactcttcttctaacccatattctgttaaatttactccatgtaattaagatctaaattgttatggagcagttaatgtttcgtcgaagttcttcattcctgtccaaaaaatgatcggcatgagaacgtgaattgttaattaatacccctttggtttgagagaggtgaatatgacacataaaatgctacctggcttttagatatccatggagtatgaattagtttttggtgggcaagttttgaccgaagctcaatcaattcatatgttgttgctctgtagatgtgagctgttatggtgggaaagtagcttcattacagtctgaagtctgaacacagatttttttagtattggaaaagcaagtttttgtttattcttgataagagtatcctctttgttttgtttttttattgattacatttatcaatggagctcacgtaacaggggcctgaactttttccttacaaagtccggttcaaccggattccttcatcttcagtaacagtttattctaaggaaagcactattagaaacagctccaccctctaattttcctatggatcacgttgttctaggaattcggaaatatgactttcaatatgtgatttgcagaaaagtcattcctgccgaaacgggat

SEQ ID NO: 58887 - DNA, 594 bp, Populus trichocarpa
  Intron number 3 from transcript POPTR_0007s03160.1 (locus POPTR_0007s03160) derived from phytozome v7.0 (chr-ID scaf fold_7; pos 1825716 to 1826309)
gacggggaggtaaggatgttgaaagttggttatgtgttgtttgttgattttggtgaatagatttttgtgaatttagaggcttctatgctctgtgattgattgatggattgatttgaggttataatttaaatataaaagttaactgtgtctggcggctagacataacctttgaagatttgagttatctgcgctttgtgtggaacgttttaatcttcttttcgatgcactttcccttaccttaatactatcttgtgcttcgcgccatgatattattatgttatatcacattgaatgataacaaaaacatctttttatgttaatcatgtgggttgacactttgaacatgcgtatgcttaccttacatatagtgcatcttttgatttattattcggatttcgaatgccgagagtaaaatgatatcataataccagtaaatcttttgaacatgtgtgtatatataggattaccttacagataggtatttattccgagtgcttagttacggggagtcatcatagtggctgttgttgatagttaggcttttgttttgttttttcagatttcaagggctgagtttgacctggtacaaagtgt

SEQ ID NO: 58888 - DNA, 680 bp, Populus trichocarpa
  Intron number 1 from transcript POPTR_0001s45060.1 (locus POPTR_0001s45060) derived from phytozome v7.0 (chr-ID scaf fold_1; pos 45358594 to 45359273 reverse strand)
ttctgctgataggtttattcagcagacttcaagaggtaagaacctgctcttatatcatgcaaagaaaaagataaaatcagaatagcaagacaagaagagagaacttagcctacatgaacagcataacaccacatgcacaagcctctttatttcaaagcaacagcactctggatgccatcaaaaacctagttcttttattattattattattattaatttgtataatgtaataggtcaatcatattacttgagtgtgtgacacagaaatgcttctcatacacaattacttttatttttttgagtttgatcctttgttgagttcgttccagtaattctacttctttgcaagtcttttcccttgttgatctgtttttaaaagaaaagaaaagaaaagaaaactaaaaaaaactgaccgatcatagcttaggttaataatatttgttgttggaagcgagctggtatcatccagagaggcgtctaagtgattatcctgaaactttcattcgtttctttatttctctgtcactgtctctatattatcttaattatgtcatcaagatgcatttttaatgggaattactacttcaactcacaagtgtcagtttgaaccttgccttgttgcttttgaagctggattccgtacagagctagaggccttctccttttcttcctcccgctat

SEQ ID NO: 58889 - DNA, 994 bp, Populus trichocarpa
  Intron number 2 from transcript POPTR_0010s19200.1 (locus POPTR_0010s19200) derived from phytozome v7.0 (chr-ID scaf fold_10; pos 17186392 to 17187385)
cactcctatccacgtaaaccttgtggtaatcttctctgttgcaaatttttagataggtgttttcttcctgttcatgtttaatgtttgactagtgaaagtccgcgtcatcgctatggatctgcgaaatttaaaagtaaatacagcagctcgagtcttttctgcttataatactaaaatgttgtgcttaaatttgaattacctgttaatgtagcaagtttcctataaaactagattaagatccgagattttggcaagtagctgctcgaggagatgactgatcacgaaagatgtttaggtttaattttttttgtttaatttttttagtatgattcaatttctagtttttgggcatggttttgcacttgttgtcacggaggaatttgaatttctcatctgtccctgtagttgattcttgccggactcagactcagggtttttaaaaaacgcatcgacgctcatggaattacttgaagcatctttttctttacgaataaaaactttctgctgtcaacagaatgttattgtgcccttgaaatcagggactttctaacacatcaaatatatcgttttgaccaaagtcagggaaaagagctacttgtagtttccgagttatagaaattcgtagaacttcaacatgcaagttatcatttagagtaatttggttgttaaatgaatctgttggaatgagccatgcattcccagggtgggcatcacttgcagaatttgcttaaaccaacatgactttttccttattttttaagggattatttctggagggagtttatttatttcttagtactatttttatgatggaatgatcctttgcctggatattttatgttttaaaattactttggaggcttcttttctgatttagtgttttaatttgctgggtttatatgctgatttcttctactgcctgaagtgatttgttgctctgataaaagttattaccatgttttttgaatttcacttgttacttcctaggcaagac

SEQ ID NO: 58890 - DNA, 403 bp, Populus trichocarpa
  Intron number 3 from transcript POPTR_0002s06680.1 (locus POPTR_0002s06680) derived from phytozome v7.0 (chr-ID scaf fold_2; pos 4492111 to 4492513 reverse strand)
ccacattgtcagagaggtcgaaaaacctggatccagtaagcgagatattcattaacccattttaagtttgtgaacgttgtgaattgaagttttaagtcttataaatgttttcctttttgaagatataatctttgagaagtaaacattatgcaaccctgaaaatttgttcattttattttgatgtatgttttcaattttaagtcatagtcatatggtgttatgatcttcaatatttggtttcgcgaaacctttttgtttgttcatctcatcttaacgtgataaattccagtgttctttaagattcttttgtttatcactttttaaaaaccagcatggacaaggtatttttcatttaacttgtgtattttgcttcttgttttgtagagctccacaagaaggagac

SEQ ID NO: 58891 - DNA, 697 bp, Populus trichocarpa
  Intron number 1 from transcript POPTR_0002s06680.1 (locus POPTR_0002s06680) derived from phytozome v7.0 (chr-ID scaf fold_2; pos 4492788 to 4493484 reverse strand)
agagctagctattgtgtgtgtcgccgcagcagtaggtttgtatctcatctctccgtctctcagatttctcctctcttttcctgtttggttgccaagaaaatcttgcaaaacttttcgactgtcttgaaaaacataataaaacaggttttccaatctcattgttatgtagttacaactttcaactatctttgcctctgtggaaatgatcgaaactaagagttgtcttgctcttttttcttttctttcttatttcaatctatgattcattgtttgttttgatttgatttgttttgttttgtttttctagtaatcagcatgaaaatcgtttcgctttttgtatcatggatgtattttgttgtttttcgacattgagtttcctgccttttattctgcaacaattgttacgttttctgttgcttgaatactatttagagatagaagattttcttaggtgtatttcttcggttgaaagatccagtatttatatgtagttcgctgtcatgcttattcacgtttggttacaactaactaaataaataaaataaaatacagagaaaagaaaagaacttgttattctatgcactaatattgatgcttaagggtcaattttaaatatttatatctttatatatgtttttaattagattctagtttgttaatcaatatgtgtttgattttgtggtgaagaataagaagg

SEQ ID NO: 58892 - DNA, 633 bp, Populus trichocarpa
  Intron number 2 from transcript POPTR_0002s16410.1 (locus POPTR_0002s16410) derived from phytozome v7.0 (chr-ID scaf fold_2; pos 12279011 to 12279643 reverse strand)
ctatctggtaagaaaattcctggctgacatttactttcttttttttctttttttttcctttaatttaattgatttaaacctgaaactattttttgaatgagataaagagagaataagcacttatttagcgccttttttttgtcgatgtgatgttactgattttgaaaagatgaagagtggccaataaggatatgcataacttttttttgtgtagtttttattttatctagccatttttttttaagatctgtatgccatgtaggttttttaggtcaatgggcattgaatttttttttatgggtctctggttagagttttacatcattttctctgaggaaggacccggaggtaaaaagaaagaccgttgttagatatttggttcagcctcctgctctcttgttgagttgtttcatttttttaagaagctcctgtgatgatgagttttgccatttgtcttgttgagtgtggtttctaattgctttctattgatctatgtcttgtgtttggcgtggttttggctgatttttgtgttttcagtttgttattctggtgatgtttaattttcttttgttgttgtgtgcaataagaataatgattttgatttttccaaacttcttgaagtaaattgttgaa

SEQ ID NO: 58893 - DNA, 131 bp, Populus trichocarpa
  Intron number 2 from transcript POPTR_0002s03280.1 (locus POPTR_0002s03280) derived from phytozome v7.0 (chr-ID scaf fold_2; pos 2012958 to 2013088)
aacgctgtatgtttcttttttccccttaatcttctgttcttgctgtatatatatggttgatatttataggcatttgtttgatttatttcttttaaattcagtgattgtcaaagcgagcagcgggccgaggt

SEQ ID NO: 58894 - DNA, 684 bp, Populus trichocarpa
  Intron number 5 from transcript POPTR_0010s23930.1 (locus POPTR_0010s23930) derived from phytozome v7.0 (chr-ID scaf fold_10; pos 20371613 to 20372296)
ttttttggtattactcctgactcatctaccatgtatgaataaatgatcattgaagaaatgatgcctttctctctgtgtgtttgtgcttctgcatgtgcgaatctgcatgttacaaatttgcttcttcttagtttgttgattatcatatccggatggattatttaaatctagatatttctttcaggtattgatagcaattttgaataaatctttgctggatgatttacttacacatcattctttctacccagaacaaggttcatgctataaccaatggaaaacttttagtgggatttggttttctccatgtcaattgcctttatttaatattagtttgaataatgaaattgcacaggtgaatcattgaatagcttaaagttgaaattcttttttagcttgttccatacagaacagaagtagcttaacgactattgctgtggtcgttggtggtgtttcttcctccagaatgtacatattaaaaaattccaagcttttttccttgacttaaatggcttcgtgatctccgattcattccatctcaaactttttttgtgcctggactgtgaacttttctatatctgggctgcagtttccatctttataccaatcacaagtttgaaactctgagggaattgtagatggtgtttttaacgttccatccatgcagggcaaagtaccagaaga

SEQ ID NO: 58895 - DNA, 279 bp, Populus trichocarpa
  Intron number 1 from transcript POPTR_0010s22740.1 (locus POPTR_0010s22740) derived from phytozome v7.0 (chr-ID scaf fold_10; pos 19540621 to 19540899)
cctaacacagttgagaccacctccgtttctcagaggtctcgctttcttgagttttctgtttgcttcctgaggaatcttggggaaaaaaaagaaaagaaaaacccgtttgttaattttgattttcttcttctgggtctctttgaattaatagaaagatagaagctttgaacctgttagtatcagatatgttatttcttgggtttttgattttttaggcagtgaaatgatcttaatgggttctgtttgattattgtttttttcaggttacagaaggaatta

SEQ ID NO: 58896 - DNA, 667 bp, Populus trichocarpa
  Intron number 1 from transcript POPTR_0001s04600.1 (locus POPTR_0001s04600) derived from phytozome v7.0 (chr-ID scaf fold_1; pos 3582909 to 3583575)
ccacttgtctgcactttgctatactgtatggtgaaagaatcatgacggtttgaattcactgattatattatctccttattagaaatttaatgttgtcccattacattagatgtgatcattgcatccatacgcacagttggtttaccattgttggcaaatgatagaatcatagacaacgattttcaaatctcaaagcttggtaccacgggttctaataacagtgtttctctgttgaataaagaattgagtatcataatgtcaactctgttgaattttttgtccatgaattaacaatattgtgaaagatcatgcttgtaacaagataacataattttaggcagaggaggcagaagatcaaaggggatgatgatgatgtactcctgtcctgaatgaatacgatccattaaataagctaagcttgtctgccttcatcctcccatgtactctgcgcttggtgttcatggtagccacagcactttttgtcatgcatgaacaggctagacagacccaaactcaccatgttttgcataatttgtggcccctgacaaatggatcaagttttctaatgtaactgtgcatctttttgttcctgttgcttgataattaacaggtttccactcgttttttgtcagccagtcctcctctctactggtttgcatcacattta

SEQ ID NO: 58897 - DNA, 347 bp, Populus trichocarpa
  Intron number 2 from transcript POPTR_0001s28590.1 (locus POPTR_0001s28590) derived from phytozome v7.0 (chr-ID scaf fold_1; pos 27359349 to 27359695)
gtgggaattaagctttgtcgttccacctaatcacggtaactaattcaatttttttgtacgtgtcctttttttccggtaacctttgtttggctgctgagaaatttagagaaaagaaaaggattttttaggatttgtttgttaattgaaggagtaatttgcctccatttcttgcttaagagaaacagaaaaactatttttcagatttcaatcaaacagtaaacactataaggctcagttattcattattataattttctaggtttcttcttaataaccttttcttttattggttaattatgctttgaattttagaaactttggatttcaaattcctgttgaagccaaag

SEQ ID NO: 58898 - DNA, 1023 bp, Populus trichocarpa
  Intron number 3 from transcript POPTR_0001s28590.1 (locus POPTR_0001s28590) derived from phytozome v7.0 (chr-ID scaf fold_1; pos 27359942 to 27360964)
gtagaagctgaggtgcttcttcttttcctgttgctatatgctgcataatatcttatttttatctttgtgagatttcatttcttttatgcaccaagagtgagaagaaaacggttttaattaatatgtttctttacactcttatcatttatttgtgcctaaggattgctgagccgcaagcatttcatttatcatgaatttactatctaaaattatatgctctattgctccttgacctgcgagctaaagttttaggtgcgatactctaatgtttatcatcattttgtttatgttgttgttttctcagcgaggctgtttttgggctatagcccatccactattgttcttgtcaaatcacagttgattacaattggatatcactgttctttgattgctattattggttacctatgggctacgccctgtttttgggctcagttcatttgttatcattgtcatcaagtgtgtttcttaagttttgttttcatatatttagatatgagtgctgggtggggggggttcattgagcaaactttatatggatcgcaagtgtaaattttgctgtgaccttgttgactatgtgagctgctccaccaactagctcaatttttcaagttggttgcttaaattggtattggagcttgctgtggtaatttttaattgttgtcctctgattcaagtttctctaactaggctgcattatcttttcttttcccccttgcatgatgctgttatgtgtttttttttaaaaaacctactccaagtcgaattgagacattttttaaatgacatgcaaatgcggacttctttgttgaaacatttaatttccatccttttttactgggtggattgttagagcctgcatgttattgcggccaactgcgcggttggcttttggccgcaataacaaacgaagccttagtgtcatgatccttttcaatctaaaaacttgtgcatgctaaaaaaatattcttccattgttttttttcagaacggctcttcggctagcttggagcttgatcttga

SEQ ID NO: 58899 - DNA, 364 bp, Populus trichocarpa
  Intron number 1 from transcript POPTR_0001s20370.1 (locus POPTR_0001s20370) derived from phytozome v7.0 (chr-ID scaf fold_1; pos 18257427 to 18257790 reverse strand)
gttgctggagctcagtccctaaacttgcaggtttttatttaattaatagtatctttccgtgtctttctcacacacacgcacacagcatactggtcatccacaaaagattgtttcttgaataacattaattggtgtccgtgtcttgttttctatttcatgatcatgtttgcatttcctagcttctatatatgcttcgatttctctttaaagtatagacgttgcagaggttttttttgggtgcatgagctgggtgtttggattaattctagaactgtattaatttgattctcttcttcttcctcttcttcttcttcttcaattcgttgttttcttctgccttattcttgggtgcaggtctgcagag

SEQ ID NO: 58900 - DNA, 657 bp, Populus trichocarpa
  Intron number 1 from transcript POPTR_0001s38450.1 (locus POPTR_0001s38450) derived from phytozome v7.0 (chr-ID scaf fold_1; pos 37567747 to 37568403)
cattgctcattctcggtaatttcatctccttttttctctttttggttgtggaaaatatgactgatttgaggtagaatttattaatttcaacttttactaatctcgttttgtgatctggatatttaggatttaattttcgattgtttaattaaaaatgacatgaacattttggatcgatctatatatatatataattttcggtgtgaaattatctggtttttgaatctgatggttttaccggcaaaaaaaagagtttttttattttcttcctctagattttgttttttaaaatttgtagtttttagattttttctttttgtgctttatactgttgcctgctttttacacacacactttgtttacctctttctatattttttctatagtcatttatatttactcatagcattaaaaatttacagtgaaacattgaatctgaaaatgaaaagaattagtttttatgtgaatgtgaatgtgaattttctgtgttacggatacaaggaaagtgattgtcgaatcattttgattattactgccaattgtattgtatatggtgattttggtgacacgagatagcttttgtttggtaacattgtctaattttctcccctttgctccatagtttctggactttctggaagtactgaaactgctcaa

SEQ ID NO: 58901 - DNA, 610 bp, Populus trichocarpa
  Intron number 1 from transcript POPTR_0001s25160.1 (locus POPTR_0001s25160) derived from phytozome v7.0 (chr-ID scaf fold_1; pos 24368299 to 24368908)
ctcaggagttggctcgtcttgccgcccagtacaaggttagctacttcgcacaactggagaatattggttctatctcaattttatatttatcaaacactagtagcagttatttgtttattccaatcctaaggggtgcatatttagtggatcaagttcacagggatatccaagaaagaacattctgcttgatgtggtcaaattatcatgaaatacattgctggactcaaccagtggaaaggaaagcatcttaatcgatagaaaaaaaaaaaaaaccctactcaggctgtaccgatatttaatttaaggtttccaacttggacactaattccatttcatggattgtgtgaatcctctcccaatttttgattcaggactccattctttggattcagattttccaaaacaggtttttgtcgaaattgttccttcaagtatagaatagcaatgtactaataaaattgttcaattatgtatacatttcttctgtccgtctgggataagtttctctatagttaaaatgggtatggatagcaacgttttactatgatacacagagttgatatatccttttatacttataacttcctattcctgccgcagattatatcaa

SEQ ID NO: 58902 - DNA, 300 bp, Populus trichocarpa
  Intron number 1 from transcript POPTR_0001s35650.1 (locus POPTR_0001s35650) derived from phytozome v7.0 (chr-ID scaf fold_1; pos 33988121 to 33988420 reverse strand)
aagaacataacccagaagttcccaaaagcattcctgtatgttttccccattaattactaacaaatatgaactgggttttgattgattttgtgtttaagcattgttttgttagtattaaattgtgctgaagtatgtttttttcttcttagcattttgttaatatttaattgtgtcaaagtatgcatttttgtttttataagtttgtgaaagtaatgatttttagatcaacttatttgttatttttgtgtgttttggtcggctattacagatctgtgatataaaacactcagagttgatacc

SEQ ID NO: 58903 - DNA, 486 bp, Populus trichocarpa
  Intron number 1 from transcript POPTR_0001s23400.1 (locus POPTR_0001s23400) derived from phytozome v7.0 (chr-ID scaf fold_1; pos 22749483 to 22749968)
ttggcaagactgctgggtaccatagcagaactcaggtaagcaagaaaagatagctccttttctcttcgtttttcgacaagattttcttattggattggggttctgaggcttttagttatctgttcaaattcaattttgtatgatgtttgagaattgggtatttgggtttcgtttaggggaattgggtttttaaactttttgaatttagcttgaacttcaaaataggtgtataggattgtgggtcaatttcaagtcctatatatttgaagattttgagttctttttgttaattggtgtataggattctgttggttttttgcaggatttatatgcttggttaaccatttaagtatagaattgcttgttggtttgcatggttttagggggtagtatactgattatagagtttctggaattgggtttttaatgaaatgagatcaaaggagtcatttttttaggttttttttttttttcaggaggaaatac

SEQ ID NO: 58904 - DNA, 420 bp, Populus trichocarpa
  Intron number 2 from transcript POPTR_0010s23980.1 (locus POPTR_0010s23980) derived from phytozome v7.0 (chr-ID scaf fold_10; pos 20400315 to 20400734 reverse strand)
agtgcttgcttgaggcagagcgtgttgtagtcgaggtaagtttccttctttattctttgcgatttcattaaaaacttgattttcttttcttgtgatttctttataaccttgatttcttttttttatttctttaaagtcttgatttctaattcttgtttagagtcattttttttaggaattagaatgtacattacgcgtaaagaagaggaatcgaggaatttgattcgttatagctaaccctaatttgattgcattttttttcttctgatagttaaattactactattggataaaaaaaataaaactagaacaatgtaagtggctaggtttatttacgtgaatcttctgctcaggttctaactgtttagctctttcgttttctgcttattgttaaatggattgaatcttgatttcagggat

SEQ ID NO: 58905 - DNA, 915 bp, Populus trichocarpa
  Intron number 1 from transcript POPTR_0002s14160.1 (locus POPTR_0002s14160) derived from phytozome v7.0 (chr-ID scaf fold_2; pos 10502214 to 10503128 reverse strand)
cacaaagaggtgcacttggtaattcagtcactagggtaaatatttgtgtttttcctttttttcttctttagtttcagttttgtacctttgagacaccgcgacttgccctcggagttgtagttggttatcttacagcttttcctgtggttttaattcaaatttagcttgtatataattatggttgtttgaagaaatttgctgtggttaaatattgaatacaataggacttgaatatgactgtagtggtaatgtatgtttcctcctttgtattatgactttgaggtatggaatgagacctgaatcctattgaagtccttgttataaagcatcgccgtgaatggattaacctcctggacaaaaaaattatcatagcttctttttcagatatgccgaactcttggcctaaataatataatgcaaaatgacatcctggagttgtagatttttccaggttctggccttttaaaatgaatcggtgatattagaaatattcagctggcacaaatgagagagaagccacacaaatgctctttctggttataattttccttttccctttgtgttttattataaaactcactcctcctccttcttcccctctccccatatgtgcgctttatatggatctacgaagtcaaccaattattcatttcttgtcacagctgccctttttctaattgttggctccttttctcaacttggttattcaattacttctggaaatgtcttatcaataaaccaaatggttaacagttgttatgataaacttatatttcctaagtccaatttgatatatatatatatatatatatatataagcctattagttaaatgtgatgtattggtatttgattgaagttatgttttgatgttgacaaagtcgccaaagtcagattacgtgagacattttagtgc

SEQ ID NO: 58906 - DNA, 762 bp, Populus trichocarpa
  Intron number 1 from transcript POPTR_0001s27800.1 (locus POPTR_0001s27800) derived from phytozome v7.0 (chr-ID scaf fold_1; pos 26676874 to 26677635)
gcgattggattgaagcttttttcgtcacttaattggtaatactaatcaataaagaatgaatgtttagtttatttccttgataatttccttgctttttaggagcccatttttcatttctttctttcttttatgttggttttgatttctttgatttttttttgggtgtagaatagtgtttatagtgcaaagttttgatttttggttatggaatttgattgattttaatttttattaaccctatagtttaaaattgcatgtgtttttgggctttgaaatagttgatttttatgtttatcaatgtggggtgggattttggtgtttgttgactggtctcatcagttttaaggtgaaagtgaaaatagattcatcaacgctagttggtgctacaggattcaagtttgtttatgagtgtcccctgtgcgcgcgataactcaaatggttactttagttcattttgcaatgattgaaacttgaaagctccttttggctttaaagctaccaggttggaactttcctagacaagcaagtgcaggaggatttaaagtcttagaacactgttttctaaatgaaatatgtattcatttatgcaagagtacttacagatgcactcatgcacacacacatcaatgaatgattgcattctcttttgtgcattcggattctttggtatatcgatgatgttttcagttttcactgaactgggtattcttttcattttgaaagctagtaaaccttattaagttgtcgaattaggaggtgaaa

SEQ ID NO: 58907 - DNA, 580 bp, Populus trichocarpa
  Intron number 1 from transcript POPTR_0001s02000.1 (locus POPTR_0001s02000) derived from phytozome v7.0 (chr-ID scaf fold_1; pos 1458470 to 1459049)
gaaaattgcttccttgtcaccagtttgaaggtcaagctcagagtagaattttttctccatgctggtccgtggagactgttaatgaggcgttagaggtttgtttgatatttaatgcaagaatattgttgtctatactaacatagcttttccttaatttttgcttgctcacttgtgtttgctatcttaaattcttggcagaaaggtgatgtatttaaagtgttatatcgacttgaggtttgttctatgcctatttgcaagtgttctttcaattttccctaataactttttattcttagccattttcatatgctgttttctattggtaggcatactgcaaaattgagggagttcctacagatcttcttatcagtggaattgctgcacagaacagggatgtaagttttttttgggtcaacccgggtcaacccatctgacccgtgactcgatcacttgaccgggtcgggtttcaaaactatgagattaagtgacaattttatctatccacttactggatcttttgtatgatgcatcggaaaatcaaatagtgggccatcgattgctcgggggccttgacaacaat

SEQ ID NO: 58908 - DNA, 892 bp, Populus trichocarpa
  Intron number 2 from transcript POPTR_0027s00370.3 (locus POPTR_0027s00370) derived from phytozome v7.0 (chr-ID scaf fold_27; pos 178376 to 179267 reverse strand)
ttgaggaaaagatttatactgccgccaccaatcaggtattcggctaatgctaggttcaataattttgatattctctagacatgaatatacacatgcataagtttgtggatttatgcatgtacacgtgtgtgtagtgtgtccacacttcctcactggtcattctgtagaagttcttatctttccgttaattctcttgacaagtgttttatttagagtgaccaaggtccttttcaagtacaagggaagtgtgcaaaaagcaaataacgaatcaatacataaataattaaataaaaagaggagacacagaagtatatcctcacagaagatgcaaatacagaaagcctagcatattagaaagagcatatatctcttttcccccttctcttgtaacatggactgctcagagatctaatgttttgttattgatatctgatttcagtctgattatctgcgtaaaatatctctgaagatgcttacaatggagaccaagtctcaaaataccatacccactggcaatggtaacaaacccctggatccaggaggtaataatgcagccaagcattgaatttctaaacatccttaccttttgttttatattttgcattattatcaaactcttttacattttattgctgcatccttactcttttaccattagggaaataatttctaaaaattacagattatttttgcccccccccccccccccctccagtcccaaaattgtcaaatggcacttttatgctttgagtcaaaaccaccttaattatttccctcataactttatgtgtgaactgtcattgtttcatttgtttttcttgttcaatgccttctttttttcctttgacatggttatcctttttgccttttatcttgaacagcatctcatagt

SEQ ID NO: 58909 - DNA, 744 bp, Populus trichocarpa
  Intron number 2 from transcript POPTR_0010s18930.3 (locus POPTR_0010s18930) derived from phytozome v7.0 (chr-ID scaf fold_10; pos 17014873 to 17015616)
ttctgcatcaatcaatcaattcacctggtggtaagtctttgattttacttttcttgtttcttggggctctttagatttccttttaattcttttcttgttggttctttatgttaatgctttcgttctgatttgcgtaactgttttaattttagtcgtatcaattaattacattcatttctttattaatttcgatgcatcaaatccttggttgaattgtgtaattcaagtttctgtaacagcccaattaacgaaaggactgcccttttttttttaatgcatatctgattctgggttttaaggatgggtcatttcttgcttttgttacattttttatttgggttttgatcgttcttgcttgtatgaaattgacaatcttttctccactttatatgtaagtttaatcgttgccgatttgttgacagcaaactttgatattgttccccttcgttcagcttctgaacgcgtagttcattatagtctaggtttgtgatgtttgtgcatatgacgcattgttggtatactgtagagtttgcatttcagttgaaagatctcttgcttcttgtcatttcacactaccttttcagcttcagttaatgaaatatctcgttttctgttgtttaggtttcaaaactagacaaaacatagagtattttgcatattggagttccccccctctgctttatacattcactgtttaggtcacggctgtcgctctgattaacaggtcaaattttgagagtgaga

SEQ ID NO: 58910 - DNA, 368 bp, Populus trichocarpa
  Intron number 1 from transcript POPTR_0001s10410.1 (locus POPTR_0001s10410) derived from phytozome v7.0 (chr-ID scaf fold_1; pos 8088850 to 8089217)
agttgcagaagttgaaggagtttaagcctatcgtcagttttcttgatttcgtggatttttttttatttcttgtcttaaaggttgggtaaataggggactgtaccggattttgaggattcgatttaagtttttgattgattcttgatgtgagttttagggtccggatgatttgacctaatgttgaactttaggttcgatctgttaattttcttgggtaatacaaaggaagcatgaaagaccattatttagaattcttatttatttatttctatagggtttgaatttttatttatttctatagggtttgaattgatgggtttttgttatatgaatctttgcacagactctcccattcgttcaagtattga

SEQ ID NO: 58911 - DNA, 667 bp, Populus trichocarpa
  Intron number 2 from transcript POPTR_0001s24630.1 (locus POPTR_0001s24630) derived from phytozome v7.0 (chr-ID scaf fold_1; pos 23900701 to 23901367)
ttcgagctctctctaggccctttctccttcatcaggttagcttgtcggcgttcccataactgtttctgcttcttctttctttttgttgtttaacttgtcagagttaatgaatagcagttcttttgttggtgtttttaagcataatagactgacttcattaatttttttaatacagttgccttaacttttattaccacaacctgttctctttctttcttttttccttttcctttgttttggatattcgaataatctccctgtgcctgttgaggatgaggaagttaactacatgcatgtgttaggttgagccaccattgttgatcttcaagttttagaatcgttgttgaaccccacagtaggcatgctccatcatgttaataagctctgtaaacacggtttttgtttatttgaatctttttgcttataataatttgtgtggaaaacttgtttgtaattggttactgatgcttatatatgatcaaagaaaaagatttgagaggcttttgggacataggttctagcctgaacagcaatttctgtacttgttgtgtacttgggtcgagtctaaatattccataaaatatactcatgatctctctgtgtaatttacatggttaatgatgttatttcaggatatcagtacagacggcaggaggaggatcgactt

SEQ ID NO: 58912 - DNA, 189 bp, Populus trichocarpa
  Intron number 1 from transcript POPTR_0007s13350.1 (locus POPTR_0007s13350) derived from phytozome v7.0 (chr-ID scaf fold_7; pos 13465407 to 13465595)
ctcaggtttattcttcttctggtttcatgctcaatggtttgattgaatttgtttttccagatttgattctcatccattttgaaatacataaataatcttaaataatctgtatgtatactttattaatctttagatttatcctctgataatgtagattcttgaaggccaggaaattcgatatcgagaaaa

SEQ ID NO: 58913 - DNA, 668 bp, Populus trichocarpa
  Intron number 5 from transcript POPTR_0001s41900.1 (locus POPTR_0001s41900) derived from phytozome v7.0 (chr-ID scaf fold_1; pos 41610541 to 41611208 reverse strand)
aaaattgacaggtaatccaacatttgttatgttttatttaggcttccttttgatacatattcaccagcacaattgcagagacagacatggaagtgaaaccttaactgcagatgtttctggtactattacagagtgaatactgacacctttttggtttctttcattgtcttgctagggttcatgtactctagctgagcaaacctgaaaatagagaggactgagagcccaattcttgagggaaaaaaattagaaatcatttgtatgctggccagaacatttgaaaatctttttagtagattgcttaattcagtttggaaatgttatctgaacatatgcataaactctttctagcaacaatgatattgcaaaatatttgatatgatggttaaaaacatcagtgttatacttttaacgtatgtttgccttcccacttcctgtcccttaaatgaattatgcattgggagtttaagaacaacttcagacaacctcaaaatgtggaatcttactgttgatcttttagcctggccttgaattcgtaaatagttccattctgcttccttatacttgcagatgagattcatgcctgtttgtgttctcttttctctttgttttaatttttcccgaaagttttaccaatgctgttttttcttgtcagttggcatattatc

SEQ ID NO: 58914 - DNA, 516 bp, Populus trichocarpa
  Intron number 1 from transcript POPTR_0001s41900.1 (locus POPTR_0001s41900) derived from phytozome v7.0 (chr-ID scaf fold_1; pos 41612203 to 41612718 reverse strand)
aaaacaaatcgttgtttctttcacctgttgaagtatagtaccagaaccaatcaaacacatttatgatgattccattttattttatttattgctctcacacttttattttcttttttactataaagaagcgcgtttttattatttgaaaacttaagaatcttcttgattttgacgattaacgactcctccttctcttttacttttcaagattctatataaccccctcccctgtgactttagactttagcctttattttattttttctgtttggttggcgagaaaatcaaagagaaaacgaaaaggaaatttcatttgagagaaaaaatggaaacaagatttcgtcgtgacaagttatcttctggttctggaagttcgaaagaacttaaaaactcctttcgtacttttgtttcaagaaggttttattttgttttttgtcatattgttttagtaattactacaactgaattgctaattctgatagttttttttttcttttggaatttgcagtaaggagt

SEQ ID NO: 58915 - DNA, 476 bp, Populus trichocarpa
  Intron number 2 from transcript POPTR_0010s22710.1 (locus POPTR_0010s22710) derived from phytozome v7.0 (chr-ID scaf fold_10; pos 19522670 to 19523145)
ggattattactggtaagtgaaaatcaaaccatgcttttatattcatttaagatatatattaattagatttgagactcctgatcacagaaaacctcatataacacacactcactaacttaattaaggttggatttttgaaaatttaagtgctcagattggaatcttcacttctcaaaatcatgtacgaaaggaaaaggataaaagagaaaagaactcattttgagtgatttataactttggaactgatgatgatttgataaaacgtaggtgtttaatttaatcaccaagatcattttgtgatttttttctcttaattacgcaccaaatattcattatgaaaagatagctgttacttcattgggcctgctctatctcgaggctacaattaggccggcgatgatggggccagggcaagatcggccagtaaagatttccacagctaagtcatgctttggtttccttctttacaggtggag

SEQ ID NO: 58916 - DNA, 570 bp, Populus trichocarpa
  Intron number 1 from transcript POPTR_0010s22500.1 (locus POPTR_0010s22500) derived from phytozome v7.0 (chr-ID scaf fold_10; pos 19402180 to 19402749)
aaggtaacaaggataacataaaaaacaaaataaaataaattttatctattttaaatatataaatttaatttatttattaattaaattcagatcaaatatcatgattaaatttaattataataaataattagtgtcaggtaacctaacagaacgttgatagttaccgaacaccgtaaatttttttaaagctctgtctgaatggtaacttcaaagaagatcgttgattaagagatgaacggaaaagcgtgtgtgatttttattttttctttaataatgacttaacagttagcatgaattacaaccttttctttttgcttactcggtggcatattccttgaagctatcagtacacgacagaactgcataataagatcgtttgaaaaacagatggaacttctgttttttattaacagattttggtgtttttgcttgtttattatatcctcttttcctgggacttgctagtgtgctttcttgttggtccttttctacatcaattactttttcatgcagtttgcggacgaccttgtgtgtttgttaatttcaagattgtagcttgtggggttgtat

SEQ ID NO: 58917 - DNA, 609 bp, Populus trichocarpa
  Intron number 2 from transcript POPTR_0010s22500.1 (locus POPTR_0010s22500) derived from phytozome v7.0 (chr-ID scaf fold_10; pos 19402930 to 19403538)
cgtcagattcacaactgcagccagtaattccaaaggtgggtcagtttttcttttacttcatttgtttctaaattcgaattttgaatttttttgtttcttacaatgtttgcaattgtcaccctgtcatcaacggctgttgttttcagatggagcatggtggattgcctaatgatggagcaagtattgcttttgttttcagaaaacaaagcaacctcgtgtagatattttctgcaaattcatccgagacagggatgcttcgtcatataaaccaaataactgaaattgtgatctcatgtgctcttttataggaacttccatggagtggcctacgtacctgctaataatgatttaactgagcaaaggcagctccaagtgggagtgttgaactggtggatccaaggacgtaacaaaggttgcctcagaaatgctgaaggaacataagaagagtgattataaatccaaagccccttgagttagaggcaagagaagagctcattccaagatcgaggtctgagcacagaactactgaagcaagtggtgacaggatcagggagagagacagggacagtgagaggggggagagagggatagggataggataaaggccca

SEQ ID NO: 58918 - DNA, 957 bp, Populus trichocarpa
  Intron number 2 from transcript POPTR_0001s18210.1 (locus POPTR_0001s18210) derived from phytozome v7.0 (chr-ID scaf fold_1; pos 15288462 to 15289418)
aggcaccaaagtctgagaagaaggattacgacgaggtattgttttcaataatttctttatcaatttgattggaaactgtgcatttttttaatttttttttctttgttgtgcaaagaattgaaagattggaacttaaataaattgatttttattaaatctttgagtttggtacttagctttacgttcttgactggaaagtatgctcgattttatttgattaactttgattcttatagtttatgggtttatgatatggaaatttatctgggttttaaggaaaatccaaattggaattgaagttcgtatgttttaagcttttaggcatctgatgaaattgaaagatctcttaattggcaatatgtggttgaagcttgggtgggctttgctaatatgctattggtttaattgaggataggtacggtatcccaaattgaagtcctttatgctgcttaagcttcaaataagagagttggatttggtgctctgaatttattttctccatttcaaaatttatttagtacaaaattctaatttcttttaatagaccatactatgttgctatattgcttttcatttggcatctttatgcttgtatgaattgattatttctatgggattgagattcctttttatgagtagatgacttgttttggaactatggtgcttgctatttacttgtaactctttgcttttataaactctaaacaactggctggttatgattttaagcagccattgttgcaatatcccatgcatattttgctttttctagagaaagaattacctctacatggaggactctatttgtataaagtgctaattttttttttttactctggccatcctatgatgcaatccagttcgtaactctgatttcctaccattcccattgctattgtccttaaatttacttcactgatttgcagactgatctggccaacattcaaaagaaaaagg

SEQ ID NO: 58919 - DNA, 777 bp, Populus trichocarpa
  Intron number 1 from transcript POPTR_0010s18760.1 (locus POPTR_0010s18760) derived from phytozome v7.0 (chr-ID scaf fold_10; pos 16901425 to 16902201)
tggtggtggagttgttacaatagatcttgagtctggtaaaaattttctacccatcaaaaagtttctctccttttttgctctaccaagtcatgtttattaatttttatttttcatttttgttgttgatgtctgttgtttttcatgaattgtatgaaaagttagtgttttgttgtctggattagcatgggtttgcaatccgtgttcttctcagccacccacaacactaaaacacaagtaaaacttgaagctttaactggactagaacttcaggacttgaaaaaaagataaattaattgaagttgcacatggattattagttgaagttgcaccatgggtttttcactgtggaattgcttatgaacctcagaactagaagaaacccacaaatgatttgttgattctactggatatgaactataatgttctttgctcatggctagcctttggaaattctcatgctcacgatagttagtcttaaaccatcgaggtatttgtttagctttcttaacaaagtcctttttctcgataaattttttttttttttgagaacactggaaggctggccataactatgtcaaaagattgaaagagttttaacaggctagtcttattgttttctaactaacatgataatttgtatacaggatttagaaattctagattctctgccttttaccaatccatttgctcaagttttgcgtgagtgattaattgtgaaatttgacttgtcgtgcttttacagagggttgcacagatcaaccttcaaaacatcgcaca

SEQ ID NO: 58920 - DNA, 577 bp, Populus trichocarpa
  Intron number 2 from transcript POPTR_0002s05590.1 (locus POPTR_0002s05590) derived from phytozome v7.0 (chr-ID scaf fold_2; pos 3661476 to 3662052)
gagctgtgtactttccacagggtcacagtgaacaggttagtgaaataactttgtttgatttcaaacttgctgtcaaaatttagtactaggagaacaattatacgtatgcctgacaacctgacattgatattaacttattcatcattaaatgatactcgtacagcataatttgtagtgttttaggggttatttcacgtatgttgttgtagaagggaaaaatattatatttggcaggctagcaccttgcttacatatgtaattttacttttgtaaatggtaaagagatgtttgggcttttgtttatttatttttaatatcgctttgcatatattcttctttgttgtctgtattaagtttgcatatttgctcttttttctgtgtaaactaagtgtcttttaagttctgtataaagtcgtagatggcatttatcctactttcatagtgagatattaatgcttctttagctaatctcatgtacgcacaagcatgtaatttctgtttttcaccactctgctagcattttaaaagagtcttccattttctgtttaggttgctgcttccaccaacaaggaagttg

SEQ ID NO: 58921 - DNA, 588 bp, Populus trichocarpa
  Intron number 1 from transcript POPTR_0001s17920.1 (locus POPTR_0001s17920) derived from phytozome v7.0 (chr-ID scaf fold_1; pos 14853583 to 14854170)
gaggatcttcaagctctctctctaaaagatcgaaagtaattccttctctctttctctggattaatttatatacttcaatgcatgataagttgcagatgatgtgttttggttactttaagttgtgtttggttgctgagaaaataaatgaaaacttatttacttgtacctataccagtataattctgttttagaagattttgattgctgctgtgctgaagtgtgctgctttatgttcatggttctcaattcgtagctttctgttgtgttttatgcttggttgctgagtaagtatgtaaaattaatggaaataaaataaaacatgcaattgttgtcatatcaatctagcttgtagctgcacaagtaaggaatttaagtttgcttttacttgtggaaagaaaaaaaaaactgaaaactcttggaatcttaattagcttttaattttatttagaacactgcttggttgttgaataaaaatcctctatttttttctttaatttatttatgaaagagaaattattattattaataaaaataaaatcctccgtttcctcagaaagcaacgagcaactcttctcttttggtttcaag

SEQ ID NO: 58922 - DNA, 964 bp, Populus trichocarpa
  Intron number 3 from transcript POPTR_0001s29990.1 (locus POPTR_0001s29990) derived from phytozome v7.0 (chr-ID scaf fold_1; pos 28554527 to 28555490 reverse strand)
gctggtaggacataaccaattggtgtctcattatatattttttcagaccttttacgttctatttgttgtttctggacacaaaactcttttctaacttaactcataccccggaaatggatccactacttcagtgtaaaaaaaaataaactttttgaagttgtttttttttttgcttttgttgaagggtggattgttcaatgagaatgtgatgataatctgaccttcatttgactatagtttaccacattcataatctataagcaaaatgcttaacctactttcaggtatacgacccatatggtagaattccatggttgctgttgtaaaatttgttgtttggtactatcagagaaaaaatttaaggaaagctggcattggttggataaattagagctaaggatcttgattttacaatccatatgttgatttgcaaactattatgttgcttgtttaagatgctctatttatgcatagatgtaaaatatcgttgttgttgggtgtgatgaattgatggagtcctaatgctagtattctctccaaccaattcagtaatctattttttctctgttatgcttacagtgaaaatgcaggtcttttgggattaacacgagttggaagtcggagagttgttcaaatatcagcgggcttcatgcttttcttttctgtgttaagtgcagtattccacattgcaatcttttattctctttttatgaatgaattgaatttcatttctcatggcaatcaatgttctagattctctttttgtcctgtcatgattattgaccactgtccttttaaaaaggctccttatctttttcctatcatttcaacttgaagtctttatcaattttgcgaatagaaatctggcaccatcattgcattgtttactcagtaattgtttttacactgttgcaacttatctttaacaggaaaattcgggactgttcttgcttcccataccatt

SEQ ID NO: 58923 - DNA, 870 bp, Populus trichocarpa
  Intron number 2 from transcript POPTR_0007s03540.1 (locus POPTR_0007s03540) derived from phytozome v7.0 (chr-ID scaf fold_7; pos 2033496 to 2034365)
aagctccgaatttgaggtaacataattctctcatttgctagaatgaagtttggtgtttccatggccagttttttaatctcaattcattgcctcttgactttgttatttaacagaccatttttaagattcaattcaaaagggaaaataaaatgaggctagggaaaatcaattagcgctcacctttattttctaatcatattatttaaataattgttataaaacctgatttggctcaataggtcctaacatctaatcatatgaagtaaattttatattgaattaagttgatagttcatctaattaaatctaattgacctaatgatttaacccgcaaatcagttgaattgagtgagacagaacatgatttgacctttttaggtttttttcaaagcagcaatgctgtaacaatgttattttagagcagagttctataactatcatattgatatcatctattgattggaaaaatagcccatccagataaaacatttcatgttattgatcaaaggacaaaaccaattctgagttttaacttttaacagtaaaattcatgttcaacctccacaaagtatacctattatagaaggaaataaatctggctttgcaatgcttatgttcttgctcaagtgtcctaccccaagtttggggcaaggaacaggtgcgtaactgaacagcttctatatattctacgagtataatactgagttgagcttatttgtcttcactgtccaaaaaatctccctgttgcacttggggcatcacaacaagaatacttgccctgatatcacttatctcatcaaaataattatgtagtttcattgttcttgatgtgaaggaagcttgcggacaaagttgcagctgctggattct

SEQ ID NO: 58924 - DNA, 972 bp, Populus trichocarpa
  Intron number 3 from transcript POPTR_0001s42650.1 (locus POPTR_0001s42650) derived from phytozome v7.0 (chr-ID scaf fold_1; pos 42682981 to 42683952 reverse strand)
acaaaaataaagctcctgaattgagacaggttcttgcttctcatctttattctagcttggctttcaataagaaaaaaatgtgtaattctttaaccttttgattttgtttatgtgaaatgagtatagttggaggaacttgatccttaaaaagtttactttaatttctaaagcataaacttttgatttttgaattggaaaaattgtttataatgttcaatctgatagcaatactgtatatgaacaaataatgcatgtatggagttacgttgttgcatgtttagtgcactgctagttgcaggatttagatgtctagatttacacaagtgtgttccattttcattttttaattttagtttcttgtttttggaggtaacaattgttgttaccgtaattggagatgcctttgaatgctgtatggacatattttggtggattttgaagttgaaaattacaagaggaatgtaatcagataaaataagaacatgcttagtggcagcgaaataaaaagaaaaatttcacctagaagataatactctgctggatggaataccgaatacttcattatgattgtaggaatgcaaaagatgtagatgttatggaagtgggattcagaatcattccatttaaattgatgctatctgtgagtggatctgattctagaacaatattttgcatggaatcatctccaggattgctcgttagtttgccaagtgtcagggcatataatagattgccatggcttggcactgacattgctggagatgctatgtggtatcctgaagtattgttgacatcttgatacttttcaaatcattgataaagaaacaactcatcattccatttcacttaaatccctgctctattgactttctgtattctttttttttttttttctatcttgttctcttgattttgttgcaatcaataaatttttaaggtcatagctgcaacagtggcaagcgatccagaaaa

SEQ ID NO: 58925 - DNA, 423 bp, Populus trichocarpa
  Intron number 1 from transcript POPTR_0001s42650.1 (locus POPTR_0001s42650) derived from phytozome v7.0 (chr-ID scaf fold_1; pos 42684143 to 42684565 reverse strand)
tctcaactagtcctcctttttcattttcaaaacccgtaagatttctccttcacttagaacaacactatatctataaataatacagctttttattatttatttctttgcttttcttgtttcttgaagtttctttgccttgaactatcagctcatccttgtaacatacatatggttcttgtgggcattttttaaattacttataaaagattcttattaaccattcatttccttttcttgttgtgtttctgcatctgggggtggttttgcttggtggaaattggggtcctttttatttttttggcaggtgcattgtagttgttccaagtttttaaatttgggttcttgtaaattttagtaccttttgaattacaagtataaagctgatattttacctggaattgcaggttcttgtttactggcacc

SEQ ID NO: 58926 - DNA, 454 bp, Populus trichocarpa
  Intron number 1 from transcript POPTR_0002s15100.2 (locus POPTR_0002s15100) derived from phytozome v7.0 (chr-ID scaf fold_2; pos 11229077 to 11229530 reverse strand)
tccaaaatcgaacctgaccgattcttttctctaaggtaaggatcaatttcttattacattttcaatttcttgctgtcattggggattttctctgatctgagcctcgtcattttattttacatctcattttctaacttttgatattgaatgttatgtgtgttcgaaagagggacttacttgatcggttatatggtgattaaagagatcttgttgtgattattcaagtaaaaaggcagattagtgtatatacttcatttattaaattaaatgtatgtgatttcgaagctagatccgctgaatttaagtgattcaaaatcatttgagctaatttcttttgcaatttgtataagctattttggttctgtagtattgaaattgtctagcattgatttgaaatggtattctattttgaattttcttctgtttggttaataggtttgcgtgcggtgggtaa

SEQ ID NO: 58927 - DNA, 659 bp, Populus trichocarpa
  Intron number 2 from transcript POPTR_0007s08320.1 (locus POPTR_0007s08320) derived from phytozome v7.0 (chr-ID scaf fold_7; pos 6981230 to 6981888)
ggctaagtggttcgaagatggtcacatgaactcctatccagagcttactgttggtgcggggagacactccgacatgggcatgcttactgcaagatggcattagtggtctataaagagatggacggcgagaggaagggcgattgggtggagatccctcctgtctctggtgcttaatttggtcatcaatggtggtgagggtgactcctcacgggttagaaatccgaaattagaatcacatttgtaagaaaaatccgatttcaagatcctctcatgatattcattcctcttatgttcagttatatttattatatccaaatcttgaatctcaaaataaatgggatataatcatattataaccacttgtaatttttctcaaactacaatcacttgcattgtctgtcatttttctcaaactataatagatttaatctttacagtagaattttccatgagcatgatggaaatcaaaccttatattacgagctaataccatcaaattaattacatgtttcttattacagactaagcaatggaaggtacaaaagtgcagaacatagactgcgcgctcctagctccaaatcgagagtatccatcccaaaatcttcactgtcccaaaaccagcagagaagattggatcattgcctcagtagtggagagag

SEQ ID NO: 58928 - DNA, 795 bp, Populus trichocarpa
  Intron number 1 from transcript POPTR_0007s13230.1 (locus POPTR_0007s13230) derived from phytozome v7.0 (chr-ID scaf fold_7; pos 13339942 to 13340736 reverse strand)
gacttgaagccactctcaaccgcctggtttgtgtttttctctttgttttagttgcctatttttagtgcttttattctttgtaatctaagctgtgtttcttcttcttcttgattttacgggtcttttttataataactatgatttaacatgtcgactaattggaaatgaaagcatcaaatttagttactttcaacagcatttgatgtaaggctattacaatcaaagatcaatctgcttgtctttctaatttcagttactgtctgtctgcatttccttctttattggtcaagacttgtgaaaatggacacaaattgcactacctttttgtctggtttgaagtgagacttgtgcccaaaacagctgaaattgtggagttaattgaggttgcaattgaaagatgagactaattcaaggaagattggttcctattcctaattctctactggagcatttgcattgagaacgcaattttttggcaatcatggcatgaagttattacaaaatcttcttggctggatggtgtttagcactaggaatcctctatagctgctgtataccagatttatgttatttcatatctttgttatatttatatgaggttcaattcaagaaagtggctatttttataatgtcaagcatctagcaccacatttgactaccactaccactgccattccaatttgttttgttattgtcatattctgcaatattcctctgtcagtatttcaattttggcattcgaatgaaacaaatccgcatgatgttagtcgtacatttgttgttggtacagagcaa

SEQ ID NO: 58929 - DNA, 1062 bp, Populus trichocarpa
  Intron number 2 from transcript POPTR_0001s17350.1 (locus POPTR_0001s17350) derived from phytozome v7.0 (chr-ID scaf fold_1; pos 14156991 to 14158052)
agagtttaggatcgctatcaaaagaatctgttaaggtaaaaactggtttcctgtttcttatacatcatcgtataatacaaattaaacttgtgtagtttatttcatgttcaaatttatagccttttatagtgcaggagatattgctgcttttttcttctcgctttgttcaacctagttatattcttttatgtaatgttgaccttttggatttaagttcttcatctgttttatcgaaatttaaaattatttggtgtgaagtggagatctacgtgctgtcagcaagataatatgattgcactggatacttttaatttctgttaggaaatcctttactattatagtatttgaagccgtgccctgtgatgcgttctttgatacggacaatatcattcacgtgtcttgttcaagtgcgtcagtgtcattgcaggcttccgtcctgcttagggcttccctagattttctttagcagaaaaagtttatgagtcctggttgagactcaactgaatcttatttgactacaaaggtgcaacttattaaatttaaatatcaaagatggtgtcatattcttctacttcataacacttggttcaacgatcgtcctttatcctgggaaaagacagtaggacctcctagaaaaggcgatgcataattggagcacacactttgttgcaatcaagagggttttcaagcttaagcttcaatgactcttgagttattatgcaccaatcaagattttggtgctttaggtattgtgtgttaacagaaaaatgtaacatgaagagtttacttagatgccaagaaattaatttgtgcaaaatttaataaaacatgtaatttaatttgtactcccatttttatttttattttttatccttgatgaattgtgagtttgaagagatttgtgaagtttctcttgcaaaaacaataacttcccatttaatattttatttaaggtattgccaagagtaattcatatccaatttcttcaagagttaattacggcagtgcaatgttatcttcaatacaggaggctgatcagcgccatcgtggcatacgtagaca

SEQ ID NO: 58930 - DNA, 721 bp, Populus trichocarpa
  Intron number 3 from transcript POPTR_0001s21850.1 (locus POPTR_0001s21850) derived from phytozome v7.0 (chr-ID scaf fold_1; pos 20341193 to 20341913)
aagaagcttctctaatagaggctaggcaaaaggaggtaggtgtttgcattgtaataaattacagctaacatattgttcactccattgccatcattgattctctcagtggcatattttctttccatgatgccctgattttgtccggggtatttgtggtgaacatccatatcatttatttgttatttgatttattttgttgtttgcaatcgttgtttactggtcaatcctctagatctgcataaaaattgttacagtatcttagaggaaacaccaattaatttatagctatggtggcgaggtttctaagatggatttggaaagattgcaaaagggagcataattgctgtctaggtcaaatggttaatgccatcaaggtcgacaaccttttccatgataagggtgtgtttggctgatgaatttttctgtttcacttgcactcttcctgtcatcatggattttttttagaaatcttgcaggcaatgtccgttaatttctattgataacatgaccaagaatcttggtgcagttgtgtttttgtcttttaattaaaggtagctatcctttcgttgcttactcacaacatgcacgtgcacgcaaatggcagccattagcagctggtttatgaatgtagtttttgttattctcagtgagttaagcatcattctcaattttttgttcatgtacaggaacaagctcggaaagagaaagaagagctggagag

SEQ ID NO: 58931 - DNA, 476 bp, Populus trichocarpa
  Intron number 2 from transcript POPTR_0001s15840.1 (locus POPTR_0001s15840) derived from phytozome v7.0 (chr-ID scaf fold_1; pos 12675974 to 12676449)
cgagggtatacatcacccccaccccaccttttatattaaagtttagcgttcatttgatgggaagttatgaaatggctgatgtattgttggctgatatctatgtataaccttaccagaaactttcaacgtattttttcatggaacttaggtcttctagaagcatgtcataaattgcgaggatcaatttgaaaagcttaatgctttatatgataccggagttgaaaagtttttgtgctctctcacatgcatgcccaccaagcaagcataggcagtattttgcttttattatcaaaatgatttttcattttattatgattatcacgatagtctacagggatgctcattactgttaaattgtctgtttcttgaactttacgatttcattttgtttctaaatactttatcacacttcagataagtgctgtatcttgtgcctactttctttgttgactgatctttggacttcctcttccaga

SEQ ID NO: 58932 - DNA, 986 bp, Populus trichocarpa
  Intron number 2 from transcript POPTR_0007s01860.1 (locus POPTR_0007s01860) derived from phytozome v7.0 (chr-ID scaf fold_7; pos 1079580 to 1080565 reverse strand)
tagaagagaggattaagaccaaacttgagagggtgagcatgattgaaattttttttttttttggtttctggcttggttggctgctaattttgatgtttagtatttttatttagcttattgtaactggttattgagtttgagataagttatagttgattgcatacaattagcttaggataaaagaaaatataatcaaatgtgatctcaaccatttataatttttgttatgaatcaagtaatttattgaagtgaagttcttttgcataacattttgccgcccattagttaagtggaaacaactatcctttgataatcgaacaacagcatgatctttggtaaaaaatttaaccaatgtgccttctaagaggaagaggaagctaaaatttgcatatacagaagtgggaatcatgtctaagcttgagggactgagcatgattggactgttttttccagcctggttttgttggactttgtaagtacaatggtctctctttttttttgctgcaagctgtattgttattgaacgtaagatgcggtagttgagtgcatataactagctgacgataaaagatctgatcctgtgtttgtgaaatccaatcaatgtgatttcaaccccatttctaataattattttgagcataattccctgtatgttatttttgcttgtgcctattgcatgcacctagaaaaggataaaagaacaaattcaccttgcaaaaatactgcagggatcaatttttccattacttgtatgtgtaatggaaaagaattgaggagttaatgtgaggatcaatacgctcccctctttattaggtctgtttgtgatgagaacagagaaggaaaactattttaggatagaaattttttgtcatgaggctactaaatccaattaatgtctcccatgtttcatataggtgattactttttcgttgcttgttcctataatcacaggccagaatcaaggaagctaaactggttgaaagact

SEQ ID NO: 58933 - DNA, 310 bp, Populus trichocarpa
  Intron number 1 from transcript POPTR_0002s00760.1 (locus POPTR_0002s00760) derived from phytozome v7.0 (chr-ID scaf fold_2; pos 345456 to 345765)
ctaccattgctggtacttttcttttactttatcatctatctaatctttgatttggaccgagaaatgtttgatgttaataattaaaattaaaaacttaaaattctaaagattgaaaatattgagatttgttgtccatggtggatggtatttttcctaggcttccaattggaacattttctcttacgtgtcggtcgtttctgatattttcttctctcacttttggtgttgaattagggactgaatgcagttctgaaatattgtttctatgttttcaggcgctgtcatttacgtcaagaaagacctcaagttg

SEQ ID NO: 58934 - DNA, 810 bp, Populus trichocarpa
  Intron number 2 from transcript POPTR_0002s00760.1 (locus POPTR_0002s00760) derived from phytozome v7.0 (chr-ID scaf fold_2; pos 346286 to 347095)
tttcaggtttactcattattctttcactgttgttctttctcactcttttttccttctgaaagaaggtatagaaatttagatcatgggttgagacaatagcctggtctttcttgttttagacaagatgccgaatctcactgaatcaaatggtagtttgtttgcatcattagtttgaatgcgtgtcgaagtatttccatggctgaatgacagtatgtgtaattcactgggaacagattttttaagcacccaactttacacatgcagctaacttcaacagctatgttttcatagatcaacttgacttctttgttatacatgataaatctagaagcttttggtgcatgctaatctttccccagtaagtgcactttgaagtggttttgagggagtcctgtttttctcagcaatgatctctttggaattgtgaaaaccatattgtggcaggccatcttttttattttaatggtagagttccaaacactttacattcttcgttcgctatccttaaagcctgaccagttatttggagatcaaggtgaggtgtatagctttatctgctgattatactttaaattgacgaggagcttaacttgataggagggagtaaaactatttcactggtgtgagttcatttctttccagcttcagtgttcataaacgtgagcataatgtgtagatgtttttaatagtatttggattttttttggtgaatttccaatggtaggaaatttaggcttctccgtttgcatatgtagcttattaaacttgcttatgtggctgttgctaaagcttctatgatgcacaggcgag

SEQ ID NO: 58935 - DNA, 688 bp, Populus trichocarpa
  Intron number 2 from transcript POPTR_0010s21150.1 (locus POPTR_0010s21150) derived from phytozome v7.0 (chr-ID scaf fold_10; pos 18551870 to 18552557)
ctatcttcgaggatccaaattccttgaaacaggtaaaatcaagatgcttcattggctttcaaaaagtttaattgtcgctgtgtgttttgttttgcctaatttagggatttggttgctgagtaattggcaggaaattttgggtatttgttggccttttattttttttagtagaggaagtacagaaatagatgagcccaatgttattaacgaaatgccgctttaatggtgaagaaacaacaacatatacggcgtaaatattttatctttttgtttgtttgtttggatgtgcattatatgatatgaattgctaatcgagacccgatgctgcagctgtttatcgaggttcttttatagtaattttctatggtctagattggttttaactctacaattgatcaattgggaagcttttctggctaggttacataagaaagaaccaacatataaccctttttactcaaatcgagttgtgtgttttgggttcactgggctttgattgttcttaccaacacttaaattggaaatgcatccttgcagaaaatgagttattttgaagtggaagtagtgggattgttataattagatcgttattatatgttgttagcatatgtgtagtgccatctaatgaaatatgaaagagatttttagtgaatctgactattttttaaaccattttgttacaggttcc

SEQ ID NO: 58936 - DNA, 943 bp, Populus trichocarpa
  Intron number 2 from transcript POPTR_0002s08550.1 (locus POPTR_0002s08550) derived from phytozome v7.0 (chr-ID scaf fold_2; pos 5974855 to 5975797)
tgcataagagatttgtcaagcagtgtttatttgaggtaatgtttatttttaaatcttcagactctgccatttgtaattttgcttgtggtcatgccggtatatgccatactcgtctgagttttaacttcagttgaaatgtaattattacctctgattccttttgttctgttgctattttatgtcggtttagaatgataattcctattaaagataacttagttatgtatcgttgtatgtctgcattgcttaggttagtcggctaagttaaacgcctgtgcaaaaagataaaaaccgtttttggaaatcttggaatctgacagttttagtaaaatggtttaatgtagtgatgtattttaaaattgttcatgatattggttgttttggattagagaacggcatgtgccgatttcaataagttggatttgaagtttccataaatgtgacctaactgttgtacaaaggtgatcaagctaatgagggaagctcttaaacaaaagcaatgagcatgtatttgatgcactggtttgcatttagagcttactaaagtgcttaaattaaattgtactaattttggttgatttacttactaatttgcttgtgaatgattctagcagaatgtttaactgttgattgatgtctatcgtgggaattaagttttcactctttcacttgttaatactgatcttgatgatgtcgtggactgttgtattaactcttcaaatcttaagaagttaaagatgtagaggatgcattggaatcatgatgtaaatttagcttttgattgtttttgggaattttgtgcgttaatctgaaaaactactctctggagttggggtcctcttacaagtttaatgctgtccgattctcattactagtcataattggtttccgaactccctttgcttctgattttatgcttgtgtctgtctatgccagtgcttag

SEQ ID NO: 58937 - DNA, 541 bp, Populus trichocarpa
  Intron number 2 from transcript POPTR_0007s09780.1 (locus POPTR_0007s09780) derived from phytozome v7.0 (chr-ID scaf fold_7; pos 9297659 to 9298199 reverse strand)
ctggagtggtatgtattcttttgttatatctatgtacatataattttgtggtccttttgagtgtctgggcatcaagctctgtgtcgatgctgttgaggagagtgttttaacaatagcaatgatcttcagatgttcaaatgaagtttatttcatttctttactaatgtgaaatccaatcatgtattgaagagccatgtagcatttctaatgcaactggttgttctgagttatcttatgggtggtctcatgttaattatttattgctagcatcgtgtgagtgatgcatggatttctggctaccctctaatgccttacggatcattttcaatctctacttgtttttggttttgtctttcaacttcatgacccgtcgttaattttttgaatgactcttaaatgtcaggcaatcagtcatttttggtcttcaaatgcagtggtgctgagatccatcgtctcttaaactttaacatctgctccttcttgtgtttttattttctgtttttcaggccctcacatcatcagctgtgaagaaaggagggct

SEQ ID NO: 58938 - DNA, 469 bp, Populus trichocarpa
  Intron number 2 from transcript POPTR_0007s11880.1 (locus POPTR_0007s11880) derived from phytozome v7.0 (chr-ID scaf fold_7; pos 12239641 to 12240109 reverse strand)
aggtatgcctcaaaatcttagttgttttcttttcatgtcattttgaaggtttcttgattttttcatgttttggaagtaatttcattatcactgttttgttttcatggattgcaaggaaatatgatgtggggttatgggttcttggtttttgaagaattttagtataatttgaaaggttcttttgttcatctatatattaaaatgggaaatttgtttggttagttttatataattgctttgtttttatataataaactgaagttttgataattttctgcctgaacttgttcccgattgcttttacttgactgatttctcggttatgaagcgtaaactagattttaaaaaaaatcacttgaaacatcattggttgagccagggagtgattggtgttacatttcatgatatgaatgttgtatattttgctactgcagtaagcttgcaggggatacaattcgcgaagctgtta

SEQ ID NO: 58939 - DNA, 741 bp, Populus trichocarpa
  Intron number 2 from transcript POPTR_0001s03680.1 (locus POPTR_0001s03680) derived from phytozome v7.0 (chr-ID scaf fold_1; pos 2944389 to 2945129)
cttcattgttctgcgggccaacgacaacggtggtaagctaaccgaaatctcattaatataagatccccaaatcattgaagttaaatcttggctgcttaaccatatatatacaactctaagtgttttctgacatgatctttgtcatctgtctctgtcaaagtttgtgataaaacgacagtattcactttggaacactatatatatagttcatttcctcatagaattagctggggtttttttcatggaaattaaggaaatgtatgaatctgaactttatttatagtatttccgtcacctgatatattaaaggaacggaaaacggaaggcacctaattatgtgatgcatgccatgtatatgttatttgtgtagattccgattaacgaatcaatgtactaagatgatatgtatgcatgacttgatcatataacagtatattttttattatttagtcaagtgccgttagtttattggcctacttggtattctattatgtttttctcaaaaagtcgttcataccgtcgaataaaaacaaaaaaataaggtgttatttttttataaatgagtgtactatagaagatgtgtataaatctgaactatatatatagtgttccaaagtgaatactgactgttttacatggctagctaggaagtccatttacgtttcggtaaacctagttatcattcgatcacgagtagctgtaccctttaacaggtggaacatttgcactctattcattgat

SEQ ID NO: 58940 - DNA, 616 bp, Populus trichocarpa
  Intron number 3 from transcript POPTR_0027s00420.1 (locus POPTR_0027s00420) derived from phytozome v7.0 (chr-ID scaf fold_27; pos 221839 to 222454 reverse strand)
gatccagcaggtaataatgcacccgagcattgaatttctaaacatcttaccttttgtttttcttctcacattgttatcaaactcttttacattttattgctgtatattgctatgtatatcgccttgctagaaaaatctcatgatcacctccacgatgctaattctataatgcatgtgaagtgtttcatccttaacttgttaagaacaaggactatgatgcattgctattttatattttatgattgagatggtagattttaaagattttcctgtttaggagataaaagtaagatgtcacttttttgcttttcttccgagagagtatttgatccttttttcgtataaaataatgctggcatgcattgaatttccaaacagcttagcttttgttttgtttgtcgcattgttatcaaactcttttacattttattgcggtatattgctatgtgtagggcatgctttaatcaaaaagttgagtaattgatgaatgctaggcatgaaaatgacatattatttttgttttctgtctcctccttttctttcccccacctcaaaaattgtcatgttatttttgttttcagccgcctcttcttccccaaacctttaaaattgttta

SEQ ID NO: 58941 - DNA, 656 bp, Populus trichocarpa
  Intron number 4 from transcript POPTR_0001s43110.1 (locus POPTR_0001s43110) derived from phytozome v7.0 (chr-ID scaf fold_1; pos 43182249 to 43182904)
ctctagctaaggctgctcggtaaagatttagtttacctgttttcgtatttaaaatttaccatttctacgtagctgtttcggtcaagcacttgggaactcatttatggcatggagaaatcagaaaacttcagagagttattggaagtgccattaaagattttaatggttcacaaagtttagatgtgattttctattcacatcctttagcctgtcaagatcctaatgtctgtcatattctcatttcttccatggctcaatctggatatcagtttaacttcaaaatgctttgtaaactaataactcgaatttaggcctttagggtatgtccaccttgcatgctacatcactggcgtctgcgtgtagcatgcttattccatgatcacaaatgatttgctcccccctgcccttctttccaagcatgtgtttttatagtgtaataatttactttgatttttgtgctttttatcctttctcaattcatagttgcacttagtaacttcatccttcaacactaggagaattttcattttagtttcttttgccactccagctgacatgcatgctttctccttgtggcacaaaatattcagtgtagcttaacaaattggacaatctttgaaaagtattttctttcccctctcatagtgctctggaag

SEQ ID NO: 58942 - DNA, 648 bp, Populus trichocarpa
  Intron number 3 from transcript POPTR_0001s00640.1 (locus POPTR_0001s00640) derived from phytozome v7.0 (chr-ID scaf fold_1; pos 555077 to 555724)
atccaaagttgaaagaaaggtagttgtgggtgttttgattgacaatgccatgacattgctgcattctagttccagtatgtttctgactaaacgttctctatggacctgttgcctgagatcagaataatggtggttcttgattgattgttgatgtgttgcaggaatttaccaagtgctatgtttgttcttagttgttgagctctgtattatgtcatttgactctatatgtttattaaattaactacctcttgatactgttgtgttagttattaatttggttctttataagaaactaactgctttgtaagtgtaactgaagatgaatcttggatctgcaaaacactgttggtgtgatattttttcttcttgatgtaactaaactaaaatgttcatcaggttgttgtaagaagaggagaataatttgtgctgttcaaatcagtccatagcgtcagtgatttacatattttgattttattttgttttgatacttgtgcttctagtgcatgattggtcaaaattaggtgttctattaaagtttagttggtcttcttcatcagaattttctcatactctctccatatgtactcgaacttatctaatggctcttttaaatattttctgacttaagctttgagaagtccccaagac

SEQ ID NO: 58943 - DNA, 342 bp, Populus trichocarpa
  Intron number 2 from transcript POPTR_0010s20560.1 (locus POPTR_0010s20560) derived from phytozome v7.0 (chr-ID scaf fold_10; pos 18094703 to 18095044)
tccgttatcgaagccatcgcaaacttgaagttccagtgagtttccgtcctgtcaataaacatttctaaaagtctcctttaggctttaacctcaaccagctgatcgatacaatcaaatttaacaatctttcatcaataaaacatcaattagaacagaaatttttaaaagcaaaagctattgtgggttttcaaaaaaaaaatcactatttaaaatcacaaaagaatattggaaaaagaattaattgtccaaaatatattattatctttccatcttcactttgtaactagttgtgctttaataatttcaggaatttctctggtggggtgcacgtcagaaggtaac

SEQ ID NO: 58944 - DNA, 676 bp, Populus trichocarpa
  Intron number 1 from transcript POPTR_0002s19750.1 (locus POPTR_0002s19750) derived from phytozome v7.0 (chr-ID scaf fold_2; pos 15683326 to 15684001)
cagatatcaatataagtagatacataaagagatcagtaagcctgaggaattgacatggcagaagaatcggacaaaacttagagatcatctttactctgaccagaaagaagcactgacttggtgttaagatccttaacataaagcacaaacgcttgaaatttaaaataaacattattatcacggcaaaatatctcaacaaaaagcaatgacttttgaatatgaggcatatgaagaatattaaataagctaaagatgtgttttgttgtatataatgtaatatgtccaatattagaaatggaaaggctgaatattagatatgaggtacatgaagaacattagataaaaaaaatcatcgtgtttgttgttgggacctacggctagaaaagtaattcaagagataacgtgcttagggtaggtttgagttatttaactgtttatctaaatattttctactttctgaattaatgctataaaatcacttttaagttttcatctaagagcttgcatttaattaatttttattttttgagataattattttacaattacagacacaacttttctattagttttaaataattacatattactagatttacattttagtaatgattttgaactatacattataatattctcaggatataatcttagcaacagtggacaatccatcaaa

SEQ ID NO: 58945 - DNA, 393 bp, Populus trichocarpa
  Intron number 2 from transcript POPTR_0002s13700.2 (locus POPTR_0002s13700) derived from phytozome v7.0 (chr-ID scaf fold_2; pos 10159139 to 10159531 reverse strand)
aagctccttcaaaggtctgatttgtattgatacttctgaatgttttagtgttcttttttacccttttcacttcctagttgctggctctgtgaaccaatgaaacaggaagaggaactgatggcttgctattgttgttttaagtaagataatgggaaaaaaatcatgtagtcaatatatggtttagtttgagtcatagcaagtggaaaatgatgtagaagagatgttttgttatattttaattattattttttttatataaagaacatgtgattattgaatttgattttttttttaaaaaaaatgggctaattcgtttatgctttgatctatacagttgagaatgtagttctcctgctctgcagggttaaagaattgactgggaggttggaggtg

SEQ ID NO: 58946 - DNA, 984 bp, Populus trichocarpa
  Intron number 2 from transcript POPTR_0001s20390.1 (locus POPTR_0001s20390) derived from phytozome v7.0 (chr-ID scaf fold_1; pos 18305328 to 18306311)
cccgcacagaaggtttgacaatgctgcataaatttgttaagctatttgaacctttttaagagtaaagttgtgcatctttgaggaattattcagtttgattgctaactgaatatgaattacctctttaatggcatgcattcacaataattaagtagtattcattcacttcaaaattttatttaagaagcgaaccataaagcttgtttatcaagtcaatgaaaaagatatttttgcattgtgcaagaaaagcaaatacaagtttgcatatatacttcccttcttctttttttgcaagcacggtacaatgttcataaatttataggtattgtctttcagtatttgtgcttgctatgtcattccttactctttagaaacaagatcttgcggaatttggtgcaactcaaaatcctcttctgttgaatccaaaattagttgccttctgtacatcgctccaaatgcatgagcaaatgcatatttttttcacaccataaaaatcattatctttttctccaaagttattttctataatcatttgcagatgaaggatcttaattaattgggcagaattttctgaatttggaaaacttgttcaagtcttaattgggagtgctgctttgaatgagataaaatttctttatcttgcttgttctcagtcagcaacgctcttgcttttttgttgataatcctacttgatagttcatacttttacaacttacttttaagttagttaatggaggttcttgacatttgaaaaaattgccagattatgttttaggaggactgctagggttcttaaatgtttgcattgtcatctaatcttcacagtcctggcttctggcatgttgtcttgaaatgtgttcccttgaaactaaaagtagcaaggttaattatgagactttaaattctgctcaatcaagtgtggaagttatgagataccatgtgacttgtgttcctgatatgttgttgtatgcagcggagattaca

SEQ ID NO: 58947 - DNA, 862 bp, Populus trichocarpa
  Intron number 4 from transcript POPTR_0007s01560.1 (locus POPTR_0007s01560) derived from phytozome v7.0 (chr-ID scaf fold_7; pos 884217 to 885078)
gctgagtaccggaggcagctgaggacagcacgaaggtatttaagttttttcaatttttgaccatattcagatgctaaatttatgtgttatttgtgtgcccaatattagctgattctttgttgttttggctttcatgccaaactaagaatgcatgagagctgtctatagtttttcatcgtcagctttccattccagtctttgcttatatatatggataaaaagagggaagattttatgttgttggctgttatgatcttagccaaagacatgcatgcccaaacaaaatattctcttttgggcttcagcattattaagttgagccctattgcagttgtattgtgctcacctttcagtcttaatagacagggttcagttcttccatttaaaaagaattgctgtgatccttttgctatcatcaatgccagactggacataacccaacaagctgcagcagactgtcattagagagtttgcagataacaaaacatgatgcgcgcacatcatatatattagcacagtgaaaatatcattaactccatacctttgatcttttttttctctcgttttcttttcactaaacctatgatgtatatataccatattgatttctttttcagtttgccatacttgcatgatgcaatggttagcttttaacacggtttattattgattttttctttttttcttttttttttgtgtgtgcgtgtatggtgtgtatttatctggcttaaccaagttattattgaagtaccggggcaaaagaagctgttttagtttttttttagttatctttgaaccgtccagaatccccagctttatgaagtcttttatgcagggaacgctacagagacctcatcgagca

SEQ ID NO: 58948 - DNA, 911 bp, Populus trichocarpa
  Intron number 2 from transcript POPTR_0002s17820.1 (locus POPTR_0002s17820) derived from phytozome v7.0 (chr-ID scaf fold_2; pos 13642550 to 13643460 reverse strand)
caccaacaaacatcaccactgagcagatccaaggggtagtatctttttgtaattcttcctttattcaatgcatatattggtttatgcatggttttttggtggttttgtttctatgattttttgatttggggttctttgcttatggtgttttttcatgtttctttgttaaaccaatatttgaagctgataagtagcacaagtaatgagtaactgtttaagtgagacaataaatagcgaattgattgtggcttcttaaatattgtccacttcaggagataggctcactaaggctcctctatcagattttgcatggatgggcgcaaacataatagttagaatatgagataaggagactgttcataagctattaagttgtagattagattgaactcagaagttggagaattcagctattcaagctcgttttggaattaatttattggaaatttgtatttttcaaagtattccttttgaagcttctacttctgcaaattcccatatttatgatgtacatttttgtatcgcaaacccattccatcttcatgaaatcctcaatattcatgtatgcaaattcattcttgcagctcgtagatgtgttttcctgttcatgaaacatgacaaaatgtcatgctatatagcaatgcatgaaaaaatagtggagaatttaccatgtgatgcgtgaattcaaatccatggttgattggttgtaccgtgtgctaatagctgtttttatttataggctttcacacctattcaagtttggctttccccttaatgccatgctgagcaataactgatcttagtttccatttttggttgccccttcatgtgcaactctaggatgtattatttgctaatatctgccatatgatggttgatttatcttttttaattctttctgcagtaccttg

SEQ ID NO: 58949 - DNA, 433 bp, Populus trichocarpa
  Intron number 1 from transcript POPTR_0001s18890.1 (locus POPTR_0001s18890) derived from phytozome v7.0 (chr-ID scaf fold_1; pos 16067008 to 16067440 reverse strand)
ccagggtaggtgacgtctctttctcatttactatctcttttaatttaattaggtcttacaagagttgctaatttagcagctcaagtctctccttaaaatgtgtgaattgatcttgccttggctttttatctaggatgctgagtgagtagttcgagagaaatgattgatagtagcaaatcactaggtaatggagtgttattataacaatagggtggcattatatattatcacttgtgatttaaaaactaatcaaatttgggatacattttcttcttatctcgaacaagttctgctttgttttgtttttccataatatatatatgtatatatagcacattaattagcaaatgacaagttttgtttcttatatttctgttgacgtgaccaaacaacatcaggtgtcgaaagcttttgatttactacaagcccttaa

SEQ ID NO: 58950 - DNA, 785 bp, Populus trichocarpa
  Intron number 2 from transcript POPTR_0007s05110.1 (locus POPTR_0007s05110) derived from phytozome v7.0 (chr-ID scaf fold_7; pos 3301906 to 3302690)
acacccttgcctgctgcttttagaatcaattcaaggtaaagtttttggtttcgtttgctatttaaactgtcgggtattctttgtttggttttttgggtgtgctcgtaattgttgttcctgcatgctgtagcagtaaaaaaatataacgttaattattttttcaagctgatgaggcaaactttgaagttaagagttgggacacgaaaaggttgggtttttgtagctctcaatgttgtctacaagcaacagactagccaagataggtaagaatgataaaatcacataagatgaatatcctaataaggttgctatccagttctctttgatatgaattggatatgattaggtgaatgaagaatgaaaatggtgattttggcagcatatgtcaatctagtgatctttttcaaagggaggttgctttagggattgcaggaagatcaaaagggaagtgggatttttgaaatatggtcgactgtgattggacaaaaaatatggtcgtatggagtatgaaatgatgggaaattatatttgtggtaataaggtcctttatccccccgagtcttggattgaattcagatgctgcaagttgtatatgggcaattaacgagcataagaactgcattttgagggtttatatataaggtcccctgtgttattcacaccctccttgactttgaacattgaaactgcatgttacagtatggggaaaagttactaaccttgtgatttttatttttttcaattttgcagtagccaattttgtgaagatatcaaatcacagcttg

SEQ ID NO: 58951 - DNA, 1010 bp, Populus trichocarpa
  Intron number 1 from transcript POPTR_0010s25440.1 (locus POPTR_0010s25440) derived from phytozome v7.0 (chr-ID scaf fold_10; pos 21123362 to 21124371)
ctttgatatcacttcactgtttcttggatcacaaagtaagtcccttttgttgcttccattttctttacttcactttgttgatatataacacaaaaaatgaaaaatcccgtcttttatagcacttctcatttcaaagtagttgtttttcacttgcatttgtgggattttttttgtttccttgtccggtttaagaggacttttgatttcatactttatgtaaatagttcaaagattgttttttttttctttcgagaattggattatgtttcatgcaaaagttttaaacctagtaatccggggttattgaaaagttgtgattatgtggattattttgttatttgggttttgggttttaaggtttttggtcaatgaaggttaaagctttgagcttttgcatttgcatgtaaaagattatagctctattgctctctgtttgtatgttgtttcacttggcttggatcactttattggtttccaagtgctgtgttagacacagtgatacatattttgactagctcatttcagtgcattttggattctagtggattggctgctctaatttatttggtagggtttattggtttttagtttttaactatggtaatggtttggggtgaatcttcttgttattttctcttccagtagtagtatgtgtttcctagctcttttttttttttaaaaaaatttgttctcctaatcaagggatttatgctgcatctttgtttgtggggcttttttgcatcttgcttgtatactcaattactttgattttgttaaccatgctgaatggaggtcattgatttagtttttggagataattatttttggatgttttagttctggtcttgcatagtatatataaaaaccttgaaactctattcatattttcttcaaatcagagtttctttggcagtttggagagtgtaatctgataatcttatgctgtatttctaaattgttgactctgctttccaggttctgattgtggggtgagtttgaagattggatca

SEQ ID NO: 58952 - DNA, 864 bp, Populus trichocarpa
  Intron number 2 from transcript POPTR_0010s25440.1 (locus POPTR_0010s25440) derived from phytozome v7.0 (chr-ID scaf fold_10; pos 21125328 to 21126191)
gaaggctgaggaaacgaagggtgaggatttcttttcatttacccctccgatgcaacctttctattggatatattgataacatgtgtgtctgttttagtttccttttctccttcctcctcccccttgattttaatgaatgatgttcatacttgctttgttgatcaagggtttgtttgggagtgtggtaaaaattgttttttaaagtgtttttttatttgaaaatatattaaaataatatattttttttaaaaaaattattttttatatcagtacatcaaaataatctaaaaacacaaaaaattaatttgaagctaaaaaaatttcaaaagcttggttggacctcaatgccaaatagggctccagacaaaaggtttaattgaatcagagacatgcaaatggaacttaaatcagtttgataaattgtaaatcagttataaattgtcggatagctatatgtgattgagaaatgaagatcaatctaactagtttcattttagaggcatgtaagacattttgaagattgcccgctcataggtggtcgggaaagaaaattagatgatgagtattagttactttctaaaactttagattaaagtagaataaaataaagggattcttgatgaatgagcttcttgtttatgttgatgttgttgtggagcaaaaggttatgcttcgttttcttgtggtgataattatgtattgttggcatcactttgtatgcacacaatcacttcattgagtacaagaatatcatctcttgtcactgaatgtgagacatttgttggttgaattcattttcctctccttcttatcgttaattacttttttgatttgttgccctttaatttgcaggagcttgagaat

SEQ ID NO: 58953 - DNA, 626 bp, Populus trichocarpa
  Intron number 5 from transcript POPTR_0010s26190.1 (locus POPTR_0010s26190) derived from phytozome v7.0 (chr-ID scaf fold_10; pos 21504991 to 21505616)
gggttgtatccggtggagaggacaatactgttaaggttataactgttttctttctcttggtgtacatcatgtctacacccagccactcacacacatcatgccagaaaatactaaaggtcccgtgtccagtccgcatcacaaggacctcacattgacagcccttaaatttcacacatggtcttatgcacttctgctgcccagtttcttttctttatgtcttcatattcagtgaatagatgcgtatcaacctggtgacttgaatttaagagagttgagtcagccaaatatattttggccctgcacactgtgcctggtgccaagggtctgagactgatacctggtgacttgaatttaagagagttgagtcagccaaatatattttggccctgcacactgtgcctggtgccaagggtctgagacaaggttcggacccaattctctctcaagtcaatgcaactaatgaatgcattagggtcatatttagtgtgtctaccacttgtaagttccttttacttgagataaccgcacatacaggtttcttttgtttgattctttttttaactaactctgcaatgtgcacgatttcaacagctgtgggatttgactgctggaaagctattgcacga

SEQ ID NO: 58954 - DNA, 439 bp, Populus trichocarpa
  Intron number 1 from transcript POPTR_0007s13400.3 (locus POPTR_0007s13400) derived from phytozome v7.0 (chr-ID scaf fold_7; pos 13512567 to 13513005 reverse strand)
gaacaataacaaccaacagagagttataatcacaggtgctctatcttccttacactacttacttttttatgtttttttctttgttgagatttcttattgcatacaattgctgtagattttgaatgattccctcttttttccatgctttttaagctcgtcttcggattgaaacaaataattgaaaaaagtattcatttgacaaccatcctttagataccactagtttgttttgggtccatagttgattgcctgtgggcacgatgcaacactggaagagttgttacaacttacaagtaaatcaaactcagttcatttaaacataaagaaaaaacaaggaagatgattgaaatctcttttaatattgtagtgattatggagttactattggtaatggtttctgggtttttacctttttctttgtttttttgttatagcatca

SEQ ID NO: 58955 - DNA, 570 bp, Populus trichocarpa
  Intron number 1 from transcript POPTR_0001s08080.1 (locus POPTR_0001s08080) derived from phytozome v7.0 (chr-ID scaf fold_1; pos 6144795 to 6145364)
ttcttattgcccttcttgttatcgtcatcttccaggtcattctcgaacccctttacttgttaataaatttggtgatttttttttaatgttagttgtttctaaattgagaaaattagacttttgttttctttgattttgagtgcttattgggtacttagtaatgttaaatttcgactgggattttaattgcttttttacagggtagctgcatagctaaatttgtcagcttgtcgtccacttcatgctgatgggttgtttgctttttgtctgtttggttttgatcaattcactttccaacttgattaggtctggtatttattgttttatgtggataataaaaatagtgaagactgattttaataaataacaaaaaagcctctgctttttagtggagtaattgtaaaaagtaaggtgattttagacgatgattgattgctaaacaaattagaagaaaaatgcgtgggaattgctccatgtatggattagtccggcattttttcgcttgtgtaaattgaggtgtatgatgttggcatatggattttgacattttgaagaattttgctgcagctt

SEQ ID NO: 58956 - DNA, 1033 bp, Populus trichocarpa
  Intron number 2 from transcript POPTR_0001s08080.1 (locus POPTR_0001s08080) derived from phytozome v7.0 (chr-ID scaf fold_1; pos 6145537 to 6146569)
tgaggctgtaagttttatcttcttctttgttgttcagaattatactttgcccgcatctgaaaattgttgtttatctgtctatgggagaaaggtagagatgtagcttttaagaggaagggaggtctactgtattaagactatacatttattgcttaccagtgaaaagggtaccatttcatcaatgcagtgtgaataggatattttcaacgaattgctgctcaatccatgctattatgattggttgagttgattatttggtggattgttagagagaagcacgagatttacttcagaatatccaaacaaagtagttggatacctgtagttttagaaggcttcaatgctttagaattacagccttgatttctgcttagacttgaggttccatgtttggagccatgaactcatattaaagcaacatatttgtatcccgatgaagctgagggtatcatgagcttcacacagtttttgagtcttgctctatgtttatttcacgtttgtcagtctatctacacagtcacttatataatccagccatgtccgtattagagatagacttgtccaaaattctgccagtactcacagtggatgcagtaatgcttgcttgtctctcatcttaaccttgaacaattataagaagtaaaatcataatgatgttatcatatattttataatttgttgagctgatgtgcctgtattacactctgtgttgccattgtgaggttctcaagctatggttttcgagttttggggttggcgggtcaggatcttccctgatcttccagacaagttgaattgatttcttatatagttagggttaacacactcttgcttatcttgctgatagaagcaacctcatgcattacataaagggatcgttatgcaaatcatttcattttgctgtagagatcgcatcttaggaatatgctaagcttgtactttgctggctacatgtgatagaacatgatatgatttgcttcttttaactttttcattcttttgattagttacacacaaagacagcatttggtag

SEQ ID NO: 58957 - DNA, 469 bp, Populus trichocarpa
  Intron number 1 from transcript POPTR_0001s12090.1 (locus POPTR_0001s12090) derived from phytozome v7.0 (chr-ID scaf fold_1; pos 9374509 to 9374977)
gaaggtggcaatttttggcagaagctatttggtaagatacatatgcgaagtcagtagactttaattttaaatataattaggaaacaacaggcttagctgtaatatttgacttttcagataaatcaaggtttaagttcttgttaatagactatttgaaaaaaataaattgtttttgttttgcttaaatctggaattgaattgagtaaaatttcatccttaaagagtttgtcaccaaatctttgggttctgatcttctaattcgagcttctacttgtattcccttaactttcttagggtgaattctctctcgttcttgaatcactgatctgatgtatcatatccatgtgtgggcgtacacaggcgtgtgagtcttactttggattgagtatctgtagcttcaaagagtgtttgttacatttgaatatctctaaacaaatttgttattgtaaatgtttttctgtgagtacag

SEQ ID NO: 58958 - DNA, 817 bp, Populus trichocarpa
  Intron number 1 from transcript POPTR_0010s16120.1 (locus POPTR_0010s16120) derived from phytozome v7.0 (chr-ID scaf fold_10; pos 15150367 to 15151183 reverse strand)
ttggttgtatcccttcaaaggtaatttcttttttttttgttttggttttttttttttttttacctgttcttgtattaaagttgttgatttttttctatccgtttttttttttgtgagattttatggtttgtttggtttcagatccatttatattgtttgttggctgaatttgattgatgagttttcagttgaaaatggaattttttttattgcttgtttgatagagaattcttgtcatgtgacacccttatgaattttcgaacatttttttatttggctattcgataagtttttgattgtttaatgaaagaaatcagaagtagtggaagatttttttctctattggattcagcattttgatttcctgacgtgaaagtgcattgtgcagtatatgcaaggaccaaagtatgctgtaatcaattcctgttaggcagtggatttagagtatcaaagtagaacttttaaggtgtgtttgattcgttctactgattatctgcttacctacctgtggtagacatggtgatttgtatagaatagttagcagctcgtttatattaattcgtctaaggtgggctggaattcaatgtattatcaattgtgtatgttcttgtgctattttgaagataacaaccagaagtcgtactcctgaattgtagactaatttatttattcatttgatttagttatttaacctatattttgtaactctgttatttttttttaatcacagggacaatatgtctgcatgccttaacatatatcaaatttgaattggtctagcccttcttattttcaggctcttcttcactcatcacac

SEQ ID NO: 58959 - DNA, 244 bp, Populus trichocarpa
  Intron number 1 from transcript POPTR_0002s00610.1 (locus POPTR_0002s00610) derived from phytozome v7.0 (chr-ID scaf fold_2; pos 267214 to 267457)
gttttgttagtatttactcattcacttactcatgcttgattaatagtcgttttgatcaaggttttcttgtgcttattttgatgattaaaagtgatctagatagctgttaaattctggattttttccattgtggataaatgggctgtgtttttatttgatggatgaagaatgacatgggtttttgaattgtatttgtgtggagggtgtaggtaactttccgagaaccagaggcagctaggagagc

SEQ ID NO: 58960 - DNA, 1047 bp, Populus trichocarpa
  Intron number 1 from transcript POPTR_0010s03010.1 (locus POPTR_0010s03010) derived from phytozome v7.0 (chr-ID scaf fold_10; pos 3523172 to 3524218 reverse strand)
agtttcacttccagccgttttcaggcagttcccaggtaattaagtagcttttttacttcgctgccaaatctttttagcggtttccttgacagtgataactttctataatgacctgatgacttttgctattaggcaagcacgtttttctcacatatctatcgactcctagatatttgggacaatgaaatgcgatcctaggctcttctgttactatattttacggccactttgagtatatcgttcattctttttactgtatggaatttgaagcgatcatcttataaagccttcttcttcttcttcttcttcttcttcttcttcttaaaatatcatgatggcattggtgatagtttcctcctgctacagtaaattttggttaggatgcgaccaaccaacttgaggctggttgcggttcatttggtcatttgaagaatataatagatgcactttatgaactttatttatgccactcaacgatctctggtccgcacatgagggatggttagagagtaagccaacctcctaaccagtgtggtctatcactgtggccgttaaagttcctcacttgattgattttcccctttcagaggaaacgttattttatattagatttttgaaaactgatctgcccttcttaaaatcatgtccttttaagtgaaggaacacttgttggaccatcttgaaagtgagaattgaaatctttagcctatgttataaccaaaatgaaaatttgattgaagggttcacaagtagttcttatttatttttgaagttaatcacagtaacatgaaagagaaaggaagcaagttcagaattatcttgtttcacttgattttttttcttaaagagtttgtttcttgatcatttacgattatcttttggttttaacagttgctaatagattttctcttgtatgatttgcgtgtcatagtagacatggttacagccttctagccagactactgtgtttataattttccatttgttgatttctaaattgttggttagttatatttgttctgattttccagggaggagtaggtgaaa

SEQ ID NO: 58961 - DNA, 985 bp, Populus trichocarpa
  Intron number 1 from transcript POPTR_0001s13260.1 (locus POPTR_0001s13260) derived from phytozome v7.0 (chr-ID scaf fold_1; pos 10353580 to 10354564 reverse strand)
aacaccacctttttcctgtgtcactcaagttacaggtgcgccattattttcaggctttacctcttttttgcttgcaacttcattgctgtatttttcttttccattttatgtttgtttttttacaaattaattcattttttttttgaaatattagaaatatattgatgtattagaaatatattgaaataaaggtaaaaaaaacaagtgcatgtcatgatcatccattttcaagaacaaaaggttgtgctccataggctgtaaaaccacatatgccaaataaatacatgtttgtgatttaaatattactttgtccatacaaaattaatgtaacccatcattatataaaaacaccgactctatactgaaacccatcattatttaaatattactttgtccatgcaattttgattttgattttgggtccatgttttttataattgagagttttttgctctaatccatgtggtctttttaattggcaagggttgtcatgtggcattgttttttttcatttctgtaaccacagttccccttattcttttcatttgcttctgcagttttgttttgttttttttttcttttcctgtcatcttatctgtatgcctttgaatggcttccatgtttttttttttcagtttactaggtaatgtgtgagttgtattgtgttatctcattcctttgtaacatgatcagcataatgcatacattatctaataacattttttttctgcactatgttcacacaaagccttaggttgcttcattgttgttaagcttcacgttgttttgttcctttttaaaaaaattgttatttgagatgaggcatttgaagttgattggtgcttcagatatgagaaaaacaatttgtttgtggtttttttccatctggattttaggtgctgatttggctgattagtggatttatgcatctgaaaatgtttgttttacaggttgctttattttttgtggaccttctcagaatctt

SEQ ID NO: 58962 - DNA, 840 bp, Populus trichocarpa
  Intron number 2 from transcript POPTR_0007s01410.1 (locus POPTR_0007s01410) derived from phytozome v7.0 (chr-ID scaf fold_7; pos 800687 to 801526 reverse strand)
ttcaaccgtatagttggtgtcaaagacaaggttaatttccttactgtggcctacaccaagaattgtgtaaagctaatgatggttgtttattttgcttgttgtcaaatctgacttgctcctcatattctgttttcatgatgacccctttctgattggctgatgctcatgttatatgtactgccaaatctgctatttaacatatcgggctgctttctttaacattttgcaaccttaatcaatgtattttggaacagacttattgatattgtttgctaatgagaaatatgttgatcccttttgcattttcttaccttcaacaatgccatataatggtgggtgaagttgaaatcattccgtgttctgtgattttgtctttgtatttggaaatcagtgtagcagaatacttgatatggatataagaatggaaattatttgcttggtgatttaatatattccgaagaatataaagcctctgtggaccagcttgatcacaattattctggatgactgtctaattgtattatcttctgtttcaatcagttacatttttcatgcactcttaaatgcttcttgactcatgttgggttggttggtccccgcttcaatggttgagtttggggtagaggggctggccacttgaaactagagttttgattctcaaatcatgattaatttaacaatgcagttgttggacttatactggatggtattttccccccaccatcatttcatttgtaatcttgatactatgccttttacttctgtattttattatgtgctcaaatatgtattgttcaatgtgtgttcaatgaccaggtttatcctgaggggacacacttt

SEQ ID NO: 58963 - DNA, 536 bp, Populus trichocarpa
  Intron number 1 from transcript POPTR_0007s01410.1 (locus POPTR_0007s01410) derived from phytozome v7.0 (chr-ID scaf fold_7; pos 801674 to 802209 reverse strand)
acccctttctctctctctagaagactccatcgaaggtgggttatcattccttttctctttgtttctttcattttcttttcaaaagcatttctttgttagtattttttgaatgcttctggcatcagatatcagtatcttgtaggttgtttcaactaggttcttttcattttgtactaaaattaataaactagagttctataagcttaaatcttgctcctcttgcttcattttccttaataacctaacaaattctctcctttctttaatgggtttgtttatttgcttctagtaagtcgagattttattactttttgtttattttgttaaaatttgtgttcccagaaagcaaagttataaaattttgaggtctagattgagtttccttgatgtgtttttttgcttttgttttgtagagtaggaactgtgaaaatgggaaataaacaagctttttgattacatatgatgccgacattgttgtttgcttttggttcgttgttggtttgaccttgttaacgtgagtgattttgtgttcttag

SEQ ID NO: 58964 - DNA, 838 bp, Populus trichocarpa
  Intron number 1 from transcript POPTR_0010s15930.1 (locus POPTR_0010s15930) derived from phytozome v7.0 (chr-ID scaf fold_10; pos 14992478 to 14993315 reverse strand)
gtcagctgagattcttgcgtctttcaatttaaacggtaagttttgccaattatctttagaatttctcaactttccaatccctagataattaccgattttactgttttcgtgtatcatttgtagtttttatttttggtttttatttcttgtaagttcgtgatgaagtgaagtgaaggagagctcgttgttgtgattcaagcaaatatagatggcgagtgaagattgcactgaaattgcacaaaaaataaagaacgctgatttttacaatttttttttaattacttattttagcaccttttattttaagaaaatggagcaataaaaaagttcgttaattttagtttatcgtaatatggatagagtttatacaattttaaaatattaacttgacaacggaatttagtcgaatcaaatattttgagtgcgcgcgcttttatatctattatatatagattgttatgaatttagaatccctcattgctttaacgagtcttatgatgtgatttagctcagctcacccaaagcttgacgagtttttttgggttgaatatgagttctctaacatgtacatagggattgaaatgatcctcagacttcatgcattatccactgggaatcttttggcgttgagaaaaagacccaatgattgggggatgaatgtttaattgttccatacaaatcggaatttgctggaatggtgggtgtgataactcttcttgctggtatgggattggaattaaggggacttgttgattgtaagagcatctgatcagtctggatatgatgaatggatttgtaataccagtgtttgttctgtgatttttggcagaaggagaag

SEQ ID NO: 58965 - DNA, 948 bp, Populus trichocarpa
  Intron number 1 from transcript POPTR_0001s15460.1 (locus POPTR_0001s15460) derived from phytozome v7.0 (chr-ID scaf fold_1; pos 12281461 to 12282408 reverse strand)
aggtataattttactgtttcatgcttgtatagatgattttttaagctgtttttgaagttatttgttttctttcttggtctaatatggcttgtggatgacttgtatgtgggttttttgcctttatgtgtggagaatggttttggggtgttcgaagtttgaaatttgatttgttcttggtgtttttgttttatgttatagacccttgtaggtgggtgggtggatttgacatacttgccacgtgttttgatgccaatcagcttttttttggttctgtttgtgtggttatttctgtttttggttgagttttgatgtctgtgtagattaagtgaaggaagaacgagtttaggataggagattgtgcttctaacatgaataacatttgtgaaggaagcagttgtctttaagcaagtaacgatattttggggagtttttcattcgcttttcttttgctaactttattcctgctctcttttaacgtttaaatttccaagcacacttgtttctgctgtgcttgtaaacttactaggacactgacctgttgatgggagtgaggagccactccaatctggaacttttatcattagttctgcaagcttgtaaaatgtgaacttgcattaaggtttattaagagcattttcttttgatattcttacttggcgagcaaaggttgcagcttttgctcatagaccacctgtgaacgtagtattctatttttttctatctcctattgtttttgcacgatgtgtctgcaaatattacatgtcagtagtacgtggtgtattagctcatattctctgagcttaagattcttggagctgtctgaagacttttgcagtattgggcctttatgtaatgaatttcatatcaagtggtcttcccaatttctttcgttttctaatatatttatttgcagtttatattgttaggtgctgttccattcccttctga

SEQ ID NO: 58966 - DNA, 400 bp, Populus trichocarpa
  Intron number 1 from transcript POPTR_0010s18320.1 (locus POPTR_0010s18320) derived from phytozome v7.0 (chr-ID scaf fold_10; pos 16607707 to 16608106)
gttcactcctgttgccgaggtcaacacttcttttttcttgttagtttttttttaaaaaaaactgtattttcaactagtaagtgattgctctttttgtgggtgattaatttttattgttgttagtgagtgtaaactacttctggatcaatcgggtggcgtggttttgaatatttttggccaattcgatggtttcattcatttacatggaagatactaccaagttcattacttttgaatggcccttaaacaaacaacaatttttagctacaattttactaactgtattgtactgtattacaaatgcaagttttcctgtttgtattttgcggtggatgatttataataaagagggattctgaattattatcctttccccattcacaggttaagctttgtggcc

SEQ ID NO: 58967 - DNA, 693 bp, Populus trichocarpa
  Intron number 1 from transcript POPTR_0001s42115.1 (locus POPTR_0001s42115) derived from phytozome v7.0 (chr-ID scaf fold_1; pos 41884328 to 41885020 reverse strand)
ttattagaacaacattcggtaagtgaaaaggagaaaggcaagacatctccttccggtgtgatgaatataaccccagccccaactccatcttgtcatgttgcgccatcaaagaacattttccatggacactcgttagatcaaaaaagggtcacgatttgttgaagaaagtcttgtcaaatggaaacaacttccagatgatgatgctacttggaaaaatgctcgtgaactgtgagagagatttaccaacttgaaccttgaggacaaggttcctttaaatgggggaggtattgataagccaagaagatctcatcgggtgcctataaagaatttcaagttcatagagctgtgaagatctaaatggagtggaactagtcactatagtatccagagtatccggcaagaaggagtcaagtttgttttctgatttgaataaatgccagctatttagtaggaatcagttgctagagtcctgatttcatgtagttgtgctagtatttttagaagagtctgttagtcattcatgtatttaaactctggaattatgcagagaaaagcattcaattattcaataacaaatatttgtggtcaattctcgcccaaagaagaattttattgcaaaatatcaacagctttgactgggacctatcactctctccttgggaaattatgatgcgtccttcatcaagattcctg

SEQ ID NO: 58968 - DNA, 754 bp, Populus trichocarpa
  Intron number 1 from transcript POPTR_0001s32650.1 (locus POPTR_0001s32650) derived from phytozome v7.0 (chr-ID scaf fold_1; pos 30932191 to 30932944)
aggtatagttttttctttcttatatttattttatctgtgcatgcagttagttttgtgtattttctttattattcttggttaaaattttgatgtgggtttttggttttttaatttcagagtgagtttttttttttttttcttatggtctggtttgaagtgggtacgtgttagtatttcttttctcttctctttgaattctctggagtttttattatctttttctttttaatttttttgatagattacggttcttttggggctaatttggcgtgttcaatcttggtaaattgatttctttttgaaaaaaaaatgctgtcagattgggttcatggtgtttttttttttgtttaattattggttgtttgtgctagttggcctagaagaaaggagggaactttaaaattatgtgtttctgtgtttaatcaattgttgttgctgacaaagtttagtagaaactcttaaagtattgattagtaaagaatcagagaattaagttttgatttcttcaatccttttctgtttagatcttcactcaactttcatcgtgagaatttttgtttttgtatttaagtgcttcaatttcattgtttgattgaataaacatttggaatcttaataaggttagatcgctttgattttggtagatagtgaagctgtacatcggatactgggcacttatgtaataaagtactaataaggctgtcgttctatgttatcacttgatgtttactgggtttgttttcactagcaggaa

SEQ ID NO: 58969 - DNA, 565 bp, Populus trichocarpa
  Intron number 2 from transcript POPTR_0010s08060.1 (locus POPTR_0010s08060) derived from phytozome v7.0 (chr-ID scaf fold_10; pos 9009148 to 9009712)
tcatcgaccagaaccgcgtatgcttctgtctcttgtttatttttcttaccatatgcttactgcttcttttgtttctgtttttttttttttttgtcataaaaaacagatagccatgtttttttagaggctaatcaatcaaacttgctagtgaagaataccgattaaaaaatagagtttgtgctccttagatcacttaaatgtgagcaatttctttgcttactaaaattttacctcacttcctgggtgatgcatacacatattggactagtttgtgttatgtagcctgttggcttttatgtgcgaaattgttctgtttcttgtaagcattagcctttgaatgtttattgagcttagggtgtttaagattaacgtctcttgctctgaggaaatcagtgttgatgtttttttgtataccgaagtctgtaaggttgtttagtgctcatgaacttgttcaggatatgttattttcaaatatcttttgattctatgattttttggtcatccgtggaattggtcagcttacattgaatgcaatttgtgacttgtcttttacaggctctggttg

SEQ ID NO: 58970 - DNA, 731 bp, Populus trichocarpa
  Intron number 2 from transcript POPTR_0002s01090.1 (locus POPTR_0002s01090) derived from phytozome v7.0 (chr-ID scaf fold_2; pos 578158 to 578888 reverse strand)
aggtgaaagaacaggtatgttaatcgagcattttaattttggtaatcttaatgaacattgaatggttctttcttttatttttccccattatgtacttcatgaatttgcttgtaaggctccgtttatttctatgatgaggtctgtattttatcatagctatttatttgaaattgtttaattaattaacacatatcacagttttgtatggtaataataaaaactttttcttgaaatcttggttaaaaaaacactataatatttgtagctttttttaaatttactttttcaaaccacaacaacaaaagttattataaagccaaacacacttgacaaggaaaatatgttgtgtttgatattgtggtataatttgagatcatgttggtgaatgtgatggtgaattagccctcctctatcattttggcttggattgatttcttgaagaaatgatatgggaaaaggaaagttgccctttaattaattttgtgctcttcatgttttttaagtctctgtggcctgtttggaggtttatggttggtagttttggaacgaaaatgattgttacaagaaaatgaagttgctgggctgggattctacatgaacttgcactagcagtttgatacttgtctgttcgagacattttcagctgatgtattttgaatttctgcaagctgtttattctgttgtggtatcataatctgaggcaattctacatggttgttcaggttgagctg

SEQ ID NO: 58971 - DNA, 871 bp, Populus trichocarpa
  Intron number 1 from transcript POPTR_0001s01590.2 (locus POPTR_0001s01590) derived from phytozome v7.0 (chr-ID scaf fold_1; pos 1185894 to 1186764 reverse strand)
gcctctgtttcctcctcacatcgccttctccactcgtctccgcaattttatcaccgacctctccatttcgccgctgcttcaagtaaatggagtcttaatgggtcaattttgaacacatcttcttcgttaccaattcagcttccttcgctaccatttcttccctcttttcgtctgtctccactctcccaccctgtaaggtttatgggtttctttggttttgtttttatatgattattctctcttttattatttattgtatgcatgtttactggcgaaatgccgcaaagaaatgtttttttttcagatttagttattcgtagttcagtctttgcatgaactgttattttcaggtcgtacaatttgtacctcattctatatttgattcaataattttgcaccaaatgccaaccattttttttccgtcttgcaaactggctgacctgaaactaatgcttgtagaattattgtccaaaagggtatagtcattattgccaaggagttgaattctggaaaagaatttgaagaacccatgtctaatttggtctaacacttgactagtcatgcggtgcatcccagccatgttggatataactaacacattagaaatgctagatttcatgtaccttcccatcaaccacttttaaaataggatagagaagctgaaattttgacgggtgagcataattctgttgacttgagttcagctttcccatatgttcccttctttttccctgtaacaatcagcatgattctggaaattttccagttgatgttaaatctgaatcatttgttttttttattatgcaattgttgaattttttttttccttctaagaggattttcgctctggtgtgccttcagttggtgcaag

SEQ ID NO: 58972 - DNA, 869 bp, Populus trichocarpa
  Intron number 1 from transcript POPTR_0002s11340.1 (locus POPTR_0002s11340) derived from phytozome v7.0 (chr-ID scaf fold_2; pos 8384603 to 8385471 reverse strand)
tttcttctgggatctcctgctcagtgttcttgcaggtacccttttgtgtctttagcttctctttttttccacttccgttaagttatgtcaggttcttatatcatatattatacacacatgctttgtttgaatggtgtcttggactttatgtgcttggagttcttgtttttctactaaatttttttatgaagttcttaatttttagttgggtgtgttgtagacagctatggatatctttgtctgattgcatttcgtctgttttcatctgtccatattcgatattgtttgggaagaatattctgttctgctagaaattgcttttatttttgtgcttaaaaaagattgtagctctgtcattccttgtcagtgtcagctcaatttcttcattcatatatcgattctattgttcattcagctttcaaatgtctttaatatgattatatgtctatgagcaacacagtagagatgaagtttagttttcagttcttgttcatttttgtttcatagccgaagaaaaaaatttctatcccggattattatctggcagtttgtcttactcaagcgtatacattttgttcaattaggactgatacaattactttggcatttttggggtacaattttttattgtcatagaatgtttcagggtacgttgtccttgtgcaatgtccatccattgtgtttatcatcttggcctgaacatattgtaacttaggattttcgaaaaataaattagaaggtttagggttgtttgttatggagactttaaatactgattgttctgttttgatcattgtttccactcacagattggaattgccagttcctgctgacaattgaaggatacacactcgtttcaggacttgaac

SEQ ID NO: 58973 - DNA, 839 bp, Populus trichocarpa
  Intron number 1 from transcript POPTR_0001s01640.1 (locus POPTR_0001s01640) derived from phytozome v7.0 (chr-ID scaf fold_1; pos 1224410 to 1225248 reverse strand)
aagaggaagaagtgaatcccttctcggtaactttccttctttcctttccgtttttgtccgttctcagatccgcttcctcttggttttgttaagtggtttggtattgctatatttcgatccatgcgaagctagtgtgggcagggcatttatgtttatcgatctggatctgatatggaaacttcttttgtttaaatttacggaagggaacaagtggacattttgtttcgattattttttaattttaatttaattaatataatacactgagctgagtaactgaacatgtacttttagagcttaatttttttaaaaggaagctttaataggattgctggttggttaagtaaatggaaaaatagtatcagagtgggactaattgctgactaaattcctgcatgataataaatttatttcctggggtacactaaattttttatttgattgatgataataacggggaaggaagtagtagtcaagttatgggttcaattgatgcaacacaactgtggtgaagtaagacttggtcaatgaccggtcaaccttagtttgaccaagatttgtcaactgggttctgttaaaccagtcaaatttactctcgcaagcttttagtttttatataccagtccgagtttaaccctggttaaattttggaccaccgacacttcctgttgtccgatttgattagggaactggttttgaaaagaatcagtgtatgttgatgcaatgctcttgtcttttagtttgtagtttcattctgaccttttgttttgttgtggttcatggtgttacttgtggtctttacagaagggctcaagtgttcctgcagtaaaggcacgcat

SEQ ID NO: 58974 - DNA, 694 bp, Populus trichocarpa
  Intron number 1 from transcript POPTR_0010s14580.1 (locus POPTR_0010s14580) derived from phytozome v7.0 (chr-ID scaf fold_10; pos 14141359 to 14142052 reverse strand)
ttcctttttgcctaattccaaggttttgtatgcaatcagttgagcagcggagttttatttttatttatctaaaaaatactccattttattttgattgtaattcgttctgtttaataactcccattccccaaagaaatgctccattttattttggtgttatgaggatatgattactctagagtccagattgttttttccacatctgcgtgatttggtctaggatccaattgttcatgttgtactttcgttactaggattgccaatgtatgtttctataattcgctttgtttttgtggtgtttaatgtgcttttgttgtcatgtggttttatttttgttctttgtattcatcatcacggcttttttgaatgtatggaaaaccattttttctaattgtaccttatgggaggaagatctattgagaatgtttttccaatctcatcttttacttgccaatgaaggatatcaataaatgcaggcaccaaaattcatagcctgggatgcatatatgttccaggctgtacgagcatggtgcaataacaatttctttgtgattcattgcatcttgactggtctttttcacatgatcggttgagcatgaactttgaagaatacattctgccttcatgactaaatactcactccttgctccaacaattccatgtcaatgtgtgatttgttcaatgatgagtcgtt

SEQ ID NO: 58975 - DNA, 1019 bp, Populus trichocarpa
  Intron number 2 from transcript POPTR_0010s09420.3 (locus POPTR_0010s09420) derived from phytozome v7.0 (chr-ID scaf fold_10; pos 10254283 to 10255301 reverse strand)
aatcgtgcccacaagtttgattttttggatttgacgtaagaaactctcccttttttttcccttgctgatttctcacgcgaagatttgttttcttggttgaattttgcaactactttgttactttattaaaaactgaaagctaatgtgtttgtacatgaaattatgtaataaaggattgaacttccattcattatatagttcatttggaatataatgctctgatggattcgttatttcacttttctacttttggggggtttttagaaaactgaacctggcttcgtttttcaattggggattggaattacaaggtttagtatgggaattcgtagtagttgcaatattgtgattggttttaagttcttgatttgtggagctcaatcactatcatcttttctgtctctggaatgaatttccccaagatattctgcattgctgatttttcaaactaaatgtattatttcactgggtctgagatttatttttcagaaaatatctaaaccttcctaggctcggcttgaaaatatctttagtaatttataggaattactattttggtttgaaatcatctgaagccatcttagtctcagtttcagctcttactttcaagtgatgctctatctcttgattgatacggttatgcttctagcgatacttgtttgtgggtaaaaagtaaatgtcaaagaagaattgttttatatcatctgttctttgccatgttgattgagttttttggttgattcagttgtcctcatgcatggtaccctgttgcacgaagaaagaatcgcaagattttcctgcatgtgggccccacaaatagtggtaaaacataccatgctttgaagcagcttgagtcaagtccttctggtataatttttatcatgatttactttaaatttaaccaccgtatccacctgagaaatattaaaactgaggtgcatcagctatacattcaaattatttttgtattggttttgttacttggtaggtgtctattgtggtcctttgagattgcttgc

SEQ ID NO: 58976 - DNA, 959 bp, Populus trichocarpa
  Intron number 1 from transcript POPTR_0001s04070.1 (locus POPTR_0001s04070) derived from phytozome v7.0 (chr-ID scaf fold_1; pos 3216283 to 3217241)
ctgactgatttactccattttgtttcatcatttgtgtacggtctctctctctctctctctctctctctgtctttcacttgtatatgtttaatttgtttcttttgttttgtggggattttgttttgtttatgaggaaattgttgggttgtttggattggtgatgcatgataattttgtggagactagtgtatatatctactgattttgtgggtttttatcaagattctttttttgttttgcctcaatctggcttttcttttcttttcttttctttatatttatatgtcaagattgcatcttgatgagtgatggcatcgttaaaaggctaggtcatagccatggagaagattttaaaaagaaaagtttgcttgctatccttggaatttgctgacttgtatgtgtttgtgcatatgcaataccattgagggttatgtccattttgaacttggatccagtaggactccgctagttggtgatgattgctttttgtcttatacttgtttgttatgaggatactgcccagaaccaaagttgattcttttctcttttttgagcagacagctaatagatgcctatcaaatatcatgttatttgactaaaaagatatgtcaattcctagaagcaaacttttctcttgaggtgaatgagatctttataagtatctaatcctctcgatgatcaattagttgattaccctgaacattttagtttagctattagagatggaagatatataatcttgaaaattttcacctagattatcatttaatgctatctattgattgatttcattgtaagtgcaattgtcaataatcattctactttctcaagttcgtggttgctgaaatttcatacttcatgtggaaaacttgcagggatagaattatttttgtagattgcttagtctcttgtccatgtatgcagttgtagagtttgtcttgatagaggatcggaaaaga

SEQ ID NO: 58977 - DNA, 682 bp, Populus trichocarpa
  Intron number 2 from transcript POPTR_0001s02770.1 (locus POPTR_0001s02770) derived from phytozome v7.0 (chr-ID scaf fold_1; pos 2185071 to 2185752)
ctcaggtcatcttttcttttatctccttccttgtagcactgaatttcttcttggcctcactgagtagagtattttctttctttctttctttcatatagaacattacttggttaagccatttctgtggggaatctcgtttgcatagacattcttttactggtggttttggattagatagtgcatggctgtatgccattgtgattcgataaccattcttttttaaaattgttcaagttgtaagctgcagccacaatttaaccacgcaggatatgatggaaattgagctctgttttttttttttttttttttttgagtttcttgaatgaagaagtcaataaccttatctgattttcctttaaaaaaatatgatacaaggggcatcaccaattcaaaatgtgctgttactaggctttgtatgactctacttcgtttcttcttctgtttgctctgtcgctgctgttaccaaagcttgaaccctggcggctgatggttggggtttgtacaacaccacaccatgcaagaacaagagcaaaacaaggggcattaactactttgtttttcttctgaacaattaaaattgaatgcaatttcgtataccttttgtaacatccttacatagtttgggatatatcgggtacattttacaggaccatttgggtgaagtagtgttcgtggacctgcc

SEQ ID NO: 58978 - DNA, 711 bp, Populus trichocarpa
  Intron number 3 from transcript POPTR_0010s10410.1 (locus POPTR_0010s10410) derived from phytozome v7.0 (chr-ID scaf fold_10; pos 10927062 to 10927772 reverse strand)
aataaaagcaccaggaagcaagaaacgtatacagcgtaagggaaatgctctttttaatcgctcattattttgatctttttatgttaagaacatttaaattttataagtatgttcttagatttaaagatgaatttcaactctttaatgcatctaaggcctttgttttgttaaatcccaagagataccctattctcctgtacaataatgtcctcaaaagaaatcccagatcgtgctttttgtcattttgattttcttttttgtgctccgggattcataattagttgtgattcaattcgaggcaaaattatgcatttgctctgcaaaccaccagatacttataattgaatggctatactgatccgagttatcttctctgattttttggacacggggggataacaaacataaaagggtttagaagaaatttttttcagagtagaggtagaggcttgaagaattcagctaccctagggagcactgatataatgtagaatgcatggctgagaactcttgactttatttttgatattgtgttaatgcaaatgccacaaataatattatagtttgtgttacccatgactgaataatatagtttttttgagtttgggcatcttttgcgagtaatttcttctctttgaccctatgctcctccacccccgtcaatttgatctttcagattttccttgtgaaattgggtttacggaaacagtt

SEQ ID NO: 58979 - DNA, 1045 bp, Populus trichocarpa
  Intron number 1 from transcript POPTR_0001s19370.1 (locus POPTR_0001s19370) derived from phytozome v7.0 (chr-ID scaf fold_1; pos 17017418 to 17018462)
ttgaaggcaacatcttaatcgaacggtacgcgttaaaaatcggaatcgttctcgctagatcaatacttttaaacttctgtttcattgttttctttaatcgatcttcttctctgggctttatatatatatatatatatatatatatatatatatatatatttgattaggtggaatttgaatggatttatgtcttatttatttaattttcgtacaagggtttacatttttttttcagtagatggtgtgattttttttttggtctatttttatgtgcgcttttttgtgttgttgtgaagtgggaaattgtaaatgattgggagcatttagttcttggagaatatttgtgttgcttgtggtgagagtgaggcaattgatttgaatgtagactacatccatgattgtttaaggaaaataaacatggtaaatcatatgagcccataatgctaatgtattcgtaggtttccaagtaacactactcaggtttgagtattgagagagtctatttcaagtggaaatttgaaagctcaagatcatttctagatgatcccatagaagatcctcgtttgcttatacgaattgtggctgctagatgatgtgatacagtgtttgatgacattagggcacaaaactacaataaacatgagttttgagtcaaacaaggccatcaactgttgttttgcatttggaaagtagtatccaatttaatcaggtcctctaaccatagtggccaacagtaaataagagacgtctgtcttcatgcatagacgggagaagtcactaccttctgttctgaaagtgttttgggcacaaggaccccacttgttttgcattttcagataacatcagaccattttaaagagaaaaaagaagagtgttttcagctgctcttgtggatttcaaatttcaatcaacaagataataggtctagatatataggactttcattataagataatttggttagtgttaatttaagtttttttatgtgttgaactctaacattgttgcaggtttagtggagttccagctgaggaacggctgcatt

SEQ ID NO: 58980 - DNA, 823 bp, Populus trichocarpa
  Intron number 1 from transcript POPTR_0010s08430.1 (locus POPTR_0010s08430) derived from phytozome v7.0 (chr-ID scaf fold_10; pos 9343682 to 9344504)
ttcgcttccctcttcatcctctcagcttggcaaatgtacaccatcacttcctttctctcttttagatctctttaatttaatctacttcttcgtttcattgtcgcttgttaagaaggattcatgtgctttttatctgggccctttctcccagatccgatgctagttgttgatgtctttatattgctgttttcgcttatggttttttgtttttgttagatgttcaacccattatggaactgggttccaaacgttttaattttttaactttatcgtctcattagcaaagagaaaatgcctaatgccgtgaatcctctagcttcagtggaaaattgcttctgctgatgattatttgatcaattatttagtcacatttttagtatattgacaaatgcacaaagaagcccttgtgcattcttgaagtctgattttactgctgaaattgatcttcatggtgtctcctaaaacgagcaatgtgatgtgtaacaatgctttatcatgtaataccgtgttctgattttttaatgtttcaaaaagcatgcctaatgattggcagcttctaaactaccattttctgtcgagcttcgttatttagcttggggggtttatggtattttttgaactaaaaagctaggtgatactagcttctgtgaactttgatgttctctatgctatcggtaaactaatgcttgactaaatctatatagtcatcaatttgcaatgctctcgtacggttaactggggttgttgagcactccagcaaaatgttgcatgcttctgtattgatgttgtttgtatatgcttaggttcaacgaatttggcgaag

SEQ ID NO: 58981 - DNA, 871 bp, Populus trichocarpa
  Intron number 2 from transcript POPTR_0001s42370.1 (locus POPTR_0001s42370) derived from phytozome v7.0 (chr-ID scaf fold_1; pos 42155165 to 42156035)
aggagactaagcacactaacacaatatttaacgtggttcggcaaatcgcctacatccacgggagagatcaatattattagagatagagaaagaatacaacacacggaggaggatcacatccactcaactcccatctctcattgctacatatggcagcagctgcataaggcagcagggctgctggtggcagcccttctctttctttctctcttttgtttttgctctctctcattttatgctgcactcttggtgtctatttataggcttcaatgacagctcctcttgctcctttgtcaacagtggtggctgccaaactttgacattagacaatggttgttggctgccaccaacaacccaccattgtagcctccttctttgacaatgtcaaggggctgcaaatgctgcaccagcaaccctctttgactttcacatggcaaccatcttctttgacaatgacagccacataattggcaatattccaacaatcaccccctttgccatttatgtgggtaattgtccttttgccttttctacacaatggtatggtcaaaacataattttgacaactttcatttttgagcaaaaaatcaaacaccactttaaaccatcagctctgataccaattgttggtgggagaaaccactggtggtggctttgaaacactcggaggggataaaacacactgttttatttcaataacaaaagcttacaaacaattaacacaaaagcttaacacaatacacgccctctctctttctctctagtgtttctctctactctctccacacagaataacataagcttagcttgctatttatacacgaattcaaaacaagaaaattcaaccttcaagtgtgaaggcggctgtgga

SEQ ID NO: 58982 - DNA, 692 bp, Populus trichocarpa
  Intron number 3 from transcript POPTR_0002s11470.1 (locus POPTR_0002s11470) derived from phytozome v7.0 (chr-ID scaf fold_2; pos 8521276 to 8521967 reverse strand)
tttctttttgcttatttatacagcagtccaggttggtactcagttaaacccatgagtaatatcttattaatctcgccaatacttcctctgccgcgtcttcatttctggcacttcaaaaaaaattcttgctgcatgtttaccatttcatactgtagcttacctgcaaaggaggcagggtgaattagccggttgcaacttttcatcgcatacattcacagtttccacaacttttatcttcttttggctatctgttgactgtattttattcgcatggtaggacaatttggcggcaacaaacaggcttttaacaaggttcaaggtaaagttggctgacttaattttcagagctttggttcattttagtttaatgttgtgtaacaatatgatggcgatttcttttacactgtcatcctcaataggcatcgtgtgacatttgatattaatactttccactaagtgccttgcaaattttactttttgcttgtcaaaattcattagagtggtcatttcgagcacctacatttaaactatctagtcctttttattttttcaatttcatttgaatggactttgctgatcatgaatagagtccactggagatttaaatgccaagaatcctgttttcactatggttactgttatcgttgtatgtccttttttttaatacccaagttaccttcgatttcaagggt

SEQ ID NO: 58983 - DNA, 821 bp, Populus trichocarpa
  Intron number 3 from transcript POPTR_0001s08890.1 (locus POPTR_0001s08890) derived from phytozome v7.0 (chr-ID scaf fold_1; pos 6791575 to 6792395 reverse strand)
tgagaggtgactcatttctccccctttttattttattttttaaagcaacactgtccagttctttggcactagttgttttgccaatttgttaaagcatgtgatcagccgattggaagtaaagttcaaagtgttgtttattatccggtccgttgtgatcaaccaacatttgcgagaaatggtccttttcttttagagaccaaagcttctgtgttcatttggactgtttcttcgatcgtcttcttcttgcctggaaagtgagattaagttataaaaaagttgaaagttcttttgtgtgcatgcttactggactaactgcctcagagtaactgttttgtaggttacaagatgaaaatggccacattatcgagcatagtcaggtggcatttctgatttcttgaatctcatttggattccacaagcacctaccccacatacacaccctacacttgtacatgcatgtttagtagtacatggttccatagtggattttgcagtaccatatctaccaaagttttcctagttagcaattaaacctattctttaaacaggactctatatgcaaagatttaccttttgtgttggtgataataccatattctccttttcttcacatgttttattactcccctcttcctttctcttctctcttctctgcttagccactctgttgtccttgtgggccccaacggcgggtaccatcatcatgcggaaacttttgtaagtgccttgtcatatgtccgacattctcagtttgcctcttaagatgcagattgcaattttattatcaatgtatacctttgttttgagcagtcgacaaactg

SEQ ID NO: 58984 - DNA, 955 bp, Populus trichocarpa
  Intron number 1 from transcript POPTR_0002s25390.1 (locus POPTR_0002s25390) derived from phytozome v7.0 (chr-ID scaf fold_2; pos 22463451 to 22464405)
cataataaggtaatcttggggtttatctttcttgattttccttctttttttggaaaatttgaagcttttagggttttggattgtagttgctagttcaagtgtgatgttttttttttttggagattgtaatgtgagggtttgtatgttttttcttttttgagattaggggtttgtaggtttggttgtttttaattttgttggttttgaattgtgtggttttatgagttgcttaggttttgaacatgattaatatgggtttcctgatttcagactagagcagtaactagttctttggtccaaggtgcagtaagaaactgataatctaggtttgggttggtgatgggtttgtgttttgtggtatttgaattgaattgaggggtatagtcttgcttgctggatccttaagtgctgttgtgaactgggaatgtctgctgtgatgagtgttgaacggaatccaaagcaatgagcattatcttataccattattatgatcttaatagatttggaagtcaaggtttttgcttttgtgtatgacatgatggatgcttacaacagcattatcaacctctcgcccagcttgatcatatactatctttctttgcaaatgtagcttcttctaaaatcatagctttaagtctggtgcaacataatgcaatactgtggattgcaagtggtctggaaaaattagcattaaagatttcacaatgtatgcaatatgattattcaggttcttgtggagtatgtaattattggctggatgcaggccatatgggttatgttgtttgtctcatgccaaattatgcatgttttctttaaagaaattgtaatttaatttgtttccttattaaagttttcatgtcaattgatatatctcatttatgagaatgatttcgattataacttggatgcttcgtgacttcttgacaggttctatctgttgttgggcttcttcaag

SEQ ID NO: 58985 - DNA, 436 bp, Populus trichocarpa
  Intron number 3 from transcript POPTR_0002s18810.1 (locus POPTR_0002s18810) derived from phytozome v7.0 (chr-ID scaf fold_2; pos 14706372 to 14706807 reverse strand)
aggagaaggatcacattgagggctttgctccagaggtgagatttgttagagaatttgagttaaggggtacttttgtttttacctaccagattcaggaacttatttaatttaatgttcctagattggtgttgcttggtttggggtcactacctaaccatgagagtgcagtttcaatgctagagaatatgctttattgaaaaatttgtaggctagcgtctccaaacgcttattgctggactatattggtgggatcataacttgataatagacttaaattttttgctgttactcagctttcaacaatattttatctaatgtggcactttttttccatcgcaagaatgaattttaaaaatacagaagaacagaggttttgactgtatcatcttggtcttttccaggttgcttgggtgacaaaagcaggaaaatctgactt

SEQ ID NO: 58986 - DNA, 303 bp, Populus trichocarpa
  Intron number 2 from transcript POPTR_0002s18810.1 (locus POPTR_0002s18810) derived from phytozome v7.0 (chr-ID scaf fold_2; pos 14706880 to 14707182 reverse strand)
caagtaagttagcccttcccataatatcttctatttatttcattttagtattttctgtgatacaacgtctttcggcgattgattttctattgtttattctcgttttacataaggtatttttgaatataggaatttgcacccagtaatgacagttgacttctacgcagggtttttagtttgtaaagctgtagttgttttttctatattatatcattttgattaatccttgctctttttattttataggtcatctacgtaatagatttctcaatatttgagatgtcaatctgcaggcattctttg

SEQ ID NO: 58987 - DNA, 847 bp, Populus trichocarpa
  Intron number 1 from transcript POPTR_0007s10300.1 (locus POPTR_0007s10300) derived from phytozome v7.0 (chr-ID scaf fold_7; pos 10134229 to 10135075 reverse strand)
agcgttgttccactcttacatctcgactgtaaggcttgctgatgttttttttagaggctttgactacttcaagtttgtctttgggtgtgcagatggctatgttcagggtgattatcatttgaaggtcgtggagctagtgggtttgattggattttggctcggatagggtggtttggttgttgttggtctatgggtgtgttatgggccttctccttccttagttagtggggtgtgcccggattttacatttaatgcacatcccattgcaatgtacctggttgtttgatcttaattgggagagtaggggctggtactcttggatttgatgtttgactgcttgagagcgacattcttgagtattaaccaaatgaccagaaatttaaagagattggtcacagagttgaaagtattgtcgaatgtttcttttttttttcttccttagatattttaacattctctcttatttgataagctaataattgaagaaattcattatgtaacctttcttatgagatgtttgcacagttgaattcctgaaaacactcattttatgttgtcatttgccggtatggctcacttctgattttaagtgtcgctcggttaaagatgttgatttaattatttgtgatgagatacatgacaatgacaaagatccaatatgatatgatgttgtttcacggtttatgatctatggcccatgtggtttacaaacccagacagtaaatgcatgaagaaaggaaagtgttcaaagtgtttcccaaagaaaatcaaaagtcaaacaatctttgatgataatggtttgtttattatagaagaaaagaacaacgtggaaaatctattattaaag

SEQ ID NO: 58988 - DNA, 719 bp, Populus trichocarpa
  Intron number 4 from transcript POPTR_0001s13020.1 (locus POPTR_0001s13020) derived from phytozome v7.0 (chr-ID scaf fold_1; pos 10105128 to 10105846)
tggacttcacgtttgaggatttttttgcggtaaatctatcatgtgcattctgttactctatgcaagatgtacgtttattcattttttaaaacatttttgaactctttcaatcttctttttttgtgtgccggttatgcaacaaagactttgtttaagaattagtccgtggagtgaactggagtcaatacatgtgcaaatgtacaaacaaattcaaaggaaactcagttttagaatatgatttggacatttgaactccatgtttgtaagttctgttgatttgatgaattggagttataatttcattgctggccccttcagacatgaggtggacttctttggaaatatggacggtgatttaaagaaccacttaaatagctcgttcacataaacattatggaaaacaaagaaggacgggtatatatattttttttatacgtgaggtatggatgaatttagttaagttaatgcaagctcttaatgttatattgagatgctgatgccaccaaaatattttctatcttgtttcatttcctgctctattcttgagatgagaagattgatttttcttgtgaacttttaagcaatgagtttttaagtcgtgacaagctttcttcatagaagcttctaccaaaccgtacctgccttcaaggctttcttgcatataatctgtaactcagatttcattgtgaaaaatatgcagttatttcttgagcagctgg

SEQ ID NO: 58989 - DNA, 450 bp, Populus trichocarpa
  Intron number 2 from transcript POPTR_0002s18130.1 (locus POPTR_0002s18130) derived from phytozome v7.0 (chr-ID scaf fold_2; pos 14014778 to 14015227 reverse strand)
cgccggcctatcctggtatgttttgttcctcctctccttacgtttaattcatggtaattgttaaattttattctttctggttccgctgatacttgctcatgtttctgtcattgattaaggttaatcaaacactgtgggaaaattaaattgacaaattgagagaatttaggaaaacatgataacatgctccgtattcattattgaatctgcctgaaacttcaaacctcgtacgaccaaaatctgaaatttgaggtgccacaatctaaaacatgacaagccacacatatactttacccataaaaatgttttcagtgaacccaaaagaaaagaagagaagtttgcagagaatcacaggctttacaggacaaggaaaagactagacaatgaaagacttggtcatagatgtgggaactggtttctcatgcaggtgtggagcacgtgggaggagat

SEQ ID NO: 58990 - DNA, 459 bp, Populus trichocarpa
  Intron number 1 from transcript POPTR_0001s41680.1 (locus POPTR_0001s41680) derived from phytozome v7.0 (chr-ID scaf fold_1; pos 41392405 to 41392863 reverse strand)
attatttatttgaatttggtggtggctggtggcgcgtgagggtgcttcttggaaggtgaaaatcaaataaaaacttattgaattgcgtggtttgaaagaagaatgaattccttcttcttcaattcaccctttccctttctttccatcagagttaaataagatattcattttggagaacatcttcatcaggcaggtaacccaataatcttataatcttttcatttgtcgccatgatttctcagttataaataatcaagttctttccttctttttttgtcttcatgtatgtatataatcgtatccatgtttattttgttattttttacttctaaacaagaagagtttgttcaagctttttagcttctttttttttcccccaattaattcaactttcattttttttttaattcgttgtttggacaaatttcttatagagacactgaaggataaaggagaaaa

SEQ ID NO: 58991 - DNA, 982 bp, Populus trichocarpa
  Intron number 2 from transcript POPTR_0001s34480.1 (locus POPTR_0001s34480) derived from phytozome v7.0 (chr-ID scaf fold_1; pos 32598747 to 32599728)
gacggtactgtaatccatctttgattctttgttttttcttcattctgctcttacttacttggattttggactttctaagaaggacccgactgtttctttgctgttaatttttaccctcttcattgttcctgagccgttttaggacagatggtgttatagccttaatcgattatgttatctgatgagtgtttgtgtttatgccagacttgaattactttcgatgtgtaacaattaatggtagtcggttttttttatatttgggtttctgctgcaaacctttaaatggacatgaataatgagtgaaatgaacgattttgattggacagtatttagattttgtgaggaattttgcaatgatcttttattcctttagaagctctactgctgagagaagcgacctcatcttcctgctattgtttgacattgttcaagcccaacaacaattgtttgtaacaaatttattgccgatttcggtttacatcaagttgtcctttaaacacttttgttctgtgctcaaactggaaagttctcctcacatcaatcatgtgttcagctaaaatgcgtgacgtctaatgctttaaggtgttccttaagagatgcttcttgattgggttgtgaatatgtgaaaagcttgtttcttgggattggtgtaaattctcttgtccattacatcagtggcagtttttgtgagaatcttaattctttttttctttttttgttagggattattaatggcataaattttagtacaaaatatatgcaaaatgtaaaccaattaaaccgaggatataaaatataatttctagaactagggagcaatctataaatgtagatagagggtttgtttagtcatttttcctttggtttaaatataatagtaaacatagtttctcctcaaccctttttttcaaataaatttattgtgtgaagaaatttctcgcgtacagcttcagtactcaagtggaaaagatacgttggaatc

SEQ ID NO: 58992 - DNA, 765 bp, Populus trichocarpa
  Intron number 1 from transcript POPTR_0002s25000.1 (locus POPTR_0002s25000) derived from phytozome v7.0 (chr-ID scaf fold_2; pos 22217737 to 22218501)
agagatcctgtggttttggctacaggccaggttagtgtttcttctaagggaattttgagtttcactctgtttggttcccaagaaaacgcaaaaaattaacagatttttgtgtgcgtctgtgttggtttttcagctcttggtgagctgggaaacgttgtaattacctgcattttttctacattaatttgagtaaatggtgatgggattttagtcttttaaaataaagaaccaggtttcaaaatctcgaatcgcttctttgtttttctgttttaattatggattgattataatgagtacttttctggattcccatttgtgaatttgggtagaaaattttgattcttgtcacttggccctaatagtacactatcttcaattcttgatcagtttagggcctttaggcagctctttgactgcacataggggccagaaagaaagggggtaacgtaattggtaggagtttctttttctctctctctctctctcttattttctcagaaaccaaacacgggtatattgttctggtgtatgcgtgtgagtgtaaacatacagtgtttaggtggtttatagtgaatatattttttggtaaaatatttgttaccggagttcgaaatctgttgtggggttggtgggatcaaagtactgtggatgagatgagttcataggccatggcatgagatgagttcattttctgctagtccttcatatcagcttcttattggatgttaatttgttctactttctatgcttgtactgttcagacgt

SEQ ID NO: 58993 - DNA, 551 bp, Populus trichocarpa
  Intron number 1 from transcript POPTR_0007s15250.1 (locus POPTR_0007s15250) derived from phytozome v7.0 (chr-ID scaf fold_7; pos 14857611 to 14858161)
cgagtatgtattagcactataattctcttaatgattttgttctatttttcaaaagtttaatgattatgttccagatgatgctgcatgcatcatggcatttcctggtttgaatctgcagggatgtttgttcaggaccatgagacttaatttgtttcattgaacacttatgcatctccgatctgttgaaactattgatgatatttgccctctcctacatgagtaatctttttgttttttttttttgttttatcatctatacaaatcatcaacgtaaagtgaatgatttcatgtcttgtctttatgacttgcaactttgatgttcttctacctactgttcaagattggggtttgtcaatgcatagaaaaaagcctttgcaagatgtgttgggctgcatgtgagacatactggtttgctttataagatatagcctgttttttatggcacaagttgaagaacacaaagcgggtgaatagacgccgacgattctgagacatcgaagctggctacacttcaagttcagaaactgatttttcagaagattatcatcatt

SEQ ID NO: 58994 - DNA, 423 bp, Populus trichocarpa
  Intron number 1 from transcript POPTR_0001s11220.1 (locus POPTR_0001s11220) derived from phytozome v7.0 (chr-ID scaf fold_1; pos 8702190 to 8702612 reverse strand)
atatcaggcttacacttctatatcacactgggcaggtttgttttttttgtttacattaccaaatacatgtcatcattatttaagtgaatctttaatattaaatgatgatcaatatggattattgaagttctcttgttttctttggagatgaagggagtctttagcatgaggagctaactagtctagttatatttcatgggctattcaaggaaattagtttgaattactgggttttacttctttcttggccttgatcatctgtcatttgcaattgggttgttcttgtttttcgctttcttgatgctcggtgccatctttagctgttaattggttccgtcttcaactaaagatttgatctttgcaacttttttttttctcagttttgcttttgctgcagatttcttgtcaaagaaaagatagcaa

SEQ ID NO: 58995 - DNA, 482 bp, Populus trichocarpa
  Intron number 1 from transcript POPTR_0001s35770.1 (locus POPTR_0001s35770) derived from phytozome v7.0 (chr-ID scaf fold_1; pos 34113680 to 34114161)
cgcaggccatcccgatccactacccgtgagtcgtgaggattttttttatctttctagattcttgtccagtctgtcaaacaccaaagaaagggaaggagaaggctaggctagactaggccagcattgaggctttaatgctttggattttgataaaagggaaagaaaatcaagctttctttggatttcctatgaaatcttctattttcttatcgaacattattgattgttcccgtctatctcgtttttaaccatttcaattttcattgtaatgcatggatttgaattatttttagaattcttagggttttatgcatggatttgattaacggtgtggatattccggatgactttaggtttaagctttgcaatggtggtatgccggttgctgactagtgcttcccatatctttttttagttttggaaatttgtttttgaagttgactttacttggaaaatattgcaggtcgagaaaacttttaaag

SEQ ID NO: 58996 - DNA, 579 bp, Populus trichocarpa
  Intron number 2 from transcript POPTR_0001s09610.1 (locus POPTR_0001s09610) derived from phytozome v7.0 (chr-ID scaf fold_1; pos 7319168 to 7319746 reverse strand)
gacctaaagaaagtaagcaatcaaaatcttcagtacccattatttctttttactgttttctttctttaattcaactttttcttaaaaaaatgtttttcttggtgggttaatttctgttttttcagttgattttttatttattcctgttgatccatgtgtatactttggtttttgtacttgttcttcaagattgcagtggataagaagttatatttccttcttcttttttctttgatgaattgagccctttatatttcttttactgcaggtttttcttgttgaagttgagttttaagcagatctttttactattgatgcatgagaagaaacatgtagtttttcttttactgtaaagtagagtgtgattttaatgaattgcactgcacttcttcttcttcttcttgttcttatattggttgcaagtttgttgtttgttgattttcctcagcaaagataaagtttaagtttcttttggggttttttaattatggatacagataatttattatctcttctcttctttttctttgtgggaacatggcaggtctttatcaaggaggtgtgtggaagataagagtc

SEQ ID NO: 58997 - DNA, 1012 bp, Populus trichocarpa
  Intron number 2 from transcript POPTR_0007s10680.1 (locus POPTR_0007s10680) derived from phytozome v7.0 (chr-ID scaf fold_7; pos 10735736 to 10736747)
tggatatcaatctagggtaatattgttaagcaatcatctactttttagcatctttacttggtatttgttgtactgaaatatgtgcatttctctttcttttctttttttcttttaaaaaatgattgatccaagtatccgttttcaaacatctctacagactcttactagcagatcatgcttctctttccatattgcaaatcaagttttaggttaagttccagtgtctctggtttgtatgaaagtgttttgttagattaaagatatttctggctgcatagaactttgaagtgaaataaagtgttggttttgtttagttagcatactattcttgttggtgcctggctctcaagatccatcctttccttcaatgttgttgtgataaaaagaatatgattgagctccacctgagaatatgttaaaatgaaatcagcaccatagaattgagacagtcttttgttgaaatattatgtaatataaaatgatgaagctttttccatgtcatgaattggcttaaaagactttaaatgctgcagtgattaaatggtcaagtgcagtgaatattggaatactaaatcaaacactttcgaagcagttcaaaagtacttagataagccatgtatttctacacgtaagagtggttgatatactgttttttctcgaaacaatagcggcattaaagacttataactttcctttcagttcttacactcaagcccatgtagattaccttgaatttgaaacgtggaaaaagctacagaaacaaaaaaattctacttatgactggatgaaagttgaacatgacatggggacaaaatctatgaaaattgttcctgaccatgttatggctttccagcctatatgggagcttcttccagcccagttgcttcccttgccaccgatatttagaactatcttagtcacattgccaggatcctgtttaaagtcttctaataacaaaactagtttaatcactcttgacttcatgagagttctggtgatgggatttgtgcag

SEQ ID NO: 58998 - DNA, 676 bp, Populus trichocarpa
  Intron number 4 from transcript POPTR_0001s35120.1 (locus POPTR_0001s35120) derived from phytozome v7.0 (chr-ID scaf fold_1; pos 33380585 to 33381260 reverse strand)
gcatttgttgttatctttttcaggttatattccaggtacatttctttgtactatcaagtagttttagtgatacagagaagggctataataaacaagcttcatgtcatgtttccttggttggctactagcctctagtttgtgaattaaaccttttgatctctttccatgaatctaagttgctgttgttcagttgttctttttagttggtatctgtatgttttacagatggtcttatattattttctccacaactttattcttttacttttcttcttctttatcttgccttggtccaggtatgcaagtttagctggaaaaaaatataatctgtgaaaaaatgaatttttaataaatcttgcagtttatccttggcagggttttgataaaccttatctcatacatattccgagatctttcatattggtgggcacaaattgactctttcagggttctgatttcctgatccagaactttaaatttcagacaaggtttagtattaatacagctattgggcatagatgcttttgatacttcagttgtctgctcttcgaaattttcctcttagattgttttcttttaaatattgaaaacactttgaggcatgtcatgagaatattatagcttcatgcagttgtttgttatctaattagttttctgtttaatctctaataaacag

SEQ ID NO: 58999 - DNA, 960 bp, Populus trichocarpa
  Intron number 1 from transcript POPTR_0007s06460.1 (locus POPTR_0007s06460) derived from phytozome v7.0 (chr-ID scaf fold_7; pos 4828572 to 4829531 reverse strand)
gaaggttcttacatgtttattttttcatattaattgtggtttctcttgttctgaaatttaattgttgtggccctaggaaatatgtggagttattgagtgtggctgtttgcttttttatgttgctaggttgttgactgcaggctatatagaattattttgaaaagtgaatgcgtaattaatgctttgttattgtgtttatggagattgattggactagttgtgagttattttcatggtgtttcagtgacaggatgtgcgattaagaaacttttttaattggattatgacaggatatgtgtgataagtttggattttaggacttgttatggtgtgtgttattaagttaagatgtcattttcatatcagatcaaagggactctgttaattaccgtcattaaaaaattccttcccccccccccccccccccttttgaggttaagttcttacatgagaagctttacagtgaaggatttggtaactcattttctttgaatgggctgaatgttccaaaatttcaattagttgttgcctcggctcaatttttgtttgcttcaaagtgctatgctaggttcttttgctttgagttagataagaaagaggaattttaatgcagtcggagatgggcttgtagcatacggagatttaattgaggtatctagattaggcaacagaagaaattgacttgttatttatttctgtgaaagtgatcctcttctcatggcattagatggttgaaagagtacatcttcccaaattctgtagaacatagtcaggtgtaatgggtaattttattcttgttagaggatatcaaagatggtgaaatctagtgctgatgtgaagttgagtgactgtgcctcaaagctctagaagtgtgctttatctcattgttgcttttcttccttttgttgatcttcatctcacaattttgtgattaaaattgtttgcatctgtacgcaggtg

SEQ ID NO: 59000 - DNA, 699 bp, Populus trichocarpa
  Intron number 1 from transcript POPTR_0010s25270.1 (locus POPTR_0010s25270) derived from phytozome v7.0 (chr-ID scaf fold_10; pos 21027203 to 21027901 reverse strand)
ctcttgtaatagttgttttcgaaagtttattgcttatagaagatgtttacttttaattgtagttattgagttgtctgattatagattaatggattagtattttataattgcttgatataaacaatgtgtacatggggcttttgtatgctgaggatgaacttgaattctttcatagttgtttgtcttctgttgtttccaagaatagcttgtaggaaatgtttagttgtaattattgggttatctaggaatagattaatggaaaataactctactctaaggatatgctcttgcatttgttagattatgtaagaaatgaaagcgatacttttggttttgactggtgtctattttgttaagccaaattgatattgcttcatcactctgttttttttttcctttttcaaaaggttaatagcttgtgggagatgtttagtgtttttttatctggctatttagcaataacgtaacgaagtagctgaagtaccttgacttgagctattatgcacatgggttgttgcgttgcttatattatgtgagaagtgaattaactgaatgtttggctttgtaacaggactgcaatggttaggttttgccttgtgtataatgtgttgagttaaattgttattgttttgttactctggttttggctgctgcttaatgatcagtggtgtttaaaatctacagagaaaggccaaagaa

SEQ ID NO: 59001 - DNA, 638 bp, Populus trichocarpa
  Intron number 2 from transcript POPTR_0002s22600.1 (locus POPTR_0002s22600) derived from phytozome v7.0 (chr-ID scaf fold_2; pos 19367282 to 19367919 reverse strand)
actttgtttctgtcgttgctttccagacctctgtaagcttcgttacatcaatttcccatttgtagtcgtagtagtagtagcggacgtagacaaataaacaaatgacaggctatcaatcatcaaccaagcattgtagtttaatcacaacagtttattcatactgtaggaaatattgtaatagacatgaactatgtctagctgcattaaaagctggatgtactgggaaactacatgaaataggcctaatatatatgacggatcctttctgacaaaatagtggaagaatggaaatctttaaacgtgtaagaaagaagagaagggtcactttgaagttaaacattagaaaaaagggaaaaaaagcaaaggtcagtagctaaggttcttggatcttagtaattcaatagtctgacgtacagactgaagtttgttatgcaagttcacattttaaaattttaattttgatccaaattgtagatagtatatctttagcaataatttgctcacaattttttttttttttttttttttgtctagtgttttaaatgtggtaggaaacaaacatatgctacacattccagttaactgctattcattgattttgttttttgttttttccttattctgatgtgactgtgaag

SEQ ID NO: 59002 - DNA, 387 bp, Populus trichocarpa
  Intron number 1 from transcript POPTR_0007s00690.1 (locus POPTR_0007s00690) derived from phytozome v7.0 (chr-ID scaf fold_7; pos 348337 to 348723)
gcggtttttcctccttcgaacttggaaaggttagccctgtctcatttcatttcttggtctttgaataatgaaatagagttttttaaattaattttgagatttcttgttgaaattgtcattgcccatttgaggttttgtaccaaaggagaacgtagatgttgaacagtctaaaattgggtttgagataggaattgaaggacaattttgaattttttgagaactttcttttttctttttttgtcacaaacatgatgatgatacagtattcttctagtgatcatgaaggagctttgttttggatatgtaaaaatgtgtttctgtgtattccaattctatgattgatatggtgatgtgatgttcaaatatatatacagcctctaactggat

SEQ ID NO: 59003 - DNA, 569 bp, Populus trichocarpa
  Intron number 1 from transcript POPTR_0001s14750.1 (locus POPTR_0001s14750) derived from phytozome v7.0 (chr-ID scaf fold_1; pos 11618300 to 11618868 reverse strand)
gcttggacttggagtttatcattctggggttcaaggtttgtactgtttagaagactactggttttagcatctttttttcaatctttgtcaagttgcatacttttcaagctttcttttattcttgaataagttgcattgctagttagatctgtttgtgtgttctgttctgttgtctggattgttttctgcgtattggtgcattgaatcttcaacgaaaagcagtgttctttgaagttcaatcttttcgaatgtttgatatattgctttaggagctgattgtttggttgatgagaatctgcaagaaattttgaattcagaaatttgggttttcctttctggaatcatacaaacaagaaacttggtaaagttttggcacagtgaggttcttttcttttggaaatgttcagagattcctcccttcatttctacacttttctcaatggctgaatacctttttcatggcttttactttccttttttgggttttttttctttttaatgttctcaatctgtttatattaaaagaacaatcttggtaagattaaaaccgggatcatgttatgcagttc

SEQ ID NO: 59004 - DNA, 649 bp, Populus trichocarpa
  Intron number 2 from transcript POPTR_0002s09060.1 (locus POPTR_0002s09060) derived from phytozome v7.0 (chr-ID scaf fold_2; pos 6420992 to 6421640)
cagtgccaacggttggaaagccttttgatccttctgtaagagagaattcctggagtttacctcattttgtacattgtgttatgcatgatgccttttcttgttgcttttggtcttggttttatgaatgatgccttttcttgttgcttcttgtttttgctgatgattaatcactggatatgagatagtacttagggttgtgattaattttggtatatactttatttttatcatctctgcatatgcatgcaataatttccagaactcaatttatgcatgaataaacaaaataaataaataaataaacaatggactgccaatgttgtttgtccaaattgagaataaattgaaattgggtgaattttgagattttgattggcagttcccactgctaacctctgcttcttagatttacttcctgattagaaagtcaaattcatggcgctatgatgtttgaatcaaaggaactatatttgcttttgctataagagctgctatactgtaaatggttttgtctgaatcatcagggaacatgtcttcgggaaggtaagactggaataatgcttgtaaacttgagtaatatgggtgttagctcatgaacaaattcaatatgccttctgttaataattgagctcttttttcttgtagctgc

SEQ ID NO: 59005 - DNA, 451 bp, Populus trichocarpa
  Intron number 1 from transcript POPTR_0010s15810.1 (locus POPTR_0010s15810) derived from phytozome v7.0 (chr-ID scaf fold_10; pos 14926018 to 14926468)
catcggatctggggttttctcgctttctcttcaaggtatttcttttccactccctttcttttcatggtttattaaaagaaaaaaaaggatggggtggtttgagtttgtgtatttgatccatcatttgcaatgtattgattggtttttgtggaattgatttgtgcttcaaaatttcttgttcctttctttatttgtcacgcttaatgggttctatgtttattatgaagttttaagctagttacatgggtgcttttttatttgcctgttttgtgaaggaatgttaatgtcatgctatttgttttgccttttttttttaaattatgtagattttgaggactgaagcgaaggctctagtttttggtccattactgcatttgggacgtggctaattttttatttcattaatcaaaatgcagggttttgatagtttttgtgattaatttttagattg

SEQ ID NO: 59006 - DNA, 832 bp, Populus trichocarpa
  Intron number 3 from transcript POPTR_0010s15810.1 (locus POPTR_0010s15810) derived from phytozome v7.0 (chr-ID scaf fold_10; pos 14927295 to 14928126)
caccattctattctgcctagtgattctctttcaaggtaataatgctcatgcaagattttctcacagtattgctgctttggtttttaacctatgcgtcattccacggtttggatacaaatgttatgtgggtggggacttatgcatgccttatggttgaattccccaatcattcaaaactatgcttttgaattctttgaactggaaagcctgcatttttgccccctattgtccatcttcagcacatgtttttttttgctatagctccactccatatagtttctttctcaagagatgtttatttgtgaaaaggtgggtagacttctgaattttgattctagtatactgttggtcttattctgaaacagtttttttcaattcttgtcgagagtgtataatgttagctatatgtgagaagagttctagttttcaaaatgactttgaatcatgttttagtgatgtccatctattttctttttcttgcttcctctaattttttgtatataattttttggggcttttggcaaaagatgattaaatccaaggctttctcttttttcctctcaatccttcttttcttggtttatcatttctttaacgatccctattatctgtgcttcccataatgtttaacagttgtaaaatgatatttttgcctggctgccattgcaaattgcaattcattttttgagaggaagtttcataacattatacctaataatttttagcaagtgatcattcctagacagaaatcactgttgacattttttttataaacttttttattcattttactaacttgtgctcttaatgccatgctattcattttgcagga

SEQ ID NO: 59007 - DNA, 852 bp, Populus trichocarpa
  Intron number 1 from transcript POPTR_0001s40860.1 (locus POPTR_0001s40860) derived from phytozome v7.0 (chr-ID scaf fold_1; pos 40454361 to 40455212)
aaggtatgaatggatgtatatcctttgtagtgaacaagttattgatttgagatcttcaatatttcaaccattatatatgtgtttactgctttccctgttttttcttctttttatggccttgaattcgtgagttttttcttgcttgatctacgtgtgtttggagacttcataaatgtgcttttttgatttataattaaagacatgattttttgatttatttgtttggagtgatatggatcagatggggttagagatagtgcttattctgtgttcatagtaagtcttaacatcattccagttctggattttatggggggtactctcaacatcattaaagccagttgctaattatttgttacagtagctaatttattgagaattgggaactttcatgatcatacgaaattaaagtattttgacattaacaatcacaatttgcattcagagataaggaattgttgaacaaattatgttaatatcaatgtgtagtgcatgctgagatataatgtcaatgagatgggatcttacaatgtgttttattcggaaggaacctagaacatggcagttattattttactttgcaattgctatctttaaccaagttgctataatttctgttcgggaggaagacatcacgttcgaagaagaattgtaagactcttttgttccaaacaattataattatacaactatggaagtatttttaattaatatgtttttgtggtttgttcagctctttgacattgattacacatgcatttttcattggattactagccgtgtgagttacctacaagtttgaatgcacatattgcaggaaaaggttggattaggttcttctccagattgtgg

SEQ ID NO: 59008 - DNA, 314 bp, Populus trichocarpa
  Intron number 1 from transcript POPTR_0001s41030.1 (locus POPTR_0001s41030) derived from phytozome v7.0 (chr-ID scaf fold_1; pos 40675288 to 40675601 reverse strand)
aggatcagaaatatccattcttggtgctgctacaggtacttatccctccctccttctctctagctcttcttttaaatggctgtatataatattattgtgtgtgggcttttgttggttctgatgcatgtgttgtttttttgatgaaacctctgggtacgtgtttctaattctatattgtaaaaagggtatcttcagtttctctccttttctggatattattgtacttgtctttgatttttttttttgtgctggtgcttgtgttgttttggtgttgaacagtgcacgtgtgaggacttagttttataattccggtg

SEQ ID NO: 59009 - DNA, 690 bp, Populus trichocarpa
  Intron number 1 from transcript POPTR_0010s16450.1 (locus POPTR_0010s16450) derived from phytozome v7.0 (chr-ID scaf fold_10; pos 15411886 to 15412575)
gcaagtatttctctttgattctttcttttttgttggttttgaaccctaattcttgaacttgagttaaattatggtttttaagagcaattgccatgtccccccccccccccctagaggtttagggtttatggggctattggaaattttgtatttttaagttgatggaagagcgaatacacgttaggtttgttaacgaaaagcgacgttctttgtacatgtgaagggatgcaaggtgtggtgattttgattgagttagcctgaatctgttgacaatggtggcttgggctgattattaattccagtgtacttgcatgttctaggacgttgctacattatgttggcgctggcttcagtttttaggcgttcgatttgaggtaggaaaggaaaaatattgcatcaccaaagaaaaaagaattttggactctcaaaataattataattccagtggaaagaatagccttttgatgtgaaaataatgaacacgccattgcttccctttgggatgaacacttgcaattagttgtttgaaacttggggggtttgcaatcattctcatgatgacatttcataattttaaacgttttttttcttaactatgaagttccaaatttgatcttatgtccgtgggattgaatttgttcctgggctgatgcggacacatggtttgaggggcagcagcaagaggaggaa

SEQ ID NO: 59010 - DNA, 938 bp, Populus trichocarpa
  Intron number 2 from transcript POPTR_0002s05820.1 (locus POPTR_0002s05820) derived from phytozome v7.0 (chr-ID scaf fold_2; pos 3825162 to 3826099)
ggatcttccaagtaagacgtcgtgctcttttcaagtgtatatatttacctagtgatgttcatccatcacctttttagagttcattcttacctaattagctagtgaaaccacagaaatctttcgtttctcgcttgtgatcaatcgcatccgtgtttggtgcacagaactagagcttctttctgccattcaaacccaatcttaaatctcatggcctcttttctgttcttctatatatatatatatacttctggtacaacattcaaaaaagtacctacgatagatatattcaactcctttatgctaattaagatcagcacatgctgacatatgtatagttcatgaggtgtccagctgcagaaacttcaacctgatctcaccgggtctgaccgacaggaatggtgtgtgtgtgtgtgtgtgtagctagagagagagatctttttttttttatgatatagcatgagatcttagggatcataagaactttggagtcactatacggtaattatttatccaaatctaatccattgtgtttcagaaaagttgcttccgttaccaatattagccagtgccccggaggaccaaaatcggaaacattcatgagtctaatacattcgatatgtggccggatatgattcatttactttaaatatgcagtacatcgatccggctgtaattgcaaaaataaataaataaacaaaacaattatttatcattccatatataaaaatgtaattaaaaaaatttagagtatgtaagcttgcggaaaataagatttcctccataaagaggcatctgcattcagttctcggtgtaacagtatgatttcaattatgcagatcatcatatcgtatttgagttcattaattacatcctgataatgtcgttggctttgcctctaaccttcttttttctactttttttacatgaagaagttagca

SEQ ID NO: 59011 - DNA, 620 bp, Populus trichocarpa
  Intron number 3 from transcript POPTR_0001s02200.1 (locus POPTR_0001s02200) derived from phytozome v7.0 (chr-ID scaf fold_1; pos 1655953 to 1656572)
agcgtcaaccggagaggtcatagctgctattacaagtgatattattgttgtgcaagatgccatttctgagaaggcatgtattcctttgctaataatatatccattcttctctcttttttcttttctttttctctttcaatatgtgtgtgtaaatggtttttaatttaaacgtatctttgactccactagtatttgttaagaatagatttatttttttgattacttccacaaattcagtttgcctgatcagtccaagattaatgggttttcattgtttagataaaaaaaaaaaccagcaatgtatgcgtcagctgttacactaaggatattatgagacctagcgatatccatatctgaacccaaaaaaaaaaaagtattctgctaatttttatatatggttattgggccactcaaaaattgtggagctcaaaaaagaaaattagcgttttggaaatttggggatggaactattttggaaaggtgctaaaaaccgataataactgaagtttgaaccactgcagaatggacagaccaacataatccacaagagtagttttgatgagaattcaaaattttgaacgttagcttttccttgtttctggctaactttcttgagtgcc

SEQ ID NO: 59012 - DNA, 774 bp, Populus trichocarpa
  Intron number 1 from transcript POPTR_0010s02050.1 (locus POPTR_0010s02050) derived from phytozome v7.0 (chr-ID scaf fold_10; pos 2366923 to 2367696 reverse strand)
gtttcctttcttgtgaaacaaaccagtaaattcctttcttctcttgtattttttgaattgacaacatacattaattatcctttttccagggattttaaggctgcattatttctggttctgctgcatttgcacgtgcttggtttaatttattgggttttgagctccaaagtttcttgctttacttgtttcttgcccaatttggacacagttagggtttaatttatgaggtttttgagttccaaagtttcttgctttagggctatggctttatggggcgtgcctagttttatgggtggtttatgttttgaccattacaatggtggcatggttggttagaaacagagtatttcaattactgaatgttggtttgttggattgccttttcatgtcatggttttttatgtcaaccactgatgtttgcttgttagaaactatttgattttttttctttgaaacttgtgcttatggatgcaaagtttgttactctggacttggaaatggttgaaatcggagaggattggtcttttggttttcagcagcagatttgtgttttttatttcaggtttagatttacagggtgaatatttgtgaaaattgctcaataattcttttaatgtgtttatgtgatgccgattccctattgttgtctgcgattcatataccagtgaagcctacagtaaatgtcaattactctgacagtacttctcttgttttccaagttaatcacagttcttatttatgttccacctgtacaaatctgcagagcccgtgtgg

SEQ ID NO: 59013 - DNA, 640 bp, Populus trichocarpa
  Intron number 1 from transcript POPTR_0002s08500.1 (locus POPTR_0002s08500) derived from phytozome v7.0 (chr-ID scaf fold_2; pos 5937077 to 5937716 reverse strand)
ctcttgggtcactttgcaaggctagccgacctgaggtatgttgtgtttatgttcaagaaaggctattttttgttctctttctctatcatttctcgagtctaaaattggtcttgagttctccgctgcataaaaaatgctgtttcatttttgtttagtttctctttcgggcgcgtttcgtctgcatgagtgatagatcccatgttgtaactcgtaagagagtatcctctagttgtgtttgatagatcctgcgtagtacatcccaccctctcgttttctttgaatgctttctgtgagagggaatgtcgataattttcacttggtttaatttattttctctcgcgtttttttctatatgatattcccttttcagcctcgaattgctctttatttctcttttttggagggagaagggaacaatttttaccagcttggtttgtcttttcttcttttacttttactttccagaaatgcaaagagggatgtggtgggtgaatttttcaggcactttttatctttttttgtctgtcattgtttatgtcacttattttcttatcttttcttttccttgggcaagaaagagctgtttgatctggggtaattatcaggtggaagtggaggcactggtaattcaaggacccaa

SEQ ID NO: 59014 - DNA, 520 bp, Populus trichocarpa
  Intron number 1 from transcript POPTR_0002s23720.1 (locus POPTR_0002s23720) derived from phytozome v7.0 (chr-ID scaf fold_2; pos 21245061 to 21245580)
ggagtctctccttggaggtagaatcttatctttcatcctaccaattcaacacaaatctttgccaagtattttcttctcttgtggctgccacataagaaactcgatcacgccattgaattgaatgtttagactcaagattggtcaatttaattctagaaacaagaaaaaactaatgtgattacaatggatttccagagtaatcgctatgatttatcttaacttgtattatccaccggttcagtttttatcactgttgtgcttttgagataaaggagctccatcatggcaaataaaacaaagaatacttcatgtttttcagactcagttgatcaccgtgtcaatctaaagttgatcatttcatatgttgtttcaattgaaaaaagttccttaaacttgaccatgttttgtctcaccggggttctaccgggtcgatcaagttggggttaatgggtcatttggatttaaccaagttaatatttaaaacaattttgaagtgaaacttagcctaagagctataatt

SEQ ID NO: 59015 - DNA, 190 bp, Populus trichocarpa
  Intron number 1 from transcript POPTR_0001s19120.1 (locus POPTR_0001s19120) derived from phytozome v7.0 (chr-ID scaf fold_1; pos 16534527 to 16534716)
tgagtgctggttaagaattccgctaacttacgaaggtatgtagcctagtacgtagtccccttctcttatcttttggttatcttttggttaatagtgtatttgttttctttgctcatattcacacggttttgaataatgttttttctgttttgcagcttgttaagccttgctgtttcacgttcctgtgaag

SEQ ID NO: 59016 - DNA, 586 bp, Populus trichocarpa
  Intron number 2 from transcript POPTR_0007s08040.1 (locus POPTR_0007s08040) derived from phytozome v7.0 (chr-ID scaf fold_7; pos 6541774 to 6542359 reverse strand)
ctttgggtggcaaaaataattggtgataaacccacgtactctctctctctctgtctcttcctttcactttgattctttataaagaaataaatgccctcttaaagactctctatttccttgttgttctcttgatattagaaattcttgttgaaaattctgttttgaagctttgatgagctcaaatcaaacacatcatataacattttatcttttacccttaattctcttagcttcagtaatcactgtccaattttttagcgtgttaatgtgtttcttgaaggtttttccctaatttataagaccctgtttcggttttattgagatattgtgagttgacatggaagcaaaacccagttctttagttatcaaagttggctcccttttggtaaattctcaaagattgattttttcaagcaaaaacccactatgtagttcttgtatattgtctggtaccttcaagtctgtgacatgttcgacaataagccaaacccaatctgaaactgtatcagggggtggtgcagagcaaccagctaactcggttgaagttctgaggagatatggttgtagcgatgatgacatagagaag

SEQ ID NO: 59017 - DNA, 882 bp, Populus trichocarpa
  Intron number 1 from transcript POPTR_0002s04490.1 (locus POPTR_0002s04490) derived from phytozome v7.0 (chr-ID scaf fold_2; pos 2807570 to 2808451)
ggagtcctacgagagcgggccacgctcgcttttaaaagtaagattcttagctttggatttcatatttttctgctggaatttaatttcatacgcacaagtctgctaaaacatacataatttcggcaggagcagcggttttttctctgcttagatgatcaatcttgacctgattcgttttttttttctcttgtttaattttttttttaggtttttgcttaatagggtagtgttaattttttttgggatgaatgtgttgtaaatgttgctatgattgaagaaccagtgaagaaacagctggttaatgacggtgttttgtaccttctttagcgttgttaaaggaagtagtacttcttatggtgggaataaatgatttctttggattttaatgcagaaatgtgttcacttcttctttttattgtagtccttttctctattgctgttgatgttatatgttgttggttttctacgtacacttaaatttgtatgagttttgttaggtttaaactgaagttgctttagtatgaattcgtagtaaaaatggtgttttttgagatgaaaattgtgtgtttactgatccgggactcgaacccaaatcctagctctcatgttgtaagagtgcgccgatgagttaccagcccattggtgcaaatagattggtgctattgcctgtgttgtttcttttgatgtgaacttggttacagtacacaaacatccggatatagcagggttcaaggttggtgttccagtggaagtctgggatctgaacttagaaatgcaagcgaagcatgctactagtcttctttttttgtgtaaatttttttgaaaggtgggactgatactgaatttcccttttcttgggcttaaaagtggcataagtgcgtg

SEQ ID NO: 59018 - DNA, 443 bp, Populus trichocarpa
  Intron number 2 from transcript POPTR_0001s43320.2 (locus POPTR_0001s43320) derived from phytozome v7.0 (chr-ID scaf fold_1; pos 43363017 to 43363459)
gttatcttgtcaagacagaagagggcttttacgtactgactttttcttggattttttggattcgattcttctctatttgatcttccttgttcaatgttttgattgtctagttttctgctcatatatgttttttgtgatgctaaggtgattgccaaggggttctgattcgtagttacttttaattgccttttgttcttcaaaaagcttagcttgtcacgtgtttccacgtttgcgattcatattctataaattcaacaatcatatgtaatatgaaggaatcatgtcccctgtaaaaaactttgcatatacttggcaattggcataaagttgtcagatactagcatgtcccccttgtgattttcatgttttattggagaatttagaaaattggaatgcttctggtttttaagtggttatcgagttcctgagggtttgctttgcag

SEQ ID NO: 59019 - DNA, 796 bp, Populus trichocarpa
  Intron number 2 from transcript POPTR_0010s17170.1 (locus POPTR_0010s17170) derived from phytozome v7.0 (chr-ID scaf fold_10; pos 15880660 to 15881455)
ttgaactgctaaaatcatacggtggcttgtcatatgtgagtatagatagtgcttcttctctttcttggttttattgatgataaaattaagaatttttgtttcttgaggatacatttggcaactcttcaaccagtaaggaattgctcgaagaatgtagccacgttgtttccccgttttcaccatctttagtgttagcatctgtagctttggaagtttgtttccgggcaatttttaacgtattgtttcagttcatagcatccaacataaattagggtaatttttttttagggatttaggagttttagatagccacttctaatgtgatctatcgtatttggtaacttattattatataaatctactggtacacttaaaattatatagctcttgctcgtgggcaaatattggtggattacaaattactttgcacgatataataaagggaaaaaccttgtagcctttgctctatcactcaagcattgaccagcctaggaagttgccacaagactggcaggtattgagtggtactctgtgttggtatcgagtattgatttttttggttgtctggttcttttcagtcagcagtacataatgtgtagtgattcattgtggtgatttgttgtgagtatccagtcgtctatgaaaaaccggccgctcatgttcattctcaatgctccaattccatatgctgtgttttttctgtcatatagtttatacaattataatttatatctttcattccgtcttttaattgcttatgagagctaactttgttaattcaaattgcagggccaaa

SEQ ID NO: 59020 - DNA, 924 bp, Populus trichocarpa
  Intron number 1 from transcript POPTR_0002s12370.1 (locus POPTR_0002s12370) derived from phytozome v7.0 (chr-ID scaf fold_2; pos 9175047 to 9175970 reverse strand)
tacggatatagtgaatataattgtcaataatttatattttatatttcaaaatcttttaatttaaataataggggattaaaatagcgtattttgttgcctaatcatttacgagcttgtggtccagcaagttctcgtgccccctcccgtggcttttagactactcccctggcgacgcaccgtcttgtagtcggaggatgacagttcacttacgaacttttttcttttaaaaaactttcaaggaccgtcctttaacagcgacacatgccgtatccccgattattctttctttgtaaagctggggggaaaaaaaagaatcagaagcgaatttaaacaccaccgcgttctacagatgagaacacacgcttttgatttcagatatgtgtgaaaccaaaccatgcaaaaagcactatattgtatgtcacacacacacatacatctgtagtgaactttcttgcagtcttcttcaagacttttcaagtaatttatgtccttgagcttgaataaatgtacagagtcaaattgagacagcacaggcattttcaaagtaaaagctcaacgtccctccaacccagccctactagctctcaaccaaatgcttgtcctgcataaaaccacaaaacagatggaaagggtagcgtatgccaggtcaaataatcttgtaatggtcccactggactcacaagagcctcgccgtcctgaacaagcatatgctgctataaatctgtgcatcaactgcacatataaagcccagcaacaacaaactaaaaataaactagtttagccttgtgagagatatcagtgctcgtcggaaattcaaacgactttctgtgagagacgatatcaaaccaaattaaagatatggagatctcaacgaaaacacggagctcagaaaagagcctttggtttgtgttaggcctaataata

SEQ ID NO: 59021 - DNA, 638 bp, Populus trichocarpa
  Intron number 3 from transcript POPTR_0007s09160.1 (locus POPTR_0007s09160) derived from phytozome v7.0 (chr-ID scaf fold_7; pos 8379491 to 8380128)
ctgatttttggagctgtaactttatagtcatctcttcatacatttactctccgtgttcaccctgatcggttggattatgctgatcaagttctggtatgtatgatgcctaaaatgcctttacattgcaattagagatataactactaaacatttatgttttgttctctattatttttttggttatgccttcagagcataaatttatacatgcactatataacattatttactggagcttgctttctaactgggatgatttttttcttaactcaagagttggcaagatttgttttcttggtaatttgaagagagagctgttgaaagcattgttagaaattaaatttgacagcgaaaatcatgactgatgggtactccaatttttatgaatgaaaagtttccagaacttgtgtttagccttttgggcagtgttcaacagtcaatttggcttgcagaaatagcttataagaaaatttgtcaaggaaattaagaaacatggatcatttatattggaattctgatcgtgcaaaatggtttgattctctttaactaatgtattgaaacaagaacctatgtgtattatcttgttccattgaatatttaacaggcaagctgatttttttgtttgatactcagggagc

SEQ ID NO: 59022 - DNA, 615 bp, Populus trichocarpa
  Intron number 1 from transcript POPTR_0001s44720.1 (locus POPTR_0001s44720) derived from phytozome v7.0 (chr-ID scaf fold_1; pos 45152903 to 45153517 reverse strand)
ggttcttctaggcctttctctgttgcccttcacaggtttcttcacttttattattcatgtcgagaccttcatttgttgtttttaaagtttttctacctgggttttggaaattatttagcacccagttttttttttctttgtttgggttttgagtgcagtgcagtgtaatgtagtgtagtaaaggtttgtgttgatagaatttgatgttttgttctgaacaacgtgatttttgtaggcttttcagtttagttgatcctcacatttttatttgttcataccgttccatttatggcttgcttgattatgagtatagaaagcttcattttgtactatgtgtttaagatgttgtttagacttcatagtttttgctatctgggtgttctgataatctggtgtttggaacatgctaaatgtgtttgcaagtaaaccattaaaaagttgtatagaatcggtttatgtagacctcttattggtcttaactaaagagagtcaatccatgtaaaaattacactttctgattaagattttggtatttgatgcttcacatgtatagaataaaatttgtgttccttgtatttgttaggttttgggggaaaatccctttgcaagtgattg

SEQ ID NO: 59023 - DNA, 866 bp, Populus trichocarpa
  Intron number 1 from transcript POPTR_0001s00680.1 (locus POPTR_0001s00680) derived from phytozome v7.0 (chr-ID scaf fold_1; pos 568572 to 569437)
tgtctgaagaaggtatgcagactttccatggcttcagccttgataaatgatgtttgtgtgtaaaatttgctctagtacaacagcctcagtaatttttgtaagcataactgcataagttccaaatatagcatctttctgataaaatgaatgtggcatctattgatactagctagttcaagtgaatgcacatttcaatttgctggtaggaaaaaaattgccagtctccctattattagtttattagatggctcattagcaagcagataggtcaagtagccatacccccacctcctctcctccccttctaatacttttcctgacatgaaaaagattgccccacaaacgttagccatgactaattgactagtgagatcagtcattgaggaggagtacaagtattaagggagcaactcttttagggagaacctataatgactgtcaagttaggcagctctaaagactggataaaatagtctatggttatcaagttaaaaggagattataacttaggtttgaattacgcatcaattcatgatgtacagattttaggctttaatttgtcgttgcactaaacaatgtaccttaatttccttactggcatacaatgaatttttgttcgagattcttggacaattaactatgaagccccaatgtttgcaaaccttgttgagatttcttgatgtagcttagctgccaacaaccaaaattatttatgtaattgaccttaattggcttcagcatcttctccttgtctcttcttaaccagtccttacttacaggcttttacaaggaacctttggcactataggtgttcatcaggcagaccaattttttttcttgttttccttctcattttcaggagtttg

SEQ ID NO: 59024 - DNA, 315 bp, Populus trichocarpa
  Intron number 4 from transcript POPTR_0007s12850.1 (locus POPTR_0007s12850) derived from phytozome v7.0 (chr-ID scaf fold_7; pos 13083225 to 13083539 reverse strand)
gtttgaggtttgttatctaactagttttcttagtactttattctctaattcaaagaaggaaattcctttcatttgtttatatgtagcatgttcataatgtgtttaagttcaagaatcaacaataaaataaaaactgtttaaagcatacaattatgagtggatgtcactcattttactctaatggtaacaaagtgattgcaactaattttgactttttaaatatgatattgtttataatatgcattggattcgaatctttgttgtgtttttatgatttttggctttttaatcttctgctgctgaatttacagacag

SEQ ID NO: 59025 - DNA, 813 bp, Populus trichocarpa
  Intron number 1 from transcript POPTR_0001s02940.1 (locus POPTR_0001s02940) derived from phytozome v7.0 (chr-ID scaf fold_1; pos 2334203 to 2335015 reverse strand)
cgataccagtttagactcttcagattctttatccagtatgtaacccctgtttgtttgttttctgggtttttattattataacctgccttttaatgcaatatcattagttgaacaagccaataaatgttgaatcttgtgcagtttgagcttgagttgcatcacctcacaaaggattaaacttgtgttacttggtttctcatagatttcttcttgtccatgttttgtgtaaattgtgtctggtttgttattttgttgggttcattgttttagagcttgacatttataattagagattttacgatccctagccttttcggactccaaatcgaaaccttaaagcatgggattgagtttgattgtgggtgttcttacttttgttacatacattatattttgtgatctgaagttatcttttctcaatctacatttgcaatttccaaactttaattgttttgttatttgtagaatcagcaagagcgtatggtagaattttgctgaataaaagattttatgggtccttagaagacagaaatatttttgaacaaaaaaatattatggattaatgttgaattggtaaaactcacatatcatgtgcaagtctaatgcaatgaagctctgcctgtttttgtttttagcattttgaacattctttttcgaccttttgagttttgacttccgacttctttcaaatatttaatgaccagtgctacgatatatcctaatattgtagtccttactaatacttctcaactcaatgtgatacttattgcttatgtcaacaattcctcataacggatgctcactttcagattc

SEQ ID NO: 59026 - DNA, 1039 bp, Populus trichocarpa
  Intron number 1 from transcript POPTR_0010s07910.1 (locus POPTR_0010s07910) derived from phytozome v7.0 (chr-ID scaf fold_10; pos 8882610 to 8883648)
caattggtgatattgttaaggattcacctcacaaggtgtgcaccatcatccttctaactgatttttgtgtttactttaacttccagttagccaggtatattttggttctctggcatgaacaaaaagctagggtttttatttcctctttcttataacttttttttttaatttaattgtgaacctcgagtggcaattttcagtttgtatgtgtttccaatggaagttcaagaaattccttgttaataacattaactgatgaacataaatttttctttgtttcccccacctctttccttttcttatattgaaaagatgattttcagcattcacagaaaaatgctttcttctaccacatgggtgagacaaatttcaggagttagtgaccacatggggagggacaggggaactttttttattgtgaactggcagttgcaatagaatttggaaatagtaaaagccatggaacataggatagccttgatgttgcaagtgtgctaaaactaaaaaggaatttgatgactagaatataatggtttgtggatggccaacatcactctggctgcttgactaggctgtttttaaggtgaaagtggaggtcccaatataatttaattgcagtgaattgttttactcataaaatagcttgtgcttaaacccctattcaccgctgctcttgctaagctagtagcataactgataaaacaactggtgtgtagctgagacttgagactttacagggtgaaactgatttagccatgcttttatttttgtccttcagttgtagacctgaaaggaactgttccttgcttttatccacatgtaatcaccacctcctttgtgtttatttcttattatttttactggttggattttcattattattaaatgtaattttatcttgtagtgagtctctattgctcgtatctagttacctgttatgctacttgctctgatttatatttacaatcttgtgcttatttttctgttttgagttatttgtgcagattttcattggtggaatttcaaaggttctttcttc

SEQ ID NO: 59027 - DNA, 555 bp, Populus trichocarpa
  Intron number 2 from transcript POPTR_0001s01870.1 (locus POPTR_0001s01870) derived from phytozome v7.0 (chr-ID scaf fold_1; pos 1358047 to 1358601)
gcgactacactgccggtctctgcgttgccttctatgtaagtgacaagtaatcatatattcctttcgagaaataggaaaattgttctctcttttttttttaatccgttccttttcttttcgaagaattttctttaagctttttagtttggtaagacctttgaatttattttttctggcttcatgtaaaggatcaattcaattctaatttgaattcgctaagtcatctcacgcttcttttcggcaattaattgcatcttttaaggctctatttatgatcacttaacttttctcattagcttttggaagatttaatactctctttgttatcttaaattttccgtgagaaattcagttgtttgattgagaatccttaaatcttatcttcataatgaagattatatatatgctaccgaacagttttgttaaaaaaatatttaatgtcaaattaataaatatatgattatcatggtcagtatataattatcaatcatgatgaatgttgagttttttcaacgcgggcgcagacatcaaacggggacgtgttcgagaagaccc

SEQ ID NO: 59028 - DNA, 608 bp, Populus trichocarpa
  Intron number 1 from transcript POPTR_0007s01760.1 (locus POPTR_0007s01760) derived from phytozome v7.0 (chr-ID scaf fold_7; pos 1022117 to 1022724)
gaacttgcacttatagatccaaagcgtgcaaaaaggtatcctgtctcacattctttttaatttttctattgttaaggtgtgatttgttatattatgagattgctttcgatgctaatttcatttagtaatatcgtgtttggatgggaagttttgcatgaaaattaaaaggttgtgcctgttctaagaaattgaatgtttttgaaacattttgtttgttttgggcgtctttgagttagttattggctccgtaacaacagtcttattaagtgctgaatttaatagttttcacttttcataaggtacttgttgtagtgatgcccggcttatgagggagttgttttaggaatagttagttatacagatggtacagaatctgtgttaagctgttaaataaagtttactggttgtataaaaactatggacttgaattcctctgccgcgaagtccacatctctctccactctcatccttcttattttatacccttctctcatgggggagagaaaatagacatgccatcttctcatgtattttagattgacatctgacgtgttcttttctgttctgtcttaggatttgggctaacaggcaatctgctgcaaggtcca

SEQ ID NO: 59029 - DNA, 898 bp, Populus trichocarpa
  Intron number 2 from transcript POPTR_0010s25730.1 (locus POPTR_0010s25730) derived from phytozome v7.0 (chr-ID scaf fold_10; pos 21267990 to 21268887 reverse strand)
cacaagtcgtaagggtaatttttctaacgttatcaagcatttcatcaggcacttgagacagtaatatttcctgatcactgaatatttgttgtttcaggcggcattactctttcggttggcaggggaacagcaaattggtatgtcaccctctaatacaccttttactatcttctttaaaagcttttaatccaactttgatgtttgaaatgagttttttcgtggaggttctgaatttgatttgtttaaggcctctttatcccttctctctaacctaggattttttgacaaaggaagcggaacagtaaggaagataatatattctgtaaaagtaaaaatcaagtggtttagttaaagatatttggccggggatctatggctatctgttcttatagccctcatttcactaaagaataacttctctaacattgcattgaagtcaactatttactgtgatggcgagtgctgggcagtgaagaagcaacatgcccagaaagaagcttgaatcaaactattaagatggatatatccgagtatatgctaggaccggataagagtaatgcattccttgaaagttaaacacggcacaagttagtttgagtatttgagtgaaaaaggggattgtttggtcgaaaaggatgtggattgaagtagcgaagagaggaattattgtcacaatctctcaaataaaatttggaaataactaatataatggaggaaggaattatttgctgttggccccagtacatgatattaaagactgaataacataaccaccgagtaaaatattcttacaaagtttttcttgtacttgttgtagtctgatgtttgagagtttcggggctgtttttttcccactcaaatagattatccgtgttaacttattttctgcttctcaagt

SEQ ID NO: 59030 - DNA, 631 bp, Populus trichocarpa
  Intron number 1 from transcript POPTR_0010s25730.1 (locus POPTR_0010s25730) derived from phytozome v7.0 (chr-ID scaf fold_10; pos 21268972 to 21269602 reverse strand)
gagggtaattgttgttgttgttattattattatttcatcattattcttagttataataacatcaacttaattataataataataatccggcattgtctgcaggcgtgcgagtgttttttatttttattttgttatttggtttgaaaatggagcaaatagctgacaatgctggtgttgtattggtataagaaagatgaatgcattcggtgttttgagcttcgtttgtatcggaggtggtagaatcttctttcttaagaaaaaggagaagatgatgcgatgcgatgttatatgatataaaatcttctttcttaagaaaagaagaagaagatgatgataagatgctatgttatatgatttctacttgcctttattatcatgcagagacaaatttgtctcttggtgattataatgcaggctcaaagcataaagttattcaatggtggctttcttactatcagggttcagagttgatgttgaatttcattttctttgttggttttgttttagttctacatgctgagtgcatcggaggtttagaaattgttgttgcaggtttacttttgtatttttcatttcttgggttatgactaatgttgattttgtctttcacagcaagcagcgtttgtgttga

SEQ ID NO: 59031 - DNA, 719 bp, Populus trichocarpa
  Intron number 4 from transcript POPTR_0001s33460.2 (locus POPTR_0001s33460) derived from phytozome v7.0 (chr-ID scaf fold_1; pos 31655954 to 31656672 reverse strand)
gattatattcaacgagtaagggttatatgctactgctatttcttatatttgcatactgtccatttgattcctgagatatcagggtaaagaaacagaaaactagtctgaatatttgcaactgatcgagtcgtatagaaacagaaaacagaaaaattgtttgtctctttggtctcaaataatcaaaattttcagatatagaattttactccgcttgcccctgatttcatcaacataaaaggaaatggtttaccaagaattctcatgaaacaaaatgttttgtttccctttgtagccctcagcactggtatcatgtcgcgtttctttctcatgatggcaggggcatgtctgcatcattttgatgatgttttgaagaaagtgcacctattaataatatcaatacaaatggaacttgggaaaaatcatgctaaccttggttgagattaaattccgagtcttttttgaaactgttaaaagtcagattacagtttgctaaagaaagatttcttatacattttgactgtaggggataagtcagaaaatataattgtccataattttctttaatgaacgtttaagattacaaaatgcacatgttgcgttccttttccactgtgtatttgctaccatttttttgcccttgataaactacaatgtgagcagagcccatcttttgtttcatgtatcttgttactttttgattccacagagacttgaaagca

SEQ ID NO: 59032 - DNA, 573 bp, Populus trichocarpa; identical to SEQ ID NO: 58586
  Intron number 1 from transcript POPTR_0001s33460.2 (locus POPTR_0001s33460) derived from phytozome v7.0 (chr-ID scaf fold_1; pos 31657152 to 31657724 reverse strand)

SEQ ID NO: 59033 - DNA, 844 bp, Populus trichocarpa
  Intron number 3 from transcript POPTR_0010s05430.1 (locus POPTR_0010s05430) derived from phytozome v7.0 (chr-ID scaf fold_10; pos 6880540 to 6881383)
aggttagtatccaaataagaattactcacattagaagaggagaaacaaaacatgtattttctttcttttcttttcccttcctttcctgttggttaagccttgatgaactcaacaacacaaaagaaagtggtcaaacaaaatggtgaaggtccgtcagacctgctgtctgtctattcttttttcatgttgctttttctgaaggcaaccatcgtattagaaacacaaagaaagattaagagcttaagagaaacaaaaaaactgctttttggaattcttaaagccttcagatttattaaaacaaagggaattcctcccttattgttctttttttcttttcatgtttaaatggtgatatgcaatttgatttgatgtaagatttgatatataatatccaattatatgtaatctgcatgcgtttcccatcatgagaaaaaaaggaattctggctgctggctgttcttttattctaccatgaaagaaaagaaaaaacataatcagatttctattcatagaattcagactttcaccgttttacttcactttttttgaactaaatcgtttttggtcaatgagctctcttttgactctatgtacgaactatgaactaatattgcctagaagatctctgtgaattaacctgacagacccaccaaattcaaagaaaaagaaaagagaacacatataatctagctattcagattcatgcatggtaccatcaagtatataaggttattaaaccttaagggccactgatattattatcttgaaaaggactgtaggcttaacacttgaagtttccagcgtatatttattgtcctttgctttcaaactgttgggttacagc

SEQ ID NO: 59034 - DNA, 587 bp, Populus trichocarpa
  Intron number 1 from transcript POPTR_0001s04750.1 (locus POPTR_0001s04750) derived from phytozome v7.0 (chr-ID scaf fold_1; pos 3666822 to 3667408 reverse strand)
tgttgatatctctaaaaccaaagggcttagccaaggtatgtagtctggccttccctttttctttctttaaaaatgttgtttggctgctgaggaaatttaaggaaatgaagaaagagatggagtttatgtttttttctgtacaaaagatgcatgactgaaacttaaaagggttgttgcgtatgtgtttgtttcgtatgaaaatggtaaaagcttaggacttgtttgattattaagaaagtaaaggaaagtgaaaaagaatggagtttgttacctcttttgttgtggtggtggcttctgagaaaaaaaagatggccgaaaaactatgagtgttattgaatataagtgtttttatgcataaaaaggttaaaaagttgaggacttatttggttgcttggaaactacagagaaaatgaaagggaaacgaggaattttgaacaagtcttgttgttaattgttttttcatagttttgatttcttctctcagaatgttgtttaatttgtaggtaaccagatagagattagtttctgttttacagtgattgagttcttgtctgttgttgtggaatttatagaggaaaaggagtact

SEQ ID NO: 59035 - DNA, 377 bp, Populus trichocarpa
  Intron number 1 from transcript POPTR_0010s11570.1 (locus POPTR_0010s11570) derived from phytozome v7.0 (chr-ID scaf fold_10; pos 11783418 to 11783794 reverse strand)
ccaaggtaatgaattgtaacgttattgtagagtttgttaagtttttgtatttgttgcactccatgatcattgcttggaaatgttagtgtttttttatcgtaattggtcgcttattgattactcattgacaaacacaaattatttgatatgacttaatgatttatattatgatgtgtttatctcttcttagaattctgtttatctgagtgtcatctgcaaatcattgtctttagttaagggtgattcagttctcttaaaaaaagtttaagcgagatttaatactctatgttctaaaaaagaaaaccttgagaggtttttggtgctggatttttttgtgtaaatgccagctgaatcatttgatgtggcaggtgatacga

SEQ ID NO: 59036 - DNA, 943 bp, Populus trichocarpa
  Intron number 1 from transcript POPTR_0001s03310.1 (locus POPTR_0001s03310) derived from phytozome v7.0 (chr-ID scaf fold_1; pos 2700123 to 2701065)
tgggtacagaaggcggccttatttcatttttgcaggtaaaaaaagatacgcttttttcttttcaatctggtgttctgcgtgtgtttgtttgctgataggaatttaagctcttgatattactaaagttgttcattggtggttttttttttccgaattggataagtttcaatctagactttcttgagatgtagtctatgatattgcatcaagtttaggaacaactatggactgcaaattgagcttttcattgaaggccctagactaggattactaagattattacatgaggattagaaagaacatttaagcatctatggtagtcattaattttgtgaaatatagaaaacctgtttgattgagaactgcggaattttagggctgagtttagtcaacagtataagcttggatgataaaagagagaaaagcatcagaccatgatcactgcacaagagaaactgtttaatgaactcagattgatataggttaagcacatggaggaatcggctgttaatacgagtcatgggagttcaaacaaggtcatattttaggttggcctctgccccttggtatcttcttttagaacaacttctttgtgttattaaatagtggagaacactgaagattagttagtctctttcatatgcatatttttcagtttaaagttttgactctttcaaatgcaattgtgcacatatggaaaatgctgtagttcattgaattcttgttatatgtttcccttactagattttagtccctgtgtttttgttttttggttattataattttttttttcctttcagtgatcatctaaaagtaaatgagaggctggctttttttgtaatatgacatgtaagagcataatattatgaggacagataaaagtagttgttcaatcaacaagttcacccctcccttaatctcaggttttcttagcgtgacctcg

SEQ ID NO: 59037 - DNA, 904 bp, Populus trichocarpa
  Intron number 1 from transcript POPTR_0001s15640.1 (locus POPTR_0001s15640) derived from phytozome v7.0 (chr-ID scaf fold_1; pos 12476963 to 12477866 reverse strand)
ggtccttcttcttcttccacttactccaaacagacgtaggtgtgcctttgcctattttcttcctattttccttagtaatcttaggttttgttggtgttattaatttgttaattctggttaaatctgattttcttttttctttttttaatattctcagggcaaagttttgatagagatttaaagagaggatttttatacaatagaaattgcgctgtctgggttaagtttgaaggagttgcaagaagaaaaggatgaggtgcattgacagaaaatctaattctgttatatttgttattgctggggaactctgagttttataaaatggaactgaatgtggtttgattctaagtttttgatctagtaaatatgctaatgccatttcaaactcgtctttgttcgttggatgaatatgtgtaagaaggacagacacttgattgaatttgtcttcttgttctgtttttagccttatcatctagggaacctgcgtatgagaatacgctacgggttatgtgtttttgtggtgaatttcaaatttgctttgtagaatctagaatgtcaagtgatgtcgctgacactgcagaatgcttattgtttgaaattggtgatcttttttttatttttttggactagcgtcatggatgtgcttggcggcttgggttatgctaattactgatgtgctacatgatggttggatttactggagcatatggtgtaacaatgttctgtcggtacgttcactctgtatgaacttgagctatgataccgaagaattggaaatgatttgttagaatgattaaagttgatgttttcattgtggaagcctatggatctgggaatgtagaaaagactagagagtggaaaatgcaagtgcttgaaatgtattgccattttgctggcagctact

SEQ ID NO: 59038 - DNA, 732 bp, Populus trichocarpa
  Intron number 2 from transcript POPTR_0002s11380.1 (locus POPTR_0002s11380) derived from phytozome v7.0 (chr-ID scaf fold_2; pos 8409226 to 8409957)
accattccgaggtacgactttgatcgttaccgttttttgggatagtttaaagttcattagattgggtttgcttggttccgatcttgttattatgatcttctttttcttgtagttgaatgttatatcttgctagtcgtcggccatttggggggggcgggggtgctttttatagaaatgccattttggcgttgttcttttattggaaaattcagtgtgtgtgcctattcgatgaaatgctgaaaagtggtaaatggatttttgttttccatagaggaaaacgattagttatagatttattgaagtgggaagtttgttttttgagcttaatgttggattttgtacaaaagtttttgcttcattagactgaaattttgttctttgtttgttcaaatgtcatgtgtccttcaaatattcttcttcttaactctgattttgaattcgaaaagagcaaaaactaaagctgttttttcaaacttacaattatatgaagcctcattgaaagctcatgcctgatttcatttgtattggctaatttagaatctcagctttctgattttacttctgtttgagtactgctcggaagtaaaaggaattttggtcttttaacctgagcttacatagcatgtaaatattctcttatagttttcaacttgtaaaatagtttaatgaatttgaagtttccaacatatgctcatcaacttaagctcttctggacagactgtaagccaaaac

SEQ ID NO: 59039 - DNA, 358 bp, Populus trichocarpa
  Intron number 2 from transcript POPTR_0010s20410.1 (locus POPTR_0010s20410) derived from phytozome v7.0 (chr-ID scaf fold_10; pos 18010970 to 18011327 reverse strand)
tcagacggttgttgggacgctgacattcttgcagcgtttgatgatgaaaaaaaaaataataatatatttttgagtaaaaaacatatggaaaaacaactaatcgtaaacacccctaatacttcaattatatttgaatatttttttttcaaaaatcataaaattaataaaaaaaaatattgtcgtcgtaccatatcatcacatatttgaatatataactttaaatcaaatgaacctctattattatcatatgaactgtgaaaataaaactgtataaccttattcttctttttccatagctcaaaaaaaaaattcattaattgcagcgtccgtcatcaccaagtggttaaaactgaagatc

SEQ ID NO: 59040 - DNA, 909 bp, Populus trichocarpa
  Intron number 1 from transcript POPTR_0010s09710.1 (locus POPTR_0010s09710) derived from phytozome v7.0 (chr-ID scaf fold_10; pos 10399183 to 10400091)
gacggtcccaaagcattgaaataccactattagcttgatctttagggggttaccaccgtttttcttttcccaagttgttgaatcacatgaaaggcttttagtattatgatttgaacaataggtttgatattatcttttacatggtgttgtgttttattcttgctgctggaagttggagcctttttcatcacggctatgctcattcctttcatcttacagaactaaaaactaaaattgtcaccaacaaacttcatgtaaagctgctgaaatctgatgaataagtgatatggtttcatagtggcatcacccacctttccactctattataatcattttagtatattactctggtactccgtaaaaggaccgatgcgctctctgtttgccactagccattccaccggcaataggcaagttttagaatgttcggtggacatactgattgaggattagaatcacttagggttccaagtttgttagtgttattatactgagcaccgttcatcttgtgatgcacttgttgcagtgaatagctggaacttaagcattactttgagatgagtcatcattgacatctgtatcagcaacaacctttcaggagcccttctaaaaagtagtaccgaaatccttttgttttgggatgaattagaagaattttaacgacattctctgaataaagttcttggagttgaagcctgttagaaattcaggcacagatagtttagatgcgactttcatttcataagctttggcattactgtcgttttctgcacaatttgtccaccatgctgtactgtcccctctatgatatttgaatccagcagatacacgcaattactaaaatttaatccactaagagaggggtcaaaaagaaaaagaaaggagaagcaacttaatattacgttgaag

SEQ ID NO: 59041 - DNA, 391 bp, Populus trichocarpa
  Intron number 1 from transcript POPTR_0010s06330.1 (locus POPTR_0010s06330) derived from phytozome v7.0 (chr-ID scaf fold_10; pos 7728450 to 7728840)
tgttttggctttggatacctataccaactgtagaggtttgtttttgtgcaattgttttactttgtcatatcattgtatagcttcatcatcaaactttttgggtgcgcatttcagttttttgagatgattttcctctgttttggtattttagtcttgcttctttaacttgcaaagtcaggctttgcactgcttgggcactataatgtcttttagctttcctccattttgattaacaatcatcgtccttgtttatttacaccacaattttcttgttcagggctcgtaggttcctgatttggtctaatccggactcttctcactagtaacttctggttctggcttggctaacattttattagtctcgatttataggagtagagactgaagagcc

SEQ ID NO: 59042 - DNA, 1013 bp, Populus trichocarpa
  Intron number 1 from transcript POPTR_0001s01420.1 (locus POPTR_0001s01420) derived from phytozome v7.0 (chr-ID scaf fold_1; pos 1074321 to 1075333 reverse strand)
cttacaagctctcttcaacatctcttttttccaaggtaataactagtaagtattgaaatttgtcttcctggcaattctataatctgtagcctgtagagagaaactggtgttatctgtttatcgagcccaataattgttttcgtctttattgttggatacagtaaagcaatttgaatttttgtttttaatttattggttagaattgttactgggttcatgaatgcgtctctttcttgttcagatctggtgggattttatgaatttcttattaggaaacaacttttattgaaaaggctttgcagtcattcttttttgcatttgggttcttgaattttcagggaaacggtatctttagtgagtggaagaaaatacgtacatgtcatacttcagaaagtccaggattcttaagatatataaatgttttttttcgtttctgaaagtttctgtttctgcctctctgcaatcccgtttgattagattgatcccaatttgcatttcaatttatacagtgtatcacaatgaaatgttagaagcacaaccagtaattgagttaaatagtactgctaagcatttcaagaatactactttgtgagaaagaggatagagaaaatgttagacagcatttaagaaaagacttgcatggggtgctttcttggttaaaaactttggacaaaatttgatattacagctttggtttggttgagctttgtgcaccaaaagtgttcaaggaatacaattgctttgcataaactgcaatttgcgaaattgtggtggacataaatgtttgacgaggtttagacaattagttttttcttctaggacaattcagctcagtgtgattgaatttcttaatcaaacagcaagtttcatgtttcttgtttaattgtttcaaacatcacttagatttgttagcctgctgatttctttaaatctgctatggtttgtccataacaattgtagtttgcatctggcttttagatcgatcgtatttgtgaacgagcctcaaactcccc

SEQ ID NO: 59043 - DNA, 443 bp, Populus trichocarpa
  Intron number 2 from transcript POPTR_0001s33840.1 (locus POPTR_0001s33840) derived from phytozome v7.0 (chr-ID scaf fold_1; pos 31997872 to 31998314)
aactggggaaggctctattaggtactattagaatttctttttgtatgattagtgtatttattgacttgtgcttttgtttttccccctttaatttactatctactgttcatttgactttgattttgcatttaacactcgcatttctgtaaatttggggcttgtatttggtttttgtatagtggaaagttgtgataaatacaagctctatttctctgaaatgttcatttaatggctcagcagaaataatggggattttgttatatgctatgcacaagttatttgtcatcgattccatgatgtaaacctagcctctctttttttctcttctttagatataaccatggtttctcgtgcgtggaaagatttggctaatgttttctttgagttatattctaagttgtttcttggaatgcataattgcagggtctgtgacagagcaaatc

SEQ ID NO: 59044 - DNA, 508 bp, Populus trichocarpa
  Intron number 1 from transcript POPTR_0007s12580.1 (locus POPTR_0007s12580) derived from phytozome v7.0 (chr-ID scaf fold_7; pos 12861959 to 12862466)
ctcaagtttctctggcagtgagagataaggtaaaatgttctgatccaggctctcttgctccaaatgtgtacctatatgttcttctctttcaacttctactgaaacatgtatggatctaatctatagatacatatgatctatatttgttctgaacttgatgaactcccaactatagaatatatagaccccatgattcacatatgatttgcttcttgctcaaaatcttcgatcagttttacctaaaaaaatcgagaaaatcaatttcatgttccaacagtacattacaaactgttacattgattattacatatccaatgatgccttattttgacatatagacaagtaaaatgtctttgttttagcgttgtcagaatgaggtagcatgttgaaatttcacctgtttaatgttttttgacttgtcagtttcttttctttttactgtgaattgttcatgtagttctaaattcttgcagttacacatcttgcctagagaggtccttggcagatc

SEQ ID NO: 59045 - DNA, 353 bp, Populus trichocarpa
  Intron number 1 from transcript POPTR_0002s10380.1 (locus POPTR_0002s10380) derived from phytozome v7.0 (chr-ID scaf fold_2; pos 7485085 to 7485437)
acacaaacaggctagtgtttctcttatctcattgttttcatgaagatttagctatttaacttcacgcacttagatttttttattcctttatgcggattctattgatgacaatgtgctagctccttagttatagctgaattaatcacgaggataatggtaaccttaactatgttttttgtcttgtcttcgacgtaatcattgttgtaatttatgtttaaactctcagattgctataataatttgtactgaatggtgattttgtatggaataagtgattaaaattggcttcaaaatggttttgcttttctggtatatattaagaaaagctaacaggggtcgtattttttcagatt

SEQ ID NO: 59046 - DNA, 1004 bp, Populus trichocarpa
  Intron number 1 from transcript POPTR_0010s10030.1 (locus POPTR_0010s10030) derived from phytozome v7.0 (chr-ID scaf fold_10; pos 10625013 to 10626016 reverse strand)
atattggaatttcaggtatgcagtctttaagaaaaaaaatagagttaaaccaaatacactattacattgtaatttttaacgaagaaaataagtagtacttgtaattgcatgtatatataccaccaaggtattgtggtggtctgagtaacatggtttttagaacatggcaattacattaccctctttttgtactcttctcttactatgtttattggatactgggacagtgggactctttattttctttgtatgagaaattaaaattaaatacactgacacttgtactgcaaacatttcgctacagtactacagtattttccctgttgagcgcacgtcctgtgcagtttgttgttcagaaaaatccagatttctctcctgttctggaaatgaatttgttcagtgttgtagtctctgatgaaaagaataaaagcagctaaatcagagtatgatgagtattttcattcggtttcattattttaaaaatagagtgggatccggcattgaatatcataaattcatgtggtagtactactaagactgtgtaaaaaatagcacatttttcaataaaaattggattctatattaagggtattaataaaatgataatggtgccttaggatgatatatatacatatatattttacttctggttaaagtgaaattaaaaaatctccaaaaattgcttccaattcttatgtatgaccatgtagttctttgattcagtgattttgatttttttttccattgaatgaatttggagtcacgtatcttattcagggtataaataatgatactgaatattcgtattgttaaagactgtgtatataacacttctgtcaactgaaaatttcagtatgaagttaaattctcttatcctagaaaagggtaagattgaaaggtgatggccgctctgttttcagttcaaatcaattgtgggttatgcagattgatctaaagcaatgtacatgatgattttgtatcgataatcaggtggtgtgacagcc

SEQ ID NO: 59047 - DNA, 766 bp, Populus trichocarpa
  Intron number 1 from transcript POPTR_0001s21080.1 (locus POPTR_0001s21080) derived from phytozome v7.0 (chr-ID scaf fold_1; pos 19435969 to 19436734)
agcggctctattttgtttgttttgcatacgaagcagtaagatttattattattattaggctgatatctgttgactttgtttttgaaaaattggattagagaactaggaccctgcataaatcttatgaaaccaatcactctttgtttgtttgagttgtactttgatgatgttgaccaacccagtaagcttactttatatgaataaagcatgtttaactaccattgaactccttatacaagccacctatttaacatgttggcatctaacatggaagtgaggttgttgaaatcgtgcaaaatagttctaagaacctgaaaactgataaaatcagactgaaaacataaacttggtactaaaatcgataatatcatgattttagtaccaagtttacgttttcatttgaaatataagtgctgcagcagacccgtaagctctctttctcttcgttgttccataaccaatcgccacacatctcttcaccaaaaccagaaaccgatctcctcctagacaccaaacatagcattctgaaagaccctcataaataagctgctgttttcactggcggcgcgctggtaagttcaaaggatgccctcatgttcgtcagtttttttattagattgaacttttttgagataacaatatggaggtgagattctttgtggcttgggagattccttattctcttttcattaaagagagctatgaagtaattattagcttcatgagaatagcttgtttgtggtttactaagaagaacaagaagcaa

SEQ ID NO: 59048 - DNA, 802 bp, Populus trichocarpa
  Intron number 2 from transcript POPTR_0010s19270.1 (locus POPTR_0010s19270) derived from phytozome v7.0 (chr-ID scaf fold_10; pos 17232785 to 17233586)
gcaaagttgtcgttttgtaagtatttttagtgcttctgacttttcttttatgttctggttggtttctgagaaaatttaggaaaatcaaggaattcggaagcatttggaactcaagacttactaatttagttttttttttttcagacttcaaggttacttaaaattttggatgttaaaatttgtaaattgtcaactttgctatgattagctatgtaattaatcgagtaaatcagtgatgaggaacatgcatcaatatttctgaagtcaatctcaatctgttgtggtggttgtttagcagtttcaacgggtggtgtaatgatttatatctgttcaagttgagaagttgtgtattgatttatttcgtttgaagtggattattgcaatctttttgaaaactttgttagaaaatcaagggattctctttattttctttgggctgctgctaaatatcatgtttgatgtgttttaaggagacgtagaggttcgaagaattacaaggaccaatgaccggttaacataaatagctttctttacttgaaatttagcatttctgatccatttcaaaatatgatcagttttctgttttattcttgttcgacagtcaagaagaaaatataactgtttgctgttgcatttacatgcaaatgttctcttggagcggttcttattagttctctattaagggagaggagctttgattgcatgtggtcatacgctctgtaagattatttttaagtttttgttctaaagacgagtttgtcatataacatgcaggaacttgaaggatctttgtcttgaagga

SEQ ID NO: 59049 - DNA, 478 bp, Populus trichocarpa
  Intron number 1 from transcript POPTR_0002s15240.1 (locus POPTR_0002s15240) derived from phytozome v7.0 (chr-ID scaf fold_2; pos 11382856 to 11383333)
gggctgctaaagggaactatcctcttggttctaaggttttgatccgtgaatcttctctttatatgggtcactgttagttcttaatgacttaaaagaatgataattggaagcaacactagattttaagttagtaccttttggtttatttaattaattatgtctaattcttgaaatgaaaaggctctgaaaacatttgttgatttggtttactgcatcgccattccatttcttgccaatgaaacaaaacaccaccagcagcagcagatcctcaatatcaaactagctgcggtcggctatcttgatcttttgcgcctttccgcataacgaaacaaaatggtgataaaaatggacccctaaaaaggttcaacatcagcaagttatcgtttgattgaactaactaattgtgtctgattatatgtattctttgtgtttggtaatttcagctcagtggtaagcgagctggaattgttggattggg

SEQ ID NO: 59050 - DNA, 451 bp, Populus trichocarpa
  Intron number 1 from transcript POPTR_0001s35060.1 (locus POPTR_0001s35060) derived from phytozome v7.0 (chr-ID scaf fold_1; pos 33332244 to 33332694 reverse strand)
ctttgtgggttgggttggtatgcttgcggtttttttttcattctgccctatttaatgatttgattaatgagagagaatacaggggaaatgaagggaaggcatggattttggagtagttttagttttcttcaaccaaactccatatccaacttaatttgaatattagaattaggctcaattaaggcgtcaaggattaatctaatcttgatcttgggtatcaagcagtatttattatgtacatgtcagattcaaaattctatttattctggaatcaattgctttctcggaaaacgatctttaataataacttttctttcttttctgttgtgatttttgcgaggtgcatctatttatgggctatgccatctgactgctttgcatgtttgttttgctgttttccaggtttttctggcccagggatcgccattgctgtagttttagcaactgccgc

SEQ ID NO: 59051 - DNA, 509 bp, Populus trichocarpa
  Intron number 1 from transcript POPTR_0007s02170.1 (locus POPTR_0007s02170) derived from phytozome v7.0 (chr-ID scaf fold_7; pos 1288446 to 1288954)
tgtttgagaaagggcttgtttaccagggttttaaggtgggtttttgttgctctgtgtttttgctttcatttgatggtttcttgttgtgttttttggtgatttgctctgtctatatagaggttttgatgttggttttgtttgattataagatttattgtggatttttttatgtgggtattggagattttgcaaatgcagttatcatttgtttatgaagttttggttttacgaaattgaaagtagtaccaacatagcatcattgtgttataatataatatatgtattggattttgagatttttcaaatttatttgttgaaataggatctctgtcaaatagggcttctttgtttttggacagaaaaatgtgtaatttatcacttgttaaggtttattagtttttggttatgttgggtgagtcctttccttaactggcgtgtgaatgttttcagttcactttagtggtatatattaattaccatatgctgttattattgtttctttgcaggtc

SEQ ID NO: 59052 - DNA, 683 bp, Populus trichocarpa
  Intron number 1 from transcript POPTR_0002s08480.1 (locus POPTR_0002s08480) derived from phytozome v7.0 (chr-ID scaf fold_2; pos 5926271 to 5926953)
ggccatctacggcgaggcaccaccgccacaaactggtactttcttttacaaatcagtgcatatccttccacgtgcctccatagcttaattcgtgttgattttgattttgtgttttagggtttaaagaatagtggaaatgagaagtttacaaataatgacacaatcccaacaatgtaaacagtacgtaatttagggttttgtagaattagggttggagaatataatttgggggttcgtatcacttccgagagggatttacaggtgatggagagattaatagaaatctcgtaattgtctgacgatcattgctaagggtctaatacaatgcaaaaacgtggttttaatgattccttcgaactttgtttcttatgttgatagcttcagtgaaattaaactgtatagcatcaggaacccctcgtcatagataaactccctcgaacctatcaatttgggatccgcattatgcaatagagcgttttcaaagtttttcactagatgtaaccatctccctgtttactgtagccagtgcagtgtgttgagagtaaattttagtgtcactgtgtgcaagttgtaggatagcatctccttggatgaattgacaggtgcactctatctatgcctacgtggagtcttccgtttgttggataatttcttctctgattacttattggttttggcaggag

SEQ ID NO: 59053 - DNA, 882 bp, Populus trichocarpa
  Intron number 2 from transcript POPTR_0001s38920.1 (locus POPTR_0001s38920) derived from phytozome v7.0 (chr-ID scaf fold_1; pos 38181971 to 38182852)
ctaccttgttgcggttgtggtgttggctggttcttgtaagtttgctatcaatatgacatttgctcctttctattttcttggtttttaaatgagtttgtttgcttcggcttttggaattattcatatttatcttcccacattggctttacatttttagatttccaatgtgcaaactcggtttgacatagctgccacagaaagtataggtttgactgtgatgcaactggaattggaataaaataactgtttcactgaagatttgattggttaatgaattaaaattgggttagcttgccaaacccaaagtcgagtgcccagtttcgtaatcacgtcatgtttacatgctactgctctatctcagttcattttttgtgtctgaataattttgcaattaatgctgttagattcttaaattagagatttgaagttttatttatgccttagcaccacattttatgctaccacagtttaaattgataagtcaatccatttgaacatattccaatttgtttgtttcttttaacttctgatgttattattacttttttttttttttaagtatttcttataagcttgtatcgtgattgtggattatagaagatggttacaaggttaaatattcatcccagaacgtgaatgacctttagaagactttaaatttcaaataaaagcaattgactctgattttctacttgaaatggctggacttacaagttaggcttttcatgttgattatcaaatggtgtcatttatcattttgtggttcagacttccacttgtaaattataattctgatagtttatttatttatatactgattgtgaggagctgtatgctttttctgaaggtttatcatcggtttctttctgggtgccatcccct

SEQ ID NO: 59054 - DNA, 986 bp, Populus trichocarpa
  Intron number 1 from transcript POPTR_0001s46390.1 (locus POPTR_0001s46390) derived from phytozome v7.0 (chr-ID scaf fold_1; pos 46785896 to 46786881 reverse strand)
cttgctgataactaatccatattcattaaaggttatctctcactctcactctatccctctcttctcttttattgtttgaagtatgattacagcttatggaagatcattgtcagctgtgtgcatttatgtgctaggccactcctccttaatttgtctcttgctggtcttgatgttaccacgtccttttcttatgtgcagcatggagatttaaaaatcttctatgggtattaaaaaacacccactagacattgaaaattggtgattgaaatcactgttcgatatatctgaagccacaggcttcaatgcataattggtgatggttttgttgacaactgtaaaaccagaatcatgccaagtatacctgatgaacctggcctcacaagttaatccagtaaatttagaatctaaaatttaattcggatgaagtttttagttaaaataaactaaatatttacatggtgaaatttaattgatccggacaaatatttagtgtccggttgattcagttgatccggccaagtgtttagtgtctggttgattcatccaagctaggcatgatcaacgctggatttttatttttattcaaaaaaaaaaaaaaaaaacaaggcaatgcaatttaaaaaaaaacagttgattcggtgaatcttggattagttcttaaattggatttccataaaacaactacgataccgagagtttgttatgtctatgagacaatatattctgtgattgaggtttttgatcatgtgtgaaccagctagatacaataatttttatgtataatagtagccctcttcaaattattgaaagaaataggaagacaagcaagatattatatcatcataacatgatctggaaacattttagaatgctgctagcagtgctctgcaataattttgcactgatacagttgtcttttcctttccaaaatacagctaccaaatttgtttgatcatgcagcctgggactgaaaaatcatcctgaaa

SEQ ID NO: 59055 - DNA, 692 bp, Populus trichocarpa
  Intron number 1 from transcript POPTR_0002s19610.1 (locus POPTR_0002s19610) derived from phytozome v7.0 (chr-ID scaf fold_2; pos 15560083 to 15560774)
gtgtgtcttctacagaaaatctcgattctcagacacttccaggtcaaggcagaaacttggtcttcaggtactgttgtcattttgacttgagtgaaatattgtagtctcttaattgttgcatgcatattcatgcattgcattttttttgtatatacactttgactgaataacaatttaaatttcaattattttatttattatataaccttaggaaaagtgcatacctcctaactgtgcacctgaaggttcttatctgtgtctgcggttcaagtttatatgtttatttaacttacaaattactgaattactgaacttgtaatagtacaccggaaggtttctattgttttttaaaggtatataagatgaacaacttccacgtagagtttgcatatctttatagaactactcgcatggtaacttgaccaaatcttgattgatacttgcattctttggatcagttgttgatgccaattttctgcttgtgcacatagatttgtatgtggggttcttttggctccctttatgtccttacttctatgaaacaataacaacctcattaatgtgtattatctcagtatctcacctactaagtatcctcattattgattaatgtcagaatcccttgtaatctcaccattttaaattgttcaattgcaggggaatttagaggaggatcattttgtttcaggaaa

SEQ ID NO: 59056 - DNA, 1002 bp, Populus trichocarpa
  Intron number 1 from transcript POPTR_0001s44940.1 (locus POPTR_0001s44940) derived from phytozome v7.0 (chr-ID scaf fold_1; pos 45281616 to 45282617 reverse strand)
gaagaattcatttcttggcttggctatcgaaactggtatgacccttttgtttcttttctttgtttcttccatttggttgtagctttttggtttggtgctgttcacgttcttgattgtgtctgtaatttaacttgttatgtgtttgaaatggtgttgatcttgataatctatgagtaggaatgagtgaaagatggaaaattgaatggatacggacattatgtgtgaggatttccttattaaaagaaaggagcatggtgtttaaggcttgaagtatttatggagtaaataaggttccttttttgatttagatgagatggtatttattattgtaatgggttcctcttggtttgtgattatatatgctatgtctagaaaatagcattagtttgtgaatgggatgaaggggtagtgtaagtagtcatttgggcttaagttgattgaagggttgttgttttcaacttgaatcattctgtgtatttttggtgattggagcattctctattacgaagagaagttggtttgtcgatcggggtgaatgaaatgacccttattttccattagagggactaagctactctcaagtttaatctatgcattaaaatcgattgtgcggaaaaacagaaaaaaatgacctttagtacaaatatatgtttgttgatggtcatatgaatccaagaagggaaaatatccatttaacagtttattttgactgaaatgttaattggattttcttccctattctgaatgtcaagactatggtgcttttgttgatcttcgaagaggaggatagaaatgctttatgttcatctgcgaagcttcagatcctgatctttttttgttgactaggactgttaaaaatgaagaaaacatcgcatccttctctttactactcaaactgtattcatattacttcgtcgttttccaatagcctggaaatttgtaattatattcattcattcatgtgcctttggaacagtttgtgctgccatactgacatttgtg

SEQ ID NO: 59057 - DNA, 864 bp, Populus trichocarpa
  Intron number 1 from transcript POPTR_0002s00910.1 (locus POPTR_0002s00910) derived from phytozome v7.0 (chr-ID scaf fold_2; pos 427404 to 428267 reverse strand)
attggagaccttttgatagctcaaggaggatataggtatggctgttgtaatgggattttgcatttcaatgtttttgaaatgtaaggagtttctttctcttgcttgtgatctttgctgtttcctaatttgctcacagagcagtaagaagaaaagggtatttgagtttaagtttgatttgtggtgttaatgggggaattcggttaatttgataaatcattgattaaaagtgttagtgattctgttgggcatcgttaatattgaatattttaaagatgttttgccaatccctaatgcatttatgaacatttgttgcccatcagtactactgtacttcttgatgtcctctctgtttcgacttgtctgttcttttttttttaatgtttgctgcaagtgttatcctctagattagataatttgagcaaattcggggacttagaattggtgatttaccgcacaattatccacaattttcgctgaaatggaagggaaaggcgtgctattactttgcgcaactcgtcagtgcctgcctgcttgtgcacttcttcatctccacattttctttcattgctatagttgaacttgttatctgctagactggataattgagcttgcgaaatggcaattttgaggtttagattgccaattcggtattgtcactggattagaagggaaacgttacttttgtatgcttgcttgctctcttttactgtgattaatctcttttttcttaaacttgggccaatttaatcttctccttgtgctgttattactgccttatcaaagcgaggatatgacttgggaaaaactaagtttagcgttttctgactggacactgcttaattgcagcaggtttatttagatcaa

SEQ ID NO: 59058 - DNA, 956 bp, Populus trichocarpa
  Intron number 2 from transcript POPTR_0001s24580.1 (locus POPTR_0001s24580) derived from phytozome v7.0 (chr-ID scaf fold_1; pos 23833524 to 23834479 reverse strand)
cttcaacagattcttcgtcagatctagacaccgaggtcagtaaaatgacaagattttacagtgaacgtccactttattgcgttttttcagtagtcttttcaactataatgtaacttgtttttgtttcttttcagtttgtttcgttcacatacctgaatttgcttaataattatgggatttaacgagagattttttttggttcctgattttgtcttccccattttggaatatagagggtgtgcccaatgaacaatgtacattaatttgaatgaagactagcagtgcttcccttgacattttctttgaaacgagtattaacgcaacatcgagaatctcctttcctcatatagtaaagcatgattgttttcgagcttgtttatcaatcttttttgttaattcactctcaaagcgccttttatgtacttttcagagtgctgttacttaagcaattaggtgccgttcataatcagttgtcagttcaatgcaccagcacttcataattgctataccagccattcctcgtgatattacagaacagggcacaaattgatgtctgcagattgaattctgtggtccttgtgtaacatatttttcacatatcgccatcaatctcagatcctatctacttatagttttggatcaaagcttgaaatttttgttgataggagaaatgaagtgcagaaaatatgatttaaatatagaaaatctataactaacaagaaactctaaagaaaagactggattcatcttgtacactttcttcggctgaaccagaacccagctgcctagctttactgtctttaatgagcctcttctgtagaagcaactgcttggtttgagattttttaatcttttgacttggctttgtaaatagaaaaactgaatgtcttgtcaatttagaatcattatggctgatcatctatatgaatgatttcagtctacagggtctttcttcc

SEQ ID NO: 59059 - DNA, 601 bp, Populus trichocarpa
  Intron number 4 from transcript POPTR_0002s14340.1 (locus POPTR_0002s14340) derived from phytozome v7.0 (chr-ID scaf fold_2; pos 10613107 to 10613707)
taattagaatcaaattatctaagtggtgggtcacagtgattatggcattgatgctgagtttcggcgattttttttttctttgtaatggtcaatatcatagtggcaggagcttataaatagaccattcacacttaaattagctttccactattcttagggaccatagacagggccttgattacaccacaaaaatctgatccaatatcatgtcagatgatgtcacatgattttatctactaaactaacttgccacagcgcccctcgtcttcttcttcttcttcttcttctatttttttttatttttaatttggtgttaaccttgttgtacgagggacatatgcacattcatggataattgcaatttgtaattttatccgatgatcatattaacaatatatatggtggatttgtttgaattaatcccataaaaaatgcacttcaacacctaaaaaaccaactttaggtcaattttcctttttcaaatacaatcaatctcatcacttttggtttatgaagaaataaaacatcttatcttgtaagatttcagttggtttattcttaactagattagacatcatatttgtctctggtcttgggatcc

SEQ ID NO: 59060 - DNA, 498 bp, Populus trichocarpa
  Intron number 2 from transcript POPTR_0001s38880.1 (locus POPTR_0001s38880) derived from phytozome v7.0 (chr-ID scaf fold_1; pos 38123332 to 38123829 reverse strand)
aagaaagaaaacaagcctatcaaaaaagggtatttcctcttttctttttccttatttaattttttttcccatttcttttttatttatttaattcatggttatttctcattaccttcaattgggtttactacaagcttcaatcttattaatcgtcttgttttgtttctaggcatgcaacttttttaatctttaaattggagaggttaatttattgtactttatccagattttattttttctttgttgttgcaattgcaaatgaataagcggtctgcacttttttttttctttctcctcttcttttggagttgaaaaaagtcaaatgctcttttgcactttttgttgttctatgcttcttctttactggcatgggggccaagttggggttcttgattttattccgatgaatctgtagcacttcaatgctgtgcttcttttcttttgatctttctgttttcctccgtgtcttcaggttcttactgattctgaaacagtgcg

SEQ ID NO: 59061 - DNA, 370 bp, Populus trichocarpa
  Intron number 1 from transcript POPTR_0010s05090.1 (locus POPTR_0010s05090) derived from phytozome v7.0 (chr-ID scaf fold_10; pos 6499508 to 6499877)
aaccagagcaaactgaggcacaactaacgtttgaggtatggatcttcttctaaacctcgtttcttgtcttgttgttcccatttgtttcttaattctctgatacataataatttctcagcagactcatggaactctaaataatcatgcttggttatgttttgctatgaatacaattctctagtcttaaataattgaattgaattgaaaattgagttcaaaacactgttttcttggtatgatttgcaaaatgatcaaaatatttttcattttggaattataccatatcatggatgaggatgaatctgacatgcatctttgtattcgttggattttagccgctctttgtaagtacacacttcaatctctctgc

SEQ ID NO: 59062 - DNA, 1035 bp, Populus trichocarpa
  Intron number 2 from transcript POPTR_0010s04440.1 (locus POPTR_0010s04440) derived from phytozome v7.0 (chr-ID scaf fold_10; pos 5536267 to 5537301 reverse strand)
ttattctagttcagtcatcgtccaacggtgagctcctgatgcattaagttttttttttttttttttgccgtggtctggtgatcctaatgcaatgcgcagttgttgaactagtttttgttactcgtgaatgttgttctgattttcacaattcagttctatgtggttaatattagcattggaacctcagctcataaaagattaatgaggttcttgcctatgataaatgatatttagtgtaggtgaatttgctgctagatttgccaagagtccttgcattgcatgatacgtgctttgtttggttgtcatcaaagacaactcaagtgtattttctttccaaagtttatggggttgaaatgtttgtatactcgtatagcattgaaagataataaacatggctccagaaaaagttgtgagtgagagcatgttggatggacttggggatagacctttttattgttctacatcagaatggaggctcaatggttgtaaagtacagtgaattggcaggattgtcatttggtaatctctaaaaggaacattgaaaagctataacaatataggtttgggtgtatttttgaaccaggtaggaattgggaagaaatgattgtcactcttttataaaccaaaatttaatcaaagatgtctccattagatatcatctttgagggtcgtgctttctatcatcaagtgcctgttgaactgggagtatgtatgcaagcttcaatgttgaacgcatttaccagttggaggaaatgatgaatttgaaaaaaattgagtaacattttctaattagattatgtgacttgtataatctctgatgttttttgtccaactattttaaccctagttaacaatggtgtcgtaaatcttgttcttgattttcaattcccatccgcacttccgatagacttgttcatttgtttgtctttgaacttttcttccgataggcatcctgttaccattttaaccctagttcacttgttttcttttggtgaatcagcggccagggattttgcaaaaccaggagttccttta

SEQ ID NO: 59063 - DNA, 530 bp, Populus trichocarpa
  Intron number 1 from transcript POPTR_0002s09080.2 (locus POPTR_0002s09080) derived from phytozome v7.0 (chr-ID scaf fold_2; pos 6429650 to 6430179)
gaaaaaaggatttcctcaaaggtcttcataacaatagagatattgttgagcttcgaaaccgggttgagatttttgcttctcagtttgccatgccaggatttgacatttgaatatataaaagaggcaacttgcatgcagctgtaggtcttttttccttgccattgtggcttactgtcatttccgcatggtcacccatccatccccccccgttttactgtatttgttattcttcattcatcttgtgtaaaataccataatgaatttctgggatgttgccggattattacaacgtcctattgtaaagttatatcacgagttatttaaaaaatttcaatgatggactaagtttctttatgtttgattgctcggaatcaaatggcgttattttgatacatcgttgattatgatttaaacaggaagacaggatgtctgctgtatcaaatgcatataacatgcaaaacattgtaatgacatcttgctctgggtgatgaccttgctcttcttctttaatgaacccaatgcagattcaa

SEQ ID NO: 59064 - DNA, 997 bp, Populus trichocarpa
  Intron number 1 from transcript POPTR_0010s09300.1 (locus POPTR_0010s09300) derived from phytozome v7.0 (chr-ID scaf fold_10; pos 10163218 to 10164214 reverse strand)
attaagcttgacccttcaaatcccactctttataggtaaaaaaaaagtgacccccaaattagggtttgttggcttggtcaatcattatgtttatcaaaatgcattcttcatttatttttagtgaaatttgattcatttttcaattaggtgttcagttatatttttgttggttttggctggtttgtgattgttgcggttcaagtttcgttaggaattcaagtttgatgctttgccatttcttagaactagttggagttggttgttcttaatttttttgctcgccttcattcactgtattaatgatgattaggtgcgatgcagcatagtatcttattgtgctcgtaattctatattaatcttcatcaaattcgaagataggggccttatacctgagttagaaatgtttaatcgtgcagtgttaaagctgcacttttgtgttttctgtccatctctaacattttgtattatgcatagcgaattgattttgcagaactggtatggcgagggaacaaactttttaactttccaaataatttctttaggcccgctttcttgtgttgagattaggtgttttgcaatggattattctcttgtcttgcttaatggcattgttattcccaataacagttatgcaatttatgaataccatgccagaatcatagagtacatttgtgcttgctaaattagaatccatatggttttcttgatactgttatcgtagttcatttgttttctttatgtttacgcaacttctgtaattgtctataagagctctagttgaatgttcaatgcgttttgaaccttgatagtctctcaatcctattatgataattgactggctttcttaatgcttatccatcaactacaattgtctatcagaggtttagttatgctcaatgatatttcgaacactcaaatcccttaatctttctttccctttttatgattctatcattcaccagcaaccgtgctgcagcatttttgcaattggtcaagc

SEQ ID NO: 59065 - DNA, 585 bp, Populus trichocarpa
  Intron number 1 from transcript POPTR_0001s44440.1 (locus POPTR_0001s44440) derived from phytozome v7.0 (chr-ID scaf fold_1; pos 44859320 to 44859904)
ctttcttccctatcaaagcattcaactctttcaaggtatgcctcttcgtctccatttcttgtttttcatatgtttgtgtgtctatatatgtatatatattaatttattgatgcttaattcttaagatctgttagttttttatggattaatcctgaaaagttgattgattaataactagagatctgtttgatgttttgatgttttattgattttgttgttcagatcttgattggtcctcgtttgctagggccttataagatttgattaattaatataaatcatgttttttttcgtttaattttgatgttaatttgtttaaaggaaaggaattttcttatgattttttcagctttgatccattgacttttaatttcttagcttatttttagatgatttgtagatataatattgtaaaatctttttttttatactaccgatcaggcaaaattttttttttttcatattgaattggttggttgaaacttttttcatatattttgttgaatttctgtctgatttgtgggttacaaacataaatcatacgatgtatctgatctggttttttttttttttttttgtgttcag

SEQ ID NO: 59066 - DNA, 308 bp, Populus trichocarpa
  Intron number 2 from transcript POPTR_0002s05530.1 (locus POPTR_0002s05530) derived from phytozome v7.0 (chr-ID scaf fold_2; pos 3610836 to 3611143)
acaagttggtggaatcggcaacccttttatcgttggtgtttctctctttatttttggtaacgttttcatcattcccagaattcaatatcagcaaaaaaaaaattcaaattcaaatcagcaatcaatcaaagaaagaagagaagaatattgcagcgacaatcattgttttttttttttctttaacaatgaagtttttgaggccaatacagtttgagtataatttctttcttttattgcctaacagtcatttaaattattttgagactgatcgctcaatattgactgtggatcaggcggggcagcaacat

SEQ ID NO: 59067 - DNA, 934 bp, Populus trichocarpa
  Intron number 1 from transcript POPTR_0002s17850.1 (locus POPTR_0002s17850) derived from phytozome v7.0 (chr-ID scaf fold_2; pos 13660552 to 13661485)
agctagctacttgtggtggagtcggtggcagacaagttggtggtacagattgttggtggctaggacgatagagagaggggggactggtttttggccgactttggaccaaagtttcttggtgctcagaccatgaaatccacccctatttatagggggtggaagagggcaatcttgtctttacaggggagaaatttcagcccttgattcagctgagaaggatctcaactgttggcttaaagtaataccatgaactgtcaaatttgacagttaaaagccatcttagtgtcaataggcctgaacagaccatacctggttatagagaaatgtcagtgatcatttggtttaggtgttgtcaaatttgatggagatatgaagaattaaatgcacctaaaaagtagatatctggatatgaagaattaaatgcacctaaaaagtagatatctgggcaactttttcgggtaataatgagaaagataatgaaatagtaaccagacgacgctttgtctggttccttttttttgccacagttcaatttagtccttcacttttcaatgtatgttaattgcacccttaatggaccttaaacttttgatttcatacaattaagtccctagaaaacttcaattttaaccctggagttctacgcctttttcattttggtccttaatctcagatttatgcattttggccctcaattgaccattaaacttttaattttcttcaatttcacctccggttttgtcaattgggtcctcatagttcgacaccttttacaaaatggtccttggctgtaaaaatccagaaatgagttatgacccattgcaaatcaacaatgaattcaacctgaaatggcaatacattaccagaacgagttctaattttagttatttactttgcaggaacatcttgtgacagaaaggaaggtgaaaccagt

SEQ ID NO: 59068 - DNA, 447 bp, Populus trichocarpa
  Intron number 3 from transcript POPTR_0002s25020.1 (locus POPTR_0002s25020) derived from phytozome v7.0 (chr-ID scaf fold_2; pos 22230860 to 22231306 reverse strand)
gcaaggccattcagcttgatcattactctgtcaaggtaatggttttttatttgattttattaatgtcataatcgcaattgacttataagatagaataagaatggtttgatggaagtgagtgggttatgtgttcgacgcgtcacgagtttgtggatgttgtacttgtttttgttgatgatggatagagaagtatcttatgagtcggaaaatgggaaagtgattgaaaatgtgatgaatggtgttaaaatcttgaaaggaaatgtgggttgtgattttttttttggaatcttgatttttgttctaagaaagtagataatggttctgaggtgaatgtttgtttgtcttttgaatttagaagaaagcggttgctttttttttttttacttctatgtagtgtgggtggttgtgcaaaattcacccttgcttgctgctttacaggctcactat

SEQ ID NO: 59069 - DNA, 787 bp, Populus trichocarpa
  Intron number 1 from transcript POPTR_0001s09210.1 (locus POPTR_0001s09210) derived from phytozome v7.0 (chr-ID scaf fold_1; pos 7055947 to 7056733)
aggctcaagttctgttctaccccagttttgttaatgtaagctatccttaatttaatttgttttggttcttatctttatctgtgggttttttttttgttttttgttttttaaaaatattcttttgttgttgcatgcgtgaagtcaaagcaattgaaattctttttctaagttttagattaaggaaagtgaaaggcataagggacttttataattagtgcttctttagaatcttatagtattctgcaactagttttttcctagttaataccatctgtgagttcttgcttaattatgtgaattagaagacaaatttatttaaggttgaggccatgtcatattagaatgtctgaatcccatatcccaaccttcagatttgtaaacaataacaaaatcgaacaaattttgggtcatttgatagtggaaatgaaacacagactacttagtttggaaagctcttccaggggtggcctcaaatttgatatcaacaactttccatattgcatgttacactatttagtggcaatataccaccttcttctttcaagatagtagttgtatcatgcaattagcatatttacaagcatttctttttaactagctagctataaatggaatacaaacatgtctagcgttccttctaagtttcaacaatctgacattgcatttcactaacctgcactgctatgtcaagttgccccaactgatagtttatagcagtaaaacactccctacctgtcttaagtaatctgataatgacaggaagaaaccattcgtgagactattgaag

SEQ ID NO: 59070 - DNA, 997 bp, Populus trichocarpa
  Intron number 2 from transcript POPTR_0001s37820.1 (locus POPTR_0001s37820) derived from phytozome v7.0 (chr-ID scaf fold_1; pos 36907839 to 36908835 reverse strand)
ttgccaacgcttttcggaggattctcatatctgaggtgtgtacgctatgcctagttctggggattatattcttgtagataaacagtgatgaaagcttgatttttagttagttattctgctgttcttttgtaataattgatatcctcttttatagatcatttatccttttctgtttttgcacattgggggatgatcagctgtcaaagtttcttaaactcttgtctgaacatgttggtgtgacgaaaattgcaaatttcttctaatctgcatttgctcatatttgttgttgataggtgcttgcttgcagtgtttagtacccctaaaaaattataactttggacagactcttagattagatggttcctggaaatgtgcttgacttataagcatattaaagccatccacggacaaaatggaacatttagtaattttaaaacagcacagttctatcacgagaagctctcattacattcatgtcaatggataaagttatcctcagatttgttgttgataggtgcttgcttgcagtacttggtacccctaaaaaattataactttagacagactcttagattagatggttcctggaaatgtgcttgacttataaggatattaaagccatccacgaacaaaatggaacatttagtaatgtttaaaacagcacagttccttatatcatgagaagctctccttacattcatgtcaatggataaagttatatcatgagtagtagtggattgtggaaaatagttttcacctttttcattgtattctatttttggtttcactagttgtttccctgctgagaaatttgaatttcctaactgaaggaatggagttaactctctctctctctccatctatcttgtctgaattttgatttacgatattgatagtttgtaaattcatgtcttgttcattatctcttgtgtgtaaagcttgtcgattgatggaaatgatggattttggttttattctctttatgtaggttcccaca

SEQ ID NO: 59071 - DNA, 426 bp, Populus trichocarpa
  Intron number 1 from transcript POPTR_0001s37820.1 (locus POPTR_0001s37820) derived from phytozome v7.0 (chr-ID scaf fold_1; pos 36908959 to 36909384 reverse strand)
ctcctactaatgtatttctaactcaccctttttatcctttcttctaaagactcaagctttggtagaaataatcatcgttataggataggagttagtttgagcttaatacagtttgttatagcttaatttagctcacatgtttgtatcttgaagtttatgaagtttttaactacagcccagttgctggactttgttgctgctatgtttggagatgggaaattgatggttattgcttttaatgaacatagcactatttgcagtgcgtttatcttgttatctcacttgatttggaaaggaaaagagggaaaattggaatggttaagtttattttaattgagttcttcggttttatttgtctctttaagtgcttatattttttaggattttggtttctgcagactgaaactttgcaatattctggttcct

SEQ ID NO: 59072 - DNA, 603 bp, Populus trichocarpa
  Intron number 1 from transcript POPTR_0001s37200.3 (locus POPTR_0001s37200) derived from phytozome v7.0 (chr-ID scaf fold_1; pos 36162126 to 36162728)
actgactgctgctctttctggattttggtttctaggtttgtttattggttcttagtagggtttctgtttttttttagtagtccatgtgcaaggtctcatttgtgggggctttttggtttatgggttttgatgattataagttaaatcgacttagattttgttaattttaaggttgggtttggggttctgaagttgttcctgttgaagtttagggttgtcttttgggtttgagaatttttatgttcacatcagctcaagctaggggcttcagctgtttgccttgcttctgagttttgatagttggctgtatcttgtcttgggtctaattggttcatgcgaaaggcctgcttttgtcatttgcctctgaattttgggaacttgtgttttgttttaggtcagatttggtgttagaaaaggtgttttaatatatcaaatatctcttattttgggatataagttttggaattgattgttattgcaggatgtagagtactaaaaatcatagtatctacggtcttttcaaatataggtcttctgttttctaattttaaggttgagttttgattatttttgtgcctttccaggtctattgttcaagcagtt

SEQ ID NO: 59073 - DNA, 746 bp, Populus trichocarpa
  Intron number 2 from transcript POPTR_0007s01390.1 (locus POPTR_0007s01390) derived from phytozome v7.0 (chr-ID scaf fold_7; pos 786818 to 787563)
tcttcattgaagcagatctattagcaacagaattggtatgctctacattctcatatgacctttgaatgtgtgttttatatggcttatcagttattaccacttttgacgtcaagaaaagtttgtccaattgtgtagggtctcacagaactggggtgtttcagtaacattatgatgcttcacggaaaatgtttccttcagagttaccttgtactttataaacatgtacaaaatattcagttaaaagatatatagaagaagatctcagtgattgcttgctagtaatatttagatcaagaactagcagcttgaaaatattcttcactcaaatctgtttctcgtttcacaaggcacttccacaaatggttaatcactcttggttcttgttttgcttgcgttcttttaaatagtttctctctgattattaattggtgtggtcatttcttgtttccaaagttgtcactgtatgtcgcatagtaacaaaataaggttaggatgaaaattgcttgtctattctctagataggatatattatgctacgtgtaacatggtttattggacaatctggtcagggatcaaatacaagcagcagccaggaatatgaccaattgcaaacaacaggatctctgaataattggcttttgaagatttttctgagaagaataaggctgtcaatcaaaataccaaggtttttgcttcaggcttgaccataggcaatacagacccattttcattcattcagggatcag

SEQ ID NO: 59074 - DNA, 689 bp, Populus trichocarpa
  Intron number 1 from transcript POPTR_0007s00870.1 (locus POPTR_0007s00870) derived from phytozome v7.0 (chr-ID scaf fold_7; pos 441233 to 441921)
ttcttatcaacactttctacaagctagaggctgaggtaaattatatatgttcttcatggttcaattgtagcaaactctctttaatgcttccattattttcttttctaccgatgggggacttcccaaagtttatggagtgaaaaagtaaaccctctttatatttttattttaattgaagtattaagatattctaaacatcataaatcaattatggttgatttataaaaggcaccaaccatttcagaaataaaaccaaagctaagcctgttatggatagaaaagctcctgacccacccctaattcttcagctagaggcccaggcctacaagtctattaaaaaaatatatatttatgtgccgctgctatagaatttaagtttgtttgaaagtgttttttttaagtattttttatttggaaatatattaaaataatattttttattttttaaaattattttttatattaggatattaaaaaattttgaaagttaaaaaaaattaagttaaaaaaattaaattttactccgtttaaaacatagtataattctggtgcaataaaccgtttcatatgtataaaactatcgagtgttggagattagtctgtaactgacatggttcaaaaaacaaaatcatattctgtgttttctctggacaggcagtggatacaatatcaaaagtctgcccaacatt

SEQ ID NO: 59075 - DNA, 544 bp, Populus trichocarpa
  Intron number 1 from transcript POPTR_0007s02160.1 (locus POPTR_0007s02160) derived from phytozome v7.0 (chr-ID scaf fold_7; pos 1284038 to 1284581 reverse strand)
acttcactgtcaaggtaatgttcaatcttcttccttctttttcattgtttgctgtgtggttggtgaggaaacgggaaaaagtagagaacagaggacaaagctttaaactcttattgttttgttatggatttgttgatgttctgtgtgttaattcattgcttgagcttttgacttttattgaatatttgttggttcttaatcttgctgaacatcattggtatggggcccttcaaatagagttttgtagtccaggattcagatacggacatttgacttgagttatttccagtccaggctatgtctatgagcaaggctgatgatatcatattcaaatggatagtgatactctaattccaagtcctctgtgtattttattttaattattgctccttctttttagataactgagccatggtgtagttagggtaatatggaattgtgatttgcagattagaggttgtttagatggcaacatcaattatgtttcttgaagttgaggaatcccagatttatataacgtttcttgctgtgttgcaggatatcc

SEQ ID NO: 59076 - DNA, 748 bp, Populus trichocarpa
  Intron number 2 from transcript POPTR_0010s08840.1 (locus POPTR_0010s08840) derived from phytozome v7.0 (chr-ID scaf fold_10; pos 9641095 to 9641842 reverse strand)
actgaattaggttgttctccgcttgaaaagctcaggtatttgatcatctcattctcttatgatttccaagtttatgccacagcaatttttaataaagcatcttaagtgcatgccgtggcaaaacaatacatagctgtttctgatatagttggactatcgtattacacatatgtaggacgtattcgaatgctgtttgagtagtctccatgcagtgcaagtgaaattatcttagggtgtcagaatgattgaccaaggaggacgctatataatcactgaaacgattttctagacattctctgtcttttccaactgcagaaccaatccttgacactactaattaatgcacttggaaggaagatatcaaatttccgagtcaattttttagacatttacaccaaacagtaagtatatgctgcaaactgtagacatgcaatgtgacactaggaaatcaattatcatgctgcatgttcctgggcagcatccctgccctgccactcatgtgggatgcataatttatttattaggattctctgatatagaatcttgaaatattatgattgaacctgtgcctcaacctgtttatatggcacagaacaattagaagtccattttcaacttggaagacaaccaaaattgagaaactggtcatggatttcactacagcagcatggtcttggtctgttttaactttctttctttatgttaatcaacagggcagaccacagctggcaagatttaagggccaaaa

SEQ ID NO: 59077 - DNA, 723 bp, Populus trichocarpa
  Intron number 1 from transcript POPTR_0010s08840.1 (locus POPTR_0010s08840) derived from phytozome v7.0 (chr-ID scaf fold_10; pos 9641898 to 9642620 reverse strand)
agacgccactactatctctgagtgcctccatacttgtgagtctctctctctctctctcactcacttctgtgtgtgctcatcttcttctattttgtgatattcgatgtggtttctttgttttgttttgtttcttgttgtgggcgcttaattgttagttcacgtaatctgtgtatcatcttttatttttcggagttgagcttggtttattgttttaattggttatttttgtgatatggagaggagtgaaatgcggttttatgatcttgttttttcttcattttgttttcctggtctttctttgctcaatggattgggagtttgattttgaaattaaggaaaagattgaaatttgattggtaaatatagccttttcttttgtgtttgagcaacgtatgatgtgagcttacagtaaatttgtttgctgaaatagtaaaattttaacttggggttgttcgaagcttttgcatggtcgctgtgctcttcaagtccatcaaaattgtcaggtccttgataagttcatgccgtgtcaagtgagaacagtactgtgtttgggggatgatgaataaaggttttgcatttttattttcctttagaaacagtttcttagtgttctatcatttaatcagtatgttttaagtgtgtcttgttatatacatattctctcatcgggcatatatctgatgcctgcttcttcattttaatttttgaaacagtttgcagaaa

SEQ ID NO: 59078 - DNA, 810 bp, Populus trichocarpa
  Intron number 3 from transcript POPTR_0010s12040.1 (locus POPTR_0010s12040) derived from phytozome v7.0 (chr-ID scaf fold_10; pos 12146631 to 12147440 reverse strand)
gtggaagcgggggttgttcctaagttggtgagagttctgtcacttttttaaaccaggaagaatagaagttgaatttggtgttggttaatgtcatcgaactgtggtgatttaccttttaaaatggaaagcttctacaaccgaaaaaagtctgaaaatggatgtgactggctctttcaattggttattttgcatttctttttattagtttgaaatagatttttttgagtgggcaacaataaaaagtagttgatctattttcttttggttagaagttcgattttgtgattacagttgttttcccttcttgttcaacatatcttagacacagtggtggtcatctagttggcaaagtcctgacacattgaagcattttgtgctgatctaaatgggagagactttttcatgtcatcttcttgactgattgaattttgttaaagttgaaccggctgttcatgcctctccagaagaaaactacattgctcaaatgtgcttaacttgtgagaagttccacatagtttcctttcctcatggtgctgctcttaagagtttgttgcacatcaatgaagacatttgcattttccgaagtttgatgtgcatagatggatttgccgatctggctttttgtgtcttatttctgtcaagcgtgaagaaaccctgtaatataaaagccttttatggagcgattcacccttaaaagtacatcctagtgtacccttcatttgaggcttgcttccagtattctaagaagtctaatctcctttggtgttgactgcaggcggatttcttaaaatctgcggttgaagaagaatc

SEQ ID NO: 59079 - DNA, 631 bp, Populus trichocarpa
  Intron number 1 from transcript POPTR_0010s12040.1 (locus POPTR_0010s12040) derived from phytozome v7.0 (chr-ID scaf fold_10; pos 12148038 to 12148668 reverse strand)
ccagtccgcaacaaaaggctagttctgtgattcccaagctgccttttgttttccaagtttggttctcactgtctactcactgccaatgcatcgtgtatattgattgaagaagcttttccaagcaatggtttcttgatgtttatttaggccgtgcagatatgttgatggtgtttctttatggtttttcttgcttatgatgaatgatgacagcatcttggagttctggccaagaatttataggtttctatttgttttttgtttttcgttttgattctatcaagtacgtgtaagcgtggagccaacgaaaataaaaaataaaatagggagcccttatcagtagtgtcttacgataaattcctggtcatttacctatccctttaactagctaaagtttccgaagaagccaactgtgattctagtattttctttagaattgacaattcttttattatgtttctattgtattttctttctggaaacccttgggcttgattgagtggtaacacgataaattagcacttggttataataatcaggggatgactaaagttcctcttttcatgctaaacagtgatgcatcttttctctaatttcagaagattgaggaaacaaaaggtagctcatctagttt

SEQ ID NO: 59080 - DNA, 805 bp, Populus trichocarpa
  Intron number 2 from transcript POPTR_0001s41930.1 (locus POPTR_0001s41930) derived from phytozome v7.0 (chr-ID scaf fold_1; pos 41682877 to 41683681 reverse strand)
taggcctttgaagaaaccaactcttttggctataggtactcaaatatttatcatggtctgcgcatataattcaattgatttcatgattgtttaatggttatgattaatattggggtgttcttaaagaagattgtaggattcattattgagaattggttatgagttggtttgagttgcaatcatgcttctgcatggatgtgttgtattggttaaagagtgattttgtaagacatgtatttatattgaaatgaaacttacagtctaatatttaagcttctgggtctgatttggtgccgcttgggtatagatgtttttgtttcaaatcccctttagcttataagaggaattggcctgaaaaagaatttcaagcattgaaagtacatctctgcttgccatcagatggctccccaccctcttctctcaaatatatagattttcccaatgaatcttttggaaaccgagaaaagcaccctaaccagattcattttaaagtcaacatagatatgctgaagttgatgttttggattcttcaaaactacaatttcccactgtggtataacttctacactgtgaacttctagtcttagatacgaactgacatggactttgaagttttgtatgcctcattcagttcttgcatgtgagccacttgtttttaggtatccctaatgctttacctgttatcatatgaaagcctaataattctttacaaagttacgattttttcttttaattattggctagctgagaacaatacttaagtgattttttgtatttgcaggtgttgaagggggatttgacaaca

SEQ ID NO: 59081 - DNA, 588 bp, Populus trichocarpa
  Intron number 1 from transcript POPTR_0001s41930.1 (locus POPTR_0001s41930) derived from phytozome v7.0 (chr-ID scaf fold_1; pos 41683792 to 41684379 reverse strand)
acaagcaggagtgctgcgtctctttcgaaactccggtattcttttctttctttctttccgtttggtttccaagaaagttcaatttttattgaaagaggaaaataaattcgaatatttttttgtaaaataatctaaataaccacaactctacttcatgtagatgataactctctaagttctaatagttgcttgctgtgacattgttctggtttgctaaatgtatttctgtttggttcacgataaagtgaaaggaaaaagaaataaaatcaaatataggaattatacatttttttttaattttcgcgccacctgttttggtttcttattaagtgaatgaatacaaattttgtttttatgatttctccttttgaaaaagcatggaagtgaggaaaatactagccagacttattttttttttaatttaatattttatgttctttcattttgatgcaattgcagttattatatatatatatatatatatatatatatatatatatatatatatatatatatatatatatatcttatgctgctggcattttctttgatgaattccagaggtctgaaggcgggttgtttgtcgac

SEQ ID NO: 59082 - DNA, 900 bp, Populus trichocarpa
  Intron number 2 from transcript POPTR_0010s16320.1 (locus POPTR_0010s16320) derived from phytozome v7.0 (chr-ID scaf fold_10; pos 15289640 to 15290539 reverse strand)
agaatattattgtcaagtacccagatcgagttcctgtaagttctctcttatgtctctcttattgttctgtatttcttttattttgagctgttattttgattgatttatcatgcgattgcttctctggttttctttctgcaagcacaatttttgttcttgagatttttgcgctctatcccttttcttttctaatctgggtgctttccggggtctttgtcttatttgacaaatagaatgcgcagccatatacctgatctaggagggctcggtgaatgaaagctagcccctacctaagaaagaaaagattatacggttggaattctaaaataaatctgaaaatcccaaaataggtggaaattcctcgtcgtgatttgggtgtgcaagttttctgaatatacagatgtttcctgtatgttctttttttattgtgatttgccatttcaagtgttaaaacttcaataatgatgaatttttttatttttttttaaataatgatgaatttttaatagctaaggtggttgctctcttgtggcaatcaaaatcatcctatatgttttcttggagaaaatgtttactagttgatgcagggcatttgtcaaaggaatgcagtcattgttatcgaatattgttggtcttggttgactaggacaaaagaagtaattttggaattctatttagaatgatgtaccttttgtaagttacgtaaccttgcaaactaagccaaagcttgattgctgagaaagctaagctaaatttgacttcatcgatgtaatttaactagcaataaaagggtttttttttttgtttttggtttttgttctcttcacccattcgagctcatcggtttttcttcgattttcttaaggtgattattgaaagatattcaaggacggacctgcc

SEQ ID NO: 59083 - DNA, 803 bp, Populus trichocarpa
  Intron number 1 from transcript POPTR_0007s10020.1 (locus POPTR_0007s10020) derived from phytozome v7.0 (chr-ID scaf fold_7; pos 9669107 to 9669909)
tggaggtttagaactccagaacaagctcttggaaggtaccaactttatcatcatgaactgccaaggaagaaaatgaagagaggctgaacgacttgtcgtctgggttaaaattatagaaattagggttttcaatttgggattcagtaaagtttcaatttaatccttgttcttcaaattgtggtatatgtacccttaattgacacaaaagctttttaattgcatgcaatttaaccaccctaaactcgattgtcagcccctaagttgaatgactttttccttttagtcattgattctaaatttgtgtattttaaccctcaattgactaataaacttctaatttctttaatttagcctctgatttggtcaatttcagcctctatattcacgtggctttttctagtttggtcattggttttggatttcttcaatcaagtctctaattgcccaataaactttaatatttatgcaattaagcccctaatttgaccaaattaactcttaaagaatacaattcgacccctagactttaatttgttccaattaaagcctaaattgactttcaaaatcaatttttcttgcaattaggcccttaataaattcaaataaaccttgaaacattctaattgagtcattacaaatccaattttaaattttcctcaaattaaattttatttgccaataaggccttcgttagtcgaaaatatactattaaaattttcaatcttgtatatttgatcttcctcaactagtctccagcgatttcctggacattctggtatacatttctcacttatatatataag

SEQ ID NO: 59084 - DNA, 374 bp, Populus trichocarpa
  Intron number 1 from transcript POPTR_0010s19770.1 (locus POPTR_0010s19770) derived from phytozome v7.0 (chr-ID scaf fold_10; pos 17597319 to 17597692 reverse strand)
gagaaggtagatctgataaaaaaaattggcgtttgattgatattttctgtgtgcttaaaagataatttgattaaaactgtatttctgtttgaactcttcgtgagtagtgaaatttgagagttaatatataattaggagttttgatcaatgaaacaaatttaagacttgtttgaatcaatgaaactttattttatttgatttgcatggatcaagaaccaatctgtaatttatgtttatatatgtgattgtggtcttgattggttcaatttgatgaaagtattagtttttattacataaaatgatcatgattaattatgttttccggtttttgataccaaggcaaaacgccatactgttggaggataaggagaaga

SEQ ID NO: 59085 - DNA, 617 bp, Populus trichocarpa
  Intron number 1 from transcript POPTR_0010s05170.1 (locus POPTR_0010s05170) derived from phytozome v7.0 (chr-ID scaf fold_10; pos 6604328 to 6604944 reverse strand)
acgtgatcaactactccaagctccgcatttggaatgtatgtgcattattagcataatcttataaacttgtagtacaatttttttgattaattactcttcttttatggtataatatattaattaatacagcacacagacacttttagcgacaaaaatgtggagtttatatattcaaactgatgtgacttttctgcattttttttaacaacctattattaattttcaaagccgtcgagttcataatgaggttattttaacttgtatctcaagtaatatatgcttctgtgcgagtgtgtgtataatcaaatgatgtttaccagagcttgaattccaaaacccaacaaaattaatttataaaatcaatcctaatttttataattaattagacttaaatagatgagatgtacagatactgtataggaataaaaaggtctctattcatgcgtaggattaagataccttagtgtttattctgtctctagtaaaaaagaaggtctctacctcagcttgcgacacaagttggtcgccaaaagttggttgtttatgtagcaaatggtcatataaaagtatatgtttgcttgcttttcttgtatgcacagttcgaggagtacagcaag

SEQ ID NO: 59086 - DNA, 513 bp, Populus trichocarpa
  Intron number 1 from transcript POPTR_0010s05080.2 (locus POPTR_0010s05080) derived from phytozome v7.0 (chr-ID scaf fold_10; pos 6488384 to 6488896 reverse strand)
agaatccttgagagagagagagagagaaagaaaaggtctgtagcagatgcttctttgagtatatgcaccgatcccgattcataattttgtgaaattagaaactgttgcagattttgttccttctccttcttttcttcttttttctgtttcaattttccactctattcattctttgacaagctggttcagcttggcatacgattaacaacatctcttcaatctccatgtgttgttttgactgtgatggtgttttgatcatagatgcttttgatctctttctttctgcatgtcatgagtccccagaaatattaccgtatatatatggattgatctgttactggtagttatgtcatactaggtataattaattcaccctgttagaatatttacaatcacaagctgatcagtgtttcattatggatctgatcgagttgtgtgtgctcgtagtaaatcttctggtctctttctctaacatctatttcgtttgactggaattaacagaaggaagaagac

SEQ ID NO: 59087 - DNA, 418 bp, Populus trichocarpa; identical to SEQ ID NO: 57716
  Intron number 2 from transcript POPTR_0007s11280.2 (locus POPTR_0007s11280) derived from phytozome v7.0 (chr-ID scaf fold_7; pos 11625179 to 11625596)

SEQ ID NO: 59088 - DNA, 772 bp, Populus trichocarpa
  Intron number 2 from transcript POPTR_0001s38570.1 (locus POPTR_0001s38570) derived from phytozome v7.0 (chr-ID scaf fold_1; pos 37779682 to 37780453 reverse strand)
taggatcagcaaagcctactgagagtgaacgaaaggtctttattcatgttccatacgttatgcttttgttttttgttgtttctgttgatcagtgtcacttttcctggcactaaaataatcgtaggtcatcatgtaattcgctttggcgcaaatgttccaagtaattctcttcatgagcacagaaaaatattcacttagattttggtggatatgcatctcataactttggaactttttacatagaagaaaaactgtgaagcttttggtcaacctcaacctgttatttgatgcgtgttatattcttggaatggtgcacttgagcgcaccatcttggcaacttaaaatggcaatattactctcaccaggtaacagaatttcatgtataaaatgatatgaatgtgtcgctttcctgtgattaaaattatcaaacacttgattgtacaagggaggaaaatagaaaaagaaagagaatcgacaagaattattttatttgtgctagtgcactcatttcatgcttgaagcttatatccttccttgaaatattattatctagcaataatggcatggaaactcacaagaccatattgtatctgctaaacttgccaattttctcagtatagagctgctttcctcttatattgatatgcaaattaaaacatacctggcatttgacagatacatatagtttagccggtgtgaatagtttttgtaatctcaaactatacgctttttggcaggaagtccggcaccatctacttgacatattacaccc

SEQ ID NO: 59089 - DNA, 946 bp, Populus trichocarpa
  Intron number 1 from transcript POPTR_0001s06400.1 (locus POPTR_0001s06400) derived from phytozome v7.0 (chr-ID scaf fold_1; pos 4900803 to 4901748 reverse strand)
gcagccaccggtggatcgccactctgtcactacacgtaagtattttcagatcccatctcttgaaatccatctctaacctctcctttaaaaaaaggaaactatcttttttacttgacatctgccaataagtaatcttgtaaatttcgaagagtgattactgaatactgtctcaattttgtgttaattagagaccctttcgaagaaaaagtttgtcctcgtgtgtttgtttgattattcaatttttcatgtttaattgcagttattatgctcaataatctaaattttagttggtcctggaccttgtaaaacacctgttaaagtatccaattttcttcagtcagcatgcattatagatttctgaatatagtaagtgtgaaaccgtaaaaataattttcttacatgcaaaagattgatgctatagccggggaccaaaagaagcttaaaacactgatagtgctgaaccgaagagtcaggctatttgagttttgtggaaattataggccgggtagagatatacaagaaggtgaattttgtgtaattattccaactgggaacctaagaaattggtttctgatgattaataattagagcaaagaaagttccttgttaagttctagttaggtttttattgttttcagatagttggcatctctctctttgacataaaaaagggatctttttgtgtctttcgcatacttgatctgaggtgcagagatgattgattcactttgattgaaactttgataggtgggagagtaaaataccttgctacttgaatcattcattacttcaacaaagattttggtaaatgtgaatgggaagcgttggctgcttcccacaattcacttgcttgctccgcagatcagcttataattttgcctaaggtgtacttgacttgacaaaaagtgaggatttcgcaaggagaagagagaatcattgttctata

SEQ ID NO: 59090 - DNA, 839 bp, Populus trichocarpa
  Intron number 1 from transcript POPTR_0002s16460.1 (locus POPTR_0002s16460) derived from phytozome v7.0 (chr-ID scaf fold_2; pos 12321787 to 12322625 reverse strand)
acaagtttctagaagccctccaattgtaagtatcattatacttctctctctctctctctcttctcttttattcatttatttttgcttggttgctagaaaagagatttggatttagtttcacttaattgacaaaatctcagctaaatgaaagaatttgaataaaaaaataataaaaaggtttttgagtttgatgttaatgattgatatagtaatttggtttttttaattaaaacattttttttccattttaattatagtttggattttgaacttgggactttagtgattgattaaatacgagaatttgaaaacaaactgagggaataaagggttcttatcgaagtttgggttctgagtttgctttgtggtgtacgctagtgttaatgaaagcatctcttttttttaattattattattaattttaattgtaatttggtttttgaaacgagggctttagtgtttgatgcagaagtgagaagattttgggttgctgaggaatatggcgagagcaataaaagtgaaagattttgaatcttaccacttattttggtaaaaatattattgtgtgttctgatttttaaaacaattcagtttgtcacgttcatcaagctctgactgcaatgcctaacattcaaacttctaaaaatcttccttttggtcttaacaagcagaaattgttattcagttacgtcacaatatgataaagctttttatgggattatctatgtcaatgtgtgtgtaaggcatatgctttctgacttgtcggttaatagaccgtgtgccctaaaattcttttggttacagatttgatcgtgattggaagaagattgaagcatttg

SEQ ID NO: 59091 - DNA, 1031 bp, Populus trichocarpa
  Intron number 2 from transcript POPTR_0001s27200.1 (locus POPTR_0001s27200) derived from phytozome v7.0 (chr-ID scaf fold_1; pos 26109397 to 26110427)
ctaagaaggtcgagtctggtgataccgcggtgagattttttttatgcgtttgtgtaattaatttgtattttttcgcaaccggtgtaattgaattttaatatttttttcttttgttgtgaatggattttgtgtataatgtgaatgtgtggattttttggttagcaaggctttcgatttcttattaataattggccctttgcatgtgtttggattctttcattttcaatgtctagataccgatattaggttcttgtgtgtggaatggcaattgttgatttcttttactagttgctaaattttggtttaatggatacttgtgttgaaatttttgatttggggttgttttggtatctagtttattgaatgtgaactgattttgggtgtctgcagtagtagctttgaacttgtaatggtggtttggagttcaatgatgaagtgctaagtgtttttaccatccaactgcttatctacaaccaaatgctatctatataattcaattaatagaacagaagttaattacactgcgatgtttgattttctacttttggatagtgattgtggatgcggaggcagtttttgagtttgacctaatcttggatttacttaaaaagtataaaagtcagagatagttgagactcaaaacaagtaccagcactcattcatttgctaaatgctggtttgtgtgggacttgtaattgtttttctttctaatatttcggctgttcatttcgtgttagcgtatttataattcctatagagattgggaagaaatctatgaactcttattggcatattcattattcatttgttattggacagcatggtattccaacccttctaatgcgctaaaaccttctcatctagatgcatgagcatgtttatttatgaacaaatcctcctgttgacgagctgtggaaatcagggggaaaaaatctgttggttgttattctgatatcatgtactataccatttgcaaaatctaatcacgtattgctcattttaggtaacctcaaaagatatttcagaagaag

SEQ ID NO: 59092 - DNA, 620 bp, Populus trichocarpa
  Intron number 3 from transcript POPTR_0010s06620.1 (locus POPTR_0010s06620) derived from phytozome v7.0 (chr-ID scaf fold_10; pos 7911767 to 7912386 reverse strand)
ggtcttcaaaggaagctgaggaagtttccaaagaggtaggtgaatccctgatttttataattttaataccaaggtgtccttcagctttgcatttttgtgtctcacggttcaaggttttagtggctagctgaccattaataattttctggccatcaccgaaatgctggtttgattagcacgagacggtccaattgaaagaaatagaaggtgccgatcaattattttccaccaagtgttaaaatgacatactttcaagggctcaagatgtgaattagctcctttgtagccagatgcggtcgggaaataataaagtcgccgctttatttcttttgccgcgctgcccaatgtttacccttttgttgtctggcctattcttgatgacctttttgaaatggaagtaaataatgactaaaatggaaattggtagagatggtgatgtttggtttaacagcttcgtcaggtttcattcaaaatattttttctcaaacctggaaatttcagtttacttgctgtatatgtggttgtttcttctgtttactggaaatggaattgttactaattcacagtgcatgattaaaactaccgttgggtttatttgataattttgtagattgaggctt

SEQ ID NO: 59093 - DNA, 532 bp, Populus trichocarpa
  Intron number 1 from transcript POPTR_0010s15200.1 (locus POPTR_0010s15200) derived from phytozome v7.0 (chr-ID scaf fold_10; pos 14534186 to 14534717 reverse strand)
gtgccgctcttcacgctgttgagaaggtagttaacttcttaactgttttcttctcgctttttaattgttaatattagaagcttagattaagtatttaattgatttctactttttaactttttttttattatttaaatcacattgatcttcatctgttgatttatttttgctgtctcgttatgtagtgaagctcagaccatctgtgctttagtgtgactgttttttttacttattttgtttgaatgtttgtgatcctcacctttttatttgaatcatagtgattttgagctttaatttttgttgattaagtttacaatcttagattacttgtgcctacgataactgtacaagcgtagattaactgtgctttatacaataacataattgtttttcttttaattttatttattctttatagctgagctttagtgttacttatttgctattatttgctatttgaactgagtagaatgggtgtgaatcttgaaaaatttataattacagggtttgaaaactgctattattgaaggag

SEQ ID NO: 59094 - DNA, 455 bp, Populus trichocarpa
  Intron number 1 from transcript POPTR_0010s14840.1 (locus POPTR_0010s14840) derived from phytozome v7.0 (chr-ID scaf fold_10; pos 14315467 to 14315921)
ggtaggcatcaatttcctctccttcccttttgttcttggatgatgggtttttgttgatgaggtgattagccgtgttttatttccgtttttaaggatttttgatgtggggtatgtgtgtttcttatttactttgtctttgtgatcttaactacaacatttattttttgccactgaattctgtctaccctgtatatttacatattctctcttggttttcataaatttctctttttattacaaaaactgtgaaaataagatgatttttaaggattctttaataatttaggattactttttatagttttccgtactgttggggttattaggagtacctgttttctcattggtcatggttcttcttcaagaaaccagcttttggttttattggctggttctgttctcatagtgtttttgctttttcctcttcaaaatttttaatttctacagaggtcaac

SEQ ID NO: 59095 - DNA, 398 bp, Populus trichocarpa
  Intron number 4 from transcript POPTR_0010s15770.1 (locus POPTR_0010s15770) derived from phytozome v7.0 (chr-ID scaf fold_10; pos 14890008 to 14890405 reverse strand)
aagcagagtcgtggtgtgcccttaactcttacttcatgttaagaaacataatattcctgtatttgaattcattttcttttcaacttaatgccgcatatttttttctaggtatttgtggagcaaattagattgttattgttctttttctaaattatctacataacaataagggatgggtggtattatcagtctatatctcagtaaacaattggccaacattttatgtgacagcatgcagggttgatgcttcttctcagtgcattcttcttggcacttccttttctttattatcttaactatgtgaagctaataccatcatgtttctaactttcgactgctgattctcctgttgaattcattctgaaggttgtggttttgttaaatactcccatagagac

SEQ ID NO: 59096 - DNA, 768 bp, Populus trichocarpa
  Intron number 1 from transcript POPTR_0010s24710.1 (locus POPTR_0010s24710) derived from phytozome v7.0 (chr-ID scaf fold_10; pos 20765958 to 20766725)
gactgaggacgaacacaagtgagtttgtgtgtgatagattttgaatcttgttcataattttttaaaagtttgaatttttgtatataatttgtttcggaatttaacaagtgtgagctattatccaacatcttctgcaagtttttgtgttttgaagcaaatatctatatgggtaatctgagtatttgttgatgaggggctgcaaaatcttgtgcggtagatgagtctacgaagggtaaatgctggctgttgaagtgtatttcttttaagatgcaattttttaagctcattgtgtatagttgtatagcttttatggaaaccttagatcaagggtagtagacaggaagttttgcatagagttagcagtaggaagtgccacgagaccccttctgggatagaaagggaaaaaccccagagagctctgttccgggcaagagtgaattgtgaggggttggatgaacgaatgttgtcagtcgattttttatttacatataagctaaaaattcaaattataaagtgttatatgtttaaaggtttaaagtatcatcttttgttttttgaattttggcaattgactctccaatggaattgtttcaagctgtttttgataggattaagttgaggataacttctgcgaaaaagattcagataataaaatgttacatgtttgaaggtttaaactctcatcttctgatttttgaatttcttgcaattgggactaatggaattgttgcaggctgtttttggttggattgaataaatttggcaagg

SEQ ID NO: 59097 - DNA, 857 bp, Populus trichocarpa
  Intron number 3 from transcript POPTR_0166s00210.1 (locus POPTR_0166s00210) derived from phytozome v7.0 (chr-ID scaf fold_166; pos 30057 to 30913 reverse strand)
gtgactacagaaaggtaggttcttttctttttgaatatagagtttgtgatctgtataatacatgtccagtaaataaccaattgtacaagcataatcttttacagtttggaaaggaaggaatgtcacaaatcacatttcctcctttgacagttatatgcgtcagaataatataaaaccgttattgaaaactcaccaaataacttaaacttttaagcaacgagtttttgacaatatattggttagcttagatgcctcaaaaaattagtctcttccatcttatggagtggtttggtggtctaaactccatagaagaaactttgagagtaaaagtttagctttgagatcattatattttaccgtttagctttgagatcattatattttacctagcagttctttcatatttgcattattcctacaaatatgctatacacttagattgcttaaagattcaatcaaataatacacagatttacaggatctccttgttttagacaggtggctttagtttgtcccatgcatgtccaaacaaaaagttctgcatacttaatgttttgcttaaatctttctctctaatattcaatcttcattacttttgaatttgtaaaatctgctcactcgccttgtacatggaaatttggcatgcttgcacccataaaaaactaagttgtatacaatatcatgatggtttgcgtttagtactaggaagttttgttatggcaagaaggacatgttgcataaactataatctatgatgatttcttcttgatgagttgtgtcaggcttagctgctgaaattaactagtggttcaattgtctcagggtttgcctaggttccgacctgaaaatcttgagca

SEQ ID NO: 59098 - DNA, 811 bp, Populus trichocarpa
  Intron number 2 from transcript POPTR_0010s15240.1 (locus POPTR_0010s15240) derived from phytozome v7.0 (chr-ID scaf fold_10; pos 14568031 to 14568841)
ccgcagctgtgatcaccaggtccctccccctcttcttcactgatacaatcgatagaaatgattgctattcgtaagaaaaccagccacgttactttttttttcttgaaagcatcgaattgattccttgttcaatcatttttgtaaggatgaagatgtgttgatgggatgaatcaaaaaaacatagaagcagggagatattaggaactctggaggaatgaaacatacatgaaaaacatgggaagacaaaattgtaagcttaggaaagtagcatccaaatctagataagtgagacttgatctccatctagattccccgatggatatgcggagaagacagtacaatttagagaaggcgccatcaatactgctcatcgaatgggtgatggaacaagctggaagattttcctaacctttatttaagtgcgttatttgaaactctttatctttcttgtctcgtgtgaccatgttctctgatcatctagctgggtggcatctgatgattgatccactttgccagtgttaagtgatatagcaatgatagatgggaaatatggtaatatattgattttcctccttcaacttctaagaaatatttctaaatatgaataattgttgcggcgtgaattaaaagttgaaaattttaagacagtttcaatccttgagtcacatgttaatggttataatacatgtttgactgactccggcatgcttctagcttttaaccaaaccaaaattaagttgtaggttatgcctatctaataacttttctaaaacgttgcaggaggttgctggtaataatcgtgtctacagaa

SEQ ID NO: 59099 - DNA, 518 bp, Populus trichocarpa
  Intron number 1 from transcript POPTR_0010s26100.1 (locus POPTR_0010s26100) derived from phytozome v7.0 (chr-ID scaf fold_10; pos 21452076 to 21452593)
ttcatcaattaattagattctctgttatcaatcaggtatgcacaattctactcgaaaacaaatcccccccccccccactagatctattcgagttgtagttgccgattattctatctttgcttgtcttgtttcacgagatttactcgcttcaagtctttgcctttaactgttttctcttaagttgatttatcactagaatagatctattttgtcagtattatcaacaaatctgatttttgtttatgtttagtgaattaatatgttgtagtaataataataataataataataatctgattttttttgatttgttctgttataatattaatcctattaggacggttacccctttatcatgcttctgttgtgtagtgttagtatgatacaagtaattaaaaaattgagaattaattattgttattgttatgcccttaagtgcatttgtcttctttgaacaagctgtctatctataccattactaaaacatttatttcataacagactaacaaactgctgca

SEQ ID NO: 59100 - DNA, 701 bp, Populus trichocarpa
  Intron number 3 from transcript POPTR_0001s03860.1 (locus POPTR_0001s03860) derived from phytozome v7.0 (chr-ID scaf fold_1; pos 3111680 to 3112380 reverse strand)
cgaggtctcctcttcttttccactcctctacctatcctactcaatcttgtttctccttttttttcataataactagtaggcagagtttaatgtatgtcttcctttcttttagctctctctaccttcttttaataccttttagaatcctaaatatactgtaacctgaatcacatccattccttttttatttttccatcttcttgcagcccctcaaaatatttttaccaaagaaaatgatgatcttgtgtctttgtcccataatctcccactactatataatatatagatcatcctatgtgccaaaatcaggcatagtcctagtggaagccatttcacatcctgggcttcattctatattagaaactgcataatctaagtgttgatttcacccaactctttgataataaaaagattttttttttttttggaaaaaaaagaagcttatagcaatttattcatttaacttaaggagacatatatatagctcattcaagactggttcgtacacttcaattcaaactatcctattactgccacaaaaattatagtgcttgattttgcttccgcttgatcatcctttacaatcatataatataaagcatttattttgttccctactggctactgcaccataatatgagctgacatttgaggagttttgtgcagggccaagaaggtttttgtttcggaatacattgggt

SEQ ID NO: 59101 - DNA, 546 bp, Populus trichocarpa
  Intron number 1 from transcript POPTR_0010s25980.1 (locus POPTR_0010s25980) derived from phytozome v7.0 (chr-ID scaf fold_10; pos 21384686 to 21385231)
cttgtggctctcttccctcccttggttattttaatgtaaggcttctcctcttcacatcacaaatcttaaaatagttttcttttcttccactggctggcatatttttcaacttttttttttaaagaaaagtaggccgactccagtttgtttttgtatttcaaaaatatttttgaaaaaatttaattttttatttatatttttgtttcaaattaatatttttttgtgttttcagatcattttgatgtattaatatcaaaaataattttaaaaaaataaaaaaaatattattttgatgcattttaaaaaataaccaaaaccacacttgtagatgagatttattttttaaaattttaatgcatctcccttacggttacttgttaacgtgtgattcttgaatcaattggtccgcctaagaaatctcaggatcattgccttatggttttcagcaacatgtagagaggtcaggccttttggattgataattgcctggtgatgattgaatgggatatgtaatagagcagggactgtgcacttaccattagtggc

SEQ ID NO: 59102 - DNA, 766 bp, Populus trichocarpa
  Intron number 2 from transcript POPTR_0002s24200.1 (locus POPTR_0002s24200) derived from phytozome v7.0 (chr-ID scaf fold_2; pos 21621815 to 21622580 reverse strand)
gtctgaagaaggaatttgggtaatttttcttgtcatttgtttattggatgcagtatcatgcttgtaaaaaaaaaatgaataagaagaagcagtgtctccttcacaatgacgaaaataacacgacaaacacaataattacaagaacataaaattttcaaaataaaggattactaagaaactctaattgtaattttattaatgaatgtttcttttcagatacttaaataaacttaaatgaacaaggaaatcaaaaaattagaaaaaataataagaaattctaaactatataaaaaacaaatactaaatcaactaggaaaatataacaaatttataacagtaacttctagattttattgaaagtctctcgggttgttataaaattttaaccctgagtatataagatatgtgattatactgtgctttttgaaaatttttgaatttttttagctttaaattattatttttggtttttgaattgttttgacatgttaatttcaaaaatatatttttaaaaatgaaaaaaataaattattttaatccatttccaaacaaaaaacactttgaaaaacaatttttactataattccaaacatactctaaatagagcctgcaaaattttttaacaaaattttagccccattcaacgataattggataaaaaattaaacctgttaacataaaaaaaatctcctgcatcactatgctataaatctatttgttgtcacaaagctgtcctttttgacttaggccgaagttgaaggagcag

SEQ ID NO: 59103 - DNA, 613 bp, Populus trichocarpa
  Intron number 1 from transcript POPTR_0010s00900.1 (locus POPTR_0010s00900) derived from phytozome v7.0 (chr-ID scaf fold_10; pos 612679 to 613291 reverse strand)
caagctcgctcaaaagccacgccagcccaaccaaggtaatcaacaatatcttttttttttaattttattttctgggtcttttcttaatactagcgagctagtttttctgggttgtgttttttttttaaaaaaaaaaattataatcttggatatatttaatatattgcgtagagacttaaaaaggaaaaaagaaaaagcatgcccttttcctttttgcatgaaagtttatgcctttaattaatttttaatcttggttttgttgtatttgattttagaaccttggcctgacattatcaattatcaataaaaattaatacaatattttgatttatgtctttggtgcaatatctatagattttgccgtcaggatgatcttgtcaatggctgtgtaagggtttctgtttgtatgacatttacttcaatttttgtacatggttttagcatatttgtttggtgtaatatcaagagatgttatgaagatggatgggctagtttttaacttgaattctttgcttgtactatttttttgttcttgaaaggaaaaggttttaattttttttatgtgattttatatacagtgataacagagagagttgagaagccaagccaagca

SEQ ID NO: 59104 - DNA, 745 bp, Populus trichocarpa
  Intron number 2 from transcript POPTR_0007s06060.1 (locus POPTR_0007s06060) derived from phytozome v7.0 (chr-ID scaf fold_7; pos 4208670 to 4209414)
accgtgggaagaaggcagtctctagattggtaagatgttagttgagccttgacagaagtttaagatgccattgatgtgcttaatggtgtagtgtctttcaagaaagttggagcattaggataattaaacttttgtttgcataatcaccaggtaaatatatgggaagaaaggaaagtatttgggtcacgtgcccggagcctcaaagaggtaattcttggagaagatgcacctccacccttggagctcaacaaaaaacgttcacgctccgtcaaaattacaaaacgagattcacgatccactagaacggttagaccaaggacctttcattgtttccttttctcctccatttgtttttatggatgcatgcactagttctatattatcgacctcttttttttttcttgataatgtgtgtcactgttttgtcgttgctctggaaactagaaattgtccatcggaggcgatgctgaaaaaatagtatcggcatttcatttggtggttagtgagcaacccaatgaagagacagagatgagtaattgcaaatcttcagttcgtcgtgtgaggaagatggagaaagatgttgatgttgcctgtagtggtaatggtaagagagatgaacttgaagttaatatagaaacagattaaagtggtttcttggaaatgcttttacagcttgagttttgactttgaaaatttgtgggtctctgaagctcaactttttttactcagataaagatccaaaacg

SEQ ID NO: 59105 - DNA, 492 bp, Populus trichocarpa
  Intron number 1 from transcript POPTR_0002s03560.1 (locus POPTR_0002s03560) derived from phytozome v7.0 (chr-ID scaf fold_2; pos 2214028 to 2214519)
atcctcacctgtttcaaaatcctaactctctcgaggttagctttcatggcctctctttatgtatgctattattatatttatgattcactcgatcaatttaagcaaaaagagaaacaggtttttaacgattcttgatttcatttgtttaatttctgtttggtttccgagaaatcaaaaaacgaaagaaaatgcttagctaattctatattattcaacgggtctcaattaatttattttttttgcctagtatttgaattattctccgcgtttatagttatcatttacgcatgtgattaaaaaaataagaagaaatttaacgattcttgatcctctttttttttttttttttgttattgaagttgtgttgttttgaagaaaataactgaaatgattattgcaattaagctagcttgagccctaattaattcaagttttgtagaagattattgattatgttttggatctgcaggagaaattagaatatagtaattg

SEQ ID NO: 59106 - DNA, 1024 bp, Populus trichocarpa
  Intron number 1 from transcript POPTR_0007s00710.2 (locus POPTR_0007s00710) derived from phytozome v7.0 (chr-ID scaf fold_7; pos 359156 to 360179)
caataccactgcttttctccgccttttctccgccagtactactttttttctttctttcactctcagttattaaatcccaggttttcttatatcagattcatcttctttctttactttttttttgtttaaaattccattttttttggcttgattgatgagaatgaaaagtgggttttgttatttgtggagggggatgggaaaaggagtaaactttgtggtgtgaaaatggttgacatgttgagttaagggcatagagaaagatgaggtttttgaggttttgtatgctgagaaattaatgaatcaaaatgggagctgaattgatttgcatctaattggtgctttggtaaatgccaaaggggaaaatagacaacacccgttctggttaagtctttattaagcttattgaagagaggagtttgttttcttttcgtttttagtaggtagttttcggagaagggaaatggatgaggggttgaaaaagaagcaaacttcgtggtgttattatggtgacttagcgaattgaggcatggaaaaagatgggatttttttaggatatttgctgtctggtttatgagaaatggaagaagggaaatgggaattgaaagagtgtataattttattaagcttattgaagagagggctttctttttaataggtagcttttggatttacaagtatcttaacattagtgccaattatacgccttcttgctaatgtgccgttcaagttgaactcaaaatatgtaactaacattatttcagtcaaaagagcagatggatggaaaattgtaaaaattgagatgacgttgttaattaaaaaaaggtctttttaagaacgtatcaaggaataaagggaactggaaagtttgttgttattgattttgcagtcttgcttcttttcaaaaagaggaaaaatataataaggctgtcatgatggatcgatatctttgtttcttatgatgtgttattattagcataaatgagatcattttttttttttcttcttacgatagatgtagctggaa

SEQ ID NO: 59107 - DNA, 647 bp, Populus trichocarpa
  Intron number 2 from transcript POPTR_0007s10820.1 (locus POPTR_0007s10820) derived from phytozome v7.0 (chr-ID scaf fold_7; pos 10987255 to 10987901 reverse strand)
ttaaagacaaaaggtagatattgtcaagaacaaaactcactcactattcaactcttgaagaacagaactttaacattcttgaatttttttaaattaattgatttatcattttttttatcaggttatttgctttatttggcttgtaactcttggtttgtttttgggtttttctttttgagtcgtgctaaagattggctaggataatgaatgctacttggtttatgttttctttggtgcttattaacttatgtgacaagaggtgcatttctagtctataaagtcttatttttgctgtaaatgtttcttttttgaggttgctgaacttctgctgtaaagtgaagtgcgcaatatcagatgccatttggagatttatcatccatggagccatcaactcatattttcaaataaattgtatatattgtgatgtgcaaaaaagaccttccttcccgaaaatatgtgaacaaatacctcgtggtgactaacaaagctggttgacgaggctataatgatgtattatgtttgtgtaataatagcatccttgtttttgttcagtttccttgtcatctaaacaacctctccttaaatcgtgttgcattaaatccttggtaacaggtgaatctattgtttctcctagagccaagaaaggg

SEQ ID NO: 59108 - DNA, 406 bp, Populus trichocarpa
  Intron number 1 from transcript POPTR_0001s41210.1 (locus POPTR_0001s41210) derived from phytozome v7.0 (chr-ID scaf fold_1; pos 40848930 to 40849335)
gcgccaatcagagccccgccactcttggtaagtcttagtttcttagaaaacaaagaacccaagaatattattgtaatgtgagatatagaatatatgcataaaaatgtattatttttaataatgaatacgcgtaaattacaataaaaaattgtaattttagtttgcttatctttctctctctttttctcttccttcaatgtttttcaggcaaaatttcatatatttaatataatcatcaataaaatttgatcatcattaaaacaaatcaatcaaaatgtccaacaatttataattttttttcttaaaagttccatgtaaattaattaaaccactttatgtacggagaatttaaatgcatagtaattactttggtgtgtattctatacgtcaggaggagcttgtggat

SEQ ID NO: 59109 - DNA, 848 bp, Populus trichocarpa
  Intron number 4 from transcript POPTR_0010s02960.1 (locus POPTR_0010s02960) derived from phytozome v7.0 (chr-ID scaf fold_10; pos 3486714 to 3487561)
actttgctgaaggtatcaagtcttttcttttccactttttattcttgtatgtcaatcttgatattgttcggtttgaatgtctaattgaatataccgtgcagtctgaagaaaccatatgcttttaattggcaatgctactttatcaacctaaaagctactaagcaagtaaaaatcctctgaatggtagaaaagccctgaaagacatgatattactcacctataacacctggcaacaagaggcaacattggtatcaaagctttgaagttttgattactgttagtgagaacaaaattcattttatgttactgaaatgtaactcaaatatgagttttagaatcactttgtttcaccttgcttctgtctactggaagtctggaacgcttctttcattggtgattattaccatttgaagccaatctagctcagaaccaatgaatggtttaactgtcttgctttgcttatccttagggaaacatttaagaagggcttgtctactcacagtacggatgggttgtcgatgcagagaggcctctgtttctatgaactgaaacattttttttaatttggccgcctaggttaccagattgtttttttggtttttgagggggggtggtctgtagccaccagagcttcacacttttatgtgtctgtctgataagtggtaagagtagttttgattttttaagggatttcctgtacaatattatagatgggtattctttgctagatctatttttgacaccatctttttcataagttttaattgtatttgacctttctctgcttgtcttttctttcatttgtctgggcaggactcgagcaaaaatattcagatctctgctttcca

SEQ ID NO: 59110 - DNA, 934 bp, Populus trichocarpa
  Intron number 1 from transcript POPTR_0002s00340.1 (locus POPTR_0002s00340) derived from phytozome v7.0 (chr-ID scaf fold_2; pos 88015 to 88948 reverse strand)
ttgaggctttacagaaccacatcttcctcacaccagttagtgtttgcttccttttactttcgatttcttgatgtggtttttaagttctttgctggttttgttcaaattttttggttattagcttatttagatatgttaggctatttgggtttctaggaattttgttgtttatggattttttttggatatgtgttcggttaaatttgtatttttaaggattttttagggtttgtgatttaatttgggaattggggtttgattgatttggagattggtttatctaggagctttgactaaactggtatgtttatggaacttataactgggtttatttatggaagacttggagtgggttttttaaagggacagaccaagtgtgcgaatgtgagtagagatctttattattttttgttgatttcacggtttcacctaaacatttggcttctgaattttgggttttaattataattcatttattttcttttaaacttatatatgtaggagcagctttgactattccgaatcttcatcgattacagttctcccactctcaacttccagctcatccattccgaaggcttttgttgtagacaagcccacgttcagccagataagttgcttttaaaacctggtttgctttgtgctggtttggtttgcctttttaatcattatgggtctgcagattatgattttatctggatttgcatgttagttgttgttttttgtttccatttgtatgttttctctctttttttggttctttttactgtttaatggtttgttcggctttttttgttgtttggattagttgcagttctgattctaatggttctgtttttccttctcagtctcttccttgacaatagaggtgtctgtcttgctaccaaggttcttagttgcttccgaggtctattttgcgactttgttcctgttc

SEQ ID NO: 59111 - DNA, 449 bp, Populus trichocarpa
  Intron number 1 from transcript POPTR_0007s02080.1 (locus POPTR_0007s02080) derived from phytozome v7.0 (chr-ID scaf fold_7; pos 1221153 to 1221601)
aagaagccctttttaatcctcactgttctctccaggtaacaaaattacactgatccatctcttttttagcttaaattccctatcgtttgcgtgttttggattgatataaattatgggatgtttggattcattttgggtaattagaggtttaagtgaaagttttgaacttttgaagaaacgggttttgcttgaaattggttttaatgtatattttattttgagtggtttttctcgtaggtttttcgagattttgaattctacgtgaaaatattttgtctttaacagaaatgggtaatgcttagtttattgtgttatctacattgtatcttggagaatgtcctttttaagtgacaatgttgattaattgcatgtttttcttgtttggttgtgaattctaatgtatttttagtgatgggatttttggctattgatgtttgtagtaccctgct

SEQ ID NO: 59112 - DNA, 722 bp, Populus trichocarpa
  Intron number 2 from transcript POPTR_0007s02080.1 (locus POPTR_0007s02080) derived from phytozome v7.0 (chr-ID scaf fold_7; pos 1221714 to 1222435)
gaagggcttcggattcttttttggaaagtttacaagtaagtttggtgctttcttctggttttgagatagtcgtgcttgttatttctttgccaaaaccttctgcttcataattatgatggattattgttcattttccatttaatgttgttgatgatgtgtctatgaaatgtgataagttcggattgtgaaattacttgactttgcaattgaagttcacaagctggcagctttctggagaaaatttgtggactttcttatgtaaagcataaaaatcaatgtgagaacaagacagaataaacaattgaccagagatctattgtgaatgtttcgcctacttaagatatattgcagatgattcacatactctgaggttagtgtttgcaaagctaggaaatcatttctaaattgctaaatctttgagctgttggtaaccttcatgtggaatctatcccagttatttcccactcccttgcacctgcattcttgcattcatttggataaaactaaaactgcatctttttctctctccgcctttcattaatgtgcaaaataatatgtaataaagaatagtaattttttaaatccacttcagatactgatgcctatgaagtttgcagtttttcctttgtgcagctgatgattgagaatcgatgaagtctcagttggtttttggtaacattgtttgtgatggactttatgtaggcgattagaagatatattgg

SEQ ID NO: 59113 - DNA, 792 bp, Populus trichocarpa
  Intron number 1 from transcript POPTR_0001s34670.1 (locus POPTR_0001s34670) derived from phytozome v7.0 (chr-ID scaf fold_1; pos 32939607 to 32940398 reverse strand)
attttgctggaaaggatcaggtaattctaaataccttattttggtttattactaattagcctctcaaatataatgttttgaaaattttgaagtggctgttgtaatccttataagtgaatggagtttctttgtttttcttatttgtgagagtcatgataagaatctcaaaattgaggaacatttcaggcgtacataacacccacagttttttgcatgcaccacaaaatagccgacaccataataacaatttgttataagggacttttaaccacttccattgtgtttgttttgttggattggaagatgtcttatgtttcaataatttttttgtacacttttctttctagtaggatttcttttttcataaaaaaaatgacttgagtttttcattttcccacttctaatgcaatttgatggttttcttggtttgcagacaatctcattggaagaaatcagggaaaccacagcaaatatgtgacgtcttgtgtattgaattgctcacttaatgagttatcgctttgcattttgcataaacattctgtacttatcatgtgtatgtatatcatatgctatacttgctaattggaagggaaaaaaagagagcaaaaaagacatctgagttctgaatctgtacccctgacatattccacaaaagcttttgcatggcaatgacttgttgacatatatccgaatagaggatgttcataggaaagttacatgcctatcataggagatgagccctaaattactggcctcgtcacagctaaagaaatcgttgaggctgcattcagt

SEQ ID NO: 59114 - DNA, 783 bp, Populus trichocarpa
  Intron number 1 from transcript POPTR_0010s18990.1 (locus POPTR_0010s18990) derived from phytozome v7.0 (chr-ID scaf fold_10; pos 17052996 to 17053778)
tcgttgcggggaccaatttgttgccttcttacgaagtcatagaaaattgccagcagtgattaacgatgacttgcccacgcactcgcaaaactgacatgttccacttgcttatgtgccatccggttcttgactaggttctaaaatagagtccgtaggtttagactctggagtgcctttttttttttcatgcagtgtagagagtatatactattgagtgccacttcctgaaactaaaatttgtttcgagaaatctatgtgctatattctatctaaatatatactttattaattattaagaaaaaaagtggaacttcctaaaacacaaaagtaatgtaaaattgaaagccaagattatcggcaggcatggctggctggcaggcattagattgaagtccaatcaataattgtcggggctaagatatctttcgaagagaggggccatagccttctttttatgcagtcgactccatcatctgaggggacctttcacggaaagatccaccgacagtggaagatttccgtgccgtttatttcccacccctctctctttctctctcacagataaatagttcagttcacaaaaagtttgatgtaatgtttcaccaagtagtcaatgaaagaaaatatgcaccatagcctgcagcccgaaacgtgctctgcaatgatttgtgtactagactatcatcataggatggacggagtagtataattgtccatggaagttctaacctttataacaattattttcaaaagttctgacaagcaaggtctaatttcacataa

SEQ ID NO: 59115 - DNA, 941 bp, Populus trichocarpa
  Intron number 1 from transcript POPTR_0010s08420.1 (locus POPTR_0010s08420) derived from phytozome v7.0 (chr-ID scaf fold_10; pos 9336338 to 9337278 reverse strand)
tttgcctctgttttcattctctctgcttggcaagagtaagcctcttcctctcccctccaccagatccgctcttccttttctccttaaaaatactgccttgtgtagtgatgttaaagttagggttttgcttatccacataccttcttgtagattctgatgctctgtttttaaagcaaagccttagatagatctggtagtatatttcatttctctttattttgtatcagcagttttgaatttcggtttataaatgttgaggttaaacctgaattaattagtttattcttttactattaactgttttgttttatttggcatgacaattaattaataaaagtagatcttggttagattgtttaatttgttgtatttaatgaatattttgtgcatctttagagtatgttgtgattgtcatgattttgttaattgttgattagtggtgtgttataaatattatggaatgctgttgattttgatgctttctagatgtggccacgccactacagtaaagtcaagtgtgtccatccaacacccatttttaactgcgttaaaatgagattttctgaccatattgccaatattaaagtttaatgttctcttttgggagtatcggtgctgggctatatgtttgttccatggtgacttgttttgcacattcgtctactttgcattttgctgatgtacttctactgagatggatatcttttccaatcctgcaattactttgtgattatgttgacgtcatgtatcagttgtgctggttttctgttgtttgaatttccgacaacatggtttttgattatttcaatgaatttttttggttgttctgctgtttgtgattcctttcataattattcgctactgcttaaatgattttttattaactaaactgtaagttcttcataaggaatcgttatctcttattcatgattgtaggttca

SEQ ID NO: 59116 - DNA, 843 bp, Populus trichocarpa
  Intron number 2 from transcript POPTR_0007s00530.1 (locus POPTR_0007s00530) derived from phytozome v7.0 (chr-ID scaf fold_7; pos 215312 to 216154)
ccaacaatctattgtcaggtccagtgccaaactttgtgaatggcactgtttcaactaacagctttgcgagtaacgaataactttgtggagagctattaacaagttgctcaattaatgacgaaaagagtgtcaacaggaagtttaaagattcattcaaaagcgggtttatgattggttatgtcttttggatgacttcaactattgttgttttcacttcctattgcgtaccctggatgtatgtagggaagagaaataacaaaatcacagtagcagaaatgatatcttcgatgattccaaagaagcagaggagagctgaagaacgtcaagaatgcaggaacccaactgcagaacttctgctgggaaaaacagaacaggtgctttctccgtcacagtctgtgcatgtatatactgtttttgtttgtgtatgaacagaacaagcctccatgttgatgctacgcatgtctaaatcagccggatcttgttttttatttcagattccgtcaattttctatcaggcttatgatggagaaggacggaggatattgtttcatttggtacagttgttaagattttgtatgctgtaattgtttatttctttatcatcctttgccacaactattatataagaagctgaatccatggattagagtaaaatctaggcatagtcctgatgtcctatctggttcggattttatttagatgcatactatagcactaatcaaacttagatgaatatatccacagatttctgtgttggagaaagttgtcacaagaatgaatttcagagatctcagcaaagcaaccgaaaattttagccaaagcaccatcattgggtagggacta

SEQ ID NO: 59117 - DNA, 1044 bp, Populus trichocarpa
  Intron number 1 from transcript POPTR_0007s06840.1 (locus POPTR_0007s06840) derived from phytozome v7.0 (chr-ID scaf fold_7; pos 5191910 to 5192953 reverse strand)
tctctgctgcatcaaggtaaaagtttttgtaccaattgttgttcatattcgtaaatgtgccagtgtgacagttttttttgtgattaatgaagcagatggctagcctaatgtgtttcaaattttatgtttgtgcaaaatattttacttttttagaattcatcaacttttctgaattcaaattttatgtttgagaatgttaagagattgttgatttgtatggaatagacaatcacaccatgatcgattacaattctagttaaacaactaagtttttcacaataccactattatatttgcatgaatgatggaatcaaaatattatcaacttgtataacctgctctttcttgacatcttcaatgatgggatcttgagtctctggcttgtctagtttgattaagagtattctttaacttgattcttgaaaatgggttattaactggaccataatggcatctaggagcctttagtggtgtctcttggtttgtgtgcaggtgtacattaccgtactctctacttttcctatccactcgctgagtttcctgaagctttttttccacattcaattattgattccttgtctctgactaatatgagaaaatggatgttgcttcttcaccttaacataatgaataacaaaaacaaagagatgtgcaatagtttacttcatcagtaactgtttatattgaccatgaacaaataattttgtaatcttctagatcagccaggctcttcttaacctggactggctggccttcctgattctgcaactcttatgtttattaatgaatgaaattaacagattatcaataatctgcattgtacacctagtgcttgtgggttttttttcttcctctcttgaacttctcgtggatttcttgggtttctgttattcttttcctggatccctctttgttctacatcatattgactactggttaactattgcatagcttgttgtgtcattctatctctttatttattttttaattcttcaaatctgtatcacaggctccttgcattagccagccacttcacaactaaaa

SEQ ID NO: 59118 - DNA, 730 bp, Populus trichocarpa
  Intron number 1 from transcript POPTR_0002s03800.3 (locus POPTR_0002s03800) derived from phytozome v7.0 (chr-ID scaf fold_2; pos 2362191 to 2362920 reverse strand)
aagagagcagcattgtcattttcatttttctaagtgtgagtttatactgtattaatacaattacgcagcagtcttaaagtttgtaactttctttatggtttgaaacattgccgacatttgtttttgacatgggttcgatgatgtggttacagtaattaaagacacaaagtattcaaagtgttgaaatttttgtgatctgggtcttcttaatcaatctctttcaatgcttaactgtatcacattataactggcaaccagcaacttggcggtgcttttcgtgtgtactgttcttttttccccttttttcattattgcccccttgtttatctgacaagatcatgctgctgcttcattcaactgggtagatttgatttggttatttcatttcaatgtttttcttagatctactgttcttgctaatctcatgtaagtgcaatagcatgccacattctcgtagatggaatgtagttcttttgtttgttttgttacatttgctatcttctttttaatctctgagtagtgatcttcttctgtatgaatgattgacctgataaaggtgtgatttcactttttgttaatgttttgacattggattgtatgagttgaatgtttgcaatttagggtttgttctgtgatttgctagactattgtgccttgtgttatggatgctttagtcctaacttgatttatttttggaatcaaggctagtggtgacaagaaatttgaggcc

SEQ ID NO: 59119 - DNA, 893 bp, Populus trichocarpa
  Intron number 2 from transcript POPTR_0001s07510.1 (locus POPTR_0001s07510) derived from phytozome v7.0 (chr-ID scaf fold_1; pos 5640564 to 5641456)
cttagcaaggtaatattttttttggttctacttttgttttctttttttccagcctttaatttgttaatcctatgctgtggttttaatgtttaattgattattttggtagtttttttgttaatgtttaatccatgctatatttatgcttatgttgatgattttgatgacgtcaatgtgaatttcttcggggcttgtatttggtgtttcgggatttttttgtatgaaattttggatgtttttgttcgtggcttttagtgtgcgatcatgtattgcattactggtgtattttgattgttttggtgaacaatatattcgggtaaagactcttatgtggagctgagagattttgtagtttctttgtgagtaaatccggtgtaaaattaataactaccgataactgatctcttgatagtatccgaattatttgtcgtagcttacggtctttaaattttttaataattagaccagttgaatttcgagcatttcatccaacagcgttacaaatttggaaatgaaatctgtggcggttaacctgtaattgacgggtaggtaatggtggttagatgaaaatttgaaatcaaagttgtctaattatcacaacacttaaccacttttaactactaatcacttaaagagttccctaaggggccctgttagccttttccaattaatattttgtagaaactgcatgaagtgtttgcaagcgcattggcttgtgtttatccacatttgttgtcaacatcatttttatgtgttttgttcatgaactgcatgagcagttttggactttatgctttaatgctcctgttatttgctcgacctttaacatttacttccatcaatctgctatcgttacagagtaaaacagccgcagctgggacttcatccaccca

SEQ ID NO: 59120 - DNA, 605 bp, Populus trichocarpa
  Intron number 1 from transcript POPTR_0002s12680.1 (locus POPTR_0002s12680) derived from phytozome v7.0 (chr-ID scaf fold_2; pos 9459416 to 9460020)
gtaaaacctttcacaagaaaccaaattttgcgcaagtgagaaaaataaaaaataatctgaaacaaaaggcagtttccaagtaattaccaggtattatgtcgatcaaagcgtaggaacatatagctggatgagatattagaaagcatggcacgtgaaacaaccactcagggaacccttttgacaggttctacggaatgatatagctttacgagagtttgtggaaacttgatgtgcctggtttgctagtaccgagctcctcatttcttgggctctcttttgagctgatctcagtttattcataattctatccatagacgatgatctctttttctcaagtttcatctgaaattgagtcagttaaggccacaaaatgcacaagcctctaaatttacaaaacatagaaacaaagatgagtggttaaagctggaacctattaatcttgaatctcagtgaccaatcaatatagatttctttttgtatttttcatgatacaatattatattaactgaatagttttgaggaagaaaaagtttagaatccaggtaaaaagttcattgctcagttaatcaaatactcaggcacggctaaaaggctatcaattctac

SEQ ID NO: 59121 - DNA, 904 bp, Populus trichocarpa
  Intron number 1 from transcript POPTR_0010s16880.1 (locus POPTR_0010s16880) derived from phytozome v7.0 (chr-ID scaf fold_10; pos 15689551 to 15690454)
tgtttcagttgctttgcttctctcagcaactccaggtaattttttaaatctattctattctgttcccggtgttttatgttttctctagctagcagtattctgacccttgtatatgcttgcaaatttttcttcacgatgacatgcaacatttgattgattgttgaaagaattgggcttgaacaaattacatggaaaccctgcttgcttttgctagtcatgtatatttcaagaaatcattttaaggaagttgcctaggcctgccggggaactaacaaattcctcaaaatgaaatgcaattttgttggttagaaaagaggaggttactttatggagtccatcatagattttgatggttttttggcggttctttgtatgcttttactcttctattctgggatcctctttcccccttttctttcttctttccgacagttttcaccaaaggttttgtatatggtgattaaattgattagagtatgccaaggattagacatttcattgatttatgtctcttaacgaaggttaagtttgtttgcaaagttgtgctaaataaaatatatatgaaggtggggaatcccaatgccaagagttgaacacaaactatttggttagagagaatatatattaatcgacccaggagcaaagctacagcgtggagaaggtgggcaattgaccccattaaattttggaatacttataatttggccccatatttatagcgatttgcccctcttgtttcttatgattgcaattgtcattgcatcacatctccatcagtgcattagtttgttgaaggattttgaaactttttggcatttattatgggactttgtgaagaataactgccaagcaagagcatgtttgatcatctgtgcttctgggttttgcagctaaagctggaatt

SEQ ID NO: 59122 - DNA, 402 bp, Populus trichocarpa
  Intron number 3 from transcript POPTR_0002s11930.1 (locus POPTR_0002s11930) derived from phytozome v7.0 (chr-ID scaf fold_2; pos 8839508 to 8839909 reverse strand)
agcaaaatcactcgaggaacttgggcatcacataggtataatttttatttttattttcattcttaatctttttagcttgctactgctatatctcgaatggggaaattggatgggcttttgtagaattcgaaattcaaacgatattaatggactttagttttctcgaaaatgcattctgtccccgctcattactattccatcttcttttgaccaaagatgtctagttatgcaatttgaattatgggatgctttttctttataaaacttggtttttggcataaaacatgtcttgaacccacataggacttcactggcttgatattgatggatcttttttgaatttgcaattcaaaatctcaaatgtttctgatgcttgttccatgcattagaggctgcaaagga

SEQ ID NO: 59123 - DNA, 869 bp, Populus trichocarpa
  Intron number 1 from transcript POPTR_0001s10800.1 (locus POPTR_0001s10800) derived from phytozome v7.0 (chr-ID scaf fold_1; pos 8402827 to 8403695)
ataacgcgtggaaggcgctttatcataaggtatttgttttgtttttgttgttattttgagaatttattttaatgtttcggttaattttattactgattgtagattcttttttaatgtgaaatacaaggtattttagtctgaaatattgtttttgttattaatttggagttttattgtgttaaattttggtgttatggttgcttttagttgttttaaatctggataattgtggggaaaatgtgaaatctggaggattagggaatgggtgttaatcgtgacgccattaaccagtaataatgtaaggtccagtagttgcagaatcttcttatgtgttgtaaactaggtggctttctcgatggaaatactataagactattttttttggaagtgagaacatatttgtcacggaacttcattttctctttttgcagaatccagagaattaaactttagttctcttttgtaaaacatgtaggtgttgaagagttatagtttaagaatccctgaacctggataataaggcagtataggagtgctgtaaggtttaaatttttcaaagttagcatttctctttttaggatttcttgagtctttcctagaattctgaaagttattctgtgtcatttttatttccctttgctttggtgtccttgagtttaaatttctctttattatgatggatttacttggttgtaaatgtggattcaaacttgtagatgcattttctttctctgcttcctattttcagtagttgcttttgagttttgacttctctcggtttttcctgttttggtgcgtgtattgaatttttctcttttgcgcttcctgtgttaggattttacactggaacaagatagtgtgacacctgt

SEQ ID NO: 59124 - DNA, 523 bp, Populus trichocarpa
  Intron number 2 from transcript POPTR_0002s09450.1 (locus POPTR_0002s09450) derived from phytozome v7.0 (chr-ID scaf fold_2; pos 6734856 to 6735378 reverse strand)
ctcgcgtaagtgtgtcttgcccaaatggccttcacccaattttttatgttctggctttccttttttattttgtgcccttttggaactaaaataaaagatacttccttgtttcaagtgctctacaataacttttatttgattcaaaagattagattggtggatgatatcctttattgggttttgcaattatgttaatctggtcaattgctttgccgacatacttcaggttttggaaattagcaaatgccagaacataaaattacaatttcaatctgttgtaatttattctaagccctttctccaatatataatccgagccaaaaaatttttttcactgctgtaggttatttcttggttctaggattgcatcagttttgagcgaaaatgtctgaaggcaaaaaaaaaaaaaatcattctttgattcttttcttagtgaagtcaccttaagacttcctggctatcactgtagtgtactagttggtgaaccgtgattattttttgtttgtttttaaatcaggtgacc

SEQ ID NO: 59125 - DNA, 863 bp, Populus trichocarpa
  Intron number 2 from transcript POPTR_0010s16560.1 (locus POPTR_0010s16560) derived from phytozome v7.0 (chr-ID scaf fold_10; pos 15488360 to 15489222 reverse strand)
gctggttaacagaggatttttcaacgacagggagaattttattcaacgtcgtaaaagtaagtcgtttatttctgttttgttgaagaaccatgttaatgttaatgtatattacttttgagttgctatgattgaagtatcgaaagcattaaatagaacacatttggcttttcatttgtatggaaactcgaagatgttaaattggtggttggcagtttaattaatgtctaattagaagacaggtcacacggaagccgattagtgtttgtgagttagcatattaattaaggagattgcaagaaaagagattcaaaagaaaaaagaaaagaaaaggaagaagggagattcatttgtaaaccagtggagtactaatagggatacactttaattatttgattaccatgtctaaaccctagtagtactttgtttatgacttaattatccggtccccccccccccccctccctctctctctctctctcgaatttgatttatacgattacacgagttcttattttcttaaaccgagtctcatagcacattaaatcaccttgctggcctgtcacattttccttttattattattatttgataatactcagaggttggctaattggatcctgtaaagtcaatttctttccgtggaagaaattgttctcttgtcctttagatgttacttaacttgttttcatctctcatcatgcaagcttttaactgtttgtgcgtggtacattgtgagattgagattctttgaacacttcttaccttcaattctatcacattttcatacatgtcgtttgattaaaagctggagttgtagagttatagtgtactgaaaagctggatcagattattgtttttcagct

SEQ ID NO: 59126 - DNA, 834 bp, Populus trichocarpa
  Intron number 1 from transcript POPTR_0001s41820.1 (locus POPTR_0001s41820) derived from phytozome v7.0 (chr-ID scaf fold_1; pos 41541737 to 41542570 reverse strand)
agggaggtgtttagccactactagctaagttcagggcaactacatctcaatggatggacaattatgtcttcttttaaaaaaaattgtaggatcgttgggcttgaacctacaattaatgtttttagaaattgctactagttggtcgtcaacattgatagtggcaatgacatgcactagttctttaccttcaccaacaagaataatagcgttataagggagatggttggtcatgagattcatcgggacaattaaacctagtgaggggctagagctaatctagggttattcttatcactaaagggtccctccccatgaagtaaacaacaagcctcatatgaccctggataaggagaaaaattatgtttcactggccttgacttcgacttaatatgaagtcaataatatggtcaaaggttattaccagattctcttgcaaaatacattgattttctgtatttttctcctttttctgaacttttttgttttgttttttttttagctgaagaaaaaaatttcagctgggcctatagaagagagtataccctagggatttttatcttatgtatctgattgaggcataggtgatggaggacctccctatccttgtgaactcttcacttctgagggttttgcttctaaggagatcatgatgagagttatggccactacaaaggtggagggtactgatcttcccccatccagggaagaaatgaatataactccccctgtggtgatcgtggaattctgtgtttcagtccctcatttaaaggctcatatggtggtattttctctatcacagattcttgtattgttaagtgaggaagcagcgggtgg

SEQ ID NO: 59127 - DNA, 572 bp, Populus trichocarpa
  Intron number 1 from transcript POPTR_0010s19790.1 (locus POPTR_0010s19790) derived from phytozome v7.0 (chr-ID scaf fold_10; pos 17607713 to 17608284 reverse strand)
actcaagtgcatttccctttccagtgattctctaggtttgttttgattgcgaagtgttttgttgctgagagtattgtgaggaatgggaagaaaatcttgagcagtaattgtttagtgtggcttctaaatggaacatgagatatattgatttatcagttaagagaagctttttattgggaagaagtcatatcttgctcttccttttgcatccaatgcttgattgctgcgaaatagaggggaaagcaattaagatttaagttcgcctttttttctctctaaatatagtgtgcagattttttttggtttttgttatatctctggtagtcaacttcctaagcaacatttgattaaagtgtcattacgattggtaaattataattaaagaattaagatatgattttttttttgtcatttttaatgctctcatttaatcaacaacaaattaacgtgttttagggaaattaaagaatttaactttaaaaattttatgttaattttattgaacaaattctatagcaacttgttttctaagcttcagttttaattttggttggtgtttcttgtagtagttg

SEQ ID NO: 59128 - DNA, 892 bp, Populus trichocarpa
  Intron number 1 from transcript POPTR_0010s15660.1 (locus POPTR_0010s15660) derived from phytozome v7.0 (chr-ID scaf fold_10; pos 14801354 to 14802245)
ttttgtctgtgatcacttgttcaggcactttcaaggtctcttcttttaaaaaacatttttttatcagcccttttatatctattaaaatcttgccttaaaagaaaactttgctgggttcttcttgtgggattttcaatcagtttgctttttttttttttggagactttgacaggctctgctcctttttttgcgagtctagatgaaaaactattttgtgtagtttaattggatcatagaaagcagctttctttttttaggactataaattaataaaaaaaacaattatcggtatttaaagatggaattttgcatgcgaatatcattgattggaaggtattggtacctatcggtagctttcttgcttttaattactgaaagtgatgcagttttttggagctgttcacgtttgtggttatctctgtcttgtcaatttcatggatactgtttgtagtgatattcaatcggattttgctttttgtgtaagcttttgattggcttttatgagtttgcaatgctttgtactttaaataacagtttaaacttggaacagggtgattaaatgtaagctttatgattagtttttagtagagccactttagattgaaatctaagtcagtgcttctaaaatgtgtgctggccaaatgcattagctctagttagaaaatagatttgctcgaggataatggatttgagactttgaattccagtgaaaaagcagggcatatatcttctatttttttattatttttgtttctcaattattttgatctttttttggttttatttcatttaactttagaaaaggattgtgccttatgttggcaatcttaggctttgtggttatgcaccaatttcagcagagacgcagggtgttgtgacaagtgagaccatc

SEQ ID NO: 59129 - DNA, 839 bp, Populus trichocarpa
  Intron number 1 from transcript POPTR_0001s19170.1 (locus POPTR_0001s19170) derived from phytozome v7.0 (chr-ID scaf fold_1; pos 16603708 to 16604546 reverse strand)
gcagtgtgtgggcccagagcgccaccttcccccaggtcctttctgaattttttttgtttgctaattaccatatcttattataatttagattcgattggatctgatttattgttctttaatcacgagttcctccttgtttttaaatgtttttattttttgatttagttattcaatgtggtgtttgatttattattacgaattattgactaagaaatgttttttttcttgtggttttagattttgggattgcttttgttttttaagacatttttttgtcgcaaacggcaatgaattattaaaatatgaagggttttttcttgttaatgaatattaagaaggattctatgttgattttgttggggttaattgttgaaagatggattgttggtaaaatgctgcatttggcaattagcttgtgatcggctctgacttttaaggattccgaaggcgcaccgttagatttaggaagtggtttatcatgataagatgtaaatggtaagtggtgtgagaatttatcggatgttggtgggcttcgttttgcttttgatatccatcttctaaaggatgtatttgaacctttgttttgatttgctgtgtagcggtttggcctgcaaaaacattttgttattaattctttgagcatcatttgtggtctgtatacacagtttggattgtgcaattttatgcatttatcgcctctgtttcttctgtttttgaatgcctttttcttgcttgatatggctccagctggatttttcttttcctctttcacatgtcattgaccaaaacatttcattgctggctgtttacagtttaagcctgaggagatatctgccatc

SEQ ID NO: 59130 - DNA, 638 bp, Populus trichocarpa
  Intron number 2 from transcript POPTR_0001s20720.1 (locus POPTR_0001s20720) derived from phytozome v7.0 (chr-ID scaf fold_1; pos 18829972 to 18830609 reverse strand)
aaaccaagaatgttagtcccctagcttcttctctctctctctcttagttttctgtgtgtgcgcggtttagagaactgaattctattttttaggagtttgaaatctatctctagctagttttcttcgatattctctgattctatgacggtgccttttttttttctttttttctttttgagaagagttcaattagacacaagataaaacaaaagatgtcgggctcttaaccctatctctggcatctttcatcttcttctatgttttttgttttgttttgttttttttacatgtttttatgaagaaaaaaacataaaagagaacccaattaaatcactacgacgtacatgcaatgataacacaccctctctctctctctagctgaagaaagaaacgattgatgtttgaattttatctccggcttctactcaagtttggaatgattttgctagaaagtaaaaaaccaagcttagtggagtatggggcttgcatgaatcatattgtctcgtaaaagagactcatgatcattacaacatatatttacagccctttaatttccccaaaaagttaccaagtaaaaaccctttgttgtataaatgtctccagattgcctttcaagtattagtcaaggcattgattag

SEQ ID NO: 59131 - DNA, 536 bp, Populus trichocarpa
  Intron number 2 from transcript POPTR_0010s14520.1 (locus POPTR_0010s14520) derived from phytozome v7.0 (chr-ID scaf fold_10; pos 14092983 to 14093518 reverse strand)
gagaaactgtcctcaaagaggtactatttactgcaattgcacacatattgccttttatgttctatattttggtacaacttccattcaaactccatgtagaaatcaacagcttttgtgatgcatctattttccattacagaagcagacttgaatgtatcattgtctacagttttgatatgggttcatgatatttcaaatgcaacaaactacaattctgtgtttcaaatgcttgtgaagttcttgctaaccatttcgctggcgtcacgagccagggaaatgaatagtccattgatgttctgtactgtcctttcatgcccgctaatgctcgtatctgcatctacagtttcgttatctttgtttgaatttgatttcatgaatcacaaaggtgggaaaaataacgatgttggccataagaaaaaagtcttttcttatgataatggatcattattaattccttggcattattatgttcctagttaactgcttcttctatgcctggattaatatttagattgaactggaggatcccttggaga

SEQ ID NO: 59132 - DNA, 691 bp, Populus trichocarpa
  Intron number 1 from transcript POPTR_0010s09210.1 (locus POPTR_0010s09210) derived from phytozome v7.0 (chr-ID scaf fold_10; pos 10083668 to 10084358 reverse strand)
atttctcaagctttgttaggcagctaaacacatatgtaagtactctttctttataaccttacagatttatcaactttaacttatctttattttaaagtaggaaaacaatcaagggattgatgggtattggtttttctggattagtattactgtaattttacgtgggttttctttctagatgtgactgcttgcttattcaagaatcagctaaagctagaaactcgtagctttattattctttatttttttttctattcttttgagaaaaaaagatatatttgatactcttttgttcaatttgtttaatgggttacttaatgtggatattttgcttgtttaatatatagtttgaaaagaggagctgcagagatcgtgtgtgtgtgtgtagacacccacagtatgctattattaggttgttaagcatgtgcagtgtttccacatttggtttgttaaaaaaaatcatgactatttcatgaaaggaagttcattaaaaactcaacctttctaaacccctaataattgcacacaaattattgttcatcctttgtagctctcgagtactgttgttgagagttcatatagtatcatttatgttatgattcatttggttattaacttagttttgttttggaattgatcaagaagatggaatttggattatgtaggggtttagaaaggttgatccagatag

SEQ ID NO: 59133 - DNA, 360 bp, Populus trichocarpa
  Intron number 3 from transcript POPTR_0001s07350.1 (locus POPTR_0001s07350) derived from phytozome v7.0 (chr-ID scaf fold_1; pos 5544789 to 5545148 reverse strand)
agggtgagttgagcttgttatcataccttctctgagtttccattgtccttctaatagatgttatttttaggttccttgggattatccataggagtgaaatactcgaccaaacttttttatatcaacattgttattttgtcttagatacgattacctcatcaaaattgtcaaggtattctatattagcggaaagcttctcataaatttcttttccattctgctgctttcttctccagtttagaacttatcctcaactatcttttatgttcttggttggtgtctaattagttgttattgcaacttctagttgactgttctcttgttttttgacctttcatgtgtaggcatttcgtgcacaga

SEQ ID NO: 59134 - DNA, 656 bp, Populus trichocarpa
  Intron number 1 from transcript POPTR_0010s18520.1 (locus POPTR_0010s18520) derived from phytozome v7.0 (chr-ID scaf fold_10; pos 16732022 to 16732677)
atactgtccttacaaggtttgaaggacattacgttagaatccatttgcttcatgatactgtccttgaaaatgtatcgacatgatatcaggatttataacattcattttctaacggtttagaggacgcaacggctgtttcgtgatattatcatggcggtaatggcttctgtattattttaatgaaattactatcaggggcgtagccttgtaagaagggctatagttcaggtaataaaaaaaaataaaaattaataacccacttttcaaatctaaacactacccattttcccttccaatactaattaattagcagctattagccacacacttcattacaagcactaacttttcattttgaattcaatatttcacattcattacagtagattgttagtggagtaaacagtagactatatcttaaaaatggacggatgctaacacactagtactaataatttactgaatatttcaaagttaagttcttcaaatctcccagtaatctgcatcactagtttatccttgtatattctgcatttcataaatattttattgtggcattaatatcttttcatcttgcacttgacttccctaatcccttttacatgaataggttataaattataatcgaaaatcaatgaagcaagagaggaaaaact

SEQ ID NO: 59135 - DNA, 409 bp, Populus trichocarpa
  Intron number 1 from transcript POPTR_0001s32420.1 (locus POPTR_0001s32420) derived from phytozome v7.0 (chr-ID scaf fold_1; pos 30759706 to 30760114 reverse strand)
ttactgcaactaacggatccaacgctccatctgaggttcgctacacttatttcccatttctcaaatattctttttttattttattgctaagaaaattggtttatattagttttatgcaatttagaattttttattttatttttcattgcgatttgattagtgaattgatagaatgctgctgttttttttttttttttgcgtacattgagaaattttattggacgaatatgttttcagtattgatttaggcaaaatgttagtgtttgaaactgtaaatattaggtgaatatagcgtattgattattttcttttattttttgagattctcgtttttttgcttcgatttagtgattttaaattattttttttggtatctgagttttatttttgggatatgttactaagataa

SEQ ID NO: 59136 - DNA, 421 bp, Populus trichocarpa
  Intron number 1 from transcript POPTR_0001s31870.1 (locus POPTR_0001s31870) derived from phytozome v7.0 (chr-ID scaf fold_1; pos 30221699 to 30222119)
cccgtcgtgctatctgtgaaatttcagatccagtggtatggttctcttctattttttattgcgtgtgttttcatttaactagttcaatgtgtttgtttataaaaactgtgaatccaaaatggatttagatgattttcgtcatttaatgagagcttgtattagatgctgatttgatgcttcgtagagtatagaaagttgctatcttcatgtttttcaggctgccacttcttgttctgccacatagattgaaaagcaattttcaagccatatttcttgtactagttcaagactagtatttggattattttcctgctcatctctagctactttatgccatgctttttgattccataatttttctttccttgcttccatatataacgtatttagatgtgactttggtgttttaactgtcagatta

SEQ ID NO: 59137 - DNA, 566 bp, Populus trichocarpa
  Intron number 1 from transcript POPTR_0007s02760.1 (locus POPTR_0007s02760) derived from phytozome v7.0 (chr-ID scaf fold_7; pos 1602594 to 1603159 reverse strand)
taatccgccgagcagtactgtgttgatcactccaggtcctctgcatgcttagctgttctttactatcatgaccttttcttttccttgtattttgtatttaatttttagtgtcatttttttaggataattttttttttgggattgtacagggatggttgttcgggttgtggattgtaacgaaggattgtgattattataatttcttgagcattagtgaattcacagagctgtccctgaattcttagaaaaaaaacaataatcatgttctggctttttcccccttgagaatgttgtttttcttttaatatctagcagtatactaacaatttagttaaatattgtaaatttatttgataattattatcgcgttgtgaaaactgaaaagaaatgttttgcacttgtggtaaatcgagtcaaaatggagccttaaaagtcgtgaaaggtttagaatccgaggcaagttgtcttcactagtcaaagaggagagaaaaaggcactgccagtctgccatgacaggtggtgtctcctatggtttcttgacgatcacttgctcaggttactattgg

SEQ ID NO: 59138 - DNA, 642 bp, Populus trichocarpa
  Intron number 1 from transcript POPTR_0001s16730.1 (locus POPTR_0001s16730) derived from phytozome v7.0 (chr-ID scaf fold_1; pos 13519230 to 13519871 reverse strand)
ctcattccagaaaacaacgacgacgacaaatcaaagtttgtatttttttttgttttgatccttcattctcacacacgcatgcatcacccctactgggttttcttttttggttcggaaagccaataaaatgagaggatcgcaagtgaagattgaatagaaataaaaactgggttctctttaatttgtattagtatttttgtttcccttctcccttttttgtgttttaggcatggttgtattcttcttagagactttgatttcacagtgaatgaaaatatgtgaacttcttgttatttctacatgtgctcttattttctattatatttttggtttctaagaaattattgctgaaagctttgattttgaagcttataattttctcgtttttggaaccctgattttttttccagctcggtgtttggttactgagaaagtttagaaatctgaaggcatgaaatttttagtctcacttctgaaccgtaataattaatgaagcgcctgcatacgtgtttcaattctaaaaaagaaaaggatcgattgtaattatacgtttcaattctaaaatcatggggtgttataattttgaatttcagttttaatgtgtgaaataataaattattttgttaatttgtttatgcagag

SEQ ID NO: 59139 - DNA, 717 bp, Populus trichocarpa
  Intron number 2 from transcript POPTR_0001s03470.1 (locus POPTR_0001s03470) derived from phytozome v7.0 (chr-ID scaf fold_1; pos 2804705 to 2805421)
atgtatgtagtcatctccttatcgttcttttttttttccttttaaattatttttatgtgcgttccttttctcttctttggcggggttcatgtcggatttggtaaaggatgactattctccaggcatagaaaataaagataggaatcgaaagtattcaacctaaataattgaggacaggacccatctattaaatccgaagacttataggataccttgaaaatggtatgaagacttaaatatacgaattcaaccactacaatttacacaaaaaggacagaattcaaccaaaataaatactgataacttgtcaagtgaagattggaggaatgatcaaactcttcaattagaggcttctttagagtatatgcttccaaattgggatttatccaattctgtttcagcagtaggatgaaatttgaatggttttgttcaaaagggatgtggctaaatcaaccatcctgataggacatgacacccttatcatgttatcatagacacgggcgaatttaggctgcaagctcttggaggactcttttggctatgttggtttcgatggagtgtcttttcatgcctagaacttgtctcctagagccatcactatcattttgctgttgttgggatgcaatttacgtgttacacttttctatgcttttgagctttagctcaagggacaatttttttctaacagtatgctttcttttttcccttcagactgtg

SEQ ID NO: 59140 - DNA, 640 bp, Populus trichocarpa
  Intron number 1 from transcript POPTR_0007s13850.1 (locus POPTR_0007s13850) derived from phytozome v7.0 (chr-ID scaf fold_7; pos 13859156 to 13859795)
gaaggtaagtggacgtaaggaggggatcacatctcagcaacaaatattcggcacaggagtaggttaatataacacagaaaagtctctcccggtacaggtttctttacttaattatgctacaaagtgtataagctacaccgagcccaaaaacctgcaaaatacatgtcttattcataaggtagaatgcacttaaaacaactgctaatggggctgaaaaaaagaaagaaagaacctaatttccagccctgacttataggtatctttctacgtaaatccatgttgatttgggacctcccttcgtgggcagtgaaagggatatcatccgatggaacctaggccttcttcctttaaaatggaaacgagttggctagcattttattcaccatgcttatctagagaagaattagaagattacatggtgataatgtgcaaccataattgatgtacatgcaggctttgaatttgaattttttttttaatctttcatatataatattttagaaagaatatttaaggacaattgataatgtaaattgcgcttagcaatacttgtcatgttatctaacctttttttttttttaatgtacttgtatggttattttcagacataaactggcctgcttacctggcactttctttg

SEQ ID NO: 59141 - DNA, 607 bp, Populus trichocarpa
  Intron number 1 from transcript POPTR_0001s44740.1 (locus POPTR_0001s44740) derived from phytozome v7.0 (chr-ID scaf fold_1; pos 45161017 to 45161623 reverse strand)
tttagcctcatttgctaacatctcatttaagacaggtaaactgttctgttctaatgatcaatcattaagtttcacgaagccatgaattgtcaatcataattttgaaaggttgtaatttgtctgtatcacagcctagatctgattgctgtcaatccatacatctcatatctgaagaacaattgtgtcccttttggatggtatttttatgtgcttgtgctcatgatatataatctatccatgttgtaagagttccgttttttttttctcaggggacgaaattacgaactgaatatggcaagccaagtttcatgttaatgttgtttttccttgccaacttgctgtgttctcatattgtggattcatcaacaatgtttccatgatatgttgcaattgtcctcttcatttcatcagaatgtaattgtcatttcttgaagacattcaaggatctcataattaatattttggcatcagcaaatcagaatatgttgttcaactctccaagttataattccgaagcccatttggaacttgataaaaatgtctaattcaaactgaacataatttctccacagatagcagcagaaaaaggtacattgctgaagaaatc

SEQ ID NO: 59142 - DNA, 879 bp, Populus trichocarpa
  Intron number 3 from transcript POPTR_0010s19290.1 (locus POPTR_0010s19290) derived from phytozome v7.0 (chr-ID scaf fold_10; pos 17241179 to 17242057 reverse strand)
taccgtttaggggtgcagaagtaagtgtactgaatttcaaaaaacatctcaatatttgaatggaagatgacctttgatgtttatgatcactggatattatcagtaaatgcttgcttacaatacattggaacgagcgttacatggcttttgtaatgcaaccttttggaaaattaaggccaatagcagttcagtgacttcctagttctgcatatagatagtgggcatgcttttttattagcaatatgttttttaggttcattttactcttactggctggcttaaggctgagaattttgaaaattatgagaaaggagtggatcgtttatataaatgataacctgctactatgagctttgataaaagcctcgtttacttttaaattggatttcttagcgacattcacctttcatttgatgctgcaggcttgattaagcacttgcattgttcttatctaaatgataacagaatgtaattggtttacttactattcgcattcggttcacgtggttggcttcgcttcttggattcaaagggaatgctagaagctatatgttgtttttttttccctccctggtcgattcaagctacacgtcactgtgaacttgggtgataacgaaaaccccattcattatttgaccatctacctctaacatgcaaagataatatattatgactgctaatttactagctttattgcatcacaaaaagaatatcaacttgccaaataaatcatttcctaacatagtagcttctgtatttcattatgtttcataacccttagatggttttgggtggtatgtgatttattttttcgaaaaatgaacctaagcgatattcactatctaaaataatttttgaacagccttgccgagcctgttg

SEQ ID NO: 59143 - DNA, 415 bp, Populus trichocarpa
  Intron number 2 from transcript POPTR_0010s13620.1 (locus POPTR_0010s13620) derived from phytozome v7.0 (chr-ID scaf fold_10; pos 13436997 to 13437411)
ggactataacagttgcttccataatataccaaatagtaaacgccacccctcttaatttcatgcgtatatatcatgaattgcttatgttttggttatcatgtgaaagaaagtcatgagaacctaataaatttgaacagtacctaaactacacgaatcccctttattgatcctctaaaaaatgctaattatggatgagcaccctatcctctagcaattaatttagatgcaaaatatgctggctgcagcattaattcacacttcaaaagtttgttgtatctgttgaattcgagattccggtccaggtttatgtcaaataaagctcaaaaggtgtagaccttttgaaattcatatcttactaaaaattgactagcatattcttctcctcctccttttttttcttcttcctcctcagggc

SEQ ID NO: 59144 - DNA, 436 bp, Populus trichocarpa
  Intron number 2 from transcript POPTR_0001s18380.1 (locus POPTR_0001s18380) derived from phytozome v7.0 (chr-ID scaf fold_1; pos 15427828 to 15428263)
gtttgattccaaatcatcagcagcgatatcaaaatgcaagtgaaatttatccctttttagtatttatgcatttgacaacttgctaataagttgcaaggcttgattccaaatcatcagcggcaatgtcaaaatgctacagatacccttttgttcgatgaagttttttttatccaagttatagaaaatttatcctgaagtatctctgagatgattcagaatttcaatcaaccctcgtagcttatgctttcttgtgaacataaaacaaatgtgttaacagtgtctgatttggagtgcggtttcgaattttaaagatttatcactgataagaagtggcaatcagatctgtcaaagcaacgaaaagaattattgaaatgaattcaaatggaagaagaacctcgttctaaaattgttgtcaattttgtttacgttgtcaggt

SEQ ID NO: 59145 - DNA, 691 bp, Populus trichocarpa
  Intron number 1 from transcript POPTR_0002s25240.2 (locus POPTR_0002s25240) derived from phytozome v7.0 (chr-ID scaf fold_2; pos 22385768 to 22386458)
agtgcaacctcagcactgctgtgcctagctgctaaggtatgcccatattctcatcacatgcattctcttgcaccttgcaaccataatttagctagcatgcatgcattaatgcagcaggctccgggtgtcgaatttgaacaaggttaaatcaatttgggctaatccaattcttttttcaaaaaaaaaaaaaccaaaactattttgttttgaaaaaagttactataaatttaagtgggttttgactggatattgacctaggtttttagatttttaactagattgacctaggtttttattcgagtccatgggtcaattattctctattttttttatgttatatatcatctcgtttaattgattaatcaggcaaacacctaactgacctgggacttcttatctaaagggggccaaggatggccttggcctcttccagagttttttttaaaatccaaaaccctcttattgtttgaaacttctcaattaagcccttagaaaggccaccccaaaatagaaaatttgcatgttatcagagggagtgttttggtatgagagatgcaatagtcattatactcgtcaaattaggcctccatggaacgtttatatgtaattagggttgctatatgctactaattatttgtataaattgctaatttatttgttgcttggcaaccattttgttgaactttcaggc

SEQ ID NO: 59146 - DNA, 802 bp, Populus trichocarpa
  Intron number 1 from transcript POPTR_0001s02910.1 (locus POPTR_0001s02910) derived from phytozome v7.0 (chr-ID scaf fold_1; pos 2304989 to 2305790 reverse strand)
ctgtgagtaggagtactgtgcatgcacaatacaaaagcttatgtagagatcaaaatatatgatgttttattccattttgtgtttttggaatagctgaggtatgttgcattcactttgatgtttccttcatgtgatctactggggttttgtgatgactttgttgctactgtgtgcatgcatgtccggttttagtttatacatatataaagagcatcttgtttccctttaaagaattcccagttttggtttcaaactttgttccctttctctccttgttccttcctttctctgtctatgctttggattttcctgtgttcattgcagagatcttacatggttctttttgtttatgtgttgttttatagaactagcacaaaccaagaagatcttgatactttgatcaatctttctgtactgatagctgatactgtaaatggcatgtgctgtcttctatcagttcttttatccgtgtccttttctaatgatctatatagtggtgttaaataaatgatccagccatcgcaccatgactgatcaagattctttcttgattttttctctctttgaagccaggcattagagtctgaacattgttctgtattcagtggagacttgttatgtggggttttttaaatgttgaatttcttgggttttttttttaattctcttcaacttgagttttttgttgcttaagcaacaataatagtttcaattaatgggctttctttgttcttttttctcttacattaattactcagttctttgtttggcttaacagtatagtataccagatcaagtagcg

SEQ ID NO: 59147 - DNA, 419 bp, Populus trichocarpa
  Intron number 2 from transcript POPTR_0001s10560.1 (locus POPTR_0001s10560) derived from phytozome v7.0 (chr-ID scaf fold_1; pos 8213976 to 8214394)
gagaggtagcttttactcattttccaacttcctcatttttttattattattattctcttggcacctcgctttttcaagcccacttgaatggcaaaaaaaaaaaaaaagctctagaatttgattaaattgacttcatttgcaatttgaacgagaacccattttttttatagtgtatgatagcatagtttcgtaaaagagctccatgtttaatctttttattcatttttaaattctttattggtgttacctttttcattttgtccttttcaagaagattatatattgctttgacggagatttataccccattagagcataataagttaacaaaaacacaaattaaataactgacaccaccaaaaattaatttaataccatttctgttaacgatttttgctgttttcttgattaggttggcg

SEQ ID NO: 59148 - DNA, 679 bp, Populus trichocarpa
  Intron number 2 from transcript POPTR_0010s17900.1 (locus POPTR_0010s17900) derived from phytozome v7.0 (chr-ID scaf fold_10; pos 16329389 to 16330067)
tctccaacagctggaaaaggtaagatgattgacagttttgggggcttgaaccgcaaaaggaaaagtcgtccatgtggaagaagcgaatcaaacacttacggggttgtttctttagcttcatgttcatgggatgcaaatgagagcaccacttccattttgccaccacgcccaataggagatgatggggtgatttttctttttctttggtttgttatgagaaatttcttgagactccaattctagtttgtcttcttcttttctttaaattagttttgatgttggttatgttatataaaagccaatgtagcatagagtatatgagctactgttatcatttttttttctgagccatgaattgtatttgtttggttagggtctcttcctgttaacaattggcattcttctcttaattttcgtgttcttttcaaaagaaagaaagaaaaagagaaggaaaagctcttgatgattccaagaagcatatagaatattttacttagtgctgatggattagtttaggtctttgataagcttgatgcagcaatgtcaagaagagagttgtctactcaaagtgtcaattgctttgttagaagtatttttatgggatttgcattagcttttgttgtttatctcacacaataatgcccactgctctggtctgccttttgttttcagaattact

SEQ ID NO: 59149 - DNA, 592 bp, Populus trichocarpa
  Intron number 1 from transcript POPTR_0007s02640.1 (locus POPTR_0007s02640) derived from phytozome v7.0 (chr-ID scaf fold_7; pos 1552149 to 1552740 reverse strand)
tgtgagttttctctctttcaatggactacatctctttatgttcttgtgtgtttgttctctaagcttgattccttgttatatttacttcttcttttttcttcttgaaatcaaggcccgatagatttgatactaacttcttttaatttctaaattccatcttcctattttcgagattcaaattaagaattcgtttttaatccacatttttgttagaatgattaagagtctattttcatgatcaaacaagtattttaatccacatttctaaattacataggttgcttttctttcttttttgaaaaagaaaaactttcgaataatattgactacaaatgatattagctgaattgataataattctcttaaatgctcagtttttcgtttatttttttttaaattgcttatataaatagagttggaagaatccgatcatttctatacctatattggcacttccaccactagatttattacatttgataagttcaatggattagatcaatatttgaaaatgatgagtgcatttgataagtcatgtaatcatgtcagttgtgtaaaccgcaacattacaggcactataacaacgcattct

SEQ ID NO: 59150 - DNA, 539 bp, Populus trichocarpa
  Intron number 1 from transcript POPTR_0001s42980.1 (locus POPTR_0001s42980) derived from phytozome v7.0 (chr-ID scaf fold_1; pos 43046634 to 43047172)
tcgtacgaggaagaccaacactgatcagccttgtctgttgcttcattgataaatatttgtccatagaaatacatacataattttcgagattcaccgaaaattttcttcatttttgctatgtgatttagttgctgtctgggaaaaaaaagaaacagataataacatcgatgaatcatgtttatatatttatattttaaattttaaaaagatagagattcaatccagaacaatcataaaaacaaatttattttatgtttttttctctatcttttaaaccaaatatatttctgttttaattatttttgttttttctatcccaagataatcaaacgctaaatattttcttcaaatttattcaacgaaaaggcatacccagagataaaaataggatctttattaatttatagaatgaaatacatgcatgctactaatctttctatattattcaataacaattctttcatcaaatcagtctcttaagaaatagtaatgtattatttgttgagttgatgagttttggatttgttatacaggaatca

SEQ ID NO: 59151 - DNA, 907 bp, Populus trichocarpa
  Intron number 4 from transcript POPTR_0001s43210.1 (locus POPTR_0001s43210) derived from phytozome v7.0 (chr-ID scaf fold_1; pos 43272328 to 43273234 reverse strand)
tcattgaagggatagctcaagggctactttaccatgttttgatatatattgacatatatatcattggtatacatagaatgacgttcaatctttcattaatgtaattccaatctgaaaggaatgataactggttcttggaatttttccggattacatttcaaacaaacatttaaatgatgtctagattgcgtctaaatatatttttggatgtttttaaaagtatgtttatattaaaaaaaaatattaaattaaatttttggatggatcaaaaaccctcggctccgaaaacattgcttattgtttttatcatgttttgaaaacccgacccaggagtcgactatcatgtcccgagtctcgtattgggttaaataacagggattactagggattactttttttaattgttatttttattctttttttaatttgttttatcttttaattttatctttcaacatttattttatttgtttattttgtcgaatttttgttcttattcttttaattgtttttttttatcttttattttttttattctatttttggattaaatcccttattattttctttcattagtttttatactagatttgattcttattattttgattgctatttgttttctttttatttaattttgtaattaagaattttgttcaagattttttttggatcttctatgtggtcattttcatctcgtgactagaattgttggtttcaaagattaacttaatttaacttcgatccttttttaattttttaattttaacatttagctattggggcttgagttttttttcctcttttcttcctttagggttatcctgaataatgtaactcgggttcactcatgtcattaccatttaaatatctttttatattagaaaacaattgacccgtcccgaca

SEQ ID NO: 59152 - DNA, 547 bp, Populus trichocarpa
  Intron number 1 from transcript POPTR_0007s02020.1 (locus POPTR_0007s02020) derived from phytozome v7.0 (chr-ID scaf fold_7; pos 1167836 to 1168382)
ccatcattggcttttttctttgtttgttttctaaggtaacaatttatttttcaaaattgttttttattcaatttttattgttaacatttgtttactgataattaattaatctactttttttctggctattagtaatttttgcatttcattctggcttcttacgggctatttcagatcgtgatgaaactagctttggttatgtgaagaactgtgattttttatatttcgattggtgggttgttttttctatttaatttatgtagcttatagacttagaattttgattattttccctgggtttttggcattttattgatttctatttcctttacgggccaaaatcccatctgggtttttaaaattttgttgattgtgtcacaagaatgtgaatttgatttgttttggctatgtgggtcagtgagtttttggcagattgttgacagtgaatttgatttgaattactgtgaactgaattttggtttttttttttttcctggtgtttgattttgtagaagaggagggggtttgaatttcatttggtgataaa

SEQ ID NO: 59153 - DNA, 597 bp, Populus trichocarpa
  Intron number 2 from transcript POPTR_0007s02020.1 (locus POPTR_0007s02020) derived from phytozome v7.0 (chr-ID scaf fold_7; pos 1168483 to 1169079)
agaagttgcttgctgatatcttgccgcgtaatcaggtgatttgttatgtgtttcatggtagcttgctttgtctttgcaagtatttttatgggttttctatgatttggaaggatactgaattgagttggcactctcttcttgtgctttgaacgtggtagtactgttaatctagtgtggattaaatggaccatttgtggttgaaatgcagtttatgtgatgatgtatatgtggttttatttgtactttgattcatcatgcacatcttatcaaagtgaactccatttgtattgctacatttatagccatggccatcattggtatcattgtcaagaatcatgaatgtattattagtgaacttggtccaaatgccagtgattttttaattaaggaatttcaccatcttgccagtagaagaatctatagctttggcagttccttcttaaagcctttcaaaggcttatgactaatctcaccctctccatccatccaacagggaaaagacaacattattttgataaaaacagtggtgtggaactttgtttttgttcttttccttctgtgctaatgcaaccggcattttgcaggaggctgaaccaa

SEQ ID NO: 59154 - DNA, 463 bp, Populus trichocarpa
  Intron number 1 from transcript POPTR_0002s24980.1 (locus POPTR_0002s24980) derived from phytozome v7.0 (chr-ID scaf fold_2; pos 22168600 to 22169062 reverse strand)
aaagggaggtaagcaagcggatgtaggtttctaatcctcaactatttttttttaaaaaaatattactgaatttgttatttttatgatattattgcattataatagtttaaaaatcattttaaaaaggaagcatactagctaattatactattacgtgtttgatattgttataatttttgggattacgatttattaaagtacaagaaaaactatcaattgtagctttttcattgctaagaatttcactagtactcgtataaaaatatattatgtgtttattaatcaaatattttaaaaaatgtagctaaaacaaaacgcagttttaaccttacttcgctgcactatcaaatgaaccttagtggattagttagccatgtaattattcgtagaatttacgtacttagtggattaatttctaaaaatcattggttggcacacaggtttaccaacaatctattgcagc

SEQ ID NO: 59155 - DNA, 304 bp, Populus trichocarpa
  Intron number 1 from transcript POPTR_0001s13940.1 (locus POPTR_0001s13940) derived from phytozome v7.0 (chr-ID scaf fold_1; pos 10986063 to 10986366 reverse strand)
tccccgatcatcttcttgtctttcttgatcacaaggtaattcttcatgctttgattgtcggtttcttatttgattttcttgatttcgatctatgggtttttttttcttctcttttgatctttgaggttttttctatcttttccttgctttattgatgatttacttgtatttttcacaaagattaccgtatcttttcttaatgtttctttaacttatagaagaaagagcagttatatcttagtatagtttttatatggttgtgaagaaacagaggctaatgactgtatttgatggctgcaggtag

SEQ ID NO: 59156 - DNA, 650 bp, Populus trichocarpa
  Intron number 2 from transcript POPTR_0010s21380.1 (locus POPTR_0010s21380) derived from phytozome v7.0 (chr-ID scaf fold_10; pos 18687230 to 18687879)
agcgttacaattataggcccccccgataccttatagtgagttttcatccattctttaagttctttttttctctcttttgttttttttttaacagattctagggctacaccttttttattttattttagtaattggttttaaaatcttgtgttgcttttcgggtttgaatttggtttaaagggtttttattaatcgcgatgatgctatgaaaggctccttttcatgtctggacctttcttgttatctgattttcagtaattatttttggatttctttctatgaagtttacttaaaggttttggtaatggctgactggtaatatgttgttcttgagcctgttagattttctttaatcaattggattatcagctgaacataattaagctatgaatgcattcagtttttaattgattttgagtcttctgctttgtttcattccagtgctttctggtaacttgataggctggtccaattacttataccccgactagtttggaaccaaatcttggatgtattttgttcttgagaattatatccagagcttttagtagcattcaaatttgttgtataatatgctctgacaattaaaggtgacattgtgttgtttattaacaacttattctcatgtcacagtgaagggggtttcttca

SEQ ID NO: 59157 - DNA, 324 bp, Populus trichocarpa
  Intron number 1 from transcript POPTR_0010s04590.1 (locus POPTR_0010s04590) derived from phytozome v7.0 (chr-ID scaf fold_10; pos 5715921 to 5716244 reverse strand)
ctcgcgtcaccattactcttggccgcagtggtcaggtattttttttttccttccaaccctcccttttctttaatctaaaaattaggtttttttttagttatggattgttctaatggaagactttattgttgcttggagagaaaatgaattttaattgtttgtttaatatgggagaaaagtgttgaaagagagattatattaaaagaaaaattagcagtaataatgttttcatgaaaaggagatacctttgggtattgtataatcgctttgattcataggtgtgagtaaccttacaggtggtaaagagagctgcaacgatatcgg

SEQ ID NO: 59158 - DNA, 1036 bp, Populus trichocarpa
  Intron number 1 from transcript POPTR_0001s12750.1 (locus POPTR_0001s12750) derived from phytozome v7.0 (chr-ID scaf fold_1; pos 9874408 to 9875443)
atcttcgagtctatcaagcttggaaaggcaacaatgtaataccttcttttcaacttgtttcccctttctctttcacttgtattttctctccctgtctttacgtgtttgttattatcatgttttatgttgtccgcttttctttttgtttttggctcttaccccgcttcgtttcttagctttcaaaccaatttacaacttttttacctacaaaatcagtgaaaataatttgccccttaagtaatttttttctctcaaaattctatctttttttcccctttccaattgctagtgtttctgcagcctaatggatctttatgtaatcttttcaccgaaaaatctttatgtaatcttaaatccatcttagtagttaaatgtttcataataagtattttgcattactaattatacttccttttgaactaataaattcatggaaacatcaatgctacgaagttggaagtcattaggcatgtaaaatgcactaatgtttataagcaacttcatagtcaagacccaatatccaactatccgagtaaaaatcactgctttagttattacaagtgttatgtttgttctttgtccatactgtgcttccaaaaagaagtttttgttaacatataataggtgataatctagcagaaaaatcattttcctgcagcatctgttgatttttcgttctgtggttgcttagaacaacataatttctagaatgattattgcatttgtaatatttgtagtttgtacataacatgttctatttcatgtgattaacttttcaacatgtttcattggttgaatctttcacagtctaagtatggatccttcgttttattttctttcttttgaatcgagcagggtggtgtatcatttaattcatgtctagttatagctatcaagtctgctgcttcatgtttaccgtttacggctacaaagcatgtgacatgtatagatcatgaattaagcaaacctacaactgactcgatcctttaattcttctgcagatattctgccttgggggtagactagtttttggtcc

SEQ ID NO: 59159 - DNA, 986 bp, Populus trichocarpa
  Intron number 1 from transcript POPTR_0010s25460.1 (locus POPTR_0010s25460) derived from phytozome v7.0 (chr-ID scaf fold_10; pos 21135721 to 21136706)
ttttctgtcactccactctctcttggatcacaaaagtacgtaccttttttttttttatttcattctcttaactgcactttattgatgtatgacacaaaaatgaaaaaccccttcttttatagcacttccaatttggaagttgttattttttacacttacatttgtgtgatttgttttggtttttgagtttggtttaagagggattttgattttatgtaaatatctgcaagattgtttttttttttttgttagaattgatttgagtttcatgcaaaagctccagactttttaatctgggattattgaaatgttgagattatggattaatttgtgatttgtgatttaggtttcaaggtttttggtcaatcaaggctaaagctttgagattttgcatttgcatgtataagattacagctttaaagctctctgtttgtatgttgtttcactttgttttgatcagtatattggtttcaaagtgtacagttatacatattttgtctagctcatttcagtccattttggattctattggattggctgctctaatttatttgttaggttttttattttgtttttaatgacggtaatggtttgaggtgaatcttcttgtatttttttctcttccaatagtagtctgtgttttccttgttctattttttcttaagattttgttctcataatcaagggatttaagctgcatatttgtttgttggccatttttgtaacttgttcttttattttgttaactatgctgaatgaaggttattgtcttaggttttcgtgaaaattaatcttggatattttagttctggtcttgcatggtatagactctattcttaatttcttcaaattagagtttttttggcggtctggggaatgtaatctaaaatcttgttcggtaaaggattcatttataggttacatttctgaattggtaactcggtttttcaggtcagaccgtggggtgagtttgaagattggatcac

SEQ ID NO: 59160 - DNA, 1022 bp, Populus trichocarpa
  Intron number 1 from transcript POPTR_0001s42650.2 (locus POPTR_0001s42650) derived from phytozome v7.0 (chr-ID scaf fold_1; pos 42681633 to 42682654 reverse strand)
gagtttggcatcttgacttcaatctaaaagagttggtaaagataaattgccttttacatcgctgtttagctttgggaatgtattaatatttgcaacatcaatctttattctcttgtgcaataagtgacccaagtattatccattgctttataccagattcctttattcaaagtagaggacatggattttggaatctttacaaaataaagcacttttcttttctccaaaggaaagctgtcaatacttcaatcatgtaatttgacttaaatcaaagaattttttttattttatttctcacaatatcatattttcaactttctagcatgtataaagaatgtaaaagcatggcattttcctttttctgcctaagaaaggggaacctgttttgtgaggaccttgtctatacaagttagtgctgtaaaggtggatgcatagtttgctgtattccttgaaacaacaatggaaacacttcaggaaatcccacaaacaaataacctatgagctggaaatctctgtataattatttttggtaataaacagggccaaggccctagaaaattatatatgtttcgtacgaggagtagccaccctgatcatatcagcatacttaataggaagcacaccatgtaaagggttacaaaaatcttgtctgtagttttccataggaaatttggtattcttgtaataatctagatactgaatttgaatcttaagcattacattttagcagtgaaggtatcatgcagtctaggatgttgacgattgttaggtccttggcttctattaagcatttctttgtagtcttttaatttgttttaatcggataggcactaaattctctgcttttctcaggatcgttatccactaaattctttcatgcattctttttctttcacaatcatgcactaaactctatttttttcagaatgtttaattgcttgttgacctgttctgattacttttgttgcttggtgctgtcttgtgaaggtgccattgagctttcaatattagcagattattat

SEQ ID NO: 59161 - DNA, 847 bp, Populus trichocarpa
  Intron number 4 from transcript POPTR_0001s25350.1 (locus POPTR_0001s25350) derived from phytozome v7.0 (chr-ID scaf fold_1; pos 24505485 to 24506331)
cctcattcaccttcatctttgcttcttttgtgttggtgaggtttttcttcatgttattacttgtcgattttcttttttactttacatattctgggattttctcttgtaatctaacagatggttttcagacttttttaccattgtaatggttgctgatgatgtttttcaataatgttgatggaccttttttttttttttttttatgtttccttgcttgttacatttgtttaatgttctgctttgtcttttcactttactgtggtttatggaagattcatgaatgcaacttttgccgcagctgatggcatgtatatcaaatttcatagaatcctttgtagagtaggcaaggaagatatattttggatggtgatgttattttgtttgcacaatattgtgaaattccccacttagtttcctcatgcacaaatgtatgcatcacttcttttcaacgctggaagaagtattcaaccagatacatgcagtttcagacaaatgtctcagacttgaatgatagtgatgatcacaactctcgaagaaaactatttagtggaggaattacatagacagttttaaaaataatacagactttgatgactcaaattggtatgtcatctgacgttagcatgttattattctttatccgaagtagttattctataaaaccttagagaagtggaatatttttcaagccttttctctttgatttaatcattcctcatgctatggagtttcagtagctaatcatttgtggccagacttctattcttaattatatttgatcctggttctaacaggagttagttttgttgcagtggaccatccatcccttcgttttccagaacaagaa

SEQ ID NO: 59162 - DNA, 538 bp, Populus trichocarpa
  Intron number 1 from transcript POPTR_0010s11060.1 (locus POPTR_0010s11060) derived from phytozome v7.0 (chr-ID scaf fold_10; pos 11438426 to 11438963 reverse strand)
ttgatccccccactaaagacatcgatcatccgcaggtctgattagtctcgaacacagttggatttgtttatgtatcatgcggctcgtaattgttttctcagatctaatctcgtaattgtttgctcagatctaatcgatctctctattcattcatctatttttcatagcaatttagctaaagagcatccgttttattgtgaatccttgtgttctgcaaatctatttttaagattagggtttctgtaatgtgatggtgattttgaatttggagctcttgatcgaattcctttttgctattattaggtttttttgtttattaatctgctcaaaaggggatcagttttgcttagtttctatagtgaattagcagcatctgaatttctgtgaattctcctcatgtgggtggtgcttttattcaattattttcttatgaaattattcggctttcattttttgggcaacagacgacagatctttgtttaaatttattttgggttcttggttctttgtaggagaaaagaaccgttttgattacaaa

SEQ ID NO: 59163 - DNA, 1036 bp, Populus trichocarpa
  Intron number 1 from transcript POPTR_0010s09940.1 (locus POPTR_0010s09940) derived from phytozome v7.0 (chr-ID scaf fold_10; pos 10539963 to 10540998)
gtgttttgctctcaataggtacatataaattgcacgcccactgctctatcatcatcatcatcatcatcattcaaattaaccaattgaaatggtttggttttattgccaaccaacttcgattttcctcttatttcttgactggttttttcgaaattaggctttagtttttaaaatatctttatattttctttacttcccccccttccttctatcttaactcttgtgttcttaacttgaatgggaaattaaataagtatcaccgtatcgaaattcgaaacacctaccctgcattctgggccacgatgattcaatctctagggccatgcccttccctccgatagaaaataaataaataaagaacccactggttttttataatctcctcttctcacttatttagtgaccggttttgcggtgaaacatgttttatttcaacaaattttatgatagaattcataagacagtgtcccaggagaagcttcatgaatcaaaaaagaaccaatacctttttattgtgcgagacaaagcgaaattatagtatagtcatcatattttttggttcatcaaaaggtcttaagtgtttttgggtatccaaaagaaaaaaaaaagaaactgaagttactcaaatctgcttcaatgcggaagccattaggctaaggctatttgtaaatataatctgtaatactctggcatgttccctctggtctcgtttcaaggatttggttctccttcaagcttatttgtttttgtgttggtacagtggttgttaattagaatagaaagaaggaaccttaaaagtgaaattgttaattaataggccaaagcggtacatcgtattttttaattaaaaatatattaaagtaatattttttatttattttttaagaaaaacattaatttcagataaaaaaaacattgtgagacacaaaaacaaacactccaaaatctcccctttcatagttgattcgagcattgactatcgttcgttatttttgtcgcagtattctgcacacaggggcctctcgatatcaggaca

SEQ ID NO: 59164 - DNA, 970 bp, Populus trichocarpa
  Intron number 1 from transcript POPTR_0010s10470.1 (locus POPTR_0010s10470) derived from phytozome v7.0 (chr-ID scaf fold_10; pos 10968926 to 10969895 reverse strand)
tggcctggtatttctcttctccaataccccttcattttttctggcctccttttctcttgcttgcaaccaagaataccatgaatctcgaaaaggttcatgaccttttttgtcctgtattctttggaatacaagatgatatgctcatgttgttttgcgtagctgtttatctttttggggattatgtttttatgctgttatccgcttttttggttgttaaggcagtttgctttgtatgagattattattatttttgtttatacttgattggcaatcatgttgctccttttgttctgagtatttgctattcgttttggtgttcttgtccatggcctcacccctgggataatttttttttccagtattttttttattttttattataatcctactctggaatttgcattttttgttgtctagaccatcaaatgttctaatacacccttaaacactgaattaaataaaataactatctagatgattgtacccgattggcgggaattggccaacatctgctctgtcctcttccgtgtctttgaatctcattcgtgtcaaatgcttcttaaaaatctggcataaattcaagtgttgggagttttgatactaataggattactgagaaaagaactagctttgcatttgctaacaaaatgatgatttccttcaacatgcaatcctcgtgtcattcaattgaggctagctctgcaaccttgagtaaggatactttgtatcatttagaatacctgctaagcccttttctgtcctgcaacttcatgcatgtaatatttggtgtttttctctgtaatgttatgcaaacctgaagcctgttatctttgccaactatatcgtaaatcttcctgctaattgccctagtctttttgaaccccatgtttttggattttacatcttcttatgagattcacttttgaaacctgtaggagaggcgcattccttgaaagtagagaagatctta

SEQ ID NO: 59165 - DNA, 526 bp, Populus trichocarpa
  Intron number 1 from transcript POPTR_0007s13040.1 (locus POPTR_0007s13040) derived from phytozome v7.0 (chr-ID scaf fold_7; pos 13221804 to 13222329 reverse strand)
tgaaagctcaaagttttgatttttacctgtttaaggtttgttggttgtcttttggtatagaaaatgtggttttgatggaattttgatgtctttttggatctgaaagttgccatttttccttcatttgttgttggattcttttactagacgttgtgatgtgggtgttttggtgaaaaagtgaggtcttggatgaatgcttgatgcaaatcaagaaagttatcatttttctgtgtaattgggtctttttgtgttgccataacttgttatatcttccttgatttggagtttcagatgggtttgtgtatatttgattaggactcctgttaagcattatggtttttaggcctgggataaaagattccaccgataacaggcaaaaattggaactgcagtctcaaatttgcatacccattaaacaagttgggttcttttgttttgtttcgtctttgtttatttgaagtgaaggaattatgttttgattttattgatttttccttgtttttatgttgttatagttgaatattga

SEQ ID NO: 59166 - DNA, 922 bp, Populus trichocarpa
  Intron number 2 from transcript POPTR_0002s24080.1 (locus POPTR_0002s24080) derived from phytozome v7.0 (chr-ID scaf fold_2; pos 21529984 to 21530905 reverse strand)
tcaggggcggtgtcaggggcaaaaagggctggttggtatggttcttttgttattttttcctctaatgttttcttatattttagctttgaatgcttacatcatagtttctgctcatagagctctgttttcatttagatttagatgattttatatttgttacctgttaacccgtaattatcgatttcttgtagcctatgaaacattacctaggattgacattggggtcactgtatctttatctccctacaattggagagactggcttggattacatgcatctgcatggcatttacaagctttcagctcttcgagatagcactcggaaaatacctaagatacaagagttttttgcttattgaatttatcgcatcaatttccagccaattcaatagtagtctgtgagcatgaaaaggaaacaattgttattttgctgaggatttattgtccggacaacaattaggtgtttgaattttacatattattgttggaatcctacttggaaaacttgagaaccacataaaaggttgcccctgtgaggtgaacaaaagagagttgacacttgacagagagcaattttatcacttggtatataggtttgacaaacctgtcctttgatgacatttttctggcaaacctgatacttgattccagtttattgtttccctcagagtgaagcctttttctcatttaatttagtgcacaaaggcatatggtgtgtgtattaaggccttctttttctttgtatgagcagatgtgaatgtttgttctgtgcatgtatttctttagtagtccttatttatgtggaagaagatgaagagaaggatggagaaatctgcctttggaaattgcttgttcttctattcatagatttgtgttggtttatataggaaatacaggaaacccttttgccaccttctgtaca

SEQ ID NO: 59167 - DNA, 499 bp, Populus trichocarpa
  Intron number 1 from transcript POPTR_0007s01100.1 (locus POPTR_0007s01100) derived from phytozome v7.0 (chr-ID scaf fold_7; pos 597069 to 597567 reverse strand)
gagcagttcaggttctcttcttccaattttttaatgcattaaatcattttttttttaattttcattttcaaattagttaagtataagtttccgtatcatatcgaaatcttttccctttcattgccttgcctctccctcaaatcttttcatcaacctcataggaattttgtgattgcacggcacggcacggcactcctatcttgattctctatttcaaccaccttgctttgattacatgggtgatatcattctcaaggtccccacattttgtatggaagaatttattatgaaacattggtcctctattgaaacaaacaaaacctctgctgtcactggtgtgataaaaattgcaagcatttttaactatagcattggtaagagtttaggataaaggttttattttccttgtatgatgttcgtggtatgtggttattaatatgatagttgatggttgttaaattcaggactaatatagagtttataaaattaatcgtggtgc

SEQ ID NO: 59168 - DNA, 686 bp, Populus trichocarpa
  Intron number 1 from transcript POPTR_0002s04300.1 (locus POPTR_0002s04300) derived from phytozome v7.0 (chr-ID scaf fold_2; pos 2694683 to 2695368 reverse strand)
caatattcgttcattaaattaagagtgttagatttccttggataattttgttaattaggaaaaaatcataacattcaaaacactacatgcagtcgtgtagattttggttctccgatttgaattcaatggtaaggaaaaacatcggagccagtttagtcttgcccctgcttcccacgctaaagctagtttcgtaaacaatggcttgcatttttagcttatatatatatatatatatatatatatatatccttgtgatgatgaacagttttttggggatcaacatttataacataaacctttctgcggtttgtacgactgcttttattcggggtctaagctatgctaccacaagtttcaaccttcaaacccatggctcggtcaaactcagaaacattagaaagctcaaaggggcatcggtcaaaacaatattaaagcaagggaaaaaagaatgctgggacgtctccatcgatcttatatatatacgagttcatatcctcattgttgcaccacatcaaaagcttaatatctccctccatctcagaaaaattagtagtaaccaaatttccctctgaacggtcttctgcttgaatagcattaggtgatcaatcgaggggaaaggaaaaaaaaaaaaactaagaacaacattctgttctttttctaagagatgggtttatgtcacaggaaaa

SEQ ID NO: 59169 - DNA, 286 bp, Populus trichocarpa
  Intron number 1 from transcript POPTR_0001s04570.1 (locus POPTR_0001s04570) derived from phytozome v7.0 (chr-ID scaf fold_1; pos 3569171 to 3569456 reverse strand)
aatttggtttctcttcacaagagaggtccattgatcctccgtatacagtcaactcccatttcatctcgttttaattttcatagttcaaaactatttgtttttcttttatatataattattcgacgagaagagatattatcggatcaatttatacgtcaatggagattaaatttcttattattcaaataattttaaagacgcaactcttgtattattatcatgcgttcagagtacatccaaattttgtgaagattggaactcgggaaaaaaaacagagtatataatt

SEQ ID NO: 59170 - DNA, 731 bp, Populus trichocarpa
  Intron number 2 from transcript POPTR_0001s09790.1 (locus POPTR_0001s09790) derived from phytozome v7.0 (chr-ID scaf fold_1; pos 7532639 to 7533369)
ctgtccttcttgcttctcaggttagaatctatcaaggttttcaatgacttttctttatgtaaattgtacttgctgatttcttctttcctttcttccatttacttattttcctcttactgattaaatcaaaataagcctatataagtttgtttaaagaacacgaagttgctgtcctgtttccttccatggcccataagacttcttttttcttttctcttgttttgaaaattgttttaattactaattcgttctccatcacgatgttattttcataagaaaaaaaaggtgggtctgcacaacattctatgttcttgagtttcaacaccacaacaatttggttgaaattagttcaccttgataaatgggaccaacttcctggcaaccaccagtagaaacttattgtgggcctaaattgaaaagtgcctaatcgaaaatgatccgcttcacaagcttaacagttcaactgccagtccatatgatttggatccacgacatgtgtttaagtgagcaaataatgaaacttgatcgttggagaggtgggacataaatcaaactctgagagtggagacaaactacttttatcctatttccagttttaaagtgagcttgcaaagctcttttgatgtcaaagctagtgcttgcatgtttatgcaataatgataagttgattttaatacagtaatgatgaattatgtttttcatatttcctggattttgaacattttatcagg

SEQ ID NO: 59171 - DNA, 247 bp, Populus trichocarpa
  Intron number 1 from transcript POPTR_0010s05000.1 (locus POPTR_0010s05000) derived from phytozome v7.0 (chr-ID scaf fold_10; pos 6294345 to 6294591 reverse strand)
ttcttctctccctttgcttcctctcattgctcaatgtaagtatgcctatctcttctactctgctccctactaactagctactgttttcagtcttaatctctctgtttgtttttctttcacttgcatgttcctttgacgtgtgattctcgtacaaattattagttttgttaattaagattagtgaggaattacttgcggggtttatttgtcatatgtaatgtgctgtgcaatgcaatgcaggtgaatt

SEQ ID NO: 59172 - DNA, 880 bp, Populus trichocarpa
  Intron number 3 from transcript POPTR_0010s09330.1 (locus POPTR_0010s09330) derived from phytozome v7.0 (chr-ID scaf fold_10; pos 10186943 to 10187822)
gcaagactcttgttactcgtactcagggtaccaaggtatataacgttttttaaatttatgaacatttttctcttattttttttcatagttttgcataattgtttgcgttttttatgtttggtcgttgggttctcttagaaaatgagagtgcataatttggggcaaggtttttgtttaaattcatagattctaggtgttctacatagttttagcctgtataagaggtcacgatgattgccatgatagagaggcgagtttctagcaatttgttactttgttaacgcgttgattgagattttgttggttggagctcattttgctcaataaatctaagttcagtggcaactttgaggtggcctgcttaaaaaattaaaccttgaaagcatggaagtacagtgtatgaatggcatatggtttgtccacgacacacttcttttcctgtaacaatttatccccacttgtagagaaatattagtcgtgaagatttgactcttgaaatttttgaaccttttctcttgtcatgttctcttccgaactgcaatgtgctcttttttttttctaccagttctattcacaatttaatttcattcattcttatctttttcctagacttgctggctcatgtctagaaggtcatctttagttgttgtgtcattttctttgtaaattaactaacagaaatttgtttgttctagtcgcatttcttgtgctgtattgggattttgcattttttacttatggtcgacgtgaaatactacaactgtattttttttatagatgcttgatcattgagaggtatccatgtgttgctgatgtactaatgtgtactctgtggtctgtaacagattgcttcagaaggtctcaaacatcgtgtttttga

SEQ ID NO: 59173 - DNA, 614 bp, Populus trichocarpa
  Intron number 1 from transcript POPTR_0010s00440.1 (locus POPTR_0010s00440) derived from phytozome v7.0 (chr-ID scaf fold_10; pos 223822 to 224435)
gcttatctgagaaacctgccgttttaaaggtaccctcttgatattttcaagtgttttagagatattatattttgttggtttttatcctcttttgattaatgttttgaaatttgtgttgggtttttgatatttgtttggataatgatggaaatggggtttgatgggagtttggtgttttcttgattattttaatatatgtgtgttttgactgtcagaaaagtgggaacctagaggttgccttgctgtttttttgaggaaaaaaaagtgtgattgtgcttgagttttgaagatccttttcctttttatacgaagtataaggtcgtaggatttcatttgtgattctcataaccagtttttgtttagcattttggaatcagtatcttcctttctttatagtttagaagggagaagtcaaaagcattcattttatatccccatcctttggtttaatttgtttgtgcttaattatatcagttttccaactagtacttggttatgctattatgaatctctattcatacataaaaaaggtggaaatattcagtaaatgcctattcaattttatttttttattccaaggttcgagattggtatctggattctttccgtgatat

SEQ ID NO: 59174 - DNA, 466 bp, Populus trichocarpa
  Intron number 3 from transcript POPTR_0007s10730.1 (locus POPTR_0007s10730) derived from phytozome v7.0 (chr-ID scaf fold_7; pos 10775041 to 10775506 reverse strand)
tgtccttcatagaggtaggtatttcatagagaaactgtcagtctcagatgattaaggacctaaagatatgccctgagtcgtgcaccataaatggtgctaactatctagttcaatgcatcatatttggtatgtaaaaagatattaatcttcaaagcttcctctacagaactctgcagaactatgtaattatatgaaaaggggaaaatcaaattttaaattaaaatgatattgactaacatgtggtaggttaaaatatctttcttgtgttaatgccatggacactgagaagaacttttggacagaaatccagttttatatagtgtataaattggcaactgatggataggctgctattcttttgtcatagaatgttcattaatacatgatttcctccatgttgagcatttaattattgggtttccaatttgaagatcttaagggaagaagtgagagacttgctggattc

SEQ ID NO: 59175 - DNA, 293 bp, Populus trichocarpa
  Intron number 1 from transcript POPTR_0001s16360.1 (locus POPTR_0001s16360) derived from phytozome v7.0 (chr-ID scaf fold_1; pos 13148687 to 13148979)
aaattgagcttaaaaaggcctctgattcgcttaaagtgagtatgttttgttgcttttaaggttttttttttttgtgtgctaattgtgatgttgtgataaagttttgatcttgaagaacagctatgtgcttagaattggaaatgaaggtttttactctttgtaattaacaatgatttttaatcaacgaagagggattttatagatgtgatttgtttttagtgtttgcttgtgatgatttacactggtagttgtttccagttgtgggacacaacctccatatctttgacagcagg

SEQ ID NO: 59176 - DNA, 853 bp, Populus trichocarpa
  Intron number 2 from transcript POPTR_0010s21050.1 (locus POPTR_0010s21050) derived from phytozome v7.0 (chr-ID scaf fold_10; pos 18479204 to 18480056 reverse strand)
caaaagccaagagcgcaagagcagtgtagctagaggtaattggtgctttgcttacgcaaactgatatttaataattatcttactctattatacatatatatatatatgcacttatcagattcaaaagtcaaaacaaccaataatccttccttggaccaattccaaatcacaaaacttagttggtcactgatcaatgccggcattgtcccaataagttatgtcaacagggagttttttaagccaatcaatatctgtagcccaaagggatatgcagttctttattacctttaaaagtatataacagaagaaaaatgctacataattacagcaactagtacatgaatgaatccttgtattgattagtaaaagtaaatgattcataatcaatttggtaaagggaggtcacttattcatgattcagttggcaagaaatggaaacaagccaaagaatagagaatgtctggagaaatcaaggtctagaattaaccattcttcttgcaataagggtgtgtgtttcaacattgcttgcattgcattatatgcaattattatattcgaacagcaacaatgcctgcatttttcattgcaagcaaaggcgatgcaatgttaatttttccatagtttttcactcattcatgtgcaatcatattctaagttcacctgtacttatttcaatgattgctcaacggaaaagcaatcaagaatcttatacaatcatacagatagaaagaagtaagcctagaatttaattgtatatcgtatgcaccatatttacaaccggatttttgtttaaattaacttttgtattgtgaacatatcaatggtccaggtcaaggtggtcatccagtttgga

SEQ ID NO: 59177 - DNA, 730 bp, Populus trichocarpa
  Intron number 1 from transcript POPTR_0010s21050.1 (locus POPTR_0010s21050) derived from phytozome v7.0 (chr-ID scaf fold_10; pos 18480083 to 18480812 reverse strand)
caaaaggccttggagatactgatttcataggtacagctccatgtttttgtgtttctttgtatatttctttcttttatttagagttccaagttatgtcaaatatcatgctttttttttcttttctgtgtttttgatcctgtcatcgtccctttcctggtacttgctgttctggttaccgaaatgcctgtcgtgatatttggctccatctggttttttttcgttcatcatcctattttcttggggttttttttcttttccttttttggctagaaatctcatttctttcattgaattgccatttttatgtctagtttcaactccaattcagataaaggtggttttgtgattttattaaatgggctgcaacttggtagagcagaccatagcagtgaaatgatgaacaattgccattcataaccgtatatcatgaacaattaaacatatattagtgaaataatgtgataatagccatcgcatgtctttggtagacttgtgtagggacatggatacaatccagtaacaggggggggggggggggaggatcaacgcccaatctgtaatctgaccattaaacacacgcttatgccaaaggcagagacctgtgcagggatgaatcctctcattggaaaatgaaatacattgacaactaaagtctttccttttttgaagttctgaatgcttgtgaactgaagattctaacttctgtatatttgatatgatggcaggtgat

SEQ ID NO: 59178 - DNA, 530 bp, Populus trichocarpa
  Intron number 2 from transcript POPTR_0001s29480.1 (locus POPTR_0001s29480) derived from phytozome v7.0 (chr-ID scaf fold_1; pos 28149885 to 28150414)
atcaatctttattggtcaacccatcgaaacaggtattggattgtgagaaacatataaacttggatttaaaagaagcaacatgatacgagcaaaagtctaagaaaacaggtatatttgttgttaggaaaaattctagagaagtagggataaactatttcataccatatttaaattggaatactcgacaaataatcaatgtgaactaaatttgaaactatacattcttatttctcaaaacaggttagatttttttctttcttattgagaaatgtttaatcaaaatctggaatgccaaaagttttgagctttggagaatattcagattattgggaggaaaaccatttttggttgttgcatatgaaatggtggcacaagtgaactattgaaaaatatatagtctcaagctagtttactgcttgtaaattagatgtctaattagttgagtatatttatgctgccaagccaatttgcatgctcttctttgtgttactcaccgcactagtgctttggggcttttttagcaggtttta

SEQ ID NO: 59179 - DNA, 740 bp, Populus trichocarpa
  Intron number 1 from transcript POPTR_0010s05700.1 (locus POPTR_0010s05700) derived from phytozome v7.0 (chr-ID scaf fold_10; pos 7196756 to 7197495)
atatctgtagtgatttttgtggccaggtaatttcgaacccattttgatatgtatgagatttatttagccttttcgttttttgcatttgatatatatgtatattttttgttttcatttctgataactatacatgcctgttctttgaattctggattatgccatgaaaaatagatgttttgttatcggacttgggatttcttggatttttctttcttgttcgtagtagatttattgagtttttgatttaatctggggcttgtttgaggatttgaaaggatcacggttgaggttttttaaggtcgggcatctgaaagaataaggccttttttttttaatttaataacacacataatgaattttcaatctgggccttttcgatttggccgtctggaatctctgattataaaatgtctccactttatctggtttcaaggataatttgtgtttaagaagagagaatatttgagatgctggtttattgaatgattttctttgcattctctcatccatactggactcgaaaagggcattctgcttataggagaaattgttgtttatttatttatttatttctgttacatattctttttctacatgctcattttacatcggttttatatgacaatttattacattgatcatctacaagtaatttggtttgctttgtatttctttctgaaatcattttgacttacattgtgaaattcattgatctgcaggactcgagccgagttttgagt

SEQ ID NO: 59180 - DNA, 644 bp, Populus trichocarpa
  Intron number 1 from transcript POPTR_0001s29610.1 (locus POPTR_0001s29610) derived from phytozome v7.0 (chr-ID scaf fold_1; pos 28241141 to 28241784)
ctttaaccccaacactcctgttaatactccttcaggtttgatttcttttcttttcttttttttctttttggcggttaataaacgattactatatttttattgggttttgtttcatcttttctataattgagttgggctctgtttttattctaatttttatttgaaaatagcttgtcgggtttgatgtttgtttatggtttgattggtttacaagaaaatgtggggaagtaagggaaaggatagaaaatcgttgcattaggtgcttgcttgtatgaggttttgatataatgatggcttaatggcttgttaattcctggtctagcaattaagtatttcatttatgaacgtttttattttgctgctggaaactagttcgtacgtcaattttgcaatctaacatgttgggtgttttagagtgaactctgtagcttcatgttaatgttacgctgaagtaagtttacttgaaaccaataattactgttaaaattataaagtacaaaatgttacaatccagttccctttttgtcttcagcagccttggaattgctttattggttctgttaaaatccctttttgtctttaacagccttggaatttctttttttgcagattatcctcgaagaaactccattagcagagaaaat

SEQ ID NO: 59181 - DNA, 544 bp, Populus trichocarpa
  Intron number 3 from transcript POPTR_0001s13140.1 (locus POPTR_0001s13140) derived from phytozome v7.0 (chr-ID scaf fold_1; pos 10226016 to 10226559 reverse strand)
acaagatcactggtatgtttccaccaagttctttcagaacaagtttaattggcttttcaagtccaaaatgttgatattcctttctcattttcacgttgaaatcttgctgaagtaaagggaaataaagactgtttattcaaaatttagaattacacaagaaacagaatttctgtaccgaagattcaaagtcaacctcttttccttttgtttaaccttttctttctgttgttttctcaatttatttatttctctgagttttcttttcttttctctcttttttttatcagttttttttaatcatacgagttctttgtagacagacgatcgaaagaaagaatattattgttatttcataatgccataggactgataatttccttttcactttacagatatgcatcgtcagtacatactgtgcttgttttctagtcgtttagattctgagctgacaaaaggtcacctttacagacattttacctctcattttgaagctgtttttgtttttgttatctatagctagggacaatctggtgttcttgcaaag

SEQ ID NO: 59182 - DNA, 348 bp, Populus trichocarpa
  Intron number 2 from transcript POPTR_0007s07770.1 (locus POPTR_0007s07770) derived from phytozome v7.0 (chr-ID scaf fold_7; pos 6193617 to 6193964 reverse strand)
atcccaaaaacagtgatagaactgagactattgtggtatgtgtttgttttttttttttttttttggttgggttttgaagattttgcctttagtgttgttaaagctaagcgtgatgtctttttgttgatggttttttagtgattctgctttgtttggttgattttgatgcttttcttaatgggttttggtgggtgtggtttggttaggtaattgttgattttttgcttgctggatttgtggattattgctattttgctttaaagattgttgattgttagcttaggaaatgaaaaggtttgctctttttgtttaggttcctaagggccatatttgggtagagggagataa

SEQ ID NO: 59183 - DNA, 569 bp, Populus trichocarpa
  Intron number 2 from transcript POPTR_0001s01610.1 (locus POPTR_0001s01610) derived from phytozome v7.0 (chr-ID scaf fold_1; pos 1202201 to 1202769)
ttcgtcctcaatccataaggcaagtttttgcatttgcatatgtattttaacttcgttatcattactttgatgattctttctctactcttttctgcttgaattacctttctgttaatggatctgatttcctaacaaatggatgaaattgacacttggctggtgttactcatcaaactgaaggaagaaaagggaaaatccatgattatgtatgttttttagaggcataacatagcatattccagttgaagtttcagaattacgtaggcatgacttatttggatattgttagttgaatggcactacatactgggtttgtcttttcgttgtttcatatatatcttcatttgaagttgtaaacctctaatattagaaatattagttgcaaaattgtgtaattctctcactttttggcaacattgtgtctagatagtccaacctgagaacctaggaaaaaaaggccgcataaagaatggcttctttatgttctattgctttattacaactttgaagatatatattttagtatattctgaggaatatatttttttaatcaatttcaggttttttat

SEQ ID NO: 59184 - DNA, 264 bp, Populus trichocarpa
  Intron number 1 from transcript POPTR_0007s14140.1 (locus POPTR_0007s14140) derived from phytozome v7.0 (chr-ID scaf fold_7; pos 14028388 to 14028651 reverse strand)
cactttgcgcgttaaaggaagatcaattaattcaggtttttttcttcctttttttggctacatatttctcgtataataattcatgatagattttatgtttttgtaggagaaagtaatacaaattttgatatagttaataatttcttaaatcatagtttaagaaaaataaaatcttttatatcatctgaaatgaaatttgaaaaaattggtgtatgaaaaaaaaaaaaagattacagggagtagcactgtggctgtaaagaaagc

SEQ ID NO: 59185 - DNA, 227 bp, Populus trichocarpa
  Intron number 1 from transcript POPTR_0001s28020.1 (locus POPTR_0001s28020) derived from phytozome v7.0 (chr-ID scaf fold_1; pos 26830395 to 26830621 reverse strand)
ttacttattttccttcaaattcacaatccaaccaggtaattaatctactcctaattccttcacttttggttaatatctaagtaaatctagtcaacttgagttgacttaaatctgaagagcgcaatcaaacttcttttttttttcctaatcatattggctcatcaatcaataaataatttgaaaattttggtttttttcttttcagttctgtgaggctggtattggat

SEQ ID NO: 59186 - DNA, 196 bp, Populus trichocarpa
  Intron number 2 from transcript POPTR_0010s06090.1 (locus POPTR_0010s06090) derived from phytozome v7.0 (chr-ID scaf fold_10; pos 7529382 to 7529577 reverse strand)
tctcaaagaaactttccaagcttttggtaaattatttgtcttgttctggggtttttttgaggttttggtcttgttggttcaagtcagattgcttgaaactttcgtggactattttcttcctgctaactgttttttgtttttgacattttctcattgggcaggtgctgttaaggaattgagagagactcctttgaag

SEQ ID NO: 59187 - DNA, 418 bp, Populus trichocarpa
  Intron number 3 from transcript POPTR_0001s25810.1 (locus POPTR_0001s25810) derived from phytozome v7.0 (chr-ID scaf fold_1; pos 24865745 to 24866162)
tcttacagcgccagcttagaccaagaatccttccagttagttgtcttctctcttttgtgttcagacacccgtgtgctcttttttttattatttgttttaggggtgggggttttgtcagtgatggtggtacatgtcatgtttagaaaaaattatcattcctgagagcactctagtcttgaaatagttagtgatgcagcaatttgatgatggtttgactgattctggaaaattcagatttcctagcttttggactccctattgtgttcagtttgtctttgagaaatttgtatgttcctgattggatcgatcaacatgatttttgagcagctcctttttttggtgattttgagctgctgttgcatatcttggcagcaaatttttcataccttgtgttttgtgatacagataaaaccagcat

SEQ ID NO: 59188 - DNA, 1036 bp, Populus trichocarpa
  Intron number 1 from transcript POPTR_0001s34390.6 (locus POPTR_0001s34390) derived from phytozome v7.0 (chr-ID scaf fold_1; pos 32539265 to 32540300)
caaagtttttagcttctttccacacaaacatacaggtatgtttttccctttgtatgtttccaaatttggtttcttttctattttttttttcacttgtatgaggtgaattttattcttcatgaactgtttctcttgctgttgatttctctctctcctgtttcttttttttttttatggttaaagtatataacagtcatttgaggtggttgttcttagggttttcttggttttgtttgtgtttgtttttgtgtgcaattatgacgtgtctttgtgtttttatgggttttgattggaaagacttgagttgactttgtttttcttggtgtttacttgagagttatggtggtttttattctagttttatggtcttctatgatgtggttagactatctttctcttgttatttgagacttctttggcttaaacgcattcttaaaagttacaactgaagaaggtaaagctttctctcgaattgtgatctgggatatacaagtaaatatcacagaaaaaaactcatccatgatatagttcatcttgaaagaatttttgtgagcatggcttgttgttgtcggtgttttttttttttttgctgagttaaatttatagggtactgtgtaatttctcgttaccctttttgcaagttcatgaaacacagtcaaccctttttttttctagtttttttttcgtttcgtgttctgaatctcaatagcaaagttaagtagttcatgtttttccagtctttgatttgctcatcaccttttgatgtgttagcctctgagaaaactgtcttgttcccttatgacttgtttgacctgtccttgttgcaggactgacatgttaatcttctaacctagattttcccacaagtttcataaatggtttttattaaaaaaaaatggaatttgcaaccttaaatcaacataattgacaggggattacatttagcattgatgaacacatttctttttagcattgttagctcttattctgcaatcttgcgagttacagatctacaagttacttttattgtgcttgg

SEQ ID NO: 59189 - DNA, 926 bp, Populus trichocarpa
  Intron number 2 from transcript POPTR_0010s07980.1 (locus POPTR_0010s07980) derived from phytozome v7.0 (chr-ID scaf fold_10; pos 8962845 to 8963770 reverse strand)
tcaagatcttggtcctctacgtcttcttctctcgggtaatgccatctgatcacttttcaggattccatgttctttattctttggtattttcatctatcttaatcatgccagacagttttttgttttttgttttttttattatctgggcagtagaagttcaagggtggttaacttgggtgaggaattataaaggagattaaaattctaggtgtatatttatatgaaagattatcaatatttcgtgtaaagcttccttttccgtgtaaaaatagaacctatccatagttattatgatgagtttcatttttttttttgccggaaaccatgggactaaaaacagtcatgatttagtatgataaaaacaaaaacaatctaatatacttaacattatttatcgatggagactagcgttttcaaatatttttaaattatagagtattaagtgaaataatacttgatgtaaagtgtttctacttttaaatcataaaatagttaacgtctaaatctaacttgatgctagaaagttgaccatccttgtagtcaaggagggggggaaaaaggtcgaaattttgaatcagtgtaatggtggatttggccgcaatttatcaataaaaattagaaacgaacacccttgaaaatgagttttttgctttgtatcggttaggaagtgagtagttggagttgcattgtcatcaatctaagaagttttaaaacaacaaaaattgcacgcaagatgaaggaaaattaatggaggttgacacattgttatcataatcttatcgaagatgtgggctagctgggaatttttataagccattatcctttggaatccccaccaagaaatggacctctcctaccatattttaagaatgtgccggccattagctttctaagctatttaactcaagatttccttctacaggttg

SEQ ID NO: 59190 - DNA, 919 bp, Populus trichocarpa
  Intron number 1 from transcript POPTR_0001s32340.1 (locus POPTR_0001s32340) derived from phytozome v7.0 (chr-ID scaf fold_1; pos 30711070 to 30711988)
accaaggttgtgtattcgaatagttaaatctgaatcgatccaatatattatcgttttaatattaaaaaaatatatcattttaaatttttttattcaaactagttttttatttatcattcaaattgtcttggcacaatgtggagaaacagaaaacttttttcatctaatattccaaattctagatataaataatacaagggtggctgatgaatgtataatttttttatttaaaattataatgccttctaccgattggaaaaaaattaaccattaaaaaaaaggaaaataaaaaaaatgatctaaactaggagaaagacattacaagagtaaattccacattttctacgttttgttattttcatccccacaaccaaacaagtcatgaacaaaacattttgtcatgtttataagacataaaatcaatcaagtttttaataaaagcgtttttattgacatgaaatcaatcaagggaggactaaaaaaaacaattcaatccatcagttggcaccttttggtgcattattgtctagcccagaaaaagaaattgcttgatgttcatgatgctggctggaatagaggtgtccgaccgcatttttcttgtctcttgctttctatttccttacaacttcttgtgaaattttgaatgttatgaagagatattctacccttttgggggacaaactgatgagcattagattcttgtggcaaatttatttctgaaagattacagacaaggaaagcattgacaccagaataagaagtggtactaagcaaagttcatagcagaatgtcatgggtataattcttcacagtcagatttctgaaaatcattctttttccaggctttaaaacctgcagaacagattcgggtgctatcaaacttcgattcgaagtcgatcattcgggtgctatcaaaatc

SEQ ID NO: 59191 - DNA, 878 bp, Populus trichocarpa
  Intron number 1 from transcript POPTR_0007s07750.1 (locus POPTR_0007s07750) derived from phytozome v7.0 (chr-ID scaf fold_7; pos 6163652 to 6164529)
ctaaagtcaagggttacccttcttggcctgccaaggttttttcccctaattttcgattcatttttttttctaacttcactatctgtaaatatattatatagttaatcttatgaatttgattcattctttcttcagttttttatcttttcgaattagtttcgtgggttttagtgatgggttttgaagattggtgggttcagtttattttgttatgtgaatcaatttgtttttcgtggtgggttttgccattttagtaagtcgtaagtaattacaatttaaagatgggctcaaatattggtgaagggggttatttttgttgctttaatgattttagtttaacttgatttggttctttctgttgagctcttaagttttcatgcttgtatgtgtatacttatactttaattctttcttgtaatttgattagttttgagggcatgaaaattaggatcaattgattcacgggttggtatatatgtgtgcatttgattagatgatgatggtataatggtttttttctgtgttatttttttgtgggttttaaagtaaggctcagttggctttgatttgtgtcttggttaattttggtagtaaatatgttgtcccccttatatttgcttcttagctattctcttttaagtgtttatactgttgttaggttgtttttgttctttggtaattgattgattgttgctgtaatttttgtgggttgtggtaatgaagatgttggtattaactgggtgaaggcttcttcctgcaacggttgtgatttattttgttgagcttttgacagtttgtcattttggttgtgtttgagcgatttcatgggtttttgaatttcagattagccggcctgaagattggaagcgagtcgctga

SEQ ID NO: 59192 - DNA, 1027 bp, Populus trichocarpa
  Intron number 2 from transcript POPTR_0010s14860.1 (locus POPTR_0010s14860) derived from phytozome v7.0 (chr-ID scaf fold_10; pos 14329605 to 14330631)
tgctctccaacaattctcactcttctactccaaaggtaatactaacaaatctctttctttattgattttcttattttctatgacattagcaagctcattcccaaatggggttcttcattctttttttctttttcatcttggcttgtttcattgttttttcaagtgtgtgtgtgtggaattggaagggaaaaaatgagaacattgctttcttttttggagctgtcaggtgagctttaaaaatgcggaaatgaaatgacagggttagtttagaccattttcaaagctgtgttttactaatatactgctaatgtagtgatgtgttgttgttgtggcaatcaaagccagtgtttagagggccctttgggcttggaatgaacttaaataaaatactcaagttttttgtctttgtttgaactgtcggtatgttttgagtacaagattttcctagtaatttgtgccaaatagagctttcttgatgacgatcagggtgtgctaacccaatcatatgtaaaagatgactgagaaaatgacataaataactgtagtttaaatctgaaaagcttcaaaattgtgatagagtgattctactgcaaagtgtgtataaattatcatttgctagtgttgcgttagccttctttatgatttggaatgaaatggttgggatttagcactaaaactaaacgtctgtgatgagaatttgaattttttataagttttagtctcattatacattgttagacttgagaagattggatgttattttaattttggtagctatcaatttctttaaaggatcaataaggtttagactcctgtcttaattagaaagttttattttgggattataatttcatgtttgcattaagctttatacgtgatgttttaggagctcaatcttttatctctgtttcaattttctacagttgattgagacttacaattgtcttacatatgttgtgaccaattatattttactcgtttttgtttctggtgattagtaggtttttagttgcagagaaacttattc

SEQ ID NO: 59193 - DNA, 1069 bp, Populus trichocarpa
  Intron number 1 from transcript POPTR_0001s45760.1 (locus POPTR_0001s45760) derived from phytozome v7.0 (chr-ID scaf fold_1; pos 46293954 to 46295022 reverse strand)
ctctcactgtttccaatacctggaatcaagtcaaggtcacttctttctctctcttttaatgtattagtgttaggatttgttatacatgtgcgtgtctgttcttgttttgaatgattcttagtgttctcttgattggtttgttgatattcttgatgggttttctgtgaaatgggagaatagttgacttggaatggttcaaaagatgcaaacttggttggttatgatttcagattcttgcagaagttgggtgcttcatttcagggaatgtgattgtaattattgtgttataattcaagagcattgcttttgtgtccttcttgggtagatatggattatggaggcttgatgggtttgagttttaggtttctgcaatgagtttgattacttgaatgtcttataggatgttttggttcttatgcatatgcaattgtagaatttatctagtgagtttatggttaatggatttgtaatctatctggttacaacagatgtttttgttcgttcatgtgatgtttcatagagctgagaacatccgcttgttgacatagaattgaacatcctttttgaaatatcattgccaattatgaatcgcgatgaacatttcagcatcaattttggatttttagcgagaaaaaaatgtggcagtgaatggccttttcgctcctacttttagctgaaactgcacacttcctactgcaatcacaattgaagaagagtacacatgttctccaacttatctagacaaagagatcttaaatgttacttctttgacctacaccacttggcttttcaatgtcttatccgtgccgtggttgcaaatttaggtttaaccaaatgatgaacttatctggctgctgatgacattatgttctttttgcattaaaattcaccttgtacccaaatctattattatgtttttgtaatagtacatcgttagttacatttaggaaaagtcactaaagaaatagttcgatttaaattacatttttttgtccatttgtgggcttcacattttacttgctgttgtataacaggaagcaaatattagtggattaaatagcaaaacaca

SEQ ID NO: 59194 - DNA, 840 bp, Populus trichocarpa
  Intron number 1 from transcript POPTR_0007s11390.1 (locus POPTR_0007s11390) derived from phytozome v7.0 (chr-ID scaf fold_7; pos 11761938 to 11762777 reverse strand)
ttggacccaactctggtgtccctcttcattacaaagtcagaatcgtactctctccattttcactctctgcaggattttcttcttcttctttagacttcttctgtttttgcacattcttttcctttcttttgtttttttttttacgtgttctttaattcttatgatttatgtttaaataaatgggattagttttttattagtttgtgtttttttatgtttgtaattgtttggtcttcaaatttgtactcttttcatttcattagagtaacattttcttgtttaactgtcttgcttgttattgaaagaaatggacttttcttgattatactgtcttgttatcatgtttctttctgtaatattctatctttgattatgctttgtgcattgtgtatggaatttaagagtgccctgggttttagtgtaaagggattttttttttatcataattaaaaaacgatttattattgtctgtttaattttgttcattggtaaagtatagcttcttggggcttgtggattttgtcaaacttgtaacttgggatgtcttaggatatctgttaatacatttcgaagttaagtaagttattgtcacctagtttttttttggaagatcatatttttgagcagtaacctagtttatccagtgagaaaagttttaaatttgtaactttggagatgacttcctaactctgactgctggcatgtaatagatgtgctaaattatgaagcttcactttagtcagattgtttttgtgatttcacataattttttttttgctgatggaggctgaatacttacttgcaggggagtcgctttcatcgtgttgtcaaaggttttat

SEQ ID NO: 59195 - DNA, 887 bp, Populus trichocarpa
  Intron number 2 from transcript POPTR_0001s14600.1 (locus POPTR_0001s14600) derived from phytozome v7.0 (chr-ID scaf fold_1; pos 11449245 to 11450131)
ttctatttccctcccctggttattgctctcaatccctgccatcattttacctagcaaaaaatattagccagaagtttcatcaccacctagaattggcaacatagcatttttctggtgatcatttggctacaaaagcagctagaactgtgttttttcccgtaaagaaatcgaagcatgttacacaaacgaaactatattcggcactgagatgggatgattgcgactcgcatgccatccataagtaactaataatatttaaacaatactgagcgcatacttaataaattgatgtcaacaaaaataaataaattagtatactaaattatgaaagaaattgggagaccatttggcaaagaaccttttgacttttgggcaagtacttttggatttttgtaactttttttttttaaatcttcaaactttcatgtagctagtatgattttactatacctctgcgaagttattgtaatttacccttgctgaatttaagacaggctttcaagcgcaagtaatcccactcttgaaatccttctgacaggttcaaatgcttgatcgtatggatttcttgccttgatttaacttgattgaaagagttgaaatctgaaaagatgttatttgaatttttttcatttcatatgatttatagcttgatctgaagaactggtgatcagaacgtaaaaaaaaaaacaaaatcttgtatgcttcaggccatgttgctgtttaaatctgctttcacgagtagcatcagaatgaatatggaagcctgtttactcagttgtcacaaatttgcaaactataattcagatattttgtgcgttcactttctaacgggaaccttttttccccctcaatgcaggttttttctctgtatattacaggacatctta

SEQ ID NO: 59196 - DNA, 563 bp, Populus trichocarpa
  Intron number 1 from transcript POPTR_0002s14700.1 (locus POPTR_0002s14700) derived from phytozome v7.0 (chr-ID scaf fold_2; pos 10922182 to 10922744)
tggctgaaccctatttggccaagaattttcggtaagcatccaccacaattgttttttaagttaattattaatgttgtttgtgctgctcggctaaggtgcttaaaaatgacgcttttatttatggtttaatgagtttatagagaaaaggtgcttcgagtggaatcgaaagttgaatgccatatttagactagacgatcactttgttcatgtctaggttttggtagatttctctgagcagcgtatttattgataggatccttagagtaattgaggcgcctatgattgattttacttgtatgggcaatcaaagaagtatcctcaatttctaacaaattacttgttgctaactcatagtttcatgtgaattgcacaattgttagcaaaattgctgtagtttctttgcaacaacaagtaatgttcacattatgttttggtgttatgaggtgtgtttaaggtagtgaaattaatcagggtcatattgttcacatttgtctcttgatgttgttaagagcttctctttgaatcgttaagcaggagggcttggcagattaagagcagtgtgg

SEQ ID NO: 59197 - DNA, 368 bp, Populus trichocarpa
  Intron number 1 from transcript POPTR_0001s26010.2 (locus POPTR_0001s26010) derived from phytozome v7.0 (chr-ID scaf fold_1; pos 25109354 to 25109721 reverse strand)
taaaattaccatcaagtttggcaggcgagttgcttgttagtacattttttttctatgcttcttttgttcttgagtttatgtttcatctttcaagctctcgttttggttttacacatattactgtattgttatgcctgtttttaattataaaaaagttgatgtagttttgtttcaatgacgcataggagctgcaagaggaaaagaatactggggtctctttgacgagttgttatcgtgtcataattactagtatcttgccatagtttggttttatttccgaagattgcaaagttcatggctgaaaattattgtattgggttttgatttttattgaatggtatgttgtttatggtgaatttgcagagaag

SEQ ID NO: 59198 - DNA, 537 bp, Populus trichocarpa
  Intron number 1 from transcript POPTR_0001s30790.1 (locus POPTR_0001s30790) derived from phytozome v7.0 (chr-ID scaf fold_1; pos 29247395 to 29247931)
tggacacaaagaagaaccattttggtggtaaaaatatggcattaacattctctctctctctttctttcttgaaattcaattatctttctataactaagaactaaaaaataataaaaataaattttcatgtcaaaatggaatcttcgaaagggacctaaattttattattttaaagattgaggctggacacactaaccattattgatttttttcttgttttggtctctcttcttacaatttcatattttcttaagaaataaaaaacaactagtctttaattaagatcaaattgcctaaaattaaagttgataactaacttgaaaaattaaaaaaagaacagtacattcataataatatatgagtgtgtgaacaatgttttttaatagtggaaagaccacactttttagatttctattaatattcatattcagactcatctgtttaaataaaaaaaataaaaaaatagtatttattgcttttatcagtaaatatgggaattgtatttgtttttataggggtcaatctccaactattcca

SEQ ID NO: 59199 - DNA, 673 bp, Populus trichocarpa
  Intron number 4 from transcript POPTR_0010s17150.1 (locus POPTR_0010s17150) derived from phytozome v7.0 (chr-ID scaf fold_10; pos 15870500 to 15871172)
tgcattcggtatgcattttttctgtcaactacaatattaacagagcttgccattagattacttgtttatttcttggtcttcgattgcatgttgtaactatagattttttagtctcttttattggtttagttttgttgaacggatgcattgctttctgttcggcaagtgttttctcagacttcgttctcttggctgtgtgtagtggaatagatttcagctcgtcttgtggttctaatttttatgtttgctatagttgaggatgtattggttattgtttacgctgtgcgctgctgctgtttagacaactgagccagtattgtttgattggttgtgcgtagtatcaggagtgcctttgcttagtggtcttctgaaaatgaaaatttgtcctgtcttcgtttagtgaatcgactctaaaacatgtttggatatagattaaaacacaaatgtaagttgtgtcggccaaatccttattttcatcccaggtattttatagtttcacttgatgtattttaaatgattcctcaccctagacatctctttgttatcactagaagatgattgctgggttcctttgatatcttactactcgagcgattacaaaatgcatctgagaaagaatgttctattaatcggtcaaatactggcacaggtttctgcagatcaaagagaaaga

SEQ ID NO: 59200 - DNA, 627 bp, Populus trichocarpa
  Intron number 1 from transcript POPTR_0010s14420.1 (locus POPTR_0010s14420) derived from phytozome v7.0 (chr-ID scaf fold_10; pos 14040014 to 14040640 reverse strand)
actaccacttcagcactcttatagttcttatttatgtaagtaaatctctactcttattttttaccccctttaacctcatcttcttatccttctgcactgactctgagttttgtgctctctctaacctttgttgcatgaatcattttggatctcttctgtcacgaatttgtttttgctaaatcttttttcaatcatcataattgacactcattggtctaatttgctcaattttataattgaaatagattgctgatgataagattgattgtggttcgttgcctgacccagttgtcaaatttggtttactttttgttctgtttccgtttgcccttttgtgtttggttgcgaaggaaacagaagggaaattgttttttttttaatcaggtcaattaccagtccatttataggctcagtttagtggtgggtttcatttttgtggagtcccaaatgacgaaagtttctatcttgaatcggtgccatttctttttagtttttatccaatttgagggaaagatcatgactttctttaactttcttttatttttttaatgtttggttgttacatccgtttgattataagagttgggcttgcattgttttgtttgttctttaagctgataggtgcaa

SEQ ID NO: 59201 - DNA, 985 bp, Populus trichocarpa
  Intron number 2 from transcript POPTR_0001s16980.1 (locus POPTR_0001s16980) derived from phytozome v7.0 (chr-ID scaf fold_1; pos 13800839 to 13801823 reverse strand)
cgcctattctcaagcaaaagaagttcaaggtgtagttttcccccccactcatatctacataaatttatacatgtgttatgtaatgaattgtcggtgggttttgtatttctgtgtttctatgcttgtgggtttgtctaataaggataaaatttaaataataatgttggctggtaaaaataagtataaactcatagagatagaaagaatcgagggaagatcttgccaattgttatcttggtataagctggaatatcattgaataaaagtttttcaagcaaataattgtagctagcatgagttgaggcaaaagtactttggggaagaacaaggtgttttgcaggaggaattttgaattttcattgggaaactatgttttggttgtagatttttgcatatgaatgcgatcatgtttatgccattgaactctatgcaattagaaacatgtctgcatagcaagtgtgatgtttactgtatgattttaggtttgtgcgtgtccttattgagcttgatttatgtttgcgagacgagccacaacattagggtcaaattcacacataatagaactgatcataggtttttttttttctcgcaattataaatagagtttatgtgtgccttgtagccattgccattgggccacgaacttgaagcttggaaacaagttgcatgacaaactgcaagttgaaacacacccttcattaataactttcttttgctattctagagaacaatttgactgctataacgtagaactcccaggaagagcataatcaatgggacagggcttttgtgcttcagcagaaaacatttcgctaaattgcattggaaatactttttaaaatcagaataactggaagttgaactgtttcccatacaagaattggcttaacgtttccagatactggtttttttttgcaactaaaactttcttgcatttcattattatatgatgatgatatttatacacattgagtgaatgtggcag

SEQ ID NO: 59202 - DNA, 622 bp, Populus trichocarpa
  Intron number 3 from transcript POPTR_0001s31580.1 (locus POPTR_0001s31580) derived from phytozome v7.0 (chr-ID scaf fold_1; pos 29928191 to 29928812 reverse strand)
catcaaggtataaaattagtaattgcgaaaagtggggtaaaccaccaatagctcatttgattattttttttatgaattgcaaaaagtgtcatgattgacacctcttctactacattccgctaaatttaaatatcacatgaaagtcgtatattttctttgaaaagtattagcaagtcaccaaaaagtcataaaaccatatatcaaggatttaataatattaaaataacataaatcttgtttttatcgtaatatttacataatttaaactttttgatgttctttatctcaatttcttatatggtagtttgttatttctaaggaacatatacaacctacatgttatttaatgagggaatggattccattatagaacagaaagagtgttaatcaaagcactctgtagcttggaagttgaaataaaaaaaaaaaaacaaaatgattcagaaggtgttttttactataacatatagtgaattcataaagtccgaataccaagaagatatatgacaagcatcaaagtatacaattaggagaagcatgtatttcataaagtataatgatgaaatgttcttaacgaaaaaaatgctctatactctccattaatgttaggtggtggactagt

SEQ ID NO: 59203 - DNA, 434 bp, Populus trichocarpa
  Intron number 1 from transcript POPTR_0007s06500.1 (locus POPTR_0007s06500) derived from phytozome v7.0 (chr-ID scaf fold_7; pos 4868980 to 4869413 reverse strand)
ccgaacctgaatacttcgaggaccagcgcaacttggtgctctaatctttcactcactcgcattattttgtttcaattaattaattaattatttttttgttgaagaattcatggataacttgttctgtttcttaacaggttttttaaaaaataataaaatcggattttttcttaggttaattacattggtaattaattaattaaaagactggaaaagtttagtgttaagtttaaggtcaatagatgcagtttgttagttcagtttttttttttgaattctggctcagttaggttaaaattcttaaactgtgtagtgtttttatagcaaggctattttgcaatttgtttggttgaatttgtgagagtgcgctgttgtttttatgttggaactcaaaagcaagcattgtgaaattgttttcttatgcaggaagattt

SEQ ID NO: 59204 - DNA, 506 bp, Populus trichocarpa
  Intron number 1 from transcript POPTR_0001s32460.1 (locus POPTR_0001s32460) derived from phytozome v7.0 (chr-ID scaf fold_1; pos 30781518 to 30782023)
gtcactgagagcaaggtaatcagtacctactaattagtataattgcttagctagtatttacatagcagaattgtgtttcacctttttttttaaaaaaaaaataatttatgaagatgtttaattttcttagcaattagtgattggtaactagtcattacaaagcaagactttttttttttaaaaaaaaatcatgattttttaacttcttactaattagtagcttgctagtcatcagttttttgtagttgctgttttcaaaattttcactatcaatcagtaattacatagaaaagtgtttttttcttttcaattttatgatgtataaatttcttataaattggtaattggtgactaataattacaaagcaaaagtgtgttttatccttttttttttattaatattcagtaattacctaacaaaagtgtatagctcctttttttccctcctaatttgttgttgttaatgctgtttatttctgttgtttgattttgtgttatttagataa

SEQ ID NO: 59205 - DNA, 517 bp, Populus trichocarpa
  Intron number 1 from transcript POPTR_0002s13130.1 (locus POPTR_0002s13130) derived from phytozome v7.0 (chr-ID scaf fold_2; pos 9774326 to 9774842)
ctcagttcctccattctggatttgatcaacgcctggtatgctgctttgcttcagtctttccggattgtgctttgtttcgtaactaaagggtgatctcataatcttgtctacattgcaagctactctataaattatacctctttgatttggtgaaactagttccactaacaatcataatcaaacttttattttagatttccccccttttcttctggactttttaacttccatgtagatcaagagatatatacttatgctcataaaaatttgatttgcatttatttatcaaggtgttttaaaatgatgcataatgaattgatagattattggaagaaccagaatcgacaatgcaaccaacttatagatttaatatttttttttttggtggttgagagattgaaatcagctcgcatatttctgttactttgcatccatcaatttttccttaaaggtggaggttctaattgtttatggaattgtaggctatccctgaaatatttgctagacatctgagaaa

SEQ ID NO: 59206 - DNA, 511 bp, Populus trichocarpa
  Intron number 1 from transcript POPTR_0007s08400.1 (locus POPTR_0007s08400) derived from phytozome v7.0 (chr-ID scaf fold_7; pos 7200798 to 7201308 reverse strand)
agctttgtgctcactctctcattttccatcttcaggtaccgtttcttttccatatctaatcgatgttagtttgtattttcttagatttacacagatcgtaattatttccactctctttctctatttttttcttgttgaatgtttaataacttctttttatctctgtaatcgcctttgatttgcttagattcttctttgatttctagatcctaattttacttatatatatatatctctgtaatcgcctgtgattttgactgattttctgaatgattttgctgcagttacatctgtaaaacttgtttaattttcttttttaaataaaatgcagttttttcgataaactttggtatttttgtggtacttttatcatcgatgcttcaattttgaaaatctgtagttgctttttgatcagagtattttcttggtggatctgtgaattgtttaggctgaccttgttgatattttggtgacaggtgttttcttttgtttttgattataatttggtgaa

SEQ ID NO: 59207 - DNA, 531 bp, Populus trichocarpa
  Intron number 2 from transcript POPTR_0001s26170.1 (locus POPTR_0001s26170) derived from phytozome v7.0 (chr-ID scaf fold_1; pos 25240343 to 25240873 reverse strand)
aagcctcgcgtgaggctattaacgttattgattctgtatgtttctatatcttttttatcttctacgtttctttcttcttcttttatacaaaattcaaccaggataaattgaaaatcgattcgtgcggtgacaaatacggtgggtggctatgggagaaagatttgcttttatgctccaaggagaattcatttgtggctgcccctttaaaccatggttttgagttcttatgccaagcaagattcgtttatggcgagtccttaaggacagggagggggctacgctaccaactttggaccgaagaaaatatttatagtgtcttaataaattcctcatgcaagaattctgctagtcatgggtgcaattttttttttttgctctttctgttatcgtaatgaccgagaaatgcattcactagacttattaatttagagtgtttgtagaagtagtgaatgcacctttcccttgatttacaaggtcaaaatgtgcactcttcattgagctgctggtatttgcactttttcttgcagtttt

SEQ ID NO: 59208 - DNA, 587 bp, Populus trichocarpa
  Intron number 1 from transcript POPTR_0010s02120.1 (locus POPTR_0010s02120) derived from phytozome v7.0 (chr-ID scaf fold_10; pos 2452719 to 2453305 reverse strand)
aagctctgagcagtcgtccaaaaggtgaatagatcacgtaactttttttctttttgaaagttcagttcctagtcagctgaatttgtattatagtatagttaatatcttttacacaatggtgtctgcactatttgggaactgagtgaagtgggattccaagatcttcttttatctggatgtttttttttccttctcttctcttttggcttcatctcaaaagtggttactgactggccatgggcctggtatcacattttctactgcatctcaaatcaaagtctcctagcttgctgatttttagcttcattttaaatcccttagaagtggaaatatacatttggcttagctaaagcctaaaaggatatcaaatgtgaaaatccataatttgttctcatacgtgttcaaagattgtgttatacatagcatgatatgtgtttttccaggattcccactaggatcaagcgaataagaaatcaaaacttaagactgattttaatcattgcgagatgagccatgttggatactatgtgttataatatgatttttttgcagataattcgtattttgaaaagttaattgagcagcta

SEQ ID NO: 59209 - DNA, 909 bp, Populus trichocarpa
  Intron number 1 from transcript POPTR_0001s29135.1 (locus POPTR_0001s29135) derived from phytozome v7.0 (chr-ID scaf fold_1; pos 27903795 to 27904703 reverse strand)
gatcttttagtatccagaaagtacagaaaggagatttcaggattcattttaatgggtgatttctcaattgaaagataaatttttattggggacaattcatttgtatcaccacttgctccattccaacacaatggaatttgatttcttgcttctgattttatatctaaaactcaatttgcagtaggcttactgtgtcatttcccccttcatgttgtagtaaaggtagagttttctttcttttctttattttttctgctcaacctaacaattgctttttctttcaatgcttaaggacaaatttgttcctgagttatcaaaccacccatttagtagatgttttataccttatgtagaggccaatatcacttcaaagttagaatttggtacctctatttcatgatttctattttcgctggtctcagttttattttcttgcttatggtgatgtccatttatgtttctagaaactagttcagggcatgctactagcttcccattattggttaacaagatatgcttttattcaggagacgtggtgattgattttgctatgtgcaactactttctggcaaacctctacataatcttcagaaaagtatagtaaatattaaatttccaactcatgtgtctctaaattaaatatcaaactcatgtgtgtctaaaacaatgtacttctttataagttaatgtaagaatacatggtttgatgagttgctcatccatctactcagtttaacagatggatttaagaacctttctgccactggctttatgacacattacttcctaatcagtcatagtctttaagtttttcatgaattagttgtctgatagtaggcacatgcactgttaacatttgcttatgttagtctagtggtcctaactgcagagagccatcttactcaaggg

SEQ ID NO: 59210 - DNA, 476 bp, Populus trichocarpa
  Intron number 1 from transcript POPTR_0001s43340.1 (locus POPTR_0001s43340) derived from phytozome v7.0 (chr-ID scaf fold_1; pos 43384658 to 43385133)
atatccaacatctcagtcttgttgctaggtaagaagtttagtttctttcttgattattttgatgttgaggatgatttttctaacattaatcttatctaactatcaaatgttcttgaaaaacagaaaccaaaaagtcaatggcttttttaggatgaacaattttgttgtttctttttaataatttcttgtggcatgattagttctaatcttatctttgcttagaatgagggggaaataaatttctaatcatctattttaataaattatgatagagggactaatatgcataactttaaaaacttagaggactatgcgagcaacttaccctcttcaaagaattatgttcctaccacacacttaaacaaggagacgacatggcttgtcttcgaacatgcatatttcctgctctatgctttgacatgctttgcctcctaaacgcagctttgaaactaagaatcgtttgagagtcagaataa

SEQ ID NO: 59211 - DNA, 744 bp, Populus trichocarpa
  Intron number 1 from transcript POPTR_0010s21090.1 (locus POPTR_0010s21090) derived from phytozome v7.0 (chr-ID scaf fold_10; pos 18504046 to 18504789 reverse strand)
tgcaagaattaaagctgagagtccttctcgaaacggtatgttcacaaatccacacacgtcctgttcttgatggatatttgttctctctgtttgccgaaggtagtaatttttgttcattccttttttgatctttcgttgaaaaggaatctttagttttttgcttcagccttttccttttagaaagtagcattattttggattcttgatgttttcctctttaggatatggacctctgtttgaattttgattgataagagaaaggaagagtaaacagggaatcgagaattttgattctcatgtctttccttccattagaagatcaaccatgcttctaattataacgtactaatattcactactttctcgtcgctgaaactttcagcttaccaccaaagaagatcacatcatcttgtcgcgttccattaggctaattaagatagctgatgtagcaaaagaaacataagaaaacaatctcaattaaatagaaccattaggaatggtttacacggggcttcattactgaacgaataaagatcaaacataaccatttgaaagatttaatctgtagtaatttttctatttttcttggcaaatttgccattgatcaggaaatttttcctttcctttattttcttttccaagtctttttgaaagtagacggttcatttcttgctttgcatttgtagacatctagatgaatttataagatatgatgcgttgattattcaggggggaacacaaaat

SEQ ID NO: 59212 - DNA, 1052 bp, Populus trichocarpa
  Intron number 1 from transcript POPTR_0010s14010.1 (locus POPTR_0010s14010) derived from phytozome v7.0 (chr-ID scaf fold_10; pos 13708591 to 13709642 reverse strand)
ctaagctacgcagtttgctacccagcaccaccaaagtaagtgccgtagtggatcatcgtcaaattttgaaaacctacgcaaaatgttacgttgacgatcgatgaaatatcggaccctatctctctctctctctctctctatctctctctctctctctctctctctatatatatatatatatatatatatatatatatatatatatcaaacccttaaataaaactatatgctctttatttatattaaatgcagaaatatggagtgtcaattatctatttcctgtttgttttgcagtacaactaatagtagttttttttttttttttttgaagatctctgtcaaacttgctaaagattctagttagatgactggtctgataatatgcccaccagaacatgtgtggaactcactttagatataagaaaggcagttacattttttcttggttagcttatccttttgttttcatctttagaacactgctactattgttttttcttttctctgtgtattccgcttctgggacttgcgctagttccgaggaaagaaaaagcaaaactaaaagggaataaacgttaatgtcgctaaattgatatgataaagaggaacaaaagagcagttgaaaagcttccatggaaatttcttgccggttaccagtcaaagtaattaagtagagaatgaaaagatataaagacagacaaaactagcattcttgtcagtcacttatagatagcccgtgccctaatcctctttcaaaaccccaccattagaaaaacctactttcatgcctgcctgaatcatcctaagagaataaaaacttcatatccacatctcttcttttcgaacaccgaaagacagtttttgcatgtaataatttatttttactactttctcttttaacctacaaaagatcgttaattatagcttgatttcgtgctttaattttttgtttgtttttgatgagtaccaactttaccatgcatgaaacgtctgattatgttcccttgcttgtcacagacagacaaagcttcactgctagcagaagtgatcca

SEQ ID NO: 59213 - DNA, 811 bp, Populus trichocarpa; identical to SEQ ID NO: 57549
  Intron number 1 from transcript POPTR_0010s22560.1 (locus POPTR_0010s22560) derived from phytozome v7.0 (chr-ID scaf fold_10; pos 19432816 to 19433626)

SEQ ID NO: 59214 - DNA, 385 bp, Populus trichocarpa
  Intron number 1 from transcript POPTR_0002s14730.1 (locus POPTR_0002s14730) derived from phytozome v7.0 (chr-ID scaf fold_2; pos 10936770 to 10937154)
atagtgtcaaggttggtgatttctttcttcttgttgcttaaaatattttttttatagaaactttgagtttcttaagttttttttttttgttgtgtgtttttctgagatggatctggaattccttgatcaaggaaccaaaaagattattaaagaagacccaacatgttattattttgatgctattgagtggttttcaagtttattaattataaatattttattgcatgtagaagatcaagcttgaattatgcaaatggagctaaagtataccgctgttattgtttatttgtacatttgattattggtattgttgaagttaaccgaacattctgatttggttgaattaacaggaagaagacttgaagagtttccgccagtggggaag

SEQ ID NO: 59215 - DNA, 443 bp, Populus trichocarpa
  Intron number 2 from transcript POPTR_0002s04170.1 (locus POPTR_0002s04170) derived from phytozome v7.0 (chr-ID scaf fold_2; pos 2597986 to 2598428 reverse strand)
caggtaaaattttatttttcttacctgatttcgttttcattttgcatcattttcatccaagtcggtcggtaaacgagaggcaacccgacccccaccagctggaatgaaaaccaggaaaccagcagtataaattcaataaagatccacttgcacctcttccatatttagcgaagcacttccctagctcatcacttgacacatccatttgcacttgattatcaatcaatcaatcaattaataatcatataactcgaggaaccattttaaacacctcagaatatatatcatatcatatgatatgatccacgtacgtttcaaaaatcaatcagaacattattaatttgtggctcaacactgatcaaagctgatagaagttaaaccattttggtgcacatacgattatgacttcagagttgtttcttccattttgtagctgatcacca

SEQ ID NO: 59216 - DNA, 977 bp, Populus trichocarpa
  Intron number 1 from transcript POPTR_0001s05170.1 (locus POPTR_0001s05170) derived from phytozome v7.0 (chr-ID scaf fold_1; pos 3961148 to 3962124)
tttgtggctaagcagaagctgtttctctgttacaggtgagcctttattgaatctcgattcatctgcattgttcaaaattacagtgtatttgttttttttttattccctgattgttaattgcgtgcattgaatctcataatcttggtttgaaaatggataatgaaaacatttagcttgctgaaaccattacattttttttatgcactgactgtttgatgaaatgcctcaatgaaacttttcagattttgctaaattactaaaaataaatcccacgaagaaatttagtttttttttagcttttggagtgaaaaaatcagccacaataaggtctggtgcgggttgaaattacatgaaggacatgcaatggatagggttttttttgttttgtttaattttaagtgagattttttgactgaaggtcacattttggatgagaaatctagtaagcgatgataacccttttttagtacattgtttctgctacaacccatgtttttgttcttaatgttgggcttccttcattgaggaattgatgcatttcttttcaaataagctttttcttttttggtggtttagttatagcataaaaaggaggagtacttatatatgaagatttgttgtttatttgtactatttgttattgtgacgttgatatcccttccttttgatcttttagattctgtgagttaattgatggtctcattcactagcaaacaaaaattggtgctgccgtctttggcttgccgttgacagttaaaattcttactgttttacatcatactgaaagcgttgatttttctacccagaattatgaatttagctaaagttgcatgtgcatgtgcatgggaatttttgcttttttgatttttaaatctaattctaatatttggggtgcaatagtaccatgtgattataacacaatgatgccgtgagaataagataagaatagggattaattatttctctgtttgcagaga

SEQ ID NO: 59217 - DNA, 705 bp, Populus trichocarpa
  Intron number 1 from transcript POPTR_0001s18560.1 (locus POPTR_0001s18560) derived from phytozome v7.0 (chr-ID scaf fold_1; pos 15609371 to 15610075)
agcacctgaaagttgttattggggaattgaaggtctgtataaattttaactatttctacgttcaagctaatttggtttaggtactttgtgcatatgtgtgcattaaggtaaaatggttattttttgtacctttttaaagaaaatctggtttgtgctaattacattttatctggatagttcaattagtttgtgttgcaaaggttgttcttatattttctacatgggttgtatttttttatcttaaaataattcttattgtctttttgattgctatttcgatggtatttttttttgacgatgatgttgtatatttacctgaagcacctatatgtgtaagccattatcggaattttatgcttctagctgtaaaacatcccttgtttggcaaactttatattataataagtactataacatcggcacttgctctttagtccataatttgacccaaaaaattgattgtcgtgtgcatgctaacttgcatgagttgggttttttcaaaaaaataatttgccatttttttgtgtgtatgtgttcacttacaacatcttcatctcatctactctcctctattctgttttgatctctggttccacttgtttttacaaatattgctattggttgataagataatgatttctctttactttctctatagcctgatgatgtttttatcgctgaattttatggaacagagaaaaacca

SEQ ID NO: 59218 - DNA, 1008 bp, Populus trichocarpa
  Intron number 2 from transcript POPTR_0007s05500.1 (locus POPTR_0007s05500) derived from phytozome v7.0 (chr-ID scaf fold_7; pos 3586403 to 3587410 reverse strand)
aagaagtaaagatccccccctttactatctattgatttttgtgtcttccaagttttatgattttttaaggtttctgttttattaagtatagaatattttgtcaagatttgtgttttttcccccttttctattgggaatcagatctgttgcagcattttctgtttcatggctgttaatgattttcacaagtagatttgaagttttgaaaaaaagaaaagaaaaaattgattgatgggtttttgaattcatgaatggtaacttcattaatgaaatgaaataggagtagtctcttattgtaaagagagttaatgtgacagaaaatatggcaggtgatataatttcttgaaaataaaactgtttttgcctctcttttttttctctttaaaaagaaaagaaaatggttagtgtttttacttctgataggaagttatagttaatttctttgtgccagctcacgaagggctcagataatttgcagccatagactctgtaatatttaggatggtggttcttcaatatgatgtagagggattatagattggtgaggaaattgatagatgcttagatttggaactccctgttgttaaaattaattaacttttgaggttttgataattcttcaaaacaaagatttgatcttttacttgttttaattgaatgctaaataagtgcattgattttacttgtgcgttggcaaattaacatcttttattgattggcatagtcttgttgttttagaaaggtagattggcctgtcttttggaaggaatttggacaatgtagttctgacttccgagtaaactaacaccccccttcacatacagagatataaaacacaatcaatttttccttgcttctaatgggttcccagcttagcaacttttgaactttgcaaataagggttatttcataattcaagttggttgttcatgcatgcttgctcttagccatctgaatcattccctttcactctgtagaaagccttgttcggggtataaattaaaggag

SEQ ID NO: 59219 - DNA, 386 bp, Populus trichocarpa
  Intron number 1 from transcript POPTR_0002s00520.1 (locus POPTR_0002s00520) derived from phytozome v7.0 (chr-ID scaf fold_2; pos 201014 to 201399)
ctctccagagatcctcacgtcgtccggtactctctctctgcttttcttagatctacttcctcgctagggtttcatctctgtttactaacgatctatgttgcatgggtctgtagagttttttaatcatttggtgaatttagggtttagataaactgaatttggggatttttgtgatgtgtccttcaattcctccaatttgccgtttcaatttagggtttttgcctgcatttcctaattgtggatttctaaaagagaattatcaattaatttgatgtgaattgctctaaattagacaaataattttgatccgatccgatcttctcttctattattaggttaattaataatctaattatgtgttaatgttgtcattaattcatagtttg

SEQ ID NO: 59220 - DNA, 958 bp, Populus trichocarpa
  Intron number 3 from transcript POPTR_0010s17630.1 (locus POPTR_0010s17630) derived from phytozome v7.0 (chr-ID scaf fold_10; pos 16141462 to 16142419)
ccatcaggtatgctcatttattatcgttttgtagttgttctctgtagtgggctgcatggttggtatcttgttgatctgtatggagtgcactgcttcatgaatttacgtgaatttctttcatgaaaacttgccgggcaattttgaatctcacctgctatcaaaagcagcaggaaggcataatgatcaaattgcaagtaaataaacacttccaaagcttacaggtgatgttggggaccgtaggtttccaatgggtcacagcaggcttaattgatcaggagctatacatgtagaggatgcgtttgtgtatttgaaaaagagatgtaggtttgtatacctttgacaattttttggatttcatggaactgagtacaagagggcaggaagagtattgtctttaactcttcagaggttttttgtggttaaaacttaacttctgacatgttggatcattgtttgcagttgaatagttctgaaattatttgtacttgttttttatgtatttctagtcgatagacattatttttggcttatgtttagaatataaagttgtacattttggtatgtggtaagctataatcttctttttcttataaaaaaagcaaattgaacagatgaatatacacaacatgcaaaatatatcattagcttcttgtggtcatggtgcttgtaacattactaatctaatcattaagaagattgctcctcagcttcctcttttgagatctagagaaaaatgtctgaacaggactctgccacacttcttagatgaaagtagcttctactatattctgatttctgcaaataccatgtctgtctactcctggaaaaatttcctaacttgtgtaattttttttttttttaattttcaacttataatagattatagttgattttcttgttaatcttttctctatgatgtacagccttaccaaccaggttacactgctcctcctcgtcc

SEQ ID NO: 59221 - DNA, 558 bp, Populus trichocarpa
  Intron number 2 from transcript POPTR_0002s10390.2 (locus POPTR_0002s10390) derived from phytozome v7.0 (chr-ID scaf fold_2; pos 7487836 to 7488393)
ttactgtccctaatagagaagcaggtttgtgtctttttctttgtttcgtttctcttctttatttgttattctgtctattatttgttttccccccctcttaaaggattaattagatgctcaattctgattttaatcaagcattatcctcctcattacttgaaaaataattaagcaattgttgcccgcagaattggagaagttctgcttattgataacatgtatatatatatatatatatatatatatatatatattctcttcatttccttattaatgaatcaaacgtatcaatcccacttagtttaagtggcattttattatttatttattttagttgaggttttcttaattttgtacttcttggttcttacagcttttcatgttgttttccaatctgcacacaacatagcagaagttgattcaatctcttagctcttgtgattcttgatctctatctcgttttaaaaaacacaatgttttgaatgcttgattttgtaatttatgattctcaatatgcctgcaggaaagaaattggctaacagcatagtcaaagagaag

SEQ ID NO: 59222 - DNA, 694 bp, Populus trichocarpa
  Intron number 2 from transcript POPTR_0001s31320.1 (locus POPTR_0001s31320) derived from phytozome v7.0 (chr-ID scaf fold_1; pos 29660360 to 29661053)
caagatcaattcgcagacaagcagctgttgccaaggtaaagtttgcaattttttttggtttggtcaactgaagttttcatgttttttcttgcaagagcagttagttgtggctatttttcaagactagttcttttatgttttgttgtaaattaaggcaagcttgttgatgatttaaaagtgtcggatagtgtagatggaaagcttgatgtggtgaaacttggattggagtcaaacatagagaaaagtagtttaaattgagtaaacaggtagcatcagctcttaatcccagttatcgaatccttaatcaccaaaattgtccatccttaaatcaatttatttttcatctaattgtgaaaactttggcgaggcgaatggatatcaagtatatggcatgctagagtaaataggaatagtctcctatatacgatgttggattggaggaaagttcttgttttttgaacaaaccagaccagaagcatgatgagattgcattagtgattgtaactggaatatttacgaaagcttatatgtgtaatcagcattgttggatggctgaagacccagatgaataatctagattataacctactacaattctgcagtggtctgctaatttgatatgcattgaaaatatttaagtgaaatgctataatctgcaggtttcggaggttagttcacgtataagtagagctgg

SEQ ID NO: 59223 - DNA, 707 bp, Populus trichocarpa
  Intron number 1 from transcript POPTR_0010s20730.1 (locus POPTR_0010s20730) derived from phytozome v7.0 (chr-ID scaf fold_10; pos 18213081 to 18213787 reverse strand)
gcaggagcggtttctgagacaaactagtcccttaacaagatcaagaaaaaaatatctgtttgttccatgctaaagactagcatgcgtgaaatgtctcgctgcatgtctcgtgtatatcttgtacatttccatcccaagatgtttgagaaaatatgtaaattccattccagttaattggcgttttgtttttcatattaaaatgataaattgatatgaaaacaaaatagtgctttatacttttgtatatatacggagtattccattgtgaataataattaataatctctttgtacgaacagatagggaactatggctacagatagttgtcagtgaaatgggctgtcattctgtcaatgactccatggcccattagacgatgtgataagcttatacatgcatcaaattgggtttgattggacatcagctggcccagtcttatttaatatattagtagttgagtagaaatatcagcttgacaagatttttaaaagaaaaatatatatataaagaaaaaaaaaaggaaagagagaaacgacacaatccgtggttcaccttttcatttgtcgtccaaagctacaaaaatcatcttcatttgatttacgttggacgagcataggtttcctaaagacacacaccaatactctgtcaaatcagagagaaaatcaatggctggcaatggcagagagcagcagtttcaaagactccgg

SEQ ID NO: 59224 - DNA, 579 bp, Populus trichocarpa
  Intron number 3 from transcript POPTR_0002s10200.1 (locus POPTR_0002s10200) derived from phytozome v7.0 (chr-ID scaf fold_2; pos 7318801 to 7319379 reverse strand)
aaataattgaaaaggtactgcctaatacactgttttctgtcttagcacttaattacctaacaccatataaaacgattgttaattaattgtgtcagcatgaatcgtttccttatatcaggtttaatgtatttctcgaaacgcagaatcaacgcgtaaacctaaatgctcgttgttgatgattttgacattcactttagtcgtgtaccgattcgttttagttgcgaacaacatggtcccatggctgaattataactaccaggaaaaaaaaagcagcaaatttcattttcttgttggctgcctgctttaaagaagaacggattaaaaaaaagaagcatgcccaacttgttttcagtccagatcgaaaatcaaaaccaaccacatgcttcacccattgacagtcaatccaggctgttttaaacatgttataatattacatgaaataaactaagcattttgcaatacttttagcatcgatccatgttataaactgagcctgttttttttttttaaagtgaaaattgggtttgctttgtttcttattaagattaaaaatcaggtggaagaggtggaaaaggaggt

SEQ ID NO: 59225 - DNA, 738 bp, Populus trichocarpa
  Intron number 2 from transcript POPTR_0010s19420.1 (locus POPTR_0010s19420) derived from phytozome v7.0 (chr-ID scaf fold_10; pos 17337206 to 17337943 reverse strand)
aatccaaattctagaatccttgctttgaaaggtaggatttgattgtttgaatcctctggttctaattgctgataatgcatcgtgcacgttgctattcttgtgatcgtttatgggtattcatagcttttttagattttttcttgaaggcattgttttccttatttggaagtttgtggacaatctctattcccctcagcacatgtttttctccttaaagtttgttatgacttatgattccttgtaaatgtatgttttttacgctaaagaactcaaccaagtgggtgatactttctcttaaatttgctctcctaagatgtgcaggtacaattatcccttaggcaaacatggaattaatgctggatatctagtagcgttcttttgaagattaaaattgaactggatatgttatcttaatccaaacaggcactatgatgtggagtttttccttttttttggattgctgtactagatataatgataacgtggtgatagtgaatttttaagctgatttgattaatcagacctgcatgtcatatgtggatttctgtgatttcctgtctgtctaggaattttttattaagccacgtgaaaatgtcttgattgtctttgaagcatattatttatttgagcacgggtgtgcacacacttgtgattttatctagatattttccttctgctgatgaattggggcattcttttgaagcccaacttccgggaactactcaggatcacttacaa

SEQ ID NO: 59226 - DNA, 473 bp, Populus trichocarpa
  Intron number 1 from transcript POPTR_0010s19420.1 (locus POPTR_0010s19420) derived from phytozome v7.0 (chr-ID scaf fold_10; pos 17338083 to 17338555 reverse strand)
aaggaagtcttaactgtaattactctcacccactcctgtctcttcgcttgtttttcgtttctttctaaattgaagttcagtttagatagaaaattgtgcttcgaactgaaatatgctcgcttatgagtaaaataacagagtgatcaatcattttttgctcaattttgaatccagaacgtgttgatttgtaatttagcttgacgtgacacgtgaaaagctagcttgtgctagagtttctatagatctgatgctttgtttctatgcccagatctactgattatattgttacagggtttgtaagtgcttagtcgctgtaattatttgatttagaacacttcaattttacagtttctttgaaaattctagtaaaggagtggtgatttataagttaggaggagctgagttggtgaattttgtgtgatctattgttttttgcagttaccggctatcgggattagtcctcagtttattac

SEQ ID NO: 59227 - DNA, 687 bp, Populus trichocarpa
  Intron number 3 from transcript POPTR_0010s17440.1 (locus POPTR_0010s17440) derived from phytozome v7.0 (chr-ID scaf fold_10; pos 16027207 to 16027893)
tttagagcaggaattgtgcctgtgtcttacagaaggtatgtctccctgtcttcctgagcgtccaattctgaccttttgaaggaaaattttggctaagatgcggtgtttaatgaatttagtctcacttttcccttaattaagctgccagtgagggttatctaggtctttaaccagtcttttcatgtactttatatttttattctcagttcaaattaattataaaacactaaaagttattaatttgaaactttaaaaaaaattaggaaaaatatgttccatcaactgcactcctaaacttgcaggctactactttcacaactctagttttaccgcagtcaacctttccctctcactatgtcaaaacttggcattcttgatctagttttttatagagtaataactgaggtgtaaatgccgaaagggaatacttttttacaaaaacaaaaaataaggttttatcatttttaccacgaactgtaaaaaaataaaaagttcaatttcctcttacaagtttgcccttccctgctgcctgtaatttttcctttcttggacatgttaacgaattgtccttttgccctgtccttagctaagccctctcatttctggctctggtgtcagtgttagtaattgtcttggtggtggttctttgtagggtaccctgcaggaggagaggaggcataaggttca

SEQ ID NO: 59228 - DNA, 951 bp, Populus trichocarpa
  Intron number 1 from transcript POPTR_0001s36650.1 (locus POPTR_0001s36650) derived from phytozome v7.0 (chr-ID scaf fold_1; pos 35329177 to 35330127)
ctcaaataccctagcttccttcaaggacggtctgggtaagcattattatttttgttgtcatttgatatcattttcagtgttgtttttgttgttttctcggattgtcaagagatctaagttgcttagaacttgttcctgttcttgatttagtgaatgtaggaattttttacttaaaaactgttgctgcgttttttttgttgaaatcaactttcccccccttttaagcttgagatcttgttcagactcaagaaatatctagaattgtgccaagaagtttaataatatcgtaattgggatatgtaaggtttttttagtaaaataagctggctggtagctgagaatgtcagcaagcaatagggagaaaaattgtctttttttttgacaagtttcagtagaatatatgttattccttgtttggttttgttaagaaagtggtaaagggcatgatattaatattgtatttagttcttgttttgtgtttttatggttgtacaaggttgactcaagtatgcgaatgattgtgttaggctaagcacgattatagttttcttcttcaggtccaaacaacaacttattcaagttcataattttattctctttctttcttttcatgtattttctgaatagccttggcaagctgtaattcagtgaaaaagatctctatgtttctgtcaataatgtaacaggattgataaatcccatgctttgtcttgtatgctacctaaatctctttgcttttaaataaagacatccattgtgtgtgttctactacatgtgttaaagctttgcagttagttttcagtgttctgtactgaatggcatttagagtcgtgatgcatttgcaattaaacaagttaggtagtctttcctcaaatgtttccagagcttattttttcaactaccctcactctatgcctactcctgatcagtcgattgtctttgcaggtgtgt

SEQ ID NO: 59229 - DNA, 914 bp, Populus trichocarpa
  Intron number 3 from transcript POPTR_0002s01040.1 (locus POPTR_0002s01040) derived from phytozome v7.0 (chr-ID scaf fold_2; pos 521995 to 522908)
gcccagagagctctcaaggcctagaggagtggcaggtaatccccccacccccctctaacccccccccccccccccctcccctttctctttcgtttccgcactccttctaccatcgactaaagctgttttctgatattggcctggacaagcatgacaaccctaacttgatttgctttcaaaagttcatacttggccgtgttcacgcatcatgttgcctttccattgatcttcatatgacgttcacgctgacatctcaaatattcatatgaatttttgttttgatttatcttagtttctcgaacgattgaaatattctttcaggaaaaactcatatagatccatgatttatcaattctcaattaggttaacaactaatttaatttttagttggatccctaatttattagaaatcctggatcgatgcgtcccacatccatattataactatattatgcaataaaacaatggcattttgaagagagaatatatatataacaatgcttattttctttacaatgattttagatcatagaagggtcttcttttactaattaatcatgcatttttttcatatgttctagttacaagaaaaataaaataaaaaagtttcggactcttgaaagaagagaaatcattgtttgatgatgaaaataattaagtcaatacacctaaaaaatcatattttatattctaattagaataaaatttgtaacgatcgatgttgtcaatccttgaccatagcagaaattgataaacatattaaactgccgtgaatttaaaattttgcgttaccagtagtttcgttaatgttgaccagttctgctatctctttcgcaaaattttattaattatatatgttgattttgtgcgtggttgcagtctgaggtggagttcttgggaaaattgtctcatcc

SEQ ID NO: 59230 - DNA, 475 bp, Populus trichocarpa
  Intron number 2 from transcript POPTR_0002s07300.1 (locus POPTR_0002s07300) derived from phytozome v7.0 (chr-ID scaf fold_2; pos 4988460 to 4988934 reverse strand)
ttcagtttaggtatttggaaccccttttaccagccagtatgcttatccatgcatgggtgaattcaattcaatttgatttctgatgctgcatgtgatagttagagatgtagatcatagaaataataaatgaactgttaaacataagaaaaacagatacatcaattttgtgtaaaatatttatatgttcgtatagcattattcttctcgaaattaatggtgaatttttaccagtcaaaggagcttctcttcacaagtatgattaatttattaacatatctatatagtcaggttgaacaactcatgcaatttttatcatcataaacagagcaacattaatatagctcatgttactggcccatgaatggtaggcccaaaattgcatgcacgtccaggtcattaatttgagatgttttggtttaagacaccccaatagtagcattttgattgacacgttccaaaaattgcagggttgttc

SEQ ID NO: 59231 - DNA, 137 bp, Populus trichocarpa
  Intron number 2 from transcript POPTR_0001s31880.1 (locus POPTR_0001s31880) derived from phytozome v7.0 (chr-ID scaf fold_1; pos 30258297 to 30258433)
gtacatcggtaaggaaaaacaaattgaagaaaatgatgaaaacattaggaattttatatcataaactataatatttgaataatcatcaacaaatattttctaaaaggtttttttatttcattgatgcatacaggctt

SEQ ID NO: 59232 - DNA, 799 bp, Populus trichocarpa
  Intron number 1 from transcript POPTR_0007s04340.1 (locus POPTR_0007s04340) derived from phytozome v7.0 (chr-ID scaf fold_7; pos 2656355 to 2657153)
cctagatctgcttctcttcatattatcaacacaaggtatgccagaatgttatttttcagtgcctgtaatcttcagctcattcatcattgtatcttggatttgttttacatcatctgggcttctttactttttgcaaatcatgtgagacatgactaagtcttaatggatcttatgtgatcttgatgtgatccctttataatacttggttttagcaaaaggttgtcattataaggctcaattatatagatctgcattgttttcttgttacatctttattatttttgcttgtaatgttgtgttttgtggttatttgtaatgggatttttacgacaaccttttatcaagtttgaatctcttgcttttttgtggtagtagtttttatctttttgtttaagtttgtcattatgtatgctaaaagtctgttactttttcttgaaggttagttgatttgatccattctcgatctaagcattaatatttgttttgtgctacctgtgttcgatgccaattcaatttcataagataaaaagattttatgttttccaattacgcttacaaccttacgaatgtggatatattgctgttttaaggttggacttgacaaatcgggatgaatttcttgtatattttgggagctatgctactttatgtgtgtaaaatatatgatgaaatgcgatctgaaaattttgaccgatgtgtcaaaatgtatgctttgtaggctgtgtcgctgtgagatttgtcatggtttgaactttgatatgcaggtgttcaaaattttgagaattgattggctatagga

SEQ ID NO: 59233 - DNA, 777 bp, Populus trichocarpa
  Intron number 3 from transcript POPTR_0010s19940.1 (locus POPTR_0010s19940) derived from phytozome v7.0 (chr-ID scaf fold_10; pos 17701822 to 17702598)
gttgaagctgagcgcattggatgtatgtatatatcatgaattcttctttcctagtaaaatctttgttgggtggcgttctctgttttctgttttgttgtcttactgtgcacatgccaagacaaacaggttcccatacacacacttctgctattacagttctttttaagggagacaatgatagattaggctgctaattctgaccctttggtgaaacattctgaaacagtcctttgagtctttaatttctttctttttgttgggtggatggagtggggtgaagaggattggcgtgaatggattttatccaaggagttaattgttataaatttttagatttcattttatgaaaggaagcaatgctatcaactccatctcaagggcctagttggtaatagctctgtaaacttcaaattttcccaccctattccttttctctttctgtgggacagagttcccttttgtttgaaacaatgattctatttcttaccgtgctggctatctccatgaaacaatcagctctgatcatggcttgtttataattatttttgtaaaaactaccaaattcgaatttcatgaagctctgcatattgtatcttttgcataaaaacgtgtcacctgctgttgtaatttcttgatgccctgtcaaaattcggtttgttgtggttgtttaacatctggaattctgtttgtggaatggtggttgaattcctttcttttgatgggcatatattagatttatctgcatctgaagttttatctatgtcataactgcagttg

SEQ ID NO: 59234 - DNA, 993 bp, Populus trichocarpa
  Intron number 2 from transcript POPTR_0002s14300.1 (locus POPTR_0002s14300) derived from phytozome v7.0 (chr-ID scaf fold_2; pos 10575993 to 10576985)
ctgctcacactatcttggataaaggtattttttttttagtttttttaattagaaaatactgggttttgattgcaagagaattatatgtttatgatgggttttaatttgatgatttgtcaatgtagtggaattattaatcgtttggtttaacgcgtgcaatatgttttggaagttaagtttaaggttattacgtaccccagtaaaacttgttttatcaagtttttcgttggtttggtgttttttatttgtgctcttgtctgataaattagaggtgcgaataatgaagtgggttttctttgtcttctggttctgtttctctgccgagaacacgagggactttaggaatatatggtttgcttgacatttaaattggatgtagaagacacttgggagatcttatttttttgagaacctcgtatttgaaggtcttatgttgcctattctcaatgaggactgatatggtttgtcctattgggccaaaagatagggtattcttctgtttccggagttagtagattgagagtgaatttatgcattgcaccaatgctcctagcttgttttagaactttgaaccctatttcaaggaggaactgttgcttcatgagaaaaggtttatatgtagacatttgatctgatatttatatgattttccttgttcttgaaaaacacgtataatgtacttggacaagtatgatttgtgaagtgttcatcatgtgatgctctgcataatgtgatgttcacttgatttgagtttttttctccattgagagagaatatgcaaattgttgcaaggtgtctcaataaactattattttcagtttttgtgtttcatggagaaattccgttgaaaacatgttatggttagcctcatgcttggaacatgattgatcattgatatatacttttactgtactatatttttctttcagcaaatgtcaatgacaattccttaatcttgtgtttgctgtgacacagatcaagaacggcttgaat

SEQ ID NO: 59235 - DNA, 809 bp, Populus trichocarpa
  Intron number 4 from transcript POPTR_0010s17690.1 (locus POPTR_0010s17690) derived from phytozome v7.0 (chr-ID scaf fold_10; pos 16176708 to 16177516)
aagcggtcagtttgtttgcttgtggcagaatttagacaaccactttgtatattttgattttttggtttatatttttcctccatttgcacctgtcatgtgtttcccgtcttctgttatggtatttaccttttcacattgcattgcaccacacttattatgtatttgtcaaggctcataatatgtctatgcttcaaaaatgaaatgcataatattcaattaagactcttagtgtctggaataaaatataccaaagttcaaattagctccttggtactcatgggtaatgtttagacagtcatagaaccccaaacagccccaaatgaatgacttttttcctttcaatcgtcacctttaaataacaggtaatcttagtaaggatgcaagtgaactgatttacataatggagaataatacatctctatgtgagcaagtaaaaatattggaaaatcattgaagagccttccaacccctattagtgttgaaagaaacccttggaatgacctgtaaaacagtgcacccaaaggaagccaagaaatcctgtcccaaggaatccatactgtttttccatccttcctccctgaaacccatagttaggtcaatcacaacttctccactctgctaggaattattcaatctcagcagtgatcacataagttctacatatcctaggcaaagacaatttaaaaagagatggctattttttctgtcactgctgaggttggtttttgctcatcactattttcaagtgttgactttagctatatgtgtgtgcagatcaaatttcgccagttcattcccagcattttaaa

SEQ ID NO: 59236 - DNA, 820 bp, Populus trichocarpa
  Intron number 1 from transcript POPTR_0010s00340.1 (locus POPTR_0010s00340) derived from phytozome v7.0 (chr-ID scaf fold_10; pos 119901 to 120720 reverse strand)
gctttgtttgccctgccactactaaagaaggtcagtttaaagttttcatctcttgtgagttttatatatgtggtctttttttatataaattttgtgatgtgggttttttagtttaaaatgagattggtgttttagttagtgggtgggatttttgttttgattctttttttggtggttggatctaatattagctgctccttaaaaaaatggatcttgtattcttggaagataagagaagattacatgggtttgcatttattttttgcaagaattatgaataaattgaataaaattcttgatctaaagtgggaaatttgtgctatttatatagctgaaatggtgggatgcattgttactaaggttgttgagaagctggtgctgccaaagtcactctttagcgtatcaatttgatttttgtggctggacaccaacaccaccagcttattttatgaattaaaggtgtctggcaacttctggttgattgtggttttagttcaaatgtaggtggtcatttgtgtcaagttggtttatgaaatgaaagctaaccatctgacttgcaatttgggaaatttgtttcatcatgttgagtcaatattgtttggacaaaatgaagtcaggaatggtagagattgttatgagatttggaatttgttatttgtgagattattttccttttcattcatgtgatagctacttacctatcgatatatgactgtcagaattaaaagatcacatgatatcgcttctcatctgaattgggaaattcatgtgctgttacatctattgatggaaatttttttgggttttcgcaggaagtgtc

SEQ ID NO: 59237 - DNA, 470 bp, Populus trichocarpa
  Intron number 1 from transcript POPTR_0002s12040.1 (locus POPTR_0002s12040) derived from phytozome v7.0 (chr-ID scaf fold_2; pos 8958542 to 8959011 reverse strand)
catcccaagaactacggtcctggatctcgcacctggtatttcttcaaacctatcatctctctatcgtcgtcttgatctggtgatttccatgttgtttctatttgattttggttcgatatctgcatgttatctgttttcggttagatagttgttgaataagaaataacaactcatggaattctcatttgtttgacgaagcttaggctagtgaatcttatgcagaatctaaaccttgttctattgctcgattgcattgttttccttgttccgtattgctaaaaaaattgatgttaatccatttcagttcaagttattttttcacaagttctctagttgctatgtgggcagactctttttcccgagtgaattttatgtttattgattgcgatgtatagaactttacctactgtatttagttatggattttgattggaatctccttgttggcagccgggtgtgtggaaacccac

SEQ ID NO: 59238 - DNA, 815 bp, Populus trichocarpa
  Intron number 2 from transcript POPTR_0001s22430.1 (locus POPTR_0001s22430) derived from phytozome v7.0 (chr-ID scaf fold_1; pos 21112990 to 21113804 reverse strand)
aggtacgtacatgtatatctgtgtgtatgtgtgcgtgtgtgtgtgtgtgtgtaaaacaagttgcatacttctgtggctgctttcctttgatggctgctttagattttttacctgtcaaaatagaaaacattacccgctttcctttcaaatgctacatgtaaattcacgtgtgctgtttccacagtaaataatgttgaaattaagtactttgattataagtagagtaaggtcttcgtcacttgattttgggatcatcgaaaactgaactcatcactaaaaattcttgttaccactaaatctatacaatccgtacattttcctttcggtagtgacctatgtgtataattctcctactaatatatatcttgaagatgaaaatgaagaagagatggtagcttggcatggtggaaattattgtagagcatgagagactttatttccattaatacaaactatgtatgttcgtctttttatggcagttaagttaggtcccagtcaaacaggtccattaacaaggtcaatttcatggcagccgtagttatatcaattaccccagctgtttttcttgtttcttcctttttctttttctttttcttttttcttcttctcttgtggttgtgataaattatttggtgaaatgcaagttgatgatcttataacctgaaacatgcaataaagtcacagtcctgctttctttccttttccatccctagactaagtgctcaagtctaatgtggtcctattgtacttaatctgtctcttgctttggaaactttcaaggtggaccaaagatacaggcaataccaccaccaaat

SEQ ID NO: 59239 - DNA, 693 bp, Populus trichocarpa
  Intron number 4 from transcript POPTR_0010s12240.1 (locus POPTR_0010s12240) derived from phytozome v7.0 (chr-ID scaf fold_10; pos 12295152 to 12295844)
gtaccgtgcccctgaactctgcggctcgttttcctccaaggcatgtaaatatgaactgtttttccttcttactgagtttattattgcattcatgattgaaaaaaataaaataaaattgattgtcggtatgtgttatttttgaaatccagcttttaagttctgctcagtctacttattgatttttattatttcaatccagcttagtgttttggaggtttcacacatgcattttgctatgctaattaattatctgcggagaattttttgagatgagcacaagaatgtggatgaattggttttaattcgaacccctcccaccttcaatatcattaaaagaatgaaagatgtcctccacaagttcaaacggcaaagtttgcaaccctccaacatcatctatcgcatcaatgtgcagcttgttatccttgaaagttgaatttggttaagaaaatcatgtcagatacccgatttgtttttctgccgctatagtttgacatgacagattgatcaactgtggtggttcattttttgcattgtttcatctactatccagcatttcccaatgctcgataatgttttgtgcaccatggttcatttttcttcttcttttggatgtgacctaaattgcattgctcgtgccattattcatttggcgttcaagattttgtttgacattttttcttaaaatttgtgttc

SEQ ID NO: 59240 - DNA, 453 bp, Populus trichocarpa
  Intron number 1 from transcript POPTR_0007s06610.1 (locus POPTR_0007s06610) derived from phytozome v7.0 (chr-ID scaf fold_7; pos 5028106 to 5028558 reverse strand)
gaggatcgtaaggatcaggtactactactacaagtcactgtttcttttcttttcatcagtcttatcgttggtttagtttttttctgctgtcaatgaactaaaagaaccttcaagtttcattatttagtttttaatgtgtagatattagatagtttctcgcatggtttagcaagtgtaattacccccttttttccgttttcagatctgtgtttatgtcgtttttggtctcaaattgagttcttattttgttacctttttgaaacattcaaacaagtaatcattcacttttttcaaagctgggaaccaagaaacagtcaaagatcactttatgttgcttttgtttccaacgggtttttttaacgtattggaatgctggagttgttgttgttaacgattctttttatgtataatcaaacataactcaaacgtgtttcatattttccatgaagaaaa

SEQ ID NO: 59241 - DNA, 626 bp, Populus trichocarpa
  Intron number 1 from transcript POPTR_0002s16790.1 (locus POPTR_0002s16790) derived from phytozome v7.0 (chr-ID scaf fold_2; pos 12542886 to 12543511)
catttcgttttctccctgttaagttaaaagaaaatgtaagttactcctccttctttgtagatgattgcttggctttgatttcatagtattgttatctgttgatctgtgggagatttattgaaatgtaaagggatattcttgttcaatgactgaatggataatgccagtaatttaatactttctaggaattatttctttctaaaatttgtggatttacaatgcaccaagttgttgttagagaggttttagaggatttcttaagggtttacttgtgcatagtttcttctctggaacaacataagatttattccatttttaagctatcggttaataagaaaatcgaagactaagcattcaccatgacgttttgaatgtataaaagctgatatatctataattaatgcaacttgtttatcattattactattttttcgtttttctttctgttgcccttttcgtgtctgtttttgcctatgtctagatgttggcctttgttcttttatcgctctccttgatataaaaaaaaattgttggctctgtgtcgatgttcaagatgatcgttcatgctgatctgcgttttaactttttcagttacatcgtacatcgacctctggtggtctttgagc

SEQ ID NO: 59242 - DNA, 968 bp, Populus trichocarpa
  Intron number 2 from transcript POPTR_0010s18180.1 (locus POPTR_0010s18180) derived from phytozome v7.0 (chr-ID scaf fold_10; pos 16529083 to 16530050 reverse strand)
actcattgtgtggcgctgcaccatcaagtttaaaggtatatattgcactttcactactggctgcttgcggcacaattttcatttgatcaagtagggacacagatttaacccattgcataattaatgttcagaaatatcatgtaggtgaattaattaattatgaacatcgagccatgcatcatgatgaagttggatctgccccatctggtggttttggtggcattcatatatatgtagaccagtagtaacaggctattagggtttacaaaaagacaactaaatgagtttgattgtcggttttgtgtagaagatatatagtgatgaactttcaataggaattacacgaggctgcaagagagtttttggtctcataggaaaccttagtaacaatgacagatcgatgtaaattgagagtatttttttaggggtatgttatgttcatctttcagatgcgggtaaaattaattaatattaatattaatttcagtgctccatgtagcttcttccagttcaaattattaaaaaatttagaaacaattttgaattcattttcaagagcatattatatacagggagcagtagcacggttcaaattaagccaggactttatgtagtcaagcgaggaaaaaccatcatggattatgcttctttacatgacagatacgcaaacacatatatagagcagatcctgtcacatttagtcattgctcttgttttcatacaccaacatatcattttagatcttccttttcctgctaaatgttctctctttaataaagaataccttatcatcaacatatatgatgatgaaagagtctttgtttcatgactttaggtgtacttacaactatctttgtttggtttcttgtttccttttctgctctttgtgatcttgcttttacagatctttgtacacctctctttaacaaatttatgtttatttttgcaccacaggattcctacgcatt

SEQ ID NO: 59243 - DNA, 256 bp, Populus trichocarpa
  Intron number 2 from transcript POPTR_0010s09630.1 (locus POPTR_0010s09630) derived from phytozome v7.0 (chr-ID scaf fold_10; pos 10368891 to 10369146)
cggtgttcttaccggtgccactgttgcctgggcaggtgtgtatttttattcttttttatgcatatagatatgctcaatcagcacgtcattggggtcaagacggaacatcatgcttgtctgttcttcttctgctgcttttcattttcctgctgttaagtttgttcttttactcagtaatctgaaatcattgctgccgacagaatcatttgtctactagtactgcgtatttgattatttgtagcattctgacagcaac

SEQ ID NO: 59244 - DNA, 878 bp, Populus trichocarpa
  Intron number 1 from transcript POPTR_0010s16790.1 (locus POPTR_0010s16790) derived from phytozome v7.0 (chr-ID scaf fold_10; pos 15650339 to 15651216 reverse strand)
aggatttgaagaaaggtgttaggtattattatcaggtaatctaatttttaattgatgtttaatctctttttttctttataatttataattcaggcatgagaaatatccttttttttttttgttttttctcatttccattattttagtccataatttagcttggaagagttcaattttgttttgctgcacggtttagtggttgcttttctggagctgccttggttttgcagcatgttagaatttctttttctattttcaaaatcacatacatccatgcctttagggatgaaagctagatggaaaaaggcaaagttttctgctgcatgtgccaggctcatgcttttcacgagattgataattgagtgaaagattgattattggaatttggttgcttttctaatgtgcattttcctcttcttccgcttgctatttaattgtagattgcattctactacgaatatcattctttaaactacatgttattggcttgacaagttgtttcaatcgcacttcattttccttgttttgcgccgactgccaaacaacataacgttttgagaaacattctgacatcagttatcaaatctggagtcaatcatagtttacatggtcatccacagtgtaaaattctgctttcgctggctcttttcatatgaccagctgcactttgatctgtattcacctgatttctctttgtcatgtacatgagtggataaatcgggtagtattatctgcttcttacccagatgacacacttctaacttcactgcagcaacaactgtagttgatgaatttcaattagctagcttgcccaccatctgagttggaaaatcttgataacaggttggaagcgactctaagggttggagcacaactag

SEQ ID NO: 59245 - DNA, 608 bp, Populus trichocarpa
  Intron number 1 from transcript POPTR_0002s24330.1 (locus POPTR_0002s24330) derived from phytozome v7.0 (chr-ID scaf fold_2; pos 21731412 to 21732019)
cacagagccaccccgaatatctttgtcctcggctggtgcgtgtagtagatcccaaaccgaaagaaatgggaaaaggtaaagtgattgacgacgccgtcatgaatttcgcagtgaccgggaaagatcatcacttcctcgtcgatgctgatcttgaggaggaattctccgattccttccgttgttccgtctgcctgtaagctctctctctctctctctctctctcggatctggttttgtataatctgtgcttactgatactgtcatgagttcttcgctgtacacatggataataataatttatctattagccgttttcaatccttttaaaacaaaattttcttgctgaatatatggcaagtattcaagaatttcttcagctattgttagtgttagttgtttgtttatagagtgattaagaaacaattctaatttactattggtttggtctcagggatcttctatacaaacccattgtgctctgtaaggcattaattgtttttagcaaatatgttattattttgattattaaaatatgatctaattctctgttttttttttattgtttcattgcagcttgcggccacatttcctgtttctggtgtgttcac

SEQ ID NO: 59246 - DNA, 747 bp, Populus trichocarpa
  Intron number 1 from transcript POPTR_0010s13780.1 (locus POPTR_0010s13780) derived from phytozome v7.0 (chr-ID scaf fold_10; pos 13522227 to 13522973 reverse strand)
tagtctctgtggttgttttagcgatcttaatagctgtgagtacttttcatgtacacatacatatgcagtcattatggatggaccgtacgtgttacagtttaatttttgatgtcaccaaaagtttattttcaaagcacttgtgtggtgccattgcatggtaattaagttaataacgtgtaaaagtaattaagagtgttttgtagttgatggtgcttgtagaaacaattagattctactaaaccattgcaattctaagattttaagtttgttttcagtggatttttcaaaatcgcatgaacgctggtgccaaaaatcagattctgaagattaaatggccatgtaaatcgaacctgatgttatatgtttatacataggaatcctcttcataatgacataaatggtgctatatatcatgtgcttttttttttctcttgcagaaattaagtagtgtcgagaaataagtaaattttgagtatttagctcttcaaatataacgtgaacatgtatatataaaacagatgcggttaaattaagatttccaaaaatgctagttgaacatgtatatctttttttttttttttggtgattgagatcttacttcaatttgccaaatctttttctactagcatgtagtgtgatttcttctgctttcctttctctcattattgtagccatataatattctggatcttgcaaggaaaaagtatgagtattaacaacggactattgtcctgcaggttgcttaac

SEQ ID NO: 59247 - DNA, 494 bp, Populus trichocarpa
  Intron number 3 from transcript POPTR_0002s23960.1 (locus POPTR_0002s23960) derived from phytozome v7.0 (chr-ID scaf fold_2; pos 21442583 to 21443076)
tgcaaccgtttattgcaattggtaaacgtctacaggttagttgtgatgttttttttctattttcagcttttcattctgagctctatccatgaacatgtgtttgaatgtttgatcttcaaatttaatcatgtgtaagatgtttgctatttgttcggcagaagctttgaataaaatatgaaggatgatacaattcaccgttggccactctgttgctgcagtttgtcaccctcatcatttttggcttacctttctaattgtcttacttatttactgtgcctcgttgtgtgctttcttaagtattagttgtagaaaaagcttgcttcttgttttgttatataaacaagaaaatctgaagttacattttctttgttaacaccatgattatttacaatgaaagagtttgtatatataaggctgaattgttgcagaatatatttttaggacttttcatttgcaaatattggttcactaacgagcactttttgcgcaggatt

SEQ ID NO: 59248 - DNA, 506 bp, Populus trichocarpa
  Intron number 3 from transcript POPTR_0010s24420.1 (locus POPTR_0010s24420) derived from phytozome v7.0 (chr-ID scaf fold_10; pos 20640741 to 20641246)
aacgtacttcgttttctttctctctttccacattacaaggaaatgaaccataaatcaagtttatcctgacatattttgtgtctctgaaactggaggcaagaagatattgctagtgagaaagttatcatcgcatacataatttttgcagtgtacatagaaccagtccgagaggctttgatcttttaaccaggagagaacagtaactggccggaattctagttttacaggggctgccttagaaccttttgttttttggaactggcttgtggaaagataagacactgcagaacttccaattttccttttgatatattagaagcagaagagtttttcgaaccagaagttctagagatccagttagaaattgatttagaacaacaaattaatgatatttgactctactctaagaaatattattggtcacatgctacttgatccttagaagtgcttatgaatcttcccgcctgatttggaatctctcctttcattttatgcagccacaaaca

SEQ ID NO: 59249 - DNA, 597 bp, Populus trichocarpa
  Intron number 1 from transcript POPTR_0002s07760.1 (locus POPTR_0002s07760) derived from phytozome v7.0 (chr-ID scaf fold_2; pos 5315141 to 5315737 reverse strand)
agaggtctataccttggcctaggagtcgagacgaggtaattttgtgaattttctgtcatttcttttttaatttttgtacttgtttaatggccggcctaacggtagttttttgtttcttgttttttggtttcgtttttaggttggttgatctggaaattgtaattttgtgtaatgtaactgggttgtttagtaattctgggaatttagtggatttgtgggttagtgttcaagggagtcgaattgctgataaaactggagattttctgggtgttttggtgttaggttggtgctaaatgtgtataaccaagtttaaactataggtagagtagttagaactgcttggataattgatggctgtttaaaatttatggctaacgagtagctaagagtacagaagttaattgatccataatgatggctctgatgcattccgccgattgtgtcgttacagtaactaatacatttgaatgtctacaatagttctgttgctttggaaaatgttggtcaatttccttgtacttggcaaataaatgttcaatcttccagtgaagtttctttggtctgatattgagatctaataataggtgtggttcagta

SEQ ID NO: 59250 - DNA, 534 bp, Populus trichocarpa
  Intron number 1 from transcript POPTR_0007s09720.1 (locus POPTR_0007s09720) derived from phytozome v7.0 (chr-ID scaf fold_7; pos 9208401 to 9208934 reverse strand)
actacagtgtttttgtagtccgcttggctatagtttgtttaatctctctttctctgtactgctgtattctttacaagtttcactactgaattatgaaaacttcaatcaaatttattgatcaagtaagtaacttagctgatagaaatgtgtataataaatatatcacctattgttgtatacttggtaatgaaagaaacattatgcacaaaatcattgaaagaaggcaatgtttgtttaatccagataaggaaagtcatgactcgggggtcaaatcctacccttaccctcgctaacttaagaactcgaaagtgaaaaggaaatgggattcattgcctgtgtcaattcgataagcttttttcttcctaaattctgtttatgcatttgcttcatattcaatttttgtttctattgtctgattatggtataagaaactatgatctggacaatcagagaagctgccttttagcatgcagaaactgctgttttggccagtgagtacattattaattttctgttaatggctttatgcaggct

SEQ ID NO: 59251 - DNA, 655 bp, Populus trichocarpa
  Intron number 1 from transcript POPTR_0010s20370.1 (locus POPTR_0010s20370) derived from phytozome v7.0 (chr-ID scaf fold_10; pos 17990739 to 17991393 reverse strand)
ggatattcgagtccatttttcctcatccatcaaaggtacacttcacgaccttctttaatttgttgcacttttatgcatgcgttgccgggtggggttttgccctctcgccatcagcccaacaatcagtaatgacgaattaaaatgcaaggtttccatggttctcctggtttttgttaccatatttagttgcgggggtagcaaagtaactaaaaagattaatataaaaagggaaaaaagggatgttaagcaaaagacagagaatagaaaagaaagaatcccttttgtaataattattatcttaagaaggtaggggtgagaaatctcaaaatactcagttagtcattaacaatacttattcaatggacttgatttgaaaagagaggcaaatatgaaaaataaaagaaaaaatcacatcaatatccacataaaaagagataaaaataagtatcgatagctactccatttcataaataattgaagtactacatgtgctgtaaatagagtgctgtgagtttgtctcctggatcgatattataattctgataaaagaaacagagagaacattacagtttttgttgtacttgttgaaagtgctgagattttctatcgtttaactgttccgattcaggtgccagctgggagggactctggagtt

SEQ ID NO: 59252 - DNA, 724 bp, Populus trichocarpa
  Intron number 2 from transcript POPTR_0001s13390.1 (locus POPTR_0001s13390) derived from phytozome v7.0 (chr-ID scaf fold_1; pos 10480115 to 10480838 reverse strand)
agttacctctggatttcattgaattcgacgttcaggtaaaagattaatcaaaattgttcatcttcttctctttataaccaactttgttgttatatcattgttatcacatgcatgaatatctgggagggacaaccaacaaaataagaaaaagttgtcaggtttcttctgtctccattcgcctcaaaactgacgcagcttttcatcaacttgttttcttgttgccacgtctgtggtcgggtttgctggcctggttcattggattttgtctcttctttcttgtccgttttagtatgatgtctgtctaaaattacacgtcgttggttgcgttttggtgatctagaatgcggcttcctcacttttgtccaggtccatctaaaggatttatggccgagaatcgtcatgggcttttgtgaatgcatacccatttttactacattctcttttcactcattcaatccaagaaattttgtccacacttgagatgaaattttgtccacacaagacctctatctcaaagccccaagaccctttttttcatgttgattttctgtttgtgcttgactgtaaaatttagaatctcaattgagggtactgattagtttccttctgttggtttgttttgccttctcttgattttactattagtgagcgaagatccttttaaaaggaactgtaaacaaaaaaaaaaactatataccaccatatttgttgtaggtgaccaaag

SEQ ID NO: 59253 - DNA, 587 bp, Populus trichocarpa
  Intron number 2 from transcript POPTR_0007s03800.1 (locus POPTR_0007s03800) derived from phytozome v7.0 (chr-ID scaf fold_7; pos 2222190 to 2222776)
ccctgccggtgggtctctctttccccccccccgcccccgcccctctctctgatctcttatacacacatattcaaggctatagcttctctcattttcatcactgcacatctgtttggattgaagagtctagcctagctagtttgagttttgcccgatcattttagttttcacaagaccgttttatttatgagcaagaacgtgaccgtatcaatatgctgtttcttgaaaataactctctcatcaaccaattttcatctaggagattattcaaacagttttcattggtattgccaagaattttcagaggagagaaatatgatctcgtcctaatcagaaaaaaaagccagccatgccttgtgatttacactctgaaaagggtgcttggtgttgacaaggaccccttatctttggagatcttggaaaacaggcactggctcttaggtagatagatacctggtgtggagtccaagggaaataattttaatcttgcgaatctcatgttcttgtttttttgtgcggtgatcaactctcttctttaatgctgtttaacaggggattacgagtacattgacatcacattggaagat

SEQ ID NO: 59254 - DNA, 643 bp, Populus trichocarpa
  Intron number 1 from transcript POPTR_0007s12550.1 (locus POPTR_0007s12550) derived from phytozome v7.0 (chr-ID scaf fold_7; pos 12843903 to 12844545)
atcacagcgattctaagtctgaggtataaacagatgtaaatcattttgcttagacagaaaagctgttaagattgcgatttttcttttggttttttggtagtttagttagggtttccgtttgtttctatttgagaatatgagctatgtgatgttattgttttagctttagttattgatagaaagcttgtagttgctgcatttgctgatttagggttttaactggaagaaacacggagcaacgtaaataacatgaattggttcctgttggcctgttttgtcatgccctacgattattttttcgaattaacagtgtatctttgtcctgtgctagctatggatttggtgtttgtaaatgctggtcacacttgtggatattgcttatgttatgttctaattttgttaagtctgttgatatctgatgctatgtcaggtttttgcttagacacgtgaaacattatgcagttattggatttacagatgttttgtatttgttagttttgtattttggttcttgatgtagacagcccttttgttgtaaaggattttgtgggtttttggttttggttggtactgtgtaccccatatcctttttattgggaccttactagcacaatgcatgaatttcagcgtgggtctcgtgact

SEQ ID NO: 59255 - DNA, 572 bp, Populus trichocarpa
  Intron number 2 from transcript POPTR_0010s11280.1 (locus POPTR_0010s11280) derived from phytozome v7.0 (chr-ID scaf fold_10; pos 11585129 to 11585700 reverse strand)
cagattatactgctggagttgtggttgctttttatgtgagtaacagtactgtacatatcaaagaattttaatgtgtttttaaataaataatggaggtttaatatttgaattcagttcatcatttatcagacctaaattggtgttttttctttcttttcatggggagtatttgatttatctttcaagtctagtgctttcaatgtatcaaagaaactcagattgatgtttctttgatttacagtttttttcttcttcatgccaactgttttctctgtcatgctaaccttgaaagtctgatcagactacaataaactcattctcatgggtttgttagttgtccattgattttatggttcatgtctaagctctgttttaagaaactgaaaaaaatacagtctaccctcagcttgccatttctctccacaaaatgtttatcttttctttaaaatctagcaaggaaaataaataatatcattatcatgctaattttcgctgataaatttcaaaattttgataaaagaaaaattagaaaaaaactcttcttatttcatgtctgtttcttttcttaacag

SEQ ID NO: 59256 - DNA, 855 bp, Populus trichocarpa
  Intron number 1 from transcript POPTR_0001s13630.1 (locus POPTR_0001s13630) derived from phytozome v7.0 (chr-ID scaf fold_1; pos 10694456 to 10695310)
accgagactggattctacctctttgtttgtttcaggtacccatctctaaatttgaactcctcctttaagccggtcattttagctctttgtgattttgttttaattatataattcagaatgggttttttttgctggtttggtttggtctctctctgttgcttgcaatgaagaaaaaattactgaaagaagacacacgcactgcaatagtaacttctgaacagtaaaagtcttagggacacatgtggaataaagtggttttgacagcttttgccaagaaaaaaaaaaacttgtgagaaagttttaggcatgcccctctcctacaataattgtcgcaattagatgcagtcatactggcctgtaaccagcttgtttaaatttatgttcattaatgagcttgaagtttactttttcgttgtttaaaataaagaaaataatatgcgaaattgtttttcaatgaaaagaaatttcttcaatgctttctgtggctgggatgagagtgctgactcccatgatgtgacaggcatccagtctttttttttttttttaatagcattgaagggtgctctttattattaaagtgtaatgactatcgtggccctttttcctttcctgcaaattccaaattttgaacttcaactactattgctttaccagttaactgcatttggtccatttagatgtggatactaaatgtcttgtaactttgatagacagatgtaagctattgctttatctacaagtaaaccaccaactaattctttgtccgggaatgtaatgttcaaacacaaaatgtttgacagtccctgttttctatgatctttattcttgttatctgttaatatttcagaccgtgta

SEQ ID NO: 59257 - DNA, 923 bp, Populus trichocarpa
  Intron number 2 from transcript POPTR_0001s13630.1 (locus POPTR_0001s13630) derived from phytozome v7.0 (chr-ID scaf fold_1; pos 10695759 to 10696681)
ggccaggaacaacggttttgccagcagtgcagcaggtaagaactagcattcttgtgaatgtagagagctctttgagttctagcaattccaacttttaactttttgttaattagaattgattttaatagaacgaaatcagaagtgcagcatcctttttgttgaagttgccgtatgctgcgattgttgagattctgtctgcatgttctcctgacactatgtttttggtttgtttccagatgtttgctgttgagtctgaatctcttttgttagattcataaatttgcatgaatacattttagctttggaataacactattatcgaggttaactcacatcctttgcttcaacaagtgagactctattggttgaccatcattctttgcattgcataagattcattcacaattaattcagaggatatgcttcctatttgccatccaataaatacaataagatcaaacaactaattagctttggtatgattgcctaaagcaatcccactaatgccgctctgctgttaggaagagtttaaaaggaacataagtagcggaagaaaactgattggtctataaaagcgtagtttatgcaagctaattgactatgaaaatattttgcgttaccatggagtaaaagtaggtgagggggaggatctttattttctctatgtaggttgactttgccagatgctgccgatagtgtttggcagcttaataacctatgtagttataggcttctagctgtatctttcttattcgcttccataccctcgaggtcggggatggtgtctatggtcttttaggcatgatagatcggtcacccattctagaaagaaattgttttggtcacaattttcttttgttggtgcgaaatattaatgctattgaatgctccttttaacaggttccattcgttgggggagtttg

SEQ ID NO: 59258 - DNA, 356 bp, Populus trichocarpa
  Intron number 1 from transcript POPTR_0007s08380.1 (locus POPTR_0007s08380) derived from phytozome v7.0 (chr-ID scaf fold_7; pos 7146873 to 7147228)
cgaagtgaacatctgtgttcttcaagaaacgtaaggtaagcgcccgttttgttgatctattatgttggttgtctcttcaagctcacactttgatccttattttaaaagaaaaaaaaactgtattgaatcaattactgtaaagtttgtagttttttgtttttatgtttaatgtgaacccatttgcttgtttctcaaaatgcatgatccaattgtcaaagaaagtttgtttcttcttcttcttcttcttttgtatttattgttaataaaaagattgagtttctagtctcttgcttgtttttgcccatatttgtttttagcaagattcaagctttctaattcttgatgattgttattag

SEQ ID NO: 59259 - DNA, 820 bp, Populus trichocarpa
  Intron number 2 from transcript POPTR_0007s08380.1 (locus POPTR_0007s08380) derived from phytozome v7.0 (chr-ID scaf fold_7; pos 7147293 to 7148112)
ctagtgctggggattctgatcccatttacaggtaaattttgacccttcctttaattactgtattacttcatgtgcatctggttccatgtttttttgttcttcagtaatgttattaatcgtccacacaccaatgtaacagaaggaacaaatctagtttttttataatgctaattgcacaatttgatatatcgacaaaggaagttttgagcctgtaaatgtgatttctacaccctcaaatgtgtggctgtttctctcacactgggtcacccaatgtgcacaagaggcatgaattaatttcgtgggcagatacggatgtgctgaacattcaagaattcggtatttcttatatttgcctgcttgtttcagcagtcctgctgcactagctactctttaaagcagtcactgctgagctatttctcatacctttagtgttaggttcagtaattttggtctgttccaccatttatttggtgtacattctcattaacaaatattttctcataggatatattcatgaaccattacagcaccttcaagtttgttttattttgctatcttttctatcattttgtgcttgttcagaatacctgattacagttttctatgagattaggtccctcaacgcccttcagtaatgtttttgttattcaaaacaacctgattatgtgcccttttcacattctgttgtattttcttctcattatctgttgtggaatcaagtaatttgctcttatgtataattcttataatctcctataattccattttgtgcatgctgaaatattttgtttgttctgaaaattaggacttgtgttggaca

SEQ ID NO: 59260 - DNA, 936 bp, Populus trichocarpa
  Intron number 1 from transcript POPTR_0001s20640.1 (locus POPTR_0001s20640) derived from phytozome v7.0 (chr-ID scaf fold_1; pos 18627789 to 18628724)
ctaagagtttcgtaccacttcggtattatcaagtaattcaaagcaaacataaataaaattctaggcatttcttcttcttcttcttgttttagttaaatttcatggctatgacttcgtgtctggtttttgtttagttcaaatgtctttgtttggtttgttatgtttgctttgagttttgaatttaggtttacgactatgtgctatttgaatcttttgaagaagtgggtattccttttttattttttgaaactgcactgaagttatttgttatagcaatcttgcatatgttccagaatagtttgggttttattattaaaataatacaaaaaattgagatagggagaaaatgaaaactaagaaatgatagtggttggtaactggatggtgatgtggattgttctgtttttgaattttaatacttcaggtagcaggaagtttttgatagtcttgaatttcatgccagtttctattcagtggcagttattttgaatgtcaggctacagattttgcattaggaagctaaaatagtgttgcaaatgataatcctggctaagtgattcttttcaatccgagacattaaatttcttactagaacttgagaaattgagtgtaactatcttttatagttcttgtttccttcaaaaatggaaatgcttttattaccatctggttgcctcgttatcgagtgggatttctagttgaatgatatccatatcgagaggctttcatgaaagcttgtctcttacagctgtcatttcccaacacataagaattggatttaactagttcttactttgcttttgatcatacaattatatttaggtacttatctttttgttgtggtggaggctttttgttccccttttctttttctcggtgttgcttgaacagtaaaatatttgcaggcagcaccggacaatataattgttggttctc

SEQ ID NO: 59261 - DNA, 848 bp, Populus trichocarpa
  Intron number 2 from transcript POPTR_0010s21060.1 (locus POPTR_0010s21060) derived from phytozome v7.0 (chr-ID scaf fold_10; pos 18485261 to 18486108 reverse strand)
caaaagccaagagcgcaagagcaaagtagcaagaggttagttctttacttactcaaactgatgtgtattttaatatatcttagtgccacaagaaaatcaaattgaaaaaaaaaaccctaatcttatcttattatatgctatcttccgttgatggcactagcctctaagcattatcaacccctttgacagatagactttgagaacaattaattaggctcaaacaaatcaattaaggattagtttcttgatttgacccatttcaaatcacgaaagttccttgtgctagatggtgaccaaccagtgtagaaatttccccagcaacttgcgtcaataagtcttattttgacagtcaaatttgtagccgtctcctaaaggaatgcgcaattcttcattgatctttgtaaatggattacagaagaatctccattattgccaacaggtagtaaagaataattgtacttaaaatgtcgttattggcaaggatgtaagcaatgttaatgaaatcacaattcacaactcatgttgccaataatttggttaacgtatactttggtttgtattgacagcaaatattacagacattaatttatagattaaaattaacattgcaagtgagaaggcaatattgcaatgtcaattatactatataatattctttacctcttagcatgcaatttctaaattccatgattgatccagatttattttagtgattgttcaactgagaagcccctggtaaagacagattgtaactgtacaaggcatgcacagctgttttacagacgaagtgctttctttaagtaacttcgtatcaactggtgcaggtcaaggtgggcgtccagtgtgga

SEQ ID NO: 59262 - DNA, 645 bp, Populus trichocarpa
  Intron number 1 from transcript POPTR_0010s21060.1 (locus POPTR_0010s21060) derived from phytozome v7.0 (chr-ID scaf fold_10; pos 18486135 to 18486779 reverse strand)
gaaggcaaaaggccttggaaaccctgatttctttggtttatcatgttactgctccagctcttcgagtatgtatcttctttgttttttccaaattcatcttgagttgatcagttgtttctaatatctttgatttatcgtgttcttgcacttctacgagtgtgtatttagtcctccaaattcatctggagcagtttctgatttcatttcgtccatcgatagtgatgttttcttgattttttttctagcaagaaaactctttcttctatttttcataattaaatttctatgccattaatttgtatatctactttcaacaaatccacttcaaattaatttagatagttttgagattttattaagtgtatttagtaatataatgtataatgttttttaaaagtgttttttaattaaaaaaatattctactttaaaattattttttatttttaatattagcatatcaaaactataaaaaaatatataaaagaattaatataccaattcttttaacatgacttggaaaagaaaagcattgagtttttttccttgaacactgaatattcattaaaaatgaattgcaaaatgttttttttccggttacgaatgtgagctccgaagattttaattttgatacgatggcagctaac

SEQ ID NO: 59263 - DNA, 415 bp, Populus trichocarpa
  Intron number 1 from transcript POPTR_0002s06960.1 (locus POPTR_0002s06960) derived from phytozome v7.0 (chr-ID scaf fold_2; pos 4708679 to 4709093 reverse strand)
ttggctgcaagttcgtttgctctgctgttaataaggtaggtccctttcagcgtgttcgattctttttaaccgaacacgtaaacgtgacttcttctttagccacctttgatcgccggcgaaatggaaatgaaatgaaatgagaattctttttcttctgattctgcacccctaccaataccagttagtggatttaattttttaaatggaagtaaaatttgagttttatttggaatcagaatcaaaatctttaaaaaaaaaaaaaacaattctatcacccgtggtggctgaataaattattgaagaaaaaatgaaatgcttgtctatgaatttataagtcctataagtaagatttattcatctccaattttttactcgtgcaggcgggtctagccaaacttattggacttgctgggga

SEQ ID NO: 59264 - DNA, 470 bp, Populus trichocarpa
  Intron number 1 from transcript POPTR_0010s06150.2 (locus POPTR_0010s06150) derived from phytozome v7.0 (chr-ID scaf fold_10; pos 7577494 to 7577963)
gtttgtttactctaagagaaagcacaaaaacttgagtaagagaagcgaatctttaatatttccattgggtattattttgccttcttgcaatctaatcatttgttattatctgcgtttttttctagtacctcttttcttgctgaaattaggtttgctaactgacaatttatctttcttttcatcatctttgtgtttgattttctcattatctcttgaattttggaaatgggtatttttttttttggattttcaggttttgtgataatgggtatctgattttgtcattttttcaagattcgaaggtttaaatacaaagatttatgtgttattggttatttaacaacatgggtactaagtagtttgctactttggtttggtacttctgtgctatgcagtactttgcttctcttttttaccttttccatgaagatctaatataggtggtgttgttattttgtttatttatatag

SEQ ID NO: 59265 - DNA, 491 bp, Populus trichocarpa
  Intron number 1 from transcript POPTR_0007s01510.1 (locus POPTR_0007s01510) derived from phytozome v7.0 (chr-ID scaf fold_7; pos 844795 to 845285)
aacaaaattgtttttgaggagggaactataagcttgtttgattgtttctccaccgtccttcatcgggttgctatttggttgcatactgtgaattcaaacttcacttatacaggaaatgacctctgaagatcttatgatggcatcaaattgtagtgtaataagaaatcttatgtagtctctttgttgtttgctgtagtagatcaattttttttccttttttttcctatgtctatttcttttttctttttcttttttttatatatccttgtattttattttagctattagttttatgatcttttcaatatgctcttgatgattattcaaaaaaaaaaagaggagacagtggaaggagaagcaaaactggttcagtgctgtaacatggagaatggcttgactattaatacaaagattttgcttcattttgaaacattttccaatttccactaataataggatagaacacttaaaatcaaacacactgctgacaa

SEQ ID NO: 59266 - DNA, 1028 bp, Populus trichocarpa
  Intron number 4 from transcript POPTR_0001s25840.1 (locus POPTR_0001s25840) derived from phytozome v7.0 (chr-ID scaf fold_1; pos 24917806 to 24918833)
cttcagagatttcaggaagaggtgaatgactacaactcatctaagtataatggacatttcagtttgagttaattcagttaatttggttttctttatcattattgtatttgacttgtttattgagtatatcgtaacggattgctaacattgttttctgccttaaaagtttgtgctatttttctttttgatattaagctttatcctgtatttgtgaactgtgcccaagagtcttaatagcaaaaactcttcatttatcattatttaattgtgtgtactgtcaatgccggtcttccaagcagcagcagaattttatatgcaaaactaattttttgattgtggtgtggttttggcaaagtattgtattaggtagtgttttcaatcatgctaaaagatagcgttgcataagtgttttctatcatgctaaaagatagcgttgcacaaggccttgtaatttaccacatgcatgctaggtagatatggatatgattgtatctgatcatgtgcattgttcaaaagatgatcgatcacctttggttttgatgtattcaagttatttcaatgatgtttatttgatggaccacccatgtgttaggatagctatgattttcatcactttggtaatcatgtcatgtatttttgtgtctccctgtgtgaacatgataagattgcaattttttcttttgctgtatgagctccgactataaacttgctgtgcccatattaaaaatgtcattgacatcattctatatgttaataacatttttcctttgaaccaattttgttgtgttaaattcaccatatttccagcaatgaatttgcatttgtgcaaatgagactggaatatgcatggagctacgttatttccattaactttaaaaaataacagctttatatagagatctttgtccaaatataagatttttactcttaagaatctgccacaagaatttttgttttccaacgtattctaattgctgaacatttctcatgcagaaccctggctttgacttctcacaggctcaattcac

SEQ ID NO: 59267 - DNA, 890 bp, Populus trichocarpa
  Intron number 1 from transcript POPTR_0001s31470.1 (locus POPTR_0001s31470) derived from phytozome v7.0 (chr-ID scaf fold_1; pos 29759431 to 29760320)
tctggggtcctttctccctttcatttctcaagaaggttattgctttctctttgtttatggtcttttttccttttctttttctttttgtatatggttcttggttttcttgattgtatgtacatatgtgtgagtgaaaaagatggtaactttgatggtttatagaggatgttcaacgttttgtgataatgccaagatgaaaaagattgaatctttagcatttagcacaaagaggtactgagattttgtagctttggttaatcattaggtgaataagaattttaaattgtaaaaataataaataagtaaaaaagtaagtaaatagagagagagagagagagagagagagagatttaaggggttgaggtgttaattaaaaaatgtttctttttgggaagtgataaataaatattgtttgaagaatatctttctgtgaagagtgatagtatatgatggatctattctaagtggtatgttttctttatttttctcttcttttttttaagtttgatgcgatccctttgagggaaagcttattttagctggttgttttcatcgcaaaagacaaatcatggtgtgccaagtcatctttcgaaggggtgattccatgattttggtggaaaaatctaacaaatgatgtttattctaatcaattggtaatttctttttgttagattgtattatggtgtaccaactagagggtacctttgtaatttttcactgaatttggtgctacagattattctaatcaatattgatacttggttctttaccagctttgttttgtactgcttctagacttataccagacgaattttgggcacaaaatttttcataagcaatcctgttattgttgttatttcaagttcttgcttgtattattggcagggaca

SEQ ID NO: 59268 - DNA, 709 bp, Populus trichocarpa
  Intron number 1 from transcript POPTR_0007s11760.1 (locus POPTR_0007s11760) derived from phytozome v7.0 (chr-ID scaf fold_7; pos 12154108 to 12154816 reverse strand)
cacccagattcccagaaaactttgcttcagattgagtatgttttctttgttaattctgtgttttatgttttggtttttggttgctgagaaaatgtgaaaacaaaaggaaaagaaaagatgaaagaaatagcattgaaatatatttttattggctactaagatttataattgcctaaaaagtatacatacattgtagggccttttgaggtatgtgttctgtttattatgtttaatctgttgccagaaaataagatatatatatatatatatatatatatatatatatatatatatatatatatatataaaatgctttgctaggtttgatgaaagtagaagttctttgatttcaatgttttgttgaggtaagaagtgcttaaggtttgacagtttggtttagttatcctataattagcaataaagggagttggggtttgtttagctgctgaacaatatcagaatttgggccttcaaaaagattcacgtttcaatactgacccacaaagggttaaattgaggattatgcagttgaattattttgatggttctttgggttgaaccagtggtaatgaatttcttttcttgtttggtaaatggttgagtttgtgttgaaatgtaaaactttatgtgatatttgttaccaactatgtggtttttgaggtgctcaagtgcatttttttatgcagggagcggatattggagtataggg

SEQ ID NO: 59269 - DNA, 1046 bp, Populus trichocarpa
  Intron number 2 from transcript POPTR_0001s17730.1 (locus POPTR_0001s17730) derived from phytozome v7.0 (chr-ID scaf fold_1; pos 14585625 to 14586670)
ggagaagtgaaagaaatttgagtgttttcttgcaggtaaatttatagaagaagaagttgatatcttttattaggaattgtatttattttttgaaatggccaaggtgtccaaaataaataaagaaaaggaaagagaagactcattagattcagaattttatttttggaaacataaggtttatttgtttcttgtttgtgtgttacaagttggagtcttgaaattcggattcaaaatcttggaatttggatacagataccagcttgcttagtagaatcttgggattcaagatttttcaaggaaagaacgctttgcctttattttcatggttgccactaagatttatatcccattattaagtaatgtataagatttatatcccattattaagtaatgtatgtgaattttgttgattctgtttcttggtgattgcagtctcaatcttttttagggcaagtttttctcaagaagatagaacttttgggtacattgagaattttcaacttgaactccagatacatatccatgaaatttgaattgttaatgatcttttcacacaatatttctccatgcaattggagtcggacttttttttttacttgatctgtgtagatctaaaggttttatgatttttttgtgtgatttggcaattcggtttatgtttgataaagtgctcagatgcacattataaaattttttgccagattctatttctttctttttattcagaaatgcacacaaaatagcaggttttgtttcttgacgatggtatctatttgagggaaatttcctgatttatagataattttgatgaaaattctaatgagcctatagtaaaagtggcgagtggggttattctttgatgtctcgtttggaacaaatatcccttattcttctgacgtgcattcccattgcttataagttatggctcataatttctagattatctaagtgatgcctcaatatgtagagtttcttggcttagaatatcttgatgattgtgctgatatggtcgttctattgcaggttacttgcctactttctggtta

SEQ ID NO: 59270 - DNA, 665 bp, Populus trichocarpa
  Intron number 1 from transcript POPTR_0002s22320.1 (locus POPTR_0002s22320) derived from phytozome v7.0 (chr-ID scaf fold_2; pos 19028831 to 19029495 reverse strand)
aaactgctcaaaaacttctctatcaaggtcacttctccttgtctttatcatttttccttgtgggttttcttgttctcaaacccattgtcttagaccttgtggatttagctggttttcatgtgagccgtcgttaaaggtttgattttgaattcggtctgtgggaaatggggttttttcttcttcttattttcttatatgagtttttcactgtgttttgtcttcaccttgtcggcgtggctaataagttatatgttttttttctttttgaagctttgtccgttgctttcattttgtaagttttgatttgtggaatgaaatcatttcttatgtttcaaagtcttaatgagaagaattagatgtactttttagcgaactttgaagtagacaattgggctcttataaatgggttttcttagctcgtgccagttcaaaagcttgccgggcagaaaaaaataaaaaacaccttatgctatggtttttatatatatgtcttgcaagtttatttcaattgcttactaattctctttcttattgttcgagaagcgaaggatggattttgatgcatattgcttgacattgtctctgtgtaactactattttcctttttaactaggactaatggttttacagatccatttcacgaagtcaaaaggaagcgtgacagg

SEQ ID NO: 59271 - DNA, 736 bp, Populus trichocarpa
  Intron number 3 from transcript POPTR_0001s40030.1 (locus POPTR_0001s40030) derived from phytozome v7.0 (chr-ID scaf fold_1; pos 39340887 to 39341622 reverse strand)
gctttggagtcctcaaggtatgctttaattaaagatactgaaaagattaaaaaaaaatccaaactagtaatcataaaagagaaaaacaattcctgacttagcatgctaagacttctactgaagaaaaggttgagttctatggctttgaagtcctcaaggtaaggtatgctttaagagatactgggaaaaaaaaaaaaaaaaacaccaaactagtaatcgaaaaggagaaaaacaaatttctgacttggcatgcttagaacatcaaaatatcgttttctttcaaaaaaaaaaacatttctggaaataaatacatcaactttcaagtttgatgggtcttattcattgttttatggaggatttgtagagtatttctttttatgattcaaccaaattttaaaagtattttttgtttgaaaaaaattaaattaatatatttttttataattttattatgttaacgtccaaaattttgcattttatcattgccttattccgtcggtatttagtttattagaaaaacttttactgataacataaatattttttttagcttcttggttgcaaaatattcataatggcattttatttgataagttggtatccatttgacaatatcacaagaaattataatttaagaacttgaaaattttgaatttgtggaagaaaacttaaaaataaaggacaacctaatacataagacgaaataactgtgatttctttccgggttcccaggtgg

SEQ ID NO: 59272 - DNA, 855 bp, Populus trichocarpa
  Intron number 2 from transcript POPTR_0001s30840.1 (locus POPTR_0001s30840) derived from phytozome v7.0 (chr-ID scaf fold_1; pos 29279524 to 29280378)
ggactactttcgctactgggtctccattttgtgaggatttcaattgttttgcacctctttattttctgctacttgctctgtatttattccttagtggataccatattctagctagcaagctgtgtgttcaaagttcaaaacttgtatcttcatcatttagtaggatgataaatcagaaggcagaaatttttatttttatttttattcaactgctctatcgcaatgagtacaaaatgaattttgatgggcaagagattgaaaaaataaatgaaatgtaaagacttcttatatagaggcacacttggtgttattggtctagcaatcctcacctttggggaattgacagctagttagagttatcatttacttgtgcttgtgatctctgagtcaataaattggtgttttcttgatctattgtatctacttgtttgttctagataatctgaaatatttcacctagtcaatgcaatgatcccacatccacaagatttgagctttaaatgcttgcttgaattaacctcaatgctcggtagatgcagtaaggtttttgttgggttatctagggtgaatgcgaggatagtggccatttaaatttaaatatcttaatatagtctgctcttgccattctgctgctgtatttttgtcgccaagaagttgtgcgacaagaataatttggaacatgtaattgaacacccgaaaatgtaattgaacacctgaaagtagctatgcggttccaaatgttactttcttatcctttaagttattggcaactaaaggaacattaaaagtattgggagctaatactgaatttctattctagtgatatcaagaacttctcatcagaaaaaggctgct

SEQ ID NO: 59273 - DNA, 786 bp, Populus trichocarpa
  Intron number 6 from transcript POPTR_0001s25230.1 (locus POPTR_0001s25230) derived from phytozome v7.0 (chr-ID scaf fold_1; pos 24411297 to 24412082)
atctggtaaggaccggacttttttttttttcatttaatcacgtggttcagcaaattattaacgttgctcttgcttgagggtgtattagatgaggcatatctgatgttagatatctgtatcctatataacattggtatacgaatgttcctgctgggttttgtgcaataatgtgggctctaaggattttagtgtttccatcaattctaaggcttctttgtgatctggtgtctcttttattgatgcaacattgtagataagaagtgcaattcaaggatttgaaaagcacacttctcttcttggctgtatgattacaggatttagagtccatttgacgtgactcataaaaaataacctttcactttgagtcatgattcaaaatgtgtttttcataaataacttgtgacaaaaatgagttaagttggaagtatgttcggtaaaaatgatccagaactacttttttttttaattatttgaagaagggaggtagtatatggtagaactcaggagttataaagttgaacattttaacttttgtttaaagcaaaattttgactcaattctgaatcaaacctttgattcaagtaaaaggtcatttctagctaaacatacttgtgactttctttgagtcaaaagttaaaaaaaacaacttaaaaatcaatttgcaaaagtcataccaaaacagaaccttatatttttttattcaatgcaggatactataccttttagcttgtttttttttttttaattgcaggaacaaaatactgtaccatctctaagaaaagcact

SEQ ID NO: 59274 - DNA, 835 bp, Populus trichocarpa
  Intron number 1 from transcript POPTR_0007s10280.5 (locus POPTR_0007s10280) derived from phytozome v7.0 (chr-ID scaf fold_7; pos 10117635 to 10118469 reverse strand)
tcattctcgtcttccggcttgcattcaacagacaggtaaagatattctccttttatttgatgatctatcttagggttttctctttatcttttattctttaacataatccagctgctgctgctgctcaattcgtcaaatgtttgcttttttagggtttccaatttagactatcaaggcctaaccttcctccatctctggtctctgtttttagagttttgactattttgatccactgcctttttttctttgttttttaagctcaaatgattaattctgcgcttctatgccatcttcactttgtattaatttgaaacgcttttaggatgccaaagcttttagtaaataaaaaaaaatagcaactcagattcgggaaagtttttgtcagtgttataattgaggactgaatggacggggagtgttagcaaagcttcaatctgggcttaaagttatgcttgtggaagcttgaaatgcaggaggtgtgttttatttattggaaaaggggggttttagctgttattgtcttcgaatggttaagttagaaagtggggttggattgagtattacctatgttattcgattttaagtgtactaaaagcttttgatattttgaagcattctaatcaaatcgggtctaacttccccatttggttgattgatgggtgcaagctaggcttcttatgctaccttgatattatgaattctagtgatttgaatttcatttcttttctcccataaaattccgatgcattatgttttttgttccttccttgggctcatatgtctcagtaatttcaacctatgaatatttggtttctttttgggttttgaaaacagc

SEQ ID NO: 59275 - DNA, 813 bp, Populus trichocarpa
  Intron number 1 from transcript POPTR_0001s46870.1 (locus POPTR_0001s46870) derived from phytozome v7.0 (chr-ID scaf fold_1; pos 47241599 to 47242411)
caggaaagaagctgagaattgtgattgcttgcaaggtaaattgttttaaagatttctttgttcggtgtttttgtgatgttttgaataacgggttttctttcttttgattggatcttcatgggttttgattgttttgtgagaacgttgacgggtttgattggatctgacgttcgattcaggtttatagaggtttttcttggtttgcgaaatttgcttttgatattttattaatgaaaatggggggctttctttatcatcatgtttagttttcctgggaaatttgctggatctttaatcatacttagattggatatttaggggtaaattttttatgctctatgctggtgcctccatgtcttttgtgctttcgtggttttcaatggctttcaagttgtaatgctggaccgaatcctgttttctgcttcagctgactgctccatatgctatgctagttctgaattttttcagctggaaacttgtgttttcgattttcacttctgagaacagataacgagaaaattatcttcctgtacgtgaagtagctcaaatgttctttatatactcaagtgtggtttgacgctttcagttgcaagtttagtttctgtctttttcatgattgtggtttttgctagcaatttttcgcgttcctcttaatgtatggtcatttaattgctgagctattattgttattaggtttcgaactgtcctcgcttattgatgctacagttttagttttcctgcctgttgcaagcttcatttaataaatttggtggaacaggatttcaagtttgccattctttgggtggaggcact

SEQ ID NO: 59276 - DNA, 513 bp, Populus trichocarpa
  Intron number 1 from transcript POPTR_0002s19995.1 (locus POPTR_0002s19995) derived from phytozome v7.0 (chr-ID scaf fold_2; pos 15915473 to 15915985)
gttggagagaacaggttggttggaccattgtttcataagtcacgggtgatgggccctacaaatactaaccttcacctagaaaaagaagaagaaaagagtaacatgtaaaaagagagtgacgacgacacctcccatattatagtttgtcatgccagaagcaaactaggcatgttcaaatgaattcaaacttctagcttttctccacaccagcttttctccacaccatcttaagttcaatctctcatctttgtgtatgtgtgtgtgtgtgtgtaattatctggtatcagagcctactaggatctgggtaggaatagtaacgtaagctttataaactttagtatgataagagaccattagttaataggtgaatgctactgaatggtgtaagtcccgttcgagatttagggcaataaatccatataacttgcagcctgttttctagtttatcttttcaatctatggattctgtttttcacaggactaattatatttcaacttcctctacctctgaaa

SEQ ID NO: 59277 - DNA, 488 bp, Populus trichocarpa
  Intron number 1 from transcript POPTR_0007s06770.1 (locus POPTR_0007s06770) derived from phytozome v7.0 (chr-ID scaf fold_7; pos 5133059 to 5133546)
ctttcagttctcgtctcttatccagatccaaacaggtaactacttttcctctctctatttcagatcttcttatcctcgtttccattcatccattcatttcctaccgtaggatttcgattcctgtttgttttcccgcaaaatcgaggaaatgatgaatctattaactctgattttttttttatattatgtttagtttataaaactgaagaaatgttgaacttttttagatattttagatttttgggtcaatgagggtttttttttttgctacgattatttttctgttgaggatggaattaattgttgattgggaatattatattttatgggaaattcaaattctattgtgggttctgttaggggaattatcgtggaattaaattaaaagtttttaggggtgccgtgatttttcgttcaattattgggattttgttttgactaataatgatttatttttctgggggtatattttgggtctatgcagttgt

SEQ ID NO: 59278 - DNA, 726 bp, Populus trichocarpa
  Intron number 2 from transcript POPTR_0007s06770.1 (locus POPTR_0007s06770) derived from phytozome v7.0 (chr-ID scaf fold_7; pos 5133605 to 5134330)
aaaagaggctgctcctgccgggctcaagggaggtcagtacacccttaaacttctgttattaaatgggttttttgtcacatgtattgtttgaggacactcaaaatttagctttgccactttcaaagcatgttgtttggagatgataagtaccggaccaaaaagttgaatgttaatggccatgtgaccacatgcatcgtgctaggaacttgaaaaaatattttacaaagctcagagcaaaattacattttaattttgtttttgaacagcccataaagcatttacaaccttcatactatgcaactctaatctcttgggctaacagccaaccctcaccagtttggggattgaggtggtgttgtttttgttgttgctgttgcattgttgtttgaggtgttgttgttgttgttgtttgaggtgttgttgtttttgttgttgctgttgcattgttgttgttgttgttgttgttgttgttgttgttgttgttgatgatgatgacgacgacgacaacgacgatggtgatcacaatgatttatattgttgcctcatattctaactaggatactcttacaatccagttaaaagtaaaatacttggtaatcattgtcgtttgttcatgactctatgatccgttataacatcttttactcctggtagatgcaactattcacaatgaacactgtgatgatttggttacttaatgcaaatcttcctttgaactaaacagag

SEQ ID NO: 59279 - DNA, 450 bp, Populus trichocarpa
  Intron number 1 from transcript POPTR_0010s12660.1 (locus POPTR_0010s12660) derived from phytozome v7.0 (chr-ID scaf fold_10; pos 12663087 to 12663536 reverse strand)
gcaccccgggtgtttgtgccaagatttctcggcaggtcagtctgtttttttataggttagatcgaatgaatgtgtgattactgcaagtaagtttctgtgctaagattttttttgtttgtgccttggtggtcaatttatacgaaaaaaactctaagaagaaactcatgatgtcttgtgagttgtgatcactggaaagttcgtaaatttagctgatttcttgtgaattgatgatgaatgtgtatgtttttcatggtttgggttgttgtactttgttatgatttggaaatgtggattccattgagttgggaaatgaacatttatgggattttggcaggttgtttgtattgtccttacaaacggtgtggatttttgtttaagttattccaggtcttttttggtgattgtttgaatttgttttgataattggtttgatataggttgggttgtact

SEQ ID NO: 59280 - DNA, 701 bp, Populus trichocarpa
  Intron number 2 from transcript POPTR_0002s15390.1 (locus POPTR_0002s15390) derived from phytozome v7.0 (chr-ID scaf fold_2; pos 11517391 to 11518091 reverse strand)
ttgaagtaagaaccatgtttccattatcttgatcacttgcaatgttgaaaagcatttagtggatcaataaatattatgatctaatggcttaatgtttgattgactttatgggtggggatgctaagcttattttctttttctttattgaggattgctctggggtttcttcaaagtttgcaaagctgcaagaagttgagatttatgacattattagttccaggattgctcttttgtttcgatgacaagcactggtcaggggttaactttaagtgaatttatttgtcaagtagctatagttgagtagactactcctactgataaactgggcttcttgcatgttattcgagctgtgctacatgttttgagctagtgggttttatttatttgtttccatcatttgaatctttgatcaaacagttttgagcatgtccttgatatggtcttttaccatattcagttcttgtaatatttctataaatgtaattagaatgagtgaatgaattgtgttgttgtatgtgaagtgctttttctattttacctaaactgacatcttattcccttccttgccaaagctctgctgagagacacatggtggtttcactctcgcctttgcttgaccaagttgaatcaacttaattttttaattatcaagaatcgaatgctttctgctcaacttattttcctgcagactggtgcaaacg

SEQ ID NO: 59281 - DNA, 817 bp, Populus trichocarpa
  Intron number 2 from transcript POPTR_0007s09330.1 (locus POPTR_0007s09330) derived from phytozome v7.0 (chr-ID scaf fold_7; pos 8723787 to 8724603)
agtgatttgatagagaaaaccaaagaagagccgtatgtttgtttctttttttcttttctggttggttgatgaaagcttggaaatttgagagtaattatttgagttattgagtgaaagtttttactctgtggttttgattggttgaagttggagtggaacttaaatgcccttactgaattattgaaatatagctgaagacggcttgtgattggttagtcatgatcatattggtgatgttggaattggaatttgattgattgaatgagtttgattaattgagttgttgaattaaaatgagttaattaattttagtcaataacttaagacgtggtagaaatggctgattactgtttcatcccgataatttgcaagtctgaacaaaataatgaaaatataaaatgggttgtgaagtgttaaggggaaatgccttttttcttttgacaataagagtaagtttaggagtcttatgattcttaattattctctgtggatgtgttgacaaacctttgatgtttatttatgttatcaattatcatattaatcaagggtgttttttatggttactttgtgattggaatcttaggtaaaaattatggtaagtagagtgcataattatgtgattgttagtggacattaaggaatctatgtgaggatggtgttactagtgttttttaaaacattttaaaaatctttggtatggttttttatttttgcttttaacttgagtgtacagtataccataacgttcaagaatttagtcgcaacttttttccttctttcaggtacactgcaatatacctgttgctgtttgttgcag

SEQ ID NO: 59282 - DNA, 965 bp, Populus trichocarpa
  Intron number 1 from transcript POPTR_0001s09520.1 (locus POPTR_0001s09520) derived from phytozome v7.0 (chr-ID scaf fold_1; pos 7264942 to 7265906 reverse strand)
tctttcttttagtctatccgaagcaaactgacactgtaagtttatatattttcacgtacactgtaagtacaaagactaaagcttctgccttccaatttcgagcttgaatttatttatttctttttttgagcttaaaaggactgtctcttaagtgaattttgatgtttcaagagtttctatgtttctttcaagtgaatctggagatgggtttttaattttaagcatggttgtttcgtatattttgctctttagtttttttttttttgtttttgtttttttttggttagtttgtgatgttcaaaaagttaggacatttagatctggtgttgatagattatgttttgggttgctaaggttgagggggctatgttagtctgttttgaaaactggggcattgaagaacggatctaattcaataacagttgttgagtgcatgccaaggtctttgtggtagtgtgaaaatggtgtctttgtcttcttgaattttgttgaatttgacctggagtggactataactgtattagaattcaagattttctcttccagtgtggattagacattagttaggggataaaatgaggggccaaggtgataatttccacttgtaaaagaagcgcacaagaaactaagagttgcaaatcatacacgtggtatgaccacggtgatcagaggaatttattcatgaatttggaatcaactcaacaaggattcatgtcaagataagagttaaatcgttaaaattgtcataacagtcgatgcatacaggtacttaaaagtcatcatgcccacattttaatcatggagtttggttccacaaacaaacggggaattttccgccatgctgtttttactgattatggaattctgtgccttgtttttttcttttccattttgaatgtgattttagttctgcattttatgcttgggcaggtatctttgcatagctgctgataacgaaacgctaa

SEQ ID NO: 59283 - DNA, 630 bp, Populus trichocarpa
  Intron number 2 from transcript POPTR_0002s26130.1 (locus POPTR_0002s26130) derived from phytozome v7.0 (chr-ID scaf fold_2; pos 23100944 to 23101573 reverse strand)
tatgtaatgaattttattaaaaaaaattattaaactaaaatgataatatttcaataaattattttaaaaaaaaaataataacaacgtttaaaataaaacaaacaaactaagttttaattggattgcaagttaaccctttaaatttttaatcaattaactcttgcttgatttaatttaaaaaccagtcctgaacaagtctcaagttcggagatctctaattaacacaccgcgatgggcggagtttaacaaggatatgaactgagttttgcttctttgacttgatctgatcttgaaatctgaatcttcagtctgggacatatcatgcatgcaagagctatacgtacttatatatacaccatttttttttaatttcttaacttgtacataatttttttctatttttaatctcttcctctgtcgaagactgatgacatcggaaaacaaagcatgggaagcaattggatatcaagtagataccagagagaagttgaaaaaacctgaggaaagacctctccaaaggagaatcacagaaactgctgcacatcagaatgactcaacccttgtccagtaactcatccaaaaaggcctccaagtcatggaagatccggaacacaacacctgcaaggtcaa

SEQ ID NO: 59284 - DNA, 813 bp, Populus trichocarpa
  Intron number 3 from transcript POPTR_0027s00480.1 (locus POPTR_0027s00480) derived from phytozome v7.0 (chr-ID scaf fold_27; pos 359456 to 360268)
ggaggagacgaagggtcaggtgcttttgtgtgagtggcggctgggttagtaatttttagtggctcccctatttttaggttatttttttatggcctcctatctttgccagaattttttaatatttataggtaatttttttattttttttaattgcttggttctcaagaaatttaaattcactttagttctttattttctttctttatgcctttgatctttttttttttcatttttccttttgttttcctatttatttttgtattttgattttaaaaaaatagcaatgtaaatgctaactcgatgaaagcattaaaacaaatttttgaattttgaatttttttgaaaagacattaaaaattacacgaatgcatcaaaaatatatttttagggtttttagctgtttttttttttactatatttagatttaaaaaaaatattttgaaaagagaattaaaattgagttatgaaaattaccatatttttacaacacttactgtatgaagttttataaagaactttggaaagtaagtttatatatatatatatatatatatatatatatatgaaagccttccgaggttagaagagaaatccgaggttttgatattaataaatcatgaggcggttattctctttgttttaaaaaatagtgttattgaggccggggactacctgttgtgtgaagaatatataggattcttcatgaaaagtttgctttcgggtgacttgctcgagatttgcgaatagatgacctacttgttgtgtgacaaatatctagggtttaattggagagtcatttccggtagccaaaca

SEQ ID NO: 59285 - DNA, 234 bp, Populus trichocarpa
  Intron number 1 from transcript POPTR_0010s21830.1 (locus POPTR_0010s21830) derived from phytozome v7.0 (chr-ID scaf fold_10; pos 18975549 to 18975782)
ggagactcatctgcttcatacatacacgttaatcttatagaatatttagctcaacgttttcttctttagttctcttagattttttttgcttggtcatctatgttgggacttgtttgattcatccattctattgactgtttctgtttctgaaaatcttgattttgctgttgatggatttatatggtgattaaatttataggtgcagcaccttatagagaagtgcctgatcttcaa

SEQ ID NO: 59286 - DNA, 906 bp, Populus trichocarpa
  Intron number 2 from transcript POPTR_0010s21830.1 (locus POPTR_0010s21830) derived from phytozome v7.0 (chr-ID scaf fold_10; pos 18975824 to 18976729)
caaatatcgagcctgtcatcacctccactggtttgtaatttccctaattctgtccatttctactttttcatcctcttcccttcaatccttgaaaccttcactttgtaatattaacctaattaattattaaggcaatagagaaggatttgataccagatcacgctcgtttaacacagataaaaattaagtgggttcgtgtgtgtgtgtgtgtgtgtgtgtgtattaaatataattcactttctgttaccttgaagatatggtcatgtactctttagactgatgactacaaatagagcctggccatgtcatgtacagtaggtctaaaaagttttagtaaaaaaatctgtttagttattttttctttataggtttgagatgaactgtttaattgttccttataaaaaaatagtttttagctatgataattaccaaaaaagattatatgtataagtgaggctatgatctatatgtaagcgtgccttaaaagagaaaagccaatcgatcctgccatacgagcttgctcacaaaatttaaggaattagaatgtttatacgagttacttgatgtaatcatctcatagactcattccaatatgcctgattgatcttggctttgatctcaaaaacaaataagatcatggcttgtttatctcttaaacaatccagaaatatatatatatatatatatatatatatatatatatatatataagatcctctcttgtttaatatatagtcacataatcatcaagtacatgcagacaaacacaaacactaggatttttcttacgtaaaaagcttatgctacctacgcataaatatgtatatagtagcagtagtaatacatatagcaatggcttgtatttatgcagtgtggaaagaattagagaaagagaacaaggaattc

SEQ ID NO: 59287 - DNA, 602 bp, Populus trichocarpa
  Intron number 1 from transcript POPTR_0001s26120.1 (locus POPTR_0001s26120) derived from phytozome v7.0 (chr-ID scaf fold_1; pos 25198177 to 25198778)
acaacataacaagatagttgaagcacttaatagtgatatttcaaatagttgaggtttacatcagaaactatgctttgaagagccgtgatacatgttgggactcacattatggatttttggtaaatctaattgtattgtttgctttcgttattgatgtgtttaaggtcattgttgaagaaggtgtaaatttagagcaaaggggcaaagcttgtgcacttcgactcgatataatcttatgatttttttttcaatttgcattagatgaaaaatatactaggaattacatatgaattatctcaaacattgtaaagaaaagatcaaaatatcataaatgtaatggatttggttaaagtttcgaaacaacttcaaataacgagggatgaaagatgagaatctatagttgatgagatttttttcttttgtgaaagacatggcattgatattctaaaaataaatgatatatttattattcatggtttatcaaggcgtgatgctaaacgattaataaacttgcatattattattaagccgagttattctatatcataattgatatgcaactttaagagtttaataattattttattgaggtaaacacggag

SEQ ID NO: 59288 - DNA, 474 bp, Populus trichocarpa
  Intron number 1 from transcript POPTR_0010s18820.1 (locus POPTR_0010s18820) derived from phytozome v7.0 (chr-ID scaf fold_10; pos 16949367 to 16949840 reverse strand)
cccatctcttgttctcatcaccggtgatctcacaggtataattatttatgttttttatttttcatttgttggcgagtttgagtgcctattaattccaagctttattgtttttgttgaatcgtgggatttagattatgtgaaatgtgcgtgcatttatagagcttccacctccattcccatattagaaaatagagtggaagagttttgatgctttgtgatcttggtgctaatcaaactgtccattctttacaagcgagtcgatcagctttaattagctgccagcatactgcaaagatttttcctttcatgttcatcacctttttttttgtgtgttcttttagacatgcatattgatgattgtgatttaacatacgagtaagccaagtacataatgttcttattttattgactttggcaaatcatgatggctgctgggcggatacggtgaatttttttttaacttttgtttaccag

SEQ ID NO: 59289 - DNA, 569 bp, Populus trichocarpa
  Intron number 1 from transcript POPTR_0007s13040.2 (locus POPTR_0007s13040) derived from phytozome v7.0 (chr-ID scaf fold_7; pos 13221804 to 13222372 reverse strand)
gcaaagtaatcaaaacatggtctttgttgctcatcttggattttgaaagctcaaagttttgatttttacctgtttaaggtttgttggttgtcttttggtatagaaaatgtggttttgatggaattttgatgtctttttggatctgaaagttgccatttttccttcatttgttgttggattcttttactagacgttgtgatgtgggtgttttggtgaaaaagtgaggtcttggatgaatgcttgatgcaaatcaagaaagttatcatttttctgtgtaattgggtctttttgtgttgccataacttgttatatcttccttgatttggagtttcagatgggtttgtgtatatttgattaggactcctgttaagcattatggtttttaggcctgggataaaagattccaccgataacaggcaaaaattggaactgcagtctcaaatttgcatacccattaaacaagttgggttcttttgttttgtttcgtctttgtttatttgaagtgaaggaattatgttttgattttattgatttttccttgtttttatgttgttatagttgaatattga

SEQ ID NO: 59290 - DNA, 744 bp, Populus trichocarpa
  Intron number 4 from transcript POPTR_0007s01180.1 (locus POPTR_0007s01180) derived from phytozome v7.0 (chr-ID scaf fold_7; pos 637800 to 638543 reverse strand)
tttgcagatattcgcctttgggatatagctaacaggtaatctcatgcggcattcttcagtttaaagtttatacttcttagatcatttataagctgcgtttaagtttcttgtatgttggatattacacgcatatattgaggtcagcatgggaagagaaaagaactggtggtaccagagagactgttatagcgtttttgttccttcttgtcttgtttccgtatgtattgcaggccaacctatggcatgtaagactgttgattgatctttgtttcttttagctgaaaattggaaaagaaaaacagacagcaactatttcttacttggtgccattatgtgtcccacttttgtaatagaagtgacctgtggaagtaatgactatgcagattagctttttaagatgagtatgatactaccattttgatgtttatctacttatgaacgcttttgtggggtttggaaatgtaatagaagtgatcaggttagggccacagagaaatttgtttgcttatcaattgtcttatcatgatgctaggatattttttaaggatcccaggaccaacaaaatgcattttaaaagaaaaaaagaaaaaaaaatggattcctagatcaggtcttgcaatttttttacatatactttcagtggatcatatgttgataggtcgatgttgtgcatgtgatgatgtttgacttatgagatctgaatcaacaggagaacagtttgtagatttcccggtcaccaaggtg

SEQ ID NO: 59291 - DNA, 363 bp, Populus trichocarpa
  Intron number 2 from transcript POPTR_0001s27550.1 (locus POPTR_0001s27550) derived from phytozome v7.0 (chr-ID scaf fold_1; pos 26446250 to 26446612 reverse strand)
gagtggggtatctcttcctaccctgttgtccccgggtatgtactctgatatcatataaatatataacgacaagtttgaattgaagagcgaagatcaattatggtgataaacaccctgatgagtgacgaattaattaaaaattattcgttcacgttttgacactgataaacgatcaaaatatatggctgtatatacctgaatctttgtatcatgggaaatgatcttatcacgagttttttttttttcagtgcacatttatttgataaatggacatttaggataacatattaagttcaccaaaagttagtttcctaacatggacatgcatttgaagtttatgatgagaagattgacaatgcaggc

SEQ ID NO: 59292 - DNA, 661 bp, Populus trichocarpa
  Intron number 3 from transcript POPTR_0001s34530.1 (locus POPTR_0001s34530) derived from phytozome v7.0 (chr-ID scaf fold_1; pos 32698481 to 32699141)
ctagagtataagaaaacttcatcccctcaaaaagtgtgagtttcctcttacttcaaatcacattttaatttcttgtctattctgcgctgccaatggtgaactttagatttggctttatatatctatgaactgacactgatcttgggggaaatgctaatgaacagaagtctatctttgttaaggcaagattacggagattccaaatgcttgcttggtccgtctttatattgaagagagttttaaattacataagccctcctgtttgtagcctatgcaagatacttgtttcgtgtggattagctggttagataaataattagctagttaagattggagtgatggcccttattttatgatagtgtgtgtaactgatgattaactggagtagaccgtttagtgtcaatttagttgccattatttgaagtttgctgatgctgtataacccatgttactttcatgcgttcaaaagaatctaagctagtaatgtgtaattagatgttgattgaataacttttcttctacttgtggcacagatgtgctgatatcttatttacagattaattacattggaaaatatatgttccaaaactttctgatgctgaccatgtgacttatctgggttacagtcattcagataataatctgcttgacttggagaagg

SEQ ID NO: 59293 - DNA, 541 bp, Populus trichocarpa
  Intron number 1 from transcript POPTR_0010s24500.1 (locus POPTR_0010s24500) derived from phytozome v7.0 (chr-ID scaf fold_10; pos 20700184 to 20700724 reverse strand)
aacgttcttctatcacgaggttttttgttatttcaagaaactctcttttttactaatgtattttcaagaagattgtaatgtctttctttcttggtttggtttgttggggttatcctgtctttgattttagattttatagaatgagaaaggttattaaagaggcttcaaagtagtgatcttttgcgtttgtcagtagttgaaagggtgaattatcttatcaatgttgaacctggcaggagataattgagctttgatgatagataaagaattgtggattgatgatctttttattttttgttgctgagaaaatttgtacgaagaaaataacttcttaagctataaataccaagacatcattttatttctgaaacccatttgtcaaaatcttggaaattttggtttgaaaagatatataaatagatagatagatatgtgtggttgtatagatttttcaatcaataaagatgattaatgtttgagttgcttataagggattacttaacctttttaatgcatctctactttcataaggtttttgagg

SEQ ID NO: 59294 - DNA, 910 bp, Populus trichocarpa
  Intron number 1 from transcript POPTR_0002s11030.1 (locus POPTR_0002s11030) derived from phytozome v7.0 (chr-ID scaf fold_2; pos 8049200 to 8050109 reverse strand)
agacagcaactgcaaaccttgcaagaaaatcatcggtatgatccattcccttcaaacaatagtgttttatatgaagataaatgaacataaagactgaaaatagaataattgcgacagatcaaatataaaaaactgaaactttcaaaggagcatgctattatttaagtcagacacttgcaggtggtactggtgtccatgtgatcactaacaatttagacacaaacacaaaaaaaatcacttgtgtcacactgaaaaagttcatctcggtcacctctaagaaatgtcagcattgtgcatcaggagcaaaaggggccacaagaaggcagcaaccatacaccctctcctaaaagtattcaagtagtactagtcaggtttatgaccccaagaaatttatcgcagagttaacccgaagactttcaagccaagtcacatttacaagcatttttgaaattcttgttatcgaacaagattaaagcatctatatgaacacatacctataaatacctctagtatcacgtctacagctgaacaagtcatttctccaattatcttttgcccatctatttcttcctagtaatatcttcttttttcatcaggaaaagaatgaaaagcattctagagtcatttctccaatgtgaataaactacctctagccattgataccccaaactaagggtcactccaaaatatatatacaactcaaaacaaagactaacagtaaatcttaccggaacataaaaggaagcatccaagatagctaatgctgttggaaaaatccttcaggaacagaaaacagtaaaaagattaaatggatcattgcttctcagtacatgcgtcattagcaaagtttacaatgtcctagacaaaagtttaaaacctaactgcatttccatatgatgataacaggcaa

SEQ ID NO: 59295 - DNA, 354 bp, Populus trichocarpa
  Intron number 1 from transcript POPTR_0007s05010.1 (locus POPTR_0007s05010) derived from phytozome v7.0 (chr-ID scaf fold_7; pos 3184032 to 3184385)
tccatctgcccatctgcaggttcttgcgtagaccccatcaacttgattaatctcatcttcttaatgctatactagctaattagctcagacatgcccaaatggtgccatgctttttattaactttcttttccatctttcgtgatagtaactactcacctatcaaagttttgcaataacctttgaatccaaatgaacaagttttgtttttctttttaggaattgtcatgcttcggacactacttttcactttattctttcaagtataaagttattattcatattcgtatccactaatttatctttactcttcttttggttattttatagaggaacacagtccaaggaaccacaccc

SEQ ID NO: 59296 - DNA, 493 bp, Populus trichocarpa
  Intron number 1 from transcript POPTR_0002s15660.1 (locus POPTR_0002s15660) derived from phytozome v7.0 (chr-ID scaf fold_2; pos 11693134 to 11693626)
gtcaaaatactaggtaagctttcgctatttgtcattgttttgatcgtgtgcgtgcgtgtgtgttttgttttagtgtaaaatagaacaaaaaggtttgttttggtagaaatgatggtttaattagcttgctttgcttgcaaagtttgtttgttcgtccttttttttttgtgaagttgtttgcatggttgtgcgatgtgcggttttcagctttattgttaatggagttattttgggacttggtgagaattgatttttttattcatgttgttttctgaaaattgagaacaatcttgcaagaaaataaactgggagcaattcttcttcttcgctgtaagttgcttaactgtagtgcatttgatgatgctcttttattgttattattattattattattggaatgtgaagatttgaagcccatggattttatgaattcgtagatatgcgaatgcttattctctattctcacagtgttgctaagcgtgtggaatctgca

SEQ ID NO: 59297 - DNA, 648 bp, Populus trichocarpa
  Intron number 1 from transcript POPTR_0010s00800.1 (locus POPTR_0010s00800) derived from phytozome v7.0 (chr-ID scaf fold_10; pos 510060 to 510707)
tggcttttggaatcaattatctcttaaggagacaggtatatattaagaactgtgttttgatttatattgggttgtggtaaattcgggttttgtttttaaagtttgtctttttatcattgagtatgtgaattttaatatttttttgtgcgttcagttattttacttgtgaagatagaaaggagatagttgctatttttgtaaagactgacgctctagtttaatgagtaattatttgtcgaaaatgggtggtctttttttatgatttttggtgtgtgttttgagttattttttgctttttaacgtaagcatttttttagttatattttgctttctggtgtaagaatctagagtttactgcttatttagttgtttgtttagtagtgttttgattgctgtaaaggctggtactttactgtaattggttatatatactttgcttggccttttgcttaagatcaagtgtaattagttatttatttgttcaaatttgtatatttaggggaataatgcagcagccctagatgcagatgacatgccttaatcttaaactttgatttgtattactcttttcttaggcctttgaggtttggttaatgtgtttaatcgaggttttttttttgtagggtaatttgcaagttgcaagtgtat

SEQ ID NO: 59298 - DNA, 376 bp, Populus trichocarpa
  Intron number 1 from transcript POPTR_0001s42830.1 (locus POPTR_0001s42830) derived from phytozome v7.0 (chr-ID scaf fold_1; pos 42858641 to 42859016 reverse strand)
agtcaaggttctgggcagattttgttgacaaaaaggtatgttacttttttttcggtaaataaagggttcatctttctggtttttgattttgttttgatttgaagtatgacacttgattaaacccacattgcaatttgatcagtttctgagaattagaattgtacatcaccagtacaatttagccctaagactgatatcaagtaaaatggtgtgatatgaatctgcagatatatgccctcgggaggaagatatagacaacaaaaggagaagatcaggagtcagccaagaaggatttcattgacagcctcaagctgttggaaagagagcttggagaaaagccttacttaatttgggggcgagaccctcggctacgttg

SEQ ID NO: 59299 - DNA, 903 bp, Populus trichocarpa
  Intron number 1 from transcript POPTR_0002s03300.2 (locus POPTR_0002s03300) derived from phytozome v7.0 (chr-ID scaf fold_2; pos 2024628 to 2025530 reverse strand)
cactgtctcacgccgttaattaatttcatacataggtaacacatagcatcttataattcctctttcttttttctccttgttcttctccccttctctcatcactctccctctcacctgaccggcactgtgaaggagaatacggcgaagctttttccgcatcgataacttccggttaggattccttccttctatcatttattgtgattagctggtttttgttccttaaacaaaacagttcataaaccctagtttttttcagattcggatttagcgagttgatttttttggattttctgtgttgtatttttcgtttatttttatagttttaatccatgaaattccatgttctggctatccgcttgcctgcgcagtgtgtctgggtgtatatgattttgaaaaggatagttatgtttatttatttcgaggaaatagggagttaactagcagtagtttcctgatttttttcgaaataataatgaaaaatagtctagcttgcgaatttaggcagaaattgatctgtttgttgaatattgtaaagtgtggaattgcttaatggacctgcaagcatttaattaattcaaagacatttcttatatgaaatggacgagaaatgaatccttctatgtgtttttaaggctgaaatgtgtttttagtgtatgattttgaatgtctgattgtttggaaatttatgttttaatatgctttgggttatggaattgtgaatgaatatctatggctttgatttgtggtagcgtgactctccatgtagaggcatggtttgaggttggtatttgattatttatttctgcttttgaattgatttgggattagtagattttgatgataagtgcgcatgtttttctaacaggaattctagcggttcttttctgctttaagcttcta

SEQ ID NO: 59300 - DNA, 644 bp, Populus trichocarpa
  Intron number 2 from transcript POPTR_0001s06360.1 (locus POPTR_0001s06360) derived from phytozome v7.0 (chr-ID scaf fold_1; pos 4879942 to 4880585 reverse strand)
atttcactcctgattttggagcaaaacttcgtgcggtatgcctttaaatttagtggtatttttcaagtttgctgctttccatttttttttcgtggtattataatattagttgttgcgtagagattgaattcttcagattctctggaagcatgaaattctacttcgaaatgctttaccatttgatgatatggagcttatgtcaatgctagctttagaccatcgattatcattttggatggcaaaataataattgcatgttttgacagtggggctgtaaatttcgttatgtttccagctgtaacttagttagctgaggggcgttttgaaattgacttgtttgatgaacgtcctttatatgtaatgtgatgacgagaatgaatcttttgaaagtgttgatgttgttgatctgcaactatcagtacaaaatgagcatactcagacattcctaattgttcttgtggagtttggtttggttggtaattaggtagaagtgctgataatttgactttatttccctgagatcccctagcagctgaatagcgctgtccttgttttttttctcttcctttttttgttttatatagctcactgtgcttttgcatgctgtagattgcagataaatacaatttcttaatttttgaaga

SEQ ID NO: 59301 - DNA, 831 bp, Populus trichocarpa
  Intron number 4 from transcript POPTR_0001s16190.1 (locus POPTR_0001s16190) derived from phytozome v7.0 (chr-ID scaf fold_1; pos 13012975 to 13013805 reverse strand)
aggtaattgatttcccctatgttttttcatttatcaagcagttaaatgtatttctttgtttttcttatctattgatttctcttttcttgtaaatgttgagatttcccttttaaaaagatggtataaatgcagtataatcattccaagaatattgttgctatttggtactctattttttggaagtgaacaagaattgtttaaagggaattaaatatgcttggctagaaattagaacgtctcttatggatgatccaaaactgtaagaggctcaaatacaagcctcattttccacctcattttctatttgtttctgacatattgctgtgtctgttctatgacatggctctaagttaatgaaaatagctaaaaggagtgttcagtgtctagccctttttctggggagatgtaagaaggctctacttgcctaatgtgcaaggccattgagaattgaaaattcttaggtgctaagctttttgtatgacttacgtctagccctatgccagggagatgcaagaaggctctacttgcctaatgtgcaaggccattgagaattgacaattctcaggcgataagctttttgtatgacgtcaagctccttaaagaaaattgtttcttcataatcctatctgtcttcttagttgaaaaatcatccacctctcaattttctttttatctttgtttaaagcttaagtagcatgtatttattttccttggacatgttttcttcttctttttttttggttttgtaaatttttttatggttgccactgtcttcctgaagtgagtgctgtctgattatcaggggggctgccatccacaagaaatatttct

SEQ ID NO: 59302 - DNA, 741 bp, Populus trichocarpa
  Intron number 1 from transcript POPTR_0001s02670.1 (locus POPTR_0001s02670) derived from phytozome v7.0 (chr-ID scaf fold_1; pos 2112249 to 2112989 reverse strand)
gaagagctcttccacaaaggctgctttcttttcgggtaatctttaatgtttctttgctgcttggtttctttggagtttgtatatgcatacacatgaagattgtagaatccgggtattcaaagacaaactctattgattacttaaattcttgaaatgcttacttgttcaaaatattaaaaatgggaaaacaaaattaaacttgtcttcatttcagttgcatatatggaaattcaagaatttttcagaaatgaagttttgcttcccatttgatgtgattattcaaaagaatattgagctggaataggcaaagaagaaggtgtgtgtattctaagatttaagagtcattaatcacttgtaatttattaattctttggtctaattctaacatgacattttgaatctttaaatttgtgatgttgaaatattcgtgttaaattctgcttgaatagttctctttatagttgatgccctggatagccagctaaaagaggtgcactcacccttcttgattgtgattgcaggtttagtgtgaggttaaaactagtaagagcagaccagaaaacaattttttgttgaaaataatattcttattttgtttcgttttattctctaatgttatggtattcttggttttttttctacaattctttaatctttgtattcaaaagttttttattccttaattctacgtgtggatattggagcattacaggtgaagtgaactctgagaagctgagtctg

SEQ ID NO: 59303 - DNA, 458 bp, Populus trichocarpa
  Intron number 1 from transcript POPTR_0001s31160.1 (locus POPTR_0001s31160) derived from phytozome v7.0 (chr-ID scaf fold_1; pos 29497618 to 29498075)
ttaactacagcaatcctcaaggtcagtttctatttttgtttgtcttttttttgaagttttgggtttttagtgggtgattattaagtggagaaacgaagattattcaattgagtggttttctgttaggttttagtgttaatgttgtatttaattgagtggttttaatgggtctgaatgatgctgtggtgttttatgtacctttgagcgaaaagtttcagaatttttgggaggggttttcaactgggtatcatgacttttgaagagtatttatatgttcttagaaatcgagacttggttgaatttgatggcaaataatgaatgcattgacacccatgtagttttgcatgtagagaatgttgagtgtcatttgttttggtcttcctggtgtgttgtgttaaattccattcgttcacttctgttttgtgtggaacatgtttacagctgcgagggcattagaa

SEQ ID NO: 59304 - DNA, 472 bp, Populus trichocarpa
  Intron number 1 from transcript POPTR_0010s11610.1 (locus POPTR_0010s11610) derived from phytozome v7.0 (chr-ID scaf fold_10; pos 11806838 to 11807309)
ctcacgaggtcctcggtcgtaactggtatccttttatttattcattttttttaattcttcttcttttcttcttttacttttttcgttactttttctgttttttcacttgatgtataaataaaaaagaagaatttaaatttcactaaatttgttcgttttatttaaatgtttgtattcttgtttggttggtaagaaaatggggaattagattatttgattttgaattcttgttttttatatatatttcgcataaggagatgggatcatcttaaattctctcctcataggttgctgggttgtttcatgcttcgaattttttttttgggatgtgtcgtcggttctctgtcaatatttttgcttacttaattattcataccgtgatttttctatgttgcaagggatctatattaaccattctggaaaatttttcttttcagtcggttcttacaatacagggatccccgtgctcaaa

SEQ ID NO: 59305 - DNA, 903 bp, Populus trichocarpa
  Intron number 1 from transcript POPTR_0007s04070.1 (locus POPTR_0007s04070) derived from phytozome v7.0 (chr-ID scaf fold_7; pos 2442129 to 2443031)
ttctgtttcaagtgttagctcttctgggtcatctggtgttgaagatcatgataataatcagggtagtagtagtctgtttggtggttacaggttagtgtttctatagaaattctgggttcttggtcttggttttcatgttttggtgggatttagaattctgggttgaattctgatttatgaaatggagttgtttgattggtgaatttgattgattatttttagatgtgaagaagaggcttgaactattcttaggtgggttttttttttgagtagtgaaaagaaaaaagagagaaaaaggcatttttttaaatcttctctgaaaatttgtgtcagagttggggtttgttgtctgaggctgctgtgtcttctgttttctcagcttttttttttaatttctgaaacttgctgtttccaaataccttgtccttaaatcccctgtgctctctctctttcctaatttttcctgtcagagtttgattgctttggatgggagttactttctctttccaatcaaatgttcctgatttggatcttttttaccttattggacagtccaaggtttatgggacttagttcttaaccgttttggttttcatttggacttcaaattaggggtgaatgtttttaataagattttaaatataaaatgaagcttatactaattaaggatgtcttctatattgtaaaaatagaagctttgttgttttttttggtttaattgctagttttaagcaatggagtttctgctccatttgcaatatctagagatgagggtttcttgtttgttataatcagctagctgattttgaaatctagatggttaagattacaagaatggattcagtatggttctcaagtgcatctgccaactgtaatccaggttatctgttgatcatagaggac

SEQ ID NO: 59306 - DNA, 926 bp, Populus trichocarpa
  Intron number 1 from transcript POPTR_0007s01040.1 (locus POPTR_0007s01040) derived from phytozome v7.0 (chr-ID scaf fold_7; pos 567810 to 568735)
tttaggtactgagcctgcaattttcttctgttctccttttttgctaaacatgtgtcagaatttcatcaatagttctgtttgctagatgtgatctaaatagttggaaacttatgttaggtagaggcatattttttcttaaatagagaactccttgggaacctatggccatgtatttgacatgatgcgtctgacttgtaaaatttagctttactgaactgtgattaacagttcagtgttcaaaggcaagcatggtaacacaaggaagaggaagaaatgcttatatcccttgctcagtgttcaaagcgagaagttggttggttctatggcgtactgtcatgaaaaccatcaggttttgttatgtatgaaattctcaaatgcaatgcaatctattattccttcagttttcatccaaggatccaagaatgctcagttcatcccagtgtatgtaattcaagtgatgtttggaccagatcgtgtttagtaaattgcatgtgagatgcctgccatccggatctttagatgatgaccatttgttaattgaccaatctcttttgtggtcagcttggagattgatctgttgagggttgctggatttccttaacttttacaaagtttccaattaacttattatacccgttccatacttcattttcactttgtttgagattgaagaatgaacatgaatctttaacactggactttgtgctttcgtttccatcggcacttctgcagtaatactatttcttcatttgacgagcgatctgcaatgtatgtcagcacgttagcttgctcaggagtttgattaatctccaatacctgcatttattgcacctacaagttgccttgttatccatgttggcggaacatttagtaaattattcttgccttgtggctgaacagggatcataaagaaaacacgaactgta

SEQ ID NO: 59307 - DNA, 552 bp, Populus trichocarpa
  Intron number 4 from transcript POPTR_0007s01040.1 (locus POPTR_0007s01040) derived from phytozome v7.0 (chr-ID scaf fold_7; pos 569223 to 569774)
aagaggaaaggactcggaacaagcaggtgtgttgatttatgttttattccctcgtctgcatgcatatgcaataaccttcattttcatttcactgggaattaaatttaagaaaagcagtgattgagataactgtgatgatgttgctttgttgagcccttgattgtcatgcttggaaagaagcatacatcatgggaatttcacctgacagtccatattgatttatttcactaattcaaattctgagttgatggtccgtgagatgacaatcttggagatcgttgctctttgtgtggagagtttcgattccttaatgcagaagaatactggttctttaaaatggacacttctggcatactcactttgttcatcgcgcctctaattttacatgccttttttctttcaaggatcgtaatatgtagaattattcaagccactgttgttttatgttagagccattgcctaaactcaacatgttctccctgtttctggtgtgttgtttcccttctgttttgaacagattcaagcttcaatcgctcaaataattcaaagaca

SEQ ID NO: 59308 - DNA, 194 bp, Populus trichocarpa
  Intron number 1 from transcript POPTR_0007s11410.1 (locus POPTR_0007s11410) derived from phytozome v7.0 (chr-ID scaf fold_7; pos 11778158 to 11778351 reverse strand)
aacaggaaaaagctgtcaacgagtatcatcattattatttcctctatctttattgggtttgtcttctgtttttccgttctgaatcaaaagaaaaaatccatttttcttttgagtatgtaattgattgtttgtgtttgtgtttgtgtttgtgtttgtgtttgtgtttgactggggatgcagctgttcctgctgtt

SEQ ID NO: 59309 - DNA, 1028 bp, Populus trichocarpa
  Intron number 1 from transcript POPTR_0010s20600.1 (locus POPTR_0010s20600) derived from phytozome v7.0 (chr-ID scaf fold_10; pos 18120917 to 18121944 reverse strand)
atcgtgtaaggctttcttttttctatttacttttctctttacggtttttttcacgtttgcttttctttcattaaatatatatattttttgtttccatcttataaatagagaaaaattttaactctaaatttagaggtgcggtgcacaaaaaagtttatatacattccttttaattttccaattgtgcaatcgttattttgttgagaaaagcagattttgaatgttactgttgatcctggcttgcaaaaaccgtagtattgaacaaaaatgtggattcagtgcagagttgcagagattatagtgtgttgtactagagattaatagttttgatgtccttgttctctattgccaacgacttgcactgtgctccaaggggtccttctaatctgtttggttacaaagaaatctcatggaagagctttaatttttcatcaaatataaacttgattgtttactagaaattcgagccttgtgcaggattatgagaaattgttatggagatactgtatatcgaatttgagtggtcttgtaatgtcttcgagtaaatatctatctaggttttcaagttcttttacttggtttttaggcgagatatactatctggtcaggttgttaaccaaaaagagaacatggccagtaatattttcgtgcataatttctcatttaagagtttgaaactttaaatcataacaatttgctgtctgtagagcttgaagctcctaactcaccactacatcgatcctaggccctgtatatttccttttcaagaaattgagagcaagaatcagttatgccagggtaaattggagtgttgaattcagaattctttttgtcatgcatcaagtttatttttcttcatcagtgatggatactttagttctattttgtcaggaagcctttctaaaaaacgttttactatggagtaattgcagctattaataatgtagcaggtttgtgttatattcttttccctttactctgtcttttttgtaggtcgaagagtttccaaaggactatcctttcaagat

SEQ ID NO: 59310 - DNA, 910 bp, Populus trichocarpa
  Intron number 1 from transcript POPTR_0001s05070.1 (locus POPTR_0001s05070) derived from phytozome v7.0 (chr-ID scaf fold_1; pos 3902019 to 3902928 reverse strand)
gtggccacaaaaagaacagacaaggtaaggtttcactttcaatcctatatttggtagagtttgtgcttagttagttagggtactaaggaactgcgcagagtttactaaacagttaatgactctgaattaaatgaaaaataaaaaaataggctgctaaaatgaacaaaatctgtagttaaattgagtgtgctaatactgtttttgggctagtttccgaggggaattaagagttcaattctgaaaaaagcttattttttttgtgtttttaggttaattgtatatagttttaaatttctagtggagtttttaatgtggttagtggttttttttttgggaatttaataggtggctgcttatgtttatgttattattgttgctttttgattgctctgattgttgttcctgtactttgatatgtgaatttgctcggcattctttttttttccatgaaattgctcaaaagaagaaaagtaaaatgcggggttgaaatctttctgcaactgaagatttaattaattaatttatttattctggttttttcaatgggtaattaaaagcttaaaaagataagattttagactgtcttctcgctttattgtcttcctagggtgggaaattgaaaaaagaaaagaaaagagtgatagaaatgttttgggtgctttttggttttgaaaactgctattggattgttttttgtacttgaatatttaatggggccaaagtgcttatccattttgataatatttcaataaaatttcacttgtttgcattgtttgtatcatataaaatcgtcatgttattgatggcaatcagaaagagtaacatgttgagagagtttcataaagtttgaaggttaataaataactgaaatcttaactgagagaaattaattaattttggtgcaacagaa

SEQ ID NO: 59311 - DNA, 586 bp, Populus trichocarpa
  Intron number 2 from transcript POPTR_0010s11300.1 (locus POPTR_0010s11300) derived from phytozome v7.0 (chr-ID scaf fold_10; pos 11611907 to 11612492)
cactgcccagacgggtttgctggaaaaagtctcgtcaatttcactggattcttttttttatttttaattttgaatgttcaagatagtttatacacatctcaatcaattttaagattataaaattaataatcatataaattttgaataactctaaaatttataattaatttcactagatctatttgcggtcagtgttgggctgagtggtgtgtccttacacgaggatattattaataacatcaaataaaagcactagattttttccatacccatgatggggttttaacttttaactacaaataaaagtggggctataacatatcttcttttttttctttttttgaaagcgaggcattccacttaattcttacacattaaaactaattaatttatttaaaggttcttgaataataataataataatacagagaacaaactttctcactaacctcactgaacaacgagtattacttttatttattttatttttatgagacaataattatacatgaccatgtatgcacgatcacgatccccaccgcattaacaagagcgggttgggtggacttgcaccattgattcccaa

SEQ ID NO: 59312 - DNA, 1068 bp, Populus trichocarpa
  Intron number 1 from transcript POPTR_0010s07750.1 (locus POPTR_0010s07750) derived from phytozome v7.0 (chr-ID scaf fold_10; pos 8722230 to 8723297 reverse strand)
cccgcgctcagggagatcctgctcaagctataccggtaagtctttctgggatgcctgtcacctcttctagctttttttctttttttcaaatgtaggttttcaaggattcattaccaccacactcaagaacctgcataacttcaatattaaatttctagatagatgaaatattgaatctagaacataagaatgtatattaccaagatattattgtgaaaacataagattttgtggctaaacagggagggtgaaggtagctttcctcttgaatgatgactctataattgtctggtggataaaatagaatgtgttttccaggtagataagcaatgaaacgcaatagttggtgggtggggtaaagctgaacagctccctcaagtggaaacagcttgtgatgggctgtttcttttaggtttgccacataaatgagtgagcatgcaacataataaaagataaaatgcttctccccagcttcatggctgagatcaaaccatgatctatgattgatgacatcatatcactgaagaaagcaaaacagttgagaactcaacagaacctttcatacgaaacaaagccaagcactgaactatttatctaaattccacaaatcgcatgtctcaattgattaaatttcttccctttaagataacttctccgtacaagatgatttatcattggcttacccgaaataaaaggcaggaaattaaaaaataaatgaatgataagttctgctaaggtatctcacggacttctaatgtaaaaagtctctccaaagtctatggaaccatttcagcatatttatacaaaaatagaaaacggaagcaattctagatatccattctctagtagtagaggaaaggaaaaggaaactcggaaaatgctacccttgaaagtagtaggctttcattgctctggacgaatttgaagtttctttcttctccttcacatcccaagtagcaaatactgtatctcaagttgcaaggatgattaacaaaaactatgttgaaaattgatgtgcttcctttcatgatagcgctgagaagcctgtggagattgaccatcacttgt

SEQ ID NO: 59313 - DNA, 841 bp, Populus trichocarpa
  Intron number 1 from transcript POPTR_0010s12100.1 (locus POPTR_0010s12100) derived from phytozome v7.0 (chr-ID scaf fold_10; pos 12187023 to 12187863)
ggaaaacaggcttgttactcttcttttgatctcctcaaatttggttatatgatttgctaatttcccccagtttctttcattttcccttaattttttttcttgttgaaatttcggtacacaaaatggttgtcaatctctttgagttggctgtctgagacctctacagaagtgaaacagggaagcaggcatgaaattttctactgaaagaaattaaagacaggaaacaaaaggattttcacaattgtgtttttttcaaggacatatattattgctatagaaatgagaaataaacaagaagagggtgaaatttgttcacctaattgaagccgttgttaatatcgatgggcttggagttcaagaatgcatcttgaactatcatgaatgcctatgagggggaggatagccttcttacttccggttcccttttcataatcacaaatatggaggacggggtgtggttttttgtaggattgttcgatagcttggttcttgattaattttgcttgaaactttatggttaatgatggactgctactgtgttctcatcatcattttatgagagactatctttagggttctctgtatttgcttatcttgatatgaagctttgcttcaatatattaaggtgatctagaactagaaagcatgaataagtatgttataattcatcaatataagttaaatctgcatatagtcactgcatatataatagaaagttcaactatacgtaagttttctatatcttgtcctttttgttcttttcggtgtgttctctcagcgctaaaatcacctcaactttggtgtagaaattgaagactcgagtggtgaaaaaaaactgcaa

SEQ ID NO: 59314 - DNA, 595 bp, Populus trichocarpa
  Intron number 1 from transcript POPTR_0010s13870.1 (locus POPTR_0010s13870) derived from phytozome v7.0 (chr-ID scaf fold_10; pos 13585953 to 13586547 reverse strand)
tcgtttctgattaccttgaaaagatcatcaggtacgtgcggcactttctttgaaaaaaaagtttgaaactgtgaattagggttttgttttgaattttttattcaacggcccaatcactctgtgcaggtgttattgtggcaacgaattgttagggcaggtaagtaaaaatcttatcttgtcaaattttaacttcattgacttggacagtgataaatgttgtaagttgtaactttagaattaaattaattgtaaacactggtttgtgatttgattattgaaagaacattacaaggtttcttactgattcgattccgaaagataggaaaggtgtcttccggttttagggctagttaccttgctcaatttacactggtttgaatgaatcttagaatgttatcactttgtaggcctgagcaatggcaatcaatccgacgggatgcttcgtttgaacttatgtttccttttgatgcttgtattgtttttttttttttttttcttttttgtgtaaatttcagattttactgacaattgttctgtgtctttcttctgttcaaatacagaaggtccctacttccattgttgagctctcaattgt

SEQ ID NO: 59315 - DNA, 799 bp, Populus trichocarpa
  Intron number 2 from transcript POPTR_0007s00930.1 (locus POPTR_0007s00930) derived from phytozome v7.0 (chr-ID scaf fold_7; pos 498021 to 498819 reverse strand)
aaaatgtcagtgagtaattgattagttttattgatgctcgttatgtttcgcgccaatgtgttgtagtttttagggtttttgatgaaatgatgagagtgagaattaggtaaattcggtgaccaatcaataaaagtatccaattgataatatgattgaattattttgctttggtagacatgaagccagagtggatattattagtctagcttccatttagagacattagagatttcatcccaaatagaaactgcgtgatgacagttattatgattattgtatcacaattagtcatagttggtagcccattcatggcacttttcttttaactcgcatctcaatggtactccaatgaaagtacatgactggatattcttaattggattactgaaaatgaagttaaggccatgacataggttgaagctggcaatgatttagttaagcaattctcatagatttaatctaaaactatctgaggtggcatcaaatggcttttaaccattggtctgtaaaacatagggttttaagcagtttccatcctttctgtacaactgtccttttgattatgtcgtaacgctgactgcatccaatccataaacctggaaacaaaacaaagtttgttcccttttgtcaagatcttgaataaaaatccttgttcgtcacttaatttgaaaaatatctacaaagggaagattttatgggagaaagaggtaaatgttatgactttgatgatattttatgttacatcacttgtatttgtcatgcaggttgtggcaatcagggatataattcctccaccgca

SEQ ID NO: 59316 - DNA, 386 bp, Populus trichocarpa
  Intron number 1 from transcript POPTR_0007s00930.1 (locus POPTR_0007s00930) derived from phytozome v7.0 (chr-ID scaf fold_7; pos 498922 to 499307 reverse strand)
gcatcgtctggtaactaatctttctctttaaagaagatcccactttgttttttcatatatatttgtgctttcttggtttggttttggataggttgaagtttttgtttattaattaatggataaaacccacttttttccttataaaagttttgtttttttgccgtgctttgaggtgaagttaggttatattatgcaaaatctgtgttttttgaggtgcttttgtaataatttgtggtttttagtgtttgtttttggataaatttgaggtgttgtttgtttatgaattgattctttgtgggttcttttaaggaatgaattggagcttttgttgattctgtggtggtgttgttgtttgtttgctagttcggctttgaattctgagacaa

SEQ ID NO: 59317 - DNA, 686 bp, Populus trichocarpa
  Intron number 1 from transcript POPTR_0007s15120.5 (locus POPTR_0007s15120) derived from phytozome v7.0 (chr-ID scaf fold_7; pos 14760610 to 14761295)
tagaagaacaagaggataggtctgcatttatcaaggtctgttcttccttctccccatttatacatctgggtgtaagttcttgtttcattttcttaaagaacagactttgcattgcttgactttgatgcaacagatctgtggtatctacctcatcgagaagaaacctgtgatttagctattagtcatttatatttcttgttaatatgcagccaatcaatcctatatttatcgttttgtaatttattggtttgaagaaacctgtgattaaaaatggtgactctttgttttttttgaaatgttttatgataagtttgcctataatataacattatgtgtcgtatacatgcatgtgcttttcatgatttgcttaggatgcacccagaaactggatgagacatgggaagtttctactttcttttttcttaattcaattttcttatgccttgaatatactggaggccataatctgctgaatttgattgcaaagtttgattcttgctcaaaggaacatacaaaattttcaaagcttgatagtatttagattagtgtcttcaaatcattttcaacatcttgatctatgtggtcttaaggtgttttcaatcataatatacaactatcaatttagctgcaaaagttcctaatgtttgtattaattagcttagtttcttaatattcttagatgacag

SEQ ID NO: 59318 - DNA, 194 bp, Populus trichocarpa
  Intron number 4 from transcript POPTR_0027s00320.1 (locus POPTR_0027s00320) derived from phytozome v7.0 (chr-ID scaf fold_27; pos 116238 to 116431)
ctgtggaagatgtgtcctagttattattatgttttttagcctggggattttgtttctctcttccaacattggtttttatttctttttctgttgtttgttttgttaatattcttttgaggtaagaacttggtagctttttcttgacgtgttgattgacaggatcagatttttttttctgaagaggctgtttttga

SEQ ID NO: 59319 - DNA, 755 bp, Populus trichocarpa
  Intron number 1 from transcript POPTR_0007s08600.1 (locus POPTR_0007s08600) derived from phytozome v7.0 (chr-ID scaf fold_7; pos 7455310 to 7456064)
gagttggtgaaggccatcagagtcattcactgcaggtatgatcccctttgcctaattgcttcctcaaacgcatatttacatgtctctgttttgaatgattttgatatctttaaacgcatgtttgctttctgtttttgagatgtaatgggaactcctataggacttttgagcgttcgaaatgtttgcagaagtattttagtgtttccgatacatgaagagaggctcttggtgtgatttttctattgaatacatggaaatggtccttttggttgtgggggtttgaatagaaaggtagtattatttgtgcaattctgggtgtcaaaaggtttcagcttcagctgggtctgttttaggcttcctttggccccaggttgcataatatgaaaactatgatatccaggatttgggttcttgaagtctctttactatgcttaaatctggaggtagttttatattgtttcgaataaatctgctcctcttggtgttttattaaaatggagggactgtaggttcttgttttgttcataatatcataatctttgcttaaataaacgggttcatgtgatggatgttgagacaatgttgatttgagcctcaggggcctggtatttgggttgagatggaaaagttgaggtttgaatggatttcaggccattcgttgatgtttatgttctttcttgggtaatgttttaatgttattgttttaggctttaagttgatgatgactactacagttgttaatgttttcaacagcc

SEQ ID NO: 59320 - DNA, 958 bp, Populus trichocarpa
  Intron number 1 from transcript POPTR_0001s31700.1 (locus POPTR_0001s31700) derived from phytozome v7.0 (chr-ID scaf fold_1; pos 30056737 to 30057694 reverse strand)
tctctagatatctcctctgtctccgacttcaaaaggtaagtgactgatctgtatttgtgtcgatttgttttgaattgtgtagatcgggtgaacggctcgttttctgatttgaaattggttgaatcgtggattttttcttcgctttatcggttttgtgttaccgatctaagttaaattttggtgtattgtgttgttgaaggttagatctagaggtttttggtggttttgtttggatcgtttgatttgatggcttgatctggttttgttgtgtatagatctgctgagatgtttttagatctgttgatttgacctttcagattttgattttgattgctatctcgtatgaacttgaagaaacgtagaatttaaatcgtgtgcaaattggacattttatgtggtgattgattgagatttagcttcagctgtggtgtcttggattcattttcaatgacatttgtgttgtttttaagctttaaactcttattttttttcataagatggctggattctgtgagtaaatggtaaacatgctgattggaatttgaatcgtgtgaaattggaaatgatgtgtggtgattgcctgagattcagtttaagctgcagtgtcttgaatttatttttttaatgatatttgggttgttttctaagcttaaaattcttattttttcataagatagctgaattccgagaagagtaaaattgtagtgaatgctgattggaatttgatgagtaaattttattgtttgcatttgtttgaagctttggatggtaaatgatttggaatgattaattggctggtagatttcattttgtgaacaggggagaaattggatatgttgtagttgattattctttatacagatggctctgtaaattatctagaaagatttttctgtatttatggttgcttcttttgctcttttttattttttatttttttgtacagaatttgtagaaa

SEQ ID NO: 59321 - DNA, 452 bp, Populus trichocarpa
  Intron number 2 from transcript POPTR_0010s12060.1 (locus POPTR_0010s12060) derived from phytozome v7.0 (chr-ID scaf fold_10; pos 12154881 to 12155332 reverse strand)
tgttcagggagaatactgtggccaagctcgccgatgtgagttctaatttatttgtttgttttgatttgacgaataagtttattgagagaattgatatcaaattctgtcataggctagtataacagatttcaaaacttcaatttgattgaatttaagttgtgaagtatggattgtctatatgcactgcattctcgctttgttagcattgcattgatttgtaaagagagagcatttttatgaatttgatatcagcatcatcatgtgttttgtatgtgacttgatgtacattctggtatttgattatctttagtgcttgtctcccatgtattctttcgatcatcgtagatatctagtctgaaagcttaagaaattattgattttctttgccattgttctcaaactaattattggctgttgtattcttcaacagattccactgtctcatatttctg

SEQ ID NO: 59322 - DNA, 191 bp, Populus trichocarpa
  Intron number 1 from transcript POPTR_0007s09170.1 (locus POPTR_0007s09170) derived from phytozome v7.0 (chr-ID scaf fold_7; pos 8387037 to 8387227 reverse strand)
ttttttcccccttctctctctccccttctctttcggtaatctgtcatcaaaactttaacaaaatagagcaaaaaaaagaagaaaaaaagaagctcttttggtctcttaatttcttcttcttcttcttgtacgtttcttgattatttttcttttgtttttgggcttctttttgtttcttttttaatgaacag

SEQ ID NO: 59323 - DNA, 898 bp, Populus trichocarpa
  Intron number 1 from transcript POPTR_0010s15900.1 (locus POPTR_0010s15900) derived from phytozome v7.0 (chr-ID scaf fold_10; pos 14977286 to 14978183)
aagcaaaaattggaaaaataaagggggtgaaactgtaaatgaaaagatttattatattcaaaacctaatttattggtctctctgattctcgtgcttcattttctggagttttcacttttatgcttatggacattttttttttaaatttttttaatatagtaatgattttttcttgggccaattgtttaggttcaaagtaaaagcttgtgtagaaaagataataataatatacctatacctgtttgttgcctaagaatatgcttgattgattctgctgctgcttcttgcctattccctgcattcacgtaaccgaaggataattctggaaaatggcattgccatgtcaggactcaggagtcgaggtggttgagaaaacattaagccttttcttttgcacattggagccccgggggctcggggggcgggcaaaggcagcaacattgaaagggaaatgctaaagacagcattgcactcttctccttctatgtgcaaacatcacgtgatttgatctaacgactcacggacagctgaggctggcaaataccagccgagagtactgctgtaggctacataaaccgacaaaccctaaactttgatcagctgaacttaaatctaaaataaaaagcctggagcaataaacacttggctgcattcctttcatttgtcctaaaacctagttttggactctaatacaagaagatattgcgaagatggtttgttttgctcagtagccaattatatgatcgaaaattaacccatcaaatttttattttgtttctaccagaattactctcgccttcaaataaaaggattataaataaaattgaaaacttttcttgctggttgctgacactaattattcagagaatttaaataacttggcagaacttggccacac

SEQ ID NO: 59324 - DNA, 419 bp, Populus trichocarpa
  Intron number 1 from transcript POPTR_0007s05230.1 (locus POPTR_0007s05230) derived from phytozome v7.0 (chr-ID scaf fold_7; pos 3366810 to 3367228 reverse strand)
agaacttgtgaagagaggcattgttccgtttaaaggtacattttactccttcaaagcactgtttttgcttcttctttttctctcctcttgttttctaggggactatttgttatcagaaaacaacgtatggcattgtcttgactggccaaaatctcctgaaatctttaggaaggatcttgataccaattattgttcttaggtttacgaggattccaatgctgtcaaagtatgggggtttttttttcctttttatagttgcgtcatggagtgcactccctttttttagcctcttttgttttggtcgcaagcaaaattccaacaactattcacattttgttctgttctacgtaaagtattatttggctcagcatccttgactcccccctgtgtgacaggatttctttgttaatgtctttcag

SEQ ID NO: 59325 - DNA, 508 bp, Populus trichocarpa
  Intron number 1 from transcript POPTR_0001s16620.1 (locus POPTR_0001s16620) derived from phytozome v7.0 (chr-ID scaf fold_1; pos 13402520 to 13403027)
tcacatcatctcccccaaaccccatcttccagctggtcagtgctctctctctctcttgagttttttgttttgcttgagcgtgaattatgtgagtaatgcactagttgcgcgccttttatgtttggttttcgagaaataatgaaaatggaaatggatttcaggtattattatgtcattgttgctgggttggatttattttaacttatttttccggggacgtgatttttatgctatatctagttaagggctactaccaaatttcaaaattttgatgcctaactatcaagcatacaaatatagcttcaatgttttgcatttattctatgtccgtgttcataaagctttgcagatttttgactgatcagaaatacagaattgtggtggatagatttttatttcgtttctcgaagaatagtggaaatcttatgtatttatgtataaatctgaagtaatttcttgatcctttgaaccaggaaaattggcctctcttctgtttagagcacggaag

SEQ ID NO: 59326 - DNA, 588 bp, Populus trichocarpa
  Intron number 2 from transcript POPTR_0001s16620.1 (locus POPTR_0001s16620) derived from phytozome v7.0 (chr-ID scaf fold_1; pos 13403158 to 13403745)
gtgacaaatttcttgaactattgtctgctcatcaggtatgatggtgagtttgtcctgttattttcccccaataaatattgttttctttcttggctggctttacttgatttaaaagaatgtaaaactacccaccatgtattgtagagagtcacagcttttctgatgcatgaatatggggggttgccacaggggacacccctttgtggttttgtgcatccatcaaaacattactgcgtaatctttattgctaagccaaatgaacctgccatgctgctttctatgttcagcaaaaagtcatggatttgataatgagttggtttggttaggttttgtgtcaattctctgtgtggacttgaaaagcaatttataattaggagatgtaggttaccacagtcatcatttggtcgatgatgtcataatggaacatgataaaaatcacatccattgatttgtttaacatttgaaattcaagacagattgaggtgctctttatgttttggtttctctgcagcaaggattagtttggtttccttttcaggctactcaatttccatctgattggtaatactcttgtctttgcagggaaac

SEQ ID NO: 59327 - DNA, 703 bp, Populus trichocarpa
  Intron number 1 from transcript POPTR_0001s07900.1 (locus POPTR_0001s07900) derived from phytozome v7.0 (chr-ID scaf fold_1; pos 5990119 to 5990821 reverse strand)
acttcaagtctcaagttcctctccacaagatccctgtaactttctcttctaccctctctcaattctctctctccctcttatttctataacatgggttttaatttttgcttccagcactctactggttgtgtctttgttttattgatgatctccttttctccagtttaattctcctaatcaattgttgaaattgtgttacactttcgatgttatagcttgatctgggtgtgtttatttgctgctttttattgactgttttacttgttaattcacccggtgtgtcttcgttttgagtcaatgctgaggttgctgatgatcttgtatgtgtattgctgtcctcgtactaggattgatttgaatgaaaattcttgagataggaatttcatgctgtgtaactgcttcaggtttttgctcatttatcctcattttgatgatctgttgatgagtgttttattaaattttcttgtgagcttggtttcaggttggttttattttatgtactaattttgcaacttattgcatcaattttgttgactaggttatcttcacctgttgtttttgtttcttaaagcacagaaaagtggcacgacggtgtattttcttgccgcttcattagattattctgttcttagcattggctcatagattgaacatctagctcattttctcccgttgtgttttcctcttagattggcacaaagca

SEQ ID NO: 59328 - DNA, 749 bp, Populus trichocarpa
  Intron number 1 from transcript POPTR_0010s05730.1 (locus POPTR_0010s05730) derived from phytozome v7.0 (chr-ID scaf fold_10; pos 7216599 to 7217347 reverse strand)
gatctatctctctctccgcctatcttacttttcatgtgcgtttctcctctcttgcacaattttaattattttttaatgcttcggctttcattcaagtttaatgaagtaaactacgtatttagctttgatcgagcaaggattcactacttaatttttcttttcattaataatatcatgttgcagtgattgatgttctattgaactcttaaacagcagctaacttcaaggtctggtttatgtttctggtcgtttccttctctatcctcgaatctaagcagccacagctgttttttaggaaagaaaagggtaaggtttaggagttgttagtcaaaataggcacggggattacttgataatggaggtactaagctgagggaggtaaccaaatcgtaggcagggagcacatgcttttgtttatttgatttgattttcaagcgttttcatggctagttggtgtgtatggtaaattcaacaagtatggattgacttgagatgtggtttgggaaggagaagtttcgaggcgctctttagctctgtttcctggcgatttttgtttcccttttcttttccgttgtcactttagggcaggattaccatctgctggtatttaaaataatcataattaatgctgtggttagttttgcattatttaggaataacaaatttaaaatcttcaagactgatttttcttttttgttgttctattcatatcaggtttggcgttcctttgacctccttgtaagcagaca

SEQ ID NO: 59329 - DNA, 450 bp, Populus trichocarpa
  Intron number 2 from transcript POPTR_0002s18120.1 (locus POPTR_0002s18120) derived from phytozome v7.0 (chr-ID scaf fold_2; pos 13989749 to 13990198 reverse strand)
cgccggcctatcctggtatgttttgttcctcctctccttacgtttaattcatggtaattgttaaattttattctttctggttccgctgatacttgctcatgtttctgtcagtgattaaggttaatcaaacactgtgggaaaattaaattgacaaattgagagaatttaggaaaacatgataacatgctccgtattcattaatgaatctgcctgaaacttcaaacctcgtacgaccaaaatctgaaatttgaggtgccacaatctaaaacatgacaagccacacatatactttacccataaaaatgttttcagtgaacccaaaagaaaagaagagaagtttgcagagaatcacaggctttacaggataaggaaaagactagacaatgaaagacttggtcatagatgtgggaactggtttctcatgcaggtgtggagcacgtgggaggagat

SEQ ID NO: 59330 - DNA, 650 bp, Populus trichocarpa
  Intron number 2 from transcript POPTR_0007s00840.1 (locus POPTR_0007s00840) derived from phytozome v7.0 (chr-ID scaf fold_7; pos 424960 to 425609)
catagttttgctcatagcactacttattttcgctggtaagtactttcctatgcttctttggattcgttgtagaacatgaaatgtgtgcattgtaagatcaaaacataagattaaaagaaaaatggaaaagcgcaagaaagtatcttcagtgactttggtttcatggaaataagcccttcaactttttagtttttctaattgaatctaattctttaattttattagcaactttaatgacttaaaaaaatccgaagctaagatggataaaatcaaaattcacaaagattctccatgcacaatcttttttttcttgaattttcgtaagaagtttttaccttttggtgcaatggatttgagatttgaaaaaaaattgatgcttccatcgatacatagtaaacttgtaaggatttatcaggaggctaacacaacagaaatcacacttcatttataaaataattttgatgtcgcaatctatcaaattaacaatatttcattctgccattgattgttcttgttgtttctcgacacagtgatatttcgtgcaatattattcctttttgggctttcatgcctcgtgacttatttaatctacacatggcgaagaaggcacttatcaatgtatgacacaattgaagagttcttgcagagta

SEQ ID NO: 59331 - DNA, 537 bp, Populus trichocarpa
  Intron number 1 from transcript POPTR_0001s28930.6 (locus POPTR_0001s28930) derived from phytozome v7.0 (chr-ID scaf fold_1; pos 27664245 to 27664781 reverse strand)
cagcttcatcacaaaccaaaacaattcggtaagctgtttctctcatgttatcttttcctttgtttgccaactgaattacctttccgaaattatcaaaaaaaaaaaagaagaaaaattgcaaatgaaaacacaacagtgtagtcagcgaagaaagttagttaggtcctttaaagagaactgctgctaaattttgcctggaaaagtttggattctggtttctttctgcagtcgatgtaaattaaatggaaaaaagcttataattactatcattttatttaatgattttagtcgttttgttcatttctttgatattggtaaagagatttcctgtacttttggttttttgctcccaaaaattatttttcttatacagtgattatttagaaaaagaagttcacgctgatgacggattcagtaccatgtaaaagcaagccttgattttagttttaattgaacaagtttattgatttatttattttttttcaaaatatttctaggtcagaggtatccttttgcattggaactcacttgattcca

SEQ ID NO: 59332 - DNA, 675 bp, Populus trichocarpa
  Intron number 1 from transcript POPTR_0010s20510.1 (locus POPTR_0010s20510) derived from phytozome v7.0 (chr-ID scaf fold_10; pos 18063661 to 18064335)
cggtcctctaaattaccctaatttttctaatttttcttgttgtttttctgctgggttttgtggtattttcttgatgggttactgttctttttatatacgattggaagtggaggaggctgttttaagaaaagggtacttcaggttttgtgttttttttttttaatttcctggcttcttttcgttattgcaatctgttatattccttttacggaggcttgagtaaattttgtcttgggttactgagtaatgctgttatcgagttgtgaaaaatggaatggcttataaaaccttaaaatcctccagtgctgaatgaaattgggtgttgtgtttataaccttttgagtttcgacaaacctggagctggcgatgtttgttatgtaaacaagtttagctgtaaatttggccccgtctgttttttatttgtcaatgtaatatgattcatgctaaaaaattcaagtatattatcaaactcaaaggcattccatggatttgagaaataattggcatttgaaataatcaaagaacgatattcaacttatagtatgtagctaatatatagctcggagggtagactatttccgtggctgaatatttgattcctgtgttgctctgctgcagcctggatttgttccatctgacattgtcaagattttctttgtgtttcaggtgacattc

SEQ ID NO: 59333 - DNA, 747 bp, Populus trichocarpa
  Intron number 3 from transcript POPTR_0001s47700.1 (locus POPTR_0001s47700) derived from phytozome v7.0 (chr-ID scaf fold_1; pos 47867899 to 47868645)
cctacctcctcctcagcttcaaccaactttggacggtaactacttaacattacttatagttaaataattaacttcttgctacagtctagatgatgagctgcaagtggctaacaagttgtactataaacgataatcaaattcataagggaaaaatattattttcattagactcagtgcgtcctagactgttgaagtagaataggatgtgcgtgatgcaatgtaaatgggttgaggatagagtagttgaagattcaaaactcatttatctattgcaagttttgcatattaatatacatactacatctggaaagcctttgaaatggatgccattgtggttaaggcatggaactaaaatttaggatgtcatgatttcatttacacgaattactgtggaactaaatttcgaatgtaaaggataatacttctttcacgaggatcccacagctgccctccttttgattcatttattaaaaggttttccttgatgtagaaaatggtctgtgataccatgtttgctgtgacgacactcagagagtacaacagtaacacgagaagaagaatttcagcattgaatgaaatcttctagaacttcacaatttttgatgtctagtacaagccaaacactgtaggaactgttttttttacaagaactaccaataaatctctcgtgagcatatcttttgggttatgttttctacatttcaaattgcaggaccaccccaaagagtgttgtcaaactttttgcac

SEQ ID NO: 59334 - DNA, 771 bp, Populus trichocarpa
  Intron number 1 from transcript POPTR_0007s08950.1 (locus POPTR_0007s08950) derived from phytozome v7.0 (chr-ID scaf fold_7; pos 8181789 to 8182559)
aactaatttgctgaaagatagatcattcttttaaggtaaattgcatctctcaattcttttaatttggtgggtgttttttattcctgtgtttttaacaaaggttcataaaaatgagctcaattttacctggttttgatatgttgagtggtgaattttttaaattcatgtttatgagatcgatgcatgtcctagtgttcttgatttggataatttcacttctctactttctgatggatactgttatcagttggcagacttgattttggttatttcttgggacttaagaataaatttgagcttagtgatcctttttcaagtatattcactaaaatattgtcattcttcgatcaattcctcgctgttgatgacatggggagaccactttatgcataggaattgtttcttgataatggagattatgtagtccatttatattttcgaagtaaaatactgaacatcggtaatttgttttgttgataacttgttaacatgatctagtaaaaacaaggcagtacttgctttgctgaaaagttaatcatgtgtttagagtggaaaagtagttagtagtattcaacttttttacctcttacgttcatgtttaagctgatgggcatttgatatcatatctcttccaatggccatttaaaggatgtgttttgaaaaatcttgaatattgctccatgtatgatctgggttttctgtatagccttgcaaagtgttgcctttcatgatcagaggtgtttttttttttttttaagttaaattttttta

SEQ ID NO: 59335 - DNA, 544 bp, Populus trichocarpa
  Intron number 1 from transcript POPTR_0010s22400.1 (locus POPTR_0010s22400) derived from phytozome v7.0 (chr-ID scaf fold_10; pos 19344531 to 19345074)
ctctaaaggaagttttcaacagtttcaattctcaggttctctctgttcctttgcaagaaagaacggatttcaagttcttgttgtctttttatttatacttccttttggttatgactttttttaatcattttttcttagttttgcatgccctgtattttgacaagttttttttttttgcttttgcattattgaatttctctttccttttcttttcatggatttaaagagtcaagaattgctgtaataacagtttatgattcgagaaatgcctggaaatttttgcacctctgttctatagaacaagtctgtttttcgtatgtccagttaagtattttttttaagtgaaaagattgtcttaacgatggtgttggaaaggaaaacaccgaacaatgcccagtaaagagaaaataattaggacatatcagcgtggttggttttctttggttctgttctttcaatcttggagcgtagaaatggttgcttttatacttttgaccttggcttttttattttttagaagtttcagagagtagaaagaaggttg

SEQ ID NO: 59336 - DNA, 173 bp, Populus trichocarpa
  Intron number 1 from transcript POPTR_0010s25520.1 (locus POPTR_0010s25520) derived from phytozome v7.0 (chr-ID scaf fold_10; pos 21172089 to 21172261 reverse strand)
tcagcttcatcctcatcaaatcccactacaccgcagtaattattttctctctatatcttttcttctgatgaaaattttaattggtttgtgtaaagttctgatcttttttggattttgttgatgggttttgatttccaggttgttaagtttagaggaaaggtttcaacttgtga

SEQ ID NO: 59337 - DNA, 560 bp, Populus trichocarpa
  Intron number 1 from transcript POPTR_0010s22430.1 (locus POPTR_0010s22430) derived from phytozome v7.0 (chr-ID scaf fold_10; pos 19354706 to 19355265 reverse strand)
acactttcttattcaacagcgtgcagcatcacaaggtaattaaattgccaattggcatctaaagttttgattttttgaatattgtatgataaagtttttgtctttaccttgtcaagagtgaatatgatttcgtttttggctcaagtttgatgataatttattataattttacatttttcttggtatctttgatagaggggcaaaacctatttgtgagttttgctcattttgtacttctagttagtgcaagctttttgagtgaagtcacttggactgagatatcaaagtctaagttaggaccaagagtaagttttgatttctccgtacttaggactacaggaattgaagaaggagaagggctacccttgtagtgtaacttaatgcttgatatttcttccaatgaactgaaatgattgttgttcttgtaggaatgttcttcattcttttgtatatgggtaattttagcagaaagcattttatggtattgcttaaatacaaggctggtgctggctattgtttttgcaggggttgcggttctcttacaaccttgctgtggatag

SEQ ID NO: 59338 - DNA, 682 bp, Populus trichocarpa
  Intron number 2 from transcript POPTR_0002s20560.1 (locus POPTR_0002s20560) derived from phytozome v7.0 (chr-ID scaf fold_2; pos 16647179 to 16647860)
aggtaacttccttgaaccctatttctttttcttattttcttttgttttagatatggatggatttacttgattccactattttaccaaactatggcttgttcttagtaatagttttgctacaaatttttgcgtcattttgaaactacaagctctaatgctatcattcacttaataaaataataactggatgtctttatttcttttatttcatttgaatcttaatctgttgtaaatacttgctggagaaggttgtggttcaatatatatatatatatatatgttgtttgtcttttctgtatttaattaatttctctgcattgaacagaatttttatagcgtattatgttacctcaggactcctgggaaatctgtgatttttcttttcctagtaaccaaatcctgctttgtaaatttacctaattaggttgatatctttctttacttgcacagtcaagttattgcaatttcagtaatcaatagaccatgctatgctagtatgtctttgcatgaaaatttccaaggcaagcaggtgctgtaactactgtgatttgtctattatttgttagcagtcgtactgacaattaacttctgatatggatacattttgtttttcatattataatgaacatggcatagatatactaacatctttttccgcctttgtatcttttgcagtaggcca

SEQ ID NO: 59339 - DNA, 579 bp, Populus trichocarpa
  Intron number 1 from transcript POPTR_0001s26920.2 (locus POPTR_0001s26920) derived from phytozome v7.0 (chr-ID scaf fold_1; pos 25910567 to 25911145)
gaacaggtcaaaaatttggcttttagttcatttgttttcttaagtcttttttcttgattgtgcaaacgaaaaattagggatgttagtcattagattttgattatttctaatggatgaatgaaatgctttgattaggttctatctctttagataaattgttggatgaaatgcataaattttgagaatttgcgattttgttgtttttggaatgtttggtgattttcttatcagtgttttatgtagaatttggaagtatatgtggaatgtaattgaactgcagatcaatcaatagggtggatgcattaattgatacccatttctagtttaggtacctttaagttattttttcttatgttttttatttgatcagtaaaatatatgtaatttattgtgatctgattgaaattttttgagggcattttgacatttgatttgcattttagctctacacggctatctttagtgattagatttatgttcttttattgtcatatatctgcattttatcatgctcgatttacaatttcttattgcttaagtttgcggaacaggtgtttggagcagagtacgtgtcgctgc

SEQ ID NO: 59340 - DNA, 911 bp, Populus trichocarpa
  Intron number 1 from transcript POPTR_0002s02580.1 (locus POPTR_0002s02580) derived from phytozome v7.0 (chr-ID scaf fold_2; pos 1477047 to 1477957)
ggtcctgagggtgatttgcttgctattcttcgaaggtttagttaatctccttctcttgtatatgttttcttcttattttatttattcatggtcgtgttttgccatggtggctttaaagaagtatatctcaatagaatacgcacacacatttctgtaatgtggtcaagcgtgcaaatttaataatcagtacagttaaacctggaatttatacgaggttacaccatctgttatttaatagttttatgtggaaatggaatgctgtttgttgttttgacaggaatttttaataactcgtgttgtgttttcgagtaaaaaaacaatggtagttgatctttcggaaaggataagagctattttctgaatgtgggaattgaagcaaagaaatgcattacgaagttgctttcgttcggttaatcttttgatgttccaggagggcacacttccatgtctggaattctgaatgaattgatggtgtgaatacccattgtcgtgtggcattagaggagctcatttaaacacatagtggatgttcttgtttacatgtttgaagcaaatgtttatgtgaaacagcttcaggacagccaacagctttaccatgtgtgtcaaaacccaattatcggtcttgtcttggttgtgatcatcatgttagaaaccatatgggctgaaatttcagcagaggctgtgctttacactgctggaaagcggactcctgctgttatactttgattttccgttgttgggtgggtagtcatgctgcattgccctttgaatttaaaaaatcatttcacttatgcaagctgctccagacctgccaagttacttgactttcttctcttaaccaaaagggaattttctgaatttaaagttttattgcagtattgagatatacaagcataacaaagaagaaagaa

SEQ ID NO: 59341 - DNA, 817 bp, Populus trichocarpa; identical to SEQ ID NO: 58840
  Intron number 1 from transcript POPTR_0010s22620.2 (locus POPTR_0010s22620) derived from phytozome v7.0 (chr-ID scaf fold_10; pos 19456916 to 19457732 reverse strand)

SEQ ID NO: 59342 - DNA, 725 bp, Populus trichocarpa
  Intron number 1 from transcript POPTR_0002s15250.1 (locus POPTR_0002s15250) derived from phytozome v7.0 (chr-ID scaf fold_2; pos 11385993 to 11386717)
gggctaacaacggagatttttctcttggctctaaggtgaggggtcctgcagaaaatcttgttaggcacctgaaaaaaaatttgttgattctcaacgagacaagtcaattaggtgttgaaattaatgggaaaaaggcatattgttaggaaactcctggaatttggaatatctttttgaatcatttttaatttgattgaaagcttgagaatgtttcgagtcttgtttggtgataaaccatagaaataatgcctctcaatatgtcatctcatatagcaaaaactcactgttttgtactgcgatttgggctcctttcaaaacgcgttttgagttgaaacggcatcaaattgatgcttgtttgagtgtttttccgatgtgagcatgccaaaactatggaaaacacctaaaaatgatcaattcggtgctttttttcagacaaaaagcactttgaactacataccaaacacccacgaatttaagctttcagatcctagaagttggagtgcttacttcggttcctcccaccccaaatgtctactctgttgaatctttatttttccttttcttttcctttaaaaaaaaaaaaaggaattgccatcttatatgctgataattgaattataaatatcctatttctgtgtattgatggctgtaatttgtttctccataagatgttgatgtttgttatttcagctgggaggcaggaaagttgggattgttggacttgg

SEQ ID NO: 59343 - DNA, 435 bp, Populus trichocarpa
  Intron number 1 from transcript POPTR_0002s19700.1 (locus POPTR_0002s19700) derived from phytozome v7.0 (chr-ID scaf fold_2; pos 15648623 to 15649057 reverse strand)
ctctgtttcatccacatccaccaccgaagaggaaggtgctcattcactctcacttttccttttctttttgcaatttgaggttattattgctaattaatcgcatcggctcactagactagactggactagattcttcggtaaaacacaaggcaaaacgaagcgatgatggttgcttgatcgagagaattcgtagagtgatcagttaaatatatcaaacaagtttattagtagctgtgtgtatatgttaaagcacgtttcctatttctaggaaactgatcggtctttcctttttttcctttttccattttcgttttttttttcttttttttttttttttgggggggggggtttaagtcttaaaaacttgcatgattataactctaactggtgatttttttttattttttatatttgtataaatgtagaagcattggc

SEQ ID NO: 59344 - DNA, 516 bp, Populus trichocarpa
  Intron number 2 from transcript POPTR_0010s19350.1 (locus POPTR_0010s19350) derived from phytozome v7.0 (chr-ID scaf fold_10; pos 17290335 to 17290850 reverse strand)
gtctttcaaacgcgataaattcacatcgagttcaggtttgttcaatgaaatcttggaatttgcttttcttttcttgtgatattgagttttctcgtcttgggttgctgcaattgtcagtttaatactggttggtttcttgattgatagcttatgttatttctttgattttttttccatggtataaattgtttcatttgaacgttttggagctatgttagaggactcgtgtatcatttccgcttgtggggttgtgtccaaagtactttaccagttcttgtttataagattttgtattatgtaggagcgtcccgcacctctgcatttatggccaaccattacagtgtaaaaactggataggttccatttgaacgtattagtaggggggggcgcgtgcaaaatgattacttaatgaattgttgatggttgtacactttaggtgaagtgaattaggaaactaagagttatttgggtgttagaaataacttccatgtctaactttctagttctgcccgttgt

SEQ ID NO: 59345 - DNA, 420 bp, Populus trichocarpa
  Intron number 1 from transcript POPTR_0007s03870.1 (locus POPTR_0007s03870) derived from phytozome v7.0 (chr-ID scaf fold_7; pos 2288569 to 2288988 reverse strand)
ttcttcccttttacggtaacttattattgttttgcttgcttcattttattttatagctagacttcatagttttttacttttttccattgtcaagttatcaagggtaccactcacacttgaaacctaaacctttaagaatatgaattaaggcattgtttgacttgacttttgtcctataaaaaagtaaattcaaatcaagtgatgtatatcatttgtttgtttccttgcaactatttgaattaaacaaatcacactagacctgggctcgtcttttctcactttttttatgacacaactctatctttcgtgagcaaaaatgttgccggctattttttatgacccaatataaattaattttcttcggaggtcttaacttttaagaattaacgcgtacaggtaatacacacactagtgacagtc

SEQ ID NO: 59346 - DNA, 463 bp, Populus trichocarpa
  Intron number 1 from transcript POPTR_0001s27920.1 (locus POPTR_0001s27920) derived from phytozome v7.0 (chr-ID scaf fold_1; pos 26764526 to 26764988 reverse strand)
agggattggctgctgctgctaagttgtcagaagaggttgtgtttcttttaaattgtatccagcattttgtgtttctttttggaaacttgatttgtttttcgttaggtggattattgaagctaattttctaataacttgacctcctcaattgtatgttagcttacctatttggttcctgagaaattaatcatgccaactggcagtattatattcagctttttgattacatggtcttatctacttgttttttcttgtcaactgaatggagcatcaattaattgtggaaaaagttggaagtctgctgtttgtttcatttcagtggttgtttttctccatttctcaggctttaagactttggaattattaatttctgaagagagcgggtgatataggaatcaaatgataagcttttcatctttggattacaggctaggctcagagaggctgcttcattagagaaaca

SEQ ID NO: 59347 - DNA, 893 bp, Populus trichocarpa
  Intron number 1 from transcript POPTR_0002s13810.1 (locus POPTR_0002s13810) derived from phytozome v7.0 (chr-ID scaf fold_2; pos 10230694 to 10231586 reverse strand)
ttttacacactctgttcccttcgtagtttttcgtaagtttttttttttttggctggtggtcattttctttgaaagctgtagtttttcttgtttctgttgatgaaagtcagttattcatttttattttcttatggctaacaactgataaaggccatgcttatcattttagttattcttggattttcattttcattttcattttcattttcattttcattttcttgggatttaggaaactggaaaatctttactcaattgagtatttactgcatgtttggttttttgattgtttgttgttatattggcttctttgtgtttgtgtattagtagactgagtgataaggacagaaaggctcataaatttattgcattcgtttagtaattctttgcaagtgagagaaaacttggggttttattggttttcattaagttaaacatgacatgatttaataatctagtctttgagagctaaaatttgttgactacgtgccttcatagttcatacaaaactttgatttggtttaactgttagacctgtaaaatattgctctctttcagtatatccagctccacttttccgaatttctaatcaaatcgacttctctacacaaatagcggttttttttaaacacatatagttgagcgaaggtttttaagcttgaaacttgtataaacttattattatcttgtaatttaactttattagttagaagaggtggtaaaatataacttcatgattatttggtcatcaaaattttaatagcatgttaaacaatcattttaaatcaaatatttttattttactctctatcatagttgctgccatgtgcatcagacttatagtaaaatgatgatattttttgtatatgttttgtgttaggtattagtgacaa

SEQ ID NO: 59348 - DNA, 226 bp, Populus trichocarpa
  Intron number 1 from transcript POPTR_0001s15220.2 (locus POPTR_0001s15220) derived from phytozome v7.0 (chr-ID scaf fold_1; pos 12060759 to 12060984 reverse strand)
taactaatcctttacactcgtttaaccacgcacatgttagttttctttactattaatgtcactccctctctcgctctctttaatctatcacaactttttaacatcaatttcttcgattgatttgggcgttttaattttttttataggttatgtttgtgttcatttgattgttttgatttggatttttttagtggaagatttggtgatattggttgggggggggata

SEQ ID NO: 59349 - DNA, 773 bp, Populus trichocarpa
  Intron number 2 from transcript POPTR_0010s12930.1 (locus POPTR_0010s12930) derived from phytozome v7.0 (chr-ID scaf fold_10; pos 12851774 to 12852546 reverse strand)
ttcagctctttggttcctgagaaaccgaaggaaaggtaaggacaggacaggaaaggaaaggatattgtgttttgtagcgtctgtttgctaataaataatcgaagaaaaggctaaaggcttgacttgatgactgttaggcttattattatggactctcttttttttttcttgaatcttcttttattttggaataaaactgttatttttctttacttagcaaacaatcaaacgcagcgtttgagtcaaaaacctgcttgaagaaacactagatcgcttgcttcgggtaaatttgagcttagcctaaaaattgcgtgttaatttagcaacttatgtaaattttgaaggcatttaggtcataacagagacaatccatgatttggagcggaattagctatgcctgcttacagatttgtacttgtttcagagatgtgttgaggcctttgtgctgtggcaatgtagcttgagattgctttactgccatgacactaataaaaacaatgttaggatgaaactattctgtttcattttaggccttcagatcacttcgttttcttatggcattcatatctttagaagattgtggcactgtacgggatgcagctctagtgactaatgctgttgattaccatactatgattagtgatctctttcattaactgtgttaataatttgtctcttacaaagataaaatattttcccatttatttcccctagtaatgcttaccattttttctgtagtttgatttctctagtggtcttggttcttgtatccg

SEQ ID NO: 59350 - DNA, 597 bp, Populus trichocarpa
  Intron number 3 from transcript POPTR_0010s02420.1 (locus POPTR_0010s02420) derived from phytozome v7.0 (chr-ID scaf fold_10; pos 2789985 to 2790581 reverse strand)
gtattacacacggaaatcaccaggtaggttggttttgttgggcttttgatcaatttgaattgttgtacatgtagttcaatttattctatttaaagaaatgtttagtaattgttctaggatgcactagtttggtcaacgatatgctcatacttgtgacatgcttctagagtttactacacattgtgagagtgctaaaaaagaaaagaagaaagaacaagtccagggtagcacataactttatacaaacttcattagcaatgaactcgtcttgaaggctacttataatggaggcattttctgtatacaataataactatcattagcttattttgtaatgacagcctttttgtttttcaaagtatgctcttatatgatagggttgaagtactttgactatcattagcttatttcctacttataatggaattgtttggattcaagtgatctcagaaagatttaaaattgactaggaaatgcttttatgaatatgttctgtgcctgcgaatggttctatgtctgtactgatatatatatatatatatatggatattgcaattcatgcatttgatatttacatgcagtacaagtttttagttg

SEQ ID NO: 59351 - DNA, 898 bp, Populus trichocarpa
  Intron number 1 from transcript POPTR_0001s43930.1 (locus POPTR_0001s43930) derived from phytozome v7.0 (chr-ID scaf fold_1; pos 44329967 to 44330864 reverse strand)
tttgaacttcttcgcttacaagtgacagctgaaaggtacatataaacggctataccttcggccaaataagtggcagccagggttgacggattacaagggcgttggagtcatgggtagtgagtctagtgacttgttgatttcccttgaatgcgtcaaagttgttgtctgttcaccactcttgccttaatgcttctgtacaggacagattagcagccttgtcatacttcaataattctgtttggttatttttttaaaataaaaaactgataaaaatagttaagataaataggaagtgttattttatgatttttgttttaaaatattataaattcattttaaaactgttttacaaatacatttatttttattcctacaatcaaacatgttcgctcttttctataactatcccttataaatattaagacactaatcaaatatagtctaagtttctcgtgattcctcgtcatccaaatatttatggggttatcatagtaaatactacgcatgatgtgagaaagtttataaattttgtttaatattttgaaccactaattgtatatatctgatgttctgattcctgctatcctaaccgtttccttttcttgatcacagaaatttccctccatctttattttttttcatcttcaaaaagagaaaagaacagaaagaaagatcatagcaatttgcttacgcaaaaaaagacttgtccacttctatgttactttgacccttgtggattggaaaccatacctgtattccaactgttacagaaagcaaaatagttcaaagttttcccagttgctaatggacactctttcttcaatgctaattattattgcgaatctactccttctattctctagattctgtattacagataatacccttactttgtctc

SEQ ID NO: 59352 - DNA, 435 bp, Populus trichocarpa
  Intron number 1 from transcript POPTR_0001s06040.1 (locus POPTR_0001s06040) derived from phytozome v7.0 (chr-ID scaf fold_1; pos 4719338 to 4719772 reverse strand)
cacaggacacattcaagttctttttggatcggaaggtaaggaaatgataatgatctgattgctttgcttatgtagattttgagttttttcttttctttttggttgaattgttgatgagaggtttaaagttcattgctttatagttttggtgatgatatagatggattttttgttctggggtttggatttttcttgatctttttgtgtgtcttgaagtttttgtttttgggtttcttttgttttgtgatttgtgatgatctgtgaggtgctcttgtagttccattgagtcttggattcatgatctttgttaaggaggtgtttagatttgactgagtattggtttctaagtgattattggtgaagtttgttgataaagattgattcttggttgttattttaggaaaattaactggtgttgtgactggattgattcgc

SEQ ID NO: 59353 - DNA, 903 bp, Populus trichocarpa
  Intron number 1 from transcript POPTR_0001s17270.1 (locus POPTR_0001s17270) derived from phytozome v7.0 (chr-ID scaf fold_1; pos 14091492 to 14092394 reverse strand)
gcttcttgtaagtccctcctccccatctcttcctatatttacatagaaaattatgatttttttcttttttaaatatgaatacgtttgaagttattgtaatgtgtgttttgccgagattgcttttcgttatggggcggtttagtttttgttttaaagggattcaatgcttgttgttatgagttgttatccctctatactttgatattctcatgggctataccatttttattgtgaggtgttgggattaatgcaagtttgaacctctttcttcttttcaagttctttcatgataaaatcagaacgaaacctcgaaaagtttgatgatttgtgtgaatctttcttgtgtaggaatccaactcgaaatattaatttcattttaacaaatattggtacatttgaatgttattttgattatttcatattgcagacggtgatttaacttgtagatagagttatttctaccttttcacttaattggcattggtttaagtgcactcccgctctttctagtgccaaatttcaagcatgccgcaaatgggagaaacacattgttgaacatctttaaagcttcgggcttggtatcccaagggacggataaataacatggaaaatgcgctgtatctgattctgtaaacaattttttttcttataatgactctacaatggatcgtatatgtttgtgtgccatcttgtcaaacaagaatgaaagtaaatttttatctcatttgttgcctcattaaaggatgggtaagaattaaatgattgtgggcctagcatagaattcatacttacgatggtgacatgatttttgttcttttgatgttattctgaagtgtgctggaaaaatattttgaccttcttttgtcacttttgattcgtacaggtagcttaggagcttcaaat

SEQ ID NO: 59354 - DNA, 377 bp, Populus trichocarpa
  Intron number 3 from transcript POPTR_0010s14090.1 (locus POPTR_0010s14090) derived from phytozome v7.0 (chr-ID scaf fold_10; pos 13789277 to 13789653 reverse strand)
ccaccggcataactctccataagggtacattaaatcatgtctcctctcgagtgtttcgttgctcttcagttctgttaatggcattgctcatttctagggttttgcgaactttattttagtagaaaagaagccagcgttatctgcaatatacaaattggtttgtgttgttatcataatgggtctataattgaagcttattatgaagatatttctcctttcatgtctttccattgtcttttatttcctttttctataacgaaaatgttgcaatgttggtcaaattcctctgaagtgttttgattttggttcttgaatgtatccatttgtctgtacttcagaacctgcagagaagcttgaacgtgtgaaagtgtcggttt

SEQ ID NO: 59355 - DNA, 959 bp, Populus trichocarpa; identical to SEQ ID NO: 58195
  Intron number 1 from transcript POPTR_0010s24760.1 (locus POPTR_0010s24760) derived from phytozome v7.0 (chr-ID scaf fold_10; pos 20785210 to 20786168)

SEQ ID NO: 59356 - DNA, 341 bp, Populus trichocarpa
  Intron number 1 from transcript POPTR_0001s33650.1 (locus POPTR_0001s33650) derived from phytozome v7.0 (chr-ID scaf fold_1; pos 31856264 to 31856604 reverse strand)
gattgtatatttaggaagcactacgcaccataggttggcttttgcctgtcactgaagaactgttgctagtgagagagaagcaaaaatttaggttgatgatgactaggggtaacttgaatgaaagtggattaaaaagggttggaggatctggaatctttgcataagcacggccagtgaagatagagactgagggatcgcaaggcaagaaaagttaaaggaacatatcaattttcttcatgctaggtgctctttgtgtacaccatctatgcttgattgaaagacctgatttttccaagatttgctttagaaaccgcaacttgcatagctcaaatggcagccag

SEQ ID NO: 59357 - DNA, 367 bp, Populus trichocarpa
  Intron number 1 from transcript POPTR_0001s33230.1 (locus POPTR_0001s33230) derived from phytozome v7.0 (chr-ID scaf fold_1; pos 31437705 to 31438071 reverse strand)
agctcgctcaagctgctcaggtactcttttcctctcttttctatgtttttggtgttgatccttttctttttctttagctcgaccagttaatactctctctttaagctcctctaaactcttgttaatcttgattactaatttttaacattaattcctttttttttccgttcaatttgcgagaaaaattaactccggaagacgtaatttattttattttattaaataattgaaatatctgattttttttttgttaattagaaatttagatcgttttaggtgttaagttttggggattgaattttccttgaatttttactattttttttggctgtctctaattttgatttttattgtttttttgcaggat

SEQ ID NO: 59358 - DNA, 888 bp, Populus trichocarpa
  Intron number 1 from transcript POPTR_0001s44230.1 (locus POPTR_0001s44230) derived from phytozome v7.0 (chr-ID scaf fold_1; pos 44682507 to 44683394)
gctcatactgccaccgtctcttgtcctaatttcgggtaggatctctctctctctctctctctctctcttttaaattagggtttttgttagctttagatcatatcaataaataatagtttttaggggttttagtggttagggtttgttaagagttatgtgagattctgttttgtgcctggtaaatgctagtggtcaggtgagttttaaaatcggcttatgtaattgcttaaaatatgaccacttttgaattattcctctgagaatttggtggttgatgccatttttattgctagatgaattgctcggccgagatttgaaggatgtttactgtgggatgtatttgccttgaattgtctttagaggttaatgtgctttacttacgtgagcttcagttctaagtattaggagtttgagttgcatcacttacgagcgaaattgtagtataactatgctgtgtaatgagaggagtgattgtgtataatcaattggacgagagggtaggcactcattgacaccttgtattagttggaagtctgatacctgcaaatagcgagtttttacttactttcctttgtagtttaaatcgggcagcttttcatttttgttggtagttagtgttcagcaattccattaatgagagagcaaatattttcacttgaaggctgtttaaaatgttccattctaagttccttgttattttatttattttcactcgcttcttttctttcttttgtgatgtatactcttcttgttttggatgtaaaaacatacttgtcacaagcacttaaattgatttggacggcttttttcttgctgcttttgtggttattcatctcatctcttatatttctatgtgcatgtgtgatcatctgtgcagtgcggaaattg

SEQ ID NO: 59359 - DNA, 319 bp, Populus trichocarpa
  Intron number 1 from transcript POPTR_0001s13930.1 (locus POPTR_0001s13930) derived from phytozome v7.0 (chr-ID scaf fold_1; pos 10983050 to 10983368)
tgtttgttgcttagcgagttctcaaaaccgaacaggtaatctctgctgttaatactgatttaaattgattctcttcattattaatttgggctcattagatcgatttgattgttgtattttaatagttatctggtccaatttggccagtattcttgatttgggtttcctttgagagaattcatgaactggtttttcttgtttgattggaaacttaggttttttaggaagagaagatgggatttattatggaatttgctgagaatttggttctgaggttaatggaggatccaaaggagagggaccggaagttcagggagcg

SEQ ID NO: 59360 - DNA, 419 bp, Populus trichocarpa
  Intron number 1 from transcript POPTR_0001s25520.1 (locus POPTR_0001s25520) derived from phytozome v7.0 (chr-ID scaf fold_1; pos 24604354 to 24604772)
ttataacaattttcaatcacttaattacttgcagtgtaagttgttgaattttcttctatcatttctatctgctccgtttcgttattgttttataatcttgtgatattttttttttcaatttttttgaattcggattaaggatcgtggattgtgattagggttagttgtttggattttcgtgaatcgtgctttgattgtgataattgagttcttgattgtaatacttgtggataaatttcgattgcacactattaaattagaagagcatcataaaaaaaaattaatttatgttttattagttaattggattattagatttctttgagttctgtttaaaatatttgattttttcagtaattagttattggtattgtattttctgcaactgcttatatatttttgcgtcgatgttggtacag

SEQ ID NO: 59361 - DNA, 522 bp, Populus trichocarpa
  Intron number 4 from transcript POPTR_0001s25520.1 (locus POPTR_0001s25520) derived from phytozome v7.0 (chr-ID scaf fold_1; pos 24605333 to 24605854)
ctgttcttgggggtcgggtcattacagtggagaaggtagaatcttcatttgttgtattcttgataagtgatcctggccttttgcattctggttacttcgctttttcaatttgtacacagattatggttgccttttagctcttatgaaattgaaagtttgttgcttctttccacttgaagcttctgttgcagcaggtcagctgtgtgtagcagctcttcatcaaactccaataaacaaacaattcaaacacatcaacaagtctcagactgttagggttgtatgccctgaatttctctctttttagctgttaaaccacgtgcaattttaatttcttacttgtatgagactgactgattttttctttcctcaacatctctttatgatattattctacaaataaaaataaaggtttctataccttaatgtgtccatttttttttgcaaaagatttgattttcaatgaactcatttcttcaatttgttgcaggctaagcggaggagaggacgaactcctactcctgg

SEQ ID NO: 59362 - DNA, 566 bp, Populus trichocarpa
  Intron number 1 from transcript POPTR_0002s13230.1 (locus POPTR_0002s13230) derived from phytozome v7.0 (chr-ID scaf fold_2; pos 9856616 to 9857181)
ccaggtgagatttcttttgtttgtgtttcttgttactctttaggtttctttacgcctttctgatatgccttttgttgttcaatgcctggtttcctagttgtatttgttttcttgttgtttgtttgctgagaaagtgtgttttagattctgggttttcgtgcttcttgtccgtaagttttctactaatccaaacttcttgttttggttaaaatgattgggctggaattactgtagtcttgtatagaaaagaaggattcttcagaatacaaacctttgattttacttatgtcaaaccgatatctaggattaaagtacttttggtctttgaagcgcactgtttcctcacaatttcattgagttctatgcaagatcacaatcctgccaaagaattttaagagaatagcctcattcttatactgtatagtgtttctaaaatttgggtatccataattcttttttgtgtttgtgtttcctgctagtgaatcgaaaattgtcttcacgaattaatttgtgtattctttctttattcagcgttcatctccaaggtgaacgtactttggaacgct

SEQ ID NO: 59363 - DNA, 711 bp, Populus trichocarpa
  Intron number 5 from transcript POPTR_0010s16110.1 (locus POPTR_0010s16110) derived from phytozome v7.0 (chr-ID scaf fold_10; pos 15146778 to 15147488)
ctgcagcagcagcagcaggccggggtaaagttgaggtgagctctttttctccttttccctgtacttagctagccatcttattgctttttagccatgacaactgtttggctgagcttgacaattgtttgcagtaacatgaagatggatccattgcatgataaccagtattagtttctttgctaaatgggaataatttatgataaaaatgtctgaataagtcatctcctaactctttaaacttgagttgcatctgcttgtctatgtcaagttatggccgtttctaagttaactttaatcaaacatgcctcctttatccaacacaggtaagaaattgatttgaatttcaagcatgttcttgttctgtgtgccagtttatgtaccgtcactttgattgtcatggtaatgtggtgcaagaacaaggttatcaagtacatctcagctatctggttttcttggtgcctatgcgaagcatgttatactgtgcgttccaaaacattttttgtcaaagaaattggtgtggagtctggttttagatatatgtttattcttgtttatcaaggtggattctttgtgtgttattgttgattcatcgtcactcctttttctcttttatccccctagatttccttttattcattctacatcacatagttcacaaaatttgtttccttttcagattagggaggttcgggactttgctggtcaggaaat

SEQ ID NO: 59364 - DNA, 484 bp, Populus trichocarpa
  Intron number 1 from transcript POPTR_0002s07610.1 (locus POPTR_0002s07610) derived from phytozome v7.0 (chr-ID scaf fold_2; pos 5200715 to 5201198)
tttttgcgttttctctttaattgccttaaatctgggtaatcaaggcttcttgttaatgattgttactgttttcttgttggggtttaaggttgatgcggggtttttatctacttatatataatttaactgtttttggttcttgttcccttgatccatttgggtcaaattgggttttgtttgatgattttgatacaccatgattgtgttgagattgccatgagatttttgttttctcttcgagttttaatgggttttgatggagaatctaagtcctgggctattcaatttgtgataatttgctgttttgtattcgatcatgtgcttatatatgtcacaagtcaattgtatcacttcaatttcgtgtttcatgaatgatgtttcttgatattatttttgtacggtttttgaatttcgcaactgattatttagttgattattgtgatttgtagggtaataagggtagcgagcttaaatcaaagtacca

SEQ ID NO: 59365 - DNA, 555 bp, Populus trichocarpa
  Intron number 1 from transcript POPTR_0007s12280.1 (locus POPTR_0007s12280) derived from phytozome v7.0 (chr-ID scaf fold_7; pos 12598984 to 12599538 reverse strand)
aaaaactctgttttttcttctctctctcgatcagggtgagtgaagttttgctttgactgttttattgcttgtggtttatgtatgatttgggttgtttttagaggattttaatgtatttttgtctctagttgattgtttttacatgtttaccatgatctgttttatgctgggatttataaagttgtaaactttttatggttttcatggctttgacatgttgaattacgatgttcttgtgatcgactgtaacgggtcgttttttttttttttttaattgttttaggtttatgagattttgagtttttggttatcttgtgattcattgtactgggtcaatttaccctgatcaggttgttttatgctagatttgtggaatagggtcaattttagtttttgattaattgtaaatgaagattgcaagttttttttttctttttttgaggttatttgtgttttgggttttagatttgaagcatgaaaattgttatcttggtggtaattgaggatgttatgtgattacaggctgttgattttgagagtttttggataaagaga

SEQ ID NO: 59366 - DNA, 992 bp, Populus trichocarpa
  Intron number 1 from transcript POPTR_0001s12880.1 (locus POPTR_0001s12880) derived from phytozome v7.0 (chr-ID scaf fold_1; pos 9997151 to 9998142)
gctgctgcagatctttctcttcacttgtactgaaggtaagtagaaggaaacttccgctctctccattcctttcctttccttttttttttccttttccattcacgcgttaaccaaaccctaggacactttcagttctcacaacacaacctgcgatcatcgttattcatatactgccagattcttaatttattcttcttcttcttcttctataatttgtagggtgagtgattataaaggaattagtgtctttctgttgcttgttaagtttagactggctgttgttttacagtgagattaagatttttttttaaaaaaaaaaatattgtattatactgctggtacattgctatttattttcaaaaaaaaataaaaatctatcgtagctaatatattgatttattattccattgtgaaggaattatagttcatagcaactcacgaaacaagagtttcatcaaatcccccctttcaaagcttcaatgatagacaaagagagcattcgtttttttagtttagatgaccatgacactgctcctggtttcagaggaatttcatgcccgctatcactttctggaaatggtgttatcaggcatatctccatctgcacttgtttgccatttccaaatgcataactatgtgaaccgactgcccttgagattcttgagaattgacttcactgctgactagtgttatttgccattctggtttgtagaagcgtggtggcattttaatgtatctattcctttcaaagtttgtagataaagcattttcggccttgaaaactccaaaaggtcttctgagaaggacctaatgcccaagagggtttctctactaagaactttatattctctctctttggccgatgatttatgtcattcaccgctttttcttctcatcattccaattatgctgatacctgttcttatggagtgcttcaagtttgtttgttttgtacaggttcgctgaagatatagcatccttgattcctagct

SEQ ID NO: 59367 - DNA, 873 bp, Populus trichocarpa
  Intron number 2 from transcript POPTR_0001s37200.1 (locus POPTR_0001s37200) derived from phytozome v7.0 (chr-ID scaf fold_1; pos 36161856 to 36162728)
aacctaggtaactgtgctatctttggcttttagtttgtcatggcttgttttggctttgaatgggagagcttttttcttgctttccctgtttcactctcttggattccagtttcgtgtggaaaacgttgatagctttattggaatctggttatgtggcataactgttgattggtctttattactttcagttcagggagtcaagatagcagtagttccactgcaaattctcatttttcacggtttttggcttttgggtctttgagagttgggactgactgctgctctttctggattttggtttctaggtttgtttattggttcttagtagggtttctgtttttttttagtagtccatgtgcaaggtctcatttgtgggggctttttggtttatgggttttgatgattataagttaaatcgacttagattttgttaattttaaggttgggtttggggttctgaagttgttcctgttgaagtttagggttgtcttttgggtttgagaatttttatgttcacatcagctcaagctaggggcttcagctgtttgccttgcttctgagttttgatagttggctgtatcttgtcttgggtctaattggttcatgcgaaaggcctgcttttgtcatttgcctctgaattttgggaacttgtgttttgttttaggtcagatttggtgttagaaaaggtgttttaatatatcaaatatctcttattttgggatataagttttggaattgattgttattgcaggatgtagagtactaaaaatcatagtatctacggtcttttcaaatataggtcttctgttttctaattttaaggttgagttttgattatttttgtgcctttccaggtctattgttcaagcagtt

SEQ ID NO: 59368 - DNA, 590 bp, Populus trichocarpa
  Intron number 1 from transcript POPTR_0002s02100.1 (locus POPTR_0002s02100) derived from phytozome v7.0 (chr-ID scaf fold_2; pos 1135419 to 1136008 reverse strand)
tgcttatttcctacaccagcaatactttccctacggtactctccccctctctctctccccctctctctccctgtcctctttcgtaattttgcacattgtgtttttgtggagatcgttttatcttgcttgacgttagaatttaatttcaagcattgtctgtaattatcttgttttaatttgtgaaaataatttaaatagcaagcaactttactgaatattctttgtttttttttgcatttttttagtgttcttttttttgtttatcatttagggtagaaattagatttgaactggaaaatttagggttcctgttgtatacatgtcatgataaatgcaatgattgtgcgtgtaatcatttgactctggaatctcgaattattagttttggttttctagcttgggaattattcgttgctgcattttgaagaatatttgggcatatttcaatgtacattggcgtcatcagtgaatttttaggaattatatggagcatgctgtgcagtgtgatttgtgctttctggtaaagagtcgtggggatacttttctggctgttaatgtgatattatgtagttttttactataacaggact

SEQ ID NO: 59369 - DNA, 996 bp, Populus trichocarpa
  Intron number 3 from transcript POPTR_0001s30600.1 (locus POPTR_0001s30600) derived from phytozome v7.0 (chr-ID scaf fold_1; pos 29082155 to 29083150 reverse strand)
ccacaattgtaggtttctcgttttgttcttgtttcttgttcgtagaaaacataaatgtagtgcatctgtactgagtccaaagagaaaccagagccttaaagataagttttgaggcatatagtcaattgcttcatacatttcaaaatgaccatttgcaaggtttttatgtttctagattcttatgctgggagatatatctctcctgatcatttagttgttcatattgaaaggtttctgtacaaatctgttaatattacttgggctgaaacttgtctccatttgcttctaagataacaaacacattgctattagtagcatttttcttcatttattgttattgttgtgttttttttttaatattgtcatcataagttggtttgcaacccacttgtgcatattcttttttctttactgctgatagaaaaaataatgagaaatccttttagtgtgttagttttctcagtatggttgaatgtaagagtcattgcttgatcccatgagagacacatctcaagtgatgcatttggaagttagaattcaatggattctcttctatcgacatgataggccagattcagattttgtcttccattttcttcctttattgtgtatagtttcctgcaaattacaagcaaaaaccaaggtgtattccttttctgtttttattacttgacagctccatcgcaatgaaaattgaatgtccctataagccactagattctgtaatctgtactggaaaggctgacttcaaatcaattagccagttttcatgtggttattagcaacaaagattattccaaatttcagattaagatctgaaattagaagtctttgaattcaatactttgctgctattgaactcaagtttcttgctgcttgaaggaattatgcccccaaaaactacgcttttctgatgcagaattcctgcatggattttgaaccatttacgctgttgttgcaggtacttgaagagcctttagattagcacaaccaagt

SEQ ID NO: 59370 - DNA, 766 bp, Populus trichocarpa
  Intron number 1 from transcript POPTR_0001s14080.1 (locus POPTR_0001s14080) derived from phytozome v7.0 (chr-ID scaf fold_1; pos 11065012 to 11065777)
tactgtcgacctttccaagagacaggatttggtaagtaaataatctgcaaaacattttgatcaatgcagaaaagaatgtacaaagcgttatacaggttcacttgaaatgaagtccgaaagagctacaaacagtataaacaagcactaacatattatcctgttatccgcgctctgggcagcagaaattttcatctttggcataaaaatggtccaactagcatgaaaaggcttcctaatatggtttccctgtaatgggggccctggaagagagagttcagagtaaaaacaaactcgcataacaccaatcatttaccaccagtatctacctaaaactaaatcagttgagggcaaaagactaacgatttcgaatgggtgtaatgtgatcaaataatttttgttagtggaacatgatgttgaagaacctattgtacatcagactccattaccgcgtattagctatactaataaagaaaatgaagatatacctaaaacagaatgacttgaacttcccatatggctataactaacacactccaacaacttcaacatctctgaagcctcgcaaccactccatctcagtctgctcatatccttctatttaaagagctttaactacaaatcagttgcaaactccttcaagattatttcatctacaaaatctgttaagactcccacgaacattaactacaaaaaatcacaagatgttcaagctatcttctccatgttttttcatcgtagtgctaattgctaccctacacacagtaac

SEQ ID NO: 59371 - DNA, 651 bp, Populus trichocarpa
  Intron number 1 from transcript POPTR_0001s28640.1 (locus POPTR_0001s28640) derived from phytozome v7.0 (chr-ID scaf fold_1; pos 27430254 to 27430904)
atattgctgtccctgctcaatccacttttggtaatcttttgtcactgattaattgcgcttgaaatttgctttctttggtttgatcccattggataaaatgctagaatctcatttctcccttccggggtcgactttgctgttgattcgttgggtcagagccaaaaccgtggttggtcctagtttttcatttagtgattgttttgaatttaatttgaatgggtctagtcatgcttggcaatggattttgacatttcttagcatttttgtgtaatgctttttttttttttttttgtcatcgaacaagcctttcggcttttttttctatttcaatatgcactgcatatttatccaacggacaaaagtcatgcttaaaaattattgcttaagttagctttatggggatgtacattgatcatggtcatttgttttcgaacgttcattatatgtttcctctccttcttgcatgcaatttgattgtccatgacgttggctgagtttaccttcattgcctaatatgtattagactggctgctgggtttcagtgagggtactggttgcaatattttgctgtcccttattctaccttcgcaatttgatgcttaattgctgtatttggttgaattgaaggggatttgaaaaaagtccttgccc

SEQ ID NO: 59372 - DNA, 538 bp, Populus trichocarpa
  Intron number 1 from transcript POPTR_0001s01400.2 (locus POPTR_0001s01400) derived from phytozome v7.0 (chr-ID scaf fold_1; pos 1044073 to 1044610)
gaggtgcatccaggaacccactggagatacctcctgtaagtaataactgatcatttatactaggagcagctgtagcttttgtatctttattaattattttattgtttgataaagggtttgtatttttatcttgctttggtttattggcgcctctaattttccaaatcaagatgctgtgcctttgagacttttggcatggcggtagccggtatgaatatgaacccaaacttataagccgaatctagttgatccaagattcataaaattaactcgccccctcacaaaaaactaaaaaggaacatagaaaaaaagacaaaaaaaaaaaaaaaagttataagaaatgacgctgtagctaacaaacaattttacccggttacggctgtaattataactgcagtgctctctctctctttttctgagtatttccatatgctgcatgtataaaacttagcgtgaaaagaaaacagcagcaggaccacccccatcagctcatttttctgatttgtcttgtggtactgtccgaattcaacagtcttgg

SEQ ID NO: 59373 - DNA, 590 bp, Populus trichocarpa
  Intron number 1 from transcript POPTR_0098s00340.1 (locus POPTR_0098s00340) derived from phytozome v7.0 (chr-ID scaf fold_98; pos 67076 to 67665)
gaaaaagaggtttggtcgtacaaaatctattttgcgaaaacatcaataactttttgatatgatcgtgatcaaattttacgaggaggttgtataagcacttaaccataataggtaaacttactgtgtccactataaaattaggcctaaaagatttttttctaagtttttgtatttttttctcattaattttgaattatagcttttattttttcttgatatttcttttcctttctttttaatatccgttataaacatatttgagttattatcataatttcttgagagattttttagtagattatactttgtttgagaataaacagctctttctggctagagtttatccaaccctttttcgtgaatttctctatctttgtgctctctttgacagaataagtctcaagcaacaatcttggttaagataaaaaaaggactgcgaaaaaggatccacatccaagatcaaacgcatctcatataatggacagacatagattatattaaaatgatgcaagagtcaagaagaaaaataatttagaaactctttccaacaaaataatgcggattcgaacaatcccaggactcaaaagaga

SEQ ID NO: 59374 - DNA, 716 bp, Populus trichocarpa
  Intron number 1 from transcript POPTR_0010s25950.1 (locus POPTR_0010s25950) derived from phytozome v7.0 (chr-ID scaf fold_10; pos 21370560 to 21371275)
aagttaatgtaagttaaagaaaatgagagagagagagagagagagagagatttttgacagtgaaacaacttgccagcaggaatgcttaacttcttaggatcctctcgtgtttttcttttcttagtcttatgtttttattcactaaaataaatgccacttgttctgtaaatcaggttatgagttgataggttttagattgggtagaccggcatgagttgactcaagacaattcgaaactatgttgttttaaggttttttttttaaaaaaatttaatgtcatcgttttgaaatttcttaaaataaaaactatatcgagtttcatgtagattttaagtgtatcaaacagactgagcagccattgaaagagctattaatggtagctcctccatgcaccactgacgataaagcatatgacaacaagctagatacggtctggaactctggatagacccacgtacgtttgaaactgcggtatggatgaaaagcaaccagaattaatggtgcttttgattttaaaccgctgtttagaacgcggtatttaccacccgtaaaaccctcaattaagatttaaggagggtaggtttagctgacaagttaacccaggaggcctagaccgttaggtctgtctatactttctacctgcatctcaaacaaaaactcccgggaaagtacatctaacagattcttcgttaatctttttaaggactcggagacag

SEQ ID NO: 59375 - DNA, 520 bp, Populus trichocarpa
  Intron number 1 from transcript POPTR_0010s23280.2 (locus POPTR_0010s23280) derived from phytozome v7.0 (chr-ID scaf fold_10; pos 19885192 to 19885711 reverse strand)
aaattaaagaagcagcaaaaactttctttctctacgtacgtaagactttttactctaagaaccctctttgtttggttccttagaaagtcgaggaatcttgataacgtctttttcttcgcagtttgcgaatcatcctttgtgttcgttctctttttttcactgtaaagtatgttaaacgttttgttgcctagacaggaaaatagaacctcttacatagaaaggaaactccattacttttgcctttcgttttctgtatttcctatacaacgaaagatgactagaaggcggagtagactcccttttgaatatttcaaacgcatattgccttgaaaattatattaatttccaaacttgcttacattctcaaatttagattttctttcggatggtcattctgcgtttgctttttcatgcgtttatttctgatttatgtttccaagattttgttaaccttaacagtttttatttccttttaggttattcagtaaaaaaaaaaaaacttgtcagaacaagctgcgaa

SEQ ID NO: 59376 - DNA, 977 bp, Populus trichocarpa
  Intron number 1 from transcript POPTR_0010s22070.1 (locus POPTR_0010s22070) derived from phytozome v7.0 (chr-ID scaf fold_10; pos 19140215 to 19141191 reverse strand)
ctctctaaaatcactcacactcgttctcaaatcaggtaataatctgtttgtgtttttattttgattaatcaaaaccctcgtattctccgattcctatttggagggttgatttttctccttttctgttatcttccccgaaatggtcttcactcttttttgtttttttcaatcctggtttcaaatacttctgtccattgagtatagattatctaatcaaatgttcaaaaggacgttttaaggagaccgctgtccttttttttgaataatgattaatttatttgtggatttgaaaagtgaaatgtttgcatctgtgctaatctctgattttaatatgtaattaattcagtttttttttctttcggcttataatctgacgtggctgtttcaatagtagtagttagtcatcgacgattgtaattttaggtcaacttgttattgtgtaactcacagtctaattgatggatttgggcttcagttacttttattgattgctgcgttagctatcgtttatatagtttttttttttttagatttggatattaatgacagtattaagatgagagtgttgaggcttagctttctagattattttgattatgaaattcttactgggttttatgataacccacccatgacatggatctagtttgatattttcatgatcaattagtgcacttccttttgtattttttttctgcttttcttgaatttattgaggactaattaaggagatgggtagttttgtcgtgttgtgctgtctgaaggtgctaactacccgtagcaataacttttcttggtgctaaaagactatgagaaactgactgattttagtcattgaaaataataaatttgctaacttggtttcagtaattattggggttggatttgaaggcaactcaggatattttgttggggattaatccatgaattatttttgttaaggtattgaaaagggttgtgaacgtgcaaactttgaa

SEQ ID NO: 59377 - DNA, 922 bp, Populus trichocarpa
  Intron number 1 from transcript POPTR_0007s05360.1 (locus POPTR_0007s05360) derived from phytozome v7.0 (chr-ID scaf fold_7; pos 3455053 to 3455974 reverse strand)
gcgatgcactgggtgacgaaggaggcagcttaatttgttgcgtgcatggaatgagcttctatactctgaccatcgaagacgtgccatctgttccctgatgctgacctctttcttagttttaggacttctgcattagtttgtttttgaccatcattagtcattcgatatttggatctcaaatttgccctcggcattttgaagtataacaattatagaactagcctaccttggcccttgggggacaacctagctagctagctacactctttagatatatcggccagaattaatatattcgtgtggcagagcttagtgatgaaaatgtcactagctaggagaatatgtgaattcttggaaaatatatatgtattcgataggcttcctgatctctgcaatattgaaatggaagacaggctttttcatgcctctcaatgtatagaaaatctgcaccagggatatatatacttctgaagttcagctgatattgaggtttgaggccagtcgcggatggaatagtggaatccaaaaacattgtgccctaccacgagctagctgtcttgattaccgaaacatattttaatagttggctgcttaaaatattatggccgattgattaattaagagtaattaatcaccttagagggaggagacggagagggcatagctgacatttcaagaataaaaaggtcattgttgttttgcttagcaaatgggaagctaccacatcagcctgcttctttttctgggctctattatatcagggtggcatgaaacatggaacgcatataaatagcaagcctgcagttaatggttggatcatagggagcctaatcttaaggtgaaaaacataggatacagtactgtcttatactcttgaaaatgggcaggtctccttgctgtgacgagagtggcctcaagaaag

SEQ ID NO: 59378 - DNA, 324 bp, Populus trichocarpa
  Intron number 2 from transcript POPTR_0010s23870.1 (locus POPTR_0010s23870) derived from phytozome v7.0 (chr-ID scaf fold_10; pos 20327466 to 20327789 reverse strand)
caagtgagtttcttggttaataaattttcaaactttatgaacactacattaatatggaagaatatttttaagagaaattatggttctgctgttttattttttatttttttctgacattcaaaagatttacttaaagctaagaatgctcatttgaattccctgatttattggaaagatagtttatttttagttgaatgagttcaaatagattctagtgtgtgaattgaatgtgtttttggctgctgaacaagttttggaacatggggttggtttgtgttgtggcttacagattacttgagttgtctggtcaagaaacaaatttaa

SEQ ID NO: 59379 - DNA, 617 bp, Populus trichocarpa
  Intron number 2 from transcript POPTR_0010s19460.1 (locus POPTR_0010s19460) derived from phytozome v7.0 (chr-ID scaf fold_10; pos 17358203 to 17358819 reverse strand)
caagctatatcactgttttcaaaattgaggtatctctctgcttcatactaggcaaattcggaaagaaagaagaagagtgaaaaatctgaaggggtaacattatgaacatattgcacacactattcaacttttcgcaagcccaggttttttctactggcaaccaagattctatatctcacttgaatttcaagcttgacaggtcaactacctcttagatttatgttggatacagctttcagttgttagcgataattttagtagccttgaagatcatggaaaatccttggtacctcgtatattcaagttatgtctattttcttcaagcattcatatccgccaagctacaatgaacaatcggcatgtcctttcgtagcccatctgtttttggctggaaaaattgagtttccactacaacaatatctaagataaacggtggttgacccaatatctgaattatgacatccatcattttcatcacaccatcaaattcaaagataaacctcacctgctaaccaaaaatcaaaagatgcattgaacaagtagtgaaggacttgcttatgattagcccacgtggtcactttattgttttacttgaatttccactttccaggactata

SEQ ID NO: 59380 - DNA, 987 bp, Populus trichocarpa
  Intron number 2 from transcript POPTR_0002s08330.1 (locus POPTR_0002s08330) derived from phytozome v7.0 (chr-ID scaf fold_2; pos 5808581 to 5809567 reverse strand)
ctggtgtccggtaaaccttttcgactccgctttcttttttgtttgtgtgtttgtttactgagatttatgattcataagctttttatttgacttcaatttaatccagttagtggttttagtagggatttactggacttgcgtttgaatttcacttatggataagcatccctgtgaaccatcatggaactagtttgttgaaagataagttcactgtagattttgttccatagagaaacaactcagcttttaaagtcattttccgaagaagtttaattccacatgtagtcgaggctagactagatatctcccctctttaggaaggagccagtgcaggtaaatgtgataggcacacccttttttcttgaagaggattggttttgttccatgctttggttaatttattataatcaccctggaatctggctggatttttgtttggatcttgtcaaagaaataagctttatatggtggcttgctgccattagcttatttgttaagttcttttttcctggttatctacataactatatgattagatggataatgtcacagtagccatgaattggctgtttctgttttgtctttgggtttatgagatgtagctttgttggacataatattttagtttatagatgtgtttaaataataaacttgttacttgttgggtccacctgcatttcaaaatatatcccaagtttcaggttattggatgtcatgcatgggaatttcatttgtataacggagattttattgctccgcttgtaatctttaatttttttccttttttcctgggttaaaattttggggttcttttatatttttcaagcttgggtgcatgttttccaaggatatattgcagttgctgttctttttcctccataggttttattgtggaaatatagagttaatttaagttatatgcacccgaggtgagatgataattttgtttatctctgttttttccattaaaaaacaatttcagagcta

SEQ ID NO: 59381 - DNA, 752 bp, Populus trichocarpa
  Intron number 1 from transcript POPTR_0001s35290.1 (locus POPTR_0001s35290) derived from phytozome v7.0 (chr-ID scaf fold_1; pos 33627566 to 33628317)
gattaaatctgtgcactgcaagtaagtataatttaactcttgattttttatttcttccttgtgataaccataaattacctgtgaaatggaagcagtgttctatttattctgatctgtgtcttgattgcttttttttcgcatttttttaatgcattcttttctgggttttgattattttccaaagtagaattgtattgatcatgaactgttgagatggatcgtgattattcttgcatgaggctgtttaatgatatttcaggatatgtatttgaagtttgcgatttgttgctcaggcatatttactttgagcgaggtatactggaatcaatcaacttgcagcaagttacttgcttgaaccttaacaaaagtttgtgtctttctggccaatcttgatcttaacttcaattaggggagtgtgagagtgacagtcattatgaatttgctttgatggtaatggaataaaattaggtttctttcaatctctctgtgttcttttcatatttgcatgaaatctagtctggatgctgtggggatagttatagtttttttttaacaatgtattatcaaatactaatttgtatatgcgagcatgaagtttgagatcggagagatcagaggatgaacttgaggaatatgagtctttgctgaattttgtttcagtctttaatttgttaaaatattgttcagcttctttaaagaataacaatgagtttttcggtgcatggatggatagagctagtgggaaggcatcg

SEQ ID NO: 59382 - DNA, 539 bp, Populus trichocarpa
  Intron number 1 from transcript POPTR_0001s19030.1 (locus POPTR_0001s19030) derived from phytozome v7.0 (chr-ID scaf fold_1; pos 16308699 to 16309237)
aaatacttgaagaaattcagacaaagagtcgataagtaagtttcttgttaacctctctcccattatttatcatagaattagtcctttgctcttctggttttgtttttttttttttccctgtttcatcatggcccagataatctagtcttgttttccagaaattaaagccaaccaataaagctgttagaatcataaacaaaaaatagttcatcaattgcttttctttgttctccccttcttaaaaaaaaaaaaaaaaccagcagtgagtattgtttttaatgacatgtaaatttgaccaaggcaatcttggcgtcacccaagttacatcggtacttgttctatttaatctgtctttgattaatcattggtgtatccaatgttaagccatttacaggatcacagtaaaacttgatcttctcactcttttagttactatgaccgtttcaactcatctcgaccctgcagttcgagtcaactcaattaataatttccctgtaattgcagggttggcatccgactcccgacaattgaggtcaggt

SEQ ID NO: 59383 - DNA, 362 bp, Populus trichocarpa
  Intron number 2 from transcript POPTR_0001s11890.1 (locus POPTR_0001s11890) derived from phytozome v7.0 (chr-ID scaf fold_1; pos 9215487 to 9215848 reverse strand)
gggggttccatttctttttgagaaggtgctttatttctctcttttcgttttgtttgtatcttttgcctgctttggtgctgtctatagctttaatcagcaagcattgcatataccattttgttacatgtccagcattcatttgcgcttttcatatttgagtttgtactttgaactttcttctgttagtgggcttggtttataatttgttcgagatggttctttggcatcagtttggattatgaatgcagcataatggttggcaagctttatcaagtttgctaacttaaggtttaagaatcaacttggcttttaagtttggttatgccaaagattaatcaatttcattgtaggttctcttgcca

SEQ ID NO: 59384 - DNA, 528 bp, Populus trichocarpa
  Intron number 1 from transcript POPTR_0001s11890.1 (locus POPTR_0001s11890) derived from phytozome v7.0 (chr-ID scaf fold_1; pos 9216076 to 9216603 reverse strand)
cggctctgatttctccgattaaattcccatcaaaggtaaactactagctttttttcatgcttcagaaaacaagaataattcgtacttggaagttatttcacttgttgctttattattgttactattgatagcagcagattaggaaattttatttacttggaagagcagaagaagatatatattttcactacagtttattaatctctaccttttctttctctttttggctgaacaatcccatcaagaaattcataaatctagatcagtctaatccattttacttactccttgaatttgattttctcaagagtcaaattaaatcaagcttcctgcttctttttttattagttaatttgcgaaatttctatcagcatttatttgtgaccactttttttgtagagccaaatcatcttctgtttttgggttttcttttctttaatcttgacgggtttttttttttttaatctgtttttgggttttcttttctttaatcttgacgggtttttttttttttaattatgaatgaag

SEQ ID NO: 59385 - DNA, 240 bp, Populus trichocarpa
  Intron number 4 from transcript POPTR_0007s09260.1 (locus POPTR_0007s09260) derived from phytozome v7.0 (chr-ID scaf fold_7; pos 8633251 to 8633490)
atctgggaggtgattctaataagatcaacccattggtgagcttattttcttctatgcatctacagaataattgccattttcaatttacataatttgatatttctgagttgtttgttaatcggatctgcttcaacatgtgcaaggcattttgattgctatgttttttttttttcagggacttaacctttgaaatttgtgtgcacaggttccagttgatcttgttattgatcactcagttca

SEQ ID NO: 59386 - DNA, 816 bp, Populus trichocarpa
  Intron number 2 from transcript POPTR_0010s20460.1 (locus POPTR_0010s20460) derived from phytozome v7.0 (chr-ID scaf fold_10; pos 18032324 to 18033139)
ctattggtgttgaatttgcaacaaggactctccaggtttgtatttatgtttcctttttttttttcgtggttaagtattgtgtttccattccatcaatcccatcttgtgatgagatctctaggttttcttttattatttgcattttgtttatttttatttttcattttcacttgttataaaacgagttttgattttggagctatgctatcaatgccatcatcacgtgttagtcccttctcggtcaaatattttatgtttgtggattgtgtttgtagttcaagtgaatcccacatgatccttgctcatatactccacttacatatcagaggaatgcactcaactccaagagcatcgaataatattgatgcctccatacaaagggataaaaaagcaaattcctaatcacccccaaccccaatacttttctggcatgagccctggcgttacaaatggaaacttgcaggttttcagagttttgttagcaattttttatcagattgtgaaataattttaacaatcaagtagagtattaaaacaaagagcaattgcggttattaaccaggagaacattttggttagggaacatgagtaagtagcccgccacttcccctgcaaggagagtcccgcataggaaacactatagagaacaggttacctgattgcgaagtttgaagttgtcatctccaccccagttgtttgttgaatcaactccatgattattcttttctggttctctttgatcgggtaatgtttatttttaatgatgccaaaattaattattgtgcaggtggaagggaagacagttaaggcacaaat

SEQ ID NO: 59387 - DNA, 491 bp, Populus trichocarpa
  Intron number 1 from transcript POPTR_0007s09540.1 (locus POPTR_0007s09540) derived from phytozome v7.0 (chr-ID scaf fold_7; pos 8989621 to 8990111)
aagttagttgtttgtaggttaagcaaactgctagagcctgactgtgatgacgttggttgtttctgggaagaagcaaactgctagaacctagaagtatctctcataaaatttcaaagaataaatagaaaatgtttagttgatccttgaaacaaaatgccttttagtttatctgcaatctctttattttatctcaatgaactttcatagtttgaaaatgttgagtgttttctccagcattgtcgagttcttttgaataattatgcacagatatcctgatgtactgggaaatatatagaaacatttagaatttttcggtgaagcactgtcattaaggcatcacaggattgtcttcaatccttttgattggatgtatacaactggacaatatttttcttctgaatccatcatatatcttctttggggtttgtcttcaatctgacatgcagttgattgcaggcagttttgaatctgcaagttccagtggaacattc

SEQ ID NO: 59388 - DNA, 379 bp, Populus trichocarpa
  Intron number 2 from transcript POPTR_0010s00530.2 (locus POPTR_0010s00530) derived from phytozome v7.0 (chr-ID scaf fold_10; pos 282350 to 282728 reverse strand)
acttgggcatttcggtaacccttctttccctaccctcttatattctgttgcttttccaatgaaatgatcataatttatcctcaagtttctctttattactgttttcacatttttgtttgctgcttcttgtgctcagtcttcgattttgatttatttatttgtattaaccccttctgcattactgaaatgtatttacatgtggtttctcaatctaattgagaacagcgctttgcggtttcaatatgtgaacttcaatgctcttccattcctgtccttgatgtctaccaactttcgagtttctcttgttaaggttcattgttctaatatcatcagatgtttttcagagtccctcttcagcaaggaattcatcccgaggtat

SEQ ID NO: 59389 - DNA, 646 bp, Populus trichocarpa
  Intron number 1 from transcript POPTR_0001s22710.1 (locus POPTR_0001s22710) derived from phytozome v7.0 (chr-ID scaf fold_1; pos 21595302 to 21595947)
ttcctgctctgcttttacccttcaaaatctttcaggtattttttagagcaaaacccatgtttctcagatgtccactgttctcatttttctttgttttaagtggattcttaacaaagcaagtgaggagttatttttttccaggtggtcttgtggttgactcttcgcaatgttgcactgtttcgttaaatattttgggtttcttttttgttctgtgggcgtgaacttgttcttgagcagtttattgctattttttttaaagcctagttttccatttgtatagaaaacccatttctccagtgtttgagtgggttttggttttatttttgcaattttttctatatttttggtttatttttgaagggtttatcttatcttctgtttcatcttaaaaggttcaatctttgcaatgctgctctgtttcttcttttattatgtttttttttttgtcacttattttttaatcatatccggttcaaatttttctttctttttgagtttgctttcattcttcttttataaagaaaaacacaacttcttgtttttattcaaatctcttcagggttttatttatttattatttttatgcttatctgttctatttctgtttgcagaatttcatagatttgccgagtttctgtaattggag

SEQ ID NO: 59390 - DNA, 460 bp, Populus trichocarpa
  Intron number 1 from transcript POPTR_0001s00950.1 (locus POPTR_0001s00950) derived from phytozome v7.0 (chr-ID scaf fold_1; pos 770769 to 771228 reverse strand)
ggcttaaccaccaacttgaatgtggcgtgtcttttcccgcgcttttccttgtttaacgggtaactttctccttacaccaaagtgtacacaaacaccaaaagtacgactaatttctccttgattggagtcttttagtactgcaaatatcccttcaaattaacgaagattatcgtagtagcataggtgcacaattcttgaattcaatggctagctatatagcagcaaaacttgaagggaaatagtcaaaaaataataatatatagacgccgaaatttctatgcttctgactttgggtatctatttatgacgtctctcttggtagccaaattgcacctctctcattagttttttctttacttcgttggtctaaatttcaaagcttgtcttgtgctgcatgcatgaaaatggccccaccttcctctcaggtaagctttacggtgaaacggcaagagcctcggct

SEQ ID NO: 59391 - DNA, 412 bp, Populus trichocarpa
  Intron number 1 from transcript POPTR_0007s04200.1 (locus POPTR_0007s04200) derived from phytozome v7.0 (chr-ID scaf fold_7; pos 2533630 to 2534041)
ttttaacaattttttcagaagccattacctttcaggtacattcaaatctccttttctgttgatgcataacgcgcacacacacaaatcttgatttgtgcttttgggtactgatggctttgttttgtttaatctaatgatttggaaattcttagctttgaattgggatttctatttttggtatcaaatatcttcttttctgaatttctgcatctgctgtttttttggttttttattttatgtgttgtattgtgaaaaagattccagctttgatcacacttttcaattctacaataatgtgcttttatttccttttttgaatttatttggtttctgttaggtattgtttaaaatccgtgatttggtttgtgttttgatagggtgacctagggcacattgtggtgttggaggagct

SEQ ID NO: 59392 - DNA, 471 bp, Populus trichocarpa
  Intron number 1 from transcript POPTR_0001s08810.1 (locus POPTR_0001s08810) derived from phytozome v7.0 (chr-ID scaf fold_1; pos 6725932 to 6726402 reverse strand)
gcaccaaggtatgatcttttggctcttatttgtttgggtaatagaaggaaaagaaattctggtttattggttattttgttatttaggacattcaaaaatggaaactttgagaaaaagaaggtgttttgttgagttgtggattttctctctggtttttgcagcaactaataatggaattttatgtttttttactaaaaaaggaaagcgacgatattggaatcttgatttgattttgtttgtttgttttatgagaaaattcaacagaagaaaattaaaatttcttaacttcatgtactgcacgggggaagatttccttttttggcttgattttgaagttcagttacttagaaatggatcgcaatagagaaaaggagtaggaggattgtggattttgattgttcaattctatcaagttttattgttttagctttttaacttattgaattaagattttgtttttgtgcagaaagc

SEQ ID NO: 59393 - DNA, 804 bp, Populus trichocarpa
  Intron number 1 from transcript POPTR_0002s20260.1 (locus POPTR_0002s20260) derived from phytozome v7.0 (chr-ID scaf fold_2; pos 16210669 to 16211472)
gttcctggccatccgtttcttcttcctcacgtctggtgagcattggtgattattttctttaatatttttcttttggatggtttaatcttcttgcctttatgtgtaactatctagcatgctcatcaatagtaattgaaaaaaaaccatgactagctttgataatacgcatcttttgattttatactcttttactttccttgaacaagaaaagaaaaagagcctagtcgaagttcaaaaggtgttggttactgctctgctcatttgcagtttaaagatggggttttacttgttttttcatgccgacaactgggatttgaattcactgcaggacaggtgaaggctcttaaggaagaaatggcctccaatctgtccaaatcaccaaattaatgcattgcatcctatatgcaattagtgctgctactaaacactgttttgttgattgatgaaacggactgcaaagaatttatgggatgaaatctggggggccacaacagttaagtttgaccttaatgtaattggattggagattttctattagttacaaaaagaaagatccaaatttattttatctgagaagatgtgtcaccgtcttgatgtaacttgattagtattttcttgcccaaacatattttgtaatgatttaagtggcttggttcgtgctaattttggcaacatcattttcggagtaaagaagatgggcacattttgctgtgttaaatagtctatactaggagatggtgttattatcgtgatgttttctgtgtctctttattttttagatttacctcggtattgatcggaagg

SEQ ID NO: 59394 - DNA, 713 bp, Populus trichocarpa
  Intron number 2 from transcript POPTR_0002s25410.1 (locus POPTR_0002s25410) derived from phytozome v7.0 (chr-ID scaf fold_2; pos 22477720 to 22478432 reverse strand)
agggaagagaagaggaagctgagtgtcatagcgaggtaaatgagtcaatcttttgttaattaccgagttaaataccatattaagtatgtttaatgttttattattaaatcattattaaaaaataataacaaattaggcaatattatcatgtccttggctatcgtgcgccgagtaagtgacgttggtaaacgtgagcacgttttttttccttccggattttctttactttttaaaaaaacaaaaaaaaaacaaaaaaaatgggttgaattgaatgtttgtatgatattgttgtgagagttgtttttttaaatattttttatttaaaaatatattaaaataatatttttttatttttttaaatttatttttgatatatgttaatatgatttgaaaataaaaaaaataatttaaagtaaaaaattaaaaaatatttaatttttttaaaaaatatttttaaaaaataaaaacaaacatacatgtactgatagaaatttgataggataaggttttgcatccatctacgaacgtcaaatatccttatctcatgattgagtgaacaatggtgttttgtatgttatgtggttgaagatgcttttaaatagattataattttaaaaattattttgttttgattgtttaaatctgtttttcatcgtaaaaactcgagttaaaaaaaactataatttgtacagtttattgcaataagcattaca

SEQ ID NO: 59395 - DNA, 490 bp, Populus trichocarpa
  Intron number 2 from transcript POPTR_0007s02070.1 (locus POPTR_0007s02070) derived from phytozome v7.0 (chr-ID scaf fold_7; pos 1218140 to 1218629 reverse strand)
atttcagagagtaaccccaaaaattatcagatgtgagcaaatatatcttcatttgaatttgagatgattctattcacagatcagttgattaagttacctttaaagatgatggtgcttgccaccttgagtggtgcggtttatagttcgaaagagtattttaattaattctttgagatcagctgtaatttttaatgttagcagcttcttctttctttttctttttctttttgaagttctcatcttcggtgcaatttctttaggaaagctactcaatttgattccaaactcgttttatagacggggttggtggattagtacattaggttctttgaaggacgtctgtagaaacccccgtaggctacctgatcggtcaatgtcaagaattttctcgtttttagttattaaatgatcttgtaaattccataatgttaattgtaataatggattttttgcaggcatcataggcggtggattgctgagaaattgggaa

SEQ ID NO: 59396 - DNA, 390 bp, Populus trichocarpa
  Intron number 1 from transcript POPTR_0010s07180.1 (locus POPTR_0010s07180) derived from phytozome v7.0 (chr-ID scaf fold_10; pos 8333550 to 8333939)
gagttatcaaggtgagggtatcgatctagttacaggtctcatcgtatatttttcattcaactgtttctggttcctgaaatcttttagttttatctgctccttggtaggctgcagtcctaaggaaagagaaattgattccaagatttcaatttagtcctagtaattgggtgaaagaattactggttacatctaaaacatatatttgttatcaagtcgaaagccagaaccaaatcattattttagttactggtaattaaatcggattgatttctcttcactagctttcataaaaacttttaatttttattattctatttttttgttttattatattcaagaaataatcaaacgctttggttatttagggtgcttcctttagggaattttacc

SEQ ID NO: 59397 - DNA, 945 bp, Populus trichocarpa
  Intron number 3 from transcript POPTR_0007s01520.1 (locus POPTR_0007s01520) derived from phytozome v7.0 (chr-ID scaf fold_7; pos 846228 to 847172 reverse strand)
gtgggtaacttgacagattttgtaaaggtaatatcaataaagtttctcttttttttttttttttttatcaataaagtttcttataaatagtagtgtgtataggggtgatcattttcagttcggtttggtttttataaaaaaaaaaagtaaccaaactgaatttttttttaaaaaaaccgaaaccgaaccaaaaccggttcaaaccgaccggttttggttcggttcagttcaattttttaggaaaaaaccggttcaaaccggtttggctcggtttttctggttttacctggtttttcccggtttggctcggttttggatcggttttttccagtttgggttcggttcagttcggtttttttggtttcaggcttataaaatcgaaaccgaaccgaactggtcagttttttcaaaattttaatcggtttaatcggttttttttcaaggttcgattttttcggtttttttttctggttttctcgatttttcagtttttttactcacccatagtgtgtgcttgtataaagggttcctaattaatttatcaacctctaatccagtaattgacttagaactagaaccaagttagtggaaattaacctggtcgagcctagataacgcgcagatcaagctataatcttattataacttgatcaaaatttcatttgactttttttgtaaatgaatgctgttttagtttttttttttttataaaaaaggaaattcttaaaacaaatcattttagatttatcctgtacccaggactttgcttgtacttgtatacataaatcaataaaatactgaaaatatttctttattcatataagtgtattgtgtgtaaaacttagcaagtaattatttacatattgagcttcttcgcattctttttctttttcattgtcggcatttgcaggaattgtacaatttaggtgcgaggaaatttgctat

SEQ ID NO: 59398 - DNA, 233 bp, Populus trichocarpa
  Intron number 2 from transcript POPTR_0027s00410.1 (locus POPTR_0027s00410) derived from phytozome v7.0 (chr-ID scaf fold_27; pos 217368 to 217600)
gattgacaggatcaggtagcttctatggtaaccttttaattatttagcttcgaaacattttcttttctccttctcatatctccttctatgaaaattgaggactttatattcatttaataatcaacgatagtatttcatcatgtttgattaaagttattatgtaattatgacttgcttatagaaacaactctcttgcaggttttgagatcatatcatcacatttggagaaactc

SEQ ID NO: 59399 - DNA, 697 bp, Populus trichocarpa
  Intron number 1 from transcript POPTR_0007s07100.1 (locus POPTR_0007s07100) derived from phytozome v7.0 (chr-ID scaf fold_7; pos 5426715 to 5427411 reverse strand)
actgctaatcatcctgattacgcctctgtgagttttttctgctcatgaattggtccttttcttttgctttgatttccgggcacgctctagatcttgccattgtgcgttccacgcccgcatatcgatgtggatttactgactgttcagtggggtctagagaatcttctttcagacttagacacacacatgttgaatctctttggtttgtttgattgtggggggggggtgtttgagatgtttgattttaaaggtgctgggatctgggtttgatcttcttttatttactgtggtgttttgctttgtttcttcttgtttgggttaaatggctataaagtttttggatagtctgattgaatatcgaagaaatatgtaaagtttttgtttgtgtggattatagtcaattgtttgcgagttgttaaatgtgttttgtgaaatgtttttgttttctttaattttcatttggaagtcatagaatttctcctgcaactattagctgattcatcttgattgagccatgttgtttctaattcttggacttggtactatttttgtgttgtaacattaacacctaacagtctgttccttacttgacaaaattggagactggacagtaaatgatctgtttcttgattttttctttgaatattattgtgctgatgcagttggctgcgaggattgttgtttcaaatctgcataa

SEQ ID NO: 59400 - DNA, 761 bp, Populus trichocarpa
  Intron number 1 from transcript POPTR_0001s10570.1 (locus POPTR_0001s10570) derived from phytozome v7.0 (chr-ID scaf fold_1; pos 8219289 to 8220049 reverse strand)
atcataaggtgactgttattgccatcacataaaaactattaagcagactaactttatgtaacgagcttttcatttaggttaaaccagtcactaattccaaatctttgaattatggctaccgcacataatttaaaatgttgaacttgaatacataataaattccactcctaatataaatgtttcattaaattaataaatttaaactctaaattgatgtcggctaagaaccagtgtctagttcaattcgtaaattagacagagtcaactttgttgcatgtagccgtagattatatatgatgcatggtaaaggtcacattttgatcaaataccttaagataagaaaccctcagataaattattattattattgttatatttattaatacatcaatcacaccttaaacactctaattgcaagcgcatgttctgtgactaatggttttagtagtagggagggctagaaagcaaattccagaaaactgtttggtagattacttttgtctcccttataaggtttgtaaaataatttaacatcttttaggtcatgttggcgtcgcctcttgactgttttgcaaatgaattcttgaagcttctgaatcaaatttggtccaagcttggattttgttatctgggattttttctttaataacataagtttagaagttgggtttatggctgctcctcttacacgtggaaatatgatcctgattgcatgggttttacatgaggccttggttcccttgcacagcctgacaggcctg

SEQ ID NO: 59401 - DNA, 916 bp, Populus trichocarpa
  Intron number 1 from transcript POPTR_0001s28870.1 (locus POPTR_0001s28870) derived from phytozome v7.0 (chr-ID scaf fold_1; pos 27638838 to 27639753)
gccattttccggtcgagctatcgggtatgtaagagagaagcttttgactccttttctcttttgcttttctttttattaagtcttataatttctcaataaaatcttttcattcttattaaatcaagaattttatacattacaatctcaattaacaaaagacaatttattccagtgttgtctcgatatttgaccaaaatcaatttttttcacaaacacgttactgatgctttcgggaatatcgagatagaatcacacgcatggtaccttgttgtctttcactgcccaccagccgatgtctgcattttggtaaaaacgaaaaaaataaaaattaatattattttgcatacattaatattgttttgcattattctaacttaaggtcgtcatttcacgttgcgcacaggaattttggctgccataaaggactaatgataagtcatacccaccagccgatgtctgcattttggtaaaaacgaaaaaaataaaaattaatattattttgcatacattaatattgttttgcattattctaactttatgaggaatgctatttagtgtgataaaaattattttttaaaatattattttatttaaaaaatataattaaacaatatattaggctgcaagcactaatgtacatggcaaaattcataaaaacgaaatggcaaaggggaatacaaatattgtttagctcgaagttagaaacaatacacggaattaagtggtctgcgtctctggttcttgttgctgagcatgtcatcttactctgatctgacagtttggaaataatattgctgtagaaagaaagtctaaggttataatatccacaaaattcatcattgcaatttcacttcattcgcaaatcttcttgtgtttttcagaacgaggtgaagaacgagtggactacattcctgga

SEQ ID NO: 59402 - DNA, 296 bp, Populus trichocarpa
  Intron number 2 from transcript POPTR_0010s17670.1 (locus POPTR_0010s17670) derived from phytozome v7.0 (chr-ID scaf fold_10; pos 16166836 to 16167131 reverse strand)
ggctattcaggtaaatattctccctagcaatcatatgtgatttgctgtgttcttctttgtttagatgtgctacttattatcaacttacttttagatctaaacaggggttttgattgatctggtttcttatcacattaaatagacgaatttgaagtacaatctgttgagaaataaagttagtaataaaagaaaaatttggagtgaaagatttgttccattgttgcaaaatgttaagttggatttttttttgttttgtttcagggtgttctattgctcaacacagttctcactggtaa

SEQ ID NO: 59403 - DNA, 303 bp, Populus trichocarpa
  Intron number 1 from transcript POPTR_0002s23210.1 (locus POPTR_0002s23210) derived from phytozome v7.0 (chr-ID scaf fold_2; pos 20656309 to 20656611)
ccttgatcttgaagtatcgatctctctttcattctatatatattgcttatttgacacattttaactatacagtttttctagttatagaagtactgaaatgtcatagtttaatgcccacacatgtcaataagactaagacttgcaatactgtgaagcttattttcaaagtaagtataaagtttttctcgattctgacttttctcaaacatgcatcttcttagtacttcaatgaagtacatatgctttcttgtcacttcaattgtctgatattggctaacattttgttttttgcagtcaggcaga

SEQ ID NO: 59404 - DNA, 508 bp, Populus trichocarpa
  Intron number 3 from transcript POPTR_0010s11130.1 (locus POPTR_0010s11130) derived from phytozome v7.0 (chr-ID scaf fold_10; pos 11486133 to 11486640 reverse strand)
gaagtccaccaaattaaggtttctctcactcccttttaaacattaccagtaaaactcctgcaagctttttgtaattcatcaggttcggtatgagtctaatggttctaaggtgaggaaaaccgaaagttggttgcttatgcttaaggttcgatgctttgtagttcatatttgatcaaacaacatgactatattgcatatttactgagatcccatgttagataaacgtgattaattgttggacttgaaatcaaacattatctggaagtatttgaaaatttggtacatttgtacatagtttcttttggctctttgttgtacctccttgttatttggtttgtttccctttgacacctcattatgttcttaattcctccgtaagaattttggtgcttttattgcttatattgcctggttagtgtagctgtgtgcatttcatcctctgaaaatttaggttttcttgttctttgcatgaaccaactgctttttgacaatttttctatagaggtgt

SEQ ID NO: 59405 - DNA, 921 bp, Populus trichocarpa
  Intron number 1 from transcript POPTR_0001s07270.1 (locus POPTR_0001s07270) derived from phytozome v7.0 (chr-ID scaf fold_1; pos 5480621 to 5481541)
actcgggctttgtctcggattgactcccgagttgagttttaaaactatgataataactatttttattctaacatatcttaattgcacaatcttggaattgtaagttttttacaaggatattttataaataaaaaataaaaaatattatctttagggatatatcctttttatatttcacttaaaaattatactagaaacatatttatttttttattttaatttttatctttttaatttttatctttattatcttgattcagtaacaataaccaaaaaactaacctaggaaacaactatgaatgaagaaagtgataatgttcttttaagaacatagtaactagaaatttcgttgtagtcatatgtgtatacttagatttaaatttatagtagaaaataaggataagactttaaacaaattcagttaacacatggaaaaaaaaatacttgttcttgaaacattatccaactgcagtacgagaaacgtatccatattacaaattcgaggcaagagtttgagcttaattattctgcaaatctccaattctaagccaaagagttcgtttacttggtaagttagctgtaagctcctggaatttcctcgagccagtgcctgtctatagttatcagatccaagctaaagaaaaacacactgggctagtatttgcgcacagacagacaaaagggatttgcttttagggttttgtgcacttgggttcggtttaaactgctatcacaatccacaacggtgttttatcaatccaggaagtcagcaacttggggtttctgtatcattaacagttcctctaggtttcttcattgctggtcagatttatggcaatcagtattttctaataaaactcggatcgttgggtgcaaaatcggcaagtacaaggtaattaaagagctcggggagggtacctc

SEQ ID NO: 59406 - DNA, 829 bp, Populus trichocarpa
  Intron number 1 from transcript POPTR_0031s00200.2 (locus POPTR_0031s00200) derived from phytozome v7.0 (chr-ID scaf fold_31; pos 11055 to 11883 reverse strand)
tccttcgtccctttgtaaaggttcaggtatgatacgagtctgcctttaatataatataatataatataatatcgaattaagttgaggtgattactggttttgtactctgccctttgtaggagacgatattgccccttgatttggatattgaatttcgggtaagcaatcgtgttttaattcctctctcgctctctccatatcaatctctatgtctgccttttaattgaattttaatgaattaaccttaattttaattcccctcctcccctttctcttgaaaaaatcaaagcgtatccaaaattaagaatccttttgctaccaacttcaactacttattttaaaaatcaaggagaatttcttcaaaatttcttactgatttcccaatttccctcgccaaatttcttaaacctttctcatgatctgtgcttccttttctgattgaatcgaatcatctcatctggcgttcgcatctttcttgcgtgcttggaaggtatattctactttcttttcttgtttttctaccactaattttgtttctttacctatttgttttgattcgtccaaataaaagtgcccatttgattgtgggatttgtaagtgggattcttgattgatcaggtagaacttaattatatatgttgaatgatcaggtagttcttagttgttcattttgctatcaacttcaattacatatcttaaaaacaagcagaatttcttcaatttttattttattttagattacttggcaggctctttttctgacaatcacttcaaaatccattttttattcaatatttatttgtaactgcagggccgaaaaagaaagggg

SEQ ID NO: 59407 - DNA, 715 bp, Populus trichocarpa
  Intron number 1 from transcript POPTR_0001s24470.1 (locus POPTR_0001s24470) derived from phytozome v7.0 (chr-ID scaf fold_1; pos 23747018 to 23747732 reverse strand)
tcatcaacctgtgtttgcacctccttgcagaagtttgttaataaatagcttccaatattattatattatggctctgagctgttgttttttttattattgattctagctcggaattcagggataggttctaaaatggtgggactttttatttgttttttgaattcgttgtttgtgttttctttctcgcgtgtattaatttattctatttttagtttcattccaagctgtctcttcatgcagataaactcgatatcagtgcaaacaaaacaaataaaaaacataaagaaagaattctctgaagagagtttatcctgaaataaaatatacacatttccatttgtaactttaatttctgattagacttgttctcttgctcactgcacttcttatgattgcttaaagcttcattcattcaatgcgaagtgcatgcatattaatatcttaattatatgcttccatctcctgtccctttccaagcgatttgctgactttgtttaactttcccccctttttagttcctttctcttaattccacatgactgaggtaaatattcttcaaagtactctctcccagtttcttccttttcctttcccctctctctttcatgaacgtagaatgtacgtagttataaacttatgaacgtagatgtgcgtatcttcactgtgatatcttttgaaatgtaattgactttcctttttcagttgtaaacagccc

SEQ ID NO: 59408 - DNA, 425 bp, Populus trichocarpa
  Intron number 1 from transcript POPTR_0010s17030.1 (locus POPTR_0010s17030) derived from phytozome v7.0 (chr-ID scaf fold_10; pos 15781616 to 15782040 reverse strand)
tgtaaccaaaccaatccgttgcattgttaaacttggtctgtttgtctctctttcttgtacccttacaaatatttctgctttatgcctgacaaattgtttctattcacgttgttttggtttgattgatctttattggtgtaaggtcactactttttcagtttttattgttgcttgctttcttgaggatatatttgatctccatttgaaactgggctgtgatttttcttttcagtatgcaagtgattaagtttgtaaattgcatataatatcccacgaagccaacaccggtattcttaatatatatccgtgacaagaaaatgaaggaatgaagaaaaagattcgatttcatgtgtgattctctacagtttgttgattatgtgacagtttttttttcgtctcaggaggcgcggcaattacttgcaaga

SEQ ID NO: 59409 - DNA, 188 bp, Populus trichocarpa
  Intron number 1 from transcript POPTR_0002s15860.1 (locus POPTR_0002s15860) derived from phytozome v7.0 (chr-ID scaf fold_2; pos 11820601 to 11820788 reverse strand)
attgattttctcttatctttgactcctcttgatcggttagtttcactctctcttcatttttagttatacacgcaaaggggttttgctttgagtgttttttctttctttcttgtttttttttaatgattgacttcaacgtgtttgattaaatgcctaagagagtctgattatatgttttactatagggc

SEQ ID NO: 59410 - DNA, 862 bp, Populus trichocarpa
  Intron number 1 from transcript POPTR_0007s15270.3 (locus POPTR_0007s15270) derived from phytozome v7.0 (chr-ID scaf fold_7; pos 14866316 to 14867177 reverse strand)
ttcgctcctcctccgccgccgcctctgtatccaaggtaagttctctgtacaatgcgtcttcatgaataaatttggttttatttatttcttgaattttgtttttatgactaaaagggtatgtcctctagttgtgtttttctgtgttattaccaacttgatactaccattcaagaattcctcaacactaccactactgcttatgctttggttagtctgttttcttgatcttttagtattattttattgacgttttagttgaggaactgtaaattaatgcagaaaatatcgccttttttctaaaatcatttgagcctgatggctcaggttctttcttttcttttccttgttgccttcggctttgttacttgcggactaactttttcaaaaaaaaaatttaattgttccatgcttgcacaaattacttagggtttggaaagagtccaaggattagatagtgtttgagaagacttcacttattcgctgaggtaccgattgattttgtagtttacttgtaattagcagtatagattagctagggtttgcttcaatgtgaaaccttaatgttcatgtgtactgagtattgagtgacattaggtttatggaattcaaattaaatataaagtatccattgattattgtttgtgcagttataagtatgaaatttcatgtgttcattgagtgtgtattttgcgcttgagcaggttttgatttttattgattttgatgtttataatatcacgtttttatttatctaatagcattttgttctgttattgttttttgccaagtaatagattgatctcttcacaatcctggcatggtttcagaaaataacaggtttgagttccgcgtcaactttata

SEQ ID NO: 59411 - DNA, 643 bp, Populus trichocarpa
  Intron number 1 from transcript POPTR_0002s18480.1 (locus POPTR_0002s18480) derived from phytozome v7.0 (chr-ID scaf fold_2; pos 14384481 to 14385123 reverse strand)
cccttttaaggtttgatgctctactaccccactgttaattctttttcctcatttatttggtctctgttgatggttttggttggttcccttgttcgagtgataatgatcagttgatggttttgggtaattagctgggaaggtttctatttgattgttgggtttgatccacttattattctgttgcatcctattttgcgagtttatatatatatatatatatatatatatatatatatatatatatgtgattctagtaaagcaatcatggattgaaatatcaactatagcagcaagcaatgtagaaggtaacatgagatgtgtcatattgccataactaatagtaattctgggcatttcatttggaacagcttgatcgtgtttttgcatattactcaaccacttcttctccttcttctttttttgggtggttcaatggaagaaaacagattttttcgcattttgaagttcttaatttagaatattttctctcttttgtttgtgaagtttgatgaattgtttcttaggttctatcataaggggtttaaattttaaggaattctcatttaaaatgtgttgattttgatgactacggtccatcttctcttcaggggcattacttctggtgattaagtttcacatttgg

SEQ ID NO: 59412 - DNA, 776 bp, Populus trichocarpa
  Intron number 3 from transcript POPTR_0010s06910.1 (locus POPTR_0010s06910) derived from phytozome v7.0 (chr-ID scaf fold_10; pos 8146011 to 8146786 reverse strand)
attgttacctcaacaggtttgttttttgtcaagcatgggaatctctctctacctcttggaattattgtcagattgatttggatttttttctctgaaactgacatctcggcctcgtggattgttctagtttgctagctaggagccaaaatctttttgtttgatatttctgaaatcttagttaggtgggtttatgaaatgtttggctcacagggaagtctaaatgaagcctatagtcatttctgtaaccttgtgaactgggaccctccacacacacaggcacacagatttatcaacagggtcagtgattttattgattttttggagaaactgcctgttcaaatcaaacaggaaacttgtacaatttacagagcctttttcatgtatttgaaaatgagacatgtcaccttaatctggctgttctaattaaagtaactgtagaagtaggacgcaccaaagaagttgatataattcatgtccgggttaagggccagtcacatattaaatttatttccgagcactgttacagcaaacgatttcgtttgaggccacctctgcagacttcagtctgagatttacactgtaaatgtaggcagggccagggtggttggcatgtaactggtcccagaatactagttgggccaaatggtcccttaccttcttttgcagtgctttgtctgtgtctgtgccctgattgttataatgcattacctttctatagttggaactcttcattaaaacattttctttgtaattgcagttggagcaaattgtcaagc

SEQ ID NO: 59413 - DNA, 726 bp, Populus trichocarpa
  Intron number 2 from transcript POPTR_0001s46170.1 (locus POPTR_0001s46170) derived from phytozome v7.0 (chr-ID scaf fold_1; pos 46619348 to 46620073)
cctcgccagacactttacatcatcctcttgttaaggtaacaaacataattactatgattcttgttctaattgaggttagttttttacagtgaagttgttgttgttatcagtgttgtttttgctgttgttatcagtcacacttaaaaatccaaaacatatgcgctggcgaatgcagatttgtttcgatctaattccgagcatagctatttattgatgtgctggttttatttaattataatccaattgattaagatttatcagcttttatgcatatcttccgtgttgattaaaacttttatgtgctgagcatctttcttttgcttttgaaatttttagaggatcaactcgttgacttacgatggtgtgttaagaaacagtaaactaaatatactaattcttttcaccaaaacctgaatcttaacttgcatggtaatgtggttgttatcactttgaatatgtattatgattcattggaattaaattttttgatgaagtaacatttgtaagctgttagttagtgagagtgttggtatctctagtgttattcattaggaaacaaggagtttttggatgatatttgatgggacttgcaaaggttgcatgtctgtggtattatctctcacttagttaaaggtaatgatcaataatgatagtttatacgttagtgcatctatcttttgccttcaattttcaggattccgtggccgatatagtttgggcattggt

SEQ ID NO: 59414 - DNA, 817 bp, Populus trichocarpa
  Intron number 2 from transcript POPTR_0007s14380.1 (locus POPTR_0007s14380) derived from phytozome v7.0 (chr-ID scaf fold_7; pos 14175994 to 14176810)
tgcattgatcccaattgtacttgggtcgaacagtaaactcctttatgagtctttgcaaatggtaaagcttgcattttttgccaagaacttgaaaaattacagaaaccaaggagggttttgcttttcttttccatacaaaattctgttttttgtgcgataaattattttgatgcttatttccatcccatccaagtataattgacacgaactttactgaatgcatggagcatccacatgttgtataagattttagtatcagagttatgaattataaggagaaattacatctgagcaagaaagaacattggagtgccctctacacatgcctgagaagttagaatgcatgtttgtatggtgatgaagtgtggttttagaacgtgtaattgagtttccattgcaagtttttgcaatttgtggagtgacatttttccgttcactgcttcagctaccaaaagtgattctgtattcagcctcctaggtgttttatgagggcgtcatgctttgcgttcccttgttcacataacctattttcatcaaatagcatattacttccttacaaacagtgtctgatttctgttatctgcacttcttttaaacagtagataagaaattaacgaaacttgatacgcattagtacttcttctctaatttcatttatcttgttatgtaatataattgtggtagttgtagatcattatcatgtccatctggcataggaaatatcatccatcactgtgaagttataatattatgtgggtgatatgatgttgaaatcttcatagggtccatagagctgggcctcgggaaaaaatatact

SEQ ID NO: 59415 - DNA, 803 bp, Populus trichocarpa
  Intron number 1 from transcript POPTR_0007s13000.1 (locus POPTR_0007s13000) derived from phytozome v7.0 (chr-ID scaf fold_7; pos 13184593 to 13185395 reverse strand)
aaacggcaactaaggcattggtaaccaagcacgaggtaatgctctcatcacagcttgtattccttgtttcaagcatcattgtaatgttgctcttaagattaatgtcatatacaagtattaaagcatcatttaagccaggatacaggcaacgtagatttctgatctttcaggacaaattccatgggaatggtcaatcaaattctgcaccgtcattcgcctaaccatcaaagtaaattcttggcattatgggacctcggaataatccaagaaagtgaggatggaaaactcataaagtgtcagatttatgtggtccatcaacttttccagctgatcattaggccaacatccagttcacctaactgcttaccatatatacaattgaaaaggctatgcctgaccaccatctgttcaacttcttattctgtctccaagccaaagatagcccactcgagatccaatcctacataacatgcaatgtcctaagctttctggttcaaacaattccattcgagatctaagactttggcctttcatttttcattttcatcaaggattctcttgccaagcaaaaccagtcgtttattcagatctttcaattctttattatgcatcacactgtcgttattcatgttcagtgtttttccaacctgcctggaacttctaactgcttcattacctgaactatcattatatataaccaaacccatgacttggattttgagctttctgtggtctaagatttctcaccccctacggtcttccttgcaggttcaaaaggtaccaaaagctacagcaaattacaa

SEQ ID NO: 59416 - DNA, 722 bp, Populus trichocarpa
  Intron number 1 from transcript POPTR_0002s05490.1 (locus POPTR_0002s05490) derived from phytozome v7.0 (chr-ID scaf fold_2; pos 3580570 to 3581291 reverse strand)
tcgtgtgtttggattcaaaccactcagttttcgaggtaacgaagagattgaaaatgtaaagtgaagctaagtcagggattatctgttgtttcttcctcttttttcatttttttttaatttttgctgtgcataaattctagggttacgatacctgttttagcatattttgaatccaaacctcagctttggtgtgcctcagttttcagttttgaataccagcttggtattgagttttagcatattttgtatttcgaattatgaaattaattgcttgcaatagcttgatgaccaacatggccgagcgaacagtggcaataattagcctgtggaaaatgatggctatcattacgtactctgaaagcagtatcctttcgtgtccagtcttaaatttaatgtgacatgagggatttctcggtgaaaacacgtagcatttggttttgttaacgtcgatgacctcgtttatttgggtgatatacgaatccagccattgattgattaccaccctattaaagaataatcgaaatgtactccagctaaaatgtattgttgagtgatctatcctttgtcttgttaaggttgtgataggttgtaatgttccaatttaagctacttgatcaatatgaatggcattctttgtttatttttatttttttccctttctgatggttgaatacccattatgtgaccgatgcagaccaacggactggaagtaaacttgaaga

SEQ ID NO: 59417 - DNA, 646 bp, Populus trichocarpa
  Intron number 1 from transcript POPTR_0001s27260.1 (locus POPTR_0001s27260) derived from phytozome v7.0 (chr-ID scaf fold_1; pos 26149730 to 26150375)
ttctcgacgaaactgctcccgttaaggaccttcctgtcaaagggcacctccctgtaagtactgtttacattgtttcatttgataaaattataatgataatttcagagatgattaataattgattcatatattccttagtcaacaatttgtctccgttatgtccatgtgtgaagtttataaaaccattcatcacgtgtagttcgaaattccgtgatcattgtagttgactagtaaattgtaatagaaaattagaccgtgatggctatttttggattagcaccatgtatcctggcaaggccaggccctcgggaaagagtttccagcaagaacacacggttaattcatgagctttaaccaagtccaatggcaagagtcgaacctgggatcttggacaaaaacagactgccaagtccagctcttctccgcggggccaactccttggagttgtgatggctggtcatactaggaattagtacagcaggacaacataaataaccagtcatgaaaatcttcaaatttaacaaatattgagaattattaacggtaatatactaatcttaaatcaaattaaaaaaaaaaatagaccagacaataaagatgaaatgacatgaaatgtgaaacttgactaatctttctttatttagga

SEQ ID NO: 59418 - DNA, 807 bp, Populus trichocarpa
  Intron number 2 from transcript POPTR_0001s12150.2 (locus POPTR_0001s12150) derived from phytozome v7.0 (chr-ID scaf fold_1; pos 9404766 to 9405572)
tctcgcccaaagttctttgacgctcaaagtaagtttttttttaatcttctcatacaggagaaaaaaaaacagagagagaaaagaaagagaaagagaaagagagagagagagaaatgactagtcttcatcgttcaagaactttattgattgttatatgaaggtcttacctatgaatagcatgactgattatgttcgtctaccagtactagttgttgttctcttccttggaatctcgactctatctctttaacacagaaacagagttttcttatgcttctgttagattgatgtgaaaaggccagccagatcagttatggattaacactcatcagtactttgggtgaataatttctttttctttttttttcatttaggatttgtaaacagatctactatacgcttggcactctgtcatttagtaaactttttgaaacatataggacttcatttatttatttttaatagcatgaactagaaacctttttaagcagaatgtcagggatggcctcatagaaatattcgagaacaggaatgctagcagcatgtaaatatgtgggggtctacagcagagggataatatgtaacagtttatcatcataggctaactaaacgttatggatcattttgattaccttttaaatgtcaaatattgtaagctcatcatcgtaggctgcaagaagctctagctttctatttgttaattatttaacacacacgcatttctctctaggaaagttcttgaaatcttttgtagggtttaacatgttctaacaccgaaccttactgtggtagacttcttggacgggt

SEQ ID NO: 59419 - DNA, 910 bp, Populus trichocarpa
  Intron number 1 from transcript POPTR_0001s22900.1 (locus POPTR_0001s22900) derived from phytozome v7.0 (chr-ID scaf fold_1; pos 21880044 to 21880953 reverse strand)
gacggtctgcgcacttcaggtgatagacccaattttataatttatttttttataaatataaataaattataattttataatttgacattctttttcttggatgagacggtgcgtgtggaagatggttgttacaaacttttcttcttcttcttcttcttttttttctcttcttgattttcacgtgttcctctgtttggctgtttactaagtggagagatagtgcaaatttaacactatttattaagtggcaaacacaatctttttaaaatatagtgtttcttgcttacctcaaatctcttaaaagatactgaaaaagtgttaattcgacgcatctcggcaattcgacgcatctcggcaccctcgtcatcttcttctatggcaagtacttttacaatattacatatattagattcttgcatggaaaactctattatgcatattattcactttgattattctacatatatattttctgtttgcatatgcaatattaactagttttcattattcaatggatttcgtgaatccaataaacttatccaggagggagagtttccagataaaaaacaagaaagaaaaaaatatattaaaaaaaaacctgggttatgttatatttttaaaagaaaaataactgaattaatacaagattttaaatattgaattatgtacggacgtctagtcccatagagaaaacgaaggccaagtcttagattcaagtcctattctttttatatgaaaaaaaaatagattcacataaattagcatgaaacaagagtttgatgtatttaaaacttgtttgtgtttttatttgatcgaccaagatttaattattgataccaacaaaaataaatcttgcgcagcttgcacgcatgcaggagctcaatctgtgactttcgtcttcacaaacaac

SEQ ID NO: 59420 - DNA, 876 bp, Populus trichocarpa
  Intron number 1 from transcript POPTR_0001s37970.1 (locus POPTR_0001s37970) derived from phytozome v7.0 (chr-ID scaf fold_1; pos 37032959 to 37033834)
caggagaagcaggttctgatctacaaaaaaaatgaatcctctttgtgtgtgtgtgtgtgtgtgtgtgatggccccattttattctcttacgttgtatgagttttctttacactgaaatgataaaatagttttcatttgtatttggattagcattttgtcataatgtgattgttttaattctttcggtactggtttgttagtggtgggattcatagatcagcatggttttgaggattgcaggatcattgattgatcaccataaatgcatctcctgtttctttcattactggctcttgtcctctcttcttctccctggagcattcaataatgtattacttgggtgatctgttaatggtttacataatacaaattctcagttttcatatctcatttttcagtcaaaactattgctgctgtcattagttaggcagctttaacattgatgttcaaggtgcttcctctgctattgataagtctctcggttttctgaactgcctcttttttctctctattttgattactgaatacgtaggttgtacgtattgagctcaattcctcgcgtatttcaaagttccatgtcgtgtgattgaatttcactgaaagctggtttatactttatacattcttggcaatatatagtggtcaaattcctcttgtagatgctttagaatttagcacgggggaacacaaaaggatacgaaacagttttgcgaactttgtttatacaaccatttgtttgcatttcaaggaggcaaaaaaatgctcagaacttagttacccttgctcatgactttgtgcctcttgcttttggatttcttacttcttgtactcgaattatcaggtcaagcattggaagaacttagaggttctctttac

SEQ ID NO: 59421 - DNA, 958 bp, Populus trichocarpa
  Intron number 2 from transcript POPTR_0001s25770.1 (locus POPTR_0001s25770) derived from phytozome v7.0 (chr-ID scaf fold_1; pos 24805068 to 24806025)
agctatcatattgaaaaaaacacaacttacttgttatggttgttaatataaagtatatataatatataagattttctattccatattaaaaaaattagacctttatctagtgtttatataatgaactttgatataaaattgtaatcaataaggaaaagatagtgggctcgcgcgcataaagttgagtcgagcaaaaaaaaaccctctaatagcctccttgcgcgtgaggcaacacctgtacttttcaaatcttttatctccggcaataatttatttttggcccttgaattatttcctaacaatcatagttttagtttaaaatttttttagcagctacaactctttaattctttaacacttattttattttttaaactgttgtaatagctctttaattttttaatttattttctatctaactgttatatactagcagcctatatataccatgtacttttataatcaaggtgtgctagtattttcatgtgtttgcaaagtttagaaaacatcattaaaggcaatatctatatacaccacaagttttattttgtttttattttcagagtattttattataacacttattacctttgtctttgcttttgcatttggcgatggaactaattctaaccctttcatagggacacccttctttgctatcaaatatattcccaatacctcgcacttgagggtctagctgttgtggtcaaccgtgtgacttgttccgcccccgtcccgggttcgaccctctatgtgcacgcctgtcacccccgcggtgccttacctgctcctggccttgcaggatgtccagtgggccgtggggaatagtcgtggtgcgcgtaagctggcccggacaccccacgtaaatcaaaaaaaaatatatatatatatatatatatatatatatatatatatatattcccaatacctcttacgactatagttactttctctacca

SEQ ID NO: 59422 - DNA, 593 bp, Populus trichocarpa
  Intron number 2 from transcript POPTR_0010s05070.1 (locus POPTR_0010s05070) derived from phytozome v7.0 (chr-ID scaf fold_10; pos 6477057 to 6477649 reverse strand)
atcaaggttttttttttttttttttaaatcagcaaatagttattctagtagtgtgtggcttattggttcctagtggttgttatcagttcatggattctaggacgttagaccctcttccctataccctagttgacttttgtgtgattaagtagtcatatcatgaattttgttcaaatgggctctttcttttttgagtgacattcaatattgttctgggaaagctttcaatcatttttttatgacttttctttctgtgaaactctgaaccttgtacacatgatctgataagtgagagcgtggattactttgggaaagatgtttgggttagatgttcaatcaaaagtgataaatcttcaccagaccattgtggatgttttaaccattttcactgccactccaattaaatgagagcgaaattttcttgagttttgtcctttgacaatttggttgaggcggcatgtgttatcttggtttcttcatctgtcgaaacaaggaactgatgaaaaattcagattatgtgaccatctagtttttggattttcccagtcttgctggttatatttaactcttcttatttttgtttagtggacttg

SEQ ID NO: 59423 - DNA, 888 bp, Populus trichocarpa
  Intron number 3 from transcript POPTR_0109s00230.1 (locus POPTR_0109s00230) derived from phytozome v7.0 (chr-ID scaf fold_109; pos 49910 to 50797 reverse strand)
aacaaacagaagtatgctttgctattcaacatgcttttgactacctattttttattgtttatcaattctttcttttcttgcatcatctctctcatattctttattacatgcagccaattaattagagagaatgtaaattactaatgcagtcatctaaccgaataataataataattgaagaacaacacagaatgttttcaaggaatggtaagcaaaagcacaggccggaagagtcaataatccatgtgtagtagctgtaatcaactaatgctagtgcttccagtacttctcgaatttctgctacgacatgatatgttctatgtaccacgtaaattatgctttaaatatatgttacgtgatcttgattgaatatggaagacaaacataagcactttcaattaacctgtttcctttttcctataaaagtaaagctccgtgaaactgatcaaacctgtttgcggcagagctaatgcttcctacctgatatctatcaaaacctcgaagacttctaattttttgccagtatctatgaaatcttttaccagtttctacgaattttgttaccagtagacacaggttactgggggtggcaggagctaaaagttttgggaactggcctctggaaaaggcaatatcagtgaaaatactagttgtagcaacagaaaattaaaacaaaaaggaactttagttttgtgccctcaagataaccattgttaggagaattagtttctcgtatgctattatgatagtattgtgagacctcaagctgactcgtttctaaatcgttggctttcagtacctttcatgctctcagttcgcattttcaaatcgactgtttttagtatgtcattcacacgtactttctactttccttttttgattcaggga

SEQ ID NO: 59424 - DNA, 749 bp, Populus trichocarpa
  Intron number 1 from transcript POPTR_0002s13550.1 (locus POPTR_0002s13550) derived from phytozome v7.0 (chr-ID scaf fold_2; pos 10054820 to 10055568 reverse strand)
acccacatcgtcggattgctaattctaatctccaggttcaaatccttttgccttaaacctccaaatctctttttgtccgtatatatatttcagtgcttcgtggtcgttaatgtagtcgtaaacttaattttggtgttttttatattctttttacctgggttggttccggttgttcttgaattttgaacttttttatgtactcaagagagttgactttatttctttccattgactttgcatgcatgtgtgttgtttttggcgtcagttgctttcatagatgaattcagattgttccatgtttcagtaaattgattgaagacatgatttcattaaggaatgggataattcggtgaaattgaaaggatacagaattgaaaatcttctagatcattaaaaatgcttttaaagagaagccagctctgtgccattaatttagttgtgaaagaggcaccatttcactagttcccctctttgatgtcttagtctttgtttagtatcttcccctttcttgcggcattccctgacttggtgagagtgaaaggtattatcattttagttactgatttgaacacggatctacctttcacggatgcattagcatgaatttcaaagtcaattttgtgtcggatactgggtattatcattcaatggttgcttcatttgtctctcttgttgaataccatgatttataggcacttatcatgttgtgattacctcctattgtttgtttgttagactggctcatcttc

SEQ ID NO: 59425 - DNA, 414 bp, Populus trichocarpa
  Intron number 1 from transcript POPTR_0010s18340.1 (locus POPTR_0010s18340) derived from phytozome v7.0 (chr-ID scaf fold_10; pos 16613425 to 16613838)
gttcactcctgttgccgaggtcaacgcttcttttttcttgttagttttttttttaaatgtattttcaactagtaagtgattgctctttttgtgggtgattaatttttattgtcgttagtgagtgtaaactacttctggatcaatcgggtggcgcggttttgaatatttttggccaattcgatggtttcattcatttacatggaagattctaccaagttcattactttttaatggcccttaaacaaacaacaatttttagctacaattttactaactgtattgtactgtattgcaaatgcaagttttcctgtttgtattttgaggtggatgatttataataaagagggattctgaattattatcctttccccattcacaggttaatctttgtggccacgcaacattagctgcttc

SEQ ID NO: 59426 - DNA, 781 bp, Populus trichocarpa
  Intron number 4 from transcript POPTR_0007s09530.1 (locus POPTR_0007s09530) derived from phytozome v7.0 (chr-ID scaf fold_7; pos 8962094 to 8962874)
tcaaaaagtgcaacaggtttgtcgttgaatagaatttttccattttctttgaaggtgttgtttgattttttttctttttcatgttttaacaaaaatgagggagcatcatgtaaccatgtcattcctaccttgaagcaattgtagaggtcaaattagtcatcattaaggaattaggaaattgttgcttctttatcttgtatgatgctctaaaagttctttgcattttgattgttctttttctataatttcaactctttatgctctttttttagtttgattcctcactaacttctttctggaatagaatggcaagtcctctacactacactagtgactcaaagggccaagtatcacttttgatttttaatttatccgtgtgtagtgaaattaacgtgttgaatctcttaaaataacaaaaaggtaaattagtgctcggcaaaccaagcatcaagcacagcatatctggttcagatggcatgctgcaggctccaactcatttggatcagtacaaaccacatcaatgctattgattcctgggaactacagttagatgatcatgctcatcatgtgcatggatggtttggtgtagctgttgtgtaagattctaacagctgtgatgtcatgcttgatttgcacaccaaaagatgcttcttatgatggttttctgtttacaattaataagatggttctcaattaggattctgtttcttttgttatgtttgtgctatctgcatcacttttagaaaacttatggtcaacattttccctttttcaacacaga

SEQ ID NO: 59427 - DNA, 811 bp, Populus trichocarpa
  Intron number 1 from transcript POPTR_0001s00230.1 (locus POPTR_0001s00230) derived from phytozome v7.0 (chr-ID scaf fold_1; pos 80385 to 81195 reverse strand)
ccagtgattctgttatagaccttccacagaaacaggtgctattataaactagtagttgctttcattttgatctcaaaaatgcttacatgcacctcttgctggctactgtttgcggttccatcacctgttttctgcatatcctgccaatgtttttcctttctttatgaatcattactttaggatcctctttttattcatgtaaagaaactattacatgctctattttcagttggcttaattaatcctgacaccatggcaaattggcgtccttgttctctagattatacctttgatttttctgataaaattcattgaagtctggtgaagtttgtcttgtaaagtgaagaaaactgaccaatctgattggtatacttatctattctgatgcaacaactctgatctctatgagaccagtggttgcaatttgttctgtatgatactgcaatcaagaggagtatcctaattcaatcttggagtttaattattgggatgcatatgacgggtcaggagagcagatcaccagataatagtcccaaatttagaagttataaatatttcagaaaatttgatcactttcatcagcaatttggattgaggaaaagcaaattatcaagagtaaattgataggattcatgacttgtagcaattcaagttaatgcaccaccatattttaacaataggtcaatggcatatagttcaagtttctcattgtgtttgattatcattatccatagattctacactatcattcttaatttattcatgtgattattactcgtgtttgatcatatatatataggctcttgcaagt

SEQ ID NO: 59428 - DNA, 434 bp, Populus trichocarpa
  Intron number 1 from transcript POPTR_0001s31660.1 (locus POPTR_0001s31660) derived from phytozome v7.0 (chr-ID scaf fold_1; pos 30026784 to 30027217 reverse strand)
ggaagaggtttcaaagtgagttctgagctttttctcgagaaagtttgatagaaaatgaagaaagtcttgatctttattattttggatgtcattttctgtttgtttgctgagaaaatgttggataaaagctcgtttttagcaaattcttgaatgaataatcaatacttgaggcacccctgtgagcaaaattgctaaattactgttctgctcggtctactctgctcattttgtgtagtccaagttgattagcattgattttagtgtatagagtcaaaagggatggctttttaactctaattactgcatgttttaatttttttagttatttaatcatgctggacattattgattagtttattcaaagtttaaacagttaacgagaacatggaatttgttttttttttctattggaactgttgctatcaggaaattga

SEQ ID NO: 59429 - DNA, 801 bp, Populus trichocarpa
  Intron number 1 from transcript POPTR_0002s24190.1 (locus POPTR_0002s24190) derived from phytozome v7.0 (chr-ID scaf fold_2; pos 21617928 to 21618728)
aggattaccagcagtggagaattgttcaaagagtaaggcttttcctttttttgtccattggttttcttttgattgaataagaaataggaatccttcaagtttctcagaaaagaagaaaactttggtgaatcgattgaaaatattagtttgcaagaaaaatttgcttgttgctgacaaagattgtgaaattttgtctcaagtacttgtgcgtttctcgatagtcttttcaaatatttcatgtgctttagcacaggatgatgatgttctctctctcacggaccccatttgatgggacaatggccttttcttaatgcaggagattctattgttcgctgttaggatttataatagagaaagtttcggatgtgttatgcaatcttgcatcaactcaatgcttcatgtgtatcttgtaactggatggtagaacaaaacaacacatgtcaatgtcatcatgctttgtaaaaatgattttatggttctatctcaacttgaattaggatcccagttcatggatctctcggttcaagaaagaaaaataagaggatcaaaccatttcttcttactcctttgacagatattagtattcagaaccacattagcattagtgacttggtttggtttccaagttgatctgttttttcagtattcaccttataatacttatgaaacacctggtttggtttcttaatttggaaggttaacccagcgttgttgtttttaatgacactttcattaaatggtgtattttttggttgacttcctgcaggttcgtgatcttgatttttccataagaataatagg

SEQ ID NO: 59430 - DNA, 373 bp, Populus trichocarpa
  Intron number 1 from transcript POPTR_0007s03290.1 (locus POPTR_0007s03290) derived from phytozome v7.0 (chr-ID scaf fold_7; pos 1898741 to 1899113 reverse strand)
gcaactggcaagctttttgagtactcaaacacaaggttcttctccttttcattttcttattattttccctactttattatatatgtcacctatgatctcattgatcaacctaggattcattaactatggtttcttctgaacccaacaaaattgaaaaaagaagagaatggctgaagtggatgtacaatagaatcttttgatatctgtgagcgaaataatatttcttgagggaaaaggaaaaggagagaggagcttagggagaaattggtactgatgatatgaaggttttgaccatgtcagttgctgccacttattgcaaattcaaaatttttttcaaggactattgacacatccatttgtgagatcctcttaa

SEQ ID NO: 59431 - DNA, 451 bp, Populus trichocarpa
  Intron number 3 from transcript POPTR_0001s12470.1 (locus POPTR_0001s12470) derived from phytozome v7.0 (chr-ID scaf fold_1; pos 9688177 to 9688627)
gtggagaggtagataagtttccttcatatatttttctatgttctcaagaagattttcttgagggggttctttgagaaagcaaaatagcagcttatgcatgcagataaatttcttggactccacatccttgagaggaattccctgagattcaaaagatcggcctccatatgccttcggaattggagtccatagcagtaaaatatatggaatctgtttaaaattactcttggatgattctcatgcccttctctctgtttctggttaccaaatacgatcatgctagatcatacccattaaacctgtggactaatacatttcttactctttatgagtgaaaacagaaaaatacgaaatcagactgtttacttttatgaaagataggaaattgatctagaccaaaagaaatgacttgcttatcttgctgtaaaggtggacctggaccttggaaatt

SEQ ID NO: 59432 - DNA, 527 bp, Populus trichocarpa
  Intron number 1 from transcript POPTR_0002s19550.1 (locus POPTR_0002s19550) derived from phytozome v7.0 (chr-ID scaf fold_2; pos 15515964 to 15516490)
tcggtgcttgcaatttcaagccgcggcggtaatttttatctccttctgttttttacgcattaatgctgcttttttgcttttgacgaatgaggaaattgaggaaagaaattgcacttcataaaagaaaaaaccgaggaaagaagttgcacttcatgaatattaaaacctttttaaggctactaaacttgatttttctttgagatttttagcttacactgcagagttttttgtttttgttttgttctgttagggtttaaccaaatttctgatattatcggcacaatacgttatcatgttcatagtccaattgaaataaacaaagaaagcttccaacactcggtctcattattagaagatttaaaattttgatttcttatgtttctagatgtaatgttattagatttaacattttcgtctaatgaaattgcatttactttgttgctggtgtttctgttatggtttcttgattggaactttgtatgggtgttgcaggattatcgagaagagtctggtatttgtttctgcag

SEQ ID NO: 59433 - DNA, 777 bp, Populus trichocarpa
  Intron number 1 from transcript POPTR_0007s11270.1 (locus POPTR_0007s11270) derived from phytozome v7.0 (chr-ID scaf fold_7; pos 11600006 to 11600782)
ttctgcctcgggtaactctttatctcttactctttttcacatttttagtgtttttcaaaatcagtttttggttttctcgtactttatattcgtctattttttaatcgccgatttttcttacgctgattgttgtttctgttttcaatattcttaaaaaatggttcttttttagtattgttggatttttatttttaacgcaaagtttgtggctttgagtgataaagatgagtatttgatgattaatttttgttactaactttttttagtagtaatagttgctattgggttgttaatatgaagttctggttaaatatttattaggataagtgtagcttccaaatttatgggaacgaaaatggttagttgttatttagtatttttatttatggtgagtgtttttttttgttgttctgttggattaatgtttgatttggaaattttgagttggtgtaataaattaaggttagttttttttttttaatagtaatatgtcgtattgggtctgttagcttgctgagaaaatggtgggaagtgggaaaaatgtcttttctatgattttaagggaaaagttatgtgaagttagtgttttacaataatatgaacaggttgatttttgtattttatttgtttatagtgctttcttatgttctttgtgttttttttttttaaaatcttcctgtgtttggaatggcgtatttacagtttttcttgaattgctaatggcctttgatgtggtggttggtttcaggggattgtttcaccaggtcaaagcatttc

SEQ ID NO: 59434 - DNA, 391 bp, Populus trichocarpa
  Intron number 1 from transcript POPTR_0010s23000.1 (locus POPTR_0010s23000) derived from phytozome v7.0 (chr-ID scaf fold_10; pos 19694022 to 19694412 reverse strand)
tttgaggcaaagctaagagactgtatgttattctttcatttcattattgttgaaacttattagaagactgtttaatgtttcgtaaattatcgatagaggacatgagtttttatcaatttctcaaaagtttttgtttgctttcttcctccacttggtctgatttttttttcctgaaatttttccttgttaaaatttgatccttttctcatgttttttttttctttttctgttttggcttattaagtgtgaaaacatcatgtgatagaaatattatgcagttgctatgtgtaataaagatgtcttctttttgttcctttctcatgtaatttgatttgtttttcttttgcaaatttcaggttcttcccagattctacaaatcccaaaactacag

SEQ ID NO: 59435 - DNA, 610 bp, Populus trichocarpa
  Intron number 1 from transcript POPTR_0002s01900.1 (locus POPTR_0002s01900) derived from phytozome v7.0 (chr-ID scaf fold_2; pos 1020872 to 1021481)
caaaatacaaagggatcgtaagtctatatattttatatattttatttagtatgtgtttgatattgtaattaatttattttttaaaatttagtttttatttgaaaagatattaaaataataattgattttaattttgatgattatgatttaatttcactagttatttttctatataaaaatacaaataattgaattcaaaaactaatgacttagattcacccaagattactcaataattgagaagatttaaatcccatttggtcctccttattttcaaacaattaatgcccttgtagagttcaacagcacaattttttttttattttacctaattaacccgcctcaaatattggaaaatgcaatagaaggcttggaatggggctagatttgtaacaccgtacaaaaaaaatattgaacgttgatttttcaattgtacccgtccatcattcaaatcatattcattgtcttatatgcctcgaatcttaataattttcaaccgattgactcagccttgattgcttgcaccagaagacttgtcgtcacttaactatccaacgacctgtaattttttatgcatttgacgagtgccctctttcctactcaatgagct

SEQ ID NO: 59436 - DNA, 417 bp, Populus trichocarpa
  Intron number 1 from transcript POPTR_0001s27070.1 (locus POPTR_0001s27070) derived from phytozome v7.0 (chr-ID scaf fold_1; pos 26023853 to 26024269 reverse strand)
ggaatcagctcttaaggtttgtgggttttctttttcttggaccttctcttcttgtcaggcttttttttttcctgcttttatttatgtgattttggtttgagttctgcttgtttgatggtgttaatgtgtatcctgtgcttttacttctttggaccaagtttaaattaatgatattgctacacaagtgtattagtctctcaagaaagtgattaacttttccatgatcatgtcattacacaactggtttgataaattcaagttatgcattcgacagttttttgaggcttgctgctgttttcttgatgattagtgacattgttgcttaaaatgcatgtatacattctagaataaagtccgtgtctgttttttagatttttgaacttcttcgtgagcaaccctggtaccaagttgctggtg

SEQ ID NO: 59437 - DNA, 691 bp, Populus trichocarpa
  Intron number 1 from transcript POPTR_0001s41150.1 (locus POPTR_0001s41150) derived from phytozome v7.0 (chr-ID scaf fold_1; pos 40792731 to 40793421)
atccaggtacccttttgcctccctttcttttatttcattcattacttcttttaaagttttttcatttcttgatttttagttttgcatgtgatttttttgaggtgttaattcagtgatttgatatgagatctgatatgggttttgtatatttggattccttcagtgattggtaatttgttttatagcaaaagcttactaaagtgcccatctaacccttttttttggtcaactttcttgtaccttttcttaagatctttttacaaccaaaaactttttcaagggctgttttgtgcggaatcgagcttgtgtgaaattattttaaattagtgttatccctttttacaacatagttgttggggcactatatgttaagtgatccagtactgaaacaaggagtaaagattagcaaacaaaggtgttttcattgattgatcttctgtactcaatttctcatctttagaattaacgtgtttatcttgtgctaaatcttttgaagtgagattatttactttatcttgtactaagttttttgaattatagtgtactgtttgatatggggaaagaaatggttcttttaatttataattaattaaaaattataaagtacctcgaaagagagttcctttatactcacacttttagttgatcatctacagagaacttgggaaagggccaaactagcaagtacact

SEQ ID NO: 59438 - DNA, 618 bp, Populus trichocarpa
  Intron number 3 from transcript POPTR_0001s11250.1 (locus POPTR_0001s11250) derived from phytozome v7.0 (chr-ID scaf fold_1; pos 8717227 to 8717844 reverse strand)
tgagtcttggcttggtgcggaacacttcaaggtgggtgatgagttgcaatgctgcacattcatttttatttgattttattaactgtattattaactgtattcaagttcaaaccattccatgttcggtgcatttgaggttggatgttactactcggtcttcccaggactttagtcatcctagactgcacctctcagaacatagtttcaactgaacattctcatcttaggaattgggacattttgaagtttactttgacatgttaagcagatttttgcttataatatttgatcttacctaccactctcatcatatctctttgtctcttgctatcaaattttggaatgggtcttttgcatgctcattctaatgtgaaaaacaaactcagctttttttattgtgttgtggagctgataatctcttttgtatgctcttaaatttgatttatttgctggtaaatatggactgatttatcttcaatgctttcaatcccatgttaaaacttaccccatgaaggttccggtgtcatacaagtgaaccaatgatccacttctatccctctgcctttttttcatgctttgaacatttcttttggtattaatacatcttgtggaatacag

SEQ ID NO: 59439 - DNA, 433 bp, Populus trichocarpa
  Intron number 1 from transcript POPTR_0001s46010.1 (locus POPTR_0001s46010) derived from phytozome v7.0 (chr-ID scaf fold_1; pos 46523987 to 46524419)
tcttcaaccttgtgttctaacccaaatttcaacaggtattccttcatctcttctcattttttgagtctctttacagttatctatcacgaattgtcaccatccttagcatcatttactattatggccactaatcaagaaatactctaatattcaacaaaaatggcttaaaaacagtttacatgaaaccaattgcatgtcaaagacagacataatttctgctgcatgcatgtttcatgggtcttgcttgtggttcttaacttatcatttaagaagtgatgttaccaagaaaatgaaagaactaaagtatttttgtagtgaaaaccaagaatgttcttgttggacactgtagttagcaacttggcataaaggtggttctaataatgttgtcatgtttttaggtctatagtataaagaattgaaagaagagtgaaga

SEQ ID NO: 59440 - DNA, 802 bp, Populus trichocarpa
  Intron number 2 from transcript POPTR_0001s29220.1 (locus POPTR_0001s29220) derived from phytozome v7.0 (chr-ID scaf fold_1; pos 27957214 to 27958015)
gtaggcttattcgcggtgcttcttcatcaagggaggtatgattggttaaattgcagactgttctcttgtttcttctttgtgaaagctatgtatcacgtacaaactcacaacttttgaaccaaggttgtgattctctatatatgctctgagggaatggacatttgattcataatatctaacagtgaactttttacttgttttcaaagttcaatcccgttaaggagaagtgtttcttagagttgaattaacctcaggaactgtctttttaatgaaaatggtacattagtttagtttgatcatcaccttgctgctgtgtaataactgtgcaatcatgtctaatgcctgctgggttttgaatttgatggatgattatgtaaaacatgcattctcggtgtatctgttacaatggcttatttctcagtgcctgttcatctcattgttaatacttgctttgtatttgcgactctgaattttatatgacattatacacattatctgattcttgtttcttggggtgttatatcctactggttgttatgcaaacattctttatcagggcatttagatcttgctaaagctagataaaatgttaaaccatacaacattaactggaaactgaaaatggtcagatgcccaacctttttagcattatataatttcttccatagaccgtagtatctattgcgtggctttaaacttgggctatctataacaagaggttgcttgctaacttctgtatttcacgtaatctggtttcccttttgcagtgcgcaaggcaaggatttgcattgggcttggcggt

SEQ ID NO: 59441 - DNA, 389 bp, Populus trichocarpa
  Intron number 1 from transcript POPTR_0002s03800.1 (locus POPTR_0002s03800) derived from phytozome v7.0 (chr-ID scaf fold_2; pos 2362191 to 2362579 reverse strand)
ctgctgcttcattcaactgggtagatttgatttggttatttcatttcaatgtttttcttagatctactgttcttgctaatctcatgtaagtgcaatagcatgccacattctcgtagatggaatgtagttcttttgtttgttttgttacatttgctatcttctttttaatctctgagtagtgatcttcttctgtatgaatgattgacctgataaaggtgtgatttcactttttgttaatgttttgacattggattgtatgagttgaatgtttgcaatttagggtttgttctgtgatttgctagactattgtgccttgtgttatggatgctttagtcctaacttgatttatttttggaatcaaggctagtggtgacaagaaatttgaggcc

SEQ ID NO: 59442 - DNA, 1023 bp, Populus trichocarpa
  Intron number 1 from transcript POPTR_0001s06350.1 (locus POPTR_0001s06350) derived from phytozome v7.0 (chr-ID scaf fold_1; pos 4874643 to 4875665)
ttaaagggttttgattgcaatcaaactgtgccaaggtatcatctttttttgtcagttaatctagttttcgagctttttattcgatttcctatctggggtttttattttttgctgattgatttggtttttgagatgtttagagtataaagtttgcttctttttttatgtcaatgccctttttgaatattctatatctattttttgctttagatttgcatattaaaaaaatttctccctttttttctggcatttgacgattctttcttttgttttatttgatccacgtactgttatagtagtcttggggagacgtgttttcttgatcttttgtgtcaagtatagtttttgcacagtgaattgtcttttcaattcccttttacagtcctagtttctttacttgacaaatctttgctcgatatggttttgttgtggtgattttttttcctttgtgtgatattgggagtgtgattagcaaattatcgtttcacactgtgctaatggttgtcatttgcaactgcacacctggtgtggtttttttttttttttttaaatgcatgattttgtgctatacataatatcatatgatgactagttgggttgtggcgaataaattccttaattcaggaaggtgagagtaattgacatcttcaattctttgctctttatggtttataggggtgtttctttagcagatgaatcatatgatgattggttaggttacgaacttcgtactcagaagatacatttccatttttatgctctttatacagggtctcttaggttactttgagtggattaactggttaattttcttataatttgtcttgctcaactcctgtcatgaatcgctcgtttttcccatgttaactgggcaattttacgtcactttttattgaatgtttttgaatgttaactgggcaatagtatcccgaccatgctatatgttacttttagtcagatcaggaagttatatgtcactttttattgaatgtttctgataggttgaggagccataaattgtca

SEQ ID NO: 59443 - DNA, 378 bp, Populus trichocarpa
  Intron number 4 from transcript POPTR_0002s02450.1 (locus POPTR_0002s02450) derived from phytozome v7.0 (chr-ID scaf fold_2; pos 1384501 to 1384878 reverse strand)
tgtgtgagctagatttggtgtttaactttcacaaggtttgtccctgtcatgattttttcgttttcgttgttgtgagaatgttactttaaccatgctcgtcttcgctcttgcgattctattggtgttgcatggatgattcgatgtttcctgcatctttgcttttactatgtgtgattcttgccttttggtctagttaccagatcaattacaccgtataattagttcctgaaaggaattcacaggcctcttattggctttttatcattccatgtgcgtgtgtgttttcctatagagcaacctgttatttgctactgtttttcttatgcacttctttgtttgattttctgtttcctccttaaaaggtttatttgatacttg

SEQ ID NO: 59444 - DNA, 609 bp, Populus trichocarpa
  Intron number 2 from transcript POPTR_0007s01050.1 (locus POPTR_0007s01050) derived from phytozome v7.0 (chr-ID scaf fold_7; pos 577097 to 577705 reverse strand)
ctccttctcgtatgtctctctttctcttggttgatgattctttttatttcttctcttcttcgtttttgttttacagttgagaaactggggaacggattatttttaagttaatgaacatttgtgtgtaattagggttgagttttcgtttgatttgatgaaatcaggagggttttgttgcgactctacggttaaattagggttttttcgaatctgattttggattttgggaggggagtcgagaaattaaggaaggtagagagagagagagagagagagagagagagagatttttttttgtttgtgatttttagggttgtgtttgtgttttaattggttttgatttggaatttcgaggtgagagattaagaaattgggtatatttagagagggagagaagcttgatcatgagtttttagggttttagattaggaagttgagagttgttttagaattgagagagataattaattaattaataatgaaattaggggactaaattgagaattgtatgtgttgatgctactgttgttgttaaagattaaagagtttagtggttgattgattctttttctgtttttgtttgatttgatttgatttgttgcagctttt

SEQ ID NO: 59445 - DNA, 664 bp, Populus trichocarpa
  Intron number 2 from transcript POPTR_0010s20010.1 (locus POPTR_0010s20010) derived from phytozome v7.0 (chr-ID scaf fold_10; pos 17756306 to 17756969)
catcgttttatatcctttttaatcagtgatttcattttaatttagtttgattcttatttgtgtttggtgggttgcaattgtgtcgaatgaaattatagaatttagtaatttatgtttctcaggtttgacaggttgaaaaattggagtttttttttttttcaatgaataatttatgttctccagtgctactatctggcctgttttgggttgagttttgaatttttgaaaccggttgagatttagaatcttaagcttgttttttaaattaaaagaactcaattaggggatgaattattgggtagcgtattcttaatgtttgtgaaactgagaattgtgctaatcttaacgtgaatcctcccaaaatcgcttttcaaagaatctcaaccattggatttgtgtgaccccggtgggatccactcattcaatggatgggatttttcgggaagtgatttcgaggattatcttttcatggaaataatcattacttttgtaagctagggtacggtctcttactgctcactgcaaaaacattgtttcaaagttgttgttttctatttcttggcaaacaaatgcatggttgtgtttgaaaggaactgattggtaatgtgaagattttaaactcagatttgtttaatccttgactgtggcaagtatatagtcttca

SEQ ID NO: 59446 - DNA, 530 bp, Populus trichocarpa
  Intron number 1 from transcript POPTR_0001s19210.1 (locus POPTR_0001s19210) derived from phytozome v7.0 (chr-ID scaf fold_1; pos 16696925 to 16697454)
gcttgttttgatctcggtttctgtttctgggtatgcactttgtcttatcgacatgagctttttttctcccttattttttatctcgttgatcctttctggtttctagctctagccttgtattccaacagaacgagcatggttgataaagacgttgcttttttgggatttttcttattcatcaattgttgctttaacatggcgtggatcattatttgtttagttttttaaagctctctgtttagaagaaatcagcatgctttgaattaaattttgcttctttgattattcatttatcccttttggccacctcccatcttaaaacttacgtactaaatggtaaggtttggcttattctggattcttggttttatatggcaaggaccatggggttcaaggtctttctctatgtttttttagaatcaagattaattctatatgtgggttttgctggttcttcaatatatatatgttcttgttgtctgttaatgtaaatattaggctggctaatattggttgttttggctatgtag

SEQ ID NO: 59447 - DNA, 615 bp, Populus trichocarpa
  Intron number 1 from transcript POPTR_0001s07160.1 (locus POPTR_0001s07160) derived from phytozome v7.0 (chr-ID scaf fold_1; pos 5435184 to 5435798)
ttgctgcccagctcgaaattcagaagattctcgaagtaactctcacgcgttatatttttttttagatgtgttatatagatatagagagatctaaagttctttactttcgacgtatttctatcatttctgaggttctactgatgatttattagtaagtctttaataggtttttgttctttttatctttttatttgttgttttgggtcattatgtttgtgctatatctcatttaatcaagtattgctctttattactctatgtagatgatgggttttctagggtatgtgcagtttttatgttttatttcacggtggttctgatttcgggttaaagtattgatggtttttttgaagaacttttgttggatattggtaatttgggtatgaatttgtggatgataaatgagtatttgattaggtttctttagtgatcttatcttgtggaagttttatgtgaatagatccattcatatggaatgtaacttgttgaaaattttgtgattgattgagaattgataacattttttgtttgatttgtgctatgcttattataaatgtggaaactatctgaaaactgccccttttgttgtgaaggctgataagcccgaggttgagg

SEQ ID NO: 59448 - DNA, 971 bp, Populus trichocarpa
  Intron number 2 from transcript POPTR_0001s07160.1 (locus POPTR_0001s07160) derived from phytozome v7.0 (chr-ID scaf fold_1; pos 5435847 to 5436817)
aagacgaagctgaaggtagactatcagtgtttgaaatattattgaccttatttcattgctttatatacccagattcttttttttaatcaatttctgtgtgagttttacttgcatttgttggatttgcacaacaaacacattttttatgcacttattgttataactggtaatgatgaaatctgatgtaacacattcacattgctcttggtaaggaaaaggaaatgattagactttccttagcttctattgctgttaagagtgaataagaggttatataagttctcaatattgatttccattcttcaactttgttagctggtattaatatatgtttagttgattttcatgggtggtaccttttgtttgtctttgttattcacctaaaaacaaaaaaggaagaggagatgtttcaacattcaaggcagttgcacatgcatccactaggcctttttatatgtggttcacatattcgatatggacactaaattctgaattatctgaaagaaaaataaagttagattactgtcctcgggtttggttttgaaaaatgatctgaccggtacatataatgaatggccttggattgtaaatttaaacctgtgatattcaaaatcagtgacacattttttgtggatttgtattacacatgaacccctaaaatggtttgcctctcttcgttgattgtaatttattgggcatctggcattatggcattcattttctcagtgaacctgttctgtgtgattatgatagtgtctttcacagaatgacattataatctaaattatcctgctttgggatgaaatggcttgtagatagctttctcttatttcaagtttattttcgtatcaataatttaatcttgcaaagagtatttaaggaagtgtgagaacacctacaagttatttcttagtttgttctttggatatttgcactaacgattcctccttttccccccacaggacaacaag

SEQ ID NO: 59449 - DNA, 212 bp, Populus trichocarpa
  Intron number 1 from transcript POPTR_0001s23020.1 (locus POPTR_0001s23020) derived from phytozome v7.0 (chr-ID scaf fold_1; pos 22070866 to 22071077 reverse strand)
gatttcaacatcaacccatttcaaaacaagtctaggtaatttctgggctcgatttcaattctcataaagctttcaactttcatcgaccacttcagtttttatggagtttcaaaggttttttttttttaattttttttctgttctggttcaatagatatataagaagatttgattcaatcatggaattaatttatctttttttaaggtccttc

SEQ ID NO: 59450 - DNA, 437 bp, Populus trichocarpa
  Intron number 3 from transcript POPTR_0007s00470.1 (locus POPTR_0007s00470) derived from phytozome v7.0 (chr-ID scaf fold_7; pos 179255 to 179691 reverse strand)
tcacaataactgtatgtactcattcttcattgttgaatagattatgtgcaatattagcttcctttcagaattttttaatccttatcttctgttagtttcatataagcattgtgtctgctttggtgaggaaagaagtgtggtttgactctttatggttgttgttttctaaggacaaccttgtgttaatggatttagtgtctactcatggagccgctagttttctgatattgcgacaagtcttttactatttattttcaacttctgctcttttggttttaactctgaatttcacacacaatatcacaattttctgttatcaaatgatgatgtaaagatacatactgatatgtggctgagtttcgataattctttttattcattgtgtctctgtttcctgtaaagaaaggtacaaaacttcggattgcagattttgtcca

SEQ ID NO: 59451 - DNA, 429 bp, Populus trichocarpa
  Intron number 1 from transcript POPTR_0007s00470.1 (locus POPTR_0007s00470) derived from phytozome v7.0 (chr-ID scaf fold_7; pos 179982 to 180410 reverse strand)
aaagaagatcatcatagacactgaccctggcattggtatgtaattattatatgtatccctttctttctttccttctttctttttgactcctctaattctcaaatctttttgtttttattgtttaatttcttaacatccagacctttaaatattgatggatttcccttgagtttagacaccagtaatgagttaaattatcaagtttaattacacgttttttttatatcaatctctctttttgttgttgtggggttatgtttttggttgttgagaaagtggatcaattgaaattctgaatctttagactttttcatgatccgggatttgagaaagtctatatcttttgctaaaaaagagttgttatttcaatttttgctggctcaaatttgtcttcttattgtaaagatttgaacttttgatgcgatgcag

SEQ ID NO: 59452 - DNA, 807 bp, Populus trichocarpa
  Intron number 1 from transcript POPTR_0001s03030.1 (locus POPTR_0001s03030) derived from phytozome v7.0 (chr-ID scaf fold_1; pos 2388154 to 2388960)
acagtttcttctggtgaaaactcggttgagaggtatttctcttaatctcgtttcgtgcttgatcttcgtttccaagttttaatgttgattgtgtacgtcaatggatgtttagaaaaccaaaaaggttttactgcctatgattctgtgtctcagtctcaatccactccgtcctgttttgtaattaattacctggttctacaccaggtgttttgtttatgttttaattacatgtatcatttagggagagattttatcagatattagtaaaagcgttagcataaaacttcagagttgagacacgagaataaaaaatgtaatgaatccatcggatcaagtggtgctgagtgttaggacagctgaaaacacaccccttgttttctgtaatccacctaagtagccaaatattgttttctcggttgattatttcatggatcctctttattgaatgtaatacaaattttaaatggatggtaagcacgaagatggaaatgatgtttctaatggtattgaaacaaaaaccagatccaaaaagagtttcattttcacgttgcctgaagttcaaacatctcagctttttttgtggaaaatagattaggccctgggggtggaaatggataaaggtggattgaaaataataataaccaagtcactgcgcatgatatgataagcaaactggactgaaaatgcaattttgatgcttagttggtggttaagaaatcaggggcacgactcacgagccatggcgattgatgatcttgattcaattgtcttcgttttctgggtgcagaaaaagctctctttctggat

SEQ ID NO: 59453 - DNA, 359 bp, Populus trichocarpa
  Intron number 3 from transcript POPTR_0010s14550.1 (locus POPTR_0010s14550) derived from phytozome v7.0 (chr-ID scaf fold_10; pos 14112032 to 14112390 reverse strand)
attaggttatgtacatttgatttttgttatcgatttctttgaggattaattgagtgaaaatatcgagaaaatttggtacctacttcagatctctcatttgcacatgcatagctgattagagttcttttttctcgaagatattatgagcttgtgcagagacttaaattgactacaatgcaatgtaattttctctttcgtttttttttttttttttgacgtgattttacatcatgtgcatgtgcaggttttggagatcggcattgtagtgcactcagttgtaattggtttatgaatgggtgcctctaacaatccgtgcacaatcaggccgctcatcgctgctctctgcttccatcaactct

SEQ ID NO: 59454 - DNA, 559 bp, Populus trichocarpa
  Intron number 2 from transcript POPTR_0002s05900.1 (locus POPTR_0002s05900) derived from phytozome v7.0 (chr-ID scaf fold_2; pos 3897318 to 3897876)
ttcattccatttcgcaggcaggttctttctcctctcttttttctttttgtaactatggttccattatcctcttcaattttcccacgcataaggttaattttgttccttttagtttcttttactttcatatgtaaaacagtacctctgtacaggttacaaaaagatatcactaaagctttgagctttgtttatttaaggtcgacaccccactctttagcttttaatgatgatgaaagagaaacaaagtagaactgtttcctgttctgcaagtattttatgtagcccacggtttgttgttaatctcattactacttgagagggaagtaaagacgatgattataaagtaatagttgattggcagttcatggatttatgatcttaatttagcatactcatggtactgaattatgacattaggtgtctctaggccattcacaaacgaataggtaaagccatcttacacacgagtgaggatagcaactttacttctttaaatttactacatgaccatggtgtagaatttcatgtatgtattgaatgagtaatttgtgttcagcag

SEQ ID NO: 59455 - DNA, 451 bp, Populus trichocarpa
  Intron number 1 from transcript POPTR_0007s12320.1 (locus POPTR_0007s12320) derived from phytozome v7.0 (chr-ID scaf fold_7; pos 12641032 to 12641482 reverse strand)
gtagttgaagctcgtctgatacagaggaatatactgtaagctatttcatacccaaaaaaagtttacatttttggcttgcctttggggtttcggtttgattgtagatctaattcctgccatcaagtgaagaatttagttctgggttttgaagtttatagcagaaatctgttaatctgagtcttttcttgttcaataagctagttttaacttcaactttggacagttttgaaactttcctgaattggattgtgttgtttaagtcaacttgataaccgggtttgcttagatttgatagttttgcaatctgactgcatttgaaggaaaaaaagatcacatctttactggggttttgcttacatttgattctttctaagtttgcatttgaagtgaaagagatcaaatctattgatcccattgggtttgttaaattattttcagttataatttggat

SEQ ID NO: 59456 - DNA, 348 bp, Populus trichocarpa
  Intron number 1 from transcript POPTR_0010s06950.1 (locus POPTR_0010s06950) derived from phytozome v7.0 (chr-ID scaf fold_10; pos 8178298 to 8178645 reverse strand)
gtgatcaggtactgcttttagcatatgagttcctcgatctgatcttattcaagtctacttcttcttgccttattataagttgacgtctttttttatatgaacttgtaggtttttctagtaattaagatgaatatcatgtttaaattagactgcaagccttgctgaagaacaaatttatgaccaatttctgaagcttttatgattaagaaaaggctcttttttttgttgcttctctcactggcaagagaaagaaaccatgaataagattttgattcgtcaagggctgatgtttttttctgatcttaatttttaggtcaaggtcagcgatttggttgggaagattgtggg

SEQ ID NO: 59457 - DNA, 930 bp, Populus trichocarpa
  Intron number 2 from transcript POPTR_0010s05760.1 (locus POPTR_0010s05760) derived from phytozome v7.0 (chr-ID scaf fold_10; pos 7239692 to 7240621)
ggtatttgaaaactgaccaggatttcttgaaacaggtatcatcatccctttactctttctttcttgttcactaatcgttggaaatctgtaaattttaatgtttgatgatattaattcttcttgcaaattggaatgcatttgaaattttgtgtcgactgttgcttctagcttataaggcaggtaaactgttttaattagaattttgactatacttgtccttaattggaaagctgcagattattgggttttcttggtccacaaaagctgctgctatttatagtttggagaaagataattgactgaaaaagaataatttgtgagcaacaagagactatgtgcaacttgacttaattttatatcagtcttaattatttggaagtcctaattcttcattctaaactggatgtaagtcttgtgtgtcgtgatgcagaattctgtgatttcattgtcagtctaactccctaaaaccttcaaggacttgattataagtagtctactcagatgtcagcctcagctaagctttacaccgaccattggagtactggctataccaatcctgtttatggattacataattgattctatctgattaaggcttacaaaactggttttgaatggtgaatcgactactcgaggataggactggttgttcaaaagactaaatgtgaagctgaaagcaatttgtttgtgatgataaatatttttctttattgagattgcatttggacatcgttcttctatcccatctttatatatcctgctgtgtatattactcgaaaaaggagggagtagactggtacaagtgcaacaataatgcatcttcttctttttcaccactcctattatctttcttgatcaactgtagaagaatggctgtatattgtcaataatgcagggtttagtcagtggcgtttgctgtgtcacagcctt

SEQ ID NO: 59458 - DNA, 626 bp, Populus trichocarpa
  Intron number 1 from transcript POPTR_0007s11820.1 (locus POPTR_0007s11820) derived from phytozome v7.0 (chr-ID scaf fold_7; pos 12194639 to 12195264)
tttctgccacgtgggcctcttcgccgttcctctaggtgcctgtagcatgacccccccccccccttttttcttcttcaccccattttgtggttaatgcatgttttaaattctgggatttctattacgctttgaatgtcatggctttgaaagaatattttatcaactgggtttgattaaagttcatattttgaggcctttttttaatatcttaacatttaatatgctcttttgagtttattaaagtttttatctttctgtgttactagctagaaacatgaaaataagtaaaaaggacatgtaatatagaattttttatgtgtttttatgttaaataaaaatttatacaaggattttcaagtaggtgatgaaattttgtatctttcaagtgttttgataaaacttccttaattagttttgtaaatattgaatattggaattatgataggtgtagtggtataacatttattttcaaatcctacatgggtcttttgtatttttggctaggaataaggtttcaagactaattttgttttcatgtgaattattgtctcactttaatgtttttcttttctgtttttggggcaagcttaggttgcaaaattcaactccagttagttactcagaag

SEQ ID NO: 59459 - DNA, 532 bp, Populus trichocarpa
  Intron number 6 from transcript POPTR_0002s00530.1 (locus POPTR_0002s00530) derived from phytozome v7.0 (chr-ID scaf fold_2; pos 205276 to 205807 reverse strand)
gcctcatcgtgggttgctgtgccgcaggtaaacactcgcttcatgctatctggccttttccaggtgcaggtctttcaaagtctcaaagttttaatgccatatcctaagccacaagacacttctgtcatagctaagttgccagagacatagaattccattgccccttgattcctcgtgatagcagttcgggttgctcggatttgaaaggcagcggccagagagtcattagctttacctggaccttcacatgcctggtttaaatatctttacacctagagtcgcaaccaagcgataaacaggaaatcctattgattgaattttgttttttctcctacaatagtagatgaatcgcctttgttcagaaccatcctgtataacttggatatcaatcaatgtggttctagtttgatgaatttaccacttgtttttgttctttccagcgcatgtttaccctcttgtgacattccttttcacaatatttatttcttctgatttgacttccatgttgatgtgagcagggaatttggggaat

SEQ ID NO: 59460 - DNA, 331 bp, Populus trichocarpa
  Intron number 1 from transcript POPTR_0001s00920.1 (locus POPTR_0001s00920) derived from phytozome v7.0 (chr-ID scaf fold_1; pos 747608 to 747938)
cctgtggatctcgtgatagtacaagcggtgaccatgtcagtccctccatcattgttcactcttcggtttctttgatcgtgttatttttagccttctcaattttaatgcagtttagttcttttgttcattcactcacttatatgcactttcaatggaaaatgtttattttcttttcttgaattgtggaagttgtgctaatgtatcctttcagaacttgttttcatatggtatcatcataatattcacaagaatgccgtgagagtttctttactgtttatgggtttttgaatgactaaaatcgatttacccatgcttttttaggtttctgata

SEQ ID NO: 59461 - DNA, 666 bp, Populus trichocarpa
  Intron number 1 from transcript POPTR_0001s36300.1 (locus POPTR_0001s36300) derived from phytozome v7.0 (chr-ID scaf fold_1; pos 34850450 to 34851115 reverse strand)
tcaatcttaccctccgtgttctctctcgtcctgaggtaataacgaaatcatttgcttttgattgaaatgaacggaaatggatgttgctagatttgatggttttgtaaaggtatagttttgttgtttctctttgtatttttcaggtggatttttgtgtgtgttttggcatggtttagttaagtagcacaaatgtgaggtgtgtttgagatgagttttaattggtttagctattgagcacagaaaggagatgaattgtctgtgattgtcatgttgcttagttgttgggtttgtccttgtgatgggtttttagagggcctttgttttgtttttaatatgcgtttcatatggtttagtgagctagaaaaagttagggagatgggtttttagttcagattgctagcaaaaagaaagagagactaatttagcttttcattgtattgtttagctgggctgttaaattatgaattgggattttggttctgaagattgagtgaggactgaagtcttctgggttttttttactccttttcttttactaaaatcagactgaatcaggattttacatggtcaatttgtatgattgtatttttgtcttgtgtatatttttactgaaaaatggttatttgagcaggtgtcacgtttgcctcatatctttcaacgccttgg

SEQ ID NO: 59462 - DNA, 990 bp, Populus trichocarpa
  Intron number 4 from transcript POPTR_0010s16870.1 (locus POPTR_0010s16870) derived from phytozome v7.0 (chr-ID scaf fold_10; pos 15687314 to 15688303)
agtgcaattatttgcaataacaaagaggtaagtttgatcagaattacttgagaaagagatgcttacattgtatgatgaactttccttaacgatctggttactacctataaaacttatttcgttcttcacctgccatgtgatttgtacatatcttgtttggctccctctatccctaatctcaaccagtgctattaagcattccgggcccctgctatgtctataccttcattattgtattaatttgtatcttgtaaggtttggtggtagattgtaagctggatgaaatatcacataaaatacaggttagggagatggaactttttgttaaaccgttttaatttttttattgatcctttccattttattgtctgttctctatgtttactagattttcctgcctaaagatcagaattttttttctgtctttttatttaatcattttcttttcaccgaaaaaggtctgcgggcaaccttgtccttcataatggagcaaattaaatgaaagttgagattggtttggccagtgaatccattaatgtgatactgtcagttactttggtttctaatgtctccttgagccagtccagcaaaccatgacaatattttgtaggtgatatcaatagacttcatttacccgtgaaatagattatgcatggttcaataaacttgaatctaaatcaggcattgattatcttacccgattatacatctgcgatgcctgattcctgtggatttctacgtttcaactatcttcttgttgtcatcttagtggcaggttatcttaccgtatgctttgtgcttatgttgactatttgcaaacttgacttggccaagtttcttgttgcctaatatggactcatgagcaatcaattgatgagagttgactgaactagacagtcttaaattgtcttgtaattttttgttattatttgaaagcctattaaaatctgtgtttggttggtttgtaggtggctctccttctaattcgac

SEQ ID NO: 59463 - DNA, 823 bp, Populus trichocarpa
  Intron number 3 from transcript POPTR_0010s00610.1 (locus POPTR_0010s00610) derived from phytozome v7.0 (chr-ID scaf fold_10; pos 326251 to 327073 reverse strand)
ccgaggtcactgccattagagaggtttgtttctttcttcttcttctgctctttctacatttaacttcgccttatattattatattgcataccttcatggaatgaacggatctgtttgggtgcacacccttttgtaagggccagcttgaaaactgcgttacaagccaaaaggcataaaaaattgatgttttctggcttgaaacgcagcaaaccgtgtagaaaaacgggctcaggaacgtgcttgagagttgtttttgaaagtgtttttttaattttttaaaattttacttttgttcaatctcaatgacaaacacccccatgtgcatttagtattgtgtaacatattctgttcagaagtgttttttattttagattttttttttttttaatattagcacattaaaacatctaaaaatactaaataaaaaaaattcaaaatagatgcactgtaaacacaaaaacaaatagctagaatgtgtggccccctaaaagaaggtttaaactttacaagttgctaagctattaccaagtcattgaaaagttagatgccctgttagggacttaaccgggttccggcatgactcagctgggctgtgagcagatacaatggcaatttgagaccttaaatatctgccccgtataaacaaaatccatgagagtaggctcttttgcacttcttttatttattttttaaccaaaaagattattttgatcttttattttccttgagatggaatggatggtgttatgttcatcgaaactcagatataaaggcttagaaagttgcttcccctcatctcttaatgaccttgtttttaccaggc

SEQ ID NO: 59464 - DNA, 914 bp, Populus trichocarpa
  Intron number 2 from transcript POPTR_1386s00200.1 (locus POPTR_1386s00200) derived from phytozome v7.0 (chr-ID scaf fold_1386; pos 4078 to 4991 reverse strand)
cgctggtggagttactagcggcgtggtcctggaaggttgcgttggctgtcgtgatagcttgagtctgtcggagttttcgcttttcgtgttcttttttttttttggctccaggcagctggatcgtttcgttgttgacggctatgccgtggtttggtggttttattggtaactggttcattggttgtgttttttttttcctgttctcgagagtgagaggtgagaattgctaggggagatgggttgcggtggtggtccgtgggtttcagtgcgttaagtgtgggatcggtgccaactccatctcctctgcgtgttgatgagggcggtttttctcgtcgctatccaacgagggatgtccagtatttttggcttccgttgttgcgttgacttccgtgatcgcttgagtctgtcggagttgtcgcttttcgtgttcttttttttcccgatcctggcagctggatcgtttcattgttaacggctatgctgtggtttggtggttatgttggtaactggttcaatggctatgttagtgttgggcgtgccatggcggaattgcgctaggcagttgggtttttttttttttagggggagatgagaattgcaaggggagatgggttgcggtggcagtccgtgggttttggctttgttgagtacagaggcattaatcttctattacaaagaaaaaaaatagcaaccgcgacctggaggaagggagagacagaaggagattaaaattatcgaccttgactggtaattttctttgattttctttaatggatctttgaattaattgtttattattacctatattggttggttgatagttcctccccagtggagtgttgcagtgatggggcatgctaatatctatgttttaataactgatcgattggttgaatgaaatgaattggcagact

SEQ ID NO: 59465 - DNA, 761 bp, Populus trichocarpa
  Intron number 1 from transcript POPTR_0002s14880.1 (locus POPTR_0002s14880) derived from phytozome v7.0 (chr-ID scaf fold_2; pos 11017264 to 11018024)
ctactctgttcacaccaccattagacctgacccaggtgagcttttgttcctcttctcattgtcaacacagcttcgataatgagcaggacattaccatatttagaaactacttacatgaacagatacattaaattcatcgtttatagataaacaaattcattttaacatcgttacaaaactttgcaccccccccccccaccctccccacacacacacacacccctcttcctttagaataaaagatcgagccctctatggcttctctactgggaaagagcgaagtgttaattttgcacagctttttggcacagcagatcaagctggctacttttctttgtatattatctcctaataaagttcatgctaataaaattattcaactgctttaataagatcctataatcaaattgagaacatgtctgttctgccactttttcttacttgcatcccaatgactcttagaatttgagacatgtctagtgggattcaccaacagaaacactaatttgatcgataaagacgatttcttatgcgtgatgttattgatctaatcaataacatcatttggcacgtaattagtttggatgggtaagtactgcgagtctgcgatggttacattgcatcaattttctttttctcaaagatgattaaagtttcaactcgtttgattcagcataggttgtgaatcccacctgcataaatatcaaaagttaattctcagtcttttcatcattttgatgcgtgactagaacacaagagag

SEQ ID NO: 59466 - DNA, 470 bp, Populus trichocarpa
  Intron number 1 from transcript POPTR_0010s23940.1 (locus POPTR_0010s23940) derived from phytozome v7.0 (chr-ID scaf fold_10; pos 20380791 to 20381260 reverse strand)
tgaggttggcttcagttcttgagccatcaaaaccagtaagttgtactcaagcttacttgcttttgccttgatttttgagctctcgctattttctttctaatagctcaagaaagctctctttgcttgttttgttaatgttatttcttgtttcttggtttatttaacccgtcaaaaatagtactttgatttcttgattggttaccaagaaaattcaagaaaaagtatagaagacaaatagtgtttggggtttcttaatcttcattgatttgtttcattgctgagaaaatgttaggaactgagacgtgtttggattcgttgtattcttctttactgtggagatcaaaagggaaaatattaaaaaaagtagcggggcttagcttttagagagaatatgagctatgatttcttatattcttctgattttggattttgcagagtttctttcctgcaaggacaaagattgttggcac

SEQ ID NO: 59467 - DNA, 867 bp, Populus trichocarpa
  Intron number 1 from transcript POPTR_0007s04590.1 (locus POPTR_0007s04590) derived from phytozome v7.0 (chr-ID scaf fold_7; pos 2846236 to 2847102)
tggatactgaccggcaagaggctcagttttctctggtgagatattattgagagcccatttatgtaaattgtttgttttgttgtaattctatctgggtttatgttatagtttatgtttttgtctgtttttttaattgaatatcatgttttattaagtgtttgctgtaatatttgatgctgtatttgagataatcaaatgcaagttctacatgtgataatttcaacttgtttctgcgttcaactttatgttgggaagaagaattattttatgtaacaaaatctttgatgaatggaaagaaagtaaataacttgattatttgagaatgtttatgtcaattttgctgatttactagtatctgctttggatttaatagccttcagttacttttaaattataattagtttgctgtttctatgcagttatattcataggagatccataatggtttgtttcttattaactttatgaataactaaatttaggtgctgtttttcccccatcattttgatttcatgtatgtattaagtaccatgtcagctgtctccatttgttgttatatgtattcatccatggtaactatggttggagttgtaaacttccatttctaatgttggaatcattgtttgaattccatatctattatcctcctttgtcacaaatcatgtaaattccgatatgttcttgcctttctggcatctaagagctttatcgtatataaactcaataattagctttaaccttcctttccaatgtccttccatggggacgtctaaattagtttaaaatattcccaagtatttttcagtgtaggatgatagcttcctactttcaggtttgtcgtgtggcttgttcttccaacagtatcac

SEQ ID NO: 59468 - DNA, 465 bp, Populus trichocarpa
  Intron number 1 from transcript POPTR_0002s03140.1 (locus POPTR_0002s03140) derived from phytozome v7.0 (chr-ID scaf fold_2; pos 1945836 to 1946300)
agcaattcgagaagggaaaagggactcagaagctggtatttaaccatttaattaatggctttttttgggatttgccattaacctttggtgttgtgtttgccattaaattgggattttccccctctctttctttttatttagtggggggttttgtgtattaaatctacatggactgtattttcttcgtggaatctttgatttttccccaatttaattaatgggtttttttgggttggttttattttccctgaacaaatcacctgatttgatcgcaattttgatttaaagagattgaatctgggttttgattgattgaagtcgggtctgaagttttcatgggtaaattggttaagacttgtgtataaaaatgatgtatctgtctaatttgctggccgtacgattctgttttatctggatttttctaagaaacttgcttttacagattgtggtggattttactgcttc

SEQ ID NO: 59469 - DNA, 633 bp, Populus trichocarpa
  Intron number 2 from transcript POPTR_0002s08110.1 (locus POPTR_0002s08110) derived from phytozome v7.0 (chr-ID scaf fold_2; pos 5603106 to 5603738 reverse strand)
cattcaggtgtgaaattatttttttgggtctatttttaggtttttctcctccttgctgatgttcatgttgaagtgagtgtttcattattactgttgagatagatatggtagggttttgtgtgattaattagagtttggaagatgaatttatgtttgctttagctatggaaagttggtttgagtggtggtattgaactcgaggttttcagctgcttttggtttttaagtattaaatattggaggaaaaagaaacagtaattgggggatttcattgtttgtttgctaatttgaggatttgatttttttggggcttggttgtttatctggaaaatatatgaagggcttacctagtaaaatagagaggcaaattgtatttattgcaatcgtaattgttggtctcatttagaggaccttaacttagatataacttctcataacaaatattgaacatcttttttcttaatatttccatgattattagctttttgctttttcggtgggggacaaattgatattctatacgaactcctttttagctgtactttattcatacttttattgattttggtatgttattgttgtgcttctcggggagtagattggttttcaccgctctcggttaatcgactggag

SEQ ID NO: 59470 - DNA, 625 bp, Populus trichocarpa
  Intron number 1 from transcript POPTR_0001s21930.1 (locus POPTR_0001s21930) derived from phytozome v7.0 (chr-ID scaf fold_1; pos 20429461 to 20430085 reverse strand)
ggtaagcttcgatttgtcttaatcaaacactctatgattatatgagcatagcttgacactgttgaaaaacttgtatgaatgcgagagaagaagattttatgccattagataataaaagttcgatatgtcttactactattatgtattttctcatcaggtaataacaaaataaagatatagacacttggtgtgtgattgttgtagtttttggtgtgtgcttagttgtggttttaaaaaaatggatttaagaagaaaaaaaaaagtgtttgaaaagatattaaattgatgtttataaatgtttcttgaattgtttttatatgttgatattaaaaataaaaaattatataaaaaaaatattattttaatatatttttaattaaaaagtatcaaatatatattaaaaataaaaaatatatgttattccaacttctatgagactaagattccaaacgcaatgatgtatggaattcaatgcagaaatcagtagctatctgagaacaaaacagttttttttccatggttgaataaagaaacagaagctacctcaatacctaaaaataataataaaatgatgatgatatgtgtctatatatatcatggcaggataactgaacagcaaggagag

SEQ ID NO: 59471 - DNA, 383 bp, Populus trichocarpa
  Intron number 3 from transcript POPTR_0001s34960.1 (locus POPTR_0001s34960) derived from phytozome v7.0 (chr-ID scaf fold_1; pos 33224293 to 33224675 reverse strand)
ttgttggtcagaaagtgtttgctattggcaaccctgtgagtgagtttaattatatacccagccctagaatttgggtggcatatagcattgaattatgaaacctacatgaatttgttgttagaatccatccccccctcttaatcctaatttaatttatatataatatattttgtccctttaattctccatttcttttctccaaaaaaatttgattaaacctgattttgtaacaatgtttagtttatttataagttcctgattgagggtttggacatcatgtaattgcaccactgtttagtttattggacaggttaccctaattgacaatccgattttctgatttttcagtttggacttgaccatactcttacaactggcgtcat

SEQ ID NO: 59472 - DNA, 587 bp, Populus trichocarpa
  Intron number 1 from transcript POPTR_0010s12410.1 (locus POPTR_0010s12410) derived from phytozome v7.0 (chr-ID scaf fold_10; pos 12441406 to 12441992 reverse strand)
attctgtatgctttcttttcttttcttttattcttgctgcattttttcttaattattttgggaacttgaaagaaatgagataggttggcctggaatgtttgttggacattttcatcttatgcctgaacattttccattatggttgatcttttggtttttgtcttttgaacctactagtgattgaatcgaacaatgttttaagtcaattatttgggtaattaccagggataacaaataattaccacacaattttgtagggatgtatttgaatatgatagcaaaatcttcctattatgtaattatgttactactaaatttttatgatcttcctctaaatgaatacgaggaaggcggagaattggcgtttgttgcatgtgctgattctatgtcatgatgaaaaccagtgtttcaggtgttgatgattgacactgcaagatttcgggcttggaaaactttttttgtttgccaaaattattttgtgttcatgcacattctcttgaaaatgtggtgaggtacttcttctgaagtattttatatcttgatctaattaaggatagtgctgccacgaaaattgcgaccctctttca

SEQ ID NO: 59473 - DNA, 437 bp, Populus trichocarpa
  Intron number 2 from transcript POPTR_0001s08750.1 (locus POPTR_0001s08750) derived from phytozome v7.0 (chr-ID scaf fold_1; pos 6684577 to 6685013)
tgccaatcaggtaaactgttctcttcaagaatcaatcttctttttttgctattatatttacaattatctttttcatgaaaaacactcactaaatggtattttactctcaatgctagattgaatctaaccgcttatatatatgtatacaatgttttcctttagagtttgattgtaaggaaatatattcttcttcttctttttttcctaaattgtcaatgtccttattcacgatagaacttttgttttgtgattctggcagttcttaaactgaccgaattctggaagagaaattaaagaatttttaaatcttgtgtttatttaatgtgtacatatgccttgagttttcttttctgttctttctttgttaatttttctttcttaatttttctccttgtattacagtcagttccaatttatctctctgaagtggctcccta

SEQ ID NO: 59474 - DNA, 876 bp, Populus trichocarpa
  Intron number 1 from transcript POPTR_0001s05040.1 (locus POPTR_0001s05040) derived from phytozome v7.0 (chr-ID scaf fold_1; pos 3884553 to 3885428 reverse strand)
aggtatatatatatatatatatttatctctagttaactttctcataaaaatatattgggaaaaaaatcatattctcccttaattagttaatctaaaaaaaaaaaaaatcagttgacaaacaatatgattaactgtgtgatatatatagttaaaatgatgatatatcgatgtttgatcttaattttcgattattaattgatttttacatcaaaagaaatataattttctttcatgataatttatttatgaaaatcatcgtcaaatcacatcaattatctgtttgttttttaatgatatttaagaatcgtcatttgtttaagcataacttgcaagtttcatatcaattttatttctacaaatataaaaactaaaaatatattagtaatatcctaaaaaaccataaatgaatatggagaaagattacataatcctagatgctgattagtcaatttgaacacatataattaaaaatgatgttgcgagttaattatactatttttcaatatagttaatttgtgccagaaaacctgtagttgtccttctttaaaatatgaatttataaataatcattaatggaagtacgtaattaattagctatagcttgaacgacaaatttctcatcatcttgtgttttttactataaatcactaccgaaatgctcggaatattaatttttgaaaatataaattaaataaattaaagcctttaattaattatgaaaatctaaaacatagattgttttactgacataaaattgtattttcttgaatcactctcattttcattttgcgttcacaagtttaattatattgtaaaaatcttcaaaagaccaacaacaaaaataataataataattgccttaacaggagattaacc

SEQ ID NO: 59475 - DNA, 1038 bp, Populus trichocarpa
  Intron number 1 from transcript POPTR_0001s30260.1 (locus POPTR_0001s30260) derived from phytozome v7.0 (chr-ID scaf fold_1; pos 28771969 to 28773006)
gccgacgacgagtaagaccttaatctgcaaggaagaaatagaagaattagtgtggattcattagtcctatgcattgttatcgtacgttagatctcatttctatataggaataatgcatgggaaacgccaaaataacgctgaaaacattattaaatataatggcagctatgtgggcaaatttccttagttaattttcgtggagaagtacataaaaaccatagttatttaataaattgtccctcactcttcatcacatgtgtcgaatttaaaaaataagaaaaaaggataaaaggattcttcagcctctacagaacaaacccaagttactttttttattacttatcgtgttttatagtatctaatttcagttccaatgccatgcttaattctatttgtaagagaagaaaagtaccatttgataacaaacatcaatatgatcggaaaccggcagtattagacacgtgcagtaaagcttaatgaattgctattacttttcctcgagtaagttgaatggtattgttgtttttttttttttaaaaaaaaaactaataccactccgaagaaggaaagaaatcggaaaggagcaagtcatttaaatagaataatcttggaagacatcccaagatttacttgtgggacgcgaaactaaaatattcaaggcaataaaaatacaatctttgcaagcttatccaccttgttaatgcctcattgctgactcaataatgcgtgctccacacggccaaaagaccccgagttcacctaggatacaaattacctctactattatttgtttgttaaaaaggcaagcgtacccttgttttgacttggagattggaattagtcgtatcctcaaagcctctcttgttagtagtagctcagtctccacgaatcccaccccacctctctatggctttagttgaccgacctcactgcccaccaactctcccactccaccccaacttcctatatatataaacaaagcctctccttactctacactcagtgatcggcccccccctctctctctatctctctcaa

SEQ ID NO: 59476 - DNA, 683 bp, Populus trichocarpa
  Intron number 3 from transcript POPTR_0001s25380.1 (locus POPTR_0001s25380) derived from phytozome v7.0 (chr-ID scaf fold_1; pos 24521392 to 24522074)
ctaaggttaatattcgagtacagactacaggtaggtcgttaatcatccctcctctcctctctaatgctactacctatgcatacattattgttagaatctcccctgattttcaagactagattgattctgttatgatgaggacatttgataattctatttttatgtattttggattttgttaagccttagtttcccagtttcaattactgtatggatttcaatttggttcatttaccttctctgggcatgtacttgtagattagagttgaagccaactattgatccgtcttatcccagttattggttatcaggaactcttctcagtccaactctaagaatctcactagcagcttgctgcaaatgttggggttcctctttgagatgtgcttcttttcgctaaactaaactagtttgtctttgatcgaataccccactcctatttccttcctggtaacagtttgtgatcaaggtgctattaagattttcaatgcaaattaaccaatacctagcagtcttattacatgaatcatgtatcttctctgtcaatcattcacaagaccttgaccttttaaatgatcatgcaactacatcaattttcttcctggtttcccatttatgttttttgagttttgatttcttgcctgtaccttttgcaggtgatccagctagggaggtgttgaagg

SEQ ID NO: 59477 - DNA, 629 bp, Populus trichocarpa
  Intron number 1 from transcript POPTR_0010s16220.1 (locus POPTR_0010s16220) derived from phytozome v7.0 (chr-ID scaf fold_10; pos 15218226 to 15218854 reverse strand)
gacagtgtaaaagcttggcagacatcctcaacaaggtattttggattttttttgcaatcgttttgagatgattttaattattttttcgattttatatagggtttatcttatcaactgtactgtattttcaatttatgtgtatttatctaatacattcgttattagtatatgaatcgctttttttaatggttcgatttttattgaatccgtgagctaacaatcagttgaagaacttgaaacaagaatcttttgtaatttaagcttttttggattttcgagctgagtttcattcttgaaacaacagaatgccataaaaatggcactgatgaagttgatggtaatgttctcagatagttatgaaaaagttttgaattaatattgtttgattacataattgaatccggaaatctgtattagatgccgctaaaatattttcatgtttgaaaaaatcaattaatttggatgagtttcaggttgaatttcatttttgtttggtatctgtaattatgcacaatagttttctcaggaaactgttgagcttatgttgtatttttcgtttgttttccaataatcccacttgtttttttttttttaattgtggtttgtctggttgtagataaatattaggc

SEQ ID NO: 59478 - DNA, 290 bp, Populus trichocarpa
  Intron number 1 from transcript POPTR_0001s35150.1 (locus POPTR_0001s35150) derived from phytozome v7.0 (chr-ID scaf fold_1; pos 33407382 to 33407671 reverse strand)
gcattcctcttttctctttgcaacgacgccgtcaggtactattttctcttctatggtccaaaattattattgttatttctgatatcagatctgaatctgtttgatcttagaaagtatagaatcaagggtctctgtaacctgtttgatcgatgagaaaatacttgtattaattaattagatctgccttttcatctctttttttttctgattaattttttaaagttttttttaatttatttgttttactcatttaagcttattggggtaattattttagggttttgattaaa

SEQ ID NO: 59479 - DNA, 854 bp, Populus trichocarpa
  Intron number 3 from transcript POPTR_0010s11420.1 (locus POPTR_0010s11420) derived from phytozome v7.0 (chr-ID scaf fold_10; pos 11702695 to 11703548)
cttctttcagtatgttcttattctatactggtgaatcaatgttcatttttcaaggctaacgcgtgaatgtgtagatgtcttcatgtcaagatatccaattctatgagtctgtggcgcttcatgatgaaatgattagcagaaatgagagctagcattccaggaatagtaaaatttcagaatttcaaggcattaatgccaatctatgtggttgaatttgttctagatatacattggtcacatgacataaggtatatagccaggcctactgcaagaggagcagtgtttatgcctttaaatgtgacctcttcaaccttgagattcctctggagttgacagtgaatggtcctctaaaatgctggtggatatgcaggcatacatgccttccaaaaaaccggtctgtcataatttatcctcatagtttttaacaagaatcttccatgggcaacttagaatttgcattacctcatagaactcaagtgagatcctcattcccaaccaggcttggctaatggttttaggtgatccgttgaataagaaatgagtgcacgtaaattacataaaagaaaagaactgtcatttcattgccttcaaatgactgttaaagcttatgcattttgggtcgtgactgtggttgaaagacttaaagggagtagccaagattgcatctcattctcagatataatgtaaacataatttatttctctactgttttttgtatcttctttcatattctgcctctcgattaattccttcctatttgacatgcctggtacagattttgtctgggaatctatttttgactttatgttactgactcagggagccatcgtagctgatctttctgttttgattac

SEQ ID NO: 59480 - DNA, 773 bp, Populus trichocarpa
  Intron number 1 from transcript POPTR_0007s06430.1 (locus POPTR_0007s06430) derived from phytozome v7.0 (chr-ID scaf fold_7; pos 4751697 to 4752469 reverse strand)
gatttacaggtctagtgattcttgactattctttttgtgattattattggtttttaatttttatttgatatgtttttggatttttctgctttttgttagaaatttgtttgggtgtatagtcaactgtatgtaataattctgatgatttttttatccaattttagcacttaaaacctgaggttacttgtgacatagtatttagctggtaacctggattttgacttttttttttccctttctttttcggaaattacctatatttttgcctgggttttctaagtatgggtttccaaaaatagtaaaactacgtccaaggtgcgaatggtgactttgtagatttggactctagaggtacaggcaaaatgtggccttcttgatttggatgctaggagctttggtagaatgctgttttcttgttaaatgaagtgtaacctgtcgaatctgagttagcatcacaagctttttgggttgggtcatttaaattgagatgcaggaaaattagctggaacaagtacatgtgcccttaagttaagcctttcgcatttcatatccaaactgaacatcaatgcatttgttttggatgtctatgatgaaagatttgaatatggagtctaaagaaagcagttgaaaaaaaaaaaaattgtagaagtttggtgttacattgtattttaaataagatggttgtataccatggttttcttcttccataacttcttaatctgaatcctgtgtgtatctgaattccttattttatatctctgcaggttctgttc

SEQ ID NO: 59481 - DNA, 721 bp, Populus trichocarpa
  Intron number 1 from transcript POPTR_0007s05050.2 (locus POPTR_0007s05050) derived from phytozome v7.0 (chr-ID scaf fold_7; pos 3252927 to 3253647)
agttttagagagaggtttcttgaagagattccaaggtgcgtttttttgacttccttcttctgctgttcttgattatggtttctaattaaatttcttgattggtcataagggcttagtggtgtttgtaattgaaaactgttttgagggattttgggatttttagggtttgaatttgttggttcctgaatctgtttctgaaattgatgggtcttgttcgaaatttagggtttctttgtcagtttagtttcaattaattgttattctataattgatttgatataattacgattattgattttaacttttcggtagttggtttgagattcagggctgtattggcattttagttctaatgatgtgtttctttgcgtctttagttgttaagatctgttgaacagcgttatgtttggttgctgagaaaatgctaggaaagccaatttagttcttgaccaaacggataaagccctttacaagactgtgtttagatcttgaattgttttcttgaagaccaaaagtgaggcctgaaggtgcatgaagttgtgttaatgaatgttaacatgtttgatcaaacagataagcgctttagtcttaagattttcaactgttttcttggagaccaaaagtgagacttgtgttaatgaatattaaaatgttttatctattttggccttcctgattgaatgattgtttctgattatttgtttcgtgtgtgtgtgtatag

SEQ ID NO: 59482 - DNA, 698 bp, Populus trichocarpa
  Intron number 2 from transcript POPTR_0010s01860.1 (locus POPTR_0010s01860) derived from phytozome v7.0 (chr-ID scaf fold_10; pos 2036777 to 2037474)
ctttgattctcaatttttgccctctccattgcctggtaattcttcgattcttttttatattcaccataaagttctgttcttttctttgtaattttttaattgacctagttaagattttttgtaagttaatctagagaagtccggccctggttgttgccgcctgactgtgatttttttagcctctatagcgaccaaacaattttgtactttaaccaaatttacaattaggaaagattttattgaattagaagtgtcgaagatctgttgtcataatacagttgttctcgggaaagaatatctcgaatcaaatttgttcgtgattttttttaatcaatggaaaaaaaagaactactgtataaggatcgatgatcactagcacgattgacatgtcacaattgttgctgggaaataattgaaatctgtgcattatctggtgtagtcgatgactgttacatggaaattttaaagtttgatcactgtttatgtatttgtgtatatttagcatgattcaaccacatgagagcatataagcgcagcctgtgtcgcgtgtgttagtagtgttatgagttcttgctttttttagaagtaatatgtagttatttacagacaagtttttatgaatagttgttgaagattcaatattgatttagttttattttttgtttttattatatgatatttaggtgaaaaaggtgagg

SEQ ID NO: 59483 - DNA, 692 bp, Populus trichocarpa
  Intron number 1 from transcript POPTR_0010s19960.1 (locus POPTR_0010s19960) derived from phytozome v7.0 (chr-ID scaf fold_10; pos 17710873 to 17711564)
tcactaacagctacgcaggtttaatttctttttaactttccgcttctcccttagatctgtcctcttctgacctccttattttttattttaaatttaaattcagtctcttaagttttttttttttttttattattattatgatatgtgagtaaaggaatttagagttggagagagctttatttgctgtcaaattatgaaaatttgaaatgggtttgttgattctgccttttgagctagcatttgtttatttatagaagactagctttcatattgctgtatgctgtgtgtcaaattttttatttgatttttattttaagggcaattagttataacgtataggtttttactagctaagaatgtagatattcagaacagtgtttaatcagcgtggagggttgtaatatttttcataccaatgcactgttccgtgggattcagcaatgtcccaattctagctatcattgttatatttgtcgaactagcatgtgccaaattggattttaataccatgctttaagattttcttttgagaagttattgtcagcctatagctatagtctcatccttttcttgttgcagctatttttctctccttgttttgaagggtgttacgattctagattggatgccatgtttgactaagttagtcatgtgatatttcaattgtaatttttcagtgccatttgaagaag

SEQ ID NO: 59484 - DNA, 505 bp, Populus trichocarpa; identical to SEQ ID NO: 58440
  Intron number 1 from transcript POPTR_0001s47520.2 (locus POPTR_0001s47520) derived from phytozome v7.0 (chr-ID scaf fold_1; pos 47673942 to 47674446)

SEQ ID NO: 59485 - DNA, 288 bp, Populus trichocarpa
  Intron number 1 from transcript POPTR_0001s17810.1 (locus POPTR_0001s17810) derived from phytozome v7.0 (chr-ID scaf fold_1; pos 14693093 to 14693380 reverse strand)
ttgatcgtgacactcgaagtttgttttgaactcaagtactgttttttcattataagagattattagggatctttatgaatgtggaatattacaaataaaattttcacagtccaatttttaaatcacataaaattgtctttgaatttctgcttggcccttcctctcctgaattgaaagtagtaagttaaagtaatcttgtatgatctgcctttctaatttaagtcttccccttgtgttttattttgttctttaccagtggttcaaaagcagttgaaattcttgaagcat

SEQ ID NO: 59486 - DNA, 582 bp, Populus trichocarpa
  Intron number 1 from transcript POPTR_0010s11960.1 (locus POPTR_0010s11960) derived from phytozome v7.0 (chr-ID scaf fold_10; pos 12084436 to 12085017)
gcaccacaacttttcgctccgcaactgttggtgagttttctttacttacaccatcaattattagaaaccaattaaattataatcatttagaattgaaacaactttcatacaaaattgtatgtactcttcaattttgataaacaccggatcctctatgctatatatgtatgaacgtacgcgtgcttatgtagattttgattatttataatattctttaattcacatatatagtactagatcttgtaaagtattttattttaaacgttatattgacgaatttagagctcaaagcgcgcatctaaatctaataggtcaacaatccaaagatcgaggaaacaaattcacttttgcaattgacctcacatgtatatattatcacatcattggaaagaaaacttgttattggggataattaatgtatccaccataaattataattaactatatttttattgcatggctagacaaagcacaatgttgaaaaaagagagaagagaaacttatgatgatgtttattgctcacgttgatcttcatgactgatcccaggtgtttctggtaaaggcttcattgccagagacata

SEQ ID NO: 59487 - DNA, 989 bp, Populus trichocarpa
  Intron number 1 from transcript POPTR_0002s17440.1 (locus POPTR_0002s17440) derived from phytozome v7.0 (chr-ID scaf fold_2; pos 13204356 to 13205344)
cccctaagctctccgtctgatcatcatgatgatcaagatgataattacccatcttttttagggtttgtttcatttctgtagcacttggacaaaatagttctatataataataataataataagaatacccgttactcttgctgttcttttcttgtgtgtttagtgttgtattttgatattctatcaatcagcaagatgtttccttttcttttgttaatcttgctatgattaagatgttctttattgtaatttgtgtgttattgcaaaattgacctttatttttactgattgcggtgtggtttttatgatattctctcagctagaactctcgaaccctgttctttattcgttatgatcgtcataattcattgtctaaaaaagttattcgtagcttgtaattgtaaatgattgcagttggagattctcttaattcgaacgaatcgtttaaaggaaccacctttaaggacaggtttagactttagatttctggtgcttgttgctttctctcggtaggtagttggtcttccttttactttcatgcaggttattactgagtgtaggtgaatatagtaaaggtggatctttcgaggaatctaatcctcgtatcttcagcagtctaaattatgtgactgcttttaacttttgaaacatctataccgctacaggggacttttcgttctatgatcctgtgatatctctgtttttatactgtcatgttggcattgactgggatgcagaataataatgaattgtgctattgatcggaagggagtttttgttcttgatcaccacagattattgtttgccaaattatttcatgcattctgaggccatgcttttccaaacttaatgatagagattttagatagtattaaatatggacagttttctctgcaaatagttagtgctttctttttagggctgtcaacgttgaatcatgacctgagctttatactaaaagtaagcgatgctatttgtctaatgcaggg

SEQ ID NO: 59488 - DNA, 395 bp, Populus trichocarpa
  Intron number 1 from transcript POPTR_0001s34620.1 (locus POPTR_0001s34620) derived from phytozome v7.0 (chr-ID scaf fold_1; pos 32856100 to 32856494)
aagcctcccagaaggctcagctccgtaataaactggtatttgctgtttttgttttgaatatggtgttgattttaaagagttgaaaatgtatgatgcctctcaattattgcggtttgatgaagtctagcttttatgttttaaatagagtgtttggtgatttgtttgcattgcaaatgtttttttttttttttttaatattacaatagaggcatatgagtcctctgggagaagaggagaaaacttccctaaagaacgcatagcttatttgttgacttggaaaccaattgatttgaccaacttttcctgatggaagcaaacaatgccttacaatgataagagtttattttatcttttgtgcagaaagtgaagttattttccttgaaggagtgtgcaat

SEQ ID NO: 59489 - DNA, 961 bp, Populus trichocarpa
  Intron number 1 from transcript POPTR_0001s01480.1 (locus POPTR_0001s01480) derived from phytozome v7.0 (chr-ID scaf fold_1; pos 1100596 to 1101556 reverse strand)
gcttctttcccctggtttcttgcacccatcaaattgtaagctacaaaaacaaaaacccttttggctttagttcttttatgtttcatttttcttggatttatcttttcttctttgttattgttagtttttctttagtttcaattaaagttggtgtttttaagatttataaagtttggtgaatttaggacttgtttgcttataatgaacgaggcaaaaaataagttggagatgtcaatctgatttgtgacaaattttattgccctgtgtgacggtggctactctttaactgacccaaatgtcaaggagggcttttatcagaattgtatctctaatttaatttcaattgaagtttgtgtctttaaaattggaacagattggtatttgtttaaaattaaagttggcaaggttagtctaattttttataatttttactgttcactgtgatagtagtttctactcttaatcaacccatatgtaactatggattcgttctcaaaatttttatcatcttaatcaattcaatgaactgcttattcattcaattattttgagactggttaaaaactgcattttgtttctttttgctaccccttttgtcacgttcagtaatctgtttttatatttggactgttaaatgctttgacaatgaggtgagaaatagtatgcaacgagacatccaaatagccttcaagtgactgaattttactccaggtaaatggtttggaggaaaatttactggaaatgggtagtgcagttttctgacttgtgaaattatcttaatttgcaagtcgtcctgtgtgtgcttgtgtttgcatgtgtgcacttgtcttgtcaaatgtcttggtgatatctagttaatcatataatcttaaagttgcaggttatattttgtgtttgttacgtgctatattggtcttcttttgcagtgagctattgttcctattttgggaagaagattgac

SEQ ID NO: 59490 - DNA, 876 bp, Populus trichocarpa
  Intron number 1 from transcript POPTR_0010s22130.1 (locus POPTR_0010s22130) derived from phytozome v7.0 (chr-ID scaf fold_10; pos 19154572 to 19155447 reverse strand)
gccttccacctctctctcttaacgcctaccaaacggtattcattcatctctttgctacccctttttcttatgtttctgttgtaattaaagaccagggttagggttttgaaattttgatttcgtggatttgttttaatattagcagcaattcaatttgtatgattacgggtccttcgcacccaaacagaaaccagagagaaatgccgaaaatttctctcttcttgcaatactttccaccctaatcatacagttagggtttatgtaatgtcattgttttgtaattgtctttttttttattttcctacaaaacaaaaggcaatgcaacgaggctaggatgataatttcggatggaaaatttcatacatattgttttaaggaacagattgattggttatttggcaaggcaatgaggtgttctgtgcaaaaagaattgatggcgtatatagtccctctgttttctgatttttcttgttctggtccctttagatgattgttttgcacagaatgccttttattgcagccatgacttctcatgttctttacctatgatcgtatgacaaaaagggaatcctagcctcaccgtgttcctttttttgaaatgcgttggaaattaaggatatggtcaaggtttctttactgctattgttttgtcatgatcttcctctctttttttcctataaaacgaaaggtaatgctctgaggctaagatgatatttttgatggaaaattccgtacatattgttttaaggaacagattgattggttatttggcaaggcaatgaggtgttctgtgcaaaaagaattgatggcgtatatagtccctttgttttctgatttttcttgttctggtccctttagataattgttttgcacaga

SEQ ID NO: 59491 - DNA, 831 bp, Populus trichocarpa
  Intron number 3 from transcript POPTR_0010s10440.1 (locus POPTR_0010s10440) derived from phytozome v7.0 (chr-ID scaf fold_10; pos 10950841 to 10951671 reverse strand)
gcaaaagagcatcacaaatgtaagatacttgccgcttcttttctcattttctgttttggaattccaatgtcctttttcaatgaatacgattacattctttgtagtagattaattatggtcaactggcttgagtgggtaaggttactgctttcgctctctctcaaggtttcttctggaagttctcttcattggagtaccttttggttggaattcaatgccgtgataagcaatttggagctcatctttgtgcctgagttattctctaggtttcgtcaacttcataatgcgtcctgttctcttgattttattttttttctttagaacttgtgaaacttgcttattttcatgtctatgtaagtaaatatgcatcctgtttgctaaaatcgaagaactgcaggatggatctcctgattctactttgtcaattatgcaaaattgtgccaattaatatgctaaactggtatttgtttggcacaactctagaatttgatcatgctagatgaactcttcatctctctccccactttattttctctaaaatatttaatgcgaaataatgtgcttgattggaaaattttccattgctgcgatgctcaataaggaaaaaaataatgttgacgaattcaaattgaaactgcagaaaggacgacaaatgtgaccatcctgtagaaaaatgccaaacagaatttccaagtttgaaaaagcagtctctttcatatgaggctgcttcttttcttattcgtactgctatcaccatcggcactgtgcataccgtacatgacttgcctcttactgtgatattgccatctgaaaaattcaataattttgcag

SEQ ID NO: 59492 - DNA, 759 bp, Populus trichocarpa
  Intron number 3 from transcript POPTR_0001s08510.1 (locus POPTR_0001s08510) derived from phytozome v7.0 (chr-ID scaf fold_1; pos 6479052 to 6479810 reverse strand)
agttttccagctctaggtacagtatgcttaatttttattttatttcttacacgaacatatatacttgtactaccatatgttttctaattattatctcacggtttcttaagcatgtgatgatgcattgaattatccatctcaagaatttgatctcagttataaacttgtctgatgaaaaaattgattgagatttgattctaaatctttataaggtccaccagcatgttagataggaagcaaagcaagtactactataagagtacgagctctcaggctttattacctgtcaaaattaaagggcctgatctcacctattcttttctttagatcatcaaaaatctaacctggtgtttttattctgttgggtttaatgttgatttgtcattatctttctggtttctgcttcgtaaatattttatgtgctgagcttttatatattattacctcttgggtccatcaatgtcaatctgtgtttgaagacaggttagagatagatcttaacaaatagaattgtccattaggattcatgtgttggatctatcgattccttcttttccaaattcacctggaaggaaacaatgattaggagttcttccttgattttctgctatatatacttctaaattaaacatcttcttaagctattcctgcttcatcaagaactacaaacagtttacgtaccctatcatgtcagtgacagttagcattgaacagtagcatattttctttttcatgatagaattgatggagatcatatag

SEQ ID NO: 59493 - DNA, 646 bp, Populus trichocarpa
  Intron number 1 from transcript POPTR_0001s06610.1 (locus POPTR_0001s06610) derived from phytozome v7.0 (chr-ID scaf fold_1; pos 5078670 to 5079315)
gttgcagatctgaaaggacctgttctacgtgataggtgatttttcaaaacttttctagaagaactgtaacagaaagaagatttagtcaagaaaatttctaactgtttaaggaactctgcatcgcaaatgcatgaaaggaaaaggatattgtaaaatacctacaggcaattaaagaacaaacataactatgtgtgcaattatataaggttatagaatgatttataatttaatataagcaagtcttaaattgtgtaagttctggtgtttatgcatcatagtcttgaaatgaatttgactgctaaagagttgagtggataaagtctggaggatatataatatacacagttttgacgaaaccccagaatacatgctggtttatcttcccaagttgttggtagttcagcttggtcatctcttgtcttccaccttcagaattaatggttgacatgtttatgtcatgctatgtattttgtttttatatgagctatgagagaaccaacaaactaatttgtttgtctaaatgcagtgctcttcaacttcttagctactaattcaaggtattgtcgattgggtttggtactctggtttttcattttgaatttattttgtaggtacgaggcacaatttattcaagatattgtcaaag

SEQ ID NO: 59494 - DNA, 897 bp, Populus trichocarpa
  Intron number 1 from transcript POPTR_0001s18850.1 (locus POPTR_0001s18850) derived from phytozome v7.0 (chr-ID scaf fold_1; pos 16028089 to 16028985 reverse strand)
attcaatcgaagtggtccttctctcactcatttgagtaagttagatttaccctaatgcccctcgccccttttgttcttgctgctgcagcttggttgcagggaaactgagggaaaataacagaaagtggaaggaaaataactgaggatattatttatttgattttttttattttttcattcttgttttcaaattgtttttaaatttaataaaaaaaattattttcaaataaaaacaactgctatcacgtaaatatctcttaatcatatgagtttgccgttttcattgagttaattttatagtcataaagataatgtccagattctacttgctttacttttgcatattttcttagtaaccaaacaattcaaattaagtggcaataatttgagccctttctttctcgacccttcatttgtggttttttaaattgaattttccaagcttgaccgacaaaagcggagcctgacgacctcactcgtttgtcatgttgtatgaaaaaatgttttattttgatgttgacggaattgccctttcaggaaaaacaaaatttttggttctcccaccctccactatcatggcatttgaatgaacagaatcaaacccgtgactgttgttgttttcttccttcgctgttctcttagtatttactttatcggatcttggtcagattatgattttctacttttttgactgaagtaaatcttgtgtgacaagttgatgacactcctgtaccttttgcactgactgtttaatcccttcctccaaagcaaagcagaactggggagggtctcgtgctcgaatcctacttaagaaccaaatatattaaagagttatgtttgtgtaaatttggatgagctaattaatgttaagaattctgtcattcctgctgaacagat

SEQ ID NO: 59495 - DNA, 884 bp, Populus trichocarpa
  Intron number 2 from transcript POPTR_0001s02010.1 (locus POPTR_0001s02010) derived from phytozome v7.0 (chr-ID scaf fold_1; pos 1481289 to 1482172 reverse strand)
ttaaatcacatttacaggtaattaaagcatactctcaactggtttatctccctgcttgcagtgtttaaattcctttgtgtgaaataaagaaagaaagagattttttaaattgtcccttttcttcttgtctttattttctgtcttaccttctaactagacttattggcttgagctaatagtgttaaattgatgcagtgttaattgtacttctaagcagaatttgccttttaatagcctacattacaggaagggtgttttattacataggtcacaaattccaaggtttccctgcacagggtctttcaaatccttaagcacttcttttctactcattttggaagaatgaacgagagagagagagacatattatcgatttcaggaatctagtaagacaaaaccccaggaattcaaaatgagtcctagccaagccgagacaagtttgcactcagtccatttttattacttttaaaaacattttctctcacattgaatggaggagaaaaaaaaacacagaacaaaacaccatcatttttcaatgatatgtttctcagatgggtttatcaaccaacttttttaaccatggtgaatctcattcatgcatgccacatcccatatctacatacatacatgcatttagtaggcaaataaatgcttatgttcaaagttcaaataatctctcactttttacattctgtacttgcactgaatatctctgatgtatgtatcccaaacagtattattgatctccttttcttgttttatccttttgtgtttacgttttttcgcaattctttttgctctgttaatcaatgcccagaaagcctaatttgatgcttcatcaaaaaattagtctaatattggacgtgaaaatgtaatgaatgcag

SEQ ID NO: 59496 - DNA, 457 bp, Populus trichocarpa
  Intron number 1 from transcript POPTR_0010s15850.1 (locus POPTR_0010s15850) derived from phytozome v7.0 (chr-ID scaf fold_10; pos 14954145 to 14954601 reverse strand)
gaagaaagtttactgaagtaaccgtgcatagaaaggttcgaattctcttttctctctctctcaccccgtccctctcgcccctcttctcatgatttgaattttgttttagatagattttaattcacagatctgtcgattatgataaactctttatttatgcttgcttagatttaaatttgtcagcgaattcttcggtttcgatttctaacaaattttaatgttgttactttggttttataggcaacccagttcgtttttatttttctctgttaactccaaatttttttaaaaaaaaattaaactcggaaggaactcttgattagttaaggacccttttctttgttgatgaagagttgagaatgtgtaattaattttaatacaaaactcatgctaagttcctctcttttgggttactcttctgtttgtagatttatcagattatctataggtagaagcg

SEQ ID NO: 59497 - DNA, 842 bp, Populus trichocarpa
  Intron number 4 from transcript POPTR_0002s03220.1 (locus POPTR_0002s03220) derived from phytozome v7.0 (chr-ID scaf fold_2; pos 1983020 to 1983861 reverse strand)
tcctcacatctatagcaacggacatatctgtttaggtattacttaactcgtagtagtaacgtttattgacatttctctcctccgtgttagtttattgaattaaagcatttctttacctgtaattaagtgttatgattattgacttaggtattgcctaagcttttagtgcaaattcccttaggtttttgctccgattgcaaggtccatgatgcgattttaagattctttgaataagtgcttgcaaagcattgtctcaaggagatttttaagcgatggtggttgtcgtaggtgagtaggacggagcagcgcgtgcgtcttgcttttttgacaaatgagtttttttgaaacaatggtgtgcgatggtagctcctactatcatcaatgtatggaaggtcggttgtggtacctggaaacaaaatttactccgtccatgtattagttactctgttaattaaatgttatgttgggcagtagaagctaaaaacaaatgtgaaatatagaaagcaaactttcaatttgttttcttccctgttgtattgctttccatctcaaaaaatttatcaattcaatgttatcattagcattaacttattaaccaagtggactgtatttggattttttctggttgcaaatattatttatccgtgtgaaggatgggtaggggtttgtgcattactgcccaaagattcgttacgcttttccatctccagaagacaatgaaaataatcttatttgacttttcatttgcttccttcttgaaccaagtacatagtcagctgtgcctggaacagataaattgtaatattcttgtcatttgttcttggtccttgcagatatactgt

SEQ ID NO: 59498 - DNA, 531 bp, Populus trichocarpa
  Intron number 1 from transcript POPTR_0001s40530.1 (locus POPTR_0001s40530) derived from phytozome v7.0 (chr-ID scaf fold_1; pos 39986544 to 39987074 reverse strand)
ccgtctctctaacgccaaagcacaacaaattccttgtaagttcttctcctcttcccttttaatacaatttgtttacatttgtctcttttgttgtacatgtttttatttttgtgaactctaatggtatagctgtttgttttcaacgatcccattttgcattttcttgtaaaacttttcacagcttcaaaacatatttgcacaatgctctcctagcaatacgaattgcaagtataatactaaatagctgcaaatttcaatctgtagttttggttttgtgtgaattgtttctgttttgataaccctagcagtaactccacctttccccttttattttaatggcccagaagttcatattttgagttctgatttgtttctatcttatttgtatgtttttattctgttcctggttatgattgctttgtcttcaacacgctgattagtaggtcacatcactatataagtccttactgaaatgttctcttaacacaaattgcagggtgcagtagctaaataaaaactggctttggcttt

SEQ ID NO: 59499 - DNA, 704 bp, Populus trichocarpa
  Intron number 1 from transcript POPTR_0001s10950.2 (locus POPTR_0001s10950) derived from phytozome v7.0 (chr-ID scaf fold_1; pos 8488328 to 8489031)
tcatttctggtacactcttcaataaactttcgaaaaatctcgtgttctgtgttttttttctcaaacttaactatgtgattatacctgctgaagtacgagtgttgcctggaatagtgttattggtttcctttttggggagcatagggatcaatatttaactggaaagatcaatatgcagagttttttggtctctatacaatttcacgtctttgaaatatattttctctgaagttttctgatcttataatctctatagtccacatgctctctgatgaaaggtttgcaagctcgaaaggggggaaaagagagtagtagaaaacaaagttctgaatctttagctcatattggtttagtttcagaattacagtcctcaactcaaccaagctatatggtaccatgttgtatgttgagttgattaagaattttggttgcccagatttcaggatattctttaatctcagattcttattggtttctctttggtcatcctgtttccatttgagtgccatagagtcattagttggaaatattttatgcacttttaatgtctatcctcgtaactatattttgcacacttgtttaagagtcgggggcatgtggtgctgtggaggtggcgttttcatgaagtaattagagttggtgggtcttaaatgttgatgtggttttgattaattggcagctaaaaagagccaggtttcattgtc

SEQ ID NO: 59500 - DNA, 677 bp, Populus trichocarpa
  Intron number 1 from transcript POPTR_0001s14260.1 (locus POPTR_0001s14260) derived from phytozome v7.0 (chr-ID scaf fold_1; pos 11209643 to 11210319)
tcatttattgccatcggtatgtgggttttcttttctttttttcatttttggttaattgacatccctttgtttgacttatgggctgatttgtgtttggctgtaacggatcttttccttttttcctttttttgagatttcggaaccgattatgtggatgtgatttgatgtgacatagattattgttgtttctggtgttagtgcttgctttctcttgttaatttgtgattttttggattgtttgatgttttgtaaaatgtgaagcactgggctgttggctttagttctatcactaaagggatgatggtaaagaatctgctgatgcaaattagtgaaagaagtcaatatggatagttgtgctgtttgtttcatggaatttgtgctctttctataccagtacttgtctacaagcttattgttcgagactgatgagattatcttggtgtcattgtcctgtaaggggaagttttttcttgatagtttaggttttggggctttttgctctttatttatgtttaatatgagatttttcatttattttgatcagtcttggtttttgctattgctttattgagtataatttgttctctacaagggatttgttgaagtggtctcatgtgatttcaatatgatttactgtcacagcccggacacgttcacgccaattgaagagacagtga

SEQ ID NO: 59501 - DNA, 603 bp, Populus trichocarpa
  Intron number 1 from transcript POPTR_0001s27930.1 (locus POPTR_0001s27930) derived from phytozome v7.0 (chr-ID scaf fold_1; pos 26769766 to 26770368)
tggcgcttcacttcagcgtccaaggtttgtcccaggtactattttcttctgtttcatgtcttttttgatttgttagactggaagttttaatgtttaatgttggggcttacagtttttttgtttgttttatcggattttacggtgatgtagtgatgctcgttgctttagaactagtgtgtaaggccttgcattatgttaaaagtgaactttgagggatagtgagttaattgctaggctgaaatcttttcaatattttgcttatggctgaaatttatgttgatcgaatgcgagctttaaaaaaattaaatttgtatctgcaattgcataagcatatgtgaagcaagctgatccatacatttccaagctaagttttttcgctgattccagtatgatgtctatgaattacaatgacatctaaaccaagacgcatttgttttgttgttggtagaatgtgcaatatgcaattttcttcttctcttagttgagcattcttataaaaatcgtgttgattctacaaccctattacttacccttggccagatttttcttttttatcctttggagagtggttttgatcgatctggttgctggttacaggtaaac

SEQ ID NO: 59502 - DNA, 568 bp, Populus trichocarpa
  Intron number 1 from transcript POPTR_0007s07760.1 (locus POPTR_0007s07760) derived from phytozome v7.0 (chr-ID scaf fold_7; pos 6181935 to 6182502 reverse strand)
ctcttgccggtgtcgcaataaaatacggggtggaggtaaaaaaaaattcttattaatccattgattttgctttctcatattaatgggttctttttatcttgaattgggtaatgttaaaaatgtgacattttttagttatggttttatacatttaattagaaagggagggaaaggaaaggtagttgtgggtctgtggaaaggtagttgtgggtctgtatcattttgatatttgtatcatgtgatttttgtttggttagagttgcagaataatcattttcattagtgtaaaactgtaccctttctgtccagaacagcccatctttttgaaactttgttcttttattttgcgatatccgggttttttttttttttttttttttttggaatgatggtattgaatttattgatacattgagtttctgggtgtcaaaatcttgatcacaattgcacagcagtttatggtgacattgttttttgcttttagacaacttctatgaactagatggtaaggcagttgatattcttctcttgtttgtgactatttttttaggtggctgacataaaaaag

SEQ ID NO: 59503 - DNA, 637 bp, Populus trichocarpa
  Intron number 1 from transcript POPTR_0010s13690.1 (locus POPTR_0010s13690) derived from phytozome v7.0 (chr-ID scaf fold_10; pos 13473299 to 13473935)
aagaagtaccagattctcaaaatctggtgtgttctgtttgccctcttttatctctattttttatgcaaactgttactcttttgccttgttttgcttcttgtttggtcgctgagaaatataacaaaatgtggaatcttaaatttcaattctttttttatactacgttttatagctacaaaaatttgataattgcttgccttctgggactttcctctgtttttgaaaatttgagtttctgaatgaaaatgttttttttatgcttttctcagcggccaaacggatgcttgttttgatttttggaatatgtgatgaatttttggttggtgagagttttatagagaatgttccatacacatatgtaagaacctgcttgcactacaaacacgaacatgtgtgcattgcaaaaagaaagaagtttcctctaggcgtttcaatggagaactggtggctttatattcattcgtaagaagttgttattctcatcatttatgtttttttactgcatactcgccacatgtgttttcttcctttaataattattcacactgcttgtcatgttgcaagtttgtgttacttaattttattcatatattttatggcagggatttgacaagagtgacattggttttgtgaataa

SEQ ID NO: 59504 - DNA, 802 bp, Populus trichocarpa
  Intron number 2 from transcript POPTR_0001s17460.1 (locus POPTR_0001s17460) derived from phytozome v7.0 (chr-ID scaf fold_1; pos 14251849 to 14252650 reverse strand)
tgagagctttgcagatcagatctgtggatttaaaggttgggctactgttatttcatgtacagtggtgttcttcttcaaattgacaatgaagagttgtgccatattttgctttccatttcctcataaattagcatccaagcaggacagctttgtgtttaatggatggataagttggttatgcatatttcttgtaaaagatttggccaggttgtatgacggggtatcccgtcccatcttttgaattccttttattccttgcttagtgttaaatctatataattttgatctaaatgtctgaagaggaggtggtttctagagtcaatagggagaggtaggcttgtatttagttattggatagttggtttagaaatacagtgcttgtacatggaagtatctgttaacgatgatgccatactagattctgttgtctctttgttttgtaaatgatttctttggtcccctcataaacatgtggcaccccttgttttttttttcccttcaacaatactggtattgatcttttctaatctgtaaatcaattttccatattgtatcggaccaattttttaaatctttttattgttggcaagagcaaatttatatgatgttggattctgaatcttctctatactagaaactggagaccggtgtgaggtgtctgtgaagttctttctgacccatatttcttgtaacaaagtgatcgttgtttggtgaattatcgatgcacatttacaacaacctgttctctcataaattttgaacacgtgcagtggagctttatttcaataaaagaagaaatcag

SEQ ID NO: 59505 - DNA, 733 bp, Populus trichocarpa
  Intron number 1 from transcript POPTR_0007s11500.1 (locus POPTR_0007s11500) derived from phytozome v7.0 (chr-ID scaf fold_7; pos 11867983 to 11868715 reverse strand)
ttaaaggtacacatttactacttgagagttcttttgactacctccttttgtctttctacttcttctgcttatttttggtccggctatttgtatccctttttgatggtaagagagtgttttagttagtacacctgttataaaggttctatgatcatgttaggcaaacaattttgcaaacagaatagggtatctgaacaaagttgagctttagtgcccgaaaaggcttccttatgttttcttctcttcagggtaattgccaggtacatccatttccttgttctgttagtatctgaggtaaattgctgctgttttcccttttgtttttctggtctaatgtgtatctctattaagcttcatgtacattctcttgttcaattattcattttcaagaaataaaaacggatgattttgtcatgttgaattgtaaccacacataaagacttgtgtttctgcagaattgtggggctgttattgattgaaataggcaaatgtatgatattttagacacagttcattacttggaactctttggcagagtaaatgaagcaattcccatattttgcttttagtttttctgaggattagaatttggagttccacatgtaggctcttgtatccattttcctttaactatatgtgaaaacataagaatttctgaagaaatttcattacagctttcttcttttccgagttttcagataaattcaagagcaacatcttctttatcaacgtt

SEQ ID NO: 59506 - DNA, 810 bp, Populus trichocarpa; identical to SEQ ID NO: 58483
  Intron number 1 from transcript POPTR_0001s29450.2 (locus POPTR_0001s29450) derived from phytozome v7.0 (chr-ID scaf fold_1; pos 28122364 to 28123173 reverse strand)

SEQ ID NO: 59507 - DNA, 645 bp, Populus trichocarpa
  Intron number 1 from transcript POPTR_0001s00470.2 (locus POPTR_0001s00470) derived from phytozome v7.0 (chr-ID scaf fold_1; pos 362683 to 363327 reverse strand)
cagctcttttttctcttttggcttcgtattcataggttcgcacctattgattcactgtacttgattttcctaacttagcattgtaatttcttcgtctccttcttgaattatgcagttgggtttgatttttcttttattcttttcaagtggcgggttattgatgttgacaagatggctcagttaaaagtttgttctttttgtttcagtgaagtcttagattattgttgtttaggtttaaacatgggcttttgatgtttttgaatagatggttgttattgttgtctgaaactattagtttagggttcgtgttgtttaattttgggtttttttttttaatttacttttggggtttatttttggataattcatttttgttaatagtatgtcatgtaccgtgatcatttagcgccccccccccctgtttttttacttgggaaatgaaaggggaaaagttaaatattgtgtaagtttagttattgattgaagctgatattctcatggaccttacattttgaagaattgaaaaaagggctttagttgctatgttgttgatcggattaatggatgcaagttctcattttcttagaggggtgatgagcaaagactaagattgtttacttaatccttgtgctgttttcaggagga

SEQ ID NO: 59508 - DNA, 1030 bp, Populus trichocarpa
  Intron number 1 from transcript POPTR_0007s04700.1 (locus POPTR_0007s04700) derived from phytozome v7.0 (chr-ID scaf fold_7; pos 2909045 to 2910074)
ttctgccggtgctagtcactctgttgctcttctttgtaagtttataattgtggggtttgtttatattgttttggttttttgttagttttggtaaagactgaagcttttggttttgatcgctggttgtgattgtttggcctttgtttgctcttgaagttgtttatggggtgatttaatttttgtatttggcttagggtgtaaccatttggcggtctgttttgagagttttggtagatttagttgaactgtgttttgatttttctgttgttagagctatgatggatatgcacaactttggatagggtaaacattagcggaggatgttagttttgagtttcttttaagccagcattgatgtatcagtttcttgtttgtgtcttgtgccatttcttgttaagggaaagtcaaggaaacaatggcttgtgagtagaaacagagaggaaactagcatctaaatgcattaccctgtggcacccaaatggtttttgggccttattgaccagtcattcttagcctctgctattgcaaatttcattttttacataaaatcatccatgaaggagtgatagccaaagaattttcatgagattcctggattcattcccaaaatgtggtactcaagtggctctcaattgtgtgttttttggtcaagaaatggtaagaagaagataatcagctacaaaaatcaccacgatttatcaaatctgtaagctatggccttgatggaataatataccttttcaaacaatgttgagatttgtagattcaaatccttttatttattttatttatttatttgcttgcaactacttatctaaaagactcgcaactttcaattatgtatgcttgttgacttatttaatctcttctttgtggagtataaactttatcacaagaaactcctattcatttgtaacctgttcttcaattctattctcacactttgattgcttaaacttgcatcaattagagttacaattgttcataatttacagctggaaacatcgtttgctcctggggacgaggagag

SEQ ID NO: 59509 - DNA, 915 bp, Populus trichocarpa
  Intron number 1 from transcript POPTR_0001s03960.1 (locus POPTR_0001s03960) derived from phytozome v7.0 (chr-ID scaf fold_1; pos 3151729 to 3152643)
caaaatcaggttggttacaactaattcccttttttttttgtataattcatgcaactaagtagacttcttcttcttctttccttctttattgtgattatgtgggcatcactatcatcatttgatcagaatggtaatactctgttttcctctgccttttcccctgtttttgcatgtcctgtatgaaccatatgttcccactttttcattatgttaagatttcttgagggattttatgttaaaatgattgagttttgatgtcaaagatatatgagattgaatattcgtttgttgctcctttaaccccttgtatcttttattcaataggttctaccatagtataattcgccctcttcatagctaattttattaagatcttacatctagattttccatccttttaccaaaaagaaataagaaatttttttatttattttctttctttagtggaacctactctactcactagagtggtttgatgctcatctcaaaagtgtttttctattccctgtaatgaactaaaaaaccctacacattgcttcaaaattaatctttttcttcaaacatctgatattaccttcatcttttccctttttcctcttttattttctgttctcctttccttgtcttgctttgggaactcgtctgcttcaatttaaggtgagctttttggtttctttaattgttgtctgatgaatctttataaagcacaagcttctggttgacctctctgatgctctcttatgctgaagagaagaaaatataagacaattggattgttatgacatcggtttaaacatgaaaggagttgacatggtattttctctttatagcatttgatgatcatgtgtgtgattcttttgttgccatatttccatgttagtctccccgaaagagcaaggtccatcaggaagacca

SEQ ID NO: 59510 - DNA, 728 bp, Populus trichocarpa
  Intron number 2 from transcript POPTR_0002s01310.1 (locus POPTR_0002s01310) derived from phytozome v7.0 (chr-ID scaf fold_2; pos 694890 to 695617)
atacccttgcaaaacacttattccactgtatgcaccttcttgcattatgtatttatatgcatttttttttctatgttgaatttgattaagctttagtttttttttattgatgtttattgaatttgtttgaaattttaatgttatttagaattttatgtattagctattcctatatttttacaatgaagtgagtaggataatgtggtaagaaacttgaatacttttagattaagctgcaatttgttgtcgtaataatgggatttcattcttggtgttgctaagtgcttgagctttttgtttgtgttaccgatgactatgtagcattcttatcaccggtacgggtatattaagaaattgttcgtgttcaaggcaatgatggggctaatgacattctgatcatttagatgatttctgtatggatacctcaaatcgattgtgatgtgtaaaaggaatttgtttaaaaacgagtagaagaggaaagatggaattggtttttaccctgtgacttgaaggtatgagctgggagggttgcaaaatttaatatcagcctgtaacaatgtctcttgctattcagcttgcagaaatattggtatcttgtatgttgaattgaacgattcttaaatagtcatcagcaaatttttctaccagaatattaacatattttccgtccatgaatacaatttcaccgtgctttcttgacaggggaaaaccaaactattgagtgggca

SEQ ID NO: 59511 - DNA, 648 bp, Populus trichocarpa
  Intron number 1 from transcript POPTR_0007s02390.1 (locus POPTR_0007s02390) derived from phytozome v7.0 (chr-ID scaf fold_7; pos 1402425 to 1403072)
aaccctaaaaaaaaaacacacacgcatacagacaggtatgtaaatgtttattttgattttttctaaatttgtttgttcttcctttaatttcgattacgatctgtgcttatctctcttaatttattttttcttagttaatatttaggtgtttttccctcttcatttcctttccaacttcttctctccttctctctctttttttttaaaaccaaattttagggtttctttctttgattttctgttgttgatggataaggagagtgaggatcttaattgtggggtaagctctgattaattaatgggtttttgtttaactaactggtagtaaatatttaattagagtcgttaaagttggtttaattgtgtttctcagttttttgttgaagtaatggcagaattaatattttagtttttgaatttttgtgtcaaaaatgtgttaattatggtaaattgttgtcaatatgtgaaaaaagaacaagaggaaatgcttaattttgagggattttttttttaattcctggttcttttttggaatttttgttatttcgaaggataatttctttgaatattttttatgttatatttgtttcttagattgtggttttgaatactgaattaatgtttttttttggtggaatgtataggcac

SEQ ID NO: 59512 - DNA, 697 bp, Populus trichocarpa
  Intron number 1 from transcript POPTR_0010s16980.1 (locus POPTR_0010s16980) derived from phytozome v7.0 (chr-ID scaf fold_10; pos 15755067 to 15755763)
aagaagagttctctaacattactgaagacctcaatgtaattatggctgtactctgtagtctattcttcttcttcttcttttactttatgtttgtttaatgatggtttttgtctctttctgtcttgtcttgccttgtccatacccttattctgtatgccttctgttttgggtgattttggtgtaatgtgggttgatcggaggatgcccattttttgatttgtgctaattttaaatggatctgttgattttcatggaaataggagtccattcggaggatgcccattcggagatgggtttttcaattgtgccgtggtgggaacattgtgtgtgaatggaaatcatatattttttttttactttgtattggatccaagggtttcaaaaacttaaaatgttacgttttaagcttcttttttctgggatttacttgaagaaaagaaaaggagaagatatgaattgaaggagacacagtttgagtttcttgtttgaaattattgtgtttgaatcaatggaagttgaaacttacctgttagaaaagaattttaggatttcacatataactcttgtcttgtcaattgaagtttcttttacatatagggtaattttgctttgctgtgaaatatgttttgtacgtagagtaaattcactcttgcttgtggttgcagactttctcaactactgttgaagagaaggcaaa

SEQ ID NO: 59513 - DNA, 1004 bp, Populus trichocarpa
  Intron number 1 from transcript POPTR_0001s30160.1 (locus POPTR_0001s30160) derived from phytozome v7.0 (chr-ID scaf fold_1; pos 28714851 to 28715854 reverse strand)
tgctttacccacttttgtcttggtggatcgtggaggtatttacccttttgatatttttggtcagttagttgttttttttttcgtgtgtgagtgattggtccaggtttgcttgattggatacgtaccctttttgcttttgaggttagtttttgtaagatttgtggtttttttttttttttgggtttggttgattgtgaggtgcccttttgttaattttattaagttgcacattttaattttgcttaatgttttttttttgtcttaatttgattgttgttatgatgttttgaggtgtcctgttgggaagctactctccttttgcttatggtttattaatggttttcaagtttaggttgttgagaaggcacccttgtttaattgggatcatttacttattttagctactttcagtcagtatagatgtttaaggaggtttccatttgttgtttcagattaacttcctgaaattttagttctttttagacagtgtgactgtgtgagaggcacctatgctgctgttctaagaaaattcttatttgattggtttgctttgtatgctagatgaatcatcagtgcaccaagttattttagctccttttaggcattttgcacagcataccaactgtttcctggttccattgcgttggaaactactgtactgtcctgaatatgccaattctttacttgttttgttggaacaagcttatgaaagtctgaacacgttgcaacttgattttcccatagtatttaagctatttttctttcttttacttttttcccccttgatctttggtccctttatgcttaaccaggatcacattgtttggtatgttgcatatgctgttaaggaattattatccatctagatatgggttttgttggattcaggactttcttctgttaaactaaattcctctaagactacctacatagctgtaatgctaaatctataattagttctttatattgcttttcagattgcttcttcgctttgaaggtctgga

SEQ ID NO: 59514 - DNA, 457 bp, Populus trichocarpa
  Intron number 1 from transcript POPTR_0002s25950.1 (locus POPTR_0002s25950) derived from phytozome v7.0 (chr-ID scaf fold_2; pos 22944985 to 22945441)
gttttgggtaagcttgtttatttactagatcatgtattcttttgttatcacatttccattttccacttgttatagacatcctgatgttgttggaaattaagaaaaatcagtgttttattctctaagatgactcgaccaattgaaactcgaatcttctcgaactttttttggtgcggtgcggtgcggtgcggttggggatgttttaggttgatcacaacttcaaaagttgtttgttttcattgcttgcttaaacctgttcatctttcaaattgtggtaagaacttgggtttgagaacctgatttttcaaatcgcaaccacaaaaatctgtctcgatcaaaggatattatcgaatacacaactgctagactatgcctgcgcttttcactgttttgatcaatcagtcactaatgcaatttgggttgtgaaatggaaataaaaccaggggagagaagctca

SEQ ID NO: 59515 - DNA, 558 bp, Populus trichocarpa
  Intron number 1 from transcript POPTR_0001s14680.1 (locus POPTR_0001s14680) derived from phytozome v7.0 (chr-ID scaf fold_1; pos 11563974 to 11564531)
caagctcaatctccaggtgtgttaataatgctctttttctttgtttccaagtttgtgtttttattttccatcttggttcttgaacagtcattgcctttatgtgtgtgtctatgtacttcatgttcttacatggggtaaaggggcttgctttgtttcacatcacacgctcaaatttcaaacccctagcaccataacttgatttagtttggggaatgcaggggaagaaaactagaaattgttgtaatgtaacttatgtcattacaatttctccctttttccctcttggtttctccctgaacaagaagaggatgaattcttcttgtgattctgtagctcaaatgtgattttttcccctttcataatttgacttgaatatttctctccaaaacttgtcatatcagttcctcttgtttcatttaatatatttttcttttctctgatggatgtgtttgagctttattttttttttaaaaaaaattgtatctaattgtattggacaagttgaggcttttctttgaaactatattgtacttaggctcccttactgtttatccagga

SEQ ID NO: 59516 - DNA, 663 bp, Populus trichocarpa
  Intron number 2 from transcript POPTR_0010s21230.1 (locus POPTR_0010s21230) derived from phytozome v7.0 (chr-ID scaf fold_10; pos 18586448 to 18587110 reverse strand)
gtgacaaggtacaacgtttagatcatgatcgatctctcgattttattggaagatttccaggtttaaattaacttgaaaaaggatggatagagattataggaaaactttaaaaacgacgaatatgaattaaatgattatcggggagtctcctatgataatatggtctagcccggccgttgtcctcccattcattcatcctctaatttattcagaagagaattttgagtatgatttttcactacccatttattctaggattccactttaattacccgtgcttttaaagatgttagaatatacaaattgcttgtaatatttactttttgagaaacacaagattgtttacagttttcatataaaatcaacaaggtgacgttggtaaaataaaataaataaaagttgactctcctaaaccaatactggcccgtttattagtgcataagatccaggaagtcgcagcccagactagcctctgaattctgatgagagataatcctgccggtggaatcaagcctcaggactagatctggcctgacacctgaaataattctcttttgatatgtacatttcttagttggattttttttcccggatgatggctggacacatttgttttgtgtttgggcaggttgtatcatacatactagccacgggtgctgctgc

SEQ ID NO: 59517 - DNA, 359 bp, Populus trichocarpa
  Intron number 1 from transcript POPTR_0001s18730.1 (locus POPTR_0001s18730) derived from phytozome v7.0 (chr-ID scaf fold_1; pos 15867653 to 15868011)
gcttacagttagtattctcttttccacaccctcgatccttcctcacagccatagctttcccttttgcttctcttagcatggatatatatattatcgaaccacagcacaaaaacatatatctcatgatcataacttgtaaaagcttgagttctagattcagtagcttatgttacttgagcttgaagaatatcctcttgattaaatatatagtgctagctagcattaacaggcatcatgatatatgtcaatatatagccacgcaaggaatattgataacgcagtgctgcctgtaagttataacagtaatcaaatactaactataaggatgttaattactcttgcagataagctgacaggtg

SEQ ID NO: 59518 - DNA, 911 bp, Populus trichocarpa
  Intron number 1 from transcript POPTR_0010s22410.1 (locus POPTR_0010s22410) derived from phytozome v7.0 (chr-ID scaf fold_10; pos 19349737 to 19350647 reverse strand)
gggttagtgtctctcacatcttctctccctatgcactcttttattctgttttgtcactcatggctccgtttctgttattcttgcttcgtagtcaacagtgctctagtgactataagttctagtttgttttcgttaactcgagatcttgatctttttttcaaaccgcgttttcgtttttctcaaaagtgcatgttttttttgcggcaaaactgcgtttttcaaatgattttttttgcatcattttgacatgcttaattcaaaaatggattttaaaaaataaaaaaaagattattttgatgtattttccagcgaaaagcattttgaaaagtaattagtttcacaatgtcaaacaggcacaaagggtcgctgattatatcgtggaaagtccaataaaatatgaaaaagtttgaatctttatgtttgatgttgcaaacaaaaataagttaaaactgcgatatattggtggtttttagttgaactttgttttgtgaagaatgggattgttgtttcagactaatacgtgtcagtatgtctgttttgagctacaactgtaaataatttattgtgtttctatgcacgacccattatctgggttggtttgaatcgattggattgttggtattagttaaagttttctccttgatttcaattctattcacgaagaaagcagctgcaaaaatgcttatatcaatgcattattttttaatgtggtaatctgtagatgtaattagtgcttgtgcactgataggtcgtttccaattgtttaattaagaggaatctttgcaatgctgctttgttttacttgcgtggcaactaaggataggatttaaagataactggatagtactatagagaatggaatgttttgtaacttgggaatttgtatacaataatacagtaagactcgtgga

SEQ ID NO: 59519 - DNA, 624 bp, Populus trichocarpa
  Intron number 1 from transcript POPTR_0001s12030.1 (locus POPTR_0001s12030) derived from phytozome v7.0 (chr-ID scaf fold_1; pos 9338540 to 9339163)
gccgacgcgcaactcgaagcacggtgtgttacatatatatttcagtgtagtttgttaacgtgtcacataaagtgctttataaaattttaatttttttatttaaaatttaatttttttatattgttctgatacgtagatattaaaaataattttttatatatatttttaaataaaaaatattttaaaaaataattgttaccacaatactagtatacccgggctctaaatactattctttgtttttgattgttattagcattttttctgaaagaatataaactgtagatgttttgagagataaaaatattaaagatacaaatgtcatgtttctttttatttccttcttgttttgaaaaatcaaaactcattcaaaaactattttaaaaatatatttattttatatatttatttcttcttcttcttcttcttcgaccaaacaagttttttttttttttctatgatagaaaactagccaaatacaacttagagatcgctgttgtcccaggaaactaataaccaaagacaacttagataacactgttatgctagctttctaacatacaatattcctcaatgttattgtccgcagaaaagaaaactaagggacaacaaactaactaggag

SEQ ID NO: 59520 - DNA, 499 bp, Populus trichocarpa
  Intron number 1 from transcript POPTR_0001s29210.1 (locus POPTR_0001s29210) derived from phytozome v7.0 (chr-ID scaf fold_1; pos 27949576 to 27950074)
cgtacgtctctaaacatttctgctccttttcttcttcagtttttccgatttggtaatttgttaaaagatatcaaaccgggacttgaacttgatgcttgaaggataaataaaatattagtttttttttgttatttgttatggtagtttagaaactcggccccatcaaggacttatctgtgttgggttttctcatttgatttcattacacaatcatgcatcgctgtttttttctttttttgaatttaaagcttttgttttgtatttgtttttgtgtttaactcttaattaccagctgatatgctttatatatgtaagttttaaatactaagttttacctatatatgtgaaaaaaaatgtagataatgattgcaaaattggtggttttcttacgaatccatagttgcgctttgtctgactcattaaaagctgtttgagaattgaggttgagattgtgaaatggctgagttttggtgttcatctgttgtgcagttgactaata

SEQ ID NO: 59521 - DNA, 369 bp, Populus trichocarpa
  Intron number 1 from transcript POPTR_0001s35480.1 (locus POPTR_0001s35480) derived from phytozome v7.0 (chr-ID scaf fold_1; pos 33809223 to 33809591)
aagggaagtaagtcaaacttcttgaagtctttgtttttttgtttccaaattgcagctcttgaatctgattaactttattactggatttttctctcatctttttagactaaaccaaaatttaaccattttttagctgatcaattgagaaaaactattgcatatatatcaaatcccatgtttttagttttattttcaattacatgcctgcttatcagatcatttgactgaagtttttgatgctgttgcttaaacattcttcttcttcttcttttcttgtagtttagatcatttgctaaatggtggattgctatgtgcagtaatctcgttctggaatttatgaattttcttttgataggtacaagaatcaaa

SEQ ID NO: 59522 - DNA, 699 bp, Populus trichocarpa
  Intron number 2 from transcript POPTR_0002s07540.1 (locus POPTR_0002s07540) derived from phytozome v7.0 (chr-ID scaf fold_2; pos 5146882 to 5147580 reverse strand)
atttgctcgggactcacccatctgtgtctctcttggtataacctttcttcctctgtctttataatcaaaatgttgttcaagctgattgtaatacttttgggatttttgttttatttaagctgtatcgattgtatataaaattgttcgtatctcttaatccgacccaggtgatcatgccttttgagttattgaagtgtttcttacttaagagtttgtatgtggttttttaacagagcaatttgtcccggattgccatcttctcctaggccatgatcgaaaacattgctgattggttacaggaagtaacatggaaacatgctatctttgcaaacttgtaaccctaattcagtgttaatgtcacgtgctgtaatctgttctcatcatggtagcttttgaattttttacgggtaaatgagtgctatacatagacaatcagaaattcacttgcttgtttgcgaggggaatgttaaaagatttggttgagtttgctctgcatcaagattttagatttgttgtgtataattcctaaagaatttctaatcaacattcaagaccttttgaaaagtaaccttttagaaattgttccggcttattatcaggtcttattttgttgaccaatctgttcctgaatttattcttcttcatcattgacaacgataacatcttgcatcagttcttttcttcaggtgcaaaaacaac

SEQ ID NO: 59523 - DNA, 557 bp, Populus trichocarpa
  Intron number 1 from transcript POPTR_0010s22080.1 (locus POPTR_0010s22080) derived from phytozome v7.0 (chr-ID scaf fold_10; pos 19143291 to 19143847 reverse strand)
catcctggagattcaattccaagtctgctctatcggtatttctctctctctcattattttacacctctgttttttgtactcgtttttgggtgtaatgtgattttcactgcgtgatttggcttgcaaaattcgttctagttgatctctgcttaaaacgaaggctagggtttcatttgattttggacatctaaaatcaagattcgaatcagcacctgaatatattaattatgctgaagtgtgttttgattcctccgttctcagctggtgtttttgtttatttttcattaaagctgcttgtctggtcacaaataaaacgcgagaaaatattaatgttcgagaaatgtgttttgattttcttttccttttgttaatcgtgaaaattttacttttcccaatttgatacgtgtttgtttgctgagaaaatgcgggagtttattgaaatttttcgtgcttggtctcaatttcttgagttttgtttttttatttcaatcgctatcatgtggtaacgattctcatgtcgaatcttttccacatatcttctcatcagctagataaac

SEQ ID NO: 59524 - DNA, 1005 bp, Populus trichocarpa
  Intron number 1 from transcript POPTR_0010s23190.1 (locus POPTR_0010s23190) derived from phytozome v7.0 (chr-ID scaf fold_10; pos 19826704 to 19827708)
tctgctacatttgtttttaaatggacataggaagttccctaggtagacaacatctctttctctacattagtttttgatcatgataattgaaaaatcaaggttagagttttagaattcttttttttatttaatttttttaaaatatttatatataaatccatttcaatcccaaaaactaacttacaatatttataaaataaatgaatctagaaaaaaaatcgtaaacaaccttgatttttttttcgagcatggttaaaaaaaaacaccaccttgaactcttctaaaaaaacaaaattattaataccaagattaatttttttggtaaaaataaattcatcatccaaacactttaattttctctctttaatatttttccgcaatcttctctctcatctttcaatatctagcaaataaaatataaagtttaagattgaaatgtgaaatgctaaattaacaaggaccaaaaagtagataaattaaaactataaaaagcaaatttaagttttttcattccaatatcctgatatggtttttttttttaatttagtctttttataatttatatctttaactataaataaagttttatttcacaaaattgataaaatatcttttgacactatgtatatgtaagaaaatacaaataaaaaaaaatcttaatatataaaaccatgctaatataatttgagggatgaaattggaattaaaaaatttcgattaccggattgaaaagaaatacatgtttcatataaatattgaaaaccctagttcttttaaatgtattgaatgcggattcgttttccttagggaagtacactaacaaacagcgatatatagagaacaaaagcagacactgtttttttgcttctactgtctcgtagtttgtttttggagggctaccagttgtttttttatttttttattaggagacatggatttaggttcatgtgaaaatagcgatgatcatcagttcctggagaaagatcctacaggtcggttcgttag

SEQ ID NO: 59525 - DNA, 755 bp, Populus trichocarpa
  Intron number 1 from transcript POPTR_0001s10980.1 (locus POPTR_0001s10980) derived from phytozome v7.0 (chr-ID scaf fold_1; pos 8514611 to 8515365 reverse strand)
ggggagattgatccacgagttggcgagacttgcaggtttgtgggttttggattctgaaatgtttttcttcttgggttgtttttttccctgagatttccttgtttttgaaggtgttggttttgtgtgattgtgaatttgatttattggggtaattaaggttgggacttttgtcttaatgagagattaagactttcaagtgtgatttaaatgtgttttttcgctgattatgctaatgttaatggatttggagggaaagtgttgattttttggggattctttgttgttttgtgtgtggttgctaatagggtaattaagattgattacgccttaaatataaaatattcggattttttactattttaggaagagatttgaggttaaggtttgctgtcgcgggctaaaagtaggagaactgaagttaatatttccatttttgtgtatgttcctatttgtttgtcgttttatatttgtatgtactatgtagtgatatggtctttttatcataaaattagtagttttattattacttctttgtttgatatgagtttgttgatgtttatgtttatgtttgtcaaattcttttgctattgttctttcaaagtctgattaaaaaagcctgatatgtttaatactgaggttttgctggtttctgcatatgatgtatagtgaaaataggtttgaatcagcatgtgtcttcttgtttaactcgattttagttcattaatttggaaacgtcaggtacttagctgaggcac

SEQ ID NO: 59526 - DNA, 877 bp, Populus trichocarpa
  Intron number 3 from transcript POPTR_0010s13710.1 (locus POPTR_0010s13710) derived from phytozome v7.0 (chr-ID scaf fold_10; pos 13486333 to 13487209)
ttgaattgcgtaacaattgtagagtgaacccaaaggtatgttttgattcgaagaatttgccaaactaagcagggagagaatttacccacttggttaatttcagcacaacgcattaattttgtaataatcgatcttttccccaaaaacctatactttctgtcaagacacccttttaggcaatcattgtcatgcaatgatggtgctgtaaagaagaacaaaggtattgtttctcgtgagattttggtgatacaattgtttgatgtggtgcttgatgatggagtaaagcataagttcggagaattaagtttttttagttgttttgaggtctgataaatgatggttacgaggaatggactgtgttgccaaggggtcggttcaagtgagaaggagaagactcattcaacgtaagtctcatattagagtcccgtcatgacttctgagaaaggtgacatttctacatccgattagcccctttaaagatactctaagcttcaaccactacatagatacaacggggatcccttcaaaggttgtgtgattagtctattagcacacccatttcttaaaacctaaaaaaaaaaggaatggaaaatttaatttattggcagaacttgctgctattgggtttgatgaacattgtagtgaggggcaaaggcagcaagaagaggtgctgttttctcatgctgtgtagataagcttctaaaactgctctttcaattattttgtttgcctgggagtataaaatgtctaataatctagtaacatgcatattttgtctaaatcgagagaaatattcagaattattttgatggaagctctcatttatctatattttactatatatgcaagttataatgtgtcgtcttggtttctgtag

SEQ ID NO: 59527 - DNA, 683 bp, Populus trichocarpa
  Intron number 1 from transcript POPTR_0001s11730.1 (locus POPTR_0001s11730) derived from phytozome v7.0 (chr-ID scaf fold_1; pos 9093454 to 9094136 reverse strand)
taagagaggcagaacagcgtatacacggaagaaaggtacttgtgatccatttattacatctcatcattcatctatttgttactaaatgctaataacaatctcgatgttcaccgctccgacaattcccgtaatctggatggcaatagcatatgggaatacgtaccgaatgccttccagtcgatcatcatcgaaaatagctatatggcatgcgatgacaatcgcttgaggttttttttcataaaagatttcaattctcgcagtggtttatggttatgccatggtataatcgcacttgttattgttttattgtatatcttctagggttaatgtattgtcaggattctactcatttatgttgcgtctgtttccatcgccaccgggtttttttttattctttccgtcaccgatcatgtcatgcagataacacatatattctatttataaaagaatatccatagacaaatggatgctaagttgttagtttgttttattgatttttatttcatgttgatatatatcaaccagatctgggcatgggtgacacgaaatatctgaaagatagatatggtgtgtgtttggtttaacgcatatcattttcaaggaccactggaagcgaggtctggacaatggatcatggatttatttgtgtgtttgattaacctcgtgtcatttccaggcaagcc

SEQ ID NO: 59528 - DNA, 891 bp, Populus trichocarpa
  Intron number 2 from transcript POPTR_0002s17010.1 (locus POPTR_0002s17010) derived from phytozome v7.0 (chr-ID scaf fold_2; pos 12775034 to 12775924 reverse strand)
gggcaaaaagatattctcggagctaattttccaaggtgagagtccgagacatgttttttcgctttctaaatcatgttatctccacgtaaaaaacggggagaagaaaaactttgttgcttatccaaattgcacgacagcttcttgaaaaatgtcataattgctcggcactagaccttatctacctggtgagactccaatttaaaatgttagaccgagtcctgactgctctcgtcattaaagtcgctaggaaaagagacttgttgccgtaccgtacacaatctaatagccattaaaactgtttttttttttaattcaaactcagtagctacaaattgagattaccatcatcattaatgaatatttaattacctgaatttttttttcttttatccaagttttctttactcaaacaagcaattcaaataatttgaaaccttgtgcgccatttttttttccctaaaacactaaaaagtttccaattaattagctaaaattgagcttgagggaagttttactagtcaaaataagtttaagagaaatattacaatttaaaattcataaataataaaaaatataattcgactaattaaattattacctgaaaattttaaaaatttgtcactttaatttcttatactattttaggtgatttggattttttttaaaaaatttaatagtgatcaaccttgactcgtatagtcatcatcattgtatcaaacctcactgcagcattctaaaccttcccttcccagttaaaaattgtctgactaagccgctttgacttcgataaccattgagcatgttttaatcatcttattaatccatttgattaggtttatttagaatcattttaacattaattggtgttgcaaatcgcagaggatactacag

SEQ ID NO: 59529 - DNA, 579 bp, Populus trichocarpa
  Intron number 1 from transcript POPTR_0007s08560.1 (locus POPTR_0007s08560) derived from phytozome v7.0 (chr-ID scaf fold_7; pos 7385690 to 7386268 reverse strand)
ttctcttggaaaaatttcttcacaaagttggaacagtaagcttttatatgtctgtgtaaatgttgtctgtaatgcttttctttaattttttacgagtttcttggtgctcttcgactgtttttccttcttggtagtacagtttagtggatactgatatcaccagattgtttagtttctttccgtttttatataaaaaaaactctgctataattcttctttattcttgttgtatggggggtttaaacaatctatgccatgtctgtttttaattatgtagaaaagaactgacaactcgaagtcatagaaaaacactgctctctctctctggtggccatttttttttttttgctgcttaaatttcgttgaatttccctttactgctatgagaaaaatgattttttttttcgttttgctttatccttgtttcctctaatgttagctttacttggttaaaagaatcgtcttttttttttccctgtcaattttgggatttgttctttgagtctcgctaattttccaatattttattttattttcaattcagtggtttacagaaaagcacaagcaagctttgtttga

SEQ ID NO: 59530 - DNA, 755 bp, Populus trichocarpa
  Intron number 1 from transcript POPTR_0001s16300.1 (locus POPTR_0001s16300) derived from phytozome v7.0 (chr-ID scaf fold_1; pos 13098038 to 13098792)
tggctcgtgtttctcttgataccataaatcccaaggtgcctatcctcttttcttttcttttctttttaacatcacttctgctgctttttatttatttattattattattgatttacagtttgattgctttttcgttgttgattttttctgcgttttcatctttttcatctttttttctttttttgctctcggggtttatgctctgggtttatattattttttgtcttttctgtttttctttgttgttttagattccctttctggctattgggttgtgcggtgcttgatttgtctttgcccatttcttttatggatacatttctgtgtccttttctcgttctgctcatgaactggacgtccagtaagcaatgttcataggcctagtgattatcaaattttatagctttatttctttcaaagtattaattttgcttggtgataataccatattctatagaacttgattaaggacatgcaaaagctctttctgtgctgtccgcgcactatcgattttaaaattcttaaatgcgattcaccttttaaaagaccattaatcatttttactaaagtcaaggagtgtttggccttgctttcaaattgaattttatcgtgaagtttttgagattgagcttgtagtgtttggttattggtaacttttctcgaactctcttgcatttttattttttttgttttctcccctccttggtgttcctagtttattaactatgatttcgtttgttttcccaggttttgaa

SEQ ID NO: 59531 - DNA, 573 bp, Populus trichocarpa
  Intron number 2 from transcript POPTR_0007s05300.1 (locus POPTR_0007s05300) derived from phytozome v7.0 (chr-ID scaf fold_7; pos 3409233 to 3409805)
ttacttgcagtcttttgtattgtccaacttgcaaggtatgttgtccttctttgataagctaatttactgtttttacttgctggggccatttctacatcattaagacaatgataaatgacaaatgaagcaaaccacaatctggtcaatggttttcttcaaattgatctgacacttacaaacatccagactgatgccattcctgttatctgtattttttttgcttgagaaatatttgtttatgcagaatctgtgtgagaaggatgaaaaggctaaattacacctgaatatccatctgtggttgaaagggttctcaatccatgaccactttgtctgataatatgacctctctcttagggtgcatctgcatgcgtgttctagatataaataaatatgacctcgatgattagatggatacaatgaacatataatggaagttgagaatgttgccatttaccctcttctttgatttaatttttgcactaagcttttgcaagtttactttcctttactgattgaatagttaagatggtaacctggttagatgctaaataattgtacttttggttacaggag

SEQ ID NO: 59532 - DNA, 808 bp, Populus trichocarpa
  Intron number 2 from transcript POPTR_0007s12120.1 (locus POPTR_0007s12120) derived from phytozome v7.0 (chr-ID scaf fold_7; pos 12435971 to 12436778 reverse strand)
ctgagagtgactactagacacaagcgttcaaagaggtagctattcattcattctttttgttagtttgcaattattgtgctcattactaatttcaatttattgttgtgctacttgatgagtttctttaactggaatggcttctgcggtgggcttcatgagtaaaatggaaatttggggcatcatcacagctgctcaatattgttctttacaagtaaaaacaatgagactacaattgtatgaaaccccataagtctttggttttattctctagctattttccaagcagaaaagaccacgaagtttttgtggtccagatgaaattttagagcttcaagaggaattgtgggagagctttttctaaatcatcaaaaagaagagtttgaagatggggttttagggatggaatcctgtgtgttcccagcttagaatttggagagttttctttctgatttttttattcaatttctcccaagctctttcccttataaagttagtaattaatgagtaatagatgtgttgaatgtaactgaaaattgtttaaagatgggtcttgggaaaattattgctaggtagacctttggtaggaggtaactgttggtatatctgaccatcttctcctttcccctttaaaagaaaacaaattccagtaaatatgttgcaggatctgtgcacattatataaaggtagccaagaactatattggaggctttttgattctttttttcttctccaatatatatctacttccatcttgatgtttgctatttgtgctgtggcagcttgccagataagaaaagagttgaggaag

SEQ ID NO: 59533 - DNA, 812 bp, Populus trichocarpa
  Intron number 1 from transcript POPTR_0001s04700.1 (locus POPTR_0001s04700) derived from phytozome v7.0 (chr-ID scaf fold_1; pos 3638075 to 3638886 reverse strand)
ctaataaggtaacggtttttgcttgttctggtcattatctttctgattatcttttttttttatatatttttttgtgcagaaatacgaaagaaaatcagttcgagaacagtgtttagtgcaaatatgtttcatggatagagatagctgcttgattatatttttgttgataatcgctataaatatttctatgtttatcatgtttatatttcttatgacttgaaaaagagtctaggttatggcgtcggttattgccctcataaattaattttatcaaaactattaattttataatttttatcttatgttttacctagccaagttcggtttatatctaacgagtcctgctgaaatcaactaggttttaacattgaatgacccgaaccagattttgggttgtggatttcctgtgtgcaattgcccggtcatgtttaataaccgtgacgaagttaattaagctatatatttatcttgagattccataaatcttcgctggatttgaatgattgtcgaaattagaaacatcttggctttgttgagtagttaatctgtgaaaacaatcaaattttaatcaattggattttgtctaggagagggttctatgccgttgtcaaaattgaatgtagtaaagctaagtattcattaaatgaaggtcgtgcttgggaacaaattatttaaattatattttgctgtggactgagaacatacttttagttgctttaacagttttggttgaaattaagttaacccttgattttacgtctcccttttttctttcagataaagaacaaaacaccaatttcaaaaccttcaaa

SEQ ID NO: 59534 - DNA, 566 bp, Populus trichocarpa
  Intron number 1 from transcript POPTR_0001s26695.1 (locus POPTR_0001s26695) derived from phytozome v7.0 (chr-ID scaf fold_1; pos 25709271 to 25709836)
acatcaataggtgacattgatatcaacatttacaacaaacttgatgagtcagttctggtaagggcgactaatgatactaatgagaatcattagtgtcggcattaccatcctaatgttttggaaagaagtggtttgattagtaatctcggtagagattggctgatgatgatatcagtgaaatgggtatcgctattttttaaagaattgttccttcagcattaacatatgatattagttgaaatttgggaggaaaaggggaaatgtttagtgatccccgaagggataaatctagaagcattaaaaagagactagatgggaaattgtaaaaaatatttatgataggacgtagccttgaatattatatattgcttattctgtttaacatacttgtctcaagaaagaagctgttgcatttgtctctccaaagctattattgattgattaattcctgctgccaccaccatcttcactaccattactattatgcatcgatcttctccaacttactaatgttattaaattctttcccagttggcagaaaataagtgatcctaaaagtattgcag

SEQ ID NO: 59535 - DNA, 972 bp, Populus trichocarpa
  Intron number 1 from transcript POPTR_0002s04180.1 (locus POPTR_0002s04180) derived from phytozome v7.0 (chr-ID scaf fold_2; pos 2605067 to 2606038 reverse strand)
agttcccttttcctctgttttcatactccccgcatgtaatatcctacttctttctatctctatatgcattttttgcttgaatggatctgcttctccttcttttcctatacttttttttttggattttatcagttcgatactaacccatggtttactagcttgaattattaatacttttgtcttatttaattaattatctaaataaatgtagagatgttaatatttaattgattgattaacaacttatttacattttttattgttttaatagcaagttgaataataatactagtttttaagtttgtattggagtaattttgtttcccaagttggataaagcataatcaagagtaggaaagttgtttgatcttggtttggttagcaaatgcgttgaaaaataatattagtgctgccgaaatcgtctctagaatggaattgaggctttctatggatgtgaaaacaggccgtgcatttccactatcctctgattttcttgagtgggtcgacagaattatgcttcactaattttgtttagaaattgtgttagagcccacctacttttttttggagatgccgtataagttgcgtattaacaagatttgttgatttggtttagcactgagtttctgataagaatcttatccttttcttttatgatgtgatggttgagacattgaatttcagttatgtattgtttgaaaaccagcattaagcttttgattccttgaatgtggccttgtaatctttcttttgtttggaaataataataataataataataaggcatttgatgttgttgaaccagtttttatcttttgttttttgtttgtataatgatgaccgcctcatttgttgcctaaagttctttggatagtattttgtcataatctcttccttaatttcaggtttaatgagctttgggttgccgggggcccagcagcgaacgcattgaaaccaaagtttggtgtgttt

SEQ ID NO: 59536 - DNA, 725 bp, Populus trichocarpa
  Intron number 2 from transcript POPTR_0001s19230.1 (locus POPTR_0001s19230) derived from phytozome v7.0 (chr-ID scaf fold_1; pos 16720997 to 16721721 reverse strand)
ctgggtgggaagaaattgtgagtccgtcctgtgtatttactaccctcactttctttgattttttatgtttctttagatgaacagttttctgtgaatgacaaaatgttggttggaaagagaaacaaagaagaaattgtttgaaactgatcattgttttttgttctttcaaagtagtgcattgtaaccaattgtcgatgtgaaaaatctgtggataatatttggaagttgtctcaagagaggaatttattaaatttttttaaatacatcaaactttatatatatattcataaagttcgatttaaagttcaaatgcataaaaatggttacatctttctttagattttggatttaaagttcgaaatctattcataaaaatttattaagatttcttaaatgcatcaagcgcatgtgaatgcaacgttcttataataaggtttaataattaatgctaactgtttctaattttcacttctagaatgtgaagacatattggataaaaatgagaaaaataaatccacaaaatacactcataatgtaaattgtgaactttcactagtattgcacttgttttgcttgtttattctctcaacttccacacatgttctactaacatgatttccattgccatttcttgatgtgcagagtttcttctaccatctgtattaatttgttgatttgctattttatgtatctcatgattgaacaattgcatttctatctcaggc

SEQ ID NO: 59537 - DNA, 773 bp, Populus trichocarpa
  Intron number 2 from transcript POPTR_0007s06160.1 (locus POPTR_0007s06160) derived from phytozome v7.0 (chr-ID scaf fold_7; pos 4306775 to 4307547 reverse strand)
gcaaattcagtgccgtatttgcctcgaaactgacggtaattctccattttaattgcttgatactcactctaaaactcgtcgctttggttcaccattttggaaatttatttgtagcttttacttggttgtggatgtagaaaatgttaggtacaaagagttaaaaattgtttcttttttagttcactttgataatttgtggaggttttacttgcatacttcagaattgtttacctactttttgtttactgttattgttccatttgtgttagctgttgatgttagagattgttgatgcttggatttttgtagcctttttttaaaataaatttatttatggcgattttgactaaagtttagaattttgcttgtgaaatatttagagtttgtttctgtttgcatcatttttagaactatccacttcatgtttatttttattgttatcgttggtgtattggctgttgattgtagagattatgaaattgaagagaaatagtagatcttggggtttgtgagcttggccttgaatttagttaaaattatcatctttgtaatgcttagctgttgttgaaccgataatttgatcatgaaagttcctttttttcccggtttaactgatcagcaacagggtagcttttgtatgacttggtttttcttttttaattcttatgttaaagctttagatttctggcttgaaaattcaggctagttgtgtttacttcttaggttaattatgttttcgtttcatcaggtagggattttattgcaccttgcaa

SEQ ID NO: 59538 - DNA, 445 bp, Populus trichocarpa
  Intron number 2 from transcript POPTR_0001s41290.1 (locus POPTR_0001s41290) derived from phytozome v7.0 (chr-ID scaf fold_1; pos 40911237 to 40911681 reverse strand)
atcaccagaaggtagtgtattttgaacttattttaaaattgatgaaataagggcaccagtgcttctccttctcatttttgtttttttttttttttttttgataaagatggagaaattttactattataagcttgcaatattgactgacatgcttgtttatattggatgatttcgatatttttttggtagtgaatgattgactatgccgttttgttaaaagtttaaacaatgtgtaatgagtctcaattaggtaaatttgtaatttctcaatatatcttcctggtgattttcttgaaactgttgtctgacggtaactattgttatgcaatgcatgggagtgaagttttggttttgttgatttaataattttagttttttctgaaattttgttttgttttaaatttgtgaagcaagccagagttcatcttcttgatacacagccttt

SEQ ID NO: 59539 - DNA, 504 bp, Populus trichocarpa
  Intron number 4 from transcript POPTR_0001s35260.1 (locus POPTR_0001s35260) derived from phytozome v7.0 (chr-ID scaf fold_1; pos 33561431 to 33561934)
tcttcgctacttcaaagggcataaagagaggtattggctcttcagtaatgagcactgattttggttttaatcgcgtttatttgcttgcaaaaactttgtttagttatttatttatgtgggagttatggaagtgaactcaatagcatataccttttggtaacttgcaagaatacttccagtttttatttgtttttcgaggtagctggaatatttgaatatgggcactacaactcataggtctctcttaagtcatttaccataagccaattccttgatggcagaaacattttgtttacacgattccttctcataattgggcgcttcagccttctctttacatttcattgtattacattaatgcacaggcatgtcttatttaggttagcttagatggttagtgccttttttatttttccaatgtctcaaaccaatgtggcttctatctcatgatgctgacatgaaaaatttcactatatatgatgtttcagggttgtttccctctgc

SEQ ID NO: 59540 - DNA, 776 bp, Populus trichocarpa
  Intron number 1 from transcript POPTR_0001s34070.1 (locus POPTR_0001s34070) derived from phytozome v7.0 (chr-ID scaf fold_1; pos 32210988 to 32211763)
gctaaagcatttggctagtttatcctgtagagtaggtacattgcaacgtggcgcaacggaaggaagatagtataaaagtcccgtttagcttttcgagtttattttaaaatatattaaaataatatattttttattttttaaattttatttttaatattaatatatcaaaacaatttaaaataaaaaaataatttaaaacttaaaaaaattataaaattataaaaacacaattgaatcataatgagacatgaaattttatgtttaataataatataagtactttttaatttttttaattataatatattaaaataatttttttaatatcaacatattaaaataatttaaaaatattaatttaatattttttaaaaaataatttaaaaaacatattctaccacataaacaaacactcaaaaccacaacgccatgtgtcgtaattctaagcggttccacgtcttgtggaaacctcgagtcgctccgaccccaccgttaaccaaaataaacacagctccaactttccctctttaagctcctcaaaagctacaatcccagctctgacttcaaagttcaaaaacctctcaaccaatcaaaatcaaaccctactaacacatctgctacgtgtcgcactcttattagctataatggtattaccgtaatttctacaaggaccaagggcatttccagatcaaacctgtctcctcctctcttcctcttaaacctcgctttttttctccttagaaacccttcttttctttttgctcatatttgcaaaa

SEQ ID NO: 59541 - DNA, 510 bp, Populus trichocarpa
  Intron number 5 from transcript POPTR_0002s19480.1 (locus POPTR_0002s19480) derived from phytozome v7.0 (chr-ID scaf fold_2; pos 15466590 to 15467099 reverse strand)
ttattccaggtatggggattcctttttcattttgttttcaaggtttatgttagttttatgcttgtattccatacaagaacacacacatttatttcgaactcatctgaacattattaaaacttgccaactatttgcatgtatcagtatgaaaatggagaatggttgtctttaagtctccatcaatgaaacgaatggtatgaattggttatcttacattgcactaaatgtggtggcataatatcccctgttgggattccatgtttcttcgtaatttacattaactgaagtctctttctcattatgttatctatccacaaatatgtggtgaacggtgtcttgcaacatccctttccattgtttgggggtgaaaggagctgaacctgggcaatcccatccctcagggccttagttttaattattctactgctggatccatgcctcgctgaaatctcaaaaaatcattgtatctgtgcaggaaaatacaaagttcgtgcttcacatcctgatttg

SEQ ID NO: 59542 - DNA, 829 bp, Populus trichocarpa
  Intron number 1 from transcript POPTR_0010s18350.1 (locus POPTR_0010s18350) derived from phytozome v7.0 (chr-ID scaf fold_10; pos 16619615 to 16620443)
caacctaacaagcattttactgaggaagcagcacggtgagtcctcattttctgctatgttttttctttctatcatcaaaacttgtgatattgagctttgtagttatattctaacaaacattatctgaatattggtcttcagtctgccagtctgacaatgtgttaattatatgctgatataggattctgccaattttgcaataatggaggcttaggttagatcagcagcagttcgggaccttacatcttttccagcattgttcacaatctgtgctcgctagtttttatttttacataatcatgctgcttctagcgcctttatgttgcataattggacctagaaagttacattttacaaggtatttcaagcacagttgaatgcaaagatgttgctgttaaaggttgatcgactatatgattatgctaattctccaaaatccaagccctcaccccttctccatttaaaatggatagaaattaaaccgttacccttgactttgcggttggatttgatagtgattggatacataaaataccaatatcatagacattaatttcaagaaaaaaagaagaaggaaaaactatagacatagtggctattctccttcacccttggtagagaaattttccatgtttctgacaggttcatcatatgtaagtcgatcaattgtgtctttggtcttagatttgttggaaacaaaagctgaatcttttctttcatgaatcaaatgatcaaaattgtttttttttctcttttcacgtaacaaatccttagttcttgtgcaaatggatgtgagatgttctaagttattttgctgttaacagatttt

SEQ ID NO: 59543 - DNA, 352 bp, Populus trichocarpa
  Intron number 3 from transcript POPTR_0002s20600.1 (locus POPTR_0002s20600) derived from phytozome v7.0 (chr-ID scaf fold_2; pos 16694257 to 16694608)
tagaattgtattggtgcaattgatggaacacatgtgtgaacttgcatatcaactgaaaatcaaatttcatttatcggaagaaaaggtgtaccgactcaaaacataatggctgcttgtagttttgacatgcagttcatgtttgtgtgggtaggatgagaaggcaatgcctacgatacacgtatttttcttgagactattgacaatagaaatataaaatttcctaaaccaccagaaggtagttatacaatataaattcttatgtaattataagtataataatttgtttattatttactaattatatgagaaatttgattgttgtttgtaattacaggtaaatactatttggttg

SEQ ID NO: 59544 - DNA, 818 bp, Populus trichocarpa
  Intron number 2 from transcript POPTR_0001s34170.1 (locus POPTR_0001s34170) derived from phytozome v7.0 (chr-ID scaf fold_1; pos 32305653 to 32306470 reverse strand)
cacacctgaaggtaatttctcatgtttggcctctgatctgttgtttttgagtgcttaagatctgtgctttctgttgtttggtgcttccttttcattgtttcagtttatacatttgtatcccctaaatctaaaaactgtttcatgagtttttatgaataaagttttcaggcatgttctgcgagaatatcccatatttatacgagaatatcccatatttataaaatcttatgtggtctagtgattgtaattctccatgatgtcatatactggtttgtctaggaatgaactttctagtgaaccaaaatgaatgaaacatttttacgagacttaatagatttggcagtttttatgcaaaatgcttttttaaatctaagctatggatgttttagcgatgccatttctgaatatttaatttttgtgagcacccctagttagtggcatgattgattttttaccttgttttccatgctttgtactaaatagagatatgcataatacaatacatatttctatctggtcttgcaatgatgattatatcacaaaatgcctgaggtcgaaatagtatagaaggtagaaatcaaagttcctcattcagtgtaggattctttttttatcaaaaaaaaaaatcctggatgacagcgtcgttagatttaagatcatgagaggattctcttggcaggatatgtagcaacagatgattatgctcttcccccttttttttattattattatccacctgttatcctgatactgccaatttttcttctttttctttcaaactaggtgttgccttagttctctgccaatcagatcctgta

SEQ ID NO: 59545 - DNA, 356 bp, Populus trichocarpa
  Intron number 1 from transcript POPTR_0001s34170.1 (locus POPTR_0001s34170) derived from phytozome v7.0 (chr-ID scaf fold_1; pos 32306791 to 32307146 reverse strand)
acgaccgcttcctccaagaatacaggtcccttttttatcaattcattcgactaagtttttcttgctgtttctgtctagggtttcaaataattgaaaaaacaaattacatgcattgggatttaggattcctctatgctgagtgggtaattcggactagaagattttatttatttatgttttttttttgttaaaagacagaagattagcaaaagatctactcttgctactgtaagaatgtgtctgcaagctaagttgtttttggttttctaggggaaaaactttgattttgactgattgtcgctgaaatttaatacaaagttttttttttttctaataggaagaagagattgacagaa

SEQ ID NO: 59546 - DNA, 745 bp, Populus trichocarpa
  Intron number 1 from transcript POPTR_0001s09950.1 (locus POPTR_0001s09950) derived from phytozome v7.0 (chr-ID scaf fold_1; pos 7679417 to 7680161)
gattcagcagtgcagctctttgtttgctcaaaaaggttagtcttttgccttatttcttgtgaatttttgagcttacacaagaattgtgtttttttcccctatactttcttgaattctttgtttttgaatttaaattttgttcttgttatatttaactgtataatcatttctagctgtagatgcgataacttgttaaggaattgatcggtgagggattgaaagggagaaactagttaaagatttattgtggggaacaggtctggatctagtcaagcatgtggtagactcgtggattgtagaagatgaatgttaagtgaacgagtgtgaggtcggagaggctgctatattgggtgcttgagcttgattttcagttttgtattgttaattagcttttaaatgcatcattaagtgtgttttagggttaaaattactgtatttcaaattaaattaatataagctaggttatcatgtggatgtatagtctgttatctatcagttcaacatccgtggcagatgtgctataagttataacccttagaagcttctagaactgggaatatagttaaagaagtggttctggggagtgataattaaagaaaaagccaattttggatgttttgttttgctaacattaaagctttgtattaattaagattatgatgtatttatcatttgtggctgcttgcgtgtgcgggtgtgtggtctttctcggtggtgtaatgttctattaaccattgtttggcag

SEQ ID NO: 59547 - DNA, 774 bp, Populus trichocarpa
  Intron number 2 from transcript POPTR_0001s41590.1 (locus POPTR_0001s41590) derived from phytozome v7.0 (chr-ID scaf fold_1; pos 41286885 to 41287658 reverse strand)
tactttgtctacgcttcgaaccgccaacatagaaggtgagttttgttggtgttggattaagttaagcaccttttgataatccttcacatactgacctttttactaaatttattatttatttttgcgtttgagtttgagtttagttttcatgatgattgtgttttttttttttcaattttagaggctatgattagtcctaaacctgttctaatttttatgcatttatgcttttaaatttatggctgctgtgaattttttgaatttggtttttgcgtaattggtggttcggtttagtttctggttatttggttgtggctgctcttgttttcctaatgttttttggagttttggttcaaaattagtttaagttatgcaggttattgagctatttgcagttttttttcccagttttggttcaatcttgaagcaccaatctctttctagagggtatcttacatgacaaatcttaagtttcttaaaagttcggaatttattctttgtagatgggaacaattttttttttcttttgctaaaactcaaatttaatttaatacatgtactaattgttataattttttggtacaaacttttgtcaattcgaatatatattgctaacaatcgtggcaatttcactttgagaaattcatacttgagttctggttattgaattaacttgcagactatcttctacttgcacatgcccttaattgcttaattgttttcgcttatagatgatggatttattatgatttgcatgaacaggtgtgggagagt

SEQ ID NO: 59548 - DNA, 704 bp, Populus trichocarpa
  Intron number 1 from transcript POPTR_0007s07050.1 (locus POPTR_0007s07050) derived from phytozome v7.0 (chr-ID scaf fold_7; pos 5389156 to 5389859)
tttggaagggacgcaatgtaagcttcttaattcaattatgatctgggttatgatttatatagtttgtttatgtaagatttagactgatgggttttgttggagtgaagtttctgtgcttttccaatgaattaatgaactggttgttgtttgtattgcgttgtattgtattgagaagcattttatagaattattttcatttttggttttttttgtttttttttaatatgtttggttcttgtttttagctggtattgtttttgatagctgaataactagccttgacctcaacatcctacggtgcaagtggacacatcgtgaaccttaaatctccgggcatatattttgtccactccacgcaaggaagtaggcctctgaccctttatggctataagagagcgctgcgaagtgttgagcccgagacctgactgatatgttatatggacattgttagtggttggatgttgttacctttaagtagtattagcgaactcttcactataggctttggtagtggctagtgataagcaatcttgagatgggaaagaaatgggatgctagtggttctacaatggggggaattatttatttgactggtttaagtatataaattgataccttccttctcaacgttttcctgaattttcttcttttattgggttcataatgcagattttcttctgcaaagggaggcttatatttggtcc

SEQ ID NO: 59549 - DNA, 311 bp, Populus trichocarpa
  Intron number 2 from transcript POPTR_0010s03280.1 (locus POPTR_0010s03280) derived from phytozome v7.0 (chr-ID scaf fold_10; pos 4031956 to 4032266 reverse strand)
ttgctttcaaggtgaggttcttttatggcttcatttctgttgcactcttctctttttaacagctccattttattttattttacatttttttaatctaattatacttttctatgatcatgggagcgctggtttatctgcaatgaaattgcagtgcagatgctaatgtttattgaaatgaggtcaaagtaaagaagtttggttttgaaaaatgatacaagtatgcctaaataattcaaaactttttttgcaggtgaagactacacatccccgaaaaagtattgtgtgcggcctaacacgggtgttgttaaacc

SEQ ID NO: 59550 - DNA, 465 bp, Populus trichocarpa
  Intron number 1 from transcript POPTR_0010s03280.1 (locus POPTR_0010s03280) derived from phytozome v7.0 (chr-ID scaf fold_10; pos 4032405 to 4032869 reverse strand)
tttggaaattctgcctcgtgaactcaagattacttgtaagtatttagttactattttctctttcttctcgcttaagttttcgtttttttttcttttttgtttattttattgatttgatgacaataattttttttcaaatatcatgtgattaatacaaaattatgttgaaaacagataaataagagtgtcccagctttttaaataagagaaatttattattatcttctgttttgttgaaagttgaaactcaaaattattcgaaaacaacaaatgtgaatttaaaacaaatgggtcatcaatatatttgctcacaatttaatttccacttgcagctttacattttctttttatctcaggcaccttttctttaataattattgatgcttacgttttgaattaattttcattttgattttttatgttttgggatttttttcaggtgtcgaattttaactttgcgcagtt

SEQ ID NO: 59551 - DNA, 557 bp, Populus trichocarpa
  Intron number 3 from transcript POPTR_0001s09120.1 (locus POPTR_0001s09120) derived from phytozome v7.0 (chr-ID scaf fold_1; pos 6985874 to 6986430)
gggttttgcatgtgaggttctttcttctcacttatatcagtcacggatataattcttagttcccacgagaccttccttgcctttagcattaatgagagtgagagtttcactttgttattgaagttcagaatttaacttcagttgttggttttcaataggttgaaattcagaagctgcaagaaaatgttgagcaaaggtagcgatgaaatatcatttgttgttatcaaattctttaagtttccatagtttttttccttgaagggtttagagaatttatttttttgtcatctctacaatcttttgcagtgagtggaagctgaagatataaacataaaatcccagagcagaaccttgaacaccctattaagcaatagtaatagagatgagggtattaatagtcattcaagtgaagtaagtttcaagtcttgtgccagaaatcatttctgtaattctcttcttgcatgattcctaaaattagatatcacggcataaaattcggaaaaatcaaatagaattctactttttcagccttttcagttttcttctctaatttgtag

SEQ ID NO: 59552 - DNA, 571 bp, Populus trichocarpa
  Intron number 3 from transcript POPTR_0001s38310.1 (locus POPTR_0001s38310) derived from phytozome v7.0 (chr-ID scaf fold_1; pos 37397210 to 37397780)
gcgatttcttgattgttccacaaaaaggaagtgagtgagttattcaattagaatccaagattgcttttcattttttttttaattttggaccattggatgggcatacagtattccatgattatgagactgtgtgtctcccgttgatgcttttgagattggtatctgttttttcagtttgagttacttcttcaacactgctttgtgcaatttaatgctgcttttaaactctcaaatgattcaaacaactcagtacgtatttgctactaaattcttgaattgttatcacaattatactttctaataattcggctcagcatgtgtagaggagtagcttctaaatattcaatccctcctttttttttttaatcttcttgtgaactacttgcatcatcaggttgtttaggctctgactgtattttcttatgccttcacttgtgctcatgttttctggatattatattttctgtttctttctttaatgtatttctgtttattatatgcttgagaattggatcaaatgattcatattagtttttggtactggtggtgtaggattgtggatcgctactga

SEQ ID NO: 59553 - DNA, 419 bp, Populus trichocarpa
  Intron number 3 from transcript POPTR_0001s27240.1 (locus POPTR_0001s27240) derived from phytozome v7.0 (chr-ID scaf fold_1; pos 26131573 to 26131991)
gaaagattggtatgtaaaacctatctttttaagctaaagtatttgtcattggatatcttcactttcaatcattgcacgctgtcgatgtgcataagttttatttttattcttatgcgtgaagaatgttctatttcttaattagtccctcttcatgtaactgcggagcagcacttttgatgatgagaaccggagattcgtgaagcttaatttgcttggtggtttgcacttgataatcacttattttcgttttttattttcaatttcaaattagcagttgaacattagcttaaaaaagaaataactgggtgggaagcgagtgcctttgattgggttagttttttggctgaggtgtgatctctgtttgttttttaacaatattgccagatattgcaccagtacttgaaggtgctgttcagcac

SEQ ID NO: 59554 - DNA, 675 bp, Populus trichocarpa
  Intron number 1 from transcript POPTR_0010s12840.1 (locus POPTR_0010s12840) derived from phytozome v7.0 (chr-ID scaf fold_10; pos 12807284 to 12807958 reverse strand)
ctctctgtgtttattacgtcttcgcctctggttgttcttttttgtttcttttcctttttcttgttacttcatgttatattagacatgggatgtaagagatgcatacaaggtagctaccttgttaaggtgagtcttgctagtctggtcttgaattagctaggggcctgtatggaaatgttggtaatgctgctaggcatgcatcacttacacctatcatgttctatttgcttcgctatgtattggggataaaagaaagactttggtttgctacttttttttgttgtttaattatatttctccccaagcatctctgtcttgctttgattattgatctgtaccggccagagacttgggtgaaattccaagtttttattattttttttactttattgcttttctgtgtttgcttgatcgctttaattatgatctttcactggtaaagcaacatgcattgaattttgagttccaagaaatattagataaatagaattgccgttcggacggtcccttccaacttcacaacacggcatcgtatttttcacgctgcgtctggcaagtcagctgaagaattacgagtattttttatatatttataaatcaaaagaatttaacgagctgataggcatgccctaatgggcactcgaactctttttttaggggagagaaaggcgccac

SEQ ID NO: 59555 - DNA, 730 bp, Populus trichocarpa
  Intron number 2 from transcript POPTR_0007s15040.1 (locus POPTR_0007s15040) derived from phytozome v7.0 (chr-ID scaf fold_7; pos 14688552 to 14689281)
ctggtgaaacatctagtgctcagtctttgacggaggtatctgctggtttcgctttgcttgtagagctttttgatttatgttcatgtgacagctgtagtctagtgtacttgtagaattgattccttaagtagttagtttctttcttgtttgagtctgtgatgactgttttggtctatgtatgttgttgataaagaggcaaaactgttccatgaataatttaaagcatacatgacaaatatttgctttaagtgagaatatgcagcttgtattcagggagatatggtaatatgatttagatgcatctgtggtggaaggatgtcattttctcactttgaaaagctaaaattatttgcacatacaccagctaagaaaatggtttagtctaaacataaatgagggatcaaggtcacagtttgtaaccattaagcaaaatgttgagtccagatggtgttcaacatccaaagctccttaatctatacatactcagaagtccattttctgaacaattcttggacaatttaaggttgtactgctggttattctacattttatctcttgcatgcatatgctcctgttcctccctcccttccaactctctatctaataaatctttcctgtctattacttgtactaatagatgaattattgtaaatggtagtgataactcctttccagaaattcctagtcacagtattaggcatttgatttgtggtacttggatcaggattca

SEQ ID NO: 59556 - DNA, 743 bp, Populus trichocarpa
  Intron number 1 from transcript POPTR_0001s41940.1 (locus POPTR_0001s41940) derived from phytozome v7.0 (chr-ID scaf fold_1; pos 41692958 to 41693700)
gcttattgaaggcaattttgttcgagacatcactggtaagtatcttcttccaatgacttgacttttgttatagcttttcccctgtttttaacgatgatgtttgattcgttatctttaatttcacacagagtcttattcgttattcggtaattggtgtgtgttatttgttgtttgatgtttcgaattgtttggttttgcttcttttttttaggcttattttcgttaccatattcagaagttcaagttctggtcctgttttttccattgaaagttattctttgaattttgaatattattgtacgttcggtcttcccgactcttgctttttatagcattactatctctctggttttggccgcccgatttgatccatacaagttttttttttatcataattgtaatgatgaaactattgatggataatatttatattgaatttctctggactaaatctgtttgcttttctgctacgtggtcttagaatcgatgctctattcttttgacctgctgttgggtctaaactacacgattgatcaatgaaaagtccaacaattcaattttttatttcaatcaaacagtttcccaatataactgtgtaacttaatgacaaaagatctactacatgttatcttgagataattctccactgtttgcttccatgtgtctcacgatactgatttctgggtactttattgatttcttcgacaggccaagaagaataagaaaaggaaacttttgcaaaa

SEQ ID NO: 59557 - DNA, 560 bp, Populus trichocarpa
  Intron number 1 from transcript POPTR_0010s23900.1 (locus POPTR_0010s23900) derived from phytozome v7.0 (chr-ID scaf fold_10; pos 20350637 to 20351196)
gtgattctcctttctctctcaaaccaattgaagctgtaagttgtttctgttcttttaccatgatttttattttgttttgtgttttgtgcacatttatgcattagcagagactggctttgtgattatatcttcacctctgttcatggggttctttttattgatttttttgtttaatttttgctttttgcaaagtgggttttagtggctaattcctgcttcttcttcttttactagtggctgtttcaaagcttcatgtttcttgcttcttctttttttttctttttgcgagtcaggtattagtggtcaagtcttgctttcttgatcaatgactgttttgaaactgcaagttttttgcttttttaccttttcgcatttctgtcagaattttttggcgtgtttactttttttgaagaattttttaatttgttcaatttaattaatttttgtttatttctagcacatgggacgagggcaatttttcgttttatttccttttgcatgtattgacttgtatcattaacatgccatgattctgatttactggtggaaaatgacaacag

SEQ ID NO: 59558 - DNA, 696 bp, Populus trichocarpa
  Intron number 3 from transcript POPTR_0007s01020.1 (locus POPTR_0007s01020) derived from phytozome v7.0 (chr-ID scaf fold_7; pos 554149 to 554844 reverse strand)
cgtcttcacttcaaaaggtatgcatactgacccagggaaagaaattatgcttccttcggtttttcttctggttttcctttattcatatgtatcacaggctaggtaagtgacttgaatccataaacttaaattcagatgaaacttggtatgttctgcaatctttttggtggtgggtatatcagtacacattttacttcttgatacagaggagtatttagtgcctcattacaacaggagtgctagtctacttaacgctatgcctaattgtttgtgtgagtctattgttaatgaaacacaatctttttttctttttgttccttttcctctagttgttagatatcatgtccctgagtacgattgccatcaacttttgatcatttctttgtactttctcttacgtgaacaactgtatctcaaatagtcatgtttttttatgcgacctttcttttatgatctccaacaatacatgcttgaaagtcaaaagcatgttcctttaatagttttaacttcagattttagccttttcatagtctaagtcatcatgatgatgggcaaacctggcagatggtgtatcatttatttcccttttccttgtcataatatatttttatcaaagagttgtttagcttagattggtatatgtaggctctctaaagattatattattttgtactcttcatttacagactgattaca

SEQ ID NO: 59559 - DNA, 914 bp, Populus trichocarpa
  Intron number 1 from transcript POPTR_0007s01020.1 (locus POPTR_0007s01020) derived from phytozome v7.0 (chr-ID scaf fold_7; pos 555160 to 556073 reverse strand)
accccagatttctcaagatttggcttctctatgtaagtttaattacacccattatgggtctctgttagttttaaggtttcattgctttgattctgttttctggtttagtttcctagatgggttttttttttatgcttttttgtggattaatttggttttttttttaagctgagagttttagtgcgtttttagagaaatgaaggatggtgaagtttttgttggttatttttcagtactgggttcaacttagtttacaatttgatagtttgttaggttttttatggagaatctgcttgaattgtgttgatagattctgaatcttaaatggggtttgtttgtttttcttgattttggaggggtagcaaatttgatagctttttttctgttagtggtcaatggtcattcttcaattttctttaaagttcagttagttgaaatttgtgtttgtggatttgttcttctcttctcccttaaatattaagtgcttggattccgtttttgttttatttaagttggactattttatgttaacgtttggttgttaaagttgaagattttgtaaggatttttagagggtttttatgagaaatggaggatggtgaaagcatttttttgggggctattttagatattgggttgttttactttgaacttgaattatttgatggcattttttgaacaaattgagggattgagaatgaagtggccatcattcaatttgctcagtagtttcgtaatttgaattgtgtgtaaattttctaacttgctatgtattttccttctcatatctatgtggattctatttgttgagtcattgtgtttcgatgggtctattcactgtaatcatatggggagctagaatgtaacattgtttaacagattaatttggttttgatggaagttggaaggtagtg

SEQ ID NO: 59560 - DNA, 778 bp, Populus trichocarpa
  Intron number 3 from transcript POPTR_0007s06960.1 (locus POPTR_0007s06960) derived from phytozome v7.0 (chr-ID scaf fold_7; pos 5326735 to 5327512)
aggctattttggtccttacgtggccaggacccaaggttatttgggtcttgcacaatgctggacccaacatagttatttataatattaataataatatttaacttgtgcccaaattcttatatttttttaatcatttaaaaaaatatatagtttttcttcgatagtaataataattttttttcaatttattaatgatgatgatgatgataatttgtaattctacccttcaaaccaaatttattactgtttttttaaaataataatatttataacacaaataattatatttagaaacccaacaatatttctaacacaaataataatatttttgagatgaatatttagaattataataaaaataataatatttatcatacaaataattatatttagaaacccaacaatatttctaatacaaataataatatttttgagataaatatttagaattataataaaaataataatatgtataacacaaataataatattttgtatattaaaactttgaattattataaaaataataatattataacacaaataataataatatctttgacatgaatatgttgaattataagaaaaataataatatttataacacaaataattaaattaagaaacccaagattattgataacacaaattataatatttttatattaataactagaattataataaaaatagtaatatttataatacaactcaagacccaagaatattgggttctgacgcaggcgtccaaggtcgggcaagccaaacgtcaggtggc

SEQ ID NO: 59561 - DNA, 499 bp, Populus trichocarpa
  Intron number 1 from transcript POPTR_0001s37720.1 (locus POPTR_0001s37720) derived from phytozome v7.0 (chr-ID scaf fold_1; pos 36743261 to 36743759 reverse strand)
caagcccaaaacatctcttagcacccgtagaaaaggtaagctctctatcactttctttttggttgccaagaaaatacaggaaaaaagctttcaactttttgttctttttaagcacccaatttcagaaattctcaaccaagcttatgccactatataatatttaccttatccgatatatatatatatcctggtgtgtttctttattgtgttagtctttttttctttgatgaatgaaatttcatttataaaaatgaaaccaaatgggaattataccattgcacggcaatacagaatgctacatttctgcaaagaaaactgtatgcaaaactgaaattgtgttagtttatagcttcattttatgatgttaagtgaaagattgtgttttttcaggctgttttagttcattattagtgtatgtgatcttaatgggatttggttttgtttccttgcccatgattaaacagcaacccagagtcctcagagtcccttgcgcaaaacc

SEQ ID NO: 59562 - DNA, 605 bp, Populus trichocarpa
  Intron number 3 from transcript POPTR_0010s13300.1 (locus POPTR_0010s13300) derived from phytozome v7.0 (chr-ID scaf fold_10; pos 13164999 to 13165603)
cagaattgtcactcaaattcctcgccccgctaagagtatgtccttgcttcttctttttaatcaactatactaatccttttgtgtttttccctgtatattttggtaatgccaagcttattttctaacaaactaaatggggaagagaacggggaaaactggtgaacgtagttggtttagctgttcttgaaagtagaacgatttctaattgtcaaaaaagggttttaaacttgaaacttctttgtattctcgagtgcctcactcgcatttcactttaatctttatccaagttaaggtctaggaaggtaatggctgcttcttcgtggaagggtggaagggttttaacataaacttttgtccaaactctattcctattagtatagtactgggcatctgtaaatactttcatgtgcatctgttacaatgcaactatgataaaacacttgctccgtgcttgattggaaagtttgatcagtgtgttttgcaatatgtgtgctgccactagtaaatgcaacatctaaaacttgtttctggtaaattttagtaatattcctttcttgttggtgcttctagagtggagacaggtttgttgtaaaggtaaggatctc

SEQ ID NO: 59563 - DNA, 799 bp, Populus trichocarpa
  Intron number 2 from transcript POPTR_0010s13130.1 (locus POPTR_0010s13130) derived from phytozome v7.0 (chr-ID scaf fold_10; pos 13013010 to 13013808)
cagggaattcgtcatcaacattttctgtgtttgcggtaattcttattcttattctttcaactcctatcatatctcaatacagaggcggcttaaagtcaataagaggataaaaaattataaacgagatattttaaaatatttaagaaatattttattattatttttttatgtatattcgacaaatagagtcttaagcaatttttaattggaactttttgttaagtggggtaatttttatttcataaaatataattaataaatatattttataaaaaataattaacaagtatactttggagtatttttttgttaagtgaggatgtcgggtcattgaccaaattgcctatatgcactaacaggctctgcttcaatccttggcgaatgcagtttcttttgcattgtcgtgggtatgaggacacggtgcaccaaactttgggttgggtgatatatttctatgctgtccacttttcagtgctgatttctctgtaaaaccaactctagaagaagttttggagttggggttttcatttgttattttatctatttgattgatgatctaatattccaaagagttctattctgttgttgaccaagggcaatggttgcttcgaacttaacaactttcccttttccagtccctgttatagtaatgtatgtaaagtggaaaactttgaatgacctcctttaacagagttcagaaacaaacaaagtatctgtaagacctgaatgtgttttctactgctatatctttcttgttcgataagatggtcttcgttctctcctaactgtcagatcttcg

SEQ ID NO: 59564 - DNA, 455 bp, Populus trichocarpa
  Intron number 2 from transcript POPTR_0002s15740.1 (locus POPTR_0002s15740) derived from phytozome v7.0 (chr-ID scaf fold_2; pos 11744893 to 11745347)
gttcaataaggttaacagttctttatctctctctctctctcttttagtttttgtaactgtattttcaagatagctgtttctgttattatgtaacttcttgattgtctttgcaagaaaagaagctgtaggattcgttagttcctcgtgaattgcaagattctgattttgttgaaatgtactatattgtgatgcattttgagttttttttttaggttttctgcatagagtgaatttattggctctgaaatcttgcaatttctttgtttttttgcacatcttgagttggacttttttaagaaactacaagtcttcgaaatccttggcttttatattttcttaaccctcaaaataataattgctgctcaaaaactgaattttttttaaaattttttcatggtttctattttaatttaagagcaggatacaggatttcctttgactgaaagagatcgact

SEQ ID NO: 59565 - DNA, 492 bp, Populus trichocarpa
  Intron number 3 from transcript POPTR_0002s15740.1 (locus POPTR_0002s15740) derived from phytozome v7.0 (chr-ID scaf fold_2; pos 11745401 to 11745892)
atcgttttagtaagtttaattccgacctccttgaagttgtcagtttctgctttttgctcaagtaacataaagctaagctaacgtgcttgtggaattgaaaatatagaataagttgaaaaaataaaaacttgatgagtgcaataattagttaatccttaataaaattgcctctgagatctcataattctggaattaagtaggcagttaattatttaggttgtcaaaatacaaagtacagtaacttttgcaaaacatgtttattggaattatttgatgtctcgtctttataaatgcctatggtcttatctcttcatagtccatttctttgatagaaattggaattttgaggaaagctttctctgtcttctttatcatgtagttttcctgcactgcctcttttaagtgaatggtctctctgttggtgctttaactaacattaataagctttggttgttagtggaatcttataggtcccttgagaagaatacccag

SEQ ID NO: 59566 - DNA, 995 bp, Populus trichocarpa
  Intron number 4 from transcript POPTR_0007s14660.1 (locus POPTR_0007s14660) derived from phytozome v7.0 (chr-ID scaf fold_7; pos 14430178 to 14431172 reverse strand)
ctgaagttgttagtgcccgagggtgaatttgttgttcttgattaagaaatttttttaatgcaagtgtattaaatggttctcatttttggttaagctacactgccctaataccctgttcatttgtttatctttcttgagagcttcatatagttggaagtttatcttcattagtggctagcatgttctgtttctgacaaccatgtcctccagctcaaaaacagataatattgacctttttttgtcttctttttgagatggacaaagctaattagattgatctttaaaattttttctatgggtgcaatacatgccatgcaatcaaaactcatcatgcagcttaatttcttaggaaaaacattgttttgcaccggcacctgctctgtgaaaattgggctcaggaagttatcctgtttcaaattctgatatttggttgagtttgaatgttgatttgtggtagagttgcattacctgatttttcttgaaaaatacattgatcaactaaacgatccatcataggcaccacaaccagacaaaaggacttactgacctgaactggttatctccctgcatagtctatgtcactggaaatcacatgttctcatagaggcataactttttgaggagggacaatatttgatggcttttatattgtttcacttttattcttattattgttttggtggccacagtacctgaatgctttcatcctttaaaccctggatatttggctcctaatatgtttcatgagatttgcttgaattttgttttggcatttatcacctgcttagcttgaatgatctttggtttaggaatgtataattactcttggcaacgacaactacccctatatccccccctcctcaatatacacttgagtgagtgtgcttgcacatgcttgtttgcatatatcagttatcatttgctaggaaaagtgttgatttgcatggaaattgtttacaggagaggaagtggagggcgtggctttaccagtggtg

SEQ ID NO: 59567 - DNA, 261 bp, Populus trichocarpa
  Intron number 1 from transcript POPTR_0007s14660.1 (locus POPTR_0007s14660) derived from phytozome v7.0 (chr-ID scaf fold_7; pos 14431618 to 14431878 reverse strand)
ttcaaaatcccatcttccgttcctccaaagctcgagcaggttttttttcctttcctaacttaatcaattcctttgcttttctttgatttaataatctgattcaatttggtatgggcagatacttactttgggactgggactgtagacgatatcttgtgccatatcagagcaattgagtcaaaggcaagaattttatttttccttaaaaaaaaccttttgtttttgaagaaaaaacaatgataatgtgtgatttttaacagg

SEQ ID NO: 59568 - DNA, 342 bp, Populus trichocarpa
  Intron number 2 from transcript POPTR_0007s00940.1 (locus POPTR_0007s00940) derived from phytozome v7.0 (chr-ID scaf fold_7; pos 503930 to 504271 reverse strand)
agatactacaagccctcgtgagatcaagcttgcaagtaggtttattttgattgcatttgcaaatttagtagaatgtggttgtagacttagcaaatactagctctatagaataggatgaacttgtcgagaaattatttagaaaaatgttgattgattgtaataaatccatttgattttttttacagtcatataagcagtggttttttttatatataattaaaatatgttggtttcttcgcttttagtctctaatggttacattgtggattttgttgtttcattgataatgctctgaatatattgacaggagaaagtggggtagtttttgctgtgaagttgtat

SEQ ID NO: 59569 - DNA, 565 bp, Populus trichocarpa
  Intron number 2 from transcript POPTR_0010s22380.1 (locus POPTR_0010s22380) derived from phytozome v7.0 (chr-ID scaf fold_10; pos 19329355 to 19329919)
ccctaggtctgcaacgccggcccctccacaacaaggtatggatattttgaagtctatggacgtattttcaacatagatgtttatctatgttaatatgtttcttagaaaggaatatttctttattttcttttcagggcatgtaaattaagagagagagagaaagaattgtggattctaagagagagagaaaaaagaattgtggattctctttatatatatatatataaaaaattaaactgccagctttcttgaaataaaatcaaataatttttggagtcatgcatcaatgcttgataaaattgctgtattaaaaatctgacgatcgcctgatcattcatggcatgatcacttactatatattaccaaaaaaacttgtataattttcctatttgtataaccttaccctttattaaaaggaaaaaaatgtttacataaaaaacgagaaataaatctctaatatatgataggatttcaataaattttagcattatatagtttgctcatgtttgtgattaaatttaatcatgaaggacctaacattaacgctggaccgaggtccacgcca

SEQ ID NO: 59570 - DNA, 445 bp, Populus trichocarpa
  Intron number 1 from transcript POPTR_0001s13740.1 (locus POPTR_0001s13740) derived from phytozome v7.0 (chr-ID scaf fold_1; pos 10808951 to 10809395 reverse strand)
ccaaaaacccttctgcgattgatcaggttaactagatctccttcaacactacgcaattttgaatactaaatctgtttgagattgataattctcctagaagtgcttaactggcttattcaagaaagtcaaattgtttaaaaactagtgttgatccatttactcgctcaatttgatcaatctaggctcttaatcacgcagctgcctttagtatattttataattttggtgcgtagttctgttattctaagcttttcttgtgattggagatcagtccatggtgttaatttggtgaatttatttgaggtctctatttcatactgtcaatggtttagctcagaactagatctgggttcttcttgtctatcattggtactatcttgtcaaaatataaactgacttctaaattgcagaggacttttgcgaggtatacagaaagaaccgcttt

SEQ ID NO: 59571 - DNA, 692 bp, Populus trichocarpa
  Intron number 1 from transcript POPTR_0002s04760.1 (locus POPTR_0002s04760) derived from phytozome v7.0 (chr-ID scaf fold_2; pos 3005635 to 3006326)
cctggcgtagcaataattggtcggtgatagggaaggtattttttttccctgcttatgctttggttttttactagacccttccatttttttcataaacccgtctcctccccccatggataaatgctagtttaacgaactttgagattgtatactgcattttgatctgcaaactgaaaggttgacattctccttttaatttcattgcatgcaaaagttctcgagagatcagtttaatggtaagcttttcttacctttcccgtatgagaccatgtagcacgcgtgcttctgcttgtaaacatgcgttttctgactttatgaagccatcttctggtcttgatgtattctttcactgcaatgtctcatataaccagtttatttctgtgttaaatccatgtattttccagtcattcactcccatacggcctgaagtcttcttcggtgaaccaagttgtcatgctgctcttgatagaagtctttgtttgcttttagtttgcattttgttttcctctgctgtgcattcaaacgctcgtgtgagaccagttacgatttattttgaagagatttgggtcactttattcttttagtcctaatggtaaaagtttctaacaaattttgtaggagaaactgttactgatatctgagtaacttcaattgcaggttgcccacaataaagaatataccaaaaattgtac

SEQ ID NO: 59572 - DNA, 597 bp, Populus trichocarpa
  Intron number 3 from transcript POPTR_0001s40000.1 (locus POPTR_0001s40000) derived from phytozome v7.0 (chr-ID scaf fold_1; pos 39326647 to 39327243 reverse strand)
gctttggaatcctcaaggtatgctttaaaagatactggggaaaaaaaaacaacaccaaactagtaatcgtaaaggagaaaaagaaatttctgacttggcatgctaagaacatcaaaatatcgttttctttcaaaaaaaaaaaaacatttctggaaataaatacatcaactttcaagtttgatgggtcttattcattgttttatggaggatttgtagagtatttctttttatgattcaaccaaattttaaaagtattttttgtttgaaaaaaattaaattaatattttttattttatttttttataatcttattatgttaacgtccaaaaatttgcattttatcattgccttattccgtcggtatttagtttattagaaaaacttttactgataacataaatattttttttagcttcttggttgcaaaatattcataatggcattttatttgataagttggtatccatttgacaatatcacaagaaattataatttaagaacttgaaaattttgaatttgtggaagaaaagtaaaaataaaggacaacctaatacataagacgaaataactatgatttctttccgggttcccaggtgg

SEQ ID NO: 59573 - DNA, 484 bp, Populus trichocarpa
  Intron number 1 from transcript POPTR_0001s02300.1 (locus POPTR_0001s02300) derived from phytozome v7.0 (chr-ID scaf fold_1; pos 1742525 to 1743008 reverse strand)
agctaggtggaccagaggtatatatgtctttccttttctcatttttatttgagataatgattacaatattgccttcttaatcattgattagtttttttttattaatcagactgtgataacccacttgcagttattgaattagggttgttgttgagtttttgctcttgctctaatgatctggatcatctatatatcttcttggtcttggatcaataaaataatttatttgtctcatttgttggtaattggttcagtgtgtttttgactaaaagagagatttttctttttgaagtttgccttaatgtaagttttgtaagtcattttgcttgcgatttcaccgagttatgattagagtgttcttgtaaatataaatactttttattttggaatcttggttttgagaaacttcgctgttctgtctctgtttattttattcatttgaggcttactaaatgcttgcgtattaattatgataggtcctgaa

SEQ ID NO: 59574 - DNA, 450 bp, Populus trichocarpa
  Intron number 2 from transcript POPTR_0002s18160.1 (locus POPTR_0002s18160) derived from phytozome v7.0 (chr-ID scaf fold_2; pos 14112910 to 14113359 reverse strand)
cgccggcctatcctggtatgttttgttcctcctctccttacgtttaatttatggtaattgttaaattttattctttctggttccgctgatacttgctcatgtttctgtcagtgattaaggttaatcaaacactgtgggaaaattaaattgacaaattgagagaatttaggaaaacatgataacatgctccgtattcattattgaatctgcctgaaacttcaaacctcgtacgaccaaaatctgaaatttgaggtgccacaatctaaaacatgacaagccacacatatactttacccataaaaatgttttcagtgaacccaaaagaaaagaagagaagtttgcagagaatcacaggctttacaggacaaggaaaagactagacaatgaaagacttggtcatagatgtgggaactggtttctcatgcaggtgtggagcacgtgggaggagat

SEQ ID NO: 59575 - DNA, 1023 bp, Populus trichocarpa
  Intron number 1 from transcript POPTR_0001s07970.1 (locus POPTR_0001s07970) derived from phytozome v7.0 (chr-ID scaf fold_1; pos 6033236 to 6034258 reverse strand)
cgttggaaacgagccgactccaaaaatcacacgcggtatttaaaaatacttggctttatttcttgcccattagaaggaaatgtggagaaggaatagaatcccgatatttgcagtctggtttttgactgcaatgaaaaaaatgaagaaaagaaaagaaaatatatgatatctagctcaattaatctaaatatcaagttgatttttttttcctaaccatgtagaacttaagatgaccttaatccagcaatctaaatcttaattattgttgaaaataactggatgaaatttatcagctacagtggctagaaattgttataaaagttattatgggattttttttccctttctttttgctgtttttgactttacgggctctataaatccttgtgttacccggtgctttagatgcagcaatgtgagaactggttattgtggcatgctaataatcgatcctgcttttggctttgtcgaagattaagccatgcaaaattgtcatgagaggtcgttgcagcagaatttcattgcctgactaaagatttagtttgaaaagtgtctctggaacttataaagagcatacgtacggtttggttgattagcatgcatacatagtatttgcttactggacaaccctgtatccaagtgcttaccagccagactattgatcatccattaatcttggatgagagtctggcattcttggatcccacattggcttgatgctgattctgtcgcttttcataggcctgctttgtgttagagcaggttctgttttcttctcacaactgaaaaatggaaacatagagtaagagggtcaactactttccccttcttgggttgttaaatattcttgttggcttattttgtttatggttgtcagctgttttttgggaatttattttgaaaattacacatgcccggtataacctgttctatgattaagaaactgcttacccattctttattataaattcttgttctttgtgctacaagtaatttttggttcaatctatgtctttgcagggc

SEQ ID NO: 59576 - DNA, 969 bp, Populus trichocarpa
  Intron number 4 from transcript POPTR_0010s12250.1 (locus POPTR_0010s12250) derived from phytozome v7.0 (chr-ID scaf fold_10; pos 12299988 to 12300956 reverse strand)
cagtaagtttcacaatgctggtaattgaatacagttatacttcatcctctcatctgtatactcaatattgtgtttgggagttgaattctttattacactgcatatatcatatagtgtttctgtgcaaacggatcgtcatgaatgacctttacaagatttgagtctcatcaatttgcactgatggtgaaattattaaattgtgctgtctttccaaaaccctaaaaactgattgtgtgatataagttgtgtgacgtgaactcttttacattattccttcaaatactaaacaaaagaatgtacatcatagcatgtagttttctgtggattgttagattgtcgagatttattctataaaggtactgaagtataagtattgtttttggaataagatagtgcagaaaggggcaattaagagcctcttctacttgcgactgcatcttttaataccagcagtactcaatggattggtgaattcattttggcattcttgataatggctcttcatttggtattcagaaaagaaggatatgaatcatgatgtcaaaaccccaagaacacatatataacggttggaaaccatcctgcctgctctgaacatcatgttctttgcacattgataggtgataaaagttgaagaatctggtgctattgaataaaatttctttcttcagctgttattttaatatagccttcaagttttgacctgagaaagagagattctcgtcactattatagaagatatttggagtcgatgttttgtaattaccaatgcttcaagcatttgctttctctctcgattagataataccaattatgacttatgagaaagtggaaattaagcctaccgagtctgcattaacttaagcctgaaagttctcgtgatctttctttctgtgtgtgaactgacgttcccgtgctcttctgctttttaacccatgcatttatatatttatattcttgcagcaatat

SEQ ID NO: 59577 - DNA, 789 bp, Populus trichocarpa
  Intron number 1 from transcript POPTR_0007s01850.1 (locus POPTR_0007s01850) derived from phytozome v7.0 (chr-ID scaf fold_7; pos 1067822 to 1068610 reverse strand)
ggcccgaagagttaaatcttgagttaataagatctgtaagtttgattatttacagtcttaatcttaattatctaccgtgtttattcttgtaatgattcaacgtaaaatatttgatttttattgctaagttttctttaactgtggtgaaaattaatctgttatagggttggtggcatagttaagaatatgaccctgaggtcaaacctgtccaagacctggttactggttggctgagttaacccgagtcaaacctaaaccaacgatgtcgttttttctttcaagttttctacttcctctaatgcattcggcattaagccctgagttggcagccctaggtcagcgagttaaccaatcgactatggttggtggtggctttagttaagtttttattttcttaccgtggtgaattttgtggtggatggtgagtgggaagagatttttttaggggagtgacacgtcagcaatgccaaaggggtggggcccggttgcatctcagttcagatctcaattagtggcaagaatcatgcagtggatctctctttttcatgtaataaagggggatgataatgtcacctatggtgacataagacctgaatgattggaattgtgtaattataatattcgaaaaatattttaagggaatttacgaatttaaaatattttctataacattttaaatttattttataatatttagagtctggtaaaatatttttttggaatttcatttgttaaaatttttctcatgcacgtgtgtgaatttgtgcatacaggctaaggtgttccact

SEQ ID NO: 59578 - DNA, 898 bp, Populus trichocarpa
  Intron number 1 from transcript POPTR_0010s23330.1 (locus POPTR_0010s23330) derived from phytozome v7.0 (chr-ID scaf fold_10; pos 19942711 to 19943608)
tcaaattggttgttgaaggaagcaaggtgtatcaggtactgatttttttcctctctgtttggttgcaaggaagtaaagaaaaatgaaagcttcaagctttgtgttttgtgcttctttgttatcaacgagtcggaatttatttgtgtttattctctggttggattggttgagttatgctatcgtctatagggtatttttacgaggaggatttcgtttacttgtctcaattctgtctggttcctgagaaaatggaagttgtgggtttttttttctctctgtatttgaagaatggatatattattgatttagaatagaacgaaagctaaggactttgattctgaacttctggattattagttttatcagaaactaaatagattactgtttatacctgaaaaaattaaaaaacaatctttaatttttccgtgaattgaagggacagacctgaaattacaaagttgtctttataaaggttgagtcatgtaattactggaatgtctgtcggtgaatcttttgactgaagttcgtatattattttgtgttttctgtccttagattaggatatttttatcagcttcttcaattcatggcgggattgcatgatatcttggaactctgtttatagccatcatcttgccatctatacttctagcgttctgcaacaagtacctttagtttcttcccttgatagttttagaaaacattgattcagctttttaggtcgaatgatttgagattagtaagtccgtatattgaggtgttggtattaaagttagcaggtttttttttttttttcatttgcaaacataactgtttagatttaagtctccaaatctgaatcaagccatgcttggaatgcacagaccttgcaaagagaccacatagcagataagttcaa

SEQ ID NO: 59579 - DNA, 897 bp, Populus trichocarpa
  Intron number 3 from transcript POPTR_0010s17700.1 (locus POPTR_0010s17700) derived from phytozome v7.0 (chr-ID scaf fold_10; pos 16188562 to 16189458 reverse strand)
ctacttctggggaggaacgcctcaaagctcttcaggtgcttttacaatttgattcttttgtttctgttttagctaacccctgtaggtcatttttctcgcagacaactatttccaccggcctctgaatctatatatatagcaaataagtaggaaacatttacagtgctaagcagagtagaaaatagtcttccaaagtattgaacctcaaatctgatttagtttgtaaggtgttggaaactgacacccctcccctcccccatccatagttgactagtttgggaagcaattctctgccttgattgttcaaggaactattttatgatctttaagagttctcttctaggagagttataaaaagttagtgggtgcatatggattggccgcctttggatgtccactggagtgtggttggggcactctcttcgtcaagaagggagaaatgcaaaagcttacaaaaatggattcttcttgtaggagagtctggaaagggggacttttaagacttcaaagtgaaaatggttttatcgttattaatgatctggagtagaagttgtcaacttttcggaccatgttttcatccacatcaattatacagtcaattaaaatctacatggagaatgcgaagagtaagatatgcttatctgaataagttggatgcatttgaagatgacttctatttattttctggattttctggtgcatttttaagccagcagtttacttaccttgccaagtttgttccttttttttcctctaatattctgcccccaatttttgtgtgtagcatgaaagtgtttttgaaacataatgtgtttcaattgtatcagcctaactgttgaccttaaaatgcttacatcttcaggccttactctcttgtccaacaagttcaatccatac

SEQ ID NO: 59580 - DNA, 567 bp, Populus trichocarpa
  Intron number 1 from transcript POPTR_0007s01250.1 (locus POPTR_0007s01250) derived from phytozome v7.0 (chr-ID scaf fold_7; pos 692345 to 692911)
aggtatgtacctgcctgcctttaacagttcaagattaaattttgggatttgggtttgttgttaaattggattatcttgctcaaatttgtgaacttttattaatttatcgaaaaatgttttccttactgggatttcatggttaaaattcttggatttgtagtttattgtgctttttttaactgttatcttgaggaactctctgtttcatattagaaaatattcaaatttgttggcttttattcatgttggataaaataaagtttctatctttattgggatttcatggttaaatttctgggatttgtagtttattgtgttcgttactattatcattataattatctggttcttataagtcaacaacaccatagtttcaatctttaatggcgtttatcaacatagaaactttggagtattaacttggattttcagtcattgatgtcatggggaattttctatgtaaaattggaattactagtgaagattgtttatttgattgattttgtattgaaactcaatgttttttatgcaggtccttagtgatccacaaaaaagagcagtgtacga

SEQ ID NO: 59581 - DNA, 669 bp, Populus trichocarpa
  Intron number 2 from transcript POPTR_0007s13860.2 (locus POPTR_0007s13860) derived from phytozome v7.0 (chr-ID scaf fold_7; pos 13864494 to 13865162)
tcagaaagctcaaaaacattccttgaaagaaagctgtaagtcaatttatctttctcaatttccaaggttaaatcctaagttctctgttccaatgcattttgtttttattttaaaagggtattttttgttttgttttttaatgagaatgttgtgtgatagaacatgagaggaggcttttgacagactgtaataggggaccggagaagaaaactccaaatatgttcgtattttaattagataagaaaatatttgtctgactcaaaatgaataatgtaatagatgatgaattggcttatgtatttgaccatgctttctttgttaaatgagaaacataggagattaaagaaatgggatttctttgcttcagacaaggaactgacccgaaatgtcggtgattttagcaatgacccatgattagtttgtcagatttaagatgattgtggctgttgagttttggtggtggcccttatgttatctgggagccatacaaaattgttttatcaagcaaattcaaagcatatgtcattaaccgaataaggaagggaatggttgtgtgagagctggagagaagagagacagaatgattatttgtggtctgtatgaatatgacaattggtgatagattgacttctttacatatggtatgattttcagttttgtttagagaga

SEQ ID NO: 59582 - DNA, 291 bp, Populus trichocarpa
  Intron number 2 from transcript POPTR_0001s27810.1 (locus POPTR_0001s27810) derived from phytozome v7.0 (chr-ID scaf fold_1; pos 26701238 to 26701528 reverse strand)
tgttaggtttattggcaattactctcctaaaagtaacttgcacttgttttgtttctttctcttgctcttccagcgttttgatttatgggttattttcagattctttgtctggtttcttagacagcttattttttaaactttttggttgtttctgtgtattgggcttgaaaagggaattaatctttctatttttttcattttctttgctattcttggggggggggggttttggtactgatttttttttatttcgcagttaaccaaacaaattggttgcaattgggagcttta

SEQ ID NO: 59583 - DNA, 695 bp, Populus trichocarpa; identical to SEQ ID NO: 58591
  Intron number 1 from transcript POPTR_0001s07890.2 (locus POPTR_0001s07890) derived from phytozome v7.0 (chr-ID scaf fold_1; pos 5980507 to 5981201)

SEQ ID NO: 59584 - DNA, 637 bp, Populus trichocarpa
  Intron number 2 from transcript POPTR_0001s31610.1 (locus POPTR_0001s31610) derived from phytozome v7.0 (chr-ID scaf fold_1; pos 29985891 to 29986527)
tcatttcctgggggtgtgtgccacattgtcgccatgtatatttcttctcttaatagtccatgcttttttcccctttttaattgatcaacttcgtagcatctatgtgtggatatggcagagttaggaacaagaaagtatctttatcagcagcgttgtaggtagctgaatttttagcctaggattgtctattttcttgggatttcaccaaagttgtgatggtagctagctgaaaggccagaacccttttgaattagtttgtaaaagtttgtgatattgttggtttagctgatggatgaagcaagattgaggtgaagttgggaaattcagatgaaattgtgaagaaacaatgatcatgctaagaatttagtttattgcagagaaatgatgtttatctaagatttgattttactttttaagcttttaggctttagaatcaattaaagagaaggtgagtactgctaggtgtcaaaagattttgggtccattaattgtctattattttgtatattcttttttgtagaaagttgatttgcaatgtttgaagtttgggatttttaccttttaatgaggaattgatgggtccaagtgttcttgcaaagcagatttctcaaagggcaagatcttgccggtagtctcc

SEQ ID NO: 59585 - DNA, 320 bp, Populus trichocarpa
  Intron number 1 from transcript POPTR_0010s16750.1 (locus POPTR_0010s16750) derived from phytozome v7.0 (chr-ID scaf fold_10; pos 15611736 to 15612055)
ttctgtcggggtcacggtcatcgcaggctatctcggtgctggcaaatccactgtaaaatccccttcagtcttcataagttaatcactatatgcataattctgttaatgattattgagaagctgcctcattcatttatctaggcttgttttggtttatttatatttctgtgtatttattgattcacttcttcttgcagaagaaaactgagtgttagtacttgtaatgtaatcaaatgcttttttttttcaaataaatattaacaaattattgaagctacatttcaggtattagcttgttaaccatatctttaatcctcaac

SEQ ID NO: 59586 - DNA, 775 bp, Populus trichocarpa
  Intron number 4 from transcript POPTR_0010s16750.1 (locus POPTR_0010s16750) derived from phytozome v7.0 (chr-ID scaf fold_10; pos 15612301 to 15613075)
aagggaaggttctgctactttctaaattctttaattaatgcatttgatttaaaagatgacactagattgctttgttgtcttgcgccattttttattttccctgattttcaatcgtacttttttttttttttttaatttcgtgattttgtcctgcccctgctttgcgatcactgctagaacaaaacagaaaaggacacgtagagtaaaataacattattcattgcacaattgcattcatcggcttgtttcccaggatcattttaggatcctctttctatatgttgggtttctagtgaagaaaaggagagggtgtgaatatgtgggtaagcatcttcttgtttgaatatataggcgagagaaggagacctcctcttcttttagttagagggagcaggaaagatcataaaagtgaaagtatccatcattgttgggtactagttccttgccctccttaacaccctaattttgggttttggatttttattttttgatgggatttgggtttatgcaaattctgcaatcccctttccttttactttcaaaaaccttccaaaaaaattgaagaattaatatccttctcttcccttcccattttctcttaaaccttcccatccttacatggtgtttctggaaacaagagcttgtcaataaaattcccttgatcaacactgttaggcttataagttatgtcacaacttaattatctgtgaactatcccctttttttttcttttcctgtagacgtgatcatatattgcttgagatcacagggctgg

SEQ ID NO: 59587 - DNA, 777 bp, Populus trichocarpa
  Intron number 1 from transcript POPTR_0010s02680.1 (locus POPTR_0010s02680) derived from phytozome v7.0 (chr-ID scaf fold_10; pos 3139955 to 3140731 reverse strand)
gacaatttgttgacggctgcaaagaagattaccaagtgagcttcttcttcttcttcttctttgcttcattatgatgtattaatctgcagttcttttcatggggtttctgtaaaatatttatttatagtgggatttgcttagtttggccactatgagttagggttttttttgtttaaatttttttatggaaagggaaagaataatgagagaattaatcatggttttgagtcggaaggagtggaaattaaagaaagatgcttttttgagcttgaagtttcgtgttttttttgtccggttcatgacatcaagtttgtttaaaaggtgtttgataaaatgtctaagtgagacttccttattgtaaatgtggtatgctgttagggtgcaatgattccatcttcttctagtttactggtgctgtgctgtataggttttatagttcattaggtagtgctaattgagatggattttgaattccagttattagatatgcatacacccataataaaaaataaattataagaattaggagtcattaagtagttatattttgatcatgtaggattctaggaaagataatttgaagaagctcctatcgttgaacatttttattgaagtgactgctctgaaggacatgaatgcgcatagctgtggttggaactgaaagtttgccttttgcttttagtttttaaagcaacatgtctgtcagtttctttagaagaatatgttttcatactgtttggtgactttctgttgtacacacatatatatagttaagca

SEQ ID NO: 59588 - DNA, 940 bp, Populus trichocarpa
  Intron number 1 from transcript POPTR_0001s00390.5 (locus POPTR_0001s00390) derived from phytozome v7.0 (chr-ID scaf fold_1; pos 296456 to 297395)
aggtgggttttgtttgttactggatttaggtgtttgttttttgggatttgagtggctacgtgggtaattctcttattattattttatataataagctactggattttttttttacttgagttgatggttttgatattgaagcagtcactgaacaattttgagacaggcaggtgcgggcttcacttattttgaaagtctcagattttattaattttaattctactgcgagtgtttataacctagagaaaaaaatgatgctttttggcaagcattttaagcatattcttttataatcagtagatccagcagactccaattttatgcctctttcttagcagtgacaagctttagcatatttggggtctcattttttttttgaccaaaacattttggaatctgagcggtgcttcatcgcttttgagttcttacacctgatttatattctcgtggccaaaacattagtccgtgttattaccgttactggtggttttgaggcgccatttggccctaaactagttaaaggcttttgctcctacttgggttatttctaggttatctgaaaggcgggcaggacccggttcaagagtcttagcggtttctcctctgggcgtgtcctgtttttttgttacagtgatttgttacttatcatggggagccttgtcctttaacattatagcttctccttatctaaatgaatctttgaaatgttatccccatttgaaattaagaacacattcattattcgagcttattccaatttttgtttttgttgttgatttagttagacaatcatgctacaatcttagttgtgaagaataaagatagcatttttagtatgtttatattgaacaatgtgatgatatgcaattgtcgggaatgtttatcgggatgttgtctgaattggtgtagcagatctcatcatttcgtgagagcaagtccg

SEQ ID NO: 59589 - DNA, 954 bp, Populus trichocarpa
  Intron number 1 from transcript POPTR_0007s10100.1 (locus POPTR_0007s10100) derived from phytozome v7.0 (chr-ID scaf fold_7; pos 9826095 to 9827048)
ggggtaattaaattttaatcaaaccctaatctgttactgaatctctctttttagggtttttcatttttattttatttttttactaatctgtgattggggaatctctggcttgagaaattaagtgtttgggacgtggaagagtttatcgaagttgtactgagctagatttttgtgtgtgtggatctactagtggtgagggagagaggaatctaagatgtttatgatgtattaggagtgttgctaacagactagaatggtatccgaagttgcttggttcggcttatggatgggacccatttctttggcctgggtatttctttcaaatgctatagtaaccaaagtactgaaagtaattatttcgtttgtgttattgttttgtggtcgtaaagttgttgtctagagctggatatactgtgtgaatgagggagatttatgcttatattttttaaaggtaaaacctcattcagcttatggaagttgatttttttttatagaatcagtaagaaatggatacttttgtttggtttgaaggatctctaagtgcataatcacataggactggcttatattaaatgaaagttgttgataccaagtttcatttattgatgcaaaacttaaatctttaaatgaatgggaacggtaaagcacggaaaaccacagcaattttaaaagctaaaatacttgagagagttggattgtgatgaatcctttcataccatttagtttcaggtatgagtcttctatattaaattgtgggcttcatatcagttactcttgatgtttcagtgtcttaaagtaaaataccagattattatattgagcattgtgttatatatagctggaagatctgttcatccttccttttcttattccaactttctagtgatagtcatggtgtgttttctttccctttcttttatgctttaacttctcaagatgtttccagagatcaag

SEQ ID NO: 59590 - DNA, 929 bp, Populus trichocarpa
  Intron number 4 from transcript POPTR_0001s12640.1 (locus POPTR_0001s12640) derived from phytozome v7.0 (chr-ID scaf fold_1; pos 9786681 to 9787609 reverse strand)
gaattcgtacctggtagtgtaagtatcctttcctattatatctttctgcattagttttataggaaccttctcacaaaaagaagaaagtctccactcctcaaccgactaaatttcgttttcaaattagttagattgggctatacagatcctttctcttttcagcagctctgctataggctaaactcttgagggtttcttgtgactgcaacatagatggtcggtggtggtgggtctatcaatcttttagatttcgtcccctgaaaaagaatgaacaagtttggtatctaactacacttttttttgtccttcaaatccaaaagtttggccttggcatggagtgatcctcaacacctaactaaaataatgtagcaacataaatgaattctagctaacacattgatgcaactggcatccaactaaatttattgccaaaaaacacagatatgaaatgaagaaacaaatcaacaaaaccttggaggactttgtgctgaaatttggtaaaagtaggtttcttttctgacttgaaatttttgttttcaactatcggtcccgacataacttttgagctggtctacacttttttctcctttctaatttgattatgtaaaatggacaatttataacataaacttgggccatcctgttcttataaagtaaatcgcgcatgtgccaagcatggtatatgatgaaaaatccaatctgatcaaccgtaaaatttaatactcttatcaatcaatttgtttaataatatagtatttaattaactcttgtacatgcagtttattttaataagttgcagtgcaagtggcatgttcttggcaacgttcatgtgtgcgtgatcatttctatatgagaaatgggttaaaacgaattttttggatgtgctgctggattaattatatgagtggtgtccttcaggttcttcgtgg

SEQ ID NO: 59591 - DNA, 641 bp, Populus trichocarpa
  Intron number 1 from transcript POPTR_0007s01120.1 (locus POPTR_0007s01120) derived from phytozome v7.0 (chr-ID scaf fold_7; pos 608079 to 608719)
caggcgtagctgctggactgaaaaactggccccaggtcacattttccgttgagccacagtctcttgaacaaggcctcgacaggatgaaagtgtcattagcagtgtctcatgagatatataaaaataacacaaaaatttgtgatctgtaacagttttagtgaatttttatgaagctttttctattcaatcactgaattacatatttgcaacttcccttgattttcttgatgttaaaaactcttggatcctatagatgaatttgctaccaaccaagattcttagcaacacttcaatatgatgaatgatattttttaaaggtattttttatttaaaaatatattaatttttttattttttaaattattaaaaaaaacattaatatttttttaaaataaatatatatttaaaaaatataaaaaacaaaagttgccttagttccaacctgtcggtagcaccgactactgcctaacagtcaccgtctaaacacgaaacgtgactcactgtttcttgtgcttctttctctcgcaacttcacttcagaaaaacaagaaatggagggaaaattaaagaaatttagttttgaagacagcgaaaagataaaaaaaagctccaccaagttacagcattaaaggtgttgtcagc

SEQ ID NO: 59592 - DNA, 728 bp, Populus trichocarpa
  Intron number 1 from transcript POPTR_0001s32640.1 (locus POPTR_0001s32640) derived from phytozome v7.0 (chr-ID scaf fold_1; pos 30916910 to 30917637)
gggagtcctttccctgtgttcttcagtgcaggtgtatatatttacggctatggaattttgtgttttttttgttagttatacagtgcctggtaatgttgattgcaataatgagtttgtttataggtatttgtctatcatttcaacacccttatcggcagcatgtagatggcactaacatatgggctattcccggtgttgtttggtcttgttgctcatttctgcaattttttgagtatgtggtgtcttgatccttttgtacgttttgggggaggggattagtttaaatcggagtcatactgttttgatactttggaaaattttgaatatttttgaaaatcttaactgttaatctattatgataacgtgttcctgatgtttttctacgtggacaccatgtttgttacctatctttatttggtttatttatgcatatgggcatgtgcaatttcttttgcatggaagtgaaggaattatgaggatattttcttttgtggtttgttaaagtaagaaaagttaattgaggatgattttcatggttaaacggtcactaataattttgagatcgaggaaaactgtttgtatcagtcgtgtttcctcaccatccaatttatcctcaaattgtctccgacttgttctttgtacatttattctttctattcttctttaacacttttaggtattgaattgttgtcatgttaacaggcacttcaactggaggtttgctgggt

SEQ ID NO: 59593 - DNA, 528 bp, Populus trichocarpa
  Intron number 1 from transcript POPTR_0010s07460.1 (locus POPTR_0010s07460) derived from phytozome v7.0 (chr-ID scaf fold_10; pos 8514267 to 8514794)
cttcttgactcctcctcctcctagcgacagtaagcctctgctttctctcattcatctagggttaccttttttaactgttcaagaataaacagggttttgtttttgactgctgacaaatagttttcagtgttaatctttaacatttcatgtatcttgtccatgcgcttgttgattcttcactctaggggttctatacgtgattctgtattgttccatatgtttaagaatgtttgttacttacgaagtatattgttagatgttgtcgtgtcgtgaatgtgttctgccgcttttgccgatgtttctggaggaagtaaaattattaatcattgtatcgatagagtttctgatgtcgagatacgttaaggttgatggttcttgatgatatggagctagattttgtctgcttttcttgagttgatctgaaatagtgaaattagaatgtagttgttaactactacctattttctttggtgtcaggctgattgttgttggttccctttgttgtttttaatttgattccaggaagaa

SEQ ID NO: 59594 - DNA, 719 bp, Populus trichocarpa
  Intron number 1 from transcript POPTR_0010s01440.1 (locus POPTR_0010s01440) derived from phytozome v7.0 (chr-ID scaf fold_10; pos 1581503 to 1582221)
gtgacgattattatattatcagattccaggtttgttttattgttattttaatgatgggttcttgattttcagaatcaaagttactttcttgactgcatactgtgttttgtgatgtcaaattgtaaacttgttctagcaaatctttcgccttttctggattacatggattatgttagtagattttgtaggcatgtttactatttgaagggatcatttgacaggtatgaaaagatcaggcatttgcagttgttttttttaattgacctatcttttcttttgttacatgaagtgtttaatcatcaagttttagacttttgattgttatgctaataaatcttcgaccctttatgtagtataggaattggattatcatcaattttatattttgtttactatttgcagtgattatttgattgggatggattatattgggctttttggtagtaattaggtagtagctacgaatttgaccagctgttctagctgaaatgattatttaacagtataattttagctgaagcttaaataatcattcatggcatcaggcaactttgttatctaactgttcttgggcacacttgagaaagtttttaattttggtcttctatagtttatcacaattgtcttcttatgaagatgtacaaaacccattttaattgaggaactgctcgattgtttttgtaggagcctggagagattgaagctgagtttgcagagat

SEQ ID NO: 59595 - DNA, 840 bp, Populus trichocarpa
  Intron number 3 from transcript POPTR_0007s01670.1 (locus POPTR_0007s01670) derived from phytozome v7.0 (chr-ID scaf fold_7; pos 962618 to 963457)
ctgttattgaagaggcaaagccactgcttacaaaggtgtgatgtgacctccttatgctttgttctaattttgattgataatagataacctcgaatacactttttaactaaatagctgtctcacatttgcaatcatcaacatggttattgtgaaaatgaaggctttcttgctgcactagttaaatgtcacctgcagccttatgaaatttcttctgaccttatttatcttgataaaatatgctgcatgtgggccaatcagttcaaagaatttgctggggtatcctttgggaccaaaagaagtgcagaattcgtgatgatataatatgtcttaaaattttaataaaatgaaagagagatttaacttgagcattgcttttgtaagatttttaagaaactatatatttagtttaggtgttcagcaactgtctagactctagcttgtttatttgattgatcaagtagatggaattctataaatggcaatgcttttcagggttaagatcattggcctttaatttgtaattaccatgagtgaactacattacaggatgtgagagcacagcattccattgtaccagaaaacttaaaaagtgaataatgtattctcattcctttttcactaaaacctaagcattattgtcatatatgcattatgatcctttacaggtaggcaatttggacaatggtcgggaaattaagtgtgcaactttttcaacactttgaatctgtctgcatgtacttgtctactttgtgattgaaattgttccatttatgttgtcaacatttagcttgtactaatgcatactttgattttgatgaagtgatgtctcagataaaagcc

SEQ ID NO: 59596 - DNA, 309 bp, Populus trichocarpa
  Intron number 3 from transcript POPTR_0010s08900.1 (locus POPTR_0010s08900) derived from phytozome v7.0 (chr-ID scaf fold_10; pos 9699648 to 9699956 reverse strand)
ttagggtaagctgctctgcacgttttttgcactctaacttttccccttttcttcggtaatatgtaaagggcatgtactgtagttctgtactaaggtaatcaaaatttaagagacagtctactgcacagtgtgagataagctgaatgaaatgttgactgttgtgtatttagtttggagaagtgttgtaaacaaatagcattaactcagcttgtcctgcttcttgttttttattaattttttttttcatattgctatttttcttatgaacttgcagtttttccccaagactgagaaatacgtagctttatt

SEQ ID NO: 59597 - DNA, 544 bp, Populus trichocarpa
  Intron number 2 from transcript POPTR_0010s24290.1 (locus POPTR_0010s24290) derived from phytozome v7.0 (chr-ID scaf fold_10; pos 20577953 to 20578496 reverse strand)
gaaggtttgttcttgcccttgcttttgatctttttagtctctggagctttgttgaccgtgctgtctttctcccaacacacacacaaacaattgaaatggccaaacattttagatgggctttgctgggttgtcaatcttagtccttgatgctaaggtactattccaggaattttagggcaaggtgtacatcgtgttcatggtctatttgataatgaactagagcaaagattggttacagaattttgcacctttgcaagtaggttagttaccagtttggtatgatgaggtttcggagcatctgcaatttgtgaagattaggatatttactaattgtacattagaaagcaatgcacttctttactcttcatcaacgaataaagaaaaaaaaatgaaaggtagatttttgaagtattaatcaaatctggcttagaattccatgagcaaatgctattttcatatttagcggggacctttggttcatagtttctgttatttgatgataatagagtgtttcttctgtgagcatcttcaggtgtggaatcat

SEQ ID NO: 59598 - DNA, 579 bp, Populus trichocarpa
  Intron number 1 from transcript POPTR_0010s24290.1 (locus POPTR_0010s24290) derived from phytozome v7.0 (chr-ID scaf fold_10; pos 20578548 to 20579126 reverse strand)
tctcaggtaccaaacattcttatttcttgattcatcttttatggcaaagtctatgtttttattgtgttatttacttgttgttttgacttgtgatgggatgtttatgagtctttgattgattttggattgccatgttgaatttcaagtttgaatcttttctagggttattgggtttttgttcattttgttttgtttgaggatttaagtgaaatctgttatggttaaaaaagttggtaaaggtgtcaaatttaattttgtgaacctagtttttgagggagaaagattgctgctttgttgttggggagctgtggttttgaatcatttctggttttagttgaatgaaaattgtaggataaaagggatacgaaagtggctttttttctttttgtgttattgttacgagttagaaatttatctaggctcggatgttaactgaagtcttcacctgttgttgagcatgtcttggtttttgctgccttccctcttcttgatttgttgacattatgattgttgctgatttttgaaagtgtaatgattttcaattttgcttgatttcagactgttgtcctcaaggttggt

SEQ ID NO: 59599 - DNA, 810 bp, Populus trichocarpa
  Intron number 1 from transcript POPTR_0002s18940.1 (locus POPTR_0002s18940) derived from phytozome v7.0 (chr-ID scaf fold_2; pos 14822713 to 14823522)
gcaggtattcaattttaaataattataacatgaaaataaccgtcagttaatttacattatccactcacgaagattaaaaaaaataaattccaaacgattacatatagttaacttccaataaaaacaagagtagaatggagggcagttcgttaatgaaaatatcgaatcaacctctaaaagtgggtgcttcttcttgtaatgttattaaatttttatttttttgattttgtattttaaaaaaaattcatttttttagttttaaattaatgttaaaaataaatttaaaaaataaaaaaattatttcaatatatttcaaataaaaaatattttaaaaaataaatattactactacataatatcaaatggactcaacatcaatccatttgatgttactgcaaggaggggtaatattgaaattatttgaaggataaaagtatgtttattttgtggttaaatttttatttttaaaatttttatttttttatatatctagataattttaaaatactgatatgaaaataaattttaaaaaataaaaaatatttttaaaaacatctccaacccatatttcaatataaacagtaaattttcaggaatttattttctaaaacaattattaaaaaaaaaaaaaacttttcagtaaacaaacaaatcctaaaagtgaaagtgaaacttcattagaattacagtggtttatccaaagaaaactcaacaacgtactgtagtccaatacgttttttttttttttccttcttattattcggttcgaagagaggaaaagaagcagcaaagaccaacaacaacaacccc

SEQ ID NO: 59600 - DNA, 913 bp, Populus trichocarpa
  Intron number 1 from transcript POPTR_0001s26480.1 (locus POPTR_0001s26480) derived from phytozome v7.0 (chr-ID scaf fold_1; pos 25492117 to 25493029 reverse strand)
atctagtgttctgtatcatctctctctctctaccggtatgtgtctttttcactttctcattttagattctcctctcctatcttgcagttagttgaatagttcgtttcttgaatttaactgattttctctttcctcaattcaccacttctttgatttgtttccttgagaatttttcttttcttttttttattaagggaacttgaatttgggtttcttcgtctttggttgctaagaaagtttgggacttttgattattaaattgaaattgagaaatttggcagaactaaagtttgtagtattttttggctacgtggaggttttgacgaacttgattaattgatttctgattaatccaagagagtttgatgtgattaaattagtggacatgtcgagaaacaaagaagatttccacattatcagtctgctgcctccatggtttttttttttttttggctcatggctgctgcctctctcatgaattaatatcactgtggcataatttgaatctgcggaattgttgaaatgattctgtgttttcagtttggtgacataagctcgtcatgttcatgtaattaattgtttctgcttcatccgttttgagggaaagctttattcgtaatctggtagcaaaccaccactctatttttctctcctcgtgctattagatcgacactagacagtgaatgttttactttgtagaatgaacagaagctagcctttgggacatgatctgcacagtatttattctccagcacactcgaaaaatatgcttgttttttctgtttcttttttataccaagttctgtttcctctagcacgtttactatgtcaatctcacttgttaccgctacattcttcctgttcctgggcaggaaatcgagatcgagaactaataaactaattttttgaaggc

SEQ ID NO: 59601 - DNA, 417 bp, Populus trichocarpa
  Intron number 2 from transcript POPTR_0001s21390.1 (locus POPTR_0001s21390) derived from phytozome v7.0 (chr-ID scaf fold_1; pos 19814728 to 19815144 reverse strand)
caccacgtgttgtttctgttcctagtgaggcattggtaagtgtcattactatgctagacagtcctataaattttccaatttatgatttgttgatgttacaggtccttttgttttattgttactagttttatatttttaaacaggcattagaagccaaggattttttgaaaataggattcatagatcttgactaaactaattaagaaaatagttcttgcttggctaagtggcagaaaaggatgtatggtgttgcatattcagtttatgctttcttttgtctctttttgtgtgatgcatgcatgtcaacttattcttccttgacaagggatatcattgttagaggttaaatactgcaggactaatatctggtcatttgaaacagcttcaattgacatacagaccagacgaaggtccttc

SEQ ID NO: 59602 - DNA, 902 bp, Populus trichocarpa
  Intron number 2 from transcript POPTR_0001s20950.1 (locus POPTR_0001s20950) derived from phytozome v7.0 (chr-ID scaf fold_1; pos 19195105 to 19196006 reverse strand)
caatactgctggggattgttgttaaggtcatatttttatcatctcagattaaaaataatctatgcatgccttaattttcgatttctggtctgcttaactcgtgatagttatcatatttatgaaaatttaagcagataaaacattcagtttgtgtaccactgcaaaaagattgaagatttcaataagctacataacacaccatttaagttttgaacattagaaattttcgcctttgcttagtagtggaacaacagctacctcaattggagagtgtggccctcttttactgtcacattcttgaccattttgaagatgctctttttattggtcaaaatcaacacaattaccggatttcagaggagttgtaaatttacagagaccagcaggtgggaatttttttattattattattctttgttcacagcaaaccttatgctgttggattattgaagtggtttgtcaatgttgagcctgagtagctgttggttttgcccagataatatttgagctcaagccaactttcctctcagggaagttttacatgcataagaagaaaaacttgcgttgttcttttttgataaaatgttgagattacattaaaggatggtccactggagctagaatcttcttttctgcataaatgtatgcaaatgagattctgaagctacagggccttgccaacttcatccattttattagttttctggaaaattttagaaagcaataattgtgcaagtggattggtgtagcatacacatagatccatgtctagaacgattctagcttaaactttcctctcatttgttttgatactttctcatgatcaaatgttggtgttaataatttgcatccctgccatcaaaacataatttacatctttaatcgagcttaactccaacgtg

SEQ ID NO: 59603 - DNA, 840 bp, Populus trichocarpa
  Intron number 2 from transcript POPTR_0010s10515.1 (locus POPTR_0010s10515) derived from phytozome v7.0 (chr-ID scaf fold_10; pos 11002111 to 11002950)
attttgctgattgtcaggctcaagttggatcttcggtaattaatctcctcaattgtcaccctatgctttactttttcacatttgcttttttttatttttttatttatcaagtggcgtaactgtaacgctctcttattataagttctatatatttcattccatatgcttgtatatgttaatttccattttgagatgtatcagaggagttgccaatgttcttttcttttcttccttcctttttttttttggaggttaaaacatcacttctcattaaatttgcaacatctgaaagtttatgttagggtgttgaatgacctgggcctgccagttcaattttagtcctgccacggtttaaattatctgtttcaaatttctgccacgcatatgaggtatttctgccttgttctctattcatcaatctctcagaaatatccatcatcctggtttggaatacaactcctcacaccatcttatatttactatttttttccaggtactcatttcttaatgagtggcatatagagaatcatgatacttatggctgaaaagtgacactttaaaaaacttgcattgtttttcaggaggctttgacgcctcatctcatgccatttactcctcatttgacacgcatgttaaaggaattgtaatatagtaatcttgttcatatagttatttctgtcaaccatctattggctctccttcttcttcttatttacttctcttcctggatttatgtttaatagtaactttagaaatagatgctgatgcagttaataaacaatatagatgttatcttggaagaggaactaaagatatttggccctttttctgttgctagat

SEQ ID NO: 59604 - DNA, 652 bp, Populus trichocarpa
  Intron number 1 from transcript POPTR_0007s00990.1 (locus POPTR_0007s00990) derived from phytozome v7.0 (chr-ID scaf fold_7; pos 538732 to 539383)
aggtttgtattggaattgatgtttttgtttgtgattgattgtgggttgggtttagattttgattagagtttgttagcaagagaatgagtttggattgtgaagaatgtaactttgattggtggagtctttgttagttatgcaaaaatagattttcaatgagctttgaatgatgttcttcgtgttttgttttgccagatttagctcctttgcttcttgaagtgtaactttgatggggtttgacttgtcaattttactgtgctgcatttaggtgttttgtgttagtatatactagaaattgatattagggaatgggaattgtcatgtttgatagctcatagtgtaatgctgcagtgttgatcatcaagaatcaacaattttttggttgataaagatggtaaatgagaacgaaggtcacattgctagagaaggattggcactggatgtttcagtaacttgttgagtagaattttattaaatagcatgaaagtcagttcaatcaaattgccaagatactgaaatgcaattattttattttatgactaatgtgatgagattcctttttttaccctagtggttgcaatgctaatgtaattggacctaatttttgcttgttaatgatatttcttcttgcagtggctatttattagaaaag

SEQ ID NO: 59605 - DNA, 536 bp, Populus trichocarpa
  Intron number 1 from transcript POPTR_0526s00230.1 (locus POPTR_0526s00230) derived from phytozome v7.0 (chr-ID scaf fold_526; pos 13407 to 13942 reverse strand)
aggtgctcatagttactttctggaaattcatttctaattatttggtcttcataaatgctgaattatttacagcacaataacaaactttgtaggtggtatttatcattataacattataacattataacccaaagctgtttccacgaggcaatgattctatactatctcacaaattgacattagatatgataatggtgaataattatttatattgagcttgcaattggcttaagttttgtcctccagtagttttccattataaatggtttgtgttaaactcatgaagccagtgttgtagactgtgatgattacctaaaatacatgagcctagtctcattacttaattggttagagaaggcatatttctgaagtagaaattctatagggtcgacccattttgaatgaaacatacggccaaccacttaaacatttgaattcatatgttttgctagtgaacaatcctcttctggttttcaatttgttatatttcacttgaaaagtttatcagttactttgaacattcatgctctgcaggt

SEQ ID NO: 59606 - DNA, 641 bp, Populus trichocarpa
  Intron number 1 from transcript POPTR_0001s18420.1 (locus POPTR_0001s18420) derived from phytozome v7.0 (chr-ID scaf fold_1; pos 15480620 to 15481260 reverse strand)
ctgattttggattggcaacaaaggtcgactaagctctctctccctctctctctcttcttcttttttttggttatttatcagcattttaatattgattttgtgtgatgtggattgctgtctttggattcttggattgataattggtgaatggaaggtacaggcttgttagatatgaaaatctcgtatagcttgaggaattctgtagattgtatcattcgtaacttacaagattagtttcctttacgtttgtacgtctagcattacagatctcatgttttgtttgaagtcacttgctgtctctcttgatttgaatcctggtatagaatgataactaggaggttatgtccagaaaggaccacgattcgttacgagaatcattttttggttacaattgactgggagaaactatatacatcacgaattctttgtgccctgctagtagagagctgacattatggaaggagttggataaactccatgccatgaacactgcagaaattcaaaatgcttgagtggacaaattggaagctgaattgactgtcctccccttgtagttttatatggagtttgaattttgttcgttgatatatttcctttccctttcagtttagtggtaaatcagttggcatcgttgggttggg

SEQ ID NO: 59607 - DNA, 772 bp, Populus trichocarpa
  Intron number 1 from transcript POPTR_0002s06240.1 (locus POPTR_0002s06240) derived from phytozome v7.0 (chr-ID scaf fold_2; pos 4176715 to 4177486)
aggtactactaatattgtcattttgatagatagattgtcttcaatacttatactaagctagacacccccctaagtttgttgctagacgcccatttctctaaggaaacttagggtttctttggggatttcttgtccttcatggttggatctggtattttggactagtttcttaagtaggcgacgtttgtgatttgcgtgtctggttatgatgtgtgtcttctatggatgggtggtggagccacagtttattgtctgagatggttgtctttctgctttcttttttttttctatgttttttcaaagaaatcttttccccactatgtaaattttgttttgcgatattcgttctgtttcgtcgattagaaattggacaaaaaagaaaaagaaaagctaaaatgtggtgtactcctatagcaatctgtgttattccttgttgttgtgattaaggcctgttgggaaaataagattgccagacatgatttcgaggagttatatgtagactggagcatggtagaattagtctggttgctttaactcttgggaaaacttattagcctttgttactcttggattacctgtaaaaattgtattcagtccccctcccccccaattgttcgatgtcattttgtattatgagtatacagacatcaatgtaatcgaatgctgctgacgagtttgttacatgttgtatttatggtggaaatttgtaaatatttgtttttcttatgtcgcattggacattcaaccttttcagccgtcatccttcagtgaa

SEQ ID NO: 59608 - DNA, 864 bp, Populus trichocarpa
  Intron number 1 from transcript POPTR_0001s01630.1 (locus POPTR_0001s01630) derived from phytozome v7.0 (chr-ID scaf fold_1; pos 1216803 to 1217666 reverse strand)
cctaagatccttgtcattgaaggtttgcatccaatgtaagtaaaactacagcttcgaatttcctttattatttatttatttttgtttttatggaaaaaaaaatgaatatactgaactgtctctctgcctgtctccctcactccccttaccatacatgcgttggtggaatctcggaatcatcttttttttcccctccccgtttttaatgaaaagttaaacagaagattccatcaaccgaatttgttacttctgcatgcataattaataatgttttttttttccttttcataaaacttaatgtaacatatatttatttatgatttatacatcaaggcataaagacaacatgcatgcatgtttatatatcacatattatatattgatgatttttcttaagaataccacgcatgatttgagaaaagaagcaaaaatggattgttgatcctgagatagtatatgttaaatgttcctctatctcaattacaaggcagagaggaattagaactctatactgcccaggctagctgtggactatgactagtgtccaggccccccaacagaatagttttggcctcggagaccgcggaaagaaggttttcagtggatggctcgtgtaagatccagtgaagaaggatttaattttatgaaaactgatttgagaatacacctaatttttaaaagctctcagacagactttgccgatgaaggttcatctttggaaaactaattatagtattatgctgctacacaaaaccaaattgtacacaggaaagagtaatgcaatatattattacaatctttttgagtaacatctgtttgcaagagcttggacttatagtcaccgtctatacaaaatatgtaggt

SEQ ID NO: 59609 - DNA, 514 bp, Populus trichocarpa
  Intron number 1 from transcript POPTR_0010s04560.1 (locus POPTR_0010s04560) derived from phytozome v7.0 (chr-ID scaf fold_10; pos 5662405 to 5662918 reverse strand)
gctctcaagtatgtttttttttttaattattattttaaattggttgaagatttatttttaattttacatagtcttttttgttaatttggacagcttttgtgattgaatcttcatttaattctaagagggcgtcaacgaaataatttaatagggttttacaggatgagtaattattgtttaagcaaaaaatagaggtaaataaaggttttttgtgacattattggggttactgtaattatttcctagtgcaagtgcaatgtatgacttgtttggaaagcaagatttgatttattaaagatatgatggaaaacagaataaagagccgaacttggagtagttaagtagcacaattgggtggcaatggaactttgaatcactactagttcttataagatacccacatacattgaggttgaaaatgccctctatttttcttttcccttgtttcttccattgctaatcaaggttggaaaattctctttcgcctactatttcaggtaccatcctgacaaaa

SEQ ID NO: 59610 - DNA, 929 bp, Populus trichocarpa
  Intron number 2 from transcript POPTR_0007s13340.1 (locus POPTR_0007s13340) derived from phytozome v7.0 (chr-ID scaf fold_7; pos 13460708 to 13461636)
taatagcagcagctgctcgtgattataagaaggtttggtctttaaagttgtcttcttttttttattttctcaaatgggtttttgtcgaaaccgtcgcatatgtctttgcttactgttgggtctttgtttatttgaaggaatttgatgtaaagcttgctttattttttttggatttctttcaactttaagccttcaatgaaggaaacccactttgcatcccttaatgttttgtggtttatcaggtttgttgtgtggctttgaaatttattggagaagaaatttattgctttatgagaatgttgatggaagaaagagggaagctttcttgcttctgcttcatagaaaagattgaattttgggcaaattgatgcctaaatagtgtgttggtgattaaagtggaaattttgaagaacttttgccaaattaagaagtgattgtagaaatccaggtttcctgtgtgtacgtgcccattgggagatcagtttactggatcaatagtaattaggggcaaatatatggtccaatgatagttaacagtttgcaacagagatggggatgcatttcaggttgtgtgcgagcacataccttttttatgtactcctattgcttttgttgtgcttgttgaattgctaaaatatattatggtgttctcagagttcttaactggaaggcttttgcttccaacaattataaaatactgattttgattggggaaacgggtggtcaaacttaattcctggctgtacatattagccttttccattcatggttggtaaagatatatgtgattgaattgatctgacggactgaatactcaaataaaaaggtggcgttgaatttgttatctttgattttttttacagttattattgacattacatgcttatgttacaggaaattcttgctcaagagaagttaaagtcgtcgag

SEQ ID NO: 59611 - DNA, 731 bp, Populus trichocarpa
  Intron number 1 from transcript POPTR_0010s18600.1 (locus POPTR_0010s18600) derived from phytozome v7.0 (chr-ID scaf fold_10; pos 16810041 to 16810771 reverse strand)
attttatctttggagttgccacttctgcttatcaggtaggcgccccattgtgtgcgtgtctttatttctgttaattggtggcaaattctgatctgggttgtttgacagttttgattgtgtagatgatatcaatgttgttaaagacggtgactgattgatccattgttcattttggttgtttgattttattttttggatgttttttcagtgctcttattcatcaaaaatataaaaataaaagaatttttttagctctctctaaaactactacatttttttcacctttgcttcttatcctctgaaatcatgcctaccttgtgctagtttttgacgatcaagcgaggaaatatttttagggatttttcttattttttgcgggcaactttccttttcgcaaggaggctcgatactgattctattagggtacagggatgattgatgagttcaattgattaaaaagttgctttgtttgcattcagaaaccagaggttttatctgacttctcccctctctctcgcgcataaagggatcatccagctctctctgttgatatattgttttctctgatccctagcggatctcaattgttgatgtcccagatgctttggaattggcatagttatagtttcatgctgtgtgtattggttacgaagaacttgcactctttgaattaagctccttgttacttgcttatagattgaaggagccagcaacgaaggtggcaggggtcc

SEQ ID NO: 59612 - DNA, 814 bp, Populus trichocarpa
  Intron number 2 from transcript POPTR_0001s04580.2 (locus POPTR_0001s04580) derived from phytozome v7.0 (chr-ID scaf fold_1; pos 3570616 to 3571429 reverse strand)
ggtcttgtcgtggactgtggaagcagtttctcgaggtatttacttgttttgtttgatcaatatttactttggaaaaaaaatatttccttattaggaatttgaggttgattactgttgtttttgtttgtgtcctgttcttaattttgtcttggattttttgtggttcccctattagatgcttgtgaatttgttttggtgtttgattgggattttgttgagattgaattcatagaatatactacaagattgatagaaggaaagttgaattgttcattcatagactgttgtctgtgattgaaagtcaaccctcctcttactagtatcgcaagaagaggaggaagtaaatgtggaacttttagaatgattttgcttttaaagaaggtgacttttgagcttttaggtggatgcctaatttttccagatttattggatctttatgtgctagaaagttcaataaccaatgaggacctcacgccacggaaaattgttagctgtttgttgatcatgatgttaaaccggcagggcttatcgacggggaggaattctttttcccttccaattgatggttgtttgaatttctgctctttcagtaattgattggctaagcttcctttgtggtttgcaaacgttaatttttccagtgttatctctattagcgtataaattatgaaattaatgcatatgcttgcaaaatgctatattctacttggtaatattaggaattagttcttggcaacttctgttttccttctttgaaattatcctaaggtgtttgcttccttttttccccacaattcccagctcccagctccag

SEQ ID NO: 59613 - DNA, 1021 bp, Populus trichocarpa
  Intron number 1 from transcript POPTR_0002s06750.1 (locus POPTR_0002s06750) derived from phytozome v7.0 (chr-ID scaf fold_2; pos 4539522 to 4540542 reverse strand)
ttggtcactgctgttcttggccttgattggcacaggtaattgcatcgttgcttttctgtttttatgctgtgtttttttattttcagtagtaatgatctttgaaactatcttggattttgtttctcttctttttttggtatggtttcttctgcattatgttaactgttaagttactgatttggaaagatattgaattagcactggatctgatctgggtttgactttgaatatcaaatgatctaattaatgaagttactgaactgaaactatattaacgaaggttgctactttagtagattctgattggtgagaggatctaaattttgattcaggtgttctgggttgggatgttttttatatttctttctaatctgatcagccaacggcccgggtgaatggtaattgctttagtgtaggaaccagaatgaactctggcgattttgtccagttttttgctcgaaatgatagctgcctgtttttgagcttttgcaaaatgattgacacccactctgcatttaggtctttaggtattgcaattgcaaagattgccgcatttaccattaaatgttagcgtattgcattctcaatgaagagcaaaatctaaatttaaactgctggatgtaaatgtttgaggcctctacttcaatattaagatccattacaacctcaatttaaccttgctgactcaatacttgagagtatggttagatttattattccctgaggaaaaattctgtagaccctgaagaattagaatgttggacttcttacaatgtggacgttatttaatagtttactaatttcaaaatgaagttcctggtccattaaatgatgatttaatttggcatgacttgtatttgttgaagttgtgatttatcctgccagtttcctgccaaaactatagctttcatctcctcagctatttagtttttaaaagatagccataaatgtattggattcatgattggcttggtaatgttgagcagtgaaacacctcctctacctgacactggccagtggt

SEQ ID NO: 59614 - DNA, 847 bp, Populus trichocarpa
  Intron number 1 from transcript POPTR_0001s45820.1 (locus POPTR_0001s45820) derived from phytozome v7.0 (chr-ID scaf fold_1; pos 46320850 to 46321696 reverse strand)
ctatcgagatccggaactttctcggcgagaagaaggtaataatttgttcccaagttttggtttttatttctcgtctggtattcccggtgtgatgctataagaaatgaggtcaagggtttttcattttttttaagactttgttgctagaaatattagagttgccagaaagttaatatgtgaataatggtggtgaaagttttagttttgggttccggcagcatgaaataaatatctgtaattggtgaattagtagaatattaatggaaatacagcgaggcttagtaaaaccctggtagtgttaaatgtaacctagttttaggatctttttatatgagagaattgaagtgagtttttagaattgataatgaaggatgccagtttttactagtgtatcttactagctaagtgtttggaattaaatgtggtgatttgctgatgatttcattttacacgggggaattaaatgtgctatttcaaatttcatttgagtcttctaatacattaagctcggattccagggcccaaaggattgggttggaatgaagattgttttgattatggaatacggggttaagtttctgtttcatggattcgagttattgtagattggtagtatggaataattggttgttactgatagctgtattctaattatttgaaatggagattgttttgattatggcttctcggattaagtttctgtttcatggataggagttattgtagaattgcagtgtttgcaataccgtgacaaaatgcagactttgtggtgcagattggcgtgtaattggctttggacatgttctgatgttgttatagtcgttttctacaggttaggaaggttgat

SEQ ID NO: 59615 - DNA, 528 bp, Populus trichocarpa
  Intron number 1 from transcript POPTR_0010s14880.1 (locus POPTR_0010s14880) derived from phytozome v7.0 (chr-ID scaf fold_10; pos 14353809 to 14354336)
ttcttggcagtgtttgggaacgcggttcaacctgcgtttccaaaaattagaattttttttttaaatttaatatagtttgtatgttttagatcgttttgatgtgttaatgtcaaaaatgatttttaaaaaataaaaaaacctcattggcatgcattttggcacgaaaagttatttgaaaagcacccgcaaccacactgccaaacacgcttaaagttgctgatggcagtgctaagaagcatagtttttatttttttccaggctcggtggccggtccggttcaagatcctggttttgaccgggttactgagttttgaccgggttgtctaggtcatttaatttttttttaaatcaaaacgacatcattttagtaaaaaaaaattaacgggtcgcaaccgggtttttgactgggtcttgccaggtcaacaaggtcacatcaagttttttttttctgtttttttttaatctggtctggtttcaaccccggattggctaggttccaaatcgatctatcataccgggtcgggtttt

SEQ ID NO: 59616 - DNA, 268 bp, Populus trichocarpa
  Intron number 3 from transcript POPTR_0002s22250.1 (locus POPTR_0002s22250) derived from phytozome v7.0 (chr-ID scaf fold_2; pos 18934041 to 18934308)
aggcatacaaggaccagttgcagtgaccaggataggtacaagtgatatgcatcttgtgctatgtaatgctaattaatggtcataaaaaatagaaactttgtataaatgcagcagtgactagctttatcagggaagaactagatcatctcagttctacacgcaaaaaaaaaagaaaaagaaaaggctgaatctctgatatggatctttggtttcttgtttttgaacccacgcagcaaccaaggagttaatcttcctgagagcccgtttg

SEQ ID NO: 59617 - DNA, 473 bp, Populus trichocarpa
  Intron number 3 from transcript POPTR_0002s01100.1 (locus POPTR_0002s01100) derived from phytozome v7.0 (chr-ID scaf fold_2; pos 585195 to 585667)
tacccctgtgctgtcaacaaaagagggttatcggagtaagtgttcttaaatccttactagtgtcttaatcttaatcttaatctcttgcttggttcctgagaaaatgaaggaaaagtaaagaaagtaggcacttggtggtgtggagttttctttctttatttttaattgattttcctgggtcttgaatgatgaaaagtttgaatctttcttttttttgcttgtgtcttgtctttgattacttctgaaaatgttttgtctgttttacaatttagaagagaaggtatttgtattaagaacccaccaattccagtgcatcgacctatcactaggtcagtaactaattgaccttttgtttgatgttgaaggtgctgtttttgatgtcaatgaattgatcttttaactgaatctttttgggtgtaattcatgatgtttgtttaggaagttcgctgcccagcttgctaacaagcagcagc

SEQ ID NO: 59618 - DNA, 435 bp, Populus trichocarpa
  Intron number 1 from transcript POPTR_0002s23480.1 (locus POPTR_0002s23480) derived from phytozome v7.0 (chr-ID scaf fold_2; pos 21007434 to 21007868 reverse strand)
aaattaatttcctctcctctttacaatctgtgtgcgtaagagaatcccttcccttcttcttctccttctccttcttgtgtgttttttttttctttttttttttaaatttttgtcgagtaatttagtaacagttagttgttaacttatttcccatgatttttgttttgtaattttaatttattttcttcctttttttgggtgctaaatatattttatttttggttaatcttaataatctagtacagtaaattaatccttgaaattgtcaagtattttttagttattccttgagttggatttttttttaaatattccatgaatataactaatatatattataattacaaagacaattgataattaatctcttggaagttgattttgattttgatttttatttttggaacagacaatatataaatagataaatagtgt

SEQ ID NO: 59619 - DNA, 858 bp, Populus trichocarpa
  Intron number 1 from transcript POPTR_0010s15450.1 (locus POPTR_0010s15450) derived from phytozome v7.0 (chr-ID scaf fold_10; pos 14688177 to 14689034 reverse strand)
gcacgctttaaacttgccaattctatcgaagtcaggtacggtctcgttaattttcactctttatgtactgcgtgattattacttttatgctttgatggtccatgaaatgttagggttcccaaccttttagagaaattttggatcggaattgaacgtgtagccttttaattctcttttattgagctgagaaatcctattttcgatagtttgagagggatttgctatttctaattttgttgttctgcatttagttgacttgcagaaaagaaaatggtttaatctgattaattgagcttacaaagcaagaattacacacggattttctattggatgttgaattcggtaattgcaccttggcttcgattttcagatattggaatttgctttccctggaatggattgaagttgactgttattttaaagggtgtttatttaactgaatatgttggtagagtgaagatagattttaggtaaacacgaaaacttatacaaggtatatagtaaagctacctgttcagtaattttacagtcgggtttgattgatagaattacttgttcttgacattgaagtaattttttaagggttgtaaatgcaagttgatatacttgatctaataatgatgagaaagaaagtggtgttatagatgcttgcatgttatgcagaggcaggttacagatgctgctcactacctagttttattttaggaccgggattaaagtatttgactggaattagtggtgcactagttttcattttttaagattctatagatttgatttattttttccctggcccagtattgagtgtccttgcaatttacaggctttttttgtctgtaaaaatatagtcaaagttac

SEQ ID NO: 59620 - DNA, 1012 bp, Populus trichocarpa
  Intron number 1 from transcript POPTR_0010s24560.2 (locus POPTR_0010s24560) derived from phytozome v7.0 (chr-ID scaf fold_10; pos 20718637 to 20719648)
acttctttctaggtctcatcggtcaatttttctttgtaagatctcttgccttttgctcttctttacgtggtgtatttatcttgttttgtttttgtttttgtttttgttgtatctctgatctgttattgtcagctttttatatgttcccttttgatcttgatatgctatatagaagtttcttcgtttccttttttactgttgttgtttgataaaattctgtatcttggatccagggaactttattttttcttgtttcgaatcgaaaaacgcagtgaaaaacatggtaataatctgtttaagtcagcctagtatgagcaaatctactggggtggttttggggtttgtgttgcggatgacaaaatctgctgtctttaaagtggatgaaatcttgtcatcatcgattgtagaaaaagattttctgaattgcctgtaatttgtgatcacagctaaaatattgtggaattattctgatggccaagaatcaattgtctctaatacagcttgtgaagagcacgagtcctttaaaaggaaaaaaaaccatcgattttgcctggcttgatggtttgaagggaattattttcactttaagctcaagggtcttttatttgctcttgagtatgtttcttgctgagtagacctattgattagtcatgagtgtttatcatatagttctccctggaactattttctcggtgatctagaaatggtgatagtatcaccttcatcaaaaagattttctttgggacattcccttgtactgcccttttacggtgtagcagctatagatcatttatctgactgcaccttttactgttcggacatttttttactcatgaatcaatgatagaatcacattggattctctcgtttaccttggcaagtattgtgtctatttccttcaagtatcacgtatttgaaacctgcgatgagactatgaaaggaaagaaagctatgcttgacagtaactgattatccactaaatgttcttaattgccctagtgcaggtggaaat

SEQ ID NO: 59621 - DNA, 786 bp, Populus trichocarpa
  Intron number 1 from transcript POPTR_0010s21020.1 (locus POPTR_0010s21020) derived from phytozome v7.0 (chr-ID scaf fold_10; pos 18453425 to 18454210 reverse strand)
aaaatctcaccatttcgagctctgatcttgcataggtaatggttccccagcttccattacgttattttcttagcgttcactctgacttaattctttacaatttttttcacatgcaccataaatgtgttatcattttggtgtttgatttggttttagtgtttactagtgttttttttttttaaatattaatcccagagtttcttttcactgatctgctgattatccatgttttatgttttattcacggtgattgagatacagttgttatagattccgtgtccttaaaaaactgttttagcctgcgttgttttatcccgagctctgtttggttcctgggaaagtttatgtataagagaaaattgtttggaatttaaggaaataaaatgcactttgccatttttttcctgtctgtatctaatttttagtgctttaatttatgttgtttttttttcacatttttttccctgttaagcaaacggagtttaattactagtaatttctgtgattatttgacttctacaattttttattaaaagttatttgacaaattgacatctagccatatgatgtcttgcatgtataattttttttttcactcattttacatttgggcttttgaatttctgcttgggcatatgttgatgatatttatgatatcgttatgtatctttgtccagctttctgctgttaagagtaagaaaaagattctattcacatcatgggtatttcttaacatttccttacaccccaggtactcctttgatacatccaagtgcgaagctcaat

SEQ ID NO: 59622 - DNA, 807 bp, Populus trichocarpa; identical to SEQ ID NO: 58168
  Intron number 1 from transcript POPTR_0010s22880.1 (locus POPTR_0010s22880) derived from phytozome v7.0 (chr-ID scaf fold_10; pos 19630738 to 19631544 reverse strand)

SEQ ID NO: 59623 - DNA, 457 bp, Populus trichocarpa
  Intron number 1 from transcript POPTR_0002s05550.1 (locus POPTR_0002s05550) derived from phytozome v7.0 (chr-ID scaf fold_2; pos 3636148 to 3636604 reverse strand)
ctttcttgctaatctacgaggtgcgtttaccccccccccccacattgaacttctagttttgatttggtatttaattgatcatagccataaattgggttttcttctcagtgcatttcattgggttttcttctcagtgcatttcattgattagtgcgaatgtttatgagtgatgggagtttgtttatagtctctattttgttgtttgttattataattgggatgcttgagacggcccttttattttattttttatgaatctcagtgaaatgtgaattctttcaaattagttattcctgtagggattagttgagtgattcaaagatcattaccatcaaaacttcatcattgattgctaatttcctgtgattatcaagagaaatcgtgtcgaattattatctttatgtgcatacagtaattttttttttgtttgtttccgctatgctcagagtacctgtct

SEQ ID NO: 59624 - DNA, 1025 bp, Populus trichocarpa
  Intron number 2 from transcript POPTR_0002s03720.1 (locus POPTR_0002s03720) derived from phytozome v7.0 (chr-ID scaf fold_2; pos 2311242 to 2312266)
caaaattctactagaggtatttgcactgctattttcgacttctagccaagtttactttcagctttcgaattcaaaaccagattaaatgcaaagggtgatcaaactcttaagaaatcatattatatagcactgaatttacttgtattttccttttatttttggttttggttttggttttgagttttttcgagtagaaaagaagggacatgtgatttggttcgttatggtggtttgtatggaaatggaacttagtgagataactaaagaagctcaaatgggtcgtgtttccatttgctgaactgttagctggggtgtttagattcaagaacctggtaccaccttctattatttggattatgaagtgaaatgggccggcctgttagttgttgaaagccaagggatggcattggatttttgttttgggtaacccaaaaagctacttcagggtaggtcctcctctgggaagttgaatgattgtcaataatgatggtcgagggtggaggaaatggtgggaacttatatatgatgcaagctttattgcaacttactgtgccatcatgcaaagacgagatcttctcaaataaaaaataaaggaaatagaatgatgcagtttcctcatatggatgctatattagagacagactagagcttctgtggtacaagtgcatcaaatttatggacccatcaagttcttgccttcacttgtcttaacctattgaatgatcacataagtttgaaaaacatggaagacaattttgtaaagctcttgattttgggatcctttttggactgccaagagcacagggtcttaaatggtattttgggtgtggctggcactgtcattttacattctccatgtcattgaatcccaagatgtaattatggagggagaattaaactatcttctggttatcatcctgttagattacaaggcgggaaacttttttgaatctcatgttattgttttttctggctttcaccttgattcaggtttagagaaggaaatcggagcactgcagctagaa

SEQ ID NO: 59625 - DNA, 337 bp, Populus trichocarpa
  Intron number 2 from transcript POPTR_0001s28740.1 (locus POPTR_0001s28740) derived from phytozome v7.0 (chr-ID scaf fold_1; pos 27505603 to 27505939)
gcctctcagggcttgcaccaaggggtatctttattatttctttcttttcttttttttatttctcttcaagccctaatagcatctggttatggactcttgattaaagaattactctttaattattataagcttgtgattgaagagaattaaaaattcccatttttagtttcaaattttcaatgaaatttttgatagatgatagcttaaagttttaagctttttagttttgataatggctgaagttactggaaaatgtgtgtttttgtttgaggtagactttgacactgttattcgattatgttaagttgattttaatttttgggtttgtttgagcagg

SEQ ID NO: 59626 - DNA, 669 bp, Populus trichocarpa
  Intron number 1 from transcript POPTR_0001s30950.1 (locus POPTR_0001s30950) derived from phytozome v7.0 (chr-ID scaf fold_1; pos 29371475 to 29372143 reverse strand)
ggctgtcgcccctgttaaagatcaaggccagtgtggtatgtttttgtttcttttttcctttttctgtttgtttttatcaacaggatgtcgttggacagcaaacttgctgggtctgaggctcatgaaaaataatttcatcccagattttccttctttgtgtgtgtgtgtgtgtgtgtgtgtgttattttggggatttagatttggtaaccggcgtgggaccaggggcatatttttctccaaggatgttcttattttgggtcttctctgcttgaccaagaaactatcgctatcatttgctattgttatacgtctgtttgttttttcttcgactagatatttggtgggagcaactcttgctttttctccggatttgattaagtataatttgaattttttgattttctggatgacatctttattctttaggttttaaagataagatcagctagaagtcggactatttgattcatgttttatggtaactgaatttggtttaggtaggagtatttgatgtcccacacgcagattgaacagtttggtgtctaattttggcagctacaaaattttatgaaagcgttctgtttggctcaggctaatttctaatgtaaagttttattttgtttttttattaaagggagttgctgggcattctccactgttggagcggtg

SEQ ID NO: 59627 - DNA, 528 bp, Populus trichocarpa
  Intron number 3 from transcript POPTR_0001s25730.1 (locus POPTR_0001s25730) derived from phytozome v7.0 (chr-ID scaf fold_1; pos 24784344 to 24784871)
gaagcagtgtttagttgattgggcaaaagaggtaagtagaactgaatttattgtttttagaataaatgatttggtttcttttgaatagatgttgtgaatttattgagttagggttgattttctgtatattgacataagaaaacaacatggatgcttgtaatctcccctttgtgctgtggtctttccttgcctttttgacctttatacaccaatgaattacggtgctttttacgccagtttattattgtttgtagaaatgaacgagtggaagaacttaggtcacttagtttcttgaactcaataaccgaattatagtaattaatcgccttataatgtgcgctcccaatgcttttcttattttttgcttgttgctgtgcgtttgctttttcctaattgtcaatgctcatcaagttattatcctatcaggctgggtttcagcctccggatgtactgaccatgaattgcacttcattaacaaaaacatctgaaatcttcaagaaggtatggacggacagttctttccactga

SEQ ID NO: 59628 - DNA, 552 bp, Populus trichocarpa
  Intron number 1 from transcript POPTR_0001s10480.1 (locus POPTR_0001s10480) derived from phytozome v7.0 (chr-ID scaf fold_1; pos 8132095 to 8132646)
tttctacttcttgcttgcatttgttggggctacaagtaagtttctttctccatatttttgtgtgtgtatgtgcaaattttgattctgttttttttttttttttgtgcttgaagtttctgaaatttctgggtggtgaattttgaagtttaggacttttaattatttggtggattaaatgtagaaattagtaaaagtggaactgactctagaagttcttgtgaatgaacggattaagggaaacagccaaacttgttcctttaaaaagaagaaattgttatgcaattggcattgtactggtgccattaatgagatatgatgttgtatagtaggatcaaaacttgagaattaacttgatatatgttgatgtataattttggtggagttttaacacacatccttctgcctgaaatttttcctggttaacttaatatttcttgctctatacatgtttgggatgtttattgttgtcaacagcttttgtaagctaaatgtctttcttcgtaattgtaccttggtggcttcacttctgttgagcagtcccggctagaattt

SEQ ID NO: 59629 - DNA, 493 bp, Populus trichocarpa
  Intron number 1 from transcript POPTR_0001s42770.1 (locus POPTR_0001s42770) derived from phytozome v7.0 (chr-ID scaf fold_1; pos 42781650 to 42782142)
aatctaggttctgggcagattttgttgataagaaggtaaattatttttttgtaaataaatataaagggttcatcttttgtgttttgtattattgtttggttttgagccatgacctgattaaacccacattgcaatttgattagtttgaattttacatcgccagtacaattagcctgaagaataatatcaaattatggaagaaattaggcatcacgatatggaatggtggagaagtctgatcattataagaaattagccattaaggtttctgatcatttcatttttgatgaactatattttcattcttgtgagttcatgagagttaaagtagatgtttctgtataaggatcaccaaattgattggatccaattgctttaagacgcaccaagataactttaagaaatgacatatttaatgcattaaagacaagattatggacttaggtgatgatactttaattaattgatagtgacaatatgaaccttcagttat

SEQ ID NO: 59630 - DNA, 484 bp, Populus trichocarpa
  Intron number 1 from transcript POPTR_0001s09300.1 (locus POPTR_0001s09300) derived from phytozome v7.0 (chr-ID scaf fold_1; pos 7101728 to 7102211 reverse strand)
tgggagtggaaggaagcagcaattggcgactcttggcaagtatttgaattagattattttgtagttatatgctattgtaagttattaatatgaaatcttattggcatttaatgtggtttaataatcagttataatgcagggaattcacacttgcttaatattaggaagtaatgaattgtgctcaatagtgatcttgtcattttattttcatcgaagtatttaatttgcaatgttctgcgtttgttatcataattttgcttggacgtaaatgctaagcttttatccatttaattgccttgctctattctttcaaagctgttgccatctgtcaattaaatcttttgaatgcttcttgtcttaatgcagttttaatctgtctttgatgttaaatttgattttgatatctgtgttgtctttaatatatctatggcttgttgatttcttctaattttctaaaatgtttttaattgatattgcaaggtga

SEQ ID NO: 59631 - DNA, 474 bp, Populus trichocarpa
  Intron number 1 from transcript POPTR_0002s20510.1 (locus POPTR_0002s20510) derived from phytozome v7.0 (chr-ID scaf fold_2; pos 16582091 to 16582564)
cttgtcagctgatgatacatcattaacagattggcacttgggatttcatatttttttggtatctctaagctctctcttcctacgtttatgttcaccttcacagaacagtcaatactaaaaccatgcttttattgcttctgttctatcctatttgcttatcaatgaaaatggttggatgatgatagcaatactggcaatgatcagttaagaaggaaaaaaaagaaaaggcatacatgcgtcgataagaaggattcgagctttcttctcaggcccttttcttgatagataactatagtgggcgacattaatagctctgtattgtatttaattcattttgccaaattcttttatatatgtagatagaatagaccttttccacttcgttgaacaatataatccatagcaaagtgtgtatactgaattttgatttctttctatgtaggaatcatctgaatttcacaaaagatcatttga

SEQ ID NO: 59632 - DNA, 1056 bp, Populus trichocarpa
  Intron number 2 from transcript POPTR_0001s26640.1 (locus POPTR_0001s26640) derived from phytozome v7.0 (chr-ID scaf fold_1; pos 25623185 to 25624240)
tcatactctctggtctcattgttaatctcatccaggtcattcattattaatcaccctttactttcttggtttctttgtcgttagttatgcttcttggtttttatttggatgtttctttgatgctttcttgtctataagggatttatcaagtttgcgttacttgggaatttgtcaatacggaagaagttcggatctatataatgtgtatcaccccaattgaggcaaacggtaatatatgcctttccaagttaaatgtgtcttctgggaatgacgcataatcaattaaggatataaagctgtgatctttgatgactctgggtcacgcacctgtaatttttttgtttgtgattgttcaatatctaaaactagttcatccaaggaaaatgcctttcttccgtgtttgattggctctgattattctacccattattgcagtaaacgattttggtttcagaactttattaagaagagtcgtatgaacccattggcaatgaaacatactatctctggtctgggatttttcattagaaagcaactctagaacaatcaaaaagaaatgatgtgatttgtctgtactgcctaaatcagcaaaaacaaaataagatcttgcagatcttgtaatgaggtgaatgaatatcttgtataggtgacttattttgtttggcctcatggtatctttctaatgactctgtctatttactaaggttatatgggttttgttccatttcataatatatgtctctagttatctccccttaaattccaatgcttttctgtttatttgaaaaacagggatccttagtcttgaaaatgactgtcaatcatgggtttagtttttcacttctttatgaaatttttatcatggtctatgtttctctattttgttttccttctcaagctcccgacctccgaacaccaccgtcacgagtcaggggaaaataaaaaagctatgaatgatatcttttaaccttttgctatcgtaatctatttcttgcttttactcatatcttgcacttcgcaggcagttcttttcatccttgttcgtcccgtgtccaa

SEQ ID NO: 59633 - DNA, 684 bp, Populus trichocarpa
  Intron number 1 from transcript POPTR_0010s23010.2 (locus POPTR_0010s23010) derived from phytozome v7.0 (chr-ID scaf fold_10; pos 19708140 to 19708823 reverse strand)
tcactcctaccgccctctctacctctctctataaggtaatgcactactcgttggttaatagtactgcttctgtatctgggctgcttggttttgctttgtttgtgagaaactgagcacttcctttgggttttcaaactgttattgaatgtgaatttcaagtgtcggcgggattacattctgttggctgctgggtttttcttttctccgagagaaattcagcattgttttgggttttgggcgggaaaccatttgtgttttggctctgcgtttttggtggttttgagcttaattagttgttctgtttctcaaattgggttttaaattgcttttcaaacgtgaatttcaaatgccggcatggtttatttcacttgagggttaattgcttactttagatgaatggcaaccttgtttggctgctgtgaaacaaaggaaagaactcgagaaaactcactgtattttcccgatttcagagccaaactgggttcccttctctgctttcctcaaatttgttggcaatcaaattaagcataaaactaagatatttcctcgaacaaattccaagaattcgagtaggttcatttcattgtttgtccattagcatttcataaacaacaattaagcatcaattaattatatatttgttttgcaggaatttgaaagcacaaacttccaaaattcgaataa

SEQ ID NO: 59634 - DNA, 764 bp, Populus trichocarpa
  Intron number 2 from transcript POPTR_0001s46490.1 (locus POPTR_0001s46490) derived from phytozome v7.0 (chr-ID scaf fold_1; pos 46861022 to 46861785)
gggatcaagagaaggtaagtgattcttaaagttagttgtgccacttgtttctatgaatttaatacagttgaattttgatttctatgcatcttttagtgtgagctatttttttatttattaaatcttgacttcattaattgaagttgatgatgataataaatagtataatcataggagtggtgatgaacaggatctaaggaatctagggttttgacataaagtatatgtactagctagtcttttgattgattacatggataggttcttgataggggtagcaaacaccttcacttttcagatgagattgttcactgactgtctacattacacaaaatctttgatggggtttaatcaagtaacctgaaaaggttgcctaactgtgtcataatagcattcacagacatagctttcatgctagtagttatctcaagcaacttttcatttatttatttgcttatattcctcaactgatcacctgaaaagatagctatatgtgtgcttgaatgatgtatagtcggttgtctttagggatttgccatccctttcaagcttcttatagacgaaaaaaaactcaaattcatgcattcattcctgccccagaatggaaattgaatcatttgatatttgtttattgcctcttcatcatcattttcagtgaattcttctatcttgagccttggattttggaaaggtaaggaaagactaaggatttttgtgttgttatttcaggaagagtcaggcaaagaaggtggtttgtattccag

SEQ ID NO: 59635 - DNA, 563 bp, Populus trichocarpa
  Intron number 1 from transcript POPTR_0001s23670.1 (locus POPTR_0001s23670) derived from phytozome v7.0 (chr-ID scaf fold_1; pos 23049741 to 23050303)
gaagaagacctgagctgttcatctgctccatacaggtgcttatcctattcttttcttttctttttcaatttcttgattattattgttgttattgtttgattgtgtttttgcttacaatcttggtcttatttacattcttgggcctcaaaagattaatggggggtttttttttctgtttgcttgaaaaaaaagattaaaaatatagaggggagaactttcagtttctgggttttgttttttagtgactaaatcaatgattgagctggttttggattttttttcattttggtgggagttcgatttggtttggattttaattgtttttttttttaagctgattttgaatttcttttttgggtatgcagggagggtttagtttagtaaagtttagatttttttccccctcttatttactgatttagagagtgacaattgtctcaattaatttttgtttttagggagtttaagataatgggaaatttcagtttctgggtgagttaaagattgtgtttttattgttctttgcagggtagggtatattgagattttggtttttgttgtag

SEQ ID NO: 59636 - DNA, 452 bp, Populus trichocarpa
  Intron number 1 from transcript POPTR_0001s32940.1 (locus POPTR_0001s32940) derived from phytozome v7.0 (chr-ID scaf fold_1; pos 31211200 to 31211651 reverse strand)
gcttcagaaaactctatcaggtttgtccacacttggcttaattttcatcagttatgctatctttgaattcatttcttgttctaaacattggtagaaaccacaagtagggaacgagtggcacaaggcaagttcaaaactatagatattaacccaggaaacctgaaagcttatatgcaaatatataatgatggttcatgccacatttttttttttaatactcaaatgaatgcttcaaatactctgtaacatttcctggccatgtggtttggagttgtaactagaaccactcaatcaatgttcttgctttggtaacacaaatgcacagcaaaaatgttacttcttgacattcactgctatttacttttccattaaaaaaagaagaagaagaagacgtttcctgctatggaaaggttttctgagcctcttggaatggttttctcgttattgcagac

SEQ ID NO: 59637 - DNA, 725 bp, Populus trichocarpa
  Intron number 1 from transcript POPTR_0002s21880.1 (locus POPTR_0002s21880) derived from phytozome v7.0 (chr-ID scaf fold_2; pos 18565634 to 18566358)
caagagtttcactatcaataagccataaaggtaggatttctcctcaacttatttttctaataataagaaacgaggaaagaaaattcaaataaggatatattttacttatgcacggtctacttggtaaattccctacaacatttcaggctagtaatatcacaaaatacagtacaagcagcagccatttttcctcgatgatatctgtttctgatatctattattctcagttagttgtagcttttgatatgaaatttgtttttatgttgtgggtaaaatttgaatatttttatagtcaacggagacaattatttattcattgttttaggaattccttcctcctcagttttgccttccatcagagctaatcttttgatgggatagacaccaatttaaattttggccgacctctgtttgtgccacaatccaaacgggtgccaggaaagaagctaatttactactattattggaaggggatccttcatatatctcatgaagcttatcagtactgttatttagtgccttcttgtatttgtagttcttaggaaacaagacgtttaaatcgaaaaggacatgctttttctcttgtttcttctttgcactcccaactaaatagaagttgaggtgctgtactgctaaatcaagcaaggaggtttattgggatggcatcaagaaattctttggaaattatagtcatttatattcttattcctgcattctatttctac

SEQ ID NO: 59638 - DNA, 984 bp, Populus trichocarpa
  Intron number 1 from transcript POPTR_0001s05590.1 (locus POPTR_0001s05590) derived from phytozome v7.0 (chr-ID scaf fold_1; pos 4316270 to 4317253)
tcacagctctccatcatcgtagttttctcttcaaggtgcgtgttttcacctctaaatctcttctttagcatcttctctgaaatgggttgtcttttaaatctctgagtttcattgatttttctgttataattagcgctgactttagatagatcaaatctacaaattcccatatattgatgtacttacatgtgtttgcgtgaattgtttcttggaatgatctttagggcatgattgttaattggttgtgactttcttagagctgtattgataattgtttgaggaaaataacagctttgattggatttggtgctttaaatttgtgttctagaatgtaattgaaagataggttttgaatatctgcttggcccttttttgggtttttattgccttggccatctcattaacttgtggttttgttttgttttgttctgtcccgtagtcataggaatgatgggttcttggattttctttgagatggatgcagtttcaagaaaaaagaaaaaagcttattttcccatattcttgataaattggtaatcagttaccagtaattgtgcattaatttttgctctggaaataaccatgatctttttggtggatttcttgtttacatgagccaggatgattaaacattgtgagcaatggtgcgtgtaaacgattcttgttgaatggacattcgtctttctgatgttcttacttcattgcatgttgtaatgctctagttaatcattaacccggaaaacaagctatagatgatgctttattcctggtgagcaaaaagaggttagaatggaagcttttaaacagggaagcgatgtattttttttgcctgggcttgacttcttggtcatctttttgtccagaatttgctatcttatgaatgatgatctgaattaatcatgaaaaaataatgttatccttccctttgtgaaaatgtgcttaccaattttttattctttaatgaagagcaccagttgaaacagc

SEQ ID NO: 59639 - DNA, 1047 bp, Populus trichocarpa
  Intron number 1 from transcript POPTR_0001s17010.1 (locus POPTR_0001s17010) derived from phytozome v7.0 (chr-ID scaf fold_1; pos 13834205 to 13835251)
tttctgcttctgttcaaggtaagttgagtcgacgacaacgactgtcaggattcgattttttctctctcctttctttttctgctttcatagtgtttctgtgtcaagattaggaagttttttgaaagataatttacgccttcacggtttctttatgtgagtctatcttgtaaaatataagctatggactaaagtgtaaaacgtgaaagtttcttccttttgaaattagttattgggatttttttctcttaaaacaagtgttctcacttgttttgtaaatacaattttgcttggttgtttcctagaattcacgtgctagtcaaaagcttttgctttttgtttttccacttcaagaaatatagatctctctttctttctctcccagctaatctggtcttgtattattgtttctctcaaagattatgtgaactcattttgatgtctttcttgttttcttgtgagagtacttttttttctttatgggtattaatctggcattgactggtttgttggggtctttcatagtttagagttatcctccactcatggtcttttaacttgggattgggtttttagagaaaggttccttttgtggaaaaaaagcagtctgcttttctttttaatgtaatgaagtgatcaatacttacacatatatgcctgtttcatttttgtttttttatctctgctctttacattgtcttggtgatctgtttggtttttgagaaaatgcagaaaaagcgaagaattgtgtatagtcacttcaaaccaagcccaattattgcatctggctttgtttattttcttttactgtatttcctcattaaccgaacagaggctaaatatcattccatggcttttttcttattccctgtgatttttattgtaaaagtacagagggatcagataaaataattcaatttagagagctttccatttagtaaaactaacctttcggttctgtcttctattttttttttccctctgttggtttttgattcagttattttttatgcaggaaaaaggactggttttgatcaattgaagggagat

SEQ ID NO: 59640 - DNA, 749 bp, Populus trichocarpa
  Intron number 2 from transcript POPTR_0002s10800.1 (locus POPTR_0002s10800) derived from phytozome v7.0 (chr-ID scaf fold_2; pos 7840071 to 7840819 reverse strand)
gccagccaaccaagtacaaaaacttctctacctaggtacaattctaaaggacccaatctatcacccagtttgatcagagaatctagtaggctcctttttcatagtgctgttatttttttcagtttgccttttgtaatgctgctgttttactgaattaagaaatttatgatctcccaagtgaaatgagcatcttaaagtcttggataatccctatcagtttcaaacatttcttggcatattccagtcactgccctttcattgcccaaggcttttgtggattttcagtttttggaaattatcctttctgattcctagcaatgtctcgtgtattgatggttggaaaataaatgataatttgaagtgacaatttatgagttaattatattgagttgccaggaacacatctttgctaccataaattgaatacacgctatattgttagaatcacctttatgaaatcgtaacatttgtttcactggttatacacatcaagggtgagaggtgttaagagctgttcttgcctttaaagtttctttatgctgaggtgcttgtaaatcaatgaaaaagcacctcaaaaggtttgtttttggatgatcgacgacgaggttgcttgcttacatgttttgatgaccgacccatgactttttttatgagtcaattttgttgcactatatgttgcagataagggtttcatttacttcattgcactgcattttgcagatcaacgcttgcaattcttggtcttgtaa

SEQ ID NO: 59641 - DNA, 919 bp, Populus trichocarpa
  Intron number 2 from transcript POPTR_0001s03570.1 (locus POPTR_0001s03570) derived from phytozome v7.0 (chr-ID scaf fold_1; pos 2859032 to 2859950 reverse strand)
tatattctgggattaagggtttctccttctcacaggtcactctctttctctctcaagaaattgttttatatacctctttgtttttcgcaatcatttgcgtttaattggccctcttccgttacttgattagagcagcataagaagtgcaatcaaacaaacgttactttcacaagatttaagtgtccttttggtggttatggtgagcacaaagtgctccatggaaagggcaaaactatcaccagaaaacctttcttttggtgtgtgggttctccttagccactgcacctgactaatccgcagccctactttgtgaaatttaacagtttctttctcgaattacttttgtgggtttctacgaaccattcccaccccacaaaacacgattagattcgactataaagagagaacatttgttcctcgtatcatggaatgaggcaaatgcaagctagcctggcattgacacatgtatccaatgcaaagacttcctttatcttagaaaaaagctttaagacaattagatttcttgtttgtttccactttgtgaccaattaaaattactttactcgacataatatatatatggtccaccactaatgtcgatatatccacttccttccatacaatataataatagttttgattaatttacaagcatatgccattaatatgcctaatttattacttgggcaaaagcttagatgatcacaaattctctttttttttaaatctataatggtccttgtcatcttcaaaaatgttccctacttttgcttaaacgaacccaccttaccttttatgctcacattggacaaaaaccaacaaacaattatatcacgcttttatatattttcttaattaattcttagtattcggcaatgttgcaggaggcttggcattggcacaaaattggttcaagaaa

SEQ ID NO: 59642 - DNA, 299 bp, Populus trichocarpa
  Intron number 1 from transcript POPTR_0001s03570.1 (locus POPTR_0001s03570) derived from phytozome v7.0 (chr-ID scaf fold_1; pos 2860042 to 2860340 reverse strand)
ctagtaagtagtaattcatcaattctcattagtcccacttctttttttcctttttacatgacactcaagtttgtgaaaagagaaacgtacacaaattattccctgttgcatgatcacataatctgtaggtcaagatttaagcaacaaaaatcaagtttgaatgtgtgtgtgacttaatggtgtatttctgaagaggaaggaagaggcttgcattgtggttatataggcattgccttttttctttttttccattctgtagtgacaaaagtcatgtttatatcattaaaacaggttgctga

SEQ ID NO: 59643 - DNA, 527 bp, Populus trichocarpa
  Intron number 2 from transcript POPTR_0001s15990.1 (locus POPTR_0001s15990) derived from phytozome v7.0 (chr-ID scaf fold_1; pos 12825701 to 12826227 reverse strand)
tgcgactgccggctgctggagctgggaacctagtacgcccaccccccacaaagatttctgaatttctcatagaaatacaatctatgtcactcctggcttgtttgttttacttgtgtgaatctgtcatcatacattttgctaaagtaatcataagggtaacccaggtggcaggacaggcttctaagattggtacaagtgagtcaacattttgtacgactccagcttgtgatcgatctattttctacttctagatgttttgctgttttgaatggttaatctatttctaatgtggacttggaaaatatacataacttggagtgaaaaaagacacctctcctggaagcttgaacgttgatttttatgactctgttaatttcttttctttcttgtgggtgcaatttctgatatcaagctggttgtagactatgtcaactacatgtatgaattttgattttttggaagacttacgaccagtttaatatcattttttggtgaccagattagcggagggacattaacagcatcgg

SEQ ID NO: 59644 - DNA, 457 bp, Populus trichocarpa
  Intron number 1 from transcript POPTR_0002s04385.2 (locus POPTR_0002s04385) derived from phytozome v7.0 (chr-ID scaf fold_2; pos 2735527 to 2735983)
ccttgcatactgcagaacactacagggttttttacgtgagttttttttttttcctaatctctgtttggttgctgagaagaatttgaggaaagttggggttgggcatgtttcgtgttgttctgggtttaaaagttccaggaaagaaaagggttcttttttagaaaagggattatttatttgctttggaaaacgtgttttttttatgctgtaccctgtttggctgctgagaatgtgtaagctgaggtaatgtttatttttctccacaaggttatgtttttaactttgttaaacaagccaagtgtttaatgtggcttttttgcggccaattctctctgttcttgtttttcttgatgggaaaccaaactgggtatttgagttaatttgaactttttttttagtttcgacaaagttcacatggttagttttatgtcgtctaattgttgtttggttgattcag

SEQ ID NO: 59645 - DNA, 494 bp, Populus trichocarpa
  Intron number 3 from transcript POPTR_0001s27470.2 (locus POPTR_0001s27470) derived from phytozome v7.0 (chr-ID scaf fold_1; pos 26379162 to 26379655 reverse strand)
atcaggtacttggtaatttttattcagtttttgtgtttgaaaagaaaagaaaacctatgagataagttttccaaaataacttgtcaggttcttcgtgcttcaggcactgttttaaatgaaaagagatgtaggttgttttgttgatgtattcatccttttccaacatcataatgtaaggttcacactttaataatagtaatgtaaggtgcacactgtaatgaggtggactgcccttgatgtaattgtgaagctcaaaatgctctacttgcgtgcttattgctatggctctattttctatcctttattatccctgcagtctgcactattgatgaatgaaaatattcatgattccattacacgcttaggtactctgttgaatgttcttagctagcattttcggtttttttctcctgttatttggtttggttatgaaatggtagctgcaacttctcttataattcattttacctttctaatgttgtctattcaggaca

SEQ ID NO: 59646 - DNA, 894 bp, Populus trichocarpa
  Intron number 1 from transcript POPTR_0001s05080.1 (locus POPTR_0001s05080) derived from phytozome v7.0 (chr-ID scaf fold_1; pos 3907124 to 3908017 reverse strand)
ggttttggagtttccgatcattcaggtcagtgactgtagcttttttttttttttgctatgtttgttttgctgataaagttttgatcttagtatttgaattggattgttattgaaaatgagatacgggttcttgataatgtggaagatcaatgcaagtgagtgtgacattttgttaatatctgtagtttttttttgaagatttttatgctgggtttgttgttaatgtgatgttttgtttacaaaattgtattcttgatgcttttattggattgttattgaaagtggattgtggggttttgatgatgcgaaagacctatgtaagaatatgggctcttgagcatgtggaagatcaatgcaagtgagtgtggcattttgttaatttctctagtttgttttgaagattcttatggtgggttggttgttaatgtgatgttttgcttataaagttgtgttcttgatttttgttttggattgttattgaaaatggattgtgggtttttgatgcgaaagacctatgtaagaatagtgactgtaattataaggttgaagtatgttattgagactgagatttgggctttcgatatttgattgagtacttgtataggattgatgaatgtaaagggtaagattttgttagctgtcttcggaaacttattttgtgtctcttaaggaagcaagttacaattttcactttgagagtgcttacaagtgtgttttcataaaaatgatgagttctggattttctaattattcaagtgagatttggttgttgtttaattggttgttttttgtgtgataatctattggtggcatttgctcttttagttatgggatttgtgattgctaatttattattggcattgtggacagcgtcctcttttctacagcttcaag

SEQ ID NO: 59647 - DNA, 720 bp, Populus trichocarpa
  Intron number 1 from transcript POPTR_0001s01590.1 (locus POPTR_0001s01590) derived from phytozome v7.0 (chr-ID scaf fold_1; pos 1185888 to 1186607 reverse strand)
ttccctcttttcgtctgtctccactctcccaccctgtaaggtttatgggtttctttggttttgtttttatatgattattctctcttttattatttattgtatgcatgtttactggcgaaatgccgcaaagaaatgtttttttttcagatttagttattcgtagttcagtctttgcatgaactgttattttcaggtcgtacaatttgtacctcattctatatttgattcaataattttgcaccaaatgccaaccattttttttccgtcttgcaaactggctgacctgaaactaatgcttgtagaattattgtccaaaagggtatagtcattattgccaaggagttgaattctggaaaagaatttgaagaacccatgtctaatttggtctaacacttgactagtcatgcggtgcatcccagccatgttggatataactaacacattagaaatgctagatttcatgtaccttcccatcaaccacttttaaaataggatagagaagctgaaattttgacgggtgagcataattctgttgacttgagttcagctttcccatatgttcccttctttttccctgtaacaatcagcatgattctggaaattttccagttgatgttaaatctgaatcatttgttttttttattatgcaattgttgaattttttttttccttctaagaggattttcgctctggtgtgccttcagttggtgcaagtgcgtc

SEQ ID NO: 59648 - DNA, 532 bp, Populus trichocarpa
  Intron number 1 from transcript POPTR_0007s07940.1 (locus POPTR_0007s07940) derived from phytozome v7.0 (chr-ID scaf fold_7; pos 6438337 to 6438868 reverse strand)
ttattaatctttatcaagattttttggagcagctggtaagtattctttttgttcatgtgcgtgtagtgctgcattagaaattcttggagggtttgttgactgccttttttacttgaatttataagggtaatgggttcatcttatgtttttataatctagttcttttttgttagtgtttttgattgctcaaaatattagaaagcgaaaaattgggactttgaatgttcatttatcattttctttgttcatctggaataattggaatagctaaaggaatagttttttaagggcaaaattgctaatcgtatgtcgatagttctttgccatttatgtttatacattgctgctttacaattttttgggggcttgttgtctgccccttttttggttgaatatttagggagtggcaatgggttcatcttagattttataatcaaattcttgttttagtacagtttatgatttaatgtgaaccaagtctcctcgtttttttgcagcactgtaggagttagtaggagcaaggagctgcaat

SEQ ID NO: 59649 - DNA, 902 bp, Populus trichocarpa
  Intron number 1 from transcript POPTR_0001s26060.1 (locus POPTR_0001s26060) derived from phytozome v7.0 (chr-ID scaf fold_1; pos 25167729 to 25168630)
atcttggtgtatccggttagtatctctttcacttcttgtgtttcttgatcagtctttaaagctttagccttctcttttatgtatatggatcgtgggtacaaaatatctgtcttcacttatcaggtcattaagtttctgtccaaacattagttaattagatgcctttctcttattaaaacatgagcaacttcactatagaatataacgaaattggtagtggtcttggcttatggatttatcatcttctgtatagtaattactaagagcaatgaagaaccaaaaagtcaaacaatttggagacaagttggtttataggcacggcacactctacatcgcttaccagtgccaatcacttgcgacttttgtgaagagcaccacaaatgagccccatcatttgatctttcttttctttgcttctcttttcaatctgataattgcaagggaattgaaataggcaaaatgttttctggagaaaactgttatggcagattatacatacatgtacatgtatggtgttaagacttttctggttaaacgaaattgtgcatgcagactgatgaaacagaaactttattgatgttattagtacatgtatttttcattttgattagaatatttgcacgatatcctctctcaagatcatagaaattaatatctagagatcagaatataggtaggaccccagcttcactctgttttgttgtataaaaaaaactaagaacaggtttcttttggaggtaacttttaacaaaccgttcacagttcaaagtagatttaatatgctgatatagaatgtttgcattgcacatcggttcatgttcaagcaaaacccactttacactcgttgcaaaagaagacgatagcttaacatgaaaatggttgtttcaggtggagtgacttcc

SEQ ID NO: 59650 - DNA, 617 bp, Populus trichocarpa
  Intron number 1 from transcript POPTR_0010s13880.1 (locus POPTR_0010s13880) derived from phytozome v7.0 (chr-ID scaf fold_10; pos 13591804 to 13592420)
aatatcgagacctggccaagcttaaaaccaaaaaggtactctctttctttctttctcttgattgatcctttttttttccttattatatcacgtgggtttttactgggatttagttttggtttgtttcttggttggaataagtaaatgggtttcctctttttcaattttcatcatgtgaatcactggtgatgccaattattggttctcgataacttcatgtcagggtggttttccttatttcgtggcttgactggggtagaaaactgaaatgctagtttgatgcttagggagtgaaatgcaactagactggaaagggacttgaattaaataaccggacattttagattttatgaaaattgaatttcattgatttcaggaaaaatcaacttgctttgattctgatgatgctgcttcaagaaatgaagagggttccctggaaatgattttagcatagaataaatttttgtagatgtatttgcagttgttttatgctatattttgcttctatatttctaggtttctagccattgcgatatataatggctgcacaaaatgcggtttaagttataatctgttttttaaaatgtgttggcaatggaaacagattgtttttgaag

SEQ ID NO: 59651 - DNA, 971 bp, Populus trichocarpa
  Intron number 2 from transcript POPTR_0002s14310.1 (locus POPTR_0002s14310) derived from phytozome v7.0 (chr-ID scaf fold_2; pos 10580114 to 10581084)
gaggtattttttttttgtttttttaattagaaaatactgggttttgattgaaagagaattacatgtttatgatgggttttaatttgatgatttgtcaatgtagtggaattattaatcgtttggtttaacgcgtgcaatatgttttggaagttaagtttaaggttattacgtaccccagtaaaacttgttttatcaagttttttgttggtttggtgttttttatttgtgctcttgtctgataaattagaggtgcgaataatgaagtgggttttctttgtcttctggttctgtttctctgccgagaacacgagggactttaggaatatatggtttgcttgacatttaaattggatgtagaagacacttgggagatcttatttttttgagaaccttgtatttgaaggtcttatgttgcctattctcaatgaggactgatatggtttgtcctattgggccaaaagatagggtattcttctgtttccggagttagttgattgagagtgaatttatgcattgcaccaatgctcctagcttgttttagaactttgaaccctatttcaaggaggaactattgcttcatgagaaaaggtttatatgtagacatttgatctgatatttatatgattttccttgttcttgaaaaacacgtataatgtacttggacaagtatgatttgtgaagtgttcatcatgtgatgctctgcataatgtgatgttcacttgatttgagtttttttctccattgagagagaatatgcaaattgttgcaaggtatctcaataaactattattttcagtttttgtgtttcatggagaaattccgttgaaaacatgttatggttagcctcatgcttggaacatgattgatcattgatatagacttttactgtactatatttttctttcagcaaatgtcaatgacaattccttaatcttgtgtttgctgtgacacagatcaagaacggcttgaat

SEQ ID NO: 59652 - DNA, 932 bp, Populus trichocarpa
  Intron number 1 from transcript POPTR_0002s16230.1 (locus POPTR_0002s16230) derived from phytozome v7.0 (chr-ID scaf fold_2; pos 12133766 to 12134697)
attcagtacagcagcagcagcagcagcctaggcaggtaaggttttttttttcaatttatcaaacttgattaattgatatgtgattagtgaattctagttgtaattaatgtgattgattaatttgaatttttgattaatcatgagtttggatgaggcaaactaggcatgcatttaatttaggagaagattaggtcatttaaactatttttaggtgtaattaagcatccatgtttgcttgaggttttgtttcaagactgaagactaatgacaactaagcgcggggtcggctactgggaattttgtattaccatttggcattccttatctgggcgatgtgtaatttatagttgatcatgtctcttgttttccttgttagtttatgtggatattgtgattttatttttctacttctaactttaacaaaaataaagaagaccctttttttgtttaggatcatgaagttattcatcagaagtattgtagttgatgttcatggtggagtccatctaattttatggttgcagttgcctgttgtgttttgttggctttcatttttgagctgcaattttggatggaggaactaattttttttttcattttgttttgttactgaaagtatatggtgcatttgacataaaaatggacctgtagatccatcatgcatgcagttacagtgctttctcctttagattcttggcaatgtgaaggtgcaatggtaattctaatgttcagttgaccatctttgtgcttgtttctgaatccgattttgtgtacttagtgaattgaatgattgttgtctttagttctaagatttcctcatgtgcaaggggattttgaatcttctttttcaggtgaacttttggtacgtttgttttatatctctaactgtccatgcaggcattacagcaacaattacttagaaaacctgaagg

SEQ ID NO: 59653 - DNA, 672 bp, Populus trichocarpa
  Intron number 1 from transcript POPTR_0010s14270.1 (locus POPTR_0010s14270) derived from phytozome v7.0 (chr-ID scaf fold_10; pos 13937697 to 13938368)
aagaaggtattgaagattggaagagagctcagcaggtatggttttaattttttatttgtttgctcagattggatatgtttattgattatggtttgatgtgtttgtaatgtcttcttgacttctcttaaagtgaagtttcaaattactctctactgattgaatggtattcatatgatttgatgatgaaattttgggattatttttttatttttgtttgatttttttcatgttatttgcttggacatatctgggaaatattttgcatagaagtttaataaggctttagatgacaccgataaacaagatgaaagatcagaactttaactcatttttactgattcatgcatcttatcctagactttgtgtgacttataagaaatattgaaacatcagatacaggatgagccttctgctctctccaagggtaatttgtgctacactagttagcatcgaaactcctgttcccaagaaacaggactatacaaattgcagtccagttgatattggatatgttttacctgcaacttctaaaatgcttccgtgttctcgtgcatgctatcagagatgtctgagtggcaaatgataagtatgcttgatcatctatcctctattgaaatttctcatatctgatttgtactcttttctttcggaatggattctcaggatatcgag

SEQ ID NO: 59654 - DNA, 730 bp, Populus trichocarpa
  Intron number 1 from transcript POPTR_0007s04850.1 (locus POPTR_0007s04850) derived from phytozome v7.0 (chr-ID scaf fold_7; pos 3033183 to 3033912)
gcctgataataaggtcaaagtttcaatccttctatcatttttttttcgatttgcaaatttcttaatgtttggtcattgggtatgcgaatctgtgaagtttaaatctcttgacttttccttaatggtgaaaagatcttctccattttgtaaagtttgttgcttttttaacatactggccgtgccaatggtgttgtttctcatgggtttatttgcatttgattgtttgggcagtagaattgtgtaatcttcttgatttgatttttgttaaatttaagcgagtgggtcttcaaagttttcttatattagttctttagttctacttgcactaaactggagttcgtctaaagtcaaggcttgaattctgatatccttagtgtaatttcagcatatttttctttttgttaacaaaaaatgcattttttcttttatacatgtttttttgtttctcaatcgtaaaatcaattcaatgtcttgatataaagtcatgagctttgatggaattgaactcgcaaatttagtaggtatgagaatatcttttttattagagtatgaaaatgcttccacgcgcacacatgcttggatgatgtgtaaacagtatgtggccttttgtctttttgcaaatttgaaactatcttacaagttttagttttgagagatgatgtgttttaaataacatattgtggttttggttacagaagccaaaggtgtgtatactaggtggtggatttgg

SEQ ID NO: 59655 - DNA, 966 bp, Populus trichocarpa
  Intron number 2 from transcript POPTR_0001s06210.1 (locus POPTR_0001s06210) derived from phytozome v7.0 (chr-ID scaf fold_1; pos 4795769 to 4796734 reverse strand)
atcgtctcaactctgagttatctggtgattttagagtatgaatttggtatccctttatgcagatttattaatacaagttgaattgagaaatttccaagcatcatagttgttgaattctctgtttgtcagaaaatatcgtcaaaatgtacagaaaagttagctggtgaatgagaaaaacaaacatgaaacccttgaaatttgatgcctgaaaaaaagacaaaaaaagacaaaaaaaaaagattaaacatttgaaattgaaaacaccaatataaggttacaagccatgttgcttgtgactataatatactgtttgccagtaagaaataagactattttttttagttcatgtaaaacattcttgcctataatatgtagtaagaacaatgagactaatcgcagccttggtaaggaaatctgctttgtgcaagttagtttttctgctacatgtgtgtatcagactttgtttgcagaagaaagttgttagaatgcagcaaatcaaggctatgtttgtttttccctcaaagagaaaaggaggtcgaaaatattgggtttttttttatatgtttaattagtgtttcaagacagaagagatagataaagaaggatagaaatgtgtttggttagagagatgaagatatgatcataaaattaatttgtattatttcaaaacaggaaggacatgcgacatgtctcctctttcccactatcttcgtttcttttatctccgtctattttgtgttgagaaagtaaccaaatactacaaagcatttcattcaagcgaacatagcgttcattcatgttattacagactcctatcgaacaatttttttcataaaaccttcagtttgtaagactttacattgagctttggtttcacaaatgtcaattcatccattgacatctaactcctaaagcttttgatatgtaacagaaagcggtgatcttgtggaccactgaccccccaga

SEQ ID NO: 59656 - DNA, 511 bp, Populus trichocarpa
  Intron number 1 from transcript POPTR_0001s17550.1 (locus POPTR_0001s17550) derived from phytozome v7.0 (chr-ID scaf fold_1; pos 14332991 to 14333501 reverse strand)
aggtaatttaaaataaaaaatggccctattgtcactcaatgagttaaattttacagggatttactagaattacacagatagggcctctgttatttgattttgttttcttgttatagaatttataaagaaaatctttatgaatatagataatttaatcttttagctttttcgttcttcttttggctcactaagtttctcgtgagaaactctactaagatgatgtggttttaggatgaaattgagatgttaaagctgaagctagaactcgatatcaaacaaaagattagacaaccaaaatggatcatgaatttctggataaaattggtttaaagagttaatactgtcgacaattcggctactgcaacgcattttctggctcatgttatgaaatgatttacaatgatagtttccttttcaaggaatatgggtttccattccatctattttgatggaaagctggctttggtcataattttctctgcagattttgagaacaagggaattagatcag

SEQ ID NO: 59657 - DNA, 926 bp, Populus trichocarpa
  Intron number 3 from transcript POPTR_0001s18330.1 (locus POPTR_0001s18330) derived from phytozome v7.0 (chr-ID scaf fold_1; pos 15378879 to 15379804 reverse strand)
aagtccattttgaggatagattgttcacattgcaggtcccaaacacgatttctttctattttttgaattttgatctctgtatgtattataatttgttgtctcctggcttgtttatttatttatttattgttgttagatcattgattgtattatatatttatttccaaatttgtgttattaagctgagggttcagctaattgtggataattattacttgtagctattattaattgtttaaagctattagttcagaatttataactagtttaaaatgtttcttacgtgaataaacaagcaaccggtttagactttagatagaaacatggaatggaaggaattaggtagtagaaagcatgaaacttgaagaacattgcctgttggtggatgtgttttgcatgcaagtgtttcagtttcgtgcgtgcttgcaatttccaatacatagtatgttgaagccagtattcagaaaggagaagaggatgtttgatgtattgggagaacgcgaatgagagcgatttaataggttgcatcctgtatttagatggttgaagggcgatatagaaataagtgagatccaatagtttgttggctataattgtgctttgaggtatcaggaccaaattttctgttgatgtgattgcttaaacaaaatcatgatttgaagctccggtccaaactcttagttgagtggttgtcataatgatggtaggagggaggaaaaaaaatgtcagacagttaatttgaaagagagttttagtgaaaaaaaactataggttcttttgacctcagatgataatcaatattcagggacatgatattttacttcaagtcctcccataagtcaatcatggcatgacttaagagtggaaatacttggtcgtgcaatctaaataactttgttgtttgccttgatactatatgtgcagat

SEQ ID NO: 59658 - DNA, 827 bp, Populus trichocarpa
  Intron number 1 from transcript POPTR_0002s19080.2 (locus POPTR_0002s19080) derived from phytozome v7.0 (chr-ID scaf fold_2; pos 14991728 to 14992554 reverse strand)
ccaccatattcgtttactacacagagtaagttgttcttgatttaatttttttttttttataactccatgtaccagttgatttcatcgatcgaaacaagcctcaatgaagtaaactgaaagagaagggggaattattggtatgaatccaaaacttgtcacttgagagtcccaactgttcatgatatagaaaaaaaatattggttttactacgttgattcatgtgattacaagcaatattgcaatacacatttcacagattatcaagtctatcgaaaaattcgttttactcgagtttttagttaatcatttgtgtttaaattatcgagcaacagattttaatattagaaacgctacactgtgggaagctactcttcacaattttataaatataattcttttttttttcgaagaaaggaaaaaaaaatgctttagcatcattatctgtttttttttttttgaaaaaaaatagaggttagagtgaattcgaatagtttaattttttttattttaaattaattttttgtgtttttatattgttttaatgtactaatcttaaaaaataaaaataaattattttaaataaaaaatacttaaaaaataactgtaagcatgatactaaatcgggtaaaaataacagaattgtttgattttttatataaaaaaataaaatggtctgaacacaaacaagtataattaaatgtctcgaggactagaataacaagaaaagggcctgaagggcccttaccagcaaaagtgggcaactttgacatacaaaatattctgtttatgtagccttgtcttctcatttctcatctcaagtggtcaac

SEQ ID NO: 59659 - DNA, 661 bp, Populus trichocarpa
  Intron number 1 from transcript POPTR_0010s06230.1 (locus POPTR_0010s06230) derived from phytozome v7.0 (chr-ID scaf fold_10; pos 7637957 to 7638617 reverse strand)
cctcaaccaaagcgtatgtttatgtgtgtttcttaaatcatttcttcttttttttctctattttttgaaaggaatagattatccaaaaagctatatatattaactatagaaatcattttaaaaaaccaaatttaatcgtcggaaaaagaaaacttagagaggtttaacttggttataattaaattgtacgagtagaattgcgtggaagcaatcatcaatttattataagactagcaagatgacacaaatttatcaaggtttggtgaaaaatcagcctgcctccctccgcaaactaaacagaaagctccgtcttcactttctattgaagtaaattaagtcctttttagtgaagttcttagattttcaactcaccaaaccaaatttatatttgatctacaaaaaatggaatgaagtcaaatgtcagaaaggtttcgaaagtggaaactagggcttagactgtcatatacaagctggaactaccactgaggaaaaaataaaataaatctcgaagtgctaatatgtcctacaacgagatcatcaataattagtaattaatggtctgtaatttcaagaaatatatatctctggaagcttttttctcagtaaaatccacttgtacgtgaagcattttcaactaacatatatatataggtaccttgga

SEQ ID NO: 59660 - DNA, 975 bp, Populus trichocarpa
  Intron number 2 from transcript POPTR_0010s10380.1 (locus POPTR_0010s10380) derived from phytozome v7.0 (chr-ID scaf fold_10; pos 10909815 to 10910789 reverse strand)
taaagtagattccacccagagctcacataatcctggtaacatcacctttgcattttgtttttctagctttactgtcgttgcatcttctagctttcttggatttggccttttatttttttccagctcagattcattcagttgttacccgcaactgcttttggcttaccgtttgtgaagcaaaaagaaaagaacccttttaagctttctgtgtgatatataacttttgtctatcaattctgttttacttgattagtattcgaagtgaaccctaatgttatttgctgttttttcatttttgggttcttcgtctactttaggataattcgatgcggatggttctcgtcattttaatgtgtgtgatctttcttttaagaagcaactttgtgtcctatacctgtgatttggaacatttgcatatgattttggttggctgactagagtacaatctctgtgaagaacggtgataaatgaatttaagtgactgtgtccaacttgataactgtgcgtgtttacttcgtgccattacaacagcgaaggtaggatccacgtagaatgagacatggctttgcacttaaattgtgctaagtagcattcccttctttcccttctttttcctcttagttattttgaagcacattttaattgcaaacaattcaccttctgaacgatagagtcaaaagggatatgtgctgttaatatacgtgaaagactctttttttcaaactgttttgtacagtttgaagatttataatgtcatcattggaaagcatactgtattgtccaaggatttcaattagaagcttaaagaacttgttttattagccttgacagcctgtgtagttttgatgggtgcaatgctggagattgataaacatactgtataggtatatatataccacaccagtaaaatcttgattcgtttatctcttgctactaccaggagcctcaagaatttccagcagaaccagccattct

SEQ ID NO: 59661 - DNA, 319 bp, Populus trichocarpa
  Intron number 1 from transcript POPTR_0002s11450.1 (locus POPTR_0002s11450) derived from phytozome v7.0 (chr-ID scaf fold_2; pos 8497185 to 8497503 reverse strand)
tcatccgcgtctccttgataattctaataaggcaggtagtgtttctgttatcatttttccccttacgttcatgttcctgattttcaattttacatatttcaatttgattagcaatcatttactttctgttttcttttgctagtttaaaatgataatgtgggtggggtgatttttggttaaagtaggcaatgttattgaaacaccaacggatttaagagaaaatctgctttggatttcgttgaagattctttgaattcccttgctcctgaaaatattattgatgattttaattttggcagataaaaacagtggagattag

SEQ ID NO: 59662 - DNA, 459 bp, Populus trichocarpa
  Intron number 1 from transcript POPTR_0002s18020.1 (locus POPTR_0002s18020) derived from phytozome v7.0 (chr-ID scaf fold_2; pos 13910713 to 13911171)
tcaaggaaaagaaggtcaaatctaccaccaatctggtaaccaattccacaaataacctctccactatttcccttatcgaatgcttctgttttgattttattttggtttttattttgcttttgtttgcatttctgtgcacaagagactgattatcgtataccgttttaagctttaattgaaatcatgtcattttctttgtcaattaggatgacattaaattaaatcccaagttttattttttaaattgattgtaactatgtaattagcctagagatttaattagatgcattgctaggcatttaaaacggagaagcttcgtatgcgttgacgtgttaaagctacttttgtgaattatgattaacgagatagaaatcaagaacgtttctttcttctccattttttactcatttaattagtggtgtctttagttgatcactaaagaagaaggattggaggtat

SEQ ID NO: 59663 - DNA, 738 bp, Populus trichocarpa
  Intron number 1 from transcript POPTR_0010s20080.1 (locus POPTR_0010s20080) derived from phytozome v7.0 (chr-ID scaf fold_10; pos 17822919 to 17823656)
tgatataaagaacgaatattaattttactgcaaaggtgattttttgtttctggttaaacaccgtgttctgattctctctctctctatctacgagttgttgtcgctggctagttttttgttttcctttttatctattcttgctgatgttgtgagatgattgggaaatgggaactcataagtcataccctcacatcaactgatcaataggaccattggaatgattggtagaatatttatagaaccttttgcttgtgcctgtgtttgtattttggagcagaactggctgatcagctgttggttagtgaaatttgatctagtatttttatttgattgatactggatttagatcgatcggctgaaataagacacgacctttattaatttttcagctttacaaagttgatattttttcttgaaaaaatagaagctttggatattttctgaatgatcatttgaatatattgttgtggttactagatttggatttggatttgcaatttactcttttttggtggttgttggaattataatggctggcaaactagttatgagatgcggtgctggtagtttttggcatggttgattagtctatttgtaagttttgatctcatttggaagttatgtttcaatatagtagtttttttctttttcggtgattgatgatatggcgaaattgagtctcatattgcaaaattttgaatttttttcttttcttttcaggagacccttatatcttcc

SEQ ID NO: 59664 - DNA, 937 bp, Populus trichocarpa
  Intron number 2 from transcript POPTR_0002s20750.1 (locus POPTR_0002s20750) derived from phytozome v7.0 (chr-ID scaf fold_2; pos 16849910 to 16850846 reverse strand)
tacccttccagcttctcaaattcgtcgatcacaaggtctgtttcactgcaaattacaaatctatttgccgtcgtctatatctcttgatttaagtgctaatatttgaatcaatctcgttaattataagaacttgccattctagtaactattaagtaataatgggttctgttatatatttttatttaaaaatatattaaaataatattttttatttttaaaaattatttttcacatcaatacatcaaaatatataaaaatatattattttaaaatatatataatttttttaaaagtatttttaaaacacaaaaataaatctaactatgggcaatcctttacttcatacctagcatcatccttctttttacttagcaggatgttttggccttgggatattcaatgaggtagccttctttacctgataattgaataaactgaagtcactaagattcaaatctattctactaaaaaaatgttatgggatgcaccatcgttaaattatatcaacttgtgtaattgatttttttttaattaaaaaattgaagggtaaatctcaaaaaacaaatgcctgtagctattgattatagtttctctgaagatgaacactttcttgaatcttccagctgtgcgtacttcttaaggcttatgttttaaaatcgagataggctctattttgtaataatggcttataaattaacgaactcttacagaagcatgtaatatttaagagcctattatatataagaaaagggatgtgttcgtctattttttttcaataataagataaatagggtgctttaacttgtaagaatctgataatttcttaattgcctgtgtgcattttgcatttaattaatgtatgtacgagacgaagtagtatcatttggactcctggaatgcagattgacgagtctttgagggggctagacaggcaagt

SEQ ID NO: 59665 - DNA, 690 bp, Populus trichocarpa
  Intron number 2 from transcript POPTR_0001s28710.1 (locus POPTR_0001s28710) derived from phytozome v7.0 (chr-ID scaf fold_1; pos 27487818 to 27488507 reverse strand)
gccaagttgtgatcttgtaagtaagaaaagtgtcaaataataagtaatcaagcattctgatcctacaggagtatatctttatcctttttgcttgcaagttaattaaatttgtgattttggatggtccatttagttgaatcaaagatccaatgtgtttagagatggtaaattccacttgtatattactggaaatgtgaaatgctcgtgaataacgttaactttatccaagcagattctaaagtcagaaatgttggatcaaaatccagacttgagctgtcatattgagtttactgttggatgaacttgaagtgaaggaatacatagagtctgtattgttgtcagtcattgtacttgttgctgcagaatcgatcatggtataaagctttccttagaagtgatcagatgacaaactattcaatgcagtgtgtgatgtctccatggacagttcataataatgcgggcctccatggagcaattctagcttttctttttcttctttttcaccttttcgtacgctactcttaccccatttatgcgtaattatgaagtttattatcatttagcatgtatcaaacatccagtcatttctcctcttagtagcaaagttgtttttttcttttctatttccttaaagtcagaaatgttcaacttgtaggcatttgacagatctctgtcttggagggacactct

SEQ ID NO: 59666 - DNA, 669 bp, Populus trichocarpa
  Intron number 2 from transcript POPTR_0010s21730.1 (locus POPTR_0010s21730) derived from phytozome v7.0 (chr-ID scaf fold_10; pos 18899335 to 18900003)
gcaatcatcaccaaattcaacttctctttctcaaggtgagttttcttctcttttctttttcattttttttcaatttatttgctaaaatttctgtacaatgaacaatgtcgatgcacctggcttagttaaagttactgcgagttgcaattctgatggatttgctagagcatttcttgcttgaaattcagcggttactgaaaaaatgaaactagaatgtcattatacaaggaaatcgctgtacttgtagtgaaattacggagaatgctgttcttgtgaaaatctcttctggcaatttggttacgaggagagaacttgacaaatgccattgaaataataccgtgctgaattctatgtgataattacaaataaattattctgtcaaaattgtcttgatttgatctggacctgctaaatatcaattgaaggaatgcagttgtccacacacaccaaaaaaaaaaaaaaaatttcaagacagagtgatttatgtttagccactattagattactggatataagggaaaaaccatactttttagatgttgaacttaaagtgtttctttaagttcaaggaagcagtatcgaagaaacgttctctgtgttttggtttgtttaattgaactctcatttcctgcagttagatttgggagacgtgaattgatagcagtgagt

SEQ ID NO: 59667 - DNA, 835 bp, Populus trichocarpa
  Intron number 1 from transcript POPTR_0001s03490.1 (locus POPTR_0001s03490) derived from phytozome v7.0 (chr-ID scaf fold_1; pos 2815540 to 2816374 reverse strand)
aacagaggttgtttttcttctccccttttaatcttttgatttggtttcaaatatctattcttttaaatcaattgggttacttttatatgatttttgggtttctgggtcaatgatgaaattgaaatgagaagtgacagcaagtggaaagttagaatctttttacagtttttttacctggtcgttgccatgtcgatgctgcttagtgttaatttgtgtttggttagtggaaagtgcaaggaaaggaaaggaaagggagtaaattttcaagattttaatttttttctaattgattgggaagatgaactatgtttgaataagagagaagtagaactatgtttgagtaagagagaagtactgctttgtgctgatgttgggtttgatttgtttgattccaaagcgaatgtagtgaaacaagaaaagttgagactttcctgcatctttctctgttttttttattcctgcttgttgatgatgtaaaagcctctcctgaaatgttctttgtgttaaaagattatatttatgggttcgttattcacttctctttcttagtttcttccacagtcaataagaagttataatttaagatgagaaaatagagagggctggaattatgttttgatagaagggattagcgtgaattgtcagatcagaagtgctgttgatgaattaagctgggagacttgattatgggttcttactagggttttatgctgtatgaggaattacatactcagagaaggggaaaatattaggaggacaagtgggacttctatggtaagatagaatggtaatcttgtcactccactgatatcaacccttctggtaccttctagga

SEQ ID NO: 59668 - DNA, 897 bp, Populus trichocarpa
  Intron number 1 from transcript POPTR_0002s26250.1 (locus POPTR_0002s26250) derived from phytozome v7.0 (chr-ID scaf fold_2; pos 23237513 to 23238409 reverse strand)
tcacttgatacgttatcagttcatctttgaagtaggtcactctcttgctttgttgtttcctttcaagggtttcatttttcttcctgctttcgttttgctgttagtgactcttggattatgatgaagttaagtatgtggctcgcttgatttatctatctttctgttgatttgctttctaagtctctatgtggaaccaaaaataggaaatgcaatggaacatgtcaaaattgactgatgcaatggacttggcttttgattctctcttcctatatgttctttgctagaagaaggccaaaagggaaatcttaatttgtcattcaaggctgattcctgttattagttgcttgattaaaggagtcaagttggagtggttggtggttgagtcatgccttgtttttttggtatgatacacagtttgcgtgatggcctctatttatgctttcattgctctttgatgaaaattttatgggtgtgaatatgaccatgtggacaagtgttccagccatcatggatcgatcccttgcctaccttgttacctttgattacgtattccctagccttgattgcagaatgaggccttgggtcttgcaatttcagttgcatacatgcatacactatcgttctcctttttctcttctttttttctgattgtggctgattggccaagtaaaaaatattaatgttgacccagtttctggtttactttggtttatctcctgtccttaagatcttccctttttaatttacattgattgcatctggtccgatcctttaaagggtagttggatcgatgctactttgcagctaattctttcttaatgagttgttattgaaggtttgctcggctatttattcattacaggttgaacacagctgcagaatatattgataattgtc

SEQ ID NO: 59669 - DNA, 348 bp, Populus trichocarpa
  Intron number 1 from transcript POPTR_0001s06490.1 (locus POPTR_0001s06490) derived from phytozome v7.0 (chr-ID scaf fold_1; pos 5002241 to 5002588)
ccagagtaattacaaaatgccttccaatttctctttttttttctaattttgttaaaaaaaatttgtttttttggatgttaatagaaagttgtcaaatgggttcttcttgcttattaaatttgatacagttttaatggagtatgagattgtgttttacttttgtatggttttttttttgtagaaaatttagaacccattttttttttttcaattatgttaaagtttacgtatttatctttgaatttggaacctttgtttctagctaaaattttgatgtggggtttctctaaaatggtgaaattgataagtgattgattgttaattatttaggaggcaaggcaaaatttc

SEQ ID NO: 59670 - DNA, 590 bp, Populus trichocarpa
  Intron number 2 from transcript POPTR_0001s06490.1 (locus POPTR_0001s06490) derived from phytozome v7.0 (chr-ID scaf fold_1; pos 5002848 to 5003437)
tcaagaaggtaaccatttttcttgcattttttttccttctaggtgtttagttttttcggtgttcaaagaagcattattgcaaatacagggtttatgtggaacaaactgtttgattgattacttagtgtaatgaatccctgtagggtgattggtttgcttggtccatgtaataatttcttgtgtctcagttgctgatgtcaaagaaaggaattaggttgttgatgaaaaatttgtttagcgaaacttattgtattaaagatgaaccgaaactgttatcctagtttcatcctaagtaagttttgactaggtttttagctttttataacttacttccttgcactttggtacgatgcgactgtgatttatataatctggttctttacttctttctaatcagggctttcgaaggagcactatgaaaagtcgattggagccacgagctttgtatcttcattctgtatagaaatttgccttccagcttataaattcgaactctctacaagagaagaatattttgggacttctttttttactatattttaatatactgtattgagcaggttttgacacatcgatcaggttctgctgtt

SEQ ID NO: 59671 - DNA, 839 bp, Populus trichocarpa
  Intron number 1 from transcript POPTR_0001s46750.4 (locus POPTR_0001s46750) derived from phytozome v7.0 (chr-ID scaf fold_1; pos 47153980 to 47154818)
tttgtagttgcagaaagtgctgctagttactcattggctagctactacacttctctgggactctttgtcatctctgttccaggcctctggtctcttatcaagcgctctgttaaatccaaggtcctacttctcttccttctgtttcttcttctgctaatatgttcttcttagctgcccattttctgttcatttcagcttagttattctttacttattttttttaatttatacttgtaagatgattacttgagtattaattttataattaaatgataattctagtgccttgaattaggagtaaagtagattgtaaattctttctataatcttcacttagaggcgtagccatcaattagtggttttctatcttaattcctagtagaaattaagaatgagatgtggaaattcagcacctgctcttagctaatcattggcaaacgtcaaaaatgccctccaattattgagtttgattcaatttaatccccgaacaaattttagtatatctattgtccttaaacattttttatttcttaattaaggtcttatgttagaattccttaacataaaaagttaatttctctataaagaaacatttgtttcttgcaagaataagtacaatttggatggaatcgattatcaaatatagatgaaaagacttaattgaaaatttatgaaacttgggaataaaattgatacaaaatcttttttggtggcaaaattgagaccaattctatagttgttggaggggtttgtctttttgaggttttcccttaattagtgtgtgtgcgggggggcgtattgcagattgtgcagaaaacatttacaggggaaggggaagg

SEQ ID NO: 59672 - DNA, 579 bp, Populus trichocarpa
  Intron number 1 from transcript POPTR_0007s07350.1 (locus POPTR_0007s07350) derived from phytozome v7.0 (chr-ID scaf fold_7; pos 5689763 to 5690341 reverse strand)
atccgatcaacagaattcaatatcaatttcgagaggtaaaaaattgatccctgaccccttagtgttaaagattctaactttgatgttactttttgcttattaagactctaactaagatttaaatattttcttgataacccttttagcaagtgtgatttcaagctgtttttactgctggggtttcctttttcttttttttatcaattatgttgtgcatatagtaaaaggaatcaacttttccatcattgtaatgtaagtattgttatttacacaccttaatgtgtaatctgttgtgtttctgagagtttgattgaactatgttggtaatgaccgtgagatctcgatcgttcagacacaaattcagaaaccctttatttttttcagagaaagatgtcatttttgaagcaaattttgggtgatatgaagaatgaagtttcaggattaatgatgtatagctgctgctgtccttctttttcaggtttgaagttatatttacagtcattgggtttagcacattagtgtgaagacaaatttgaatgttacaagggactgaaattggctcactttgatttgacaaaa

SEQ ID NO: 59673 - DNA, 707 bp, Populus trichocarpa
  Intron number 1 from transcript POPTR_0001s17080.1 (locus POPTR_0001s17080) derived from phytozome v7.0 (chr-ID scaf fold_1; pos 13942369 to 13943075 reverse strand)
ggactaagcaggccatcaaggctctcactgctcaagtatgtataactcttcttgctcttcgttcacctttttatctttgattgctgcaatagagtcagagatttgagttttttttttttttttaactaaagcccagaaagcaccgaagcatacagtaatggaagaaggttgaattatactgtgtgttttgacaatttggatttaaggggttatgttttatttcttatatttttggaaaaaaatagtgtgaaaataaaaaaaaaatcccatgattgctctttttttttgtccttttgtttttgcctagtttccgcaaaacccaaaattttgccctttggctttcatcaagggggtaaacgacgtggaggggctgcccggtttcttttgcattgccacttgccggaaacaaaaacagtgaaagaagaattggaattaatcaccgtgagatatgggtctgatttactaccgtgtagcacaacggtacttctttcaaatttattttaaaaaagaaaattataatgattgatggacttgggtttcttttatggattggaaccaaagaccagatcagcaacatgggtttcttaaattcattttttctagattttgggtgcgaaaggctgatgaatagaattggacctggaattgtcttcgttttattgcaaaatgatgaaggattattgttattatttttttagataaaggat

SEQ ID NO: 59674 - DNA, 525 bp, Populus trichocarpa
  Intron number 1 from transcript POPTR_0002s16070.2 (locus POPTR_0002s16070) derived from phytozome v7.0 (chr-ID scaf fold_2; pos 11964817 to 11965341 reverse strand)
tgcggaagactgttacaagaaggtgattgttgagtttatttgtagttaaaaagtgctaattttttattgaagttctgctgttaatttatagtgagacaattggtctctacttgtttggttgccgagaaagaaattaattttttgattattctgttttttatttctatttttcccttgatttgaagaaacaaaaatagttgtaaaaaaaaaaaatatatattgaagaacagaaatgagaaaacttacatgtttatgccaaatgtagcgttaaggacaatgtagcggaggcatttgtcttcttgacttgtatgcagttgaaaacactataaaagtttctaataaaggcttaaattgtaaaagagaacattctttttccttctttgtctattaatgattgagtatatttgggtcataactctttaagtttttcattgttgccagggaagtcgaaaatgagactagcacatgttttttttttttagtttactgtctgcattatttgaaaaacggtagcttttcagatat

SEQ ID NO: 59675 - DNA, 1044 bp, Populus trichocarpa
  Intron number 1 from transcript POPTR_0001s26460.1 (locus POPTR_0001s26460) derived from phytozome v7.0 (chr-ID scaf fold_1; pos 25482184 to 25483227)
gcaccagagatctaaactctgatacccctcctagggtttgtcttctctttctctctgatcttggttccctttgttttcttttcttttaaatgaagttattatctttatgttacaattcatgtaattgaaactagcgttgcaattgtagagttttcttgtgcttgtttaaagacatatgcgaaaattttgactttttttccttcaatattcatgtgtgtttagggaatatgaataaggtgttttcttgtaaaatgggacctgaaagatgcaaactttggtaagggcctgatacttttgtctgtgtttttccttccctggaaacccatgccaagaaacgaatttatggtctttaaagtttcattttggttgtcaaaacaaaaggggaagttaagttagtcctgtgagaaaacaacccattgtacaatttttcagtaatttcattttgtttggcaaaataaacggggaagttaaattgttagtcctgtgagaaaataacccattgtacaaattttcagtcacattgtagtacctgattgaggaaatcgtagtgttttcattggtatacattagtgatcattgtttgaattcttaaaaaaaatttaaatgtttttatctttctccatcattgtactacatttctaggaatttccatgtgctgtactctcatgatcctgagccttgacagtgtttagtggcatttaagttcttgcaaaaaccttatgttaaaaccgtagctagcttgttaaaacttccatgaactgttttctcaaggaatttgcttttaatgtatatcaaccttttaaaatctgtggaaaggttgcatgtgttgttcacttgtacattttaagttcatgtaactagtaatggtggtttatgccttttaagtcattgcttgacattcatccatatttggtgaatggttggtgtgactaactttgggccaatcatttttatgcgtaataatggttctcaatttgattccttttctaatgttttctgacttctatggttgtttctttcttcagaaacaagctgcaaaaaaag

SEQ ID NO: 59676 - DNA, 706 bp, Populus trichocarpa
  Intron number 1 from transcript POPTR_0007s04240.1 (locus POPTR_0007s04240) derived from phytozome v7.0 (chr-ID scaf fold_7; pos 2557767 to 2558472)
agaaagctgtctctcttgctgcccgcctctgccaggtgaagtccctttctttgcctctccctgtatttctttttcggaagttgggtctgtttggattttagatattgtgtttttagttgttgaaggattttattggctggttttagagtgtgaaatctttatttcagcatgacccatatgttattactgtgtggtgggttttggagtatgaagcttttactttgtttggtttttcattttctgattaaagtttgtttcttgagactttattggattttttttggaagagggtttgaatggatgattgaaatggaaaaaaaagagaggaagaaatggaaatggttgaatggaaataatgctagcatcaggggagttagctattgtgatgccttttagtatagcttttgcggggaaactgattctcatgttttttatttgcttatttacgctctgtttctggtgtgcgttctatataatttcttcccctttcagaccaatgaagctgattttcatggcttgtgttggtccccttgtgattaactgtttcattatatatcctatatctgattaacatgacgttatccttttttagaacaggtgatttgacattttgcatcctggcacaaatgttttagatagtttgcatgcgtgtaccttttcttgttatcttaagctgatttcatgtatttttgtttttcctcagaag

SEQ ID NO: 59677 - DNA, 634 bp, Populus trichocarpa
  Intron number 1 from transcript POPTR_0001s22790.1 (locus POPTR_0001s22790) derived from phytozome v7.0 (chr-ID scaf fold_1; pos 21680723 to 21681356)
cagatcatctgaagtactaaatccttttcctccaggtattattataattatttttagttttagtttctacgcggttgattgattgtatgattgatgtgagcgatttattctcttcttgaggaaagttaaacccttgtttggtttgcgagaaaaaggagggaaaaaatatgaaaatgaaaaatctactggaaagtttgtgttttgggtatttctttgaatatttaaattctgggtttcccttcttggaactggagaggagaggagaggagcatttgggatttaaaaagtgggtttttgttattgtttttaatgagtttgtttttttttttttttagctattcatttatgggattgcattagtaaatgctgcttttcaaagttaaagttttgaggcttaacgaaaaaaaatgggttttttgaattggtaggttttatgggttagcttagcagattcatgagtgttttttattttttgaagaaggacagtgggattactttctagatggaaaaatggaggatattaagatgataagtgttttagggtttttgggagttgtttagtgactttgggttttgccgtttttttttccttttctttttttaatgtggagataggtttggggttaagagtttg

SEQ ID NO: 59678 - DNA, 894 bp, Populus trichocarpa
  Intron number 3 from transcript POPTR_0001s02660.1 (locus POPTR_0001s02660) derived from phytozome v7.0 (chr-ID scaf fold_1; pos 2107403 to 2108296 reverse strand)
acagacaccgagccatagccaacaagtacaaacaggtacttttaatagataattatcaagcgtgagttcattattccattttatatctgctccatgcaagtaatgatgatcataccaacctaagtgaaattctgaaaatgaaattggctgctttgtaattactttttgttcattactgctgtatgaacctagatgtaagaagggcttttaaaggttgtgctgcaaaaagtcggctgcttttgtttgtcttgttaggtgtttgtttgactgcaaagcctttaaccctcactagcagtttgtcatgaaatataaatgctgactctgtagcactatgttataatcatatagtatgttaattctctgagttcaatgcatttgtgttatatgtaagttcacattgtatgttgtgttcttaagaaaggtaatcattgaaagatggagatttaaattgttacccgtttattataatgacattgtttcacaaactgtcagagtgtagagattatatatcataatatggaactcttacagtcttaatctggaccaatgtctgaatttgattgtggggttatggatgtgatacaagtatctgaacaaatgctctatgttaggaaatttgaccgtggatttagcaagctttagtgacttccaatagctcaatatttttgggggcatgggatggtcatataaggtagttgaaatttgctggcttctttaacttcctttctgtttctatatgcagtctgcattttcttccatgtatttctaagaaaagctatttactacatgccagttattttagattttcatgaattggaaattggaatatgaacaggtgaaaaagctcacttctctctgaaatttcagggtttgcataatattcttgatcaagag

SEQ ID NO: 59679 - DNA, 448 bp, Populus trichocarpa
  Intron number 3 from transcript POPTR_0001s40410.1 (locus POPTR_0001s40410) derived from phytozome v7.0 (chr-ID scaf fold_1; pos 39810087 to 39810534 reverse strand)
agcaaagaacaattgaagccttgacaaacccccaggtgaagtcatgtaaggattagttagtttttttacagcttgtcttctgtgcaagcgaattattggaatagttagggttcatattgcatggtttaactatagtactaaacagttttttcctcaaatttaagatcttcactgatgagtatgttcactcatatatgctgcatctcttggaatagcaaataaagctcataccacaaaccattttttttttcattaccaaacagatgaatgctttgaattcatttttcctgcttgattattatttatttcgcatagagtctgagacagtaacatgtacacctcccctctctctcctttttgacaagtaattgtcctactttctatattacttttgtttttcctctaaaacttgatttcatttcctctcaattttcaggttaggaagaag

SEQ ID NO: 59680 - DNA, 772 bp, Populus trichocarpa
  Intron number 2 from transcript POPTR_0001s10620.1 (locus POPTR_0001s10620) derived from phytozome v7.0 (chr-ID scaf fold_1; pos 8265539 to 8266310)
aggtacttgttttattttccttttagtatagaggtttgatcgttgattgggttaattcctcgtaaatttaatgtcccaactttcaatttgatttaaaaccaatttgtaaattaatattctttgagagtgaggtcctatgacatgatctcatattgactgactaaaaagatgctatttacattagcaagaacactggtgtttaagcacatcatgagatgaaacaaaattctataaatatagctgctgaatccttttataatattgcgaatgctaaaagctttgtaatgtgatgtttgttactttcatgaaatgttaacaaatttacagggcacctggatccaaatttgaaatatggaggcatgattaggaggaagatgtttccttgcaaaccataatgcaagatcaaaactaatttcatgcccttaaaagtgtttaatagaaattgaaaaccactggtggactggtgtttacaaaaataaagttagatttacccatacaaaaacattgcaacatataaaaataaagttacaccagaattgataaaatcttcatcacattctagcatttttaaaaggaggttgaaaacttcacttcaaaaccaaacttataatctgaatgtacaacttcgaaattaagtatttatccacacctgtggcagttcatcagcattccactccccatgccttctcttaaataacatctgtttggttaaatttatcgtacatttactggtgccttttgctgtttccacatgcaaaaagattgtggagtt

SEQ ID NO: 59681 - DNA, 498 bp, Populus trichocarpa
  Intron number 1 from transcript POPTR_0002s03870.1 (locus POPTR_0002s03870) derived from phytozome v7.0 (chr-ID scaf fold_2; pos 2434093 to 2434590 reverse strand)
agcaggatttgcagtgtgagtatttcttaacagcttgattgtgtttagcgggatcagatatacaatgtgtaatgcttttgaatggagttcaaaatattgtattctttatcactatgtggtggtttttccatcaggaagctcataaattttgttgaaagaataatacaaaaatagtcttctgttagtagatgtactgtcagtctgaaattttctttctaacccatgccaaagaaaccaacataaatgaattctattagatcatgtgaggattgcaagttgaaagaataaatgcaacctgaaactgtttggggatctctaattttcctttgtttttcccttcctttttccttggcaatttaatgtagctgtttaggattttcgaacacatgatctctggtttgggatggctggagatggttgagattcaaactcttaatttgcacatggatttttctctgtataggttcagcaaagtgaagccctattgaagaaaatcca

SEQ ID NO: 59682 - DNA, 849 bp, Populus trichocarpa
  Intron number 4 from transcript POPTR_0001s36240.1 (locus POPTR_0001s36240) derived from phytozome v7.0 (chr-ID scaf fold_1; pos 34775017 to 34775865 reverse strand)
tggtaagtgttaatggataattttatctttattgatttggatctcataacatgtctgtaatttttttgaaaacagaattttggtggtctatccgaattaagcttggtttcctattagatgtcatgttaaatggagctgcatggttaagatgtcctaaatgtgttctttagttaaggaaaataaggtttttagtaacgacatgctcaacattgctaactcatcttggaatgtttctctgatgaggattgtatgtggaaagtgtcttaggaaaaatgccagttgactaggtatgtgtttttgcattttttgttggacaattctctggattacatgtcgaaaagctcatagcctaatacattgtcacactctaagttgaggagtatcatatgtttgactatgaattcgcccagtaaatttaggctcatgaaaattgtgggaagttcaatccttcacacccttagtatgaagaaggaacttgtatagaatatattctaaatctagattgagctagcttattctgactatgacaccctgctaaatctgttgtcaataatttgatgtttttccacttaacttatggaaagccatgaatcacaattgttctgatcgctaggcttgcttaaactcctttgtcattgtttctatataagcttatgttttcagtgcttctgcccaagtttgtattgtttctctaagttttatggctttagttttacatcgctattcttcttattgcatggagaaatatgcatctattggatattgccagccacagtttcacaatatatttaaggaattgaaacacttcacacttgtgctgaacccagagtcatagcaagtgcttggcag

SEQ ID NO: 59683 - DNA, 600 bp, Populus trichocarpa
  Intron number 2 from transcript POPTR_0007s11540.1 (locus POPTR_0007s11540) derived from phytozome v7.0 (chr-ID scaf fold_7; pos 11911582 to 11912181 reverse strand)
gcaagagctatagtaatattactttagctggttctgttagtatctgaggtaaattgctgctgttttccgttttgtttttctggtctaatgtgtatctctattcagcttcatgtacattctcttgttgaattattcatttttcaagaaataaaaagggatgcttttgtcatgttgaattgtaaccacacataaagacttgtgtttctgcagaattgtggggctgttattgattgaaataagcaaatgtatgatattttagactcagttcattacttggaactctttagcagagtaaatgaatcaattcccatatttttgcttttagtttttctgaggattagaatttggagttccacatgtaggctcttgtctccgtctttatttagctatatgtgaaaacataagaatttctggagaaatttcattacagctttcttcttttccgccttttcagataaattcaagagcaacatcttctttatcaacgtttcaaagctgcgcaacctgctggtcattgtgaagatgataatattccagcataaagaaatcgagttacctgaacaagctcaagttccgaatagaaaattacaagattttggt

SEQ ID NO: 59684 - DNA, 468 bp, Populus trichocarpa
  Intron number 1 from transcript POPTR_0010s20180.1 (locus POPTR_0010s20180) derived from phytozome v7.0 (chr-ID scaf fold_10; pos 17865888 to 17866355 reverse strand)
tgagattcccgagactgcccatcagattagcagtggtttgtttccctttcttttgacacggtgaatctttctttccattttttgggattttgtgtctggttttgtccttttctggtttcttccacctgtagcgtggagcggttgtccgcgtaaaaacttaactcgcctgttcggtttcaattccttgggatgttattatgttaatgaagctgttcctctttcaaaaagaaaacgtgggctagatgaaactctagagttccgtgtttttaatgttttctgattgatgtataatgggttttttacacccttttttatctgattggttgttttaacgtctggtttacaatttttttagggaagaaaatggatttttgataaagggtgtttcatttctgggcactcaattgtatttttgagttattgttactttgaggtcgtttgactttctgtactggaattcacagattc

SEQ ID NO: 59685 - DNA, 175 bp, Populus trichocarpa
  Intron number 1 from transcript POPTR_0010s07290.1 (locus POPTR_0010s07290) derived from phytozome v7.0 (chr-ID scaf fold_10; pos 8403936 to 8404110 reverse strand)
cctggcggcatcattgctcttcttgacgaagcttggtatgtatgttatagaagacagtggacaacaaccattcatcccgtttaattgatgcagacattaaagagtattttggtttgttaagaaattttcctttgatgttgtagtgacatattagcttttgtttattgtttgcagt

SEQ ID NO: 59686 - DNA, 633 bp, Populus trichocarpa
  Intron number 2 from transcript POPTR_0001s47320.1 (locus POPTR_0001s47320) derived from phytozome v7.0 (chr-ID scaf fold_1; pos 47557326 to 47557958)
gactacgttgaatttcatagtatcaaaattagaaggtaaatgcctttctttttcgtttttgtactgtttcttattggattaaaaaaaaatgctttttttttaacttgtatcgattttatgttttctttgtttggttgatgggaaaaatctaaactttctatggaaagatgaaaactttctttgaagggtttggttttttgagttctgtttttgacgttttgtatgtttaattgatttgacttgtgaaataaatgtaactttgaggattatcgttttgatgtaatggttaatgctagtatatatcctggattttttgtattcttttgcatggtaaattgatacacttgtttcttttttttctttgatttttgagaaatttaagaagattctgtatctaatatggtgttctgtagtttcaatgtttatgttaatcttaatgattaaatcatggtatatgtttatgttaatcttaatgataatcacggtgttacagaaaattgaataattatgtttatgcttattcatcttgttttcataaatcaaactttttacttattttaataagttgaagaagattccgtcttgaacttgtatctaatatcccaagtttggtgttcattcggtgcagtcaga

SEQ ID NO: 59687 - DNA, 362 bp, Populus trichocarpa
  Intron number 1 from transcript POPTR_0001s33430.1 (locus POPTR_0001s33430) derived from phytozome v7.0 (chr-ID scaf fold_1; pos 31629076 to 31629437)
aacgcctctcctccttcaaaggttctgatttaaattttccattctttttcttattcaatcgatctttcttaatctttattgctatgtatacttccgtttctgttcctacttttagggttttgactatttttttatattttttctccttgatactttctttttttgcaattgcatgactttgatgttaatttatttttctgtatatttttcatgccgaatggtgagagattactgagattaatagctgttgttatatgtggattcattgattttgaatgtatggaactaatgatatttatgaattgtcttctttcttggaaatggtagatcgaggaggaattggtgaggacaaggctctgttg

SEQ ID NO: 59688 - DNA, 474 bp, Populus trichocarpa
  Intron number 2 from transcript POPTR_0001s05820.1 (locus POPTR_0001s05820) derived from phytozome v7.0 (chr-ID scaf fold_1; pos 4551962 to 4552435 reverse strand)
caattggagctggtaagccttaatttcgttaactcttaatcccgatattgtaacgctattagatgatattattcatatctcaagtagttgatgcttgagctccatgctcaactagtaagtaatgattggcatcaaggatctatatgttctcaatgacacataatttatcatgccagaaagtacttttatgtcagctttctggtgtacaatgcttcatgcatcttgaagtttccatatgaaatgaatctaaatcaccaatgaatttagacatttttcatgtggtaatggtttttgtcacagaaaattaactcaagaacttgactgttttatcattgtaattattaagccaggcatagtgtttagatccaccatttgtgttatcttaaagcattagtttgtttatatacacctacttcctctttgattttgagtcttcaatctgaaaatttaactcttgattttgattctatagga

SEQ ID NO: 59689 - DNA, 751 bp, Populus trichocarpa
  Intron number 1 from transcript POPTR_0010s10850.1 (locus POPTR_0010s10850) derived from phytozome v7.0 (chr-ID scaf fold_10; pos 11252516 to 11253266)
tttactttcttgcttctcctttaacctgcaaaaaggttcgcttttctccttatcttatctttttttcatttctcaattaatggttgccgattttgagggatctaattataagggttacagattcacgattcacttttctttatatgtatattaattaggtttcttttttggggttttgaggaaaaaccctaatcaatttcttgaatataattgtcaatctagatcttatcttcttaagatgatcacatgatttgtcttgtgttcttaaatctatctgtgcaatgttcaattgagtctataattatgatttcccttgtgggttttcgttttttgtttcttacccatccgttttaggtaattcatatgttgtctgttggctgggcttccgccaagaatgctaatttctaaaaaaacctcttgtgatggtgttttcggtaattggtttgtttttatagtctttaaaatgcgttcatttttcagacttacttcaagaatagtaatatttgccaggctttgggtaaagtaggcaagttgtgctttacgtttcttcccttaactatgtctttctgtcaaatcaatatcatgtgtacgatgtaccaagtgttcttgatgttttatgatctcgctgtggtttttagaaagagtggattcttgattttttaccttctttagcagttgaatttttttttaactgaagcctcttgttctttgtttcaccagggaagtgagtgtgagtatcgccacagtgaat

SEQ ID NO: 59690 - DNA, 347 bp, Populus trichocarpa; identical to SEQ ID NO: 58718
  Intron number 1 from transcript POPTR_0010s22360.3 (locus POPTR_0010s22360) derived from phytozome v7.0 (chr-ID scaf fold_10; pos 19316385 to 19316731)

SEQ ID NO: 59691 - DNA, 631 bp, Populus trichocarpa
  Intron number 2 from transcript POPTR_0002s22270.1 (locus POPTR_0002s22270) derived from phytozome v7.0 (chr-ID scaf fold_2; pos 18978990 to 18979620 reverse strand)
tccgagtgaagaaggtagagtacattcaagcagaggtaagtcccttttaaattctttaagctcttatttttgtacattctgtttattcatcttttgttctctctgtttcttcaatttattttaagcttgcttatattcaactgagggtgtgtttatttgtgtttagcttgaatatatctagttaatgatgttgacttcaaaattgttgaagcaatgttagtctatctacaactttacttccaccacagaggacctgtaatctttatggaatatttcaaggttatgtggtttgtttgacaagtgggttgtttgctagacatatgcattctgtcttacctttaattctgaggcaatggtggacactaaagcaagcttttcaacacatttttaaattttgttgagtgtggatttatttattttcattttcaaatttctacatatttcttttatcatttttttatttgttttttgaagaagatggttttcctgctggaatctttgtctaataggtgtaccataaaaatctcaataaaagattccttaataagtgattcttgacgatagatttaattttttttttgaatacatatatacaggtgaagataataaagtgtctagtgaaaaacattgt

SEQ ID NO: 59692 - DNA, 874 bp, Populus trichocarpa
  Intron number 1 from transcript POPTR_0001s32470.1 (locus POPTR_0001s32470) derived from phytozome v7.0 (chr-ID scaf fold_1; pos 30798126 to 30798999)
ggaagattgaacaagaggagtttcgaaagcttctggtaatatttgtgtttttaattttttattattgattttttcgaagatttaagtaaataatagattctcggaatgccctttcgaaaaaaatggaaactgtgtattttgatgtttaactatcgattgcatctgtaaaagaaataatgggttctttttattgatgggctgggaaaggaattgaataaaaaaattgttttgattaagattgtttggttggtgtttttagggtttttttcagggtattggtagcaaatgtggagcatttgatgccatcttaaggaaaacctattccttctgtgtttattttttaattgttattgttgattagggtttcagaggtttgagcaatgttgggttttcagacaaaatgtgtttttatgatggtcttaagctgcatgctttaaatggtcaatggcatcaaaagcagtattagtgattagtaaacaggagatagtctaggtagtacgtttacaagctagaacaatgcaaaccaggttaaggactttgatcaaattggatgtggaacggtggagatgcttttaggtatacacacgtatgcagatttgtggtgatagagtgcatttttgaaactgtaaagattccataaaaccagatgttcattcctgaatgttttacacattctacttggatattcattttttatgctactatactattaagtatctgcggaggctgaagggatttgattgaaaattttccgtggttttgttggatagtgtcaaaggtttacatcgacaagctgcctttcaatgcattactgatgtgacttgatctgttctatgcagttgaaagaaagagcagagaagcttgagaattggag

SEQ ID NO: 59693 - DNA, 305 bp, Populus trichocarpa
  Intron number 2 from transcript POPTR_0010s21180.1 (locus POPTR_0010s21180) derived from phytozome v7.0 (chr-ID scaf fold_10; pos 18561310 to 18561614 reverse strand)
gtcaaggtatgtgattcgactatattgtgtttgtagaaagtgtaagtttggcagagattatttgaaactttgtttttagcatgatctagaaagtaagctccaagttgttgggaattttattagacttctttccagtgttacttgctttcggtaggaagatgttttcttatggtagttttttctgttatgaagaaatctgctttaaacagatttaattttctaaactagttgctttctttgtttttgtgcattgtttctgggagaaactgatttcaatatttgcttttaggctggctttgctggag

SEQ ID NO: 59694 - DNA, 929 bp, Populus trichocarpa
  Intron number 1 from transcript POPTR_0010s21180.1 (locus POPTR_0010s21180) derived from phytozome v7.0 (chr-ID scaf fold_10; pos 18561669 to 18562597 reverse strand)
tatctctctcaaaatccttcctctcctttaacaaggtccatttcttcctcctcttttcgatcaatcgctgttctctcttctcgatctattatttagcagcctcgatctgtgctgttttttattttgcattttgcttcataaagctggggatcttgtaatgtgctgcgactcatgctgagaaatcatttctttttgttcctttaattttgatcgtctgtttggatctgattttgtgatcattttactttttttgtctaaaatctgaaagaaaattgggaaattagcgacgaagaacgtaaaacacattagaatcataatgttggaaatggagttgttgcgttcgcgttttttagtggatgtctatgttttaatttagcatgcaattggtatgttgcgttaaagaagaacgtaatttcgcgagatttgcctgttctctttaatcatttatttgcaggtattcacaaatgcttcgatgcattttgatttggatgcgatttatctgtccattttctgattattttttaattccaaatattttgtttttactagtttttaaaaagacagaaacacgatggttgatttgctatttcatcctcgttaatattaagtatttagttttgtgcaatgacctacgaatctataatgaatgtggtttgattgatttgttttgtgttgctttacttaatttcaaaaaatatatatatattatcctctgcttcctttgttgcgttgctttactttactttatgctagttgcaaaatctggtttgattctgtctaataatttgaataaacagtgtcatgtacttattacgagatgattttgatgatgttcaagaagagaaaatgaattgatgaatctgctttggttgataaaagaagtccgtacctttttgttgattgctgtttggtgttgcaggcattagaag

SEQ ID NO: 59695 - DNA, 963 bp, Populus trichocarpa
  Intron number 2 from transcript POPTR_0010s17580.1 (locus POPTR_0010s17580) derived from phytozome v7.0 (chr-ID scaf fold_10; pos 16113617 to 16114579 reverse strand)
ctagtagcccctacgatccaaaaaaggtagtgtttgcccttgaaatcatcgccagaaagctgtcattctttgtccttgtactgtacaccggaacataaaggttttttatttattttcaaaatgggactttaaattctaccagtccctgctaacaggaacgcaacatgaaaaaataacgagtagtagttctttacagcaacaatttggtcgaaatttttcctctttccatttcataaccaataaatcttgtgactgataaatgaattttataggaaacagagcaaggacgacttcctaaaatttcagttcactggcttagattttttccttttcttttctagattacagtaatggttaatgaagaaaagatcagatttatgttttgaattgattttatcgacccactttctttctatggtcaatattgatcgacaggttaaatcaatgaaaccattgattcataaagtaatcgacagtctcgataagattacctatacttttgattcaccccttatattttctaatcattaacgtaatctctaaagaaatctcttgatcaatttccagtttgaaagaactcattttaacatgttaagttgccaaacattaaattggtaaaagctttcaagtgaattggaattcaaattatagctacatagaaagggagcaatagcttgccagttacaagcctgccttgagaaactggcaacagggggtttctagtggcacaagcccaccaactcaactcaaatttctaatcatgaagcccagcccagaaaaacctcaaggcacacataagcctaacgttcttctttgaatcatcaggtcctctcagtgcatgttttagttgatgtcatgtatctggtttcggtagaattctttgcacctttctttgtttgtcttttacttttataataactgatcttttggtaaacggtacaggttgcagacctaaggagcggt

SEQ ID NO: 59696 - DNA, 699 bp, Populus trichocarpa
  Intron number 1 from transcript POPTR_0010s25170.1 (locus POPTR_0010s25170) derived from phytozome v7.0 (chr-ID scaf fold_10; pos 20983852 to 20984550 reverse strand)
cgcgtgctctctctctgcatccttagctccttcaggtatcgtaaaccttagcttcttttatatctttgattattgttttaatactgtacatgtttagcttagcttgtaaagtttggtctttgtagttttggttcttcgtttttatgtttagagtttgatctgattcttagtttctttggctaatgggttagggactttgtgtttctgattaaacccattttcgggttccattgacttgtttgttaaagtagagtgtgttagtctttgcgtgtaaagtttggtctttgttgttcttgttcttctgttttgtgcttcaagtttagaattttattatgtgattctggtttttttgtcaagtgggttttctttatgtagtttttctcaagtgtgttatgtttattttagttattggaattgataattctatgttttgcaaatttagcttcttttatgatttgattggcttctgtcattatgtattgcatgttagttcttgcttcttagggtttggtatcagttgttactataagttgataacattttctatctgatcctcgtttttctctgatgagttttctcaagttggttttctttgttttttagcaatttgaattggagatttggtgattgctatttaagccacgtgtaagctttgactggatgagactgagtttgtcttgtgttttgtttttgtgtaga

SEQ ID NO: 59697 - DNA, 1018 bp, Populus trichocarpa
  Intron number 1 from transcript POPTR_0008s10020.1 (locus POPTR_0008s10020) derived from phytozome v7.0 (chr-ID scaf fold_8; pos 6245762 to 6246779)
tcggctgtatcccttcaaaggtaattcccttttgttttggtttctctttttgatctctttctgtgttaaagttgttgggttgtgtttgtttctgtgagattttatattttgtttgctttcagatctgttggtattgtttgttacctgaatttgattgatgggttttccgtcggaaatgggaatttttctgattgcttttttgatagagatttcttgttatgtattttactgtttatcgaaatttcgaacaaattatgctttggctattggagaggtttttgactgtttaacggaaggaataaaaacagtagaagattttgtttgttattggattcaacattttgatctccatctgtgaaagttcatttcgcagtgtatagaaggcccaaagtatcctgcaattaatccctgttaggcagtggatttaggttgggaacgctgatgaaaccgtatttcccaaaaattcagaaatttttcttttgtttttttacttaaaattattttttttatgttttcaaataatttggatgtactcgtatcaaaagtaatttttaaaaaataaaaaaaattattttgatacgtttccaggcaaaaaaacattttgaaccacaaccgctaacacactcccaaacacctctagattatccaaatagaacttttaagttgtctgattagttctactgattgtatgttttacatctgtggttgacatggtgatttgttttgtaaccagcttgtttatattagttcgtctaaaatgttctggaattcaacatattatgaactgtgtatttgtgcctttgaagttaacaaccagaagtattactcctggattgtcaactcatttatgtattctttgtatttagttatttaacctatcttttgtagctttattgttctttcttatagccaaactctttgacaagcattgggaaaaaatgtttgcacacgtaacatatttcacatttggaatttatccaacccttctttttttcaggcacttcttcactcatcacac

SEQ ID NO: 59698 - DNA, 652 bp, Populus trichocarpa
  Intron number 2 from transcript POPTR_0008s05390.2 (locus POPTR_0008s05390) derived from phytozome v7.0 (chr-ID scaf fold_8; pos 3116470 to 3117121 reverse strand)
aacgttacaatcataggaccccctgataccttatagtgagtattcatcaattcaataagtttttttttttttagaaattccagggctatacagctttttttattttaatattttgttttttaaatattgttgccttttggcttgaatttggtttagggttttaattagtcatctggttctgatgatgctaggagaatcaccttttatgtctggatatttgcttctgttttatttgatttccagtcatgatttttggatttctttttgtgaagtttacttaaagttggtgttaatgtccttagcgtttcgtttagctgttattgagcccatcagattttctttattcgattggattgccacctgagcgtaattaagccatgaatgcgttctgtttttttattgatttcgagtcttctgcttgtttcattccagtgctttctggtaacctgacaaggctgatacaattacatatacgtcaactagtttttggaactaaggcctggttgaattgagttttattttgttttttagaattatatccagagcttttaggagcattcgatttattgcattattagtggacaattaggtgggattatgttgtttcttaacaacaacttgtactctgctcacagtgaaggggggttcttca

SEQ ID NO: 59699 - DNA, 983 bp, Populus trichocarpa
  Intron number 1 from transcript POPTR_0008s07490.1 (locus POPTR_0008s07490) derived from phytozome v7.0 (chr-ID scaf fold_8; pos 4587083 to 4588065 reverse strand)
ttgaaaaggttttatctttttctttctttgattgtttattttatggttctttatgttgttttctttctgggttttctttgtagtgttggtttctttaattttattgttcttagcgttgtatttagttccaagatcaggatgcagccgttgatgtgcgatttcaaggtttggtgtaaattgtaagaaaatattggatttttgagtgttatgttgcctttggctttaaaaaagggaaaactcaattcatataaggttgcaggttttcctttccaatttcttctgcatgcttgtttagttgtgtatataatttgggttgaggatattatatagcattccaaggctgctacatttgtttgcttttgaggaaattgggaaaaggaacagaaaattagaacttttaaatacttccgtggtcttctttgctgttgtttaaagattagtgaagaattactaatgtgcattagttgcataaagcagaatggaaatgggtttaagtttatatagtccatagataagattcttccatcggcagttggcatccaaattgcagaatggtataatacaattttgacgtttgagaggtcactggaagcctggtggatataggaaattttgctttttaaattgacatttagaactgtgacctaagcttgattttcgctatttagattataagggtaggaaagtgtctttgtagaatcatttgtttctaattgtgacaaataccaaagttttatcattttctattcaacatgagagtgcgtgttaagtgaaatgtttacagcgtgacagtctcatagtatgtgtttgataaaggctttttgtttcattgctaatcctatagtcctaccagctattcttagccttccatttgtcaatctacctgcttaatcttcagttttgtactgccccccaatctctttggttgtgaattttccattctaaatgatcttcataaactcatgtttaagggaagtgattgg

SEQ ID NO: 59700 - DNA, 652 bp, Populus trichocarpa
  Intron number 2 from transcript POPTR_0002s25400.1 (locus POPTR_0002s25400) derived from phytozome v7.0 (chr-ID scaf fold_2; pos 22469637 to 22470288)
cagctgttctcttgtctgcttcaccaaacataaaggtattttcttttttattgttttatcttatttttctttctttctttcaatatcttgaacttgaagaagtatcatgcttggaaatatattcgaaatcccaggtgaattatcaatttatgtatttatgattgttagaagaatggagaagatatgaagcatgcttttttggagtttatttgggatggatgataactagaataattagaggcagaacacaaagttgctatcaggggatgctaggctttcttttgattttacagaccggggcacggaatatgaacatagaaaatattaggtggtgggggcaatgaagtttgtttttttgcagtaatagtggtgctcgtttactgatttgtgaggatgttgttggaaacttttgtacacatgaggtttgaagaaaaactcatcattttataattcagaggggaaagaaaacctttcagaggttgaggcttctggtctagtttagatttaggtaaagctgaccagagtttattgtatcacatatttgtcatactgctattgttggaagtggaatggtatctggtacatggactaatgtgagttttaaatgaatggtgcagaaaccccttgtgcaataccagtatctgtggaggaa

SEQ ID NO: 59701 - DNA, 470 bp, Populus trichocarpa
  Intron number 1 from transcript POPTR_0002s02510.1 (locus POPTR_0002s02510) derived from phytozome v7.0 (chr-ID scaf fold_2; pos 1418920 to 1419389 reverse strand)
caaaaaatcgcgataataaaaatcgttgtaaaaaggtattgaatattcaattttcttatgtttttttgtaaaattatctgaatttcttcgtattcctactacagattagttgttgcggtttttagttctgtttcgggccgattactggcattgcggtttcttttagcttaatttttgtagtttgtttagtattttaactctaatttttgtctttggttatcgattttgatggcgagtgggtggagttttagataattgaaattttcgcgggattattaattttgttttttttagtgatttattgagcgattgtttgctctggttttagtgacgaacatgtcttaaacggtttgtttggttgttatgtgattttttttaatttgatttttaaaaataaataaattttgaatgattaaatattttctgcgttggattttaactagttttttttttcttgataggtatacaaa

SEQ ID NO: 59702 - DNA, 830 bp, Populus trichocarpa
  Intron number 1 from transcript POPTR_0002s05960.1 (locus POPTR_0002s05960) derived from phytozome v7.0 (chr-ID scaf fold_2; pos 3930416 to 3931245)
gtgctcttgcttgtattgcattttctcaggtttgttttcccttttctacttcttcgtcttcttctttgtgcataccgttttggtctgtgttattattgatggcattggaatttacaatctgagcttctttgataactgaaacaagtagtaatgatgggttattgattctgtttgattgaatgtactttgaattaggtttggattgaataagggaaaatgggagattttgcgtcgtgttggaatttgagggataaattaaaaaatatatatattttggtatcggaatatattgtttttctttcaagattcccaattcgtgattctttagattctgggcaaatagataccagtcaaaagaaaatgttggagtggagctatgctcaccaaggttttttttttttcttggaaaaaaacgagagtgcatttaaatgctggaaattgttcttgaatacatgattttgaatggccagaaatttatccaacgaaagttgcagtttggatatgtgtgaggactatgcagcgtctacttccttggtaggcaatctatagacctgacatactcactaaaactaatgaagggattcgatccgcgctgggatttttccaaaatggcactctaactaggcgaaatgtgtacattagatttatctccattattagtctgagcatggtgtgtaatggcataatttgctcttgcacatactttgtataaaatcccattatatgttatgtttgttatttttcgccctttttattttattctatttgttctgacatgttatagctatttaccagtttacaaggatccatctgcgaaatcaacaaactgg

SEQ ID NO: 59703 - DNA, 535 bp, Populus trichocarpa
  Intron number 1 from transcript POPTR_0035s00400.1 (locus POPTR_0035s00400) derived from phytozome v7.0 (chr-ID scaf fold_35; pos 234492 to 235026 reverse strand)
gtggccaatctatcaggctgggacgtgcggcataggtaaatcatccatccacttttattcacaaatccaccctttattgtttcaatgatgaacatagcttctttcttttaatgtttttcaattgaaacatgtgattaaacatcaaaataatcacaattaaacaagtatatcactactaattcttgaataaataattgttagtatatatttttgatccattaaatagctattcctagcttttgttcttgtgtgcatgcttctttagtaaccgtgtgattctataggcaataagatagctattgtaaggatcattcttagcatcaatacaatcctagttccgtttgcagtttattctttccttttcctctctgttcttgaagctatatattgtcaagccctatctttctcaaagattgatttattaatttccggctaacagccatacattttcgagctaatatttattttcccattatcactatctgatttgatttgcacacagcatgattaatgttttccaccaccatatgcagga

SEQ ID NO: 59704 - DNA, 666 bp, Populus trichocarpa
  Intron number 1 from transcript POPTR_0008s20510.2 (locus POPTR_0008s20510) derived from phytozome v7.0 (chr-ID scaf fold_8; pos 14268339 to 14269004)
tggtgggtttttttcttattttgagactgaaatgtccgaattctgaatttttatgactgattgatcgaagtgctcttattgcttatgattgattattgtatttgtgtagtagaattttgcgaatcttgacatgttatgatattcatgggttgtgtatggtttaatggatatttgttgtgagaatttactgggttatttttttttttttgtagaaatgatgaagagatttatgactttattttcctttcttttctctgtgaaaatgaattaactgtaattttttttctttttcctgatcctcaaggtgtataaagcacttttcgttaagtcttgcttatttcaataacattgcttcttcaatataaaatgttgcaaatggaattcttccccattttgatatttcaccactccatgaaattttttgtcctttttaaaatgttggttcctttgtcggtcgtgtgattgcaatgcacaaggatattctctgagaatcgaacatttttttctcgaaccaaattcttttacctcctccaatactgtccaagtatcttttattcattctttcattgctggtggatgttttggcggatgaaaaacacaatttaatgggtactgttattggatgctgcaggggttataaacgattttacaaaaggactcaattag

SEQ ID NO: 59705 - DNA, 701 bp, Populus trichocarpa
  Intron number 1 from transcript POPTR_0016s06790.1 (locus POPTR_0016s06790) derived from phytozome v7.0 (chr-ID scaf fold_16; pos 4593744 to 4594444)
ttcatccctgggagatctctttcactgtcttcaatgtgagttttttttttccatagaaatttaatcttcttttcaagatcttttacgggtgttgtcttcttatccattgaaatatgattaaaaaaattgtgggtttgctgtagaatctaggaaaatctgttggtctatgaaatatcttgcttttataaaactctgggtttcatttatttttcatgaatttaaaattttcatttttggtgataagttactgttagtttttgggttgcttgtaattgagatgaagtggtttttttaattcaagaatataagcacgtgaaggtttttctttattttttatttttttatgtttgtgatttctttttcgtgggctattttggtagtcaattcgagggaacaaatgattcttaattggtctctaagggatttaggggttggatttagtcaagtaattctttctttattgtcttggaaaaaagcttgggtatattggatatcttgcaggtttcttgcctgatggttttgtcatttcaaaaccttcttgttgaggagattgcttggaaatggttttttatttgaccttgtaaaacttgtttcttcgattgtttggatttgtcttacttgttaacaactttgaagggaacttagttgttttgtgttctgattcagggtgtgaaccaagggccgaagaataaggttcctgg

SEQ ID NO: 59706 - DNA, 586 bp, Populus trichocarpa
  Intron number 5 from transcript POPTR_0016s02400.1 (locus POPTR_0016s02400) derived from phytozome v7.0 (chr-ID scaf fold_16; pos 1182785 to 1183370)
catcaaggtaagaatctctatctacatgtattctcttcttataatgaaacaacaattttcaactattaaggacgtattttattgagtgaacgatcaaatttcttggacagagtcaaaaggaaaccaactgtcatgaaggtgggtttgggaggcagaaaattgtgttaactattgtgagacaaagcctggcctcgagtgaaagactgaattttttgagtttgtgctgcattttattctataatttacgaatgccaggtctagtttaataaagaaattctttgaaacataaatttggctgtcctactggaacgttttctttaaccatgtgttctgcataaatcagatgtacattaatttggttttcttaaatataaatggaaatatatgtcaaatagatttgatgacagacacgctgtttattgactctgcaggtagctaataaatctttgcaattctgtttctaatacgctgttcaggttcttgtttagtatttgcagatgtaataactgctaatgcttttcactgtgatccaggcccccgtctctagtcagactgaagaggctggaagaattagacaaggaaatag

SEQ ID NO: 59707 - DNA, 150 bp, Populus trichocarpa
  Intron number 2 from transcript POPTR_0008s04880.1 (locus POPTR_0008s04880) derived from phytozome v7.0 (chr-ID scaf fold_8; pos 2827339 to 2827488)
aggttagataagttcatgcttaatgtttatgtggccatagttcatttgttatttttgtttttgaattatattattattattctttttatcaattttaaaactgttttcttctgtgaatttttataggagtttgtgtcgaattctcgagga

SEQ ID NO: 59708 - DNA, 625 bp, Populus trichocarpa
  Intron number 1 from transcript POPTR_0008s15680.1 (locus POPTR_0008s15680) derived from phytozome v7.0 (chr-ID scaf fold_8; pos 10455142 to 10455766)
tcacagtcggtgagtttaattttatatattttagagagagagatggaaagaataaagacagttagtgagatttcttcctttttctttttggctttctttgagtctttgttttgttcttctctctttaataatatacgaagcaattcactgtctttgtcctttttgacgctttggttaagttctcttttgccaaaaaaaaaaaaaacttgtttcttctacggtgtttgtttgcttctctctgttttctgatcgaaccaatttgtaaaagttatctgtattgccctgcttatgtatcttttttaagagaaatctaagtctgaccttgttttgatccctacacgctccattttcactcttcttttatctttttggttttatctctcattcaaaatccatatcaaccacattaacagttgatccaccatcgtttcttttcccactctataatctcttgaaacacaaacaaagactctgtctccttcacagtcactagtctattccctactgttattacttttaattctctcaataaagttataactgcccataattttacttcatttcttgatttgtggggtctattcatgcagcaggaggcatctccacgcacttcaggccgactctc

SEQ ID NO: 59709 - DNA, 942 bp, Populus trichocarpa
  Intron number 2 from transcript POPTR_0008s15680.1 (locus POPTR_0008s15680) derived from phytozome v7.0 (chr-ID scaf fold_8; pos 10455838 to 10456779)
tcaaggtaattccttaaagttggccgaagctgattaatgttatgaaatttgttgctatttttagggtaattttaggcaagtttaaataaagttggtctcgtcgattctgtgtttgtgtttgtttttgatcttttttggtgcaaaacacgatttctgatccactgactctaggccccccacgacacgaaacatatctcaggctttctctgtaaccaatgatactttttcgcaccagagatggagagagagagagagagagtatctattatctattgttctgtttctccttttcaaataagaaaagcaataatttttttttgagaatgaaaatcaataatactattgttttcaggtctcctgtagtatactttgctttgttccaaagaaaactactgtggcttttcttgtttctccttgtatttttctgtaaaaatcaacagggttaacaaaattttgagtaagatggtgattgcttttctgtctttttagcaaaattataggaactgctattgtttgcgatgtgcgtgaattgcataatgacgatatacgtgcccttgtctgtttagatctaatcaccttcttcgtttgtagtttttagaagacgcgggtacaagctggtcccgtagagagtgaattagattagttacaatgcataaccacagcaacacatttatggcgtctggacccacttttttttagagcatcgtaacaacccaccaccataattttagataatctctgatgtgtctctatgatgattaattattagacaatcaattttacttgctggtttaatgattcagaaaatactaaaatctcgaacccaatttttaggagaaaatatttcatgagaaaggaaaccgatgttttttaatgaaaataatgagttatagatccatgtgctttcttctcctcagttttgtcgacccaacaatccgccta

SEQ ID NO: 59710 - DNA, 946 bp, Populus trichocarpa
  Intron number 2 from transcript POPTR_0016s06690.1 (locus POPTR_0016s06690) derived from phytozome v7.0 (chr-ID scaf fold_16; pos 4511712 to 4512657 reverse strand)
cagttcaaactccactcctccgctggtgtctaaaggtgtgcttttgttttctaattttgcttttgcatggtatttatgttcttgtaatgttggctttgaaatcttgaagaacttttcttggttgtttttagacaaggttccgcttctgttggttcaagtcttttttccctggactgatctctcatttccaatcttttctgtttgaaagtttgcgagagtttgcagtgttgtttggttgccgagatgttaagggaaaggaaaggtcttgaagctcgcatgctttaggaactacaatagttaaatctccattctgctcctagtttccataagtgaagtgggttttccttccaatgacgtgtgtggttgttgtgtggggttttgcagttaaggatttgatttatcttttgtttgattgctaaggaggagttgtaaaagatagaatttggtttgtctgtattaacattaaaagggaggtaactttttgtttaaatttggacctctacgcttcgtaatttttagtttcaacattgaaggatatgtttcaatttcctgaaaccagccagccaaaacacttcttttgttctgttttgatttggaagactttcatttcatttagttttgttaatctgttctgagttttgaagttcgagtcccttttctttgttttatcaatcaaatcacataggatctatatgtttccaatttgattttatattatttctggttcttcattttataattgtagcttattcaactgtgttgtgaatttgattgctgttcatttttgtttcttagaataaggttttcactttcaacaatctatctggctgttttctaagtaagaacattttgcttgggtcaaaatgtgtgctgtagagcagtgtgcagtcacagtctacttatctattgtaattttgcagttccttgcaacaagattcctcgaaga

SEQ ID NO: 59711 - DNA, 899 bp, Populus trichocarpa
  Intron number 1 from transcript POPTR_0016s03760.2 (locus POPTR_0016s03760) derived from phytozome v7.0 (chr-ID scaf fold_16; pos 2107143 to 2108041 reverse strand)
gatttcatatctcaccatgtaagactgcttttcttccccatgagcattttactgtctgatctgtaggcatcgactcatcaagaacattgtgatacataagtcttcgcataattgggctctgctttgcagttgcgctttgtaattgttatgatttgatttcagaatcattatataactccagaaaaactgtttggttggaaagaaagcaaagttctgtaagtgagagattaaaggagaggagaaatggtggccttctgtggtgttttgtattaatataaaagttcatgatacctatttccgaaattttccaagtaatagtaattactgtatattaataactagtagccagcaatttaaatctctttatcagacttgctactggccatttgccccactatcaaatgaatttgtagggtatgggaggggacttgttggaaacgttgtggaggtatcagtttttttcatagtggaaagatgttaaagatggtttccttgttttcttccttgaaattagatttaaaaaatctccttctctgtcaatctgtatttggggaatgtgctatttcgtaaagttttgcttaatagtgtggtagataacacagtttccttccttttttgaatttcaatttcaattttttggaagtcatttttggatatttgctctaagtatgctttttgtttagatggtttcttgacatgtgttttgattgctgaactatgttatctgaatgtcctgatcaaaatgatatcattgtgcatttacaaggataatttgattatgaatcttttctgtagtttcttggtagagcatgctttctccaaacctgttatcccttgtatgattcctgctttttatggcaactggttttggtttctttgtcagtgcaccagaatacagc

SEQ ID NO: 59712 - DNA, 678 bp, Populus trichocarpa
  Intron number 1 from transcript POPTR_0002s05800.1 (locus POPTR_0002s05800) derived from phytozome v7.0 (chr-ID scaf fold_2; pos 3802156 to 3802833)
tctcctccgattctcttcgatccaaacctactcttgtaatctttcttttcttttcttccactttctgttttgttccccgtaaatatatatttcttaaagctggaaagaagcgtttcttttctctgtttcttgaaactgaattttaggtaattgtaatcttgttcttagttggtttttaggattctctaggatttctattagtttttttttgttcgagacgtgttggctgaaatggctgcgaatcgattactgagcgtttaattccttgatatcggtgttttttatgagataaaagtaaaacagagaattatcgaattataagatatttaccgtcgtcgtcatttttttcctggctgagttgagaatgggaagcaggaaaccatggtatctaaaaatcgtttagcatctcaatctttctgtttggttgctgggaatttttttgtttgattggaagctgaattttagaaaaacaagcgatttctttagtctaatattttataggatttttgtttttgtttaatatctgttttggttggatagaaaataagtgtttaattttttggtgtaatgtttgctagagattaaacaggtgattattgaatgataagatattcacaacttttttttggtgagtgggaagcaggaagctggggtgcttaaaaatcgtttatcatctct

SEQ ID NO: 59713 - DNA, 629 bp, Populus trichocarpa
  Intron number 1 from transcript POPTR_0016s06440.3 (locus POPTR_0016s06440) derived from phytozome v7.0 (chr-ID scaf fold_16; pos 4333563 to 4334191 reverse strand)
cttctccttgtcagtcagttttctcttctccttttcttttcttaatcctcttccatatagttcttgttgcccagatgcagtttttataccagcaacatatatctaatccagggataaaatttattatttgtttctttagaggtattaacaatatttgtttttggggtttattattcactactattttcaaaatctccttttttaaaactttatttcttttttggttccttgcttttgttgttttcatttatctttaattttgggatctgctgtacttattttatgtggcccaaaaattcatcaacagcaagtacttcagaaaattctttaaggaacttgaaatggtcacaataataagatcagcagagtctgacttgggttactaactcaattaatcgcatctatcaaacttttgtgccattttttttcctgttgtttaatgtttcattagtcatcacttactgatttgattatatatatatgtataaaattcaagctcacgatcctaaagatgtaagatcgagtctcgaagtcagttgttttatttgtggtaaaaatgttagaagaattccgtttccctcaatgacagatttatactgttcttctcttggcccactgctgcaggttca

SEQ ID NO: 59714 - DNA, 672 bp, Populus trichocarpa
  Intron number 3 from transcript POPTR_0008s14990.2 (locus POPTR_0008s14990) derived from phytozome v7.0 (chr-ID scaf fold_8; pos 9991002 to 9991673)
atagatatgtgagttttaaatgctcatgcttgagttttttactacttggaggatactttgtgtacaaccattttacttaaataacctttccggaattgtgttagcattctcctcccaagtgctatttctataaagagaacaatgttattagctgtttagaactttgggctgataaagaactaagtaattgttaagtctagaactgacggtttatctatggaagcctggtgtactctgttacgctgaatagtttgccttgatttggaaatttactagtccttttgacttatgattcctcctgtgatgaaggtggagttagaactctcaattcaaaactattcttttgacacaagggtcttacttgtgtagctgctttgtgtacatgatctgatactgcagcattcttgtctgtttgtattgcctatcttttggcttttttagattcgttgtatctattttttgttgcttttatttttctgatttcttgtcggttatggcttgtttaatcttggtatgatttccgatatatgcatgaatgctttatgaggatgcttgcaatacaattatgcaataaatctagtggacattcctctttttgatgattatatttgtcatgtgtgttttgtgtttgttgcagttaattgctgttgctgcactttttctcgctgcaaa

SEQ ID NO: 59715 - DNA, 462 bp, Populus trichocarpa
  Intron number 1 from transcript POPTR_0016s14420.1 (locus POPTR_0016s14420) derived from phytozome v7.0 (chr-ID scaf fold_16; pos 13634779 to 13635240)
aaattgtggtatttgctggctctcacgaggattctgtaagaattgcaattcctattcttttaatttcatctaccgtttgaaaatttgaaatttgaattcttgaattctttttgagtgatttttgtgtttttccaattgggtttcccttttttgactgttgaatttgtgttgggtgttagtgctttttgttgaacatgagaaagccgtgctgtttgattaacatcgaattttcatggtttgatttggttttgtatttagagcaatcccatcttgtttgtgccaaattttaaagctatttgtttctccttgcaattttcatttcaagagagatttttaaaatgggttcttttcaatgtttgaattgaaatgaggtgtaattggatcatcttttattgttttattcttattttttgttggcaatgtttaggagcattcagagattgaagtggaaaaggaaagtca

SEQ ID NO: 59716 - DNA, 923 bp, Populus trichocarpa
  Intron number 2 from transcript POPTR_0008s04870.1 (locus POPTR_0008s04870) derived from phytozome v7.0 (chr-ID scaf fold_8; pos 2820014 to 2820936 reverse strand)
gtcaccggaggtgctcctaacaagctctccaagatgtaaacaatcacaatcccttcacctctctttttctgcctctccgcgttttttttttcacttaaatggattgattgatggatctagttctgtgttaagtttaatgggttcttttcttggttcgtacttatggattgaggcagtgttggtttgtttttttttttttttttttgagcttccaagctgaatttgctcttagttattcgtttaggatcgactttaagctatatcaacgttctttattgatttaggcagcgtctgttgtcattctgggctgctttctgtaataaaatcaaaatgaaaataatttgtgttcaaaaaatgtttaagtgatttcaagtatctagcctgccatttttttggggagggggggtgatggttttgcttttgaaattcaatatacaagcaacttgaaccatctgttttcttgtttccgtggaaagaaaaaaattgaaggcctagttgcatgactgttaaaatccgggtttggtgtaacctattttgacaattaaggttttagttttatgagctatcaagtaatgctttttaataacgcgtaaactgactgaagttaataatctttgttttagatattgaattcgctagcaaatatatacagtgcttagtcatctttttgaacaggaaacttgacaagtttctacctctttgaagtgataaatgagtttttctactttggaagtgaaaaatgcctaggtcttatatagggcatgcacagctacttcgtgttttctatttatctgtagttggtgtgcctcgttgatattgttttattcattgtttaaattgatatttatgtgttttctttcttgtgttgggtcttgatgtggtgtgcagcaaggttgtgaggttgtccattgcacaggtgttga

SEQ ID NO: 59717 - DNA, 902 bp, Populus trichocarpa
  Intron number 3 from transcript POPTR_0002s20050.1 (locus POPTR_0002s20050) derived from phytozome v7.0 (chr-ID scaf fold_2; pos 15979248 to 15980149 reverse strand)
cacatctgtttggttacaaatctggtactaaaactgtgagttgaattgtacgatttctaccagttcatctaccatgtaaagatcgcattatccatatgtaaaagtttggttatatcagcaaagatgctgatgtgactattttctcttttctcaacctgccatgtcacatgaatgattagtttttatcgtctctgggattggactttctttggttcagctttgttagtgggccattcttcaccggaagcatgttttctgttgatttatcaaccattttctgctcaaacaatgtcctttttctccattgctgtttgctttcttttctttgttttttcttttttttttgacttgtcatataaaattctcttgccaagagaatccagactacaagaaaatagttttgaatctgtttttgtggaatacataatggacgtcttgtttgatttctggacatcagtgcgactgtctttaatctctttcttttcattcagtttttgcccccaactgaaaccatgctcaatgaaactatctgaacagtgtcacaactttttaatataatgaactgcaatcaagtaacaaaggtatccagaaaactgtcaaacaagacctgacagctaagctggtgcattcggttgactgccctttctttatcgttaaacaaccagatgactgtttagcatttgcctgaactccattttcaaaagacagcaaaataaaacttgattttctttcatcagaatatacttatggtttatcagctattaccattttttttccaatggaattcttgctattgtcaagctttaattctattattctccctctggtttatggaactgacttaaaccactgtatcttgttttataggtgaattgtggagtgaagggaagtcttgaacctcc

SEQ ID NO: 59718 - DNA, 522 bp, Populus trichocarpa
  Intron number 2 from transcript POPTR_0002s20050.1 (locus POPTR_0002s20050) derived from phytozome v7.0 (chr-ID scaf fold_2; pos 15980211 to 15980732 reverse strand)
gtcctaatagggctcaagcaaaatttagaccgaaggttcaaaactcatttaacaagcttttctgtctgcgtcagactgccatctttctccattttgaagtctaggaagaaactggactagaggaacattttctgtggtgatttcttgtactataatcatgatgttggattcaagaataacatgatgttataagaattttacttcttccattttggcatctgcaagggctttgtactttgaagcttgctcccatcaccaggtccagtcattttagctcgcaaaagtcaaaaggaaatacaagtgactcccattgtgtcaaagtacatccctattggatcaaaactcaagggcagaaaaaaaaagggtttagcttattgctcaaccataaactgaatgctggattagatgttttatacatattggtggcaaagtaaatttaattagaaagatagttaatttaatgattttgatgataaagtttatagtacatcacttttaattttccgagagtgcttttgcagg

SEQ ID NO: 59719 - DNA, 747 bp, Populus trichocarpa
  Intron number 3 from transcript POPTR_0002s09230.1 (locus POPTR_0002s09230) derived from phytozome v7.0 (chr-ID scaf fold_2; pos 6541088 to 6541834)
ctacacaggtaagatttggtcttaacaatattttatctgtcttgctgttacttgctactaccttgatgaattttgttaaatcacgcactgacacaagcaaaatttgcttatagaacttcatcgatttttaattttttttattgacctaggtgtatgtatatagctatcgcattgtttatacatacacacaggcttttcaatcaataacatgctacattaatcaactaatcagatgtgcattcacctagctgacatattcatcaatgtcccgattctcgcattccatgtattctatcgtataatatgatagagtgatgaatggcacaagtatttatcatccaggttgcaaaatcagagcattggctcggtgaaaaccctgagagtggggattggcatacttaaaaaatactcagctttctagaatatacaagcaagaaaagaaaatattattcttttttgataattttcaattatacagaagtttattatcctgtaaccgtaatcaaaccagataccttaagatttgtagaagttctgtttgatgcttaacaaaaatggtgatgtatgcagctcacatcagtcactgttttgcataatattgagtttgagcttcgttgctactgtggcttaattgcatatttcctgcttgatggaaaatattgtttatctttttattcagcacatagtaatctctgcaatcactaaatctctcattcctctttacgcaatgcagattcctcaatcagg

SEQ ID NO: 59720 - DNA, 887 bp, Populus trichocarpa
  Intron number 2 from transcript POPTR_0016s00830.1 (locus POPTR_0016s00830) derived from phytozome v7.0 (chr-ID scaf fold_16; pos 309927 to 310813 reverse strand)
tggccttccaatctagctcaggtttctctgttcaggtctgtgttttctactactaggcctctactttcccttcaatttttctaaatgatctgtttggttgatgaaaagaatattggaatcccatattttaatcgagtctcttcagtttttacttctgggtttacttctgagttcgtagtgacttcttgattggcttggacaaacatagctgtgtcaacttcaagatttttttttaaaaaaagaacgaaactatgtgattttaataaaataaatgacctgataactcacggattaacttgatgacctgttgatctaataacccaaaactttagtcgagtttgacaaatatgattcaaagactgttttgtggttcaaatttcatcactgaaaacgcatgtgagaatatttctagaaataaacaaacagaggctgaaaaaggacattgcagaattctctccatggtgtaatgtgtggagtgaaattaactcgagcaatttacttctttttttttcataatagagttgaacatgacaataattctagttgaataactttatcttgttggtatatgattacaagtgcaagttcactggttaagaatctgttttgtagctttccttgacttatgggtgatattccacaggggacagagtgcgtaatactataaacattgaacttggtttgtgctggttgtcatgacttatgggtaaaatcatgacttatgggtgaaattccttcttaatttgtagtggttgtcatgagtttgcttgggatcatattcctcaagtcattggtgaagctagaacttccatatttgattagcttgcacttagtttttggaaataatgttgtcatatgctaaccattttgtctctacagagcactgc

SEQ ID NO: 59721 - DNA, 740 bp, Populus trichocarpa
  Intron number 1 from transcript POPTR_0016s08560.4 (locus POPTR_0016s08560) derived from phytozome v7.0 (chr-ID scaf fold_16; pos 6367181 to 6367920 reverse strand)
ctatcctctattcccgtgccgtacctcaaaacaaagtaatcactctcttctcttcttttgttttttttcttcatttctttggccgacctgagctctatctctaattatttaagatccaacctttgttggctctttttcttaataataatagtagtagtctagatcgttaaacctaaaaggaaaagtagtatctacaagttgagaaatccgtctcttgctttacacatcttgaaattaaattctgaattttcggatcctgattcgggtttggatgtacaaatgtatgatttttgttagattgattagtttcaatttttattttttacaaaagttgatatgctgtttttatgtagttcttcttcttgctgatgaccttgttgctcagtgaaaaggaagtgttttctttttcatcagttgcatgatttgattagatttaattgaatttatgaggattttactacataacactccgtttggttgctgagaaaacccaggaaattgaaaagattgcccttttgttatgatactgaggtgtgtagaagccattttatatgctttaactagtataaactgtgagagttggtagagttgagtggattgtttgaaaaacaatttatgggtctttggaaatcttgttgctggcatgattatagacgggggatccaattcaaggaggattctttttaaattatattttatgaagatatgtttaatgttggtgagttttctccagggcaatc

SEQ ID NO: 59722 - DNA, 851 bp, Populus trichocarpa
  Intron number 1 from transcript POPTR_0016s05230.1 (locus POPTR_0016s05230) derived from phytozome v7.0 (chr-ID scaf fold_16; pos 3185939 to 3186789)
aggtatttgaacatttatattttgtttcattgtcttatttagttagtttgtttgttttacatgcttttaatgatttttcgggcttaaatttgaaatgaggttaatgggtttttgttatttctttgaattgttttttttttggcgctttgattgctgtttagctcagattctattgaatgtttttatacgctgtaaatgggaaattagggtttcttgttttttctgcaactttgttcattgaataacttgcaaaaggcatcatgataaatgctaaatctgtgaaactgcggtacgtaaatctaattggggaataggtttaagaacacgagaaagcattgtttctttaggaaattaagcgagggtttgcaattagcatacaaaatagcaaaagagaattcgctttcgatgttggtatacttgtatagatattgtttatttatttgaagtttatatgttttgagtagaataattgactgtgcaaagaatatatttgagtagtttaagtaggttgcagtgagtatttatttgtcgaggtgcagtgcagatggtagattgaacctgtccctcttgttctagcatgtggtaaacaggtgactccatggcagaattatgcatttttggtacttctgtttgctttcactttttggctctatttctgcctttggtgcgttgttcacgatttaagcgctctctgtacttctgtttcttatcttgtctgagttctgaccccttcttgtcttgctttgctttgtgatgcggtttactttgcaatttgtaatgaagtgagctaacaaaatggcaacccacttgttgtaggttcttggtgttgagaagacagcatctcaacagga

SEQ ID NO: 59723 - DNA, 746 bp, Populus trichocarpa
  Intron number 1 from transcript POPTR_0008s01090.9 (locus POPTR_0008s01090) derived from phytozome v7.0 (chr-ID scaf fold_8; pos 510788 to 511533)
caaggaacgaagaaggtatgcttactttcagacattgttccctctttttaggtgtttgtgtagtaatgtttggctgtgaatacgactgcttcagctttaacattcaagtctgaatctttattgaataaagatcttaggatgatttctatggttctgttggatttgattaagaacttgagtgagtgttgaaaacaacaataacccatttaaatgtgaccgatttactctttttttgttggataattctctctccatgtcaagttaattaacttttctagtggtttaaggactggccagaggatgcaccatccatacctcatctaaatgccaactcctgaatcccctgctactaataacaatggtagctagatttgcccttttcatgtttttatcaaagcttccacgcttgaaattactactaaatacttaatttcagttgtctcaacccccctaatggctcattaatatgaggaatagctgcataaggactcgtctgctacaagatagctgctaaacattgttgcggatctgaaagcctctctctaatcagtgaaatagagaagcattttttggaatacagtttagcaccccatgacaatgagcacaagttttacatcattatacaagcattccatgaataaaaatacattttcacctcatcattctgtattgtcattatactttcttctaaccatatatgattgttgccagattgtcatcttccaggacaataattattgtgcaag

SEQ ID NO: 59724 - DNA, 623 bp, Populus trichocarpa
  Intron number 2 from transcript POPTR_0016s03590.1 (locus POPTR_0016s03590) derived from phytozome v7.0 (chr-ID scaf fold_16; pos 1934107 to 1934729 reverse strand)
ctgttgatcttagcagaagtatgtaattgaaatcttgacatccttcaaaagcagattttctttgtattggtgatccttagacttctaattttatttccatgtctttggtttcttttaaccatctaacgttgtgtcatggcatgtctaatttcacaaaatcatgcataagacatagctatttaacctttttatcaaatattgtagcttagggggtacttgattgttattctcaattttccatttgggattgcagtcaatctgtcagttgccaagacatcatgtctcggtcagatttttagcctggggtggagttctcaacatgggtcctttttctctataacatctttccttaactacattacttaaagcattgatttttgatttggtcatcttctggttgaaacatcatcagcacatccatgcatgacgttgtaggtagattgcataccagataatttcagcttgcagcatgatccattgagctcacattgcatagactgctatatgattatgctcttgatctttttaaattttctcttgatattgatatagtttcttgtattcttagtcatttatattgtctttcagatcctctttttcatcaattaaaatctagcgggcag

SEQ ID NO: 59725 - DNA, 777 bp, Populus trichocarpa
  Intron number 1 from transcript POPTR_0016s03590.1 (locus POPTR_0016s03590) derived from phytozome v7.0 (chr-ID scaf fold_16; pos 1934781 to 1935557 reverse strand)
agctttgttcctcagatatcaacttctaatcccatgtaagttgttttcagttcaatattctttatcagtttgagttgtataattcattcttcctgttgtatgatgaattatctggctaatctgtagtttatgtctatgatttttgtagatttgattgtggttgcttgtttatttctgggttgttgtaatataggctgtaattttgagtgatagcttcctgctaatcagtgagaaattgtttgtgtgcaataggaaaattaagtgtggaatatttcatcgtttgcttggtaccttaaatgaaaagaaaaaatgagaattaactcaaatcttatatctttcttttggctcacaaactgcaccatttatatttgcatttttaaatattttatggaacctaagattaacttcttaaaggagcccaattgatgcttttagttggaaattttttgagggtcttggagtgactataattctcctttagagaatgcatgctgggaacagttgtgttcatgtaattttggaggtattgtttgattgtgctatgtgctatgaagctcttgtgttgatatcagagagaggacagagagtagagttagattcggtcccaatgtgtaacaaaaaaaatcagtcccaatgcattaatactggtccaaccctttagaatttacagatttgttgtttgccttttcttgcttctgtataactggtgtggttctcatagttctgatattatatgtttcagtggcacagaaggaaataatattcgttcttccagag

SEQ ID NO: 59726 - DNA, 584 bp, Populus trichocarpa
  Intron number 1 from transcript POPTR_0016s14430.1 (locus POPTR_0016s14430) derived from phytozome v7.0 (chr-ID scaf fold_16; pos 13643119 to 13643702 reverse strand)
ggggttacctacttttgtccttgctgatcgtggaggttagcttcttaaatttcacctctttgattgctttttatacctttttatgtataattttaatggcaagtaataatttgtgtggagtgaagttcaaagtttgtttgtagtttttagtagtatattaatttgttttgatgataaattaattgtgtgataattgttaaataggtttgatcttagtggtaattatgctatatatgccatgttagagtaatcggaattttttttctaaaagtacctggaatttttgtgttgatttctagcacgttttgtttattatgtttagaaaatggactttatgtatttatgaaattttgaaccatgctggctctctgcttcgttgtgaaagttttaccttgattccggaaccaagtgtaattttatgtctggtggtgatactttggatcatatgctgtcgtgtgtggctgatattcctgggaaaagtaactatggtgttcttctctatggaagtgatcatgttcttatcatctgcctgtagatgtatctgaaatgtatatttttgcagattgttactttaccttgaaggc

SEQ ID NO: 59727 - DNA, 1038 bp, Populus trichocarpa
  Intron number 2 from transcript POPTR_0008s12400.1 (locus POPTR_0008s12400) derived from phytozome v7.0 (chr-ID scaf fold_8; pos 8008984 to 8010021)
gcttgctggtcctaattgggcaccctttgcatctggtaatatttcttgtttgctatagttttcttggttcctaattcatcttgctagcttagaatttgattgtgtttttggaattctgtggttttgctttcacaatttatttgccttcatttctcatgaccttatcgttgttaccaccaactttgttagccctttacttcaaaacatggaactttttaggctgcacaaaatttcccgcagtagcagccatgacataagggtctcaatgtgcttgatgctctctattttcctttctgggtcatggtttcagaatccctccatttttaactgtgggcgccgtttataggctggtgtttttcacattataggccgcgggaacttgaagttttctttgaaattttatgcttgaactttgctcattgtactgcaaattgaattggttaattagtaaccatacccatggagtcagagtaatattgtgacgagcctgaaacaatcacaggaggatgatatgctgaaatataatgcgctggagtggtatggacatactccttgtcttattatgcaatacggttgagttcatgaatttatttagcttgtgtgagcatgcttcaaaatgcattatagcatctgcattgcaagaataaatgtgggatccaacaagctttctgggggatgcttgcagagaaattcaaaaagttttagccaccaaggaaagaaagaaatggtgattcactaaatgtagttttcacactgaccttcatttcagtgagggtgaattaagacacaaacgattgatttgtttctatacaacacctcagatatataccacgcttgaaacttgagtcaacaaaccatagtaagtgctcttattctgtattgagctgaatcttcagggaattgtagggcgtgaatttaattatctagcattcattgcttttctccagcttattcttttttcatatcactgatatagttatgttgtcttctttggtttttcaaggaaaagttagatatatagctggtacagtcaaccac

SEQ ID NO: 59728 - DNA, 612 bp, Populus trichocarpa
  Intron number 1 from transcript POPTR_0008s17250.1 (locus POPTR_0008s17250) derived from phytozome v7.0 (chr-ID scaf fold_8; pos 11589104 to 11589715 reverse strand)
aggagttgatcttcttattgttggccagcgacgaggtttctctactgcaatattaataggatgagattgacaagccatcttcaaactttacattacatttcatacatatacagcttgctgtataatgcacataaatacctcatgtaaaaaaagaattcccttatctgaatgaactctgttaacagaccatattcacagacctctctaaatctattctgaagggctcaaaacttccaaatccaatgctagctagagtacagaaatataggtgtgttagattatggtcctcaaacagtccggccaaaaaaaagagggacggccctcagcacgtcattcaaaaaggaaatctgtgtagcaataagacgactggttctgctcctcgacaagataatgaacatgttggggagagattgggcaggagagagcttataacacgaccacagaccaactcatcaagaacttgctcagaagatcctattagaaacagaaaataccattttgaacttgttatttagattatttttttggatatgaacttcctaactatctttcttttttatatctgttgcactagcaggtataattaagctgtcaggaggttcggggacaaaa

SEQ ID NO: 59729 - DNA, 586 bp, Populus trichocarpa
  Intron number 5 from transcript POPTR_0008s05640.1 (locus POPTR_0008s05640) derived from phytozome v7.0 (chr-ID scaf fold_8; pos 3277018 to 3277603)
ggaggttgttgctgcacaaaccaaagcaattgcaggtattctattgatagtatccttaaaaaaattattttgtggttctacgatgttgtacatgattgtgtaaatattccgcgtaagaagtttctggcctttatatggcggtgaaacattgttgattaagttaatctgttgctagtcgggtatgcagaatcattgttttcttatcaattgaaatatcgtactctagtttacagtgatgcaatgttctttgtttacagtgatcacttgctcacacactttagatgaacttgaattcaactccgtctctttctcctagttccaattctgcaatgcaccttcaaaacaacgttcagagaacttgtatttatcatacagttaattgaattttgatcacaatttgatcatatcaaggggctccatatgtgcatacctttttcagtacatctgttcattaatttggaacatatcaccatgttgattcttttatatgtcttgcaaccttcacagtgtcttaactgtaacgagttttggagtgccatgattttcaactttgcttttattgcagcgcgagtatcaaactgggctg

SEQ ID NO: 59730 - DNA, 686 bp, Populus trichocarpa
  Intron number 3 from transcript POPTR_0008s10090.1 (locus POPTR_0008s10090) derived from phytozome v7.0 (chr-ID scaf fold_8; pos 6324721 to 6325406)
tgaagaattttcttcttcacactttgcagttgcaggtatattaagccaaacattcccttacttatttttttgcatatgtagtgtgtatttttgtctgtgctcacatttgagttacgttctgatgttctgctgcttaataaagtggcaattgtgtttgcatttgaaacaaagatctgttgctttggcatacatttgatgttcttttacagcataacacttttgcagtggtcgcattgattcacacttttcatgttgcttacacatttatactcacttttcatagtgctttccatgtttgtgactactgccttaaagaatagccaccttctgcagaaaccaaatttatgggcaacaggctgtgatgataatattgccaactccatggaggatgcatttcatctccaaaaaaaaaaagtgacaatagcttagaactttaacttggggaagttgaacttttgaaatgatgcatcaataattgcaattttcaccaaaattagcccattacatgttacttttttatgtttatcaaaagaaaaaacacactgagagagagagagagattgctttttatgggggataaaaagagagaatgacaagtagcaattcttcaaaaatcaatttaaacttaaacttctctcttgtgtatgtcagagctgggagaaaacagtggactgttacagtcctgg

SEQ ID NO: 59731 - DNA, 840 bp, Populus trichocarpa
  Intron number 2 from transcript POPTR_0002s04100.1 (locus POPTR_0002s04100) derived from phytozome v7.0 (chr-ID scaf fold_2; pos 2565633 to 2566472 reverse strand)
cttcactgttacattgtttggcttgatttcaagtggtaagtgattcactattcttactctcttgcaaatatttgatcttagattaggttataattaatttattaaagggagcagcagggatagcaagaatagtgcacttgaatttaagtagctgtaaaagcaaaacaatgcctgtacagagagagatcatacagggagtagcaaagttcttgtttatattgcgggattgggtaaaaattgattgcattttaggactttggtagatgaacaggcagatatttgatcacaatgttaagaataacatctggttctattattttttaaattttcttttacccattaattaaaagtgtttgtttcagtggttcctaatagatttaggatactcaaaatgtaagagtacctccagaatgatgctataatttgattatgtttcgacacattctttgtcgtgttctcttcatactgattaatatggagcactggtaatattggtggttaacaagtctgaaaatttcttccatcaccccctttccttcctgaagattttattttcatttctgagtggcatgtgatgaatgagaagtggaagataatgtggttctgtaaatgctgtagaagtggcatgtgatgaatgagaagtggaagatactgtggttctgtaaatgctgtagaagtggcatagtttgtcatgtaacttctttagtttctcaattttttaatgttagctgattattgtggaaacaggggattttgcaagctaaacatagtttgctatagaaggcatgactagtctgatcctttttatttttatttttcagagctttgccttaacctttt

SEQ ID NO: 59732 - DNA, 819 bp, Populus trichocarpa
  Intron number 2 from transcript POPTR_0008s19160.1 (locus POPTR_0008s19160) derived from phytozome v7.0 (chr-ID scaf fold_8; pos 13131398 to 13132216 reverse strand)
ttcgagcttctgagctccagaaggaagggaagaaggtgtgtgtgtgtgtgtgtgtgtgtgtagtctgctcaagttttctttagaaatgttgctgttcataattttgcttatgatgttaagtggatttaaatgtgttgagtttctactgggtttatcaggatgcaacaactggagatttttacttgattttgcacacctcaattttgaatctgctgactaatctttatcaatagcttctagtttcggttgcttattcagtgtcttccaagtgttcgtataaatcactgccgttcctttgttggatatacctcttgtttgtattccctttcttcttcttttgaattcatgaaggacttgtcacatgttgtaacgtgcatttttcattagagggacgcttttctctcgtcaaatgtgaaaacttagtcctatatgagatgcattttctattgcgtataatttgtttattgaagaacagcatgtatccgcaaaaacatgttcttgcatatttcgtagcacagccatgagccatgcaatagcaattaatcctccacggccctgcacttggctatcaatgacaatcttaaacgttagacctgatattattctagggccttaacatgttactttatgtgtaaaatcttacttcacatatcattttcttccttgtaaaaccatgagatggcatctgtattttggctttaatcaaccaggacaaataattgatttttttttttttttttttgtataacatgtcattatcctatgcatatttctctgagtctcactgcttcaaatttattcggtagattattttcacaa

SEQ ID NO: 59733 - DNA, 432 bp, Populus trichocarpa
  Intron number 2 from transcript POPTR_0016s10570.1 (locus POPTR_0016s10570) derived from phytozome v7.0 (chr-ID scaf fold_16; pos 8878898 to 8879329)
tcaaaaagcttcattagctcaatcaatactcagtacatggaataactttcatctctaagctctttttctcagaattagtgcgataaacaaaatcatgatgcttcaatgcaatggtcatgtgtctcccaaacgattcatcaaataattccacaaggaccacatttattacagtagaggtggctagctttgaattcgcagttgaaggttttaatattctgttagctattggattaatcattttctgtttatcgtcgtctaaaactaggccacagaagagttccttttggcgccatggaactgacaccgctatattctaagagatgacatagcttgcttttatccgcacctggaaaacaaacgctgggggttgttttccaccttcttttcttctctacaatttactatattttatgtttttctatctaggaacaa

SEQ ID NO: 59734 - DNA, 605 bp, Populus trichocarpa
  Intron number 1 from transcript POPTR_0016s06860.3 (locus POPTR_0016s06860) derived from phytozome v7.0 (chr-ID scaf fold_16; pos 4655973 to 4656577)
gataccatcttctctgtctctcaaagtttgtatttttatcaggatattccagttttgactctgttttttttttttatctgtttttttatcttggtttcttcgctgtgtatatatgtggtttatttggtcactatctttgtactctaagatggggctcattttatgccttgtttatttttttattttttatgcatagaaactctcttctgtttatgtattttcacttccttttcttgtattttccctttatttggttggtgtttaattgatctttatagtaatatgatgatgatgatgatctgattctaggatttgatatttggcaatttcaagtttttcttaaaagaaaagaaaagaaaagaaagtatcttttctgcttcattttttctgagaagatttggttgacgaagctgagatttttatgttgggggattgtgttttacgatggaaaagtatttggtgatatataatttataggagttctgtccttgtatatttttttgtatttttatggagttgaattcagcagaaatcttggagagaattttgattaaaaatttcaacttgcaggaattagtttgaactactgttgggataaagacgat

SEQ ID NO: 59735 - DNA, 854 bp, Populus trichocarpa
  Intron number 1 from transcript POPTR_0016s02290.1 (locus POPTR_0016s02290) derived from phytozome v7.0 (chr-ID scaf fold_16; pos 1111927 to 1112780)
cccctctctccaaatctgagcctcttgcaagagacaaaaacacaattcagatatcacaactgttgcaagtgttgttgtctcttctttaacttccgagattcctgtaaatagaaagtcaagtcagatcagaaactcgatcagtccctctagcagtcaagtcaatactgttaacaatattttaatgtgtttttgggaaacagtataatatgtttcctactactttatattaatattaacattaacattaaaaaaaattaaattaaatctcctatcaaaattactatgcatctagacatgtggcattatttatttaaataggataattataggattgctcttcaacaataaactttgaattatgcataggagataagataggtttttttcatgattcaattattatttttaaattatacaagtactcttaataacttcgttaaccctgaaaaaaaaaaaaaaaaaaaaaaaaacccttacattcaagggctggtccgctaatcatgcggaaaaacaaaaatccacgcaagaatcatgcggaaagagagagatcaccatactaattaatttgagttccttatatggatttctataaaactagctggcgccgtacttcctgctgcatatagaagaaaccatagttttaagacctcggcagtggagaaaatcgtttcagtaattaaaaaaaaaagaaaaagaaaccatgaaatgatagtttttcaagaatttattttttaaaaaaaaaaaacttggattaactgagtttttgctggacccaggccttaggccatatcaccctaggtcaggtctaataatggtagaaaaaactatggtcagcccagcagctgataggcccc

SEQ ID NO: 59736 - DNA, 970 bp, Populus trichocarpa
  Intron number 2 from transcript POPTR_0008s09330.1 (locus POPTR_0008s09330) derived from phytozome v7.0 (chr-ID scaf fold_8; pos 5771632 to 5772601 reverse strand)
gataaggatctcggtaaggtaagctcaatgcgttgttatgaaatcattgttcgttcgactgttaataggaattgcattagtcaaggtggaaaactggtggttgttttatttaaaaagaatggagagaagatgatggtaataattcttgtcttattatctccagagtttagacttggttcattttggttaattccgcctaccttggatcagtacttccgaaagtttcgtgttatctgattctatgcaatagcaaatccataatgtatcatgttaggttgagcaatgtgtatatttatgtcatcaacagggccttttcttatatgcttgtatgaagataattctgtttcagttgaatttgataacaagaccaaggattttttctacttaaatttcatgcaattcagcatatgcttattggaagggaaaacgcttgcaagggatgcaaaattttggccatgccccctcatggctttttggtccttaacttgcataagagagtacgtttatgaggcatcagttcagttagataaggattgagctcattatttgcttgattagatgtgagaaaaattttgtagaaagaaagcatcccttgaagatatgttgcatacgtaaggcttgatttttaaattctataaagataatctgtcattctattacagtagtctgcttggctcaagaaactaaaacgaggtcaactcacccagaaaaaaaaatacagatgtaaaaagaaaggaagcttttattttgctttactgtttataaagaaacattacctggtaatggattaccattgaagagcatatatgactgttttgaaaagactttcttcttggttctacatttggttttctttgatctcgtttcctggatccttccatcatttcacaaacagttggtgatagcttttaatgatctcaaactggtattatcagggtgagaagctcttaaacaatctcggaggcatttt

SEQ ID NO: 59737 - DNA, 692 bp, Populus trichocarpa
  Intron number 1 from transcript POPTR_0008s09330.1 (locus POPTR_0008s09330) derived from phytozome v7.0 (chr-ID scaf fold_8; pos 5773091 to 5773782 reverse strand)
ataattgctgctctcattcttcattctgatctcaggtacccattctttgatctctttcccttctttagttccactttttaatgtgatgttcttttgaattgtccatcttgcattacttcgaagcaagatgatttttttccctcatgcttatcttgcttattgcagcacggttcttgatctgtttgccttattttctggataagattgagagattctagttttggttatttggaacgttaatcttcactcttcagggataaattccgttgttcgtttcattaatttggcatctttctttcgttgtcgtgttcaagacccaagataaccaaaaaggaggagttgggattccattttcagtggttcctccgttttttttcttcttatcaaatctacgacccattcatatttgttaactttaatgtcttgcaaaattctggttctctctttctttctctcatctatttatgttaattggagttatgttggtaattgatttctgggtgtttttaatgtttgtgtttggcttgagatttaatactaatggttggcaaatatgctgttagcatcctgaaacattttcttagtaaggaaaatacaatagattgggaagaaaaatctccattgccattacagctgactgacatggtttatgtttaggtatcaggattgaagtttcacgcggataccattgt

SEQ ID NO: 59738 - DNA, 1012 bp, Populus trichocarpa
  Intron number 1 from transcript POPTR_0008s05210.1 (locus POPTR_0008s05210) derived from phytozome v7.0 (chr-ID scaf fold_8; pos 3022144 to 3023155)
acgttatttttttttatcaaaacagagaaaaagtaagcattgcgatcattctacactccttttacttaacttgtctctaccatttcaatttcttggcgttttttttttttttttttgggggggggggtttgtgtggattagtgaaatcggtgctgattctatgtttgattttaattttaggattttatcggtggataaaaagttaagattattttttatattttttctttctttttgtggttaaccgatctgtcttttttgggttttggtcttgttgatttgtgttcgattatacttttttttggtggtgttgatttaatccaatgcaagtttctgtgggcaatactctaattttaatattagagtatgttgtttggttattgaagtcggtactagttgacactcctgtgtgttgtgttcactatttataggaatgttttgaaatggctgattttgggtttgtttatagatttttttttctgatttttttttgcatttaagttttttcccctctttatgggtggataaatgaaatagtacttgtaggcatgataatttctcgaatttgtatcctccaaagattacgaattttgtgggataaaatgtagactgatgatttagattgaagattctcgtggattgtgaactgaaatgtgaaggatatgataaaagctcagaatgaagttggaatttgagatgaggtgtattttgctttgggactttgtcgtcgttgagaactgtgtgttctgctgattgttattgatttggagtatctctttctgaaaaaaatggggtgtaacgtgggaatttatgtagattaagagggtttgtaagtattaccaatccttaatgattttaggagtaggatattgctgctttcattatctttgtttgtatggatgaactgcgagtccagctgtaatgcagcggcatttgtaaagagataaggccaaggaataccttttcacctatagtgggttactaactagttgttctttccatatgtaggcaa

SEQ ID NO: 59739 - DNA, 707 bp, Populus trichocarpa
  Intron number 1 from transcript POPTR_0002s25210.1 (locus POPTR_0002s25210) derived from phytozome v7.0 (chr-ID scaf fold_2; pos 22367892 to 22368598 reverse strand)
actttttggtacgtgttcttgctctgcattgattctttaattacttcttgatttgatataactcttgagaagagaaaattatattccttctttcttgttgttgattgttttgggtttttacctgtttatcaaattaaattgagaaatcaatagggtatatgttcaagcatgttattagcaaggcaccattccaccatggcctcctcctcctactgcccgcatggcttaatctcttacactactcgcctcttctttcctgggtaccatgattttgagttgaagattttatttagccactgtggggtttaccaagatcaataatgattaatgggtgtggatgaattttggaatttttttttgaaaaacaataacaataccaataggttttcctttagaacataggttttggtttggttgcgagtaaatcgtgaaagtaaccgtgcaatagctactcagattcttttttggtttcttttatcaacgtgtgttttccttgtcctttttttttttcttttctttttaggatgattttgtttgtttagtattgtggtgtaaaactcattttaaaagtgtattttaacttgagaatatattataataagttttttgaagttttttttttaattttttaacattaacatatcaaaaatatattaaaaaaatcatcaacttaatgatgatttggttttcattaacagggcgagtaa

SEQ ID NO: 59740 - DNA, 429 bp, Populus trichocarpa
  Intron number 2 from transcript POPTR_0002s22860.1 (locus POPTR_0002s22860) derived from phytozome v7.0 (chr-ID scaf fold_2; pos 19899702 to 19900130)
ctgtcagggaagatctctctctatctctagcagaggttagttactaaattgtctcccagtatattaagcacttatccagagctaagtaaccggttgatttgtccccgtatcaataagcctcctagcttgtcagaaacatgcaaacttaagctgcggaagaataattgattttcagtagacattacaaatatggctccagatccactgcggaaattgaacttaagagaaaagtttctaggatcaaaagatcagctagatctagggtacttgtattaagaaaagcatcccctgtttactgatgatgctgttttaaacgcagcaaatgaactctttggtttttagcttccaaacttatatgtgctacttactctttgtgtttgtatgaactatgaagtattccgtgtttggttcaatattgacattcggagc

SEQ ID NO: 59741 - DNA, 764 bp, Populus trichocarpa
  Intron number 3 from transcript POPTR_0008s19440.1 (locus POPTR_0008s19440) derived from phytozome v7.0 (chr-ID scaf fold_8; pos 13391727 to 13392490)
aagtttgtgaaagcttttcctcatagttttgacaaaattagatctcaattgagtgttactatgctgaatctagtgttatggatccaacatattgctgtttttttagaatatttattttctaataaagaaattatttcatgaatgcctcccatcaccgcctcattttttcaagtaaaattggtagcataactgagcaactgtgcagacctgtcttccacctattttattttcattttaaatggatacatttgatttaagaaaaagaagatcgtagtcctgtacaagcatgttaatcatggattctttgggttctttaaattggtattttctcattctagggtttccagaatttctcccaagctcattggtaagctccactcagagcaagcacctgaagcacaatatctcaaatctaagtatgtcatgactgagaatagccattatttttatctgtcagttataacaattaccaaaacatcatatgtcacttatttgagttttccaagcaattgtaaatctcaaatgatatatgactctgttctatcaaaatacttcatggaaaccagtccactgctcttggtatgtcttctggttcttaaaatgctgattgtcgacgcaacaaatgttgtctacttttgtattataaggcaactgctgaccagaagttgaaagtaatctattcctccaagaatagactcttgaatcttcaaacttgtcaagaattttttgctaattattggcataaaaacttgtacttccaggga

SEQ ID NO: 59742 - DNA, 1037 bp, Populus trichocarpa
  Intron number 1 from transcript POPTR_0008s14650.2 (locus POPTR_0008s14650) derived from phytozome v7.0 (chr-ID scaf fold_8; pos 9725778 to 9726814)
tggcctggtatttctcttctctaacctcccttcatttttcgcctccttttcttttgattacaaccaagaacactatgcatcttgaaaagttaaagacctcctctgtttctttggaatacaagatgatacactcatgttgttctgcgtagctgttaatctataagaatcatgggtgttcttttgttacgtcttattgcaaattatgttttatctgaggacttcaatttcgggctgttaagtcagtttggtttgtgtgagattttttttttggtttaggtttaactggtaatcctggaggtcttttttttccgagtatttacaattcgtttggctgttcttgttcatggcttcactccaggggcaccttttctttttctgttcgtcataattatttttaatttatatgattattccctgtaatgggaacttcttttttgatgtttatgccatctaatgttctattacacccttaaccactgacttaattaaaatccctttcatttttactagtctaggtgcttgtacctgattggtgggaattggcgtgtatctgctctgtcctcttgcatgtatctgattttcattcatgttactctgaatgattcttaaaaatatggtattttttcaagttttgggagttttgaattttgatacaaataggattaccgagaaaagaacaagctttgcatttatttacaaaatgatttcttgtgctgttttccttgaaatgtccttgtgccactcgactgaggctatttctgcaatattgagcaaggataccttgcagtatttagaatgtcagctaatttgtcgcaccattctctgttctgcactttaatgttgttatatttggtgtttttctatgtaatgttatgtacatctgaagcctcattatctttgccaacttcatcgtaacttttcttgttcatggccctagtctttctcaatcccacgtttttggattttatttcttcttacgagattcacttttgaaacctgtaggagaagcacattccttgaaagtagagaagatctta

SEQ ID NO: 59743 - DNA, 525 bp, Populus trichocarpa
  Intron number 3 from transcript POPTR_0008s11110.1 (locus POPTR_0008s11110) derived from phytozome v7.0 (chr-ID scaf fold_8; pos 7021628 to 7022152)
tggcgacgtacgtttttattttttttctgaagttcccttccggtttgattaatggttgaaaaaagattttatgtttttgggtttgccatcatgaatgcttaatggacagacgagaattgaagaaaatccatattgatctactcagttagatttatctagcatttctttgagttacgaagataaaaaaatttatgcagcttaatcatatgcagcttgtgttatgcagcgatcatcagtgccgcatgtagatggcttttaatgtgatttgtgaatttacagcagttttggtgctttatatggaaattgaaactgcttgcttttgtcgtctatgaatcacagaacaggaaggctggagtggttatttgcatttgattttgtaaacttttttaggttcaaatgaatttgtgtatcaaaggctcttgtggaattaatgagataatacaatataggtcttatttttccatgtttgcttttcatgggtaaaactcaggtacgagaagcagtatacggaggaggttaagcgta

SEQ ID NO: 59744 - DNA, 900 bp, Populus trichocarpa
  Intron number 1 from transcript POPTR_0008s17820.1 (locus POPTR_0008s17820) derived from phytozome v7.0 (chr-ID scaf fold_8; pos 11968577 to 11969476)
ctcgcttttcccttctctacattcgacagattaaggtaattagctctcttaactagcttaaattatatattactcgctcaactctgtttgtggattcatcttcatgttgtgttaactgcttgtaggctttgctacaattctggcaattttgaattcgtagttcttttgcgttttaacatagcatgattgcaatccggcataattagcaatcaggcatgaatcgtggttggtttatgttgttgcttcgccaactcaagttttatcagaagtttaaaagattacagattttctcatttgcccataatttgctcgcctgcgtaccaaaaagcaatgttttcctaatttcttgccccagataaaagattattctttccatcaagatgaagaatgaaaatcataaatcattgaatgacttttgatttagatgtgtttggaagtgtgttgttattgtttaaagtatttttttatttagaaatgtattaaaataattttttttattctgtaaaaattatttttaatattagtacattaaaataatttaaaaatataaaaaaaattttaaatttttaaaaaatatgatgacaaccgaattttcaaacacagctttaaacatgtaacgaatgaggtcctctggttctcatattacattgtaatcccaactcttgaaaatctggttcctttacaatttctcgttcattttttgagaatgcacctgcaattgagttctcataaatcatgctattagctttacacattctcaccaacataagttataggttgttgacatatcatccctttggctcttcgatgagatatttcagtcacaagtacaatgaagacatggtttggataatttctttcacaggattctttacgcttgctgatcctctggtcgctgcc

SEQ ID NO: 59745 - DNA, 955 bp, Populus trichocarpa
  Intron number 1 from transcript POPTR_0016s11860.1 (locus POPTR_0016s11860) derived from phytozome v7.0 (chr-ID scaf fold_16; pos 11026336 to 11027290 reverse strand)
gaacgcgggtcaatatactattccaatttaaattgaatcaaattgtttttttaatagtttactgttctgatcataaaagcaccatgcatttcaatgtttaagattcaaagcgaattcattaatgttagatgtgctctcaattgcaacgaggattgaaaggacttcaaaatgtaactcaaataaagacactttcgagccacaattctttgattccgctgtttcggaatgatttttttttaaaattaattatttttaattattttggtttgttaatgtaaaaaataatatatttttaaaaaaactttaaagaacatcgaatataataatctcaaacaacctgttatattacattgtaaaacaacaaaacaggagaaatgaaagtattttaaaggagttattataataattgttttttattaatatagatgttcagaaacttatatatattttaattaattttaaaattttaaaattaataattatataatttttcagttttttattctcaacttttagccatggattatctactagtagagggttattatagtaaattttaatatactcacttcgaggagaggtaggtgatctaggtaacggcagcacgcgttgccacgtaggagtatcttggacacccctagtctgaacatacaatttagtgagactcatatagagattaaagagcgaaaaagaccatttctttagcataatatttctcaacaacccccaaaactcaacaacttcccattttttcgccagtaggatatatttatatatacgtgtagaacaaatgcaagttcttaacactgctactatatccatccatctctctctctcatggcggctaaatctgctctccattcttcctcacctaacacctcttcttttttgaactctaaatcgaatttggttcatttcagaagaacccagttgagatttgagcccagaatcccat

SEQ ID NO: 59746 - DNA, 397 bp, Populus trichocarpa
  Intron number 1 from transcript POPTR_0008s06670.1 (locus POPTR_0008s06670) derived from phytozome v7.0 (chr-ID scaf fold_8; pos 3992682 to 3993078)
gagaaggtacgtctaattaatttgatttaatttttttggcctttgtttgataatttctgtgcgactcctgagaaaattagaaaggaaaaactaaaggtaattcgattaaaaactgtagatatgttttaattcgttctgtgtagtgaaatttgagtgtccattataattaggagttctgatcactgaaaagaatttaatacttgtttcaatcagtgaaacatcattgatttgtactgatcaagaattatgtttgaaatgattaaagaaatctgtaattctgtttatatatttgattgtgttcgtgtatgattcaatctgatgaaagtgtgtgtgtgtttgcttaaataaagatgatcttagtcaattatggttgctggttttttgaaaccaaggcaaa

SEQ ID NO: 59747 - DNA, 681 bp, Populus trichocarpa
  Intron number 1 from transcript POPTR_0016s07040.1 (locus POPTR_0016s07040) derived from phytozome v7.0 (chr-ID scaf fold_16; pos 4831470 to 4832150 reverse strand)
ctgttcaatccatagatagatcatacaagagacaggtgggtgtgtgctcctttgtgtttttcatgtatacacacacacacacacacacacacgcacatatttgtcctccctttccttttcttgtgtattttagccccaactgtttatcgttagttctctctccttctctcacaattcatgggcttcaagtcattgtaagtgaaaaattgttccttccccttgaagttcagatgatcatgaagcacgtgcacactcagatttccattacaacaggttccaattatataaaaacctgagactataatcaattctcgcctctctctctctctctctttcaatctctgcagtctgcactatcccccccccctctctctctctctctgtctcaatatctatatataaacaacacctttccgttttccactccttacccttttattttctaactctttcttcttctagatgttgatactcgagctctatagaagatgaaaacatgtaaacattaacgaacaataattcttttcaaatcttgatttgatcgcactgttcataaattaatttgtataatttatgaacaagaattcttcacttaattcaaagctttctgaattcgttcctcatgcatcctcttcttgattcacaggcttcgagtaacaagaggtcatcactacactttct

SEQ ID NO: 59748 - DNA, 945 bp, Populus trichocarpa
  Intron number 1 from transcript POPTR_0002s08300.1 (locus POPTR_0002s08300) derived from phytozome v7.0 (chr-ID scaf fold_2; pos 5785744 to 5786688 reverse strand)
ccctcccaattcaggtagctagctagtaccgaatttttttttttgtgcgtatttgtatgtatgcacgtgtattgttcaggacgatcgatggtgtattgtacttgataattaaaggatgactttgaacttagaggctccaaagaaaatcagctttttgcgaggttccttttttatatttttgtttttcaaaaaatagaaattaaaactggaaattagttatcgtaatctgttttcttcttttgtattttagacttgaattagcagcataaaaatgtctgatttaaataattttttgtggttgagatttgtagcttgctgcttgtttttatcacgcccatgatctaaactaattctttttccttaataaaactagggaggaaaagaagaaaaataatgtgaaatgagaatttgtgcatgaatattatttatttatttgtactgacatagaagataacctcattatgaatatattaacatttattaacacgtgtcaaattaaaataagaactagtgtgattatttgagcctgtcttgtaagtgtcagattaatatcggtgacaagacaaactatacaaatattcaaattttaatgtaaaagttatcagagtatactgacaaaatacttgagatgttttgcataggggcacttattaatattaatgtctctatgggatagggagtcacttcagagggtgtttggtgggaggtgtggttttttttttttttcaattaagagaatgataccttttaaaaaaaaaactaccacacctgctttaataaaatgataccttaaaaaaaaacctaccacacctcccacccaaacacaggcaaaatccggtgtcacatggtaataaattggctagcctagcttcacaaagaactacctaaatcttggggttgcttgttctaggaagctgtagagtgggagcataaaagcaaggtagc

SEQ ID NO: 59749 - DNA, 653 bp, Populus trichocarpa
  Intron number 1 from transcript POPTR_0002s04220.1 (locus POPTR_0002s04220) derived from phytozome v7.0 (chr-ID scaf fold_2; pos 2644574 to 2645226 reverse strand)
cctgtattcttcccccccttttcatcgctctttcattatcccactgtcttttctttttcttttttgcattttgcgacgctttctttcttttgacaaaaaaaaggtgtaaaaaattgtcaatttacgggtctcgcttgcttcccccggccttcacttcattgttcagttttctgccgaggcttaggtctatacgttgaggcttagttaccgtcgatacgcaattccataccttggtttactgtatccactttttttttttaatgccttaaaatgcatgcgattctttgaaccaggcttcgtaattgaccccggtgtcttgttcacattcttgaaactgtagctgctcaggaattatctcctgatttttattatctgttcgatatacaatccactacaggaaagaatgattgaactttgagttgtaacttctgtttcttggttttcttactcaatcaaagaaagatagacatatattttaggactcatatagttgttgatgtttgcgatttcttagatgtacgtaagttatctctctccctgtttatttttttctgagttgacccttttgaattatatcctttattttgcctgtttttttaccaaaatataaacctaaaagaatgaagtgtgacgtgcatctgttttctgaatag

SEQ ID NO: 59750 - DNA, 864 bp, Populus trichocarpa
  Intron number 6 from transcript POPTR_0008s05630.1 (locus POPTR_0008s05630) derived from phytozome v7.0 (chr-ID scaf fold_8; pos 3268998 to 3269861 reverse strand)
cacaggtgaggtcacttatcgaggatatcagagatgtaagatttcataagtggagaccaatttagaaaagttcactgcatctacagtaacggtatgctcgctatgtctatttatcaattcattgacctcataccctttgaaagttgaatgttctttctagacgtggtattgttggagagaatgatctcccttatgccgggacgtgaagagtgttctagttatcccatctatctaaaatctctgttcttgaaataactgttaataagaaccttccaataaagtgtgctatttttatttgttttttaacaacatgaatgtgatctaaaccacttcacttaactgaataatgatggatacatcaagaaattaatttagatgcaagacttagagaatctggctgtgtccccaagtgcttccgtgggagatatagattgtgaaatcaggggtaaaaaatctttttctcttatagacttcagtgttctgataaaattacttatttaaccaaagaaaggaaacgggataaaagtacctgaccttttccacttatggaaatatataaatataaaagaagcatctctcactgaaaattcatgatggtgtcttgcatgcttgggcaacctccttgctgcccacatgcaaacagcaaccaaacttcatagctgagtagatgttgagactattatcaaatgtcatgaggttctaggtttgcctattcgcagggttaccggaaagctatttgtcagttgtcggatgtagtactagattcattcttcattatgttgtgatctactgtatctttgttagatcatgcattctgctgttctataaagtgatctcttgaatttgatattgcagtggaaaaat

SEQ ID NO: 59751 - DNA, 807 bp, Populus trichocarpa
  Intron number 1 from transcript POPTR_0008s17540.2 (locus POPTR_0008s17540) derived from phytozome v7.0 (chr-ID scaf fold_8; pos 11806352 to 11807158 reverse strand)
aacgaatttgcattaacttgacccctcgacaggcaagtgaacacctaataagaaacattttgtattgaaggaataaaaaggatgatttttgttggtttttcctgttgtttttgctactatttttcttttcttctaacactaaactctaaacatctggcttatgtcaattcctacctgtaaaaacgccttcctttgtcattgatgggccaagtggagctgagctatgtgatgctccaacttggtctgctctgtcaaacttggaagttcagcttgataaagcttgtttcaatagtttgatcaatcatccttcactgcaatgcttcttgacaaacctagagtcctagtccttgttgtttaagtctcttgtctctgtcaggggttgctttcactttgcaattagttaagcaagatcaatgctatacggtcacaaatgcaggcaaatagaagtataggacacactgagatttacacattgtcctcccatgtcagccatatgtgccgtgcattaccaatttcatttgtttattcttagagagttttccatgcttgcattgtcactaaaatgcctttgattatacaggtagtgtagagatagggctcaattttaccctaaactatacctttaatctggtttatccacaatcacgaaattgagacttcaaagaagtttattattgcttttccagttttgtgatctgttgcactcctctccctctccctctctctgtcttttgtttatgaaaatccaccatgatagattagtttgaaattccgcaggaagaaagattcaaaaggttgaagcataga

SEQ ID NO: 59752 - DNA, 574 bp, Populus trichocarpa
  Intron number 2 from transcript POPTR_0002s23990.1 (locus POPTR_0002s23990) derived from phytozome v7.0 (chr-ID scaf fold_2; pos 21470916 to 21471489)
gcggactggtgagttgacagagcggttagaatttcatcaggatccacgttgaaaatggtggaacttgggccgttggatgaatttcgcgctgaatttatctgacttccataaatttaaaccattgagatcgtttcgtgaaaataaatctggaccgttcgttgattttgttatattacttagatttgttggaatcgcacgccttcttttcccaattctcgagaaactaattaagttcgctgcataatttattgctcattggattttttcaatttacgaaaatgacctcattcacggtcatgtaatgtaaatttactacgaaatccattgatcaagctgtaactatatagaagagataaatattaaaaaataaattatatttgaattcataaaacatgataataatatcttattcttaaaaatcattttgtttttattttttaacatatcttttctgtattataagtatttatatttttagcaccgtagaatctctcgttaaattaattagtaactaagaagtgaaaaatatatattttgaattaaaattcagtcttatttttttttttttccaggt

SEQ ID NO: 59753 - DNA, 1053 bp, Populus trichocarpa
  Intron number 1 from transcript POPTR_0008s17490.1 (locus POPTR_0008s17490) derived from phytozome v7.0 (chr-ID scaf fold_8; pos 11765155 to 11766207 reverse strand)
ggaaactggagcatctcgaagcaggaaagcgacgggtatgttgaattctttgattggttgatttctttgattggttgatttcatgcaattgattaagtttattttgatatcgtggattttcttttgcaaaatgtgcaggaagaaacatgcatgtgtctatttaggccactgatttgagattgtaattagataactgaggcgtattttttttttgggaattgagtattttgtggttgtgatgaaataaaattgtttgttcatgttacctctgtgctcgtgatccgagttaaacatgttgctgcgattgccttttttttttggcggtaggggagtggacgtgtttaattttcgtaaatatgagattattggattagagaaagaacgtagaattatatactgattttattgtttttgaggattttgttatgattttaagcatacctggtctggctggcgagccagaaataaaatgcaattctttaaagatgaaaaatttgtatatctccatgagtagtgcttattatacataaacaagtgaaagcagtcaggaaagactagaaaccaattttgtgatgatgatttggagctgaatgagttggaattaactttaagccgatgaaagacatgattctcttcatgcaactcttcttcggatgattattgtggtccactagaattctaagtggttaatcctttggggtaacagtcaattgggttgctttttgatgcttttggtgttgtgccttttcatctaaaaagcacttttccaaatacctccattgcaatacaaaaaaacacacattgtgcacatccgatctctttttgagactctgctttggtgaggggtctttgatggccttctcaggtttagaagcagaagttgtttattgccccttgcgtgtttatatgtttgcatttatttagaggtgcttagactacatatttggctgacatctgattaaaacataaagtttaacttgtaagagtgttttccctttgtctacgtgctcttttgcagttggaggagttccgcaagaaaaaggcagcagagcg

SEQ ID NO: 59754 - DNA, 895 bp, Populus trichocarpa
  Intron number 2 from transcript POPTR_0008s05270.1 (locus POPTR_0008s05270) derived from phytozome v7.0 (chr-ID scaf fold_8; pos 3055345 to 3056239)
tcattagaaggtacaaccttgctggtgatcattcaaacttggaaccaattactttcatgcattcactgggtcttttccttctaggtgggaaaggcaattgaaaataatttttctagtagatatgctgagacatcgagtatgaccttgctgtatgcatttctgtttgccagtttttggtcttttcctggatgatggcattatatatataaagtttgctttaaacattgttattcactagcatggaatcacctcaaagtgaattatctgtgttgatagatccgattgattcaagtgctccctaacacatgtaccctgatttcttttcttgatcactagagcactgtacggttgcatatatgaggtgttcaggttgcttcttcttgaagagaatctgggaatatttgattgactcattaaattttctttcttcaactagggaagaaaaaaaggtttaaaagtgctaaccagtggcatgatgtaattgcatcagctatatttgcatgcatgcatctgatgcaaaggagcatcataattcatcgagtggctagaataacaccgcataacatctcatagtgactgataggaaaggggagaaaacaaagaaggaataaacttcgctccagggtttataaatatcccattttgttgtcgctgatatcacgccttacatttctctattggaaatggccttagttttcaggggaatttgcatcttggtgtttcccttgtattttaatgccacgtgatctttgaattatgaaggagtggtattctttaatcttctgcattacatctgctattgttgttagcagtacagcacatcttgtctcgatgaactaatcttcattttttcactggacagtgttcaagaaagaattggtgcgagggaagggcc

SEQ ID NO: 59755 - DNA, 879 bp, Populus trichocarpa
  Intron number 1 from transcript POPTR_0008s16500.1 (locus POPTR_0008s16500) derived from phytozome v7.0 (chr-ID scaf fold_8; pos 11076813 to 11077691 reverse strand)
ttcgcttccctcttcatcctctcagcctggcaaatgtacgccatgattccctttctctctctcatatgtctttaattttatggagttcttgtttcatttccgtttgttaagacggattcacgtgttttttattacgggccctttcttcgagatccgatgcaagctttatattgctgttcttgcttatgattttatgtttttgtcagatgtatcaatccatagtagtagtatattttgtgtttttgtttactgttgcatatgtcgaattgggttctacatgttttgtttttttaatttgattgtccaactagccaaaaaacatgttttatttgatcaattatttattcacagttttagctgttatgatttaagaacaaatgcacaaagaagctcttgtgcaatcttgaatactgattttatttcagaaattgatcttcatggtgtgctaaatcgagcaatgcgatgtgtaacgattatttatcctgtaataccgtgtagtaattactgcagaaattgatctttgtgatgaataccaaattgagttactataatctgatgtgtaacaatgatttgtcttgtaatagtgtcctattattttattttttgttttgaaaagtttgcctatttttttgggagcttctactggtttgaactattattttctgcccagcttcataatttagctggggggttcacggcacgtttgacctaaaaggtttggtgatgctggcttctgtggacattgatgttctgaatgcaatttgaaaacttaattatgctggacaaactatgtaattaaaaatttgcattgcccccgcactgctattgggtagatgctggatgcctctgccttgacgttgcttataatgctcaggttca

SEQ ID NO: 59756 - DNA, 901 bp, Populus trichocarpa
  Intron number 1 from transcript POPTR_0008s20820.1 (locus POPTR_0008s20820) derived from phytozome v7.0 (chr-ID scaf fold_8; pos 14799115 to 14800015 reverse strand)
gatcttacattgtttgacatagattttgattcgaggtgatttcggcagctgaactatttaaactcatgtaagccaaaatatcagtagctttgatgataattacttctgaatttttcagttttaacgtgtgagagtgattcttgcgttcttcagttcttgaacgaactgaatctaacttatcaaagattaactggcttcgtggcgtcattctactcaatccaatagtgttggtgccttgaggtaggtttccattgtgtcacactcctatcagatctatttcggctttccgggatcagatctcaatcttgattgtgggttgcgtgaccacgtgatcacgaggttggcatcaaatatgaagggagcttacaaaaggttgaatttacaaacatgaagacaatcctgatatcattagacgtgtttttagatcgaaggttatatcagccttcataaaattaggcaagccttttggtcggacaattgcaggtgccttatcttttatctcatttcttctaaacattacaactttctattcttattatgattgtttgtcttagttttctttttattttgtagatgtttgtgcaattgaatttcaaaagaggggtttgccatacactcatatgttgatttggctacactcgaattttaaatgtcgtacacctgaagatgttgttccattgtttcagctgaaatccctgacaaattaacagattcaaaatgctatgaaattgtttcaagattcatgatgcatggtacatgtggtcttgtaaatccaaaatctcagtgtatgaacgagggagtttgctcaaaaagattcccaaaaaaattcaagacacaaactgttttttatgataatggctttgtttattacagacgtcgtgatcttaaagacaattttgtt

SEQ ID NO: 59757 - DNA, 439 bp, Populus trichocarpa
  Intron number 1 from transcript POPTR_0008s07770.1 (locus POPTR_0008s07770) derived from phytozome v7.0 (chr-ID scaf fold_8; pos 4766006 to 4766444)
ggatcaccaaacccagcagcagcagccatactctggtcagtaccgacacttgctatttaaatataataacttctcttacaattttttttttaatgttatcatatttattcagagaaacaatcttctttttttcttttaattacatgatacgaatttgaactatttgtaaatatctattgtggtttttctacttcttgtaaatatctactggtcgttcctttccatgggctgcctttttttttcttttttttaggatagctcagaaacaaaaattttgcaactttattatttttgtgtgtgcagttgtgtttatttataatgggttttaattcgtaggctatgattttgattgttttatggttttgaagagtgttgacgatgatgggttctattattatgtgcaatgttcttttttatcgcgcaggtgcaggaaacggcc

SEQ ID NO: 59758 - DNA, 827 bp, Populus trichocarpa
  Intron number 2 from transcript POPTR_0175s00210.1 (locus POPTR_0175s00210) derived from phytozome v7.0 (chr-ID scaf fold_175; pos 30495 to 31321)
ggggtcagacaaagccagtgtttcacaagaaggtttgttttcttattccttgcataaacttggtatacttaaaagtccctcgaggatttagatcaatatttgaattttgtttgtcactatattgtaatttgcatgtattcggtggctgtaaaaaatactgctaaatgtttgattgtgaagtcttgatagtgtacatgttatcactaccatagaacatccttttgtggtttcagagtatatactctcaggaggcctatgatgattaaatttgcctacattgtctgatcatctaatgaatgacagagacatataattagttctgaggcttcctcctttctttccttgtcctcatggttgatattaaaatggaaagcgcttgcattgtacttgttataccaccataaattatatttttgctatttctgaattctctttttagaggcctgtgatgatttgaatttgcctacattgtctgattgtctaacatatgacagagacatataattagttctgaggcttcctcctttctttccttgtcctcatggttgatattaaaatggaaaacgcttgcattgtacttgttataccaccataaattatatttttgctatttctgaattctctctttagaggcctatgatgatttgaatttgcctacattgtctgattgtctaacatatgacagagacatataaactagctctgaggcctcctctttgttcttcaccttgcatggatatctagtcttcatgcttagttgaattttgatattgatatctcttttgttaacaggcaaagacaaccaagaaaattgtgttgaggctgca

SEQ ID NO: 59759 - DNA, 355 bp, Populus trichocarpa
  Intron number 1 from transcript POPTR_0016s13620.1 (locus POPTR_0016s13620) derived from phytozome v7.0 (chr-ID scaf fold_16; pos 12787347 to 12787701 reverse strand)
ccaggttatatcgcaattccctcggaatatttgtcttttatcctgtagttgctagctagctctctattgtgtgtattggtctgtggttgtgtaaaattgtgacttttcccttgtattttctcaactaagattttcttgacgagggaaaaggatgacagaattaagattttttctttgtttgtctgttttttcccttgaaaaccaaattggtgagctaattcagtgatctgccttctttcgcatggactggatgattagagaattaattgagtggcacttgtgacttggcatgtataactgtgagaaacgaatgatggtttcttttcatttgaattgcttgtttgttatctgcaga

SEQ ID NO: 59760 - DNA, 706 bp, Populus trichocarpa
  Intron number 1 from transcript POPTR_0016s04700.3 (locus POPTR_0016s04700) derived from phytozome v7.0 (chr-ID scaf fold_16; pos 2803393 to 2804098)
aaatgttggtgcgcttaatcttgactgaattccacatattttgctattgtttttgtgatcatctctcaactgggcacctcaaaatgctttggtattggctacatggatgattgtttacaccagacatatactcttatttcatgtttcatcaatgttttctttgcatcgtcaatctaggcctcgcatgctttgtacataaatgtcttccatgtaaattgttctgtataatggaattgagagtggtcctgataagttttgaggtttgtggcaaaacttgttacgtgaaaatgattccaggacttctaattgatactatgtttgtgcccgtggaataattctatattttggcttggaattgtttgtttttaaaagcagcaccggagtgatttttagggccatgatgtagtgataaaaagttgcatcgtcattttatatctttcagttatgaacaaggtacatttcaatttcttttggtaattttgattttcttggaagaactagttatagttattgggaatttcattggatactgtaaaaagttttcatccttttagtttttctcccgtgagttagaaattacctttgggagctacacgaaccaggtttatgtttcgatatatggccttaccatgtttctgctttaattatatattttcttttcaatattgcagaattgtttttatatttggtgatctgactttacaaa

SEQ ID NO: 59761 - DNA, 608 bp, Populus trichocarpa
  Intron number 1 from transcript POPTR_0008s08340.1 (locus POPTR_0008s08340) derived from phytozome v7.0 (chr-ID scaf fold_8; pos 5181482 to 5182089 reverse strand)
ccgacttctctccttcaccgtccgatcgcttcgaggtatccgtgcttttttctctgatcaacaccttctttttgaaaggctgtcggtagtcacaccttgtttaaccttcgttctagtttttggttggtgagagaagaaaagaaagtggagtaagatagataacagtgcgtgcctttgattatcaagcggaaataatttcttctttttttttaaaaaaatgatctgtgtatcagtgtagttatggcttccttttggtgcgcatatagtggtttcgagtttcatactttctatatggttggtgagaaaacagaggaaaatgaaacagagtattgtttatctcttaaaagaacttgtaaaaagaagaaaaaaagcagtgaagagctggcatcagatcagtaaaaacactcattattatttgaccttatgttctctacaaggaatgtttcatatatagattaatcttttgacaatgtagaagctgatgagtggtgtgaagtacctattactatatagaaatgtatttaccttttgccattgaatgttgatctttatttatctccttcataatttcaggtttcaagcattcgttttaactcttcgaagagcat

SEQ ID NO: 59762 - DNA, 710 bp, Populus trichocarpa
  Intron number 2 from transcript POPTR_0002s20650.1 (locus POPTR_0002s20650) derived from phytozome v7.0 (chr-ID scaf fold_2; pos 16720271 to 16720980)
ttcgcgaaaaagaagtcgaagatttattctacaaggtaatattcaaccctcctcctcctcgttgcttggaagttcgaatgcatatcttcgcttctgaatctcactgcttggaattggcgaacttcgttttggttagggttttgttttatcttggacaattatgtcagattctccttctgcagcatttttgtctaatgagattagagcagtttcttctaaatttggttttatattggcgatcttatcttattattcccaaaattcaagttatttacgtacctgaatggaactctgctgtatgtttttcttttatatatataaaaaaattaaggatatagtgtccgaaaacctctcactatcaagttattattgaagttgaacgtaaccgataaaaagaaaaaatattttttcccttctaggaagttgaaattttgatttgtcaagttgatatgcagggagaaatttgtcgcactcttgactgtgcaactgatgacaagatgatgataggagtaacaaaaaatagacatggtcgatgtatgatattaattcttcatgaatttaaattcttgacttccctagaaggcttaatttcagttggggaagatggtgatgagttgtgataaaaaatgttatgagtgatggttgagaagcctgtactttttatttattctgtctttcgaatcttacaatggttttcctttcaatgcagt

SEQ ID NO: 59763 - DNA, 470 bp, Populus trichocarpa
  Intron number 1 from transcript POPTR_0016s10300.1 (locus POPTR_0016s10300) derived from phytozome v7.0 (chr-ID scaf fold_16; pos 8532866 to 8533335)
cgtttcagggtttaaatcagccaaaacccgctgtatggcctttttttttttttttttgaaggcagaggctccacttgtacttgtaattattatgtgaatcttcttatgacttgaaattcatgctcgaactctgtataaacaaggcaagttgtttttttttgctttcactgtaaaaatgctggcttatttgatatattttggagaaaatagtttagggctcgtcttaactcaattttattttattggcaattttcattctcaatcttacacaatgtttccttcgctcttcagtaaggtttagtcttctctcccttttactgtcatggccacttaatttgctgctgtttcacttgttatccatgaaaccactgctctgctgttactactaatatcactttaattaaacttcatttcgatctgctattgatgattcagattgggcatttaaggagaataggagtgggtagggt

SEQ ID NO: 59764 - DNA, 473 bp, Populus trichocarpa
  Intron number 4 from transcript POPTR_0016s06200.1 (locus POPTR_0016s06200) derived from phytozome v7.0 (chr-ID scaf fold_16; pos 4149636 to 4150108 reverse strand)
tcttcccacactcttaacacaatttgtttatctgggtattcatcttcctccttttgtgatcatctttgctatgtggtttttgaactgtgtcataggatttactcatcataccggttactgttatgctagtaattgaagaatagttgcagctaattttttagactttttgcatattccgagaaagtagtgaagttgtttctttccctagtcaagaatagtgagtatgcttccgtggttaagctcctgattcttgcttattggtaaaaagctgatttatttttctctctcgtattttgaattttgtcaaggttcaagctgtatgagtataatattaattagttggttgttgtctcctcaaaaactccaatgaggttattatattgttttgaattttcacctgaacattctgcagcatgtttcttattgtcctaaatataccctcttcaaataatttgccagatacctattgcact

SEQ ID NO: 59765 - DNA, 337 bp, Populus trichocarpa
  Intron number 1 from transcript POPTR_0016s06240.1 (locus POPTR_0016s06240) derived from phytozome v7.0 (chr-ID scaf fold_16; pos 4183717 to 4184053 reverse strand)
ctctggaaggagaagcaaaaccggcatcgtttcaggtacttttctcattctctgcttctacttctcttgatctttgatattttctccgatctttatctctcaattcttcaaataatctttcattttgtgtttttatagtctaattttattataaattatgagaggagaggccaaggaaaagcttgaactattttttttaattgttttagcttaatattttttttttaaggaattggagatttatgaatattgaaaactattggtttttgtagttaatcttagtggttgtaaaataaggtttttctttgcttgttgcaggcagtgatatttgttgaaa

SEQ ID NO: 59766 - DNA, 324 bp, Populus trichocarpa
  Intron number 3 from transcript POPTR_0016s01650.1 (locus POPTR_0016s01650) derived from phytozome v7.0 (chr-ID scaf fold_16; pos 751808 to 752131 reverse strand)
ggtgttcatcaagttcttctgctcctgcacttcaggtgaaccattgaattttcattcttcttcatatgttggcatagaatttcaaaaataaactaaaggatttggctggaatctggagagaagggtgatggtgctgtttgatggaagcattctgagccgaagaatatcattttctctagttctctatgatggcggggtggtttgttcatatctgttattaacaatatcaaaaggatatgcgttgttgtttaagcaaactttctggtttacttttgaatcaaatgggattgaaatcattgtagtgctttgcctttggcttaaggc

SEQ ID NO: 59767 - DNA, 523 bp, Populus trichocarpa
  Intron number 1 from transcript POPTR_0008s13910.1 (locus POPTR_0008s13910) derived from phytozome v7.0 (chr-ID scaf fold_8; pos 9178080 to 9178602)
tccactaaaattacatatctttcacttggggacaggtccttttcttttttctttcttattgttattaattataataataatctcttttcttttcttaattgccaatcattatcttctttctcctgaataagcttttaccctctcaagatcctcttggtctcttgcttccctttttttatttctttctaattttgaaaagaaaagggaagagttttaaagggagctaggctggtgttgctagaggttttagatctgaggaagctaaggttgtttgaagcaatgtctcttggtttcttggtttctttttgactatctaagtaaacccacttgcatctttctactcctaaattttcttgggtttttttagggtcttgacttcttggcccctcttcttcagagaagctgtagtgtttgggttccttttgtttttggtggcataaaagtctcttcttgggtactcactctgcatttcttgcttgaattcctaggaagatagagagaggggctactcggtaagtggtaa

SEQ ID NO: 59768 - DNA, 876 bp, Populus trichocarpa
  Intron number 1 from transcript POPTR_0016s04600.1 (locus POPTR_0016s04600) derived from phytozome v7.0 (chr-ID scaf fold_16; pos 2703956 to 2704831)
tagctcaaatctcggccatcacactcacaacagaggtgagtttcaaagtggtcttgacatgacaaggccagtgcctcatgatttttgttttaacaattcaatctagtacattagtatttctgttggttctcatttcaagtgttttcctgctcttcatattgatcaagaaatgaaatgttggtgcgcttaatcttgactgaacacatattttgctattgtttttgtgatcatctctcaactgggcacctcaaaatgcattggtatcgtctacatggatgattgtttacatcagacatgtacttttatttcatttttcatctatgttttctttgcatcgtcaatctaggcctcacatgttttgtacataaatgtcttccatgtaaattgttctgtataatggaattgagagtggtcctgataagttttgaggtttgtggttaaacttgttacgtgaaaatgtttccaggacttctaattgatactatgttttgtgcccgtggaataattctatattttggcttggaattgtttgtttttaaaagcagcaccggagtgatttttagggccataatttagtggtaaaaagttgcgtcgtcattttatatctttcagttatgaacaaggtagatttcaatttcttttggtaattttgattttcttggaagaactcgttatagttattgtaaattttattggatactgtaaaaagttttcatccttttagtttttctcctgtgagttagaaattacctttgggagctacacgaaccaggtttatgtttcgatatatggccttacaatgtttctgctttaattatatattttctttttaatattgcagaattgtttttatatttggtgatttgactttacaaa

SEQ ID NO: 59769 - DNA, 210 bp, Populus trichocarpa
  Intron number 1 from transcript POPTR_0016s14800.1 (locus POPTR_0016s14800) derived from phytozome v7.0 (chr-ID scaf fold_16; pos 13932297 to 13932506)
tttctctcttcctcgacggagtttcgctttcgcaggtactattattcctccctttatcctttttttgtctttaatcttcacgctttttcgatcagtttttgttttttaattgttttttttctttatttgattgatgatttgatagggtgataataatatgaaatatatgtgatggttagggttagggcatcatctgctgctcatacggtg

SEQ ID NO: 59770 - DNA, 404 bp, Populus trichocarpa
  Intron number 1 from transcript POPTR_0008s18100.1 (locus POPTR_0008s18100) derived from phytozome v7.0 (chr-ID scaf fold_8; pos 12127850 to 12128253 reverse strand)
cgttttggcattggatacggataccaattgtaaaggtttgtttttgtgcaattcaattcagttttatgaaggtgattttccacagttttggtctgttagtcttgtttttgtgcaattcatttcagttttatgaagatgattttccacagttttcgtctgtgagtcttgtttcttggactttaaggctttgcactgcttgggctctatagtttcttttagctttgccgttactgcaattttgattaataatcatcgttcttatttcttgccctgcaatattcttgttcaggttacctagcttcctgatttggttctaatccggactcttctcactagtaacttctggttctggcttggctaacattttattagtctcgatttataggagtaaagattgaagagtc

SEQ ID NO: 59771 - DNA, 899 bp, Populus trichocarpa
  Intron number 1 from transcript POPTR_0016s05530.1 (locus POPTR_0016s05530) derived from phytozome v7.0 (chr-ID scaf fold_16; pos 3463887 to 3464785)
gaggatctactaagactcttggaaactttgttaaggttcggtttcgacatgtttattttgttgtgtgcttgtggttgcttttattttcagaactttgaagtgatttattgttgtgatgggttgcaatgtatagttttttaaatctttggttatgaattgatctggagatgtttttcttgatgaatttattttgctttgcccacgtacatgtcttcttttactcacgagactggaggattgatttgtttgtttgagaaagttgaggcattccttatcacgaaatgttggttatggattttgatccaaatttcatgttgtcatgtttctcattactgaatgatgcttttctgggattcgaaatggaagtaaatgtaatctgcactgattgttaatgattttcttttttaaaactccttttcgggcacaattacgccgttgtaaatcctctcttttgattccttttttctatattgattgtagaacagtttataattagtaggagatgattaagacaactccactgaagtagaaagtaaatccatgtatgttgaggatatctgtctagtttgggttgccttggtttgctattcagtattgttgtgtcagtttctagttgatcctatgtgtctttatcttttgtttgctgctgagttgccattgtaagcaagtaatgtttacttacccgcttgtttttccacttctgtttaatgatgttagaactttagcttctatctattaagcattgatgtaagatctccacttcactacttaattgcttgttcttcttgtgcgacggaggtgttgagtgttaatatgtaaaaattaatgatgtgtatcattgcggatgtctgaattgtttgttcatctgcaggccacatttgactgcttgctgaagactt

SEQ ID NO: 59772 - DNA, 1021 bp, Populus trichocarpa
  Intron number 1 from transcript POPTR_0016s00720.1 (locus POPTR_0016s00720) derived from phytozome v7.0 (chr-ID scaf fold_16; pos 261376 to 262396 reverse strand)
gtgttgttaaacttctgaaggtaagcccaatttttgaattttagtaaaaatttactctgtttgtttgccgagaaaaacctagaaaggcaatgaaaagaagtgaaggtcggtttgttggagctgaattgttgcgttggggtttgttgcatgggaaaattgcttgtaagaagggcttaaagtttggagcttttttaggttaagctagtcaagtttgaattttttgagtaaagcagattgtttaggtgaacttttttttgtttgtctagggttatattcgagggagtttggttgaattagggttagtagcgcaaccatttaaaagggttcaccgctcgtgaaaaatttcgcttggtcgcttgttaaatttgcctcttttggtcctaaagtgtatcctgttgttgagctcttcagaattttggtttctaggactgaattgctgtcctctgctgaggaaagtggatgcttagtgaaacagaaaaggatgacaaggaaaaatctgaatctgactagatttatgaagcttagacgggtggaaacttccgggctactcagattaacatgtcaaatatgaaagaattgttgttctaactttcacattgtttgtgtgttgaatcttttgagattaaaatttatggctttgatgcaagattttgaatattctgatagagttaaggagccttaatattgattttcttttaccatcaaataaagaaaggaaagagaaactgaatcaggagctgaatttgtgttgtttcataatgttttgacctgtaagctactgtttataaaggttttttttactgtattggacctcggtttgtgtttggaatctattaatgagatgaccctgggatgtgtttgggatctattaatgattttgagttttaggcaatagtgttgggtttttctattccctaatgcaacagatgtacaaccctagggttcttgtttggattttaatgtgctgaaaatatttcctttatggatttacctgcagcaagctgctacttgtctttctgag

SEQ ID NO: 59773 - DNA, 818 bp, Populus trichocarpa
  Intron number 1 from transcript POPTR_0016s04110.2 (locus POPTR_0016s04110) derived from phytozome v7.0 (chr-ID scaf fold_16; pos 2337899 to 2338716)
caagaaacagatattttctcgttcttcgttcaaaggtaaaaaagaaatatattcaaaattcaatcttctttcaaattaatcagatcttttttgtatctgttttgattcatggttcttaggtttttattttgaatttttgtttggtttctgagaaaatggaaggaaaatgaagattttgaagttcaaatcagaaaagaatagtttgaatgaaatttagtatccgtcttttttagggtgggaaatcaattaattatctcagcgattatattttcggattttcttctcagtttaatttatttctttcatctttgcttatttttctcggtaaccaagcagaggtttgcctgcttgatctgtgaatttttgtgttagattgatgtgattataatttttttttcttgtatatagtcttttattgtgtgattagcacctttaatttttttttttaactgagctggctttgtttattcgtcaatttaacgttgacttgacttgataacgttcaagattctgacttgaattactagaacagattaatactatttttaatcacttttcgccaaatttctaattgggggtagatgttaaaggttttaattctttattttatggcgagataatttgcaaacttttgttttaaaaaacaagattgtgtattatcattgattgttatgacttgttgttgaatgagttgattaatgttaatcacaagttagtaaatttcttggaagaggataatttgataacttgcattgaatctcattcattttctgtgtgaatttggagtacaggactgcagaggttgtggtttgaaaagg

SEQ ID NO: 59774 - DNA, 405 bp, Populus trichocarpa
  Intron number 1 from transcript POPTR_0008s11990.1 (locus POPTR_0008s11990) derived from phytozome v7.0 (chr-ID scaf fold_8; pos 7731448 to 7731852 reverse strand)
taagctggaattgtacagttaagcagccaaagggggtaatattcttgatacctagctgacttttcccttttctctatttaattatgttctcacatgctgtttcccgcttgggttttgttctggtaattgataaatccaccaatatttcagatttggtcttcccttggggaatatttctgtttctagctcgtaaatatggggtttttttgttcaatttatttcttacgattcttcaggcaaccgtgtggagctggcagctgattgtctttttttttatgattaagtttgaattctttttttttttgcgagatctgtaattagcttatgtaactttaaagtcttaattattttatgctggttttatgtgcaggacttttgttcttagggaaaaaggcgaaaaaaaaa

SEQ ID NO: 59775 - DNA, 630 bp, Populus trichocarpa
  Intron number 1 from transcript POPTR_0008s03260.1 (locus POPTR_0008s03260) derived from phytozome v7.0 (chr-ID scaf fold_8; pos 1722646 to 1723275)
taaaacggcaagacctttacatccatctgggtttagctcattttatggtcttgcatcatgagttttttgtagtttccaagactctgccttttggctagagaaaaatgctaccttgggtttttgctttcggggtttatgatggtttctattttcttgattttgaacgaaattcctacctgttttttgctaatcacaaggttttagcattgtaggatctctcttctgcactaatttttgatccagcaatggagaatataaccacattttcttgatttgccatgttttctcagcaaccaaacggggggcgactcgaacaaaaccccatctgggttctgttcattgaaggcttctttctcatggtcgtctctcattttcaactattaactcatccacaacaccaaagcaaaacaaaagttgtcattgcattttcccagaaaataaacagagcacgctctgtttcccgtgtttcttttaacccctttttttttttttttaccaaattcttgctgtagctacttggcttatattatattcccacattttacattttcttcaagacaaccaaatattcttttctttcttttgtttctcattattaatgtttttatattttaccttgcaggagagtca

SEQ ID NO: 59776 - DNA, 961 bp, Populus trichocarpa
  Intron number 1 from transcript POPTR_0008s16610.1 (locus POPTR_0008s16610) derived from phytozome v7.0 (chr-ID scaf fold_8; pos 11160115 to 11161075)
gtgagaagttgcttaaggtagaagtagcttaagctaagggttgcttcaacaattatccaatactctatttaataaaatgtttaaagatatatttattaattatactttatgaaatgaaaattattatcagttaataaaaaaatcccaagttcataataaaaattatccaagatcctatttattagatatatttatataaaataataataaaatatttcttaaatattttaaaagaatgcatttatagttttattgagacttaaaattaccttaaatcgactctgattatggtaattttattattattattattattgttaagattaaggtttattcacattgtgataccttacaagtgagaaaaaccactcgttccctcgagtcattgtagtgaaaacaaaccaaaggaaggagtggttcctcgagcggagcagagcatttggagggaaacgaagcagccaacctgagctgtcccaactacggggaaaaagaggaaattaattttcatccacgtggatgacaagtggacaaggccctcttcaacaaatcccacacccagacaaagctgatgtgattgggatgatgtcatcacaaaactcttctgacgtggccatccatcttcagttgaccaatctgtaattttaccccataggcatgcagatgtggatcccacatccattcttttttctgtattttagaatattgcaagactagcttaaatgatttttagatagaacaacatgaagattaaatatttttgtaattaaatattatatgaaaaacccgcacacttgtatttataaaaaaatatctatatttttttaattatttttttatagataaaatcaaaatcctgcctaactgactgcatccctttgctgggtatataaagtacactagacttcaaattttgcacaccccagtaggcactgcaagaaaacaggaagccacaaaaaacaca

SEQ ID NO: 59777 - DNA, 930 bp, Populus trichocarpa
  Intron number 1 from transcript POPTR_0008s06810.1 (locus POPTR_0008s06810) derived from phytozome v7.0 (chr-ID scaf fold_8; pos 4078357 to 4079286)
tttccaagagagaagatcaagaaattgctctaacggtttggtttttcaactcaatttcttgaattgctgttttgattcttttgttcgtaggaaaccttttcttcttttgtccctgtacacttgtattcttgggcattttagctattgaacagtcttttaatttttttcccttcccattgtgcactggctagggaccaactaaactaatacactgtgatatcacagtggtgacactgttatggggagtttttttttttctgactgggttggagagggatcagggatgatgcatttcataaaaaaaattgggaatgggatcattctgtttaagtatcatcaagaatgacagtagtgttggcagaacatgtaaaattgatgaccagaagactggtttcaggaggtaaaaaatctcattctgttttgttgagtttgcttcctcagaatattttcttggaaatctttggaaaatctcttacctttttcaaaatgggaccaagactagaaagaaaattttcctgattagttgggacagttcttagtcatatatcctaacagtattatttgctggttttaaaaaaaatattttctttctttttttaaaaccagcaaataatcctgcttgtcaataatacaaaactaaacagctagaaaaataaaaataaaagactgacttgataagtaaaatcttgtagagcatagattccaagctccatcaatctagcagttgccccgctgctttgtttccggtcagattcagaacaattgaaacaagatctaggaatgttgaaaataaatcaatttttttacaattttttgaaaaaatccaatctataaaagagatgggtaaatagggctgcaacctataaaatacaatataattatgttttatttgcagcctggaggtaaacacgtgaaattgcttctgcacta

SEQ ID NO: 59778 - DNA, 573 bp, Populus trichocarpa
  Intron number 4 from transcript POPTR_0008s06810.1 (locus POPTR_0008s06810) derived from phytozome v7.0 (chr-ID scaf fold_8; pos 4079694 to 4080266)
gtatcgataggtgttcctgcctgttttaatcaaaagtaattgccttacttgctcaaagcgaatatttttattttacattatgaagtgagttagtgggagatccatcttcatgtagggttgctttatgtcttagtagaagggtccaattggttttcccgtttgtagttctcaaggatagaagatttcttgttgaaattatttatgtcattgctgttaaaacttcaatgtaaaatgtagctccttagaattatagaaactttgctcaagtcctctaggaactccccgattttaaaacttcaatctaaaatgtagttcctttgagttatagaaactttgctcgagtcctctaggaactccctggttttaggtttcactttcaggggtttatttaaattaattgctcgttatgatagtcgagtccccaaaaaatcatcacatgtgtacatggagaatggtttgtctatgctgtcatccaacatctatttacttgtacagttgtttttatagcttatagatagtatttctttttcctcaccagaacaaggctggaaattcaggcagacgctgcttgtg

SEQ ID NO: 59779 - DNA, 956 bp, Populus trichocarpa
  Intron number 1 from transcript POPTR_0008s20760.1 (locus POPTR_0008s20760) derived from phytozome v7.0 (chr-ID scaf fold_8; pos 14746048 to 14747003)
gaaagaattattcgtactagagttatgtaatgacaaattttcttaagggtaaaaagatgtggggatacgttaacagaacatgtaatacccaagaatattgaggaggaagatgttgttttgatagatacatggaaaacaaacagtgcaaagattattacttggatcaacaattctgttgagcattccatagatacatagttggcaaagtatgagacagcaaaggaggtttgagatcatctgcaaaggttattcacgcaatcaaattttgcaaagcaatatcaattagagaatgacatacgagctcgtcatcagaagaatatgagtatttaggagttttattctactataacagatctttaagatcaattggctcttacagaatcggcagaattaaaggcatgcggtgcttatattgaatgtagagagcagcaatgattggtacagtttttaacaacacttcgcaacgattttgaaggacttagaggttcaattctgcatcattctccactgccttctgttgactctattgcagtgagttattagctaaggaaatatgtcgttagtcttattctgaaaaggtaattctttctactttgaatccttttgtactagcagtaccctcttagtcattctctaatcatcagaataagtcgtacacaagggttggcttcgataagtgcagtttctgtaagcaaaaaaatcattggaaggtttagtgtcccaagttgagacaacagaatcaagcttagaagcatgataatcagtcacaatctaatgatcataaaccaccttagggttataaaccatcacaccacaatactacaaaagtaacttcatcaggctctatcaccgatcctagtactctagttgagcaatttcagaagtttctctctttacagccataagcaatgttcacttctccttctgtaggttagttgcctcatagttcctcaggt

SEQ ID NO: 59780 - DNA, 854 bp, Populus trichocarpa
  Intron number 1 from transcript POPTR_0016s01730.1 (locus POPTR_0016s01730) derived from phytozome v7.0 (chr-ID scaf fold_16; pos 788945 to 789798 reverse strand)
attaaggacggtcctagtccttgctgtggaaacaagtataccaccggcactcatcattgactcgtgttttggcaccacaaatgttgaagtcattcttctgttacttaatgatatatgttcatttttcattacagattatttattttttcatcatgtaatacaattattataaaattagagttagtaaaaggtcaaatcaattaatgatgttgagaatttatacagtactttttttaatatataattcctatttgttggtttccgattcaattcagacaattttttggcttttgtttctccattttcttttttttttcttttttgaacgatggtgtccccaatttagatttgttgattatgcaatacagtgcactttactttttgtgataattttactgactttggatgaattgaaagcttagttattaaacctggtttcatctttgaggataattaaaaaaaaattaaggttcagaatttaatttaatttaggttttaaattgaattaaaaaaaatattgatttcactaattgactcagtcatgttttttgtaatttaataactcggtaaaacatggtccaaatataatcgtgttaatttcaataattaacaaaaacaaaaaaacactgtttttactaaaataatagatcctagttgatccgttaactcacaagttgaagaacaatccaatacttcatgtctttttccaaagttgataattatgatgatatcctgtcgatcattcataaaattatagctccatcgataaaatctacttggttaacaatatgagcttttgtgtcatcggagatatcataggtttggttttcgatctcagaggccccatattcggt

SEQ ID NO: 59781 - DNA, 569 bp, Populus trichocarpa
  Intron number 2 from transcript POPTR_0002s14040.1 (locus POPTR_0002s14040) derived from phytozome v7.0 (chr-ID scaf fold_2; pos 10400568 to 10401136 reverse strand)
tgtggacttctggagttgtttttgggagaggagaggtacattacttagtgaaggtcttatggatgttgcaatgttctcctagcttctcgttgagtacagtagcacctaacatcgatgcgtgtgcattttcacagttatccaaaggcaacagctaagtacacatcgtgtattaaaaataaagtggaaagcattgacgatcaatattctcagatatgatagtagctggatttgaatggcaactccttttgttttatttctaaaagtgtaggaggatcgaattatcatccatgttggtttcctgaagaaaattctttgggccttatttgatttttccttggataataatccaccaatataactattagttggtcacatgaaggacctccatttcttcatcatcaacacatgggtgaaattctgaaacatatctgttaattcatgtttctagtttccacagctgtgagcattagcatatctaccttgagttctcagttgctgatttgttgatcatctttcatttttccttttccttagcagggcattgttggatttgaaacgcgatacgggac

SEQ ID NO: 59782 - DNA, 710 bp, Populus trichocarpa
  Intron number 2 from transcript POPTR_0008s20560.1 (locus POPTR_0008s20560) derived from phytozome v7.0 (chr-ID scaf fold_8; pos 14326897 to 14327606 reverse strand)
aggtatattcttcggataatgaaaccaacccctcttatgacgaactaaatgatagatttgaatcattatatgatgaatttaaaaggttaggatctaaatataattcattgaaaaagatgcatgcaaatctaaaaaatgaaaaaaatggtttgcttaaaaatgtgataaagtaacacaagtaaatgaatcattatgtggtattgcttgttgttcatcatttatagaggatttgaaaaataaaaatgatgatattataaatgatttgaagacttgacttcaactttagctaagtttactcaaggtagagataaattggattttttgttgggaggacaaaacaaaagcctgaataaaagtgatttagctttcaatggtgtagaaaaacaaaaattgaatgagcatgttaatcaatctagcatgtatagttgtttttctatatgtgatttttgttatagaaaagatcatttatcacataaatatagattaaagaaaaatggcattccaaaaaacatgttgtgggaatcgaaaggtataatgcctaacaaacaaggactcaatgttaaaagggtacctaaaaatacttcccgcaagaattctacaaatggagaagcaaggaaagtgttccaacaaagaagcaacacaaactatggacaagcaagaccttaattccaaaatcaacaattaagaggcaacttgcaaaggaaaaacca

SEQ ID NO: 59783 - DNA, 593 bp, Populus trichocarpa
  Intron number 2 from transcript POPTR_0008s20440.2 (locus POPTR_0008s20440) derived from phytozome v7.0 (chr-ID scaf fold_8; pos 14193476 to 14194068 reverse strand)
tgtgggtaagtaatcaaattctccgacttgtaacatgcaaagacttcctcttccttatgcttagaaaatgttgtgggcctccttgtaggattctacgagagcttttgaaatgcttttgaaataatttggttagattacattgttattagttaaaaagaaagaaaatgcaaagaatttttggtaattcagggactttgtgttggtatgtctaaaatagaatggttgcaatacatgtttaggttgtttagatctgagtttagttttctgagttacaacttcaagattgtgatgcaaaagatatgcttgtcattaaattcccttgttaatattgctaaatattgattcttttttcaataaaaaaggatttctgctcaaagtgactggaagaaggatgttctttgtggggaattgttctaaatgtctctttaatattttatgactttttatgttttgttatgttttttggcgttaaataatgtggtatgttgttacatttgaataataagcaatatgttgtcatggttgttctccgtgctgaatttgcagcaatccttgtaggatcaattgggaagagtgtcattgctttctggaat

SEQ ID NO: 59784 - DNA, 387 bp, Populus trichocarpa
  Intron number 1 from transcript POPTR_0008s20440.2 (locus POPTR_0008s20440) derived from phytozome v7.0 (chr-ID scaf fold_8; pos 14194179 to 14194565 reverse strand)
cgtttttacattctgtggaccccagaatcaaattggtaaacaaaaagtttggattttttatgccaattctttgttctgggcttttttttttttcatttgtgttcttgcaatttttcttctattggataagatctgggcttgctgatatatgggtaatttcgttttttcttgattattttggagaaatttgattgatttgatatgtgggttacttccattttgctgggttttgattaaatcagcagtggaagttaattgtatgataggacttgaatattttgtgatgttgtaaatgatgggagtttttagttttcttttatatggagttttgagaaagtaatgtttatgtttgtgtaaattcgaaatatgtgtattggtcatgcagat

SEQ ID NO: 59785 - DNA, 708 bp, Populus trichocarpa
  Intron number 3 from transcript POPTR_0016s12620.1 (locus POPTR_0016s12620) derived from phytozome v7.0 (chr-ID scaf fold_16; pos 12013729 to 12014436 reverse strand)
aagaagcaacgtattgaaggtagatgatttctatggtgagtttgatgtttgttgatttcttaagtaaatgataactaattagtttgggaattaattaacttaatcaattgtaagaagtacatgtagtagcttcaccactctgctttgaaaattgtattaagtgaaatataatgtacaattatttgtaaaaaactatagtaattttcccctgagttcacatccctagtttagcgctttaagtaggagataaatggatactgctgtgttaaatccctgtccaagacaagttggtgtgtttgcgtgattatttgagggattaacagcttgttatcttccctttttttttcttttcttttctatatctggttgaattttaaatcatggggcctgttataagctagctattctatcactccggttcactctgtggattgtagtacgcaccttatgtttgcacaagacagaatcttcatgtttgatttgtatagtatcaggttgatatggaggaaaggaagaatataagttaaccgcttctgtcaatattattcaaaatttattttcaagtttctcttgaatagattgataacttgctttaaagggtaattgaatttgaccattttaagtattagattgtatggtttgtgtttttgtgttgataattttgtgtgtgcagctataaataaaacttctgcaattgtgaaagtgggg

SEQ ID NO: 59786 - DNA, 783 bp, Populus trichocarpa
  Intron number 1 from transcript POPTR_0008s02260.1 (locus POPTR_0008s02260) derived from phytozome v7.0 (chr-ID scaf fold_8; pos 1086779 to 1087561 reverse strand)
tgaggccttgcagaacactcgcgaacgcctctcaagtgagttttttaattaattaatttgtttatttgcgtgaatttagctgaataaggttttcgtaatatgtgggatggtgttgattttgctgaagattttgtgtggtgttgtttttcactgggttgtaaacgtgcttagcgtgtcaggttcagttattgtgcgggaattgagtattgacctttgaagaaagtgacgattctagatgtatggtgatggtgagaatataggagtaggaaattgttctattagaaacttttagggagtgttgagtttaaggaaattttctggtggtttttgtttgattgcacgagagggagacttaggtgggtgattttcttaataattaactagatggagttctggtagatctacagagtgctttcttttcgtcggatttatttttggggaggggaggggttgggataggcgagggttatgaatagaatattaggctggtttcaacccagattcttgaataatttaggggttacaatttcttagtgaaattaggcttgacaaggggttttttttaaagatgcagttgttaatgattgtaatataattataacgatcttatgagttccttgcttctctttatacaaaagtcagtgttatgagagcagaaggatgacctgctggttgtctttattcacatcatttctgtcctttttaagtggttttgagcatcccttgtatccttttttcttcatccgcgtaaagacatgtaatctctgatgtttagttttgcgg

SEQ ID NO: 59787 - DNA, 688 bp, Populus trichocarpa
  Intron number 2 from transcript POPTR_0002s22090.1 (locus POPTR_0002s22090) derived from phytozome v7.0 (chr-ID scaf fold_2; pos 18791856 to 18792543 reverse strand)
ttggcataaccatctttgcccttggaacccttcaggtattttcactttttatttacctaaacagcaattaattgggtcttgattgttagttggtgactctttttcatatttgttgaaaaaagtattcatttttgagaatataattgccttgtgtaatatattcaaaagcccagaaaacttttgatttcgaaacagtagttaaaatgtcaccacacagttcttcatttgacttcgaataagagagacctgaaaaaccatcattaaaaacccttggatttttttgctgccatgggattcttagatttctttccacatcaaaggatgcctaaggaaagtctttaatgcctaaaaagtcagcatttgtgtcccgttgaatcttgattttgttatcgagcacacgcaattcttttaatgtgggatctttccaagtcatcaactgcgggcggcatctagaagggaacctgtttgcaagttctttcttcccttcatcgtcactcgaaccgtccagcctcgcagtcttttcaaaagacaaaaaactgaatcgaaaaagattatttttttctagctctctcctcgaccacaaaaactgatgtgatctctagacaagtaatgtgaaaagtcttctaacaaataatgcaatgccctgtttgcaggtgttggccttgcttttgaggcccaagccagacca

SEQ ID NO: 59788 - DNA, 558 bp, Populus trichocarpa
  Intron number 3 from transcript POPTR_0002s24890.3 (locus POPTR_0002s24890) derived from phytozome v7.0 (chr-ID scaf fold_2; pos 22108824 to 22109381)
aaattgtaaggaactcttcacataagcacgtttattttagctgttattataattctcagtggattcaatggtagtaaaattgtttttatccaatctgttgcactttataaaagctacctattaagttttattttactatggctgagagtcagagaaatgaggagtgcattaaactcatgtataatataaatctatagctgagaggcctgttcttcacctgacattgaaatcttgagtattagaagtcacaaagctagctaaagacgcatgaaataacaactatggttaaacaatctgagatgacatgaagctggaaatttcaggtgttgggaactcctttctcacaatttgagttgcatactgcatttataatgccctaagtgggtttatttggcaaattgttgtgtttaaatttgtagccacacctgtgaggcaaaagaaaaataaaagcatcgctgttatattgtttttgtaagaaaggagttccttgtgtttcctgtttgattgttaaaattattgtcacagttctatttctgatctcaggttgctgtgaagaaa

SEQ ID NO: 59789 - DNA, 226 bp, Populus trichocarpa
  Intron number 2 from transcript POPTR_0008s19830.1 (locus POPTR_0008s19830) derived from phytozome v7.0 (chr-ID scaf fold_8; pos 13684722 to 13684947 reverse strand)
cacttcttaaagttgcagctgtctgtggccgacaggtaagtgatcacctaactcttcttgtttgattacagatgtgccatggcttgttttttttttttttgttctccatgtctctgacttttttcagattcattctcggggttcttttaattattaagagtattgtgaataggatgttgctttgactgcagggctggccagtcaatcagccggatattattgtatc

SEQ ID NO: 59790 - DNA, 574 bp, Populus trichocarpa
  Intron number 1 from transcript POPTR_0008s06110.1 (locus POPTR_0008s06110) derived from phytozome v7.0 (chr-ID scaf fold_8; pos 3616547 to 3617120 reverse strand)
cggtacgctgaatttacccaaaattttctaggttttgcgtgggtttcctgatggtttatttttctttttatataagatttgaagtgtgaaagactttgttaggaaaaaaggggacaggttttttttttgctttctttgtttcctgccattttttctgtttcttccgtggagccaagagtaaacttttctctttgaatgaaaaactggaatgcatataaaagcctaaaatcctgggcactgtgtttagtctcttgtgaactggtgatgtttgataagtaaacaaagtttagttgaaaattctgctgtctttactatttctatttctgccgtcttcactatttctatttctgccaatgcaatatgagaaataattggcatctgaaataatcataggcgtttattcactttggaatatgtagcttatcgaatagctcggagggtaaactgttgacattgttggatgtttgctttctgtgctgttctgttgttgcctggatctgttctatctgactttgtcgagatttttctccgtctttcaggtgacattcacgggcagtatagtgatttattgaga

SEQ ID NO: 59791 - DNA, 742 bp, Populus trichocarpa
  Intron number 2 from transcript POPTR_0016s05950.1 (locus POPTR_0016s05950) derived from phytozome v7.0 (chr-ID scaf fold_16; pos 3894956 to 3895697)
ataccaagtaccctctcttcctccatctcctgtgaaattttttatttttaattccagctttggttcagcatgatttcaattcataaatatctctgactattccgaaatatcctaggcagccacttttatgacaccacatatttcacggcatatagcggccggttcaaccgtgttttaattaatttatttattttgaagaaaattagttttaaattatttgtttttagtggtttttaattgttttgatgggtagagattaaaaataaatttaaaaaaataaaaaaattattttgatatatttttaaattactacatattagatgttgcttttcaaattttttttttaaaatatatcaaagtaataaatttttaattttaataccaacacatcaaaataattaagaaaaaattataataaattaatttaaaattaaaataaataaagctaaataaattaattaaattaaaaacactgctgaactctaatttcaaaatatagtcaaagtccattacaggacccacactcaatttacaaaaatattccattaaaattctaatttccatcgtatcacatgtttttacttactatccaattttgtgttaatttgctaattaggaaattaaaaaaattctctcgttgcccctctccaattcacaggttattgataaaatgttgccattttagttgattgattttttgttttttattggttcgaaaatagaatcaaattttattgcgtgg

SEQ ID NO: 59792 - DNA, 669 bp, Populus trichocarpa
  Intron number 2 from transcript POPTR_0016s09000.1 (locus POPTR_0016s09000) derived from phytozome v7.0 (chr-ID scaf fold_16; pos 6829032 to 6829700)
caggttcttccttcattccatcattttatttctgtttttactgttaaatcgtgtgcaatttgtaacgtggcacttgacactctgttagtaaggaaagtagggaggatggattggtggagaaggataggatgtgttcccttgctagatgaattaagacccgaccactggaaggatgggagggagggatggatccctcctgtgcttgtataatttactatccgtctctgctagagtgtgtttgtttttgcaatcaaaatgcgcttttaaattattttattttatttttacttcaaattaattattattttttatgattttagattgttttgatgtgttgattttaaaaataaaaatatatattattttgatgtattttcaagcaaaaaacactttgaagaacaaccactaatgccttattctttctttcaattatacatcctttcctttcttccctcgttcatcttccaacccatttgagtaaaactactattatttttattgaattgatgttttgatttagcaattaaggattaaattcatatggaatgttgttttttctgaacattgtaaaagcctgtagaacacctctctttgtctcctcccctggccctttggtttctaactggagactgataatatcttgggttctcttctgctgatgtagataca

SEQ ID NO: 59793 - DNA, 537 bp, Populus trichocarpa
  Intron number 2 from transcript POPTR_0008s13340.4 (locus POPTR_0008s13340) derived from phytozome v7.0 (chr-ID scaf fold_8; pos 8760003 to 8760539 reverse strand)
tccacaaaacaggaagctcacccagcctcctgaaggtgtgtctattttgcttctgcatattcttggtgtatcctatctatttggtattgattttctagtcaagcaagaataacttaatgaaattaacaactcttgttttcatggggagatgggaaggagtggttaaaaatgatgaaatgtgctgtttaggaagtgaaagatagacaccgccagtacacaaccaaggcaaaaacaaaattgaagtgtacatcagttaatgattgtactttgaatcacgggtgtgagtttgatttactgctcaaacgtttgaaatgattcaactaaattgggatttgttagcggttgttattaaatggagtgaaacccgatatgaactccatgcattagcactggcaccaagtcaggatggtaagatgcggaattatgagcaactgaacaatgggcatcttccttgcaatgcaattacttggtttatgcatatgttttgtaaaattctcaagaaatatacagtaatcattagttgtgtgtgtgcaggaa

SEQ ID NO: 59794 - DNA, 347 bp, Populus trichocarpa
  Intron number 1 from transcript POPTR_0008s10910.1 (locus POPTR_0008s10910) derived from phytozome v7.0 (chr-ID scaf fold_8; pos 6865318 to 6865664)
tcgtttatttcttgagcaattctctctcaattgaggtttgattttgattcatttaatcaatttctatgtgggtctttgtttgcttccatttgttgttttttactattatttttggtcaactgggttgcttgagtttattgccggtttgtagaatagctcctcgagttaaaatctttagcgcaaaaaaattctgggctgtgataactgttagttttttagtcacaattttgcaaagaaacagcaaaaagagaaagaaaattttatcaaggatgattctctagcaaagcaatccgtattacttgtcattgctttttaatgggatttggtgttttgcagaattactttgg

SEQ ID NO: 59795 - DNA, 533 bp, Populus trichocarpa
  Intron number 3 from transcript POPTR_0008s10910.1 (locus POPTR_0008s10910) derived from phytozome v7.0 (chr-ID scaf fold_8; pos 6865861 to 6866393)
ttttgtctggtccagtaaaagccttaacctatctggtaagcactctctgcattttttgattagcaacatcctgttcttcgattagtgttgaagatgagcttaaaggattttgggaatttctcggttgttttttatgatgatcatttggatgcattaattgaatgacatcgtcgaacttgtttctggcaaaaattagctactgacaactttaattactctgtacatgggagttgaaaaaaagagagagagtaaaacttgatcttaatgatggagttcttaaccctttacttagttgtggtgggattgtttctcgcaagtttaagaaatggtgaaaatagaggacgtgttgcttttgccaggatggtgaataaatttgtagaagtgtgcttgaacttatatttagtgagaatttcgagcatcatatgccaaatctttgtgaatgcttactttcttgcctaaaatttaaacgtgcttttcttgagcagaatagctgatgatttactcgcttgatgcatctctctttcagctaacac

SEQ ID NO: 59796 - DNA, 509 bp, Populus trichocarpa
  Intron number 4 from transcript POPTR_0002s00890.1 (locus POPTR_0002s00890) derived from phytozome v7.0 (chr-ID scaf fold_2; pos 417635 to 418143 reverse strand)
ggttagagtggatagctgggacaatctttcaggtagtaagtatttgttcatgtcaggaattcatggagttattcttgtcttggtttggctattgtgctttaaccaatttgtccctggcagccatgatgttcctccttttcttatattgaatgtctgatttgaataattcatgctgatttgaataattcatgcttttatttgtttcatttaatctcaaatggtagatcgattggtgtttttcgtgtttgatgtaagacaatgtgaatgatggtaggactatgacctctggcttactcttgcaaaaggagtggtagctcagttgtgatgtccactagcctatgagttcatgtgagtttaaattttgatggaaagctggaaacgaagatcttgatgcccctataatggcaaaggaattctattcaagcataaattttgtatcctgtcttcagggagtttgtttcaagttctatattctttcttcaatgattttgttttctttcttatagaga

SEQ ID NO: 59797 - DNA, 950 bp, Populus trichocarpa
  Intron number 1 from transcript POPTR_0008s07590.1 (locus POPTR_0008s07590) derived from phytozome v7.0 (chr-ID scaf fold_8; pos 4646962 to 4647911)
aagtgagaggaagcggacgataaaaagcaaaagtaaatttgttgtgaactcgttttgcttcatgtttgtttctttgcatataataagaactgcctggaaaactgcccctgtccatcgttacagatgtgtgtagactattgctgttttcagtagcctctatggtggcatctcctccattcgggctctatatgtattactttcttcttacaagcagattagaagtgcaatactaatacgatgttgctcgtaatgcgatgttgtttggttttgtggtgattatgttgtatcagttagacattggaaaataaaaaaaatttagagcttaatccatatgtcagggactctagttttgatggttaactaaggaaataagtttcaaatttcgctgacttaaatggatgtaaccagctttctcaattgtggcaattgatggagaatggaatcgactgtgttcctattctagcaactgtgttcgaggatgccttgcagcgcctgggctttttttggttcagctagagatatctttgttgtttgcctaatgttataaaagctgggtttttttagttatttgcacagccagatagatgcatttaaccttggtgtttttttttttttgtagtgatgaatttttgaaattataagctacttaattgacaacaagttacacaagctgattgctagacgtgctgttatagtggaaattgggtagcaatccgatttgatgtggaataagttttggaaaaattgattcgtgtggaaccatctaagatcttattatgtttcctgctctcttgcggggaaaatgcttttcttgtttcttttataactgctgattcggtacatttggtttgtttattttcccatggcatgaaattggtgtgctccctgaattttatgaacgctctaatagtttttagtcttcctttgttactaacagccaaagcagatac

SEQ ID NO: 59798 - DNA, 732 bp, Populus trichocarpa
  Intron number 2 from transcript POPTR_0008s00480.1 (locus POPTR_0008s00480) derived from phytozome v7.0 (chr-ID scaf fold_8; pos 194757 to 195488 reverse strand)
ctgctactggccacgacaagcgccttttcttcaaggttatccatccctccatttcttcactactgcttagtcgggtttcaatttgacttcatcatgctaatgcaactgcaacaaggtggaattaggattctttgtaggactttatccaaaacaagttgttgcttctgaatataactatctttttaggtccatttccaatgctattattcacttgattttggacgagggaaaattgttaattaatgcaagtgaagactagggatgagttatgtttctttatcctcagataatcttctactgttgatgtaggcatgcttcttgaatcttaaaatccatcatcatgatctctgcaataaataggactgagcctctgcattttatatcttaacagatggggtttgtctgtggtatcttttgattttctcattgccttgatcggccgatgctgccccctccgtctctctctctcccagtcccatttattgtctagaattagcagtcttagctaaatcatgtgattttctacaaattaacttgcctggaccgagattcattgctcattcgggaacctcttgaagagtcttgtagaaaagctttctggtttttactggcatgccctcacaatggccacaacatttttctttacagattttatcaaatgtaacaggaagttaatcttgtctttttctttcctcaggtcatcgtttgtctttacgtactatcagctttggg

SEQ ID NO: 59799 - DNA, 527 bp, Populus trichocarpa
  Intron number 3 from transcript POPTR_0008s00940.1 (locus POPTR_0008s00940) derived from phytozome v7.0 (chr-ID scaf fold_8; pos 446560 to 447086 reverse strand)
gagtcgttggtacacagtatgtccactctactttctttctttttggttgggtttcgaggaagtttaactgttgtgtatgtcttgatttttcttccctctgaggccttttccaggacatgggggctttttacctttatcaaaaaactgtaaaacattttatcaaaaacaaacacagaaaaattagaaaaactttttttctctaaaatattttaaccaaaataagcaccatgttgcagtatctttcatttttttcaaaatacccatatcatagttataagatttaattcagatgttaacccggctcaagacttgaatcaaaagttaatgtcggattagtatattaacataagctatagttttttttaaaaaaaaacttgaaataaaatgtataattttttttaaaaaaagagatttaaaaataatctcgtttcaattaaaaaaaaaccaaacaaattgactagcaagactagagagggttttataaccatgattaagactaatattttttcgtttgaaacagtggatac

SEQ ID NO: 59800 - DNA, 311 bp, Populus trichocarpa
  Intron number 3 from transcript POPTR_0002s23870.1 (locus POPTR_0002s23870) derived from phytozome v7.0 (chr-ID scaf fold_2; pos 21343246 to 21343556 reverse strand)
tacttgaacagaatttcttgacttacttatttcaggtttggcacctgttgttacttcatgtcgggtgggtgagtttggacatgcatggaatgaaacaagtaacactagttgttgtcatggttaagaagggagtaagatgaccttttcttttctgaaagaaaaacaaaagctagagcttttttgtaactttaaactataaaaaattgaagagaggcgattcggttgttagacaagatgtagcagagaatcaaatcaagatggtaaataattctgctgtcaatttatttttctgcttgatttataaaaaggtg

SEQ ID NO: 59801 - DNA, 481 bp, Populus trichocarpa
  Intron number 1 from transcript POPTR_0008s14230.1 (locus POPTR_0008s14230) derived from phytozome v7.0 (chr-ID scaf fold_8; pos 9414797 to 9415277)
gccaaactgccgagactgcccgtcagttcctgcaggttttccatcagttccttctccttctctctctttgtctcccccccccctctcttttcagttatgaattgaatctgtgatattttttatgtagtttagcaagcatagggttctggttgaggttaaaaacatcagtttttttttttttttgctatttatttttcgaatcgtaaaagcatattttcgttggtcaaagtttataactttttatgtttttgagcttgtgctgtcctacattaacaagttcttcgactgcttttggttgtcaagctgtctgcattgaggaattttataactaagtctttttgaatctcgccttggtctaagtattagtgttgttgtggtatgtgcttgtatataattttggtcatgaagtgttgttcttatattaaactcgattgatggtggaatgttgggggtcgacaggccacaagctggaagcttgaag

SEQ ID NO: 59802 - DNA, 502 bp, Populus trichocarpa
  Intron number 1 from transcript POPTR_0016s09570.1 (locus POPTR_0016s09570) derived from phytozome v7.0 (chr-ID scaf fold_16; pos 7483950 to 7484451)
cttttcgtttcataagcccagaatctctcacttcggtaagtaatcttctatatatttattatgttcttaaattatttagaaaataattggatgagttctggaagatgttagctaatattgtcacagatgatttatctttgctttataaatcttctatttttatcattataaggttttagaggaaggaaaacacttgcataaacaagtaccaaattaatcatcacgctgaaaattaattaatgagaggataaaataatacaatattatattcacttcattttggcaatggtttagccattgttgaattcaaactcttctgctcaaaattagtaaaagcctttgacatatgatcctattaggattttctgttagttcgcttgtgttgctattttgcatggatcaatacttttgggggtttgttctctgctccctctaatttctagccttgtgggattatctaattgcagggaatttaatacattttctgattatcaagtcagac

SEQ ID NO: 59803 - DNA, 958 bp, Populus trichocarpa
  Intron number 1 from transcript POPTR_0002s21670.1 (locus POPTR_0002s21670) derived from phytozome v7.0 (chr-ID scaf fold_2; pos 18224002 to 18224959)
cgtttttcctttaacaagtctccagattgggtatatgtttttatcatcacttgcgcatcttcctatttcatctccttaaattagtttgatatttcaactccgagagataattttcgtttccctttttgtaaatgaaaaaaaaatttaacttggaatagttatgagataataaagatgatggtttatttccttgtgtatatattgcttgattgtagtggaaaggaatggccagcgagcttcatgcagacagggtattatgcttttgcaattctaatagtgtagtatcttttaggaaaacaattcgttttcttttttagcagaaagtgggataaaaagggacaagtgaagggagaaaagagtgaaaagcctgaaagaagatgttagtaggtgcaaaattaatcacttgatgaggtgatataatttcagattagaagtatatgaatgaaaatcttccacagtgactttttatggatagtgtgcaatcctgttcttttattgactcgtgggaagcacttgtgttttggaagacatgatctataatgggcagcatagtctatgatttgtgattattattttttcatgatcttcttgtgttttatttgatgtaggcataaaggtcacttgtccctaaattactttatgcagcttgtaggatgactatgacaaccgatgatgagtttgtttgcatattcgttatcttgagtgtgtttgattgcatctaagaacatgttgtgtctgcctgctttgaaaatgctgaagatttcgttctttttttccccccaattccttccccttttcaaacatatcatatggttgtgaaccttgtggtgtcaatcattagaagacctttaggcctgtagtgtatttgagtatggttactgaatacttactctgttttaatttttttccctcggtgattttagagacttgcagtcttatctctcagatcttagccttt

SEQ ID NO: 59804 - DNA, 745 bp, Populus trichocarpa
  Intron number 3 from transcript POPTR_0008s19220.1 (locus POPTR_0008s19220) derived from phytozome v7.0 (chr-ID scaf fold_8; pos 13175992 to 13176736 reverse strand)
aggtcttctcttctctctgtctctctctctcttccccttcttttctgttaatcacagccttcataaacttaacaacataaaagaaagtagtcaaacaaaatggcgaatgtctgatggactgctgattgtctcttctttttcatgttgctttttctgaagcaactatcgtattaaaaacacaaagaaagattaaaagcttagagaaacaaaaaactgctttttgaattttttaaagccttcatatttattaaaacaaagggcattaacctcccttattattatttttttcctgcgtgaaaaaaaaataacgtccatttaccttacagagtatgtgatttgaatgcgtttgtcatcatgagaaaaaggaattctggctgctgagcagatttctattgatagtaattccagactttcttggtcttcttgccaagtagtggtcactgttcttacttctttcacttatttggaactaaatcgtttttggttaatgagttctcttttgactctatgtgtgaactcatgccaacgagatcaaggtctgtaaatagacctgagagacccaccaatttcaaagaaaaagaaaagagaacacatctaatctagctattcaggtaccgtcaaatatacaaggttattagacctcaagggccactaatattactatcttgaaagtgacagtaggctgaacactgaagtttccatcgtgtatttattgtcctttgctttcaaattgttgggttacagc

SEQ ID NO: 59805 - DNA, 585 bp, Populus trichocarpa
  Intron number 1 from transcript POPTR_0008s03630.3 (locus POPTR_0008s03630) derived from phytozome v7.0 (chr-ID scaf fold_8; pos 1971886 to 1972470)
tggggattaatcgtgaaggtatggaatcttgatgcaattaaagattttttttgtttgattttaatttcttgaagcactgtttggttgctgagaaacaacgctaaaaaaatggaataaaatgtatgagcttttcctgtattaattttaaatacgtaaatgcaataataaaagttcgattttcttgcttgattaattaataatttttatgcgatatagacaatgggcttagattttagtttattttacgtctggttatctttttacacgtctggttatgttcctgtgctcattatgtttaatttttcttaaattttatattccagaaatcctaatcttgctaaatgtgccagtttactcgacccctttttcttaaattgaatttcgtaatttttctcagcgaccgacagagaattagtgttatagtttggatttttaatttttaatttgatccctttttttaaaaaaaaatgagttttgtaaattttcttagcaagtaaacatatagaattggtggggaggtttggatttatttatttttgatttggttgtttattgtatttttcttattttcagtttctttgagag

SEQ ID NO: 59806 - DNA, 790 bp, Populus trichocarpa
  Intron number 3 from transcript POPTR_0008s03070.1 (locus POPTR_0008s03070) derived from phytozome v7.0 (chr-ID scaf fold_8; pos 1612980 to 1613769)
ggtagcattattgggaaaggagggtccatcataaagtatggttaaaattcttcttacaataaatttttaattgctattgcctgaaaagtcaaaaattaattttatatctggaaatttcacttggatttatttagtcaatagctgctggcatgaatgcatgctggtctgtgaggaagtgtatttactctgtacttaattccatgagattttatggtatccctacttgttgtttagagttctatccagaatcatgctctgctcaagcacaatttttacgtgtagatgtttgtttcatggtaattaggaatccatgatcccctttcttttgagggctgtggcaaactttggatgcatcgtcacaataagaattctgtattgcgaagatttggtcttagacctgagagcttatggttgctgcttcacatgccacaccatctgagctacccctgttggtttatatatgtattttgatttatagtacctcattaggaacctcaaccatccagttctgctaaatgcataaagtgaatagatatcaattgtaaatgcgtgaaattaggtcctttattttttattgcatcctgtctttgctggttgtgatgctctgttagtctatgattgggtttcatgtattatgctcctgctccatttttcccgtgagtctactaaaggggagctttaatttcttattttgtttcttgtaagactgtctagaagttaagcaaattctttcaaatagtgtaaaacgctgatatctgcctttactgcaggtcattcattgaagagtccc

SEQ ID NO: 59807 - DNA, 1031 bp, Populus trichocarpa
  Intron number 1 from transcript POPTR_0008s09630.1 (locus POPTR_0008s09630) derived from phytozome v7.0 (chr-ID scaf fold_8; pos 5948725 to 5949755 reverse strand)
gagggagagagatagtttactgctgttttaacaaggttagacatcacttaatcctgcttttgtttgattgattgtgatgtttttggatcatctgctgtttcattgagtggttaaatcataaggatcgttaaattaggggattgcattgctgtatttgtttagatctggctgttatttttttagttttttcttaatacagatctggatttttttttgtatctgagtggttacagtttgacttgatcgaatgtttttttttttgttttagctaatgtttgtttacgttctttttagttttatttttgtttaaattatttgatggactggttttggctgtaaagtttggttttttgaatttgtttttttttttttttttttgcctaacacaactagtcaaaatcttagctttggtcgcgaagaaaacagtactgggtattttattggaagatgcagaaacattatctttctcttatattgattagtgttgcggcctaatctgctgttggtgttattgtgtttcttatttcttgtttaagaaccaatttttgaataaattggatgttaaaatgatagtgccaattgggctttctactttcaagccccatactcttctctcttcttaagcatatggtttagggttcagattttgagataatgaaattggttccgcattgggattagggtttgatgatcttatgtaacctctttctttcttttcttaagaaaaccgttgtttgttatttgctaactttcatgtcattcatgttgtggactatgattgcctagcatttgttgtgaatgcagtatttatttgcgattatggtttgccgctatgtctgtgctggtatatgttttgtaatttcactttctgtctaaattcaagtatcatgcttaatattcttggatgttgagtttcttatttttgtctgctttacttatcactctccattcatttatatttatatgtaaatttagcttggctttgatttaaaaccttcgttagtgaatagtatgtgtttatttccgcagag

SEQ ID NO: 59808 - DNA, 994 bp, Populus trichocarpa
  Intron number 1 from transcript POPTR_0008s01130.1 (locus POPTR_0008s01130) derived from phytozome v7.0 (chr-ID scaf fold_8; pos 547277 to 548270 reverse strand)
tttgaagtcacttaactcattcttggatcacaaaagtaagtcccttttgttgcttacgttttctttacttcactttattgatatacaacacaaaaaatgaaaaacaccccttcctttatagctcttccgatttgaaagttgttgtttttcacttgcatttgtgggattttgttttgtttcttttccaggtttaagaggattttgatctcgaaatttatgtaaatatctgaaagaattcttttttttttttttttttgagaattgatttatgtttcatgcagaagtttcaaacttcgtaatcaggggttattgaaaagctgtgattatgtggattattttgtgacttgggatttgggttttaaggttttcggtcaatgacgggtaaagctttgagcttttgcatttgcatgtaaaagattatagctttatagttctctgtctgtatgctgtttcacctgatcaatttattggtttcaaagtgttgtgttagatacagtgatacatgttttgtctagctcgtttaagtgcattttggattctatttggtttttttaaaaaaaaaaattatggtaatggtttgaggtgaatcttcttgttattttctcttccaatagtgaccttcttccattttattttattttaaaaaaaaattctcctaatcaagggacttaagatgcgtttttgtttgttgggcttttttgcaatttgattgtatgttcaattacttttattttgttaaacatgatgaatgaaggttattggtttaggtttttgagataattaattttggattttttagttctggtcttgcatcgcatgtataagaacattgaaactctattcatttttccttcaatcagagtttctttagcagtttgaagagtgtaatctaacaacctcgtgcagaacaggattcatttctaggtttacttttctgaattgttgactctgctttccaggttctgatttggggcgagtttgaggattggatcat

SEQ ID NO: 59809 - DNA, 569 bp, Populus trichocarpa
  Intron number 1 from transcript POPTR_0025s00390.1 (locus POPTR_0025s00390) derived from phytozome v7.0 (chr-ID scaf fold_25; pos 149251 to 149819 reverse strand)
ataatcgctctgctgctgctcagtatattattgaggtttgtctctctttttttttggtttttttattggtttcttgaattggttcgtttttattttttctgctttttaatgggtttgtttcctttgcttgtttgattagcctggctggtgggtctgatttgatgcattgaagagtttattgaggtgtttaagtttttttttttgttagttcatttcttgataaaaagtgatgattttgatttggggagttggattttgtagtaaagttcgtgtcttttagtttgaatgttttgaatgaagtgcaatttgtttggttagggtttgatgcattaatggagcgaggtaatagttggatttggtttgtttgttagttctttttatgttatttttccgggtaaaaagtgatgattttgatcctggaaagctgatattgtgttaaagttactgtcatttagtctgtttgtatcgatcaaagagagttcaatggatgatattgatggtaacttatttggagttgatgatataggatgatgactaatttggtaccggatccttttctttttgccagc

SEQ ID NO: 59810 - DNA, 857 bp, Populus trichocarpa
  Intron number 1 from transcript POPTR_0002s01920.1 (locus POPTR_0002s01920) derived from phytozome v7.0 (chr-ID scaf fold_2; pos 1027992 to 1028848)
aataagagattaaggttcagctcatttttcgagaggtcaattttgcagcggattaggattagttaacgaactttgatttatcttacaatctatttaataggaaagattggattgttaatgaccctcgtgtgaatgatctaattggatctgtttttcctcacttaaatttattgcttttattaatcttaccccaaacacaattaaaatccaacaaaatcacttctttatccatcttaattggtgatagttaaaatattttattccatttgcatgagcttattaattgctcccaacaaaaaaaaaaactcatatgctatgaaagataatcttaacactaaattaacaaagaggaaagtattaaatgtaaaattaaatcttaattttcttcctatcaatgattgaaatttaacaattaagatggagcgagtgtttggtattgtggtataagatgtttttatcttataaatgcattgagataatttttttagatttttttatttttaataataaaacatcaaaatcataaaaaaatattaaaaaaattaatttaatatttttttagacaaaatatactcttaaaacatattcaaatgcaaaaataaactgtcccaaaataggtggtattgtttatggggtaaaattcataaaatcaaaagataagtacttaattgataataaagtaaagcatgaggagctaaattgatatcatttaaaaagtagcagtagtcaacgataaaccctaattcctacccgggtataaaaaccggtttgaaccggagaagaaaagagtggtgtatataaagcacgataagcctcagcaagcggtttagggcgtaaaagaagaaacgaagccgtag

SEQ ID NO: 59811 - DNA, 519 bp, Populus trichocarpa
  Intron number 1 from transcript POPTR_0016s13630.1 (locus POPTR_0016s13630) derived from phytozome v7.0 (chr-ID scaf fold_16; pos 12793415 to 12793933 reverse strand)
ccaggttctctctctaccccctcagtttatattacagatctctttctctagttggtggtttttttgtgtgtgtaaatttggaagatttttctatttttatcttttgtatattctgagattggttttgaggttgaagagttgttgctcatcagtgaaagttgaggtatttcttcaagcaatatttcgtccatgaagtcaaaagatgaccaaattatgtttctattatatatctaatttccttcttcttcttcttcttcttcttctttcttttcatgaagattcaataatctgttcttgtgacttgtttagaggccattttgcccgtagactggatgatagattagacaattaactgagtcaaacttgtgcctaggaaagaactgtgagaaaagaaattgcagtccctttagcaggattgagatataactttctcctcatcttgcctctctgcatcgttccaattttcaggatataattaacggggtttcattttttgaattgtttgtttgtatctgcaga

SEQ ID NO: 59812 - DNA, 782 bp, Populus trichocarpa
  Intron number 1 from transcript POPTR_0002s10970.2 (locus POPTR_0002s10970) derived from phytozome v7.0 (chr-ID scaf fold_2; pos 8003345 to 8004126)
gtcgatcaggttagcaagttaacctctttttgtttgtctgggtttgaattagattacaagaaagcacagtaatctggcaaaagaagagaaatctcagtttgaattgatgggtgctcgatagattggacaggaaaagaatcaatggaagggtttttaatagccaaataagttgtcaaaaaagaagaagaagaaaagaaatgaaggaaggaaggatcctatctttgaaatggctaaattgacaagtcatcagctttatgttcttaattttatgatctcatgccagaggaatcatcacttcacggcttgtaaacaaagaaactagctagttagtttagtggcaagtgtatggattggattctggaaaaacaatgtctcctttaacaatattatggatttcaaacatgtgaatgagtggaattgctttccccgccgcttattggatttgaaccctctctttcactcacccaggttgatccagtgacctgcaacatactagctagaaatgactttgctttgatacatagtagtatatcatgtgatccaatcataaaccccttcaacagggagcatctgagctgaagttttctggtttgaggcaaatgcttggattttgttgtcttccatattatgatgttttgaatattggtagctttcttttggctaaaattcatcatatcttgtattcctataatttaaaacactttaggttgttacacaaccgcttctatcttcctcacaatatctttctttttttcccgcagataaaacgggagatatctata

SEQ ID NO: 59813 - DNA, 535 bp, Populus trichocarpa
  Intron number 1 from transcript POPTR_0172s00210.1 (locus POPTR_0172s00210) derived from phytozome v7.0 (chr-ID scaf fold_172; pos 21361 to 21895 reverse strand)
agaaacttatagcgaggattttgaagccaatcaaagtaagtcctaatttagaaaagccatatgtttatcttgctgtcttcctgttccttgcagccatgaggcatggattgaggtgtagttgttaatcccattctggctggtagtttggcctggccttctttttgaaccaataagtcaacctttaacctgtttaaccatatcaaacttgagtgagatttgatctagttatttccaaggaattttttttaaaaatttatctcgttgtttcgttttgaaaaaaccactaaaaggatatcgttttgaaattaaccgccctgttactagggtctatatatagccgggtatgataactatggttcgaagggaaagttcaacaagatttcctgctttatatagttatttgagattcttttctgtgagaatccatggagttttcatctgttctttacatttgttttatatttgtttcggtatcagtatcatcaaataatttgttgagtctgacggatagaaattatcccagttcattcacagg

SEQ ID NO: 59814 - DNA, 660 bp, Populus trichocarpa
  Intron number 2 from transcript POPTR_0008s14880.1 (locus POPTR_0008s14880) derived from phytozome v7.0 (chr-ID scaf fold_8; pos 9885913 to 9886572)
ttgcagccagtagtgcttctaaggagaaaacgcaggtgagggctggatttgaattttacttttacgtgtacaattagtttccttttcggttacttttggcgtattttggtaattttagatggttaatttaattttttgaatttcttggcaattacaacgttgaagttctatttggcgtgaattttgcaaattgatttaagttgttttttaacttttgacttatagaaaagtcataaatatgtttgactggcttaaatgaaacatttgttacaaaattgagttaaaaaattgatttaattgaaagttaaaatttctaatttttatttatggattctaacttataaaaagttgatttgagtctttttcatctaacatacttctaatttaaagtgatttccactcacttttgttaggaaaaacttttggattatgcctcaaactaaaaagtcatgcacactgacacttattacaatattgctttattattgtttttattatgtttttatctcaaaacataggaaagctaactaaagctacagctttttacccagttcaatccagaattattcttgatcaagtattctcatggttaatagagaagtttttacttcaaattttaaaataggcacacatcagagagctcgaggaagaagtgaagct

SEQ ID NO: 59815 - DNA, 305 bp, Populus trichocarpa
  Intron number 1 from transcript POPTR_0016s08260.1 (locus POPTR_0016s08260) derived from phytozome v7.0 (chr-ID scaf fold_16; pos 6090774 to 6091078 reverse strand)
ggtgaccgttgcgctgcaaagatagcggtgttgaagtaagatgagtgacatggctggtgacattttcagttgagaattagatggattcttaggagctttaagagctcgggttttgacagtaaatgactttagaactccacgacgaatttgcagttcaatacaaaatagcttgtagatccacaaaattattcgacatcgatttcaggaaaagaaaaacacaatgatttgaaattttcatgctttcactactcaaattttgttggtttacagccgttgccgacaacgcagaacccaaccccacgtca

SEQ ID NO: 59816 - DNA, 987 bp, Populus trichocarpa
  Intron number 1 from transcript POPTR_0016s09330.1 (locus POPTR_0016s09330) derived from phytozome v7.0 (chr-ID scaf fold_16; pos 7336038 to 7337024)
aatccctacctttggactctcactaaccagttcaagtagtctttttatccctttcctttccttttcttttgtttttatttttttgcaatttttatagtgcttgtttggctctgttaagggttttgtactgtttatttaggagaacccatttggtttttcaatttacatggaaattaatttagttcagttactaaataaaatttgaaattaatatatttaaggatgtttgttcgactctggttgtttttttttcctatgttaatttttatctgtttaagggtgtcttatggattggttttcttttgttttaatttgcatttaagggcgaaaatcgttaattaaaaaaaaatctataatgagaatgacgatccttcaccaccaaatctaagggtttaagtattgtgtgaaaaaataaagcacaatttggccgtggaatttttatgagatatgaagttatggtgtaacttttggtaggtttcccatattctgaacctgtctattttctcttaaaaggattattttttatgaaacaaaataaaaaaaattatgagtttcttcatggaaaattttggaaggaaatcgtagccattactttaatgtacattggcccttttgcatgtgctgtatgagattgtgatttatgattgttttgtggttccttactactttaaggcttgtttcaatgtatagcaaactgaatttgagaactggatgattcatctaacttcgatgcaaccgtaaaagagcaaccttttgtactcttaagccttcaaaaagtcttcatttctcttgctcttccaaaatgataacctttggttacatgaacatgcatcttgtagttatctgagaattgctgtcataagtatttatgttcttaaagcatacctgaatatttttactgttttttggggctttgtttgtgttgttttttagcaatcgaattttgtttccatcttacattttgatacccttcaatgtgcagttggc

SEQ ID NO: 59817 - DNA, 447 bp, Populus trichocarpa
  Intron number 1 from transcript POPTR_0008s16970.1 (locus POPTR_0008s16970) derived from phytozome v7.0 (chr-ID scaf fold_8; pos 11404003 to 11404449 reverse strand)
tcctttcactcccgctatccaacctctcgtcgcacgtaaaatcttctccctttctcttgttttccttcggtctggattaatcaaagttttggactgtgaattttttttttttttttggatcaagtatcattgccgcacaacatttggtagaaaagcccggcgttgctaattataggatttacttgcctcggtttcttagtaacatcttgttttggggatctaggtgttgcatctgtcttgacatgctagtgtctgtctgatacgacgcagagataatccttgcttattgatttttgttcataatgtacatgggagtgaattggtgcttactatgatccttaacaaatttcgttggcgttgttagagttgtttagaatttgattcattgtgtaatttgaaccatcttttgcaggtagaatttgcccctttaccgggaagaaagccaac

SEQ ID NO: 59818 - DNA, 1018 bp, Populus trichocarpa
  Intron number 1 from transcript POPTR_0008s09010.1 (locus POPTR_0008s09010) derived from phytozome v7.0 (chr-ID scaf fold_8; pos 5587306 to 5588323 reverse strand)
cgttaaacatcctcctcttcccctccttccccttagtaagtctgaaaagaaaattattatttttttgtctttatttttgtagggatttatttttaatatttaaattattgaacaaaaaatggaacgttggaattctgaattcttatcgggacatggcaatttgtgatcttggtttataagaagacgaggacagttgagattactaagagtgggactagtgtatatattacaagttgtaaggtttggtgatttgtttatcttcaatttggttttggctaagttgctgattcttttagttagccaagtcaattattcagtaaaaagggaaaaaaaacactgcattttcgtggggtttggaggttgatttctgttgtctgaaaggttaaagtatggatttttaaaacatctagtttggttatattttgaattaatcccaatccctgtagcattcattctacgtgtggattgctggtttatggtggtacacataatcttaagttatgtcgatgatgtaagagttttggaattgttaatcaataaaagtttcttttttggtcctcaacctgtcttgaattttttttctaaagttcaagtgctaatggttgagtcacgattcttgcttctctgggagctctcgtgagttgtttcatccagaagttacatcttggcagtcctttcataactcttagctttctcctgtgactgattctagcttctgaatcaaagttcttgagttggtggttcatcatatacatctcaaacaccttctgtttgagttttacatgcatctgcatttgctatgatgatttctttttgaagaaaaacatttctggaaaaatactaaaaaagttctgttttaaattgtggtgggacatttttcatgtgcagttaaagctttaacatatagaatctctcaaaagtccaagtcttcttttatggacgccattagggtctttctgtctatctctgtaaataagaccttaagagctgcaactttttgcaggaaactatacaagca

SEQ ID NO: 59819 - DNA, 547 bp, Populus trichocarpa
  Intron number 1 from transcript POPTR_0008s21900.1 (locus POPTR_0008s21900) derived from phytozome v7.0 (chr-ID scaf fold_8; pos 16232512 to 16233058 reverse strand)
gaatcagttttggatttgattcaaaagtgagccaggttgatgtaatacccttactttgagaaggtcatctgaactttctattccttaccaaaaacacatattacgcttttccatcttttgatactcttgagcaaaataaactcccttttcaaaaggggataatgatgtgttatggacattaggtaggtaggttgggagagtgagaaatcttcttatgcacattttgaacaccataatgatgtcccccttctattcttttggtcttccttctgtttcaaacgtaagattcctccatatggattactaaaatgttgatggaaccttcctttaccagatgataataccttttcaacctccgttaccaccactggttattgtttacgtcaacacaatacatgtagatgtataatggattggtcttatttttcctttgattatattaaagatgtaataatctgctgtgtttttgccaatgagttcctctcaatctctcaccaattaatttttttttttctggttcaggtattgccatcgttgagggagaagc

SEQ ID NO: 59820 - DNA, 747 bp, Populus trichocarpa
  Intron number 1 from transcript POPTR_0008s13290.1 (locus POPTR_0008s13290) derived from phytozome v7.0 (chr-ID scaf fold_8; pos 8709943 to 8710689 reverse strand)
ggtgtaaagagtcaggtatcttcttcttcttcttcttgccttaaaaaaaagttttttttgttttttttcatcttttgctttggttttgtgattctagcattaaaatgaacttgtgagcttagttatatttagaattagttgtgatatgaaatcgtgtagctttgcttttgctttggtgtggaaaattttctccttctcttgtaccttgttaattctgagtgcatggccggtgcagccgcgagtctgtgactgtgatgttcgaattgaataaatgaaaagaaagagtaattgtctcataccgttgagaaattatgaaggttttttttataaaaaaaatcgttgctgaatttatctgtttgatacagtgtatatatacaaccaatatatgtgcatatatgtgcgtcgccatatatctactgttgacggattatatctgtgagataaagattcaattttgtatcagtgcctgtttacatcgatattttataattgtttgtcttcatatgtttgactgtttatctcaacaagcaattttggattatacacaataggttgattttcccagtttagctttaaagagtgtgccatctggagtctgattcaaacagtttgagcttccttttccctaatttgatagtgaccaaaagttgagtgttatgttactttcccggatttgttttgaattaaaaggttatgcagttgctaatccttttgttgaaatctatacgatttgctacaggttcaggg

SEQ ID NO: 59821 - DNA, 730 bp, Populus trichocarpa
  Intron number 3 from transcript POPTR_0016s02300.2 (locus POPTR_0016s02300) derived from phytozome v7.0 (chr-ID scaf fold_16; pos 1117204 to 1117933 reverse strand)
ggggtaggagggggttaccaccatttttctggaaggtttgttcttttcgatcttctcactaactctaaagtcgtcgctttattttgaaattaagtgctcctttttgctgtttcgaactgctggtttggctcataacaataattgcgctctaacctcatttctgtatcacttttagtctaatcgtgtgaaaattcttccgcgttatcatgtgcttgaagacattagaagattttgtctaattaattggctggtgcaaatttctgagcaatctcttaagtgaatctgcatttagtcactattgattgttctttgaatgtagttcctatgatttgcatagccgtggttctggtcatgttcacttatggagtacatgcaagctgcacaagttttgatggactcaaacctggatatctatttttttttcctacagcctactgattcttctgctcatgcagtttaacttccatcaacatcaagagcattgtatttagtttatctgaacctaagcttgtttgtgttctttgattcccaagctcagcaaatacttaaaacacttcagagtctccgctctcaacttaccaatttaaattattctaatgattgtttggtctgtggctggcccattgatctatataatgccgatcagttgttctttctcctgttctctgtttggttaaaaatgaatttaatactgcagctgactactttctcattcttgatgaacttagag

SEQ ID NO: 59822 - DNA, 728 bp, Populus trichocarpa
  Intron number 1 from transcript POPTR_0008s04230.1 (locus POPTR_0008s04230) derived from phytozome v7.0 (chr-ID scaf fold_8; pos 2370380 to 2371107)
tctctcgcggctagggttttagcgcctctcttcaggttcgattctcgatgttctcctgttctctcacatgtccttgttgattagctcctcttatcgtaaacaagaaaatgttgtttcttttttctctgttaagcatctgtgttttgaatcagttttatcagcctttaattttagaaaagtcttggttcttgattcttcgtgcctttcttgttttctttagattatttacggttttctcagtgaatgttactggcatacatcgtcgttgatttttatttagatctagttttttctgtgttggttttgatatatctaaaaggattcctgtattgattctatgattttcttcaattagtttaagcactgtcactaaaataaacttatgattttctgtttaactgattaataatcttaaattgctatacaaatgtgtatcttcaaaatgatatgctgctgctaaatagaaagtattttttatttttattttgggtttcagtattttaaatattaagatatatttgaagttggcttaaacattgttttttcgattgatttgtggtccgagtacttgcatcttacccctagagaatttgttattattctgtattttacaagtagacccagttgcatatttgagcttactttctctacgtggtttcagtgtcccagtgttttgttcttaactcttataacctttatatatgacagctcaactctattacataagt

SEQ ID NO: 59823 - DNA, 677 bp, Populus trichocarpa
  Intron number 1 from transcript POPTR_0016s07040.4 (locus POPTR_0016s07040) derived from phytozome v7.0 (chr-ID scaf fold_16; pos 4831470 to 4832146 reverse strand)
tcaatccatagatagatcatacaagagacaggtgggtgtgtgctcctttgtgtttttcatgtatacacacacacacacacacacacacgcacatatttgtcctccctttccttttcttgtgtattttagccccaactgtttatcgttagttctctctccttctctcacaattcatgggcttcaagtcattgtaagtgaaaaattgttccttccccttgaagttcagatgatcatgaagcacgtgcacactcagatttccattacaacaggttccaattatataaaaacctgagactataatcaattctcgcctctctctctctctctctttcaatctctgcagtctgcactatcccccccccctctctctctctctctgtctcaatatctatatataaacaacacctttccgttttccactccttacccttttattttctaactctttcttcttctagatgttgatactcgagctctatagaagatgaaaacatgtaaacattaacgaacaataattcttttcaaatcttgatttgatcgcactgttcataaattaatttgtataatttatgaacaagaattcttcacttaattcaaagctttctgaattcgttcctcatgcatcctcttcttgattcacaggcttcgagtaacaagaggtcatcactacactttct

SEQ ID NO: 59824 - DNA, 757 bp, Populus trichocarpa
  Intron number 3 from transcript POPTR_0002s09570.1 (locus POPTR_0002s09570) derived from phytozome v7.0 (chr-ID scaf fold_2; pos 6860082 to 6860838 reverse strand)
gccacagaatttttcaggtgacgatgaaatagttattgcaatctttatgattaagatagagtttgtggacatggtgcttatagtaaatttgggacatggataatgtttatacatgttcacactaggacttttgcaaagtacatgtaagaagatttgtccatcttggagcaatggtcgattatcaactacagtgactaatttattttggattaattccgacccatcatgcttcactaatgatggctatctagtctttttaaaccatctatcctgtcaagcagaagaaagggtcaagttacttttaactaaactttgagccttttacgctggactctattgcattctcgagatgcggggctgcaattcagtgattgtaaatttcattttgaagggattggcgtttgttgagtaccacaaccagtctgaacttggttatcttggctagataagcgattatgttgattgcatttgcagatccagacaacctatgctggaacttcttctttgggaaaaattagttcttttggcatcttttgcctagatacagcatcaaattttgtataacattgtggtttattttgacttcaatggtattgtatggataaaaattacagtaggaatatatagtcatcacactgatgcatttcatgctaccacgcacaatgagtatgagtgccaaacattaaaattttggttgtccttttattgtttttctgaatcagaacaccattcatatcattcctttacgagagaggtt

SEQ ID NO: 59825 - DNA, 837 bp, Populus trichocarpa
  Intron number 3 from transcript POPTR_0002s26100.1 (locus POPTR_0002s26100) derived from phytozome v7.0 (chr-ID scaf fold_2; pos 23071072 to 23071908 reverse strand)
agcaaaatcattgcagcatcttgggaggttcagaggtacttctgctttctgatcatagtgttctgcaaaaaaaaaaaaaaaaaactcttagtacattaggtcacattttctatgtttcctgggatgctagtcagcttaagaataccaatgttcgtttaggagttttaaattattttttaggctaagatgcctagagctctctctcttgtttttctattttctgtttaatctcttccttttctacatctagattttgatgctgcagtgtcttggctactgttaacgcccagtttaaactccaacccttgaacgaacatcaattcttattcaatcccaattccacatgcatcaaacaaacagttagctttatgcccacctaaaacactgaattcctatgacctaaaggctctactgtgtctcttccttttattaactaagtgacaacttaccaagcatctcacaaatgaacctataagagacttaatgtatgtttcaccaaattgagtagtgcaattgatcagtatgtcatatgaatggcttgattttgctgctgtcttcattgtcttcatatgcctccatgacacgcagtcatctcattatcctttgtccctccttctctccttccccacccctcacaaacatatatatgtttaggtgtgatataatttttgtagacatatagccttggacaaattggaagaacttggaagaaaataaaagaaaatgaagttttgatgagacatggaaaaactatcaaaccatcgttgtagtggctgatgtatgtttttaatcatccttgcagaagctgctcaatcttgcaaagttattgtggacata

SEQ ID NO: 59826 - DNA, 338 bp, Populus trichocarpa
  Intron number 2 from transcript POPTR_0002s26100.1 (locus POPTR_0002s26100) derived from phytozome v7.0 (chr-ID scaf fold_2; pos 23072103 to 23072440 reverse strand)
aggtttgtttctcctgactttaaatttccatattcttcttgattcttgatcagactgttcggctttctttaatccttgatcacagtgagtttaagttacattaaaaagctgtgttgaaattatctttggattttcttataacaattcaaaagactcatgtattaaagctcattaatttttcagctgatgtattttatccacatgtttctggatttgaactttgaagcttaaaagattactggtgggaatgaatcaacgttgtggatggcttttatgatggcttgtctttaacacaagatgactgcaatttgcaggaagccagagcattgttaggaaga

SEQ ID NO: 59827 - DNA, 704 bp, Populus trichocarpa
  Intron number 2 from transcript POPTR_0016s03360.1 (locus POPTR_0016s03360) derived from phytozome v7.0 (chr-ID scaf fold_16; pos 1742835 to 1743538 reverse strand)
cttctaaggtctctctatagtctctactcattgattatgtgttatcaaaaattgtcttttgtttgttgaggacaaggaaattctaaaaagtttttatttttcgactaatgatgcaataaacaccaagcatagagatgaacatcaacaatcttgaattgggtagtcgtggactcaacaatcttcaatggtgacccacgagatgtaatgaatattgaattaggtatagttattaaattcagatcggataataaatcaacttactatcttaattgacctaaaacttaagaatggattgggttttaaaaaaaacaagtgagagttaatatgtttaaatctggatgacttgataggttaactaataaaccaattaaacctcattttaaccttttttatttataaaatgaacttatttctattaatataaattaacctgttaaattcatgatttgagttacgaatcgggttagatttaataactttggaactatatatgaatataaaaaaataccaataagccacaaggctgttaatcaattaataaaaaatgaacaaggtttttagttgctattttgttttacaatatacatagttttatgctaccaaaaaagaaaaaaaattaagaagatatactatgtttaattcgtggaaatttggactattttatggcaggtgggcaagggcctaagcaaaaacgcagaatcaga

SEQ ID NO: 59828 - DNA, 990 bp, Populus trichocarpa
  Intron number 2 from transcript POPTR_0016s11600.1 (locus POPTR_0016s11600) derived from phytozome v7.0 (chr-ID scaf fold_16; pos 10822443 to 10823432 reverse strand)
tgttgacctttacttcaatctggctgctggggaaggtaagccttaattacaatctatgcatgtatttaattcgacaattttgtttttttataaggaatatttttggctcatgattaaataaagggaatagtgctaaaattctagttggggggttttgaaatgtaaaattggtgaatgtttctttttctttcccttttctttttgggtttttttttccctctcattttggtaagatttttaattgaattggtgagaaaaaaaaagaacaaaaaagagaagatgttaggtcgggtttgatagcaataagcatagagatttgtagaaaaatcaataatttaacagcatgtttgtgatgtgatttgccgttttttttttgttaaaaaatatttttgaaaacaaattgaatttttaaattttatttatttattttaaattaattttttaatgtatttatattattttgatgtgatgatattaaaaataaattttaaaaaataaaaaattattttaatatatattaaaaaaaaatactttgcatctagtataattttttttttattttaaaaaataaaaaaatattattttaatatatatctaaaaaaaatactttaaaaacttacctaaatacaaaacatactataatagaacagaccagcaacatgggtttttttttttttaatgtaaaagtccacgttttcttcgtaaatccgtcttgtttgaatgcttccctttcatgttctgctctgaactttccttttcaaccaaccaaggcattttggtggcttgcttgcttcaccttgaatcaaagaattgcctttcccagtgatcaaagaatcatacgcccttgtgtaaaggcaacgtaccatggctaaaaattgtgtactgactttgactttattatagcagtgatcaatattcccacaaatggctattttgtctctcaataatgtctcttgactcacgcaggtgcatttttgcctgacctctgtg

SEQ ID NO: 59829 - DNA, 614 bp, Populus trichocarpa
  Intron number 1 from transcript POPTR_0002s23540.1 (locus POPTR_0002s23540) derived from phytozome v7.0 (chr-ID scaf fold_2; pos 21095065 to 21095678 reverse strand)
gttccgccttaatttccaattgcaatcagaaccaggtatgtgttgttgttgctgtaaggaattcttgaatggagattttgccaaaatttccatttgcaattactaagggtttcgctaatttagcataaatatatgaattatactagctgagaagaaaaagaggcttaaattaatggaagaaatagagagaaatcattgctcgttgtaagaattttgtgatcaaggagtagaaatttgtgataaggcatcctcccatcccatttttgttcgttgattttctgccattttgactttggaggtagataaattattattctgtttattctttttagctttcaagattgcagtagcattttaacagagaagattggttaaaaatatttcttctttggatggttttactaaagaaaagtaatgagttgttaatttttcaatatttagctgtttccttggtgatttttggattgcttgtttgttttccagaattgaagtttgtttttatagcagtaaaatgggaatctgctctcggttaagattcttgaagtgttatatatttattatgtgtctgtgatatttaaggtttgattttcgaggacaatctgcttcacttgaat

SEQ ID NO: 59830 - DNA, 691 bp, Populus trichocarpa
  Intron number 1 from transcript POPTR_0016s14245.1 (locus POPTR_0016s14245) derived from phytozome v7.0 (chr-ID scaf fold_16; pos 13497262 to 13497952)
caggttgttagcatgcttatgcaaactgtcttatagcttttgcctgcatgattattggttgaaccatgtttctgaaaattttgaatttttttttaattttaaattattattattttagatatttttagatcggatttgaatataatatgatttgaatgttatctccatcttagctattatagccaaccgattctttataaaactgaacatgtagaacacgtcaaccaaatctcaattgatctgaaaatcaaataaaaaattatgcttgttttaatgagaaaacttgtttggcttatctatatatatttatggtgaaaaaatatttttatatatcaatgtaaaaaataaaataaatattattctaatatatttttttaaaaaaaaaacactttaaaaatcattaaattatcatggcagaatctcctgtactagcacttgttgacaggcgttccgcatcacacgaagacctactgctatccattatttgtgtcaataatgtacatcttttctttactgacaaagttactgacgaaacaactatatagaggttgattgtgatagggaaaacttataaagtcggggctgtcttttagctggtgaagcatcagccatggaccatgtcgcctggactccctgacaaataaatggacctgccattccctacatggtgccttcatctatttagcctgta

SEQ ID NO: 59831 - DNA, 388 bp, Populus trichocarpa
  Intron number 2 from transcript POPTR_0002s07790.1 (locus POPTR_0002s07790) derived from phytozome v7.0 (chr-ID scaf fold_2; pos 5341380 to 5341767 reverse strand)
acgagaagaaagcgttttttgatcaggtttttttcattttcatttggaattcagctgagattttcttccttgggtggatctattgacaggaaattgcgaattgtttagctgtttgcgatgtggatttggatttagaattgaattataattttaatattttttggcgagttaaattagaaattacaatggcactgtgaaaaagaacgatgttgaatttggtataatttgagttaaattagaaattaatttggacatccttttgaatgtggatttgttacactttgctgccttttttatacatgttttttgtctattaatggaaactatgagtttgagttttcagttctgacttctacgaacaatttgactgtgcagtaacgttcaggcc

SEQ ID NO: 59832 - DNA, 681 bp, Populus trichocarpa
  Intron number 1 from transcript POPTR_0008s14320.1 (locus POPTR_0008s14320) derived from phytozome v7.0 (chr-ID scaf fold_8; pos 9493001 to 9493681 reverse strand)
tttactttcttgcttctcctttaacctgcaaaaaggttcgcttttctttctctgtcgatttttagggatctaacaactagggtttcggatttacaatttgctttgttttatattttaattaggtttatcttgggtcttgaattgaatttgagtgaaaaccctaatcaatttctcgatataaaattttcgatctagatcttatcgtacgatttgtctttccaatgtcttcttactgaatctatgtgggcaatgttcaattgggcctgtaagtatcatttgccttgtgggttttcttttccgatccttatccagccgtgttagttagttcatatgttctatgtttgctgggcttccgcaggaatgctcatttttctgaaatgtctagtgatagtactgctgttttcattaattgctttgtttttgaagtctttataatgcattcatattttttatttgctacatgaatagtaatgtttgctaggctttgcataaagtgtccgagttgtactttacgtttctgtcatctttctatgaaatcaatatcaagtgtcccaattgctttctatgtttatgatcttaccgccatgtttttcagttttatgcagtttaatttttgttaactgaagcccacttgttctttgtttcaatagggaagtgagtgtgaatatcgccacagtgaat

SEQ ID NO: 59833 - DNA, 761 bp, Populus trichocarpa
  Intron number 1 from transcript POPTR_0008s01090.8 (locus POPTR_0008s01090) derived from phytozome v7.0 (chr-ID scaf fold_8; pos 510788 to 511548)
caaggaacgaagaaggtatgcttactttcagacattgttccctctttttaggtgtttgtgtagtaatgtttggctgtgaatacgactgcttcagctttaacattcaagtctgaatctttattgaataaagatcttaggatgatttctatggttctgttggatttgattaagaacttgagtgagtgttgaaaacaacaataacccatttaaatgtgaccgatttactctttttttgttggataattctctctccatgtcaagttaattaacttttctagtggtttaaggactggccagaggatgcaccatccatacctcatctaaatgccaactcctgaatcccctgctactaataacaatggtagctagatttgcccttttcatgtttttatcaaagcttccacgcttgaaattactactaaatacttaatttcagttgtctcaacccccctaatggctcattaatatgaggaatagctgcataaggactcgtctgctacaagatagctgctaaacattgttgcggatctgaaagcctctctctaatcagtgaaatagagaagcattttttggaatacagtttagcaccccatgacaatgagcacaagttttacatcattatacaagcattccatgaataaaaatacattttcacctcatcattctgtattgtcattatactttcttctaaccatatatgattgttgccagattgtcatcttccaggacaataattattgtgcaagcttcatcggctccaa

SEQ ID NO: 59834 - DNA, 747 bp, Populus trichocarpa
  Intron number 1 from transcript POPTR_0002s19300.1 (locus POPTR_0002s19300) derived from phytozome v7.0 (chr-ID scaf fold_2; pos 15259681 to 15260427)
cagcgggtatttctcatttccatgaaatagaggcttttgagtgtttactcgcttcttcttctttgtgtttgattgtttgtgcactcatgctgtttagatgtctgtgaaacttttttgcatgttgtgttgaagttctagatctatgtgggtgctttcgaatctcactagaaattgaatgactcaattgcatgttgtgttttggaaatttggatgctgaggattttttgtggtcctacttgcatgaggaaaagaagaactttgagtcgcttactttagttgctatttctttcttcgtgcacccgcgtaacttaatgccttaatcaattccttgtctttaggtcatataacaatctcccttcccattgcatgcctatttttatgacggctaaagttatgttaagttccgaaaatgagatttagtacctgctcagtaccttttcagtgcctcagctctgtcctacctgaattcggttattaaattttggcattcattatgtcaatgccccaactatggattttgcttatttgcattgatcataatgtagtaatttgtgcacttatcatttatgttatcttttcttttggcttccacaagctctatttctagccaatctgttctttccattttatcaatggagttgaagatatgtatgctctctgtttgacttatttatcatatgagtgatttggtttctcaatttgatttttaaagcaagcaacaggatcggtttttagctcagggacaga

SEQ ID NO: 59835 - DNA, 695 bp, Populus trichocarpa
  Intron number 5 from transcript POPTR_0016s07600.1 (locus POPTR_0016s07600) derived from phytozome v7.0 (chr-ID scaf fold_16; pos 5466082 to 5466776 reverse strand)
gttcctgcaaagccaaaagtagcttcaggcaaaaggtattttgttctcttgtaattgagttatctagaattagtcattggatatcttgtatgattgattcatttgaattacatgcatgacctgctgactgctgttagaacgttcatttctatgggaataataatgcctttaattcagctcaagtaagaatcaaccctgaattgattggaattggaaattgcaatcttaacatagttgattatgaacaataaaagaaaagaaaaaagaaaagaagacacgatcacttccttgatatcttttcagtttgttttgtttttgtttttgtttttttaataatgaagaaatattgtgtgttggtaaaataaggaaatgatattttcatttactttaactttacacctcaagcttgtgtatagaaaattttcttctatgaacataaacagcagtgtatctccatgatcacttacctgatatcttttcagtttgttttgtcctcatggttacatgacttcaaagttgatggtgcatttgcatttgcacttgcacatttgtgtaattgcagatgttgcatcatcaacttgatgtttactttcgttgattgataaaattgagctttttagtactgcacctaacttactgcttgcacaaactgtgtattacttagtgaatttgaggatcttgaagcagtcacaaat

SEQ ID NO: 59836 - DNA, 713 bp, Populus trichocarpa
  Intron number 1 from transcript POPTR_0008s10860.1 (locus POPTR_0008s10860) derived from phytozome v7.0 (chr-ID scaf fold_8; pos 6824987 to 6825699 reverse strand)
tgagatctctctggggatacttactctttcttctggtttgtctctctctctctctctctctatctctatacatatatatagacacacacacatgcctatgcgtatatgcaagagagttatctttctttcttgaatcttgagagaaccaagacaactactttggttcagtactagtacgtcactgaggcatcaagaactatagtgggtaggcgtcgattttttctcttttttgttttttattttagggtgatgggcttttgttaattaggtgattgtttctgtcttttaattctgtttccaagctttttgatgcggggtattctgtttccaagggtttttgatgctgggtatgtgtgtttcttagtcatgttgtttctgtgtgatcttaattacaacatttatgccagtaaattatttcttccctggtatttgtgctttattttacacatatttacatatcctctctgctttagatttctttctttattccaaaatttgttttaagaaaaaagtgattgttaaggattccgttataatttaggagtgccttttatcagttatccgtactgttttgggctattaggagtatgtgttttgcgttgatgatggttatttctcaagaaaccaactttttggttttatgggctggttttgttctcatagcttttcttttttattttccgttcaaaatttttatttctacagaggtcaac

SEQ ID NO: 59837 - DNA, 400 bp, Populus trichocarpa
  Intron number 1 from transcript POPTR_0016s00550.2 (locus POPTR_0016s00550) derived from phytozome v7.0 (chr-ID scaf fold_16; pos 191432 to 191831 reverse strand)
tggtatgttttgattttctagtaaaactaaagtcttgcttcttcttctttttccagcaattatgtggttgccttttttaaagtgtatgatttgtgaaagtagtcctcttttagtattaatgcttaggttggatgttggtggtttccatcttaatctgctgtcctttgctaagactgaatcctgtttgatgttagagttttgattgagttgtgtgcgtgcttgattctgatttttttttataaccttgtataagatctggctttgtgatacactttagagtttacattgtgcattgctttctctaaattgttgtcctggcacagttgatggatgacattactgattggaatttccatgcttcatcttttgtttctccaacaggtgaaattcttttaagtat

SEQ ID NO: 59838 - DNA, 586 bp, Populus trichocarpa
  Intron number 1 from transcript POPTR_0002s06620.1 (locus POPTR_0002s06620) derived from phytozome v7.0 (chr-ID scaf fold_2; pos 4438127 to 4438712 reverse strand)
ttcacaaggagattcatcatcatccggtgcaactggtaagttgaatcatcaagatcattaattttaccctcgaagtttctcccctgccattcttctctcaattcttgtcaaagctctattattttacttgagttttgttacttgtccacctaaattatttggtcaataattcattttcaatgttttttattttgtatagtgttgattgattaacttcttataacaatttatattacaaatttcttgtagaaatatctaaatattatctaccatatctattattgcatgtatttgtgggttttattgtcaacttccctcaaaatccttgaatttgtctgctttagaaaaaaaaaatataatttgcagtcatctagaaatgagcagcacatggaataacaataacaatgcgtcatagccttgggtatagaatttagcatctcaatcacttaactttaaagcaataatattacacatacgcaaattttatatatatatatatataaagagtttgctttcttagtccatactctctcttcttttaccatttgcagccaccgaagaagtgtctgcttcaactatagtaatc

SEQ ID NO: 59839 - DNA, 603 bp, Populus trichocarpa
  Intron number 2 from transcript POPTR_0171s00250.2 (locus POPTR_0171s00250) derived from phytozome v7.0 (chr-ID scaf fold_171; pos 53595 to 54197)
ctgatcaccttactgggctcctccggttggttaaattcccttcgccatttcttttcttaattattgggatatcggatttcataattaatctgttgtattaaactcaatccatctagaaggtcaaggaaggaagccaccagctgtcaccgcccagccaccaaccggccagccgccagccaccagctgtttgccgccatagccgccagccgccttcacaccaccgtccacagccgccttcacacttgaaggttgaattatcttgttttgaatttgtgtataaatagctagctcagcttatgttattctgtgtggagagagtagagagaaacactagagagagagagagatggcgtgtattgtgttaagcttttgtgttaattaattgtaagcttctgttcttgtaataaaacagtgtgttttatcccctccgagtgtttcaaagccaccaccagtggtttctcccaccaacataatcttgctaatgctagctatcgagggaaacacaagttaacgaactcaaaataaaagaatcaaaatgcagtgttgataattatttttctctcaataattgtgtttcctattcgttgtgttgccagcgaggaa

SEQ ID NO: 59840 - DNA, 1000 bp, Populus trichocarpa
  Intron number 1 from transcript POPTR_0034s00270.1 (locus POPTR_0034s00270) derived from phytozome v7.0 (chr-ID scaf fold_34; pos 146554 to 147553)
ccacacaaacaagtaattgatatttgagattgtttctctggcattaccaattaaatgattgagtgaattaaattctgttaaacaaaaagattttgtttatttcatttttctaatgggcttatgaaatgtgcatttcattagaatgctgatatatgaactagcttcagttgtgttttcttgcatatccaatctctcctattctgctaatgtacctcatctggttgtattgttctgttttctagctggtggggttagaaaaacttaactaatggttcgtgaagaacaattggcgagcagttatgcatgcagccatcaagtggaaacacaatgctgtagggtagtaataactatgcagtatgcagtttgataatgtgatccagggaaataaatggaacaatattgtgtttattttcatgattgagattatgttgtaatctttttacatgttcatcgttaatgatttgctattttagcatgtattcttaactgaattacagatgaattagttaaagattgctttattgtctgagcatcagattgagttctgaacttattttggcatatgatagacaccatgtgtagattaagtgatactattttgatatgtatgtaattaagagagggtttttagtggcatatgatagacaccatgtgtagattgctttattgtctgagcatcagattgagttctgaacttattttagcatgtattcttaacccaagtagttgtttgtcacagatctgcaaaaaccatgtctatgcaagcaccactcgtaacccattccctaaacccatcaagctggactcttcagtgtcgaccttcttctcgccaacaaggaggccgcaaccaaaatttctttagctttttttactaaaaaactcaaaagatctgtccgattcaagctgtcattgttgggtctagttgttgagctttgtaaggtctgaaaattggttggtttggctagaagcttaaaactccttttcagataacaactgctaa

SEQ ID NO: 59841 - DNA, 754 bp, Populus trichocarpa
  Intron number 1 from transcript POPTR_0016s01310.5 (locus POPTR_0016s01310) derived from phytozome v7.0 (chr-ID scaf fold_16; pos 576632 to 577385)
cagcttctttatcagattcaaaacgagaagagaaggttggcagtctctttctattcgtttctatatattttatgtgtgttgtgttctttttctgttgttttcttttaattaggtggattttgattgatttgagattgtttggggtctgggttgcttttctttttttgctttggatgagaaaggttcaatctttatgaaaaattgcgttttttagggtgattcttgatgtctgattgaggtttggattagagtatgctataatatgttgtgatatttacatagataggaagaaatagttaatttgctgagtgctaatgtgattgcaaagaggttagtttgctggccaagtttaacttgaatgtggttgggtgtgttgtgagaggaatctgatattactggctgtgggttgagtgtaaaggttttagctttttagtagctttagtagtccagggagtaaaagtggaaacttttattgtaggtttgtgaattaggtgtgatctgtggtgctatatgtgtcattgatttgtttcaactagtttgttcacaataaaagaattagattagtgttgttgaattttggtgagtgtagatgtaagattgcgatgaacatgcattagggtcgctgtataatttcttgcttttgttgcatgttttgataagttattttcttgatttgggctactggggcatttaagcttctgtcaagcattttatttgtggaattcgaatttgacaattttattttctaatacag

SEQ ID NO: 59842 - DNA, 710 bp, Populus trichocarpa
  Intron number 1 from transcript POPTR_0008s16880.1 (locus POPTR_0008s16880) derived from phytozome v7.0 (chr-ID scaf fold_8; pos 11344879 to 11345588 reverse strand)
gaatcgggtggcctaagggcggcagtggatccaaggtaaacttttcgacaagtttaaaattcgaaaagtttgattaaaattcggttttgatttgcttattttttagtagatattgctctttatgttatgattagggcattatgatatcacgctgtctttttttagaatttgttccttgttaactattgctctttgttttttttatgaaaattttgttcaattttatgattcattttttatttataataagaaatcaagaataactaaatttcttctttctgttgttgtacccataccacctctctgattgtgcctttcctgaaattggtgtgtgaacaaagtgaaactcaagcaactttctttaatgaagaagtgggttgggagtgctagaactagatatctgaaattgttctttctgttatggtaccagaataagtcaggagttgttagttctagtaatgcatatgtacctgtgacagctaaactgttatataatcttctcttgtgcttgtattttttgttgtttatgaaattttaatttgaacaattttcttagcttatctctccgttgatgatttgcctggatgcattttttttatttcccatgaggacattttatgggttcgccatgccatgtcagttctcggtggacaagatgttatagtggattatgaggttgtcatcataatttgcaggtaagacttgaagta

SEQ ID NO: 59843 - DNA, 1003 bp, Populus trichocarpa
  Intron number 1 from transcript POPTR_0008s10140.1 (locus POPTR_0008s10140) derived from phytozome v7.0 (chr-ID scaf fold_8; pos 6364103 to 6365105)
cagtgaactaaactgtatgttgtcgcctgcagttcatatcattttcttttcggttactaactgaaaaaaaaacgttactattgttctctttgacattggaaacccttgaccactctgattctcatttatctttaagaaaagaaaaacaaagagcacactagccctaattatgtgcttgtagatatagaaatttctgaatattttccagtttggttaaatttctgaatattgaaagctacgaagccatcatccaatagcaatctatttgccatggtgttcaccattctattctgccttgtgattctatttcaacgtaatgcttgtgcaagattttcttacagtattactgctttagtctttaacccatggtttagatacaaatgttatgtgggctaacttatgctttaatacatgcctttgatttgggctgtagagtttttctttatggttgaatttcccaatcattctaaagtaaacttttgacttccttgaacgggaacgtgtgaatttttcccctactgtccattttcggcatctgctattcctgttacagctcccatccatgtagtttccttgtatacacatgtttacttgcgaaaggttggtgggcttctgaattttgattctgatatactgtatcttatgctgaaatggttttctgcatcttgccagtgtgtataatgttggctacatgtaacagggttatagttttcaaaacgactttgaatgacgttcatgtattgtccatctattttctttttcctgcttcctctaatttttcagacatccttagtttttttggggcatttgggaaaaaatgatttaatttcaggatttctctcactctctctctatcctttttctcctgtttcattatttgttttatgatcttttcatgtgttgtccatcaaaacaattaaaaatactttaaaaaataactattatgggatcccttcatcctttgaaagtggcctgggattatcagcagattgtagcccgggag

SEQ ID NO: 59844 - DNA, 915 bp, Populus trichocarpa
  Intron number 2 from transcript POPTR_0008s12000.1 (locus POPTR_0008s12000) derived from phytozome v7.0 (chr-ID scaf fold_8; pos 7739840 to 7740754 reverse strand)
ccgccgtatccctaaattgcgtggaattgctggaggtactcttgtttttatatattattattcaaattaattgtgtgtgaaattttagagaatcttgtcaattaattttgtagaaactcatgtgaggatggctaaaattttagggtattgctatgtatttaaattccagtgataagtgctttctaaagagaatacgttagtggggcaaagggtgagcatgtttgtagaataattctttcttgcttcatattggtgatcttcattggttttgacacacgaatagcagggtctctactgtgttcaacaatgcatttgcaacttcatgtgatctaggagccagacaccatttctctagtcttcacagtgattgggttgcagaatcaaatttcaatatttctgtttgaattcttggtgatagtttgaactgtgaagtctctaggaggtgccgatgcacaatgaatttgttcggaaagactgagccagcatttcatttctctaagtttaaaatgagcaatactcaaatttgaaggcctttgcatgttgacaatataatggcccagatggagtcattaaccttgtttatttattgtttatttatttcttggctttggcatgctgagagaccaatctgtggtgggtaaactaaatggacatcccactgccattttgtttggagctttacgaaacactcttaaacacttattctgattgttgaaatggtgaagaatctagtatagagggtacatcctgcttctctattgcctattaactaaaccatgctatcacatcttgaatatcaatatatagtgctttttttactctcctttctccacacagcaagacttgcatgtttcaatgatgtgtgtgttttcatattcataaactcattggtatgcttctgttactttcaaaggt

SEQ ID NO: 59845 - DNA, 696 bp, Populus trichocarpa
  Intron number 1 from transcript POPTR_0002s23140.1 (locus POPTR_0002s23140) derived from phytozome v7.0 (chr-ID scaf fold_2; pos 20566742 to 20567437 reverse strand)
agcggcagcagctattgcttcttcgctttcactcggtaattactatgaccttcttttaatgcttttgtttcttctttttctttgttaattagggtgcgttgcgtgcatgctccctccccattgatttcaagaatcgaacccgacccaaaagagagcgactcttttcttgaaaacccattttgtgttttggagaaaggctctatttcttagctctgttttgatgcctctttgcttagtccactgcaaatcagaagaacgtattaatatgaagacattaggaaaggcacttcagtttttgataccctttttccataaagacttttatttgaagggtatcagcttgctattaatttgttttctcgctgagaatgcaagaaatgaatgtgaatgaattcaattctttcttttcctttttcttctaaaaattctggttgcagtacaaatacattttatgcattggttgggatgggttgatggggaattagctttctggaacctgaaaaaagagagaaagaaataagtaataaatttcattaatctacttttgtcattgactgaggattttgctttttaattcttccttttcagcatctctgttcatcgaatttgctcctcttaaactccatgtttttttcattcaaggtgtttttcttgatgtttatgtatactgttttcaggtacttcccattgtcaact

SEQ ID NO: 59846 - DNA, 626 bp, Populus trichocarpa
  Intron number 1 from transcript POPTR_0002s26640.1 (locus POPTR_0002s26640) derived from phytozome v7.0 (chr-ID scaf fold_2; pos 23527398 to 23528023)
gagcaagttaaggtgacccatctttctttcagtttaggaaaaaaaaaaaaaaaggtctacttgagcttttttttactggcaaataatactgatcatatttttatttatccaagtttaagaaattacaacttttttaaaaaacaaatcttaccagggctctgcgttgaagttttttataactttgataggtaatttcttgcttttaaaagttgagattttttcaaacagaagcaaagcctgactatatcaaagtttatagcggattgataggtaaagcattagtgtgctttgattttcaacaaaaccaaacgtaccctaatttagaagaagaatctgtttggaaagatgaggaaaattggaccgttaaacttttctgtcctctcttggaccactgaaattattagaaaccattgtataatatgccttgttatgccgattgcttcaaatcacaatgggcaataatcgaaggtttataatcatgcgagataattgaatgagctcgctggtcaaagttcaaacttcaaagtgacaagccaaaataagtaatttgccatggacacaacgacctgatctttcttttcctttcaacaggggtgggtgccaaaaattgtggctagcataacgga

SEQ ID NO: 59847 - DNA, 736 bp, Populus trichocarpa
  Intron number 1 from transcript POPTR_0002s06550.2 (locus POPTR_0002s06550) derived from phytozome v7.0 (chr-ID scaf fold_2; pos 4367393 to 4368128)
agagagaggaaaaaaccactctgttccatccaaaagtgagtcaagttagtagtagctgaactgttctcgtttcgctctgtcttttcctttcccctttgaaggagtaaatgtgaagtgaagtgatgcatgttaccatctttctttcgttaaacagatctttaacaaaaaaagaaaaaaaaacttgctactttttttggaaatgttgtgatggtatccttcgattttcttttctttttggtattgaatttagatcagctgtcaaaaaactatcctgattttgcattcaatgttaattaatgattacaaacgcagtatttaagaattaagcgtgtttgtgatgctatatttaattcctgaatcctgtttgggatgctttcaagtcctttttttaagcatctcatgattgatagccttttttatggtcaaaatttgggctgacgttttgtttgatgactttgtattaaatgggctcttgtaactttgatcagattgttgatgttggcgatctaactcttgatattaatgtcattttcttggccacttttggttagctttttgtgggttgttgttgtttttttttcttggttttgtttttgggatttaaagtcggaagataacagtgatacatctaatatttggttttcttttttatgatgttttgatggcaacctgtctaactatggaataattggtgaatgaaggactggtgtctttgtcagttattgcaagggggcag

SEQ ID NO: 59848 - DNA, 702 bp, Populus trichocarpa
  Intron number 1 from transcript POPTR_0002s02460.1 (locus POPTR_0002s02460) derived from phytozome v7.0 (chr-ID scaf fold_2; pos 1390250 to 1390951)
ccaacaagctcaaagaggttaattatcactcactaattacttttttttaattaatttaccttgtcttcttcaaaaaaattatcctgtgttgttggggtagttgtggtactcagaaatatcaacccgaacagtgtttcaacacttcgtttcgtgattatataatatggtctctgactatgctcaaatcctatatggaattaattgttacttgctatgcattctcctgttttcctttcaatttttccctttgattgttaactaatggatcctggccaaagcaaatggagagtgttagaatgatttcattaaatccatgctgtgactattaacatttcattagtttatcagtagtgctcgtttgatattgttcatttgcttgcttgtgatagaatttaagttttcatagagctgcgagaactttgttccttttgtcctgtgatagaataaagtttaaaaagaaaactaaatgtttatgccaattgataaacaatagcgatatcaatctattatttaatggaattgagggctttaagaatattgtatctattgcttttggcgaggagaagccatctcgtccatgccagcatgcgaccctgtcatatatagaattaggagttggaaagggcggtaagcaaagcatcttacgttgtgtgtatatatatatataatgttatatatgattttctcctttcacataattag

SEQ ID NO: 59849 - DNA, 378 bp, Populus trichocarpa
  Intron number 1 from transcript POPTR_0016s09640.1 (locus POPTR_0016s09640) derived from phytozome v7.0 (chr-ID scaf fold_16; pos 7708662 to 7709039)
ccgcagcgtcagtcttcttcttcttcttctttttctcattatcattagtggttgattaatcacgctttcatgttataaaatataatttaagagaagggtttttatatttacgtgtatatattattaaatcatgttgctcttgttttgattattgaatttgttatctgttggttgctattgccagccagccagccagccattgtataataaacaacaacaacaacaataataaaaacaactttctgcctcaattttaggatagtcttgaaattgtgaattttgatttaattgtccaaaaagggattcgattgcgaggcttaaagttgtttttatccatgatcagtaataagaagaaaaagagaggtcaacgggcagctg

SEQ ID NO: 59850 - DNA, 611 bp, Populus trichocarpa
  Intron number 1 from transcript POPTR_0016s14350.1 (locus POPTR_0016s14350) derived from phytozome v7.0 (chr-ID scaf fold_16; pos 13597133 to 13597743 reverse strand)
tctggtgatttcgccattctctgcgataactgcgggtaattttcttaattttaattaaattctttaatttctttgatattcatagcttttttttagaaaaaaaatcgtctggtatttatattttgctaggagttattgacttattgcgttaaacggttttgcgtccattttttctttttttggttatctgaatattattaactcacagtgcgtggaattattattattattattattattattattattatgtatcattattaggattcttcattaatatagtgccatcatttccaattaatttttttcttttgggattttccatagttgtcgtcccaaatttctgttagaattaaaatggtcgaatttgtttgtaagaacagaaattaagaagagattcctgaaagtgaggagcctaagttgtcctaatgatacttaaaaggactcatttctttttatttattttatttataaattggggatgatagaaaataagttaacaatggattctaacacaccatttatcgactgtaatataagaagcttcatgggatataataattttgatccatggttataattggggattcgtgttcgttataggtccgcgt

SEQ ID NO: 59851 - DNA, 351 bp, Populus trichocarpa
  Intron number 1 from transcript POPTR_0002s17030.1 (locus POPTR_0002s17030) derived from phytozome v7.0 (chr-ID scaf fold_2; pos 12795067 to 12795417 reverse strand)
gcaagccaagacaacaactcattgctctgatcaaggtgagcttcctacgctttaattatacttgttatggtgtttcaaatccaaagagtttctttccttcctctttttgctgcttcaaccaagcaataattccctttgtggattctcttttaccttctcaaagattaagatcgttttcttcttttccctcctacgtacgtttcgtgtttaactttttttgtttgagttctcgatcccttgtctccccctttcttgcgaggccaatagtttctctttacagtttctcgttttctttctagctacttcacagctctttctgtgtgatgatttggtagaggtaagcagcattga

SEQ ID NO: 59852 - DNA, 776 bp, Populus trichocarpa
  Intron number 1 from transcript POPTR_0303s00200.1 (locus POPTR_0303s00200) derived from phytozome v7.0 (chr-ID scaf fold_303; pos 207 to 982)
ttgcaacttcatctgcaagtaaataataatattctcttatggaaaaattaaatagtttccccatgctgtctctttttttccctatcagggagattcttcaaaaaactaggctgagaccaaatctattatagtgaccttggtgctaataaaaacaaaataagtccaacttgaaaaaagcatgctcaaaagacctccattccatgaagggcaacatctagttcagcttatactcggtggtgcaacttatacttcaaagaaaggcttgccatgacttgtgaagagggttggaaggaaacaaaaaagaaacagtcaaagtatatgctcagagagatgatcccaagataatattctgtatgtaattacaggaatagcctggataaataaacctgaaattcttcctacattcattgacatgactctctggcaatagtaaataaatctatttaacaaaaataaaacactctctctctctgcatcacgttttatttcttctttcctggcagggagatcttctgtctataactatccatataaaagaaaaggcataaactgagtatgttagaaaatgcgtttgactccatgttgaaaacattttaggtcatatcagaataaagactgcttcaaaaacttttattccgtaaggcacaatctggtggagtatatatggttattcactgatcgggacaaattcattacattatatgagtatctaatatttctagatttttttttatcatgtagtcttactatccagagcgtctggcaaagtgcttcat

SEQ ID NO: 59853 - DNA, 696 bp, Populus trichocarpa
  Intron number 2 from transcript POPTR_0016s13310.2 (locus POPTR_0016s13310) derived from phytozome v7.0 (chr-ID scaf fold_16; pos 12503573 to 12504268 reverse strand)
gttggtgaacaagctcaaaggtttgttgatttgctttcttcttcctgtttagccacattgtattgttgtagtttgtctgtttttctacttaattctttccaaccttcctacttatgattcttaaattcaatgtttctgctgttctgtactgcatttgtgctcaaacaaatgctttatagttccaagtttcttttgggatcccaatgtcaaaaactttcctacagatttaaatccaattccttactttgggaagttctgaaattctctaatcatttgggaccttgaagttggaggctatttattgcaatgagaaataaatctgattttaaagcttgaataggatttagaaagttgtcaaaatgacatatatataatgtcaacatgagtaaatttgagactgttctggttaaaatgaatcatgtgctgctggctgaagggtaacttaaaattctgctgtgctgttggttaatcttcttgagttttgaataagccggttgagtaaattgagtagatgtcaggagagtttcctggaataagttgccaacctggagccaaacatctaaattgtgatattttgaagacaaccccttttgatgaaactgctgattttgctgccatctcctgaatagaacttataaatgcatctttctttgcttctatgttcattaagggaatgactctgtttatataggaaaa

SEQ ID NO: 59854 - DNA, 855 bp, Populus trichocarpa
  Intron number 1 from transcript POPTR_0016s13310.2 (locus POPTR_0016s13310) derived from phytozome v7.0 (chr-ID scaf fold_16; pos 12504272 to 12505126 reverse strand)
gcaaggagttcaattctgtcggcgacgacatcaatgtattgttttttcttttccttttaatcttggggttcttgaattttttttatgattaataagttcgatctgccgcataaagttgtttcctttattgattaggttgtgatttgaaaagtaattgtaattataagcgtaatggtgggattaagataatgattgtgaaagtaattatccgttatgattgagaatcagaaaaaaaagaatttggggtttgtttggaaataaatttatagaagaaataaaggttttgatttttactaaaatagatgaaggattgtagcttttgatgagaattcaagattgctgagttggttttgttgaggttcttataatgctggagattgggtattaattgctcttaattttttaatttaaagctaaataaataattgaagattgaagaactaaccttattagagtttttacttaccaattgactgcatgacttgtatcattgcgatcttgaaattactaaagctgaaatattggctaaggctaatgagtagaagttggactttgtgaagggttagatgatcttggatgtgttagaattcttttaatgttttgcaggatgagatgggatatgggtttttatcaggttttagttagacatagtggaagtgtttcccccccttttctgccttaaggttgtgccataatataatttcctttgcccttcatataaatcattcatcataccaaattattgccttttttcctgtgaactctgctgtaattacctcagttattgcattttgcctgctgacatctttctcttatttatcagtcattatcgacaagcattgaaggaggaaccaa

SEQ ID NO: 59855 - DNA, 248 bp, Populus trichocarpa
  Intron number 4 from transcript POPTR_0016s02550.1 (locus POPTR_0016s02550) derived from phytozome v7.0 (chr-ID scaf fold_16; pos 1255057 to 1255304 reverse strand)
attttccacactctcctcctaaaggtttgtggattcacattgttagtttgacttaaaaaaaaatttgatatgcaattatttcaattcaagggcttacttcctatagtgtagaggaaactcagggatgcctttcttcatgttgcattccagatttaatttcttgagctattttcttttgtcagcttgtgaatcctttaaacatttatgtaataggttacttcctgactaggattttccatcccaatatt

SEQ ID NO: 59856 - DNA, 453 bp, Populus trichocarpa
  Intron number 2 from transcript POPTR_0016s02550.1 (locus POPTR_0016s02550) derived from phytozome v7.0 (chr-ID scaf fold_16; pos 1255580 to 1256032 reverse strand)
gccgtaaatctatctttactaatgctaccccccacccacccaaaccaacactcacctcactctttttttccatggttttgtagaaagtaaattgtgcttgataagataaaaactactgtttccctttttttaaagaaatacacctgtaaaagatagggtcatgataccgataaaaccagaaaaaagcatagctgtttgtgaaggtgagttaactgtttttgaagaattaacgaggtagaaatatttgatatgatgccttagattgatgatggatcatggatggtggaaacatgtggttgctttgaattttgatgagcactcggcaatttctaggttaatgaaaatagtggtttgcattgagtcagtctgtgaagcttctctaaaccctttaagatagttataatgttttccctctaccttactgttttgtatttttttctttaaaggcaacca

SEQ ID NO: 59857 - DNA, 1006 bp, Populus trichocarpa
  Intron number 2 from transcript POPTR_0002s19950.1 (locus POPTR_0002s19950) derived from phytozome v7.0 (chr-ID scaf fold_2; pos 15883209 to 15884214 reverse strand)
ttttttgccaggtgatttttttttactactcataatactaaaatgataaagttttcaagtactaatactttggttttggaacttctgtgccgtttccttaaatattagtcgatggattgcataaccactgtactaaaattacaacttgataagttcatatttcctgaaacaggaagttgtcatttgatagcctcataatttgaagctcttttatagatatcctatacaaatctgtggattatggcaataatcattgatggactcaggctgctgtttttatcctcaaatcattatactgagagatttttgttgaccgtggtttataacagttttgtgacttggagtaaagagattccttttaagtaaatactggtaggaaattttcggtaatgaaatttgcagtttgcctagggatttggctgcatattatctactatttgcttatgcaaaatcaaatcccggggatcaggtgctggggtatgctctatgcaatctctgtgatggcaatagaggcattacccttcatcctggccttcaagttggacttgaggttgatgtctgtcatgtgctttaatagatttgagtcaccaaattctgttcttttggttcaatagctccaagtgggaagtattgtttcattgacttgggaacaaagaagtctttaagggggtggtcagaatgccaaattgtcatagaaattgctgtttgaagttttcgtaatctgaaaaaaatgtgattgatagatcaaaccattggctagataaaataattgatttcatatttaaattgttgggcctgccgtcactactggtaagcagggcttgattcatgttcttttttggtagataatttattcgaaagattcgcttctaccttgaattgtgccataggctgataagactcttcattttttgatctggctgattgagaggaaaaccatctattttatttttattctgtttttaatacttgttcactttgtttcctcacatttatcatttcaggg

SEQ ID NO: 59858 - DNA, 556 bp, Populus trichocarpa
  Intron number 1 from transcript POPTR_0008s02190.1 (locus POPTR_0008s02190) derived from phytozome v7.0 (chr-ID scaf fold_8; pos 1048226 to 1048781 reverse strand)
gtcagagacaccaaagttactgggttgtttctcaggttcttgttatgtctaaatctgaagtttattgatgttttttttcacgctcacaagcatgaagtaatggaaatgtttactctcacaagtttataagaattaggaagagacaattattttcgctaatttcttttagtggtttgatctttgcagtgcttgcttgctttattttctgctaaaaaaaaagataatatgattccaagttgagtatgaacatttcttaattaccttttgatgcgggatatatttctcatgaatctatgaagagtctttatgatcactgctagtgttgttttagacctgcttttctctgtgtttaattcggtgtttgtaaatgttgatagcctgttgagttaaacggaattttggtggatttgggataatgtaaaaccaagattttggccacgttagagagtaatctgtaacagtgaatttaatctgggtgttgtcagtatcgagtaagatgataattttctccaattttatagcacaaattgtgaaaaaattctcatttctcctaggg

SEQ ID NO: 59859 - DNA, 647 bp, Populus trichocarpa
  Intron number 3 from transcript POPTR_0008s10480.1 (locus POPTR_0008s10480) derived from phytozome v7.0 (chr-ID scaf fold_8; pos 6570459 to 6571105 reverse strand)
ggtcaagaggaaatagcaatccctgtgcattcgacgtatgattttcttttcttctctctctgttttctattcctttcacttgttttgtttctgactatacgagtcattaaatgatttctgtacccagttatcgatcttgggagggttcattagttatgttgcaaaagcaatcaatttggtttgatttgctgaggttgagtgttttatgataccaaatcacgatctgtatcaagattacatttaactcttatgatactctgccttctggtgtgctggttcattagaacatcaactccttgatgatgaggctccggtctactcaaatgtgattggattatgagttgttggatgtggatcatgtgctggttttgtttctagttttactagtcactttgtgattcaagtaccgattttggaatggttactagttgtggtttgaaaaaagtccatttaatttgttgtgatactagatcacgattgttattgagattacacttaattcgtatgacctttttctctcccgtatgtttgttcattacactaaccattaaatgtacttgtatttttctgaggtttagtttcccacttttgttttatcgtctttctttgcagtattgaggcagcttgtgctgctcatccaactgctg

SEQ ID NO: 59860 - DNA, 448 bp, Populus trichocarpa
  Intron number 1 from transcript POPTR_0002s16190.1 (locus POPTR_0002s16190) derived from phytozome v7.0 (chr-ID scaf fold_2; pos 12103164 to 12103611 reverse strand)
gctgtagtaaaacctgaggtttgtattattatttatttatttattatgtgcaattatgtctttccgttggtttggtagtttctcagttgtagaaagcagacccttcccttaactgttcatggaaatgtaaatttggatgttcttttctggcggggcggcaacatattttcctggaatgaggatagtacttgacttttactatcttacctttttaagcattttgtagctgatattataaaagtgagaaacaaggagttaaaagcgtttgctttttttttttcccttcccgcaactctctgtaacatagaatttgatatttgttgttgatttgtgatctcatgcaacttaaatatatcttgttcatctgagcttcttttgaaaccatctgcttgtgaagttaatgagggattgtctgaagggttcaaatcctgttgctatccattgtcag

SEQ ID NO: 59861 - DNA, 767 bp, Populus trichocarpa
  Intron number 2 from transcript POPTR_0008s13160.1 (locus POPTR_0008s13160) derived from phytozome v7.0 (chr-ID scaf fold_8; pos 8606994 to 8607760)
agctcggtgaaggtggatttggacctgtatacaaggtaaatatttctctttaattgggtgtgttagtgaatcccaatttctgtttggtcaaaagaattcgaagagttatcatgctctttttggtttttcctttcaagagttgatgtttttttttttcttcctgtgcttgagaggaagaattgatgattatttgtatcagtttatcattattattctttttaataaatattgttgtcattatattgtctgccaccgcgttttggatccttaacacaatcatgcatataattggtatcaaatagacatatagcctataaaacgttaacaaaatggcatttgctacatcaagttctgccaattctgtctagaatgtttcgtgttattgaataagactttttgaaatgagactaattgtggccactagccatgaagaaaaacaatcaacctgattatccaactgcgcgaaacaagtttaagatcttgtaatttaaagggttatacttgtatactaatgagaatagatgctctcagtacggaattagttagaggatatttttcgttatataacttgttcaaggggaaaaggcctatatctctgtcggtacgcgcacgcgcgcgcaggaagctagcaagttattccaatcttctgtagatcctgaactttaatcccaatcttgacgaggcaagggttcctagatctctaggaagggaaagaaggcaattgagtgttcttctaactctggaatgttttaaataggggaagttgg

SEQ ID NO: 59862 - DNA, 407 bp, Populus trichocarpa
  Intron number 4 from transcript POPTR_0002s22800.2 (locus POPTR_0002s22800) derived from phytozome v7.0 (chr-ID scaf fold_2; pos 19738759 to 19739165)
gtgatctagcacctcggaacagtaaacttgagcaggttgcttttaccaatcattgcctagtctttattattattattattattatctctttttttatgtagcatcagttttggtgtctgttttgcttagcaaactgacacatttcttgaaaatctggggatgtgtatttaaagtcaggctccaatgtgtttatgaaccctggcaaattataggaatggtcactattttaattttagctgaaaacacgtacccccatcttcctagtactttaggttcttgaatccgtggtttggatattgtagtctttctgtgcagctgtcttgttttttctttgaatttttttaatcaaattttttctttgtggtgttgaagctattccaagtccttgcacttggaagttgttttga

SEQ ID NO: 59863 - DNA, 682 bp, Populus trichocarpa
  Intron number 1 from transcript POPTR_0016s04800.1 (locus POPTR_0016s04800) derived from phytozome v7.0 (chr-ID scaf fold_16; pos 2879133 to 2879814 reverse strand)
aagtttcagacagtagtggtatgttttctttttctgtccctttttctcctttctttctgttattttttattttctgaactgcttttgttaccttgtattcgacataaagtctgttcttttattgggtattgctgaatctttttttaagaattatgtgggtttggtttctgtggcctagggttttaaatttcacaaacttaattgggtgttgctgttttggtgagtttgtgacttagagggtgttttggacgtgggttttagaggaactaggttttgaatgtgtaataaagtcttcatttcagagattgagttggattttcagagtttgattatttttgggatgcaattagcattagaatttgattctggttatcgtgccagttttgcgtttcttctaaatgtttttgaacatgtaatcatgtgcctgtagaattttaagtgaaagaaacactttcatatttatatcaaaatgttttgaacttataatgttattatgtgtgaatctgacatgttttatgaagattatatagtcaaaatattagttgaattatggatgtctggatgaatttgacttaaaaactatctattagaggagcatcgtttagtttttgtgagttttgtggttcatggctctttgggctatgatgtcatgtaccttttgtctggaaaaatgcaggtactg

SEQ ID NO: 59864 - DNA, 776 bp, Populus trichocarpa
  Intron number 2 from transcript POPTR_0016s00680.1 (locus POPTR_0016s00680) derived from phytozome v7.0 (chr-ID scaf fold_16; pos 236103 to 236878)
tggcagttgaggagccattgaagagaacttatcaggtttgcaattgtttctgctctttatctttgtttcttctttatgggatccgtctcttcaacttggagtcaagatttttcaagtcttttcgatgttgaaattagatgaattatgtaaataacagtgaatcatgtaattctgttgttatcagctgcagaatgtgattctgatccactattcccttttccagccttgatttactcttctttcatagatgttcatctttcatgtttttttaatgccactatgatgtttaatcttggatgttgttattaaggtgatagcttcaaaagaaattaaggaaaaaaatgtggtgagcagtcctagtaaggtttgatctaggaaaaaaggatgcttattgggcttctgggtgtgttgaatttggcatttcattgcttgatgtcttcttggattgatgagaagctctgattcgagccgttatctggggttggtagaaacaatctttcttgactgacaactaattggcttaaactcatttactgggtttgtttataattcctttcttttacctaactaagtctataaatggcatatgttatgaatgtgaaaattctctgttgccattatgttgtgtcatcatagatttgtttatgttttggtttctttggattgttatgcactttcattatcaaatctctgtaaattacagtttcttactatctaaattattgtttcttgatctggcagactgtccatcaaggatatcaagctgaaacgctggc

SEQ ID NO: 59865 - DNA, 1011 bp, Populus trichocarpa
  Intron number 1 from transcript POPTR_0008s11150.1 (locus POPTR_0008s11150) derived from phytozome v7.0 (chr-ID scaf fold_8; pos 7056216 to 7057226 reverse strand)
gttgaagaggtgcaactggattacaaagaacagtggtatagtataatataccgttacattaaagtttacgaaatcactgtcttattttgtcatacatgtaaaaatattctgacaaagaacagattggctaatttaaccgagataaataattcttatttttccaaaaactaaagatatgcgttcggtagtagttaattttttgtgcatagcacgaggcatcatttttcaaaaactttgacaaatgacaatgctgcagtagcgggtctgatgtaaaatctgatccacctgaaagcgatttcaagaaagggcaaacctcaaaaatgcccccccgctatttgtttagtattgaaattaccctcaaacaaatatttgtatcaattctgtccctagacatttttggtttctcaattcgtgcccctctattggaattatttagccaaaagaaaaaaaagtaaaattgggatggagtcaaaaatcaaatattcatgggcagattgattgagaatttctggaaattgatataaaaaaattgctgagagcaaaattgagactacttttataataggggggcattttcaaggtttgcctttaaataaatcaaggacaaactagaagaagctcgtgaagcgtctctgtccatatgtagtggttgagagtaacaacatgggtttataagaataccaaccttcatgcaagtctaaaaatgatcctatttttggagacttttaataactctattctgtcggtccaatccttgcgtaaaattcaaaaccatgacatttctctaccaaactgtgcatcatcttagattatatatgtatcaataatgaatgtacgtatgccaatgattgctattctacaacaggttcccatatgcatacgtcctactatatatattcttatatatccatttagagcgtatagtactaaaatagataattaagagagaacaagttttaatgctatgtatgtatataggcattgattctgagtcttgtgcagataaagttt

SEQ ID NO: 59866 - DNA, 434 bp, Populus trichocarpa
  Intron number 2 from transcript POPTR_0016s04570.1 (locus POPTR_0016s04570) derived from phytozome v7.0 (chr-ID scaf fold_16; pos 2687811 to 2688244)
gagaagaccaaagctactgtgcaagagaaggtttatcattttgattcttcgtttcctttttatttttttcaattatttgtctgttaagtaattttttttacctgtcttatttaagttaaaaaatattcatttttttactgtttaggatgtcaattaaagttcaatgatttagagatgttgatgtcgaatgattgtagacattgaaaatttaattttcaatgagcaaaaacgtggaaaaaatttgcatcaactaaacttgttacattttcttttatgaaattaccagttacattttttaagacaaaatctcactcagaaaggataaaaagtcgaaatcaaacgatctagtaacgtttttttagttttaactaattaggcttttggcaaattttgttcctaaaggccaatggtacaactttttgcaggtagagaag

SEQ ID NO: 59867 - DNA, 651 bp, Populus trichocarpa
  Intron number 1 from transcript POPTR_0008s01390.1 (locus POPTR_0008s01390) derived from phytozome v7.0 (chr-ID scaf fold_8; pos 671273 to 671923)
tcttgatttgttgagagaagaagaggaagaagaaggtaaagttttgtaaactatgtagctgttatgtcttgttatttgaatttttcattgatattttaaagataatgaagagagtttatctgggttggtaatcattctactttaacagactctccatgttttcttgctcggtgaatgtccttcttaaggctaaagatactgttggaagtgatttacattatgaatttgtatgcgggatggttaattttgatgaagcaggatagttctttgtgcccaactggtgaattgtttaaagaacattactttgtgatagattttgctactgtataggaatgctgccgctttttaacttaaacttgttttattactaggtgaaaatatgttgcctgcattgtattacttttagcattatcatcattttggttcatctttgtcgtatcacaggtgtttatgatgatcacactttaattttggtcttgatggtggttttgatcccaagattcttcaatggatataaatagaggaactttataaatttgcttgtgcttagactagaatgttttttttttttgttattatatgaagttctcagtttgctaatcttttaagctggttttttttttatttattagcagagttgatagacctatt

SEQ ID NO: 59868 - DNA, 825 bp, Populus trichocarpa
  Intron number 1 from transcript POPTR_0008s05560.1 (locus POPTR_0008s05560) derived from phytozome v7.0 (chr-ID scaf fold_8; pos 3229972 to 3230796)
ctcgctcactctctcaaaatccctcctataacaaggtcggtccttttctttttcaatcaatcgctcttctatcttttcgatctgctgtatagcggtctggatctgatctccttttgattctgcattttgctttttagtattttgtaatgtgcgattcatgctcgcaaatcattttttttatctgcattttggattcttcttaatcccatatttggatctggttttattattattcccgggttcgttttgtttaaaatctgaaggaaaattgggaaattaacagtgaagaccgtaaattttactgtaattacaaagttggaaatggattctaaatgctcacttttctttatgtctgtgtctttagatttcgtttgcaattgctttaaaaatgtgatttaacattattctgaaatgatatccgagatttacttgcctattctctgaagtcttttttatgcattttgattttgatgcgatatatttgttcactttatttttcctaatcgatttcttttccgtttttaagacacggaaacacgacggttggtttgccattgcattttctttttttgggggccaatgtacacgacggttggtttgccattacattttctttttttggctgtttgttttttaactgatgaaggcgaaaaaactcatttgcttgtttgtgttcttttttttttcaatattttattttttactctgttttgcattaatgcatggctagttaggagatgattttgatgtttttgcttcgcttgataaaagaaatttattccttttttgttgattatcactgtttggtattacaggcagtagaag

SEQ ID NO: 59869 - DNA, 727 bp, Populus trichocarpa
  Intron number 1 from transcript POPTR_0339s00200.1 (locus POPTR_0339s00200) derived from phytozome v7.0 (chr-ID scaf fold_339; pos 1022 to 1748)
ccttgatcattcacattggtgatcaaattgaggtattttcttagccctttatttgatttttcactcaatttttcttttagttcttttattgcattctctattcttgtttgttctcatggaactactagctatcttttttgtttttctttcttttccatttctaacaacaaatcaaatcaatttcaatcttggaaatatatgcgataatgttaagtttttctttttctttttctttaattagttaattacaaagaagagatttgaattcttttttttaaaggacatatataaatgctaactgggctataaatttatcagcaatatcaaatcatcacctcaccaattaatcaattatctatctaacacctaatttaattgggggggggggattaacagattgaaagtgttgaaaacaacttggtatgactatgcattccttccaagaaacggatgctttaacagcaagttattacttagaaccagttggcatttagtggaggaggagttaatgagcctttatgaggagtccatccttcattcatggcaaaagaagggtgtgggcacaaagcatttagaaaaaataatgattgcattgttttacaccaggcatgggcactatcatttaaaggctatctgtataattatttctcttgacttattgtgttaatggttactaaaatttgtcaactacatatacacttggcaattggaatgcagatccttagca

SEQ ID NO: 59870 - DNA, 356 bp, Populus trichocarpa
  Intron number 1 from transcript POPTR_0025s00790.3 (locus POPTR_0025s00790) derived from phytozome v7.0 (chr-ID scaf fold_25; pos 433582 to 433937)
cgacgcgtcgcctctccttgaaaccgtttgtaaaggtctccgatttagcttctatttttttaacttcttaaaactctttatttatttatttttgagttcctgaaatttgtaagagtgaactagttatttccttttattatcattatcatttttttcttcttcaatttgcgctgtttttatcaagcatttgatttagattactgctcttataatgattaaaatttgaattttctttaatgcttaattaattaacacaaaatgtacaatgctaatctttttttcttttaaatgattgatattaattctgtttttaatataatgtcctgtaacagaattacgcgacggtgagctaattc

SEQ ID NO: 59871 - DNA, 700 bp, Populus trichocarpa
  Intron number 1 from transcript POPTR_0008s04930.5 (locus POPTR_0008s04930) derived from phytozome v7.0 (chr-ID scaf fold_8; pos 2858555 to 2859254 reverse strand)
ctcgttccccaggtaattccactccttctctttacagaaagaatctgcaatcctcctttgttagttagctaataaaagccgctgaatttcttcaagtgtttggctctaaggaaaatgaaagaaaagaaaaaagtcgacgactctacagctgttttcagtttctctaagttgtccgagtcgaactcagctaattttgattttgctttcttttctattcaatcagttgctgagtttaagtaacttgtaaatctttctttctttctttcttttttctgtaattttcgtgtgctttctcggtaaccaaacagagtcttacagttgtcaacggttcacgtagtgcatgtctctgccttgtttgattagtcatggttgttgcgtaggcaattactcaactgagattgattggattcactggagatgctgtttagattgagagattttttcaaggattaatgatattatttttttgttttagattaggtcgtgtttggttgcttggaaatgacgtgttgagtgtggaatttcgatatgtctgcaaccaaacacagccttctgtgattttgctctttccctctgagtcagattttagcatattaaacgtaatataatgttgctgctagcattgtgtattatttaagatttatgtagactggttggattattcattcattcatttattttttgttgtaatgaacaggca

SEQ ID NO: 59872 - DNA, 879 bp, Populus trichocarpa
  Intron number 2 from transcript POPTR_0008s03940.1 (locus POPTR_0008s03940) derived from phytozome v7.0 (chr-ID scaf fold_8; pos 2166404 to 2167282)
aaactttcgaacgggtgaggccttttataagtgaaacatgatgataagtagtatttgctatatgttttgtgtggaattttgtgttgatttgatatgaattatgattattgcctgtattttatttgtactattcggtgcttgattgttaatattttgaagttacgaaagaaaaagggaaagaaagtcttttgtgttgtaatttaaacagaatgagaggaaatcaatgtacttggtttttcatcaagattttggattttgaactaattgaaatggaaatgagagtgttgatatgatgctgaatttaatctaaggacataatagtcagaaacttggaggattagtgatgtggggtgaaatacttttttagctggagaaactttagtttaggttcataagatcaatgatgcaaattgtttggtgaatgggtgctactgttgcatttatcatccacagatacgtgatctggcctttgcctgagaaggaagtaaacacttgaaatgtaaaaggaaagagggaagatgctctttggatgacagggtagttctgaaaactcatatacctcaagtgctttgaattgtagacatagctgagatgatgtctattctttttaagagctattgttttgtgtgcatggcaatggctatgtgagcttagtaaatcatgatgctggcttttaaagcatgcttacctgattccctgttttaacctgtaattcttgggcttcaaccaaagcttttctgtgtgatttaaggaatagttttaaactatttactttgtccgagttattcaatacttcagtaaatgattgtggatttgtgaagtcctcttatcaactttcttaacttggttgatgtattgacagtgcttgctagtgaaggg

SEQ ID NO: 59873 - DNA, 1041 bp, Populus trichocarpa
  Intron number 1 from transcript POPTR_0002s11220.1 (locus POPTR_0002s11220) derived from phytozome v7.0 (chr-ID scaf fold_2; pos 8285745 to 8286785 reverse strand)
acaccaggaggtttgtcaggtcatttctcacatttttgtttcttgttatttttccctttctggtggatgcgtactaaaaaaatcaaaggtggttgctttatcttcccttttgggttctcttcgacaatgcctgtcattttatactgcttggcatctgggttttgcttctcacattctttccttttgtcatggtacctttttctttcttttttgtctctcatgatgaatctttacaatgtatactgggtaatcgttgaaatttcctggattttcccttgactattttagactctgtacaatatatataatgcatgtaagttttgctgtaatattgtcatcatctagagataagctgttaagacttaagacaccagatatttgcacgaacttttatgtggtttctggttgttctaagcggtgattgatcaaattttaatcacgtttctataggaatgagcttatgagtccttctatgtgtgctagttaatacattttgttgactggaattgcagacttaaacaaacagtcttattctgtattagacagtaagaaatttcattgccagtgttaacctctttttactatataaaattatgcgtgttaattttcaagagctcgtttagtaaagtttagtgtgtagaattaatactggtacatgatttagaagttgagctgccttaattagagagagtgttgagctaacagaaattatttatttatttttttaaaaatgatgcttgcccttgttaagatcacgtccctgcttcccagcacatgatggtataatggcttgcttgcttgaacatgggcactggaattctgcatttgcttttgttgtttttagtccttttgtgctacttggtcgcatttcatagtgaaggatcattgctattattgccccttctttccttcgctaatcggcagaacactacggatgataggccttatctgcatatatatgctttggggtggtggtagtctgtcttctatgcattgtttatttggttattgtgtcgcaggctttgtgcttgacccttcaaa

SEQ ID NO: 59874 - DNA, 438 bp, Populus trichocarpa
  Intron number 3 from transcript POPTR_0008s17420.1 (locus POPTR_0008s17420) derived from phytozome v7.0 (chr-ID scaf fold_8; pos 11690708 to 11691145)
acaacttcaaacaccttcttggtgacaccattgtggtaattacttgcttatccattgctatttgttttttttttttctttgaattagatagaattcatatatgtgttaaaaatattttggttgaatatgtttagattattctgtctctttacaactttcaacttttgagtgtaatctgtctagatgctttgtaattgggctgcatctttgcataattatggatgcagtttgtattgtcattaccctgtatattacgaccctttttatactccaataactggttctagcggtttgatgtctttgcttgaataatttgtcatcgttggtgatgaattggtacatttttttaacaaatcagagcatgttgtcatacgtattgaaagaggtttgttgaataaaccattgagaatttattcttttcaggaaatccaagtggga

SEQ ID NO: 59875 - DNA, 278 bp, Populus trichocarpa
  Intron number 1 from transcript POPTR_0002s25920.1 (locus POPTR_0002s25920) derived from phytozome v7.0 (chr-ID scaf fold_2; pos 22930739 to 22931016)
gtttatcgtttttcgtattccgtttccataatcaggtacattgctgtcaccttacctcaccaatcaatcaataatgctcgccgtcttcttgatcatcatcgtttgaggaattcgatgatcgttaaattttggggattttttttttgtttttacactaattaaattggctattccttggtatctgcatgtgcatttgagttttagatcaaattaggaaaaagaaacctaattagaaatgtaattattgagtttttcttgcgattttttttaggtatccg

SEQ ID NO: 59876 - DNA, 1027 bp, Populus trichocarpa
  Intron number 1 from transcript POPTR_0008s20460.3 (locus POPTR_0008s20460) derived from phytozome v7.0 (chr-ID scaf fold_8; pos 14207259 to 14208285 reverse strand)
agtctctcttccagccattttcaggcagttcccaggtaattaagaaccttgtttacttctctgccaactctttttatgggtttccttgacaatggtagctttgtatgatgacctaaattagactttggatggtaggcaaagagcatatatctggcacgttttcctcatatctaccaagttcttgatatttgagacaatgaaagcaaccttaggttctgttactaaacttcttacaagtttgagtgtatcattcatagtttgatcaatcttgagattaatttttgagagagtttcatcttctaaaacctgttttccatttcaaagctgtcatgatggtcttagattcctgcgctacagtaaaatcttggctagattgctaccagcaagcatgaggttcgtgggggttcttttggtcatttaaagaatagagccctttatgaactttatgccactgaatgatctggtccacacatgaggaatggtattggtaagagaataagccaacctattaaccagtggactatcactatggccatccaatacgaagttccctactttagatttctctttccttttggaggggaaacattgttttatattgaattcttgaaaactgatcccccccttctttaaattatgttgttttatagctgactatagtgactatattgcagcatgccagaaattaagtgaaggaacatttgttcgaccattttggaagtgagaattgaaatcttttaagttttggcatttgttataaccaaactggaaatttgataggagggtccagaaataactcagattcattttaaagttcatctctgtagctagaagagtaagtttgtttcttgatcaattatgaggttgatccactttcatcttttggttttgactgttgctaatatgatttgcctgtctacagtagacatggttggctagactactgtgtttataatttcccgtttgtcaagttttgaaatcttggtcagaatatttgttctaattttccagggaggaataggtgaat

SEQ ID NO: 59877 - DNA, 424 bp, Populus trichocarpa
  Intron number 1 from transcript POPTR_0008s11790.1 (locus POPTR_0008s11790) derived from phytozome v7.0 (chr-ID scaf fold_8; pos 7560508 to 7560931 reverse strand)
ggacaagagggaaagatacgattcttcttgtacttgtgaggtagataaacaaagcacaaaagtgaagttagggataacaagccaggcgtgccaaacaaaacccccttcctcagctcaagtagaatcagattccaaaatgaacgcaaataattcccagcagacaatccaaaagccgaaacaacagttggtctattattcttcaaattctcaaaagcaaacattccttgttttctctggatgttccgcgccatcagatcaacccatcattgatttcgtaccatgtcttttagcaactacatacctgcaaaggtaaattgcaaacagcgtcttcaaaaggattcgtgtttgtgttttcttttccttttcatactgattgaaaattaaacaggcctcttcttttgatgtatgattgtagacttgctgc

SEQ ID NO: 59878 - DNA, 659 bp, Populus trichocarpa
  Intron number 2 from transcript POPTR_0002s02960.1 (locus POPTR_0002s02960) derived from phytozome v7.0 (chr-ID scaf fold_2; pos 1811248 to 1811906 reverse strand)
ttgagggatcggaggttgtggaggattttgttgttcgtgcgaatatacctgagggaggggaggatttgggtgctgatgttgagggatcggaggaagcaatgaatgttcttgtggaggcaagaggttatcttggagataagaaacagcgggttcgtcgtcctttggatgagcagtttgattcggtgagactctactccctgggtagtttttttctaatttgatctgcattttcatatgaactcgttttttttttaaattaattttcatgtcatggcagctagtcttaaaattttattctgttatatgccatatgtgagcggccagagagaaccatcgatcgtaattgtttgacctgttattttttaaagatcacttaggatgtcattgttctgagtttggcatgaccttatttgtttgaaaatcatcaaagggaaacatttttaacaagaaaaggtgccgcatactctgttcatccttgtttcctatggagcttgaagctattgcagtttcttttcgtatgtatccgagtaacaagttggctatgatgagctacaaagccatggctagttggctaccattttgttggaaaacatggtgtcaatcaatgttatagatcatggactatttgggttgtaatctgtaatctaagctgagcagca

SEQ ID NO: 59879 - DNA, 880 bp, Populus trichocarpa
  Intron number 1 from transcript POPTR_0008s04010.2 (locus POPTR_0008s04010) derived from phytozome v7.0 (chr-ID scaf fold_8; pos 2206717 to 2207596)
ggcagaaagaaacacagcaagcgccgattcctcaggtactctctctctctctctctctcactccttcacgtgtctagatttcctgctacttctttgggtgcgtctctgcatagattctcagatcgcactgcaccgtttgcttggatcttttactgttatgggtcgccaaatttttcttgatctaatttttttgaatagtaaaaaaaatagggaacttcaatgataaatctaaatctttgagatggtttcttaggtgaaattttttaacgggttcttatggttttgtttgagttggtaggagttggcgtgtttgctagtgcatctagtttactctttgtagttgagattgaatccagtcatttgtgcggatcttgattgttaagggtaggggatgtgttggatcagatcagtgagatttgtgaatcagataggagtttttttctgaaggggtagtagtgattggaatcggggaattttggattttgagcattggttgcaatctatagagctgatagttataggatggttagattttgcatgtacttattgatcttctcgaggattatgaccactgaataatttcttatgacttttttttattttcgtagaaaatgctgtcttttggcttttaaaaaaagtcatttatagcaatttgcttattttgtatatgattgtggatttgtattaatttttacttgtcgagccttatatttgtctatcgtatttgtttgttttgatggggtctaaatgcaaatcaaattttgttttgttactcgaagaggccgcttgataatttactaggaggagcatcttcaggtgctaattttaggtgcattcatcgtctttttatttcagtataacattggagatttcaggaagc

SEQ ID NO: 59880 - DNA, 692 bp, Populus trichocarpa
  Intron number 2 from transcript POPTR_0016s06310.1 (locus POPTR_0016s06310) derived from phytozome v7.0 (chr-ID scaf fold_16; pos 4238421 to 4239112)
atattaatgtatttttccttcctttttccctaacaggctcaccattaactgatctgtaattcgattcgtggttgatttattaagtaattatatttgacctatcttttctaggatttgaatgtttggtcgtgttgggcttactgcctggtgaatgtgatctcttaagtagtaaaatttgaagagatttgtgattgttttctattgtttttgcttttgttttcttgtgtattggattaatagaagaatccttggtagactgatgagattaaataaaaaaattgtactaaaagttttcatagttggggaatcatgtaacgtttttgtggtttttatggtgtgtagagcggcaggtgaagttggttgacttttagttagtgatgatggttcctgtgggttagttgtttttgtagctaattggatctgaagtgtacatattttcatagtctttaaaatcttagcttgtctatttcatggctttgtttgttgagtagttagtctcggtcattctgatcagtatttgcgtcttaagttgatggctaattcattcatgatatttggaactgatgggtgccattgggatctctgaaattgatagattaaacatcttagaaattgccttataaatttttgggctgtataatgctactccttaaatttggatttggtttgattttattttggtggtcaggtaa

SEQ ID NO: 59881 - DNA, 538 bp, Populus trichocarpa
  Intron number 1 from transcript POPTR_0008s09190.1 (locus POPTR_0008s09190) derived from phytozome v7.0 (chr-ID scaf fold_8; pos 5686852 to 5687389)
aagattcccgtcaaagcttacttcctttgtaccaggtctgccactttatattattaatgttcttttttttccctaacggtttctttgttctgtgtctggaaatgtgtttttttttttgctgcaacttagtaattttttttctttggtgggtttctattggctgaaatttgtggcttactgtgtttgtttgcaaaaatgaagtgacttggattaaactaggcttcaatatgcaacaaccctctttaaagattgttttttcccctgctgagagacttcttttaatgttagtaaaatgttgtctagatagagacagtgtctgttgtactgactgtccggtcactaaaaggtgatgatttgaagtgcctacgtttatgttgctgggttttggtttttgatagcgagcgtctttcttcggttcgttacgtgctatcctctccatgctttatgttcctcttacatttgtggttctgtgtttttttttcctttgatggtttggttttctcagattcgtgattttggcagtattaatttgaagagc

SEQ ID NO: 59882 - DNA, 713 bp, Populus trichocarpa
  Intron number 1 from transcript POPTR_0016s14820.1 (locus POPTR_0016s14820) derived from phytozome v7.0 (chr-ID scaf fold_16; pos 13947415 to 13948127 reverse strand)
tggcttctactcccaattctcaacaggttttttattctttgcctcccttttatttttgttatatatccatctatttacttactcggggttgttggaggggtgaggtaccaactatcattttcatcaaattctttgttttatggagctaattatctgcaatgatgagtatttttgctggtttcttgctcactataattgagttggtcatgcccaagtgttcttttatttgggatctaacttctaagttgctggggcgttttaaagagggctcctgtatgggtgaaagttgatgactacataaattcatgagaagaatctgtgttgtgctattggaagtagcagttgattgaccccacccaacatttcagctcaaatacagcatatgggttttacttgatcattactatctttgttgcttttattgtaattctcaaggcagtggggctccttcagaattttttcttctctttctactgcattcttaccttcagcatatgagttatgttgtattcaaattttaaaaagcctgctactttaccatgatatgcaaaacctgtttctatagagtgctagtaactaaacagtactttgtgattgtcatgatgtgcttgattgttgcctcttggtctctcctcatggctctagaggttgtatagattgatagaaagtattcattgttccctgagtttggtttcaggagcccaagtcaagtg

SEQ ID NO: 59883 - DNA, 342 bp, Populus trichocarpa
  Intron number 2 from transcript POPTR_0008s07280.1 (locus POPTR_0008s07280) derived from phytozome v7.0 (chr-ID scaf fold_8; pos 4448461 to 4448802)
ttgcaggtctagctccttttctcccttttttaattagtttgaacacgcgggtacatatatgtttatatatatatatgaatgaagacagtacgtatacatatcatcgtttgtatgctggaatgagaaaggttttcttttggtagggtaactgaaagatggtaataacgacagcttggtcgtgtaccctaccaattggacagaaagaaactaagctctgatctctcttacacacacgcatactaattaatggttttgagatgatgcatgtatttgattatcttaattagacattaacttctctctttttggccaagcaggagctaccagttcatcagagagcgg

SEQ ID NO: 59884 - DNA, 754 bp, Populus trichocarpa
  Intron number 4 from transcript POPTR_0008s15400.1 (locus POPTR_0008s15400) derived from phytozome v7.0 (chr-ID scaf fold_8; pos 10257742 to 10258495 reverse strand)
gaagtcggttgcagaaggagttagcaaatatgtaggtctcctcaccttgcttgtttgtagtgaagttttcttgttttctgcaatgtactagaatatattgatgttttcttgtttgaaggaactggcatgttgtcaagccaaattaactagctgtgttgtttattagttgcagagtattttggtttatgtgtccggtgaacttagttgtaacctgaattttccgcaagaagattgagattgatagatcaagtgaataggaaaacctcttattttctgaaatcatttgtgcttgtttgggtgttacgaaatcaaacttctctaaaaactgacaagtcaacgttgttaaataaatcagttaaccttagtttgtctgaaattatagctttgttggccactagaactgacacgattgctgaggtgctttaggccagctagtttaaaagtatatgtggttattttttcctaacattccaagctaattgtctgaatcttcaccaacgatcctaagataagtatctgtgacataaatagcagttctccggaccctgatgaatctcttattaaatgctgagcactgtcttttctagtataataaatgtatctagtagttatcttcctctctgtcaagcatttctttctttgccttttcattttccattttttcccttacattccatttcaccaacatctgtgctccattgcttgaggaatcattatctattgattagtgatgaataatattcctaatgacaga

SEQ ID NO: 59885 - DNA, 972 bp, Populus trichocarpa
  Intron number 2 from transcript POPTR_0002s11530.1 (locus POPTR_0002s11530) derived from phytozome v7.0 (chr-ID scaf fold_2; pos 8587824 to 8588795 reverse strand)
gagagagtggtgagttttggtcttgtgaatcattccttttggatgccatattagtaacattattagattatggaaccccgcggaacatactttatcaattttttgttatatggtttcttcatatatgccttcacatattatcctgcaagtatttgactgctttgtgttgtgaaactagattgttgctagctctaagagtaataggtgggcttagagtagatagcaattatctgtcaagctggttctggtacattgccatgaactttatgttactaatctattttattttcttcatatcttgtcatttaattgcatgaggaagcaaggttttcaagacggatcaattggagtactgctccttatgcagtttgaattcagaaatatgtttttgaattcagatctataatgctagtctggatgcataatagcttaaataagctgattcttagccatcaaaacaaactacaaattcttagcaagttaggctacttctggttaaaattctctgtctctatctgagttacattgtgaacagaaaggtgtctttccctgctttgccctatccacttgatctatatttctgcaaaactttttttttatgcctcaagattggggtcagatagtagaaacataataggggtccttctttgtattagcttagttatcttaaccattttgtatttctataacaatagaacctcgaagaattctctagacctaagaaattctgtcgtataactctctccttctgttgggtcctcttcaattctgtttataaatcatgtaggttgcttttctttgtatgcaccatatcacagtgataagcctagttttgtctttctctgaagctgtcaaattcatttatcctgctctgattttgatctctccagcagtttcctttcttgattgtatttgcatgcaattatgatgtattgatgttgtccttttgtttttcaggagcgtataagacgt

SEQ ID NO: 59886 - DNA, 541 bp, Populus trichocarpa
  Intron number 1 from transcript POPTR_0002s09190.1 (locus POPTR_0002s09190) derived from phytozome v7.0 (chr-ID scaf fold_2; pos 6510825 to 6511365 reverse strand)
aatattcctcaaagacgccatatccgttcaatcaggtaacctctttatatctcaatgaacttattatcatttatgcctatctattttctcttatatgtacatataatgatagtccaatttgttcagagaccaacttttagcttcccctaaattcctagattttaactatggctgaagttttgattttttatagagttaatgaggcctttaacatatgattcacttggaaatgaattgcttagtctgatttaagatttttgatttctctgttctgttcttgataagataaatggatcttaggaatctaattgtttttgttaggtttgtctgtaatttatttaaagaagtaacaattttattttattttattttgccaaaaaagcaaaattagctgagaggtccttgcgagaagaaaatgcagcttgatacatttaaagaactgccgttcatgcgcctgtctaatcgatgtttaactaattgttacttttcaatcatcttcatgtagttttttggcctcgtgcaggatattgtctcttttaaa

SEQ ID NO: 59887 - DNA, 585 bp, Populus trichocarpa
  Intron number 3 from transcript POPTR_0016s00290.1 (locus POPTR_0016s00290) derived from phytozome v7.0 (chr-ID scaf fold_16; pos 36955 to 37539)
gcattcttactgtaatgtgagtcaattcctttgctgttaataaatactcccttcactttcaccccatttattaactaacacttgtgcactaccacactcttttgctgccaatatggtttggtgaaagtttctttcttcagtcggaaggtcaatcttttgtcttgtttctttcttcaacttcaatgcaatttgtgtgttgaaacgtgtagcacagtcttttgttaacaacttggaaatatgatttgattaaagtttcttcctttagtcagaagatcaattcttcagtcttgtttctttgattttctttatttaaatgtgatttgaatgctttttgtaaatttatcttggaaagaaacaaataaagacgatgactttgttaaaagtcgaggcagaggggttaactggctcatgcttggcatattggctattgagaggaagcgaaagggaaagaaaagaacaatggctttaggcattttgactgaatgctgtttgtacctcaaattcatgtccttgtttatctctggtacaaactgggattatagaaagttaaaaactatgctgattcttagttaattttacaggtgt

SEQ ID NO: 59888 - DNA, 431 bp, Populus trichocarpa
  Intron number 2 from transcript POPTR_0016s10830.1 (locus POPTR_0016s10830) derived from phytozome v7.0 (chr-ID scaf fold_16; pos 9195386 to 9195816 reverse strand)
aggaaagcgattgaagctgacaatttgggatactggtaagtaatgaaatcacagtattctcttctttctgtttatatatgtttcctgttgtctctgtaaaacttttttgtctctatattttgaccttatgagctgagtgatggagccaacaatgtcaaaggattcttaaatattgatctcactaatttgtaagttgctagcaatgtaacagtgggatatcaattataacacagaaaatttagaaaaactgttttctgttgagacatggagtggcttttctggcttcaataaatagaattttgtttttaacccatgtttctgttaacagtaatgatatcagccatttatgttccagtatgtgtaatttgattcataaaaccattatggttcttgcagctggacaggagaggttccgaacactgactagttct

SEQ ID NO: 59889 - DNA, 524 bp, Populus trichocarpa
  Intron number 1 from transcript POPTR_0016s10830.1 (locus POPTR_0016s10830) derived from phytozome v7.0 (chr-ID scaf fold_16; pos 9195816 to 9196339 reverse strand)
ttccagttctgttgaggatcttgcaccaactattggtattaattaaaaacttctctatcattattttgctttctctttactgttacatggtttcttagctagctaacagtgtgtaatgcctttggatctatcttcatgggttgaaacttgttcagtgattatgaaacatggtacccagttttgagtttctgctttttgttaattgctctcaattagcgatattaagttctctttatttcttatgatttattagatggtgactgttatttagtaaaacctgtctttgtcgactacaagtagctggggccttatttttatgttgactccttcaatgcttaaccaagtcaatgtgtgattagatgttaatcattacatagaaaagggagtctcgtgatttctgcctgtaacttcaattgagtgatcaactgaataattgagttctctatgagaatatgcattgagattctttgtctctgtttttttatgaaggtgtggattttaagatcaagcagctaacagtcgga

SEQ ID NO: 59890 - DNA, 1016 bp, Populus trichocarpa
  Intron number 1 from transcript POPTR_0002s10790.2 (locus POPTR_0002s10790) derived from phytozome v7.0 (chr-ID scaf fold_2; pos 7835903 to 7836918)
tcgcttcaattgtttgagagcttgagaaatatcaggtgaattttcgttgttttttttcgttaattaattttgctaagtgtcttttatgcctgtctgtgtgttgttgcaatgctaacttgtggtattctgattttttgtatgcagtgatgtgtgtgttagttaggggattaagtttgtgtgtctctggttgctctaagaaattaggtttaattttgtttggttgctaatggggaaatgctctttagtagccaccaccttttctattggttatttgatggtatcttaaataaggaggcatttggctggttacattttttggttgttggtactgcttgcttaccagattaggtccatatgtttctgcttgatttacaatttttgtttatctattcatttgattcagcagattgatcgacttcctgtttacagcaaatcttttgtgttgatgggttttctgtattttaagtttttaagctgtgaagaggttgttagtaagataactcaagacacgagggggttattattatttgttttcttgtgctttattcgccacctagtcctgccatctttctttttctgatttgtttgtttactcgggttatatacttttagctgcttaagaaatgttatgtcatcacttgtcatgagactttcttgatgggaaacttgataaactccctgattttttgtattatctccaatgggaaaaaagaaacaagaaggaattgatgagaacttgcaaatctagccacttaattttcaagccaatttttttgcaaaggaaactgaggataactttacctgtctctagtaaagatactggttttgttcagctgatataactagatattcttgttgttgcgatggtgtggatttcgcatacatgttgttcacagaccttttaactttgaatctcaattgttatggagtttggtgctctttgcctatgctttcattcacaaatttctcgtattgcatgcttgttttgtagtcattttggcacttggcctgttgca

SEQ ID NO: 59891 - DNA, 753 bp, Populus trichocarpa
  Intron number 5 from transcript POPTR_0008s04320.1 (locus POPTR_0008s04320) derived from phytozome v7.0 (chr-ID scaf fold_8; pos 2413409 to 2414161 reverse strand)
ataggtacttctctgaatcaaacattttgattgtatcattctacagttgttttgtgaatcttatgtgcgtagtctgtatattcagtttgatgaatttgtgcggtgttgctttttccgtggaaaaataaaaataaaaatcatgttcaacatgaccatcaattttggaactaagaattatttattcagaggcagggattccctaaacaaaaccacagcagatataaaatgatattccttgcttagtgaaatagcttatctgatgtcagttttcagataactgcttttttgcactcgataattaaatagtcattctgatctcaataaaaagagtatttactttttgacaggatcctatcagtttaagttcctcttcctttgtaacatatttcctcagatcaattgtagcaattgcatcatctttcaaggcttttaattgctgtgaaaaagattgccaagtacttataacataagctccagttatgatgtaacagttagcatgaattacaatcttttataggcttacctggttgcttatctcttcaagctattagtacaagacagaattgcgcaacaagatggtttaaaaaacagacgctgcttctgtttttaaattaatggattttggtgttattgcttgtttagcatatcttcttttcctgggacatactagtgtgctttcttgttggtatttttctacattaatccattctctttgcagtttgcggacaactttgtgtgttcgtttcaagagtg

SEQ ID NO: 59892 - DNA, 487 bp, Populus trichocarpa
  Intron number 2 from transcript POPTR_0008s22630.1 (locus POPTR_0008s22630) derived from phytozome v7.0 (chr-ID scaf fold_8; pos 17293708 to 17294194 reverse strand)
gccgcattttaaggtaacattgaagactatcagtggttaaatatattgggcgttccagtttcattacataatccatttggtagttaatttacaataactaatttataatttttttagaattgtatagagcaattgatgacacacatatgcgtgcttgtgtgtcacaggaaaatcaaatatcatttattggaagaaaatgagtatcgatgcagaacatcatggcaccatgtagttttgacatgcaatttacttttgtttgggttggatgggaaggaagcgcacatgacacaaaattttttcttgaggccattgataatccaaatatcaaaatttctaagccactataaggtattttggattgaactctatgacttgtacaaagcttgatttaattaatttttggttatgtggttaaaaataattttgtttttaaatttgttttgtgaatgcaggaaaatattatattgttgactcgagttatccaaat

SEQ ID NO: 59893 - DNA, 735 bp, Populus trichocarpa
  Intron number 1 from transcript POPTR_0002s24110.1 (locus POPTR_0002s24110) derived from phytozome v7.0 (chr-ID scaf fold_2; pos 21551403 to 21552137)
ctttggctggtaccatctctgtaaaggtactcccattcttcctttcttttttataataacaataaaaaataatatctgggttgtgcttcaaagttaattttctgaactgggttttctgaatttttctggaataatagcactgctgttgaattgttgcttgctatgttatttgatgaattttgagtttcattggtgtaatgtattatgggtttggagcgttttgtagatatccctttttgttggtcttgtaggtggattaggcggtagtgaaagttccaacctttttctctacctatagaccataatctgcaaagcaaaattatgcataatctttttgataattttagagttagcaatgttgtgtgtaaattggtttttggctaggacacggggaaaatggataatagactgtatcatatgcttggtttgttgattttctgtagatgcattaatcttctatatcatagtttttgacgagcaaagaaatttgatgcggaatccccatctgtacattatatttttggatgattgcatttgttagttgagcaaactttcaaacctaataatttcagttatgggaaaagaaaaggaacttgtttcctacaatgctttaatattttgaaatgtattgctagttcatgtaatttagatgaaattttcatcgtagtgaaccatgcactaaatcttcatttcattttgtgattggatgtttattggtgtattagcactgttgcg

SEQ ID NO: 59894 - DNA, 573 bp, Populus trichocarpa
  Intron number 1 from transcript POPTR_0700s00200.1 (locus POPTR_0700s00200) derived from phytozome v7.0 (chr-ID scaf fold_700; pos 586 to 1158)
ttctgggctgattttattgataaaaaggtatggatatatatacctttaatcttgctaaatctttggtcccccttcgatacatgtatctatgcttgcgtgaggacaaatatatattcctttgctactgcgatatatgttactgtaatatcaattatgtgctgtaaaaatgaattcttagaggttattttaaaaaaaaattattttatattggaaaacgttttcagagattatttcaaaatgtttttattttttatcagaaatatttggtttttttttttaaattgaagtatttaaagtaaaaatatttttatatctcatattagaaaaacacaaaataccacttaacttaaaacacttaaacttactggattttcttgttggtatttgccttgttgtttttgcatccctcctttcgaggaagaacctattgaatcctggtggataataattttatgtgggtaaatatctttaaggaaagtaaatatccttaaagacaatattgtttgtgcacgtcttaggttttgtgttctgctatattatttttgtgatgaagtgctgtgaatcttcagatac

SEQ ID NO: 59895 - DNA, 664 bp, Populus trichocarpa
  Intron number 1 from transcript POPTR_0002s16470.1 (locus POPTR_0002s16470) derived from phytozome v7.0 (chr-ID scaf fold_2; pos 12332524 to 12333187 reverse strand)
aggtatttatttgtgcattttgaaaaatcttagttattcaagctgtttagttaagtgttgattttggtgctaaagatgttatctttagattgtttttgttgcttgtgaattaaattgaagaaaattgttattttttcaattgatgtttaatgttagagcgactcaaaacttacgtgttttattgatgtaattgatttatgggcatatgagaaatgaagttcactttgatgctttatgaggtttatgcggaaagaatacattttgtttctgtaaatagttccaaattatttgtttatggggcctggtgtttacttatctttgttatggaaaaaataaaataaaataaaataaaaatcttgataaagcataaatgatgttatatttgataagctgggcgctttcttataatggcatttggaagatgcaattcgggtaggattgagaagcattctgttagaagttgttgagttgtgggatttgacgttctttgaattgtagctgctctctaatttaatgcattgagttgctttgtgcgcttttctgctttcaatttctggtgcacagtttatttgttctttcaacttggacttgctctttgttcactttttttcccaaatcaaattatgtaggggccaggaatattaagcaggtcttctattgcatt

SEQ ID NO: 59896 - DNA, 749 bp, Populus trichocarpa
  Intron number 3 from transcript POPTR_0016s14360.1 (locus POPTR_0016s14360) derived from phytozome v7.0 (chr-ID scaf fold_16; pos 13605369 to 13606117)
atactgttgataaaactttccgagctggaagtacggtaattcatctctctctatgttttttttttaaggagtttgactttacttgtctttggctcgtgtaattggtgtttgataaaatgtctatgaggaaagattagttaatccagcaatgctgtaatgggctggcataaaaaatgctgctttttttttcttctaattttgtttctgctcgaccattatgattaaatagatactagtggctcaaaataggcaaaatttgtgtgtttcttgcaatggttggtcggggaatttttggtacatttggtgttggacgcctccctcttgcgtgaaggtgggacttatggataattttcatggtgggttcccatgtttatgtgagaggcggggtggggggagtacaacttttggtgtaactaatattttgtctggtcgtaaaaatttaaggtggcaaacgggcatttggcagttaatgttaataaggggtaggattaggtggtgatggataagaaattcaagcatctggatgaaacaattttttaagttataggaatttcagtcccccttttgtttcagcttgaggttatggtttatttgctgatcttgaaatttgattagttggcggcttctttgatatgtagatttacagcaaaggcatgcaagtgtcaaccatagtaggtgatgcttgtgttagagggaacccttttcttatgttctcttctgttttttgtttctgcagattgaagaggcaa

SEQ ID NO: 59897 - DNA, 953 bp, Populus trichocarpa
  Intron number 1 from transcript POPTR_0008s09750.1 (locus POPTR_0008s09750) derived from phytozome v7.0 (chr-ID scaf fold_8; pos 6028655 to 6029607 reverse strand)
attaacaaactctctcctctactatttctcagctggtaagcaagaaaggaaactagctacttactgctctatgctactagctccttactcctttgttttttttcccttcccatctgtttcactgtttatatcaagaaaaactgttgctaaaagacagagaaacttggaatccggcaacaacccatttcttgtcttgctatatttgtatatacgctcaagctattgaaatgggtatttttatgtcttgctcttttttatttttattttttgaaaaaaaaagctgatttttttttattttgcttgtttctcttgggatttttaatcggaaagtcgttggagttttttcgttagttttaggctaagtatcaaagatggactagggatgtatgttgtttctgtttggtttgctgagaaaggtgaaagaaaaataaaatttgacagtgaagggtaaaaaaaaaaaaaaaaagaaacatcatctctgcttaactcagcctatattttgagaaagcttttggactctgttctcgcacaagaaatggaaaacataagcattaagtttcctcttttttttttttttttcaagttatgttgtcagtaacatcactgttattaacttattttgtctttaccatgggagatattaattctaggaaccagaattaccgagttttgcttttaattatgtttaatggaacgtgttcttatgctcaatgtttttgctattatcttttttttttgtttttggtacaaatagacacacaaatttaaattataagcttatctactagttccgtgagttttggaaaattaaagtgagcttgttttctttgttttttatttttttgtgcactcttttcgtaccagatgataaacaagcggtcctttttttaagttgtgaaattaatcattttgaatttgtttgtactgtctgcagttttacatttgttatcctg

SEQ ID NO: 59898 - DNA, 253 bp, Populus trichocarpa
  Intron number 1 from transcript POPTR_1924s00200.1 (locus POPTR_1924s00200) derived from phytozome v7.0 (chr-ID scaf fold_1924; pos 2296 to 2548 reverse strand)
caactctggactcacttcaatagcctccctaccaggtacgtgtgtgtgtgtgtgtgtgtgtgtgtttcagcacatgtacgtgtatctatacgatatatgtgtatgtatgtgacttggtgttgcctcttcgttacgtacggaaatgaaaattttgggtttttttttttaatttgaattattagttttttctttgtctttttatttttatcttttggaggacaattctgattttggaaccttttgtggtgtagat

SEQ ID NO: 59899 - DNA, 734 bp, Populus trichocarpa
  Intron number 2 from transcript POPTR_0016s04440.1 (locus POPTR_0016s04440) derived from phytozome v7.0 (chr-ID scaf fold_16; pos 2609495 to 2610228 reverse strand)
tttgtgagaaaatttcctatcaaaaccctaaagtacggtcattcattattataactaaaattgtcatgtatgtttctgttgttttgtatgattgaatgtgtctgctgaaattgctgaggaaaatttactcatttgcatatcatgatatttcttctaaaattaattttagcatcctggtttgcaccacagctggtcaggtatctccatttaatgtaacgtacatgtgctagctagcttcaattattctttcagcaacaatttaaatattcaatcatatatcagcattgtgattatcaatcaaaaacatgtgacactacaaaaggattcatgtgacgtggatgctagacaaagtgacaatgcaatcttcagagaacttttggtggactagagattatatgcaaaaaggtttccagggagaataaattgttgaaccctgactccctgagtcataaaatagtggaattgtgtgtggattattttaactctgctggttgctttaacaagcactgaaaacaaggaaaaacattgtaggcatgaatctgaaaaccttgcgatgtttgtatcccatttgattcttggtaaagcataatttaaacatgttttgttaacgcggtatatgttcttagttttctctccagtttgtttggcattgcactttcaatgaataattactttgttttaaaggtaatggaattattgttttcttttgtaaactggtttgaataggtggtggg

SEQ ID NO: 59900 - DNA, 976 bp, Populus trichocarpa
  Intron number 5 from transcript POPTR_0002s01630.1 (locus POPTR_0002s01630) derived from phytozome v7.0 (chr-ID scaf fold_2; pos 872790 to 873765)
gcagcaagtgatctgcaatcagctgtaagttattctcatcctcgcacattctagtaataattgttgaagaaatttcacgctttaaacactcagagctacaaagttgttcagccacggtccccaggatcctcaccaggattgctgtcctatatcttaaccctctttttttccttagaggtgaaaattggctggcttgcctctatttagaccaaaaaacccaactgaatcaatttgtttttttttaatgaactgaagctaatgactggtccaaactaaatagtttgtttgatttagtttggtttttcatttaaaaaaccaaattagtatggagtcttttagctgtcttttttttaacaggtttgtacgtaataaaccgggatttttaggcttttatttttaaaaaagttcagtttgatttggtttgatttttttgttctctcaaatttgaaactaaaccgaaccattttttaaaaaaacaaaaattataatcaattttttcgatttgatatcttaagtttttttcgagtaattttatatcagttttttcaccttatcttggccacccatgcttttcataataaaagtcacaattatatttgttgtgcccaaactttcaatgccttgtcagttgttgttttgctggaaaatgtagagtcacacaattgtattgctttcaaaaagatcttcaagaacaacctaaagcaaaccaataccgaacttttggacaataattttctgtcgaccataacttacaataggcatgcttttggtccaagaagatactaaaataccaatgaatttggtgagtgacctacaggaaacgcatacggtcaagctttaaaccttcatgttgagcttcttcccgtgtctggtagcctacagtgatgatgaacagctacttttttctagcatacttcttagatgcggaaaacctgatgtttgatagcattgaaattgcttctgcagggttttaatc

SEQ ID NO: 59901 - DNA, 775 bp, Populus trichocarpa
  Intron number 1 from transcript POPTR_0008s00650.1 (locus POPTR_0008s00650) derived from phytozome v7.0 (chr-ID scaf fold_8; pos 292664 to 293438 reverse strand)
gccctcctctgattactttgttaaaggtactttctttgtctggttgtttctttttttaaccgtctgattgctttttttgtatataagattttgtaatgtgggtttttttcccttcaaaatcactgatcgatcaattggttgtggataatttggttatgagtgtattgcaaaattgagtctttttttgtgttaaaatgactgtattgttgtttggtgttacttactggagatggttagtactgtagctttattttggatctgaaagaatgtgatttatttcgattattgatgttttttgggaaatggttgctttgaaaactgcctgctagtgcgttttattttggatgattggtctttccttgcaaaaatacttgctctgctaagttatagaggacatgcacaagaagaaagtctggtattttgagtgttttacttagaaatttgagatttttggagtgaggagcgatggtgttctatcttcaattgatgttatcaatttatactgtcttcaaaatgagcctctttgcttgcactttttttgcatatattgaggaagctatataaacaattgaaaacaaatgaattgtgttatctttgaatcatctgatgtagccaatttggttttatgttgttcgaggcatttctcacagtaaactgtaaaactgacgtgtttgattgctatcttacaagtttctgaagaacattaatttctgtttatgtgctatattgctgattacactcttgtttttcttcaattataggtgcacctgcacat

SEQ ID NO: 59902 - DNA, 645 bp, Populus trichocarpa
  Intron number 1 from transcript POPTR_0008s20840.1 (locus POPTR_0008s20840) derived from phytozome v7.0 (chr-ID scaf fold_8; pos 14847502 to 14848146)
gcaacccaagcactgcaacttgcccaggttctccttttttttaaaaaaatctttttaacattcttgttaatgtcagaagtttaagattacattttattagtagttcattcgtgtctgacaatgacaacgttgcccccgttttcgtatggaaattatcattcaaatgcatatatatatatagctagcaaatagcaacggatgagatttgtgatattccaaagataccctgatttgttgaaagatattgtcctgttctttggttgataagccttgtcgggtgctgataaggaagcctttacacgatgaagacaaatgaattttgctcctttccatgtctcgtttttacttggaaaatgtgtttgtgaaacttagaaggaagaaatttttgggaaaattctcgttgcagatgatatgaaaaccaagagtgttttgtttataagatatcagattttactaaagacttctaagtttcttgcatgataattctctgtttcacccaatcacatcagtttccttttctcacaggggcacacataatcccactgttgtatttacatttgagtcacacttgttatgctctttttatgttttttttttatgaagaatatgaaagcatttcttttctctttgatttatgtagatttg

SEQ ID NO: 59903 - DNA, 813 bp, Populus trichocarpa
  Intron number 4 from transcript POPTR_0016s12290.2 (locus POPTR_0016s12290) derived from phytozome v7.0 (chr-ID scaf fold_16; pos 11637161 to 11637973 reverse strand)
ttgcaggcaaattgcttattacactggtccgacaggtactcgaccccgctattatctctgataaatatttcatatttggtgctatgaagggagtggaaggctgtttttcttgagaaacttaatgcatggtagcataaaatattcgagtgatatgagagaagccaacatttcaacatcaaattatttaattagtcatatcaaacttaattaattaaaaaaaaatgatgggatcgaactgcttcgaagctttctcgtgataagaaaaaaaaataaaaattgatagttgcgtgtggtatatgattcagaccaacccaccaaaaagatttcctaactcttctattgtcccttaccattaaaaagcttcttgccatgtcatttactttcagtgatatgtcacttcaaggacgaggaattctttgtatcattatagtatttaattttttaaaaacttattttaattaaataaattaaattgttattagataaggtattattttttaataaattttctctagtaaaaatttttcagatttgaaatttatataaattcatattattttatgttttgatttttattatatataataaatcggtgagatttaaatttgtattcattaattgacatcttgatttattttatttttcaataataaatgttaattcgtgttcatgaaaaaaccttggtactggaattgggcttgtcatgtcacgtcagacatgtatggaagtttcataagattactgaagaaaaatgaaggaagcgtgaaatttaattccttctaatctttgtttttgcagtgggagggctcctaa

SEQ ID NO: 59904 - DNA, 680 bp, Populus trichocarpa
  Intron number 1 from transcript POPTR_0002s13900.1 (locus POPTR_0002s13900) derived from phytozome v7.0 (chr-ID scaf fold_2; pos 10309887 to 10310566 reverse strand)
tcaagcccagaaccgccgatatctcctcccaacaggtcccccactctctcccctcttcttttgcttctgaggtttgattatttttcgttccgaagcacaaattcgtgaaaaaagcgtacgggaattaaatatgtttattgtagcttaaatttctatctaccttatcgggaaatggtgtaaaatgtttctgaaattgtgggcaatatttaataaaagttgatagtgctgattcttttgagcaaacccatttagaatataaagattgcaatgtgcctaatacttattttatttttcggatcaaaccctaattttcgtagattatttttgagtaaagatataaacgaggtattgatactgtgaattggaagggaacgttgcacttgtttttatcgataccaatcttaatgagattaaaaccagcataaggattctgatgcatccagctgtcctagtgtgaattctattggaaaaaagtttcatcatttgttacctatcattgcattcaaggacatgcatcgttttttccccactgcttgtaactttattgactgggatcgatgggtgatgactgttttgtatttcttttgacacatatatgactgttctaggcgacttcattgttttctttttgtttttcttctgaagttcgtggaagcagtaattgggatacgagcaggtcc

SEQ ID NO: 59905 - DNA, 709 bp, Populus trichocarpa
  Intron number 2 from transcript POPTR_0016s03490.1 (locus POPTR_0016s03490) derived from phytozome v7.0 (chr-ID scaf fold_16; pos 1863134 to 1863842)
gttttggtgcattgttttgctggcgtttcgagaaggtatatgataaattgttgtcatttttcatgataatgatgatgattttctgtatttttttatttaaattaattaatattgcccttaagtttggattaagttaatattgaaatgcaatgctacttctcccgaatgattttctggaatagtatgaactgtgtttgggacacaccagaggagtccatttcatcaatggttgggtattattcacgaaacttgttcgagatggaaatggatattttgggatgaaaaacattactctgattcttgcatatagtatgaactgtattttggatccatcggtgaagtctgcttcatcaatggttggtattatctggaaaacttgttcggaatggaaatggatagtttgggggtaaataacattaccttatttttgcatgtctacttgcttggaatttgatgtgcaaatttgtgacttttttctcggttaattttaaacggtcatgaagtctgttttgatatttttcagttgattggtttatcatcctgaagtggatcaaaatagaaaagaagtgttttaggttatcttctgacccaattgatgagtgttgggaaattgctcagaagacctgccctgaattgtcaagccctaatggtttggtcccttctttcgtttttttttctttgcagtgcagctatcattacagcgtacttg

SEQ ID NO: 59906 - DNA, 797 bp, Populus trichocarpa
  Intron number 2 from transcript POPTR_0008s13820.1 (locus POPTR_0008s13820) derived from phytozome v7.0 (chr-ID scaf fold_8; pos 9107833 to 9108629 reverse strand)
acagtttcacttataatctgtgtcaggttagtgctttctcatcttagtttaatcacatggtatttgagaatctcgacttttcttctttgtttggtgttaatctttttttctaggttctgttttagagattttgtgatggggtgagatcttgaattctaccgcctgtttggttgctgagaaagtgcttaatgtaaatggaaagtaattgtgtgtgagtgtgatatggttcatcatttacagaaaccaaaactacacatgtgagtgttgcaacgcattccttgtttgtttaactggtatgactgcagcagtgaacttttctttaaatgatgcaagaaaaaggttcaagacattgcaactgatggaaataaactctttaatttgaacattttcttcaaatgacctaactattgtcaacaactgagaatgataccagtgattaaatcctgtacttcgaggacttagctagtgtcgccttaggataaaaagaaagatagtaatttctgtgatatgccaaagaaaggctataataagtttcaatcgaaattatagttgtgaaaaaaaattagaaactttgtaaagcctttacctgtgcaaaagttttggtgtatattcttttgcgtgatttatttttgtaaactgctcccccccccccccccctctatacacataagcatatacatacacatatacaaacatacccgtgtgtgtgcatgtatgtatctatacatatctccaatttgtagttttgacatataaatcaaaacctataactctgttaccttgtgtttctgaagtac

SEQ ID NO: 59907 - DNA, 790 bp, Populus trichocarpa
  Intron number 1 from transcript POPTR_0002s09100.1 (locus POPTR_0002s09100) derived from phytozome v7.0 (chr-ID scaf fold_2; pos 6449765 to 6450554 reverse strand)
cttgaaaacccttttcttggtccctctgcctccgcgtgagcacttttcttcctttcttggtctttctgtgtttcttgcttgaaaattgggctctgttagcttctgttattatgggcttctgatatttatcttttttcatattcttaattgctgctctaactaatgaaattggatccatctcaattcgtgatcacgcactgatgaattagcgctgtcaaatgttaatgcaaattctttttagtattttggaaatgctgctttgtagaatggttggttaattgtcattaaagcttttaccttgtatctttttcagcttctatgattgaataattctttggaaggtgattctaggaccatattttctgtgtatgagaatgtatcgacctgtttattacaggagaggatatgtagttaggtcttcttttttgtgtcaaaattgattatggttgtagttgatttctgtttttgtggggtttggtgcttatttgtttgctttggcatcccttttcttttctggttagtgtggctttggtttccacttgttaaacctaatttgcaatcatttgtcaaaggacataaacagcaccccttccagtggcgaatgcggttttttcgtaagagtacaagggaaaatgtccattgcagaatatgcacttaactatcattgccttcaagtgcatgccaaaacagacttgtgtgttttccaatttaagcttgtagctttctatcgttttccacttcagtaattgataaattgtttggaaggtgattctaggcccattttctctcc

SEQ ID NO: 59908 - DNA, 714 bp, Populus trichocarpa
  Intron number 2 from transcript POPTR_0016s03610.1 (locus POPTR_0016s03610) derived from phytozome v7.0 (chr-ID scaf fold_16; pos 1954646 to 1955359 reverse strand)
ctctagaagaagctggagttcgaggtgatttgctggtaattagaaaaagtgaacttatcctcccatttgattgttcaagggaactctgatttatgaatggttactgctatgtgcattggcattaatgtgctgatctttaggtcctagagctgatgagaaacatgtgcaatgcatcagaatgaattagatccacagatgatacatctctgtttgtacttgctcataaggcatatcttgtggttgttctagatgggtgcatagttctgaagtattataatttaaacaaagaacttgatttgtttgcatatattgttattgaactgtaatgtcagtatttcttattgataatgccttacttttttggtaacttcactaaatagtttttctaggtgggtgcatagtcaggaacttccatttgtaattgcttaaaagaaacttggtacgagtatgtgttttttctttcccttgtttttcattactattagaagcgactcttaaatgccttactggacatttggctttcattgctttagagagatatcagagaatggttctgccatgatcaatcttagcttagctcctttctgcatcttatggcaatcccgcttcttcttttcctgcggcatgctaaatgatctgccgttccctttgttaatatttaggtcactttgtatttcagcattttctgggacaatacgaattcaaaagcaaaac

SEQ ID NO: 59909 - DNA, 562 bp, Populus trichocarpa
  Intron number 1 from transcript POPTR_0016s03610.1 (locus POPTR_0016s03610) derived from phytozome v7.0 (chr-ID scaf fold_16; pos 1955393 to 1955954 reverse strand)
acgcaaacagtggacctggtcttctcttcccgaaggtatttatatcaagatgtagattaatgcatttgtctgacaagaaaataaaagacttcatgatgctccatttattcttatttcttatcttatctccatttgttatttgtttctagttcccttttgtttggattagcaaaaatatgcaaggtaaggaatgaaactttgacttcctttaattgccttgtcattcatgacatgaatcaaatttcaaggtcattcataatatggattaagttccagggccagataagtacagtcacacacatgcacagatagtttgttctttaccaaagaagattgaataggcaacggaagtcttctagctcttgaaaatatgtggtggtagtttgtaaatcatactgttataagcttgttttgattaattagcttgtaaagtagcaattatatgtagttgcaattttgtttgccatgatttagattcagttttttacagacatttcccttcaatgtcataaatgtaaaatgatgttggtatctttataattatagggtggctgggaaactg

SEQ ID NO: 59910 - DNA, 270 bp, Populus trichocarpa
  Intron number 1 from transcript POPTR_0008s17530.1 (locus POPTR_0008s17530) derived from phytozome v7.0 (chr-ID scaf fold_8; pos 11802215 to 11802484)
gtgttgcttctagtgatcttctctggacctccaaggtgtttttcttctgtctttccttcttaattgatgtttgttccgatactgtgatgggtttgattatcatttatttaattggggaattttgaggtgttgtagctaagtctttaattaatcattatttgttagtttgcttgctttgatcttttcgtcaatgatttatgctaataaccaaaagattaatgtgttgttaagttagagtggaaggttgagagaatttaaagttaaggtaag

SEQ ID NO: 59911 - DNA, 538 bp, Populus trichocarpa
  Intron number 1 from transcript POPTR_0008s13720.2 (locus POPTR_0008s13720) derived from phytozome v7.0 (chr-ID scaf fold_8; pos 9033413 to 9033950 reverse strand)
ttcattactacaagaacccatctgcaattgaccaggttcttgctcctttctctcgaaactttgatttctgtttttgctggttggattttaaaggttctaaatgtttgctggggaaaagacaaaaattgaaaaagggaagatgatttttgaatgttagtttttttgctgtcatgttcccaaacaacaaaaaggaaaattcacttcaatttagcaacaagtcatgcaaggcttagttaattgtgatttctgaagagatgttttatttttctttctgtttgtggctttgaagttgtttaggctgttttgttcttcaacgaattaaggtgaatccattggaaattaattttggaaatttaaatttccctgcgatttggcttgcaagatgtaaaaggaaaaatgcaagatgactttgtcaaatgtttgtgtaggaccaaaaatactttatccttctaatccttgttctctgattgtgcacgctgagaattaattttgacaaaatgcaggaaacctttgctgagtacactgccagaactgcatt

SEQ ID NO: 59912 - DNA, 610 bp, Populus trichocarpa
  Intron number 3 from transcript POPTR_0008s01650.1 (locus POPTR_0008s01650) derived from phytozome v7.0 (chr-ID scaf fold_8; pos 801351 to 801960 reverse strand)
cagtttttttggctggtcctgctaaacttcaggtctttcttttctttatcttgtaatcttttttcgggttcctttgtgttagtatcttgatttttgagtttaataaagaacccctttttgggtttcttgattttgtttattggaatcaagagatttttttgtcatggtgatgtgatgatgatttatgtttttctcttaataatcgacaaagacggtcttttaataattttttgctgttaatgaccttaaatttgatggaacattaaccaaatattttgtgaatggtcgtcgagggcaaagtatgtaactgtcttaattattgttcctcagtttgtgtgagtgaaaaactgtaagaaagtttggttttttgagtttcgtgtgatggaaatttgtaggcagtcacggaattttgaggcagggaaatgcagactatgataataaaagacaggcattgtacgaatattatcaaatcttgcaggaggatctcttacttgtaataagaggctggggagagactagagagagtgatgcagagagataatttatgaaaaactgccccctcatttatggtggctactgcaaattttgatgtaaatttgtttcttgcagg

SEQ ID NO: 59913 - DNA, 1063 bp, Populus trichocarpa
  Intron number 6 from transcript POPTR_0008s14830.1 (locus POPTR_0008s14830) derived from phytozome v7.0 (chr-ID scaf fold_8; pos 9855938 to 9857000 reverse strand)
caaaacatttggagcaagtatctgaggctctgtctgtaagtgctgcttcattgatgatttttttttagggtgggggctaggatgtggataatgtgaaaaagtagatcacattgtgcttccattaagttataaatgtgccaatccatgttgaagaataaaagtagtatgcaaccagccaattggtgtaggtgatgaacttatttgctgtcgatttttccactgactagtttcccactgtgtttgtgtgggcaatctgctattgtctatttctaagtttttttcctctccttttttcttctggattggttacttgaattcttgttgataataatcatgtaaaagctgatagacattttttttcttgtattgtgctatcagattaggctgcatttttagcagaattttgcattccattgaatttttttgtgtggatgcaatggattcatttaattaataagcttgtttctcgttggaggaaggctttcctggttttttgtttgttttatttaatgctaatgtaaaatcatgataagttagtttttagtagataaagttttatgaatattttttggaaaggatatttacacctcctagtaattagaaaagcttcaattagaattcatacttcctagcaattgagaaagcatggttgtcaaccctcctaatcatcagtcaagtcaccatgccttgctccacctaattgatagatttgtattttgtacatgtaagtagaacacttgtcaatactagacgttggtgcttccattttattatattattatgatatgattatgattatggatctcatatgatgtatggttggtacctgtcccttttttcttctttacagagtgtgacatgtgagactatagggtgaactcttctgaaaataattcaaaacatagcaatccttgattttattatgttggcatgtcaagttatgagttgattattcttttggctggctggctgacattgtcatgttttccatttatgctgttgtgcttatgtatatattcttttgctagactgccaagacgcatttgacacagagaatacaact

SEQ ID NO: 59914 - DNA, 610 bp, Populus trichocarpa
  Intron number 1 from transcript POPTR_0016s12750.1 (locus POPTR_0016s12750) derived from phytozome v7.0 (chr-ID scaf fold_16; pos 12126717 to 12127326)
taacgctggaagcgaaaaccgttgacccttacaaggtatgattgattgattttttagggatgtttgtggaaaattaatttccaaattgatacatgattcgtacattgttaaaattttgaattctatctgcgtttgttttttaatttatttggaccgaattttgctgcttatatttacaattttgttggcaatttcaaaattcttgttttaatttatatttgcaatttgcttaattcaaatttatcaaaaaaaataattacttaattgttcttgaagtggtttaggggattgtatgtttagttaatcaggatttaatcactggttaatcaaagataaggattttatgttttagttaattagtcagcagtggcttgcgattgttaagggagcaggatgtagggcagaggtggtaaattgaggacagaaggaatggaggcttgataaaatgagaggcctttaaatccttagaagggagaagaaaacttggtccatttcgcttgtttaagtaaaacatttgtgccagtgatgattttctttttttgaagtttttttatcgacggtgctttttgtaccaggttcttggagtggagaaaaacgcaagtcaacgaga

SEQ ID NO: 59915 - DNA, 701 bp, Populus trichocarpa
  Intron number 1 from transcript POPTR_0016s04700.1 (locus POPTR_0016s04700) derived from phytozome v7.0 (chr-ID scaf fold_16; pos 2803398 to 2804098)
ttggtgcgcttaatcttgactgaattccacatattttgctattgtttttgtgatcatctctcaactgggcacctcaaaatgctttggtattggctacatggatgattgtttacaccagacatatactcttatttcatgtttcatcaatgttttctttgcatcgtcaatctaggcctcgcatgctttgtacataaatgtcttccatgtaaattgttctgtataatggaattgagagtggtcctgataagttttgaggtttgtggcaaaacttgttacgtgaaaatgattccaggacttctaattgatactatgtttgtgcccgtggaataattctatattttggcttggaattgtttgtttttaaaagcagcaccggagtgatttttagggccatgatgtagtgataaaaagttgcatcgtcattttatatctttcagttatgaacaaggtacatttcaatttcttttggtaattttgattttcttggaagaactagttatagttattgggaatttcattggatactgtaaaaagttttcatccttttagtttttctcccgtgagttagaaattacctttgggagctacacgaaccaggtttatgtttcgatatatggccttaccatgtttctgctttaattatatattttcttttcaatattgcagaattgtttttatatttggtgatctgactttacaaa

SEQ ID NO: 59916 - DNA, 304 bp, Populus trichocarpa
  Intron number 1 from transcript POPTR_0008s19450.1 (locus POPTR_0008s19450) derived from phytozome v7.0 (chr-ID scaf fold_8; pos 13400799 to 13401102)
gcaacatttatctggatccggtattatcattagacatctttccttctcttctccgaatttctttgattcgactttcctagattgattgattgttcaattcaattttgatttcttttcgtcaccgaatcgcgctacttttcttttcttttggaaacggcgtttcgttcgtttcgttccttttagtgaggaattataattacaatttgaattattgatgtttgcttgcttgcatgtttctctgaattgaattgaatttaattttatttcagctctctttgaagttcgtcgataccgagcagttcca

SEQ ID NO: 59917 - DNA, 857 bp, Populus trichocarpa
  Intron number 2 from transcript POPTR_0008s19450.1 (locus POPTR_0008s19450) derived from phytozome v7.0 (chr-ID scaf fold_8; pos 13401081 to 13401937)
tcgtcgataccgagcagttccagaggcaagcgcaagtctgatttatttatttattcatgtcaaaatataattaaattgaatcgaatcaaaaccattcaccatccgagctcacaagttttactatatgtgtgtatgcagacttcgagatctaaagcaactcggtgagtgttatttatattcctctgtgcctacttgacctgattttattagcatatcttttcctgtgactctgatgtttctactttttacaccgcggctaagaatttaagcctgtatatgaaaatttttattttctcatgcaattaattaattcaatagttttgaagggggaaaaaaaaaactagctgcctgcctgcaaagtagcttttaagtttcatgctgaatatccttgttggaatcagatatgttttatttatctagaaatactagtttgtgtgagactatttgactactcttctatcacatatagtcttcaacgatgttaaattcaatttatcaggaaaaaacgatagaatttttgttctgaacaatttcaagttcatccctgagtgaagaacatggagtaacttgattgtttgctttggtcactattattctttttaatggaatcttggttgtttttagcactctgatttccataacggtcaaatgtgatgtcagaatccatagttcaaagaaattggctgatcaattacatcattggaagaattagtcactaaactggacctagtaagctataacttgttcaccagcaagagtgttgcaacaagccatttcagtgttctgtatagaaacaaccatctctaacttccatttctgagagatttcattctttttactaaacaagttttactctt

SEQ ID NO: 59918 - DNA, 657 bp, Populus trichocarpa
  Intron number 2 from transcript POPTR_1340s00200.1 (locus POPTR_1340s00200) derived from phytozome v7.0 (chr-ID scaf fold_1340; pos 3616 to 4272 reverse strand)
gtattttgcttgccggattaagaaggtgtgctctttgacttttgcttcgctttccttttcaacaattttctaacctgttttgagttcggggtcttcatttttttcctcaataatatgccatctgttcataatgattgtgacgggctggtgctgttcttcgttgatcttattggactcgacgcttccatgttctccagatcatgctctatcgtgttcgtaaagtccacatcacattataatcaaccgttgagatttttactcattaatagcgggtagttattcaacaatttagatttaaagaacttgatatgtcgtattttcaaagccaagaacatgaaactgactttataacagcagtcccactctaaattttctcaagaaaacctaagaaagttcctggccacagccgggcatcacctctggagaataaagctgtttttctaatgctttccaataattgattgtagctgtaaactcttggtctttgggcgagatggtcaaagttaaaacacagttattagtttttacttgtgtgtttctccatacttttgcctgtgtttctaatgcttgtcttgatttaagtaaagtggtttgattttgatacagaaccatggagcttgtaaatttttccagtgggcagattctgaagggaatatc

SEQ ID NO: 59919 - DNA, 954 bp, Populus trichocarpa
  Intron number 1 from transcript POPTR_0016s04300.1 (locus POPTR_0016s04300) derived from phytozome v7.0 (chr-ID scaf fold_16; pos 2488285 to 2489238 reverse strand)
actcgccatctccttggcgctcgagtccgaagttggtttgttcttcatctctctccccatctctcgttctggttaagctgttgaattcttcattttcactgccagttttagtgcttacgttgctttcagataattaatattctactatttagcaaagattaaaatgttgtagaaaacccaaatcacattttgggttttgaaagattaatttcttggtatccttctgtttgttttttttttaagggggaaaaaattcaatcttgaggttcaaatatgttttgaaggtttttgtctttgatgaaatcccattttcagatggacctgcaggtagttaaacttgatcagtaggtaaactttgcatagctacaagccgaccagtgtccctttttacagttgtaaggtcacctacttgctgacaaaattatatggctttctaatggagtagatgtagtgttcttgatctctgcgtttttttttttattttcatacatgcggtgcagaaccaggagatcatttaaaatcttgtccaaaaactttccaattttgcattgtttagtgcaaaattattgatttgtttatacgctttttcacatgtttgaatatttatttcaccattttcttttattctttgctttgcaagttgctctaagttaattcaattcacgatttacttttctgaaagagaatcacttttaattttgccatgttctttactttgaaacctggattacctagccaaatctgtgctttatgtcttaggagtacagaaaaggtgagaatttagaacctctccatcaatttcattttttggaggcttgttttgaagactttttggtcaattagtagagtgattcattccatatcatgaacgattatcttcatggaatatattcatttcttaatgagtccaatcaagctggccccatctaattatttcctttcatcaaacagagg

SEQ ID NO: 59920 - DNA, 945 bp, Populus trichocarpa
  Intron number 1 from transcript POPTR_0016s00530.1 (locus POPTR_0016s00530) derived from phytozome v7.0 (chr-ID scaf fold_16; pos 176050 to 176994 reverse strand)
gttgggcccttgttggattaaaaaggctaggcgcggtaaggcctacatgccatttacattttaaaagtgatcgattctatgcgtttaacacttttgcatgctaaagctatacagttacgtgggttgacatgtctttcaagaatcatgatcccttcttcttcttccaccatttcagtttcttctccttttcttccccatctttctgataattttggccatatctgtgaagccactacatggtgatgaattttttcttcaaaattaaatgctgcctcatgtgttgatgaagttgttagattactgcccttttgccttggcaatcattgtgagtatgtcctaaaagctctctcaatttcttcccttaattggtgactagaatgtattaattcacttcaatatttcttgagagctcttgtttttctttcctttttcaactagatttctcctttttaattttgacatcttttccaacattttctcaggctttgatttttccaatttaattccaggcagcaccaagtaattcgtttttgtttttatttttctggtgaaaaatgatgtataaagagactttttattttattttattttaggacaaatttcctggccttcttctgtatacacgcccttcctttaaatacatttcatttagaatctgttctggaaaaaaaggaattagaatgaatgaattaccatttctgctggtactaatggaaaaaaaaatgaatatatcagattgcattgcttaatattgtctgatacacaaaaattcattacaattttttctttttccatggacaaattcaatgtctaattacagagtagttttctcaaggtattccttttcatttatggtacctcgctcacctctaaaattttgttgatacgcctgcctgtttgattaaacacatcctggatttatttcaggtgagatctcaaaagggc

SEQ ID NO: 59921 - DNA, 795 bp, Populus trichocarpa
  Intron number 1 from transcript POPTR_0016s10250.1 (locus POPTR_0016s10250) derived from phytozome v7.0 (chr-ID scaf fold_16; pos 8449286 to 8450080)
cggctcctctggctcgccttactatcctctttcaggttgttaacttttttcttatgtcaattttgttgtttctcttcggattttctactctgggtttcgaaagtattgtttgaatttgggatatttgaagttgtgggttttgggatttaataggaagtggctagttttttgctgttcagaatttaccaaggcgtgtttattttctgttgaaaaactttgttaaatcttctttccagttggagtggtgttgaatttgaattagatttctcctaatgcacctgaacttacattccccccccccccctttttaaattagaacatagagagcttttggtgaaagtaaatttgacgcatccaatggaattttgtagtcaaaagttaatatttatggaaagtggttgttgagtgtgaatacacattgcatagttattagagctgggttcatttgttagaaaggactccaaggatttgcaagatggttttgttaggtagttttccatgaagtattatgtattttgtagcaaaaggatccaatttacggcaatgggagcgaaaaccatttaatttcttgaagtttcccagttatgttcataatcttgctgtatcaaccttgaaactatttttgatatttcaagtcatttcttttccaagctgcctatgcgtgaagagtactaatatttctctgtgttttgctgatgaaaataatttactggattgattgctcgtatgtgctgtccatatatgcaccaaatatttgtctgactgcttactttgtcattcttctaggttcaaggt

SEQ ID NO: 59922 - DNA, 1009 bp, Populus trichocarpa
  Intron number 2 from transcript POPTR_0016s03500.2 (locus POPTR_0016s03500) derived from phytozome v7.0 (chr-ID scaf fold_16; pos 1872640 to 1873648 reverse strand)
aaggtggccctaacaagcttggactatcgtatcaggtacattctattggctttactgtttttcttacgtgggttttttttctttttttacattagtggtagattgattgaaatcagagtcagaatttttattttgtttcacaaaaatattaatagttttcctttttaattcaaaatatttagtttagttgttaattatccttgttttaatgatttctttctaaaaagttataattttatgacttagaaggtaaacttagaactcaactggttgctgatgggcatagaagagtgagggaaggagagtttacagtagaattatagataaaatgggatgattgagcatgtagttggttagggaatcttgtggggttggatggttttgtggaactttgttgatttgggagtcgtggtattggacattataggatgtacaagctggatttttttgaaaatgacatagttatcagatggaaatttctgaggagtcagctcagtagcttgattttgtaacatcctttgttaggattgtgtgtactgaagttgaatatcgacatgagtatgggtttactggggcttctgtggcagatattttattttttatttctggggggaggtggggtctgtctagctatatcccatggaagtagacttgggagattgaggcatctgtttccagcaatgcagggtaacatcatgattttagatgatatgaatggatctctatattatagtgtgaaatatccatctttatatagtttagccttatcaaattataattcgatgaaggtatgtgttagccatggttgaagatgtaagatgagttaaaggaggaaaaggatgttaaccttgtcttcgttatgtagatgactgttagccatggtcaaattataatattatgatgtatcttgtgtagtggatccttgaatttaaaaatggagcacaccttacaaattttgtttttctttatggcaggatattttcaggaatccccgtctctggaagttaat

SEQ ID NO: 59923 - DNA, 891 bp, Populus trichocarpa
  Intron number 4 from transcript POPTR_0008s00600.1 (locus POPTR_0008s00600) derived from phytozome v7.0 (chr-ID scaf fold_8; pos 261591 to 262481)
atttaccgggccaggctcagcagaagtttcggccggtaacctagtattagcttcttgtcatcattagtaatttggcccactatgtttctattgtttttcttcttttgggtcttcctccttacaacctacgtccatgcatttctgtgtctttcatgctttttgtcttgaacttttatttttggcgttttgtttgcattttacctactaagcatggggtaacttaacaagaatgtatatttgatcagaggagaaggttaagcgacaaacacccccctgcccactctgaatacacagtgcattatttcagggcacaaagcctcttactctaccaatatcttaagtttggctttgtgtgtctcactctgaattcatgcgtattacattcttaaatctaattcttttattgtgtgctcatgggcatcacttgtgcagttctgtctcgtgatcaggaattctaatatgctgctagaggaatgtaggcccatgaaatttcatctttaagctttctcctctattttcacataacttctctgtgtatgatcaagaggttttatcaaagtttgggaggataatttattgtcagagagcatgctgttagacctcaatttcatttaacaaaaaagaacttgagtctaccttcatatctgtcttgcttaaatatttatatattactaccctttctttctcttttaaactgctttatctcttttaagctgcatgcatattacttgtgctcataaattcataatggatgtttgcttgtatggtgcagatttttgtaccatgtttcttttctctctatttagtttgagtttttttttctttttatgattatttccttttttgatccgtcttaagcttgtactgttttgtttgcctcagattccgaac

SEQ ID NO: 59924 - DNA, 776 bp, Populus trichocarpa
  Intron number 1 from transcript POPTR_0016s02740.1 (locus POPTR_0016s02740) derived from phytozome v7.0 (chr-ID scaf fold_16; pos 1359550 to 1360325)
aagcagtttctagggtttttcatttccatcatgcgatggtgttttagaaggaaatggattcatgacattgaacccaaccagcaatcaagcagaagaaacacacgagcctcttgaatgagttgcgctcttcatgcacgtctgcgaagctaaggcttttatttcgataggtcttgtagttcttatgaatgggtgagattggaagggggggaccaaaataacaaaatgcggcaaatatgagtgatgtacaataagtttcgaaaacatttactttggtcctttaatttaaacaatcatgtaaattatacaatttcgatccctgtaaattatccaattttattttgtacagaagtttatttttgttattttttgaactctggttgagagagcgataaaagagaaatttattgatagtatcaatttaggctattaaaatgaggtatttttgtgtcaaattattctatctgataagaggagttaatattaggggaacgtttaggaacgcggctgcggctgcgttcctaaaaaattaaaaaaaaaattttttactaaaatttaatatggtttgtacgttttggatcgttttgatgtgctgatgtcaaaaatgatttttaaaaaataaaaaaaaatcattggcatgcattttggcacgaaaagttatttgaaaagcacccgcaaccacactgccaaacacgctcctaggtgttaatgttgcccacatcctacttccctatctcttgacaggacgtccaagaacaatctgctatatctgcacctgc

SEQ ID NO: 59925 - DNA, 892 bp, Populus trichocarpa
  Intron number 1 from transcript POPTR_0016s00660.1 (locus POPTR_0016s00660) derived from phytozome v7.0 (chr-ID scaf fold_16; pos 225459 to 226350)
aatcttctttcagctttcttgatctttcaagccaggtactttcttccactgctcatctctcattttctttaatgggtttttcatttatttttttcgctcttttcttcatctgggtttccgctgttggcttggatctattgtggggtttggctaaaagtagtgattttgtgatcaagatctgaactttgcttaaataacatttgatcatgctgttttactgggcttgtttgagaatgcattatgttagttgctgacttgattggtttattctttactctctttttttgcggtccttgaatcctttatgcttgtttttcatttttgtctttttgatggtcctgttttttgtgctcctttttggtgagaaatgattccatgttgagttggttttgctagctttgaagttttgttcttgttcaattttttcttcagtgtcatctaatcaaactatgggagctgcttttttattgaatgctcttcttcttccagggaaataattaattttgttgtgattattttttacgtttgtgtctgtgtttttctcttgaaagtttgtgttttgacctaatttaggtaaacttaagtgccctaatagataatttgtaggtggtcttttctgatctgacttgtgatgcagtgtttaggccaaatgaaattagagttagtaatgctatcatttctatattggtattcttccatcttacttatatttcgttccataatgtcttttgggtgtcttctatatggttatgcacctaaatcagtgtcttttgggtgtcatgaacctctataaatatgcatgtatattttttcttctgtataagagttggtttttaggttttatgttgcacttgatatgtaacttattctaatgcttttgacagaatagttg

SEQ ID NO: 59926 - DNA, 828 bp, Populus trichocarpa
  Intron number 1 from transcript POPTR_0008s01990.1 (locus POPTR_0008s01990) derived from phytozome v7.0 (chr-ID scaf fold_8; pos 948526 to 949353)
cggcccgtcactccatccaagtaaatacaatgactgtccacttccgacatcatagatgagctatccaaggtgttttatggctattccaacactccatcctattataactttaaaaactgtaaaattaattaagacacacaaactatttcaaacattcgtataaatttacaatgttatatcgctctcccccctccgaagaaaacgtttctcttagaaccatgggcttgccaccggcccatctccatttgttgggccctttttttgattaaggtttgggctaagccccgtttgttttttgggcagcctgctggttgcactccgaaaggcattttttatgctttgccaaaccaagcctaccaagctgtgctctattcattattctcatcacagtaattaaccacgtcactggtttattggtttgtttcaatcaaaactatatattttttaaaactaattcaggtaaaattctttgaaaagtttttaagaaatgaaagtgttaaatatttttttaaaatatttttagagaaaattcatggaaaatccaaattatcttaaataaaaaataacaattaatttttagttttaaaaaatcacagggtaaaaaagaaaatcaaattatttcataccgggatttttcaaaatataattattaaaattcagaaaattaaaatattaattccggttgataatttgtttttttaaatcgaatcaataattttctttatcagaattactcggacaaccaccctagcttatgcttttcatcagcaaatagccaaatatatacttgcagaattcacaattttatccctctcgatttcttcttct

SEQ ID NO: 59927 - DNA, 474 bp, Populus trichocarpa
  Intron number 2 from transcript POPTR_0016s11730.1 (locus POPTR_0016s11730) derived from phytozome v7.0 (chr-ID scaf fold_16; pos 10908049 to 10908522)
gttactattaaagttcttgagagattgaaagcaaggtagattcctaatagtgtctttttatctacctttttttctcaatttttttttgaattactaatatgcttgtaaaatagacaagaaccaaatttcaagtataaattaacatggggtttatgagcattgtttagtttcattaacaaagaatttttggtgttttatatgctatagaatttcaaataagcagtttgaatgaccatgatgtttttgtttatgccaacaccaacatcaatgcatacacattgtctttagagtttttttggtagttaggggagaggtttttggtttgtttgattagagttttgatgtgagagggaagttgttggtggaggtgggcactagccctctctttgggtcatctgtgaggttgctcctaatgttagtgctgcgtgaacaaatatcatatcatattatatcttctctgttttctttttaggt

SEQ ID NO: 59928 - DNA, 779 bp, Populus trichocarpa
  Intron number 3 from transcript POPTR_0016s11730.1 (locus POPTR_0016s11730) derived from phytozome v7.0 (chr-ID scaf fold_16; pos 10908695 to 10909473)
aaatcttcggccagggtcaatttttgtaaataaaggttggtaggatgacttaaatactctttgttgcattgctggttgaccttagctgcttccagttctttattgattttcttgccatcgaaatctttatttagtagctcaatgtcatctagcagaaaggaagaaactgaaataccagaagatggtgataaatttaagaagctttctgctttttcattttctcggaaagcagacactgaataatttactgaagtttgtgtgtcactttttttttcagaggcctattgttctttgactctttcatctcagttttttttaccaaccttccactttggattgtctcaaaatgttgttcacttccatatagtatttatggagttgccatggtttcttaaatagagtagttagaagaagcaaacatgagattgtggaaaggcaattatggaatgcacatattttccaaagagtgagaacataattagtggttactcccttgaaaagttggatcaccaaagagtagccattagacgtaggatggagggagtatatttttatttacttatggaagagacggcatgttgtccttttactatagcttgaacatcccaccagattaacctctgcgtcaggttaagtaagagttgtagggttaaaagttgactgaccacccatgtcacatttcctttcctgttctttgttactgtttagatatcttcgtgctggattccaagaatataatttatgatattttaatgattgttttgcaggagagctgttag

SEQ ID NO: 59929 - DNA, 874 bp, Populus trichocarpa
  Intron number 1 from transcript POPTR_0002s24690.1 (locus POPTR_0002s24690) derived from phytozome v7.0 (chr-ID scaf fold_2; pos 21978029 to 21978902)
acgtcatcgaatcgtcgcccagagcgtttgctcaggtactttctcttcaattgaacttgagagaaagtttgttactttcttactatttcttcttattattattatttaatttcaggctaagaacaattcccggagggctttggtcgttgatgtagagtcaggtggtgggtgtattctgttaatggaattgttgctttgtgtttttttaaagtgcacatgtttttcttattgtctgtttgtgtgtactgtagggcgattcactcacaataagcgtagaagggttccgccgaatcaaacgatcatcaattgtgatctttatatcaacttggaaggcggaagtagcagcagtagctctaaggtaatgtgccctcatagctgctcctatagtagttcctgttcctattgataaatgacttgagatgttgcaagtaatgcaaccgttttcaataatcttaaggatgtcttaatggctttttatgtctgcgcgatcggagcttgatacatacgcactgcttttaggtgcttaacagttgaccccctttgcattcatgctaggagattattctgattgttattctaggtattctggaccttggatgccttttaatatttgtaattttgttttgattttagagttacagtggagatataaaagaataatattggaataattgatcaagttgtgattttgttttgattttagagttacagtggagatataaaagaataatattggaataatgatcgagggtctctctgttttttttttttgcgtgtgctgatgtgcctgcataggcatgtaatgcatacatgtttcgattaatgaattttgaaactctgatgcttactgttttacttttttgccagagggaga

SEQ ID NO: 59930 - DNA, 599 bp, Populus trichocarpa
  Intron number 1 from transcript POPTR_0002s04500.1 (locus POPTR_0002s04500) derived from phytozome v7.0 (chr-ID scaf fold_2; pos 2814017 to 2814615 reverse strand)
tctgcatacgtgtcagtctctccttctcaattcatttcgcttccaaatccttgattatgttttgccttgttcatgatctaatctgggtcatcggtggttttttttttctggatttgttggcctgcttcttcttcccttttgtcttgctttgactcggtacttgtgtaattgtgtttaaagaatgtggggatttagcactttcttctgcaccaggatctttgatgatatcgatctctttctagctagattctttgcttgatgaaattactgtttgcatgttgggccaacagtaacatattttagccaattgggaagtcttttagctctcttttagtacaatttttatttatcttagaccatatatctagctagctgctacctttcgagttaattttttttttgtgtagaactgtattccaggtttcatcttccaatagtattgtgtgctactttgacgatgaactttgtattattcatgcggattaaatgttgctgaatgctgatatttttaagtttatcaagtcagtaaatgaaaaaatatttgattttttgtatttcatccagtttgcaggaagtgtatatatcggaggatatcaaat

SEQ ID NO: 59931 - DNA, 826 bp, Populus trichocarpa
  Intron number 1 from transcript POPTR_0016s04960.2 (locus POPTR_0016s04960) derived from phytozome v7.0 (chr-ID scaf fold_16; pos 2994394 to 2995219)
ttctctaaggtatattgttgataatccttttctttctttttagttttgagcatttttgttccatgttggacgttaccttttgctctggtttttcaaggttgtaatgttgctgttttggttttgttttctttgtttgtttgtttgtttggtgcttttattttccttgaaaatgagtaaaagtgaaggaaaataaaatgaaaaatctcaactatatgcgacctttctgataaaccaaacaaagagttgttgaatgtgcttttttatgagttgatgagaaggaaatggaaaatctgtgatagtatacggtttattctcggacattcctacattttctgagcaaccaaacgggaaaataaagtctatggtacatttcgagcattttgtttcgtttttcttttttggtgtaaaagtcttgatttaataatttatggttttggttttttatgacttccgatttttggtttgtctgtgttttttctttacagcgttgaagcgtttcagatctgaagatttgaaggtttgtttgcacgtaacagtcatttgaaggatctgatgaaatattagagataattctgtgtagttttgttttatgttaatgtcgttttgagttcatggaggtttgtttaattttttatttttaaatattccctttcatatttgttttgtcaaggtttggttctttcaatatttggattttgttagtttcctattatcaagtctcctttactatttaaattactgaagtttggtattattaacggctaattgaatcttttgttcctatatttcagggtttttgaattgaaagactctgaattcaacgctt

SEQ ID NO: 59932 - DNA, 967 bp, Populus trichocarpa
  Intron number 3 from transcript POPTR_0008s14090.1 (locus POPTR_0008s14090) derived from phytozome v7.0 (chr-ID scaf fold_8; pos 9307526 to 9308492)
gagaggattgtgtggtccgcatttgggattctgaggtaactcgctagttatttcttgcattatttttattgtgatgtaggacaacttggaggcaggataaactccctgaattaatctacaagctacaaacgattgtctctttgctgataattctaagaccataaggtttagaattatttgtggatcttggtttttgagaactcaaatttaaattcaactctacacggtagttcaagtttcgtgcagtaggctttgttggcatattgctctgatcattattgcattagagaactttaaaagagagctgaaaagcttccaatgtttctgtcaaattgatctcagagagtgagagatacttcttgtaatctgacatctatctagactcaatgaccctaaatagagtgttaattttggcacagtattctgtatggtaatttgctgttttagacacaactccccaaagctttttaaggtggttaggaatacagctatttgggagagcttgtgaggtcaatgatgggaattttccatgtgacatggactggatcaggttataccatttcagatttatacaggatggcttaagtgtctgtagattggggcgataaataatcttttggaaagatagaatcttggttgaattggcatttccatgtaaagcagttgctgaatctttccttttaatgtgtgtcaacatgcgtttgtttttgttttcacatacaagtgagcagagcccttcttctgcatgcttttttgcgctttgtttatctattgagctgttattgttttgattgaaagtataagaaaaaaaaagatacttgaagttttaaattcatttgatttttgccatctggtcttacattttgctgcattctttttattggttggtttcatgactgagtttattctgtactctcttatcaaattcgcagactggaaaattgttgaaagagtcggaaccggaagt

SEQ ID NO: 59933 - DNA, 635 bp, Populus trichocarpa
  Intron number 2 from transcript POPTR_0008s14160.1 (locus POPTR_0008s14160) derived from phytozome v7.0 (chr-ID scaf fold_8; pos 9348925 to 9349559)
gggtataactttgttttcacggtaattattattattatttaatctctttattttgcttgaggctgtgattttcttgcttgtgcaaattcatcttctctgagaattgagatggatcgttgttttactttactgctgttgaagcaaattagttctgtgctgaaataggtgtacagtcatcgtgtagttaattggcttttgaaaaaggaaatgttcgtgcactgcttacttggagagtttactgaaactagttttaaggttttagaggttatttgggctgtccgaggtgtcttggcaacctttttttcaatagtaaaagaaaggaataagatggatggtgtgatgctgcaaacattttctatgttacattgtgaaatgcaacacttttttttattcttcaatcacgaaaggttggtttttgacattttgtttaattattttgctcaaatggttgaactgtacttttgtgttttttcaaaatagaatggcatttcctgtaataatgctgctattttttttctttaatctaggtatgcagatactcatttctgaatgcatattcatgtctcatcctagtctggtcatcctttcctaattattctactgcacattcaatgtgtttgttggtttcctccagg

SEQ ID NO: 59934 - DNA, 838 bp, Populus trichocarpa
  Intron number 3 from transcript POPTR_0008s07410.1 (locus POPTR_0008s07410) derived from phytozome v7.0 (chr-ID scaf fold_8; pos 4544574 to 4545411)
gatttgaagtgagtgtttctctttgagcttttaattgctttctagttttgttgctattaacttgtgaatttatagtattagatggattcttatattcaaactatgtcatttttctgttttaaattacttcatgttgttctgatgatatgatcatgatttttaacgcctcctaattgtattctagataaatgcggattgattttatgattcagggtaacagagatacattttaagtttttatttggttgcccttgttttgagaaagcttgaataatagttaacaatcctccctcattttgcgagaatttgagatttaggaaacataataaccaaactagacatcaaatgtgctctctctctctctctctctctctctctcgatggcgttagaaatgtatgcagttaatgaatcaatcaacttgaaagtcaattacttgcctctataaagctgttgaaatttgacaccggatattcggattaggactttcaacttgaaaaagcgactagatgcatgattatggattgcatataagcttgttaaggtctgaatggactttgtcctgatattaactaatgctttcccagaatcaccaggctaacagctaatatcatccctgctgactatttgccctggcaggcacataagggtttcagatttgattttcacattaactttccttgatggtttgattatttatcatgctgatgactttggttttctcaagaaggcttgattcaacatctcattttgatctatatcattttgcatacttctgacatgaatcttccttggttcttgttttcaaatcatcaaaggcattggtactagaggtctgtg

SEQ ID NO: 59935 - DNA, 612 bp, Populus trichocarpa
  Intron number 1 from transcript POPTR_0002s05610.1 (locus POPTR_0002s05610) derived from phytozome v7.0 (chr-ID scaf fold_2; pos 3678631 to 3679242)
cttaattttctcttcctcattgctcaaattcgcaggtcagttcctgtcatccttgtttttttgtgaaggaaagagtggatatcggcgtggaatgtccttgcttggaacttttgagtaggctttaggaccccacaacaatgatgtcgattgatgatttctttgatccttttttcgttggctataaatacaaaaaatccgaagggtgtgtttttgtcacttatttgaatgaatttggatctaaatattcacattttcatttcattttttttaatgttttttgtttgtttatgtgaatatgacttaaagattgaggttctgatgacgggaaggaaaatgtggtgcgagaatgataggaattgtctaaagtttgaatctttggatttgatggtgtggggtcccaaggaaagaaacaatcgcttccatttaaagatcctaaatttcttctttttttggttcactgttgcttcctttttttctctgttttggcatttcttcactgtttgttttgtaatctattattgttgttttcggtttaaagtgaatgaatgaggtgcattttgtattttgtttgcagcaggcattgattctttaggaaagttttttgggtattga

SEQ ID NO: 59936 - DNA, 883 bp, Populus trichocarpa
  Intron number 1 from transcript POPTR_0008s02360.2 (locus POPTR_0008s02360) derived from phytozome v7.0 (chr-ID scaf fold_8; pos 1131733 to 1132615)
cattagctttcaccagaaacctcatcttcccacaggtctgcacattcttttttccctgctttcccccctggcttctttgatgttttcctttcgatggtgctcaatttctcttggttgcttctttaaatcatgtatgtcttgcaagaacttggactgcctcttttgctttcccgatgaagatttctgggactgctattctggttgactgtgtgtggaggtgcccttggatttgttttctttgttgttttctagagttgtgtctgggttcaatgagaattgttttggttgattgtctaggtagctttcacactaggtgtttgatcgaatttttgagagaaatgggcctttgtgttttcaggcgtgcactgctcacacgctttgctagcctttttgacatccatagttaaaatgctcacattgctttttgaggactagcacataaggcgcatccaataacctgataattttgatgagtatgtgcagcaaattgaggacatggaggaacaagttactgaatttgaagctgttatttcagttcttgacaggtatgtttctcaatgaatacatgccaaagacttggtcttgccgtctggaagtgaacgaaaagaaatacccttagcacttggagatggtcaatgaatatatttggctcttcgaaatgattttttactattaaaatgcacagaagaaaaaaaaaccgtattcacactacggaaaagctatttttatcgatttggctcttcaaaatagcatcttccctggagatgttctaatactatttttttttgttgagatgctaaaatttgatgcatgaaaattgatttaaaaagtacaatcgaactgcaaaatgagaaaaaaattgcttatcatctctgttgcagcc

SEQ ID NO: 59937 - DNA, 625 bp, Populus trichocarpa
  Intron number 2 from transcript POPTR_0008s07890.1 (locus POPTR_0008s07890) derived from phytozome v7.0 (chr-ID scaf fold_8; pos 4851651 to 4852275)
ccagattacgtccatcttgaggtgggtgcaaccgctaccttttgtctttgtagctatattgtctaacaacttacacctgtccaactcaattgtaataagtttctttctcaaggaagatgttcaaatagtaagacttgaaagaaaatgctactggattttgtctggcatttcctaaaatagttttcatatatttatgttgaaatgtagctttgatatatttggatgtgccatatagccagcgcattgacaaatgtttccagtctcaatcttttggacgaggggaatgagtctcaaaggaattattcgttgtcctatctagattagtgaacttaaaacctagtatttgcttacgagacgggtcaagcatgcattgtagagaactagtaacattaaatcatgttttataaaatcttccactatcatgattataatcaattatggagtgggaccttgctgaagcatggttgtttttttcataatttttgaactaatgttctgtagaggcaccaaatcgatacatttaatggtcaatgctgagtttggtctacatcagtaagctttgattcatgtaaattgtttgatcaattcaaattctgtttggcaacattacaggcgcagactgttt

SEQ ID NO: 59938 - DNA, 575 bp, Populus trichocarpa
  Intron number 1 from transcript POPTR_0016s11410.1 (locus POPTR_0016s11410) derived from phytozome v7.0 (chr-ID scaf fold_16; pos 10263482 to 10264056)
cagagacatgtagcagcacaccatggcaattaatccaatgtgcttcagcatgaaagaaacaacactaaaaagacaacacaaccccaaagtagaaagaagtgggagaagaagagactgagagaagcagagaacttggaggaacagctttgattgagagacggagaggttgatttagattgagagattgagagggtgagtggttatgaacttttgttagcttaggtagggaggggggcggctggtttgctaatggttgtggttatgagcaaatttttttagtttataggaccccggcattttagtaattttcagaccagtatggttcagtctttaaaaactgcatccaaccaaaccgaatgttttttaaagtttatttttacgattaggttttttcattattattttttcggtttaataaaaataagaaaagagttaaaacggtaaaaagcgagtcaaccatctatccatggtttggcgtctgagaatgcagagagtctaataataataaaaataatgttcatcaacgccaaacacaaatagactcccttttccttgctcgatctattcgcattcca

SEQ ID NO: 59939 - DNA, 935 bp, Populus trichocarpa
  Intron number 1 from transcript POPTR_0016s04010.1 (locus POPTR_0016s04010) derived from phytozome v7.0 (chr-ID scaf fold_16; pos 2250516 to 2251450 reverse strand)
ctcactcaggtctttcttccttgtagtcagtcatatatagcagctcgttatgatcatttcaagattttctttctctcttcacttcttctccctttgtctcctctcttttctctcaaaatcttgatgagtgtgtagagtagtactcttatgttttttttttgttttggtttttgggaagtgggaaggcgtttttgtgttgggttttttattttctcttttctttttgttgtgagggaaattttactatcccatgatcaagtggctgatgtcttgtgtgatatttcaattggtttctacctagctttcatgttcatctcaagcagatgcagttgagtttgattccacactcatttatagtgctttatattcaagcactaagtcgcttggcattttcttttgtagttggagatggtaattcaataattgtttcaattttctcttaacagtttttgtgggcttttcttctacttttcttctcattaacttctgttctttctgctgttgatatatagttatcaaacactatagcactattttcatttaagtcaaatgttcattttgtccatgttagataagtgttttttcttgatttcatgtatcatttttggttgctggagttgagattttcaatctttgtgctgtacatatagcctagactttctaaatttagttcttcatctccagtcttgtcttccacagtatgctcaccaaatctatgccaaacaagcactttccccatttgggtataagattgtgaaaaagagatggacaggataaacaaaatttttacatgaaacatcccatcatacaccaaaacaggatggactaaatgcaattgatcgtaaagaaaatttttccatttgcagctaaatccatttaccaatgctctaattattattcccttgttttctgttcctcagaagcaattggctagc

SEQ ID NO: 59940 - DNA, 571 bp, Populus trichocarpa
  Intron number 2 from transcript POPTR_0008s05970.1 (locus POPTR_0008s05970) derived from phytozome v7.0 (chr-ID scaf fold_8; pos 3519872 to 3520442 reverse strand)
tcagaggcacaatcttgggttacaagaggtaataactatagcttagcttttatattctgtgaatttattatgcgtgttttcttgatttgtattttattcactctgtttggttacggagaaatctgaataagaaaagaaagttaagggcatttaggttatgggattggttttttagaagctattatgtttgattttgttgtcttaaatgaaatattggcatcaggtttgatgtcaagtaagtgctggcattttctagtttatagagaatgttttgatcttcttttgaaagataagcaaaataaaacatgttttatcagttcaagatttgtggttttaactataactatatttgcagcaatttgaattgactaagtgcagtaaagaataggatggattcattggaattctttcattcaagtttcagaaattgaatatagtttgtcagaaattgaatattgtttgtcagaaatggaattaggattttgtttttgttgtgtggattagtctggagattaaaatattgttttggtggttaggtcgaagtccaaccaatatcccaacacatcactga

SEQ ID NO: 59941 - DNA, 714 bp, Populus trichocarpa
  Intron number 1 from transcript POPTR_0008s15560.2 (locus POPTR_0008s15560) derived from phytozome v7.0 (chr-ID scaf fold_8; pos 10339385 to 10340098)
aaggccaaaagggcaattccgtgttgtctgcccaggtaactcttcttcattgatgtttttcatctctttagaaacttgatttacagattgcattttgcttatatcatattcttttattgggtaaaagaaaatcctaaggctcagaagacagttttagcagtgatctaagattttggtgttttctgctcgattaaatgcaaaaggcagaaacaacatgcaaatctagcgtcggaaattggatgagaagtacaaactaaaattgtttctgctttctcgaggaaatgaagcaagaatggttttagagtgccttttatgaggatttgttgaatacgagggtttactttttctgccttattgattgatgaattttgtggtgattttacttgggagtaatctttactgtcttttgtttccctgttatatttttcctcttctattcttcatttattatcaattgcatgtcaatgtagacgtcacccaatttgtttacttgttttctgtagactataggcagagccttgtatagttattttgcttattaactgttctggggatctctgggcgattaactgtaaatagaaatttgatttagtctggatttgtgtgctggtgatcaatatagtagagggacattttcaagcttataactcttttatctttgcttgacattcttctgaactggagtgtggtgatctctgtccagggttacattgt

SEQ ID NO: 59942 - DNA, 722 bp, Populus trichocarpa
  Intron number 2 from transcript POPTR_0002s18800.1 (locus POPTR_0002s18800) derived from phytozome v7.0 (chr-ID scaf fold_2; pos 14683927 to 14684648 reverse strand)
aggagatcttttactgtgagttgcttgatcatttcttattttaactcttcttgctcccctttccttgttttcgctctcttttaccctgtaggtaagtaaattagtgtatggtttcaagaaaatggtaaagcattgccctgactcagcttatttcagtcagaattacagtcgtaaattcaagtaaatacataaaatgagaacaatttgcttggggatctgattgaaaagaattacttcttctctttcactgttaccaaatgttgatggagaaatgtttattagtttccttttctttgtcaaaactatggctgtctgttcagtttaacatctttctggcaaaatgtagctcaagcggcttgcatttctatctatcagtaactgatatggcatgaaatccgtgatctattgcttatgaattggtttaaaactacatgtttgctagtttaaagtgcttcactctctatatattttagtatttcttccagttttgattcacattttactttacatggcttgcctttctttatattctgtttccttggctagcttttgagtttttaagctgatcaaggtcatcaacattaccatacctgtatataagaactcaccatcgctcactatgattaactagaaacacaagtaaagaaacaaaaagacataactccgatctcttactctacttaatcatctttgaatatattttttttattttcagctggtga

SEQ ID NO: 59943 - DNA, 820 bp, Populus trichocarpa
  Intron number 1 from transcript POPTR_0008s22410.2 (locus POPTR_0008s22410) derived from phytozome v7.0 (chr-ID scaf fold_8; pos 16902826 to 16903645 reverse strand)
cactctcttctggtattgtcacactttcttttctctgaattaagttagatcttgtatgtttagttcattccatgtggacccttttgatatttgaacttgatttcttgttttttttggttggctggcggtctaatttcagtgtgtttgttggattaagaaattttttaatttttcaagttcatgaatggcaattggttgaggaaaaaagataaatggctataaattaagagattcaaaggggtcattattggtggtgattttcttttacccttttttcagtaacgtagtgtctacaggcatggaggaattaaatttaaaattgctcttttttttcaaggatcaggattgtcaatttaatttataatttcacatttcaacttctgtttagcaagacaaataacagataatttctaacaaaatggtggatgccatgctgcaattatttagggggtaaagggcctccatcctcgtattctctgtgttatatgattagttgttcaaggaattcggagaccatcttcgaggtttattttctcactctggaaaatttatgctccagtagtataaggctaacttggaatatttaatgtttctggtttaagctaatgactggtagcatttggaatcaccttttgggtccccgtgtattcttattctcctcaaatctgtttgcgaaagcaattggcatcttccaagacttgcttgatgtcgcggttacttatttgtcttcagttacatgatgtttttcaatgatgctgataagatatggaacttatttatgttgctcgcatcccagtgttgaacagcttgaaggacagtt

SEQ ID NO: 59944 - DNA, 610 bp, Populus trichocarpa
  Intron number 2 from transcript POPTR_0002s23540.4 (locus POPTR_0002s23540) derived from phytozome v7.0 (chr-ID scaf fold_2; pos 21094454 to 21095063 reverse strand)
tgattgtatttggttgtggaaaaagttgtgtgtctgaggttagcgaatttcctcctggtttgccaatttttcagttttctagctgtttccttggtgaattttggactgcttgtttgttttccagaattgaagtttgtttttatagcagtaaaatgggaatctgctcacagttaagattcttgaagtgttatatatttattatgtgtctgtgatgtttaaggtttgatttcgaggacaatctgcttcacttgaatgtgattgtatttgtttgtggaaaaagttgtgtgtctgaggttagcaaattccctcctggtttgctgctgtaccacccctcgttctgtacagacatctgaaattatattattcacaagaaagcaagaagaagaaaaacatgcaaacaacttcacagcttcactcaatcttttactactccaacaggtatattccctaacttctcttttgtgcttgaatgactaattgattttcatcgctttctttcatttctattgaagctttaacgttttgcagaagaagctacctaaaacccaatgggtggataaagacgaaatcgttgaatttcagtcaacttggtttcagtagacactgtcag

SEQ ID NO: 59945 - DNA, 725 bp, Populus trichocarpa
  Intron number 2 from transcript POPTR_0025s00360.1 (locus POPTR_0025s00360) derived from phytozome v7.0 (chr-ID scaf fold_25; pos 124452 to 125176 reverse strand)
tcgaatttcattcagaagactctccttttcttcctgtaagtaagcgtagggtttttggcttttatttcctttctgtgctacatatatctttgtatcatgctagtctgttcattgtctttgtcatcagctagattgcatgtccatgttttaaaaatgcgccttttaacactgttattaccacatgctctttgatcaattaaaatgagaatatgatgggaacctaggacttggggccagtaaatttgtgacttgaaaagagaaaaactgtcttggctaggatctggaagatgaatgtttctcaaaaagtttgcatgcaaaggagggttggtattatttgatagtcaagagagtttcctcgttcattttctgcagcagatgggtatttgagggattgaacagtgaccgtgttatgacattgcaaatgcttaactctgttgtaattttaaatagcttcagattctctattttaagtcagtttttaagtttcagactcaaactgatataacagtaagtttttttctcttttagtttctctacatcccatggagcctgtgagtttctttggtgtgaagaatgttcatgcaacaacctaatgaccattctttggctttctatgtgataaccttaatttattttcccttttagttctctctgtgttggaatttggtttctgtaacttatatataaaaaaatgatttgtttttttaatccgacaactttgcagg

SEQ ID NO: 59946 - DNA, 690 bp, Populus trichocarpa
  Intron number 1 from transcript POPTR_0025s00360.1 (locus POPTR_0025s00360) derived from phytozome v7.0 (chr-ID scaf fold_25; pos 125181 to 125870 reverse strand)
taggtaaaaagattgctactttgacagtaaattcgattgctttgtaaacataagattaatgggtctttgagattttattgtttttgacatgggtttatcttgtttcgctatgatttctcaatttttgaagaacttggtttcttaggattaattaattattaatgtgtttcatggaatgtttttgttgtttcatgcaatgtttttcaacgaagatttttatgttttgtgtggagaacattggagtgcctttaattggttagaaggtaattttttggacaaaattcagagggaaagggtgttaatgatagtttgtaatacgctgtggtgctgaatcggcttggccttttattgtttagctgttctatatcaaagcatggagtagttaactggttatgaatgaggctttgaaaggaacgaaaagatggataactaaatggtgggtagtaatgcagccattattgatgttggcagttgtcatggcactatttaagaatttagaggtttcaagtcctgttttgatatgttcagtcagttacaagggtgtttttgtgttttgcatgttaagcaagctagttaaattaatgttgttgagttatatccttcttctgtttgtgtatttctaaatctgctatgttaactttctgctaattaacaggtgctacatttcgcagttctcgtgaacctaaatat

SEQ ID NO: 59947 - DNA, 730 bp, Populus trichocarpa
  Intron number 1 from transcript POPTR_0008s14000.1 (locus POPTR_0008s14000) derived from phytozome v7.0 (chr-ID scaf fold_8; pos 9244309 to 9245038 reverse strand)
cgaggggaactggtccatttcacaatcccaggtacatgtctcaatctctacatcaatgaatcttaattgccttattttacttaatatgcatgcactacatatttgttctccatgtatgtagatcttttgttttgtatgttcttaatttggatccctaatgttttagaacttaaccgtttagtttactttgagcttgcattcatgcatttcgtttgtgaatattggtttgagttgattgcttgtaaatctggaggtttcatcttccttttcagttgactatcaaatacatatttaatactccaaattttttctggaaaaagaatgtgttttcatgcatatcatgccattcaattatgtagaattcatttctttttaaaaaaacaaaactagtgattaaccatccctattttatttggccaagtatttttttgatctcatgctggaagataaacaacgaggtactattctctatacaaaaatttgtggatttttgcttgtctttctgatgtacttattggattgagttttccttgcagctctttgcttgtttcatatttaataaggtcttattaatttatattttctactatgatcttccattctgtcacccacatttcatcttcatctgcactaatgttctttaattttgaccttatcttctatcaatcttgtcatgtattggtgtctagtctataatggttggtcaatcctaatgacacaggttttgtca

SEQ ID NO: 59948 - DNA, 549 bp, Populus trichocarpa
  Intron number 2 from transcript POPTR_0002s06630.1 (locus POPTR_0002s06630) derived from phytozome v7.0 (chr-ID scaf fold_2; pos 4459471 to 4460019 reverse strand)
atcgttatttgatcaaggaggaaggaagaggaaaggtataggagcaattctgtttgttagatttttcaatgcctttgagtgccacctttttttatggataaattaacactgtagattaaagctgattttgtatgaatatagttaaatttcttgttcatgctatgtggtttgttgggtcgtcttttgtttttcaatggttaatcttgttttgttttgtttaggtgctttcgctatatatctggaggctggagccatggatgacatcatgcatatatctttgagtttctatatctcaggaaaaaccaaggaaagttgacgttcgttacttaatgggcttaaatatcgtcgcccttaaatctagtgcagtacttatcttagtttaagttggggtatatatattggttacttccaaaggaaaagtatcttcttttctttctatttcatatcctttaatttccctttcttgttttccccgactccatcttgtgtttttctttcttgatgccttctgcaggaagaacgtcgagctcaagacttgttctgtgctct

SEQ ID NO: 59949 - DNA, 204 bp, Populus trichocarpa
  Intron number 1 from transcript POPTR_0002s23930.3 (locus POPTR_0002s23930) derived from phytozome v7.0 (chr-ID scaf fold_2; pos 21404451 to 21404654)
ccgtctctgctgccagagacatctggttcaacaaggtgcctccctccctccctatctaactctcctatccatctagcctcgttagcttcttcttcctagggttttgttttttcaattatcgaatcgaatcgaattggagtatttggggaaatcaaaggaattattaatttaattaatcaatggatttaattaattaataggttg

SEQ ID NO: 59950 - DNA, 479 bp, Populus trichocarpa
  Intron number 1 from transcript POPTR_0008s11240.1 (locus POPTR_0008s11240) derived from phytozome v7.0 (chr-ID scaf fold_8; pos 7107439 to 7107917 reverse strand)
gcctcggctcaaacaaaagaaagaggaacggacaggtagcgaccatgcttcctaattgttttattaattgttggtattttgattaaggttccgcttggtataggttgatttaagctgttttttgtaacttttaaatcattggaaagtcgtaaatatgtttggttaggaataattttttatctaaaaagtaatactacctcgcttcttcaaaagggttgatttgagtcattattatcggttagaaataattttttatttaaagagttatactgcatctcttcttcttcttcttcttcaaaaaaaaaaaaaaaacattgctttgaatcattttaaccaaacatactttaatttaaagtcattttaacatatttgtcataagttatttatgaaaaacaaaatttgaattatgacttaagtcagaagtcatgccaaaaggactctaaattgtttgtgatgagattttttttttcggtggtagg

SEQ ID NO: 59951 - DNA, 582 bp, Populus trichocarpa
  Intron number 2 from transcript POPTR_0002s08680.1 (locus POPTR_0002s08680) derived from phytozome v7.0 (chr-ID scaf fold_2; pos 6082279 to 6082860)
ttaagcaccttgaggagtgctcggttgccaagttagtttcatcttcatttttactttcgatttgtaaatgtttcttttatcgttgatttgatgaaattgaagacttgaaaagattttgactttctgggctgatcgctttggtttcagttagttgaaagtttcccttaagttagtgagttatactctcatgtgactgctgctagttagaggagtttgcgaatatgcatttccttttgatttaggcacagtttgatctttattagaagggagaaaactgaagattggacatttgtttgtcacactgctatcctagccatatctagtattgtactcatgaacagatttgtgtctggtttctgatttggtcttggtctttgacttcgattgagaacaccaagttttatgtcttagtttcattctagaaggccatgtccctcaaacaacacttacacatgaaaaatatttatgcaaataatatgtgcgcgtaaattttcttctccttctttattcatttacctgttgttccgaacaaaactatgatgataactactgaatgatctatatctgcagcgcactaggtac

SEQ ID NO: 59952 - DNA, 806 bp, Populus trichocarpa
  Intron number 1 from transcript POPTR_0008s13380.1 (locus POPTR_0008s13380) derived from phytozome v7.0 (chr-ID scaf fold_8; pos 8783480 to 8784285 reverse strand)
ttctgttttggttaaactggcccacaaagttcctggtatgtattttttcccctattcgtgggtgtctgtgcatattttgggtgctcgttctgtttgattttagaagactgcaaatgggttttatttggtggatgggggatttttactgcaatgcttctttttgacgtctcaattttgcttcattgtgctcctaataaatttatattaatgctagtactgtaactgtagtgaatgttgtatttcatcggccaatataccctcaactaggataacttagaagtcattgaatggatcgaaagcttagttcaagtttgtcagtacaataatagcttggatatgcttaagttgttttttccatataaaacgtggtttggttttattacaagctgcttccttgatgcacggattaagagttcatgttgagtaaacatgagatattgttatgtacattttagaggctcagaattgtgaggcttccgaaaactgaaactctgaacttcttaaccagcatcttctatttgatatcaattttctgggtgatgactcgtggaatgtatgtcttttatcttctgctgtcagtttttgcgagggaacatgttaaatcatatgccaaattgatggtgatatatttctgttggtgctctttgatggaaggtgctatttttagtcttccaataatgtgaaaccttatatctgtaggataaggttttctttgcacaacatgagtttgtaactccatgtattttaaatctggctgtttacacttttgaacacgagtaaattggacgtgtgggagcatttgacag

SEQ ID NO: 59953 - DNA, 555 bp, Populus trichocarpa
  Intron number 1 from transcript POPTR_0016s04790.1 (locus POPTR_0016s04790) derived from phytozome v7.0 (chr-ID scaf fold_16; pos 2870970 to 2871524)
gtgtccgtgacgatcaagaaaatattcaggcaagggttttgcttctttttctttatttctttattcgtattttatactcattaattgaaataacaatggtttcttgaatgcaatgtgtttgctagtagaattgcttggaaaaagagattgatactttgaatgaatatcaaacatgtataacgagtagaattgctttgaaaaagatgcatactttgaatatcaaacagctgttaaggcgagtctgttcttttcgtttgctcggagtcggaggagatgccattcaggattttggattatttttctgtgggtgagaaggtccctccgagctgttcttcggcatagtctcaacgtagggtagcgttattctaggaaggttttcttttgtatctgtggttgagctgctggtctgagtaatgaggggcgaaggttttttttgttctctgtttccatgtgctgataaatctacaatatcattgtgaatttatgctttcattaaactaactaattatattttaaacagtctgcggaggaggagagggaagaaaagccggtgga

SEQ ID NO: 59954 - DNA, 312 bp, Populus trichocarpa
  Intron number 2 from transcript POPTR_0016s04790.1 (locus POPTR_0016s04790) derived from phytozome v7.0 (chr-ID scaf fold_16; pos 2871593 to 2871904)
caggtaagttgataactgcaatcaagaaattaagaaataaatttctgttttgttttaacttttgttgtttatggttaccacttcgtttaagcttaggaataactgaactctaaaatacattttcaaacttattttcttcactgctcccatttttgctttgatagtttttatcatcacaacggggctgttttttttttttttttttttttaatctcaaatgatggttcatagcttttgaactaattggtgttctttacttcacttttcggctgaaaagtggcagaagctcaggaataccaatccactagtgtg

SEQ ID NO: 59955 - DNA, 646 bp, Populus trichocarpa
  Intron number 1 from transcript POPTR_0008s04410.1 (locus POPTR_0008s04410) derived from phytozome v7.0 (chr-ID scaf fold_8; pos 2475251 to 2475896 reverse strand)
ccctgtaagaaattttcaagattttcaattctcaggtactttctctctgtgattctatgcaagaaagattggttttgatgttcttttttttcttttttctttttatcttcgttttatgttgagtatttctttatctttttttccctctgttttgaaatgccctgaattttgtcattgaaatttaatccccttgtgcttttgcatttaatggatttccttttcctttccctttcatggatttattgtattcttgatactataaggaatgccaagaatttctgtaataactgtttatgatgcaagaaatgtttggatcttttttttgtatttattttctatagatatcggtggatggaaagaaagagagagcaaatttgtttatcttatgtcccaattaaggttttctttttctttttcttttttctgatgtgtaataaacgtgaaagattgtcttaacaatggtgatggaaaggaaaacactgaagtgtgccctttaaagagagaagaattagtacatttcagcattgttggtttgctttggttccatgcttgctttcaatcttggggtgtagaaattgttgtttctataccttttgccttggtccctttgattttgcagaagtttcagcgagtagaaagaaagtcg

SEQ ID NO: 59956 - DNA, 757 bp, Populus trichocarpa
  Intron number 2 from transcript POPTR_0008s09270.1 (locus POPTR_0008s09270) derived from phytozome v7.0 (chr-ID scaf fold_8; pos 5743754 to 5744510 reverse strand)
aggtgaatgttgggtactcccctttatttggttgaactgcatgggcagtgctatccttggaactgatgattgttgactttttaccttttgtacccaagtgatctatgattatctagatttgacatctatggttagaaagtggaatgtctgaagaaaccttttgctacttttgcagcaggtttggatagctatatgttagtggagtttggtttttggtgaacctgatacaatatgagactttgaaccaacagcttccacatgttctacaatgacatctgaattttagaacctgcaatctgaattttttttctgtggtttggttgtggggctcatattcagattttaaggaatgtgaactctctttttggatcatggaaaatcttttaagctcccattgcacctgatataatatgacgctttagagcaccataattattttatctttgtcctcagtggatgcacttgatctatgagttatatgcttgctgctgatgttgagaaattgtttttgactctatgcttaaagggagcaccaagccaattcaccttctcctcttggtgcatccatcactaatctgtgtgctccagcatccttagtaaattgcattgctgtagcatttcaaaccctattttcaattgcatcgagctttcaaacatgaaaaccaaggaaccagcaatgcacttatatcatctctaatttccttctaattgatggtttatagttactggacgaggcacacagcagccctggtctgca

SEQ ID NO: 59957 - DNA, 856 bp, Populus trichocarpa
  Intron number 2 from transcript POPTR_0016s02990.2 (locus POPTR_0016s02990) derived from phytozome v7.0 (chr-ID scaf fold_16; pos 1504830 to 1505685)
tcccttttgtcagaacttcctagcaagcaaccaatgtaagtgtttttctttcttgtgaattgctgtttagtaaattccttgtttggggccttaaattgagttatgctgcaatgtctggtagcaatagacttcctaatggctctttattatggttattgaatcctgttttatgtttgtgcttatcctttctggtgaattttatggtgtggccagtttcgcaatgttaatgttaattttaaggagctggaacagaggtgaatgaatgaaatgcttgtgttagtttagacgacattgtacagcgaccctttgtttctttttctttcttttgcttcatattttgattgtgtggttgaggctttcctctagagtttcctagaaacccctttccatactactgtatggtttggtaatctgtacctgaagagtacaaagtatcaacaaatggatcttcgatgggaatttaccaatatcaaatgaaagacataaatataggggaggcgggaaattctttgtttctttcttctttttgcattgtagaagttcggctgctatatatgaggttgtggtgttcctccggagttgcatgaaaaacccttttcataggaggattagatattgaagtaagtgctcagtattgcatggtattttaatatgagaaattctttgatattttgacctttgtagtttctatagatattttactgaaatcaaatgaacgagaaattcattggtagttagaagggattgatatagataaatatgatatgccaaacaatgcattagcggtagtttttcacccctaaccttgttgaaaacctttgattctgataccgtcacgaacagaacagggaaagag

SEQ ID NO: 59958 - DNA, 550 bp, Populus trichocarpa
  Intron number 1 from transcript POPTR_0008s03690.1 (locus POPTR_0008s03690) derived from phytozome v7.0 (chr-ID scaf fold_8; pos 2004822 to 2005371 reverse strand)
aaagttcatttagaggtgattttttcaaaccctgttatgttcaatttctgattcttttttgggtctttgttttatcaataaagatagaaactttattgggatttaccttttttcttgtttaacgtatttatcatggtttctcaagatttgtaaagtgggattctttaactggaatttggctcaagtgtagaatttgatggggttttttttccaatattttgtgattgaaatatgaattgagagttattgccgtctttgtttcattggccagctctacataattggattttgattgatgaattgtatggttaagtgttattacaaacttgttaattgatgaattcattgatgaaatatttatatgtcatggaggagggaacaattttattaatatattatgtttaatggtggtttgcaatttagaaaagtaatgttctttgaagaatttctgtttctgcagcttcatagacaatttgactgcgttgaaatgggtccgttttgttttgtttgttctttttgacagtgagatcagtggctgcaccagtagaag

SEQ ID NO: 59959 - DNA, 563 bp, Populus trichocarpa
  Intron number 1 from transcript POPTR_0016s07580.1 (locus POPTR_0016s07580) derived from phytozome v7.0 (chr-ID scaf fold_16; pos 5456694 to 5457256 reverse strand)
gttaaattgcagcatcatagcttcttaaattcaaggtgctcaattctgaattctatatttttttctggttcattgcaagttttctttttttgtaccatcaattttgactgtgtaattgtagagtggcttgggtttttggaatctctgcttgtttggatgccgagaaactgagagaaaataaaagaaaatcaatatccaaaactagactttcaattccagttgtgaattcactttccttttcttttctttttgaaagagtgtaaatgtgtagtatactgcttgatcggttcgattaaggttttgtgcagctataatggttcatcttgcgttgaattttttattgtgtttgctgttgggcgtgtaaattggtttgttcatgaaaaaagataaattcttggatatcatggttttcggctatatctataaaaggagaacaaggaattggggaacttgtcggaaataaatgatgatgttagaaatattaatgtctggcgtgctttcagtacaacattaatgtggttagagctaactgttgagtgtttctactgcagctcttcaaatcc

SEQ ID NO: 59960 - DNA, 674 bp, Populus trichocarpa
  Intron number 4 from transcript POPTR_0008s11710.1 (locus POPTR_0008s11710) derived from phytozome v7.0 (chr-ID scaf fold_8; pos 7489287 to 7489960)
acaaaaaccaggtttttgtgcatctttctctgttaatacgctctgttttttttcttaatgttatgatatgtttttttttatttggtttgctacaataggaatcttttttgtgtgggtgcttaatggtgggtctgcttcggaattgaggaatcggacactgtgtacttgcatcgtatttcgtgttatacttttgcttgattttgtagaataatatgctttagttagatcttcgtgattgtgactttaatttttactgcagggttaacttacattctgtttaactaactcatgatgcttgaactttccaatcatatcaaacatatttcttttgctttgataaacaagtaaccagtccgtacctcaaccacctttggttgatattgctctaaacctaaactagatagctggggaagcgggcctctgcccttgtgttggccaaaggagggcgccgaggagtgttgaagctgagagctcatgaatataagatcccaagttttaccatcgagccccctcttgtggtttattccattgaacattaaaattgttacttggtatgcccagttaacaatttggacatggctagctacattatttggtaactagtaattacattctacctgacttttcgatagatgtcagcttctgattgtggtttgttataattatgtagcttt

SEQ ID NO: 59961 - DNA, 839 bp, Populus trichocarpa
  Intron number 4 from transcript POPTR_0008s22390.1 (locus POPTR_0008s22390) derived from phytozome v7.0 (chr-ID scaf fold_8; pos 16866774 to 16867612 reverse strand)
gttcacctctagctgccgtaagtatatttcttttctgtgttttaaaagtttttttatatataaatcattttatctcacatcccaaatcccatatactatcttttcaattgaagtgaaattaaacccttataaattgatatatttggagctataaaaaaatattaattaattgagatattatttaagctttaaattcaagttgaaaccgagtaaaaatattatttaattaagattattaatttattaaagttatactgtatatggtgttacatattaattaaaaaaactaattaaaaatccgtttggtatagttttatttttttttgtaaatgtctatgtgatgttaaaatatttctccattataacatcctcagaaactttattttatagtttttaattggttttgaaacctgttttttgaattttacaaaggatatttttcattgattatcgataaaaaaaccttaaaaatttttttatttaaaaataaaaaaacaaaaactgcatgttgtcaagcacccactaattatattagtgaattatttgtgatatatatttttaattgaatcatgatgaattatatgattgttcatatttggaagaaaatgatttgcaagcaaattcttaatttttaattatacgcactaaaatatcaattgataattcgggaagtacatatatagcgacaaagtgaggcataatgcatgtataaggaaatttctttttaaccacattaaaacgacaatctactttcttcttcggtttggtggtcctttccctttttgtcctcccatataaagaagatgcaagtcatgacactcaggaggcagactttattc

SEQ ID NO: 59962 - DNA, 374 bp, Populus trichocarpa
  Intron number 1 from transcript POPTR_0016s08470.2 (locus POPTR_0016s08470) derived from phytozome v7.0 (chr-ID scaf fold_16; pos 6273780 to 6274153 reverse strand)
acaagttccttgaagcccttcaattgtaaatttcctttttcgtttctctttctataactactctgtctccccccccccccccccggtttttagttcttgctctggaaattcgagttcaaaagaagaaagaacggaaaataagcaccaatttcttgatttttatttcagcaattgagtttgatttgttgctgtttgatggttgcttccttttttagctctgtcactttttcttggttgaaatgctatctgggaagaaataaataaacggacctattaattatgttttatacaggatgtttatcacatgaaactaaattgattaggtcctttttcgttcaggtttgatcgtgactggaaaaagattgaagattttg

SEQ ID NO: 59963 - DNA, 855 bp, Populus trichocarpa
  Intron number 1 from transcript POPTR_0016s10320.1 (locus POPTR_0016s10320) derived from phytozome v7.0 (chr-ID scaf fold_16; pos 8547617 to 8548471)
ctagagaatctcataaaggtttggtttgcagcatgccacttgcttcttgatatggaaaatcagttgtgtgtaatgagcttattatgtttactgggcaattatcactcacaatctgcacaccatgcttttgtcattcttctgtaggaaattgtggttttctataaattcataatctaatgcaagaaaaacaatttgaatattctctgtacacattattttccagtaaaggactctgaaaagctccatcattgtagaggtagctgcattggaacatgaatgaaaacagtagagagttgctcatacactaaatcattatgtttttacttatcaactccttgtacgtgcaactaaacttaaggaaggaaatagaacaaaacttaaaatgttgttttgaagttactgaaaagatccatcattgtagagtatgatatttgttctattctatcccaagaatatagcaaaactttactgatttgtagcttaaattgaacagagtttgttggacattaacatttaatgaattggaggatgtggaagattttatccttggttaaaaagtaagaggaaggaggagaaaaaatgctatcaaattcatctcatgttgttgtttatctttgagaaaggaatacctgtcttgcctttcagtgctattaaatcactgtatttacgcattccttagatttgtcatgtggtgtcttttttagttggttataggttgatgttagattagcatttttcttttttcataaattgtttgaactgaccacactcttataaacgttggattaacctggctttgtcgttgtaattggatgcaaagcttttcaaagggctggaagcttttgatcgtcaacc

SEQ ID NO: 59964 - DNA, 368 bp, Populus trichocarpa
  Intron number 1 from transcript POPTR_0008s18450.1 (locus POPTR_0008s18450) derived from phytozome v7.0 (chr-ID scaf fold_8; pos 12416855 to 12417222 reverse strand)
taaaaactctcttgaaaccattttctgttaacgtttctacttatttgattttcacgtccacttcaaagcatttgagcgaaaatctgctattgttattctgtcttggcacaaagcatttgagtttgttgcttttttttttttttatataatcatcgagagtatattaagaaggccataaagtgaatagccaaagaaaaatacaaggatatgaaaacaagaaaaaataaaaaaagttgatctactacagcaaacaacaagaagactacctaagatttcttattacacaaagcatttgagtttgttgcttcacttgtcaaatattttctactcttatccttttatgtgctccatgccattaggaatcatcg

SEQ ID NO: 59965 - DNA, 993 bp, Populus trichocarpa
  Intron number 2 from transcript POPTR_0008s06350.1 (locus POPTR_0008s06350) derived from phytozome v7.0 (chr-ID scaf fold_8; pos 3766096 to 3767088 reverse strand)
ccgctgaggtaagttaaaaccgtatgtatatggttgtttctatgtgtgattgctggtatagattgtatggttagatttattttttgtcaagtaacgatgcccttttcataacggttagcccttaccattgattgggactttttgttaaacgtgaaatggatagaaactgagttctttcattatgatactgttgtggtgacatggatttggtgatagatgaggtagaaacttgggattggcggcctttgtcactagtatactttaatcattgtttgtatgatttgaaagattcaactgtttagatagggcctcatgtagaataagggttcaattgtgttacggcagggaatggttttcttttctctttcctttcctttccttttaaaagacaaaacataagtcatgggtcgttttgtgatctacgcttacacagtgtgtcaaattagcaacaaggatcacagaagtttgtggatgaggatagcaaatagtacttgaaacgattttctttcccttaaaattagtcaggtgggaagagaacaacatgttgtacctttggatcgactttatactggagttgccaaaggaaaaattgatatcaaatattatagtaagacgactggatgtgatgtctctcttctccaatcttgtattgattgaagatgaaatccacatattcctttgctttgcgcatacattggttgttgtctggtctttgatttttgttgcttcaactcataaggtgacttgttttaagaaggatttcctttaacaaaaaaatgtagtgaatgcttaaagttctttgttgggagacctccattccttcagcttcacttgataccttctctttcattgcttcttttccttctctctctcttaattaacacagagttcaggagttttcatttgaacttgaatctaggttatggatttttgtttatagctatttttgtgtgattaattgagttccttctcttttctgtggcaggagcattc

SEQ ID NO: 59966 - DNA, 602 bp, Populus trichocarpa
  Intron number 1 from transcript POPTR_0008s06350.1 (locus POPTR_0008s06350) derived from phytozome v7.0 (chr-ID scaf fold_8; pos 3767325 to 3767926 reverse strand)
attcaagtatcgaagaagcagctttgccttttcaggttattttacaagtacaaattaagcattttactcttctgttcactgcaagttctgttcttttatgtggtgttgtcatcgttttggtattctctatttgatctgcttgatttgtatggccagccctctttaattcgcgacattttgaaaaaaaattgcatttatttatgtttccaacgatggcattttatgctttcgtgttcaatgcctcagattttctttatgattttttctctttgaatttcattattttaaagcggtttctatgatatgaaattaatgatcacatttttataacttacacatttttatctttggatcaaaacaaaaggtagataactgagatttatgttcacgatttataggctagcacagggttgatagagtgataaatcccatttttacacacataacggtaccttgtgtgtaacaattgctggttgcggcttgattgtgtaccttttccctcttcattatttggaattttgttgattcttggaacacgaaatttgggttttgtatagttgggttttgtgtagctaaccagggttttcttgataatgtaggaa

SEQ ID NO: 59967 - DNA, 572 bp, Populus trichocarpa
  Intron number 1 from transcript POPTR_0008s15820.1 (locus POPTR_0008s15820) derived from phytozome v7.0 (chr-ID scaf fold_8; pos 10532722 to 10533293)
cactctgttgaaaagcaaaacccttttcttccaaggtatttttttccctttaaaattgtgacccatgtttttgttttggtttctttggttgatttttgggattgatctggtcttgttcgcttgaggtttgttcatgtttgagttttagctttatgggattttaggttgaagaaatttggtactagtttttctgcgcgtttgtgttatggtttgtggtaatttgcttggaaaaattttcaacttttatcgactttttagtagatcctgttattcatttatttattgtttgaaaacttttctgtgtgtgttattttaatcatgcaacttagatctgttccttggattgatagttttgactcctttacgaatgtaaattaagggcttgcttaatgtggtctgcaatccatttttttgcagggaagaaagggccaagtctgattttcttagctatgtgtttgttgagagttatgtaggatttagaaagatgtatttctgtaaatctctagctagtgttatctgtgcataacattggtaatgcctcttttctctggctaggttatttgcggttgtgg

SEQ ID NO: 59968 - DNA, 432 bp, Populus trichocarpa
  Intron number 1 from transcript POPTR_0008s02060.1 (locus POPTR_0008s02060) derived from phytozome v7.0 (chr-ID scaf fold_8; pos 992925 to 993356)
tgtggtctttccgcttttggaaacggctgagagaggtaaggaattggggacatccttgttcgaccggtacgagatctgacctgaaaaatggtctgggttgcaatattttaatctcccacgaaaagatatttgacaatcaggctagaagtcacggatttaccaagtcaacctgcctacgaaaaaatattttaatcgtattgttttggaagtatttgtttctcctaaaaaaaattgtgtacttaagttgttgctcggttaattttgattattcttgctaaagattgggttgtgtttttaagctaatgaagattacttgctggtaaggtgaagaatagtgttcttttttattgcttgctgagattttttttgtgggggtaatgcacttgccaaggatgtttaagatctgaaaattaaatgtgatgatccagggct

SEQ ID NO: 59969 - DNA, 903 bp, Populus trichocarpa
  Intron number 1 from transcript POPTR_0016s13430.1 (locus POPTR_0016s13430) derived from phytozome v7.0 (chr-ID scaf fold_16; pos 12600449 to 12601351 reverse strand)
ctcaagtagccaaaatcatcaaaaaacccgagtctgtgagaatttttccttttgcctcagattctttaatgttttttttttattgctgcaatgttaagaatttatggactgttacaactttttttgtgagttactcagtacaagaatagattttgtattattgaaacaattagtttgttaaaagttctaaagtgggtttttagtgatttggttagtgtgtattctagctgctggtattaaaattggttcactgtatttatattttcttgatgctcaaaagttttggaagcattcatttttgtaatgattaagtgggttttgttgatgttaaatttgattgccttaagtgtatttatatgcttgtttacaatcttctctcctggatacttgagttcttggggggtccatggcagcttgcttttgtttatggttctaaactcgcttgttatcatttgattttgaactggataagtgaaggttttgagtatctagttgtgcttttgtctgcaatggctatttttttcactttctgggaggtttctcttttgaagagtttcgttgagaacttaactccaatggtcaaagagtgatttggctgaattgattcgtgtaagcttataatatagtcaattcggatgtcacttgtttgaccatgaaagatgaaatggattttttctctgaatgttctttgttagtttatctttatagtggacgacaattatgttctgtacaccttacacctgcaaaactcaaagtctcataatttaaatttttttctgcttttatgtttgtgttatttttcagctcttacaacctaaaaggaatttgcatgtttgcattgattgctatcatggtttcccactggatatgtcttttaaccgtttgtgcgtgcaatcatgcagt

SEQ ID NO: 59970 - DNA, 669 bp, Populus trichocarpa
  Intron number 1 from transcript POPTR_0008s22670.1 (locus POPTR_0008s22670) derived from phytozome v7.0 (chr-ID scaf fold_8; pos 17347411 to 17348079)
aggtttgtgatatcctaacgagatctttgttaaccgaagatcctagaaggaagaggaatgcattttctaataaataagaaaaaaataatttaaagaggtagcggtctaaactactatttcaatgttactaacttactagacagtccagacaaaaaaaaaaaagagatccaaagttcacagaagaaacattggattcaagtcaatgactagagacaaaaaaaaaattaaaattgagtgtgatctaagatcaaaatcatgtcaagatgtaaaaaaaacaaaaattaaaggagttttaaatgaatagaaaattaaaaattaaaaaattcaaattatcgtagaaaaaaataagagcacacaagttttgaatctattagagttattagttaaattattatataaggttttgtaaaataaaatttctagcactgtaaattaataaaataaacttatattttacaataaatttgacttataaaaaattaacttctttaataatttttatttatttttttctcgtcaaattgatattgatactcaatgcgtttgtttgcgagttgatatttaaggggtaaagatcttattctaatagtgttaatgtattgtgataaagttttattatatcacacttttattttggaatttgttgtgagttgtgcgactatgataggg

SEQ ID NO: 59971 - DNA, 559 bp, Populus trichocarpa
  Intron number 2 from transcript POPTR_0016s08690.1 (locus POPTR_0016s08690) derived from phytozome v7.0 (chr-ID scaf fold_16; pos 6485392 to 6485950 reverse strand)
tttgacttcacttggtaaaagagtaggtgaaggaagtggctgacaagataatggaaagaaagcaaagggtaagggatcatggatttgtttatgatcccaaaatgaggacaagaagtcaagttgagacaaataaacataaatgatgcttgtaaaaaagaaacaagagctagaacaactcaatagctcacttcttttatcaagcagggattgcattcaatgtcgcttgtttggaaagctctaagaagatggttgaagttattgaaagatatgggctaaatttgaaacctcctagttatcataaacttcaagtttcactacttaagaaagagatggattatacaaatgatttgttgaaagggaaaaaaaaagaatgagcaaaacatgtttgttctattatgttagatggatggacgaatagaaggaatagaagcataatcaattttattattaattgctctttgggtttatgtttattgagtctattgatggatcatcttttgaaaatctagtgagaagacatttgagttacttagatttgtgaagcaaattagagagagca

SEQ ID NO: 59972 - DNA, 809 bp, Populus trichocarpa
  Intron number 3 from transcript POPTR_0008s06120.2 (locus POPTR_0008s06120) derived from phytozome v7.0 (chr-ID scaf fold_8; pos 3622796 to 3623604 reverse strand)
cattggatcttgtgaggacacgccttgcagctcaggtatagccttgcaaagataattttgctacgactatcttccattcgaagtatgttctcctcatttgctcctgtctttgagcacgtcaatgtgaggtttaatgagtagaatgccaaacattttttgtgccttctatgcagtcatattttacttttgtaatcaaacactagatttgcatctaatcagattcataagtttcagctttaaacccttggctgatggggcgtaccctctgtttgtagtcatggtaacttttagaccattgttatttttgcttgtcattaacttgagtaaccaaaacaagtagttgtctgaagattagttgtttgctcctgttatactggttgcacagtaaaatgtaatgggcactacaaagtataaatttagcgcgtgccacatgatgtggagctctacctttgttgcttttcatggtcaaaattcaatcaatgttgactctttgtttctgaataatagaaaaggatcgtttctattggtttgttttattcagttctatgttacttagtctgtgatttatggtaattcatctcttgactaggattgtagttgttgcccatggatttcttcccttaagcagatgatcgtagttatgacttgtgttaatgatttatgttcttatttagtttatatctagagtgcaatgtcattttccaattttgtattttctgcttttgaacttgttgtgtgactggtatcttgtcattgcatgtgaaagctgcttcttcattaattcttgtagtttcctattttgtagacaa

SEQ ID NO: 59973 - DNA, 542 bp, Populus trichocarpa
  Intron number 5 from transcript POPTR_0008s20800.1 (locus POPTR_0008s20800) derived from phytozome v7.0 (chr-ID scaf fold_8; pos 14786585 to 14787126 reverse strand)
ttggccctggccttggaagggacccatttcttctggtttgattttttttcttgaaaagtttcaatttggtttataagggtacatttttaaattacatttcttctggctttgggagtgcattggaatggctgtatgaaagctttgtagatcaatgcaaatgatgctttcatctcatgagaataatttatttgatgttttcttatggaattctgtggcatcatatgtgcatctcaactacatatcgcatgagtcccttaggttctgattgatagcttatctacatgatctttgatttgaaaatgaacatttcctgccttcctatgttttataatgtcattcaatttcagctattccatctgcgtccatgttctttgagattccctcatggcacattcactcataggcatcctgccattttaagttctacctcatcatcattgctgctttgattgatttattttttgtttgtatttcttcaacattcttatactctaatgctactaacaggattgcgtgagtgaaattataaagcaggcaagaca

SEQ ID NO: 59974 - DNA, 318 bp, Populus trichocarpa
  Intron number 1 from transcript POPTR_0002s24280.1 (locus POPTR_0002s24280) derived from phytozome v7.0 (chr-ID scaf fold_2; pos 21682748 to 21683065)
cttctcatctaattaagcattcaaaaaaggtattattcttatcagatctctttattataatttgcttaatgtttcatgttttatatttttaaataataatagtaaattgaatttctggattatttttttgtgtaaaatttattgcatgcatcctccctttctcttaatgttttttcgattttgaatttaggattcagtttttattttctgtatttattttgtggaaaactcgaattttccttctgatttttctgtttttaattaatttatgatatataattttttacttttattttttatggtttcggcagttacgaa

SEQ ID NO: 59975 - DNA, 518 bp, Populus trichocarpa
  Intron number 2 from transcript POPTR_0002s24280.1 (locus POPTR_0002s24280) derived from phytozome v7.0 (chr-ID scaf fold_2; pos 21683126 to 21683643)
attttcacgtctccggtggtaaaagaagtatgtaaataatctctagcatgaaatcatttaaatctgttggtgatggttgcgatcaagtatttttatttagttgctgattttgtttgactgccaagagttactgctgcacttcagatgcgtaattttttttatatgaatagatatttatagattttgatttaattggtaagaaaatgtgaatggctgatgaggtttaggaataaaaagatgacaaatgagaagtgcatgttaagggatttggatttgtcttttgttgttgcagggagtatttttcaatggaagttaagtgtggtgttgttgttggaagttttgacttctttaaccgtttcctcttctttcttcattccttgctgtgatatattcttttcacagtttgatataaaaacacaagtatatgtggtgcatttttatacacaagtgctttcagaagtaaattgattgttaatttacttacttgatgctcttttttgtagttattgaggagttaa

SEQ ID NO: 59976 - DNA, 841 bp, Populus trichocarpa
  Intron number 1 from transcript POPTR_0016s09690.1 (locus POPTR_0016s09690) derived from phytozome v7.0 (chr-ID scaf fold_16; pos 7789035 to 7789875 reverse strand)
ttcagaaattcatagcaaagcaggttagaaatgcaaacattcacacatgcagtgaaaataaatagaatgcaactcgaacctgattttatcaataaacaaaaccatcagtcagtgactgaatgagcaaattgaatcttccaactaaaatggccactagacataatacttaaaacatgtattttcagttttagcaagtatcaaatcaccagggatatgtcaaactaaggatcatgatcatgaaggcattgaagttaactttttggggatacccagtgttaattcctaccgagtaaggtgatgtaaattgtgcaatttgttggtatttttgggcaatatatactgcatgctcccacaggcacttctagaggcctttcaaatttacataaaccgtaaggtttttgctggaatgttacttacccttcttgcatgtgtcttaaaaggattctctataaattaaaagattattctcgaaagacatggtgttgagtttggtgttcgaatatgtacccttcctcttgtttttttcacttcttcgtttaaagacatatttttcttgtttgtatattaaatcattgttagaaggattctattgcaaggagtgaattatgattttgttcatccagtttgcttcttaatgggtttttaatccatatcgatttccatcaaaaaagaatgaatgctttgtatctgtgacacgatgttgcagaaacattggtatgaattgcaaacagcacatataagtgatgaatgggcccgtacacatctttgcttgcaaaccgattgctttctttctgtgccctctgcaggttgcaccattcaaaagattacggagagtaacatt

SEQ ID NO: 59977 - DNA, 1025 bp, Populus trichocarpa
  Intron number 1 from transcript POPTR_0008s16400.1 (locus POPTR_0008s16400) derived from phytozome v7.0 (chr-ID scaf fold_8; pos 10978224 to 10979248)
tgttgttgggcgtggtaagtcagacctaacgcctaacccaatcaagaaaaggcccgcgctcgagcctttaggttttttattttaacttaaaaacctattttcaatctatttttaacttaaaacacataagaagtaccctaggaaacttgttaaaccaatctatagctccaaaaacattaaaaaaaaaatagcccaaaactatgaatcaacacgaaaccaaaatctttccaagcccaggtttgtttttttaattgttttcaagcttaaaaaacacataatattaacccccatcattgtatggaacattttgacacaagattcaaccattttggtggccgaaagctttccttagaacaatgttctctcttaaagctaaaatgaagtttagtcttaaaatgtattttttaaaaaaattatagagatcgattactgaataacttaaaaagatggaggattaaaacgagcgtttcaaacaaattaaagacctaccatctatttttccaatttttatcactttagttctctgtcttttaattcaacccttagcccaaaaaaaaatgatttggctagaatgtaggggtgagcaaaaaaaccggaaaaccgatttaaccgagaaaaccggaaaaaaattaaccaaaaaaaccgaaccggtaaaaaaaattgattgaaccggttaaaatatttagaaaaatgtccggttcggttcggtttctggttttggtgtgcctgagccggccaacccgaaccgaaccgaaccggttcgggttaggaatgaaaaaaatatataaaccaagcaggccgcctcctcccattactttcccttttaataaccctagcagaccatttatttgctttccctttcacacagctgccccctccccttcaaccctttcaatcttcattcacacttcacccttcacactttacaaacacagccgccccctccaatcacccttactcccattaacaaccgccccctcccattaacagtcgcctcctcttcaccagtcaacgagcttaggcta

SEQ ID NO: 59978 - DNA, 443 bp, Populus trichocarpa
  Intron number 2 from transcript POPTR_0408s00200.1 (locus POPTR_0408s00200) derived from phytozome v7.0 (chr-ID scaf fold_408; pos 6981 to 7423 reverse strand)
ccttgtggtgagcacatacttccactttatagcctttgaaacattaatcaacatctccaaaaaaaattctttaatgaagtacagaggctggtttagatcaaagaagtttatcctcctttgtaattttctaagttttaatctttagactaatacctgaaactacttcttcctacaagtacaccgaaatgacaatttttgtttttgtaaagtgactcgaaaatgactcggaaaaaaaaaatgactcgaaatgcagtatatttgttcgtacaacttataatttatctttggagaatacataatcggcagtaatttaaactctggtaaatctttctttcacttacaagaaataatttctcataattcacaaacatcttttgaaaattggctaaaatgtgtagtatgcttttatgaatcagttgtgttcgacaagttcaaggacacca

SEQ ID NO: 59979 - DNA, 619 bp, Populus trichocarpa
  Intron number 1 from transcript POPTR_0008s06730.1 (locus POPTR_0008s06730) derived from phytozome v7.0 (chr-ID scaf fold_8; pos 4020961 to 4021579)
tttgttatcgttcatctcttccactaattaaagaggtaagcgatcctttctagatagcttgttcttagtttttcctctctctgtttttgtttttttcagtcttggtatagcttcttttcttttttgcccttttgaacagttttgatataatttctgattctggttcattagttgttaattggtttttctgttctattttttgttttccagttgagttttctttatgatcaattgaagtagtgaatttttctagttgagtgtttttccttgtgggttttctgttatcgttttgctagtttgtgtcttaattcctctactgtatgcatcgtctgtgtttgcttatgggtgaagtaaacaacgcttgaaactttatggcttgtgttttgctttagtttccgagaaaatggaattaatcttaaattagcgtcaaccagaaagttttcttattaccaaagtggttatgctttgtgaaaacaagtttcttctttgtggggaaaaaagtgttagcaattctgttgtaaccccttttcttaatctgccaattaggttaattatggtttgaatagagtaaaatgtttttttaatcaaataatgttttttcttaacatcggtaatagcc

SEQ ID NO: 59980 - DNA, 822 bp, Populus trichocarpa
  Intron number 1 from transcript POPTR_0008s09950.1 (locus POPTR_0008s09950) derived from phytozome v7.0 (chr-ID scaf fold_8; pos 6160905 to 6161726 reverse strand)
ctggctcttgctgatactgacatcaattgggccaggtcggtgcactttcttcactcttaatatttactgggtttatattacaaatctcgttagttttaagtttcagcctgatcatcactggttctggctaccacgtatgcttgcttttattgcaccgtgtcgtaatatttaaaacaccagcgcgatctttctcgaggtggcatgcaaataataatgtctggccatgtaacaaagagagagaaacctaaatcaatttcaatttcatataatattatttgattatctactctgctttatacttctcttaagcaactacagtgactatggtgttctgttatacgaaaggataacctcctattgagcaatttactttaatggatttttgataatcaaattcgttgaaggcacattcacataatcattcgatcataaacctttttggcatccataaatcgattagagtttgtttttgagccagaagtaaattgtaattgggctagctgggtgctttctgttgcctttattcgagtgatgcccgagtagtggcatcaagtaggtggcaatgactgtgtcccatccatcctcatttccttttcagtaaacatgcagtgagcttgcatctaaactcacaattatttcagttcttcaatgacgagtcttgaagatgtttgttctcatcatcattttctttttgtggattttatatagtcatgtgaagcgctggcactactcgggtttttgcaaaatctaaactaacactacttgtaatttactggctctgactcaggctggacaagacgaagtttcatattattggtgctg

SEQ ID NO: 59981 - DNA, 935 bp, Populus trichocarpa
  Intron number 1 from transcript POPTR_0008s14930.1 (locus POPTR_0008s14930) derived from phytozome v7.0 (chr-ID scaf fold_8; pos 9941198 to 9942132)
attttgacggtgggacccaagataaaagccgattggtacgtgtttttgagatgcccttttgattttctggggtcttgggtcatgggatttgtttaattttgtgaatttgggtgcttcctggggcaattgggatacccttttggtaatttctgtcaaaagtttggaaatttggggtttctgaagggggattttagagtttggttttagggtatgttgtttaagaggagaatttcgaggttagggttggttggggattgcgggtgctgtaaattttgtgttttcttctctgcgcgtgtgaaattgtttcttgttatctttgttttgcgtggtgcacgtgtgaaaatttcatggattttcgaattagtattgtattcctcttgaaccacaagattgtgatagtgtcaattaagttatgcagtgaagaggattgctggggttaggtttcttcgcggttaatggctatgatttgttttctcattgttaatctttggactagatatgtatgtttactgtcctgtaattgactatctaaactgacagtatatgttaagcatatacacatccattgtcggaaagttctgtggcttctctttctcttctataatggtctcattgttgtgttaccttgtttaaagaataacatgtggagcagttttggtttacttagataaattctctctgtttttccttgtgttctactttttttcccctttcctataaggcaggtcaaattgaataatgattgtttccgctccttatttgctgatggtctttgtattgtagagtttacaccaatctcttacattgagaaacaagacatcaatttccttgcaatggagattttcctgttaatttctcttgctgtttttagttgatattgctattgaagtctgcaatttatgtgttaatttgttgtttctgatatagcttttgga

SEQ ID NO: 59982 - DNA, 406 bp, Populus trichocarpa
  Intron number 4 from transcript POPTR_0008s04040.1 (locus POPTR_0008s04040) derived from phytozome v7.0 (chr-ID scaf fold_8; pos 2232386 to 2232791 reverse strand)
tatttgtgccaaatactgatcagagaggatttgtgagtatttattgaaatttggcattgcatatattcggtggttaatttagctgaaaagggtaaaaatagagtgtgtttttggcaaaatttatgatgtatgcagaatgattatgcgattgtagccttaaagaatgtttcctaggattttcaaaatgttactcttctgtgtacgcaatgatggtgactgcatgtatatttgattgctaaaagaagttgaggctctggatttaatttgaaagctgcggaatgaaataagtaatagggtgtctatttacttggaaaggcacatgtacttcttggttggcaatctgttttgtagtttctaaggagctgagaaggtctcattcctattttgttgaattttcaggattaca

SEQ ID NO: 59983 - DNA, 858 bp, Populus trichocarpa
  Intron number 4 from transcript POPTR_0016s00390.2 (locus POPTR_0016s00390) derived from phytozome v7.0 (chr-ID scaf fold_16; pos 99913 to 100770 reverse strand)
ctgctttgagatcattgcttcggggacataaccaggttaattcttatacttgttaaagtctcactagtatcttgtgttttgtgcacctaaacttgagtaaaaattgacatttatgacatcatgtaacctagcaattggcaatgtcttaaccaataatgaatttcactttgtgattattgataaatcagatttctatgaagtaaataaaatatgtatttgaagtcctttcgatgatccattacatatgaacacactgcaagaatgtttgttctcaacttatcttgacaagttgcaatacgtggatagtgtttttttccaatagctgttctctccaaatcaagtgcaggcaatattcaactgatcgagttgtggaggaaaaacttcactccaaaataattaaactttcttatgacactgacatcaaactaacaattgcgttacagatattaacatgagaactacatcactctccattattgcttctggattttattttggtttcagttctgtcaattaattgcttggtgtactttaataagagatgctaaaatttcttatgtgtataataaaatcctgattttttcttagtactgaagcttcttataattaaaatcacacagtgatattggatagatttgcaaagtaagcctcattaatttcattactttagctgtctgctgtcctttcatgtttagaagcaaccccaaatggccaaataatgtatctttcttctagttatgcaacatttttttgtatctctttgagatcaatgttggttattattattttctaaatgcttgcagaaaaactatctaattcattaacatacatgattttctcatgcagaaagtaacagac

SEQ ID NO: 59984 - DNA, 456 bp, Populus trichocarpa
  Intron number 1 from transcript POPTR_0002s03540.1 (locus POPTR_0002s03540) derived from phytozome v7.0 (chr-ID scaf fold_2; pos 2202906 to 2203361 reverse strand)
cctgtactctcttttttttcaatctcctaacgtttttacttgattttggcttcttatttctttcttgggtatgtcttaattttggcttgttttgcttttttaatgtataatttacaacttttttaacaaaaagatcgtttcttttcttgctttgtgtccatacccttggaggcttttgatacatttcgtgtctgattcttgtctttttttcttttcgggtctatgttatttatagacattaaacacatgtactggtttagttgactcaatgagtgattttttttagtagtttccttcctacttgaagtagaacctctgttttattacattaacaatggcaatattggtgaaaaagggacagtgatgttgttgttggtcgtgtgatgaaaggggatttaataatgtgttctgggttatgtaggttgcaattgaagagcttgagcatatattaaaaga

SEQ ID NO: 59985 - DNA, 276 bp, Populus trichocarpa
  Intron number 3 from transcript POPTR_0008s07840.1 (locus POPTR_0008s07840) derived from phytozome v7.0 (chr-ID scaf fold_8; pos 4829246 to 4829521 reverse strand)
caacaattgtcctgctggagctacggtattctttacattgttgctcaatttaatatccagtctaagtaagcacttgtaactcgggatttgattccttgaccaggttaatcttgatttgttgaaatgttaagaatctgtttttgtttttttttccttatatattcagcctgtgggttcaattgaagatcttgagagaagaagattagtttgcttgacaaagggtactatgaactggatttgttatagattttttcatcaaatatcccattgggagat

SEQ ID NO: 59986 - DNA, 582 bp, Populus trichocarpa
  Intron number 1 from transcript POPTR_0008s10080.1 (locus POPTR_0008s10080) derived from phytozome v7.0 (chr-ID scaf fold_8; pos 6310968 to 6311549)
cgagggacgctggaattctctggctcgttgtgcaggtaaactataggtttctctccgtctctctctctctaacaccccttaatttccaatcaaaatatcaataactccaatatatagacggcaaagagccaaagaacaacttgaccaacatgtctcaatttgtttttgtcatgcttctatttaccttcataatcttcaatgggtcttccttgtatacttcaaataaaagggccaaaatcttcaaactttcctttcaatatatatatctatatatatatttctcgttgatgagaacttcgtagctaggttcctatgtgggaatttgatggtgtgaattattcttacaagaatgagataatattgcgatagatgattgttctttacagccgtacagctttatatcaagacaacttaatcgaaaagtttgtgaaaaagcacatcaactataaaaagtagtactagtatagagcgaaaatgctccgttttcttttccaattattaatttgttctcgtaataactttaccaaaacctaactcgatgaaacaggtctcaaacgaactggaaagagttgcagattaaga

SEQ ID NO: 59987 - DNA, 529 bp, Populus trichocarpa
  Intron number 1 from transcript POPTR_0008s19590.1 (locus POPTR_0008s19590) derived from phytozome v7.0 (chr-ID scaf fold_8; pos 13500770 to 13501298)
ggagattacgtaggtcagtttttcttctttttatgtgattaaaaatgatatattttatattgtttccctactccttttgaaggagaaacaatgatctattgatagttttctgactttataaaatcgtgttgggaattcgtaaaactgctgagaatgtgaggctgtaggagctggctgcgtttctaattgggcggcagactttgactgttaggagttgaatttcatttgcatatgggttaactgagttgtatgcttggtcgaaattcgagagcccctgaatttccatcgatggagcttgagatatatgcttagttctgatagaaatactgatgacctttacgtttgttgttaggttatggatttttttttttaattacttccgttttgttaacattgtttttaaatgttgaatggggatggtttagaacattctttgaagttttacatttactaaactctagctttttctaatattaccgattacatcaatgcagatcgtgggtactattcagtggagacggttacgctc

SEQ ID NO: 59988 - DNA, 554 bp, Populus trichocarpa
  Intron number 3 from transcript POPTR_0008s14450.1 (locus POPTR_0008s14450) derived from phytozome v7.0 (chr-ID scaf fold_8; pos 9586388 to 9586941)
acggtaggcttttctttccccgtagttctttggaaatttttgaaagacatagttcatcatattgggacttttttattatcaaatagattttgctccttttggtttccctcttcttgttcattcttcaattaaaaagtataaatgttgtgagattcaaccttcttttgttgaatttcttattgtattcatttccttgaaccaaatcaagctgcaattagaagattgcatcggatgtttattgctcatgtaggctttggtttggagctttggagtgacaataatttaagcttgttaaataaacggaagaaagtacaagggcaactgtagttaggtatcttcttaggcagatgggtctttatgctttgatgtattatctgatgatcagttatctatatgcttatctgacaaaaacctgttttagatgccaatatcatggatcatgtgtactgcttgctaaatatttgtaaacattaaccttacatctgcttgtgcgactttaaaaaagtaatgaaaatcttctgcagagaaagcgaaggaaggcagaagattataac

SEQ ID NO: 59989 - DNA, 348 bp, Populus trichocarpa
  Intron number 1 from transcript POPTR_0002s10590.2 (locus POPTR_0002s10590) derived from phytozome v7.0 (chr-ID scaf fold_2; pos 7677082 to 7677429)
cgagatagctgaattagcagctggtaaagtcttaggcaagttcaaaaaccctagtctcgacaatcccttcttttccgagtaccagtttctcgaatgctgtacttgcagccactttttatttccttttatggaaaattatagtaaaaatcatgtaattgaagaagaaattagttatgccgtagtactaatattctaaattgggagttcgaattattttgattatttagggatatttttcttttctgattgaagtaaaagtagaatttgcgcgtgtttattgttttaggagattaattttaggtttgatattactgatttttgttaaccgtgtgttccagttgcccagga

SEQ ID NO: 59990 - DNA, 712 bp, Populus trichocarpa
  Intron number 1 from transcript POPTR_0016s08640.1 (locus POPTR_0016s08640) derived from phytozome v7.0 (chr-ID scaf fold_16; pos 6448579 to 6449290)
ctgtaaacaacaacatcaacaacaattgttattaggtacacacatgtgtattatcaaaatttaagtagtatcatcaagttttttttttatccgatcatcattgtttccttctttttatggtttgattttccttgttttttcgtttttttattcttcaaattgcaagttttatgttgttttttttttttctgggggtgggtgggttatagtgagtgtcttttttagtgttttggtgatgataattcggttactggtttatcataaaaagagaacaaatcatgtgttttctttaatgtttttttcttcttcttttctgctgtttaacatgttttcactcttacagcgttgtttgagtttttcttttggtgttgttttcactgaaagcaaaccctgtgtaaggatgatgaaatggacatgtatatatggtttggattttttatatatatgtaatttttagggtttgtgagttcataaaaatgacaatgtttacccccccccttttttttttgtaatggttaagttttgttgactttgcaaaagtgattttgggtgaggtaattctgaactaaaattatgattattatgattgtttttttttattggggggatagattattgatgtggttcttgtgtctgccaatttgtcagaatgatatatatatttttttactttgtaggatttgatatttatttggaaggtttgttgataaaa

SEQ ID NO: 59991 - DNA, 735 bp, Populus trichocarpa
  Intron number 2 from transcript POPTR_0008s05940.1 (locus POPTR_0008s05940) derived from phytozome v7.0 (chr-ID scaf fold_8; pos 3497744 to 3498478)
gcaaactcaacagtctggtaggtaaccctgttaaaaccaggtctgtgaaattggtttgcaatttctgttgaaattggatgttgtcagtgaattgttttagacatcatttaggcttatggtttgacaacgattagattcattagctgttttgttttaaaggggtaggtaaaagcggcaccttgcctttaggcatccatcgcctccttgcctctttggcgatatttatatttcacccgttatgaatttaaggtggctagtaaatgggaatcatatgaattttgatcgttaattttatgaataaattccattgtttaaatcacatgggattgattttgtgttatatgtctgcccaattctcgtgctattgtgtggggctagcggtcaggtcaaggctttactgttcaactgtattttggattcttgaaaggcatagtttctgcttccaagagaaataaaccacaacggtcccgaatcctattccaaatgttttttgtacttttaataaatgaatgctgcgtcaggacccatgatattgtgatgatgttctaattcttccgcctgttcatgttgtcacttccttggctttccaatgccatgttttgaaccccatttttatagaagccagtagataattatccgctcttatcatgtgtaagaattattgcaaagtttattattacattcttctttttttcagagatttaatatgcacgatgtattatgtttaggtaaaca

SEQ ID NO: 59992 - DNA, 284 bp, Populus trichocarpa
  Intron number 1 from transcript POPTR_0016s05810.1 (locus POPTR_0016s05810) derived from phytozome v7.0 (chr-ID scaf fold_16; pos 3740013 to 3740296 reverse strand)
ttcgactttcctctctcctcccttctctatatcaggttccttctcttcctatttcttttcttagctatattttcaatttttaagcttgtagcattatgtgttatacacaatatgctcatgatcttgataaatatcaaggaattcttaatttcttgctttctttcaccaattgaagattttctttgaactgggtttttgttaccttttcatttggttttctgtttactttattataatgtcatttttttttatttgttggtgacaattattgttttttgggcaga

SEQ ID NO: 59993 - DNA, 733 bp, Populus trichocarpa
  Intron number 3 from transcript POPTR_0034s00220.2 (locus POPTR_0034s00220) derived from phytozome v7.0 (chr-ID scaf fold_34; pos 110122 to 110854 reverse strand)
ctacaaaggatatatttagagaggaaggtttacccgtacgatgctctctttctgtttattatttgtggatggatgatttaatttgcatagtgtaattcaaagctgctatgcagtagttgatttaatgatgcttgttgtagatgggtattaagaaatctaagcctatgatttgaactttacagaagcagggctactgaacccaggtggcttagtcccggtttaccaactttatggtttagtttcagtaaaatgatggaatgaatttcaaatgtagacctgttttttttttttttgcatttctaaacaccacctggatatttttgctataatcctttgaagaaaggaattatctatgttattattgagttttagttcttccatcaacaatgtcctgcttgtttttgagaatgcaatttctttctttttccttcttggtaacaagaggggtctgagcccagaatttgagaacgtaatttttaacttactcatgctcttcaagcagtgaaggtaagtgaaacatgcttttcttatagttacagatcttgatggcggatataacataccacagttcattcacttcatgccattgtgtttggttgaattttcatgaagtccaaatactgttcttgggagttccttctatatattttcaaaacttattttatgaaggttatataccattttctgctttttatccaagacagttgcttgctgtagggcttttggcgtggca

SEQ ID NO: 59994 - DNA, 575 bp, Populus trichocarpa
  Intron number 2 from transcript POPTR_0034s00220.2 (locus POPTR_0034s00220) derived from phytozome v7.0 (chr-ID scaf fold_34; pos 110892 to 111466 reverse strand)
tcatcaaaatcagattccaggtctttctttccttgtttcttttctgtaaagttttgatttttttaatggttgaattataaagtttgaatttttattgttctgcaatgatgggttttttaataggcttgataaattgttcatgaatctatatgttagctatccttttcaatgtaatgtgatgtgatgatttatatgaataaattttcactgttcatttctattgccaagtttttcgatagagtatatctgtgaagttctgttgtccatgtgaatggaattaacatgcaacttgaataagaatttggagttcacgggggaggccggcaaatggggaacattgatctttagatgaaaaagagctcatgctattgtgcagtaaaaaaagagggaagaggttggacagctgcaatttattttatacactggtgttagttatggtgtgtttgtctttcaaatgcatggttgtatttcgagtcaaaagtattaagttgtgatgctgagaaaaatattgggttgtgatttgatgacaggttcaactggagccgacatattcatgggatttggttcgcaggaat

SEQ ID NO: 59995 - DNA, 835 bp, Populus trichocarpa
  Intron number 1 from transcript POPTR_0002s06550.4 (locus POPTR_0002s06550) derived from phytozome v7.0 (chr-ID scaf fold_2; pos 4367393 to 4368227)
agagagaggaaaaaaccactctgttccatccaaaagtgagtcaagttagtagtagctgaactgttctcgtttcgctctgtcttttcctttcccctttgaaggagtaaatgtgaagtgaagtgatgcatgttaccatctttctttcgttaaacagatctttaacaaaaaaagaaaaaaaaacttgctactttttttggaaatgttgtgatggtatccttcgattttcttttctttttggtattgaatttagatcagctgtcaaaaaactatcctgattttgcattcaatgttaattaatgattacaaacgcagtatttaagaattaagcgtgtttgtgatgctatatttaattcctgaatcctgtttgggatgctttcaagtcctttttttaagcatctcatgattgatagccttttttatggtcaaaatttgggctgacgttttgtttgatgactttgtattaaatgggctcttgtaactttgatcagattgttgatgttggcgatctaactcttgatattaatgtcattttcttggccacttttggttagctttttgtgggttgttgttgtttttttttcttggttttgtttttgggatttaaagtcggaagataacagtgatacatctaatatttggttttcttttttatgatgttttgatggcaacctgtctaactatggaataattggtgaatgaaggactggtgtctttgtcagttattgcaagggggcagtgggtggagcgatacagaaatcatattttgatgcccagatgattagaactgatgttattggcagtggaaggaggaggtttcttctcatcttcagcttct

SEQ ID NO: 59996 - DNA, 400 bp, Populus trichocarpa
  Intron number 3 from transcript POPTR_0002s14390.1 (locus POPTR_0002s14390) derived from phytozome v7.0 (chr-ID scaf fold_2; pos 10652377 to 10652776 reverse strand)
ggttgccgttggcttgggattcgtagttcttaaaagtatggtcttcaaattatttttatgaataattattgtttctacgagtctaagcttacctttttatgttatttaatgaaatgtttgtcatacgatgcaatgggtcattaatttgttgtacaaggagttggaataaagctgaataagattgaatgtgaattgtattgaaattttgaatttagataatgttgctgccttttaatttagtctcaatgcatggtgaagtttgtaacatataagaagcattttttttctttttccgtctccaattgtctctgaagcttgttgcttctttcaaactgatggttattgctgcattttatgtcatgcaggaccaagacgcattttgtactacaagaccttgcgc

SEQ ID NO: 59997 - DNA, 485 bp, Populus trichocarpa
  Intron number 1 from transcript POPTR_0008s09690.1 (locus POPTR_0008s09690) derived from phytozome v7.0 (chr-ID scaf fold_8; pos 5992175 to 5992659 reverse strand)
tctctatctttcactcacttccttccactgtccaggttctctttctatctaaagtttcactctttagttactgagttttttatcttctttctttcaacttccatatttggattagtattagctgctgaatctttgatttcacctttatacttcactttaattgatgggttttgattgctggttagtggatgtgtgttttggccttcgtatgtgaagataatcctccaatatgcttcatatcgctgttttatcttaatttctaagatgggaaaaagaagaagaaaggatgttgttgctttgcttttattccactcacaatgtaaagttgcagctttttcgtttttgttcacaaaaaaaaggaggtttattaagggcttttttaaattattgttctgtttacttcttagtaacttttgtttggttggtgttttctaatctttaaatgttcaggtggcaattgaattggccaaatcatcaacagctga

SEQ ID NO: 59998 - DNA, 762 bp, Populus trichocarpa
  Intron number 3 from transcript POPTR_0016s01220.2 (locus POPTR_0016s01220) derived from phytozome v7.0 (chr-ID scaf fold_16; pos 518702 to 519463 reverse strand)
tggagcataaaggcctggtacccatatttgcttttcttgggttctttttatatctctttttcttgttggtcgttaatcaaggtagtcttatcttggacttgttgcatcatgtgatcttgaatgtagagtttgtgtagtgcttagcaatttttttcccctaaagaaaggagaattgttgatcaaatgctgctaaataatcttgaattcagatcagttattgattatatctgattggaaattgaatttagaatgcaagggggagctttaagatcccagtttgtaaagctaatggaaatacagttttaatcttggcattgaggtgatcttgttttgtaacaaaactgggaattgaatttaacatgccggaggagctttaaaatggcaattgaatttagcatcaacgtctgtaaagctaacggtaattgaattcatcgtgcatgaggtgctaaaatccttgttcgtaaagctgctggaaacaaagttttgatcttcgcgttgagttcatcgagtttgtaacaaaattgaaagtgctttttctattttgtaatgctagcatgtttcctttggactgtatcatcataactgtggagcagaggagaaaattaaaaaattataagttgctaacccatttgtgttaatttagcccggataaaagtgctgtggctaaacacacttgactatatgcgtgtaattactgacaattgtttattttatttctcaattgcaggtggatttagttactgagactgacaaggcttgtga

SEQ ID NO: 59999 - DNA, 927 bp, Populus trichocarpa
  Intron number 1 from transcript POPTR_0016s14670.2 (locus POPTR_0016s14670) derived from phytozome v7.0 (chr-ID scaf fold_16; pos 13828217 to 13829143 reverse strand)
ctttagcaggcctggcacaaaagcaacttttcttggtaaataagcagtgatgacaaggctatttacgtaaactacaacctgttattcatattccctccatcatcatcatcatctgcctctcggctcaaagactgctttaagattattgttttgtctgaaaggaaaaaaaaatggtgtctgagaaccttctttcttcttctaagagatcacctactactcctaacttctgcaactccttcactactcggtaataaacccatctttttgtttccctccatctcaacatttttatgtgcatataaggtttggtgggctgtcgcaaaatgttttattatttagttttcttcttgagggttttgtttactgttagaagattttcattttctaggtggtaagattttgggattataatataaagatctgttttttttgtcctctgtgtgtgtgtgtttatgcttaggcttggatatggagatctgcaagttgtcttgtttgtgcatttttattagtgttaatctttgtttttaactagctagagtaggtattaattattctaaaccatggattttttttaaaaaaagaaattaataacttaatcagttttttatacttaattaaccaaagattcccagtgtccttgttttatttgattagtacagtcctaattgcgcatgagtgctatagtatgtagattgtttttggagagaatggtttgatcatcttttgcaattttagctctttagttctaaaactcataagccatttcgaaaaaggactgaggaaaaggaaaagaatcccaaatctcaaattattttgtgctcctggactttctttaggggctagcagtgcccatgatttgaattcttcagaatccttgatcttcagcatcgtaatagatgtctgttcttccatacagtatcttttcag

SEQ ID NO: 60000 - DNA, 850 bp, Populus trichocarpa
  Intron number 3 from transcript POPTR_0002s26430.1 (locus POPTR_0002s26430) derived from phytozome v7.0 (chr-ID scaf fold_2; pos 23415966 to 23416815)
tgtggtgtctccgggtttatcagttcaaagctcaggtaattaatttagcctaagcttgctagctagtgcgtccgatccgttattaatacattgcctagctatgttggccaagacaagtatttgacttgcctaaggttcatgaatcatggctgtattttttattgttttcttgtggccgtggacaaaatagattgaagtttatggttttgggtaaacaggttaggttatgttcgagtgttttgtctcttgttgatgtccttctcgtgtggatgttgggctagagaatattagcagatgtggtaggtgtgtgtgtgtgtgtgtgaggagagaagggttttacgttgtgtttcacgagtagctgctgctgccaccacagtcaataaggtgttttttcgtggtcttaccatgtttttgatttttttttaaattaattttttatgtttttatactgttttaatatgttaatattaaaaataaattttaaaaaataaaaaaaatattattttaatgaaaaccaatcgttactataataccaatactacttaaattataagcttaaaaataaaacatttacgcaataataaagtgaattgagatttggagagatggatagaaaggactccataattgcttagcttttacagcagtttcatcaccacacccctcatgttcctccaaaaagtacattctttttgctagtatatcctttttctttggtatttgggatcattggactgcattgttcttttttctttttcaagtcccttttctttactttgggttaatgttcgttttctctctgtttcttgtcacagaattagcagaaaatccaattggactttcaccacca

SEQ ID NO: 60001 - DNA, 616 bp, Populus trichocarpa
  Intron number 1 from transcript POPTR_0025s00310.1 (locus POPTR_0025s00310) derived from phytozome v7.0 (chr-ID scaf fold_25; pos 99055 to 99670)
gagcaaggtttagattcgggggtaagtcaggagaactaatccaaatattttttttaaaaaaaacttgaaaataacattattttaattaaaaaatagaaaaagatcaaagaaatttttaccaaatttaaactaaaatttaccagattaatcgaatcataagtacacctgagtttttaactgcatgtaactttacaagtgatgatttgccggaccagcaaagaaacaaagaaaagaaaaattctatataatggccatcgttagtttgatgactgcctgtgatgagtgtacgtagtggaaaagatcaaaatactttcttgtcttcacagtggtttagaaaagaaacagaggttaaacgagttttatttaagagtaatcattttacattcttctaaaacaaaaaacaaatattgaaacttcatggaaattgatggactgagtcaacttccataaaagatccacttgatcaaagatgggcccgccggacggcaatgcatggtgctctcccctataaagagcctttggctcctaagaagtatttgatacattaatttcaagcagaaaccgaggggtacaaatgggattcaacaggttctctctgccagcagtggcggtgata

SEQ ID NO: 60002 - DNA, 941 bp, Populus trichocarpa
  Intron number 1 from transcript POPTR_0016s03680.1 (locus POPTR_0016s03680) derived from phytozome v7.0 (chr-ID scaf fold_16; pos 2040960 to 2041900 reverse strand)
cactccgttcactacttcctgcagccgatcaaagggtatagttctcggttaaccctatatattcttgctctttaattctctatgctagcttttactccgtgatcgcgccattgagtctgcacaatattgtagctcaatcggattccataaccctcttattgtaagaggtttcggattcaaaccatcttaattataattatcaaaatcatctcaatttaaaaaattaaattattataaatttgaaatttaaaatttgcatatttccactactaagtatacttaatttttttattagataaaaaaaattaaaaaaatttaaatttttaatcttttgatcattaaagttctagcaccatattaaaaaaaatcattttaatttaaaaatttaaatagttaagtgaggttctaagaataatttatattattttttaaaagtaaatagctcagttcataataatcaagtggcaaggagtaaattaaaagaagagtatattcctagtttaaattctaccacttgtatttttcaattcacgtgtaaacacataatcaaataaaaacctcaagttgacgagctcttccttgtagtttggctcttgaaagtgatcgtttacgcataaatcacatctattaataatgtgttgatcatgatataaaaaaacaaaaacaaataaactaactagccaaaattagattttttcttggtgtatgggaacacgatttgaatttttttccagagatatcttaaatttgtaacttcttgagaggctaattagctaatgaaaacacttggtaaagtttagttcaaagaggagggttttaataaaacatagtcgcaagtttttctcaaagaggaggacatcatattctaaggtcttaattttgatttttgtgatgatactcttccagaagaaattaagcataccgtatacagtttcacgtgt

SEQ ID NO: 60003 - DNA, 847 bp, Populus trichocarpa
  Intron number 1 from transcript POPTR_0008s00860.1 (locus POPTR_0008s00860) derived from phytozome v7.0 (chr-ID scaf fold_8; pos 405815 to 406661 reverse strand)
atcaagagagaccattttgattctgttgaagtatgtccctttcagcccttcttcataagtttctataatacttgattttatgtgtgtaggtgatcttttggtcattcaagtttcgaattttttcttatttgaagctgtgtttcttgatggggttttagtatggatttagatctttaaacccttttgaaagctcactgtgataattcccactttgcatctgacaagtagtgttcttgtagttcagtgtagtaagatctacatgttcttggcccaaatgtcttggctttatggtgcttataccttaatttttctttctttgtcacattctcatgagtctctggttgtttgtttgagtcaattttgttcttttgtcaagtttgtgttagatctttaaggtattgtcactgttgtattaatttgtttaattagtgacttttatcttacatttttggattaaaatttgagctgaggtgctgcgtttatttctcctctgagctactgatgatatagaaaaagcgaagaaaccgaattacttttttgctctctagttgtttaggctctcaaaagctctggtcttttttatgattctttcctggagcaaagtgagattcataattacagggtttgataattttcacttcttacctgagccattatcatctggagcatgctttcttgcgagtttgatattttggaatccaaggaagcttttgataaatttcattctatgaagaaacatgtcatccaaccatcattttctgtggatctacatgattctccttttcattattttgtattttgttttgtgaaaggggaaatttccaggagttagggacgtcgagtttga

SEQ ID NO: 60004 - DNA, 359 bp, Populus trichocarpa
  Intron number 2 from transcript POPTR_0016s03290.1 (locus POPTR_0016s03290) derived from phytozome v7.0 (chr-ID scaf fold_16; pos 1689420 to 1689778 reverse strand)
agaacttgactgctgcagcaaagttggccgaagaggttcttgaactttgccattttctctatatggctttatccattttctttttaattatgcatgacacaaagtcatggatgtgcacaaatgaggaatactcttctaaaattaaacacagcctgaatctacaattgaaatctatatcttgtgtttacttaacttaatcaaaggccatctgccctttccctttctgctagcttctactatacctttttgccttgtcttaaaagagtatgaacttctgatgtggatctatgaaaaattaattgtagttgtttctctaaaattcaggcaaagcttagagaggtggcttctttggaaggaca

SEQ ID NO: 60005 - DNA, 1027 bp, Populus trichocarpa
  Intron number 1 from transcript POPTR_0016s03290.1 (locus POPTR_0016s03290) derived from phytozome v7.0 (chr-ID scaf fold_16; pos 1690029 to 1691055 reverse strand)
tttgaggtttggtcacacattgtgttgttatctctgtaagtgcttcttttagcttcttttctttgttttattcatctgggttttcatcatttggtttatagagtaagggttggtgctcaatttatgctttatggttgcaaagttttgatcttggctttaatcttgagtgttgctttagaatttggaatgtgttttacttttctgaagaaagtttaggttttgattggtgaagaatttgttgtgtgtagaaatttggtaatgtgggctggagttgttgaaatgtactaatgtagttaagaacatacacttggtgactgcaagtataagtaaagaacatacttttatggactaatttgtttccttcttttattaaaagctttactaggatgacagtagtctctccttttttttcatggttgtaatattgagctggaaaaataagaggtttttattttctgtctatctatcatgttcttttgaatcattagagtagcttggaaaggtttgtgttggaaattggagatcggagttgctgcagatcgatgaatattctgttctttaaatgaagttattcgaaatttggtgcttagtaattgcatttgatttgtgagacttggtacttgtgggcattagcgaattgagtttcctcttaatttgtaaaattaaccattgatttcttgcatctttactcaatgtaatatatggcccttccttctcttcaactccttttgccttagtgcatttgaataataattccctcggtttgcttgtgtaatttctgatacaattaaatatgattgatcaagacttttgctagattatacgctgccttctcaaaacatgttatactttaaagtgcatttctatggtttcttaatttgcacaatcatctggaggtttgtgctatgaaatttgacgagatttgaaatttcaacgtgtctttagatttttctcttattcaaggtttaaagtttgatgatgttttttgggactggcttatggtgagcaggaacctaatctagcagaa

SEQ ID NO: 60006 - DNA, 336 bp, Populus trichocarpa
  Intron number 1 from transcript POPTR_0002s17350.1 (locus POPTR_0002s17350) derived from phytozome v7.0 (chr-ID scaf fold_2; pos 13126837 to 13127172)
ctgaaagaggtgagtgttgatttggtgaacaagaaaatgaatgggcttttgctgctttgtttggttgctgagaatggagaagaaaggcaaaataaatggggctttgagctgtactattaattaatcttggtgtgcaaaagattataaattttgatggagtggaggtttttgctttgaagggactaaaattatgccaaacttatgtttcttaatctgctgttctcttttcttttcttgggttttctcagcaaccaaacagagttttagacccacttaaacattatttaagaactttcgttattttgtgtgttttaatttggattttgatggtgtagg

SEQ ID NO: 60007 - DNA, 659 bp, Populus trichocarpa
  Intron number 1 from transcript POPTR_0008s14200.1 (locus POPTR_0008s14200) derived from phytozome v7.0 (chr-ID scaf fold_8; pos 9393273 to 9393931 reverse strand)
gaaggttcttccctgtgcttatctccattcatcatcattattattagaactagttgttgtctgcgcctggtgtgctaatattgttttcagtgcatgcggtggaggtttcatgttttctctaatgcggtaaggctgtgattgtttttgaggtggtattgtgcttttgaaaaaaaaatgattttttttttgttttaaattaattgtttttggtaattttggattgttttggtgtattgatgttaaaaataaaaaaaaaattattttgatacatttccatgtgaaaaacactttaaaaaacaaacgttatcataatgccaaacacttgtttcctaaatccattgtacaaactggtgtggaaaattcatctgggaaagtttttaatattatagtgcgatggatctgagcaatcaatttgatatttaccatcattgaactatgtccatcacagattgctacatcacttggtaaaatagtttaggtagttttgtattgtcctagaacaacaatgatcgtccttttgaacaacctggacttttgagcattttcttcttgaattgcgtatcataatggtggtcatttgtttcctaattttctctttatatggccactagaaattccttttagcctaatcagttccatccattgacagtactcaggtg

SEQ ID NO: 60008 - DNA, 346 bp, Populus trichocarpa
  Intron number 2 from transcript POPTR_0002s25540.1 (locus POPTR_0002s25540) derived from phytozome v7.0 (chr-ID scaf fold_2; pos 22594424 to 22594769 reverse strand)
tgtggatccattagtcgttgaattggacgaattaggtatgtttggttcatttctcttttactttatatttttttctttgatttcttgtttattaggtgctgctggttcttggataggatcactcatgatttaggctatttttagattcttccaaataatttgagttgttacaaattttaacagtacaaagttaacatttttttttccatttatgcattggatctttttctgggaaatttgatataaggttattaggttttgaactggtgaaaattgtttttttttttgtggaattttttaattttgtacaggcgctcaaggaccccagatacagaaagtattagag

SEQ ID NO: 60009 - DNA, 965 bp, Populus trichocarpa
  Intron number 3 from transcript POPTR_0016s10740.1 (locus POPTR_0016s10740) derived from phytozome v7.0 (chr-ID scaf fold_16; pos 9061196 to 9062160)
ccattctttggagtcccaaggagatcatgtaagttaaccactatagtgatcacctataatattttacaaccaagcaaattaaaaaagttttttctatcttaatggtagctcaactagtcagatattaggtttgtttttcaatgcttatgatttttagttccttcagggttactggagtcttacatagtcgttaatttcagaactcgtgggattagtcgagatacacgcaagttggctcgaacacccatattaattatttttttttaaatgcttcttctaatttttttttttatattatgtatatatttttttgacacaatcttgggtgagtaattattttattaactcaagatttctaattcatcacatgtttactagattaaaagatataaatgatggtattcaaacaagagattttctcatttttttttagttgatcacgtactacctgactgttattgttgagctactagctcacgaagcttcttctaattaattagtgaagaaccaggttatagtctgtttatgatcggcgaggataggaagaagtttcctgtgagagggtctgaatgataagaaaataacattatttatgtggtgattttctctctggcatttagcatcattactgtctcttcacttaaataacgagcacatttgtttttatattgtttgaatatgatgattttagaaaaataaaaatattattataatatatttttaaataaaaaatatttttaaaaacaacattattaaaaaatatatcaaacatgctattattatatgttgtgtcttctacaacatcaatcataaattcgttttcccagctggcctcaaaaccaaacgtacattgcagcattagtaaaaagcaagcaacacctatgagacttgtagacaatgatcatgtcacatcgcattcatatatattaaatttgtaattaataaatgtttcagattcctcgtgg

SEQ ID NO: 60010 - DNA, 609 bp, Populus trichocarpa
  Intron number 1 from transcript POPTR_0068s00220.1 (locus POPTR_0068s00220) derived from phytozome v7.0 (chr-ID scaf fold_68; pos 41550 to 42158 reverse strand)
aaagcaggagcccgatacaagcggcccccataaaggtaattaattttagaaactaaaacagtataattatttctttactatttattactatatatttgccaaaattcactgataactcattgttcatggagcattacgtatggagtttccttcaagattctgaatttggatctagttaggatcttttgagctaaacgctatgcatggcatggcttttgagataggagagctattgattactactgaatcaaaggttaatcaatgatttcttttctcttgtagtatagagctttacaagctcgctatgttttttattattattatatttcttctctgctttacatttgaattcccattcttcgtattgattgaagttctttaatctggatgaagagattaattatattttcaggactggcttcaaataaactagtggaatcctcatattttcattaatacaaatattctctccatctaattgataaataaatactatattaagtataaaaatgtgtttgcttataaaaatatgaactcagcctctaatatgtttgcgtattatcttttatttcagaagcgaaccaaggtgcttaacatccttaaaagggg

SEQ ID NO: 60011 - DNA, 616 bp, Populus trichocarpa
  Intron number 1 from transcript POPTR_0008s06690.1 (locus POPTR_0008s06690) derived from phytozome v7.0 (chr-ID scaf fold_8; pos 4007980 to 4008595)
ttgcaaatccactggtctcactagcatctttcacggtttgtgtttctttttttttcgagcaattgattgacgaattattgattcttttgaattgcctggattctaattttcatcaacgttgttgttaatttaggccgttttcagattgtcattttttggctagacatatttgataaattaattcgttgattaatgcgtctgttttgctttacaactgaccaaaatattagctcagtccagtctgtagtgacgaggaggtcaaaattggagctacaaattactttggttcgttaatttatcaaagctgatgattttttttttaaaatcctttagttgttcaccgagcggggctttgttaaggaatgcagtctccctctctttgccatacagaattttgaaattctgttctgttttcgcgtaactacagctctaattcgtatttatatgctgtatgctcgataagagtaccaaatggatttgctatatatgtattttaatcagagcggttccatgtataattctttgcatctggatttgattgatgaaaaatcgaacttactatttgtctttcctattttccatgtcgcagttttgcgggcagacagcataacagtcg

SEQ ID NO: 60012 - DNA, 664 bp, Populus trichocarpa
  Intron number 1 from transcript POPTR_0008s01240.4 (locus POPTR_0008s01240) derived from phytozome v7.0 (chr-ID scaf fold_8; pos 605363 to 606026 reverse strand)
ttattagcttaattcactctattacccttttaaaggtcagtttcattttatttatgaagaccccattttttatgttgaagtttatggctttcatttcgataaagtttgaaactttattgatttttgtcaatgattttgtggttttttttttttaaatgagaactgaatttattgtggttactgggtttttgtttacttgaattttgatatgtaaaacataatacactctgcacatttgcttggggtggttttgctcttataattctgttgttttcgttgtttttttgatgggtttgttaatttttgctcttattcttgataaaactatgttgtgctgggataataattaggcagtgcctggttacatggtagtgacaatggcagtgaaagaatgaaggagaaacaagaaagctgctatatgctttattttttcaagtgacttttgcttgaagtgtggataaaggcaaaatcttaagttttcttgttatatgttttttttctactatgcaatagccaccttttgtttttgttacaattcttgcttacaattagacatgttcagtaatcttcatggattagtgttttgaactggttacttttgtttaattctgataagagagattattcaggctgtttgtactgccgatcaagctggaataaacat

SEQ ID NO: 60013 - DNA, 688 bp, Populus trichocarpa
  Intron number 2 from transcript POPTR_0016s00240.1 (locus POPTR_0016s00240) derived from phytozome v7.0 (chr-ID scaf fold_16; pos 23135 to 23822 reverse strand)
ccataggtgttgagtttgccaccagaactctccaagtatttccttgttctctctttattgtcatcatcattcttatcataaatagaatatataattttataaagaacaagtttattttttttggtatttcattggtcttctattatccacttgttagtttgattttatgtatcttagcttatttatcttccttagctggtccaattccaaaaaattttaactatgatcacaatccctccccatttgtttattagtgtgtgactcttgcccttgtttgattactcttatagtttcggtcatataaatagaatcttcaccttgtacaacactatgtgctcaccatacctttgacaaccattacaatgcatagctccctttttgtagtccgcttgccatgcctggtcttctgtagaatatccatttaatatctctgctgtttacactttgcatctagacctctttatatgatttaaggtctcggttatcgatggatggttctaaatctgctgtctggatgtttgctaccagggcatattactaactgatgtttaatgcctctggttttcctgctgatgcagcgtgattttgctgcctatatgggtgaaatctaacagctagctgattattattgttgttattgttattattattgttgttgttgttattgttattattatggtgcaggtgg

SEQ ID NO: 60014 - DNA, 500 bp, Populus trichocarpa
  Intron number 1 from transcript POPTR_0002s08390.1 (locus POPTR_0002s08390) derived from phytozome v7.0 (chr-ID scaf fold_2; pos 5843779 to 5844278)
ttctctcctccactccaccatcatctccgtgtcaggttctcaatatttctgtcattctgctctctctctctctcttttcatttgggtttctgacatcttattggaagctgtttctgataattatggaaagaatagcttggtttcttttcctgctgtgcgtctttctgtataaatgttcatattgggaggcaacagtatagtcactgttgcttttgtcggtaacaggcgcatcagtttttaagcaatcctttcgattataagttaatcaccaactaccagaattatgtgtattgatggaaaggatgtttaaaagatgagaaaggtagattttgaattcaatgaagtttcttgtgctcaactattttgatgcttctaaatttcatgctgcaacgtgcttgcattcctttgtgatgtgcttcttatcttatcattattaattcctagacttgtctgcttgcttcgcagtggttttcattttggcaaatcaacgtttaaaaaag

SEQ ID NO: 60015 - DNA, 621 bp, Populus trichocarpa
  Intron number 4 from transcript POPTR_0008s06390.1 (locus POPTR_0008s06390) derived from phytozome v7.0 (chr-ID scaf fold_8; pos 3795026 to 3795646 reverse strand)
tgactgctcttgatcactggtcaccgcaagtgaaagtatgcgatcatctattattttgtacaattgcttcggttttgattgctggtttgcttcaaattgacgtagacttttgtcttttcaatgctttttcatgatggttaagttgtaaattctgtaatccaaatttctttccttttatgaaatatacagatctcctagtatactttgtggcttgtttatgaagcagataataagcattctgcgcccttccattccagccattttttctgcatctgcttcactgcatgtgaattttttggatagtatttcaaaagaatgtttaacaatataaacacaaggggtggagtgtttatagttgagtaggggaggaaatagatctactatttcaaagcagtcatattcttcaatattgaaccattgcaaacccttttcctttacacgtgttaacttactgtgacatgcctaagcatttcaatctttaaaattttgtctttatgtatgctgggatttatgataatggaaagggataatgtggagacaatatagaatgagtaacctacgtgttatggttgattccttgatggacaacactcttttttcctcctgttttagggacaaggc

SEQ ID NO: 60016 - DNA, 736 bp, Populus trichocarpa
  Intron number 1 from transcript POPTR_0008s04400.1 (locus POPTR_0008s04400) derived from phytozome v7.0 (chr-ID scaf fold_8; pos 2469975 to 2470710)
gggtcagtctctctcttaatgcgcactttttgttctgttttgttaagtcatttatggctctttttctgttatgcttgctttctagtttacagttgtcaagtggttatgcgtctcagtttgttttcataaaattgagatctttttgatgtttccaaactgagtttttcttaatctcaaaaagggtcgctgagcaaaatgtggaaagttcaataaactgtgaaagtttgagccttttatggtttatgttgccagaaaaaaaaacattttaaaactgtgatctgtttgtgatttttggttaaactttgctttgtaaaataacggggttgttgttagcaaaacatgtgttagtatgtgtgtttttctttttaagctacaactgtatataatttcttgtgttcttatgtcttacccttgatttgtgttgatttgaattgattggatggttggcaattgttttaagtttttccttgattgcgattcagtaagtgaagattgcggcaaaaaatgcttatatgaatgcttaatttattattcacgctgcaatctgtagatgtatttactggttgtgcactgataagtgattttcaattgttttagtaagaggaatttgagcaatgctgcacctttttcctgtgttggaactagaataggatttaatgacagtggcatgttactatagaaaatgcgtgggtttgtaacttggtcaatgtgtgtgtaatacagtaagactcgtgga

SEQ ID NO: 60017 - DNA, 974 bp, Populus trichocarpa
  Intron number 1 from transcript POPTR_0002s05370.1 (locus POPTR_0002s05370) derived from phytozome v7.0 (chr-ID scaf fold_2; pos 3504601 to 3505574 reverse strand)
acttcgtcaaagagaaacatctcctcaagaattctgtaagctttcagtttcttgtaattttatattttgtttactgaattgggcacttgataaatacttgaattttgtcttctctgtgctttatttgatccggctaacagtgctcaattttatctgtcaactgtaacgtttcattctgattaactgcttaaatcaaggtattaggttcaaagttttttactttacagccaaaagtagttttaatattccatatctgggaaaaaacgaagtgggtggccttgagatctggacttggttaatgaagtgagtatttatctggctttaatccgaccattaattatggtcacaaatcagtgtgtaaaaattgggattttttttaatgatagctaatcagtttgctatgtgtttttaccagcaattgcagtccataacaagtgaaaattggattgaaagtgactggatgagcttttgaattccgctaatgtttattctgtcagttgattttgccgtccaaaatgtttgtcttgtagtatgtaggtttctggacctgcatttaggttccctctctctgattgaaaagtagtaccaaggagagatgctaatgaatgataagcatcttatcttgtttggttgtggagaaaagaatcgagagaaaaatgggcgcataggatgctagagtttaattttgtttttctactactaattcctgaaaagtttaaagttgagctgatgcccttactctgcatgacagaatgacaagagatcttatcagttccttcatcttattttccttccctttgtttctatcattccatatcggcttctttagaaaataaaatgacatattaggctcttagaaaagctatagaaattatcctgaaaaagaaaatttgttaagtttgatgcatttggtacttttggtgatagcgaacttatgggttatgggttttaattcaatgcagctcatttcagat

SEQ ID NO: 60018 - DNA, 489 bp, Populus trichocarpa
  Intron number 1 from transcript POPTR_0008s20620.1 (locus POPTR_0008s20620) derived from phytozome v7.0 (chr-ID scaf fold_8; pos 14384922 to 14385410 reverse strand)
ggttgggggcctaaacgtggtcgccggcataaaaagtgagttttttttcaccgatcttttttggggctttttattgatccggttcgtgttcttgtttttattagatcaaagatcatgttctttgctatttttttatgtgaatttatagtatagttatgtgtgaaaatttggtatgggatgggaccaaattttgtgtctgatgatcactggatgttgttttgtgggtacttttggtagttacattcgacgtgcttcggtcaaatgttttgatgctttttttagaatgtccatgtcggtagaattatgtggtagttcaaagtttacaatgaacgcaaatggtgttaattatatgtctgattgaatctagtcgacgctgttatggtacatgttctactctgtgaaaagtattttatttagggttgaggtaatgattatctgtatatgttcgatctaggaattgcattatacttatagagttccgattgcttt

SEQ ID NO: 60019 - DNA, 554 bp, Populus trichocarpa
  Intron number 1 from transcript POPTR_0002s06390.1 (locus POPTR_0002s06390) derived from phytozome v7.0 (chr-ID scaf fold_2; pos 4252145 to 4252698 reverse strand)
ttttccggcggttagcttggcaacgagtgaggcaggttcttttctcgctttcttcctttccactttgtttttttttttttttttttgtgctgagatagcttcttggtaaaattctttagatgattcaaaatgaattttcagacattaataggaatcccttgtttgttgtttgcgtttttctttctgagaaaaaatatgtcgattgcctttgtaattgagtaaaataataagatagttttttttcaacgcatttctttgcagcttcttactgaaataaaaacaatcaggttggaattggtcctttagaaattaactatgaaattgaggattattgttgacatcttactttgtgtcagcagatcaaagatctgaatgaacctattgagattaaaatttcagaatggaataccgggggcctacttacgagaattgaggtctgtgtaccctttatgtatttgatttgtgtgtaaatgcattgcatgcatagtaatgataaatttttggaatttgctctttcagggattgcgagctttccttccaaaggctgagttaat

SEQ ID NO: 60020 - DNA, 856 bp, Populus trichocarpa
  Intron number 1 from transcript POPTR_0008s10730.1 (locus POPTR_0008s10730) derived from phytozome v7.0 (chr-ID scaf fold_8; pos 6738941 to 6739796 reverse strand)
gatttcatactcttcgaggtactgatttttttttgtactttggttcaaatttttcaaattggaaattagctgcttagggcatggcttggtatacactggagaaagtttttttttcttttcttattatcggtttggggagcaaaagcacgctgtaattttatatgtttttggcttgttatgtagctttgcttttctgatattgtctggtttggtttttgctctctagctagctggaattagttgcttgttttgttgtatatttgtttcttgattttattaagctgctttttgctgctttcattttgtcgagcacctaatatctggttacgttggagtcatggctcgctctgtggcatttcagtgggaccaaccaagccaacttaggttttaaagatgaattgtcttcttcctttttttcatatataattatttagcattcggggttgatgggaacattgtgtgaaggattggaaaaatatgggtggggagaaaatgggcggattttgaaatggatgcttttctcataaattttgatcgaatgaaaagatgctgatgtgcaatgaatttcaatggttaaaaaggtgaagaggaggtaaattgaagagagaaagatgttaatcatagagggtggaatagcaaaactagaattcttgccgggaagtggggttggggaggacaagttgtgcggatttatttactctatgctcttattgtttctatggcgaaccatcatttctttgtagtctttcgtatatattcatctggtgttgcttatctaatgttttatttatttattattattacaaatagttatacttattctagcaatgataacattgttatatgatagatttgg

SEQ ID NO: 60021 - DNA, 628 bp, Populus trichocarpa
  Intron number 1 from transcript POPTR_0008s04640.1 (locus POPTR_0008s04640) derived from phytozome v7.0 (chr-ID scaf fold_8; pos 2662965 to 2663592 reverse strand)
tctatcaaccctctcaccgcctttgaacacaagaggtacgcctacaaatcctctcccatcttctctcgccacgcgtcacgcgtcactttctttctttttatttctgagatgatctatcgaattccggcccctacagtttgcgtgatggagttgaacttcattagcacacacatttccctgatcgatcgcgtttataattactctttgactactctttgactttgactagtttgatcattaccgaacttgatttgtttgaatttggttactgtaatgcgtgatgtttggctaagtttaggaattaagtgtgaaatgcggtgatttttggtaaatctgatgttgagagatatggagggtagaattgtagttttaagtggaatatgttgttgtctagtttgagccagcgagatttcaaggttgattgcaggtaaattcattttatttagatctgtcttaatccatgagttttttttttaatttattttagagttatatatttttttctttgtttatttattgcgggcagaagtgtttgtgtgtatgtttgtgatttgcatgtcatcgggaattttcctgaatttttgttgtggaggtgttatgttgttaatggatattggtgtggacaggg

SEQ ID NO: 60022 - DNA, 394 bp, Populus trichocarpa
  Intron number 1 from transcript POPTR_0008s10280.1 (locus POPTR_0008s10280) derived from phytozome v7.0 (chr-ID scaf fold_8; pos 6436031 to 6436424 reverse strand)
gaggaagagcaggatcaagataagaacaagaaacagtaatttttttccttttcttttccttttgcactataatataatattggtattgtttttgtctccttttgtctcgtttgttaccgtgagtttctggttttattggaacatgaaagtaaagagtgatgagtgatctactgaaaggaaaatgaattaaaaagacgggtttttctttacgtttactgttttgtggaatttgatgcggggctttgtggtttgttgtgattcttttcttttttttcgttttgttttcgtttactttctttctttggcttttttcccccctctgaaagctctgagagtgtaataatgtgttctgggtttaggttaaaaccaaaaaagaggagccaaaaaaggctaa

SEQ ID NO: 60023 - DNA, 752 bp, Populus trichocarpa
  Intron number 1 from transcript POPTR_0016s06450.1 (locus POPTR_0016s06450) derived from phytozome v7.0 (chr-ID scaf fold_16; pos 4339315 to 4340066)
cttgtctcaattctgccattgccaatcttgcccttgtaagttctctttcctttcatgtttttgttggagagatggaatcttgatatgggatttctgtcaaatttgaaaacttttggctgatagttgtcagttacccttttggctgattatgtttcttgatacctagtttagtttgtaaagacatttgatttcgtctctgaattgaaagagttggaagtcaggaaaggataggaggagttatcagacgggttggtgaaaaaaaagaaaagaaaataaggcaataaaaagaagagtggagtaattagtggtgtctcttcgccacaaccatactgtttatattcagttctaaccagggttctagtttattcattgatttcgttttgaaaatatttgaaagagatttcgtatgctttcttgttctgttttgatgtattttcaaaattgctatatcaatttaagatcttagttgattgccttctcgagacaatttagctttacttgatgttcttgcgattaatcattcatgtcttctgatttatagtaaatgtgatgagccgcataggttccggcaaggtcttgtatgctcaatttcttttggttttaatgttcgctacaattcactatataggtcactaaatttaactaacttttacaggttcaacttaaaacagaataatttgactgctgaatgtttgtaattggtatctgtgttataatcacaatagcttttttattttgtagtgtgtgatcag

SEQ ID NO: 60024 - DNA, 1041 bp, Populus trichocarpa
  Intron number 2 from transcript POPTR_0016s00330.1 (locus POPTR_0016s00330) derived from phytozome v7.0 (chr-ID scaf fold_16; pos 60637 to 61677 reverse strand)
ttagcaatacaaaaaacaacaacgtggcttctaaggtaggcaaaccatgttttttgtcttctctttgcttttgagagtacttaacttgatgtcttaatctaccttgctatggccgttgcttacatctactcttggaatccaaagtttgactgctctcgtggctaatctcatctgtttatttgtgctctgcttcatttcacacttgcccacagcggcagacaattctcttctctaggccgtccttttttcctcttttttttgacactgttcactagtaataatacacttagtatgattttcgagggaaatttattctacaaaaaagcttgtgattctgaatatttgcacatcccaacttctcataacaaatgaagccctattccacccactgtcagttaaggtcccgtctcatctacctacaggcaatgtgcattatcaccaccacatgatcttaccatttttttcttctttcaattattgcaccctcccctttcatacttaacctttttatgtttgtagatgatccaaataactccccatcatatcagttaaattaattctcatttcactctctaataaccacaactaatcatccttctcatgaaggcaacaaaaataaggggcgcgcggaaaagcccccccgtcatgagttttggccaacaggttgctctccaagtcaaattttacctttcagggtataagaatcatcatcatatatagttctataaaaaaagaaaggattagtacaattgtagcttgtgaatcgaacaatatccttgataacttgttctttttatctactcttgagactgcactaacagcagactgaatttgagatgtctaattctttagtggttttttttctgggaaattttattttttttcttttgaggaatatgtttttatgtcttcgagatcaagatcaaatgtcatttttcataatgtgtctctcacttcaaactcctgccagggcatgctcatggatttgttttagctaacctgttaagttattcatgtgatgtggcagaacttgtgcgcaat

SEQ ID NO: 60025 - DNA, 409 bp, Populus trichocarpa
  Intron number 1 from transcript POPTR_0016s00330.1 (locus POPTR_0016s00330) derived from phytozome v7.0 (chr-ID scaf fold_16; pos 61766 to 62174 reverse strand)
atccctctgtttccatttataccacctccatcaatgtaagtaactcctcattccctaattttctcctgggaagagaagattctcttcctagataatccataaatcatcaatgcgctccccccccaccaaactcccaaatttacaagactctttgttttttccttaattctctttaggattttgggatgaaatcttataattaagatcgatatattacatacaatgatttatgacgacaagggtcccttttaatttctcctcaaaaagccatccttgtgcagttaatttgcatatatatatatatatatataacaagataaatttaattaatggaaggggattgtaattaattaagaagccagctaacacctgcgagtgaaatttacagatctcggattctaatctagca

SEQ ID NO: 60026 - DNA, 927 bp, Populus trichocarpa
  Intron number 2 from transcript POPTR_0008s13200.1 (locus POPTR_0008s13200) derived from phytozome v7.0 (chr-ID scaf fold_8; pos 8649327 to 8650253)
cctattctaggttgcttctcaatcgggctgttagggtacgtcattttcaaactgggctaagctagctctggctcctctttattttttagtgtttgtcaactgtcttcttgatatttcactttcttctcaattagttatcgattctagatctttcaccttgtttactggctatagcctgctgttttacgtttatatttttgaaaattatctcctggtttttacagctagttttttttttttttaaatacaccatgcatgattgttagcattttactataagagatagtgtgttattttctagcagcaagagtagtgtctttcttttggaacacactgggtttccttggaaatttgagtggggtggaccataaagattaataaaggcatattaatgcgactaagaattatcttgaactgggctgtttgttgatagtatatgtaccttgtgtgaatatgtttcaatgattagtggcatgaagcatgaactttgaagttgtaccaaataaaaaaaatgatgctcgtaaaaggacaaaggtggagtgagcttagatttgtgccaccgcatgtcagatcaattattttttccttatatatatatatatatatatgcccaactgttcacatcgagtttgactgcattggaggacagtgagatttattcttttatgctgattaaaaaacaaaaggttagtcttttgatattattattcgagaaaaatgcactagatcagttattttaaacattcgtccctaaacttgttttggaattatccaatcacgggttggtgtagacgtgtggtagcagttgtcattttaaacgaatgcacattttggaaatagagcgagaaactgaccgttttgtgggtgtatgtgtgaaacggtcacttcgtaggtcttcgactttgctgacagacatcgtggtgcata

SEQ ID NO: 60027 - DNA, 300 bp, Populus trichocarpa
  Intron number 3 from transcript POPTR_0002s08210.1 (locus POPTR_0002s08210) derived from phytozome v7.0 (chr-ID scaf fold_2; pos 5692722 to 5693021 reverse strand)
gatctttttcgaggaagtgtgtctcaagtaacaacgtaagacaagaaccaattttgattgtgttttcatttgttattggatttctttttttgttcatctggtgctatgatgattatccttctatgttcatgtcagttgcatatgctcttttttgattgacctttacgattgagtggtcatttctgagttatagcaccttaagtgtccaccatgccaaatagtcattgatgtagaatgttacagtttctttttttgctttttgttctgtatgcaggtgctcaaattgtggaagagattctg

SEQ ID NO: 60028 - DNA, 771 bp, Populus trichocarpa
  Intron number 1 from transcript POPTR_0002s08210.1 (locus POPTR_0002s08210) derived from phytozome v7.0 (chr-ID scaf fold_2; pos 5693755 to 5694525 reverse strand)
ttccatccgcaccagcttctcttttcgggtttcaggtataggctacactgttcatttcactctgattttttttttcattttctctaacaacgagtactaattatcgttcttgacgtcctaatttctgtctacctttcataattattaatcctcgtagcaatcccacgttcttgattttttttcttgatgtttagttgatgagatattgctcgtactaagataatttttctagggtttttttacctctccctcgcattaactctcttctttctttctttctttacgttcttgcagtaattgtttcttgagatttcttactcgttcttaacatgttgtttctttaatggaaaaatcaattttcttttatctccatctctactctcgtatcccatttttagcgagagctgtagttcatctcaagaaaatatattatcttccaaaaataggttagaaataggactgatgcattgttattactgatgccttttgcttgctagtgggaattgtgtgttgaatttacgagtcatatatatacaatgcgtttaactatggttttgctgtcaatgctatatgcttgcacatgatattcttcgaaaaggacaatttttttggaggtgaaaactgtattttcagtttcttttctgatatattgtatgctcttatttattttaactattatgttcttgatatttgatgagttttattttacttgtgaaacaattgattttgatttcaatcagtgatattgttgcccatttgcagagtacgctg

SEQ ID NO: 60029 - DNA, 716 bp, Populus trichocarpa
  Intron number 3 from transcript POPTR_0008s09160.1 (locus POPTR_0008s09160) derived from phytozome v7.0 (chr-ID scaf fold_8; pos 5680134 to 5680849 reverse strand)
tgtgggatactctattgaaacatgtaaggattcttgacgcatcctcacaagtcacatgaacatgaatctaccttagaacttgacacatgttgctttcttcctttcttttttgttattttctgcaagacaacgagatagatgtgtactcaacctcacatggtatatttggcagtaaatgcagctttcctactattctaataatgggaaaacgtatgcatttatattcttttccttggagatctttatatttctaaagagcactattaaatcctgtcaactgttctctgaataaggtcagtcatacatctagttaacatgttgttgggactacagacaaattttgtggatatcaaggataaccaagtctaagaaagcaaaaaataagacctttgcatgcatatttataggggtttttatcatccacccacctcatactagaaaccttgcattccatcctctagatttctttttaaaggttagggtttctgttctttgcattataatttttgacgttatgatatatatgaccatggcaatgcaatgcggttttgctgtaaggtttggttgctaagacatacaaagagcccaatttgcagcctattttcatgtggatctgctatttccttgttgcgtcattgctgtaggggtttctgatgattcttttctatttggcttttataggccaagtgatttcagctggattagacaagaaggta

SEQ ID NO: 60030 - DNA, 969 bp, Populus trichocarpa
  Intron number 2 from transcript POPTR_0016s14940.1 (locus POPTR_0016s14940) derived from phytozome v7.0 (chr-ID scaf fold_16; pos 14014497 to 14015465 reverse strand)
gactccgagcttcaacagttgcttcatattttcaggcatgcttctctcttattcatctaatttaatttaattttgcgctttatagataaaagaataagtgttattaacccggtttaagttgatccaatcaagaggttggatcccgagttttatgagttaactcgaatcaacaaaaaaaaattaaaaaaaaaaaaaattttaatattttatataaaaaaattaagaaaaaatccatgtaaaaagaggctacacatattgtaaataataaagtttaaaagaatattttaaaaaaaaaaattatcccacattaaaaagatattatgttaagtttttaagttgaaatatttaaacaaaaattttttttatcccacatttaaaaaacacaatttttttcatgggaacatagaatatatatcttaatggatttcaaatttcacattgaaaaaacatagtttttttcttaggaacatagagtatatatactaatgggtttcaaatcctacattgaaaaaacatggtttttttcttgtaaacatagagtatatatattaatggatttcaaatcccacattaaaaagatattatgttatccttttaatttgaagtatttaactcaaaaggttttttatcccacattgaaaaaacataacttttttttaagaacatagagtatatatactaatgggttttaaatcctacatttgaagaaaaaaaaaacatcgggtctcggccgggtcacgggttgacctgctgggtcgaccgggtttggccggatcgttgcaccggctggttttttgacaaacccggaccggtccagctcccgggtcgacccgccagtccgggtttaatagctatgaaaagagtggcttttgcactttaccatacatttacttttataaattacgtaagctaatttctaccgattaattccaaggttgttaggaacaccaactgaagagcagtggccag

SEQ ID NO: 60031 - DNA, 765 bp, Populus trichocarpa
  Intron number 1 from transcript POPTR_0008s08010.1 (locus POPTR_0008s08010) derived from phytozome v7.0 (chr-ID scaf fold_8; pos 4945123 to 4945887 reverse strand)
cagcctaacaagcattttactgaggaagcagcacggtgagtactcaacttgtgctacgctttatctatctatcatcaataacttttgatattgagctttgtggttacattctagcaagaattgtctgaatattagcctttggtctgccagtctgatggtgtgttaattatatgctgatataggattctgccaattttgcaaattgcaataatgcaggcttaggttagatcagcagcagtttgaaaccttgcatcttttccagcattgttcacaacctgttctcgcttaattttatctattcaccaccatgctgtttctttgccttcatgttgtaatcagaaagttacattttacaggtaattcaagcatgttaaaggttaatcaacggtatgattatgccaccctcgccccttctccatttaaaacggatagaaattaaaacattacccttgaccttgaggttggctttgatagtgattggatatttaagatatcaatgtcacagacatttccttcagaaaataaaaaataagaataccatatacatggtggctgttctcctttactttctgccagtttcatgagatgtcagtcgatcaaaagctgaatctattctttcatgaatcaaatgacaatttttttattatattctttgcctttttcccatcaatgtattttccgttctacacgtaacacatgccttggttcttctgcaaattatatggatgtgatatattctatgtaatgtttctgttgacagatttt

SEQ ID NO: 60032 - DNA, 450 bp, Populus trichocarpa
  Intron number 4 from transcript POPTR_0016s13270.1 (locus POPTR_0016s13270) derived from phytozome v7.0 (chr-ID scaf fold_16; pos 12473422 to 12473871 reverse strand)
cattatgtatgtttctactttctagactcatgttcattgctagaaactgtttaatttcctggagatatgaatccgatccaatggtttaatttcctgatattgtctttttaagtcattattctagtttgatgtgaacaaatcttctcttaaatctaaacatgttgcattgatcaataaaaacatctacaaagtcattaacatgatcggttcgtggcacatctctatctagttatagcaaattatttttcgaatactcataacctttaattttatataaccccggctacatcataattccatccatattttaatggaattcgcttagttggtggattttgtctccaatctttgttaggctttccattatatagaggtgtcaggatatgtttctgtaatggaaaacgtttacggtttctgagttaattaacttgggctgtctttgattcagct

SEQ ID NO: 60033 - DNA, 888 bp, Populus trichocarpa
  Intron number 2 from transcript POPTR_0008s14850.1 (locus POPTR_0008s14850) derived from phytozome v7.0 (chr-ID scaf fold_8; pos 9867091 to 9867978)
accaagtaagaaaacaagtgctgagaaacagtaactgcctgtgtattcagtttttcttttctcttaatccaagaactagaccatactataaaaacaaaagtttcgaagttatgcgtattgaatgttcaacatatataaaaacattgttaggattgttgccattatgtgcagcaatcatagagcaattatagcctatcttctagaagaggatggctgccattgccattgtcaaagagggctgctaggtgcagccacctttgttgaagaagagctggagttggcagccacctttgttgaagaagagctggaattggcagccaccattgttgacaaaagagctggaggagctgccatggatgcctataaatagaggcatatgttagagagcaaaatgagagagttgagagagggaaagaagagccaaagatgtgagaaatgtaggagagagtgggctgccaaggcagccagcagtagctgccattgcagcactgagaagagagaaatagagtgaggttgagagttgctaaagagaggatgattcctcctcctctattgttgtaaatcttgttctctccctatataatcaaatggcttctcccgtggatgtaggcggtttgccgaaccacgttaaatattgtgtcagtgtgctttacctcctataggcaaatatcagaacatcaccggtcggaattccctacaaacataacattgtaacagtataatctccaatcaattcttaactacaaccaccaataattagcagttccaaccatgtcaaaaatcacaaccctaattaaacagaacctagttttagcacctaattataacttcttcctaattgcattaataatttcttcaattggtacgcgcaggcattcattaaagcac

SEQ ID NO: 60034 - DNA, 821 bp, Populus trichocarpa
  Intron number 1 from transcript POPTR_0016s04140.1 (locus POPTR_0016s04140) derived from phytozome v7.0 (chr-ID scaf fold_16; pos 2359936 to 2360756)
ggaaattcgggttcgggtcggatctgaaacccaaggtgatttattttttcttttagtttttgtggggttgggtttttgggatgttttaagagtggttgattttttatgggtttgttaggatttgggttttcgggtctggtttaggatctgggtatctggtaaatgctgattccgatagtatatgatcaggattccattaaaaagattgattagacattaaaaatttaaatttatggatttttttattaatgatcttggtttgtatttttgggttttttttattaaattcaatattttcagctttattttctgtcgatcatgtgtatgataattaaaaaaacggaaaataaaatattttgatttctgcaatgtatattttttgttttatctgatcactgaaaataggagcgaggcaagttattttgatgcagtcttggtttggctttaaattgtttgatcaccgcaaagatacgatcaacaagaacgtttctgttgggtgattgtgttaacaattgtttgaatattgacccgttcattttagcattgcctatgtggataatttgagtcgaatgcatattagtcctagaattagtttcatttagcttaccctggtttatggcaatttgttcggagtttaactactttctccatctgtcctagttgttcgttagttcaacaactgaactgatcgttgataaatgcagctaccagatcgaatgttatggatattaagatgttttgttcttttgaaatgtttacttttgtgagttatgtgatggaaattaagacacttgctttcataattttgcttcttggcagat

SEQ ID NO: 60035 - DNA, 326 bp, Populus trichocarpa
  Intron number 1 from transcript POPTR_0008s22800.1 (locus POPTR_0008s22800) derived from phytozome v7.0 (chr-ID scaf fold_8; pos 17578442 to 17578767 reverse strand)
gtcactccgctagatatcttgagctctaggcaacggtgaggttttgttatgtcctattatatgatgattaagttgatatttatgtgatttaatcgagattaaatttattgtctttttttattgtagaaatgtcaatttttttgaaatttttataaaacaattacatggagatgctttagataaattaaatttatcttcgtatagtatggctcggcatgatgtaatcagagaaatttaataaaaaaaaaaaaaaaacttaaattgattttgaagatttgaatctaaaaagagcatgtcttctttgtttgattttagagctggattga

SEQ ID NO: 60036 - DNA, 605 bp, Populus trichocarpa
  Intron number 1 from transcript POPTR_0008s02720.1 (locus POPTR_0008s02720) derived from phytozome v7.0 (chr-ID scaf fold_8; pos 1371696 to 1372300)
gaagactccatcacagcgatttctccaagtcattggtacgccctttgaagtgtttgttttactatttcttaacattttttaccagttattatttttttgtgggatttacaatagatttgtagtttgtctttggaagatagaactttgggacatatttgacatttgtacgggtgatgatgttacttttatttcactttgatgattcagaattcaatcaataagttaaatttatgacagtaatagagatggtggcagattctggagggggtaatgtggttgtttcctagtgagggtagttgccaaagaggaagtttatagatgctggttagcttgattgataaaattaaagtatgtctgttgcattaaggcatgagattttcagtatatatttttatttctgaacaagcaaggtttctttgaagtaggcagttatcagaacaatggatctgggtattgctgcttgctaatggtttcttttgctttcttttgctttctttctcttgaatattgttggtgattgttattttgatgatataattggccctggtcctctttagtgagaatgctaatggaattattggttcttgtattttgcagggaaagat

SEQ ID NO: 60037 - DNA, 406 bp, Populus trichocarpa
  Intron number 2 from transcript POPTR_0008s02720.1 (locus POPTR_0008s02720) derived from phytozome v7.0 (chr-ID scaf fold_8; pos 1372308 to 1372713)
ttgttgtttttggtttccggtccaaaacaaagcaggttaactttagctgctatctcttcttgcttcagctcttgtttttcctccaaactatgatcacttacagatggattttgttttttcatttgcaagatttatgctgttataaagaaatatggagttcatgattttgatttttgcttggttgggggttaaaaagatgtagttgagattgagaataatcttctgatctgcctatgttttttatttttttgtgggctaagaatcagaaatcagggattttgagggtttatattttaaaatcaactgaggaaagatttgattggatgggttcaaaatggtggattgggtcatcacacctgacatgttttaagttacttgccttttcttatgcagagacgggccatat

SEQ ID NO: 60038 - DNA, 755 bp, Populus trichocarpa
  Intron number 3 from transcript POPTR_0008s12740.1 (locus POPTR_0008s12740) derived from phytozome v7.0 (chr-ID scaf fold_8; pos 8224966 to 8225720)
gaagaaagtaaagaaacttcttcagaggattgaaggtgctgactttctcatcgtcttttttttttatatatataaaaaaatctatgttgtaatattcttaccctcttccttgttgatatggaattctggactgcttagcttgctcttttttcatttttacagtgcagtctttttgctaataaattggtagcaaaagaggaatagttttgctttgattttgtagttggattcatcttgaaaaacagagcactatgaacgaatgaaatgggaattaaaaaggctaaaattatagccctacaattttgctagtgaccgaggagagcacttgtgctctactgttttccatgtcaggaatagattaatgattatgtttcatcatgtagctttattgattttccttaaattgagttcttcttggtctctctgacattcttttctttcttttttgggttaagatgggggtaacgagtcaatgtctaattcccgcagaaagtgtaatatgtaatgattaattatctggatttatcaaatgtagcttcacatgaggaatgatcattcttttaggcttttccgtagccagggaatttgagatattcgcactttagaaagataaggtgacttggattttttttgtagaaaacaaaaggttgacttagatttggtgaatttctagtggcttgtccaacttctaaaattttctcttgtttccccttccctaaaactctcttgtacaggtgtttaccaagtaaacatag

SEQ ID NO: 60039 - DNA, 690 bp, Populus trichocarpa
  Intron number 1 from transcript POPTR_0008s10810.1 (locus POPTR_0008s10810) derived from phytozome v7.0 (chr-ID scaf fold_8; pos 6798237 to 6798926)
tgctccccttccgtttaatcacccgccactttcaggtacctttgcctttcttttgaattccaggttcgttattgaccgttaaaatactactaaatccaaaccccggtatgtatacacatctacttttatttgatttctgtacatcacagtattgttttttttacttgctttatttaattaatcaaggcgggttggctgtgattttattgaggacttttggagaaacgtttttgctgggatcgaatatgaatttttgaatgttatgagattcatccataattctgagctctaaaaaagggctttgatctattttaactgtcgttcttttccacttttgtcttcaaggaatagcaatgtctcataaaaactatgtgcccgcatttgtatcagtgcttatgcattaattgtttgtagataggctatgatgcgctaatgaatgcacttactaggaaatattgcagtggaaccaacaagggttcgtgaaaatatgaaatctaaacagcttaatttgacgagtgatataatgtgaactgcctgccgttgcgaattctgggttgtgtgaaatcttagttaaaatgtaaaaagaaaaaaagataataagtgcgagttgtttcatatgtctaattaagtggctggattttaagtttaccaacagttgctcgcaggtctgattgtaaaaattggttagga

SEQ ID NO: 60040 - DNA, 751 bp, Populus trichocarpa
  Intron number 1 from transcript POPTR_0008s08410.1 (locus POPTR_0008s08410) derived from phytozome v7.0 (chr-ID scaf fold_8; pos 5214069 to 5214819 reverse strand)
caaaaggggccaaagttattctttctagtcatttggtacgtgggatcttgttcaatttcattttttgaatttgggttttgtagcatttctgttttgtgcgtttcattgattctgatggttttgttgactctgtgaatttcttggttcctgcattgaatctttgatgttatgcgactagaatcatagcattgacttttagttgcacaataatctgaaaatcactctttattttctatatatatatattggtgctggtttattggaatcacacttgcgtgctaatgggtccgaaattcaggtagtaatttatgatatgcaaagttcttctgttgcttttgagagagttagcgaaattggcagcaggtttgcaattgtgaattgccgattgatagaatgttaagaagggattgaatgttatagcttgtcttcttctggttatccaacgatattatgctctgagaactgcttcagtaaagaattacttttgactgctggatttggtgtagaagctagttcttatattggtaactttagctagtgtggtgttttttatacatgataacaattgtttgcagaaatatctcaataacatttaagtttgcggatttacttctggtcataataggttatccgtgaaaataatttgggttcgtaatctctgcttaatgttagtggtttgctcatatgagctgaagtgttttttgattatttttcagggacgaccaaaaggtgtaactccaaaattcagctt

SEQ ID NO: 60041 - DNA, 283 bp, Populus trichocarpa
  Intron number 1 from transcript POPTR_0008s17010.1 (locus POPTR_0008s17010) derived from phytozome v7.0 (chr-ID scaf fold_8; pos 11440003 to 11440285 reverse strand)
aggactcttgttggccaagtacgtattgctactgtatgtatttcgaaatttattattcacaacacattttaataggcgagtaaattgatctgtttttgccttgtttttgttcaagattgtcattacattttctgcatgcgtgaatgggtttacactattttcttgtttgttttttatgattttgtgctccgttttttcttattaatttgattttggatgcatcataattttcgttttgaattcatgatcaattcatgacttgttgtcctcttcaccttcacag

SEQ ID NO: 60042 - DNA, 947 bp, Populus trichocarpa
  Intron number 1 from transcript POPTR_0008s14530.1 (locus POPTR_0008s14530) derived from phytozome v7.0 (chr-ID scaf fold_8; pos 9639912 to 9640858 reverse strand)
gctgttaaacagtcacttcgtaggtaattgatttttgcttttactttttctttttgtttggtgcttagaactaggaatttgtagtgaaaatatggcaattatactcttacttggaaaatagacatttcttgttaatcttgtgaattttgtctcgtattaatttatgactaatgtgaaccttccgtaaacatttaactctcaaccaacgaccgttctttgttctgattagttacaactaagtttgagaatgtgtgattgtgaaaccacaggatcaccgaaatctttcatgaacaaaaaataacttcaggaaggttgataacatgtccattcaagtcttcgctatctgagtattcaaataggattggattttaagcaggcgaggatttatgaggatgatttagagagacatctggaattcgaaaatcttacttgcattcatgcccgaatatggtttagctatttcatcttttttgtttcttgcgttctagttctaccagcacaaacacaactttgtaacgtgctaactaattaaacaacaccaaaagttagatcaaattgatagaggatgatgctttaatatattataacattacccgttgagagaattagaacaggataacctttgttacactaatatcacaaagtgtagtttaagatttttggatttatgtctcctttgataggcggtgccttgttttatgactgcatgaatttgccgatgccttcatgacatttccatgatccacttcacagtactgtcagtacagtttattacaattttatatgtttattggtaaattaattacctgtgcatgatgaccctaatctactagaccagtttcaatacctgcagcatctaagtacagtgtgtggaactagagtggtttaatttaatgcgcgtggaacttccaggaggggaattggttggaatcttctgaaggcaagtg

SEQ ID NO: 60043 - DNA, 782 bp, Populus trichocarpa
  Intron number 4 from transcript POPTR_0002s19240.1 (locus POPTR_0002s19240) derived from phytozome v7.0 (chr-ID scaf fold_2; pos 15165141 to 15165922)
attcttggctattttggtggacattataccttaatgtgagttcaaattggatggctgttgcgtataatccttaccgtactcatggttctagtgcattaattttcttataatgtgagttcaagcattatgctcttattttggtggacattatatcaatccttgcgtataatgtgagttcaagcattatgctctgattttattcatctaagtgaagtataaaacttttttgatattttgccaaataccaggtgtgcaagaaataaataaatagtgggatcttttactatatttagatattgatgtagatgagtggtaagatatgcttgaaatgctttgcatgacagcttaaaagctgcaacagtggttgaagaacaaaaattttaatttgttaatagtatggagcagtatggtttccacattatatatatatatcagggcaattaacagcagaaaaattgttgattgatatggttacaaatgaagtgatggtgtagtatttcttgaagggcactatatatagaggcatccttgtgcttggacaaaaacttagttgattgtttatccaatgactaccctgggagaggaaataaaatgaaataatatttggtaaatttcgtggaagtctgatgcatggtgccctgctgcttgtactggatcctgtatgcattaagttaaagacaaaagacatttcacttgaattctcatcgtttcttaagctggtacttcccatatttcttattattataggctgctgcttgggtcatccttggaatattttcagt

SEQ ID NO: 60044 - DNA, 411 bp, Populus trichocarpa
  Intron number 1 from transcript POPTR_0002s18880.3 (locus POPTR_0002s18880) derived from phytozome v7.0 (chr-ID scaf fold_2; pos 14792123 to 14792533)
tagccccagagcagctgattgctttgacctctcaagtaagaacaagcaccgtagaaggaaacacgcagtattgaagagtgggtctttctttattactattccttttcaattattgagttttttattgccaaaatcaacatctaaatctttgtcgttgctcaaatgggcgtgtttactcgtagcttctattcatttgaaggaaatgttcattactatcatggtttttcttttaattttctttattctagcttttatacataaacacacaaaaaaatcagttttttttcatgctgtatttgactctttatctgttgcactcaactgtctccactgtttctgttatatgcatgctaattctttgttaaaaatgaggcaggttcttttctgaaacaccaggtaagtgaagctgat

SEQ ID NO: 60045 - DNA, 735 bp, Populus trichocarpa
  Intron number 1 from transcript POPTR_0008s01000.1 (locus POPTR_0008s01000) derived from phytozome v7.0 (chr-ID scaf fold_8; pos 470097 to 470831 reverse strand)
aaagctggtacacacatcttattttcttttcttttcacaagttaattgtatctttctttccagttttttgttgcaaagaaataatctcttaaaaattaattaattacttgaaccttcttgatctaggtgtcaaacaattttacaataatcaaaatactacaaagtatttatatatctgggaccatatattaattaaagaacctaccaaatttgtcctttcttggttattttcttcagatctgataaagacaatgaagaaatttaaaatctttgaatagtatttgtcgttgtatagaaatgtttatctgctacaggaaatctctaagctgtactgtggctaatgaaaaacatggcggggtcggttttcctctttctctccatgtgggttgttggatctttgatttgttaggcatatgctatttgtttctttcctacaggagaaatattattggatgcttatgctgctcccacctagccttagtacactcacatgctatgcattatttttttcctgtttcatgtcagatattaaccaataattctatggatgattatcttatatggctttgacaaagtcatgtccgtgattagatcaattaaaagaaagttgaaattaatttgtgatattgaacaagtgaaaaggatttatacctatatgtttggttaatgataatgacaatcctgattaacacaaggattagttgactaaagaaattgatgcaattgtacagggca

SEQ ID NO: 60046 - DNA, 706 bp, Populus trichocarpa
  Intron number 2 from transcript POPTR_0002s15470.1 (locus POPTR_0002s15470) derived from phytozome v7.0 (chr-ID scaf fold_2; pos 11562273 to 11562978)
cacagtaagttttgacacattaaaatggcctatctatatagggtttttgctatattttgcagaacatgcagctagtttgagattgaggctttcttcttgttgttccatagcaagcaaacatttttttttcccctctaatcgatcaagaaaattttggttctttgttagcctcatacgtaaacgtaaaacgtacctcctattaactcggttttcatatatgtgatgaaaaccaacagacttgaggctctccgcttctgcttcctttttccttctgttgttccccgttagattaagattcaattatattcatgtgttgtattctctttacttcctgatggacgaagtacagatagaattttgtcgttgttatcaaagttagtgctgctaactctacggcttaaaacttgagagtattatcaaagttggttttgtgctttgaaatcccgccaccaatagagccttagagatcttttcaacaattgaatactgtgttttcttcctcgcgccctgtttctcctcacattgaagctcaatatttggtggacattgttgttgctattcagctgtttagtttgcttcgattgtgttcagtcaaacctataaagaaagtgaagtcctgatgctcttgacttcagtgtaccatctgatattctctgaattaatcatagatgagactcaatatatcttctttcaacaggtgctccat

SEQ ID NO: 60047 - DNA, 832 bp, Populus trichocarpa
  Intron number 2 from transcript POPTR_0008s01020.1 (locus POPTR_0008s01020) derived from phytozome v7.0 (chr-ID scaf fold_8; pos 481467 to 482298)
aaattagaaaggtaaatttcttgtcttggtatggaattcatgctcaacatgacatttacatgtttggctaatagttgattgttatttaagtagtgcaatgattgcaaagtctgtagtaattccatgttttgttccgtatcaaaatgcagtttcaattgcataattggctattgaaggttatgcaattttgagttagaggcttagagcatgaccatgactataaactcgtgcatgattaaattacaccaattcagccctagtgattctacttattggtaatgagatagtaatctagattgaagcatttgtaggggtgcccctatgcaaaaaaattgtgatgggaagtatctaaaacatgaagataaacactcggttgaagttggatatccaatcgattaataaggttatgtaaatagaacaatgagcatatcagtattagtaatcagtctaccaagactgtttaacttgtttcttccttccagaaatagctggaatctgtatctaagacctggttttcttatggatgaagaacttccagaaataaaattgtaacaaaagcagtgcataatccatactgtcctgtcaagttttagagataatttgaagaaaacaaaggtgattttgtgagtgatgccatccgacaatctatgataatgatgattcacagcatgcacgcttttcttctcgtattttttgctatgttaaaacatcaacccatcaaaacaatctaaaaacataaaaaatatatatttgttaacagtatatttgtgtagacatttttatcatcacgtaatacaatctgtgtgtttttctgtaggaaagcgaggaactg

SEQ ID NO: 60048 - DNA, 943 bp, Populus trichocarpa
  Intron number 2 from transcript POPTR_0002s16140.2 (locus POPTR_0002s16140) derived from phytozome v7.0 (chr-ID scaf fold_2; pos 12048907 to 12049849 reverse strand)
atcaggttgattctcatttctgatttcgattttatttgttttatgaaaacatggagcgttagaataatactaaattagaattctgtgaattttgttaaattgttttctagaaattcaaatattattcccattacattttatagttttaccagtgttaacctcaattgagtcgaggttcttggttatggaaatggctaatgtgtgattttatatcattttatttccgaatctgttatgagaggagatgagcctgaattatagaagcttttggattttgaaattgtgaatcttaagggagatttgttaggtcaatcaagcacatttcttactgttcttctgttatcatgaaaacaatcgtaatttaccaccataggtgatttgctgtcaaactggcgatcatttcatttctgatagatatgacaattataagctgtgaagatctagttcctttagctgttttgttgttccatgctcaatgactatttttatacctaggcttgaccttgtcctaagggtccttccatctgttatccactcattttgcaaaaatgtgacctgctgtgccgggagaggtacgcagtcactcaaccatagggagaggctcttatctgaatacatagtatgtttagattcgaggggtgagaacctccttcaaagtgtgtgttttgcccctttggaaacttcgttttctgattcctttcctgggaatagttgcctggtccgaacccctttgtagctcttctttgccaaaccttcgatggaatagtgtctcatgtaatggccttggactgtgatggcatttgtcagacaatgttctgtgagttacttgtttattgtgtataaaatacaattgaatgtgttcatcattccactttgtttcctttgttttttgttcatttgttatacagagattcagttcacaggagcgagagaactctgtgaa

SEQ ID NO: 60049 - DNA, 720 bp, Populus trichocarpa
  Intron number 1 from transcript POPTR_0002s16140.2 (locus POPTR_0002s16140) derived from phytozome v7.0 (chr-ID scaf fold_2; pos 12049964 to 12050683 reverse strand)
ctcagctccatttcggtccttcctcctcaatcaaggttcgatttaactatcacgactcgcttctgttggattcttttaagattctctaaaaccatagaaattgagtttctgttttgacatggtctagcttagcttagcttttcagatttcaaaaattgaacaacagaaacagcgatgtgactttgttttcttttcttagatattcctctgttttcgccgtatccaaacagaaggaatcaattgtttgatttcgttttccagttcaattgttttgctcgtatttaaatgatctgaaggagattagctgcttttgatatctctgtgagatctgtttggatgctgagaaaatgtaaacagaggaaatccaaaaacagctgcttaacttcgttaatctcgttcttctttttatttttctcacagagagaaacttcaatatttttcttcttcgcctgtgtgtctagccttaattttataccgatcttaaagacctattctatttgttgcgtagaaaaactggagaagatgagaatatatgtttatgtattgttaagaatttcattacgtcagttaattaggtgatttttgaataggatatgagagaaggtatttaacgatgttttcattgttttgataaaaaaaaaaaatctaactaattgtactgtttgttcttttttctgatacaaaggagatcaagttctatacctgttggaccacaacaag

SEQ ID NO: 60050 - DNA, 918 bp, Populus trichocarpa
  Intron number 1 from transcript POPTR_0008s08330.1 (locus POPTR_0008s08330) derived from phytozome v7.0 (chr-ID scaf fold_8; pos 5168107 to 5169024)
actgtgaatcaggtttcatcaaagctaggaaggtcagtttcttttgtatacgtgtacttatatagtataggtgtatgcgtatgctgtttgcaaaactgattgtattgatttctgcttgctttatactagttttcatcaacatatgtgtgcgatgagggattgattgtttcttttgaattattttgtacaattttctggtaattagtgttaattgtaggttttttaatttagtggtgtaaactttaaatgtattctgtggagaatttgaagttacattgagttaggctttgttaattggtgaatttagggtcttgcttgcaaaagaggagcaaaaggaagaaaattcttcttgttgcaaaaagaaatcatcactagttttttttggaaaaaaaaatcttagtttgtgtaaatttaatgcagtttctttgtttcttttaatgtttcttggattatgtgatatgtatgtgcgcactcagcctgtgttcaagcaaaaattttagtttgtgtaaatttaatgcagtttctttttttttttaatgtttcttggattatttgacatgtatgtgcgcactcacctgtgttcaagcaaaaattttagtttgttttgttgcctgtgcatgcacagtctgtcttcactgtgaaaaaaatggcaatcttactgattgatggtttataaatttctattataccaagttgttttctttgtgtttattaagcatatattcatttgatgggttataactatgtgctgaatcttgcagttttatgttaattatggtcatgtaggaatttaaacaaaaatcattttcaatgtgtgcatgttcactttatttttctttaagtttcttcttcttcttttttcttatgcatttgttttctacagcacaagttaaatagaggcaaccgtgagaaagtcca

SEQ ID NO: 60051 - DNA, 883 bp, Populus trichocarpa
  Intron number 2 from transcript POPTR_0002s17790.1 (locus POPTR_0002s17790) derived from phytozome v7.0 (chr-ID scaf fold_2; pos 13626258 to 13627140 reverse strand)
ctgatcccatttacaagtaaattttgagcctgccttcaattcgtgttttactacatgtgcatctagttctgtttatttgtgctcttcagtagtgttattcatcatccgtgtaccaatgtaataaaaggaacaaatctagctcttagtataatgctactacatgaattgcccaaatggatatgttgagaaaggaagttttgaacctgtaaatgtgatttgcacccttaaatttgtgtctgtttctctcacattgggacatctattgtgcacaagagatatggcagggctcctgtccatgctattatattcctgtgcttccatcactttgggtcgtatgcattgagagagcatgtacatattaattttcatggacaattatggatgcgctggacatttagaaatggtctttctcatcttttcctacttgtttagcagccttacagtactagctgctcttttaaggagtctctgttgagctgtttctcatatctttggtatttggttctgcaattttggtctgcccctgaatttatccgatgtacattctggtcaacaaagattttcttacagggaaccattacaaaataccatcaagtttgttttatgttggtgtcttttctatgaatttatagttcacgtgttcaaattaccggattacaattttcaatgagaggggctgcacccttcattaatgtttttgttatcctaaacaacctgatttatgccctttgtacattctgttttattctcttctcattatcggctgttgaattaagtaattttacgctcatgtatagtctcctataatctccattgtgtgcatgctgaaataatttggatgttttgaaattaggacttgtgttggacagtgtgaaaaatccgg

SEQ ID NO: 60052 - DNA, 393 bp, Populus trichocarpa
  Intron number 1 from transcript POPTR_0002s17790.1 (locus POPTR_0002s17790) derived from phytozome v7.0 (chr-ID scaf fold_2; pos 13627159 to 13627551 reverse strand)
ttcactttccaactgctttcttcaagaaacataaggtaaatcacccattttgctgatctattatttttctctattcaagctcttgttttggtccttttctaactatgttgaatcaattactgtaaagtttttttagtttttttttactacataattttaatgtgaacccatttgcatgtttccaaaatgcatgatccaaatcatcgaagaaaatctgtttcctttttggtgtttattgttaactaaagaatgaagtattagcctcttacttgtatttgccccttgttggtttttagcaagttttgagctttttaattctcgattatttcttaatggtagatcaatattgcgttggtttctttctggtgttttcaggtcttgttggagctttag

SEQ ID NO: 60053 - DNA, 898 bp, Populus trichocarpa
  Intron number 1 from transcript POPTR_0016s13560.1 (locus POPTR_0016s13560) derived from phytozome v7.0 (chr-ID scaf fold_16; pos 12736072 to 12736969 reverse strand)
actgtttgggaggtgatagaaaatgatatgcacatcattcattgttttttttttcccttatcaacttatcatcttttctctaatgatctattcataacctctcattatgttttggtagttaccatatttcttggcctttgatttattttcgtttttgtgattgtagttttaattaattttcaatcattgatttttctcacacataggatatgttgttttatggatcaatgcagataattcagaaagattcatgaagatgaaattcaaaaattttgctgtaatattgaacttgtttatacatattttgatgcatgtgatgacatcccattgccttatgcatatagttctttttctgttgttgcctgtgtcccatgttttcatagttttctttggatgttacttgccttgtcaatacggctaggacaatttttcgggtttccagagaaagtttaatttcccatgtatttttattgtatgcttgtcatgtatctgtgtgttatgatctggtgttcttataatcaccctgcacctgctgagcacaagagaagaaatattgaaatttttcgattaattgctgccttcattgctatctagttggtgatctgaaatgcattgctctgacttgagaaaaattcgtgaaaaatatataggtttataattagcatcattctcagcattgcagggctttgaacagaagaagtttttatatcagttaagctaatttgaggtttaaatttgagaaagagataccatgcctcatcttcatttatgctccaattagatgcagtatgtttgccctatatacctacatcgttcttttgaatggtagaacgtgaacaatcttgtgtattcgactaaactttgaagcttgattcaggaattaacaggtgataaagat

SEQ ID NO: 60054 - DNA, 505 bp, Populus trichocarpa
  Intron number 1 from transcript POPTR_0008s18490.1 (locus POPTR_0008s18490) derived from phytozome v7.0 (chr-ID scaf fold_8; pos 12482192 to 12482696)
tgattgggaacatattacctgcaacagcagtacaggtcgagtcacctttctctatctttgggagcacaaggaaccaggagctgggagattggtacttaaatgcctccttgtttcttcctttccaacaactcaacggtgtctacttgtacggtaatcgtatagctggttgggttgagaacaaaggtttgctctcttaagtattacaaaatatttatattagttttatttttttataattaatcaaatcaggtgttgtttaattactatcattcattttggttctctacagtaattcatcatcgaagaaatagaaatcattataatcatgacatcatcagtgaaacaattacttctcttactttcactttcaccgcctcaacctctttacatggattcactataacaattacatgcctcttcatcgatcataattaaattactccaatgatatcttttttttttcttacatgaagtcttaatttatttattttttatataggtggtt

SEQ ID NO: 60055 - DNA, 814 bp, Populus trichocarpa
  Intron number 2 from transcript POPTR_0016s11050.1 (locus POPTR_0016s11050) derived from phytozome v7.0 (chr-ID scaf fold_16; pos 9586191 to 9587004 reverse strand)
gctcggtaagtatttaatatttttttctacagttacataacaatagaaatggggaaggcatgctttgcattccaatttgttctctggtttgtgaattttgatctctatctgtgatagattagtgaggatctgtttatattaatttgggggagaatttttttgaagaatggttatttgcttgttgacttgatggaatctcttggaataggtaacttactatatacgagactgttaattttctgtcaaatccaagttcgaaaagaaaacactattttggcttcatggatgacattttgtactatgtcaactttaggatgctactcaaaaagtttattattttatatcagaaagtttgagtcgaagtttattattggcttgcctttttctcatcatagtatctgaaggactgtaacaatctcctaaccacacagttctgtgaagtgcatgtatggtattatattcaaataatattgccattctcaagcaagatacctaggatgtattgtttatcacgcaatatttttgcatttttatcttgccaagttcctgtcctttatcttgttctaatttttccttctatccttactgatttcttgttgcattactgtcattcttgcacatgtaaataggagtagtcacatttatatatgtagtctttttttttgtactctggagatttaaatgttgttttccttttcctttcattgatttttcttgaagtcttttttaaactaatattttatattccactgatttgtacagaattttgaatacacgcgcgcgcacacacacaaatttatgtcttaattgcagg

SEQ ID NO: 60056 - DNA, 226 bp, Populus trichocarpa
  Intron number 4 from transcript POPTR_0008s13800.1 (locus POPTR_0008s13800) derived from phytozome v7.0 (chr-ID scaf fold_8; pos 9097619 to 9097844)
cttggagctctgtggaactctgtgagagactgcaggtaatctttttatgaatcatgacagtttcttaagaacttgttgcactacaaatgaaatctaataaagggaaaaaaagaaataaacgatagggaacttggctatgttcgaacatgtcattaaattaattttgatatcttaactcatcttcttatacatgcacatggtaaactaatcctactccatgaaagat

SEQ ID NO: 60057 - DNA, 981 bp, Populus trichocarpa
  Intron number 5 from transcript POPTR_0008s10870.1 (locus POPTR_0008s10870) derived from phytozome v7.0 (chr-ID scaf fold_8; pos 6842816 to 6843796 reverse strand)
atacagtggtgcccacactagtaccagttttgttcccatgcttgcttacaattgtatcgtcacctcaggttaggagttctcatattttgttgctttttccaaaagcattatttgattggttttagtttttttgctggctatccaatgggaattttttatgaatggaaatgtgaacttgttcgaagaaaaggtgggcatgccagtgcatgctaagtatatatgccagtgaccaaagaatagagcaggaccatgagaattgcaatttaaacagtatcacggtgaccaaagtggcatgagattcctttgatgcctacatgaaatacatgtacatgtgtcatgttgcccaaaaacagtaacatacaaaagttccctgttttcagtgatgcattactattgcaccttcatgggatgtgttggagtcaaactagctagacttatgtggcttggtgcactctttggtgtgtgcttatgtgttccgggttctttattattttgtggcctgaaaggaaaattgatttttttttttaaaatcttggtgaattctgattcctagggtaaattagtaagcagcaagtggtataccatggctgcatgagagatgttactctttctgcatttatgacttcaaattacttgtgtaattccgtggcctgaaagcaacaatgaaaatgttgtgatgaaatcttgatgacttctggtttctatggtgaataagtgggtgatgggtgacatactgtggttctcttgagagatattattcattcttaaatgatttgaaattacccatgtatctcttttcttccttgtatttctcatagatattttcaggattctgcatcacagtttggtatatgagtagaccctaattttgtgtatggaaagtagtcagtatcaatctgttaaagttgctttcttgatggcaaaaccatactcctgttcatcccgtggacttactatgtcagaacctgtttaagcagaatt

SEQ ID NO: 60058 - DNA, 554 bp, Populus trichocarpa
  Intron number 1 from transcript POPTR_0002s09330.1 (locus POPTR_0002s09330) derived from phytozome v7.0 (chr-ID scaf fold_2; pos 6638255 to 6638808 reverse strand)
ttgaatttgatcccagctttctcagattccagcaggttcgtttccatccttctttcttttggttcacttgaaatgtcaacttagcgaggcttaatgggtgggttttgtttgatgtgtgaattcgagggactctaatttatctactcttttttttttgggtttaaggagtggttttcttaagcaaaaccttttgtctatctgttatcattgtttctaagatcttgcatccgtgaacgtgatacactctactaaggtcttgtttggttgcttataactagaactggaacatgatgggaactggggttctattttagttagttgcttaaacgcgagcaattgttcgtgacgtcacggaatgagacagtctgactctatgattgagctgtttagttgatgtgttcatatttaccttcagattcactttgtttcttcatgtttgtcaactgctcttgattcaatctgaagagaaccaaccagagtaaataaatttcttaagagatgatactgtcgattccatgagctatacagttaacatattccttttctggtgcagc

SEQ ID NO: 60059 - DNA, 1055 bp, Populus trichocarpa
  Intron number 1 from transcript POPTR_0016s03840.1 (locus POPTR_0016s03840) derived from phytozome v7.0 (chr-ID scaf fold_16; pos 2145868 to 2146922 reverse strand)
gtgcgaccgtgacatcattaatgtaagtatatttgtgggttcttgagaattttgttgttgatcatatggggtttggtaatttagcaaaagtcgttgccttttttagatatatagactcggatttcttgttttacacatgttagaatgcttaaccatgttgtggtttagaaaatattgatattcgtgatgctggagttgattgttatgacagaaagattaaaactcgtgattttttaaaaaaaaaaactcttttggtttatgcaaggattgatgatagatattgaatatgagaggaatgcaaggaaagggtgaaagttttaagatagagaataaagggttttcgttttttcgtttttttgttttttttgttttgaagtaagaaaattgagggcaatagaaatcaattttgctaaaaatataggtcccatctggagccggttcatttttattttataacggtctttgtaccccttcaagactcttaattcatttttcttactggttttggaggcatttacaatcaggttgtgtaaattttgtgtgcttgacagttcgtctatatcatcatttttttccgggaatggaatcatgtcacactgttcttttgctttggaaatattgtatatgtttgctcttgctttcttcactgctactttttcagctgaatggccgtctcctgatgttttccctgtgtatatttgaaactaagattcgtttaactttagtgtcctagtttgctaaagaagttctgctattgtcctttgtcatggtatgtaaatactttagagcaagaattgcgaaatctttttataaaaatggaaatgaaatgttggaatgctttttctctgatgttgcatgtgtttcattcaatcccaacccccaggtctttagcatttatgttgcctttgctacttaaaaatactaaggacctttaagttgttttgcaagcattgaatcaatagttaattcaattttccatgattttgtgttgtggttaacactctgtccttttgatgctagggctgtgagagggagattgcagaagctgctgaagg

SEQ ID NO: 60060 - DNA, 644 bp, Populus trichocarpa
  Intron number 1 from transcript POPTR_0016s11540.1 (locus POPTR_0016s11540) derived from phytozome v7.0 (chr-ID scaf fold_16; pos 10774797 to 10775440)
tggcttctgctgcaattgtggaacactcattctatgtaattcttcttctttcttatattactactaagattttttgtcgacgttgaggaagtacttgtatatagtttcccgttttggtaaattacctcatgcaaaggttgcattaggattgttgtcgttaattaaacgatatttgagtggccaggatatataggatggtagccctgttataccttgaagtttcttacataggaaaaacattcatcaaatcagccatacctttttgttttatcttgcgctcctaaataagatcaaaatcatgttcacgcttaaatggaagggatcgagagaaaagatactacctttgatactgcaacgtcccaagattcaatatcctactagaaaagaaacgtgggtgtcaattgaactacgttcttcagcaaattcaatgcacttcttcccacgatcatctaagttatggaattttttttttcatccactttggaccgacctagattgcatatcctagcaatattagtctgtcggagagtgtatatatataggcatgcaaatatattttctacttgcttaaacattttctacttgtttaatttattgtgaatgttttaggtgaaaaaccttacagttcgtcggctgtgctccga

SEQ ID NO: 60061 - DNA, 565 bp, Populus trichocarpa
  Intron number 2 from transcript POPTR_0016s11540.1 (locus POPTR_0016s11540) derived from phytozome v7.0 (chr-ID scaf fold_16; pos 10775523 to 10776087)
tttaacaagtcaccctacgacctgagtattcactggtaaatccttggttatttatttaagaagctagacaattgtaaaaattctaattagtgtattagaaaataaacacgttaaattgtaaactctgatgaaaattaagactacacgtttcgagcttgccaagtattttcactagaaattagcagcttgataactatattcatgcacaacttatcctggtatataacataatgttgtctcttgttcgatttgcaataacagtcagttgtttcttattttttgttttaactcaaccaagataccatccttttccttagtcgaccataaaattagaacataatatcaaatttgtcttcaagttatccaataaaaaaactacaattgaatacttgagaaatttattcttcaactactgtaggctaatataattatgattaacaaatttaccgaagacttggttctataactgacatcatcgtagtcgtcatcatcactattatccctcatactttaaaatctatcattattcaattaattactgattatctactttttttatgtaggc

SEQ ID NO: 60062 - DNA, 1036 bp, Populus trichocarpa
  Intron number 1 from transcript POPTR_0016s02130.1 (locus POPTR_0016s02130) derived from phytozome v7.0 (chr-ID scaf fold_16; pos 1026201 to 1027236)
caaggatttcaaagaattcactgaatcttcttcaggttcttacctctctcttgctccaattatttgatttttagtctttttttatgattctatgtatttgattaaaaaaactgattctttttgggattggatttaaggtttttttttttcctttttcatgctgggatatgaattattattaaaaaaagagagagcttttagactctaaagggatttttttatagaatctaaaatcttgggatttaagaaagactaggttttttttttttttttttttttttggggggggattgtgattctgggtagggatagattctttagatttgggaatatacttaaatttagcgtagggatgatttttgggttttgtgtttatgaagtttgtggctttttaaatcaaaattctcgttcttttgttgtttgaatgaatatcgagctttgaattttatttatttattatcttgcgatgcaaagcaagttatgatatatggtgagtaagttggttttgaattgtgtgaatattagtttggatagcgtgattttaggttggatcagtaatgtgctagttaggtgcgtggctttcgatagtggtgattggaactttacatgattttctggtaacctagtctttactagatagaattgctgtgatgcgattttgttagtgtatgctatagctgaaaacccatctcgcatggcaagtttttatagctgatgcccagcttctgttacaaattttttttattttcttgaacttcttcaggttctctcatcatataaggtcaattttattggatgcacattggggcttatactgatgcatattgttttacttgttagtccttgtcttttactcctctgtgaagggtgcaatctagtcttctatactagaacgtgaattcagataactcatagttttcctactgcttcatgagtttgtcaagcttgctcttctgttaactctgcaacttcataactttttttttcaaactatctttcaggtgcactctttgacgcttcacagtacgaatttttt

SEQ ID NO: 60063 - DNA, 427 bp, Populus trichocarpa
  Intron number 1 from transcript POPTR_0016s00370.1 (locus POPTR_0016s00370) derived from phytozome v7.0 (chr-ID scaf fold_16; pos 88371 to 88797 reverse strand)
caagatcaggaagtccccttagagccctcaaagaggtaagatatacatacggagactcaaacacatagaagacagaggaaaaaagagatcaaagtttaatttatcttgtcgacacaatgatttgattggagctgtgagttcattattataacacatgcatgatgtatctttcatttcatttgtagattcagctgttttctttgaattttgtatgatgagcattttgtctcttggttttggccctttgtatataacagattctttcatgtgatcactctcccagctagtttcttcaatgaatttcagactacatggcattttttattccattggtagagagtcttgtatgtacttgtgaatcgggttggttttctgagcatgcaataatgtggccatgatatctctctacagaaacataatacaggta

SEQ ID NO: 60064 - DNA, 736 bp, Populus trichocarpa
  Intron number 1 from transcript POPTR_0002s11140.1 (locus POPTR_0002s11140) derived from phytozome v7.0 (chr-ID scaf fold_2; pos 8181248 to 8181983 reverse strand)
aagtttacgttttccctgctgttacccctgaaaaggtctctcattttttctgttttccataattttaactctaatattttggaattttgtatgaatatgatgcttatgcacgtatttgttaatttattgtacggattggtactatatattcgtttattttctacttttgaatttagtgtaaaggctgttttacttttgaattctgtatgaatgcgatgcttatgtacgtatttgttaatttattgtacggaatgttactatacattcatttattttttacttttgaattttgtgtgaaggctgttattttggtgctacaattttttttcttctttttttacttcatatatgttggaaagtagtaatcgtacttttgatgctttcttagtaataccaaatttgtgcgcattaatacgtgaatggagatgcttttggttttcaggaaatcttctacatgaactatgtatatttgtttccgtggttttttgggaactgcagaagaaatcgattgcatcttcttcaatcacattggatgcatatttgcttgctatacatggattagcctaattacttggacacttacaattaatgcaattatttgttttgttcttttcatctttccattagttttccagagatcttcctatagttctctagttcgcttactttaaatgaatgatattattggttttgactgtcaggtgcaagcagtgctcttgcttctgggaggacgaga

SEQ ID NO: 60065 - DNA, 776 bp, Populus trichocarpa
  Intron number 1 from transcript POPTR_0008s00640.1 (locus POPTR_0008s00640) derived from phytozome v7.0 (chr-ID scaf fold_8; pos 280045 to 280820)
ttttgctaaatataaggttagacccatcttcacattccctcttctttcaaaatcttatggctttatgttgtttttatcaatgattcttgcgtaaagattgaaactttttttgttttggtgatgtgaagattgaacttttggtgctgaatagtactgaatttgtttaattctgtgaatgtgtgctaattttgagccaactttgaccctttctgcaatctgcaagccattgacctaatgaactacatgttggttttcgcgtgtgtaacgaaggtataacctttagcctactgtctgctgtgtagtatttgtttgcagaatgaaaaggtatgagcaatcaattatgttttttatttgctttcacgtctcttagaaagagcagctaaacgatcggaccagacaggcgaagggagcttgaccgccttaccagtcattgaaacacaagccggagacgtattggtttacattcctacaaatgtaatatccattattgatggacaaatctgttgagaaacaaaactcttttatcgcagagtttccagtatacatgtttagaggatctgaaaactgggttctttaaattttgttgtatatgtagtattttaatgcgcgtggatggaaagtttggatagcgtttttattcatttttgtgctgcgtatagtatgaaatatggataattgatgttgatgattgtcgtccttgtcattattgacttggcatttatgtaacttttctgatttttcttgatttgcttgcaggccgcatagtttcagctgag

SEQ ID NO: 60066 - DNA, 326 bp, Populus trichocarpa
  Intron number 1 from transcript POPTR_0016s00600.1 (locus POPTR_0016s00600) derived from phytozome v7.0 (chr-ID scaf fold_16; pos 206074 to 206399)
ctgcccccatgtttttgaatgctcttgtaactctttggatcttcttctgatttcttagttggatatatatacaagtcttaaaataggtatctgtttctcaaaagtttgtgttttgtaaatacatcccttcttcattcattgttgatgctgcctccatggtttttctctaaaactttgaattgataaagggaaaaatcggaacttaagaaagaaacagagaataatgttgtaataaaataaatccaagccctcaagaatcaaggaactaaattataagttatcaaacacaaacgatggagttataatgaagagttcaagactcaagg

SEQ ID NO: 60067 - DNA, 1005 bp, Populus trichocarpa
  Intron number 1 from transcript POPTR_0016s08020.1 (locus POPTR_0016s08020) derived from phytozome v7.0 (chr-ID scaf fold_16; pos 5820810 to 5821814 reverse strand)
ggtggtagaaagagaaggaaagtgaaattgtaagttgggttttgtttctattaactgaaaacactatgaagtttgttactttaccatttgtttagcataatttgtgatttaattgctttagtattagggtttgttattacatctttttagggttttagatttttttatatgaaggggttgtgtgctgatgcaaattggttgttttagattgtgtttagtagtgatgtgggaaattggaattaaagttgagtgatttcatttcagtgtgatgtgggtgtgatttagatatgatgctttgggtttagagtgctttcacttttgggtgatgtggtttggaaatttgaatattactctcaaatttgaacattgatcctagatgggtttcctagaattgccatattgtgtgtcaggatattgtgatttttatcagtgctgattcttttattggggggctatgagctactgatttatgtgattgatttctggataaaaaatgaattattgtttgaattcatttttggagcttgtgtaatttttaataattttttagcatagagtgatcttcgcaatcatgatcatgattttctgtaaaccaattgccatattgatcttataggtgatacgcagttaccatgattatgtaatttgtgctcttttgctgcaatcaattcctttgtaatggcagtggttttttgtgattgcttctaatgctgtctccatactgttcttgatttgagaaattccacttttcatttaaggtccaaatcaatcactactctccctaaaactgaaactgcaaattagctattttattttatagtcttttacttcgtcagccttttatttataaattgcaaattagaaatctatctcatcccagtcaaaaaaaaaaaaaattgaacttttattggagttacaacttcttttgaataatttatagttgattttgcattttattcccatttatgtgctttccatgacctaggttatctgcgagggtggtgg

SEQ ID NO: 60068 - DNA, 779 bp, Populus trichocarpa
  Intron number 2 from transcript POPTR_0002s02250.2 (locus POPTR_0002s02250) derived from phytozome v7.0 (chr-ID scaf fold_2; pos 1250068 to 1250846)
tgtcttgcttttcaccacccttttgctcttaacaagtaattctctacttctgtttgcttatgtttgtttcatctctaattgtgtagcgtaacgcaaatggctcttacttgatcgtctatttgctgtaacttaaagagattgaacttaaacacacaatttgatacttagtggtgattatatggaatttggaaatctttgacctcataaagtgaagcagaattatgtagtgtcgggattgaggaagaatcaaatagagcacttgatgttgcaatatggcctgtaatttgttatctgtactggccaattggacctcattttttattaagaatatcatggacttgggcagcaaaatctgcaaaggatgtccggtattgcaacttttgatcatgtaaaactctctttcatttccatgtaaatttaactctgtgggcaggattgctgtttaggattacggaactaatggatgtaaattgatgtaaaatcgtggtaggactggttttgaggtctagctggggctctcttgaagatatcaaatgaaaaacgtagatatttcacaacctatttacaagggatcgaatagtttttggaaagagagaggattatccttgttatttgaatagacctcctgaattaatgatctctgttttgtgttttctatgtttcaactgcattgcatgtttagcaaatgttttaagaaaaaaatgcagattgtttcgtttcttagatgtttggatttggaatcatatttaacttcttttatacttttctttgcagttcgc

SEQ ID NO: 60069 - DNA, 325 bp, Populus trichocarpa
  Intron number 3 from transcript POPTR_0008s20220.1 (locus POPTR_0008s20220) derived from phytozome v7.0 (chr-ID scaf fold_8; pos 14003255 to 14003579 reverse strand)
ttcaccagtttaagggtagcagctccaggtacatgtttgcttcctatacagctaaaaaaaaaaagcattcttgagggtttgtttttctccatattggatatgaaatgcattgaaccttacaaaaatagttcagatctaatacacatggcctagaaaaactagacttggaattgttaaaattgtttgtttttctttttagttcatttttgtttgatttaataaagatgaattcttctcttcaactcagtttttcgatgaatgattacaagattggattttgtgttatatagcataggtgcactgagagttaaaaacgactgcatcg

SEQ ID NO: 60070 - DNA, 491 bp, Populus trichocarpa
  Intron number 2 from transcript POPTR_0002s04630.1 (locus POPTR_0002s04630) derived from phytozome v7.0 (chr-ID scaf fold_2; pos 2892199 to 2892689 reverse strand)
cagcaatcacaagctcgccaggtacatctttcccctttaaaaaaagttcaattgtaaaaaattaaatgggaagttgtgtaattatttacatgacagattctctaacagacatgtattaagaaaatagtctgtttcatatgctctctattattttggctattcctaaaagctacagaaaagcagtggaattctgataaaaaaacagggaaaaaagggggaaaaagaaaaagaaaatagttggaaaggttgaggaaacatagacttcctgaactataagaagcaaacacaatctgcaattttttggattaataagacagaacaaccatttgtttttcaagagcagaataagtcatatctagaaaacccaactttctaggcagttaaaaaggtgatgtgatgattttcaatgtggtattttattattttgaagatgggtgcttttgagttacttggcttttgtgctctaggttcacaaggaacttcaagacaca

SEQ ID NO: 60071 - DNA, 772 bp, Populus trichocarpa
  Intron number 1 from transcript POPTR_0008s14170.2 (locus POPTR_0008s14170) derived from phytozome v7.0 (chr-ID scaf fold_8; pos 9354740 to 9355511 reverse strand)
ttcaattgcaagaaaaggttcttgaaaaaggtttgtgtttctaattttcttatgctggtactacttttctttttctttttcttcttttcttttctttttttgcagcacaaaacaaataaagaataatccaagggttacggaagtttcgcagtttgtaaagttttgttcaaaggccattatccttgtttgtacattccttaactataactctcatatgtttggggctgctattagtctgattaaattgttttatatgctaaaactaagcaatgaagggatttttaataatgtatctacactgttaaagggtgaagatgctgaagtgcctaagaagtaaggaattctttctgtttgtgctgcatctatgctggtaatcttcatctcatgaaaacaggttaaaaaatgcaagtcgagttttgggtccttattttctgaaaaactatttgtttgaagcaagacattctgcttgtgttggttaattgttggagtggtcaactttaattttaaatggacaatcctgtccagtatcttgtcaaacttatcgtctaaaaatgctagttgtaaattgggatatgtggttgatgcagaaacgataatttcacttagatatttacaggcaaccatgaacctgaagaattttagctcttcctctttctttctggtaatcttgaaactttcctctagatcattgagattatttgatctgtttctgatctgattgtctgattttcacacagggagctgagcgagattcactaaagaagtggattcc

SEQ ID NO: 60072 - DNA, 799 bp, Populus trichocarpa
  Intron number 1 from transcript POPTR_0008s17180.1 (locus POPTR_0008s17180) derived from phytozome v7.0 (chr-ID scaf fold_8; pos 11541276 to 11542074)
ccaaaagtctctgtttctgaaggttaaagtttagctcattgcattcatggcacaaaattcaaattagaatctgagcagagatatttgtcagttcttacatataaactctctattgatctttcacaggagcagagaagaaaaacatttttaatgaggaggataaaccaaatatcagagccagttcaatcccacgcccgcgtgctgtcttatctagtcctggtaatttcactttccttttttaacattcaatccaaatttatctcttcaagtactatggactgcctactatagccatgtcttgtgctctatcatgccctaatatgggcagcaaagagcgtagtataaacataagaaatcaactaaaaagaagctagcttcaacctagtctagggctggagaacggaagtaagctttcattgccctatgtttgtggcctaaaaagatggatatatttctgtgggaactacagccatagtaatgaagcatgcctttggtttatgctttaatattcatcctatatatgatatccctcgttgtttcatatattttaaaatttgaggttatcaaattattgaataagactagacgctttgttcgtgtaggaacatagtggcccagcgtagttagagttagggtttaacaaattaaacctggtttatctgggaagcaaaaggccagacaccctgataatcatcgcagcataacattgttcatatgcacttctttttgctatttatgcactggcctgctatctgcacttctttccattcatgtgtgtgtatggccacgatctgcttag

SEQ ID NO: 60073 - DNA, 898 bp, Populus trichocarpa
  Intron number 1 from transcript POPTR_0008s01820.1 (locus POPTR_0008s01820) derived from phytozome v7.0 (chr-ID scaf fold_8; pos 859600 to 860497)
cgctcctcgctctcacctgtgctctcctcttgaaggtaacactcaccctcttctctcctgcttcatgtcttcatcttgtgagacagaaaacttttgtattatttagttcaatgaaaaattattgtttttgttgctttcgtgtgtatttgatctgtctggttgctaagatgacgtgggaaagggggagggggttatttggctttttttttttttcctgttttgaatatttagtttcttagcaatgggaatgcaaaactattgtgatattgctcgtttacagattttttgcagtgattgatttgtttgtttcctgagaaagcatgagatttgaatcggttttattgattagcttactgttttgaatgatttaaaaagtgattttagatttgtttgaaaatgattatagttttgctgctggaaattgaagtcgtgttcttttctgtaattttgatgtttagtgtacgctgaatgtcgattttatttctgtttttttgtcttgttagaagagctctgtcgaactaatatgacgtcattaggggtttgcagctcatttgaaactgaaaacaggattgtttttgttctgtttctatatatctgccatgacttgaattggttatctatcgtatatgaggaacttttttaggagtttatctcctcggcgaaatttttggctttaagataatagaattgactctccaagctgtcttcttgtagctctattgcattttggttctcatgttatcatgtatgaacttagagttgttttgtcttgggtcattaccaacacagtttctcatgttttgcttgcgcggttcctgaaaggaaatgatgatcagcattacagtttcagttaatcttacgttttctttgcagcagcagcagaagcttatctgtgaag

SEQ ID NO: 60074 - DNA, 285 bp, Populus trichocarpa
  Intron number 2 from transcript POPTR_0008s04090.1 (locus POPTR_0008s04090) derived from phytozome v7.0 (chr-ID scaf fold_8; pos 2279967 to 2280251 reverse strand)
tctcttgtatgcaaatatcctttcttttctgtttctttactgtgaaaaattatcaactttgattttaatgttttattgggtcgccagtcttggtcttgtgtattgaactagaactgttgccctatatggtgggctgctgcactgtgtttttggtaatggaaatggctttattgaaaagaaatcctctgaaggattcaaaggtttatagtatatacacaacagcggaaattactattaagccttagtttttactgtggcaagtgatgatggcctgttcttctgcag

SEQ ID NO: 60075 - DNA, 298 bp, Populus trichocarpa
  Intron number 1 from transcript POPTR_0008s04090.1 (locus POPTR_0008s04090) derived from phytozome v7.0 (chr-ID scaf fold_8; pos 2280258 to 2280555 reverse strand)
tctaacacagttgacaccgcctcagtttctcaaaggtctctctttcatgaatttcctgtttgattcccaggaaaatttctttttaagaaagaaaaagaaaaacccattttataatcttgattttcttcttctggttctctttgaattaatcgaaggacagggaccttgtatctgttagtatcttatatgttgtttctttggtttttgttttttaggaagtgaaatgatcttggtgggttctgttttttttttttttttttttttttttttttttttttgtaggttacagaaggaatta

SEQ ID NO: 60076 - DNA, 556 bp, Populus trichocarpa
  Intron number 1 from transcript POPTR_0008s10050.1 (locus POPTR_0008s10050) derived from phytozome v7.0 (chr-ID scaf fold_8; pos 6265250 to 6265805)
cttacgacttcaattctgagattggcaccagagttagtagcataatcttacttcttcttcttcttggggattttgccttttcaaagattgaatcttttgttggttttaatatggataattgaaaatgggatgtgtttgttaggtggctttgtgtttcaataaggaaagttatgtgaattatgtgggatatggaattgtgggctgcaagaaaagttgaaactttcttctttcaaatgaagtgaaattggttacaagttattgattgattgtttgttgcaattgagtgaatgattttgttgatgaattaagtctttgttggttaacctttctttgtttctcttgttggtttctacaagcgtgtgctttttcttcttaatagtacgtgcaatatatatactgtgtctattcgaatattcaacggaagtaaacataattatatgagaacttccaaaagaaatatgaagtgaaaattaggcagttgttgggtgcatgagggatagtattttgattgtcattctgtatgtgtttttataatcaggttaaggggacagttttt

SEQ ID NO: 60077 - DNA, 633 bp, Populus trichocarpa
  Intron number 2 from transcript POPTR_0008s20930.1 (locus POPTR_0008s20930) derived from phytozome v7.0 (chr-ID scaf fold_8; pos 14950301 to 14950933 reverse strand)
cgcttcattcttcttctttcgaccccaacaccaaggtttgatcttttctgtttttaatcgcttttttctgtttcttgcagctatttctgtgaaaatgaagcaaacccagttttatttcttcactttagctgtgttattcaatcttatcagtgaattttgtaatttcaatcagctaattctgttatttatagtgatacgtgttgaaatgaatcaaacccttttattgttattttcattcaagctgtgttattgaatgttgcctatgaatgtgctttttgaatctgttagtgattcgtgttaaaatgaaagaagcccatttgttagtttttcttattatagatgtgctattgaataatggtaatggaattttgattaaagcttctaggtgctttagttatggtgaaaggtagtttgctttatgttgatttcatttcacggtttttattatcagtgtactttttcactttctttatgattcaaatgccacggaaaagaaaagagattgccttctttgatagaagactgttgtggctgtgtataaaatgtgacaaattattgccaagtatgccattgtgagcttgctaatttgaaagttttgtgtggaggtaggggtggaaagagatttatataagg

SEQ ID NO: 60078 - DNA, 603 bp, Populus trichocarpa
  Intron number 2 from transcript POPTR_0008s22050.1 (locus POPTR_0008s22050) derived from phytozome v7.0 (chr-ID scaf fold_8; pos 16386810 to 16387412)
ggtggaaaactcttcgatcttctcagtgaaagaaagttagtgtttccctgttcaaactggtttattacattttttttccttaaaaaaactgtcttcagaacttggaaatctattagattcagtttgtaatggggctaaatatgacttgaaaccttggctgatatgattcctcagtcactgtgttctgtgggtgcttgctatggtgacttaaaagtcacatttgtataattttctccagtgcggttgtggcataagaagtaataaaaaggactttttttctttaacaataattctataatatccatttgctttgtaattttacctgcactttgaatctgtaacatccatttatagacggtaatttcttcactttttttcttaaaaaaattttgggctagcttcgtaacttgagttaattgaagtgtaaccatagaagcagcattgtcccttgtcaagcaggcattatcttttctgtatgttttcttcagaataatttttatgtatgtgttcattcatgtgtctaaaagtcttgaagtgtgaatggttaatgagttcaaccacgtatgctgaattcaattgttcttctcaattaggaaactttgt

SEQ ID NO: 60079 - DNA, 1034 bp, Populus trichocarpa
  Intron number 1 from transcript POPTR_0002s24210.1 (locus POPTR_0002s24210) derived from phytozome v7.0 (chr-ID scaf fold_2; pos 21627971 to 21629004)
cagcagtggacctggtggccctggttctgcttctggtacatagagttctttttctctttatttttggtctatgtattgatagatattatattatttggtggtgatttgagagaaatctctttatttgctccttattgtttggattttgtgaatatcaatttgggtttttatcttattttgaatctgataagataaaaaaaattgctggtcaaacactttccagatagtgtttactactgctgtgcccatgttaaaatattgcaagcggaatagttgtttgtatttgttgttaatcatgtgaaacaaatggtttcagaatgcctgtgtataaatccgattacgcaaatcaatttggaaagaaagcagtcctccaaaatatttttttgacaaagggtcagttgtggtttaaggatttcgtagagagtttcttgaaacataaagggactttcgttgtaactaatgtgaacaatgactttagaatgtcaagttttgtgctacttaggctcgtaagtgcagcagtttttttagtgattgtgtatggatgtgaatgtattgtgtgattttatcacgagacttgtcaatgctgaagaggatgtataatctagtggccaagtttcattatgatttcaaatactttgctgaagatgttgcccttgatcttttatttgttggaattgtgattgactccttagcgttgcgcatctgttgtggaaaaaattgattattagcaaacatttcctacaagcagttactgtagtaattaagaagcatttatatttgatgcttaaactcttagaagttctttgaatctttgataatgaatgatgtaaagagagattgttgggttttatgaattacggaattttggagaattgtgaagtgtaaaccacttaatgaatttcgggcctacaagatcatgaaatattggaaataggaagtgtgataactgtagcatcatgtgatgttgcttcattgttgctaaacaattgagatacttgattttgcaggtgacagtgatagcaggagtgttctgg

SEQ ID NO: 60080 - DNA, 656 bp, Populus trichocarpa
  Intron number 3 from transcript POPTR_0016s10550.1 (locus POPTR_0016s10550) derived from phytozome v7.0 (chr-ID scaf fold_16; pos 8860683 to 8861338 reverse strand)
gccagtacgttttgtcttagtatatcttggcaacctcaactacccacttgtctctcacctattctcttatttcatttctcaggttggctttgttatttatttatttattattgtcttgtgcatatcgaaactgctcatctgagtatgtatggttagcatcgggatgctccttgcattttgatacctttctcttgtagtccatatttttatgtctcttcttctcctagccctgtagtcaatatttttctctatcaacatcttagtagttgatattcttggcacttggcagggaatattttgtactgtgggtaacactgtgcaagacagctctaaactgttatggctcttttttatgtttctgtttattgcaaattgtgacagtttggatcgttctgattaagttggaaatttgtggagtatctacttgcatgggttgcatgatgacatgttttatgatttggatatcttttgacaaattggaatgaatatgcctgtggagttattactatatatgaaaatttgattgcatctttccttggatatgtacttgtcaaatgcaataaatcagttgattttgtctctcttacaagtacagattctgttatgtatgcatatgtgcagatcttcattcgataggaggtttggtccctctcctt

SEQ ID NO: 60081 - DNA, 769 bp, Populus trichocarpa
  Intron number 1 from transcript POPTR_0008s22490.1 (locus POPTR_0008s22490) derived from phytozome v7.0 (chr-ID scaf fold_8; pos 17032945 to 17033713 reverse strand)
aacataaccatatccagcaaagataaaaatattttgtaaagtatgctactacaaataaagatccataattatgacatgctagaaggatttatccctattccttttatattcaaaattcactacaaagccatgttctcagcctttgccagcaaacacaaattccaatctcaaaaaggagaaacactcgtactataaacaaatttatcccgctcaaacactgttgtcccaaaagcaatccaatgaaaagatatatcccttccagaagattggatcctcgaaggtgcaacaccaccagaattacctcaaccacctcaacccaatgtccaaattaaaaacattacccagtacacagatggtaaagtcaaattgtctttccatcgacactctacaagttccaaattctcagaaggctcttcctcttccagtacaatagacctaggaagaatttccaaaatcccttctgttatcaatatcccttatcacgcaaaccctcctagaaaatctacatctgatatcccttctattagtttccaaaatgcagactacactacaaatatatcaaaacctgtttatacaaaccttgagcaaccatctcctccaacttcaccaacctttctagctgttactgaaaacatccaaaacgagatgaatgttttgacttcagaaaagcattttgtcataaacaaaactcttttcagaagagatttttatggtgatcataatattgaaaaatgaacttggttttttcaacacttcctccaacaaagaa

SEQ ID NO: 60082 - DNA, 496 bp, Populus trichocarpa
  Intron number 1 from transcript POPTR_0008s07310.1 (locus POPTR_0008s07310) derived from phytozome v7.0 (chr-ID scaf fold_8; pos 4470986 to 4471481 reverse strand)
ttcttcgccgatcctcttctcccaaacctcaccaggtgattgctttcttctctattttttatgcgttctgttcgactgctgaaaactgggagcgagcgaaggaaagttagtgtcttttgttgtttgaattgaaaattggcgggtccagtttaggttcagtgttcaagttgcttaatttaatagactggtttagttttggtctgttttagttgtgtgactatttgtaatttggttgaatcagcatttgaattgttgaaaaataagctgttcaccttttctttgattttctcagcctgcttagttgctgagataatttgaaaaatgagaagagaattttaatgcttttagctgttttgatattgaaggtggaaaattttaactacagtgacttttgggagtttgtatcatagttgcttccttgcatttgtttttaattttggttctgtagcttaataattaagctgataatctcagtgctttacgtggttaacaggtg

SEQ ID NO: 60083 - DNA, 545 bp, Populus trichocarpa
  Intron number 1 from transcript POPTR_0231s00210.1 (locus POPTR_0231s00210) derived from phytozome v7.0 (chr-ID scaf fold_231; pos 6222 to 6766 reverse strand)
gctttgtttttgggactggctcagctgcctatcaggtagctagagtatatggacgtatccttcatgggatccagtccttacaacatgagctatatagtgcattttctaatcttgattcttccttttctattcattcttataggttgatgttcattgtcgaatctattgaaagtagaggaagaaactatacatcgatcccttttttaaagggaaaaagaaatgtttgagcgcatggaatagtttctctgatcaattatcagattaatattcagaaaaatatctgtttattttttgataaatcaaagagaatatatatatatatatatatatatatatatatatatatatatatatatatatatatatatatatatattaaggagacatgtcctttaaaagctagctagcatatatacgttattagtttatttctttatagaaataataaaaatattattttattattagaatgagggtttaatttattcatatctagctaatgttgaaactatctttgtgcatggtgtgtaatcagttcgaaggtc

SEQ ID NO: 60084 - DNA, 464 bp, Populus trichocarpa
  Intron number 3 from transcript POPTR_0008s00800.1 (locus POPTR_0008s00800) derived from phytozome v7.0 (chr-ID scaf fold_8; pos 353433 to 353896)
cgtggggccacgacgagcttcaagtaatgataattctgtttcttttttgaacaattttgttgattttatgttttgtttcgtaggtatgatttggattaatgcaagtttgtggtttgtgcttaatttgtttctcttcttttgcaatgcatttccactgagaaaaattgaatggcattcatagcctatgtatatatgatagtcaagcttgtgctttgttttctccttgctggatgtcacatggatcattgaattaagctagtttgattcctcaagtaggataaagtgattaactggtaaattttacctaaatattctatagaaatggcacctagggtagactaattggacatgaaaggttatttttgtatcttttctagaggctttacatactcagcatgttaatttttatttttcttcttttcccaacagccacagtcgaagaaaggtattgacagctttggtgg

SEQ ID NO: 60085 - DNA, 735 bp, Populus trichocarpa
  Intron number 1 from transcript POPTR_0016s09120.1 (locus POPTR_0016s09120) derived from phytozome v7.0 (chr-ID scaf fold_16; pos 7074477 to 7075211)
acactgagttgataaggtttctttcttttgttttaataaccaaaatgcatgcttttgttgtcggtaggtatggtttttgaaagaaaattagcgggtcttcttccatttcgtaatgtatacagtgtttttgagaatccaatgatgttaccttacacaaattgtttttcattcgcaaatagctttccgttgggtttacaaatttcaatcccattaacgtgattatgctataattagagattcagttaagtagatccattgtatgattatgttatgttgagataaataatcctgttactaattatgcttgtgattccacattgcattgcataccctattttatatacaacctgagttaaataatgacgcaattgagattcgatctgaactcagtccatataatgaaagagcatcaggttcaccagcctataagctatatattacaatgtttgcttcttttctagtgcaggttaaacctaattttgttcaaatcaaagccgacattgattctgaaagcaagctgaataaatttctgtatttgtttccccagtggaacaatcaaatgtcttcgatattacatccgttatataatgttgattggagtaattcttatgcttggcactttccatttagcgaaagcacttgttttactatcatccaactttttaaccccatggtgtttctacacattggaaatttgtagaagacagtttgatcttgccaatagggaagcattgg

SEQ ID NO: 60086 - DNA, 812 bp, Populus trichocarpa
  Intron number 2 from transcript POPTR_0002s05370.2 (locus POPTR_0002s05370) derived from phytozome v7.0 (chr-ID scaf fold_2; pos 3504601 to 3505412 reverse strand)
gtaacgtttcattctgattaactgcttaaatcaaggtattaggttcaaagttttttactttacagccaaaagtagttttaatattccatatctgggaaaaaacgaagtgggtggccttgagatctggacttggttaatgaagtgagtatttatctggctttaatccgaccattaattatggtcacaaatcagtgtgtaaaaattgggattttttttaatgatagctaatcagtttgctatgtgtttttaccagcaattgcagtccataacaagtgaaaattggattgaaagtgactggatgagcttttgaattccgctaatgtttattctgtcagttgattttgccgtccaaaatgtttgtcttgtagtatgtaggtttctggacctgcatttaggttccctctctctgattgaaaagtagtaccaaggagagatgctaatgaatgataagcatcttatcttgtttggttgtggagaaaagaatcgagagaaaaatgggcgcataggatgctagagtttaattttgtttttctactactaattcctgaaaagtttaaagttgagctgatgcccttactctgcatgacagaatgacaagagatcttatcagttccttcatcttattttccttccctttgtttctatcattccatatcggcttctttagaaaataaaatgacatattaggctcttagaaaagctatagaaattatcctgaaaaagaaaatttgttaagtttgatgcatttggtacttttggtgatagcgaacttatgggttatgggttttaattcaatgcagctcatttcagat

SEQ ID NO: 60087 - DNA, 881 bp, Populus trichocarpa
  Intron number 1 from transcript POPTR_0016s14310.1 (locus POPTR_0016s14310) derived from phytozome v7.0 (chr-ID scaf fold_16; pos 13561749 to 13562629 reverse strand)
agggcaagttcaaggccactgattctccccttccggtacatctcttgcctctcgatcactctgtttttctttcactcctttccctctctttattgccaaagtagtcattatcaaactcaggcttccagccccttgtaccttaccttcattgccagcttcattccttgctttagcttgaatttctcattagggaagacatggcttcaaatttccaatcttttctttctgtttagtggagttttcttaatttattaataattatctgagaaattgtgtagaccgtaggtagaccatcaagaaatgactttgcatgtttgatctgctgatagataatgtaatgttcaagaaacggaaagaaatactgagataattaagagtaaaaaattagtgaaattgggtaccttagtaccatttttgttctctactaaattgagccaaattgacaaaattatgaaatctttgaagccaaatataagaatattttgtattttatgcaagattattaaacacggtttagactggcaagttgagccagggctcggcccgagccaagtttcacaataaacaagagaggagttgatcatatcaaaaatctggattgatccacatcctggtcgacttgattaaaaaccagttaactttttaaattattttttttcaaaacaatactattttgaccttcaacaaaggtttttttgagttaacccgcctggtctttgactcaagccttgtgacgagtcaaccctgagattggtataataacactggtttttgttgcactttatcaccacgttgaatatatttttgtagccatgcaagactgatttgcagtaatcaattcttaataaaaagggtgttcactttttagactgttcctggat

SEQ ID NO: 60088 - DNA, 503 bp, Populus trichocarpa
  Intron number 4 from transcript POPTR_0002s18330.1 (locus POPTR_0002s18330) derived from phytozome v7.0 (chr-ID scaf fold_2; pos 14288637 to 14289139 reverse strand)
tttccagcttgcacgaaccaataaccggggaggtaattaatatgccgtttaagctccttttcttttagtttcttcttgggctatgtggatccttaaagcaagcaacttttttttttttttttttttaatgttctcatgcttttcaaaagacatccttggtcatcagcttaggccaggctgattttttgactgccattcaatttcgtacaaacatgatgaaattaaaattaggcatgccatatttctggatagccgacttcacatactggcaggccatgaggtggaaaaaccatcttcttgggtctgcagtaatttgaattattattttctttttgcttattttggtagtcatatgtaaactgcactttgtatgctattctacccttaagtatgcttattttttgctatatgattttactgacctccaagcgagtgctgattggactggaaattttattctctccacaggcctgctaactgctgtgcgtaaggactgctttacg

SEQ ID NO: 60089 - DNA, 460 bp, Populus trichocarpa
  Intron number 1 from transcript POPTR_0016s08070.1 (locus POPTR_0016s08070) derived from phytozome v7.0 (chr-ID scaf fold_16; pos 5912870 to 5913329 reverse strand)
gctcctaaaggtatgtcaatggctatcttcattttcttgatgattattattattattatttacctggataggctatcttttagctgttttcagttttgatttctttacagtttcttgtattggttatggacctggttttgtgattgttcggactaaaggggtggttcttctaggcttggcttctaataacaagttagtgaagtaaaaggtcatgctagtgtgaataactgggctgcttatttgctagtgacttcgatatttatactttagagaagatatttttgggttgtttagtgtatttttgtagcttaacattgtttgtcagtgtcatttaagtgtggagctttaagagtaatataaatgagatttgtggtaatggaaaaaatgaaatgattgatttaagagcatgtggaattttaatggtatacttgctttcttgtgtttgttttttgttacttag

SEQ ID NO: 60090 - DNA, 991 bp, Populus trichocarpa
  Intron number 2 from transcript POPTR_0016s03370.2 (locus POPTR_0016s03370) derived from phytozome v7.0 (chr-ID scaf fold_16; pos 1747900 to 1748890 reverse strand)
aaattctagtgctccggtagctaaaccgtagttaggtaatggatttgtaatgatttcggtagaatgcaatgtaaggtaatatgatgtttgcttgtttgttgatcggattttttctttttgtattgaaattcaaaatgcagcgaaccacttgtattttttttgccctccctgacttgatgagttgtagaaatttgggtaccatttgtagaggagtggagagctctgtctcaaacacaattatgtgctaaagatggaacttgttgtctaagcgtccactgtactttagtgatttcctcttgttaaagcctgtgtgttcctgaccaaacatgcgttttgattgaatctaagttgtttcggttgtttcattcatgttgccctgttagcaagagaaattttagtttgttttccactgttgttggctgatttgcctctcctacttggtttgtttatgaaagttctattctaaacacctccacatgttgtgccagcagaaactgttgtgtgcaatctggctttctattgttctactataagttgtgaaagatggtagggatcgtacttgtcagcttatttaaagaaacctgcccttctgatctagcaagttagtgttccaccttttgtttgttgcagcctcttcaattaccaatacattttgggaaaatgcatttctaattatatgcaggtctgttgtctgtgctactgtagtctgtcgaatgcttgtgaggttttgtgaatattcgacttccttgccgaactaattttgctcatgttttggattttataatgcattttattctgaacattgcaccgtgcattatatttctataccttttactctaacattgcaccgtgcattatatatctatgccttttactctacttctatgctatggagttcttgcatctccatgacactaaatgcgttgactgacctccagtatggctttacccagcaggaccattgggttaaggaaatccaaatctgactgaa

SEQ ID NO: 60091 - DNA, 943 bp, Populus trichocarpa
  Intron number 1 from transcript POPTR_0016s04120.1 (locus POPTR_0016s04120) derived from phytozome v7.0 (chr-ID scaf fold_16; pos 2342021 to 2342963 reverse strand)
gcatccctctactattcttgatgtttggtcgtagattttccccttttttggattttactgtaggaatcggttcaaagcttgtttggtagaagtagccgtttttggaagcaattaatatttgcttcatgcctccctaacaaacaagtgcatagcttttcttgataccattttctctctgcaattactttctcgtattggcagtagaaatgtccaccaagtcttcaaccctatctcttccagtggtcctgctgctccccaccaccaagagataatgtgctacctttcataccaagaaaaatcgagggaaatcgattacttgtgaagaaaatgtgagttcatattagcatgccaggacttttttatgatattaattataagttgatagcatgtttgccatgatatatgtctttacatgtatagttttgttaggataaattaaaaaatctcatccatgcttattttttacttacaatcttaagattttatgttgcatgttatatttgtttagtttatacaagcattttatgcacttttgagtgggtttttttttgtataatttgataaaaataaaaaactttattattttaaagtatttcaacaaataaatatattttttttattttaatttaatcagaattatttttattattaatgtaaatgctcatgctttgattttatatcaataaatatttaatttttatgttagtattattttgttatatttatgttgaaagtatattaggtctgagttttatttttgcatatttataaatttaaaattatatacattctgtactttccttaaataaatttttaatttttatatttaaaatgttttgtgtcactaatctaataaatttacaaccttgatggtgttgactttgacggctaatttcctaagcgggcagcagagtcgtcgttcaaggcttggaaggagtcaagg

SEQ ID NO: 60092 - DNA, 544 bp, Populus trichocarpa
  Intron number 1 from transcript POPTR_0002s10440.1 (locus POPTR_0002s10440) derived from phytozome v7.0 (chr-ID scaf fold_2; pos 7529171 to 7529714 reverse strand)
aggtagagtcttgcttatttttggcttagttttcttacttcaaattataggtgttcgattacaagaaaacttcttcgtttagctaatacctcggagataatcgatgattatgatggtttattcataataaaagattggttgctgtgagttactggagtaattaaatggagaaacagaagagaaagtactcaaatttgcttcagagatgttaactatttagctggttcaatttttttttctcaatgtttatttatttcgtgagaattgtgcaagtgaaagagacaattagtattacctagactactaatttacttggataatgcctccttaactgtaaaaagattccatcagtattccttggtttacatattggtctttgatggaatttgtttggctgttttatttggttaaattgcaaaatggggtgttatttagttatcttgtctcaataagaccgcaattagttccttttcaaagttttattttttccagattttgatctaggtatgattgtgggggtcgtattttttttcctgatgcagtt

SEQ ID NO: 60093 - DNA, 436 bp, Populus trichocarpa
  Intron number 1 from transcript POPTR_0008s14480.1 (locus POPTR_0008s14480) derived from phytozome v7.0 (chr-ID scaf fold_8; pos 9610573 to 9611008)
atcccagttcgacccttcttctcaagttctcgaaggtctctatcttttcttttctttatgttcccatgttttattacaaggaatgcataaaaggagataatatttgttgacaagatttggcgggtttttctctctcctgtgaatgatgcacttttatcgggattttccagtagcagttgtttactccctcttcgtttgattggaaaggaagcattaaattttattgttcttgtctatataagaatgttttgatttcttctccattcttgctgacactgtttttggtttaactgaagcagttttttctagtattcctttaatagctagcacccgtgaaagttgcggtggattatattgctagattttggatttcttacttgtattcctctttgtcgaaacaggaggggatatcggacgactaagggataagagaggt

SEQ ID NO: 60094 - DNA, 391 bp, Populus trichocarpa
  Intron number 1 from transcript POPTR_0172s00195.2 (locus POPTR_0172s00195) derived from phytozome v7.0 (chr-ID scaf fold_172; pos 1571 to 1961)
gtctcagattctcagaagacaatcaatcgcaaacagtatgtccttatttttttttccttcttttctttcttactggtagattggaatttagaactgccaacaaaagtttgtatttgaagttagctttttgaaaattgaccccattatttactgtggcttaagctttgagatattgcatgattatgaattagtttatatgagttgaaacttgaaacatagtctgacaaagatggattagccgattgctgggaaaatagttttcaaatctctttgagtgtggcttggaagggcgaatttctgaagaaactcatgctatgctttgtgtctttgctcatcaaaagaaatggtttcatgtaaactgtgctttattggttgtttatctccttcagcg

SEQ ID NO: 60095 - DNA, 567 bp, Populus trichocarpa
  Intron number 3 from transcript POPTR_0008s13890.1 (locus POPTR_0008s13890) derived from phytozome v7.0 (chr-ID scaf fold_8; pos 9153835 to 9154401 reverse strand)
atcataaaaaggttaggtcctccctctctctctctctaatcgtgcattagaagatttttatagctctgacgagcaccttccctgaatgttggcctggaaaatatcgtgctcgatgtttgttttgtcctgataaaattctccagtactataccttctgatcaggttctatctttaaatttattggttatgagcggctcctgaaagggctacttaattatctgattaggtatagttgtcattaacagacagcaaagtatatatgaggaaatagaagtccagataaagcatcaattaacgagaagaaagctgtatatatttctttcgaatctgctgttgtctgaaacgacttgagggctttaagcttcactgttaatgaaatcatgagattggtcttaaaaataggctgtaaagtgtgtgggttaattaggttgaagatgaagtatcgtctagttccttcaaagacaccctttttgggatttcaattttcaaaatttattgtggtttgattctctcccttcttttctcttgatagttgctactcgcatttatagcaataacacggtacga

SEQ ID NO: 60096 - DNA, 775 bp, Populus trichocarpa
  Intron number 2 from transcript POPTR_0008s09030.1 (locus POPTR_0008s09030) derived from phytozome v7.0 (chr-ID scaf fold_8; pos 5603729 to 5604503 reverse strand)
ttgaacttttaaaatcatacggtggcttgtcatatgtgagtacagtccttctccaatcctttattgacacatgtttctttgtctcattgatgataaaataaagaattttgtttcttggggatatatgtttattctacaatcagtgatgaattaaccgaggaacgtgctagccatgtttccctgttttcaccataactagtgttagcatttgtagctttggaggtttcttgctggatatttttaacgtattgtttcagttcatagcatccaaaattcgggatttgggcgttttagatagccactgctaatatgatctatcatattcggcagcatactattgtataaacctattggtacaatgaaattatgtagctcttgattgttgggcatttattggtggattaattgcaagctaattactttacaccatgtaatagaaggggaaagcttttaccctttgctttatcactcaagtaacgaccagcctagcaattttccagcaagactggcgtgtaatgagtgctactctgtgttggcattggttattgactgttttttggttttctggttcttttcatcagctgtaactaatgtgtagtgacccactgtggcaatttgtttgataactcaatgttccttctcaatactccaatgccgtatgctttgtgctttgctgtcatatactttatacaaatataatcgcacatcactcattctgtgtcttttaattgcctgtattagagctaacttcgtttattcaaattgcagggacaaa

SEQ ID NO: 60097 - DNA, 762 bp, Populus trichocarpa
  Intron number 1 from transcript POPTR_0016s11700.1 (locus POPTR_0016s11700) derived from phytozome v7.0 (chr-ID scaf fold_16; pos 10891377 to 10892138 reverse strand)
ccatttccacaccccttttcgacaagcttcctcctgtaagtcctttttttatcacttcccttttgtttggttcctggaaaaaaaaaaaaaaaggaaactttacagcctatacttttcgtgtttttctttttattttttatggatgaaatttgaatcaacgattattaatataaatctgaatgtattttatgaatctttaattgtattgtgccaagttttttgttttttttggaatatattaattctttaaatttatatctaacaataagagtatgaatctagaagttcgttgtgtatttatttatttttctgttaagggctgagttgaaaatgggaaaaaagggaatatgcgttggtggtgaattaggaatggtatgaacatcttttggtattctttttgactcacaagaaaatggatggcaaccagagaagcattgaattttccagtagagaggtggctttgaccattatactgcgtgtaaatgggctgctttaattggtgtttgagattgttttttttttttaaagagatttattaaaataatatattttttatattaatatataattaaaaaaattaattttaaaaaaataaaaaaatttcaatgaccgttagggtttttttttttggtctgacttggtctttccatggccgttgtattcatgatcatgaatttttgtctgtatgcatgaagaagcactgtcttttcaattatcttgaatgtcttttgttcttgtttgcagcagactccaaaaatttgg

SEQ ID NO: 60098 - DNA, 856 bp, Populus trichocarpa
  Intron number 2 from transcript POPTR_0008s12100.1 (locus POPTR_0008s12100) derived from phytozome v7.0 (chr-ID scaf fold_8; pos 7807454 to 7808309 reverse strand)
tgcaagtaaaggggtatgtccataataattagtgaagcactttgctgaaacctctgatcactctgtagtcatttaccagtctacttttccatctgcgacacatgaagccccacggaattatccatatgaaaaggaaagatgttaaagaaaattgaatttcttaactttatccttgagatctccaggacaaagccatcaaatatggaaaaactagaaagtaattttaagctagttttgaaaaaagcaagctgtactggacctttcagaaaaatcttaggtgattcatgttactgggaatttgatgcttcacatcttctgctaaggttaaacaatccctgtatctcaagatagaagtattctatagactcattcgtatcttcgtaatgtactacttaaactgttgctttgactctggtgttgacagagtctagtttgttgtgacaaactatatggtgggtgggtcctaaaatttcttcaagtccaccacctttatttggaaagcattttatttatgaaaatgaggccaatagttagcaaggttttgcccaaaaattcagtacaactgcttgcacttttcctcccccaccccgcactcttcgggtgtctcaattatgtgtttcttttttacaatattagcttaaatgatatgatgtcgcagctaggaacttggtaaaaataaaagtgggctggtaaattttatggtcattcatattctacataccgctttctccatggacttgatgatggatggcactgatttttaccaattttctctgactatatatacatacagggatcgtcactgtcttttgtcttctcaggtaactgtggaggcaattactgaggcgggttatcc

SEQ ID NO: 60099 - DNA, 544 bp, Populus trichocarpa
  Intron number 1 from transcript POPTR_0008s12100.1 (locus POPTR_0008s12100) derived from phytozome v7.0 (chr-ID scaf fold_8; pos 7808387 to 7808930 reverse strand)
gcttgtcatattcgcagcgcagccacctccaaaatgtaattatgtagtctcttcagcatttggtcccgcttgcatatgtccactctcagccagttgagtattcctgctatccatttcactagaacataagtgttcgtgctgtacatgttactgcattttactcaggatttcttggtttctagtcctgctcagttaatcttggatttcgtatgatacatcattcttaactagattctgcaggttggcaggtgggaattgtgttcctttgtctatatttaaggacttgagtttacgcctttattgctttttttccccaagaaaagctaatggaaattgttaaaccatgcacgtaatctcaaaaacaaattgtgtttacaaatgccttcccttttcttttgggaacgggaagtctgttacactcatatcttttgattcattattctcttgtgaacttctcctattgagagtcatattggaaacattaaactaatagaatgtatacgcgaaattgattatcattagtttatacttttgaatgacagcc

SEQ ID NO: 60100 - DNA, 383 bp, Populus trichocarpa
  Intron number 1 from transcript POPTR_0008s18400.2 (locus POPTR_0008s18400) derived from phytozome v7.0 (chr-ID scaf fold_8; pos 12372440 to 12372822 reverse strand)
gcaagcaaaacatttgtgtagtctgagctgatcaggtcggtggtgccctgttctgtctttgaattggtctccttttaaatttcctttgtctctgtttcgcactacttctcctccttttgtttttcaactcggaaacttcattttaactcacttcttcttcaccatctccaactcagataccccataattaaaaaaacattctgcaatttttatttttatttttgcattcccaatctgtagtttctgtgttagagtttagtttcaagttttaaggtatgatcaacatgttaagaaatactatatatactgtgatattgttttcttgagttgacattattttatttgcagctggaaaggagggatttttttctgtttggaatcaa

SEQ ID NO: 60101 - DNA, 1017 bp, Populus trichocarpa
  Intron number 5 from transcript POPTR_0016s06730.1 (locus POPTR_0016s06730) derived from phytozome v7.0 (chr-ID scaf fold_16; pos 4544289 to 4545305 reverse strand)
tgcatctcttgggaggcaacactctacagaaagtaataattgcttctatcttggtatctttcttcattgtgtaacatataatatatacagagacactcttaatggatctgtgaaacaacacacacacacctttcttctgttcattcctctgttagctttgatggcactattgttgcagcatcttaactcgataaaaaaaaaaactgcattttgcttttcttttaagaaaaaaatcgcaattgcagaaaaatttatattttaacactctgctaattatagttttccttaagtggcttgattaccagtaaatgccaaggaaatcagatcgcttgagagtcgagacttctaattttgattgtgaaattctataatagcttcatctaaatttccacaagttgcattttatcctattgagatagttctggaaatgtcttcaggaatgtgtaggttggtggatctgtgtaaatgtcatttttcttaatttatttgacattttggccctggttccaacttcattaaagacaatatgtacatatgcgtacagaataggaattttttttcttacgaagtttgacacctttgcttcatgagtataaaataagaggttgttgcttgtcatgtttgtcttgtccttgtcaaccatatttattcttgtttctcctattaaatattgttgactgaaatgcatggtcacatgtgatgtatagcaatgagtgcattgatgaggagttttagggatagaagaacaaagatctttgcaggcagccatgccctagaaatgtctaggatatatgggtctgtacatccttgtatgttcttgtgattttgcttgtttctccattttttgcttcctattcttttggttgggtaattagggagggtgcaccactgatgcaaaggattaagaattaaatggttgaaatcaagatttgtatttcaagctttgctttggactgatgatttggtgatctcatgttctcaggtggcctcagtatagtttcccgccatttagaatca

SEQ ID NO: 60102 - DNA, 621 bp, Populus trichocarpa
  Intron number 1 from transcript POPTR_0016s06730.1 (locus POPTR_0016s06730) derived from phytozome v7.0 (chr-ID scaf fold_16; pos 4546171 to 4546791 reverse strand)
tctcagagagctttcacgtgatcactcgaagtttggttagttttcacgatttcttcttctgggcccttgttattttattctttctttctgttttggacaagtttttatgagcttgttcgtatttctttgattggtttctctcatggttgttggctttgcttgttaagatgtgttaatattttggttcacatggctgtttacttgtttggataattttagaatcggttggtgagatttggagtcttttcagtaaggttgtgctattgattcaactgttttgagactcttgtaataaatgtatcatctacatattatattcagaagagtcaaaggcactcttttcgaacttcgattaattagttgtgagaaaccatttccagtcataacctagtgctaatcattatctgagtgaatggttctaattatttattgtgttataagatgaagatattatgatttcttttgattaagtatttatggaaccaaaatatgtaaattctctttatagtattgcttatccatgcaaatgattttaagggaccttgtttttttctgcatattttattgctacaagtctataacaaagtttgaacatattttttgtaatgttgaatccaggag

SEQ ID NO: 60103 - DNA, 610 bp, Populus trichocarpa
  Intron number 1 from transcript POPTR_0008s07820.1 (locus POPTR_0008s07820) derived from phytozome v7.0 (chr-ID scaf fold_8; pos 4811168 to 4811777)
gttgctgattctgtgcctactgtgactcgctccaggtcagtctttatctcttatcaagctccatttttttgctctttcaatttttgcctctctctcttgttttgctcattcatgtcaagatagttttttttttttttttggggggggtctatgtccgtgttacggtggttatataaagatgttttcttttcagttgggtttcatttagtattgaaaaggttgttgttttccccttgttttgtcgcttcatttgttggatctagtgggttcatgttgtccgtatggttgaaaacgggaatttaatcaatattaatcttcttattgtttttagtgctttatgttgttcattattgcttggctgctattgtatttttttttattggaatttgatttgcgtattttggctggtcagaaatacctccacactagtccaattcagttcttcatttcttttcaatcgaaaaaaattggagcttaatggcttggcagctattataacaatcttggttagataattcaaaatggaatcttaatcatgaatttaataagtctattgctttcttttgacttttcaggttgcaacggcacacgatttcagtgtttgtaggtg

SEQ ID NO: 60104 - DNA, 508 bp, Populus trichocarpa
  Intron number 2 from transcript POPTR_0008s15160.1 (locus POPTR_0008s15160) derived from phytozome v7.0 (chr-ID scaf fold_8; pos 10142385 to 10142892)
gctgtggtttcgtctacattcaactccaaagaaaagtatgttcttcgcacctataactgcatttccatgctgtcttctctgtgtgctagtttctgcacggtttttctttgttatcttaattattgttcttagcttattagagaatgatcaagcaacatcctaccattggcacaggactttcttcatggccaatctgtgttcaaattacagtttcagttccaatatccgagcatctttctcctggcattttcttttctctcttttctaatgattccatgtgaatttaaaaccagttctcaagaaatccaaacacccagatccaatctcctttttatgtttctatagaaatcgttttgcgaattctttctgacctgccactatagactccttcaattttatttttttaattcgctgcatttaatcaaacttcatcctaaattttataattacttcagtgcaatttgttgcatttttctttttgtttcaggaagagggatatacattctgt

SEQ ID NO: 60105 - DNA, 747 bp, Populus trichocarpa
  Intron number 4 from transcript POPTR_0025s00670.1 (locus POPTR_0025s00670) derived from phytozome v7.0 (chr-ID scaf fold_25; pos 342545 to 343291 reverse strand)
atttactcttggaactgttgcgccccaatttacaggttggctttgtttcattgtatgtaacgttgttagattttggttataaattttttattttgcaactgggatgccgttatttatgatattggttgttatgccttgtttatgtccatcggcaattacagatgacttgataggttagttgtaggaggcatgcagcatttcatttggtttttgatgtgctctagtggcccagttctgtgtcgattatgagttctgtaggagaattgtttcagggaatatttctgtcttaattgttttgatgtggccgaaatggtggtctttgtagatttagttcctgcatagggtatggccagatgtagatccggttttctgtgcattgtaattgttacaggtaatgcatatctaacatgaaattaccaaagatccctttgatatttaaacaaatagagccacttgggctccaagcaaagaaccagaaaatatcttaacattatatatagaagtataagttaaaattaaggtaggctcactaataatggaaaagactttgatactctctctctctctctctctctcttgtttgctttctacatcatcaaggtcaacctatctaacagtaatattttggttatggtcagacgtagaattctgttttctgtgcattttaatcgtttggtacaatattttccatggtacaaactggcaatcctaaatcaacgttatttttaggagtttctatcatcgagg

SEQ ID NO: 60106 - DNA, 299 bp, Populus trichocarpa
  Intron number 1 from transcript POPTR_0025s00670.1 (locus POPTR_0025s00670) derived from phytozome v7.0 (chr-ID scaf fold_25; pos 343750 to 344048 reverse strand)
ctgaaaacgcaagatccaagcttcggtctgagcttgtaagtcgctatctgtcttactttgatgttaattatgttgttttaactataaagcttgcttctctgtgtttttggtttctgggttttggctaagaagttgtaaattttgattttttgttgtgtttttatttatttgtgtgtgtgtttctgggtttttgttaagttatttcgttatgtgttttttgatttctttgtatgtttttctgtttccgggttcttctttaatcataatttcaggcaacaactatagctgcttttgcaaga

SEQ ID NO: 60107 - DNA, 754 bp, Populus trichocarpa
  Intron number 4 from transcript POPTR_0008s09050.2 (locus POPTR_0008s09050) derived from phytozome v7.0 (chr-ID scaf fold_8; pos 5611187 to 5611940 reverse strand)
cgcattcggtatgcatttcttcttttgatttcaataatgaaacaccaccttgtctgtttagcagagcttgcctttagattatttgtctatttctgggtcttcgattgcatggtgttactttcactctgttttttagtctctttattgatttggttttgttgaaccaatgcatagttttcccttgcgcgagtgttttctcggccctctttctcttggctgtatgtagtagattagattttcaattctgtttttttttttttaattattattattattaggcactgttttaactcttctcgaggttctgatttttatgtttgctggagttgaggatcgtatttgttattaactctgctgtgcgctactgtttagaccactgagccagtactgtttgctttggtcgtaagtatttgtctgctataagtagactttgtagcaggagtgccttgtgcttagtgggcttctgaaatgaaaaatcatcctgttttcctttagtgatatgactctaaacacgttaggatagaggttaaaacacaaatgtaatttgtgttggtcaatccctaacattcatccctggaatattagagtttcacttgatgtatttcaaatgatttctctccttagacttctcggtgttatgtctagaagatgattggagggttccctggatatcttattgtatttgatctagaatgttttggtaactggtcaaataccggtacaggtttctactgatcaaagagaaagattgact

SEQ ID NO: 60108 - DNA, 528 bp, Populus trichocarpa
  Intron number 1 from transcript POPTR_0008s15880.1 (locus POPTR_0008s15880) derived from phytozome v7.0 (chr-ID scaf fold_8; pos 10600632 to 10601159)
acaatactgttgccatcttgagcgagtaagaataattttctttttgttaaatttgatgctatttgcatgtttgagttgcgttggtggaggatgaatacatgaagtttatatttttgtatttgtgtttgaaagtgataatgaattagattaaattaatgtttatattcttatgatgtgatttgtgcttgtgcgttggtctgctttagatggaagcaccctctttccttttccgatcatgctaggacaagtgtaccatagaaagaaatgtatagcatgtcaagtattgttcatagttgctgatgtcagacaaattagatgattgttctgcaagttttaataggcatatcctttgatggtctcatttctcatccaccaacgcatgtgaagtcatagattgtgtaaagattttttgctatccaattcgattgatgttgaagaaactcctaattgattaacctgtatcctgatttatttagttgtttctttctttcagtgtagagatatataagcaccccaaagaagaacgga

SEQ ID NO: 60109 - DNA, 450 bp, Populus trichocarpa
  Intron number 2 from transcript POPTR_0002s12100.1 (locus POPTR_0002s12100) derived from phytozome v7.0 (chr-ID scaf fold_2; pos 8985029 to 8985478 reverse strand)
tcgatccaggtaatttcttccttgctctttcctctttccgcctgctaaatttttaaaattttaattccaagaaattgcagctcctgttacttcataaagcgaaactggagctgatattaggccaaatgcgattgattttgtttttaccaattaataattatctaggcatgaattgatcaaaggaagaaaaccaacctcttcaatacttactcttccttgtgtggttattgagagagatgccttgatcgtgtcatatctatgttttccattggcttcagccatgttatcgtctcaatgggaaatcttgagattattgtggtcgactcaataagattaccccttggatgcgttggatccaacaattcagttattaaaaataagcatttggaattatgaattgaaaattttgtttttctctgtcttgtattttgtctgcagtgtaaggtgtgt

SEQ ID NO: 60110 - DNA, 286 bp, Populus trichocarpa
  Intron number 1 from transcript POPTR_0016s02490.1 (locus POPTR_0016s02490) derived from phytozome v7.0 (chr-ID scaf fold_16; pos 1227372 to 1227657)
tcaaagcaaagaagattttgctctgaaagtttcaggtaccctttgtttttcttgattcaaagtttccatcttttcatatggaaatctctattcttctgaatgttcactgttcttgactctaaagttctggtttttattgccttttttgataatttttccgcttgccttgtcgcgctaataagtatgtgattttcaagaccaattattgtgtttttaagagcaaggatggcagttgatttgtttaattttgattttttttttcttaaacaggaagaacagcaacaaa

SEQ ID NO: 60111 - DNA, 722 bp, Populus trichocarpa
  Intron number 1 from transcript POPTR_0008s05650.2 (locus POPTR_0008s05650) derived from phytozome v7.0 (chr-ID scaf fold_8; pos 3284512 to 3285233)
tgctagagttaaagctgagagtcttccttgtagtttgttctcaaattcgtacagatcaagatgaatatttgattttactctttgccaaagttggtgctttttgtttattccctttttttttatctctctcgcttgaaaagggatatttagtatttgcctatgcttttttccttgttgattttggattcttgatgctttctttcttgagatatccaccactgtttgattgataagaaaagggaggtggataggggatctacaattttgattcttgtttctttacttgcattattacttccctgtcactgaaacttcttcttgttgtttttcttatatgaatatcactgaaacttttagctctacaaccaaagaagatcacaaaaaccatccatctagttacgttacgttgggctaatttggataagctgatgtaacacaaaaaaaaaaaaaaaatagaaaacagattcaattaaataaaaccatttggcatgatttacatgacgcttcagtcctgaaataatcaagataagataaaacatagccatttgaaagataatctgtacttatttttctaattttctcagcaaacttactattgagctgaaacttcttcgtttttccttttcttttgcttgtcgttttgaaagtatagatggatttgtaagatatataactttgactattcagggttgaacacaaaatacgctggcagaagtggcaat

SEQ ID NO: 60112 - DNA, 593 bp, Populus trichocarpa
  Intron number 2 from transcript POPTR_0016s02770.1 (locus POPTR_0016s02770) derived from phytozome v7.0 (chr-ID scaf fold_16; pos 1374313 to 1374905 reverse strand)
ttggaaacactctgacccatctcagttcagtggtgaattaccttattccattcttttcctttctgttatgttatccccataccgatgtttatgctcataagtttgtggttttatgaaatgtggacaactggtaatctctttgacaggttctatcacattacaagatgtaactatgttccctctagctgagaagtctgacttgatgacttcttctgagtctgtggatgaacaagcagatgatagggaagacagtatgtggtctccaagggtagctttctaagtttccaattactttcctctagtttgcagcttcagtttgaatcttcttgttttttgatggaatgaatcctccatcgtcctgtagtttctttaaacaaaattggtgaagatccgcatcagtaacctaatttgatttctgatacatattgtgctgttaaaatatagacattcattgatggaaaattggtgacagttctacattaatttgtgagactcaatttagttaatctcatacattgaaatctgctgcttctgctgttgttaattactgctataatattagaattcttgtactattctttcagggctttttg

SEQ ID NO: 60113 - DNA, 674 bp, Populus trichocarpa
  Intron number 3 from transcript POPTR_0016s09180.1 (locus POPTR_0016s09180) derived from phytozome v7.0 (chr-ID scaf fold_16; pos 7157189 to 7157862 reverse strand)
cctcgagaggtatgtctgctagacccagtaaaaataaagtctcctaccttttcatatattttcttcaaggaaaaaggctccaactttattcttcttttcttaatttttctttactggatttgaataaaaatagatttttggcttttcattttcttttctattgatagtcttccttgcttttggctactttctttatctacttccatctttccattgtataaacatatatttttttgtttgtttctcaaggcttctgttcctctgatgaatacatcatagccttatccactgcctgcttggtaattggcacgtagcattagaccttttgcatatataatcttggtttgtatttgctactgtcatctctggttagttcattacaagtagagtatttacttcctgtgtttttcttgcctggattcttctaaaattcgaatttacttttcttttaagctaaagatttaatggctatgaagttgctgagttgaatactatggattgagtccaccactcctgcaaacactcattattgcttcactgcacaacactccaaattccagacacacactctctcacacgcagacacacaattttgatctttttattttctttgactgtgcctgtggtgcccttttgcagctgactggtgaaacagtaggagaagtgaaggcagt

SEQ ID NO: 60114 - DNA, 705 bp, Populus trichocarpa
  Intron number 2 from transcript POPTR_0016s06540.1 (locus POPTR_0016s06540) derived from phytozome v7.0 (chr-ID scaf fold_16; pos 4388101 to 4388805)
gggcgttactcaataccctcttatccctgggtacgtatatccatattgagtagcctgtgtgtttgttttcatttgaattgattgttatgtcttggtggttcttaatttggaatggaagaggatgggatttagccataagaacacaattaatttcatttgaatatattcggagagatttaatctggaaagcgagtaattgtttggagataacccttacagatgaagaaaaaaagagagaaaacaaggtctagttcttcccaaatgctgtgctcccatataaattgtcaggatcctagctatagcaacccttttcaactgtaaaatggctctttgaatttcctatcatgaatttttgtttcctttttgtgaatgattaagatcagaaactgttattgatgatattaaaatataacaagaagccaacaagtaactgtagctaaatcagttaaacaacgagcaagacagcataaaagttcaattagccagaagctagatttctaggaaggaaaacagagaagcatttaacagaatatttgttgaagatgcttactaaatttaatgattccaatgaatttccataagattctaggatcagatcaactccttttgctcattcatcaatgaagttaaagcgctatagctcttagaatttataaatattgaaaatctaagggtaacgagttaattaactgtctgaatgcaggc

SEQ ID NO: 60115 - DNA, 488 bp, Populus trichocarpa
  Intron number 1 from transcript POPTR_0016s09020.1 (locus POPTR_0016s09020) derived from phytozome v7.0 (chr-ID scaf fold_16; pos 6861672 to 6862159)
gcaaaactgttactcaggttttctcttttctatctactccatttcatttttgagttcttatatcaatacccattttgttaatccgattccttcaacttttttttggggttaatttttgtctcaaagcgttttgggattgcccatttcgttaaaagctgaatagtttaagaatatttgttttttggtttttggctcactaatttaataattttttgtcattacatttgttgaatggtttttcttatcttgttttatcattaataattcattaatttcaagggtttttatcaacaccgtaatatgcttgttagaatcaacatgtacatgtttatctgctaaatttgatattctatcgtcagtgttagaggcatcttttagttaatttgataatgcctagctgtatattttgtagatgtctcaatttcagtttttgaaaagaaatttgattaacaggtaaccctagctattatcaaggacaagcctgcccc

SEQ ID NO: 60116 - DNA, 831 bp, Populus trichocarpa
  Intron number 2 from transcript POPTR_0008s16320.1 (locus POPTR_0008s16320) derived from phytozome v7.0 (chr-ID scaf fold_8; pos 10937084 to 10937914 reverse strand)
gaggtatgcattggttctccatatgatttattgtatctgtattttctcttattcttctttggttttctgttttggttggtatatatatattttttcagttagcgcagtaatgctcttggtagctctctgtttctctgagtttggaagttagagtgtaaaagctgtggggaatataaggaataatgcaccggctctattctcctacgtttggtggttgaactctacctaccacactgaactattgtagccttctaccttgcaaaaactagcttgaaaccaacatgataaaaaataaaaagaatttcatgaagaatctcctatccaaaatcatgaaatcccttctctcccaccctctgtgttacgacacaatggttcctccagtaagatttttttgactaaaatgaatttttagtcacattcactgacttcttacttttttttgagttcttcatatagcaatcaattgcctgccactttgtggaaggaggtgcaacattaggtttcttttgttaacatatatgattgcaattggatgtggtagcatttagtgcatcaatgaacaaattgatttcttcttcttcttttttttacttagtcgggagtctgaaaattaacaaaattcagtatcaatagttgcaagaaaacttgactgaatagatgttatcccattaagattagtgtgcgcacttctgcagagtacatgcttaactcttcctcttagatattatgattgctacttctgtttcttatccctctcatataagctgttatccaggcaactgtttgctaactgattttgttccattatagggccaaaaccttctgagttat

SEQ ID NO: 60117 - DNA, 902 bp, Populus trichocarpa
  Intron number 1 from transcript POPTR_0008s16320.1 (locus POPTR_0008s16320) derived from phytozome v7.0 (chr-ID scaf fold_8; pos 10938100 to 10939001 reverse strand)
tagctttgcctataaccccatttgtcaaagctcaggtttgtatcgacatcgatctatacggtgtcgttttcaattctccatattcaatcgggttttcaccttcttttttgatcggggtttatttgggaatcttgaattcgatctttattttccggcctcagattctaaattctcttaattggcgtgtgtttcatgcaattggtttttctgagatagttttacttttattaacctgggttttgatttttttcataatcttttcgattgttattgagctgcagttgattgatttttgaccgaaagagactagggtttatcgctgattgtaatttcttgatgacgggtttttgagttcgaagattataaatatgggttttggttgatttccaatataatcgacgatggaatttgattagaaaaaaagaagaagaaaaatacttcgttgttatgaatgtgtttattgatgtttttcttattattgaaaatttaaaaataagctaaataatctttcagtggtggtgtttgggaattgtaaatattttgcttaacagatatcgaatgagtgtaggtttgtatttcatgaggccccaattgatgcagaatttaattttcatttttttttaattgtaagtttcttaagagttgtcaacaaccttagtatgtttttcctttctcaaaatctatacgttttgcaatatcttttgtacatattttgggtgattttttttggtatctgtaactactatgagtggtctttttaatgtttgtagttttgaagacttaactggtgtgtctattgttggccaaaaaattttctgtttggggggctacatttctgttttttcttattggttttcttgtatgcagtgaggggagttgaaggattgttggggaggagtttt

SEQ ID NO: 60118 - DNA, 450 bp, Populus trichocarpa
  Intron number 2 from transcript POPTR_0016s13940.1 (locus POPTR_0016s13940) derived from phytozome v7.0 (chr-ID scaf fold_16; pos 13165845 to 13166294)
attgatatttgtgattctgttaattctaattactggtaatttattttattcttttctttatagcccatcttttctttttttagttttggtgttgactttgatgttcttgctgagaattttacgttttctttttcaaattttgataacagctaggttttatgtattctttgtacttgtatacgtatgtatgtacgtatgtatgtgttgcagattctgtttctgtaattctttttggtgttgtagctgaaattgaaagcttaattctttgctatttgtcagttacgatcaaagtaatttttttgtttttttttctttgaaaaaactttgaattttatgtgaaataaagattagcttttacagggagttgttctttttttttaagtgggttttgtaatattaggatgtagtgttggttgatgattttatttttttttatcaggcaacccaagg

SEQ ID NO: 60119 - DNA, 985 bp, Populus trichocarpa
  Intron number 1 from transcript POPTR_0016s14690.1 (locus POPTR_0016s14690) derived from phytozome v7.0 (chr-ID scaf fold_16; pos 13844163 to 13845147)
gttgtaaggtcatcaaatttaacattgatgtcgccaaacttaatttgcattcacccctctaaagcttctatcgctactgaatggcgatcaagtcgattctaaataggctacatcccttgatcaccattatgaagatggttcatcatcgatccggatgttgacctgttttgataccatctgatgcaacatatagcgtaaataaaactaggattttcaagctctaaggttatagaccaaactgtagagaaatctagagaaaattccttggtatttttattgaatatctgaataataatattgatctccgtaaaataaattggacatctctttttatattagtaattaaaatcttttatagaaaaatatttctaattaaaatatttctaattaatagaatctatctaatattaaggttaataaataataaaatactaattaaattaaaatttatatatataaaacaaataattaaaatttaaaattaactagaaaaataattaaaaaaaaaacaacttaaatctggtcataaactgctggataatttttctacgtaatagttgctgaacgttatgttactgcaaaatcaagtgctaagaaacaaatttctctttgctagttgtttgattcttgaaaaagtaaactttccatattactctacggttgggaggaaggaagatagagggcaatttggtggagaataatccatctttttttgtttggttcttttgaaggggagggagaggaaaggttcaagacagagtgtgagagagaaataggaagtcattcttacgttaggcattacatccatcttaccaaaacaggtgaccaagattggtcaagcttctgctttctgaaattggaaagcaggagatctccttgtgggtatgagtaatatagacaaggatcattgcatggcatatagttactataccattctctataatttgcaggcttttgagcggaaaccaaatatcgggtcctttgc

SEQ ID NO: 60120 - DNA, 732 bp, Populus trichocarpa
  Intron number 2 from transcript POPTR_0002s03780.3 (locus POPTR_0002s03780) derived from phytozome v7.0 (chr-ID scaf fold_2; pos 2347380 to 2348111)
accattgggcttgcccactcaatctgctcacccaggtatattttcattatcatgctgcaatattttttttattttgattatgaaattcacaactggaaatttgttaggttgccgtaatcattggctttcatccaaacaataaatatgattttgatcaataaattttgatcattgtctttcttctgctgtttttttacatttcagtcataccagaagtaacatttaatatcactggactaagctatcggggttaatttttttatgcaatccaaaatcatattttcagatgtgctgttttgaaaactttttcccatattcaattgtactgttgttttcgcgatttgaataatttttacaatgtcacaagtggttggactcttgataaaatttctttacaggtttatgtttgcatgtatcaaatgattttggatctgacctttgcttttggttgatttgtcattagataaattggtttaaacatgcatttggtgatccagccatttgacttcattcaaattcttcattgcctcacaaatctgaactgttatggcatgtttgcatgagctaaatatgatttctcttgggattttccagacaaaaagactacacacatattgagcttcgccatcactcctgagtgtccttctctgatcaatgtttagtacttcagatacaaacttcacttgttattgattttttcccattttcaaattgcagcccgcttctcccccg

SEQ ID NO: 60121 - DNA, 428 bp, Populus trichocarpa
  Intron number 2 from transcript POPTR_0008s01880.1 (locus POPTR_0008s01880) derived from phytozome v7.0 (chr-ID scaf fold_8; pos 905650 to 906077)
ccacaggtgatttaaagattggtttttgtttagattttgaatctatttatggtttgattggttttctttgaaaatgaatatgccacaggtgatttaaatgttggttttttctaaaaaaatatgttaaagattgtagagtgatgtttaattgtgttaaggattacgtaatatgagttattttgaggtctaattgaagataaagaattggaaaagattaaggaggtaaactatgttgtacaaattaatgacgatgaatcttaagttttagtgatttggctgttgcctatgttgctgtaatgattagtaaaaggtttcattttgtggtgcaataatgttatataaagttttttttaaaaaaaaaagggaaagaagattgtttgttgatatagggatgttaatggtgttttgtgtgaaatagggtggcattg

SEQ ID NO: 60122 - DNA, 846 bp, Populus trichocarpa
  Intron number 2 from transcript POPTR_0008s18570.2 (locus POPTR_0008s18570) derived from phytozome v7.0 (chr-ID scaf fold_8; pos 12535365 to 12536210)
attttataggaagaatattaagtgacggtaagttatatattatatacagtgatgtttatatatttgggtttaattgaaaaattcaacttgctacttttgaacagagttgcaaaatttaagctccttgcaaagtttgtatctggacggttgttctctagatgaatactctcttcaaagccttggagcactgtcttctctaaaaaacatgtcattacaagcactcaatggcattgtactttctagaggtaaattaacaactttaaactccactattacttatcattgacctttctacttctctaaaacacctgtctttgcaagcactcaatggcctgctacgattagatgtgtttgcataaaattcctcttttatgttttcgcaacctactaaacaagtcttggagagacaattaaacctcaaatttagaaattaactcaattgaaatctttattattttaaaattctaccatctatttaatataaataatatttcactttaactttacccctctctcaacaccatttcaatgtaaagtaaatataatgataacataaaaaacaataatttctttaataaaaaggtaacttcatatacagagagtgctatttttaggagaaaaataaattaacaaaggtgcatttgttttttggggtagacatataaaaaatcattctcttaaatggacaatacaatttctacacttactggatatttttagtttttttagccacgattaataagtaatgaattatttctaatcttcattccttctacattaatataatttcttgtctaattgattgtggcaggcttccttgatctcaagaacttggaatacttggat

SEQ ID NO: 60123 - DNA, 800 bp, Populus trichocarpa
  Intron number 2 from transcript POPTR_0002s03400.1 (locus POPTR_0002s03400) derived from phytozome v7.0 (chr-ID scaf fold_2; pos 2107549 to 2108348)
ttattgaggttccttttcttctttgcttgcttgtagtgctgattacggtcttgataaaatattttctttgctttcgtcatttttattttaattcatcaaatgttctcttattgattgcttgttagcccgtgtcctttgttttattgattatttaaataatcgtttgcttcagtaaattcggaatgggttttgtcaggtttttaggtgttacatcctctttcaaatattattcagaggctgattatgtaatttgccaattgctttgtcaataaataaatcaagattggcctgtaaaaaactgggaaaatgattggctgcttgaagtcttcaatgctatgatgcaagacgaatgggaaaatgattgactatgtggtgttcctgatttctttttgaagctcccctttgacttcacctggttagattgtcatccaattatttagctccttttttgtttgtccttttatgaatttcaatttcaattgcagaagtgatgagagggtcgccaattaacagtgatagctgcattgttcattttggttttcaaatcaatcaaatataggctgtggtatgagcatttacagtggttgtttcatgttcagatttcgtctttctaagtaaacttttatgaggttcaatgatcgtgtacacattggaagtgagagctgttattaatgtttctattttcacatatttcttgatgctcaaaatgaggaatagttggttcagcttagcagaacttttgtgcagcgtcaatactaaagaatctcgtttttgcaggttcttaaaagcaaggaagtttg

SEQ ID NO: 60124 - DNA, 515 bp, Populus trichocarpa
  Intron number 3 from transcript POPTR_0008s02660.1 (locus POPTR_0008s02660) derived from phytozome v7.0 (chr-ID scaf fold_8; pos 1350459 to 1350973 reverse strand)
ataacaggtcagtactttatttatgcccgttaactattcttttctccagtagttttgtttctgcgagccttctcatttcatattatttttctcatctttaactgaaatgttggtgctgacacgtttcttattttgagactcaagcagcaaatgggatgttagaggatagaaggtagacaaaagtttgaatggtactacagtatataaatgttagaaatcaggctgttatggaataatgtaataataattactacggtgacacatgttataaataccatctaataaaaccaagctgattttctgctaagcttctcctattctggttttagacttaaacttcaaattggggtcgtggaatagaattgggtagcttgattttatcctgtttgctaccacttctaaggttgctcttcggcacaaagttcttctagtcttgggctcttataacttatttttgtttgctttgttcagcctggatatgaatgtcagaaggaaacctctggtctccgtgatca

SEQ ID NO: 60125 - DNA, 710 bp, Populus trichocarpa
  Intron number 3 from transcript POPTR_0002s20200.1 (locus POPTR_0002s20200) derived from phytozome v7.0 (chr-ID scaf fold_2; pos 16135263 to 16135972)
ctccaaccgtgctcgcactgcttcctaactgggctgtaagttgaagccttacctcctcaatttagttctcatagtgagttttgtttcgaacttatgttttgtacgtcacaacatttagttattgttataaaacagaagcacttgagttgggtttccatgctagtttgtgtgaagtgtgtgattatgtttgcaagcatttttaactaaattggagcttgattatgattatttgacgagggcatggcacagcatatctataaactctgttattatgcgattaaatttgtttgcgttcttgtaagatgctgaattttagaaacgtggtgagtgaagaaataatccattcacagactgaatcaacaaaacaatgattaacttgtcgtaaccctcaatctagaagtcattgatgaattcatctctacagcacaggcaattttcagtgccaccatgcattgtttcttttaggtacttcatggacttgattctgtatccttataataaacaatcactagtgagaactgaggccacaggatgaattttgaagataatgaaatatatcagaattaaaatatttgattctattttctcatttcccctagcatttccgacttcctttttttgtagatcatgctgccttaaattttcttcctaatgatctaggttttttttttacaggtttattttacaatctacgaacagctcaaaagctt

SEQ ID NO: 60126 - DNA, 732 bp, Populus trichocarpa
  Intron number 4 from transcript POPTR_0002s23360.1 (locus POPTR_0002s23360) derived from phytozome v7.0 (chr-ID scaf fold_2; pos 20855321 to 20856052 reverse strand)
ctatttgtgttgaggattctttctagaaaatacgagtaaggatgtgctaattgttgacattttgatttgtttccaagataatatgccaatcactatgctttttgactttttctctagttctgaacatgctcgcggttctcttttattgtttcttaaacatccaaccattggtgttgggatcattttcccactaaaaacaggaaagacatataaataactaacttgcatatggcatttgagcttgatgtaatgacctgttttgaacaattggcccgcggtgctggtgagacacaccattatataatttatttgcttgtgtatctttgggcatcaaaaaaaaaaaaaacaccacggtcatttatttgctggctatataattggcacacatacctgtgcttttaagttggttgttttctgttatttcatcagggatgctttttatttcattgaaaaggaaccttcgctggacaaataaatggtggcatgagaatcttgggacacttttcagtcctcacgttgggtttccatgttttagtgtactacaacgtccatgaatgctttatctgagctgctatactaagttgacttaaggattagaaatttaggttttgtttatgttagactgctttgtcacccaacttattcttccatgcaatgaacacattgcttgtgagtctggttgcaaagctcaataaattgtctgaaaattttgttttcataggttcaagtcgg

SEQ ID NO: 60127 - DNA, 849 bp, Populus trichocarpa
  Intron number 1 from transcript POPTR_0008s02580.1 (locus POPTR_0008s02580) derived from phytozome v7.0 (chr-ID scaf fold_8; pos 1274184 to 1275032 reverse strand)
aggtttcaaggtactttccttgttcaactaaataaattctacgaagcccttttgggcaaatatcctgtttcctttgttgagtatttcttattctatcaggcttgttcttgcgttgcagatactggattaggaaaccctaaattttttttcgttttgtcacgaagtggacattgatgatgatagtccttcttcttcttcgctttctttttttcttcttgtgtgttttaagggctcatgccccaggatttaaagcaattttatttgcttatttgtaaaatcttctcttgagttcatttcgtgatttcctttcaatagccgtttttgtgcgtgtgtagtggtgatcagtacaagtagtatttgttctcagtatcataatctcttcgctaattttctattatgaactccttggtagcaattggaggatgatggtatatactagctagcctcttcttcttcttcttcttcttcttcttcttcttgagaggagtacaataatagctagttaatgattttaaaattcaaagagagacaagataacttaattagctggtgggatcttcattaattacatcccaagaagaatgttttgaatatttaatactttaattactaaaaatgatggtcaataaactaattaattgctttttgtgtgagagaaatgttgagagtatgttagtcaactaatgaatattgctaaatcattatattaatagtatcattattgtctgcacaagaatacgtaaacttctggttaggtttttcatttccttgaaatctgtacctgtgtgtctgtttgtacacacatacaagcagtattgagttaatttgactttgctgatattcaggatc

SEQ ID NO: 60128 - DNA, 813 bp, Populus trichocarpa
  Intron number 1 from transcript POPTR_0008s13600.1 (locus POPTR_0008s13600) derived from phytozome v7.0 (chr-ID scaf fold_8; pos 8960781 to 8961593 reverse strand)
ctaaaggaatcctccaaagcgcggctctaaaacaggtctccctcttttctcttttctctctcactgtgtttataatcatacgtgctaagttcttctataatcactattactcccctagccagcgcagaacaataaaataaatactcgttttcaaatcttccatgcactgtacttcgtttttctggacaggttagcagattggagaaccatttaacttcagcttgagattcaaactcttttaccacgttcaacttcaaatgccagaattttcacttctcctgactcccacaaactgtttactcatttttttaaaattaatcggtcgagtttaccataaattgcgcgaaattgggtatgagagtgagaaggattttgctgatctagttgccatgtaagtttatgtgaaaatgatgtaacaaaataatctcattgtatgtggatcgatccaaaggtttaggcttgcatgcttgatactgattaaatgatcttagcaagtgcaagttttttttttatgacaagagaaaagacaatcttcacttttcttataggatagtagaggaaattatattcaacttttcactgcaaaacaagataatttttctcaaaaaaattcaattgatgttttgcaattttaccttttctgcattaatttgattaggttcatattgatcgctcagtataaaacatgcgcatgatctacctgcttgtaagagttgtttattttgagtgtaagctcctttgttctaatatttctcttaatttctgaataaatatatagtatatatacgaaactagtgcatatcctggggagca

SEQ ID NO: 60129 - DNA, 484 bp, Populus trichocarpa
  Intron number 1 from transcript POPTR_0016s05740.2 (locus POPTR_0016s05740) derived from phytozome v7.0 (chr-ID scaf fold_16; pos 3678458 to 3678941 reverse strand)
tgcaaaagcttatttgtgctcttcgatttctagttagtactctcttttttttttttttttgtgtggtgttctattctttttgcctttcttcctctatttcttttttaaaaagttttattgaatcaaacagtactaggtattaattaacagccttgacgtttattgctttctgatatttagaatttccttgggctacgtaattacgtaaccaagaaagttagggagaattaatgatggaactgattttttcttttttcttcttttggagttttaagtggttactcaatcaacgtgagtgaatgatctagtttctgtaacaaaaaaagtagacacaaagttactgggttaaagtctctttcttaccttgtttttattttgtgaagtttgctcaaatgggaggctcgtatagtaatatgaattgatgttttactgttagtttccccaaatgttttacacatttttttgtggtaaattcaggaaccat

SEQ ID NO: 60130 - DNA, 355 bp, Populus trichocarpa
  Intron number 1 from transcript POPTR_0008s20380.1 (locus POPTR_0008s20380) derived from phytozome v7.0 (chr-ID scaf fold_8; pos 14163038 to 14163392)
gactcgatccccagtttcttcaacaatatcaaaaggtaattaatccatacggggattgattgaatgctctttaatttcactgattggtttgtttatttatggatttatctttttttctgtgatttaagtggttgggaaatgatttcaaaaggaaaagaaacgaactttaccgatttgcagtttaggcctttgaattagcagtgtcacttaacttgcaaaaaaattgtactttttatttatttgttaatcccgtttaatcaaagtgcatgattgttgtaattgctcgtaattttttttttcatttttggtgcctgctgtaaatgcagttcaaatagtgatccttacagcgaggagt

SEQ ID NO: 60131 - DNA, 860 bp, Populus trichocarpa
  Intron number 1 from transcript POPTR_0008s15000.1 (locus POPTR_0008s15000) derived from phytozome v7.0 (chr-ID scaf fold_8; pos 9999405 to 10000264)
aagcttacagagaaaagcaggttttttctttttttctttctgattttaattactgaaaattaatccatcatcttatagttaagttaaaattacgctttgtctccattattttgtaaattacagaaaatatctttagtcaataaaaattttctaatcattcaaaatattaaaatttctctcatgtaaattatatccacaaacccgcaaacattaacccactttttttctctctttacatacaatttctaaacaaaatctctctacaaaattctacaaaatccaagttcgattgaacctttaattctacaaaatcaaagtttaggtgctttgtagttgatttttgtatcttggtgtctgttcgtgtcaacaattgtgaaattgctgttgttctcgacacattagggtatatatgtcatttcacttgttttctattagacttcgataattaagttagtgggtttagtggtggtttaattattgttatttctatagaatattgtttattttactctatttaaccaaaaaaagcataaaattaaatgaaccccatcgttttcttgaaaacctaataaatcttcaatttaaaaattagagttactattcatataatgagtaattttgtgttattttactgtaacatatttaattagtgtttgactgtgtaggaaataaaatgcccaatattattgtatatcatggaattgcttcagacgtcatgagcaattgcttctctgagtacatgttttatataaacttgctgttcatttacaagcaagtttatgacgttgacttgcatataaggaatgacagggataataaaatagttggtgatccctcgacaatgtagatattgaatatac

SEQ ID NO: 60132 - DNA, 790 bp, Populus trichocarpa
  Intron number 1 from transcript POPTR_0002s22470.2 (locus POPTR_0002s22470) derived from phytozome v7.0 (chr-ID scaf fold_2; pos 19215896 to 19216685 reverse strand)
ttgttgttcacgaagatcagaaaagggttatcaaggtatgattgttgcgatgcgcattgttgcttcgttttatcagattactgctgtccttttgtttcttgaattaagaaaaagaaatatgttgtgcagactgtaatacatgcatgatgaattaagtaaaacacacactaactcgtacacacccacacacacaaggacaccagagaggagtttttactaggtgagctagacccatctggaggaagagatcaacatctggacctctcgcctccgccatggggttccataagaatctgccatctataatcaaattgaatcctcaaattagcttgtaccaaattgcctcttttcttccatttccatgattatttcagtgtgtctgtgactcaaaaataatcctgttctttttattgttaattttagtgcaaattatgaaatcaatatagtgatacctgttagtttactcaaggttttgattattgacttatcatgtgtgtttctggcgaggttatagttgtgtaatagtgtagtagatgtcttagtgtcctctacaacccccatctaatccttcccggattctataaaaactaaaattattatatttagatgatatattatctttggaaaacattctaagtgggctattgcctatgataaaccaatgcttttgttctgtgtttttgttccatctcatgattagttgtttctgtcaacaatagatgatagctaatgtttcgttgatgcaggattttcagccctatttacctagttggggagcaagacaagagat

SEQ ID NO: 60133 - DNA, 660 bp, Populus trichocarpa
  Intron number 1 from transcript POPTR_0008s03620.1 (locus POPTR_0008s03620) derived from phytozome v7.0 (chr-ID scaf fold_8; pos 1958939 to 1959598)
caacagcaatctttgctggactgcagcaataccacgtaagactttttgctctaaaaccccccttttttttcctgtttggttccttagagagttgaggaaacttgatatatctttcctttactagttgtcaatcactttttgtgcattaaaaggctatcttttcgttctctgtgattttcactgcaaatcttgctatactttttgtcttttgcttttccttttctgtatttgcttgacaaccaaggatatttgttttccttgaaaattttagcatgtttccaaatatacttgcatgtccaaatatagactctcttttggatggtgattctgcgtttgcttattcttgcatttatttctgattgatgtttctcaaatgttatgaaccataacaattttaacaccattgtaggctacccagtaaaaaaaaaaaaaaaaaaacaaaaacatgctaaaacaataaagctacaaaagcctgtaggacaaaaggtggtcaattttacctgaggtttgtagcatttctccttgaacttcaatcttgaagcttttgaattaattcttcttttcttttcttttctttttcataatagataaaaaaaaaattgtgctgttaattttagttggaaattttgaaggggagagaaacagaaggagaaatagaaa

SEQ ID NO: 60134 - DNA, 647 bp, Populus trichocarpa
  Intron number 1 from transcript POPTR_0008s12260.1 (locus POPTR_0008s12260) derived from phytozome v7.0 (chr-ID scaf fold_8; pos 7918527 to 7919173)
gcagaagaattcccagtaaggttagttttttgcatagtttcttgagattcaatcatgtgaatttaacatttgtatcctgttgttttgatcctcaatcaacatcaattctgttgcacaaattagcacttggtaattgatattttattttttcttaattaatagcaatacttgattggttaatgcccttgtgatttcggtacggaaaaaagaagaatttggagtggaagactgttgtcatcacgcacgcgtaacagactacttttcctagaaaagataaaataaatggctcctgtatcacgcagtggactggggaagggaatcagtgcagttattcggttaaaataagactaatattttaatttcgatgcatgagagctagttcaagattaatcttcactgaaaaagaaaaggaaaaaaatcagttgcacttctcgcactccgaactaaagaggagcttgacatgaaaatattaactaaggtctacgatcttaattatcaaaagaaatatagtgcaaaagaaagagatccgagtgtctgcataaattactacagtgattttttcttgactttccgtgacacagtttttacagctattcggttttgttaatcatcgactctcactttcttgttatgtgtcatgatgcagg

SEQ ID NO: 60135 - DNA, 914 bp, Populus trichocarpa
  Intron number 2 from transcript POPTR_0008s14040.1 (locus POPTR_0008s14040) derived from phytozome v7.0 (chr-ID scaf fold_8; pos 9277086 to 9277999 reverse strand)
atcagggcgaaggtttgcgctaatccatcttattgatttgcattctattctttgtgttttgattaagttctgggccagctgtcttcttgtcattttaatttagttttttgttttggtatgtgtataacttccacgagtattaaagatgaatgctttgattgttgatgttttttattccatttggtttaagttttatggtttagtccctatctagaatttagttggcagttggatggatactctctctctctctctctctcttcttttcatgcagggttctttttcagttctaaaatccagcttttctatatgtttacttgtattgaatctacttttataatgtatattggttttattgatgtaggctaaacagttgagttttcgttcatcctagcgtgtgttgtttgctatttgcaatttttttaaaaaagctcattccgccatttataattcttaaagtttcaagatgttttctgcacattggatcccgctgagatctgaactgtatgaataattggaagtaaggattgagcagaaattcagtttataggaaagtaattctactttcttttgtggtaaatttgtcagaggtttgtagaatcatttgaatctgcacatatgtagttcaaaaatgtatgttgggttgtataactggttatgattgtttgtctgtataagtttgatcaaattgatttctctctttagaggtgcatatacaagagttatgattttttcattcgcagttaccaaaacttttgattgctctattacttcaagaccgtggtcttcaagaatgaccttaaatagtgctagaagcaaagcatacactcataatagcgcacaggttcttgactggtgcaaaccactgattatatgcaggtggaacatttgctttgtactcattgctctgcagg

SEQ ID NO: 60136 - DNA, 436 bp, Populus trichocarpa
  Intron number 1 from transcript POPTR_0008s14040.1 (locus POPTR_0008s14040) derived from phytozome v7.0 (chr-ID scaf fold_8; pos 9278200 to 9278635 reverse strand)
caccaccgcctactactaccactactcagcccaaggtattatattttgaactactccattctctctgttttctctctgtttctacacctcacagttggcccaaaagaattcatggacttggtgagtatattttatgctaataatgaaaccattctcatgtttctgcaactttcccttttcttttcaaattctaaacgtggccgtattaatttgacttgatggaatatttttgtttttgattgttgaacttcctgtttttctttttaccttttctctttgattgattttgcttgaggggctattcccatttatcttgagtttgataatatgtacactaatgggcttatggatacgttggcactcttgcaaagtaagaggaatcctggattttttgtttgtaatgaatttgtatgcgtgttaaccaggagagaggaag

SEQ ID NO: 60137 - DNA, 256 bp, Populus trichocarpa
  Intron number 2 from transcript POPTR_0002s22920.1 (locus POPTR_0002s22920) derived from phytozome v7.0 (chr-ID scaf fold_2; pos 20073350 to 20073605 reverse strand)
gattgaaagaggtatgctgcgctgcgctgcttgcatttcgtagacttttaatgtttctggtgttttgattatttactgttactatttggataattggaaattggccatctgtgtgagaagaaaacatatactctcttttcaaatgggaactagtcaaaaggaaaaggatttttgtctcttgtacagaagctatagaatacaattttgggttcttaacacttattcaacacattttctgggctttgtaggtagaggt

SEQ ID NO: 60138 - DNA, 277 bp, Populus trichocarpa
  Intron number 1 from transcript POPTR_0002s22920.1 (locus POPTR_0002s22920) derived from phytozome v7.0 (chr-ID scaf fold_2; pos 20073667 to 20073943 reverse strand)
aaccactacagcttcttcctgttgttctatcaaaggtcttttctttcttcctttttttttcctgcttcacctcacggatattattattattattattatttatagattgctataataattaattaattttcttcttattagggtttcaaaaagttgtttttatcaaatcaaaagcaatttggaatggtttttaaaataaaataaaataattaatgaatgaagctgtggtttttttaatacagggttgccacttgtgaggaatatcagtgagcttcca

SEQ ID NO: 60139 - DNA, 730 bp, Populus trichocarpa
  Intron number 3 from transcript POPTR_0016s09340.1 (locus POPTR_0016s09340) derived from phytozome v7.0 (chr-ID scaf fold_16; pos 7345249 to 7345978 reverse strand)
taacatttacaagatctcaacacaattctctaaatgtaagatgagtttatatgcttcattatatttttgagtcattcgataacctttaatttatctgataaacaatgtcatgaaacaacatctgttgattccttaactttttaatgcatgttatcaaagagaagatacaaaaaaaaaaaaaagttacaattgtgctttacatgcttttgtcaagtacaagtctccactttcgaaagtacgtaaatccattcacttctgtttctgccaactcaataccttctttttggagatttgcactctcacgttttcatttctgaagtctacattctttattgactacttagccttgtaaattactcatcttgcgcacctttatccttttcttctttctctaatccacagttctttcttctctttttttgctttccaagattgataataaatcaagtttcgttgagaagcttcaagcccttgtttaatttgaatagtttaatcccaattctgggcttgtttttcatgttaatttgcagattctttattccaaatcatatatatgttcatcctacgctacttcaagtctgtatttatagatatgcaaacagcatgcattcgagtttttcccctagatttgtattgtcttcttgttcttctttaactgtttgggaggatagcagttgaaacatttagtagactatcattgttttgtgcaatgagagattctggaatgcag

SEQ ID NO: 60140 - DNA, 871 bp, Populus trichocarpa
  Intron number 1 from transcript POPTR_0016s02180.1 (locus POPTR_0016s02180) derived from phytozome v7.0 (chr-ID scaf fold_16; pos 1050966 to 1051836 reverse strand)
ggcgctcaaagaaagaggtcttacaccactgaaaggtatgaataagagaaaaattaaaagctcatttgttgttcttgccgtttaaaggatagatagtggtaaaaaaaaaaaaaaaaataatttctgggatctaaaagtaggaaaccataaaactaattattatggtaagataaatttttaaaattatttttaagaaactgaaatccacaccgatactgaatagatccaaagatgttcaaatccaatttcaatataaaaattatttatgttaccagaaacaaaatccgttcttcgattttcatctaattcactggaaagtctactgggtattatataaattatgcatggattttatatgaattatatataattcagttatttcttataaaaaaaactatttcaaatcaatagcttaaattattagatgaagttttaaaattaatataatttatattattctctaatatacatattcaagtgaaagtttttaggcttaaaatttacaaaggtccatactattttgtttttaatttttatcagatagatgaggtggtgaaattcgaactcgtgacaacttggttatcaaaactctaatatcatatcaaagaaccaattcaacccaatagcttaaattattagatgaaatttcaagatataatttatattattctccaacattttcttctctcatcgaggaggtcatatgttctctacaatttgctcagaccgcttttagttcttttaggagtttgtatcagtgagtctctgcttatacatataaagaaattcgttacctgtctgcttaatcactgctagctatttatatagctctatcgattaaaagatactgatttgctcaattttgtttcag

SEQ ID NO: 60141 - DNA, 513 bp, Populus trichocarpa
  Intron number 1 from transcript POPTR_0016s07680.1 (locus POPTR_0016s07680) derived from phytozome v7.0 (chr-ID scaf fold_16; pos 5519778 to 5520290 reverse strand)
aaaataagataggtctttaaaaaacttttatacaatatctcttacacaacattaatattgatgaaaatatggtaggtcctcagaagattgttatacacctaagggtttttatgtattcaagggtttttaaccccactaaatttgaatttatcacatgactcttatttttttatttgtatttagaaatatcattagcacaactaaataattggtaaaacatattatagttgaaagtctatgaatttccaatctcttgaaaaaattatgggtccgggtcgctccttcgtgcggggcaacaaagaaagttttccttggaacaattgcatggaagattccaagcagccatgggtgcatttcgctcctctctctatatatttagtgttatgaacgttagaagtgattccggcccctacctaacttttatttcataaaaaacaaaggaagaaagttattgttagttgtctgatggatatgccagggtttcgtttttacccaacagaagaagaactggtc

SEQ ID NO: 60142 - DNA, 1029 bp, Populus trichocarpa
  Intron number 1 from transcript POPTR_0323s00210.1 (locus POPTR_0323s00210) derived from phytozome v7.0 (chr-ID scaf fold_323; pos 7269 to 8297 reverse strand)
atactaaaaccctttgcctcttttcttcttccaaggtataatctttaccttctttgattcagtcctagtttatatctcaactctttttgtttccctttctcctttgacaatatgttttcttgtatttgactgtttgatgctggtgttttatgtaaaaagttatgtttttaatgatttttttggatcatgcatagtttgttttttagtaaagcttcgctctttctgtcttatctctaatattgttttgttgtgtactaaactgggtttgttgggttgtactcttaaagggttttgttttgagatttggtttgtgtattttggttttgggttatgttttgttctctacacttaattctttgtctttgcttaagcctcagtttatagatgaactctttttttcccctttctctcgagactttatttttccttgtacttgaatgtttgatgctggattttatttaaaaagtaatgttttttatgatgttttatggctcatacagagtttgattttgttttagtaaagtttcgttctttctgtcttcaaggattttgttttgagatttagtttgtgtgttttggttttgggttatgttttgtttgccgcgtgattgattctgtcttgtttataagattttttctctgtttgaattgtgatttattttttagattattaatgatagccttttagagtgtttttttttataacctgggctgcttatggagtgtgaatggtgtgagtgcaggctcagctaatcttttagagtttgttggttgtctgaatgatttttgtgttctgaataatccattttgttcttgtcaatgttttcggtttgtgtttttttatttaaagttagctatttgatctcttaagaaacaatgaatataaaaatcgacatcattatttactgtggctttgagatattgcatgattatgaattggcttactatgttttgagcttgtttgggttacatattgttaatgcttgatactgatgctgtgatatccctatggtttagtccataattgaa

SEQ ID NO: 60143 - DNA, 604 bp, Populus trichocarpa
  Intron number 2 from transcript POPTR_0008s05580.1 (locus POPTR_0008s05580) derived from phytozome v7.0 (chr-ID scaf fold_8; pos 3241535 to 3242138 reverse strand)
ctgctttcttcgaggatccgaattccttgaaacaggtaaaatcatgacgatgatgcttcctttactttaagatttcgcctaatttagggagtttttttaatttttaatataggaagtagtgaacttgataaagccgaatgttattaaccatatgccctttcttagtgaagctacggcattttaaggcgtaaatattctaccttttctgtgaatttaatgatacaaatcggtaattgagacccgatacagctgtttatcgagagcttttttttagtgatttttcattgtctagattggttttaactttagaattgttcaaacaggaagcttttctggttaggttactcaagaaagatcaaaacataaccttttgacttgaatcgaattatggttttgggttcgctcggctttgatttttattactaacatttcactgagaatcaggtgtacttgcagaaaaattggtattttgaagaggaagtggtgtgattattataattagatcagtattatatgatggcagcacatgtgcagtgctatttaatgaaatatagaggaggttttaagtgaatcttacatttatttttttcttaaaacaggttcc

SEQ ID NO: 60144 - DNA, 794 bp, Populus trichocarpa
  Intron number 2 from transcript POPTR_0008s14070.1 (locus POPTR_0008s14070) derived from phytozome v7.0 (chr-ID scaf fold_8; pos 9296500 to 9297293 reverse strand)
gacgagtaccccgttaccaccgagcttcaggtcacccaaccctctctttaaaaattacttgcatactatatataggtgtattttttacgagctctgtacagagtcctttttagcatccgatgcccaaagcaagaattagcagagagttcgtgctggtgatgcataattttcctctgtttccaatgcagagatgctacaccagcggacactttcccatggtttacaagcctgtttttgttttgtggttttaacttttaagggcagtaaggctctatcagttctatcaagaccaggaaaaaaaaaattatactcggaacttttttatatttttttaggaggcaagagtttattagtcttagggaaaggatgcatgctgatttgttttcgcttttgttttggttttcttagaccgtgaagtcagaaagctgaaatttgacttttcagctgaaactcttccctgtcttatggtgctttggtcaatatcatatcaattaaattaacgagcatatacagaggcggtcaatagactgggaatttctgcttgcagaagatctacgcaaaccatgagcaataaaataaacggactgctgggagatttttcaacaaaccttgtctctctatagtctataccatatcattttcaaacaatttttttctaacaccgatcacacagtttcttgacgtgcttattactaaatcgtggggttggacaaatcaaaatgcgtttaaataatagaattaatttgactgacacaaaattacttgatatttatgtgcagaatcgctgtgtgaac

SEQ ID NO: 60145 - DNA, 872 bp, Populus trichocarpa
  Intron number 1 from transcript POPTR_0008s04810.1 (locus POPTR_0008s04810) derived from phytozome v7.0 (chr-ID scaf fold_8; pos 2792810 to 2793681 reverse strand)
agctattgcagacttttaaaaagtaagtgatctgtttctcttatttggacacttcattgtgagattttttatttttagagaaagtttgattgttgtaagatactatttcaattgatttggcccttttagctggtgaaaggaaagaaccttgcgcaagtaggggatgaactgaagggggcggacatgcttgcttggtttgcgggttatagtgatgttggattgaggagatatatttttacacagttgtttgatttaatgttcatagccatacttggttgcaataaatttgaatagttatcaatttagcgtgggaattttatttgggaaagttgacaaatgcggtatgctagcggatgatttagtataaatgtatttgtagtcccattatggtgtagagcaaaaggttgtggaccgtataagttaaggacaagatttttcaactaggatgtttcaaaattaaaacttagtggttgtttattttttcttctaaattgtagtagctgatgccccaccctcaaaactgcaaaggaagaagagagggtggggttttaggagctatataggtatcagtaatgaatgtctcatttgcacatgcacccaccctcagaaccctaaaagattttttttggctggattttgcacgcaggagctatttagggatcagtcatggatgtctcatttgcacagaccttactatgacctcaggcttgatctgatgtttggagaaacattttccaaaaattgttcctgtatgctcattgctttgtggaatgacggtagtggattatttggatcaattatgggctttccttttcaagtggcagtgtaagcattaacttattttcgattctgcagataccggttaaggtcta

SEQ ID NO: 60146 - DNA, 650 bp, Populus trichocarpa
  Intron number 3 from transcript POPTR_0016s07110.1 (locus POPTR_0016s07110) derived from phytozome v7.0 (chr-ID scaf fold_16; pos 4952436 to 4953085 reverse strand)
aagaaaacgttagtcttttcttaatcatactgatcaaattgttggtaattaagttttgattagacgaaactagtatgtttctattatgttcttagacatgaaggttagtggcagcttattgatgatgatgtgctcttcttttagtattgaaatttatttttttccgcgaattggagaaatcaattttaatgtcttaagtcgtgtttcatttctcatcgtatggttgtgtagcagttttgcgtagctggttaggatttacagagattatgtctgtgtatgattacttggtggtgccaaaggtgagaagtaaatgcggtggttatctactggctttagctagggaatttgatttataagctaagaatcggttttaaagttgttggctttatgtttcagagtacttctctctcgttagcctttcttttgctgttaaaaaatttgtgtaagttttggtcggaatacatgcaaaagagatgcatcctcactattatattttcttgtaaaattgggttttgcatatattagcttgtggttatgcagcattgggatgtcaacattgtctagttacttttacatattctcttcatgaagcaagcagttattgccagttatgcatgtggataattctgtatcatgtcaacagattggct

SEQ ID NO: 60147 - DNA, 158 bp, Populus trichocarpa
  Intron number 2 from transcript POPTR_0016s07110.1 (locus POPTR_0016s07110) derived from phytozome v7.0 (chr-ID scaf fold_16; pos 4953125 to 4953282 reverse strand)
gtgaagtccacaaacactctgagagagcccagaaggtcttctttgtcttttataccttttttctttcttgaatttgctgtttcatgtttgattttaatgtgactgtttttgttatttttgtggttggatgggaacaggctttgggtattaagggaaag

SEQ ID NO: 60148 - DNA, 834 bp, Populus trichocarpa
  Intron number 1 from transcript POPTR_0008s04730.1 (locus POPTR_0008s04730) derived from phytozome v7.0 (chr-ID scaf fold_8; pos 2716727 to 2717560)
actaactctctctctctctcactctctctaatcaggtaattaatctgtttggtgtttttgtttgattaattaaaatcctcttagtctccgattccgtctacaagcccggttcatttatctccctctttattctcctagcttccctgaaatggtcttgcttttctttttccgattttggatctgaacatgtctggaaactgagtatagattatccaatcaaatgctaaaaaaaaatcgtttaagggagatttgttgtttttttatttaatttataaatgattaatttatttgttgatttgaaaagtgaaatatttgaatctttgccaatatcttatttaaattgtaattaattcacagtttttttcttttcaccttataatccgctgtgtctgttttattagtggtagttggtcattgatgattgtgaatttaggtcaactttgttcgattttaggtctcaaattattattgtgtaattcacagtctcattgaatgagttgggctttcggttactttgattggctgctttgttagttattatttgtgctaaggaaatagcttgttttatttttttagatctggatattaaggacagtattaagatgagagtgagttttagctatctagattatttagattatgaaattgttactggatacttattgcagataattcaaccataatttggatctagtccgttgaattttttccaagatcagaagtttatttcctcttggtctttctttgtttatggagttttgttttggactgattaaggattgtgttgtgttgtctgcaggtgctaactaccattggcaataaccttgcttggtt

SEQ ID NO: 60149 - DNA, 720 bp, Populus trichocarpa
  Intron number 1 from transcript POPTR_0002s05800.2 (locus POPTR_0002s05800) derived from phytozome v7.0 (chr-ID scaf fold_2; pos 3802104 to 3802823)
acctgcttccgaaccaaagacgatcgctctaatcggtctcgaccgcacgccatctcctccgattctcttcgatccaaacctactcttgtaatctttcttttcttttcttccactttctgttttgttccccgtaaatatatatttcttaaagctggaaagaagcgtttcttttctctgtttcttgaaactgaattttaggtaattgtaatcttgttcttagttggtttttaggattctctaggatttctattagtttttttttgttcgagacgtgttggctgaaatggctgcgaatcgattactgagcgtttaattccttgatatcggtgttttttatgagataaaagtaaaacagagaattatcgaattataagatatttaccgtcgtcgtcatttttttcctggctgagttgagaatgggaagcaggaaaccatggtatctaaaaatcgtttagcatctcaatctttctgtttggttgctgggaatttttttgtttgattggaagctgaattttagaaaaacaagcgatttctttagtctaatattttataggatttttgtttttgtttaatatctgttttggttggatagaaaataagtgtttaattttttggtgtaatgtttgctagagattaaacaggtgattattgaatgataagatattcacaacttttttttggtgagtgggaagcaggaagctggggtgcttaaaaatcgtt

SEQ ID NO: 60150 - DNA, 489 bp, Populus trichocarpa
  Intron number 2 from transcript POPTR_0002s16880.1 (locus POPTR_0002s16880) derived from phytozome v7.0 (chr-ID scaf fold_2; pos 12626862 to 12627350)
agcaaggggaagaacttctattcacaagcagtaaggtatgtgcctttgcaaaatcttacaaatcgtgcactgttttcttaggtcaatgttggttttgagtaaggcagtatccagaaagggatattttccattgtacggctgtcctagtatcagaactaaaatctaaatgagaaatgactgggaactcttcttcttcttcttcctttccccttgcctttcattttgattccacgagagcttacattacatgtttaaatatgactagtcaaattcatggaaccataatcataggactcactagattttgaattgctgttagatttttagtttctaaacaggttgtcatagagttgttctagcataacagagagttgcagatggtattgattaataaattttaactcttaagagatccaagactgattcaattatctgaccttttcaattattgcaggggatctttaagcctccaaaacaagtgcgcggagg

SEQ ID NO: 60151 - DNA, 849 bp, Populus trichocarpa
  Intron number 2 from transcript POPTR_0002s03120.1 (locus POPTR_0002s03120) derived from phytozome v7.0 (chr-ID scaf fold_2; pos 1934226 to 1935074)
ggcttgacgtagtgatcatagaaacacttttatgattttaagttcaataatgatgcttgattttattggatagtgcatttgctttgctatatctttcagatgtgagtttcttgtttgatgaatgattagcacaattatctagtagtcaagctgtacaggagagggttttgaatttgtataatcgaattgctgtcataatatagcataatggctaacgctattaggtgcttgatgtttctttacacggtgttcgatcttgttgctgggggcctcatcttcatctttgaaaaaacttaatcgacgccaggaaaatattgaagttggcttataggaaatggttttagtctgtagcttgccctcgtaactactcctattgcttttagttataattctgcaaatatacttttactgccttctattttgttgctattgattttttgtaatatccagcaaatatttgtgttttgactgaaagtctactaatttacaccattgttgattgcgagcactaacttttattctagcttaaatgtgttactattttcctacaagttattttatcatccctaaattatgtatgctacaatatttgctgcctgtccttagcttggtatagaattgcagatgcagctggttttagtgtatttcagaacagcctttcggtttggaaactgctcagttacttcagaactcggtttttcttaatgtactttagaactaaatcagctgctgtattatctaggtgcttgttggtcgttctcagctactagagccgtcgaagccattgataaattgtcactggatctcttgttagcctttcggaacaagagttagttgactgtgatagaa

SEQ ID NO: 60152 - DNA, 589 bp, Populus trichocarpa
  Intron number 1 from transcript POPTR_0016s00540.1 (locus POPTR_0016s00540) derived from phytozome v7.0 (chr-ID scaf fold_16; pos 185480 to 186068 reverse strand)
ccaacaccgtcacatcccactaaaaacagcttcaggtaaactccccaaagtccaactccttacttgtttagattaaattagattaaaagcttaaaaaagacgaattcttttttgctctctcagttagtatctgatcatgggatcaatttgtatccttttctttctctattttttcccaattaaatactgcttactgctgtttcttgcaaaagggtcatgtaaagtttgcttcttttgaatccaaaatcttttagttttggtttttgagtcagattttgatgtttatggtaactttctaaatgaaatctgggtgttttgattgacaagtgtagatttttagtttcaatgtcactgttttagttacttttgtttgtagcaaataagtatttgctacaaactctcctatatagaatttggatttagggttttggatgcgagggtgtggtgctgcttgagcttgttgattgtcttcacttgaaaaatatgcaaatttggatatcttggtcggtttgtttgtcgatgataatgccacattatggtgctgtttagtccaggaatcatattgaggaactgtgtttaataacgaagg

SEQ ID NO: 60153 - DNA, 322 bp, Populus trichocarpa
  Intron number 1 from transcript POPTR_0008s19540.1 (locus POPTR_0008s19540) derived from phytozome v7.0 (chr-ID scaf fold_8; pos 13465569 to 13465890 reverse strand)
tagcgtcaaggcctgttctcatcttcatcattctggtactacactcgctcattttaataaaactacgtagttgcatgcaaaattctcttattacttgtttgattttcaacgtagcttattactgcatgcctgaaatatactgatgaaaatatttaatttcttcgatgataatcacctattctaaaatgggttttcatctaatatttctttaataattgttatgttcattttcttttattccactgcaaatggaattgcactcaaggtttgtacaaacttaaatgcaggcaattggagttgtgctactcccttgtgtagtggt

SEQ ID NO: 60154 - DNA, 832 bp, Populus trichocarpa
  Intron number 1 from transcript POPTR_0008s07950.1 (locus POPTR_0008s07950) derived from phytozome v7.0 (chr-ID scaf fold_8; pos 4908343 to 4909174)
gtcagggacagagctcttaattcccaacagctaaggtcttgttgtttcccttattgtttcttttttttttttaccatcattttctctcgttttttttatttttttatattctttgggatgatttttgtagtggttttccattagaattctgtttggtgtgtttgagaagaaaaatgagctaaccctgctttaagttttcttttacctctttctcttgttcttcagttttacactaaaagcaattttcataggatgttacgaaagaagcatcactttacacctcccatgaaaaacgaaaagaagaaagaagtagggtttttacatgcataacaaaaataaaggaatgatctctactcttttgacgtacatgatatatagacgggattctgagtctcttcttataatgaacaaagagtgttcacaagatagaagaagattagttataagaaacatgatctcatgaaatccttcttgaaagaactgccaccacgaaccatgatatgtatttcctgggtctccttcagcactaatgtttaacctgggtcttgaaaactgattaaggtgatgcatgctaagtactattctttccatgcttgtttaaacatattttccatggttttaccatggaacatattctccaatctttgacctatggttaaggtattttaaacctcttttttttacagaaaccctgtggatttttatgcacataatatattctcgaaatgttcggtctgttgtctccaatgctgcccatacaagaacattttcgttttcttaattccttgcttttgaaatttcaggacaaaaatcgatactagatttagggaga

SEQ ID NO: 60155 - DNA, 493 bp, Populus trichocarpa
  Intron number 1 from transcript POPTR_0008s02345.1 (locus POPTR_0008s02345) derived from phytozome v7.0 (chr-ID scaf fold_8; pos 1121850 to 1122342 reverse strand)
agagcaacaattagatccaacgaagtacttacgtgtgtggtagcagctcacggtgctacttataattcccttacttctctctctcaagcttgataagactgctgagaatgtctgagcgatggcaagaacttgagtaagggtatgttgttgttcttggtatgttgcttggtgctagttatatagttagcctcaaagctgactatcttcccttctcttttaacatatggcaagtggttgcttcttcctttcccttcgatatagaagggccttcttttatttttgtcgtcgggtctttgtttattcccttaccagctagtaaatccccagttgatcagcttcatttatttaatcaattattaattacatctcgacacttacgcttttcccttccttctccttttctttttggtacaaaaggataaaagcaaaaacagccaacaccttattttaatttggagcttgtgccagcagcatcaccaaatacagcaggaat

SEQ ID NO: 60156 - DNA, 632 bp, Populus trichocarpa
  Intron number 1 from transcript POPTR_0008s06540.1 (locus POPTR_0008s06540) derived from phytozome v7.0 (chr-ID scaf fold_8; pos 3897754 to 3898385 reverse strand)
caggttcaatttatctttaactttttgcttctcgtttagatctgtttcaaattcagtctcgaagttactgtttgttttttctcctagtgttgcgctattttgaattttacttatacgtaaggaatttagggttagaggaagctctatttactgccagggtataaaaatagaaatgggttttgttgattctgctttttcagtgaacatttttttattcatataataattcaggttattattattattatttaaaggactctcatttataacttataggtttttactagctaagaatgtagatatttctgcatagtgtttagtcagtgtggagggtctcggtacgaatttggaatcgacagtggtttgatttatttttctcttaattattgtattaaaacgtggatttcagcagtgtcccagttctagctatgatcgtcattcttgtcgaactagccatgtgccaaattggatttgaacacaagtttcaagagctattttctcatttttattttttgtagctatttttggctcccttgttttaaaggttgttaaggttctacaatggattctatgtttggctaagttaattgtgtgatgcttgaatggtaatttttcagtgccatttgaagaag

SEQ ID NO: 60157 - DNA, 650 bp, Populus trichocarpa
  Intron number 1 from transcript POPTR_0002s16220.1 (locus POPTR_0002s16220) derived from phytozome v7.0 (chr-ID scaf fold_2; pos 12124500 to 12125149)
ttcccgggacgaaaatcaagacacgagtttcccaagtatgtccaaccccgttcttctctttggatcgttaatttaaaccaagaatacctttcattacttaattcttgttgcatcaatacatgatagttttctactttgcaacctaccattttgttcaactacagtagtattcttttcctgctgtttttattttttatttcaatgtttttctcctcaaacctgctatatatatctgtgattttatttgatataaaatttagtccattaagaattctcatatttaaacaaaaagaaagaaaaggaaaatagaaacgtctttctgcgtccactggattggccgctgtgctgtcccttttttcttccttgcggcagttatgtcgcgccacgtgctgtctgtacctttgcttattcagcatctgaaaagacagatcgtcttaatgtttgacgaagactggtcgtcgacataggtctcagacagttctacttctaccaagttgttcgttcgtaaggaaaggagtgtggattttcagcataaaatattttctgatcttggatcaagtttttgtctccaaactaatgctctttttttttttttttctaattcaaaatattcagctcattgggaaaactccacttgtgtatcttaacaa

SEQ ID NO: 60158 - DNA, 539 bp, Populus trichocarpa
  Intron number 3 from transcript POPTR_0008s00440.2 (locus POPTR_0008s00440) derived from phytozome v7.0 (chr-ID scaf fold_8; pos 172104 to 172642)
tttttgttgcagaaaatcaactactaaacaatctggtgcctcgttaccttctcgtttgtgaattattattaccatcttgttttctcatctcttcttgcttttttttcacaagtaaacttcttcagctatgtaaattctaatgtccctttgtctatcaactcagctgctatgctaattgctgtaattgagattgcaaggtctaatcattgtttttttataacatccctcctttttaattactgttgtacaacactagttttgttggaattaaagcctgatttttttcttatttgataactaaataagcacctcttacccatattaatcagtcaaaagctgaatggggactatcagactacttccattttagagcaccaacattttattttgatttcccaccttttctccgtgaaaaaaaaatgttgccccattctgcttcgaaaattttgttcaatctagtagaaaatgctcttctaataataccctttagctaaaatgtgtgttccttgtagaggcacctggtttaagttctcgttttg

SEQ ID NO: 60159 - DNA, 882 bp, Populus trichocarpa
  Intron number 1 from transcript POPTR_0008s01180.1 (locus POPTR_0008s01180) derived from phytozome v7.0 (chr-ID scaf fold_8; pos 561211 to 562092)
gaggaggtatatatattaatgatgtgaattaaatgaactataaattgaattatcatgtacttttctgacggcatgtcccatataaaactaactttatcataaaagtaaggtggtaagatgagcttggctctgaacctgggagcttgtacttgaaaaaaccagcccatgtcaggctctgtactgtaaactagctcagcctgatcctagctggatcagcaatggctaaaacaacagtaagtctgccttccatgcgcaataaattaatattaataaaaggagaaggagaaggagatgaaaacggagattgcaaagccatgctgataatgctgtagtcaatgtgattagcccttcagattattctccgcacatatacgagtcccatgcaaagattcagtcattcatgtgctccagtaagaattccagcctaaaaaactgtttggttttgtgagtcaactgagtccagttttagtgatttgaacagactcacatgactgccattaaaaaaatcatgagttcaatagctacgtaacactattttttcatcaagtgaatgctgcctttcttagcaagttccaaacacatccctaacctaaaataaatatatttcttcaaatcccacaaaccaacgccaccttcccatgcctccaataattataacgcgttttccctctctatttaaagcccatgtatgctatgcctttctcttcacatgcaaacacttaatttgtagaaattaagtcaaaatgcaacacccaccattcttgtttctcttccttgcctttctttccatcttttcacctttgttaatctcctctcaatctccaccaccaccaccaccggtaccaccaccaccaccaccggtagcaccacaatcgccttccg

SEQ ID NO: 60160 - DNA, 483 bp, Populus trichocarpa
  Intron number 1 from transcript POPTR_0016s05140.1 (locus POPTR_0016s05140) derived from phytozome v7.0 (chr-ID scaf fold_16; pos 3108810 to 3109292)
tcaactttggcctcctcgctatcgtcttttacgctgtatttattatcttcctctcctctccttccaaataaaccgtaactctactttcattccctgtttgccgaatactcagcattatagagtttccaagtttcttaatctccgatgctttcttttttctttttttgctaattctttcagtttatttggtttctaaaattaatttagctaaatattcatgctaaacttaattattgatactagagtttgcgcgcaatttgaattttgaactattactattattatccactcttgtatactataactttatttattatttcgtttaagatgttagcgatactgttatactagtgtgtttggctagatttggatcactgagaaaaaaaatatagattcgatgacagttattgtggatgttaggattggtattttcttattgttgtacttgcttgctttttatttatttatttatttgtagcttct

SEQ ID NO: 60161 - DNA, 626 bp, Populus trichocarpa
  Intron number 1 from transcript POPTR_0002s16200.1 (locus POPTR_0002s16200) derived from phytozome v7.0 (chr-ID scaf fold_2; pos 12106079 to 12106704)
tgagcagaggtctgtctataacagcagttcggaaggcaaggattaaatactgctcttactcttaaccatgtttagttactatcaggctttaatcacattaatatatgctttgggcaccgactgattgtccattgatagtgagaagaattttaagtttctaagaacattggtattctatgtgttattccgaggataaaaagagcagtctataaactgatatgccacatacatctactgtgtgggttttgccggagtaaattttccgatttcccataatgttagtatggagaggtcatacatgtctttaattttataggtggttttctttgtcaaattaacatttacttactatgtggattaaatataaggatgtggatgtagaattggacctttacatatacactcacaactgaactaaaagtaaatatttgggattcttcgggtatttcttatcagatggagtaaataatttgagagctgtcagtttgattagatttaaccagctcaaagcagtactgatatgggtaatagaacatgcattccacttttttgcaataatttctgctgcctggttttcttcaagccaagtaatggttgctcttcaaaatttgttactatcgcagatc

SEQ ID NO: 60162 - DNA, 587 bp, Populus trichocarpa
  Intron number 2 from transcript POPTR_0002s09440.1 (locus POPTR_0002s09440) derived from phytozome v7.0 (chr-ID scaf fold_2; pos 6728498 to 6729084 reverse strand)
ctcaagtaagtgatacacaatggtcatgattgtcttctttcctttcactgtgcgatgtttaaaaagaaattggaagatcccaaattggtccagctgcctgatgtgtttaaatagtttttaatcaggaaaaaaaacacagattggtgacgaatcaagctgttggatgctgcattatatatatatatatatatatatatatatgatctttaatctgtggctatgtcatgtgttttaacttcaactgacaactagatgaataattcaaggatatctgggtaaagtgatcattaagcgacagaaaatctttgaccattcaaaaatataggcttatcaaaaaatctttgaccagtcaaggagagaatatagaagttaaagaagcacagaattatatattgctcaagttaaggaagttgtttctacttttgtacagtggtttattttcctttcttaaaattaatcaaatctatatttaagatattcatgttaaaatgaaattctctgccgtttcatttacatgccagcacctttttctgggtttaggtcacattgcaggatttagcggatacgtaccagcctccattccagag

SEQ ID NO: 60163 - DNA, 636 bp, Populus trichocarpa; identical to SEQ ID NO: 56414
  Intron number 1 from transcript POPTR_1770s00200.1 (locus POPTR_1770s00200) derived from phytozome v7.0 (chr-ID scaf fold_1770; pos 1723 to 2358 reverse strand)

SEQ ID NO: 60164 - DNA, 645 bp, Populus trichocarpa
  Intron number 2 from transcript POPTR_0008s05320.1 (locus POPTR_0008s05320) derived from phytozome v7.0 (chr-ID scaf fold_8; pos 3092439 to 3093083 reverse strand)
ctccatctcctttaagattttccaagtacttccaggtataactatttgactttttttttttccatttataaatgctgtgatctttttgttttttctctggtattcaattaagtttttgtatgatccatgatctgcatggcacaaaatcgtgataaatttgtttcaagctacatatcgatatccaatctgcgatttactttttatttctctatatctgttctttttgggttgcaatgcatgttgcattgagttttggattgcaaggaaaagaagttgcaatattaaaattgaatgccgaagttacaatattaaaattgaatgccgaagttatagtattaaaatcgagtgcaattcagagaaaatgtttgctagatcttgttagatgcaatctagttttactttctggattttgagttcattgagggtcggtaatatttcaatggtagattttcccatcatggaagggtttctgaaaagtacctgtgcattaacacttgattgtggatgttttcgtgctttaattgagattttttatagagggtaattgtttggtggtattatcagaaacatatattttttctcagcagtcactatggcgtccccttctgtttaataaaagattttttctttttttggtagtccaat

SEQ ID NO: 60165 - DNA, 622 bp, Populus trichocarpa
  Intron number 1 from transcript POPTR_0008s05320.1 (locus POPTR_0008s05320) derived from phytozome v7.0 (chr-ID scaf fold_8; pos 3093139 to 3093760 reverse strand)
tctctcaaattcttcctgctgcaaaagtgatcctggtaattaattctcaaatacttgggattttttttctgttattcttttgttgaaaagaaaaggatgtcgggattgagagagattcagatctgaggtcatcttttcttttcttttcttttcttttttaaaaaaatcggtggggtatggtttgttatggcatttaaagctttgttcttctcgtgatttcgaagtcccgtttaatttatgcgtctttgtctttgtctttctctgtcacaagttggtgtagtttgtcagtgtgtttattttcataattagctgctcaccttaaattttcaagccaatttggttacaattgagctctttatgtaaagctgcagtctttgagtttcatggctcgcagcaaagtttgagattttgaccttttttcacatcacttaggtgatttgatttttttcttggattgatgtttgtcgggtggtttgatatgaggtttttgagtttttaattcttgggttgtttatgcatctgatgatcatccactgttttctttttctgggttgtttgtgaaattgatgtagattgagatttttcttttaatctcttgattttgtttagaaattgaacaaga

SEQ ID NO: 60166 - DNA, 569 bp, Populus trichocarpa
  Intron number 2 from transcript POPTR_0008s15230.1 (locus POPTR_0008s15230) derived from phytozome v7.0 (chr-ID scaf fold_8; pos 10184099 to 10184667)
cttctactttgtggatctcaaaaagttcctgctttgacatcatttctcctttttcaacttgatatgtgactttgtgatttgtccccttagtataagattcttcttcagttctcatgagcaaatcattgcatcaaagtttttgcagctaagaaaccataattttttgttaaattacttcatcaagatttcttagattggctggtagcaccttgcaaatcatttcctatcacttgtttgcatttctttttcttacctttttagcacgttcactatccattaggaagccaattttcatggcatattgtagagttattcagcattacaaggttttcttgctcattccacataatacttcttgtaacgaaaactctaaagcatgtctgatttgttatgtgcagctcaaagggggttcactatccattaggaagccaattttcatggcatattgtagagttatttaacattagaaggttttcctgcccattccacataatacttcttgtaacgagaactctaaagcacgtttgatgtgttatgtgcagctcaaagggggttctatcgagaacgtg

SEQ ID NO: 60167 - DNA, 433 bp, Populus trichocarpa
  Intron number 2 from transcript POPTR_0016s00800.1 (locus POPTR_0016s00800) derived from phytozome v7.0 (chr-ID scaf fold_16; pos 295923 to 296355 reverse strand)
ccaaggtagacttcccttttgtaaaaattgtgtgttttatagatacttgatttctttaatctggctagtagtgcaagatgatgaattatgagaagtaagcagtaaaatttttaaaacatttctggggtttcttttgaattgtggatgcttgtatttgtttgtacattcaggccttagtgctttcttttcactctagaaatgttcctggtttacattttattgattaaaattagctcctgctagccaggacgctacctgcaattctggtttgttgatgtaatgcttccctattggttatacaagtgtgttcttgaattttgattatggttcagctgtcaatcatgcatacgtgctgtcttggcactgcttttatgtgatttgatttgcacattctgatttgagtgacttatgttgatttccagcttgtctaaaa

SEQ ID NO: 60168 - DNA, 786 bp, Populus trichocarpa
  Intron number 3 from transcript POPTR_0008s06500.1 (locus POPTR_0008s06500) derived from phytozome v7.0 (chr-ID scaf fold_8; pos 3865570 to 3866355 reverse strand)
tagcgccatcagtagtaggcacagcttgttctcaggtgaagccattttagcatcttaatttctttttgaactttcgtttttcttgttagcatggattaaatagtttcattttttttttaatttgtttcgttgccaaaaatgtggtggaaatagaaattagaagccagagtttgggagtttataataggttggactgcaatttgtttaatatgataatagaaataaagttaggcatgacacgcagagatttgcaaattgttgtatctgctggcatagttcagttagagataaagcgttgtgattctcaatgaaaatggtgtgtgctcccctggacactgaaaaatgtgcattcaatgctgtgagtctgtgacttactgtacatctctctctgctactcccatgttatagttctaaattctaataaccacagtcaatccataaagcatgacccgtgttagatttttttctaggactgattgctatacaccgaaaactccagtgaatagaaaagaaaattgttttaaagaaaatttaacgacttaaaatcaaaatcctgttagtacatgcgtgtttgtctgggtgcaataatattgtttatggacatttaatatgtgtcttctattttttgtaggttgagatttttagcaccgcctgataagttacgcatttgatcattttggcttgcataattttcaacacttcttttgcattgttttgtgatctcttacttgctttcatttttatgatacagggtgtttactattatttctatcaagtattcaggga

SEQ ID NO: 60169 - DNA, 1050 bp, Populus trichocarpa
  Intron number 1 from transcript POPTR_0008s01550.1 (locus POPTR_0008s01550) derived from phytozome v7.0 (chr-ID scaf fold_8; pos 770532 to 771581 reverse strand)
tcacaatcaattgcctactcatactttcagtgaaggtgagtgaatactgtgtgtttcttgatgttattgtgtttgatggatgtttaattaagagagtgaaagtaatgtttgttagaagttaagggttttctgggttgttgaaggtagtgaatttgatttgaacattgaaggaaagtgtgaactttctttgacgatataggaattaacgttaagcttttggagttatcagaacaatggtggaaggacaatgaggaattgggagttaatgttaagaattggaaagtgaaggaattggtaggtggaattgatggaagtaaaagttgtgtgttaagagcccaattggcataacctagtttacctcgagtcacaattcataagttgtttttcataaataacgtgacaaaaataagttcagaaatatgtccggtaaaaatgattcaaaacgaatttttcggggaagagatatagtattaagtagaatccgagttaaaagttgaaaattttaacttttgattaaatcaaaatcttgactcacttttgtaacaaattttttatttcagtcagaagttgtctaatcaaatatatttataacatttctacaagtaaaaagtttaaaaaacaactcaaatcaatgcacaaaagtcataccaaacagaaccttagttcatttgaagtgggtgatatcttgacccttttgagcgtagtatagaatacagatgatcaaagaaagctatgaacttatttacaatgtagagcagtgagctgcgttgatgtgttaggattgctggtaaatctattgaagattgaattatagtcaagatgcaattgggcactaaagtttaaaggtaaagaatcagaaagtggagattgatatttgtatgtaatttggatgctacgtgtgtgaacaagctttaggatgcatgcttgataaccaagaaaattgtggcttttgtgggagaaaaaaagctaagaaaaagttttatgaatgttttttcatatttgtttcattttgcaggtcaagtgggttctggggcaagatcttactaccat

SEQ ID NO: 60170 - DNA, 554 bp, Populus trichocarpa
  Intron number 1 from transcript POPTR_0016s12400.1 (locus POPTR_0016s12400) derived from phytozome v7.0 (chr-ID scaf fold_16; pos 11745046 to 11745599 reverse strand)
attcccccactgaaaagctcactgtatgtgctctcttttattgtttccattgtttttttcttttttgtgtgtgggttttgtttaaatttttattttatttttttgttgggattttttcgttgtttttggtactttgttttcttggttttgaatattggttgcgcagttttgttttttatttggtaatttgggccagtttggttttagtagttaggtgagaaatgaatgccattgtgggggaatgtagtaataaatgatgaatgacaaataacgctgttagattcttaacttttatggattgaatttgggaggttgtgttgcattaagtgattgtggttgttttaggtataaggttttgttgtggtagagtggattgtttgtgtctagaaatcttccactcgcattatgaaagtttattattgtttttcatatcaagttgtgtttttggccaaaagggtgctccttgatttgtaggcatgtattgcttatcttgcccgagcaataagttttgtaaatgcagtttactctgtaaatacaggtggtgcttgacctgg

SEQ ID NO: 60171 - DNA, 926 bp, Populus trichocarpa
  Intron number 1 from transcript POPTR_0016s07400.1 (locus POPTR_0016s07400) derived from phytozome v7.0 (chr-ID scaf fold_16; pos 5262971 to 5263896 reverse strand)
acgtttggctcaggaggatccagtgtcgtgggttagtcgcttattcgatttttaacaatgatccgccggctttgacttctgccttttgtttgatagtttatggattctgttatttatccatcttgtgtgttttgttgggctatgttcaattctttgatttgggattatgggtacctgtcgttagcctgtaatggttgtatttatcttgcgttttattgttattttttttaattaaatctgcttctggattgtttttatttggaaaattgatgggttcttcaaattgggtgattgcaattgtgtatgggtctaatctgcttgattatcatggcaatcagtctgtttatggaaactgaaattttatgtttttgatgaaattgtttttgaacatattcacttcaacgtgttcaggacttagtctatgattgttatagattgataattggcgaggagctgtttgctgtaaggttgccggaagatatagctaataatgttataatggtgttttcacacttattgggcgttgctttgtcaggtcttggtttggtggattctgaggtgtggctgtacttgtgcaggctcgtgttcatatcatactttaagcaaatttgtagaatatctagttgttgagttaaactattaagtggattcttctatctcttcaagaactgagctttgtactgtatgaaggttatgtctttgaaaacaatggaatttggtagtatctttgtaaaaatctctaattgttttacagttagtttggagcttgaacttgtttagcatttcaattattattattattattattattattattattattattttgctttttatctcattgatgatgtagaagattgggtgatattgactatttaagtttctatgcagtccctcggaacttcagattgctggaggaacttgaa

SEQ ID NO: 60172 - DNA, 738 bp, Populus trichocarpa
  Intron number 3 from transcript POPTR_0016s12620.2 (locus POPTR_0016s12620) derived from phytozome v7.0 (chr-ID scaf fold_16; pos 12013699 to 12014436 reverse strand)
aagaagcaacgtattgaaggtagatgatttctatggtgagtttgatgtttgttgatttcttaagtaaatgataactaattagtttgggaattaattaacttaatcaattgtaagaagtacatgtagtagcttcaccactctgctttgaaaattgtattaagtgaaatataatgtacaattatttgtaaaaaactatagtaattttcccctgagttcacatccctagtttagcgctttaagtaggagataaatggatactgctgtgttaaatccctgtccaagacaagttggtgtgtttgcgtgattatttgagggattaacagcttgttatcttccctttttttttcttttcttttctatatctggttgaattttaaatcatggggcctgttataagctagctattctatcactccggttcactctgtggattgtagtacgcaccttatgtttgcacaagacagaatcttcatgtttgatttgtatagtatcaggttgatatggaggaaaggaagaatataagttaaccgcttctgtcaatattattcaaaatttattttcaagtttctcttgaatagattgataacttgctttaaagggtaattgaatttgaccattttaagtattagattgtatggtttgtgtttttgtgttgataattttgtgtgtgcagctataaataaaacttctgcaattgtgaaagtggggccatctgtgggaaaaccagagattggaggc

SEQ ID NO: 60173 - DNA, 590 bp, Populus trichocarpa
  Intron number 1 from transcript POPTR_0008s19790.1 (locus POPTR_0008s19790) derived from phytozome v7.0 (chr-ID scaf fold_8; pos 13649424 to 13650013)
gctctcaagtatgtttattattattattattttagatgcgatggaaatgcagttatttttatttatttatggcgattttgagagcttttgttactgaatctgatttcatcctcagagtgtgtcagccgtaagaggagtggagtgaaacagagcatgattctgttttgagtgagaatgggaagagttccaaaagatttcgagtttgtttcctaatttaatctctgtgagatggtttaatatttgcattactaccatcagtaaaggatctgggatttgggttgaggttgaggttttacaagatgaaaatttattgtttaagcaaaatatagaggtaagtgaaggactttttgcgacactattgggtttatggtgattccaaagagaccagcgagcaagcgggtagtggaatttatcacttgtttggaaagcaaggtttgatttggcagactcggaatagttaggtagcatcatgggttggctttggttaaaataccctctactttttttctctttgtttcttccattgctgataaaggtgtggaaattctctttcacatgctatttcaggtaccatcctgacaaaaattcaa

SEQ ID NO: 60174 - DNA, 333 bp, Populus trichocarpa
  Intron number 2 from transcript POPTR_0008s17280.1 (locus POPTR_0008s17280) derived from phytozome v7.0 (chr-ID scaf fold_8; pos 11602339 to 11602671 reverse strand)
ccacatttcaaggtgaaaaataatttttctaagttattaaataatggaaaaggttgcgaaaatatttttactacatttcaattgaatggcaaactatttttttttataaaattgtattggagcgattaatggaacacatgtatgtgtttgtgtatcacaagaaaatcaaataccatttattggaagaaaatgtgtacctactcaaaatataatggcgacatgtagcttagacatgcaatttacatttgtttgggctgagtgagaaggtagtgcacacgatacaagaatattttttgagacgattgacaatccaaatataagatttctgaagcc

SEQ ID NO: 60175 - DNA, 604 bp, Populus trichocarpa
  Intron number 1 from transcript POPTR_0008s02210.1 (locus POPTR_0008s02210) derived from phytozome v7.0 (chr-ID scaf fold_8; pos 1056657 to 1057260 reverse strand)
gctaagtaacttttcaccgtagtttcttgttgcaggttctctttctcacagacaccaaagttactgggttgtttctcaggttcttgttatgcctaaatctgaagtttattgatgtttttttttcacgctcacaagcatgaagtaatggaaatgtttactctcacaagtttataagaagtaggaagagactcaattattttcgctattttcttttagaggtttgatctttgcagtgcttgcttgctttattttctgctaaaaaaaaagataatatgattccaagttgagtatgaacatttcttaattaccttttgatgcgggatatatttctcatcaatctatgaagagtctttcatgatcactgctagtgttgttttagacctgcttttctctgtgtttaattcggtgtttgtaaatgttgatagcctgttgagtgaaacggaattgtggtggatttgggataatgtaaaaccaagattttggccacgttagagagtaatctgtaacagtgaatttaatctgggtgttgtcagtatcgagtaagatgataattttctccaattttatagcacaaattgtgaaaaaattctcatttctcctaggg

SEQ ID NO: 60176 - DNA, 152 bp, Populus trichocarpa
  Intron number 3 from transcript POPTR_0008s10590.1 (locus POPTR_0008s10590) derived from phytozome v7.0 (chr-ID scaf fold_8; pos 6634115 to 6634266)
gaagaaactgcgcaggtacggcctcatgagagtttataatatgttttttttttaatcaaattaaagatcagatatttgactttttcttctgtaccaattataactaaatatttgcagattgagcttgttgcaccaaaggaagttgcaaatca

SEQ ID NO: 60177 - DNA, 370 bp, Populus trichocarpa
  Intron number 1 from transcript POPTR_0008s11140.1 (locus POPTR_0008s11140) derived from phytozome v7.0 (chr-ID scaf fold_8; pos 7047205 to 7047574)
cgtggggtgctggttacttcagatcttgcaatctggtgagtgcttaatgtcggtttggttcccaattgggacctaacgttgctgtttcatccttagtttcttttctgttcctcttgtttttaaggtcagttttgttattttgttacttttcttaattgtaattgtaatgagaaaatataaatagatttttgtattaaggtaatctttattattgtttttttcgtaaaatagtattagatccattaatcttagtgaaattaagtgacttttctgctatttgatctgtgatttaatagttttaaagagtttgttttattgatggcctcttgtttctgcttgtttttcagattactgggggttttcaatagga

SEQ ID NO: 60178 - DNA, 830 bp, Populus trichocarpa
  Intron number 3 from transcript POPTR_0008s10070.1 (locus POPTR_0008s10070) derived from phytozome v7.0 (chr-ID scaf fold_8; pos 6288964 to 6289793 reverse strand)
ttcaagatagcggtatttccataataataaaatttctccaatggacaccttacaaacttgtttaagcagtacttttttttatatatagaaaacatgattaggaaagtatgtctaatcacagagagtaagatatccctgtgcaaaaattcacttgtttgagttgtaatttctgtgttagaatgtctctagatttggcattcactgcatttcgagtcttgatgccccggttatattttgctattttatttgttctctcaacagttttattacttttgaatttgagttttaaatgacaatctagaatgaccatgctgtaaaacttattaattccattccaaacaatttccctgtttagcaaattctggtcattagttatgaaactttttgttcgagtctggtgtgaagactgccattgatgatgttctatggtgggtctacttgattaatctgcagaatgttttatggtggtcctgtaacaaattatgtcctgctgtggtaatagttaagaagcatgaacaatgggctatcagctattgtgctggaaggcgcctcttctgtctataatgatggcattgaggatgagtaaaaaccacaaagtgcagtattgcaaattgcagggttcttttagttattccaaaactcagacgtgttacttcgttttattttaccagtttcacatgtgcaagtaatgtgtatttgaaattcctctgcattccctagtatccctctcaatatactccatttgcagaacagcatattattggtttgtattaacattctgttattactcaacaggggatatcgtgagcctatttgctggtggggattat

SEQ ID NO: 60179 - DNA, 500 bp, Populus trichocarpa
  Intron number 1 from transcript POPTR_0008s10070.1 (locus POPTR_0008s10070) derived from phytozome v7.0 (chr-ID scaf fold_8; pos 6290138 to 6290637 reverse strand)
ccgctgctgtcaaaattcaagttaggtttccctccaatctttcttttgatcaatttattataatttacgcatgttaatttgtgttcttattcattatttaattaaattcaatgccttttttcctgtgtacatgaatgccatgttctacacgtaatggtgctgtcttagacatggatttttgtggatttaagaatcagggttgaaaggatcgcgaaaattagggtttctgtaactccatcgcttgccttgaagaaaaattagttacaatttctgtttgattgaaaatggattttttcgagtgagatttggcgtatctcttaattctcgggccttctttgttctgtgacattttgtagcgagatagcatattctaggttacctttaatctaaataaagagcacttgtggcttttttttttctgggatgattgaagctgttgttagaacttagaacttgtaatgcttttgttgcaaagtgttgactaatttgtaaccacagaa

SEQ ID NO: 60180 - DNA, 924 bp, Populus trichocarpa
  Intron number 1 from transcript POPTR_0008s04940.1 (locus POPTR_0008s04940) derived from phytozome v7.0 (chr-ID scaf fold_8; pos 2865409 to 2866332 reverse strand)
gagttttaggtatttaaaaaaaatacttattttttctgtagtaattagtgttattaaagtaaaaataaactgtcatgcttgttttgcttaatctctttgaaaatgtttttcttttttggtcttaaatggcaatattcggtcagattttctttttgttttttccttgtttggtgtcaaagtactgatttttttcaagtttggcgtatctgggtttttttctcgggtcacaaaaaaatgtgtttgatccttttttgaacgtttctgggttgttaagatggtaccgtgagtgtttggctctagctgtgtaaattacagcagaggttggtatgaaagacaaatccgatgggttggtgtttgactggtaggattttatatacgtgacttaaagtgtttaattaagcttgaggttttaatgggaaaatatgacaacaacttaaagtctttaagcactaatgtaggtgagttagatttgatattgccaaatctttagcttacatgttttttgatattgccaaatctttagcttacatgtttatcggagtttgaaaaaaaaaaaaaaaacgaattggtgtgtgtttttttttttttttatacgtgcatatgacgatattccttttccatttataggatgtttaacactataattgattaaaaaaatgattagatatggtggattgaattaatgaagaactaatcatgatttattggcaggggttttagtcgcgggttagttttgataatgtcatgaactagagtctatgattcaaaagttttggcaaagcccttcctttcatgacttggcttgaatagtcgtctctttgcagctaatgttagtacctttaatgtaaggaaaaattattgctatggataatggtatatgagtcatgtctcgaccactttgcttgatggctttaggtcccgaag

SEQ ID NO: 60181 - DNA, 320 bp, Populus trichocarpa
  Intron number 1 from transcript POPTR_0016s13840.1 (locus POPTR_0016s13840) derived from phytozome v7.0 (chr-ID scaf fold_16; pos 12982570 to 12982889)
cagccggtaacacccttgtcaatctcaggcagaaggtatgtttaattgctctgtcatttgctttcttctttttcaatctaaccatcacaacaatgataaattctaaatttggttgccttttacacgagactagatatgattcatttaatataaacatcgaggattattattattttttaaatgtaatttaacaggtaagggccacgcataaaataacaatgatgaaagttgaatacagtcaaataagtttattatcattactgtccatatatcaatgagatggcttacggcgtgtttaccattctctccagataaggacc

SEQ ID NO: 60182 - DNA, 193 bp, Populus trichocarpa
  Intron number 2 from transcript POPTR_0016s06410.1 (locus POPTR_0016s06410) derived from phytozome v7.0 (chr-ID scaf fold_16; pos 4302406 to 4302598)
gaaggttagagagttcaatcttcttcttcttgttttttttttataattcgttttatgtgatcgaacggatcttctgctagagtgtattgtacgttttgattaatatgttagggtttggtcattttggtggtgattgtaattttttgatgtggtagtagtggcacaagtggagcaaactagtaccgtggagaat

SEQ ID NO: 60183 - DNA, 837 bp, Populus trichocarpa
  Intron number 4 from transcript POPTR_0016s06410.1 (locus POPTR_0016s06410) derived from phytozome v7.0 (chr-ID scaf fold_16; pos 4302944 to 4303780)
caatcaaattcataacaaatactcgattagaaagggtatcttcttttgtgtcccctatttaatggctctttctgttattgtaattttattttcaagttgggcattttctgtttgttcttaatttattacgtatgtctatacattggatcatttcttatatttagattgcttgcctgagtacattattatttttcctgtagagcacttgttctttgtaaccttttatgaccgcaatagatatgttatcaataattggctattttataatcttatgacttctagagaagttgccaatgattgtttatttccaaagtgaattgaaagaaaagtaaatgcaccaaggtggtgcaatccatatacaaggttagattagaattcagtttgcacgccacaataaacacccgacagagtttggaatccttgtcattgtgagcgttttccaataatatgatcaattatagactcgactatcttggtatttgagggtttgggatgcttgttaaattattgtttcactatgctgaaggcagcaacttctacagattgtgatctataaaagctgtcaaacgaattccagtaattcggtcctggaaaatagcaggttctggatatcttgaactaggtaattcagaaattatcataatggaggttggttgagcttggatcttggttagttttgttaaatgtatggaaacaatatgtcgtgtaaggaagatgtcagcaccacagtcaacttctttttggtgttctcttattgaagtttattgtggactttgatattatttaatattgcgttctcttttaaaaatacattcgcagacacacaacatcagttca

SEQ ID NO: 60184 - DNA, 597 bp, Populus trichocarpa
  Intron number 3 from transcript POPTR_0016s06000.1 (locus POPTR_0016s06000) derived from phytozome v7.0 (chr-ID scaf fold_16; pos 3926050 to 3926646 reverse strand)
tgctgtgttgattcgttcttgtgctccgattagtggtaattttgatgtagctttaacgagtagtggcatttgaattgttttttgtgaatgcgctttgagtgtaaattagttctcttctccttgctttgtattactggcttccaggttctagccctttgtctcagtgcaggcatttcgcgttaatgaagccctccacaccctggaatatgatattgggcacccattacttaatttagcacatattgaatctgatatagaggaactgtacaggcactatttcggtattttggatggtttactggtagttaatatggttataactgaaaactttgtggaagcaatttacagctcaagagggtatcacttgaatgaatttcacaaaggtaaaattataacagcttaggtctagataaaaaaaattcacaccaataagtatctgaatagatcagattagagaaactatgtttgcaactgctacgacgattcaaactaatcgctacttcccttttgttcttgatgaattgtagctgctcatcatatgaaactgtggaaaaagcttgtattgcgtctctcctaatccagtttgacatggcaggg

SEQ ID NO: 60185 - DNA, 672 bp, Populus trichocarpa
  Intron number 3 from transcript POPTR_0002s07770.2 (locus POPTR_0002s07770) derived from phytozome v7.0 (chr-ID scaf fold_2; pos 5324228 to 5324899 reverse strand)
atcagtaatttatctctacactcctatgcactatgtatgtggatctgggatcttttgtgaaggcatctcgaaaatattatctaatgttttttgtaagtcagtgggtttacttgaaacacatagttgacttgtgtacatggttgatcatgtgaccaaatagatgtgtaaagataaaataaacaaactgttagattgccattttgctgcctctatgtttttctgtttatgattttcttttcctaaaacatggaatagtaggactttcttatgaaaaatttgaatttctgactgttgtgtgcacgcacttgatcttatatattggaagtaattgacacttgggtcttttatcaatttgaaggtggtgcagcataaaggctcttcctggtgccaatcggttaataaaacatttgagtagtcataatgtgcctatggcattggcttcaaactctccaagggcaaatatagaatccaaaatttcttaccatcagggtgggtttgtttaagaaatttaatgaaactgataggttttatttcctgttgcttcttttgaaaattagctagggtggcatagcaaagagtcaaacttgaactgcattcgtactctacttgcttggttgctcattatacctgcttacaggctggaagggatccttttctgtcatcattgctggt

SEQ ID NO: 60186 - DNA, 432 bp, Populus trichocarpa
  Intron number 1 from transcript POPTR_0008s10180.1 (locus POPTR_0008s10180) derived from phytozome v7.0 (chr-ID scaf fold_8; pos 6380301 to 6380732)
aagaagagtttactgaagtaacagtgcgaggccaggtttgaactctctctctttttattatttgagtttgttttatatatatttcgattcgcagatctatcaataatgataaactctttattcatgtttgcttagttttaaattcgttctgttttcagcgaattcttcggtttcgattttcaacaaagtttaatgctgttactttggttttataaacaatccaattcgtatttctttttttctttttttatgtacaaagttctttttttaattaaactcgagggatctcttgattatctgaggaccctttttcctttttagtgaagaattcagaatgtgtaattaatgctaattccaaaatcatgtgaggttcttctcattatggttgcttttctgttttcagatttatcagattagctaaaggtagaagcg

SEQ ID NO: 60187 - DNA, 974 bp, Populus trichocarpa
  Intron number 1 from transcript POPTR_0016s02500.1 (locus POPTR_0016s02500) derived from phytozome v7.0 (chr-ID scaf fold_16; pos 1231323 to 1232296)
tctggattgttgtcctttgtgcaggttaagcatcattctatggctaagatcttttcttgttcgtgttggtttatttttaaattttgtttcttatttgtgcaagtagagatagctatatgtacttgcccatttccgttggataactggctctctcaagaggtattatcataattggcccattcaagtggtattatcataattttccctctcaagtggtattatcccaccttggactcatggccttgtggtgggttttgtcttaaaaagactcttcgtgagagaggtggtatctggagatttcttgaattggtttgcgttgtcaattgttcaattagtttcgtgtgattgttcaatgaaatggtttgttttgagacattgttcaggcaaatgttgttgtttacaaggaaacaagattttttatattctagaaggtcagggatttacacacaattttgctgctaatgaagtttacacatcttcagaatccattcttgcagtaacgtggcctaatataatcatgtgtcaagagttgtaatgatttggtccataatctaattaggtggttaggtccatgattatttaagaaagctgactgaaaaagagcagttttctttatataaaaaatgtgttttctctgaaaaagaagggaaaaaaaaatcacctcaactcaaaacaactggagtgtgtcaagatggatggaaatgggattggagagtctttcttgaagaagaagaagaagaagtactatgaggactgcccaggttgtaagacttcacttttcaaagaaaccaacattggtgttccttataaacatttgctctatgtctggattgtttttctttgtgcaggttcattgaaaatttcaacgaatcaaatgctttttttgagaaattggaatttccctctaatatctgtgttttgtggttttgacttttgcagctttgcctatatcatctctctttcctttcctctat

SEQ ID NO: 60188 - DNA, 837 bp, Populus trichocarpa
  Intron number 3 from transcript POPTR_0008s17560.1 (locus POPTR_0008s17560) derived from phytozome v7.0 (chr-ID scaf fold_8; pos 11828959 to 11829795)
aagcaaggggcggtgacctcagagttcattttaaggtattgtgtttagggtttagacgggtttcgttttttgtatgaccgttgcttgttattgattttgctagtaaaacctgatgaaaaaagcaggggcctgttgcctatgtgaacaggcctctcgtaaacttcagggaaatcagttacattgttattgggtgaacctctgttttattttatgtggctgaaggttcagtaaatgatgacacattttgatgttacgattttgtttatatctaaatgaggttttgtggatttcagtagtaagaaatgaagagcattggatgattttcttcctcactttatcctttcgttttaaccaaccaaaactgctccacatattttctattctagttgttaacctgatgaaaaaagcagggccttgttgccttttgtgaacaaggctctcgtaaacttcagggaaattaattgcattgttattgggtgaacctctgttgttattggtggctgaaggttcagtaaatgatggtacagttgttttcatatcaatttttctctacgtgtttgttgttgaagtggtggttttcttttatatctgtatgagttgctattcattgatgttcagtccattgttcctgatgaacttctcctctcaagttggtttaaattctgaattctcaaaaattcagttatcccaacatgtattggatgagtttgattgcaattttgtttttatcttttgtgtttctcactttcagagatttttttagcttgttttgacttgtgcatcctttttaatgtttatgcagaatacaagggagacagcttttgctttgaggaagtt

SEQ ID NO: 60189 - DNA, 994 bp, Populus trichocarpa
  Intron number 3 from transcript POPTR_0008s20180.1 (locus POPTR_0008s20180) derived from phytozome v7.0 (chr-ID scaf fold_8; pos 13972675 to 13973668)
tctttcgcccaatcagcactatcttgtaagtttctgatgattctagatggaaaaaagatgtttatgtattactaagataggaagtaaattattgtagtcatatagtgtagttcaatgcattagttctggttctctgggtttactggagccttttcatcgcttattatactgtagttcaatgcattaatgcaggttctctgggtttagtggaggactgtctctttggcggaccacctcttttatgacctgttaccaaattacttaagtaccgagcagaaattttctttgattttgtttagcatacagcttggtggattatatgcctgctgaatcttgctatattgcacatatcatgtcctgtctatgacatgtgcccctgttgcacttgtgtgtgagtgtgtctgtgagaatgtatgatcatctctctatgcattttcagattcaatctctttgaattccggattgtgtggatatcattttttttttatatggacacggctcaagtgctcccttgtaaagtaattttttatattggcataaacagccttaaaaaagggttacttggttgttttaggtccttatatctttttggttgtctacaataagtcaatttgtctaatggcatactgcaacttagcccaactttggaactaggcttgttgttggccagcataattttattaattgcttacagctcatccttattttcctgtctaatggcttttactgttgctgttgattttaccaggatttatgcaatacttgaaatagttgcaccatatagggtagaagataaaacttggattatcttttgggcttctatactatggcaaatataatttacaggatcttccacttgtgtctaaccatgccacttttcattggggacgaactgatttgtagacttgacatgcaatgagatttaattttataacttggatgcagtgcatttctttgttgattccatttaccttcaattttaatgtgcaggtgt

SEQ ID NO: 60190 - DNA, 454 bp, Populus trichocarpa
  Intron number 2 from transcript POPTR_0002s22890.1 (locus POPTR_0002s22890) derived from phytozome v7.0 (chr-ID scaf fold_2; pos 19938436 to 19938889)
gagagaagcatatattaagaggtgtgagcttcaaggtgaaattcttttcaatgttgtgtttgctgtttaacaacttttttattgcttatttgctactatttgattgttgtgcttattaataccaaaaatagatttacctaaacctattttgataggattaagctgacttagttgaatcatgagcaaggctcaagccccaaatttttgctggttgaattgctatttgttcacaagcttctaggaaaccaatgataagcagaaaaccaatgataagcagaaagcttgatattttcctaacaagatagtatctttaatatattgccattgcgagccatgctttaaaccaattttcttttggagagagggagggcggggtattttttgtggaataagtcttaaatctgtgtattgtttcattggcatggtgataagttttcacttatgcagattagac

SEQ ID NO: 60191 - DNA, 518 bp, Populus trichocarpa
  Intron number 2 from transcript POPTR_0008s06370.2 (locus POPTR_0008s06370) derived from phytozome v7.0 (chr-ID scaf fold_8; pos 3773731 to 3774248)
tacggggaacagtcttgggttataagaggtaataaccgaaacttgactttagtactctggttttaatctgttaatttgtattttatgattgtttttggttacatagaaatttgaatgagaaaaataagaaattagggtatttgaatcacgggttaggttatttagaggctattgtcattctgttgtgctaattgaatttttttttccttttttatatctatagtaaatgcttttcatcaaaagcaaatgctctattagctttgctagagaatttgtttttgttaaacaaaacaagttttgcttgtttattaatgaactatatttaattgactaattagtgcaactaatatagtggatttacttctagtactttgattcttttgtgtgagcttcggaaaatgaatagtatgtgacaagaaatgaaacagagtatggacatgctgtgtggattagtttggagattaaaatatttttttgttgtaggtcgaagtccaaccaatatcccaacacatcactga

SEQ ID NO: 60192 - DNA, 265 bp, Populus trichocarpa
  Intron number 1 from transcript POPTR_0016s02190.1 (locus POPTR_0016s02190) derived from phytozome v7.0 (chr-ID scaf fold_16; pos 1056713 to 1056977 reverse strand)
agcactcaaagaaaaaggtctgacaccactagaaggtatgaacaaggaaaaaaacgtaattataatttcattaaggtttttttattagttcattaattcaaaatattttctcctgtaagtaaactgttgcccttaattattcattcttttcactaggggtacaagctaggaaaccttctttttttatatatatattttctctgtttctgcagccacttttattcagttactaaaagctatatgtacgttcaatttttgtttgcag

SEQ ID NO: 60193 - DNA, 940 bp, Populus trichocarpa
  Intron number 3 from transcript POPTR_0008s14140.1 (locus POPTR_0008s14140) derived from phytozome v7.0 (chr-ID scaf fold_8; pos 9342207 to 9343146)
tgctttctttgtcttgatcagatgtatagaagcatgaggagtgacctgaggggacaaggtatccaaagctttttagtttccaccctctttgtttgatgagtacacattaatagttctggctctctatccctcaactatcacatataggcccaggaatcccaaaacttccaattttctaaccttcaagctctatgtcatccatcattgtctgggtctgtacatgcattgatgacagactctctattatactttcctctagtggttcttatcaactgctcaaagtcaagaattgtgaaattcacatgtgaacatacattttggaaatgggtagttgcctcccttcatttattacctgtcttttctgttagagttgatgccaaaagcgttgagaacaaaataagcctcgtttctcttgcaaatcttctaatattagcatttctgatgaaactcacagcatcacttgcatcgcattcctgcttttataagttacaggccccatttgttttcctttactctcttttttttcaattataaaagagccaaatttgatggaattgacatctttttgtatgcgtttgggtttatgttgctgggttggtcgctttgaacagataatagctccacccaacaaaagagacgatcttttgatgaccatgatgagtgtgttgaagacgtaaaacccattgaagaatcagattctcacttgatgtacaggcctttctcttcaaaaaggtcagcttagctttatccttatggtttcagacgcacatatcaaaaagaaaagtagatatattcatgtagaaacaaacaaaaaaagattagcaatattgcatgatcttttcctttcagccctttgctttttcttcttttcaagctcctttttgtttaaattctcttttctacagggccagaatcgagaccaggagttcaatatctgagg

SEQ ID NO: 60194 - DNA, 490 bp, Populus trichocarpa
  Intron number 1 from transcript POPTR_1028s00200.1 (locus POPTR_1028s00200) derived from phytozome v7.0 (chr-ID scaf fold_1028; pos 4041 to 4530)
tcataccgtcgacaagggtgccggtcataagcaaggtaactttatcgcccccctctttttgttttgatcttatattttcgaggtcaaattgtcttttattttgttgattattatgttttcagccccaataattcgtagatctaatctgtttagatggacagaactgtggagttttttttctctctctctctctctgatgggtttaaggtttttgcaagaaaatcatgattttggtgagaggtggaactgggtttagaaatggatttaattaagcaaagattaaatttatgtgggtttctttcggtgtttttttgaagttttaggatgatatttataattttggattgggatttgggatctggtttttaatgagtgaacattttagatggtcaatttcttctgagatttgtgttaaacttatttgcttggttcctgtgtttttaaggttttaatttgcttcgactgtttaaatgttcaggacccaatctga

SEQ ID NO: 60195 - DNA, 838 bp, Populus trichocarpa
  Intron number 1 from transcript POPTR_0016s07650.1 (locus POPTR_0016s07650) derived from phytozome v7.0 (chr-ID scaf fold_16; pos 5492639 to 5493476 reverse strand)
agggtcgtctgttagaggctgctgaggtatgctcatgccaattaattcatcttcttcatgagaaaaaaatatcagtaaataagatgtccatggtaatcagaagttagtacacccagtaagcttgtactataattttttttacaggttggatataactctgtactatgcaaattgtaaagtattcgaattgcagtttacaagttactatttctcctttgtttaggtgttttactcttgaattattttgtaactcatcaccatctgcatattagatgcaatgaaaatgtggattggtgatagctgatactaatcactagtttctacattctttgcatgataaattggaactgggagagtttatagtctgtgctcatagcccagctatccatgcatgtttatggactcagacggatgcctcatcctgcatgtgttgaatgtaaagctaaaagtaaatactgttcaattgaagaaaatagataatttattgtttttatctattctgttgtgcgacacttacttttagttctccttttgagcttctgtattttcttgttacaaaatgttctgggtagctatgaaattatggtctatcaaagccagcctgagagctgcaatgcataaggatgtattgaccatgttttaccataatattgttgtgaataccattctacaagtattgaaactatgtctttgcaagtcatgtgtgtttatatatgagttgatcacactcgggtttgtttggctttgcaactatttatgttaaaagttgacttggaagagtttattgattttttttggtgtagtcgtaccacaaggctctgaaagctgatctttcata

SEQ ID NO: 60196 - DNA, 884 bp, Populus trichocarpa
  Intron number 4 from transcript POPTR_0008s16190.1 (locus POPTR_0008s16190) derived from phytozome v7.0 (chr-ID scaf fold_8; pos 10815165 to 10816048 reverse strand)
gctgccacaaggtaattcacattctgcaatttcttttacatttttcaaacgattttaacatgcagtaattattaattataggtttgttttacctcttagcatattcataaaacccggctcgacagggtaatccggggtcaagtaacataacatgggtaatcataaaatatgagatattaaaatattaaatataatttttatttttattatttttaaattaacccgaatgcatcccagccacaaccaacgactttactagatcaaatcccagacagggtttgatgacaatgacttgtaatattatattacttattgacttaacccgtccatgccttgcacagcttgaaatgtgatattataataatgtaatataaaatattatattttataaagtagtgctgctttgcacgacacaatgaatgttcttcattattgacaagtttgaactttgaagtacaatgatcttatcgtgcctgtcgtaactcattgaaggagtggctagggaagtgcttctccagcagatctaattcataattacgactcctgttatttaattttttttaagtagaattgttttttttagaatagaaattacttcaatcgacttaggtttaataataaaaaaaataacattagattattatttttttaattatgtattttctaggcgctttaatttttttatttttcaattcacccacttccacttggcctcatttttctcttttatgaagggccagaggtgccgtggtttttcatttataccacaccaaactttatggtttcaggaatcgaatggtttttcatttatattatcgtcatggttttaatttttgtgggttttggcagaaaacaaagatttgagagggtgaccaagaacttga

SEQ ID NO: 60197 - DNA, 681 bp, Populus trichocarpa
  Intron number 1 from transcript POPTR_0002s08190.1 (locus POPTR_0002s08190) derived from phytozome v7.0 (chr-ID scaf fold_2; pos 5680835 to 5681515 reverse strand)
tctatcctactgggtgcgtgttttcttgattctttgcaaaaatgaaatgaaaatattggattcgtgtgtctcctggtactatcttttaatggtctgttttattagaatattggattcatgtactatcttttttgttggtttggaggagaattgcttggccattcatcaactctgaattccattgcctcttggataattccatggtcatttgttttcgttttcgtttatttattccgggcaccactgtctctgtaactctatttttatttgcttaattgacttctacaaccgggtctggttctttctcgtctttgcggggtgtgttgctgtttttgaacgattcttttgacttttcaaatcacattctcccgactcaattccaccgcctggattcttctaggaacaactggaacgacccgtttgtagtcccgcgtagtttctttagcatttcttgagattatctctccttctccagggaatgttgacttgacccctttctcataaattaattctatatcaggtgtctttatttttttggaaaataattctatattaaattgcttataattgagatttcaagtttgtaacttgacatttaaagatttctttgaagtgcaataataacgaatcttcttgcaatttgcaggcactactctgtgattctgaacataggcaacccac

SEQ ID NO: 60198 - DNA, 790 bp, Populus trichocarpa
  Intron number 1 from transcript POPTR_0016s08290.1 (locus POPTR_0016s08290) derived from phytozome v7.0 (chr-ID scaf fold_16; pos 6100369 to 6101158 reverse strand)
gatcatccttgcttacattttcgtttgtattaatttatttttatttcttttcttgattaacatttttaacttgcaagttttgtatatgttagcttggtaagaaagttcaaccatgaaggaaatagccaaagggttgtgtgaattcctcgtttctgttttaatatttatttattttttactccttttctcattaacgaacagagcttaattcagtttgaatatattttttctgcatcaattgattatttgtatgtctcggatttgttttgatttctttttgagcggcctttccataatacagcggacatgtgattttatctcatacagaagaacatagagagagagaagaaaagaggaattattggagacaaaaacatggaatttctaagccatatttgttaagccttgatttttctctcaacgaacaatcctcgccacatacctagaattgtctgcatgctgacagcaacagagcacaggctttctgctttcttatttactctgtttaatgttggttttcaactctaccgtcgataaacttggctgcctgcacttcacaacttgcaagtgtcaagaaaatcttgatctgtaatgggctttttatccctgaaaatcccaacaagccgtctcaatctcgtgattcttttttctagattataattataggagtttggcaactgatgcaagacttcaactaggcttctctctcaaattatttttcctagttcttgacattattattgacccccctgcaggtctctgtcgctggatatacagcaggacaacgtgc

SEQ ID NO: 60199 - DNA, 1049 bp, Populus trichocarpa
  Intron number 1 from transcript POPTR_0016s12160.1 (locus POPTR_0016s12160) derived from phytozome v7.0 (chr-ID scaf fold_16; pos 11493174 to 11494222)
ctgagattgggaaagttaggttagaactgtttagtgtaacttaaattgcaacaaagaaaacaaaaaccataaattaattacctgagctatcgaagaaaacagtgcaaaacctaacccgtttacagagaaggggtaaaacaggatgttcgatggtgatgatgatgggtctggtgcgatgttgccatgggtctatgtttttgttggtttgcagagaaatattgaaactgttaagatgaaggagaagaagatgaagaaaaaaaaattgggttgctgaagacgaatgcgaagatgatgaacagtttcggataaaggaagatgaaatcgatgaagagagggtgatttttgaacagttaggaatcgatgttattagggacgaagaaggatactggaagagtggaaatgaagtaaattaattttcagcgtaaatggtttggtggatctgtatttcgatcggtgtggggggagagagtgaaaataaacggttcagattttatgtaatcaacggtctacataattttagttttatattaacattttaattttttttcaattagcaacggaaaatccgttgctaaattcaacgtaaattttgcaacggattatccgttgctaaagtccgttgctaatattaaaaaaataatatatgtgtaatccgttgcaaatccgttactgaatttagcaacagaagtatccgttgctaaattccgttactaatacccctgtttgttttttttttttgatttacgtggggtgtccgggccagcttacgcgcaccacgactattccccacggcccactggacatcctgcaagcccaggagcaggtaaggcaccgcgggggtgacaggcgtgcacatagagggtcgaacccgggacgggggcggaacaagtcacacgattgaccacagcagctaagccctcaagtgcactaatacccctgtttttagtagtgtgggttggtgtttcatgcagttcatctaatggaagagttgtaactttgaacctggagtctcagagtttggttggctctataccgccttctgtaggaaa

SEQ ID NO: 60200 - DNA, 1021 bp, Populus trichocarpa
  Intron number 3 from transcript POPTR_0008s05810.1 (locus POPTR_0008s05810) derived from phytozome v7.0 (chr-ID scaf fold_8; pos 3389298 to 3390318)
ggcagtgcaggttccccgccagatatcccaactgagtatgtcaatgtagattcatattttttaatttcttatttagatcctcttacttatctgttacagagacttgttgggtatcgaaaatgcgttgcctgtgaattaggaatattcattctcaagaccagaggcctaagaaagatatactggaaatgaaatgaatattttggagtcttgtgtttccaaaagcattgcctaattatttgtctactgtgttaattaactaaaacatttgcaaactctgaagcattcttttatttaatatcgcattacaaccattagtttttggcatgtttcagtagaatcacccactgccaccatcaccaccattttcacctgattttgttgagtatctcgtcagaatccttattgaccaccaccatcttcaacccaggcaggctgaataatcataccggcacccttattgacgacctattgaaagtattaattaaaatctgcatatgtgcacaatcaacgaggtatcttaaactgacccataaaggctaataggaagcccatccttaattttgccctgtattgacttagacctcccctttagacagccctttgaatctcccccaagatttaaaccttgttggatatcagttggactgagtgtttttctaaacaagtaatccaattctccttgtggatagttatgaatgtagtctaggatattctatgtgggaaatttgattcctagtttttgagatatgctaacaaaggatgtatttctcacctttttttcttttgtaagtcacaatataagaaacttatataaggacttcttcttgtatggataaatagtctaatgcgccagtttgtgcatgacaattgtcggtcatcattggagtgctttaaaatcttagcatgctcttggtaattgtctttgctctatcatataaatggggatctgtacctctgctgatcagatatttgtatgctttaaacagcgcaactcttatctttgaggtggagttagtggcct

SEQ ID NO: 60201 - DNA, 511 bp, Populus trichocarpa
  Intron number 1 from transcript POPTR_0008s06740.1 (locus POPTR_0008s06740) derived from phytozome v7.0 (chr-ID scaf fold_8; pos 4037480 to 4037990)
gaggaggccaagaaggtagcttctgttattttatcttccttctaattaagaaactcaggacgcctgttcctgatgatgccactgagttgactcggttttgggtcgttccagtttacttgaatgatattgttattatgggtctgtcttgtgattcacgttacagggaattaaactggtgggtgacaaacattccaagcatgttagcagcttagcatacaaaatcaaaccagactagtagtaaaagtcacactcacatacgcacgaattacttttattcccttaattaatcatgcttcttgctattattaatttatttttgctgttatatacttggtttttctgcagttagaaggttccatctaactaattgcacaccattaattaattagcaagcactatactaattttatctgggccacgccgtctaatattttccttcttctctttgatccgtttgtctctttttattgtcttgggcatatgttctttgcagactacatttgagttgaca

SEQ ID NO: 60202 - DNA, 330 bp, Populus trichocarpa
  Intron number 1 from transcript POPTR_0002s05080.1 (locus POPTR_0002s05080) derived from phytozome v7.0 (chr-ID scaf fold_2; pos 3287374 to 3287703)
gcggctgctctgtagctctattaaacactacagaggtacctctcatactcttcttctctataatcattcatcaaggaattctattttaccgtttcgtctctctctgtttttttttgctacaagagatatggaattgctttacctttttcatacttttgctttgacttaccttaaattagtgtcactctgcaagtctggaagagaatacaaaaaagggaaaaaaattaatttttgtgaaaattaatttccttttctcttttggttgggaaaaatgatagtttgttgcttctaatttatacaaatggcaagattgtgggtatacagaacatt

SEQ ID NO: 60203 - DNA, 476 bp, Populus trichocarpa
  Intron number 1 from transcript POPTR_0002s07220.1 (locus POPTR_0002s07220) derived from phytozome v7.0 (chr-ID scaf fold_2; pos 4930145 to 4930620 reverse strand)
acaggctaagtgagctctctctttcttgatttttgtatctgacaacgtgtgtttattcgattaacgtggttgtgtatgttagggttttggttgattttccgatttcgttaatcgtattggcgcttatttttgttttgtgtgatttaagaataaaccaattagaaacttagttttcttgaagaagagattttttttccttttctttatgttcgagttccttttcttattgtcaaagtaattagtttaatgtaatgattttgtaggctaatcgcgatgtaaaagaagttaactttgatgcataagccatagcacttaataaatcttttgaaagccatttgaatatgcataatgtgggtctcctgtgcattttactaaaattgactgtgataagtctcggtgatttctgggcttctttctgatacgatgatgtatgtggtttaggttgtgatcgacattcactacgtaaaaaaagacag

SEQ ID NO: 60204 - DNA, 752 bp, Populus trichocarpa
  Intron number 1 from transcript POPTR_0008s06550.1 (locus POPTR_0008s06550) derived from phytozome v7.0 (chr-ID scaf fold_8; pos 3904009 to 3904760 reverse strand)
caggtgtaatttctcttcaattttcgcttctcccttagatctgttttgttttgtcctctttagtttttattttaaattcagtctgtaagttgtagttttagtttgttttttttttcattttcttttgttatttgctattttggattatacttgtatgcgagaaaaaggaatttagagttagaggaagctttatttgcttccaaattattaaaatagaaatgggttttgttgcttctgcttttatataataataataataataataataataataataataataatattagctttcatttagtgtatactgtgtgacaaattgttgaagttgaaatcggtttttcaaatttctttttttttttagttcagttagttatgacatatagttttttactagctaagaatgtagatgttcagcgcactgtttagtctgcgtggaggataattataagaggtgtaatgttttcttgtttaatgcatggacctgtgaacttcagaagtgtcacaactctaacaatgattgtcatgcttgtcgaactagcatgtgccaaattagactcttaataccatgtttcaagagtttcctgtaagaagttattgtcaagctattgctgtagtctcatttttctttttgatagctatttttgtctcccttgttttaatgggtgttaagattctagattgcaagctgtgtttgattaagctagtagtgtattgtttgaattgtattttctcagtgccatttgaagaag

SEQ ID NO: 60205 - DNA, 608 bp, Populus trichocarpa
  Intron number 2 from transcript POPTR_0002s19370.2 (locus POPTR_0002s19370) derived from phytozome v7.0 (chr-ID scaf fold_2; pos 15334997 to 15335604 reverse strand)
tggagaatcaggtcattttactcaggtattgcgcgctgcttcttggaaaacaagttggtgaattttttaaatgagtgcattgcattctcagtgcacatttttttttgaattctctcctttatgtataaaacaagtcatttatttgtgatttctaatgggatggaacctgcaataaccataaggaaactatggttttgtgtatgctctagtggctctacctttgaatctattttgcctttatgccatatttacatgacagcttgtgtttttgtccaggaaaccagcttggacatgcttgagaattgaacttggtgcctaaactgaataatgtttttagattaactgttgttggatgttcttgacttctaactaatcataccaatttgatttatgcttcacttcagtgtttacttttggggcgcagcataagtttactgcttgaataacaccaactcacatgcacatgaagaggattgccattttgttattcttttcttttttacttgcactatccaatgtcagaggctgggttggttgtattttttgttttgttttatttctttgatctgggattgaatgttgtgccatatatctggttctttaaaggg

SEQ ID NO: 60206 - DNA, 503 bp, Populus trichocarpa
  Intron number 1 from transcript POPTR_0002s19370.2 (locus POPTR_0002s19370) derived from phytozome v7.0 (chr-ID scaf fold_2; pos 15335883 to 15336385 reverse strand)
ggcttcactctctctatctcccgcacgccgctcaggtaaatgtttttcaccttcttcgtctccgatttgcttacttttcttaaaatcgatagtacaaatctgaaagaaaaaaaaattgcagtttgcttcaaggtctcatttactttgagtttttttttcccctcatcgaacacaagttttgaattcacaataaaaaagataaacctgcttgttattttggatttaggttatttttacttccttaactgcatcgcatgtaattatactgacacaaaaatttctggctaatcacttccacttggcattcaagaaccaggtgttaatacactacagcagtcgaatttatgaacaagtttaaaattactgtgaaatttgttagtcatgtaaaaagcagcttcagctgttcttgaataagtttcctgttaactggttggttagggtttttgtttttatttgtgatgaggtgtattattgttttttgactaggttgagtttcttttgga

SEQ ID NO: 60207 - DNA, 811 bp, Populus trichocarpa
  Intron number 3 from transcript POPTR_0008s13930.1 (locus POPTR_0008s13930) derived from phytozome v7.0 (chr-ID scaf fold_8; pos 9188861 to 9189671)
ccaaggcaattgtggattcgttggctttatttggggtgagattcttcaaccatgttattaaatttacttgaattggtgtctatagattatgtgcatattttccgttgagtgcttggatggtgttgatctgctattttgttcccttctatcgctgctacttgtcatttgcttccatcattgactttgttttagtggtaatcatgctagttgtttttatttatatatttttcgatggttggttatctttgatgcttggttctaatctattttcattgttatcttcacttgttctcctatttattctttgttctcatcattgatactagtttgttcatgaagggctatttttatggatggtttatttaactctaatgcaaatcaattttttatttatttatgtataatagcaaatccatttgttgccggtggagggatggggcctttggttgggaaatgatagtaatgttacaggaatcagcagagaagatgccatttcaagttttttgttacataagaattagttttactgctgcttttgtgtgacatgagaaactttttgctgagtgccattttatgaattgcttttagtgcagctttcaaaagtaaaacatcactaaagtaaatttacatgtggtatcctttgaagatctgctcatttgtatatccttctttaagtatctcttggtcatttgttacaacgtttaaaattgaattgtttatgcatttttatgttaatggatgcatttctttcttcgagtgctattagtttgactcattttgatcaactttactatttttgcaggcaggagct

SEQ ID NO: 60208 - DNA, 396 bp, Populus trichocarpa
  Intron number 1 from transcript POPTR_0008s11190.1 (locus POPTR_0008s11190) derived from phytozome v7.0 (chr-ID scaf fold_8; pos 7070774 to 7071169)
atacttctggcgagaagtttgagtatcaagctgaggtgggtctctttattattttgtgaaagttggggtcttttaggttttgcgaattgggtataggtttttcttgtgttgtatttttgttttgtttgatttcagattgaccaagtaaaaaacactctttttttattggataattattgatgattgtgcaatttcttagctgtttatggagtcccgaatactgtgattatgaaagctttaccaaagatggatgccttgttggtttttattgttgttacaattggtttttacatgctacttagtttggagttaaattttttgtctataaggcactgaaagttgggaatctcaatcctttcaggtcagtcggctcttggatttgatagttcacagtct

SEQ ID NO: 60209 - DNA, 623 bp, Populus trichocarpa
  Intron number 2 from transcript POPTR_0008s03000.1 (locus POPTR_0008s03000) derived from phytozome v7.0 (chr-ID scaf fold_8; pos 1575492 to 1576114)
caagaaaactataacaaaggttgtgcttaacgaatgttaaatgtttgagagaatttgttttcttttgaatgtcggagaaatctcaacgtaattggaacgtctggttcaattacaagaacaatttcttgaactaaagattctaaagataaaaatgctttaagaggaatcaatttgatcaaagaatgaggaagggatttgatcaaagaatgagtttgccgccaaaaagctcttgttgttcttgatgatgtagataaattggaacaattagatgccttgtttggagagcgaagttggtttagttctaaaagcagaataatcattacaactagaaatgatcatttgctaaatgaaattgaaccagatgaaaagaattagctacaaagttggattggcatgcctataggagcacccatccgaatgagattgtgtggagcttttggatagtgtagtggactaggacttcctttagctcttgaagttttgagttcttatttgttcaaaagaagtatacttgtatggaaaagtgttaatgagaaactacaaaaaaattccataccaacaaattcagaatatgttttgacacactagatgatgatactgtgagccatattcgttgatattgc

SEQ ID NO: 60210 - DNA, 290 bp, Populus trichocarpa
  Intron number 3 from transcript POPTR_0008s18480.1 (locus POPTR_0008s18480) derived from phytozome v7.0 (chr-ID scaf fold_8; pos 12464840 to 12465129 reverse strand)
tccatgtgctcttacgattcaaaataactagtttgttaagtaacaaattatgagtacaagtagaagtaaattgaggaagtaactcctctgattttctatatttaaattcttgttttaaatgaaatgatatcaaattcaaacattcaagaagagaccactgtcttttgaaggtcaagttaccctcgaagtagcttatattctcttatctttatttagttgccggctcaagctaaggtttataacagtggcattcagtggaaccaaagcctgaggatctagaggaatttcaa

SEQ ID NO: 60211 - DNA, 755 bp, Populus trichocarpa
  Intron number 1 from transcript POPTR_0016s01330.1 (locus POPTR_0016s01330) derived from phytozome v7.0 (chr-ID scaf fold_16; pos 585305 to 586059 reverse strand)
cagcttctttatcagattcaaaacgagaagagaaggttggcagtctctttctattcatttctatatattttatgtgtgcttgtgttctttttctgttgttttcttttaattaggtggattttgattgatttgagattgtttggggtctgggttgcttttctttttttgctttggatgagaaaggttcaatctttatgaaaaattgcgttttttagggtgattcttgatgtctgcttgaggtttggattagagtatgctataatatgctgtgatatttacatagataggaagaaatagttaatttgctgagtgctaatgtgattgcaaagaggttagtttgctggccaagtttaacttgaatgtggttgggtgtgttgtgagaggaatctgatattactggcagtgggttgcgtgtaaaggttttagctttttagtaggtttagtagtcaagggagtaaaagtggaaactttgattgtaggtttgtgaattagttgtgatctgtggtgctatatgtgtcattgatttgtttcaactagtttgttcacaataaaagaattagattagtgttgttgaattttggtgagtgtagatgtaagattgcgatgaacatgcattagggtcgctgtataatttcttgcttttgttgcatgttttgataagttattttcttgatttgggctactggggcatttaagcttctgtcaagcattttatttgtggaattcgaatttgacaattgtattttctaatacag

SEQ ID NO: 60212 - DNA, 968 bp, Populus trichocarpa
  Intron number 2 from transcript POPTR_0016s06970.1 (locus POPTR_0016s06970) derived from phytozome v7.0 (chr-ID scaf fold_16; pos 4760591 to 4761558)
gcttcttctgcgtcacaagcagtgtcggtactggggtatgccatccattcatgtcctcattcgcccccttcaatttcactataaaattacaatctttagtatagtattgatattgtgcctatgcttagtgcagttggtttttgacctttttttatattaattattaagataagtagcaataatgcatgttgggttgaatctcatttgccaatgttataagttgaaatctgtaaggattgtcatttttggtgaaattagtcaatttataaagtagaaagagtttgctgaaatttgtttacaaatcatggtagtcacggtgtcatcattatctgatgctacgactaccttcacaagtgcaatataaaactgtgcttcatgcaattacacggaagggtagaaattgtatttgtactttctttaggtggtgcccttttttgttttaaattttccaatttccatcttgggattctttaagaatatatcctgtatgtattgtatcacctataatttttactagaagatgaaaagatggatttattttaaaatgatattaggatagataataatagtgatgaaaattgaatgcaagtttcacagttgttcattgaatagcatttggtcggcactcatggtcagaggttcaaatagtgggcatgtggaatcaaatgctatattgggtttgggtttttttgttaaattactaacatattctaaatcctacaagtttttgttaatcatgtatttattgggggttggatgaaaattggtgcacaagttacctgcaaaaaaagttgtcatccctaagtttgtgtactgaattttgcttagagatatgccatattggtgcatggcttgaattagtcagaagcttaaaatggaacatatcatataatctctcttaatcatatcctaaagtgtagttgtatcatgcagggctacgtcacctccttcatttgctttggaggtgt

SEQ ID NO: 60213 - DNA, 967 bp, Populus trichocarpa
  Intron number 1 from transcript POPTR_0016s03600.1 (locus POPTR_0016s03600) derived from phytozome v7.0 (chr-ID scaf fold_16; pos 1948038 to 1949004)
gtgagaagccttgcagtataatttgagtaagctctctttggtggcttctgttcttgtctgtggtatggttgttccatgtaatatgtgattaatcatgtagttcatgtctctttgtgtgagaaattaacattgctcgatgtagttaatttgatgttgaaggggattgcaactagctagcaagaagtgttcatgctaataacaatttgcttcctttatctctacaagtaccaattacttaactttcaagtgtgtttaatttgagtaagatctcttacaagttgcgctgaagattcaagcataagatccaagctaggagaagtgcaagaaacattgttatgggacccaacttacttgatcttattaacaaaatatatagaaacaagcaaggtccatcacaaaagctccaagccagaaaatagctatagctagctaggatggaagacctaacaatgaatccaaacactcctaaatcaatattgaagtggtctttctctgttgaaaatacagttagctagggacctaaataaaaggttaatggttcaacttgtgcctcttccaaggaatcctcaaaagcaattaagactttgatggtgaaacctcgaccaagtgatcaagatatttttatcgagggaataaaaaataaaacaatatagtaaattaattatactatttgcttgaaattaagtagcctcaaatttccagcagagcaatgataaattaatgaattcatgatctgattgctagctagctgggccaagagatagatgtattgtacatccacaggaaaagttgcccagataatgcggcacagcactgtagttgtttgctagcatagcttgtttcccactctcaatgtacgattagctttggagatttattaggagtacttgtcttttgtctaacttaatttctttgtctcttctaccttctagggttcattgaatccagtttaggaaaagattactgt

SEQ ID NO: 60214 - DNA, 906 bp, Populus trichocarpa
  Intron number 1 from transcript POPTR_0008s11000.1 (locus POPTR_0008s11000) derived from phytozome v7.0 (chr-ID scaf fold_8; pos 6931138 to 6932043 reverse strand)
tttcatccttctattctatcacaaggtcaataactccgcgacaacgatggaattgattttcctggttggctctcttaaaaaagcaagataacatgaagaaaggtagaataggtaggtattcttgttctgaaagaatgattgaaatggatgtttgtgtgctgacctagatggagcggaaactaacacctccatgtgctagtttcaaagttatgaaaatcaaattaccagaatcacatcaatcatcttagaataaccccacatgttaaaatcagaccatccaaccaaataagtccacaccaaataaaaatgttcaagtagattacgacaagtttttaaataatagatggatggcacattttcttgaggatttagtcatgcacaattgccttgacttgttcaggaagagaaggaaacagggatgaatatgaagattgttttgaaagttgaatgggtaaatgaggggtaataagccgttcagttttaggttttttgacttgcccaaatcattcatgtaatttgaagggcaactacagacttttccaagtcccttctttcggtttgtctcgagtatctatttggtgattttggtatgggagtacccaccaaccaggccaacattagttgcatcctctcttgactatagagatctttatgcaaaatactcagaactgctatgcaaaaagcaaagtgcaaaaatctactttcttttcacttaaatatctcactcagtccaatccatctcccccactctttcctactttcatgcaagaaaagcaaaaggagcaacaatggcgtttcctcttcaagaaataaagcttcccatattaccattttctatgttgattatcatctccatcctcggcagaagcttgcatgcaagcggccctcctctaactttagactact

SEQ ID NO: 60215 - DNA, 733 bp, Populus trichocarpa
  Intron number 1 from transcript POPTR_0008s04340.1 (locus POPTR_0008s04340) derived from phytozome v7.0 (chr-ID scaf fold_8; pos 2428997 to 2429729 reverse strand)
aagttaactcccaactcgagaccaagttcagccaggtctccctccctccctccctccctccctctagatctctcccctttttcgaattgttttttaatttcttcgtttctagatataggattttggttaactgtattgtatttaatttgcatatattttcttaatcataaaggtagggattttatatttatctcgatcatatttatgatggattggtatttttaatttattttttttattttaattttgatcagggatttcgttgggattttggaaatggatctggtttgcattgaaactacattgttgccaatgaaaattaaaatgagaaattagtgattgatcttttctcgtactgtatggttatatcgcggataatttattgttggattgatgagagaatcaaaatagttgccaacaagaaaagggaattattttgcaataatgtttgcagttgtaaatgtcggtatttcaagctgcattgcactcaattgtgtctccaatagcagcagagtcatattaatagtgcattcgtcgaggggcattcgtgcttgtctattaggagtgactttgtatgtccaaaaccagctccgtgaaagctgttcctgctgttcttacttttgatttttagctttctaggtaccttttctagtgattgtgagtattgtttaatgattgttgattgttttattgtgcaggaacccgaacccatagactgggaatattatagaag

SEQ ID NO: 60216 - DNA, 974 bp, Populus trichocarpa; identical to SEQ ID NO: 60017
  Intron number 1 from transcript POPTR_0002s05370.5 (locus POPTR_0002s05370) derived from phytozome v7.0 (chr-ID scaf fold_2; pos 3504601 to 3505574 reverse strand)

SEQ ID NO: 60217 - DNA, 817 bp, Populus trichocarpa
  Intron number 1 from transcript POPTR_0016s00730.1 (locus POPTR_0016s00730) derived from phytozome v7.0 (chr-ID scaf fold_16; pos 267020 to 267836)
tgactaacattgagattcacagtcttgttcaacaggtgagctttaattttatagtgttaaagtttaaaaccttttcgtttttaataatggttttatctttataatgttagtgttggattggtttttgagtagggattggttttgatagttgctggattgagtttttgggtcaaactatgatgacccatttggagaaatgattgatttcatatgttggttcaatacggctttgtataggaatagagctgtgatacattgttaagaactttactgtaatgcatagaaatggcgttggcgaatttgttcttaaggatgtgttagattcatttgaagtgagaattgttgctaacagttcagttaaatttagttggctgaattatgagggtggagaaatgagtgaatttctgtatttttgagtttcaacacagctccgctcgaaagaggttggtgatatcgttcttaagacttaagaggaatgaattaaccctgtaatatggtcagagtattcgcgcaatagatacaatagataagtcagatttatggcatttcaacgaagtttttaatttgcatatttatactagaattttggctacaagttatctgtgccatttgcaagaaactttgtattgaagagattatttggttaattaattgattttgtattaataggcaagagtgtgggcagttcaattggcattgttggagaacaattgtgtagttggtggaaggtatagggttgttaaacaaatgcaagcttatgcttttcaatggctgactattataccatcactatttaaatggcagatcatttactgtt

SEQ ID NO: 60218 - DNA, 515 bp, Populus trichocarpa
  Intron number 1 from transcript POPTR_0008s04620.1 (locus POPTR_0008s04620) derived from phytozome v7.0 (chr-ID scaf fold_8; pos 2641935 to 2642449 reverse strand)
ccttatcccactacgatcgcattctacgcaaactggtactccctcctttttggagtaagataatgaatttttaatcacagtaattagcgttattcaagttaatcatagcagttaattttgacttagaggactgctaggtgcaaacaatgccgtgttctggtccagttccctgactgttgtgaatgggcagtgcggtcttaatcaggggaagcgtttattaatgtaaaatgagggtagttacgttctaatcgatcaatttgcatgtttaatctaatctagtgaagctaagtagtgaatgactgacattggccgtgatatgagaaaaactttggtgttctcaccgtcgtgattttaatatctgtgggtcataccatgtaaaattcgaaatactaaaatcgcaatggaagaagtatggtagaagggaagtacttgagtttttttttttttttttttaacggtctgacatgaaggtgtggtgctgtgacagggttgcaatttggtagcccaaagggaaa

SEQ ID NO: 60219 - DNA, 456 bp, Populus trichocarpa
  Intron number 2 from transcript POPTR_0016s00700.1 (locus POPTR_0016s00700) derived from phytozome v7.0 (chr-ID scaf fold_16; pos 247618 to 248073 reverse strand)
tagtcgtcaagctgggcaatcaggtgattctaggctctataattcttgtttctatgcagtaagtggttgttctatgtttgatgatcataaatgcactgatattggttgctttatgggacactaattcgctgatgtgataaacttctgaaacctcatagacagaaagttcatggctttgccttctgggtcaactgaatttaatatcctatcgagtagatggatatagtcatagtatcccctgtcattaaaatgctgttgatctagtcccattttgtctctcctctctggtctttgattggagttttatcagcccgatttttctttactgaacttatttctcctcttcagtttttgtttttcgttttatcaaatttgtagactcaactatgctaccttactgactatttccttcctgcatcagacagcaaagaccaagtttatcaatagttgtcttaa

SEQ ID NO: 60220 - DNA, 455 bp, Populus trichocarpa
  Intron number 1 from transcript POPTR_0016s00700.1 (locus POPTR_0016s00700) derived from phytozome v7.0 (chr-ID scaf fold_16; pos 248171 to 248625 reverse strand)
tgcttctctttacccttcttcaacagaggcaagaggtcccttttctctctggactttgttcccgtgttcagggcttaagcaattatcttctttttttttgaacttttctgccattggaagctgtcttaaaatcgttatttgatttctatttgggttttctttctatgagagggttaaacttaaaaaaatgctttctttctggaatctagataagaaagatgcgtttttccagaaactgggttttggccctaatttattgttgtttcatgggttcttttttcagttgttttctctccttttgactcttgtaaatgcaagagtttgtttggattttaatccttcatttataactactttgaggttttagagattgtcttctcattgaattaatttggattccttttgttttgtgctttgcagtgttgtatctttttgaaatttttgtatcttcttac

SEQ ID NO: 60221 - DNA, 820 bp, Populus trichocarpa
  Intron number 1 from transcript POPTR_0008s03450.1 (locus POPTR_0008s03450) derived from phytozome v7.0 (chr-ID scaf fold_8; pos 1832094 to 1832913)
ctgatcctgaaacagaaaaggatcggcaattgcaggtgattttggattcattttttagctcaagttttgagctttctgtgtttaatttggagaattttgatttttcttggggactgaattttgatgggttttaaaaaatttcgggtttagaattgtttgcagttgaaaaggtgagatttctagcttaataaactatggcattctgttttttagcctttttaggacaaagggtaattggcttagaattttgattccaaaaagaaaaaagaatttgtagagagtaatatattgattcatgattggaggatgtttttttttccaaggcggttttgtttcgatcggatatgaaatcagctcaatgcactaatattgcggtttgtttttgtttaatagagttaactttttttagcttctttagtgactggagtttaatgagggtgatatagaaatggagggtataactgaataattctgttgaatcagggagttttatgtgttaggggattgagttttcttgctgatgttgatatagggaagcagttatgaacacctcactagttgtagatctttataagctggtactggactgataatcagatattctccagtcaattcacactagattctagaagtagagaatcttttggagttaagttcagtttcagagtatctaacttgttgtatcctgccattacgcaatatcgctatctatttactgagttccaatatatttttgcttgagatctagttgcttaaggttgactgtattattcttctggttttaggttgatttaatagactttttgcaaaagtcaaagta

SEQ ID NO: 60222 - DNA, 727 bp, Populus trichocarpa
  Intron number 1 from transcript POPTR_0002s06550.1 (locus POPTR_0002s06550) derived from phytozome v7.0 (chr-ID scaf fold_2; pos 4367402 to 4368128)
aaaaaaccactctgttccatccaaaagtgagtcaagttagtagtagctgaactgttctcgtttcgctctgtcttttcctttcccctttgaaggagtaaatgtgaagtgaagtgatgcatgttaccatctttctttcgttaaacagatctttaacaaaaaaagaaaaaaaaacttgctactttttttggaaatgttgtgatggtatccttcgattttcttttctttttggtattgaatttagatcagctgtcaaaaaactatcctgattttgcattcaatgttaattaatgattacaaacgcagtatttaagaattaagcgtgtttgtgatgctatatttaattcctgaatcctgtttgggatgctttcaagtcctttttttaagcatctcatgattgatagccttttttatggtcaaaatttgggctgacgttttgtttgatgactttgtattaaatgggctcttgtaactttgatcagattgttgatgttggcgatctaactcttgatattaatgtcattttcttggccacttttggttagctttttgtgggttgttgttgtttttttttcttggttttgtttttgggatttaaagtcggaagataacagtgatacatctaatatttggttttcttttttatgatgttttgatggcaacctgtctaactatggaataattggtgaatgaaggactggtgtctttgtcagttattgcaagggggcag

SEQ ID NO: 60223 - DNA, 517 bp, Populus trichocarpa
  Intron number 1 from transcript POPTR_0002s03360.1 (locus POPTR_0002s03360) derived from phytozome v7.0 (chr-ID scaf fold_2; pos 2075959 to 2076475)
actgttgcatcccctgatccttccatcttctccaggtatgcacgactctttctcaatttctaggatttgttctttcgattaattgatccctcttttcttttcaattgattttggagtttaattaaatatagaattatgcgaatttgaatttaattttattaattgcgtagaatctttgtaaagaaacgaggcctcttctcttacaggaaaaactagaagaaaactttgagtaataaagaaaattttatcaattgtaattagtcataagagctagcaatttttattctttttagttattattggaaatcttgaaatttcccatacaggaaaattttgaaactttctgcaccaataagttttttaatttatgcaattcttgctatgaaattgttggtctttggataatatttcttaaaaaattcctttgaagatttatctttttttgttcaattttgtaaatgtttgtctgtttaactgggcaggaaattggatcgaggggtgatttttaagtaaggaa

SEQ ID NO: 60224 - DNA, 549 bp, Populus trichocarpa
  Intron number 2 from transcript POPTR_0016s12420.1 (locus POPTR_0016s12420) derived from phytozome v7.0 (chr-ID scaf fold_16; pos 11784388 to 11784936)
gactctgtgatccaggtaacgtgtaatgggggagctgtttatttgaattattgtggatttttttttcttttttctgggttctattttagggtgaaattgggagaatttgtttgtttcttgagaaaccatgaggggaaacaaaggaaagtggagtgatttgaagttatgcatgtgatctctgctgttgtatcttttaggataactggtgatttttaaaaaaaatttgtagtagtatatcaaagtttagatctttcacagtggaaattgagtgcgtcgcttttttgatttcaatgttctgttcactccgtaagcagaacattgaaattaaatacaggaagaagagaatttgaaatggctagaacttgtaaatcgatcagctaatgtttttattaatgaagaaacaagcaatgtaagatctgcattgcagttactctggtttctcaaggcatctgccttatgtttttgcgttgtttgcacttagtgatataactttactcttatgtttttgggttagacaaggagaatttgtgtctgtacggacatccaagt

SEQ ID NO: 60225 - DNA, 367 bp, Populus trichocarpa
  Intron number 1 from transcript POPTR_0052s00210.1 (locus POPTR_0052s00210) derived from phytozome v7.0 (chr-ID scaf fold_52; pos 93659 to 94025 reverse strand)
ttgttagaggtgaggttaacttagacgtgaaagctggctgtatactctttggcaaaatttgttttcttacctccctctctagactttgaatgggtgattgttagtcctccaatagaagtatttgaagaaggttgtatactctttggcaatccaccattgctggatgctttgtaggtcagaaacttccattcccaatggttaaatctatagctaacagaatttggggatccctcggattattagaagtgttgtttttagataatggcttctttatgtccaatagacatttggtccttaaaagatggacaccaaacatgcaattctgcaaagatgctgtctaagattcttgtttagattaaacttcatc

SEQ ID NO: 60226 - DNA, 381 bp, Populus trichocarpa
  Intron number 1 from transcript POPTR_0008s01960.1 (locus POPTR_0008s01960) derived from phytozome v7.0 (chr-ID scaf fold_8; pos 936874 to 937254)
ttgttgctctccgtgataaaataatctaaccatctgtacgttattttttcttccaaaagtttcaatctttatattatttctagtttctcgatcttaactttgcatatgggttgtttttatttctcgcatagattcgatctttacagtgtcttagcttctcggccttgattctgcatctgggcacttgttattattttagaaagattcaatcgttatagtattactggattctggatcttgattttgattctgggtacttgttattttttcaaaaaagtttcctttcttgctattttgtccagattcttgatttttgtgtgtttatcacattgatcttgatgggttttgttggtcatgcaggattttaattgatataaaaaa

SEQ ID NO: 60227 - DNA, 757 bp, Populus trichocarpa
  Intron number 1 from transcript POPTR_0016s07520.1 (locus POPTR_0016s07520) derived from phytozome v7.0 (chr-ID scaf fold_16; pos 5392755 to 5393511 reverse strand)
atttgtctgatccttctcatagtcctgtttctgaggtgagtttttgtttgattatacgttgttattgattgattttttcatgttttgttgaagggatgttagtcaaaagttttattcttggtttcttatatatgttgcttttgattaagcagaatgatgtggaagaaggaaaacaaggaaaattggatttgttttgggttttttttaagaatttgtttaagtggagtttgattgttaggtaagaaaagtgggggaatttgaaaaggtttgagccttggaatcttaagccatgtgttagtttggtttctataaggtgagtggtgattatattaggtttggtattgtgggtctctctaattaatgtaaagctttatgtttggtcttggctgattgtatttcttaatattacaatgattgaatcttctttgtttgaaaagttagttgtttatattggttgtggatgaacataagaattttagtagaacgctgatggtgttttgcagtgtgtcatttgttttttctattttagctttctcaaattgaaatcttgcattgcttttgaattgtggctttataatttcaaacgtaattcaataacatctaaatatagagcaaacaactggaactgatatggagatttgaaggccttgaagctgctgcctctatatccaagctagttttgcttaaatgtggtgctgttgtttgaaatcatcgttttgcagaggattgatcgatctggaactggcagtcgccatag

SEQ ID NO: 60228 - DNA, 455 bp, Populus trichocarpa
  Intron number 1 from transcript POPTR_0008s08940.1 (locus POPTR_0008s08940) derived from phytozome v7.0 (chr-ID scaf fold_8; pos 5550662 to 5551116)
ccattccaaggtagaactcagaaatcagaactcaggtcaggcgtagtagaagtcgtctaataatcagttgggttcatgttcttttaatagagtatcaataactgtaatcaaaagtttaaaagtcttggtttttgtttttcaatttttatgattgtcttctaatttcggatgtattgccgttatgattgcgtgagattctgtgtattgatcagcaagatttgatactcgttgcttataatttccacacggggtcttattattactggctaaattccttctttctttctttcttttgaacttgggggttgtcaatttgcacatctattattaaatactgtggttttaatttactgctagttaatttttcttttagataccgttctttagtttattgatttttatgtaacgagtcatgtatctcatgatcgatcattggtttaggattgtaagctaaa

SEQ ID NO: 60229 - DNA, 383 bp, Populus trichocarpa
  Intron number 2 from transcript POPTR_0008s08940.1 (locus POPTR_0008s08940) derived from phytozome v7.0 (chr-ID scaf fold_8; pos 5551262 to 5551644)
tcaaaggtttttgttgtatgctctactagtgggtttttttattttatttttctatttggtttaaaagtgaaatttgatctcttacaatccattagaaagttgtttttttcaatgttattgtttgaagaccgttgttcagaaacttgattgtagaagatagattttggattccctggattagaaatttgtgctcaggatggcatgcttatacactatgcatcaaactatgtacctgtttcatgttttacttgtcaacatgagcttggctttgttcaaggggacacatattcaattattatatcccttacacgtgatctatcagtcctccagtttctgaaattcttaaattgcctttaattgtttatttcagcgaggcatatatt

SEQ ID NO: 60230 - DNA, 629 bp, Populus trichocarpa; identical to SEQ ID NO: 59713
  Intron number 1 from transcript POPTR_0016s06440.2 (locus POPTR_0016s06440) derived from phytozome v7.0 (chr-ID scaf fold_16; pos 4333563 to 4334191 reverse strand)

SEQ ID NO: 60231 - DNA, 473 bp, Populus trichocarpa
  Intron number 1 from transcript POPTR_0016s10020.1 (locus POPTR_0016s10020) derived from phytozome v7.0 (chr-ID scaf fold_16; pos 8149168 to 8149640)
aaaactcattgaagaaggcgaagttccattccaaggtatgtcaaacttgtttattcctcctaattattgttcggatttgagtaatctcaactataatccagtgggatcaataattgatttgtcaacctcaaataattaaaaaaacaattcttctacatgtgatgatgattcaagatgttcatgaaagtgactgaaaaattcacagggtagctataagaaaataatttttatagataaggttaagtgtgaataattcaattgaagatgaacagaaaaccatattaattaatttagagtaacatcaaactatcaatttctcaaatataaataaattatcacctcttttttttttttttttccctgtttatgctcttgttaggaaaagaaaagttaatcccactttataagtagctcgtgcatgaaattctttttttaaaaaaaacatgtcaatgctggtaatcatattccaggag

SEQ ID NO: 60232 - DNA, 533 bp, Populus trichocarpa
  Intron number 1 from transcript POPTR_0016s04290.2 (locus POPTR_0016s04290) derived from phytozome v7.0 (chr-ID scaf fold_16; pos 2481908 to 2482440)
gtatctattcacaaacagcaacgccaggaagatcggtgagtccttgatttgcagtttttcattcatgcgcatgttagtggactagttaaggttttgctagtttgagccgggttgatatttttgttaattcacgcacatgttagtgcaatggtcctggaacttgccaatgtacgaccggtgtttttttttctttgcattgaatggacgaaactgcggtataactggacgttgattgttcagttaggtcttgatcactggggtcagtttcgtcctatccccatatttttgcgccttttttgctgttttcagctgatcagtagtgggccgaaatgcctttgttgcttgcgcgttttcttctttttgaaaatgctgaatctgccctcgaatattttgatgttgtagagcaatttgcaagggtatattcgtaatcttatgagctttgcagatttatgtaggtaccacgttgattttttatttttttttgaaattttaatgcaggacctaaggaattcactgagctgttttacagcttg

SEQ ID NO: 60233 - DNA, 538 bp, Populus trichocarpa
  Intron number 1 from transcript POPTR_0016s04310.1 (locus POPTR_0016s04310) derived from phytozome v7.0 (chr-ID scaf fold_16; pos 2492748 to 2493285)
caagagtctttaccgcaccgaagaagtgcctcaaggtaagcaaagaaaaacccatataaaaaatatgatttttaggacacgtgcatgtagatacagtgaattactgggtgtttgatgcagtaaattgttgagatttatagaaagtcttttatttctaatagttttttttttagataaaaggagtgtgttttgtgtattatttttattgctttggtgttttttttgctgcattaaatgtaataaaaagcccataatctttcttttaattccaataaattgtacctgtacatatagtgaatgcgtgtatttcttgattaaattgtttgattgaaaaaaaaataaaataatttttggacactatacacctatggatacagcaaaagtgtacgtatctgtttgatgaaattgtgaaatttaacaaatatatttcattttcaaggcaggaacgttcttttattagaactataaatactgtgaatttgtttgtgggttcaaatgttgaaggtttgattcttgttgttgttgttggtgttaagac

SEQ ID NO: 60234 - DNA, 460 bp, Populus trichocarpa
  Intron number 2 from transcript POPTR_0002s14780.1 (locus POPTR_0002s14780) derived from phytozome v7.0 (chr-ID scaf fold_2; pos 10965147 to 10965606)
ccccacctagttggctcaagatttctcctcaagatgtgagtaaccctcaataacactgcaatattttgtttgctctttgattgtttcttaatggatttttgaaaactatggcgtcctcgcatatagtaaaccgatgagatatcatgttttttgggtgtattttgttttttaaaatgctaattgagattaaatttgtgtatttgcaatcccattttttgcacaataacagttgttttttttttctgaaaatagaaccgtgttactgagtgatctgttcaagtgttgcgtgacaatagtaatacaataaatatgaaaaaaattaaatttcagtttccaagcttttaaccttagtcatcagttggttgcgattggatttatgtagttgttattcagacaggtactcagtgttcttctaattctttcaggttgacgacaacatctgtaagtttgccaagaaagg

SEQ ID NO: 60235 - DNA, 722 bp, Populus trichocarpa
  Intron number 2 from transcript POPTR_0016s02090.1 (locus POPTR_0016s02090) derived from phytozome v7.0 (chr-ID scaf fold_16; pos 1002900 to 1003621)
agcgaaggccttcttcctcaccatttcatatccaggtaacctattattcttttctctctttctcctttttctaataaagtacatgcctttttttatttgtctattatttactttgaccttttatatcatgtattcaactgggttcattggatttttcttttcgtttttcgtgtgtttggttgctgggaattgatttataagattgaaacccaccaaaaaagatcgaatctttccatttctactattttatcagcctgtaaagttgaattttgatgctgggttttctttattctttgctcaagtttgttctcggttggtttgtgtgagcttttgcatttctcttgctgttgaattgattagtgggagttttcttctttgttacttgctatgtttggttgctgagaaaattgaaagggaaacatggaaagattaggatttgtttggtttctatttgtagattgacttagctaaagtaaataaattgttccttgattcatgatgcatgattagtttagctgttgtatttgcttatttctttattaaattagggaatggatgcctataaatctttagattaaagaatgctgtttgttcgtaggaatggtatattctaattttaacttgtccaaaaaaaaaagaagtatattctaattttgaagtttgttatcatcttgtatagaaatttgtgcatcttagcttggatttgttgatgttggcatagt

SEQ ID NO: 60236 - DNA, 557 bp, Populus trichocarpa
  Intron number 1 from transcript POPTR_0016s03650.1 (locus POPTR_0016s03650) derived from phytozome v7.0 (chr-ID scaf fold_16; pos 2009750 to 2010306 reverse strand)
tttaatccggcttggtttggtgcatacccaacgttagagtacagcatagccaaagatgttgccttttgcttgtattgttatctcttcaagtcaaaagggggtgttgattcgtttgtgggtgatgggttttcaaattgaaaaaaaaagaggaaagatttgatcttcatattggaaagtctaatagtagtcacaatgcagctcggataaaatgtgagaatttgattaatgaaaaacaaagtatcatgactttgttatctgagcagacagtaaagagtcaaagtgattatcgaactcgattgaatgcttcaattgagtgtgctcgttttttgttgcaccaaggacttccattacgtggccatgatgaatgtgaatgttcaagcaaccaaggaaattatttagagctcttgcattttctttctagaaataatgaagctattaaaagagttactttcagtgaagctcctagacataacaaattgacttctatagatattcaaaaagacattactcaagctgctgcagagcacaagcttcgtgggcgtttaaggcgaaaatct

SEQ ID NO: 60237 - DNA, 874 bp, Populus trichocarpa
  Intron number 1 from transcript POPTR_0002s18050.2 (locus POPTR_0002s18050) derived from phytozome v7.0 (chr-ID scaf fold_2; pos 13928519 to 13929392)
cggttacagaggttttaatttcttgcttttcactcttcgttggctttaccatcatttttatttttttgtaatttcttttttctgtctaatttaatttaatttaaattctcatttcttttttcttctcgatcaacttatctttgttaagtagacaacaatttgaatttttttggtgatataaacatgtcagtctctcgtggctgcactatcatcttgacttgtttttgctgattttgataaagattcctcttttttttttataaaaaaaatcgatatttcacttctgatttgtttttgagggaactggaatttgtgttaaatctatttatcatgcttggttgaataaggcggcattactgtttttgctgctcttgatggaaaaatatttatcatgctatgtagcctggatgaatttacttctgacccttgctctgtaacctgttgattcttctttccctctttctctgttatatgatgtaattgaacattatatttaatattcgagtacaatttgagtttgcaatttgcaaaataaaaataaaaaatcatgacattttcaattttcggtatcatggtcttcgactgaagatgtatgcttttctctctgagcagtttctgctgttcctgatggattaatggcgtgggagactttgaaggagagaccccatagcatagatctcatattaactgaagtggagttgccattaatatcgggatatgcgtttcttgctttggtcatggagcatgatgtttgcaaaaacattcctgtcataagtatgtaaaagcgtgtttttgttaactttactatcttgatattttgtttgtcgtggtgctaaacaatgtcaggaattttttgcatcataaacatacagtg

SEQ ID NO: 60238 - DNA, 744 bp, Populus trichocarpa
  Intron number 1 from transcript POPTR_0008s02840.1 (locus POPTR_0008s02840) derived from phytozome v7.0 (chr-ID scaf fold_8; pos 1448968 to 1449711)
agtgcaactacggatccttccaaggttgatgtgttatttgcggaggagtgggaggctctgataccatgatagacagtgatatttatatataaatgaaacagaaatgaagaaagagcagagagtagaaaggaagaagaacagagaatgaatctgtttatacagaaaagcagaagacgaaattcatgcactgttacattattgcttttgcttgactgtttacattactatttatcactttatatatgcagtattggaagatactacacggagaatatgctttcttttacactcaatataatgctaacagattctcttttactaacaaacactactaacagaatgctaacaatattaattgctaatcttctgacacttggcatcattaggaccgttgatatctttatatatattatctagtttaaataatcatgtaattattatttattttcttgttactaaggacacaatcaaatctcgtaaataccatattaggaaatgattctagttcatatatacttgtcaataatgttaatgttatgattgaaagattatacctacacgatctaactgctagggaaaacaaagctgaagatttccacctgcttacaagttcaatgccaaaaagtgccttaattaatccactctggcatagcacctcgtttcgttacatcttcttgattgatttccttcattggaattattgcaaaagagaatttttcgggtttttctttctgctttcagttt

SEQ ID NO: 60239 - DNA, 775 bp, Populus trichocarpa
  Intron number 2 from transcript POPTR_0002s18490.1 (locus POPTR_0002s18490) derived from phytozome v7.0 (chr-ID scaf fold_2; pos 14389834 to 14390608)
ctgataatatctggcatcactgtgagtttttcttttccctcttcatgttaccttcaatcaggactgattaaaattttcttgcctgcccttaatacgcacaatcatcaaatttattgtcacttcgccttttgtttacttagcttactgggttggtcttttcatccttcaaaagatttaagtctaatagaaaggtgccgtccaacattgcctctgagcttgcctagtgtaaacaaataaatacgtaggagaacgttcccttggttattttttccaggtaaattatttttgtttgtaatttcccaactgcttagaatcaagcacttaagcacggtgattaatgggtggatcgcctagctccttcacctggtcttttgtagatatgatcaaatataagctgagccgacaaggtagcttgttcttgactgcaaaattaagatgcttatttggcctttgtcgagaaaccgagtggaggaaccctcttcttgacttcattttaattttttctggatttgtgaggatagttgaaagttgaggcatgtcttcatagaatggctatgaggaaaaacatagactaataagaagagaaaaggggaaacagagggaatagataaaatttcttggctttgagaaccatgccacaaatataaaagccacaatttattgtgtaatgcaaattacttggttctaattctcaattatggatgttgtcgtttagattctaataagtaatcttgttttctgaaaacaacagtcaaggttagtcctagtctagccg

SEQ ID NO: 60240 - DNA, 403 bp, Populus trichocarpa
  Intron number 1 from transcript POPTR_0008s05750.2 (locus POPTR_0008s05750) derived from phytozome v7.0 (chr-ID scaf fold_8; pos 3339159 to 3339561)
acgaggcacagcgaggtgaagtttttattttttattttttaaaaaagaaaaaaaaacagaaagataaaatggtaatgattttgatatattaatattaaaatctagaaaaattctaaatttttgtttttttaattaaaatatttttttaaaatattatatgccacattattaaatacacaataaatttatatatatggcttaccatatcttttaactttttattattaattctttttttgtttttgaatttttagaatcacaattttttaatgataaaacaagaaagtagttgtaagaaatatcagggaaaagaagaaaaaaaaacaagacaagcacatcgtggacgagtcaccctgagcgcgtcgaagaataaaatgaagaggctctaattagccggcttaca

SEQ ID NO: 60241 - DNA, 401 bp, Populus trichocarpa
  Intron number 1 from transcript POPTR_0035s00370.1 (locus POPTR_0035s00370) derived from phytozome v7.0 (chr-ID scaf fold_35; pos 210737 to 211137 reverse strand)
cagggtttaaggcggccggtatgctaataccactaccataccctctctatgaactcatttcttttttcaagttgcattacccgcgcatttcaattcatctctcaatcacttcaattccatttcttcttcttttttcatttcctttaattagagggccaactcccatatattttctaccaaaatttttgatcctttgattacttttgataagaaacccacaattctatctctaaaccatccacagttatgtggagaaacgtcgcaaaacaagccactttgaaatcccaatcaaagtccctcaatttcccttcatttccaataacttacagctttttaggagcctctaaataacccatcttttttgagaaactcaagttccattcgcttaataacacaagtcc

SEQ ID NO: 60242 - DNA, 937 bp, Populus trichocarpa
  Intron number 1 from transcript POPTR_0016s02540.1 (locus POPTR_0016s02540) derived from phytozome v7.0 (chr-ID scaf fold_16; pos 1251342 to 1252278)
gcggtttgtttctcttgatctatcttctgatttgcttcttggggtgtttttggttttgtttctatgtttttttgttttattttaccttgaattgttttagaccttgttttttgggggtagaaggtggtgtctttgatggaagtatgtgattttgattgatgggttcttttaaattttggaaatttgttaaagttgagattaaaaaaactgatgttttggatgaaagatgttttcactcagtgaaatatgtgattttgagtgatgagttctttttaaaatttggagatttcgattaaaaaagtagattgctttattttaggttgcattcaatgatccaatcaacaaaggaacatattacctatgtgatgtttgttagctatcgtggaggatctaaggtctgtaatttagggctttttggcggcaaattaacaataatcgttggagtctttgcatcggatgatagttatattgtgacgcatagtgagattctttgctgaatactgttttgcaaatggttgtcttcaatcaaattagcagtttttatgttcagcttgtctttgtctttgtctttgtccttgtccttgtcgggtttatttgtatcttaggttcttgaatgtttgtgattggttgttttggtattttggtggttcttaaactttatgagatatacttatgtaagtggtaaatgagattaagctttccctgtgaaaaaaaaaaacactataataagaatatcgaagtagaagggcccttcaattccttcctctttactgcattttgcttgcgacattcatagaaacaaattataatatgaaatgggagattggattctgtgtgtgctggtgtctgttgagaacattcaaacaattggccaattggtttttcatatgtcttgtgttcttcaggttgcatcaccaccaaggaattggggactgtg

SEQ ID NO: 60243 - DNA, 976 bp, Populus trichocarpa
  Intron number 2 from transcript POPTR_0008s16790.1 (locus POPTR_0008s16790) derived from phytozome v7.0 (chr-ID scaf fold_8; pos 11295086 to 11296061)
tacagagtggagaggaagtggctgttaagttggtaggttttacatctttagcaattatctgcaattctttcttatagattgttatttcttcattcgtgcattcctggatagtagttaactgtcatgttttgatatactagatggctgatgatcgtgtttgtttccatctgtttgaagtagcaatttatagttgatgatagggaatttgcttcttcttctttttttctccaaatgcttttttggttttgagaaatttagatagttagttacttaagatggattgtgaatttggttatccaagtggaggacttcttcttggtgtcttagtagctagttaatgttttcctcaatcaattcattatatttatgttaccaaatgattctctcagtggcaatgctaaatgctcccctctactatgttcttaaaacaaaaggatccctgaataaaaagtcgttaagttttctgtttttggctggtgattccttgtaccctggtcctactagcttttgaccgaggtctatttgcattggttggaaacatcaaatattgtattttagatattggaagcttctaattagcgacgcttttggtcattttgtgtatatgtagaagagtaattctattcatttgattatgtactgatactgtgagcaaaagatattgtaaaaagtttccagtttgcagtcggtgtgttcttgagcgttgcactttccatgttataccatgttgagggaaaaagcctgctgttgaattaagcctgctctaaggttgttttgactggatgttttaatatgaaattctgaccttttctgttcatttaaatctgaggatgtaatctagtagattcatgtattatgtccttttttatatatatgttataatatagtgcaatttgcacttttgattttgtagctgatacatattcttatgatattcccaggaatctgtgaaaaccaagcacccccagcttcatta

SEQ ID NO: 60244 - DNA, 519 bp, Populus trichocarpa
  Intron number 1 from transcript POPTR_0008s15270.1 (locus POPTR_0008s15270) derived from phytozome v7.0 (chr-ID scaf fold_8; pos 10193501 to 10194019)
ccacagtttagtgacttgtttgtgcttcgttccatgtaatatatttatttgtattttgtttccatgatttattaatttgctttctctttgctcttctgttttaatattagtttaaagggaaggctgtaacaacaggctggttttattctattttcttttgtaaatttatttagtgtgtcaaagtctacctagcaattagccactgcagttgcaaatttaggcttatcattttcttttggatgatcttcggttgctaactgatatttctagactctgctgtctttttcagctgagaattatttattattgttttttttctgacctaaatccttaattatgaatgcaatgtatggaaccattggtttagtttagccttggaagaaagagttgatgatgattcttatgagtttcatcatctgctcaatattttcaatagtgcaacccttaacacctacttttgtttgtttttaccttctttggtcagatcttggatttgtgggtggcaagtcaaagtccttg

SEQ ID NO: 60245 - DNA, 888 bp, Populus trichocarpa
  Intron number 1 from transcript POPTR_0016s10590.1 (locus POPTR_0016s10590) derived from phytozome v7.0 (chr-ID scaf fold_16; pos 8887545 to 8888432)
agattaacaggtttggttcctgggttctattttaatgactctttctgtaggaaagaaaccttaaatcaggtgatggaaggcgtgttaagactttttttttttgtgtaaatcagctaaagagtgttcaattgtttttcttgcatgtcatgttgtaattttgtagaaatgatctttgtatgaacatcaaaggaaaatctctttaattgttaaattgaagtagttaacagtagtgtctcaaatatttcttgcaattctatgcacccgctgaataaatatgaaaacaggattcaaaatgggctggcttttttagtgcaagtggctggattcgcaatctgatgtttctataggtggagctccttttctatttatatgttttttaaatttatgtcctttaaaaacaattttctgttttcttttgctaaaagaaattcaatgattgttttgtgtcttgttgggcgagagagcaacatagcatggttaattgctgcttcttggtcaaagatctaagctttctctcatttgcattaagtgtttgacttaaatgcttgaagcattcacacgaataggattgaaaccaagtccatgcattctttattcattacaaacagatgttttagaatatgaatctaatgtttttacctggtttccataataacacggaattaaaggagaggattatgtcttgtccttcttccatcctattttctggttatcaataatggaaacttgtcaatttgttaattctcctagtatgcctttttatctagactgattatgatgcacttttgctcgtccatattattcaaaatgcagcttcttacttttctagtggtcttttttgcccgctttttctttcagcttccagcttgaagaagcattcaactccaa

SEQ ID NO: 60246 - DNA, 551 bp, Populus trichocarpa
  Intron number 1 from transcript POPTR_0008s00580.1 (locus POPTR_0008s00580) derived from phytozome v7.0 (chr-ID scaf fold_8; pos 243388 to 243938 reverse strand)
cttctcactctctgccctccttttgttattctactgtaagcccttttcatttgcttctgcatttgaatatgataattcttggtttctttactttctcttttgttttggttatcggctattgtttggaaaagaaagcaccacagatatatgttacgggtgacacaattacagaaccaatttgtatagtgtgttgcaacagaggaagctactatctttttaaactttatccggggtgttttagatcttaataaacctttagattattgcttgtcaaagttcgatcttttttaatgcaagtttattagtctgcttaagaaatcccaagattgctgctttttctttcttcagcgaaattcagagaaaagaccgtttttactactgcagtattaaaagctataaatcttgatatgtctcaagacgataatgtattgattttttttagcatcgtgctattttgattagtgtatgagaaaatgcatggaagaagaacgagggatggattcatcgatagaataagtggttattaaaattagaatcttcaactaatgcag

SEQ ID NO: 60247 - DNA, 751 bp, Populus trichocarpa
  Intron number 2 from transcript POPTR_0016s03000.1 (locus POPTR_0016s03000) derived from phytozome v7.0 (chr-ID scaf fold_16; pos 1509569 to 1510319)
tcccttttgttagcacttccaggcaaacagccaatgtaagtgtttccatcattatgtatagagggttccttagtatggttatggaatcttgttttatatttgtgggtgtcttgtctcttttttttttttgtgaatgtttaggtgttggttgtttttcacatttagtgttaatcttaaggtgctaggacagtgttcaatgagtgaagcagttgtgttagtttagatgataatgtatcagcaatcctttttttgttttttcatttcttctaaagttttggtgaaggcttcatgggttgtttttcaaatttaatcttaatgttaatcttttaaggagctaggacagtgctaaatgagtggagtgctcgtgtttctttagatgataatgtaatataaagtgtttgtttctttttcttttttcattttgttttatggaaatttttgcttgttcaatgctcatcaacgtttgttaagaaaaccctttccataggaggatcgaatatagttgcagatacttagtattctacaattgaggagtggaaatcctttgatttgttgatctttcaacgtatactttaccaaaatgagatgaacgagtcatttataggtaagcgctagggtgtagggtggagaacctttgtctgtgtgatatgctagccataatttgttgctgctgtcttcctgaatgtgatagaaatctttgactgctgttttcaaaaccagatcagggaaagagataaatcggcgtcaagag

SEQ ID NO: 60248 - DNA, 714 bp, Populus trichocarpa
  Intron number 1 from transcript POPTR_0002s10370.1 (locus POPTR_0002s10370) derived from phytozome v7.0 (chr-ID scaf fold_2; pos 7472435 to 7473148 reverse strand)
gggctagaaaagaggctgttgattggattgcaaaggcgggttcatttttttttctttttttttttcactatagtttgatgttctaaaatggcgattatatgggattttctatatttatatttttcttgactggttttcaaaatatgagatttggttatccaaaaggggttttttttttcaccgtatagtgtataggacttcttttcattttcggattggtatatcgtgatgattacagtgatatctgtgctggatgtgtggagatagatttgtatttgctgtatattttgattgatgtaaagctatttttctagtgttgattgtgctgagtgactctttcatatcggtgttgtgagtacttcgaggcttttgatgaaataggttgcgtttttttctttttgtttggtgttcttttttcttctccatctacttaatctgaagtgggtctggtgggttcccttcttttttcccttttttggggccggtgctaatttgttaattgcatttctatgtggtcttttctatttttcctagaagattttttgtgcatttattttttccttccccttttccttacatttgatttgcctcgcactaatgctgattgttgtttatgagctgttaggttcttttttgttctgttcgattatctcgattcctcaattgagcttttgttgatgatcaatactaatggtcttgttgctcaacaggttc

SEQ ID NO: 60249 - DNA, 401 bp, Populus trichocarpa
  Intron number 2 from transcript POPTR_0008s18670.1 (locus POPTR_0008s18670) derived from phytozome v7.0 (chr-ID scaf fold_8; pos 12638780 to 12639180)
agataatcttatagctggttgggttaagaacaaaggtttgctctcgtattacaaaatatttagaagttgaaatgcgattagttttttgaaattaatcatataaggtgttgtttaacagaagaaaatagaaaacatattttgattattaaaacaacgaaagatgatttgttgtttttcttttaattccttactttattaatataatcatacaaaaccagaccgtaacaattacttcttttattttcactctttcaccagctcaacctctttacatgaagtcactgtagcaattacatgcctcttcatcaataataattaaattatttcaataatatcttttttcattctttacatgaagtcttagtcttaattttttttttttttttttgatatagatagtt

SEQ ID NO: 60250 - DNA, 277 bp, Populus trichocarpa
  Intron number 2 from transcript POPTR_0008s02970.2 (locus POPTR_0008s02970) derived from phytozome v7.0 (chr-ID scaf fold_8; pos 1556798 to 1557074)
cttccttattggccctcttctcctacggagctaaggtaagaaactccaccaagtaatattgcatctaatttttgagcctcatgcttctagcatgatgctgtgaacttggtcttttcttcaatacctactcaatcaaataaacttgagtagataattaattaaattttttttaattataattaatgtcaactgtgtctcctttaataattaatcactgattccatattggatttttttaacaggcaagcggcggttaactactctaaagaaacaaaat

SEQ ID NO: 60251 - DNA, 540 bp, Populus trichocarpa
  Intron number 1 from transcript POPTR_0008s12560.1 (locus POPTR_0008s12560) derived from phytozome v7.0 (chr-ID scaf fold_8; pos 8136632 to 8137171)
acggttctgattttcgccactggatctggtatcaggtgcgatttctttctctccttttgttttcgatgctctcttgatgagaaatgaatctgtgaattttgctcatttctgccaaaaaattattgtacacaaaatcttagaatggaacattagtgctattcagtttcatgagcttttgccttccataggataatttctaacatcagatgatgcaatttgataattaatatattgcatttcgatatattaacacaagcatcatttgccatcaaaagaagaagttacactttcttagccaaatcctggcttgtagtaaacctgaagtagaagtagagtgtgccatttagccagtactagatgtttcttgttttggcatttagcaaccttgcttcattgccattgatttcttttgccattgatttcttcaacatctgaactctaagtattcttaatatatgcttttactttgtcaatttctgtactattttcgttcttttctctcctgcagtccaattcgatctcttattgagtcaggtttta

SEQ ID NO: 60252 - DNA, 562 bp, Populus trichocarpa
  Intron number 3 from transcript POPTR_0016s08420.1 (locus POPTR_0016s08420) derived from phytozome v7.0 (chr-ID scaf fold_16; pos 6231468 to 6232029)
cctgggtttttggtgtgtcaatcaacttcgagcgatactcaaacagcgatgacaaaaacttcggtagctttaaaaataatcggaacaaaacgcatggaatacatctagaatatctttgtcggcaagctggaaatacggaataacttgagattacgtaggaaataaaatttgttccactttatttcaattttgaattggtataagatatactagctattccagcatgaacaaaacaaaactgacaatcttgcttcatgaaaactaaaaaataaaatattaatctaaaagaagcgcaagttgattttctcacagaaaatccataaaaaaatttatgtaccatcttattagctactctttggattcatcttaaaaaagaaaccaacacaaagagaagatagagaaaatacaactcatgagcttgagatcaagaaatttgttttccttgttgttttaagtttgaatcatgtggttactaatataatagccactggaggcttacatagtcgttaacttcatgacccatgagattagttgaggtacgcgcaagcttacccggacaccc

SEQ ID NO: 60253 - DNA, 861 bp, Populus trichocarpa
  Intron number 3 from transcript POPTR_0016s15100.1 (locus POPTR_0016s15100) derived from phytozome v7.0 (chr-ID scaf fold_16; pos 14132814 to 14133674 reverse strand)
ccaaggtgaatatgcaacatatgcaatactttcaggatcactctgtgtgaatctattgattatttagcaaaacatttgattctacaacaagtttaggggttttaatttagctaaaaaaaatttccttgggagaaactgcctgctagagattattaagtaaattagattccatttcatgacatgtatctcaattttgttccatattattattcatgggcagccaaaatcaacaagtttgatcaccatgctggtgatttagatttaggcccggctaatttgcctcagaatatattttgatttcttcatatttatgacagttattgtggcacactgtcttcaaaatattgggtgcattgcttcatcagtcttttctgttcatgttatactgtatcattacctatttcttctttaaggttaatgctttctttggaaaatcaaattgcgtgcaaggattaactttaggttagttttagggctatcatgagttttttgaacttattttaattgatggaagtttggttgctcttctatttctcttacttttttggggtttccgttgtccaaagctttagttctttgtttatgtttgggttttgggtttgtttgttgtcttcaaccttggggtagtgagcactttggatgagatctgttgattttatgttgaaaaccccttttccatgtgaagaatgttagtcttcgaaatgactatgtgcttccctcctaattgtgatcctggctcattacgtttgcagttccaatccttatatctattcacatggtttaagaggactttctattgtgaatgttatgagctggatgctagtattcacaatctctgaatttggcttctttcctgcaggc

SEQ ID NO: 60254 - DNA, 556 bp, Populus trichocarpa
  Intron number 1 from transcript POPTR_0008s16060.1 (locus POPTR_0008s16060) derived from phytozome v7.0 (chr-ID scaf fold_8; pos 10715921 to 10716476)
cccagactgaatcaaactccttcttcacctaagaggtcattacttctccaacttcattatctgtacgcgcacgttcttttgagttgatgtatgtagcattttaaacttattttctggagtcaagtacaacattgacaataacaagaagtggacttcattaattgagatagttaagacagtgtgtgaaccttttatgctgaatgttgctcacataaagatttttccaggaaaatatgttgaagaattattttcctacatggtcgagaattgttcggctttgtgttgatttcttggatgcaaaatactctgtaagataggagtttcttgaagaattttttatagtatcagcccgatagaggtcttctttgttccctgctgctcttgttaaacaaaaattttccggtctgagcatttaagatggctacactcaataaattttttttttaacagaaaagatggaaaagtgtgttaaattcatgtggtgttggtactttgttttataggatgacatcaacaacttcacactgacagtgtatttttacaggaaatcgtttcc

SEQ ID NO: 60255 - DNA, 416 bp, Populus trichocarpa
  Intron number 3 from transcript POPTR_0016s04130.1 (locus POPTR_0016s04130) derived from phytozome v7.0 (chr-ID scaf fold_16; pos 2345053 to 2345468)
tatcttaaggtaacaatattataattcttgcaatgttttggagatgctcaagtatttatgtagccaagggcctgcaaactagctctatgtctcttctgtgtacaagttaattcaaaagtattatgactgcccttttccatttgctgttggatcaataacgatgtataattcaacttctttaatgatgttatctttgacatgaaactgatcgatacatttgtgtcctttaccgtcaacttatttcctgttagtaagaacaaagatggttcttagaggttttactatgcctcatcagattgaaacattagttcctattggtttttttcttttccaaaatgaaatttcctgaaattggatggttgaatggatttttctctgcagatactagacttggaagagcgtgtggctgggctcaa

SEQ ID NO: 60256 - DNA, 463 bp, Populus trichocarpa
  Intron number 4 from transcript POPTR_0016s04130.1 (locus POPTR_0016s04130) derived from phytozome v7.0 (chr-ID scaf fold_16; pos 2345480 to 2345942)
ttgctggaactaaagggaaggtaatacccattttaatatttttgcttaacaaatcaaccaggttcagaccacaatccactcctcgaaatttgacttaaccttacatcaagcattgtgataaaatgctaatggctgctactatattgaaaacaattatgttttctgaaaggtgagagctactttagaatagctcactaatttgagttgtgtataattgtgagggttaaaagtaggctaggttgtatgactttagtttgaggatgtcctgcatgacattaatatatatatatattatatatatcccttctttgattcaatattacattcgagaatcatattaaaacctgtgataatatcaatattacattcgagaatcatattaaaacctgtgataatattttatcacactcttctttaactcagtttcatgttcctttgatggatccacactccagggttcaac

SEQ ID NO: 60257 - DNA, 909 bp, Populus trichocarpa
  Intron number 2 from transcript POPTR_0008s13580.1 (locus POPTR_0008s13580) derived from phytozome v7.0 (chr-ID scaf fold_8; pos 8935813 to 8936721 reverse strand)
tgctctagcaaggtaatctctttttatcatttcatgagcaaataatggacatattcatactcaaaagcagcacatataattatagatagaacgggcaggtaaaccttaagccctcaattcatctgtcaaaatgaatagaaatgccaataattcatcttcagtttagtgtcgagttgcaatccttagaaaaaaaataatagtatgaatacacactacgatccaatattcagttcaaagatgaacctttgcttgcttgattcgtatttgtcaactttagcttggaaagagaacgccggctctgttttattttttttttatttttcctgctccaatgttaaagttgaattcgtcgaacaagatagaaagactattttccttgtcatttaattcatttatttgtcatttcttttgatgaattattctgggccacatccctaaatctacccgtatgtaccctatgttttgttaattatttaatttggtcaattagactttcccctttttaaattttttttttcttagatcaccctttgctatttaatttctttttgctggatagttttagcatacaattcccttttgatttaaccgatatcaacattttgttggcataaatattctatattgcacattatagttctgagtcatcaaaactctttaaacttcacagagacgtgtgacaatctaggttcatgagagctgaagaaacatgtatgtaacctaacactagaaaaataagctaattatgacatgatgagcgcatttcctggtcattttccaagtctttgttgaactaaaaaacctggtttagttcaatgtacccgttcaacctccgagccaaatttgaatccgtcaagattttgatgtttgacaggttcattgaaaagtacggtacccatattattgtgg

SEQ ID NO: 60258 - DNA, 568 bp, Populus trichocarpa
  Intron number 1 from transcript POPTR_0016s03580.1 (locus POPTR_0016s03580) derived from phytozome v7.0 (chr-ID scaf fold_16; pos 1929046 to 1929613 reverse strand)
attctggttttcggtggagctaccttgtataacaggtacatggcttctctgttttctcattttgtctagtacttaaatttattatttctgtttgattgctgagaaaatgaaatgaaaagaaaagaaaacgaaatatttaatgcttatatcttatttatttattatttacacgagattttgtggaaattggaaaatgggaaccaatatacacagccttagaaagcattcctgctttagggggaccaaaaaaatccatgcttgatgggcctattttgattcttacaacctttaattgatcaaaattttctgtctttttttgtattactgaaatgggtttattttaaagaactgaaatttagaacagaacagtagcgaaagaacaagctttgaggtggatttgtgtttgcttatgattttagcttgatctgctagggagtagggaatggttttgacgagggagattttcccggctattattgagctcatttaaatttaatttagttattaatttttaacatgtcagcaataactcatgtttgcagataaagaatcttgactggaaggaaag

SEQ ID NO: 60259 - DNA, 627 bp, Populus trichocarpa
  Intron number 1 from transcript POPTR_0002s00850.1 (locus POPTR_0002s00850) derived from phytozome v7.0 (chr-ID scaf fold_2; pos 394857 to 395483)
atttgcggattctgaggctgaatttcggtgtcagggtattcagagttcttttggtggggtgtctctgaatgcaaatgaggacacggatgtgatcgagtggcaattgccctgtcaaatgaagagagttgccttctgaattcgtaaccacagcatgtttgaatttgatatactagcaattactcatataggaggtggagccacctttcttccagttctagataacaaacctcctttcggacatgttcctagatagccggctcttcccaatagtggaggcatacctatgcttgcgtcaccctcttccgaggccaaaatccctgggatattggctcctttcattggaaacagtgctacagtgaatgctataagcccatctgctgaaatgatagcaaaacagctgtgttgtcgattatggggttcatcttttacaaatatttagcatccagaaaacagggcaagttgaataaacctattgaggaacttcaaacccaatctgggatgccaaaaaagaagaaaaatcagaggtcaggaaacaacaagaataattcaataatgagaaaatgcagaaatatgtgtctcttcagtataaggtcggttaaacgaatggaattttgcctgttgaaggaa

SEQ ID NO: 60260 - DNA, 694 bp, Populus trichocarpa
  Intron number 2 from transcript POPTR_0016s06270.1 (locus POPTR_0016s06270) derived from phytozome v7.0 (chr-ID scaf fold_16; pos 4215153 to 4215846 reverse strand)
ttggtatgttttgcatctacttcattgctgcttgattgtatttttttttatgaaagtacacaataataatgatacaattgaggaattttaatgcctgctgtatttgcgaaatattgtttgttttcgtttttaattaaaaagatttctctattgaaggttgaaagcttgtaaggccactaggtgaatgttaggccattagtttgatcgttgcgcgacggaatcttttcatggctgtttgagtgatttctatggagttttgatgctaaaaacttacacctagaaagcaactgcatagctcataaccattctatattgtgtactctagttcctgataatacaacagggacaatccaaatgaaaaaattctacttagactcaccaaaaaaaataaaatgtatggggatgtattgtgcctgctattatccttttcatatcgagctccttatatggtctaggatttgcttaatgttctgcaaagggacagcaaaagacattcttggtaagaaatggatgtaaaaccgctccttatccagttgtttccccataaatggatgttattgtttcttctctttgtttctttcgttctttctttctttttaatgattttggtctcttgatatgcaaagctgcaggctgattgatgttcttgtttactgtagatttcaagaaagaactgaggtcacttaatagagaa

SEQ ID NO: 60261 - DNA, 660 bp, Populus trichocarpa
  Intron number 1 from transcript POPTR_0002s17460.1 (locus POPTR_0002s17460) derived from phytozome v7.0 (chr-ID scaf fold_2; pos 13220499 to 13221158 reverse strand)
cgagggccattggaggtctttgcctaaaaaatctggtaattagacaccactatgtaattagtggaaagtgattgtacatgtttctctcttcttctttcattttcctttgctttcgatatttgctcgagcacttgaaaatgttgctgttccagaacagagataaaattgtggactttggagagagctttcttgacgagtttctttgcttcttcttcttttcccttgacaaaatttccagaaatattcaaatctagtctaatcattcgatcgtttccttggctttcccctctcttttcaaacaaattatcaggtttgagctctgaataacaactatgaaaaggaaagaaatgacttgcattgtcgtgtatttggtggtgtgtagcttcaacctgccataaaactgaaaacacactgctagtcttaaattaacttttaaaaagtgttcaattctcgtcttgactctctattaatcaagctatagaccattatatttgtgatcatgatgtctcgtcatgtgctgcaccttttttctctctctctcttcgtgcatatattttctcgagtacatactacttataacaagaagaaattaaaacgagactaatcatctgacctttctctcacccttgtatttccaaaactaaatgaaggtctcctcag

SEQ ID NO: 60262 - DNA, 374 bp, Populus trichocarpa
  Intron number 1 from transcript POPTR_0016s03780.1 (locus POPTR_0016s03780) derived from phytozome v7.0 (chr-ID scaf fold_16; pos 2123775 to 2124148)
ttggctgatccttttccttaaaaaaaataggtaactctctctcttttcccaaatttattgccttatcttctgtgtatctgcaaacattttctcttatctaattcaatctggaaattgctgcttctttattgatcttcccaaatatccttctttttctttattggattcagtttgattccttggccccaattattgaatcaatctgatgtcttctggtgcttgttaaattctaccacagctgcttaactgctggaatttacaatatcaaaataaattggtgtttttttttttaatttagtcttgaaaggcatatgtttttcttataatcaagtttcttctttagttcccagcttctgctgataaatagcagttcg

SEQ ID NO: 60263 - DNA, 435 bp, Populus trichocarpa
  Intron number 3 from transcript POPTR_0008s16240.1 (locus POPTR_0008s16240) derived from phytozome v7.0 (chr-ID scaf fold_8; pos 10868779 to 10869213 reverse strand)
taggacctgggaaaccaaatttccaagtttgtcaggtgcttgatttgatcttctcaacttagtttagttcctacctttctaaaatacacatccacataatagttttaaagaacttctgtagccgttgcaactggagtcctaaaagcactggattattagaaattacttcgttgtactgttctgcatattttgtttaaataaataacctaaacttgatgtgagagacaaaaagattctacacggtccctaattgaattgcagcaggagaatcaaacattttattcaaattctcttcagagctgttcatcaatctgcttccttgttattttatcaatatatttgttctttttaggtgcctgaagaaactggttgttcatgcttcgatattctcattcctaacaggacactgattttttcatttttcaatttaaatag

SEQ ID NO: 60264 - DNA, 835 bp, Populus trichocarpa
  Intron number 1 from transcript POPTR_0008s04270.1 (locus POPTR_0008s04270) derived from phytozome v7.0 (chr-ID scaf fold_8; pos 2389745 to 2390579 reverse strand)
cctcttgccgctagggtttttgcatcttacttcaggttcgccacccccctctcctttatcttgtttcagtcatgccttttgtctgattcgattctctctgacacctcatcaccactgatgttcagttgatttgtgttgatatttagttcttgattgctttgtttagcatttttaactttaatatgtggttttgatctgtgttatcggctatcaatctgttttatcttgattgctagtgccttttatttgccttgaagatttatatacgaagatctattagattacaattcatttatgtggttttagcattttgtcactgtttgttgggtagatctaattagatgtgaatttgtaggattgtgaaatgctcagccgttattttctcagctttttacctgttgtatgcttttctttgttgattttttgtattaaaagaacttttaaatcaattttttattttctgaagatgttgatttgattttttcaagataaatattgctataaactgtcacttggatcaactgatgtgaaggtcatcagaagctacttaatttattcttatccaaaattatgcgttttagctgtccaatttatcaaatataattaactagcgttttcaatttgtgctgttgatattttttaaattttatgctgtaatcttccttttgggtttgacttgttgtccaattggtaagcttgtgctcttagatttttctattgatacttcctcttgaagtgacattaatgtcaaatataattttgctttccgtgtgtgattttggtctcacgctatgattttgctttctgagtttcagttaagcgctgagatttcatt

SEQ ID NO: 60265 - DNA, 736 bp, Populus trichocarpa
  Intron number 2 from transcript POPTR_0016s04200.1 (locus POPTR_0016s04200) derived from phytozome v7.0 (chr-ID scaf fold_16; pos 2403369 to 2404104)
ccattaaaatacaaagcgctttccgtgcatatcttgtgagctctctgaaatccgagttctattttgcgacataactctttaattagtttttcatcttggtttttgtgggttatgctatatcttgttaaaacttcttgagttcgtataagttgttgttgacactgcattcaagatagactgctatttctctaaccgtcgaatttaatcccctttaatttgtacttcacgtgagatcaattttatgatttgtgcatgcaagatggatgagattttgatcgagtagatgagaaaattccagtcgcggtttaaactctaaagttgtcccatgaggaaataatcttccgcaagtatattacaatgttgcgcagagaatgatttcatcatttgaaaacttctaagtgtaacaaggaaaaattcatattatacctctcgtagttcactcattacattaataaacattaaacagcactttcagcagcgtattctgagaactttgctactattttggtctgaacttctgtaaagaaagatgctatattttttttcttatgaatcaaatttaagctcaaaaagttttggcagagtgtggattaagcaagttgtgtaacctgattataaaaccagaaatttgtcaaattattggctctgctaaaaaaacatgcctcactgcctgatttgggttttcaatgggattgaaacaggcaagaaaagccttacgagcactgaagggattggt

SEQ ID NO: 60266 - DNA, 816 bp, Populus trichocarpa
  Intron number 3 from transcript POPTR_0008s07190.1 (locus POPTR_0008s07190) derived from phytozome v7.0 (chr-ID scaf fold_8; pos 4374520 to 4375335)
taccgtttaggggttcagaagtaagttaactacatttcaaaatatatctcaatatttgaatggaagaggacctttgatgtttagttctactgcacattatcattaaatgcttacaacacatctgaatgagtggtacatggattttgtaacgcaaccctttggaagcatgaggccaattagcagtttagtgacttcccagttctgcatctagacagtgggcatgtttgtttttctcggcaatgtagtttttaggtgggactactcttacctgttggctaaaggttgagaatgtcaaggtttctgagaaaatagtggattacgagcttagatgaaagcctcttttgaagcagctggcttgattgagcagtcacgtatattttttttttatctaaatggactacaaaatgcagtcattttactgagtatttgcattttgttcatgtgattggcttcacctcttggttcctgagggaatgctagaagctatattttgttttttttgttctccccttcctgtcaatataagctaaacctcactctgaactcatgtgagaatgaaaaccttattcattatttgaccatctacctctaccatgcaaagaacatattatggctgctaattactagctttattgcatcacaaaaagaatagcaacttgccaaatacatcatttactaaaatagtaacttttgtatttcattatgttacatagccctttgatgttttgggtggtatatgattttttctcttgaaaatagaactaagcaatatcctccatctgaaacaacttctgaacagcctcgccgagcctgttg

SEQ ID NO: 60267 - DNA, 953 bp, Populus trichocarpa
  Intron number 1 from transcript POPTR_0002s02710.1 (locus POPTR_0002s02710) derived from phytozome v7.0 (chr-ID scaf fold_2; pos 1625436 to 1626388 reverse strand)
gaaaaggtactttgtatagcgacagtcagagtgcaatcttccttgccaagaatccagcatttcactccaagacgaagcatattcagatcaaatatcacttcatccgacaactgctggatgacgagcaactaatgctagaaaaggtctgtggaagcaagaatccagctgacatgttaaccaaaggagttacacttgataaactgaagttgtgtaaaacttcagttggtcttcaaggataaatgatgatttcattgtttgtctccaagtgggagattgttagttagtggagacaaacaatgtcccaccatatgcaagtgggaatacctaatctcccacttggcacatggtggaggacacaaagtggaggcaacggtgggcatcaatcatgccccttcaatcatcaattgtatatgtatagctgtgtgtgtatgaagaacacagagagagcagcgtgagaaacacagagagaagagagaacagagaagaatagagagagcttgagagagtagagttgagttgagagagttttatctcctcctcctttgtttgtattgtttgtaagcttcattaatacaaaccagtagctccgtggagtaggcaagttgccgaaccacgtaaattgtgtgtgattgagttctggaaatagcccaacagggagtagaaggtagtggcttgtatcgaaaccttttttctcttcaattctacttttacctttgccaaaattttcctctgccttccttgatttagaagtcttaaaatgaaagcatacgagagcaagtctcttcgcaaaggagttttcctttagataaacaaaataatcttcatcttttttcctatttttcaaaaacttaaacatttttaagaatgacttctaaaaaagaaaaaaaatgcgtctcataaatgaaattccagtttcagacctgaaactggaatctttagtcgaggatcttcga

SEQ ID NO: 60268 - DNA, 765 bp, Populus trichocarpa
  Intron number 1 from transcript POPTR_0008s18950.1 (locus POPTR_0008s18950) derived from phytozome v7.0 (chr-ID scaf fold_8; pos 12934185 to 12934949)
gccgtttgatcctcgatttcatcggtatgtagatcctacgacgcatctacagtattttctatttttatttttgtcgtgttgcctgtgcagcaacgatgaaatattgaaaccaagtcaaacctaatttttatacgcgtcggtttcgaaaaggatgccggggaaatgatatttctgttctctctttttttttccattttgttttggtgtaaatataaaatatatattattatattaattcaactttattgtaaaaggaataaattgtcaattaattgtaatagttttgcaaaatgaattaaacattctatcgtagttttaaaaataaataattaattaattttcatattttctaaatttatctgtgatttaatcttcttcctctattttatattttttagttcatttattatttttttaaaaatataaaaatattgatgagagagaagactttttttataataaaaaatattacggacatctgatattcttgtctaaacaagaatctgacgtgattcaggccgagaaacccgggcaaccactccctatgtgccgatcgctagcacattcagggccccggcgcccagcctgattagcagtaatcaaagaattaaatcaattttaaaactagagtgattatttaatttattttaaaaaaactaatttatagtttattctaataaaaagagagggaaaaaaaagcattctcaaatttgaaaacttgaatttgtagcggaaagcttgggtgtgccacatctgagtgcatat

SEQ ID NO: 60269 - DNA, 1014 bp, Populus trichocarpa
  Intron number 2 from transcript POPTR_0016s11745.1 (locus POPTR_0016s11745) derived from phytozome v7.0 (chr-ID scaf fold_16; pos 10928997 to 10930010 reverse strand)
tgaagcaagaacttgttccgatcaaaagagtcaaggtcataattctactatagaagaacttaccgaaaatatgttccggcgtgtgtgggagagcttaagaacattttgaagaaaataggaggaatatatatacatatatagttttaaggttttcaaattattgtccttcttaatttaagcataatataacgatctcatttttttattcatttttttacattattgggcatgcatgtccatttcatgagcatataagggtttcttttgaattatcaccccaatggatgtttgcttctttttttttgatattgcaatcctctttgagtatgtttagtattgttatagcttttgtggttgtggttcgaaaaaaattattttataaatagtatttttagttgaggttggtttgaaaaaatatatgtttggttaaaactatagttgaaattgaggttgaacaaaaactagtttaatgtgtttggttaagaatgcttttcaaattgaggttataaaataactaaaaaaacatatattaatattgatggtttttaattgtacatttaactactgctattacatcatgaaataaacaatactttatataaattattttttattgttccattaaactatttgcaattccatcatgtacgaaatccatccgataagaactacagtttccatggcttgtcgagtgtgcaacaacatcaggtaaaatatcatcaggaataaaattaggattgcgatcaaattctgcatatgctacgtcatcatgcgatctccttctaatataattatgtagtgtcattgaagaatattaaacactagtttttcaaataaaacacaatatttgagaattttttttggattttttttattttactaggtcggacctagacaccgggtatttaggtttgggccggacctggtcggtccatgaacagtggagacgctctccactgttcacatgcaacgtgagcagtggagagcaacccaaacgaaggagaaggagaaggg

SEQ ID NO: 60270 - DNA, 872 bp, Populus trichocarpa
  Intron number 2 from transcript POPTR_0016s02680.1 (locus POPTR_0016s02680) derived from phytozome v7.0 (chr-ID scaf fold_16; pos 1328806 to 1329677)
aagaaacacgcgagcctcttgaacaggtgctcttctatactgaattcatgtcatttttttcttcaagaatgagttgattgctaagcattttgaattgaatttttttaaattttttttaaaatttaatttaattttatttttatatcaattttgatccttatttttataattattatttatttttcttttctaatttttttaattaaaattttttatttatcatatttaatcttcattctcattcaactttttaatttgtaaaattaattcctcattattctaataaacttgaaataaaataaatattaataagttattttccagttttttttataacatagtcaaatatcaaaaaatatttttcaatttatattttatgacaccatgaaactctaaaaaataatttaatttttaaaaattcattttctaaaaaacaattacatacaataagaaattctagcaagctgtggtacctagagaattggattctaggttatttagatccaaaaacccttcaaattaactcattttcatttaaaaacattaaaaaaaaacttttaataagtttaaaattaaaaatcaaatcaaatataaaaaatttacttgtgattcgctacaaaatattctagccagcagaattgggttctaggttatttagacccaaaaactctaaatcatctgccttgtcagatggacagaaaagaccctctgttttggatggacacccatcatgtgtccaatcacagccttctatgtggcagatttccttccgcagattgtgcaaggggtggaataattatcatgttgccaatatcctacttccctatctcttgacaggacgtccaagaacaatctgctatacccgcacctgc

SEQ ID NO: 60271 - DNA, 463 bp, Populus trichocarpa
  Intron number 1 from transcript POPTR_0008s22080.2 (locus POPTR_0008s22080) derived from phytozome v7.0 (chr-ID scaf fold_8; pos 16459611 to 16460073)
tcaaaactgctcgggtcagtgattattattttctttttttaatttgattttttttgtttggttaccgagaaagcgtgcgagatggtaatgtaagatatggaatgtgtggttgataatatttttaattaggtttagaaattggaatgtataagatatgcattttgtgtttcggggtttaattgctggttttgttttattttttggcaattgaatcgatcaatgacagtattgtttattttttatttttttaagtacggcaatgttgttgacaattggtagaaatcgtaaaggaatgtattaattgatgagctaagtatgcggaattaggattaatttttggttagtttgtaaaaattggggaattattttgtagatcatcatatatgagaaatgaagatgatttttttattttattttgttttgttcagttattcaagctggggggtttacaatcagtttgcat

SEQ ID NO: 60272 - DNA, 576 bp, Populus trichocarpa
  Intron number 2 from transcript POPTR_0008s22290.1 (locus POPTR_0008s22290) derived from phytozome v7.0 (chr-ID scaf fold_8; pos 16686237 to 16686812)
tagacaaggccagagaagtctgcaacaataaaggggtaatcgtttgttgagcatagtgtgcttgatatgcccttttcttttcttttgtaatttatgttgtttctgcaaaagacatttgaaacgatacataagagattaacatggctcctgctgggtgatgatgtagtttatgttttgttgaagatagaggagaatcgcttgattaagatcatattctatccagtattgatttaataggtggttttatggtttgatttagatttttgaaacatatcctgaaaaactataaagtttttaaattaaaataatgaattgttcatctttagtgtccttctagagatgcagacgcggctacggtgcatgatatttgcttacaccgcattcatgtccatgttcccaagcggatccctaaactaatccgccaatcattcaaaatttacaattgttttctagcatgatttccatcaacagcatcaacattttatcatacatatgttaattaagtaccggtcttgaatttattatttcggaacaaaagaaaaaaccaaatttaagcgattaatttgcaggtgagtg

SEQ ID NO: 60273 - DNA, 452 bp, Populus trichocarpa
  Intron number 1 from transcript POPTR_0008s18640.1 (locus POPTR_0008s18640) derived from phytozome v7.0 (chr-ID scaf fold_8; pos 12588240 to 12588691)
gaataatcgcatagctggttgggttgagaagaaaggtttgctctcttaagtattacaaaatatttattttagttttatttttttagaattaatcaaataaggtgttgtttaattagtactatcattttggaagaaaatagaaagcacatttaattagtaaaaaggagtaatttgtttaattccttacattattaatataattattttgagggtgaaatgcagctttacctgtaaatgcatattcataacgaacactaagccagtgatgatggaagcaatgggcaagtagtaaattataatctttctttcaacctctttacatgaattcatcgtaccaattacatgcctcttcatcaataataattcagttactccaataatatctttttttattattattcttcacatgaagtctttatttatttattttttatttgtttatataggtggtt

SEQ ID NO: 60274 - DNA, 708 bp, Populus trichocarpa
  Intron number 1 from transcript POPTR_0008s00700.1 (locus POPTR_0008s00700) derived from phytozome v7.0 (chr-ID scaf fold_8; pos 323262 to 323969 reverse strand)
agactctttctttgcctcaggtgatcatgtttttttttcttgttttggtcataaaggtgaatgctttatttcttgagttgatagattgacaatatacgaatttatgaaagtttttgcaaggtttaaggaagtctcaggaaaaaaaagggaaaaatagttgaggttgaatgttgtgtcagagaatttgattgtcttgtttgttttttattcaggattggaaagagagaatttttttactgttgagattggaaagaaattagctttaagaaagggttgaattttctttaggatgttagggaaaagagaagaactttgctctttttcttgaggtttttgattggctgaggtgatgcttggtggtaagggagttgtggaaacagggttgaagagctgataagattattttgagcttgagaatctcacaatttcttatactactaacctggttggaatctgcaattctgtccattcaagtttcgtttccttgtttaacggtgtattttttttttttttattgtgcgcagattatagtgagttgttaggctgttagggaagtttggggggcaaaacctgtggtcagtttctccatttaatgtagagggtgtggttttttttcctttctcttcgatcagagttgtcttcgtatgcctatatgatgttttggaaccttttcttttctatgaggtagacaataactggatttatcaa

SEQ ID NO: 60275 - DNA, 1030 bp, Populus trichocarpa
  Intron number 1 from transcript POPTR_0002s21620.1 (locus POPTR_0002s21620) derived from phytozome v7.0 (chr-ID scaf fold_2; pos 18142958 to 18143987)
agaacgagcagcctctgctgcgggacgagtcacaagtaagttttttctctgagtagacgagcttggtacatcaggtaccttgctatttgattaattagatatatcttagtcattttcattagatttgcgtccaattaaacttgcaacggaaagtttgaaaagtgggattggtgaattttaaacaaacaaaagcagcgttcttttgttttagttggttctaagtatgcacgctatctgttcgatgcaatgccacagtgtgtgtgtgtgacacttctttggttaaggtgtactctgttaatttttgtactttggtttgagctttgccatgtcgtcgtggtctgtctttgtatagtatttcttctactctctgtttgtccctgtttcgttatcttggtattaactttgtagctagtttgggcccatgtgattccttttctgctaatactgtaatccattcataaactttgcacgccaacttttcgatgaatcgttggattctttctgtctatcttgaatactttgtttttctgaatcagatatttagcgagggggaaacaaatgttgggaagttactataagctgacaatttgtatattggctggaagttttatcaatttttggggttttgccctgatttttcataatggaattgagtaacagttgggacatccttaaatacctagatttgtaaatagtcttactgattcaatgtcttgatatttactgataaagtaggacaggatgtgggtatatttgtgatctctagagattttatgagagaataggtttcttcggccttcatcactcaataacagtcggttgacattgatgtgcctttttttgtgcttttcatataatataacagacaaggtattgttttcctgagtggtttgaatgcgttttctgtattttcattcctttacatggagtcttctcttctttaagtatctgtcactgtagaatttcattttatgtgcaaagtaccattgctaagatgttttttggacaattcaggtgcaaaagagaaaac

SEQ ID NO: 60276 - DNA, 378 bp, Populus trichocarpa
  Intron number 1 from transcript POPTR_0016s06190.1 (locus POPTR_0016s06190) derived from phytozome v7.0 (chr-ID scaf fold_16; pos 4141630 to 4142007)
cagtgcaagcctctctctgaacctcaggttctgctcaattctatttctatttgatttatgaaaaaaccgaatcgaattgcctaatttaacatttgattagcgtttttaattgtttttttagtagttggattcaactggattgaattgtttctctgttttttttttggtagagaaagaaaagaaaatattgtggttaaaatataaatgatctccaaaataaatactgtttgcttttactgatgcggtcgcacaacgcgggaaagatttagggttttatttatttatttatttagacgcgttcttttcttgttatttatgttaaagaatggcgcgagttaatcttttttgttgatttgtttcggtgtaggttagggcatt

SEQ ID NO: 60277 - DNA, 503 bp, Populus trichocarpa
  Intron number 2 from transcript POPTR_0008s15550.1 (locus POPTR_0008s15550) derived from phytozome v7.0 (chr-ID scaf fold_8; pos 10325500 to 10326002 reverse strand)
ttcacggtaggcattttcttttcctggtcttctgcgtgacgactacctttaatcaaacttggggtttttaatccaatggaatcaaagaatcagctttatttatactacagtttctcatcatctggttggttgctgagaaaaacagaaaaaaggaggaatatcctcgtgaacttggtgcttgatggtattgtgatcctcaaatatcaccaactttattcacctctgctaaatgctcttttccttcttgtattccaaggagtgaaagaaataaaagattgtccatatttccatcttcttttaatcctaaagtttctctgcaaccaaattgatactgtatctgctagtgacaattttaagttataatctcgttttgtttttgttatcaattcaacttctccacattcatctctggtttaccctttctttaaaaaataggatcgctttacaagtgtttttttttttcatcagggggtgaagttcagtacaggactagcttctcagag

SEQ ID NO: 60278 - DNA, 639 bp, Populus trichocarpa
  Intron number 1 from transcript POPTR_0008s19000.1 (locus POPTR_0008s19000) derived from phytozome v7.0 (chr-ID scaf fold_8; pos 12967092 to 12967730 reverse strand)
atatttgtggccaggtaatttcgaacccattttgatgtgtacaagatttcgttagacttctctcttcttctttttttactgatatccttttttttttaattctcgttatgccattatctattatgttattggaattgggatttcatggattttctttgattgatgagtttttgaggttttttattttaatctgggacttgttcgaggatttgaaaaaatcaaggatgaggttttttaagtttgagcatctggaatcagacctttgttttgtgtttaatgactaagattatggaagcaaattaagatgttgattaatttacaatttgggtcttctcaatttttgccgtctggaaactctgatcatgaaatgtctccaatttttatctggttttcaaggataacttttgtgtttaagaaggtagtaattatttaagatgcggatttaatgagtgattttcgttacattctctcttctttactggaatcaaacagggcattacgcttataggagaaaatatttatttattgattgatcagttttctactagtgattggctttgttttgtgtttcttcttgaaatcattttgactcatattgtgaactccattaatttgcaggactcagggcgaattttgagc

SEQ ID NO: 60279 - DNA, 550 bp, Populus trichocarpa
  Intron number 1 from transcript POPTR_0008s06730.2 (locus POPTR_0008s06730) derived from phytozome v7.0 (chr-ID scaf fold_8; pos 4021030 to 4021579)
ttttcctctctctgtttttgtttttttcagtcttggtatagcttcttttcttttttgcccttttgaacagttttgatataatttctgattctggttcattagttgttaattggtttttctgttctattttttgttttccagttgagttttctttatgatcaattgaagtagtgaatttttctagttgagtgtttttccttgtgggttttctgttatcgttttgctagtttgtgtcttaattcctctactgtatgcatcgtctgtgtttgcttatgggtgaagtaaacaacgcttgaaactttatggcttgtgttttgctttagtttccgagaaaatggaattaatcttaaattagcgtcaaccagaaagttttcttattaccaaagtggttatgctttgtgaaaacaagtttcttctttgtggggaaaaaagtgttagcaattctgttgtaaccccttttcttaatctgccaattaggttaattatggtttgaatagagtaaaatgtttttttaatcaaataatgttttttcttaacatcggtaatagcc

SEQ ID NO: 60280 - DNA, 666 bp, Populus trichocarpa
  Intron number 4 from transcript POPTR_0016s03560.1 (locus POPTR_0016s03560) derived from phytozome v7.0 (chr-ID scaf fold_16; pos 1913762 to 1914427 reverse strand)
ggcgtggggtatgagacttttttgttaatttagctattgccattaacttgcataatggaagtatgtattctggaaagaggatatggcatttatatttttcatctagttataaacttccaatatactttgccttgtatggatatgcattttactttcctattgttttttaggtagcgatctgcaatctattccagggcttgtgtgggtcagagagaatattagtttggagaatattattagttcatgctattgaatgtgacactgaagaatttgatgcacttgttagagtataattcaatatgtgccttttgagctgaaacctttgtgactgaagtgtgataaaccattacgttacttatttattgtcttttcattttatgtggacctaaatgacacataatcataagacaagaggtcattccaaaccattcttcttttttttcaatgcacctgcattcacttttcaaattgagttttagtgcttaccatctttttctagaagtttacttatttgtcaataacaataattttcttttgatgattgttttagaggctatggtcatttatgccagctttcattgtgcattttattgctacgataacatgcttctctgttttacttgcattgcagattcctactgacttgcatccagagacaaagaaatc

SEQ ID NO: 60281 - DNA, 815 bp, Populus trichocarpa
  Intron number 1 from transcript POPTR_0016s01480.1 (locus POPTR_0016s01480) derived from phytozome v7.0 (chr-ID scaf fold_16; pos 672462 to 673276)
ccgatgtgtttgcaatttcttctccttcttccaacccttccaagggaaacaggcatgcccattaagtttccaacttgctaaattcttttacctagagttgtagcatcacacaaatgatatatatgtgattccttttgttttccttttgcagcaagtgttgaattttttcaaaattctgatcaaattcttgggaaacaattttgaatttgtcgtgcaacctaccttccatgatggactgaatgttggcgtagcttggagactaagtatatgccactgccttctatctctctttgttggttttttgggaaaacttcattaacatccctaatattttacctctttctcaatattgtcatcctaaaccgattaattttatgaattcctcattcaaaacctattagaaattaagcaatgcttcctttccatagccaaaacacgttcagaaaacacctgggtattctagcatgggagggaaacattgtttaattcaaataagtttgggatgagaaatcgataaaattaatcagtttgggatgaaattaagaatcaaataatatgttagggacacaaatgaggttcttcttcttcttcttcctcctttttccttgataattaggagggctccaagtggagacttggggaggggacaaggtacacaaccaaccatagcaagttggctatatatgttgtcattgccatctcttcacagggaaattatcacagttttgaggagttgcaagggaagcttttcttaccatgttttttttttatgtttggttaatttattttgtaatttgtagactggagcaagacac

SEQ ID NO: 60282 - DNA, 794 bp, Populus trichocarpa
  Intron number 1 from transcript POPTR_0002s24700.1 (locus POPTR_0002s24700) derived from phytozome v7.0 (chr-ID scaf fold_2; pos 21988063 to 21988856 reverse strand)
ctgctactgttgagaccattgccaatctcttgcaggtaaaaagaaaataaaatctttaattttcattttaattttctttcgggtgtttttgtcttgtatttttattattttcatgcatacatcgttttgctgtgaattttgacggaattaattcttttctctctctttttttcctttctgttattgaattttgggttctgcattgccgtgtttgatttgaattcttgaaactcatgcaaaatttgagattttggcatttgggatttttaatttttgatagtttctcttacctgctctcgtaaagttataatttttgtttattattattattattattattattattattgtttgtttatattttagcgtttggaatgtttttgtctatccggagtctggattttgtatggttttggttttggcctggatttagcagcctattttatgtggaaatttgtaaatttattctgtgtctttcccttactctgtgagattctatgctagtctattactggtctctatggcttgtctgcacatattttttatttgctttatataatactccatgcttatggcatttgttttgctaccactaatttgaaaattggtttccagctcccgtatgttgatggatgtttgttgagtgctagttgtgaataatactaacactaacactaataataataagatgttgttattagagttgttgaggaatgaaggtttgattcaatttcaaaaaatccatatgttttgggtgtaatattgtgtgtggaatttggactgtaggaggttgg

SEQ ID NO: 60283 - DNA, 501 bp, Populus trichocarpa
  Intron number 2 from transcript POPTR_0008s08260.1 (locus POPTR_0008s08260) derived from phytozome v7.0 (chr-ID scaf fold_8; pos 5135641 to 5136141 reverse strand)
ttgaaggcctgggacttggtggctgcatcactcaggtatatatcgcacacgacctagctaggaatatgattttttcatgttttgcaattattgccttctgccagccagtagaattttatgcagattacaagggttggagatgtcgacataatgacaacatctttgtcttttcactgttctactacattaatctcctatatatggtcaactccttgtgtgatcttggttcgtcaatgtgataggtttgccatgcatacaaatgcctgacttgatagtttcaacataaaaatgattgcgtggtaaattaagtagcttttgagcatttgattaatattttaagaagaaaggattatgtaagaaaaacaatttttatttgttaattaaacatgaatcaatgttatcattgggcaaagattgttttttgttatactgtcgtttttcctcctttcaaccccgatgaattcctgtttgtattaataggcacaattcaagtctgcgtct

SEQ ID NO: 60284 - DNA, 415 bp, Populus trichocarpa
  Intron number 1 from transcript POPTR_0002s18900.1 (locus POPTR_0002s18900) derived from phytozome v7.0 (chr-ID scaf fold_2; pos 14798331 to 14798745)
ggtttttggccttgtcttgcaatttcagcacctgggtcagtttgtttccctctcttttcttttgattgtttttctatcaaagttattctattttcgtactacattgttgtcatatgttgaatttaggtttgctcctgcgttcaattttttatatttcataatttgcaagaaagaaagctttttttttttttttaattaacaattgcttagcatgctcactgtttgaacctgctgaatagtcccgtgactgcgtacaaaggatatcaattgtcaagatttgtgtatttcaaattttataatttgttacagctagctatgtcttgtttagaactggatttccattgattaatttatttattttttaattcttttctggacagattatttgttttggtcttgttgaattccggcaaag

SEQ ID NO: 60285 - DNA, 770 bp, Populus trichocarpa
  Intron number 1 from transcript POPTR_0016s00510.1 (locus POPTR_0016s00510) derived from phytozome v7.0 (chr-ID scaf fold_16; pos 163062 to 163831)
tctttctccgtgaactcatcagcaactcctctgatgtatgcctctctctctttctctgtctttttttatgtttctttttaattaacgtataaatgtacgactttggctgaattttggggctctaatgttctgtttgatgaacccttttgttgctgtgatttagtgatgttaaagatccaaactttgcaactaatgtatgtcgctcaatatgttttttttctctgaattttgggtatctgatgttttgtctgatgagcccttttgttgccatgcttagataaatgtcaatttatgaataaagctgaatttctggactctaatgttgtgtttgataaacccatttgttgctgtgatttaatgatgtcaaatatccctatatttttcactcttttttcccttaatgtttttatatgaatagagtaatcaatgcatgtagctaattgtgtttttagctgatttttagactgatgtcgtctgataaacccttttgttgttatgttttaatcacgtcaaaaatcaatatatttttttaatcgtttcgtttatccggttttgaaattttcatggtttattagtagtttggaatcggaaacaaaattatgttctttattttcttctttcattgaatgcaattttgtgttatgtggtatgattggataaaggtagagttaatgggtatgaacgtgcagatggtagcgttagcttatgctgtccttgtatctctgtgttttataggctttggataagattcgatttgatagcttgactga

SEQ ID NO: 60286 - DNA, 789 bp, Populus trichocarpa
  Intron number 1 from transcript POPTR_0008s12550.1 (locus POPTR_0008s12550) derived from phytozome v7.0 (chr-ID scaf fold_8; pos 8131030 to 8131818)
gccagcctgtgctaaacactgggtccccaattactgtaagaaaattcgttcagtttttcttatgttgtgtttgtttttcaatttcatggtatctgatgagaaatgctgggcttttgttgtctttcgattttccttttagagtgtgatgatccatgttaagatgggtttttctttttattgtagatctggggtatttgtttgctatgattattgcagcgataaaattggaataggggtttatggaaatagaaaactctggaaattgggatccgttttctttcgttcttttttttgtttggtgtgattctatttttagtgcaggaatatgggaaagttgaaaggatattttattttatgaaataaaggatatatttgattgcaaaccggaaaaaaggcttgaatctaataggttcaattgcggatttatatgttactggattttatgtaactgtttagtttttttgggtgatctctttgatgtggtgttgatgtggatcaaggttttatttgaaatatgattgctgacacttgaaggataaattttttagtgcaggctaagttcaaaactctgatgcttggctagtgtatctaccccttatgcattggtgtttcctttataatgttttattgtttattgctctggtttgttattgcggggtttgtctgtggttttcaaggaggtattatttgtgctatgtctctgttaaaagttgcatcttctaagctgatttctttactggcatacgctctataggtgcctgtgggtagggccacccttggtcgtatcat

SEQ ID NO: 60287 - DNA, 767 bp, Populus trichocarpa
  Intron number 1 from transcript POPTR_0008s16580.1 (locus POPTR_0008s16580) derived from phytozome v7.0 (chr-ID scaf fold_8; pos 11126459 to 11127225 reverse strand)
gactcgtcagcagattggcagctttatttatctattcaagagatagtgcagcagagcaggcaactaaccgaggccagtccggttgaaggttgtagtggtagagcaagaagaactttcttttcttttggtcatgttcgaggatccagaagcaatacagtcttacctgtttatttgcagtcgtaaagtcaaagtattttagattgattattttccttgtagtttttggttttcattttaaagatatagggattttaattacatgtgttaaaaggcataggatttgtgacatgaaaaagtattcaattgaaatatcaaattctaattttatttgatttttagtgccagtgcctttgcccagtgttttttgaagggctccaataacagccatgactaataagcatcattgcttaaactacctctttttttatgctcgttctgtcttttccttttttaaataattttttttttaaaattttttttaatatattttttaattaaaaacactttaaaaatcaaccataatcacaacatcaaacacctcttaaatatcagaccgtaattgacattacagcatctgagaataacaatggtaaagcatgggttgtctcaagtagagggagaactctttacaaatatttaaaagagtaaaaaaagctacaaaagtgagggagaggtgggaggtccccttgcattgaattaggagttagctagggagggtcctcttcgatcgagagaatcacagagggcatcgatcatattagttctgg

SEQ ID NO: 60288 - DNA, 629 bp, Populus trichocarpa
  Intron number 4 from transcript POPTR_0008s20540.1 (locus POPTR_0008s20540) derived from phytozome v7.0 (chr-ID scaf fold_8; pos 14309813 to 14310441)
aaaggcctgacaatcatatcaaacgcgaggtttctctcatctctttcttaatgccttcgcctttatggttgtggagttgaattattaaagaatttcttgacctcttattgatgggctgctcatgtatgtgtccctaatattcagataacattttcttaacaagatcatggagtcatttgcatagacatgcaaacatatagaacatagcctggtcaattcatttaattcacacctctaacttactgaagaatgttttattcctagttacatgcatgaggcaaaaaacatcaattgaagaacctgcaagtctcagttatctttgagcaaatttataaaattcttggaagtagctttatatattgatatcgattgctggatttggtaaaactgcattcatttagatagttcagattggtgtcatcatgaataatgtctagtcgactataaaatgtcaattattatacaaaaacaaggttgaacctttatgatccatagcctgactatattttccttgttgatactttatctcttccataagttttggagactttttttgggggacctttgacttgattcttttgtcaatttgtgtagtttgttgctatttctgcccatcctcctgaatctta

SEQ ID NO: 60289 - DNA, 816 bp, Populus trichocarpa
  Intron number 1 from transcript POPTR_0002s14800.1 (locus POPTR_0002s14800) derived from phytozome v7.0 (chr-ID scaf fold_2; pos 10974757 to 10975572)
tctaatcttcaaggtaagttaaaaagttaaacctttttttcttttaacgttgcaaattattatatatattaatggaaatatactgggaatatttgttgtgtgaaaagtttcaatcttgtagtataatcagtccattttcatttctctttttttttttcataatttaattgttttctaggttatttttatctcagcatttcaaggattgaatttacttccttggaagctaacatcttggctgctctttctctctgaaatatacagcttgcttgcattgggtttccatttttgggcatatagattttcttacattcttaattaaaatggaacaaaggtttggtattgatatctgattttgggttgtttattttttgaattcaacaacacttcaatgtcctccttgatcaataacagaaagcaaagagccaaaaaatagaagaagttccccttccatttatatgtaaatgattacttccattattatttagatggtcagaagttattgcttctttcctttctaaagattcattgctgtggcttatggcggggtcagtgtttttgaaacagtgcacccctgaacctggaatctttgctccaacaattgatatctcccgctctacagttatagcttgtagagaactttaagtttgtttcttgatttattgcttattttgctttagcacatcttatcataagctaccttatggaatttcaaggacgctactgctaccaaatgggggatcttttgcaactgagtattaattttgctctccgcgtacagttttgcagctttgctacaataagttggctgggagt

SEQ ID NO: 60290 - DNA, 604 bp, Populus trichocarpa
  Intron number 2 from transcript POPTR_0008s21080.2 (locus POPTR_0008s21080) derived from phytozome v7.0 (chr-ID scaf fold_8; pos 15200320 to 15200923)
gccttctttccttatcgttatattttgttagttttgtaatgataataatttgtcttcattgatcaccaccacctccttaatcttcacgttttttgtttggttcatcttctcaatcttcacttttgctattcacgcttaatcattggatctgaggtagtcatttggcatttcgtacttaccccttctgcattactgaaatgtttttacatgtgttttctcaatctaattgaatacagtgttttgcactttcgtaacatgaactcctatgctcttcctttgctgtgcttgatgtctaccaactatcaagtttttcttgttaaggttaattattctaataacatccaatgtttctcagagtccctcgtcagcaaggaattcatcccgcggcatattttgcagtcgtactttaaatcttaggtcaattagtgccattggatatgacatggactacactttgatacattacaatgtgaaggtgaacatgactccttattctcttaacatctatccgtgattacttatcaatgaaatctaactcttatcaattcaatttgtttagttagactcttcattttatatggatttgatcatttaagatctagtt

SEQ ID NO: 60291 - DNA, 933 bp, Populus trichocarpa
  Intron number 1 from transcript POPTR_0008s05620.1 (locus POPTR_0008s05620) derived from phytozome v7.0 (chr-ID scaf fold_8; pos 3261309 to 3262241 reverse strand)
tctctgatcttcaccatctcgccgacaagatttcggtaatttttattctcacgtttttccaatgttctgccttctctcattaaaattccctagaattattcaacaacaacaacaaaaaataattctctagaactcatcgaggtttagtaccgaaagagaaactgagctgaattcataaagaatcgaattgaattctgttaagattttttttttcttttgcttacatgaaatgttttttttttagttttccttttccttttcttttttttgttaattttgtttggtaatattaagaggaagagagaagacatataaaattatgataatattattggttttgattttctgtaaaaatggatgaattaatttaagtaattttatggtataatttctcactaaaattgaattgatttctgtaaatcgtggaggaagagaaaatttagatttgacaattgcggttatttgcctctcttctcggattgttgcgaacttctagttttgtgttataatttctatgattgcttgtcaagttaatcaaattgttttctttgtaccgaaaaaagaaaatgttagaaatctcagatacttcccgggagatcgtaaaaactgaagtgcatataaagactagctcagcttatattgtctgtctgaatctcatctggtatactgtcgtggttgtattctggtgtctgcagttttgtttaaatggcagttcttgtgtggtttcaatatgttttgctgacgtaggttcaaatgacgacttccttgcgcatcttggagttgtctttaatattgcaatgagcagtctatctatcgatctgtgttgatacattttaactcttgtcactgtttaggcttgcactatttgatcatataaaattttgctgattattgtgctactattgcagttttacaagcgcacagtagctcaat

SEQ ID NO: 60292 - DNA, 690 bp, Populus trichocarpa
  Intron number 1 from transcript POPTR_0008s23010.1 (locus POPTR_0008s23010) derived from phytozome v7.0 (chr-ID scaf fold_8; pos 18205323 to 18206012 reverse strand)
ctactcctgccgttcctgctcagtttctgcctaaggtaattgattaaaaaattggttattttttgggtttttgttgatttctgttttttgttttttaataaagtttagatttttatggcttttgtatagtgggtttttgatcttgtggcttaatttttgtctgtattgattagaggtcttaaactgtgaaggacatgattaattacttgattagattagggttttgagttagttaattgtatagggcaatgaattaggttaattaatcaagcaaataattgttgacaatgtttaattttgaacgtaatcgtctgtaattaattagggtgttgattttaaatgacaccaattggacaattaattagcttttttcagattgatttactttgttgtttgttgatgacatgtttcgttttaaaggggttagtattgattagaggtcttaaattctaaaggtttagggtttggaattcagttaattattctagaaacgacttgttagaattgttaaacttttattccaacttatcctatattacagcttcgattctaaacgggtctatgggaaaactgatttgattgtaattgagtttgctttagattgaagatgagttgaacgttttatgttttaatggcatgtatgttcttttaatggtggcatttgtgggtcatatagacaagcgttggggg

SEQ ID NO: 60293 - DNA, 815 bp, Populus trichocarpa
  Intron number 1 from transcript POPTR_0016s05490.1 (locus POPTR_0016s05490) derived from phytozome v7.0 (chr-ID scaf fold_16; pos 3414308 to 3415122)
ctgctgttacgaagaccattgtggaggttgttcaggtaagaaacactcttgtgggtttttttttttaaaaaaaattcagagtcgaatctattccatgtgttgattgtaaacgcttgtacgtgaattttgcttttggatcttgaaatggtgcttggtgctatttgagtgctgaggaaatatggttttatacttggtgtatggaagcctaggacccataggttgttggtaaaaagttaatctcctgggagtgattggtgcatactgtctggtagaattatgggatagtttgtcttgatgagtagatgcggcagatattgattctggtgatctgaaaattttattttttaccgtgtggattctctctgttgatttcctccttttgccctggcttcttgtgcttactgctgcttactttgagtaagctcgagggttcatcatatcttgattcctcccctgacacacttgtcattagcttcgtgagtaactgtgtagttagtacctaaatgtttgattacctcttggttttatcagtttcctcttttcttaatttgatttctcaccactgtttcgaaactcttttgctaacaatgaagatttgactgtaaaataattcatttgcttaaaaatgttaattcatttgactgtattaacttctgtgttgtccaaaatcaatggaaaggcttgtagggatttccttcctttttatcatacagcatgctattcctaaaacgacactattcctcccatcttgcacacattatattcaattagcggagtcctaatgcttctgagatatgttttgtcatgttgcagat

SEQ ID NO: 60294 - DNA, 543 bp, Populus trichocarpa
  Intron number 1 from transcript POPTR_0672s00200.1 (locus POPTR_0672s00200) derived from phytozome v7.0 (chr-ID scaf fold_672; pos 1528 to 2070)
ctagaaaaggtctgtggaagcaagaatccagctgacatgttaaccaaaggagttacacttgataaactgaagttgtgtaaaacttcagttggtcttcaaggataaatgatgatttcattgtttgtctccaagtgggagattgttagctatttggagacaagcaatgtcccacctccactatgtgcttagtgggaatacctaatctccacttagcacaagtggaggcaaacggtgggcataaatcatggcatgatttatgcccttcactcctagcttaatatatatgtatgctcagtgaagagctggagagttgaagcgtggagaacacagagaagagtgaaaacacagagagaaaaacgtgagagagagagagcttgagttgagtagattttctcctccttcttgttttgttgtttgtattgtttctaagcttgattaatacaaaccagtagctccgtggagtaggcaagttgccgaaccacgtaaattgatgtgtgtttgagttctggaattacccaacagaatcttgtcaacctggaaata

SEQ ID NO: 60295 - DNA, 429 bp, Populus trichocarpa
  Intron number 1 from transcript POPTR_0008s12960.1 (locus POPTR_0008s12960) derived from phytozome v7.0 (chr-ID scaf fold_8; pos 8452506 to 8452934)
cggtgtgttttatctatctttcttcatattatgtcatttggaaagttgagagcttgcaatatgtaatgtttgacattgcatggattgtgaatcagaatcaaagtgtgatttagctacatatataatttaatgctatttagttaaacggggcagcttgatattgctgcctccaatctctggtttctatagctatgtccttaaaattgtctagaactggctgctaagaatttcattattatagttctaaatgttttccttcgttttctgcttggccctggcttgttgttgtggatttatctagggtataatgtctgcatcaccttttatccttgcgatttattttttacttgcgtgttaattactctgtgttgatatgaaactgaattcattgcagctatcaactgtgtggaaaaactcgtataaaagtgg

SEQ ID NO: 60296 - DNA, 937 bp, Populus trichocarpa
  Intron number 1 from transcript POPTR_0016s02790.1 (locus POPTR_0016s02790) derived from phytozome v7.0 (chr-ID scaf fold_16; pos 1381892 to 1382828)
ttacttataatgtaagtgataaacttttgatttgtgggtttttgaatttggggtgttcataatttgtaacttggtgatttgactagctagggtttggtaatttggggttaagggtttttttggtttgctagggtgggaaagattgtgtttgtgatgtaaggttcaatttttgaaattagggttttttggggcatgtcgattggtaaattggtgattgattgaattggtttttttttaaatttgggtttgtaaatttggtttaagagtttcaatatttacctaagttgatattcttgaataaatttggtttaggaattttcttttggttgggatttgggttttttaagttactaatttggtgtttgagtagctaggggttctttaattagggttatgaaaaattggggttttgtatattggttctgttttttgaattagagtttgctgtatacccaaattgctgattgattaactaggggtttgaattttacaatttctaaaaatagtctcatttagggtttattttgtagttttttgcttggttcggtacccttgtggataaattgttttcacgcgaacactgctgttgctaaatatatgggttttctgaaaagaagtcagattttgttctttgtgagtttttgtagttggagcctgattattgttttttctcttaggccgtaattttgttttaatgggggcttctttaagtttttttatttttaattgttggtttgagattttttttaactactggaatctagagaactgtgtatgttttgatttctagttcttgcactaatgatcaagtgacatagggccacaagctgcaatattcattactttgtgtcatttagtttctcatttgagttcaagaatctaatctcaactgacacatgtttcctattcttctatgatattgccaggacattggagg

SEQ ID NO: 60297 - DNA, 569 bp, Populus trichocarpa
  Intron number 4 from transcript POPTR_0002s07550.2 (locus POPTR_0002s07550) derived from phytozome v7.0 (chr-ID scaf fold_2; pos 5154377 to 5154945 reverse strand)
acagtactcttgttaaggtaatcttttttattgttattgcatggccatcaagatcagtgatacttgagttagagccaagtcctactggacccttctagagtgttggtcacataatacaactgattgaagtttgcatactagttcgagcttcaggcgttgtagcagactagcaccaatcattgatagaaatgaaaacaggccctataatgtatgggtggctaaagccacaccataggctattggcagtcattttgatgtatgaatgacccgagccagccaaattgctgaatatcagactttcagaacgtatctcttcctttctagtactttactgcacgaggggcctctactgaaatgatttttgttcttaaattttcctccatccaattacactgcagaattgggagaatacagagacaggatcttatctttaaccagattccttacacgtgtgctctaatttattaattggaaagcaaattattatgcttgctatgaatttgttttttagataatgtcacggcaatgacaaactaaaattcatgaatgtgatgtattaggttgacagc

SEQ ID NO: 60298 - DNA, 278 bp, Populus trichocarpa
  Intron number 2 from transcript POPTR_0008s17600.1 (locus POPTR_0008s17600) derived from phytozome v7.0 (chr-ID scaf fold_8; pos 11846750 to 11847027)
ctttcaaggttcattttattgtcttgcttttcttttctcttctttttaaatttttttttttagctgcataaaaagataaggaaataaaattgtttcttaggtgtagaattctgtggtgttttgttttcttgaatttgagttgataatttacatgatttttcttgctgtttcaaaatggtttgattaatgaattggggttttggagctgacatggctgttgtgtcggtcatttttgtttgacagtatttgttgttaagtgtaactgacccgcagcatag

SEQ ID NO: 60299 - DNA, 884 bp, Populus trichocarpa
  Intron number 1 from transcript POPTR_0008s03660.1 (locus POPTR_0008s03660) derived from phytozome v7.0 (chr-ID scaf fold_8; pos 1991052 to 1991935 reverse strand)
gttcttttcgtctattttttactatagagagagaggtgagtggcttttttttctccttttgttgtttatcttgcaaaatgggtattaaattttgatgctttagcagactttctttaacatctttgcttgcgtttgtttcttgatgggcttgcttatctagttgcactgtttaagaaaaaaaatatttctttaaagaagaataaggagcttattgtcatgtgagagaatgggtaaatgaaatgaaggctgccttacatggatgaattgggttctggagcttctgttcttggttggtgactatttcaccctcagtggtgtatcgtctccaagctttgcgttggttcatggttgtttgaataaagataggatgcttctggttatggatgagatttcaaagacaatgctcccgggaatcaggagcatatgatcttggttggtgaattctgatggcttaggctctttatgaaaggaaaatggcaacaacttggcttaggctctttatgttatgggattgtgattaagaagagagaaagttattgcctttagaaaataacaatagggttcatgttttaagttaattaccttttattaaagtgctttgtgaggaaaatttggcctctttttggcttggttgatttgattagcatgcaagttttggataatttatttagttttgcaattgaataaattgcctgacttcataggttaaggttttgcttgtttgaataccattggtaattttatgggtatttggatgtgtttcgagtttgtaaacatgtttggtttctgtacttttgttttctcgtatccttaattatgatgtcgttgttgtaatgctaacacaattgtgggtatgcaactaggcagttggtcctttaggaact

SEQ ID NO: 60300 - DNA, 970 bp, Populus trichocarpa
  Intron number 1 from transcript POPTR_0002s24310.1 (locus POPTR_0002s24310) derived from phytozome v7.0 (chr-ID scaf fold_2; pos 21704904 to 21705873 reverse strand)
aagagacttttccttaaaatcttacctttcatcaggtaatcctttggtcccttctctcctctctcgtcttcatttttctttgatttattttgtttcttaatttaagacttgaatcttaggtttaattgtacgtagatgcgtttctctccgttgtctttggctctttgatttttatttttaattatctaattttttcttgtagatctgtgtaattttgaagtgctgctgtttaatcttttgttctaaatgacgatacgattttctgtgtttttgttttcaatttttatttcattaatgaaatgaattaagggttaaacttttatttttcttcttgtaaactctagaatgtagcatgtgggaactgggaagtcctcgtgcactcgtgttcgagaaattattaggtatactgggagtttaggctctgtttgcttctacgttgcggtgccgttgtgttttttccaccacagatttgaaagtatttaataaataatataattttgcttttagaaactcagtgagaaaaagttataatttgaagttttattttttaaaagttataaccgtaatatcataatgtcaaacatacacaaaagagccgtttgaaattgtatttctataaaaattgattttttttgttataaaattaatttatttttatatttttggattttgaagtgatgatattaaaaataattttttttttttaaaaaaaatatttgttgtatttatgaccgaaaaatattttgaaaaataatcactaccatgagaattcatggccccatcatcatgtgagagtatcgggtgcaactttggatataccgaagaattctgacttttcaagttataccttggattttttgtaaattggtattgctaattttgtatcatattggttttaaatgaatgcttgtgctgttggattgtgactggaacagattatcattcattggttgacagaactttttgctac

SEQ ID NO: 60301 - DNA, 828 bp, Populus trichocarpa
  Intron number 1 from transcript POPTR_0008s13070.1 (locus POPTR_0008s13070) derived from phytozome v7.0 (chr-ID scaf fold_8; pos 8522906 to 8523733 reverse strand)
ggaaaccaggcttgctactgtttcttgatctcctcaaattttgttacatgaactgttaattttgccttggtcttttttagttgaattttcggtatcgtacatggttctatctttttgagttgtctgtctgagacctctatagaaatgaatatgggaagcggagatgaagttatgtacgagagcgaattaaggaccgcaaagaaaagggttttcacaattgtattttgtgcaaggatatattattgttatacacatgggaaataaacaagaagagggtgaaatttgttcatctaattgaagctgtagttgatatcgatgggagtggagttcatgaattcatcttgatttaccataaatgccttctctgatgagaggaaatagtcttctcacttctggttagcttcacataatcacaaatatggaggacggggccttctttttttttggtagaattgtttggtaacttggttgttgattgatttttgcttgaaatttatggtcaatgttggactgctgatgtgttgtcattattttttgagagaatcgcgttagggccttaggggtctctgtacttgcttgttatgaagctttgtcttcaatcatttatcgtgatctagaactagacagcatacatccttttaaagtacgtcataattatataaaattagatctgcacacatattcacttcacaagataaagttcaaccacacgttagttttcttttttttcttcttgtctgttccttttccagtatgttatctctgcgctgaaatcacccgaacgttggtgcagaaattgaagactcgagtggtgaaaaaaaactgcaa

SEQ ID NO: 60302 - DNA, 851 bp, Populus trichocarpa
  Intron number 4 from transcript POPTR_0008s09910.1 (locus POPTR_0008s09910) derived from phytozome v7.0 (chr-ID scaf fold_8; pos 6143302 to 6144152 reverse strand)
cttctaacattcctaagaacagtcccttgcttgaggtctgctctctctccccttctctttctcgtgcgcaagcacgcacacaagcatgtgcttatgcactagaatcctggttgcatctctctcgtagcaatggccatatgcaatgctcatgagaatagctgcagataagtagttatgaaaataatataccattgacatctcgagaaaagtaacattattatataggggtgtctggtatctgatgggtttgatataaaactgtacaagacaaaagagttcaatcgagattgtattcagtgaggagagattgatggttaaacatgaatgaaatattatctgaaaagcaattttgatagctgacaaagtctgggtgatgttatttgtaaaattcatggaaatttctacacgatgacttctgaagcatgactattacactattacacaaggaagaaaaggttaaactgatgctgaacctaaaaagttacttggcaataaaagggctaaagtctattatttccagttatggtagcctgggaactgcatgttattgaaaataatttggagaaatttagggaattctaatctggtattcttagagaaatgatgctgggtatttccaaaaaaagatataccagcattttgaatgtaaaaggaatctcaaaataagtaagttaattcttggacttccatgttttccttattatctgcattgttaagtgatcgatatttgttgatcttgactaaatagtgatctttgtgacttgagtacattcacgagttagcataccaaaagttctcattgttttttctttccctttttaattttgttgttcttttgggttgttaggcaa

SEQ ID NO: 60303 - DNA, 786 bp, Populus trichocarpa
  Intron number 2 from transcript POPTR_0008s22910.1 (locus POPTR_0008s22910) derived from phytozome v7.0 (chr-ID scaf fold_8; pos 17973039 to 17973824)
ttttgctttcgtctggagtcattttgtacaacaaggtaacctccatcaccatctccatcaccatcaccatcttccttattattattatgcaagtgtatcagcctaggatattattgcagtttgccacatcgttactgtattattttgatgctgtcttttcttttatatttgaaccctgaaattgcagttagttagccaccacatccttttgttcatcagccaacatctggtctttgacattgaattcataaagaaatgagctgatactcgcacccaaagaagcctaattgtgtatcgtcacgcattttctaactgtttggtagtcactatggctgcctgctcatgtagttgacaggcatccagtgttttcttttaattttctatagcattttcttgccttctatgaactttcccttgggaattaaactcaattcttaatctcctcgggaccaatctggtaaggattgcttcagtgtcccagttattcaattcttccaccagggtgtaagctctgaagttatgcctagtttaagccagttcctagcacctgtagaggtgacccacttttggttctctacggtaaataaatccttttttggacatatatacatgtttacttggtggttaatgccattttcatttatgcagcatcgtggtttatatggtttacttgaaacttaagctgtaattctatgtttatcttttgaactgaactattaattgaagtatgattcaatgaattttattgcagtgggtgctctcaccaaaatatttcgactttccatt

SEQ ID NO: 60304 - DNA, 782 bp, Populus trichocarpa
  Intron number 3 from transcript POPTR_0008s22910.1 (locus POPTR_0008s22910) derived from phytozome v7.0 (chr-ID scaf fold_8; pos 17973863 to 17974644)
gggctgtagcctttttccttattcgtgtatttaaggtaatgacttcctacataatttgattccctgtgcttttggagcctagatggctattatgggaatcacgaaacagtcaattaagttgtgggtgacatggttttaattcacaggaatgaacaagaccttatttcatatggctgaatagaagactgtgcatgtacctcttgtttgagctcttaagttatcatttctctatcttagaatgttatagattctttaaacaatgttttggatttatctttggaaaatgtgaagaatgttagtgctagagtttctcagtgatcaagtaagacataaaatctatgataaagagtatcatattcatttgttttagctcattcattcattccgaccagaaaaaaaagaggtgaaaacttctcatttcaattcccatcattcagtgaatcccttggcaggtcctttatacaatgaacctttctttgaagaacaaactaaaatagcctaggattagctttatgtattcttgtatccatttagctatacatttcagcatgtatgtggagctcatatattgaattttgagcagttgctctgtaacatatgttgcaaatgtatggtaactttcttcatgtttctccaaaaagtgtgatcttacactgggtcaagcaaaatactttattgaaagctctgtacttctgcaattcgttgccttcttttaatctctttgagtactggaattgatttctccttcttttctggacatgcaggttgtatctccagtcaaa

SEQ ID NO: 60305 - DNA, 982 bp, Populus trichocarpa
  Intron number 1 from transcript POPTR_0008s04450.1 (locus POPTR_0008s04450) derived from phytozome v7.0 (chr-ID scaf fold_8; pos 2510410 to 2511391 reverse strand)
tccggttcagttcggtttccggttttgtaatgcttaaacctgacaacccgaaccgattcggtttagaaataaaaaaacgctttctacccattaaccctagcaggttacagccgccccctccctctaaaacaagtataaataccatattttcttctaaccctaaatttcaacattctcatttctcaaccgccccttccctgctctctgtctctcactctcaaatctgtcttcttctccttagatagcaaaaatctctctttcaaaaacctattatcctgtgcatctttgccattcttacttgttccctcttgttgggctctcctgtctgagtgtgtgctggcttctgtcctcttcgatttgctttccttttttttttagcatctctggtctctccctagcttcaaatcaattagtgatgaaagggttttcttgaatcaataccaacacaactaccaccaaacatccctgcacccgttttgcttaccatgaaagggttttcttgggatttcagcgaaaccaagatctaaaaactctgcactctcaacagtttctgtatcaatgctatcgatgcttttcttgtctctcatctctcagatctgtattcttctccttcatgttttttgatgattttacatttcaataacttttgattttctctttgtttttttgcaggcaaatccttttgttttgtgtatttttttgctgggttcaacttctggacaaggagaacaaaacgaaaattggagttgattttttggaaaatggaagcaagtataaaaatttaggtttgaaccggtttggaaggggaaaaaaccgaaccgaaccgaaccaaaattaatcggtttgaaccggttttcggttcggttcggttccaaaactaaaaataaaataaaatcggtttggttatatattttggtccaaaaccggaccggaccgaaaatgctcagccctacccgagattgctctacgtcaacggcatcgt

SEQ ID NO: 60306 - DNA, 1006 bp, Populus trichocarpa
  Intron number 1 from transcript POPTR_0008s18920.1 (locus POPTR_0008s18920) derived from phytozome v7.0 (chr-ID scaf fold_8; pos 12910938 to 12911943)
tctctcttcttcttcttcagtttctctctttacaggtgcttttctgtctctctctttctcataattgcttatcaatcaaccatcgtgaacaacctagaacctgaaaattctccttcctttatataaatttttaaactctttgtgtgaattgccagattctatatagaaacttgtttgagtaaatttcccttttctggctttgaaatttctgatatattactgccatctagcttggtttaccaaagtttaaatttactatattgttgtgtctttgacaactctcttgtacttgctatatgaggttaccaaatcacacacacacacacaccccactctctttccaaatatgtatgtgtgtgtgtgtgtttgtgtgtgtgaattccttgtattttgtatttagtttccgtatatttgtatttaattatggtatatacgaatgatttctatagatggtatgatgccaagatgcatttgtagcccagggtatgtttactatatagtgaacgccttctctccctgtcctagatagttaggcagaagggttgtgtttggacttcagtatactaaaacaatgacgaccctactgctgagctctctgttctcttcatgtttggttccttcggtttttattttcacaggtgcttctctttctacgtttcttctattcactgctgttataactaacataggagatattctgatagaattccagagtttgttgtaaacttccttcgctggttttgaaataagaaaaccctttttacatctgattattggaagcaaggcaagtactttcgaagttgctgactaaacaatgcaattacattgttaaattttggtacatagatgtccatattgaattgaagaactcataattatgtttcattttgtctatctcataaatgttccaactgttctgaaggttttcttgactaaatctgtgaacttaattcatacaaaacacatgttagggtatcatctcaacctgagcgggctagctttccac

SEQ ID NO: 60307 - DNA, 502 bp, Populus trichocarpa
  Intron number 1 from transcript POPTR_0016s05870.1 (locus POPTR_0016s05870) derived from phytozome v7.0 (chr-ID scaf fold_16; pos 3815710 to 3816211)
taatttatcaagatcgtctgtttaagtatcatcaggtctttcaatcttcttcttttcacatttctcttcataatttgctccgttttagcttaaattatttgtaattttgtttttttttttaatttttcctatttgattactgtaaaatccattagttcaaagttgcagtgtcggtgaccttgaactagggtttccttggtgcaagtaaattgggattttttttttaatttggggtttttagttttgggtttttgattaattcatgggacttcttatctgggttttgtaatttgtggtgaattgtggattttatgatatgcttctcgaaatttgtgggttcgattgttggtactgtgaagggagggatttttatctgggtttgtggaattggtgatatagttaactttgtttgcttattttgtgagagagttgatattttaatctgactctgtagtgtttttgttaattttagggtttttgatctggaattgttgaatttggg

SEQ ID NO: 60308 - DNA, 911 bp, Populus trichocarpa
  Intron number 5 from transcript POPTR_0008s18170.1 (locus POPTR_0008s18170) derived from phytozome v7.0 (chr-ID scaf fold_8; pos 12177575 to 12178485)
actgccaatcctcgactgctctacagaagtctcatgtataaattttcatgttttgcctctttgattttccagttggttgttcatcaaattgttttcattatttcaaccttgtttcttgtgcaaatagaaataaagtgaacatttagtatttggctggacactagaaatatgataaaataaaaagttgatttgccctgcattatcatccacatttgttggatatgccggttggattttatgattaaattaaggacttctcgatgagaactatctgcatctagatttacattaaaacgctggaatgatcccacttattcctgcaacatggaccaggaaccaggaagacaacccattacctcatggcatggaccaagatgggagtcctctctgtctctctgagggacactggacctgaactcaatgttcatagtactctcttcttttattggtctaggtgtaaatggctatgctagatgtctgagtcacattttcatccatgtagatggagctatgacaaagaatgcagcccaagcaacaatttatcagtcaaagaagatgaatacaactcatcatagttaggttaaagcttcttgcccaaatttgaatgtcttctcatggccatgttcaaggaaaacgtttatcatcataattttgaatcctataaaacgtttatcttcattgagtgatgtttttgttttttccctgatagtatcgtaatccaaaaataattcactctgaatctggtaaatgtccctatccaaatacatggcaaaatgactggtagttgatgatggataatttcaatctgatgtgctatccagatgtctttgtttttattctctgcctgcttctttttgaaccatacttaaagagtttctcatctttactttctctttacagttggtattgag

SEQ ID NO: 60309 - DNA, 652 bp, Populus trichocarpa
  Intron number 1 from transcript POPTR_0008s03190.1 (locus POPTR_0008s03190) derived from phytozome v7.0 (chr-ID scaf fold_8; pos 1671861 to 1672512)
ctccagctctgttcgtgacctttctcctactatcggtactttcttttgtttctttttagttatctttctttcagtggcaagttttcactggatatgcagcataggcaggactctgtagctgtcctctggttacatgcaaggaattttgacaatttggtttatttttgtttggtgacttttttgttttagtttttgtaaatttctgactggaactaggagagacgagccacccatgcttgtgcctagaattggatcaataatcttcgttttaattcttagaccttttaggattgaagtagcaatggaactgtcaggattcttgctcaactggtgcctacaagtggcttctgggttgtccttgtaacgtctttcggatagcagatgaggtgattgcaattttcaaaggcatggatagataactgacaacacagtggccgttttcccccattgcttgattaatttcttcatgtgataacttcattttctgaagaaattggatgatgccatgaactctaattagatccattgagtgcactaaaatcactagccttgcttgtttcacattattcttcaattttgaattgctctaaacgctatggtgttttaaagggaaacgtttaaaatatgtgcaggtgtggattttaaggtcaag

SEQ ID NO: 60310 - DNA, 1024 bp, Populus trichocarpa
  Intron number 1 from transcript POPTR_0016s05670.1 (locus POPTR_0016s05670) derived from phytozome v7.0 (chr-ID scaf fold_16; pos 3603487 to 3604510)
ggtaaacgtagctctatttaccgtggtgtcaccaggtataaatatacgtattgttgggtgtatttgtacctgtatacgtttgtacaatattcttatttaaggtttaggtttaaagtttggagctttttatgttttgtataaattagtgtgttgtgaggtgtgattgtgtatggatgaaatggaagttagaaagctagttgtttgtgctatgtggattacgtgtttgatgatatgtgtaaatgagtgtttttgtggatcaatgtagtagaattgggtcctggaaaagaaaaggagtttttgtttttgtttaagtgatataaataagaagttggctcatttttagaagcttgtaactttgtgatttgaggaagataacaatagtgtatggggtggttactgtttaagggtaattgttagagaatgatagtagtttatgaggtagtttagaggttttagtgattagggattgaaaggaaagtagtttgatagttaagggttttagttgtagtagtttagtaaaagaaggacttagtttatagtatggaaatggttgaagaatgtgggatacacaagcaaaaactttgttgataggaaatatagtacaagaaggagagttttagaacaaaggttttaaacttagcatagtttttttggcctgccttacaagtgatggttgcatgactatttatagccctgttaaccaacctgtatggaacaatctagatgaaatttgcagccatagaacttgctagaaattcagccaatacactagaaaattctagagttatttgaattgtggataagcactttttttttcctagaacattcctagtgtttgtttgatttctttagaacttttctaacttagcttagcactaacttgtagtttgtagtattttctataattgatctctagaatcttttttaagtgcattgataatttaaaagtaatcaacagcaacacataaatgtgatttgatgcgtggatcgcatttttattgtttgttttggtcaataggcatag

SEQ ID NO: 60311 - DNA, 944 bp, Populus trichocarpa
  Intron number 1 from transcript POPTR_0016s13420.1 (locus POPTR_0016s13420) derived from phytozome v7.0 (chr-ID scaf fold_16; pos 12592408 to 12593351 reverse strand)
ctcaggtcgccaaaatcatcaagaaacctgagtctgtaagatttttttttccttttgcctcagattctttgaagtttctttttatttcattttattttgtggttttagggtactgtttagttcaatctcctcattttggtaatatccttttgttaatacatgtttttttagccttgaatgctgaaatgtggatagaataataaaaatttatggtctgatacaacttctttgtgggttcctctgtgcaagaaaaagattctgtattattgaaacaattagtctgttaaatgttctaaagtgggtattcatgatttggttaatgtgtttttatattttcttgatgctcaaaagttttggaaatatatatttatttctgtaatgattaagtgggttattgttgatattgttaaatgtgctagccataagtgtatttatatgcttgtttacaatcttctttcctggatacttgagttcttggcacggtcatggcagcttgagtttgtttatggttctaaactcacttgatatgattgggttgtttatcgtttgattttgacctggataggtttaggttttgactatgatcacttgtttcttgagaaatccaatgttcaaagtgcgactgggtgaagtgattcgtgtacgtagcttgtaatatagttaattcaactatgatcacttgtttggccgtgaaagataaaatgggtttcatcactggctgcatgttcttggctagtttatctttatagtggacgtcgacaattatgttctttacactaaaccagtagtctctttgattagattttttttttctgcttttatgtttttgttagttttcagtttttacaacctaaaagaaagttgcatgtttgcattgattgatatcctagtttgcccactagatgtgtctctttcaactatttttatgcgtgcaatcctgcagt

SEQ ID NO: 60312 - DNA, 191 bp, Populus trichocarpa
  Intron number 1 from transcript POPTR_0002s03780.1 (locus POPTR_0002s03780) derived from phytozome v7.0 (chr-ID scaf fold_2; pos 2346736 to 2346926)
cactttctagtcccttgcaagaagagccgagagaggtatggccatcactagggtttctttattttttactcttctgtggtctttttcatgcttttttggcttttaattatgttatgtggatttttgcaaagatgggctccttgtgattttgactttgctgtttgtaggaaggttaataaggagctggaaca

SEQ ID NO: 60313 - DNA, 882 bp, Populus trichocarpa
  Intron number 1 from transcript POPTR_0008s20630.1 (locus POPTR_0008s20630) derived from phytozome v7.0 (chr-ID scaf fold_8; pos 14392916 to 14393797 reverse strand)
agaagttgctgctcctcttttggagaaaatcccttgttagtccaatttttcactgccctcttcattttatctctcaacttttcatttttgtgtgacaaagtatgattcttttagctattaatgattctggaattacattattacagaatttgcgaagtcaattgataatttctttcttcttttttttttgtgttttccaatagttttgatggttgttcaagatgcaagagggttttctttatttagtagtttcttggtagttgggggagtatcgtaattcaaaaatgggtcgtcaaagtttatggatttctatgcagtcatgttcttctgacaaaaatggatgattatagtctgtgatgtgctcattgtccttcacattaatttgccaaaatcttttgatctaccctgtacaagttgattgtgcttggacttccttcaaaattgacaaaggtttgttttgtttgatattaagaaaatttggcaattttcgaggctctaactcaagaactcttgagaggaggaggacactaatgccagttgagcgacaagctgattggcatctttcgattgctgggttgtctgttggtggtgaactgaggaaatatgggtcttttgaagcagatgtagttttaattgccaagctaaattgatgtagttggggttcacatctgcgaacttgggccgcccctttcgctcattaaaatttctgtgttctttctttgtttgttactgtatttagctgccgcctgcatcataaatgcttgtgtaaatatgtattttgataacctttggcagttggtaatggagattttttaaacattcaccgaatctattctgatgtatgcatgtagggataaagtcttccggtactcatccaaagga

SEQ ID NO: 60314 - DNA, 839 bp, Populus trichocarpa
  Intron number 2 from transcript POPTR_0002s06590.1 (locus POPTR_0002s06590) derived from phytozome v7.0 (chr-ID scaf fold_2; pos 4397805 to 4398643 reverse strand)
ttcttgcaattgcagctcgcgactctgtttacttggttagccactcgaatcactctgttatactagtctttgatactggctagttagcatccagtataaaatggaactccttttacaccgttaaattcacgtatactgttcggtagtattcctggaaacttttgggcttgggtccaagatttcaattccttatctcggagttgggttcaaatcgaataactagcagctttctctgataaaatcccatcagtaaaatggttaattaatggttcttgttctcgccagacaacgcgtgagtcaagtctctatgtttgtatctacatctaatttctgtcctgcaactaagggcattggatgtgattgacaaggcgtcagataagcttagccgatgttgtcgttggagctttgaccatgtaggaccgtttttgtatctaaatgcggaaaattgacacatctcagtttttatccagttagttgatgagtgatagcgtgaggcaaaatctgcattaagttctcataatcttagaagtctctgaaaaagtgttacgtttatgacttgtcacttgtcatttgtcatgaacattaatacatatatagatgtgtggatataaatatatatatatatttatttatttctaatgtgagtcgtaatattttaattcagttcaatttggcgataataacaacagggtttcacagtcaaatttaggcaacaggcattaaaaaattgaaatgatatgcccaattaagattcctttcagtcataactcataacaaaagctaatccttctttaacttctttggattttcttctttattgcagtctggtggtccagatt

SEQ ID NO: 60315 - DNA, 604 bp, Populus trichocarpa
  Intron number 1 from transcript POPTR_0016s14740.1 (locus POPTR_0016s14740) derived from phytozome v7.0 (chr-ID scaf fold_16; pos 13894959 to 13895562)
tttctttgatataagcccgctttccatcttttggggtgagtttcttttcttatatatgattgtgaatcgaggggtccttatttgattcatgagtttttggggggtttttttaaaaagttgaaaactttgcaactcacaatcaaaatcctaattgggaatattgtatataattcgaaatttttcatctttttggcgtttgacagcacaggaaccaaatgggttctagtgattttgaaaagttatttgctttactttgatactgtcatcttcttgtcccttggatttattgttgacttcagagatcaaattgttgactagagaggatcaagagagcacatttagatttatataatttcaattgttttaccaagtttgaattctttgctattgatgcttttttagggattttctgttgaaagggtttagaaggccacctcaattgctttttcttttcttttcttttcttttcttttctttttaatctgaatttctagtgtaatttgtagcagtaaatatctgtgattcacattatggcgttggcttatacaattttctttaactttcggcagcaacaagcacagttcctggcacagctcggacagta

SEQ ID NO: 60316 - DNA, 834 bp, Populus trichocarpa
  Intron number 1 from transcript POPTR_0008s20370.1 (locus POPTR_0008s20370) derived from phytozome v7.0 (chr-ID scaf fold_8; pos 14149753 to 14150586 reverse strand)
cttctatcaattgttccctttatttgtgagtactcaaaattcaagatctctcctttctcctttctcgtttctgtttttctttcacgtaatatttcttgatttgcttacaggtttccaattctctaccgtaattaaattttaatttgaattcaattaataaataagctaaattcacatattcaggaaaaaaaataaaactcgattcattttgtttactgtattatatccatactatctttatcttatttttcaaatgtctacaacaaaagagatggttcgatgcatatttttaacattaatttctcctatttagtttcctctgatttacttttctacagattgaattcaattattgacactcaaaatgattccaaatatgagattttattaaaacctaattgaattcaattacgagggttgcaacatgctgattttatgttctttaaatttcatgtttcaggatgtcttttggggttaaggtttgaatcttgattgaggtttaagattgaaacttgaattgggttaaagattaaagcgaaatatctttaccttgtcttttgttttcttgattcatgtttgtgttttttggatagtatgcgtatttttgtcttgatgtaggggtggaattgaaacttgaactggattaaagcctctgggtttctttttatcgttgttgtttgcatataacaggaagtgagacgcctaaatgctcgaatatatcattggcttaagtcaattcacgtggaagagtattatgaatttgcttgtttcttaagatcttgtgcttttaatttaaatcataaatgttggaaaatgcagtgttgtggcccttgc

SEQ ID NO: 60317 - DNA, 566 bp, Populus trichocarpa
  Intron number 2 from transcript POPTR_0008s13680.1 (locus POPTR_0008s13680) derived from phytozome v7.0 (chr-ID scaf fold_8; pos 9005465 to 9006030)
cagtaaagataacatttgtagtttggtgtgctctggtgagttctcttaattgtattttacagtactttttaatggtgaatgaaactgtccatcatcatggactagttcaaatactgtttgttgtcaattttatatgtgatgattacgatatattggcttgatagatatttgacttggcagtattgtatgcagacgatgtccaagagggagttttctggagctctttaggaatggaagaggctatagtcgtagagacatcaaaatcttatatcaatatgatattaactttgtttacttaattggcacaccaccacacttaatttagtgccattttctagttcattcatctttgattatgcctacgttcacagcacggtaaaagctgatatgtccatgtacaagctgtttggagacatgcatttaaatccaagatccaacctttgcatatgatatttagtttttgtcgttctgttcatttctgtaggtcttgttgtctcatgtaaatattgtcgtgcaattgctaaccaccagattccgtagagagattccacatcgcagcattcctc

SEQ ID NO: 60318 - DNA, 664 bp, Populus trichocarpa
  Intron number 2 from transcript POPTR_0016s06940.1 (locus POPTR_0016s06940) derived from phytozome v7.0 (chr-ID scaf fold_16; pos 4734431 to 4735094)
gctttcgaattggggcttcacttgtaagtatgcttaacttcctaatttttatactgtattgatatatatttacaagaagtgaactatataaagtaaatagcttgatttggtagtgatgtgttaggaatttaatatagaaatgcttaagaaatggttaggataattacactgggtaaggaatattgtcagatattcaaatttggttatttgtattcacacgaagtttttagaggactattaggattcgactgttggttgaatatctttttgtttgtaggtgcatagggtgtgtttatgtctggaaaagagcttttttttttcaacattttgtatctccattttgtagttcatttcttcatgaaaacatggtcagtatttaaaactagaaaagttttttctgagtttgaaaaaaatatcggagaacatgtttgctaagtatattttttattataatatggtagctggtaagtggagaagttgagatactgctttttctgaagtcaaaaaagaaaatttggagatcagtaagactacaaaaggatacttttaattttctggaaaattggaaaatttgaaaaatcttctccaacgaaaaagattcttggctttttatcatgtgtctgtacttacaatatcttcattttgtacttgtggaaaggaagcc

SEQ ID NO: 60319 - DNA, 542 bp, Populus trichocarpa
  Intron number 1 from transcript POPTR_0002s03520.1 (locus POPTR_0002s03520) derived from phytozome v7.0 (chr-ID scaf fold_2; pos 2190220 to 2190761 reverse strand)
gaactcggtatgtgtggacttaaaccctgttctctatcattttcctttttttatttcgaaagttggaatttttgaagttatataagtgaaattttggatctataagtatgaaaacgaggcttaatttaaggatttagtggtttagacttgaagctgtgcatggttatatgttcttagttttagcagaacaagcatggaatttgaaaagaagtaatgtcataatgtgcttgcttaatttaaacttggaaagaggctgtaacagggggtgttcttttgcttttcaaggaggggaggaaactttttctttaccgaattcaaacatttttcttctaaaatgataacccttgagccaaacaaagaaatagatggtgtactgcgaaaacattccccaaaattatgagtgaattccgtttagtgttttgtttgcttgacaattgaatggatttgttgatgggatattcaatttgtaaaggtggaaaatgattatttgtttgttttgggcccaaaattgtgtaggtctctagctgaagcaaggtcgcgga

SEQ ID NO: 60320 - DNA, 961 bp, Populus trichocarpa
  Intron number 1 from transcript POPTR_0002s07260.1 (locus POPTR_0002s07260) derived from phytozome v7.0 (chr-ID scaf fold_2; pos 4962925 to 4963885)
tgaccagaagcccctagctctctggctcaacggaggtgatcagtttctctctcacacaatatgttcattttgaggatgtttatgttttttttttggtaattttgatgaatgaaaccttctttcataaaaaaaatattgtgagctgtaatgtcttttgttattggggttcaattttgtttctttttactctacttttagctctagttatttttcttaaatgtacttgctggtcttgtccttcaaattttctttctacgttcaagattcactttctccttttctctttccaaaaaatatgaactgtgcaattttgtatttgttctttgtcttatatgtttatgattatgacaattctcttgatgcaacttcgtggttttgaatcatgaaaatacaaatttggataattctgtctctcaacagtcttgaagcatttcatattactccccttctaatgtaggggggattttatgctttggttgatgaaaagttagaaattttgtcaatagtactctatcaccaactgttgcaaggttcacagttttcttttcctcctcttttctttttggtgaatcagaattcagagacaaatcttataaattaaaacgaaaagggcattacaaaatagcccttgtttagtctttaatttaaccatctcttctgctcttgggcttggaatcgacgagtaattggatattaatgaagaatctgctgctgtgatcaatcgacaggatttcttcatattcaattcaaactctttaatgatgttccagtcaaaacttctgctattttctttaatctcgttctgcagggttttagaattcaataacaagttcgacctgtatcgtcctaatattgaaaaaaagatgcagtgcatttcccataatgttgacggattcaagttagtaatattaatatcccattttcaggccctggttgttcctctattggtggaggagccttc

SEQ ID NO: 60321 - DNA, 741 bp, Populus trichocarpa
  Intron number 2 from transcript POPTR_0002s21850.1 (locus POPTR_0002s21850) derived from phytozome v7.0 (chr-ID scaf fold_2; pos 18547894 to 18548634)
cctacaaatacgatagcgctcttcttgcagcccaggtttttgctttttatttatttattaataagaaatggattttgttttcatagaaaagcataacacaaagggataatcatcttgttttgatacatgaaaaaaaaaaagcagatttctcaactatgtttgaacaacaatgtcagtttaaataaatgcagaagtgtgctcatgtgggttttttttttttttaattataaattgaaataacttatttctgcattagtttagcactgctagttttagagatcctatgtgaaatcatcccatggaggaaatcctctaatcaaatcaaggggattttcttcccagaaccaaagaaatttaggtaattgaagtccattggaattctgatagactgcattccatgcgtgttttcttcctttaaggtcgtagttgtattattatctgtgagttttgagaagatttttgaatcttctaaggggtgattgtatcttttcaaactgaatgacatgaataacttaccaaactcaccttgatgtttggaaacgttggttttaggataacaaacatttttcttaaaaagggggcattaatgtgcggaatagtaactagttaaatttctaagggactcagggtatttgatgattgtcagcaatctattatatttttcttcaggttgactgttttttttgtgtattctcatgtgccttagattcgtcaattggcgcaagagattaaggagttgac

SEQ ID NO: 60322 - DNA, 308 bp, Populus trichocarpa
  Intron number 1 from transcript POPTR_0008s17500.1 (locus POPTR_0008s17500) derived from phytozome v7.0 (chr-ID scaf fold_8; pos 11767772 to 11768079 reverse strand)
gagctaccaaggtaacgagatccatcttcttgtatatattttgtaactgttcatgaggcccacaatgtttaatttgatctggtagcagtcctggaaaaaaacaattgattccaaaaacattttcttcttcttgttcttaaagtggaataataattaaaaatttctcataacttgccctcttttatttttactctcctcaggctaaacaccttcaaatatctattcatttatctctgttctgtgacatgtaaattgaatgctttcattatttagagtgctgcctttggtgcccttttccgagctagtgg

SEQ ID NO: 60323 - DNA, 1058 bp, Populus trichocarpa
  Intron number 1 from transcript POPTR_0016s07090.1 (locus POPTR_0016s07090) derived from phytozome v7.0 (chr-ID scaf fold_16; pos 4941526 to 4942583 reverse strand)
atagtgagtttgtggagaaactgaagtctagcttggtatgttttctgttattactgctattttttttaaattgtggtttggtttattcaactgtttggatgagaaattcaggaattttgagttttaaaactttcgtgagactttggaaattagggatttagtttggagtgtctgatagagtttttattttggatgaagggttttattggtctctttattggtttttgttagatcgataaatctaaacgactatatatgataccactcaaaagtttattggatgtttattttgatcactctatggttaaacaacaaatttgaaggtcttttaatgaaacattagctcaagtagaaatttttactacaacatttgaagcaggcgaggggggctgtaaaggccttgagtaaaagcagaaactttcttggaatgactgatctttaattaatgttaaaaggcctgatgatgttgcgttcttaatatctttgttttttaggaaggttaaccattaaccataggatcctaatttcatcatgtaaacttttaagttcatgttcagtgctgctgtcagttctatgaaatgctatgttaacatgcgtgctgctatctagtttgttgtacctggtcaagttcagagttcatcttcaggtgattttctcttagtgtggagtgtgcagttcccagttaggaggaattcatgtaaacatgtctgacattaataaggtagtcaaggtctgggtgacatggatgcagggtttgctttcaaatctcaaggaaatgtgttaatccctcatggagacattccttccactgaatgcaattagattgacatttgagtgcaaataaacaccaaaacattctcccttggcttgacgtttgatacttaagcttggtaaaatcttgcagttactgtataatatcatggtttggaatcatcattgcatattttgctttctttgatattcatttgatgatcataagctgttttcattctcttaaccagctatccatctctgttttttcagaaagcaattcgcaaggagcctcaggagtcaaaggt

SEQ ID NO: 60324 - DNA, 359 bp, Populus trichocarpa
  Intron number 1 from transcript POPTR_0008s08430.1 (locus POPTR_0008s08430) derived from phytozome v7.0 (chr-ID scaf fold_8; pos 5219643 to 5220001)
atcctgatatttctcctgttttctctcgaaccaaggtaaataaataaataaacaaataaaaaagaaccttcttgattgtggtttttttttcttttcgtgtaattctagaaataaatcttttaattggtagttttagtccttttagctgtgattagtgtttgatgcaatttgttaaccatgagtagttttttgtgttcattaaggatgtggagatagattttgctttttatctcgctctttaaagtttaaagattggagctttatttatttctgttttgctcattgtatgcttcctttgtttgataaaagtgtgtgcttgtatattttttgttttattttgtttcagtttctagttttgg

SEQ ID NO: 60325 - DNA, 561 bp, Populus trichocarpa
  Intron number 2 from transcript POPTR_0016s01530.1 (locus POPTR_0016s01530) derived from phytozome v7.0 (chr-ID scaf fold_16; pos 697092 to 697652)
gcttcttggggctgtggatattgaggctgctggaggtaatctgcttaaacattttgaaaatgtgttaatttgtagtataattcagatttcctttgcaattagtggtaatggagctatgttttatgtagtctgttaatgatttttttgtggatttacaagtctctgcatattgtctgctgtgagaagaactaaaattcacctgagaaatcttaggaattaataaaagttaattttgttaattagggttgatagtttatggattatttgtcaaattttggtttcttttcccacgatttatagcaattgtgtctgagctcatgtgttactatagtgtgttagacccttctttcatcatctccatttattcaagcatgctatttcattgactagatttgtaaatgcttgaattggaataaaatttcctctgttagcctttttgattcttggaagaaatctgatcatttaatggcagatgaagtttgtttggatctctgacatttttcttaatggttttataactatgtagagactcttgaacctgaagttaaaatcctgagcctt

SEQ ID NO: 60326 - DNA, 686 bp, Populus trichocarpa
  Intron number 1 from transcript POPTR_0008s13410.1 (locus POPTR_0008s13410) derived from phytozome v7.0 (chr-ID scaf fold_8; pos 8793451 to 8794136)
tgccttccatcttgctgctaagaagggtcacttgggtaggttttctgttattcttttttgcctttttggtctacttatatgattaattactgtcttctcgtctgtggtatgttcacaattagattaatcgcttctagactttgatttgtaaagttatcgcctttttgtttaaatggcttcttttctcatttgaattgtctccgatgtccactgtatatgtgtgattggaggtctatggctgcgatttcaaacagcacagtgtttattttttaaaatacatggtaatagtgttatttctatgtaatgggaggtcttggttatggttcgtttccttgatcgggcacatgtaagggagaatggatttccataatataagtcatttgctggataaagtggtcagtccaaacagcaattcaactatatttttctttgaaagttatatagatcactgctgattgaaattggctatagtcgaatacaacgtttgctttgcataatcatagaggcataggagattgtgttcatgaagattgagcttcatttacataaggtagctatatttaatatgtccgttcaggattgtgcctcaaagccagcattttgttaacttgttagttggtggcaggtcgtttaactctttatggtattgaatattggttttaggcatcgtgaaggaccttttggtc

SEQ ID NO: 60327 - DNA, 761 bp, Populus trichocarpa
  Intron number 3 from transcript POPTR_0008s11460.1 (locus POPTR_0008s11460) derived from phytozome v7.0 (chr-ID scaf fold_8; pos 7277023 to 7277783)
gcaagaaaattagaccagggtattttgataataaggtatgaattatggccgtgtctcaagatttcgtatctattgcatagagggaagtttctgacggatgggttagcactggcatttgttactttggttgtgttgtagaatttagctctttagatcaaaggataatttattttttcttgaaaaaccacctgctaaagtgagtatgaaatatgtgaaaagaattccatccgtaaaagaagtaatttgactggaaattggagaatgtgcttgctaaatgttgtagttgttttgtctgttctagcaacaaatctatggggttaactgaataattgaggaaagcttggatttagagcatttcaggttaatggataatcttcattggaagattccttaatttcttcgtgatgttatcacaataagaaaatttttagtttaaatttttttaacttgatgaaagtttgacaatgtttcacatgaaatacttatttgataactgtgaaaagtaataaatggtagtgtttgttttgcgttcatgatgagacaatgaaaatgagggcaaaaggaaaacatatcattcttagccattaaaaaccagaaactacactgaggttccctttcgacagtttttaatcgctgatcaccaattgatcgttttgtagatgataagcctagaaggggtacttcaattgtttcttaaccagctgcccaatttccacttcctataattgtatgatgtaattttcatgcttttcaggttcgaa

SEQ ID NO: 60328 - DNA, 631 bp, Populus trichocarpa
  Intron number 1 from transcript POPTR_0008s14860.1 (locus POPTR_0008s14860) derived from phytozome v7.0 (chr-ID scaf fold_8; pos 9874829 to 9875459 reverse strand)
gcctcgatcctttcacccctcaagaccctgctactgtataccactccatcactctttgtttattcattttttttctttttagggaataaaaaggaagtttatgtatcagttggaatcaaatttagaaagtagtaagtttgtggcacaatcatttaattatcataatttgttttcttgataaaattgaggtaaattttatgttctctaatcgcttcttttggcaccattttcattcgaagagaactgttgacgagaaataatttcattttaatgcccaaagaaaatatgagcttttctttttctgaaagcattaaaggagggtcctggaatatatacatatataatctcttctctgcatatattttcttggccctgttttattttttatttctgctacggtttccatgtaagattgatgatataataacaatgctagaattgatcttagggtgcttttaccggtactaccattgtgtttctcttgctgttctacagcgatcctttgactacaatttgtcaaaatgtcatggttcttgttctgtctcagcatgattgtctgtgatggattgttatatttagggcttaagttacctttggacttgtttcttgtctcaggatacctgctgcaaac

SEQ ID NO: 60329 - DNA, 1006 bp, Populus trichocarpa
  Intron number 2 from transcript POPTR_0008s05260.1 (locus POPTR_0008s05260) derived from phytozome v7.0 (chr-ID scaf fold_8; pos 3047147 to 3048152 reverse strand)
accttgaaggtaattttctctcagtagaaatagattttaagtagttttttggtcttgaagtattttgcttttggaaccgtgctgaatgtcaagctgatcaattatcccagttgctgacattgatatttgtgcaattgtatggttgttttggctttttcaccacatttatcttcgtatgtggcaatttccatgctcatgcacacacaaatatgataaatgttgttcttgcaacttgctgcatatgttaatgtaaaattcagtctttcgtagtgaacttgtttagcaaatagattcaaatgactcattgtgtaaaacaaatgccttttggtcatgtcaaattctgtttcttgctataatactttcctgtgtcccctagtatgtgcttggtttactgggagtcttgtaactagctgaacctgaaaaatattagtataatttagcatttgggaatgtgataacttgatcgtgctatttaacgatattgctctttattctttgcatgtagcactgaatattgatgagaactgtttcaaacttgtagcaatgaatattgatgagaactgtttcaaacttgtagcactgaatattgatgaaaactgcttctagtttgaaattactgggcaaacttaaatgagtagaggaattctgagaatttgaagattctgtccattgaggaatgccacatttcattttaattcaagtttttagcagttagcaataactggaaaaaatcttctactgttgttttccaaaatttatcctcattaggagggagaatatgattcttaaataattacaacacagtggaatgttataaagagtttatgaccttttcattgtggacatgcaaattggaacacgtataaagggaagcgatagacttaatatggttggcggtaaagtaatttgagtatgtagatattttattctatatggttcttgtttcattttattgttccttttctttcttgaaaaactttcagtaatttttccttctatacaggca

SEQ ID NO: 60330 - DNA, 560 bp, Populus trichocarpa
  Intron number 1 from transcript POPTR_0008s02210.2 (locus POPTR_0008s02210) derived from phytozome v7.0 (chr-ID scaf fold_8; pos 1056657 to 1057216 reverse strand)
ctcacagacaccaaagttactgggttgtttctcaggttcttgttatgcctaaatctgaagtttattgatgtttttttttcacgctcacaagcatgaagtaatggaaatgtttactctcacaagtttataagaagtaggaagagactcaattattttcgctattttcttttagaggtttgatctttgcagtgcttgcttgctttattttctgctaaaaaaaaagataatatgattccaagttgagtatgaacatttcttaattaccttttgatgcgggatatatttctcatcaatctatgaagagtctttcatgatcactgctagtgttgttttagacctgcttttctctgtgtttaattcggtgtttgtaaatgttgatagcctgttgagtgaaacggaattgtggtggatttgggataatgtaaaaccaagattttggccacgttagagagtaatctgtaacagtgaatttaatctgggtgttgtcagtatcgagtaagatgataattttctccaattttatagcacaaattgtgaaaaaattctcatttctcctaggg

SEQ ID NO: 60331 - DNA, 681 bp, Populus trichocarpa
  Intron number 2 from transcript POPTR_0008s01160.1 (locus POPTR_0008s01160) derived from phytozome v7.0 (chr-ID scaf fold_8; pos 557059 to 557739)
gaggaaggcagaggaagtttcgtttgattcatctggtatgtaaatgaatcacttgcgatcattgtttctctcttgaattgtgttaaggaacctctctttttcagtttttttggaaatggaagatttctctagatataattttcttctcgttaagaagattccattccattttctttcttccacgattcagatcattttctcctattcttatttttggttttttgacttccatggcaagtcaaaaaacgagtccaaaatgtaaagatgaagggttgcgaaggcatagttaagaaaagttaaaggttgacagtgacaagagcatcactgcaatttgctccaaaattgagaacatattcattttggactttatccagtggaagaatggaagcaagagtggtatatcttttctctgtctaaatcacccctggtggatggtctctcctatccttccttatctttctttttaagtgcttgttaactttgagatgagtgggtgtactttgagaaatgcttggatttctctgcaaccactgatgttatacctttcaaagcaagtttttcttgcacaaattgctttttgtcctcaatttccgattacaattttgaagtttttgcataaattccatcttcctctttccaattgcagaagcactttctgatccatcactcaagtctctcttt

SEQ ID NO: 60332 - DNA, 565 bp, Populus trichocarpa
  Intron number 2 from transcript POPTR_0002s16240.1 (locus POPTR_0002s16240) derived from phytozome v7.0 (chr-ID scaf fold_2; pos 12147286 to 12147850 reverse strand)
aaagtaaatcctcagaacctttttcttcttctttttttagcacatatttattttcatttttatcgtcttttctatgggataattaaagtgattgcttttgtgggtgtctgttattctttattcttttttttgtgtgtgtgattatacagatgttgataaatgaaaatatcatctgtgttttgtgtttaatagaatatagttagcaaattaacacctcagatgtttgttttttttttttttgtgaaaattttaatttttggatttctgcacagttctctcattcaactgttttttgcagtttgtatatcctaaaaacttaaatgccttttgtttcagaaagaagttcacttctaggagaattttttttttttttcattgcacaatctgcattttctcagacctttttagcccaatttagaacaagtctaatcctcaaattcattttcttgttgaaactttatgtccaattaatataccaaactgggtatggatatttttggtttcagcaaaaataagcatcttttacccttttctctcatgtgatggattgctgcaggtccttatc

SEQ ID NO: 60333 - DNA, 949 bp, Populus trichocarpa
  Intron number 1 from transcript POPTR_0008s08740.1 (locus POPTR_0008s08740) derived from phytozome v7.0 (chr-ID scaf fold_8; pos 5397776 to 5398724)
aggaacgaggagagcaagaagggaacaacaacagggtatgtgtttttgcaatttgttggattctgtgtttgccgtaattataagaatttgctgccatgtatttgcaattttctcaagtgttacatgttatagaatttcaaaatcaaggaattgttccattctcttgccttttctctgtggcatagaaggttttcatcctcgcttttcacctttactaactgtggtaattgtcggggattaaaatgtttaccaaatcttaacgtgttccatatatttttcccctttgtgtcgtgctttctctgtaacttcatgacatttgagggggatattttagagaaattttttattcgacttcgtttaaaacagagttagtgtcggtgaactataggggccacaagctctgtatcagtatttcactgttactttgcattttgaaacggttagcaagattgatccagatgtttcctcaaggatcataggattttgtcagattccttaacttttgataagccacatcttttcttggactgactaagtatattacttctccaaacaattaatctccagtcttttctgtttgatcatctgccactgcgtgtgttttagggaaagctttgctttatttttggaaaacggtaaatctttatggttttgcctctaataacaattttaggttttagtacttggaataattaaacacttaatcatcagttgacagtgagacagagttctgcttgaagttgtttttaaactctgtagccctacagagttttctttaaactaaactgattatatttcaattttaattccacctatttccacctgcttttggtttgagaaattgtaaatacgactctacataagtaagctgtctctatttcttctcattcattttattcttatatgtgtgtgtgtgtattttaggagacttcaggagaggaaattgcca

SEQ ID NO: 60334 - DNA, 836 bp, Populus trichocarpa
  Intron number 1 from transcript POPTR_0002s21690.1 (locus POPTR_0002s21690) derived from phytozome v7.0 (chr-ID scaf fold_2; pos 18242044 to 18242879 reverse strand)
agtctgctcacatcaacctcaaagtgaagggccaggtctgtttttctttcttttgattatgtcttcttacttggttgtgggtttttgtttctgtttcatccttacatatttttgggtttggtttttctcttttaatgtttttgttttggtttcaaactgttacatttggttttttttttcttaatcattgctttttgggacgttatgctaatgcaaaattcatatgggagtgtgggtattctctattagtatgctacaaataatgcttcaccaattgagtagtagtgttttgggaattatagtgcttttcaaaatttgaacgagacttttattttttgagttaggcctgctaggtaatagttaaaaaactcttctttatcatattttttagttctggattctaaatgggttgtgttcaggaaaaactcctgatgaaagggcgtggtgaggatttgttcacttgtggtgcaactagtctttatgggaacatcgatttggtgtcttgtttagaagcagttgtgcgtgagagaatctacgctgcttcaaagatgagtggaacaacttttagtagttgcttaccttgtgtttcttgattgttgtacctttgaatcgtgattattgttatagatgtcgaaacttgattattgaatatttcaataattgaaattacaagtttcaagttgcattttaattgaatttttattatggggtagtccatgctaactcttattttgatgatgcaatgggttaaaagtttgtaatttatactcttgttgtaagactcctattttcgagaatatgctgattaaacacccattttttaccttttttgtagg

SEQ ID NO: 60335 - DNA, 968 bp, Populus trichocarpa
  Intron number 2 from transcript POPTR_0016s11080.2 (locus POPTR_0016s11080) derived from phytozome v7.0 (chr-ID scaf fold_16; pos 9658521 to 9659488 reverse strand)
ggtttcgtttcaaagtttaagttctccttccaaaggtaagacactaccgatttccgtatccatttttttcaggtcttcatcaacattttctttcatttgaagatattaatcatcgttgctttcgaagaaactgtctgaaatttgtctcgggcgtaaaaaaaacgcgtaggaccatttatgtgttttagctttcagtaaagttattcagcaacgctttgtgttatgctgttattgtggtttagtacttcagtgtatttttatttttaaattcaaaaccttgaatattaggaatctgattttgtgaaatggtggaaaaagatccatataacctgcctcaactggtgtggaattgtgtatttgttgtgaaccctaaaatataattagaatattaggaatctgattttatgaaacggtggaaaaagacccatataacctgccccatctggtgtggaattgagtatttgttgtgaaccctaaaatataattagaatagttaatttcttttccttctaactttcaattccagttgtggaatttaaattcattgagggttaatgtgcaccccattcctttatatattgagctatgcatcattaatttaacccatttttaaacaatctttggaaattgtaaatctctccacttttctcaaagaaaaggaaaaaggaaaaaaagaaagaaaaagatctccacttattgttaggagctttgggtggagagatttgaacagttgaactgaacccgggcaacatattgctttaaacctttaaaattgaaggctttcataaatttcttagaagttatttaacttttcttgagagatccaaggtttgttaaatcaagtgaattatacgttgagtttgaggaccttgtttgtagggtgatttgatatttacatgtaattaactcagaccaggtttgatgagcttgtagttatttatcatccaagccaagctggtccaaaggaa

SEQ ID NO: 60336 - DNA, 880 bp, Populus trichocarpa; identical to SEQ ID NO: 59879
  Intron number 1 from transcript POPTR_0008s04010.1 (locus POPTR_0008s04010) derived from phytozome v7.0 (chr-ID scaf fold_8; pos 2206717 to 2207596)

SEQ ID NO: 60337 - DNA, 551 bp, Populus trichocarpa
  Intron number 1 from transcript POPTR_0008s12790.1 (locus POPTR_0008s12790) derived from phytozome v7.0 (chr-ID scaf fold_8; pos 8278699 to 8279249 reverse strand)
ttcaatctctcgctactgaactagttgctgcaaacgtgagtttagtatttgtttttctttctttctgttttattcttaaacgattctttgtcttttcttaaaaaaaaaaaaaatctttttttatctttctttactttatcaatcaccctttggccttctaattagcatctaccaattcaatttttgggtttacatggatttttaatgcaatacactaattgttctcttagagatgaattttgcttcttaacccccattttgttgatgtatgcatgggtgatgctgtataggtggagggttggtgtccattttttagtagcccacacactttcaagagctccaggaaaatatacaattatgtctcggatcatttttagttctccatcaacgctaccacaattatattcaacttcaaggtttttttttttggggggggggtctcttttactaggaagaaaattgcatttttgttttttgttttttttggtggttttggactttgtttttattatgttttaagtagtttgaattgttgcaggcggattgttaaa

SEQ ID NO: 60338 - DNA, 931 bp, Populus trichocarpa
  Intron number 1 from transcript POPTR_0068s00200.1 (locus POPTR_0068s00200) derived from phytozome v7.0 (chr-ID scaf fold_68; pos 8801 to 9731 reverse strand)
aaagcaggagcttggcactaaaagctcccgaacaggtaattgatctttgaaaatgatatcagcttcgatccctgttagaggatggcatgctagaaagaaatacttcagattgcttaaaattcccaattttttaaacgaattaatacctctaattatgtttctttaattgtggatttggtttgaattggatttttctagcagattgcttcttcactattagggattcatatatgttctttcattcaattgaaaaaattaagagaaataataggattaatcaactagttttcaagtatatgtttcgaatcaaaatctaaaaattaagaaacccaaaccagtaaaagtttatcatcaaattaaaaaaacttatcgttttgttaaaaatattataaaaataaaaaaaggaattaaaaaagataaaatttaatacgcacacatataaagaaaactaacaaatacatattatttttaagaagatactaactccaatttgtcattattttcctgtatagctagcctatcttaaacaaataattaatcataaccataatcttattaataaaatatttttcattagatattaatatttattggtattttctaagaaaatattaaatatttgataaaggagaatatttgtaactaaatctttaatcaataaaatgaaaaaaaaaaactatgacaatgtgtatcgatgttttgaactgattaatagaaattccagcttgtttatggttgatatatagtaaaatatacttagtacaagcaagagatgtgatgatatgatctcaaaacaagagatgtgcttgaaaaaatttcaacccaacatttcaaaatttgttttatagacattgttccaaatatctaatcatatggttctatatctttaatttcagaagcgaagagaagtgcttgaaaaaattaaaacgat

SEQ ID NO: 60339 - DNA, 622 bp, Populus trichocarpa
  Intron number 2 from transcript POPTR_0008s15750.1 (locus POPTR_0008s15750) derived from phytozome v7.0 (chr-ID scaf fold_8; pos 10501899 to 10502520)
atttcaacacatgtatttcatttttgttatttggtaagtagtgcaaattgaatgtcagggtgtaggtttgtttcaaagcatccatagtcagcaacgtttaagtgtttaacctgttctcttttattattgtttttgaatcggcgtagtttggccatcttttcttcacaggaaaaaaatctaatggtgaaatgggtgccaataagctacagttttactctataattggaaactagatttgcattaaggttatgcaaagaaatgcaattgtcatagaagtttctgaaagtttaaaagtccaaacatttaggtgaagaactgctgaactcccgcctttgtggttggctatacatcctcaaacagcagattaattatgtaaaggaggtcaaaagaaagttagatttgaacttttggactttcaaggaataatttcaggacagatcttggtgtttacagatagaatatatttattcaagcccaaagaatgccaattgtgtactttagactctctgctttcagttctattgaagtgtttgtttgacaactatgctttccaatacaagtaaatcattgtacgtatgctgaatttcttacatttgcagatcaaaacatcgaaaatcttgtc

SEQ ID NO: 60340 - DNA, 220 bp, Populus trichocarpa
  Intron number 1 from transcript POPTR_0008s05770.1 (locus POPTR_0008s05770) derived from phytozome v7.0 (chr-ID scaf fold_8; pos 3349176 to 3349395 reverse strand)
agccaccaagaaaagtccccaaaacacctcataaggtaactaccgagtcttcttttttcttttttttttcaattttgggtttctttggttgtttagaaaattgtggataaagaagattgttttgcatcgcttttgatttaattggattcgatagaaatcattgaagattcagtccaagaaaatggtaattattgaaggttaattttgctgcaggttttgg

SEQ ID NO: 60341 - DNA, 564 bp, Populus trichocarpa
  Intron number 1 from transcript POPTR_0008s02900.1 (locus POPTR_0008s02900) derived from phytozome v7.0 (chr-ID scaf fold_8; pos 1482233 to 1482796 reverse strand)
gtgattctcctttctctctcaaaccaattgaagctgtaagttttttttttccatacaccattattttatttttattttttaagttttttttttcctgttttgttcacatttatgtattagcagagaatgactgtgattgtattttcacctgtgtttatggggttttgattgatgtttgggtctagtctttgccttttgtaaagtgggttttggtggctaatttcttactttttcgtccagtggatgtcatcaagttgcatgttgtcttgatttgttgcttttttttttcagtcaagtattttttttctttttctttttttatcaatggctgtttcgaaattgcaatttttttgcttttatactctttctcattcatgttagaatttattggtttatttactgttcttgaataattttttaattctttcagtttaattattttttgttcatttcttgctcgtgggatgaaggtgaattttttttatttttttcttccatatgcatatattgagttgtatcatcaacttgcggtgattctgattcattggtggaaatgggcaacag

SEQ ID NO: 60342 - DNA, 445 bp, Populus trichocarpa
  Intron number 1 from transcript POPTR_0008s01365.1 (locus POPTR_0008s01365) derived from phytozome v7.0 (chr-ID scaf fold_8; pos 665617 to 666061)
ctagctaacagggacgagtaaaaaaactgaataaccgattaaaccgggaaaaaaaccaaaaaaccgaaccgaaaaaaaaactaaattaaccgattagaaactcacaaaaaagtttcggatcggttcggtttcggtttctaaagtctgaaaccgattaaaccgaaccaaaccgaaccggttcaaccaggccagtacttaaaaaaaacaagtataaatagtatgttttttctaaccctaaatctaaatgcattctcagccaccccctctctgtctctcatttctcaaatcttacatggtctttgtctctcatctctcaaatttgtcttcatctcttccaatcttccatgctctttgtctctcatctctcaactctgtcttctttttctccatgcattctcagtcctgtgtcaatttgggtctctccctcttctccaaaggacaggta

SEQ ID NO: 60343 - DNA, 533 bp, Populus trichocarpa
  Intron number 1 from transcript POPTR_0008s17260.1 (locus POPTR_0008s17260) derived from phytozome v7.0 (chr-ID scaf fold_8; pos 11590707 to 11591239)
aagttgttgggttactttgctactgaagaaaacaggtgatggattaattaagaaatcattagtcccttcactgctagtactgctatgcattcactcatgtaattaatatttgtcctgtattcctctttgcttcaagttttgtctttccgtgtttattacactccttcaactaatttctctttccattccttcacttgttttcagtattttttggcagaaaataattcatgggctcctttcaaaatcactccttttttttttgaacttacagtttcgctcccacctcttacaaaactttcggctttcattttcagagtttaatcatggatttatcttctgggtattcgtcaattttggcccttctcttcattttcagttcaaagctttgtgctttgtgctttttgtttttttgttttttttttttttgtattagtttgtttcttgctttcacattttggtgttccttaaatagcttttgcttaccacctatttgatgttttacaggtaggttggagaataaaatcaagaaaatt

SEQ ID NO: 60344 - DNA, 542 bp, Populus trichocarpa
  Intron number 1 from transcript POPTR_0008s08220.1 (locus POPTR_0008s08220) derived from phytozome v7.0 (chr-ID scaf fold_8; pos 5114047 to 5114588)
cattcgtccctggttctgcccttcttctatatcaggttctctttcttgaacttttatggggttttggctatctggacagtgcaactatgcattcaaatttctttttttatttatttttgttgattctgttgctgtgcttcttatgttgtagaatttcgtttcactatgtcttatttgaaatctttatgaatttatacattgcacgcatgcttaccggggaatgaaataacgtcagtcatctctggttatcgagttattgtcggttagaactcggaagaaagaaatgaaagtgctattacagagagcatactttgttttatgttcttaataattggtatttgattattctaacaaggttgattatttgattttatttttcgaccattcatttggcactcgcggtttttttcccctggatgcattctcaaatctgtaatttttctataattcatcatgaataacctgacttggctttctttccctttggccaatcttccttttgtgaagcaaccctgacagaccctgcatcaaaattagtcaca

SEQ ID NO: 60345 - DNA, 697 bp, Populus trichocarpa
  Intron number 1 from transcript POPTR_0002s24510.1 (locus POPTR_0002s24510) derived from phytozome v7.0 (chr-ID scaf fold_2; pos 21871135 to 21871831 reverse strand)
aagttgtgccctagcctctcaatttcgtaattcaggtgattattgctttacctttttcagtaattttgcttctactttagaaaccctagaattggggtgcaatgttgaatttttgaaaatcatgcgtgattgaagcgaaattagggtttgtttgttcggggcaatcttttttgttccgtgttttgattaaatgtcttctcagttttacacctttgtctagcatggtttttcagcacccatgtttccatggtgtgatgcattgctgttaagttcctctaaatgcaagttcttttgttcctttttttctattttgaataaataattttgaagctgctgtaaaattgatctaaatgcatgctcactgaattctttttctattttggagaaataattctgaagctgctgcataaatttcttttcctgcatattttcttgtgtgcagtacttattcactgggtcagttcatggacacaagcatgttgatgtcatactctgcctccgaagctcatcgagcttgtggaacaacgatggaatatataatattaagacatcttaatttgttgtgatgagatgttgatgtttgatagcttttgtcacattacctttctgatatagatgtctttcattatgcttttacaatctcactttctctgttgtcgctgcggctgtgatatggtcccagaaaagaaaaaaaact

SEQ ID NO: 60346 - DNA, 620 bp, Populus trichocarpa
  Intron number 3 from transcript POPTR_0008s20570.1 (locus POPTR_0008s20570) derived from phytozome v7.0 (chr-ID scaf fold_8; pos 14339801 to 14340420)
aaacaagtagtgaacatattactaatgtgcttggttggattgatttaaaattgaagttgtttaaaaagaagacaattaacaaacatctaaaagatcaaatcaataaagaaaaagaacattggaaaaaaaattactgagaatcatagttgtagtgaaatctcttgctaaaataatctagcattgcatggaagtaatgaaaagatcaaccaaaagaataatagaatttttttaggtctaattgaaatgatcacagaatttaatttgattatgcaagaacatgttctaagaattcaaggtgaagaaatccaaaatcactatttaggacacaatatataaaatgaattgataaaactattagcatctaatgtaaaaaatgcaataacaaagaaagttaaagtaaaatatttttcaattatacttgattgtactcttgatataagtgtcatcataagcaaataactcttattttaagatgtgtagatttatcgacaagtccaataaaagtggaagaataatttcttgagttttttaatgtacatgacacatctagaaatgatctttttgataaatatataaatgcattagagaaacataaacttgaagttaataacataaaggga

SEQ ID NO: 60347 - DNA, 857 bp, Populus trichocarpa
  Intron number 1 from transcript POPTR_0008s00790.1 (locus POPTR_0008s00790) derived from phytozome v7.0 (chr-ID scaf fold_8; pos 350083 to 350939)
gaggtacttacctctatctcatcctctggtatttcctttcccgttccatgtttttttttcgatttaattcaacattcctttgtactatttaaacaagttgaagttttttattttctttagctccctcgttttctgtttgttcttcctttctcttgatacatttaggggttaatgtcatatacttccttctcgattatcaccagaatttaaacccagagtatacaacttattattttatcctgtataatcccttatcttgtggcagataagtacttgtcttttgatttccgtatcagaaagctgatgcaaatctggaaaagggacccctatagtgccgtgaccaaaagcctccacaaacattaggagctgctgcaattctatttctttcctgatagtattttcctagttagagttagagatttagtctgttattgctttcctagtttcctagttgaaatcggatgtttagattaatatttaaaggctgaatgaaaggaacagaggacatgaatttttggccaaataacgactttgaataaagttttcattggagtgattccaacaaacacagagagattttgtgtcttaccctgtccttggctttaacgtgaggttgattcaaggattgcaccaaaagcttttctgaaaacatcgtctcaccgcaaaccaaaaaaacaccaaatatatatttgcactctactccacaagcaacaaggagggaaagagaagagtggtgttgcttgctagcttctcttggtggaaagatgagaaatagaatgcgatgttagtttgttgattgtgtagcttttctactgtacgtaggtgaacgttcccaagacaaggaagacttactgcaa

SEQ ID NO: 60348 - DNA, 715 bp, Populus trichocarpa
  Intron number 1 from transcript POPTR_0016s14670.1 (locus POPTR_0016s14670) derived from phytozome v7.0 (chr-ID scaf fold_16; pos 13828217 to 13828931 reverse strand)
actactcctaacttctgcaactccttcactactcggtaataaacccatctttttgtttccctccatctcaacatttttatgtgcatataaggtttggtgggctgtcgcaaaatgttttattatttagttttcttcttgagggttttgtttactgttagaagattttcattttctaggtggtaagattttgggattataatataaagatctgttttttttgtcctctgtgtgtgtgtgtttatgcttaggcttggatatggagatctgcaagttgtcttgtttgtgcatttttattagtgttaatctttgtttttaactagctagagtaggtattaattattctaaaccatggattttttttaaaaaaagaaattaataacttaatcagttttttatacttaattaaccaaagattcccagtgtccttgttttatttgattagtacagtcctaattgcgcatgagtgctatagtatgtagattgtttttggagagaatggtttgatcatcttttgcaattttagctctttagttctaaaactcataagccatttcgaaaaaggactgaggaaaaggaaaagaatcccaaatctcaaattattttgtgctcctggactttctttaggggctagcagtgcccatgatttgaattcttcagaatccttgatcttcagcatcgtaatagatgtctgttcttccatacagtatcttttcag

SEQ ID NO: 60349 - DNA, 816 bp, Populus trichocarpa
  Intron number 3 from transcript POPTR_0008s08200.1 (locus POPTR_0008s08200) derived from phytozome v7.0 (chr-ID scaf fold_8; pos 5103744 to 5104559 reverse strand)
agtacgattagaaggtacgccatggctaaatggcaatgaaaactagtcttttaggtggtttcttcaagcatctttcttgaaagtgggttttttacaaccttccttttcacacttttgttcgtttggaattatttccttgaattaagaagattacgtattaacaaaaaagtaaaagcaaccactatcatccctgtggccaatccagtatttcctctccgatttatcattttcgatgttttttcattggcggaggcaataaagctgtgcaagattttggacagggaactcaaaaataacctcgaagtttgaaacttcataaataaaggtttttctaattgttaagaaatcttattaggagactatcttgtcaagataatcttctgtagctgaggtaatcctcatcttttaacctgtccttttacggaaattgtatgccttaaaggtaaggttggtgttcagaatagatagctaagtgaacctgaacattactaaaaaatgaaaaattgttgtttgtgtgcatttgttaacattggttagcattggattatttgggaatgcacttatgaattataatggacataacatgttatgttagtaaggcagtctcatgaacatgtcagctgatgtgtgtacttaataatatatgaatattcagacactaatgcagcatgcttgtgatttacggttttataccagtaacatgccaaattattttgtgatcatttttattcttgcttaatgacaaaatatgactggatacattcattggctctagatgcagtttcaattctgcgaattctaacaattttccatacc

SEQ ID NO: 60350 - DNA, 513 bp, Populus trichocarpa
  Intron number 1 from transcript POPTR_0002s11290.1 (locus POPTR_0002s11290) derived from phytozome v7.0 (chr-ID scaf fold_2; pos 8350780 to 8351292 reverse strand)
aagaccatcaatttaactagcttcttcgaaactctgtaagtatcaaagatctctaatcacataaatattgttttaggtctccattattctctcttttgaatggaaattcaccatctggtttggatgccgagagaaagcaagaagaaacaaaagagaacgctttctttccctttgttttattttctctctttgaatgtattagctcatgttatcttggcttcgaaaaatcgaagagtcagcttcactgatttttttaagtcattggaatgttctcttggagacacaaaaatcatgagtttcaagattcagattttattcacagcattctcagatttagggttcttgtttctattcaccggtgaaaatggaacagttatatatatatatatattcgcggaattatttgtaggcttcaaacattccgcaatcttctattttctgatttaacgggattcttttgctgtcttgatgtgcatactgcagtgaaatagattttgccagttatccgtgggc

SEQ ID NO: 60351 - DNA, 631 bp, Populus trichocarpa
  Intron number 2 from transcript POPTR_0016s05330.1 (locus POPTR_0016s05330) derived from phytozome v7.0 (chr-ID scaf fold_16; pos 3281090 to 3281720 reverse strand)
aacctcatattttgctggctgaggtatgttctcgtattgagttttgagctttcattgtagaatgtattttattactctatttgtttgtgggccaacgctatctactaaccaagaattttctctatgataggttgcaattttctgttttgttcacaactgttgcccatttatggaaactgacttcgaaaactttagtttctgatctctctttcttcctacactgttggtgctgaaatttacttttatgtttttcttcttcaaggtgggatttccaccccttcatcgataaacttaaaaaatatgaaggcactagcatacattttcatgcgatttgttcttagcattagttaagatagataggaagctaagttcaatatgcattgctacttgggtatcatatcacactcttaccacttgcttttatctcagcgctacagtttatctcttgcttttgatctcagtacttttgtaggaataacatcatctgtaaagcagatagtgcgcttagaaatatcggtttgatattcttgtagtatgctttgaatacgagttagactgggctaaatgaggagtaattttagcgtcatttctatcagattgctcagaagacagccaagcggttctgtatcca

SEQ ID NO: 60352 - DNA, 319 bp, Populus trichocarpa
  Intron number 1 from transcript POPTR_0016s00200.1 (locus POPTR_0016s00200) derived from phytozome v7.0 (chr-ID scaf fold_16; pos 3030 to 3348 reverse strand)
gggcatttgcgtctgtcgcttctcactgccttctggtacctactacattttttttttctttacttctttttttaattaatcggattgattgaatattattgttgtatctgtttttttttattttttattctagaggatgagagatgttgctttgaaggaagaaatgaagatgtgccattctaacgaacaagaagattttggaaacgaatttactcctactttattgggattgtctagttctttatcaaggttcctctcctctctcttcctctccagcattcctggattcttttttcgtgtatttgattggaaataggaa

SEQ ID NO: 60353 - DNA, 561 bp, Populus trichocarpa
  Intron number 3 from transcript POPTR_0002s20630.1 (locus POPTR_0002s20630) derived from phytozome v7.0 (chr-ID scaf fold_2; pos 16706836 to 16707396)
cccctttggtaatttttctctctcaagacacatgcaagcagtcattcatttcacttttggaactgattgtttattttgattcatgtcttgtttactggatatcaccagcattttgcatggctggtagccaggtgtgttgagtttcaatcaagccttaagaattgcgtcctagagtgtgggattttctgggcactgttatcttttgacagatgtatactacatgactcctaatgaaaattgaaggccatctgcttgatttttcttctagactctatatgctgttctattcttcatttctataaaatattactggttttgaatcttaactaaatgagatactgataagatttcaatgcagcacatctcattgttgcaactctatgattgtggctgcagcccccctctgtccactttttcacacttgagtctaaaacatattatggacttgttttaaatgggtgattgaattctcaatttacacctctttgacttgtacttcaaatattgatttatgtcgttttgacagattgttctttctggttttgggtctggagaacaaca

SEQ ID NO: 60354 - DNA, 387 bp, Populus trichocarpa
  Intron number 2 from transcript POPTR_0016s05240.1 (locus POPTR_0016s05240) derived from phytozome v7.0 (chr-ID scaf fold_16; pos 3191150 to 3191536)
gctttccttgttcttcataaaaccgagaaaaaaaagttagaagttaattttgcttgtaaattttgtttcttttctttatttccatggatcttttgcatataactagagcaacccacttgattaattcaatcgaattttcattggtgtactagtatccaaaagattggttcttggtattgaatgatcgaaggatatgaactgttttttttttattgattatgttaatttgatttcaattataaacacaaattttttgatcgaaattgtgagtttggcttcacaggggtaggtaatggttgtgccggcacgatcctttgtcttctagcagtcattgtctttggtctaaatagctgatttttgaggttctttttttgcttttcggtaggt

SEQ ID NO: 60355 - DNA, 694 bp, Populus trichocarpa
  Intron number 1 from transcript POPTR_2191s00200.1 (locus POPTR_2191s00200) derived from phytozome v7.0 (chr-ID scaf fold_2191; pos 1175 to 1868 reverse strand)
catccttagcgctgctatcatagggcaaaactttggtaacaatttctctctatattgaattttcaaatttaaaactatgcatatataagatattgtataatttttgtcttcctaatttcatgaatgcagaaacagctttactgttgctagaactggataaatcgctcgccagcttgaaggacaaaaatcaaatatctactcttcaacttctagccgaaatgcccgctgcttttgagagtgaatttcccatgggcgtatttgaaagactcatctactattgtatgcctactccaaccacattattagaccttacaatattgcctatatattcttgtttgaataccatggacatacacatacatatatatgtatataatttgaactctaaattatgttgcaggcctggcgagtgtcacgacgaggaatcaaagaggcggcattctcaaatatttaaaggtccctaaaggtattggacacaaatgtggctcacttttatagatgcacttcttcttttaattattttggtgttgttttgtttcatatatgataattaatttagcttatctctattttttcacctttttctatcattgactttctttctgtcatcattaacatttctttccatttcataaaaatggctagctctcatccatgtttaatttcattccctttcgcatgagcatgatgtagg

SEQ ID NO: 60356 - DNA, 377 bp, Populus trichocarpa
  Intron number 2 from transcript POPTR_0008s10520.1 (locus POPTR_0008s10520) derived from phytozome v7.0 (chr-ID scaf fold_8; pos 6595318 to 6595694 reverse strand)
tcaaaaacattgctcaagcccttatttacaaggcacgttcaactctctcttgctctctctctctctctgacttcttaggcagctaaattgaataatattagcaattggtatcgttttccttgtttgatatttgcaatttggctcatgggaagatttagggaaggaaaaagaaatgaacctttcagtatcacattgaattcttgggcagtgcaggagggtttgtgtttattgctgttttgttgttttgattgatgatggtttctttggtgtttaagaacaatttgtagtaagatgtttattgatttttccaaggattgagattatttttctttttttttcatgagcaggctaagcaaaagcaaaagggggctcagcga

SEQ ID NO: 60357 - DNA, 1041 bp, Populus trichocarpa
  Intron number 1 from transcript POPTR_0008s10520.1 (locus POPTR_0008s10520) derived from phytozome v7.0 (chr-ID scaf fold_8; pos 6595963 to 6597003 reverse strand)
ggtggaaagcgataaataaaacggcagataaaaaggtaaatcgtttcttttcttttctttttttacttattagatatctaaagtatttagggtttgttactggaatggtgaggacatctttaattatttgatgcatttcttgctctcaagatagcattacatgataaaaaatggggagaggttaagaagaagctgtgtctttttattttggccaacaaaatcctctcttgctctgtcaaatgcttcttcaagtggcaactttttagtttgtatatatattcaaatcacgaagaagactttttattgtattatttgtgtgtttttaaataatttacacagaaagaacttataaaagacaccgaatctcattatttaagattttttgttttggaggaggaattatttatatggtagcaaaaatgtgaattttgttagcgaatatggctaaatgatgagttaagtgccgtgatgtaatgtaatacatatgctagtttaatactgtttcatcgagatttggttgagatggtaccagcatgatttcttatgcccttggacctttttgttcagctaattgaaatgaaagaatattgtcaatctatttctttagccaacactagagatcatagcggaattgcctgaattagtatggaggtttgattctttctgggttgctccaccaaatgaagagagtaaattttgaggagattatttttttttacggtaatttaaatgtgaaccatagagtagaataagggatgaagttgtaacacaatgcaagtatgcaatttgtgtgatacttaacgtttcattatcattctaaaaaaaagaaaaagaaaaaagaatttttttttgccattgagcagtggctggtacagttgggaacacaatgtagtttagttgcatatgtagttctgttttgctagtaataatcacagaaagcacgtgccactcaagctagttttataatttgtttgtgcactgcaacaggcttgcaagccattttgacatactgcttcaacagctctggactggtgtgataaa

SEQ ID NO: 60358 - DNA, 928 bp, Populus trichocarpa
  Intron number 2 from transcript POPTR_0008s10450.1 (locus POPTR_0008s10450) derived from phytozome v7.0 (chr-ID scaf fold_8; pos 6541075 to 6542002)
agattgaggtaccaatcattttcaagattttttttaaagatatcttattaattaatggtattattaaaagatcttgcttgtgtgtggaacatttattttcttgattaagaatagggtaataatctgaagctcgaattccactgcttggggtttttgcctaaataatttagattttttttttaaatattacaatgttctggaattagttaaaaaaatggatatgttttactagtaaatgtggtatgatttatgaaattttgcagaacaatacaaacgttttattttagctgtgtcgggtttcttaatgatgttcagccttggtttaattttactttggtgaatgcgataagtcgatgccttgttttgttgtttaaacgagagtttaaactaaacaaatggataggggatggagaattcttaggtatgacaatctttaataccagtacttatcaaaaatttagaagactttttttttcccctctgaataccattaaaaaggataggtgatcttaacagagtgaaacttcaatgagttcatcatggtttgatgactttggagacgatcctgttacatattggtttgtggattacattgaacatttgttgacgaaaataaatttatatatatatgtgtgtgtgtgtgtgtgtgtgtgcatcttttttctccatctgagctggtatttcagatcttgatgtagaatcacagaattctgtgacttgatctgaattttaatcatgcactattctgtatgcaaaccaaaaggcactgcagcatgatttttttcatggaaatttgtccctcatcttttggtatattttgattcttctttggctgatacctgttgaatgtcttccctttatcaactaaacattacacttgtgctgctttacagggagaaagaattggctgctgtgaagatcaacgcag

SEQ ID NO: 60359 - DNA, 699 bp, Populus trichocarpa
  Intron number 1 from transcript POPTR_0016s03280.1 (locus POPTR_0016s03280) derived from phytozome v7.0 (chr-ID scaf fold_16; pos 1680098 to 1680796 reverse strand)
ggcttcaagggttcagcaacaacaagcaatcagaggtattttgattttctttctctgatttattgtcattatttggttcttcttctttgtttcttggtcaatgattgaataaaataataatgggttctttccattcttcttcataatggggtctctctttagtggtttttgattaatcattttgataataggattgggcccagatgtgattacatgtaaatctgttgtttcttggtgtttttattttgtatttatttatgattttttggtagccgtgatgattctttaatttttatctcattttatttgtttatttttaaaatcaatctattgttttccttttgggtgtttttagttacagaattgattgattacaatctttatatgggtttaatttaccttctactgttgtttgatgaaaaagattagatcttgggggttgatttttctttttcgtttctctctttcctctttggtttgttttcgctatagtttatgtttggttactgagaaaattaaaggaaacccaccagagaaaacaaaagactgactaagtgaccttttttcgtttccctcttgagttcatttctttcaatattttattatatgtttgttgaatcctggtttacaatgagtagatgatggattctaatgactgataatctgtcacaggtgaagcagttgtaggtgtaaacaaga

SEQ ID NO: 60360 - DNA, 553 bp, Populus trichocarpa
  Intron number 2 from transcript POPTR_0034s00220.1 (locus POPTR_0034s00220) derived from phytozome v7.0 (chr-ID scaf fold_34; pos 110914 to 111466 reverse strand)
tcatcaaaatcagattccaggtctttctttccttgtttcttttctgtaaagttttgatttttttaatggttgaattataaagtttgaatttttattgttctgcaatgatgggttttttaataggcttgataaattgttcatgaatctatatgttagctatccttttcaatgtaatgtgatgtgatgatttatatgaataaattttcactgttcatttctattgccaagtttttcgatagagtatatctgtgaagttctgttgtccatgtgaatggaattaacatgcaacttgaataagaatttggagttcacgggggaggccggcaaatggggaacattgatctttagatgaaaaagagctcatgctattgtgcagtaaaaaaagagggaagaggttggacagctgcaatttattttatacactggtgttagttatggtgtgtttgtctttcaaatgcatggttgtatttcgagtcaaaagtattaagttgtgatgctgagaaaaatattgggttgtgatttgatgacaggttcaactggagccgacatattc

SEQ ID NO: 60361 - DNA, 488 bp, Populus trichocarpa
  Intron number 4 from transcript POPTR_0008s02440.1 (locus POPTR_0008s02440) derived from phytozome v7.0 (chr-ID scaf fold_8; pos 1185359 to 1185846 reverse strand)
cattgcagccatttttctactggtacgagtaggggtctcaaccaatttgatcatcttttgatctttctcagttgacacttggaagacggggcatgacatttgttccataagtttctcttctatccatgctcttaattttttttgcataggtgcatttggcttagatgcaacgtgcctcaaaaacaataaaggaaaaataaaaaaccagaactttggaatctagttcttgctagatggactagtatctgtaaatgccactgaaaagttcgaaagtcagaatctaatcctgctcctttccttctccacaaactgcatgtgtaattatgaaatattgccaaggttttgaagcaccatttcggttgtgatcggaagcacaatgggatccccacttcctgttatgagcattctgcattgttcagggaaattttgctctttgctgttactaaaatgctgtatctttctgcttggtttcaggctggatattggag

SEQ ID NO: 60362 - DNA, 566 bp, Populus trichocarpa
  Intron number 3 from transcript POPTR_0002s10670.1 (locus POPTR_0002s10670) derived from phytozome v7.0 (chr-ID scaf fold_2; pos 7748657 to 7749222 reverse strand)
gtgaagcttcgaccgaggctgcagcttgtgttaaggtgggcttctatcccattactatgatagtgattgtttctatatactatgtgtgatacaatctgttgttgtttgtttaatccttgtataaatttcgagttttggagattttatgtaagatttctagttcagaaactcatttcaagagttgaatgtgtcaaaaagaaaaaggacgaattagttttaaattttccgttgtcaactactcgcatacagataaagggttgaaacgtgtcaagttaattatagtttccaaacaaatgtaatgatgttcaaaggggcaagggcattgtaaaaacaagatggtttccaggaaactactgtgaccacatgatagagcttgaggtgcaaattttttatgtattaatcatttaacggactccttctctttgagatattccaagaaggcaaaacatgcttgaataatttgttttatttgattcctcttcattttctatgtccagttaccttattgatgagaatggttgttttggttaggtattaatagcatctggtttaccaagtgattcaac

SEQ ID NO: 60363 - DNA, 508 bp, Populus trichocarpa
  Intron number 3 from transcript POPTR_0002s24520.1 (locus POPTR_0002s24520) derived from phytozome v7.0 (chr-ID scaf fold_2; pos 21878925 to 21879432 reverse strand)
gtaaattgttgcgggacaagtacagtcttgctgctgtgagtaataatctaagatgggattttgagatttttttttgctaattgttcttcttgaaatttattttttgttgaatttgattttgaagttattgattattatggatgtcaaacttgttaaacgtaaacgttccagcttaaagaacccactttatctcaagcagcaaattagcagctgcagcccagccctgaaaggagttcattgttcttttgtttatggtgatatataaaacattaattcgtaaatagcatctttgcaaatgatcctcatacctgtgcctcaaagttgctataccaagagctttttgcctaaaatttcagaagaaaataacgcgggctcaactaagagcttttcacctaaaattttcagatgaggcataatttgtgttctcttctatcgtcaatcgttttaaatgcatggtcatgaagattgattaaatgctgaagagctatactgttatattaggtaacaa

SEQ ID NO: 60364 - DNA, 290 bp, Populus trichocarpa
  Intron number 1 from transcript POPTR_0008s04180.1 (locus POPTR_0008s04180) derived from phytozome v7.0 (chr-ID scaf fold_8; pos 2342479 to 2342768 reverse strand)
ataactctgctaccgtggttaaaaagatataattctttcgtttgtttttttagatacgttcaagtttatgtcttctggctttgtttttttccttgcacgatttctttttcttttttggtttgatggtttatttattgcgtggcttcttggggttgtcgaattctttttgttttgaatcaagtttgtggttttttctcattgctggctggatcttgtgatggtcgtttccagggactaatttgcgtggttttgggttgttttggttaagggtgatattgtgctgcagcatt

SEQ ID NO: 60365 - DNA, 1043 bp, Populus trichocarpa
  Intron number 2 from transcript POPTR_0002s16300.1 (locus POPTR_0002s16300) derived from phytozome v7.0 (chr-ID scaf fold_2; pos 12185063 to 12186105 reverse strand)
aacctcatttaaacggaacgcccgtttattattatgttagtaatatttactttatccttactctctaagtatatgtatatgatatctgccggtcatgtttgttctagtagatttggttgacattaatgttgtgtcattatggtttcttgcttctgttgaagtggatgtgggttcttgcagggcgaaagttgtgcttttcggaattgtgcataggattcggaactagctagagttttaggatctctctttgaggtttaaactgggtggggttgttatcatacaagatggcgtttttggttttccccatttgctacagtttatcctcatataaatgcactgctatagagatagttttgaagtggagctggggttatttaatggctgttacacctgtgaaatgttacactttggtgttcaatcagtttggattgggaaaggaaaggctattcttgagaatgttttatgcgataatgggagaattttagggtcaacgttgcacatataggggacagaacatgttataactcagttgttttagccatgaatataagcttaaaaacatgcctctaattttagctttctaattcttgcactatttcacaatccgttccttgaatgacagcaagccaaatagagaaaaaccttgatgctgttcaaaagtgccatttgattgatcaatttttgtgaatgattgcttaattgaattgtaatctataggtttgagggagctttattgttgagattctgtaagagaactgatgtaagatgcaattataaataattcttagaacagactgatactcaaagtttgtattctgcactttttttctactccattctacaatgacatagcctaaaactactaccacttcaagcaaaatatcttgaaaatgggctcatataggttcttttggctaacaaaatatcatcttgaaatttataacatccttgtgcagtgtccgccagctttggaagagcatgtctccttaacatctcacaatgttgcagcctctgcattcactgcaggtctccttgttgaattg

SEQ ID NO: 60366 - DNA, 1000 bp, Populus trichocarpa
  Intron number 1 from transcript POPTR_0016s14650.1 (locus POPTR_0016s14650) derived from phytozome v7.0 (chr-ID scaf fold_16; pos 13820737 to 13821736)
gcttgtgcaatcataataacgttacaacataggtgagcttgctatctatcttgtttttggagcaatttttagtgccctatctatatattgcagatctatattttgtttgctctcactcccagcctagcacaagactagaagaagaatcttcttggaaatgtgcatatatatatatatatatatatatgaactaatcatagacttgtaatcatccaggcataagtcagcccacggcaatgtgccacgctgaacatgcaaatcctcttgtgaatgtctcagcaagtaaactcggtggaaggttcatctaaccttttaccagaaaaataagatattaccctttcaacatttcctcaagtaatcttttctcctaattaatccaatatttcgtatctgattaagacattcaatttgaaaacctcaattataaatagtactattctctgtttatgaccttcaaattggaattttcaaattgaacagtagttaccgagaaaaagaaaagaaaaggagtcctgtctccttgaagactgacaatttctttataattttaaaccatggtgtgatatctatgcttagataaaaatattcctatcttaaagattcaaaaacatgattttgttacagtagatattccttgttcttcctccaaaaccacatagtgtaaagccaacttttgcactcaataaacaacattttgtaatctagttttgagggtcacctttactctaagaacatggctttgctttcaatccacatcttctccctgtgttttatacttagcctttgctttcctctacgttacatcaaggttctaaaccctataaaatactaaagtaacaactttaaaaatttactattttttatttgtaagtatgtaaactaattaattaaaatcactctaatgtgacacgttttatttctcggtaacatctgtggggtggtcttttttctttcactgatatttattttgttctgattggagtaggagcaagaacatact

SEQ ID NO: 60367 - DNA, 647 bp, Populus trichocarpa
  Intron number 2 from transcript POPTR_0002s25220.1 (locus POPTR_0002s25220) derived from phytozome v7.0 (chr-ID scaf fold_2; pos 22371288 to 22371934 reverse strand)
atcgtcgttcctcgccgaagggtatgtatatatatggagcatatcattgtatttcttccatcttttggccctcgacaatttttctagccttgtttcagaaacaattattcttaaaattttattatcagatgattatttaacatcatcaaacaatcgtaaaaagggagcatataatttttccatgcctagtttccgggtattttttttttcatgctttcttcatgctcatgaatgaagggatcatgaaaggttgtggtggggctagagtgacaagtaaaagttcaaagaagaacggggaagaaaaggaagattcattaaaagaagtttaagtaaagggggcatgaactaggggacataaccatatgatgtgtagaggatgcattaagctttgatcgattgcttttcattcatatttttttaaaaaaaaattatggcgtgcgggtcatgtttccaagaaaaagaaaacaaaagaaaaattaaaaaaaaaatcctccaaagtcttatgacaacgagggctagtctagggcctaggcattgatggatgccatggctcagctaactagcaacacatataaaattaattatagttccattgatagcttcatttgggaaatggtggttacaattgatgaatctctcaggaaaaa

SEQ ID NO: 60368 - DNA, 753 bp, Populus trichocarpa
  Intron number 1 from transcript POPTR_0303s00220.1 (locus POPTR_0303s00220) derived from phytozome v7.0 (chr-ID scaf fold_303; pos 15225 to 15977)
ctcgtggaaaaactaagaaatatcttctcgtccaggtttgatagtttaaattcctctctagattctttcaaggtaattatcaaatgttaagttgtgtgttttaaatggtatatttgtgaatcattatgggagccatgactcacatgctgcatatttttctaggtagtatttagcaacccttacacacaattatctattctaggcataagatacatccagctgatgttcgtaagcttataccaacttagccaaaaaaaaacaagaagaaaaactctatcagcaataaaatagactgtagatgctgattcaagccacttctaacataaatgtagtgtttgtctctggctatgaaatgactacccaacaagtgtttgttgttttatatctcaaagtttggaaaacttgagagttttgttcctgattttgatactgtgaatctgattagaattctgaaatgttttaaattccatttcatgctggataactgatgaaagttcgacgtacacaaagatttcttgctgaatgaattgtgctacatgccaacaatttcctgtatcgtataattaagattggtatgaattcatgatgagtagattgtagaaagttcaagccttcattttttgaaataacaactctcaaatgctgtggggaaaaccttgtgtatgtatgttctatttattgagtttacaaaatgtttattttgtttattcgtgtaatagttgtttaacaccttcttcctctttcgtttggtag

SEQ ID NO: 60369 - DNA, 764 bp, Populus trichocarpa
  Intron number 1 from transcript POPTR_0016s08380.1 (locus POPTR_0016s08380) derived from phytozome v7.0 (chr-ID scaf fold_16; pos 6182689 to 6183452 reverse strand)
tctgagcaagagaaacgcaattctcgtgctgaaaggtataaaatatatttttcttcgtgttttaggtttattagttttcatttactattttgaactttgcaattagggttttaaatttctttcctcttttttttcgcttggattagcggaccttgattcaaagttacatacataatacatgatttaagttattctgtgttgttgtggattttttggcccaaagtttagattacatacgcgttgttctagtgttcttttgggagcttaactggtattttgaaaagtagagggtatattatttttgggaatgaaaaccgtaacttcgcttctttaatggtcgagagactgatcttgagttgtttagaaaggtgtgcatttggcttgatctgttatagtatttataatacaaagttaatagttggagtccataaagcaagtcatggggaactttgtttcaacatttgcatgcatttgcaactgcttcggccctggtgattccagcatgagtctctgaaggagtttatgctttggtgtgtatgcttgtgcttatgtgcaagtgcaaatgcttatgtgcaagtgaaaatgtgtgcgtttgtgggaaggtgttgtatggatcaaatgattttctaggtgcccatgggatttttcccatggaaatgtctgaagaacttgatttccgttttcttttcactaactgaaactttcatcggtgaacctatcatgctgtaggtttggcactagcacgggcacgggcaccggcaccg

SEQ ID NO: 60370 - DNA, 1035 bp, Populus trichocarpa
  Intron number 1 from transcript POPTR_0002s04680.1 (locus POPTR_0002s04680) derived from phytozome v7.0 (chr-ID scaf fold_2; pos 2928425 to 2929459 reverse strand)
tctgggtctctttcaattgacaattttaaccaagcgtaagtcttttcatgatgttgcaactgcccattttgttgttaatctttatctatttattagatttgcagctaactagctcgcgctcgcgaaaattctcgtgctttattgttctggaaagttataactttgtgatgcatgtaaataatccctgcttgtaaatatatcacatgtcggtagttcctgcctacgctcacttagctttatgaactgtaaagtttgtgtcttttggagctttgcgtatgttttttcagcattttatctatctggggtgacatgttaatgcgtctagaattaaactatcatcatgtaatgagtgatgagtgtgatgagctaaacatgtttgatcactttgtttatgctggctagaaaatatgccctctaggtttggagatttcctagtgtaagatatttgatgccagcagctttaagttgaactatgaagcaagacaaaattggggatacgtatgaaaggctgcctagttcatagttaagaaagacactggcctgatcctgttgaaaagagcgtgttatgcttgacgaagggcaaatattccagaaattgaagattgtcaaatgtagccaatggcgttgcaaatattatttccagttatgtggttttcataggaagtacagctgccaatgttttgagtaaagtttagatcaacacaaaaacagtttgtgaagcaatacttaaatttgattcagacacaagaaatgtatgctttgctttgtaactctttatacaattcgcaagttctctttatcctcactaatttatctcggtcttgtgtgttatagtaatcaggctgtcctcattctgtcaaatttgttctttttttggtagtgtccttcgtttcacatttactctgcatcactttgattacttttttttttgtcgcatgttgaataacctaacaatatttttcattacatcaatcgcttattgctgtttgtgcatacacaggtttcctatcattgaacctgatcctggccatacaa

SEQ ID NO: 60371 - DNA, 645 bp, Populus trichocarpa
  Intron number 1 from transcript POPTR_0016s03300.1 (locus POPTR_0016s03300) derived from phytozome v7.0 (chr-ID scaf fold_16; pos 1702745 to 1703389)
cgttcaagttttctccattctctaaaaatctccaggtaatcctctctctctagatctccaggtgtttttgttcacattgccattacttctcgttcattagatttatcaattttatttagtgatttttatttcgatttttctggtgaaattttgtagatcttgcatgctcttagtcgattagatctctggatctttaaaattttgtatatttatttatttattaatatttttaactgcaacactgccttcttatctatggatagcgattttattgatttttttcaatgttttttcagttattttagcttatgatggttacagaagtgagattatagtaacaattttatgtagtttttgaaatcaattcagttatagtgatattgtcttagattcgatgatttgtttttattaatttcccttctacgtagtaattattttagatcttacctatttaattgccattttcacttcttcatagtgagcatatagtaattcatgcgtttttttcttaaacgaatatttatgagtgatagatctgttatattttattttatttactttaccttcattggaattataagatttgttagctgtgaaattgtgtggtgctgattgatagtagttttgatttttgcagaagcgaca

SEQ ID NO: 60372 - DNA, 881 bp, Populus trichocarpa
  Intron number 3 from transcript POPTR_0016s03300.1 (locus POPTR_0016s03300) derived from phytozome v7.0 (chr-ID scaf fold_16; pos 1704093 to 1704973)
ctgcttcaggactcttaaattgactactccaagctgtaagtgaaactgaaatgactgtaagttgcatctgtcgatcactttaaattttgtctgaatctagtttatcatgtcagcagttcatctagttggattgttttttctatgtattttaaatatggttcatgtaattgtggatttgacatgttccttaatgactcattttgttctactgatcacactttagttaattttgttgctggtttttgtgtaatgtataattggtgctctttacatttgatttatggagataggttaacattatgcaaaatgatacccactggttccataactttgaatatttggttgtcgtgactactagttttaggttcccttttcagtaagcatgggattgaacaaacttttgcgcagttatatagttccttgtcatatgcttgttgctgaggaatcaacattgctttatatctggcagaggttgtcactctaccctttttcttgagagacattgtcagtaattagggtagagcattaaccaatcacagttttgagctgcaattgattaggcagataggatgtttgcaatctttaacgtgttgcacatagaaaaatagaagaacacatgagtagaatctgaatcacagttttgagctgcgatttgttaggcatatatgatgttggcaatctttaacatgctcatagaaaaatataagaacacacgagttgaatctgaatttcttgctttggattttcttatatccatcatttgtgtttaccttgtactgttgctgttgtagttgttattttttggtttctcggttgtgttagctcatttggatcattattctcttacagttggtgatcttaaccacttgatttctgcaacc

SEQ ID NO: 60373 - DNA, 1004 bp, Populus trichocarpa
  Intron number 2 from transcript POPTR_0008s16690.1 (locus POPTR_0008s16690) derived from phytozome v7.0 (chr-ID scaf fold_8; pos 11224106 to 11225109)
tgatacgcttttggactaaatttgctgaagagaaggtgggtgattattgcttaccattctcttactttgtttattgcttgatttttaatttaagtggagcacgtaagtatttcacttagttttttctctctttcctttttgtaatattaggactttattgcgagaaaattcaattaaaaataataaaagtgaagtgagaaaaatgatgtgagtttctcgtttggcaacgtgtgctttgacacgtccatgtaattaagcatccaattaatctaataaaaaaaaacttctgtaagagtttgcgttaccaaatacccatagatactctcatccttttcttttcttttttgagctaggaatcttgaggggttataaatgtttgaaaaaaatatgtttaagattagatccccagagagtgtggcgtaatggcaaaggatttgagatctgcacagcagatctcgaattcgagttagggcgtgcacctcttgtaagagcctgggacagccagggttttactcgcttatttagacccacaaagtgcgcttcccggaaggtgaggttttctcgaataaaaaaaaaagattttaagattagtatctagaaatttttattaaattatttgaatatattagagctaataggaggggtgcgtgatcacttaatttatgcaagaaaataataattttgattgacgttaacgaactcaaacacacacacagatatatatgtggactagacatgatcagaattgggcaataaataactacatttattacaaaataaaaaattaatatagtttatgatttatatctccatgacttcgatgtgcgatttattatagcttggaatttatgacgccatttaactttcctattctttttgaagattttgcatgctgcatggaatgcaatgtgctcccgaggagaggaaaaggaaaaggcagcaaaactaaccgttgacgtcatagaaaagatagagggagagctaaaagggaagcaattctttgg

SEQ ID NO: 60374 - DNA, 1066 bp, Populus trichocarpa
  Intron number 2 from transcript POPTR_0016s03760.1 (locus POPTR_0016s03760) derived from phytozome v7.0 (chr-ID scaf fold_16; pos 2109012 to 2110077 reverse strand)
cagtgagaagggtcttaccaaaagacatacaagttgtaagttgtagatctttgaattttagagttgatgaacttttgatatgtgctatcttgttctactaattttagcagtagaattattttgtatcaagtaagcggccaatgaggatagttgaaaaatgctattttttgttgacaaaattagttttgacctttggcttcctcaagcaccttgtataacaaatgtagttccgaaatgttttctctgataggctacttgaccctgtgttggaattgttctagttgattttcgcggagatagatgcaggaatctttgaactgattacatgtcttcgttgctagatagcagtgccttatatataaccatcagcacattttgattctttcctaaggcctttccctgataaatactgaaatggaaacttgattttaatatagaaatccaggtcctaattggaaattcttcttcatgtactgtaaatttggaagtattagctgacattagtcacctgtgtatgagcttaaatctcaggttcttaagttaaaggtcaaataacagacaacatttatgttgtctttccatgcaagggttaatgatacccagagggaatgcatcttgtctataggattttgggagttcaaatcattatgttgagctaaatgtgtgcaggtccagagagccatgcatgtgatagcttcgctttatttttatgttggtgactcagtagtactttttctgtgctagccattcaacattaactaatttagaaaaaaaatagttgtaaataaccacgcagaataggacagtctggatatctgctatgcacacaatacccagtgtgtccataaaatatttttatgaacagctgttaattagagattgtctctcatctgtatctttctttgggaaaaatgggtttctgcatcagaactcttttcatggggttgagggatcattaataatcttttagaccttgacataacaatgcagtcataaaaaatctcctttggattattgatgtttttttccaggtgcaaaatctcatagagcggtgtcttcaactgta

SEQ ID NO: 60375 - DNA, 394 bp, Populus trichocarpa
  Intron number 1 from transcript POPTR_0008s05360.1 (locus POPTR_0008s05360) derived from phytozome v7.0 (chr-ID scaf fold_8; pos 3107199 to 3107592 reverse strand)
gattcctttcattggtacaattttgacgctttcaggtatatgtacatattatatcacagatttcaaactactttctctctctctcttttttaagctcttttctttgctgtaaattcctgtttggttcgtgaggaaacaaaaagtgtaagaatcaaaagggatgtctcttcaaatgctctagattcagtttttttttaaaaaaaattttttttatctattcccgctttttgctttttcgtgatttttttaggaagtccaaaattgtttgaaaattctttatttgacccaactacttcctcacgatttctgcatgtctgagaagagaaaaattaattttatcaaaattctttcctaaaatcacttaaaaatgttgacagatacgtttttgctgcga

SEQ ID NO: 60376 - DNA, 605 bp, Populus trichocarpa
  Intron number 2 from transcript POPTR_0016s01550.1 (locus POPTR_0016s01550) derived from phytozome v7.0 (chr-ID scaf fold_16; pos 703166 to 703770)
tgtggtggtaagttttaaggttgcccctttatttctttttgttttttcgttagatagacaggaagtaaattgagagttttattttgtgattatctgttcacttccatcacaaatttattatagacatttgggttggtacataagtacattaataaaaacaaatcttgatttgctgatagaatattttagcttcaaattaaagactcaggtcatgtagttatgtgctaagcacaaaattgagctgtgctatttaattatataattcacaaaattggctttaagcattgaaggtgagtagttttgaaatcatgcctggcagcaggactaattctgataaggaaatgatttgcgactgggtagaagttatgtaggtggtttttttttgtggagtaaatgatggtgaaatgttaaagttcaatgtttaataaagaagtattggagttagtagaaaaaagaaggttatggtttgaatcactttgaagggtagattctgaagattgaactgtatcatatagttttccaatcaatcttgttatttttttcccaaaattatgtgaatgataatccttgttgttcttttgaaatagcttgttggaggagaggat

SEQ ID NO: 60377 - DNA, 467 bp, Populus trichocarpa
  Intron number 1 from transcript POPTR_0008s07670.1 (locus POPTR_0008s07670) derived from phytozome v7.0 (chr-ID scaf fold_8; pos 4695963 to 4696429)
tccatctctcgttctcatcactggtgatctcacaggtataattatttgttggtttttttcttttgcgagtttgggcttatgagtgtttgttaatttcaagcttgactctttttgttgaatcttgggggttaaattatgtgaaatgtatatgcatttataaagcaccgagctccattcccaaattagaaaattgagtggaagagttttgatgcctcgggatcttaatgctaatcaaactgtccctttttgatagcttagtcgatcagctttagatagctgccggcatactgcaaagatttatccttttcatgcgcgtcaattttttgcctgtgacatgcaaagacatgatttttaaaacatatgaataagccaagtacataatgttctgatttttttaatgaactttgcgaatcacgatgatggctccgctgatacactggaaacttttttgttgctttttttaccag

SEQ ID NO: 60378 - DNA, 283 bp, Populus trichocarpa
  Intron number 1 from transcript POPTR_0016s04280.1 (locus POPTR_0016s04280) derived from phytozome v7.0 (chr-ID scaf fold_16; pos 2471943 to 2472225 reverse strand)
actcgctttcttactccaatttgttcaatcttgaggtttgttcacatgggtttttggttttctcaattgggttctttttagttttttgaataacttactctttttttcttttttagattggattaactagttagttttgggatttgggaagatgggtttattgaaatgtgctgaattcgcattttctttgtgtttttggttaatgtttgattttgtggattttggattgtggtttttgttgcttgtttttagtctttggtgaacttcagagttccacaaccag

SEQ ID NO: 60379 - DNA, 414 bp, Populus trichocarpa
  Intron number 1 from transcript POPTR_0002s22180.1 (locus POPTR_0002s22180) derived from phytozome v7.0 (chr-ID scaf fold_2; pos 18866920 to 18867333)
aagactggttactattttaggtaatttatattacgagagtagcagatagatggtttactctaattattactgtatttatgactaattgttctacgatttttatttgaattttttgttcctgtttattagtgttaatttactctttaatttactctaattatttgaacgaggattgaaatttctaccagtgcttgatgcatatacaaaattttcatcgacattttcttcatcatgcctcaattcaaaatcaggtttacatgatagtgattaccaaattttcattggcattttcctaagttctccatatgactgaagaagttctaaaatttttgtttgaaacttgaattagttggtgtcgattgtcaatttgcaagttctcactgttattaattttactttgatgcttcctcaggt

SEQ ID NO: 60380 - DNA, 573 bp, Populus trichocarpa
  Intron number 4 from transcript POPTR_0016s01760.1 (locus POPTR_0016s01760) derived from phytozome v7.0 (chr-ID scaf fold_16; pos 802113 to 802685)
cagtaattgtaacatattcaggtcagtctttaaaaaaggcaatctttacctaattattcaggtcagtctcttatctacatggtctatggtaacatattcagattctttctggaagaattttgttgcagcttggattggtctggtattattcatggttctcttcatatcatgcaacatactagaatttgatgaccttctagctagaattagtttgattacagtagtctagtatgagaacagaaagaaaaggccctaggcgatattagacgatgttgccatctgaacaaaagttaaggctattcacaagaaaagcacctatcttgaattttcagcaagagctatgcaagccacacatttatttagtccccactcaaataaagaccacaaactaattatcttctaataccatcctggccagcacactacctcatcagttatcttcaacattactgaaaaaaaaaaaaaaaactgaagcaaaacacacaacgaaatttataatacatgaagaaatcagagcttgtttttgtcccttcaccaggtgttggtcaccttgtaccggcagttgagattgca

SEQ ID NO: 60381 - DNA, 445 bp, Populus trichocarpa
  Intron number 1 from transcript POPTR_0008s23240.1 (locus POPTR_0008s23240) derived from phytozome v7.0 (chr-ID scaf fold_8; pos 18570787 to 18571231 reverse strand)
aattatcttatactatcgaagttcaatataagcaggtaccgatacgcgatcaattaaccgaatttgaactagattttgtttttaggtttctaaattttgtgtgcgaatttgattctttaggttttgaattttgactattcaatttgaatttgaatttgaatttgaattaggccgtgtttggatgctctaaatattcataaaaaaagctagtaaaaagtaaacttttgaagctacacattaggtattgaaacattattgaaccctctaatttgtacagaatcttttgactataatttcttttcttgttttcttgaagaaacagtattgtacaattttattttatttttggaattagtaggggcaaataaatttgaaatttttaacgtgcaattttattttggtgaatgtagttcaagtggagattattgaagaaagcggcacaagt

SEQ ID NO: 60382 - DNA, 661 bp, Populus trichocarpa
  Intron number 1 from transcript POPTR_0086s00270.1 (locus POPTR_0086s00270) derived from phytozome v7.0 (chr-ID scaf fold_86; pos 54338 to 54998)
gtgcattttacttcacaggtatctttatagtagaggtgagtaaaaaaaactgaaaaactgattaaatcgagaaaactgaaaaaaaataactgaaaaaaccgaaccgtgaaaaaaagtgattaaatcgattaaatttttaaaaaaaccgaccggttcggttttacaaacctgaaaccaaaaaaatcaaaccgaacataaaccaaaccaatttgaaccggtttttgttctaaaataaccgaaccgatattttttggcttagttttgaagtgaatttttatatttttaaaatcataaagtacaggaaaatgtatcttatctgtctccaacatttgtttattctgaaatagtaattaaatgctagtgattgtttaatgccctagaagtttcctgcttccccatgaatcatccaaaaaaagaaaaaagttcttataattaaactcatgaacgtatggatcgattgctgctacataaaatttctgtttcaagttcttggtctgcaattttcaataattccttgctcttattttctgtcctgatcttcaagttggtgctttgcctcttcatggtttaatgaatatttggcttattaagaaaaaaaaatggtaattaataacaatatgttggagataatcagtctaatcgtttggttttctcttctaac

SEQ ID NO: 60383 - DNA, 661 bp, Populus trichocarpa
  Intron number 1 from transcript POPTR_0008s08780.1 (locus POPTR_0008s08780) derived from phytozome v7.0 (chr-ID scaf fold_8; pos 5431630 to 5432290)
ccaaattccactcgtcgtttgatttgctccttaaggcaagttttctttctttctttttttgttgtttctttccccccctacaactcatctcttcttcgtcagaaagacagagagagaggcaggcagatacgtagattttcctctttcttttcattaagaggaaactgggcagtgactgtttcattcttttgttttgtttggcagtcacaatagctagctaaatggcttagttcttcttggctgttttattttttttcctttttaaattcccagtttcttcttttcctacgatcccatttctttccctttctctcttatgtcaaaactattgctttccatatctgcatttgttttttgatcaactttcatttgtcaaatctcttgtctggtctttatgtacttattgttttgatacttgatttcggtgcattaggtattaaaaggtgtttaatcatgataaatttgcaaactttcgaggatattttgatgctaactgatgaaaaattaatacctggtttgaaatacgtgcttaatgttggaaattaaatgctgaaatgaaattagaggtcagtggaaactctgagaaacgtggaatattctatataggctttcaaatcaggggcatcttttgatacttacatggcgatgttaaacgtgcagg

SEQ ID NO: 60384 - DNA, 564 bp, Populus trichocarpa
  Intron number 2 from transcript POPTR_0091s00270.1 (locus POPTR_0091s00270) derived from phytozome v7.0 (chr-ID scaf fold_91; pos 60503 to 61066 reverse strand)
tttaacaagtcaccctacgacctgagtattcactggtaaatccttggttatttatttaagaagctagacaattgtaaaaattctaattagtgtattagaaaataaacacgttaaattgtaaactctgatgaaaattaagactacacgtttcgagcttgccaagtattttcactagaaattagcagcttgataactatattcatgcacaacttatcctggtatataacataatgttgtctcttgttcgatttgcaataacagtcagttgtttcttattttttgttttaactcaaccaagataccatccttttccttagtcgaccataaaattagaacataatatcaaatttgtcttcaagttatccaataaaaaaactacaattgaatacttgagaaatttattcttcaactactgtaggctaatataattatgattaacaaatttaccgaagacttggttctataactgacatcatcgtagtcgtcatcatcactattatccctcttacttttaaatctatcattattcaatgaattactgattatctacttttttatgtaggc

SEQ ID NO: 60385 - DNA, 944 bp, Populus trichocarpa
  Intron number 3 from transcript POPTR_0008s20270.1 (locus POPTR_0008s20270) derived from phytozome v7.0 (chr-ID scaf fold_8; pos 14039389 to 14040332 reverse strand)
tgttgcagcttctattgttctgcatcattttggaggtatgcatgaaattgatgcttgcacttggattgttttttaggttttaggcctgcttgatgactctgtttttttgagtagtgtaaatttatgacattttgctactctcttcgtactttatttttctttttgaatgttttcaggctctcttggaagaaatcaatgcacaacatctctttccctttttatttcttgcaagattttagtctcctttaacaagtaaaaattgctcagatgttagaatactgtaattgcaatttgaacattctggagcatagtgctcccttcgtttgagaataatctttgtgtagggattcagatagtcgttgaaggcagaagtgattatttaaatgcattcatcaccgttattgatggttaagaaattccacacttgaagtaaaatatactcttgaaaatgttctgtaggcttacatcatggtagttgcttctgataaagatttcttgaatatctcttaggtcttatatgttaaggaacaccccaagaggataaaccaatgacccataaaacgaccataatctagcaagtaatttgtgtcaaaagtttcatgtcatatattgaacccatccattccaaattgcattctgttctgtcatttctttttcgcatttaacttttcttaaatacaaattacataatggacgaatatcttttgcgtcttcattccacatgcctttgtttttttctttcagctgcatatgtcaccattatcatgtaatgaatggtattgacaacctaatagcaccaccaagaactaaattagcatagagaagtagatatttttcccttcacaaacaaaaaacaactaagattcaaacttttgtatacaattgtcctagttctcactcgtggttgtcttcagtttgggcaggcttttctgaaagaagccgag

SEQ ID NO: 60386 - DNA, 625 bp, Populus trichocarpa
  Intron number 1 from transcript POPTR_0008s13020.1 (locus POPTR_0008s13020) derived from phytozome v7.0 (chr-ID scaf fold_8; pos 8484771 to 8485395)
atcttttctttgttgtcctctcggttcttctcgttgtagcctgactgtaattgggtgttaaagtgtgtgtgtgtgtgtatcccaaaatattcgtggcggaggatactgtccgcgtccaggaaggaaagtcaggtccatcactttagtcaacggcgtcaccattgtctatggcacgttactcttttttttttttttgaaaaaaaaattattctcataggagatgaaacaaattgaagaggcttgaatttcactttttttttttaaaaaaaaaaacaatattgctgttttggcgaattgtaattaatagaatagtcattcacattacattctattttatttaaaatatctatatattgaggtggatttgacatctgattgcgttaaaatatcctggtttgtgattgaggatttgttgttattaattttaccttgttgactttagatggaaactttatatgcctgcaattatatagatcccatcatccgtttgaaatatccttgtttgattttagatgcattgtcctgtgtgttgccgcaactttgattttgtgatagtttttggttttattttcttttttttgatattgtagcgagtaacattacagttgtgaaagaagttgaagca

SEQ ID NO: 60387 - DNA, 698 bp, Populus trichocarpa
  Intron number 2 from transcript POPTR_0016s04510.1 (locus POPTR_0016s04510) derived from phytozome v7.0 (chr-ID scaf fold_16; pos 2650480 to 2651177 reverse strand)
tccctggtatctctctatctttcttttccttcttttttttttgttgaattgaagttaatttttgcattttttgttcgtttaggtgattcgggttttgatttgttgtgtgttttgagcttaattatggcattaaatgttctaattttggaagaggggaggagtaatttctggaatggttatctttttagagtaaagttggggtctttgcggagatcttttatgtaggtgtcttgttatttttctgatgggctggtatgtaagagggaattcgtaagttatgctgatatttaaggcttagggttatagcatttgcgtttctttttttctttgccatttcttttcttttcttttatgggtttttgttgatttagttcatacataatttgaaaattttgtcattggttctaggatttcaatgaaattagtttgttgtgaaggtttatgtttgagtttgtgcacgttaggtcactttcttgatgggcactggctaattgtacatggtgttgataaatttcctggttggtttattttccaagtttcttcatttccggcttttgtaagggtcttggatgtagttagcttgaatttttaatgatatgataacgctaaatggtttgaagttgcatggagtggtttttcttagccagcttctttttgttgcagtttgtacagttttggaattggaagaaggcaaggaa

SEQ ID NO: 60388 - DNA, 951 bp, Populus trichocarpa
  Intron number 1 from transcript POPTR_0008s03950.1 (locus POPTR_0008s03950) derived from phytozome v7.0 (chr-ID scaf fold_8; pos 2177534 to 2178484)
ctttgttcttgtttactgcactgctggtatttcaggtgggtttttgatattctcaatttcttgtttctcctgtccataaagtttgtgtctttgtaactcttgagttctttgttaccttttttttttgtttgttattacagctatattatcttccttttagtttcagctataaggataagcatagttatttttctttcttgtgtttgtttttgtgtttagaaaacgcatttgagtttttttttttataattttgtatcattttgatttgtttatataaaaataaaattttaaaaataatcataacctagttctaaacacaccgttaagagtgatttaaacatgccacccttttacagtctctctgcctcttacttttcttctctctctttaatttcttccgtcaagatgtaagttgtagcagatgatatcaattcttagacaagtccctttaccaaatattgttagcaaaagaagttgtcttctgtttaatttaactcttcattttattcataaaaaaaaaccctttcacatgaaaatttcacctggactggctatgtattgagaggagtattttcctctcttcctttccttttcttttctcagaaggatttaagacaaataaatttattctgggagtagatttttttctacctaatgcagattatcaagtcatggtaattgaaatctagtcacaattaactctactatttgacaaggagttagctaaaactgaaaattatatactcatagtctctgatatacattacaatttttaaatatgttctatgtttgctaccatattgagtaaaaattggaaggcccagcttgagttttttagtctttccttccctgttatggtatggtgagccggcgtatgttagtcaagactaacacaaaactttcttttgttacgcagggggtcacattaacccagcagtgacatttgggctg

SEQ ID NO: 60389 - DNA, 850 bp, Populus trichocarpa
  Intron number 1 from transcript POPTR_0008s18970.1 (locus POPTR_0008s18970) derived from phytozome v7.0 (chr-ID scaf fold_8; pos 12945210 to 12946059)
gtccattaacaatctgctgtctcacctcttttcatgtgcgtttttgctctctttacttctcctctctgcacaatttctaattattattttttatttattgcatcagtttaaagaagtaaataggtatttagctttgattgaggattttctttctgattttttttattgataatatcaagcaagttgtagtaaatttatgttttattgaattgaatcaaattcctaagagcagctaactttaacgtttggtttatgtttccggtcgtttccttctctatctttgaatctacgcaactgcagttgttgttatttttgtcttaattcaaataattattgtgtaatttattttaagaagagtaagttttagatgttgttagtcaaaacaggcaatgggattaccgataatagaggtaagttaaccaaattctaggcagtttaagaggggaggataacgtgcttttatttatttatttgtttgtttgtttatcaaggtttttttcatagctagttgttttgcattataagttcaacaagtctggattcacttgagatgtagtgagtgaggttatccacaagtaaaatcctcagtgagtgaattgcttctgggaaggagacgttgaaggctctctttagttctgtttcctggcgattcttttactctttgctttttaatttgtgacagaattatcatgtgatggcatttagaaaaataaaaataaaaatagtgctgtggctatcatttaaaattttcaccttgatttttgaagttattggtgtagactgatttttgttttttgttgtttgatttacatcaggtttggcattcctttgacctcataagctggcagac

SEQ ID NO: 60390 - DNA, 802 bp, Populus trichocarpa
  Intron number 2 from transcript POPTR_0025s00620.1 (locus POPTR_0025s00620) derived from phytozome v7.0 (chr-ID scaf fold_25; pos 304684 to 305485)
acccaggtgcttatttttgctccttggctactcttgctattgaatttgttgttttactggtcacagttttgtctgtgtttatattatgggtttcagtcggcattcagttagataattacttttcttgtaaggatccttggcttaatggagaaatggttttttcaatcaggtactaaaactatgagtgttcttgttgaaatgagaggattgctttgtgatattagatattattgttaattattttagggaatccggtgatatgcggaaatgagaattgcccgaggtgttagtttggccccgtctcttgttttagggttcgaggagggagttgtttatagctctactaatcaaagcaactaacttttggttcttgggttctgattctatggttttgaatgatatttggcttggtttgggtatctgcataaaaggatcgtgagttcactgccattgcagtagttgattcagtggtggtgttaaatcatctggagcatctggttttagttactgtagtaatttagtgctaagtgataagctatcttgttccataccagtttgaaaacatttgtgtagatttttacttgtttgtgcttctgagcatgtcatcttctaactgaagtagggacaataattttcatatcatatattctgtatgttgacaaggcaaaagaaattgttttaatgttgggatctgagtttccatctagtttgaaattgttttatgtttgccatcggacttcaacttttatgttgatttttctttctgcaagagtttatttgtttgtcattatttgcaggtcac

SEQ ID NO: 60391 - DNA, 398 bp, Populus trichocarpa
  Intron number 2 from transcript POPTR_0008s20160.1 (locus POPTR_0008s20160) derived from phytozome v7.0 (chr-ID scaf fold_8; pos 13948372 to 13948769)
ctgaagctgagaaaggtttttctcttatatatagttttttctctctgcccgtgtgtgtctgtttgttactcgcgtgtaaaggtcttcttgtttgaattttattcgttgatcatttgcttattgatggctgactttagtttgctctggatcctggacctggacatggaaataggatcccgttacctattttgatagggttcttattcaaattctatttgaaattaaatgcgccagtagtaggatcataatattaacataggaagggagtaatttcctacttttataccacagtatcacagcaaaagatttctggtcaaggaattggaaagagatttgtgttccatttccaatttctaagtgaaccaagaagcctaatgtatttattctatgcggtgcag

SEQ ID NO: 60392 - DNA, 956 bp, Populus trichocarpa
  Intron number 3 from transcript POPTR_0008s11420.1 (locus POPTR_0008s11420) derived from phytozome v7.0 (chr-ID scaf fold_8; pos 7253488 to 7254443)
tgggtttaatctgcatttccttgtttggagctcaggttttcttcactcctggttttattttactcgtatttactatagattgccgtttatttatatttactgggttttttgctttcttgttcatttggaaatgaattattagtgatcttgatgcggtggggcatggccatcattttcaagtaacatcctagataatgccattgccactgtggacccttacgtgtacattctcttaattaaaatggagaaggcaacacaactatattattgatgattcaattatttatcagtctagatataaccaccattgttaatcttttactaaccaatgacaaagcattgtttaattcctttttggatttggatgctctttcagggagaagcacgtgtggaattatcatctttttttcagggctaggagggagtgatttttgtttttgcgtttaaaaaatgtattttaatttttttttgtttcaattttatttttttattttaaaatcattttaatatgtggtgtcaaaaataatattttttaaaaaatattattttaatatattttcaataaaaaaataactataattatggactccaatgcagcccaattaatttactttctaggtttgtttatttaatggtcccagcaagacagcaaacagaaacaaattagtggtgtgtgtttttcttgtgatctttgaactttttcctaattttcgttaaaatcataggtcatgacctgaaagtggattgaaatttggggaaatagtttcaagttttgaccagttttttctcagaaaatattaataatgcataaaaaaaatagaccaatgattcttaagaacaattgattagggattgtttgccgttgttgtctccatttcttcaaaaatgttgtcaatggaaccattgaggacccctttgcaggtattggaaaaaccattagttatttggccatctgt

SEQ ID NO: 60393 - DNA, 1001 bp, Populus trichocarpa
  Intron number 1 from transcript POPTR_0008s16510.1 (locus POPTR_0008s16510) derived from phytozome v7.0 (chr-ID scaf fold_8; pos 11085042 to 11086042)
tttgcctctgttttcattctctctgcttggcaagagtaagccttctccagatctgctcttccttttctatttatagacacaaatttctgcagttatattaaaattaggggtttgcatcttatgctcccacctttctctagattctgatgctctgtttttcaagaaaatccttagatagatttatctgatagtatatatatttttaattaatttacgtgtttactgctttatttggtgtggcgattaattactacaagtagatcttggttagatattttaatttgttgtatttaatgaatattttgtgcgtatttggagtaagttgtggttgtcatgatattgttaattgttgattagtggtcggtaagttagattagtgctatgttacaatttatgagttgctgttgattttgatgctttctagacgtgggcactagtaaagtcaagtgtctccatggaacacccattttgagcttgttgctgtgttaaaatgagattacttgttgtttaatgttttcttttggaattttgatccaagtgacttgttttgcaccgttgtcgtttgctttgctttctgcagatgtactgctactgagatggatatctttccaattgtgctatgaccttgtaattatgttgatttgctgtgttgagtttgttggtttctgttgtttggatttccgatgagatggtttttgataatttcgttggttgctctgctgcttgttcattactgccgaatgcgttttttattacttctaatgtaccagtttgttttcgcagttggccgtgttttttaaaaaaaaactattttttttttcaattttttttttgtatcatttaatatactggtgtcaaataaaaaaaatattattttaatttatttaaagtaaagaacattttactgccactacaataacaaacattaccttatttgctagtcgatcattgagaatcattatttattgttcatgattgtaggttcaacgaatttggttctg

SEQ ID NO: 60394 - DNA, 577 bp, Populus trichocarpa
  Intron number 3 from transcript POPTR_0002s26180.1 (locus POPTR_0002s26180) derived from phytozome v7.0 (chr-ID scaf fold_2; pos 23194548 to 23195124 reverse strand)
gacaaatatcgagaaagagtaagaactcggcatatatttttgtttgtcttgtcataccaggtctctctatgataggaaatcccaaatgtcttttgagtattcaacgtagacatttgccaacttttagttgttgatacaactttggttaggattcaaaaagcttttcaggcctaaaatagaccatcttctggcagaacatgtttctctgctgtgaatctcacgggttttggtcattggtgtttgtcttaatgtctctgtgtttcatctactaggtacataagtgaggataagtccatagttccaatgctcagagattctaaacgtgcaaggttcttggtaacaaacaggtactaaatcctcccatccccctttctgttattttccctttctctataaatattgaaacgtatcttttcatattcagaatgaatgttacataacagcctaggtttcttttcttatcagtactactgggcgtcttgcagaattatcgacatgactggtttcttaattgtttgtacagactgatatgtttctatgtttggatctaacatttgcttaattccgtaggctctgt

SEQ ID NO: 60395 - DNA, 877 bp, Populus trichocarpa
  Intron number 2 from transcript POPTR_0016s12680.1 (locus POPTR_0016s12680) derived from phytozome v7.0 (chr-ID scaf fold_16; pos 12053010 to 12053886 reverse strand)
ggctggattgccgaggcttcatactttgcctgaaggtatgaacttctcggacttctcgccggagtgaatatttaaagctcggcttgaatttgactgctctgatagttttacttataataattttcaacattgcagtcatgattttttaggactaatttaatttaatttaataactctgttatgtgtataatataatcaatataatataattatttaaatgcttgtattctgttttgtatttgatatgattgttgcttgcggagatcatttgtatttgttgaaattgcgatttttttatttctctgttttaagagggaaggaatgatgttaaaagagggataaaaaatagattatgtgcggattataaaaccaagcaacacgagaatgatatttattaatatatattttgaataagaagtgaagtgcaagaaattttttatctgttatgtagtaacagggttgaaagcttatcctcggtaaggcatatgcgttgaagatgaataaggaaacttaacttgggattaaagtagttcgtcttggtgaacaaattggaaatggtccagagtcgttaatggcttcattatctagctaattactggtgtcctcttaacagtttgcttgggctgctcttccttgtgccttccaataaaatcttactcccacttctaccccttatgtagagaaggccaccagctgtggattcaaatagtgccaacttggaatgacttggaattcaattgaaattttatttactccattcttttttgttttttcacctcttcatttgaggtggggagctgttatcctgtttgctgaaaacatccagtattgtgctgttccagggaaatcttctgggcatatcaagaggcctggaagt

SEQ ID NO: 60396 - DNA, 549 bp, Populus trichocarpa
  Intron number 2 from transcript POPTR_0008s07210.1 (locus POPTR_0008s07210) derived from phytozome v7.0 (chr-ID scaf fold_8; pos 4383073 to 4383621 reverse strand)
gcaaagttgtagttttgtaagtttttcttcttcttccctcatcttgtttttaagagattttgacttttctgttatgttctgtttggtttctgggaaacttagggaaatgaaggagtttgaaagaagctgtaaacttaaggcttactaatttactaacttcatagtatttttgttttgagaattcaaggttactttaaaattttggatgttaaaatttgtgatttggtcaactttgttattattagttatgtaattaatcaagtaagtcaatgaggaagtagtggttctttgtaattcttttggaaaaacatgttagaacaaagtaattctctttaaattccttgcgatacttctaaatattttgtttgatttgctgtaaagatgactttttgctgttgtatttacatacaaatgttctcttgggcagttggtattgattgcatgcggtcattctctcagtaggattattttttaagttcttgttctaaaggtgagtttgtcatataactcgcaggaacttgaaagatctttgtcttgaaggaacactgg

SEQ ID NO: 60397 - DNA, 601 bp, Populus trichocarpa
  Intron number 4 from transcript POPTR_0008s03530.1 (locus POPTR_0008s03530) derived from phytozome v7.0 (chr-ID scaf fold_8; pos 1887981 to 1888581 reverse strand)
ttgtggaggtctcctatttgcaggtattgaaatgtttttatatgtgggtgccaattcatgtgaaatgaagaaatgagtatacgtaactatactcggtgctaaaagtttgggatcaagggtttgttctcctataatcttaggtttgaaccctgtgattgctaatattgatggtcattagaggcttacttggtcgtttatttcaggatctgtagggattagtcgaggtacgcacaagaacaccccaagtgaatcaaaaaagaaaagaaaagaaaaaaagaaatgagtatacggggcacattttcatgtcttgttatatacaagtttgtgattgtgagacggtagcatgtggaaacctgtatttttaattcaaatgaagacgtactgcaatgccgtggcccctccctggatgggaccactgtgtatcatttgattgtctgcaatgaaaatgactcttttaattgattattataactaaaaacagcgtttttttcctgcacttgctttgttatcaaacaatttctgggtgaagatattcatgctagttttaagatggatgttttctgttttagattctcacttcatgttgctgctccagttgtat

SEQ ID NO: 60398 - DNA, 161 bp, Populus trichocarpa
  Intron number 1 from transcript POPTR_0008s03530.1 (locus POPTR_0008s03530) derived from phytozome v7.0 (chr-ID scaf fold_8; pos 1889262 to 1889422 reverse strand)
ttcttcccgctctcactctctcgacttcgacaacggtctctctctgctttcttgttatttcggaagaaaaaaaaattcaaaaaccggagaggagtgttgtttttttttttttgaattctaaaatatttgattatttttatttattgtgttaatgacagaca

SEQ ID NO: 60399 - DNA, 537 bp, Populus trichocarpa
  Intron number 2 from transcript POPTR_0016s00490.1 (locus POPTR_0016s00490) derived from phytozome v7.0 (chr-ID scaf fold_16; pos 157442 to 157978 reverse strand)
cccatccaaagagcctaagtcttctctcaagtcctgtaaggatgctttacattactctacatgcatttttccatttgttcctgctatttttattttcataaaagaagaaaatttaatggggtttaattaaataaatttatcaaaattctttgctctaccccatgtctatggagggtattactgttgtgttggttcatccttgtggtttagggttctgtgaattttgggttctgcttgcttttctctaatatgtttgttttttttatttgtagccattatttgggttttgttttattaccacttagtttatcttagtcttctccttcaagcaatttgcaacattggaactatttggaggtgcctttataactgaagtactgaacgatgtgaaaaggctttcatgtttttttttttttttcctgaagaccccacatgcacgcttcatttctcttttcttttttttctggattggacaataattgaaactactcatagtttctgtttgaatgtctttgctagcatcgaccaaaggaaagg

SEQ ID NO: 60400 - DNA, 767 bp, Populus trichocarpa
  Intron number 2 from transcript POPTR_0008s17200.1 (locus POPTR_0008s17200) derived from phytozome v7.0 (chr-ID scaf fold_8; pos 11551777 to 11552543 reverse strand)
ctcggctgttgcaggtaagattagttttttatcttttctgactctactctaattttcacttcatcataccaatttaagataactcatgtcatgaaattgatgcattatgttctatcgatcctaccttgagccatcaccagttgtccccgtgcttaccagaaaagctgtccagtcttttgacctccttattgtaaaacatgggatctagactttgaatgatcaggtcctataatatttggggtttttatgttcagatctttgtcaaggtctgcttccagtcatgttcattaggtttgaatgtctaaaggaaatgtaatcttgttggtgcttctgtgtcgatttggagcagattgaaaggttggcttggcttgatagctgctatttttatttttttcaattacctgcttctgcttctgcttatgcttctgctagtactttttgtactattgttttatgcataactttggatcccacgttttctaaatggcgtcacaattaatcaaatactgaaattacttttaactggtaagaatgcccatctatttttattttttttattaaggaaacgaagcattttgacataaaataatctcattaaagtaagaatagtgttcggacaggcattttgttgataatagtgtttttcttcagtattgtaattcctcgagcattctgagagtggacctttatattttgtagaggccataagaaaatgattggtttttcattgtaaagcttctctttttaacagtccaaggaagacctac

SEQ ID NO: 60401 - DNA, 771 bp, Populus trichocarpa
  Intron number 1 from transcript POPTR_0008s18090.1 (locus POPTR_0008s18090) derived from phytozome v7.0 (chr-ID scaf fold_8; pos 12121859 to 12122629)
gagatacttccaggtactctttttgttgttttctcaccctatggagattgagtttgcttgtctattaagcattgtgtgcaaatgggtatgctttgaatttcatttaattaattattaatccatatattttttatgcattgttttgttgcttgagagtatggcaacacgaaatcggaacaggggatgtggttttgttaaatttctgaagagaattgggagttttacaggagagagtgatctaattatagcattgttaaaagatctcatgccatcaattgtaaatagctccatgatacaatgtagatctaatttataaattggagtatgttgtacaacggggatctgattttattgaagaggagaaaattacatggtattggcccaattggatggatccagtggctatattacttctgtacctgaaatacatgtaaattttccaagtgtttttggcaggatttcccctaagaaccgaaaactcgtgatgatgcttgtcgtatcattctcattgtaagaagagtttcttgaagctatttgattgtcgtttgttagacgaatccatctttataccaaatttaagttgttcacaatcatgctggttcaggaaaatcactctggctacatggttctaattatatcaccatcattatatatgcacatagttgtctgttctctcttcgttttggtcactttaaattttttcaaggcctgtccttttccttctgttttaatgaagtggtctcccctgactttgtattggtaccagagcag

SEQ ID NO: 60402 - DNA, 747 bp, Populus trichocarpa
  Intron number 1 from transcript POPTR_0016s13740.1 (locus POPTR_0016s13740) derived from phytozome v7.0 (chr-ID scaf fold_16; pos 12889750 to 12890496 reverse strand)
agcaaccttcaggtactgtttagctttagcattgctatgtttttttttttttcctataaaatcatttcattctttagtttcctttctgggtttgtccttaaacctttcttatcacactgaattgtcttgaaagttttttggacttcaatttttgtgtttgtcggggacttgttttaatgtgtttgatgattagtcgctaattttagtgttcgtgtgttgttttctttcacattattagttgtcatgagaaagcttatgggttctagctttttggtgggatttgaaagaaattcataatatgatgattgttcaagtttatggcttttagggtgttttgaaactaacatagaaacttattgctgatgtgctaaatcagttaactctctctccatgggttttgataatgattacaggtattggattagaaaagtcttgttttgtaatcactgatgttaaaaataagctccctgtgtttatttgttcagtgagttctttattggtaagcaattcaactcaatgtgtcattgtagtgattttagaagctgaaatttttggacaagctcggcttttcgatttctttagtctcttaaggctttcattttcttttgatttgattagaaggttataattctgcttcttgagtagaggtgatatagtattactgtgatattagacaagatatttattgttattgacctggtttggaatctgattggccctttattgtgtagttttgaataggttttg

SEQ ID NO: 60403 - DNA, 873 bp, Populus trichocarpa
  Intron number 1 from transcript POPTR_0008s08090.1 (locus POPTR_0008s08090) derived from phytozome v7.0 (chr-ID scaf fold_8; pos 5036524 to 5037396 reverse strand)
ctcgcctccgccagaacgcccgtcccgattcccttgtacgttttttttttttaatattagtgtaagccacatgtattttttcctttgatctaaagatttttaggaattgcctaccttctgtgattggaactctttaaaaaaaaaattctagaatttgattctgatgcccagacacatgattgtagtgtttataagcatattagtgacgaaaaatagaggagaatccactggaaatgcgtataccgaaggacgaggagtgtgtttttaggtattaagaaaagcatgataaccttttttggcagacaacaacaagaagaacggaagggtaaagcttctcagggtacctgcctactccaattagcataaagttgcaaaatagtcattggattggggaggtaactaatagttgacagatgtccaacctttcatcttggcaaatggatttcacaataaatgaatgttgaaaccaagggcacaaaaatcccatttccttctctgatattctatggtaaattctttagcgcagatcaccttttggaaatcacaggaatataagtgcatggtaactgtcatatatgcgtaggtttgttcctctttaatctctgtcttgtgttctagaggtttattgccctgcaatcttggatcatggttaaacaatcttaaacgttttctttgatttaagctatgttagacttattcttttcagatataaatttgtatgttcggacttgattttaactggtttcagtattgaactagttcgtattatgttaattaacggcgttcaattctacagtcaatgttgaaagcattttccatcttcgaatggaaatgcatgctgacagatttttcttgcttgaatttctcgatcag

SEQ ID NO: 60404 - DNA, 518 bp, Populus trichocarpa
  Intron number 1 from transcript POPTR_0008s15090.1 (locus POPTR_0008s15090) derived from phytozome v7.0 (chr-ID scaf fold_8; pos 10085711 to 10086228)
cagcttgtcagtgctgttcatcaagacccaggttagcctgcctccctatctcggcctctcttaagtctcttgaatggcataagtgtccgaaagttttgagggaaagggaatatggtagtgcaggttcttcaataaagacaaattaccctttgtttttttaatcaaacaacaaataacttcaccaatatcctccggccaccgttcacttttctctattcagacaaatgaaaaggaaaaaacacatgattggatttttttttattagtttcgcttcaaattctggtcttcggggataacagttgggttgttttgtttattagttgagcaatttattttgagaaagtgacggtgaaggagttaatatttacataccggataaagaattcatgattcttgaagttagctttaaatatccattcctgtttattattcccagtaaaatgtgcaataataaaatgaaaatcgagtttgatcaagctaaaactggggattttgtggtgtttatgtgtgtttagcag

SEQ ID NO: 60405 - DNA, 462 bp, Populus trichocarpa
  Intron number 1 from transcript POPTR_0008s13510.1 (locus POPTR_0008s13510) derived from phytozome v7.0 (chr-ID scaf fold_8; pos 8886996 to 8887457)
ccaaggtaatgtagtttcaacattaatctagtgtttggttgtaagttttgtattggggacatcttatgatcaatgcttgaaaatgtttatatatatacagtcccttattgattaacatttgacaaacataaattattttgtaagactttgtaatttgtaccgtgtaatgtgtttatctcttcgtagaatttctgtttccctgattgtcaattacaaataattatctttagctaagggtgactctgttctagaaataaaaaataataagaaaagataaaaaaaagttaagggagatttaagactatatttcaagatgtaattttagtgttttatatacatgctgaaatttagaaaaaaaaaaaaacagaaagaaaaaagccttgtgaggttcttagtgctggaattttgttttttgtttgtgtgtgaatgctagctaatcaatggacgtggcaggtgcaacga

SEQ ID NO: 60406 - DNA, 290 bp, Populus trichocarpa
  Intron number 1 from transcript POPTR_0016s07120.1 (locus POPTR_0016s07120) derived from phytozome v7.0 (chr-ID scaf fold_16; pos 4965145 to 4965434)
aaatcactgcgtagattctaaaacaaggtactcttctctttctcgttctttttacttgtgaaattcagtttaaaattcccacatttttaattgtgtttttgaataattcccttcattcttcatagatccacctttactggtcctttgttggccttgaagtttgatttgtttctttacctttcctagcattttttcccttcagttccattgtagacttcatgtcatgcagtccaattccaaatactgaaattctgttttctgtcacttttttttttcatgcaagatttgat

SEQ ID NO: 60407 - DNA, 645 bp, Populus trichocarpa
  Intron number 1 from transcript POPTR_0016s06860.2 (locus POPTR_0016s06860) derived from phytozome v7.0 (chr-ID scaf fold_16; pos 4655933 to 4656577)
ctgagacctaagttgttgcttgcttccacttctgagtatggataccatcttctctgtctctcaaagtttgtatttttatcaggatattccagttttgactctgttttttttttttatctgtttttttatcttggtttcttcgctgtgtatatatgtggtttatttggtcactatctttgtactctaagatggggctcattttatgccttgtttatttttttattttttatgcatagaaactctcttctgtttatgtattttcacttccttttcttgtattttccctttatttggttggtgtttaattgatctttatagtaatatgatgatgatgatgatctgattctaggatttgatatttggcaatttcaagtttttcttaaaagaaaagaaaagaaaagaaagtatcttttctgcttcattttttctgagaagatttggttgacgaagctgagatttttatgttgggggattgtgttttacgatggaaaagtatttggtgatatataatttataggagttctgtccttgtatatttttttgtatttttatggagttgaattcagcagaaatcttggagagaattttgattaaaaatttcaacttgcaggaattagtttgaactactgttgggataaagacgat

SEQ ID NO: 60408 - DNA, 805 bp, Populus trichocarpa
  Intron number 1 from transcript POPTR_0016s04750.1 (locus POPTR_0016s04750) derived from phytozome v7.0 (chr-ID scaf fold_16; pos 2838380 to 2839184 reverse strand)
tttagaggaatctccaattttccttgcatatttaggttgagtactcgtgctttcccttggactggattaatattgttatgaaatagtggttgttgttttgtaaaatattttttatttaaaaatatattgatgaaaatattattttttattttttaaaatttgtttttgatatcattacattaaaacaatccgaaaatataaaaaaaaaattaaaacaaagaaaaaaaatcatatttttttgaaaaaaatttaaaatgcaaaaacaaacaggctttaaaagtgtttttttcaacacaaaaaaaaataaatacaactattgttgatgcattttttttaccataacaaaaatttaaatacgaactgaaaatttcatgcgtgtatttaataaaaaaatcaagaattatacatgtcaatagatgttaaaaacaaattgttaaggccaaccaaatatcaagttgttaaattaagagaaagacacatattaaaatatttaatctcctaacatcgaagttttacaaaaaaataataattatacaacaataaaattgtttttaactaacatgatttttgtctcaaattaatttttttaattatataaaaaaatagtcgataaaaaatatgaagttgaattaaaacaaaaaaccactccaccaaatccagggcaacctgcatgtatcctatcttaatgggaaatcactgtattctgttctggatctcatttcctgctctgtcttctgcagagccagagacatggaggtcgaacattttagccacccagatcatccattgatcctcattaatcaag

SEQ ID NO: 60409 - DNA, 154 bp, Populus trichocarpa
  Intron number 2 from transcript POPTR_0008s08580.1 (locus POPTR_0008s08580) derived from phytozome v7.0 (chr-ID scaf fold_8; pos 5318353 to 5318506)
gtttgctgttgcagttataaatacatattctagtatgaagatcttttatgtaggggggtgttctgggaaattatcattgctttgatattaagaaaaggggagttttgttttttaagcaggagtgactgggcagacataagccacggggccacct

SEQ ID NO: 60410 - DNA, 513 bp, Populus trichocarpa
  Intron number 1 from transcript POPTR_0016s03190.1 (locus POPTR_0016s03190) derived from phytozome v7.0 (chr-ID scaf fold_16; pos 1632172 to 1632684 reverse strand)
tttgacccgaaaggaaggcctctctgtaactctttgtaagtatcaagtttgaaatttttttgattttgtatctgggttttcgtttttgctatctgggtcttttttgtttgtttgttttgatcacatttttgtatctggttgattagttgtgaatttagctaaatttgaaatgtgggtttgttttttatcttcgttgtgtttatgaattgaagaaatctgtgtttagtggatttatttggttatagtttattatatttgattaatcatggattgttttacaattctttagatgttttgcatggtgtgctgtctttgaatatttatttctgtttgaatctttatacaagaatgtttattgaaggaagcatttggataattagcataaattttgttagatatgatttattgtagtttttttttcttgtttgtctaagatggttgataaggacctttgtggatgtcttttttgtgtttgtgtttttgttttgattgtttcagggtttaataaaagca

SEQ ID NO: 60411 - DNA, 569 bp, Populus trichocarpa
  Intron number 3 from transcript POPTR_0002s04120.1 (locus POPTR_0002s04120) derived from phytozome v7.0 (chr-ID scaf fold_2; pos 2571451 to 2572019)
cgaggcttgcagatttttacagagaccatcctcaggtactgtgcttctgtttatgttattagtgcttaaaatggatgctatcaattatctatacattggtttgaatttaagattaatgtatttatgattatgttgttataaagtatgattttgcagtttgggaagcggcatttgattaggttctgttattcctgtatgctcaaccattgcaatatagtgtgattaaatgtactaaggaaaccacagattagaattttagtgacaacctttattatttgacactagctaagagttgctttgagtttgatgaaaatgaatttgtaggttacttttttgcttctttacaaaacacttatttgattcaatgtgcttctgtttctaaattcttcttaaagggtgtttggtagtggttattttttaaattgcttttctcctttgaaaatcagcatatcaatgataaaaaacatattataagaaaaaaaactcaaatttttaggaaacttgctttcaaccgcgttcccaaacagggtctaaatgtgttagtaatacgttgcaatggcttcagggtg

SEQ ID NO: 60412 - DNA, 429 bp, Populus trichocarpa
  Intron number 1 from transcript POPTR_0002s14950.1 (locus POPTR_0002s14950) derived from phytozome v7.0 (chr-ID scaf fold_2; pos 11069179 to 11069607 reverse strand)
agaatcctctctacgtcctgaagttgttgttgcaggtcatgatcttttaacattttgttgtttattttttttttgagttaacatctttttaaagaagtagagtttaacagttccttttcttttatgtgaaagttcgtggttttgatctttgaagattaaagcaaattgttgtttcttttttaaaattcccttccttttttacttttatatatgatttttttttaggttatgatctctaggtttttctgtgtatggtaattcggaattaaaatgctaatatttaggttgaattaaatttcctgtgtttttatttttactgagatcatttttttttaatttattgtctgttaacctttcattttgattctaatttttatgaatttctgtgttgcagaagcaggaaaataggattgttagctgtagtgattg

SEQ ID NO: 60413 - DNA, 982 bp, Populus trichocarpa
  Intron number 1 from transcript POPTR_0008s21040.1 (locus POPTR_0008s21040) derived from phytozome v7.0 (chr-ID scaf fold_8; pos 15106729 to 15107710 reverse strand)
ttggcagagttaattcaggtaacaaagttcgaattttttttcttttttgtgaatgattttttgtttgttttttcaaagatcagttggtgggtttgttgtgttgaattatgctttgtttggttttaattcgaggtttttgctgatgggttgctggtagaatttgttaatgttttgatctgtttcatttacgggtggtttgattacttgcaggtttttatctcagttttgcagttttttattggattgctagtgtgttggctgtgctgcttaattcttgctctaatggtgtagtgtcaagtgtttattttggagatctgattatgtttttacggagtctatttgtgttgtttcttatgttatgttttggttttttatgataattgatcattattgggatgaaatgggatggtattgattgcatttcaaactgaaaacttctaatgccctagcagatagagaatcagaaactgaaaacttgtgaggagatctgtgcttctaagaagaatttaaaatgagtaatgttaggcttaaattttcgtcctcttcaaaatatgagattgcttccagttctgttggacaaagacaagcttcagattactcaactcgtaagagaaatccaattaagagaaatccaatgaacatcatgttatttgcacatttatggatgttgtattctttttgcggaaggtcatttaacttaaagggtatagggaaggataaagatatgttgttccatatttctttttgcttatatatatatatatatatatatatatatatatatatatatctttatactttaaactgcagaatcatattccataatttagcgtactcaaagttctggttataacaaaagttctggttatcataattcgtatgctcaaagttatggttataataattcatctgtctgttttatgacatattcatgcatattcatgcagacaaatcaaagtcccggagtggttctgatcaaaag

SEQ ID NO: 60414 - DNA, 647 bp, Populus trichocarpa
  Intron number 3 from transcript POPTR_0002s24740.1 (locus POPTR_0002s24740) derived from phytozome v7.0 (chr-ID scaf fold_2; pos 22021589 to 22022235 reverse strand)
gtttggcagtggtgctcttcttggacgtcttcaaggtcgagttctaatctcaatcacttctatatgcttgcgtgtcttcatggatgcaccctatgttattctcattatctatcctttgtgcgaaattctttgtggggcattattctttcatttcaattttaatatagtccaagtattctttagttttgtgggatcattaagccaccgaaaagacaggaacatttcaatgctatctgttggcttctttggtcctgctcgtgaagcagatgttttcttctcatttcttccttggcagaacctattgaccaagcagtttgttcatggtgtggttggctgtttttgagttccaacattgagagcattgttccaccttttaaaacaaatgcaaagtaaaaacatatttttgtcctatgatatggtataaatatgatgccatgaatacagtcctccattctataatgccaacctttattgaaagagcctaacgtaaggagatctctccctttgaaaaacgaggggggataattaggtgatgtctcctgcatcttcctttgttgagctcccttccccatcataattttaagtgctttgttttttttttttacattttagggggtcagtttggtgcctttcgctactcggtcatc

SEQ ID NO: 60415 - DNA, 492 bp, Populus trichocarpa
  Intron number 1 from transcript POPTR_0016s03170.1 (locus POPTR_0016s03170) derived from phytozome v7.0 (chr-ID scaf fold_16; pos 1616037 to 1616528 reverse strand)
aaagaaggcgatagcttttatttaatcactcaacggtaacattaatttctttatttttctttccgctgtgtgggtttttcgtgttgaaaggttcgtgacttcaaaaaattcaaggttttgtttttagagtgaaagttgaagtcttcttcttttttttctcatgtcttgattttttagagtgttaacaagtttttaatgtaaaaatgcaaagtgggtttgtttagttttgattttttctactgtaaagaaaggtttttagttgtctgaaatctttaaagaatgcaaatctcaattcttgttttctgaattaagagacaattattgttcaagtttcaagtgggaactaagtaatttactcagcaattttgttcattgtgtgtgtgtggtagagaatggaagttattattattattattttttaattgagaatgagctgttaaaattttgaataataatgttggtgatattttttgttttgctggtttataatag

SEQ ID NO: 60416 - DNA, 430 bp, Populus trichocarpa
  Intron number 1 from transcript POPTR_0016s03630.2 (locus POPTR_0016s03630) derived from phytozome v7.0 (chr-ID scaf fold_16; pos 1969702 to 1970131)
cgcagtatcctcctcctcctgatttgaaaccgcaggtatttttcttttttccttataacttgttttgctgtttgcgctgaaatacagtttttctttctgtttttctcaagagacgtgttcgttttggttttgttgacattttaatatttttttatgattatttcatttctaatatatttaatgaattttaggctttttctttaaataaaaaacattttgattccgttaaaatactagtttttgttgttgctgcttattagagatgatgatcatatttatttgttgtttgtttgatttgaagagtaagaaatgcaggcagctaacgaaacagtagcttaaaatactgttccatacggctcaatttttttatttaattattttgttatgaaatttaggtagcaaacttggaggatataatatcagaaagagg

SEQ ID NO: 60417 - DNA, 858 bp, Populus trichocarpa
  Intron number 1 from transcript POPTR_0008s17740.1 (locus POPTR_0008s17740) derived from phytozome v7.0 (chr-ID scaf fold_8; pos 11920509 to 11921366)
ccgagaccagaaactgccctcggtaactcttgtatcattcaattttctactaatcttgtgtttctttgaagaaaagattaaagggaaactgagccttgaggaattaaacgaaggcttttttttttaaaatctttgctctcaagtttggtttgaattctattcttgacttgcgatttatgcttttctcttgcttaatttggtggtttccatgctttcttattttgggaattgtttttttaaaacatcctcagagtaggttttgaattgatatggattatggcttaggtacactttgtctttataatttcttctattttgcttgaattctgtagagcccttatttttcgcaaggtagaaagcgagtagcttttttcattatatgtcgggaactcatggaaaatgcggacattttttttttaaataattttaaatggtgccagccttgtatattggctttagtttgaattctttcttaaagtttttgtttttattgttctatttaagccaatgaagcgagaaggatggttcttgaagaaagttgactaataaagtttacaatttgagctgtcttaacgattgttttttgtttgctacaatattgatgggctttaggagacaagaaacatgttttccatgttggctttagttgttaaatttgattagtgatgttttatagcatctcatcattcgcggaaatggcatgaatgggtgcgaaatcaacttaaattcgtaagatatgcagtggacaacgtaaaaataagcagcatgtgtttatcaatacaccagtatgtccgtcctttatcttgctccgtgacagattgatgtgtttatgtttgatccgtgcaggcatacctggag

SEQ ID NO: 60418 - DNA, 503 bp, Populus trichocarpa
  Intron number 1 from transcript POPTR_0016s02120.1 (locus POPTR_0016s02120) derived from phytozome v7.0 (chr-ID scaf fold_16; pos 1022843 to 1023345 reverse strand)
ttctcttagaatatttgaagaggtttgtctgattctctggctagttaatctctatgttctctttctattcttacttcctttctgacactggccatgcgtgctttctttaccagaactgcaatatttagtttgttttgtggttggattttaggagggttgctgtagaagtgtttggttttttaacttgtgagggaaaaatctgatcttggttttgtttagcagactggtattgaagataactttttagctggaaattgtgttggtgggatggattcttttctggatttggctttctttggagataatgaattggaaatcttgtgttgttcagtttttttatgcctactcctcagctctaacttcatgtttttgaatctcgctgatcagtagagtactgtgatggcatgcacctttaagctgagtttattgtgaaaattccttgatcatatctaatatttcaagtttgatttttgttgctacttaatatatttgtgccattaggc

SEQ ID NO: 60419 - DNA, 592 bp, Populus trichocarpa
  Intron number 1 from transcript POPTR_0016s06910.1 (locus POPTR_0016s06910) derived from phytozome v7.0 (chr-ID scaf fold_16; pos 4693117 to 4693708 reverse strand)
aaaagactattgatctcttgatctctacaggttagttgttaattcttggaccgattttggtattcgataaaagaacctaaaagcgttgactttagatatacggctaaagagacaaaatttatttgcatggtaaaattgatctcaactttttttttcttcttggtataaaaacgatttgcgataattggaacgagggagaatttagactagtgttcacgcatgtgcgaggggatgatgtttgttcatctcatataggtggcagcaacccatgatgagtggggactggttggtgatcgttggcagcctttcccttttgtacatacaaactcaatctgcaaatcttttcatttagttttgtctatggtgttcgtgggattagattctagctagtcatcacttgggtcggcactaaattactctaccagctaatgaatggagtccattcaaataaatttacagtggtttctggttctgggagtttttgaattcgagaccttcaagattgggatagatttgttgcaatggtctaatgatttgaaaattttgtcactatacaggtgagagcgagacatttctccagaaagcaattcaa

SEQ ID NO: 60420 - DNA, 878 bp, Populus trichocarpa
  Intron number 1 from transcript POPTR_0016s04700.2 (locus POPTR_0016s04700) derived from phytozome v7.0 (chr-ID scaf fold_16; pos 2803221 to 2804098)
tagctcaaatctcggccatcacactcacaacagaggtgagtttcaaaatgatcttgacatgacatggccagtgtctcatgatttttgttttaacaattcaatctagtacattagtatttctgttggttctcatttcaagtgttttcctgctcttcatattgatcaagaaatgaaatgttggtgcgcttaatcttgactgaattccacatattttgctattgtttttgtgatcatctctcaactgggcacctcaaaatgctttggtattggctacatggatgattgtttacaccagacatatactcttatttcatgtttcatcaatgttttctttgcatcgtcaatctaggcctcgcatgctttgtacataaatgtcttccatgtaaattgttctgtataatggaattgagagtggtcctgataagttttgaggtttgtggcaaaacttgttacgtgaaaatgattccaggacttctaattgatactatgtttgtgcccgtggaataattctatattttggcttggaattgtttgtttttaaaagcagcaccggagtgatttttagggccatgatgtagtgataaaaagttgcatcgtcattttatatctttcagttatgaacaaggtacatttcaatttcttttggtaattttgattttcttggaagaactagttatagttattgggaatttcattggatactgtaaaaagttttcatccttttagtttttctcccgtgagttagaaattacctttgggagctacacgaaccaggtttatgtttcgatatatggccttaccatgtttctgctttaattatatattttcttttcaatattgcagaattgtttttatatttggtgatctgactttacaaa

SEQ ID NO: 60421 - DNA, 799 bp, Populus trichocarpa
  Intron number 1 from transcript POPTR_0016s09290.1 (locus POPTR_0016s09290) derived from phytozome v7.0 (chr-ID scaf fold_16; pos 7301383 to 7302181 reverse strand)
ctaggttttcttcgattcttcgatttctctctcaggtattgcaaatttaacttcagtttctcattttgattacgctgattttgatattttaaggtcaaaatcaatcactattgttcaaaaccctagttttgtttggatgttaaaaattggggaaaatattaaaggtggaaaatttcgttaatcttagggggttttgtatgtgggattttagtgatcgattgatttgacttctctaattaggtgggttcagtgctcttagcttaaaatccggtaatttggatcttaagaaattgaaaaggatgaaatttgaatttctaatctgttttattttgctgcattttcaatgggtggctgttattgtagtttcttagcttagatgcatgctttagtttgcttaatttgatttattattagtgttctttttcttagtgaaatcactgttctatagtttctggagatggagtttatagtccattagggtttgcttgtaaaattctaaacttggaaaatagcttgatgctcccaattctaaagaaatttcaacttatccgaatattaattatgtggtgaatccaagttcttgtttgtgggttcaatgaaaacatgttatgttttgggttggaaaacataagattaaaaaagatctgattgattgtatttccctaaattttaaatgttgaggagttttggattgaatagtcatcttattgatttatatgctaattaatttttgatgatgagttcttgttcaatttcacaactagggttacatcattcactgaggtggaggtcaaaggga

SEQ ID NO: 60422 - DNA, 768 bp, Populus trichocarpa
  Intron number 1 from transcript POPTR_0008s16140.1 (locus POPTR_0008s16140) derived from phytozome v7.0 (chr-ID scaf fold_8; pos 10785384 to 10786151)
agaagccactactatctctgagtgcctccatacttgtgagtctctctctcgctttttatatgtgtgtttatcttgtgttattcctttttctttttgtttcttgatttgggcctttaattgttagttcacgtaattcgtgtatcatcttttaatgcttgaagttgagcatggcttatatattgttttggttattttgtgatatgtagagtattagtgtaaatgaaatgcgattttatgatcttggtatttctttattttgttttcttggtctatttttgctgaatggattgggagttttattttgaaataaaggaaaacattgaaatttgattggcaaatttagcttccttattttgcgtaggagcaatgtaaatgatgtgagcctgcaagctttatagtaattcatcaaccataaagtcatcattctgttaatgttcatatatatgtaaatgtttcaatgtttgttgccataaaggtaaaattataacttggggttgttgggagcttttgcgctcttcaagttcgtcaaaattgccatgtccttgcttagttcatgctgtcaaatgagaacagtaatgtgtttggggatgatgaataaaggtttagattttgtattttcctttagaaatagatttcttttttagtattctatcatttaatcagtacgttttaagtgatgtcttgcctagatgttacataaatctctcatcgagtatatctaatgcctgcttcttcttctttttaattttttaaaatagtttgcagaaa

SEQ ID NO: 60423 - DNA, 757 bp, Populus trichocarpa
  Intron number 2 from transcript POPTR_0008s16140.1 (locus POPTR_0008s16140) derived from phytozome v7.0 (chr-ID scaf fold_8; pos 10786207 to 10786963)
attaaattaggttgttctccacttgagaagctcaggtatttgataatgtcattttcttataaattattcagtttatgccacagcaattttgtatgatacatcttttgcatgccatggaaaagcaatatatatgtagcggtttcttatataaatggactatagtgtcacacatatctaggacgtgtgcaaatgctgttcgagtattatccatgcagtgcaagtgaaattgtcttagggtgtcagcatgaatgagaaatgagggtgaaataattttctagacactcctctgccttttgaaactgtagaaccaatccttgagtgaactgattaatgttcttgggaaaaagatatcaaaattgccaagtcaatttattagatatttataccacacagaaagcatatgcttcaaacagtagacatgcattgtgacacttgaaaatcaattatcgtgttgcttatacctgaccaacatccctgccctgcagctcaggtgggatgcatgcatgcatgatttatttatttggattctctgatatggcatcttgcaaatattatgaacatttgcctcaatctgtttatatgccagaaaaattagaagtccattttcaaggtactcataatgcttggaagacagaccaaaattgagaaagtggacatggatttaactacagctgcagaatcttgagcttgttttaacttgctttcattatgttaatccacagggcagaccacagcttgcaagatttaagggccagaa

SEQ ID NO: 60424 - DNA, 542 bp, Populus trichocarpa
  Intron number 5 from transcript POPTR_0008s00290.1 (locus POPTR_0008s00290) derived from phytozome v7.0 (chr-ID scaf fold_8; pos 81071 to 81612 reverse strand)
gggttgtatctggtggagaggacaatacagtaaaggttataactgctttctttctcttggtgtgcatcatgtctacactcaatacacgtcatgccagcaaataccgtcgcttgtttgtaagaaataatatctcaaaggtcctgtgtctgctgatatgcatgataaggacctcatattaagggaccttaaatcacacgcattctggcatgcattttctgttgctcagttcttttctttatgtctccatccttgtgacttgaatttaagaaagcagagttagttgcaaatatattgccctagcacgctgtctagtgccaagggactgacagtaagttcagactattctttctcaagtcaacacaactggtgaatgcattaggataatttttagtgtgtctacaacttgtgagttcttttttacttaagatgactgcacatacaggtttcttttgtttgattcttgattctttatttaacgaactctttaatgtgcatgtattttgacagctgtgggatttgactgctggaaagctattgcacga

SEQ ID NO: 60425 - DNA, 561 bp, Populus trichocarpa
  Intron number 2 from transcript POPTR_0016s09990.1 (locus POPTR_0016s09990) derived from phytozome v7.0 (chr-ID scaf fold_16; pos 8125397 to 8125957)
ttttcataaaaagttgcacattggaggaggaacccgtaagtttctctgcttttttttttgccttgttctcgggccagtgaactactgtgcgtatagaagccagtaagtctatcaagtgctaagttttgtgatgaaaacatctgatcgaagatgtttatgtcacttccatatggatgctccaaattgtgttgtcatcgtcccttgtggcggcggcaaatgtctatacgttcatcagagattgattatatcatttttgtttatttttcctctcgttcttgtaaatgggtgatagccccccctctccggtgcgccatcattagtagatttttactcactatgaaaaaaaaaaaaaaaatcaaggctggcaagttaatcaaacagtctatgatttactcctcaaatcggaacttacttgctgaggtgcccatggttgaacagtttgtattgcgggtctgcatttcaaatttatttttggtcatcagttgtctgcattcctactgtctaaattagtgctaggttgaagtaggtctctaactgtatatttgtatagcacagagtcct

SEQ ID NO: 60426 - DNA, 617 bp, Populus trichocarpa
  Intron number 3 from transcript POPTR_0008s14840.1 (locus POPTR_0008s14840) derived from phytozome v7.0 (chr-ID scaf fold_8; pos 9860770 to 9861386)
actggaccagaaagcaggtaacctacaattaacctaagcctgttcccgaatgaaattaccgtttcaattttccaatagttttccttggcatatttgaccacttaattctcaaaaaaataaaaaatcttccaacttcagatcaggtttattccgttcattgccgatcatggtgtttgtttgagaatgttttacagttgcttttttttcggaaatatattaaaataatttttattttattttttaaaaataatttttgacatcaaaacaatccaaaaacaaaaataataataatttttaaaaaaattcaaatttttgtgaaatgcaatttaggtttgttctcaaacggcgcctaaatttcttaaatgtgtgtgtacgtgagaaagcaggaccttaggcccttaaccacctttggtagacacgtgctaaactcaagcataaattggagaagcaggcctttgatatgattgagagaaaataaaaagtattcatgtgtttgacatgtttcctccatcacaattatcctttaatgtttgatttatgatgaattttcaatgtgggtgacagaaattgggcatcttgtaggtattttcgttgtcagtgacagaaattgggcatct

SEQ ID NO: 60427 - DNA, 960 bp, Populus trichocarpa
  Intron number 1 from transcript POPTR_0016s05380.1 (locus POPTR_0016s05380) derived from phytozome v7.0 (chr-ID scaf fold_16; pos 3317593 to 3318552 reverse strand)
tctcgtttctttcgcaatctctttaacttgtccaggtagacttcgtctccgctcctttcaccgtataatcactccccacctcacaatttgttgccgctaccatagtctttttctttttctagtttttcttcttttttttctttaatcagttttgttgttgatgttgttgagtttgatactggaaatcaggattttctgtggatgggaaataaattaaatatggttatatacttagtaatactttcgtttctcgtttgcccatagagttttggaacctgggaacgtattttgttgcaagcaatcttaatttgattatataaattgtttttttccccctcttaattaaaagtctgaagtgtattttgttaatttttgtctagtttctggaatggtttgttcatacctggcctcagtaattatatttttattacgcatttatgattgattaattgggatttatcattaataaatccggaattgcatttccttttctttttttttgtataaaaccttaggtgcgaaaataagtattcataaacctattcacatgtatcgaagggagttccaactctccatgatgtatctaactaattgttaaaaaaagaaaaagatctcttttttagataaatgataaattcccataataaaaataaatgagagatttgagaatgggacacagagaactttgagattttgggaaaatacagtgggtgcaggaattgatgggctagcgactgacaattttcgaactttttttgtactagagttttatgacactttgaattatttttttttaatttgatgaatcacgtaaaaaataaattaaaaaatattatttaatatattttcaaataaaaattaaaaaaataatttttttaaattaaaacagaaaaaattgatgattttgtttcttaaaaccttgcagtgttacaaacggtatcttaattcggtccaagagga

SEQ ID NO: 60428 - DNA, 748 bp, Populus trichocarpa
  Intron number 3 from transcript POPTR_0016s13980.2 (locus POPTR_0016s13980) derived from phytozome v7.0 (chr-ID scaf fold_16; pos 13214640 to 13215387 reverse strand)
tctacacaaccaacgggcggcttgggctccatcaggtatgtagttaactgttatatgttactttatcctcttgcataaactttgagcacagacattgaggttttttttattataattatttttcagtgataagtttatattctcaaatttccaggctttgagtatacatcgttcttcattgacatgaaaaagttagtgaagtcctaggattgtttgagattgtaaaagattccatgattttttggtgaatttgtactataacacaattgtgttttctttaaattttctggacttaatttttagagagagaatttacgatgatttgctagttgacgtataatattcaaaaaaggttgcatcaccctttttctttcacacatctcaagccatgagaggctcatttggtggtaatgctaagtacttaaaaaagctctggttgaaacacaaggtcctgaatttctttctgcatcagtttgttcatgtgtccagcaccctggttatgtcaatttggttagtcggtttttaagtaagaggagaaatattgagggctcaatttttaagtaagaagagaactatagaaggctctgctcggaaaaagaattgccaattttgcaattttgttactggcaattgcatgagcgttgtcaaaaccttttcagatactcttttttattgtatatataaacatcaaaaggggcattaagacaatatttacactcatcttggcttttacatttgtaggatcgtg

SEQ ID NO: 60429 - DNA, 842 bp, Populus trichocarpa
  Intron number 2 from transcript POPTR_0008s10230.1 (locus POPTR_0008s10230) derived from phytozome v7.0 (chr-ID scaf fold_8; pos 6407196 to 6408037 reverse strand)
caccattctattctgccttgtgattctctttcaaggtaatgcttgtgcaagatcttctcacagtattactgccttagtctttaacccatacttggttcaagccaatggtttggatacaaatgttatgtggataacttatgctttaatacatgcctttgatttggactgtagagtttttctttatgtttgaatttcccaatcattcaaaagttacatttgacgtctttgagctggaatgtgtgaatttttcccccattgtccattttcagatctgctatttgtgttacagctcccatccaagtggttttcttgtatatagatgtttatttgcgaaaggtgggtgggcttctgaattttgattctaatatactgtatcttatgctgaaatggttttctgaatcttgcccagtgtgtataatgttggctacatgtaacagggttagagttttcaaaacgacattgaatcatgttctagtgttgtccatctattttctttttcctgctttctctaattttttagacatccttaattgtttggggcatctgggaaaagatgatttagtttcaggctttctatcactctctctctaccctttttctcctgtttcattatttgttttatgatctttttatttgtgcttcccgtgcttgtaaaatgataattttgcctgggtgccattgcaaattgcaattcatttttggaaactcattgatcatattacttaataattttttacaagaggtcattccattacagaaatcactgctggcatttttctataagcattttctttctttttgctaacttatgttcgtagtttcatgcaattcattttgcagga

SEQ ID NO: 60430 - DNA, 467 bp, Populus trichocarpa
  Intron number 1 from transcript POPTR_0008s10230.1 (locus POPTR_0008s10230) derived from phytozome v7.0 (chr-ID scaf fold_8; pos 6408842 to 6409308 reverse strand)
cttcggatctggggttttctctctttctctacaaggtacttatccactccttttctttttcgtttttcttcccctgctctttctagggtttaattaaaaaaaatagtggggtattttggatttgtgtatttgatcctgtaatttgcaatgcattgttttcttgtggttttgctttgtgggtttgatttgcgcctgccttgctttattttcaaggcttaattggttctttgattattatcaagttttaagcttttcttatgggtgtttttgtatttgcctgttttgtgaaggaatgttaaagtcatgttatttgttttgccttttgtttttccaattatgtacactctgcagattgaagcacaaactctaactttgggcccattacagcatatggagtgtggctaactttttattccattattcaaaatgcagggttttgttagtttttgtgattaattttgagattg

SEQ ID NO: 60431 - DNA, 808 bp, Populus trichocarpa
  Intron number 2 from transcript POPTR_0008s02090.1 (locus POPTR_0008s02090) derived from phytozome v7.0 (chr-ID scaf fold_8; pos 1003011 to 1003818)
ttataactccttctgtcttgtctgacagattgagggtgtgttctttatgctctacattactttcttttagttttcattcttaccagcctttatgcttttatggtgttagtctacatttagaatgaattctgtggtgttcttggaaattgctcatgtaatatggctctggtatcatgctgcgtaagttgtgctgagagacaggcaggcaaatttcataagtggcagagtttgtttcaaaaagcttttgatttgatgtgttctacttaggttagtttaacttcaagatgtggacaccaacaaaggatactgtgaagttatgttcttagagaattggaaatcattttgcatatgcattaaagaaatgcgacctttgaagtctaagttttaccgtcaacgcttttctttgaaaggtaaaataaaacaatatagcatgaaatttgtcttcaaaaaattcaacctgggatttgtaaacgttgacctgcttttcttgattttttgttttttcatgtatcgagtttcttttattttttctttcgttaagcatgatggaagatgatgaaatgaatcagaaggattcccattgatcattcaatgtgatatcataaccagcacgtctgagccatcatgctatcctaagctgctaaatgatctagattcctgcttcaatatcttgtgcatttaatcttttgacaaattcatgatgattcgttgtttgcttaatgctttgcaatgtacgcaaacatttgatgctttgttttttatctgaatttcagattagtggctctcttgcacgcaaagcaatcaagga

SEQ ID NO: 60432 - DNA, 818 bp, Populus trichocarpa
  Intron number 1 from transcript POPTR_0016s14080.1 (locus POPTR_0016s14080) derived from phytozome v7.0 (chr-ID scaf fold_16; pos 13319878 to 13320695)
tcgggtactggaaaccctctcaacaaaaaccagaggttccctctctctctctctctctctatgaaattggggttttgtttttcttgctaaatttgtgcgtcatttcttttaaaagtcttcttttttataacttttttttaaaggaaatgtgtgttttggatgttaaaagtttgaattttgataatttaggcttttatttgtgtcatagttgttaggaaatcatgaggttatttgaaaaatgtggatgactatgttggagttgcaaaatttgtgggacaaatttaaatgttgctattatgttttgtgttgtttagaagactgtgtactggcaattttagctacaaaagatgatctgctggattctgaatttccgtccgaaggctgtacatttttatattttagttttattagagacactttgttgttacagttaccatgaaatctgccagttcatggatcaactcgtacttaagggaggtagttagtagttgcgggtgagaaaatctgaggagtgttcatgttctgtaggttgttattgagaagttcagtaaaggggattaagttcaacgttgatgcatgatgggggatctatcaatggagtaatacattcacgcatttagattttgtatatctatgatacattattcagcctggaactgctagttggatgctcttttttttttttttttctgtggtgcttgatttccttccaaggagattcacgcttcttgtttttttcctgttttttctgtggtgcttgatttccttccaaggagattcacgcttcttgtttttttcctgttcaatattggcaggac

SEQ ID NO: 60433 - DNA, 161 bp, Populus trichocarpa
  Intron number 1 from transcript POPTR_0002s20230.1 (locus POPTR_0002s20230) derived from phytozome v7.0 (chr-ID scaf fold_2; pos 16175565 to 16175725)
ggcaagtatttcctagcaaggctggtggcgtgccggtacttatatttcaactcttcaaaactccttttctttctttgattttattttatttatctgccatttagtttgtttaaagcaagacctgtatttgctatattgttgttaatgtatatgttgcaggc

SEQ ID NO: 60434 - DNA, 233 bp, Populus trichocarpa
  Intron number 2 from transcript POPTR_0008s14630.2 (locus POPTR_0008s14630) derived from phytozome v7.0 (chr-ID scaf fold_8; pos 9718112 to 9718344)
acaccatcaatcaccttctacaactcctttttttggtatgcacatatttcgcctggttttgtttgatttttcttttttgctctggaataaaaaaattcaaggtgaaagccaaaaaatcggtattattagagcttactaaagaagagtactaacataatcttgaaccatcatatccttctgaatcatgtcatgtttattttagttctggtaattgtaaggattctttccatttc

SEQ ID NO: 60435 - DNA, 507 bp, Populus trichocarpa
  Intron number 2 from transcript POPTR_0002s10240.1 (locus POPTR_0002s10240) derived from phytozome v7.0 (chr-ID scaf fold_2; pos 7348014 to 7348520 reverse strand)
ctctggtatgtagtcctgtctcctccaaattcccttaattcttgccgaataccttaatcagaatgattttttttttctttcaaaaaatatcttccaaatcttgatacggttataatttgataatctttttttttaagaaaaaaaaaacacagtgatctacatatcgattcttgttgagcaaggtcaattacatggagccttatgttttgaggggtagtcaaaatggttggtgcgtgtttgtatccagctaaaaaagtgaagatcactaattcatcaggtggatatagttcgtgaactgaagcaacaaatttctttttttacccatttataatccatatttgagcaaaatatcatatacgaaggcaaataatattgttattttgtttttccacgctctaccaagaacgttaactaagcagcgaatttaatacagttaaaccatgaatttacatctagctcttatttgctgcagcttggagaattggtactatagaatacttataataa

SEQ ID NO: 60436 - DNA, 667 bp, Populus trichocarpa
  Intron number 1 from transcript POPTR_0002s21490.1 (locus POPTR_0002s21490) derived from phytozome v7.0 (chr-ID scaf fold_2; pos 17989005 to 17989671 reverse strand)
cctctccttgaggaacaagtaagttacagtagcgcacgatatagtcttctcattttttaatttcttataacgtgtttttcagtttgttttctgagaccgactttgaatatgtcaaataagctagaagtttcaccctagttgcgtggctctccatgatttaatataaaatctttcgtcgcacttaaggaatatttaatataatttcaaaagtcttcgagattggcaagtatctattttaatttttcgtagcaggtaattatgtttaaaaaataaaaagataagttggaagtgctctcaaactttgttacgatacctaaaaaaatcatttaaaattatatatatatatatatatatatatatatatatatatattaatcttttttctaaaattttgttcctagatgctgtagatcccaagaaatcccttgattttttttatggaatatattgctaaatcaccttcattttaatcttaacccactaaagtaatacttttggatttatcagttgtcatttctgaaaagaatttggggcatgtttggcagccgactttaattttgggtggagcatatgataatgattaaaatcaatagattttttacttgttttgacgacgactgatcacaaaacagattcgggaattctcgcaagcaatcttggactatcc

SEQ ID NO: 60437 - DNA, 994 bp, Populus trichocarpa
  Intron number 1 from transcript POPTR_0008s13830.2 (locus POPTR_0008s13830) derived from phytozome v7.0 (chr-ID scaf fold_8; pos 9114865 to 9115858)
gtgggaaatctgacgataagaaaggtgatatttgagttttaattttgattatggattgctgaatgcttgttccttgattatttgtcatggtgttaattagtgtattttaacttaattgtaattgctttttaacaagatttgtcttctttatcaatgcatggtttgctatatgtgaattttttgtcaccatagatttttttttttaattcgtgagctgggatttgtcaatcccgaagctgattaggaaaagtgttgttcttgaaaaaaagacttgtattctcaaaaaattatttatgatcttcgaatttgtagagtatgggttggcaagctggacaattaatgattatagcatattgtcgtggcaacgttctttaagtgtggttttcaatgtgttttcctctacggttgttttttgggagatgagaaattggtgccaagtatccattccttgttttatgtatggcttggaagttgtgcaagtaaaaaatgctgttggtatacaatcttgactgctaaatatttacatctatcaagtcagatttggacaagttatgtctctcctacatctttttgtagatgtgccatgtaataatttgatggatgcttattgttgtgattactttccgaatgttgtttgttttgcacaacatgtgtaggaaaaatggaaaatcttctcttctgtaatttgtttttagcctaaaattgttgatgcttttatttctgatatgtaagcttggagtttctttttgtattttgcttctaccaatattttctatcctctttcgcctaaaatctactgtgacatagaaagttttggattgttagttgttctgtttgactctccttatgctacatactcctacattatgaacaccacattgaatgcagaagtttaagaatacaaatatgtgctcttatttgaaacaatgccttgtcctagaaactactctggggaaacaatgatgttcatttaatttctttgtcatgtcagcag

SEQ ID NO: 60438 - DNA, 925 bp, Populus trichocarpa
  Intron number 2 from transcript POPTR_0008s06280.1 (locus POPTR_0008s06280) derived from phytozome v7.0 (chr-ID scaf fold_8; pos 3720705 to 3721629 reverse strand)
gaggcccacctaggcctctcagacgttttctccaggtaagatcccatgaatcgagttgttaatatctgatttttttatgggtactcaggatttgtttcaatgattttcatggctctgtaatttctatgggtttttactggttgttaatttgctggatgattcattttggggtttccttagactttttcaataagtagaaaagggctggcgcacgaattttatgttcacttcaattcatcaactcccacctccccgggtggggttcatgtcatttgaatttttctaaattaagagaaaaggccgggggatgatttttctgttttcactttactgtgggacctagcccaccaagatttctcaattatcaggctgctgtttacctcttcgaccaaattttggaaaatggtgttcttaaagtcaaagcaccagtggtgttcttaaagtgaatggtatggttgggcacgcagtaaaaaaaaaaagaaatgagaataaatgaaagggatgccagctgatctattgaagttttcaagtcaacttttctataactgtggcccagattgtggataggtaaaatgaagtctgttgtttttcaaccgagccccttaaaatacagacaggcgagaagcccgttaatggaactcgatctatttcaagcagtacatcctgcatttaattttaaaaaaaaataaatattttccgattaaatctggcgattttttaattcagaacatcttgtactcttctttctttgttagttttttaattaatggtgaaatgaacatcttgcaatctgctccttcagttatatgaacatatgaccttccatgaagatattttatatttctctttctgttttcacaaattctcatacctcgactcataaccaacagggtcttgatccaaagtccacagccaacttattctc

SEQ ID NO: 60439 - DNA, 982 bp, Populus trichocarpa
  Intron number 1 from transcript POPTR_0008s11930.2 (locus POPTR_0008s11930) derived from phytozome v7.0 (chr-ID scaf fold_8; pos 7686261 to 7687242)
gagggcgagaggcaagagtatccaggtatagagagaagcggagaacaagattgttctccaagaaaataagatacgaggtcaggaaattgaatgcagagaagaggccgaggatgaaagggagatttgttaagaggacaaccttagcaggaaaataaatatggactgctctagcgaggttccagtttgcttgcaccaagcggtgcgatcgacgctgatatgcacattacataggagctctgattgagggtcttcgcagatttaataaataataagtttttgtgctgtagtagagcattggcaattggtaacttcgtataggtacccttccttcctgctaacttttgctgcgcagaggaaaaaattttcatgtggatttttcagtcattatgagaacttttctcgacttgatttttttctttttgaaggatccacgtcaagatggcgacgggtttttggccacctgtgttgttcatcatggatgtcgattttcgaaatgctagtctcttttctcaaaaaacttttaaaatctactctctagcgtttacagctttacagtctgagcatcacagaggtattttttccattgaaaaattatacaatgggcatgtttggttttttttaacaataaaaatgtattttggaagtattagactcacctctgccaggcccatgtgctaggctttgaacttcttgacgttaaattttgaaagggactagagtgagattggctcatgtatcaaggtggtgtctggtaccaatatctaactatacttttaaaaatattttaaattctctttagatttaaattaatattatatattttaaaatatttttaatatactagtattaaaaataaaaaattattttaatatattttcaaataaaataataatttaaaaaacaactcctcaatactctcaattatactctcaattatgcacatgtaggtataccttcggcaggtgcgcttggcctacataca

SEQ ID NO: 60440 - DNA, 448 bp, Populus trichocarpa
  Intron number 1 from transcript POPTR_0016s12590.1 (locus POPTR_0016s12590) derived from phytozome v7.0 (chr-ID scaf fold_16; pos 12000063 to 12000510)
aacagtttcttcatagaaagaattctaaagataacgtaagattcttcaatttttttccattttaatttctttttttcttgttacaatctcttgattaggaatcaattcttcttgaccaaaacaagaaagaaaaaatcgaattgtgttatatttatatcttcttgtaaattagtccttttattagttttttataacaattgaattttgtttttccaaaaatattcttcattgctattgaaattctccaatttcacccactgcaaactgaaacaaaagtttatttttaaaggttaaagactaacatatgatttgttttttacaagtggactaaattaaaaaattatgtataaaatcggagactaaattataatttgatcaattttgaattgggttcttacataattcctgcttgtaacagttggatagatttataccaaaccgatcagcc

SEQ ID NO: 60441 - DNA, 515 bp, Populus trichocarpa
  Intron number 2 from transcript POPTR_0016s09980.1 (locus POPTR_0016s09980) derived from phytozome v7.0 (chr-ID scaf fold_16; pos 8108828 to 8109342 reverse strand)
gttggaaatacattcttaccggtttaatttttcaggtgttaattcaattcaattactattgttaccttacctaactctctcgttcttcttcttcttcttcttctatgaatccaatgctgcaattctttggtccagttgtttgtttgattctgaggactgtgaaaaagggtgaagggtctggtaaaacgttgtagccgtcgcttgccttgcccctccttgagagaaaacttgtactcttagcttaagcgtatgttaagttcgataaagaacaatgcatagtgtgctgttttgagtacctgaattgcagcatattctggggatgaacgcttagtcaactaatataatgtgatttttcttactgggatgaaatgtatgcatttgtatggtaccatcagacttttaggctgcgttcttgtgtttttgcacttccccttgttgttttcttttcttctgattatagtttgatgcttatgtcctaacatctgtattatatgtttcttgcccacagtacatac

SEQ ID NO: 60442 - DNA, 734 bp, Populus trichocarpa
  Intron number 2 from transcript POPTR_0008s14660.1 (locus POPTR_0008s14660) derived from phytozome v7.0 (chr-ID scaf fold_8; pos 9734222 to 9734955)
tggagattgctggtgctcaccaccaccactctaaggtactaataatcatataatcatcaccctttactaattacattctttctttccttttgaattttatcatggctatcatccatttccctcaaaatgtatctgtgtttcctagctcgtgttgttatgctactgtgtaaatttggggaaaatgctataaaattgactttcacgagaattttgtgagttgtgaccaatgatgaaggtagggaatcgataaactccaccattattatagttgctattctctgcaatgattccacctattgctttacgttttggagtaagctgggcatgtgaacggtttttatcagtggccattgtggggaagagcattcagtgttgcctggttgacccaaaatttgacatggtttgattcttcgtaactaacatttggtggttgaggggggttaggaattctataaacagcacctttcctctagccgtgattagaatccatgaaaagagagcgcagcagaaaaccagctgaaaagttaggagttcatatcagtcccaactttaactgctaggcattcaaaaagattttgtctgcttcatcagccaatcttactcactttgacaagcagcaaaagtggtttgctagaatgaaataaaaaattcacgagtcaatgagatctgatgttttctattactaaaccattactttactatattaggacctttcagtttggaaaactcttgca

SEQ ID NO: 60443 - DNA, 928 bp, Populus trichocarpa
  Intron number 1 from transcript POPTR_0016s09230.1 (locus POPTR_0016s09230) derived from phytozome v7.0 (chr-ID scaf fold_16; pos 7224436 to 7225363)
aaacaaggcggtgctcttcagaaggaacttattaggtgagcagatttaaaaacctccaaacctaagtaaatgtttgttacttcaaatacggttttccttttcctctacctttttttcctttttcactaacgtggttggtgtgagggtagagacctgttcactcgaagagttgagtcttcactttcaccataagagaatacagaaaaagagagaggtggtagctaggtcgagttgacgctattatgacttttaaatgatctcttatatcatgagaaatccatgatattttgaagaagaggtaggtgggcatcgagtggtggtgggctatggccgtccattcaatgagttgtctagtagagagagatcgatgttcccatttaaagactttctatgaccccatcttacaacttccatcatcaagttccatgaaagtgggggaaaatatttatggaccggagttccttatttataagattggtagttaaaattgatcaagaatgattttgttttggtgaggagtattatgaatttttaatacaagcaatctacctttaaataagagctaggaacttcaatttttatctcctcacatgccaacaaacaccttcatatttaggaatattcaattggaaagtttaggcgaaattggtcaccagaactgcattgagatttccgtttcaactttattttattcttccaatatctgtttacatcttttgggttaaccttctctagctaccaggtaaatggtcaatgcatgctttgactgcttagctttgtgtggaactcgttgtttaatcttttttattatctgacagattgatacacacaagtttccttcttgtgagtttgtgcttttgaagcattaacataaaaacgtaattgatttgtttatggtgttttcttctttccctcttcagattcttga

SEQ ID NO: 60444 - DNA, 535 bp, Populus trichocarpa
  Intron number 1 from transcript POPTR_0016s05070.1 (locus POPTR_0016s05070) derived from phytozome v7.0 (chr-ID scaf fold_16; pos 3072486 to 3073020 reverse strand)
ttaagtgtcattttttcagaaggaagctcatctgggtctaactttgttcttttatttgttaattgcttattattgttgtttctttataatcctgttgtttctttaaaatcagtgattggggtaataagaaaatgttattttctccattgggtagaggatattttatgtttcgtaaaagaaattgaatctgggtctggatgatgagaaaatgaggagttttccctgaaaatgtgatgagatctctgtttttgtttttaattttagcttcatttggggtgcgagaaaccctagttttcctggaagttttgtttttttgaaatgattaaagttacaatatcttgtttcattattctctagttgtattctgacaaaaccctcatttcgcggaaaattttacttttttttttcccggggttctctttatataattcgagatctctgttttcttcagtttctctattgtgaattagacttgtttaatcttctaattattaaattaatgtaacagaatcttggttaattctctcagataaaa

SEQ ID NO: 60445 - DNA, 852 bp, Populus trichocarpa
  Intron number 1 from transcript POPTR_0002s12900.1 (locus POPTR_0002s12900) derived from phytozome v7.0 (chr-ID scaf fold_2; pos 9596172 to 9597023 reverse strand)
aattcccttgtctgtcactctcaatttctcaatatgtaagttcggttttttcctctgaattggctgtttttcggttgtttagtgatattggtttctgggtttgaccgggtttataagaattcgatgttttgtttttgttgaattttggtttctgggtttgactgggttggtgctcatatgtttttggatgatgctgaactgtagtttttgttgaattttgttactttatatagtgaagcataaggttaaaatggaaccttagctagataggtggagctggatcttctggttccctttaatggtcctaatatttctgataacggatgatagctttatctgaaagtgctaaatgggatctggtagttgagacaaatcataagcctgtttgttttacatgctaggattgaatatgttctttttcataagaattgaattcagtgtgtatttaacatgagaagatgatgggagtaatttagaagtgcaggcttaggcaaccaggctaaaagaattttcttattgtgctgatcactctatggtattatctactcttgctttaacagggaattatgtacatttcttgcatttacttgctagtttcatgactctgacattagtgactatgttttattagtgggtttgacttctgcatgctctctttaaagttgtgttttcctatatgaatgacatgtaacatctgagataatattccatgatcaaaaaaatgtttacggcagtaaagctttgtattcattcctacacgtgcacaatcagttataattttaaacctggggtgtaatgtctatgataatctgttcaggttctttcctgagaaggctgaaactttagcatttg

SEQ ID NO: 60446 - DNA, 459 bp, Populus trichocarpa
  Intron number 1 from transcript POPTR_0008s20050.1 (locus POPTR_0008s20050) derived from phytozome v7.0 (chr-ID scaf fold_8; pos 13847162 to 13847620)
ttccctgcaattccctactcgtattcgactttctggtaatcttatccttttccctgcccctcatcgtctctatcttttattcctctttgtcgcgaaaaaagcttttcacaaaattgaattctccagcaaaatcgtcgctcataaagctgaatttgaatcttatcactagtcttcttcacaagaaaattcaattagtagtttttttgagatgttaggttatgttttcttgtttgtgtgcgtgaagtagggttagtttttttagtattatttttaattttaatagattttgggagtctttcgatcttcatataaattcaaattttcatacttccctattgttctcgaatttgataaattagtttataattgtatgtaaaattgttttttcgaaaaagcccagtgtaattgtttaattaatattaattcttgattttttctaactagatttttgaagctgaa

SEQ ID NO: 60447 - DNA, 702 bp, Populus trichocarpa
  Intron number 3 from transcript POPTR_0008s07580.1 (locus POPTR_0008s07580) derived from phytozome v7.0 (chr-ID scaf fold_8; pos 4641717 to 4642418 reverse strand)
aggtaagtgggcaggaagctgcttcattgactattcgtgtctttttctttattcctgtttttatctgtaatcatttacatctgatagtctcatgtctgttattttcaagttttgagtttcacctttggtcttcaacaatcaaaaccaacttcaaaaggcacaaaatagtgaagaaaaaaaaaatctgtttacagtggttattgatttgcatgctagtggtgctggtggttgatgtggtttgtcctttctttaatcatagcagagaatgattttgatgtaattttgtttcctggtttttgaaagcttttatttttgatttcttgttttagtgacctttttttttcgtttttccagtgttgttacttctaaacctcagatattttgatgaaatgtggcctcaactggcttttttattttttggaatcatatcgtgcgttctagttcttctttgataaaatcaagtagaagcgtttcctttgaggaactgcataacatgttgatatttgctgacataaaattaattaacctttgagaacttcattttgagctgtttgtcagtttgctgctttcccatttctttaattttcttcacaatgattctcttccttttggtggcaaatttatgcagtttgccaatgttaccagcttattttcttacacaatggacattgattatttgattgatttgtacaggtgcttgtt

SEQ ID NO: 60448 - DNA, 376 bp, Populus trichocarpa
  Intron number 1 from transcript POPTR_0002s10000.1 (locus POPTR_0002s10000) derived from phytozome v7.0 (chr-ID scaf fold_2; pos 7182696 to 7183071)
ctgagagtactctcactgcttacaaagccgctcaggttttttatttttctttctcagatcttaagccttggattgttttattttatggtttttggttttagatttgttcagtttagatactgattcgtgtcttttttttttgttttttcgttgaaggttgcaattattgagtatttcttatggtgttgatttgttagctagagagctttgattgcccgcccttttatgttgattatatatataatttcttccttttctgcatggattagaaatcttcttacgttatctattttgcacaaatgtaattctgctctgtatttcccatctgaatgctttgctgtattgaaaatggatttgtgattgcaggacattgcaa

SEQ ID NO: 60449 - DNA, 298 bp, Populus trichocarpa
  Intron number 2 from transcript POPTR_0008s12380.1 (locus POPTR_0008s12380) derived from phytozome v7.0 (chr-ID scaf fold_8; pos 7999211 to 7999508)
taatccatccattttaccgatttgtgggaagggatatgatgacagacctgaaatatcgctgtgaaagaaaacacagtgcctgcatggagtgttcctgtaagttttcttcagaattagttcatctagttgtttgttacgtggatgggctttaagttttcagagagtcgattgtattatgtattgattgaccatccaaagtcaaattaagattggataatacttcatttttctgtttttgcttccttgcggtgttgaggagtaaataattcatcagggtctacacctttttgatattcag

SEQ ID NO: 60450 - DNA, 759 bp, Populus trichocarpa
  Intron number 2 from transcript POPTR_0008s10320.1 (locus POPTR_0008s10320) derived from phytozome v7.0 (chr-ID scaf fold_8; pos 6473851 to 6474609 reverse strand)
ctaatcattgtagccaaacagcatcagtaaatttctcctcgtttcattcaaatcgtgtattctcttcttcttcttttttggtgttgtttttattcttaatttaagctcttcttctctatattcatgtgcctttacataattttagattgataagttttgattatgtaggtttttgttcatgttgtttttgtttcaatttcgtgccttgatttttatttttatttttttgcctctttcgtgaatatgatcctcatcttggaaggatttttattccccctaatttgcgtgtttttaaattgtgttcctcctttctaattataggtgtgtgtccatgtgtatattttcccaaaccacgagcgtgtttctgttttttccgttgcttgtctggcatcattctaattgtgcatttctttttgcgtcagcttttccctcatgcataatcatagtcgtgaagtaatatttttctaatttccattgattttcttttagataatccatataaatgtcatttaacatttcattttcagtttgatttttttgggggggtaagaaaaaatggcggttgtgaagtgattcgcaaatctttttatgatattttatgtgtttgatacgagtgatatttaagcacttgtgcttcttcttgttttttttttctttttaattagctatgttttttatgtttcatgtttggtttatttggataaatttgtttccctggtttcagatctccgtgttagctttaaatccagttgtttcagc

SEQ ID NO: 60451 - DNA, 902 bp, Populus trichocarpa
  Intron number 1 from transcript POPTR_0008s03560.1 (locus POPTR_0008s03560) derived from phytozome v7.0 (chr-ID scaf fold_8; pos 1907148 to 1908049 reverse strand)
tcaaatcggttgttgaaggaagcaaggtgtatcaggtactgttttttgtcctttctgtttggttacaaggaacaagaaaaatgaaagcattaagctctttgttttttcttctttgttagctatgagttggaactatggtttaattattctctgttcaaggataaattatattgtctattggataatttttatgtggaagatttcatttatttgtttatttacctcaattttctgtttggtttctgagaaaatggatggaagttgtgtgttttgagtttttcttttttcttatatttgatgtatggagatattattgatttagaatagaacgaaagctaagaaaattgattatgaacttcctgattgttagttttatcagtaactgaatgcatagctgtgcgtgtctgaaaacataagaatcatctgtaaaattctcgatgaattgagagaacagacctggaaatacaaagttgtcctaatacaggtcgagtcgtgcaattgctaatgtctgtcactgaattttgtgaccacctcccatatttttgtgtttttcgtcccaaggttaggatattgcaatcagcatccttagttcgtggcgggattgcatgatttcttggaattctgattatacccatcatcttcccatgctatgctatgcttctggtgttctgcaacaaatactttggttttttcttttcattgatagttttagaacttgatcattcagtttttgaggttgaatgatttgatattagcaagtctgtaaattaaggtgttggtatcaaatttagcagtttttttcatttgcaaacatgattctttagatccaagtttccaaatttaaatgaagccatgtttggaatgcagactttgcaaagggacgacatagcagataagatcaa

SEQ ID NO: 60452 - DNA, 523 bp, Populus trichocarpa
  Intron number 1 from transcript POPTR_0008s08950.1 (locus POPTR_0008s08950) derived from phytozome v7.0 (chr-ID scaf fold_8; pos 5555543 to 5556065 reverse strand)
ccacgccaattgaagcaggcggtgagttcacatttggaaattgagtttttaatttaaaccatttcgaggtttcttaattgccaggattgtttgatttattcgaattcatgacttgggacctggtttgaaaactgtcgtgctagctttagtaatccatgatttgatacattggatgattgcattattgtttttttaattgtaattatagctatctaattgattaggaaaaaaacgcggtttctaactgtaattgcgtaagttaaggatctgaatttaccttccttgtcaaagcaagaacgccctggtctttttttcgtggaccacagctctcttctaccattactgttactgctgcatttcaaattgaagattcaatatccgtgttgaaagtctacgcatatattattcagtttactacccagtaaaggatcggaattatatgtcttgctgagttgttataacttcccttttcttctctgattcgttaggctcagagggcgttttgtttcagcacgctgacaag

SEQ ID NO: 60453 - DNA, 814 bp, Populus trichocarpa
  Intron number 3 from transcript POPTR_0008s11830.1 (locus POPTR_0008s11830) derived from phytozome v7.0 (chr-ID scaf fold_8; pos 7576186 to 7576999 reverse strand)
aaactggtgagtacattttaattatcgtaaacctttgtataggctaggaactataagggatatggttgcggtgatggtttaattagaaatatgaaccttgaggttccttaaaatctctagaatcttaacatcgggcaacattttcttaaggaaggaaggaagtttatggacaaaatttcgtgaacttctgtctgtttgcaaaccaatgggaatagggaataaagtaagctgtggtcagaatgtctgtttccatgaatgtagagcaatgcatccaatacaggaaagagaaagagggcagtatctaaatttatatgttatgcaacccctaaattttctgtaaaatctcatttactcgtaaaagagagagattggttgtttactaaaagtgcagtttctctttcgactaattcaatcaacttggttaccatttatgactgttgaatgcatataaatttgtatggagaactggagaagagaggaagtatttttactcttcggctagtctcactaaataggtcccatggactcaagaattgttggcatcttagttttcagttcactaaatggacaggtaaaatttttgaaagcaatcaatcaaaaaaaaaattatatgctaccgagtcggagaagttcgcatcgcggtgcccttttatgctaaatggcattcttctattttcttcacaaatgagcttttttattgtagcttcaattgaaaacatgttaccactgagatcggctgaattcaaatttagcctccttggggagatctaacttctgttgtaattttgatgcagaacattcagcagagaagaac

SEQ ID NO: 60454 - DNA, 531 bp, Populus trichocarpa
  Intron number 1 from transcript POPTR_0008s06450.1 (locus POPTR_0008s06450) derived from phytozome v7.0 (chr-ID scaf fold_8; pos 3822747 to 3823277)
gacagaagaggagcacaggtgaatccctttttgttatggcttccctctagtgaaatttcttgtttaaaacagtaaattttgaacaatgcatccagtcattgatttacaatagagataaatcattaatcaaacacatttacaaaagattcggtagaggtgttatttcattgatcatgaacttttctattcaattggtttgtcagcagcaaaatggatcttcagattatggtacattttctctccatccaaggttcaaatttgttacttgttgtttccaggataataactttatattttaatccattgctgttgtagtttttaaactttttgagatcgtcgtcagattatctaacagagagagattagttgctggaaatttcaagattggaattttttttttaatagttgtcaggggctgcttttttctgttttgctatgaagatgacagtaaacaaattcttttcgggttgtgtttatttctccttgaacttgttcttgcaatgtttgattatgatcaataggcggttcctg

SEQ ID NO: 60455 - DNA, 572 bp, Populus trichocarpa
  Intron number 1 from transcript POPTR_0008s06940.1 (locus POPTR_0008s06940) derived from phytozome v7.0 (chr-ID scaf fold_8; pos 4193483 to 4194054)
cttactctttccatcacaagtactaccgctcataggtatgtttcttgttattcttaaagacagaaaaaaaataactttctagtttcatttttgatgatgatgtagctatgttggttcttgatgaactgtagggtatttttgtttcctgggtttggttaaagtttgaaattttgtttctggcgttgcttaatctgacctgttctttaatgattttttttccatgtttttgttttgttgcaagtaacagtgatcttattagagtaagtcatttttttgttctttggtggattttgttctgcctgtgttttcttctggtttgtttggagaggaaattcgcggataaaagcattagaagttgagcagaaaagtttgaaactgtttaattgttgtctactttgtcatcaataattagtcttgctcctctgatctgaactagcaaatagttttccaagacttagtatttttaggctctttttttttacttttttttttcttggtctgattaatcaatagtctaaattcttgattatggtatacttaacatgtttgttttaacgatgcaggacttgggt

SEQ ID NO: 60456 - DNA, 785 bp, Populus trichocarpa
  Intron number 1 from transcript POPTR_0016s14780.1 (locus POPTR_0016s14780) derived from phytozome v7.0 (chr-ID scaf fold_16; pos 13917556 to 13918340)
acaaaaacctcatctcctcctcctcctcctcctagtctggtaatccccccctttttctctctctcctttaaattattttgctcgttaatcaaggttttcagttgaattggagaattagggttttttcaatctcaattgaattgattagggtttccatgagcttcccatttcttatcagaaataatgcctcctcctactcactccatcacctaaatattcgaaaagggttacgttttttagacgatgcttgcttagaaaaacgtaaaagaggtgaaattatgaatgctacaaatcagtaacaaatatttgtttatcctacacttcagctcagctgagtgcaagctgaattgatttggaaaatttgacagcgaaatactaaaggtagccatcgatctatcttgtggtgtttctgggtttgtcaattttatttgattgatatttagtttccatttatgttattagaaacatggttttcaaatcatggtaagagttggatatgagttgatgtttaagatcataaagttaaatatttgaggggttggagatttctatttgttgattttatgcttcagcttatgtcattgagaaatcaaattatgtgttgtctaccatatcgtgtagctttaaggagaatgttgtggtcgcgaaaagcttctgtatatctcccctccagttattctctctttgtgatcatgattgttcatttactcagaatttattgttgtcaacttcttatgatatccaatgcaggaagcctttcctacagactccagaagagaaataaa

SEQ ID NO: 60457 - DNA, 570 bp, Populus trichocarpa
  Intron number 1 from transcript POPTR_0008s09140.1 (locus POPTR_0008s09140) derived from phytozome v7.0 (chr-ID scaf fold_8; pos 5667138 to 5667707 reverse strand)
ctgattcaccggggttcgagctcttctctcctgaggtaatcgagtgcttatatgatggttgcaacagatatatattaactcttctttttcgtagtttactttcgcttgagaaagtttcggtctttttcttgttttacactattttttattttcatttttatttttgagtacgtagaaagaaataaatctttttgacattttaagtttatctaagaaggtctttcgttgtctttaagatagacattttgttttcccggagattttttttgttttcctacctttggtaatagctcaggtgcttattagtcacatggattagtttccatgaggattcttagcagaaggaatattaaatattttttagcttcaaaatgatttatttgctcgcagtttctattattgatgctttcaagaattaagattgcaatgtggtaaaggtttgtattttattaatttatttcccccctctatcattaatacgccaccgctcttgtaattgaaagcctgtatttttattgtctagctatacttgtattcttacgatttttgagatgtctgcagggctttgga

SEQ ID NO: 60458 - DNA, 768 bp, Populus trichocarpa
  Intron number 4 from transcript POPTR_0002s09500.1 (locus POPTR_0002s09500) derived from phytozome v7.0 (chr-ID scaf fold_2; pos 6778398 to 6779165 reverse strand)
gaatcggtgcccctaaggttggtatatagttttgcttaaactttctatgttagaaacgccattgtttgtgatctctgaactttgtgcaacgaactttgagggttttttgagtgctaaaagttgtgcaaattcattatgagccagcagtattatgtctactcagtttcagggtttcattaatttgtgcgatgattgatatgaattgaagatgagaatctatctcgatactctgaattgtgtgaggagtcattagagggaatgaaaataatgattatcagaaagaatcaaatctgtctgttgaaaagaagttttgtttcacacacagaacagcatgcttaacaggatggaagttaagacttggtatcattcaagggagcctctgttttacagatggctcactgtaagtttgtctgtctgatatcggtgtcctttgtttggagatagcgatatctgtttacaagtagcttgtattagtctcatggctgcatggagctttgtcagatctattcattctataagccagaggtaaagaaatagaaatgtttggactgtgctttctttcagaggagctttttttctctttgatctcaagcaatgtttataattcccattgttctaataagtgcgatttgtcagatattctttttttactcagctgtagaggctatcatttctggacttgtaacaaccgatacccaactcgccctccccaatatctgtctgactccttttcctgcctggcacagattgaaaaacccttgcagaggc

SEQ ID NO: 60459 - DNA, 794 bp, Populus trichocarpa
  Intron number 1 from transcript POPTR_0016s05690.1 (locus POPTR_0016s05690) derived from phytozome v7.0 (chr-ID scaf fold_16; pos 3627384 to 3628177 reverse strand)
cattagctggtacctctccccctcctccctccatgcatgcacgcacgcacgcatgcttctcattaacttttaatatttgctttgtaaaatcctccttaagtttataatagaaagattaattaatgatctatatagcatgttttcaaatagttttcaaattatttatcttttcgcaaagatactaacaaattacgagtttatgctttcacaatcaagcaaaaaagtaaaaggtagagagagtggagatgcggggtatcgatccccgtacctctcgcatgctaagcgagcgctctaccatctgagctacatccccttgccgctacctcttgctgcttctgtttaattgtatgttatcttcttaccctggttttggatggcttgcacggcaaaaataggtctaggagataaaaagtttttttttttgtttgacccctctactataaattttttgccttaactctgttggcagggggtaggttatagcagctttagcaagtgtttcttttctttctttattggcctctcaagccaagtgtataaaacgatctaaagtaataatatttcaaatttcaaagaaaaaacactgcatgaaaaataatataactataaactaattgcaaattatcctaagattatattaactatattttttttttagaagatatgagaagttttaaatttaattatatgcatatttttcttttttcttttttgttgttattttaatagttgaatacatgagaggaaatgacctttgatttccttgatcctcaacacagggaggctgtcttcaa

SEQ ID NO: 60460 - DNA, 986 bp, Populus trichocarpa
  Intron number 1 from transcript POPTR_0016s03740.1 (locus POPTR_0016s03740) derived from phytozome v7.0 (chr-ID scaf fold_16; pos 2080841 to 2081826 reverse strand)
agctggactgattttgccaccaccagttctaatcggtaacagcccatgaagcaaagtttgtgtcttttattgtttattggattatttttacttgagttatcaaaactagtgtttgttttgattgtttggtgttaaattgtgctccttaatcatgattggccagcaaagatcttcctctttgagcagcggaggaatggaaaagagagtatttttagtgaaaaaatttgactgtgtgcatgattgcttttgcaaatttatattttcatgaagggctgaagtcgttttagatcaaatttggaaattttcttgttctagagttgttgcttagattgtgctgatagggattgcagtaagcaccttttttcttgttattacatcgcatcttgtcaaatactgttaattggatatctgagcatccgttgcaattgactctgattgtatttcttttcatgtagcttttatcaacaaataaaagattcagcttttcacaagttgagagcgaatttgaatgcataagcaaaaagaaatcacatgaatgagtttttgaatggaacgaaattgttccacgggtaggattgcttaaggggctgtatttgattctagaaaacagtagttgatgccgataattgttggtttagatttcagtttgttcaaccatctaagtgcatagagctcgttacttccttctgcctttcccttgtcaaggaagtggattggtggtagctttgtctagttaactggctgcttgaaatgtagttgctggatttgttgactacttcaaatggtttgatacagtggtggtattcaattgtgtggaaagtgtaaattccctctgtttcatagaccgagaggactcactatcaggaatacacactggatttttttatttattttttctatcatacattataaagtttcacatttttttgactcaccgcaaatctcaatttgcaaggaacgagtgtgttcgcccatttgctcctgaa

SEQ ID NO: 60461 - DNA, 486 bp, Populus trichocarpa
  Intron number 1 from transcript POPTR_0008s03570.2 (locus POPTR_0008s03570) derived from phytozome v7.0 (chr-ID scaf fold_8; pos 1913595 to 1914080)
ggttgctcctcttctcttccaggcaaatccctaatttttttctttgtgggtctttcaattctattgaaagccataagttccaactcttgggttatgattttattttgatattattgtaaattaagtggatcaaaatgcaattttgatgtttgatcgctttgatttggttaatttattgagttggaagggaatttgggagattagtgtgtgatcggggaaatgggtttttggtaaatagggtttgagaaagttttttgttgataaaatagttcagtatactgacttttttgaggatttttgctaaattttctgtaaaggtagaaattttgatcttctagtttcggtggctgtttattctgggttttggttgttaagcaattatttgatatattgattttatttgataattgtggctaattttgggtgtttccgttggggaaaatgtatgtagatagaagtactgggaggttgggcggacttaacaat

SEQ ID NO: 60462 - DNA, 961 bp, Populus trichocarpa
  Intron number 2 from transcript POPTR_0008s03570.2 (locus POPTR_0008s03570) derived from phytozome v7.0 (chr-ID scaf fold_8; pos 1914106 to 1915066)
ccaaaaacctacgtgtgaaggtaaatttatgggcttcagattttagactggttgttgtttttattttttctgtgtgcgatttggttggacagtcttaaaatgcatgcgggtaaggtagcaagtattgaagtgggattaggctagcagctgatactatttgaatttttcataattttttggggggctgacttgatcaggattgctctaattccaagccgtttgaggcttttggcagctgttgatgaaaatgtgcatcggcatcttctttttcagaccgcggcattgtgtttgaagctgtgactagtggacttttgatccaaataggaaagatggttgctattttatcatgttggccgttcttttctttattttggttgggcttgggggagttaatggtggtgcttatgaccactttgtttttatcttttgttgtggtgcggtgctatgtgctctgtttgaattcttgaattaagtttttacttttgggaaaaaagttgttcttagccttcatgcatacaatctcgaacatttctcaggttgtttctgtgaatcattctgctaacttctgtagtcatatattgactaactttgttacagttagctgatgatataatatactgcagtttgctctaaatttaagtctctctaggtttgcatagaatctgattcagaaagatggtttaaaaggtcaaatcatatgtctgcatgtcatgcatggtgcaactatacgttttatatgtaactttggaccatcaaaatactcatgattgaatatacattgtaggaggagcatttgaaccatctcttgattttaatgtctatgaaaaatcaaattcaaactacttgtgctttcaagaacaatgataaagcatatcacacttttcaaagtgaatacagctgacttttcattccaatgctgtgaacagttggttttgttaggggattctggtgttggtaaaag

SEQ ID NO: 60463 - DNA, 972 bp, Populus trichocarpa
  Intron number 1 from transcript POPTR_0002s19040.1 (locus POPTR_0002s19040) derived from phytozome v7.0 (chr-ID scaf fold_2; pos 14939344 to 14940315)
gcaagaccgagtcatctgtggtttttgtcaccaaggttaggcctgcctttttcaagttttaacttttttttttattgctaatgctttttagttatgatgatggatgtgcttgattgttcatcgataaatcgaatttgtagttaggtaatgcaatttttctgcttttcaataaccaagtacgaaatcttctaagggctaattttcatctgttggcaaaaatagaggtctgactgatttctggttttgagtatttaccaagccatgtgaagcttctttgttttttatagaccctcttaggacgtggtaatagtgaagcagctaatttttgaacatacgagtcttttcctttatcaaagaagaatttataaccaaatcgactagtttaaggactgttggaagcatttttgctatgtggcagcgaatgctatatgtaaagaataacgatgaaagaattgcaaatcggtatattaatgccagaacatatatgcaccttgaaaggtaatatgtaattgctgggaaactggaccttgatggtagtttttccatggatattttgcagaaaacaagcattttgcagatacagcatttactgtaggaatgtagagtcagtggaatcaaaatctaatacaatcaagacaaagggctcatcactcaggattttttgggcacggtttcttagagactataataaatggttaagatagcccttattgtattttgcgcttaatatgaatgatatttgttttttagtttccttttgaagttatctttttattgtagttgcaaatcaatacatttaaggtgtattcatgggaagtaagtaatatatacatgtagttgtatgcttagtttttcgatttccttcactgcttttgttcatatttgtgatttctactgttcatcacatggatttaatgacacaaaaagctttatattttgctgttcttgcaggctttaggggattatacaagg

SEQ ID NO: 60464 - DNA, 540 bp, Populus trichocarpa
  Intron number 3 from transcript POPTR_0008s03630.2 (locus POPTR_0008s03630) derived from phytozome v7.0 (chr-ID scaf fold_8; pos 1970152 to 1970691)
ttccacacaaacttgttactcgtgcaggagtcactgtaagtcttatggttccatatactttctgtaattcttccttctttgtaactttatatcccacagccaggagaagtaaaatctgattgtaactgagcagttataagtcattctatcgaggaaataagagatacaaaatcattttgggagggggagatctaggtctggaagagggttgaaaatttagtttaagatcactttgagaggtgggaatggttcgatttttaggttctgcctaacctcatgaaacatttaactagttggtgaataatttagtagtactggctatttcttgtcataaattccactccaaggctattcctgtcacaaaaaacttttaacatgcacaggcatatcaaaaaacaaagaacgcaggcattttgaaggttaatcccatgttttctgtttgctccagcaaaatatacattccaagcacttgtgattaacagttaattgttcgatttttcatgtatttgtttgctgtgggctgtgaaatctgtgcagaaa

SEQ ID NO: 60465 - DNA, 994 bp, Populus trichocarpa
  Intron number 5 from transcript POPTR_0008s03630.2 (locus POPTR_0008s03630) derived from phytozome v7.0 (chr-ID scaf fold_8; pos 1970889 to 1971882)
aggataccttgtgaattgtattgctcgccattcttttttcctgatcggtatctctttatttctgctcttttttttttccctctgtaaaaaaacattacatagagaagaagaagactgccctttttttttttatttatgatttcggctttggttaataacctcatctgctgcaaaaagaatagatgaggaatactgatctgcagcaaaaagaaaatatactttgagaaatacacaataaagaaaaaaccggtgacctcatcactgctaaatcaaattgttgttgttctcctttgttttgtgttaaattgtttaggtggtgatgggcctaggatttatatccctcggacaaggcccatagaccctcgtactgcatcgggccgggtaatatttataggcccaagattattgtggatctcaatatatataaacatttttacaagaccacatgtaatatatattatcaaactcacaatataatatatataaatatttatggtttcatgggaaaatcgtaaaatgcattcgataatttaacaggtttattagagagggtagatattgagagagagagagacttcaaacgacctctacaggaatgctgcccatgcacgtaacgaccgtctatcaccgtccattatcgatcaacggtcctcacaattccctctctttttttactctctataaaagaataaataaataattggaaacagaaaaagtgaccgtttctcaagaatctcctctctccatgctctcgctccctctgtaaatcctctctctctctctcttcttttttttttccacgattttttatattacctctcattaatcaagaagctctcctcaattctagacacgacatcgtttgctgcttaaccaattttcctaagtttcgcatttgattcttgtctgttttagattctttttaaaaaataaaactatatgcgtgtattgattatttatttatttatttcattaggttgtagttctttcattg

SEQ ID NO: 60466 - DNA, 877 bp, Populus trichocarpa
  Intron number 1 from transcript POPTR_0008s03650.1 (locus POPTR_0008s03650) derived from phytozome v7.0 (chr-ID scaf fold_8; pos 1984804 to 1985680 reverse strand)
ttgttgcctatcttggagttaaaaacctgaacaaggtacgtacttatgttgttgtattcagattttttttttatgtgatctgaataaggtttggactttatgctgtgtttggttgaattggtgatgggttttgtttttctcttgggtttttgattgaattgaatgttattaggggtttcaaggaaaggaattctttctttttttaaagtaaagttatgtccttttttctgctttgttgatgcatttgaatttttttttaattgaatttggtgatagatgtttgtttaatgatgttttcttttaagggttaaactaagacgtagcttcttgatgttggaaatctgaagactttatgttgtgtttggttgaattggtgatgggttttgtttttctctggggtttttgattgaattgaatgttgttaggggtttcaaggaaaggaattttttctctttttttaaagtaaagttatgtcctttttgctgctttgttgatgcatttttttttaattgaatttggtgatagatgtttgtttaatgatgttttcttttaaggttcaaactaagatgtagcttcttgatgttggaaatatgaagttttgattgaaggatgggaattgggttagcagcgtaattgcatgagtggttttttatgttgaaattaggagggttttttatgttgaaattaggagggtttaatttcgattgctgcaaatgggttttgtggccttattgtaggatatagaaagttttggcttttaattagtgaaagtttgaagttatttgttttgtttctgtatagtgaatttgattagattttccatattatggctaatttggcaggtgcccgttagaaagatttgtgcaagtacatatca

SEQ ID NO: 60467 - DNA, 701 bp, Populus trichocarpa
  Intron number 1 from transcript POPTR_0008s02360.3 (locus POPTR_0008s02360) derived from phytozome v7.0 (chr-ID scaf fold_8; pos 1131915 to 1132615)
tctgggactgctattctggttgactgtgtgtggaggtgcccttggatttgttttctttgttgttttctagagttgtgtctgggttcaatgagaattgttttggttgattgtctaggtagctttcacactaggtgtttgatcgaatttttgagagaaatgggcctttgtgttttcaggcgtgcactgctcacacgctttgctagcctttttgacatccatagttaaaatgctcacattgctttttgaggactagcacataaggcgcatccaataacctgataattttgatgagtatgtgcagcaaattgaggacatggaggaacaagttactgaatttgaagctgttatttcagttcttgacaggtatgtttctcaatgaatacatgccaaagacttggtcttgccgtctggaagtgaacgaaaagaaatacccttagcacttggagatggtcaatgaatatatttggctcttcgaaatgattttttactattaaaatgcacagaagaaaaaaaaaccgtattcacactacggaaaagctatttttatcgatttggctcttcaaaatagcatcttccctggagatgttctaatactatttttttttgttgagatgctaaaatttgatgcatgaaaattgatttaaaaagtacaatcgaactgcaaaatgagaaaaaaattgcttatcatctctgttgcagcc

SEQ ID NO: 60468 - DNA, 706 bp, Populus trichocarpa
  Intron number 3 from transcript POPTR_0002s09820.1 (locus POPTR_0002s09820) derived from phytozome v7.0 (chr-ID scaf fold_2; pos 7034989 to 7035694 reverse strand)
aatctaactttgtgcaagctggggtaagcccatataatttatttccctcttgggaaccgtaatacaagtttggtcctgtctcatgtactctcatagttttaataaatagggtagcattagtatgatctggtattggatgcagagtggttcggtaaactaataaggaaaagctttttaaatagcctttcacagtaactagttttcatatttacaccttaccctgaaagtagatttgagcaatatgcagtctaaagtctattaaacatattagcactctttgattagttatcgaaaggaaaagaaaaaaataagggagaagaggacagcattttagtgctctatgactgcatgatgagcccatttggtattgtagtagtaattgctttttaaagtgttttttgcttagaaacacattgaaataatttttttttaaaattcatttttaacattagtatatcaatatcatctgaaaacacacaaaaaaattaatttaaagcaaagaaaaaaaaatttcatattttttcaaaagtgcttttaaaacacaaaaacaagtggactcatgtcctgtgctgtcaagaacggaagttttgcagcttacttttattctgcagccacttgatactagttatgttctatgagcaatatttatattaattacccatgtttatttcctgatttttcaggtaagaaccattttggatatagg

SEQ ID NO: 60469 - DNA, 532 bp, Populus trichocarpa
  Intron number 1 from transcript POPTR_0002s09820.1 (locus POPTR_0002s09820) derived from phytozome v7.0 (chr-ID scaf fold_2; pos 7036598 to 7037129 reverse strand)
caaaagtgattgtataaggttatcttgttttgaaacatatctgctttacttgtctttgaatccttttatgtgtttagtcttagagttgcctataaagtttattcctctaaatagtttcagtttcttttcataggctctatttctgtttcctgggttttggatctaaacatttgctgtaatgaccataaactgagatcccaatttcttcctttcttttagctcgttggagtgaaattaattttggtttgcgctctatccgatgttttagcttttgccttttcctttgtcaccccccccccctgaggttgggggttggggaggggggaaggggtgggggtctgattcctttgaaataaagaatgtttctttgccttcctggtctcttttttctttgcttttttaactcatttgagaaattcttctctgaatttctctcattctgtattgcaactccaggtgaataatcattgtgtataactttctattttgtttccaagagtttaatattattgttgggttttcaggttataga

SEQ ID NO: 60470 - DNA, 844 bp, Populus trichocarpa
  Intron number 1 from transcript POPTR_0002s02680.1 (locus POPTR_0002s02680) derived from phytozome v7.0 (chr-ID scaf fold_2; pos 1588420 to 1589263 reverse strand)
atcttcaactccctgaggtacctaattggtcaacgataatcacttccttagtttttttactgcttactttctattttcggtcacttcttcttctttttttcctggaacttgttgattttttagtttgagtggtgatttattagttaaataactaatgtgtttggttccgaagaattgttggaaatggtaaacgaacaatgtgcggatgtgtggaacatccgagaaactttgaattttcgttcagtgaagttttgtaattaatggtgtaaaatctgatttactatattgattgaagctggatagaagaagaaggtcggacgttgcaggaacttatttagccattttttgttccttagtcaaagttattaagtctacgcgaggattagaaactttcgtctttgatttagtcaaggtttattaacgccaatctaatttgaaagttgaaactagtaaatgtagtatgctttaatggattatcaaacattataggcaggattggcgtttcgtttttgactgatcaagtttgaagtatgatggatacatgtaagatctatagatatggatgacagaattcatggatggtttaaggaaattatgtggatcatggttgcaatttgcaattggtagtgtcgatcaggcatcgcatgtgtatgtgtgaatgtatgtatgtatgtatatttcttgcttgaaatgtccatttcatcgaatcgtattgcttgtatgtctataaggtttcggtaagccattcaccatcaagagttacagtcgaaagttggaaaaaaaaggaagtctgttttaatgtagcatcagttagatgatgttatgtaaatttcatttcagagca

SEQ ID NO: 60471 - DNA, 627 bp, Populus trichocarpa
  Intron number 2 from transcript POPTR_0008s01770.1 (locus POPTR_0008s01770) derived from phytozome v7.0 (chr-ID scaf fold_8; pos 837566 to 838192 reverse strand)
agaagacagagaaagagaatcagggtagtgacaaggtaattttgtagcttcatgatttttgttcctcattttggaagtaaagctgtcacattgctcctgtaacaacattttctccgtcatgttttacttttggttaagcataatatagggttgcattgttgacttggtttaattatgagaagatggtgacttggttttctatcgtgtttcaaaatcaatactccctactttcaagtttcaccaactttgatgtttaatgtaatgactacctgaatgattttaaatgcatgtcgttcaagtaatcgatactgggttatatagattatgtttatgcattctagtaacatactacactaggaaatggtcggtggtgcgacatcgatatcttgatgtagtgaaaactgcagttttggttacacggattgagtttatgcattctagtatcataatatatgaggagatggttggtgtggtgtaaactgcagatttggtgattgttacgcttgacgcagatttctacttgatttccttttcttttggttattgcagtttttctttgaaaattaagttttatctacctctattgtgtccttttttgcagaaagctggagggagccagaaatcctg

SEQ ID NO: 60472 - DNA, 523 bp, Populus trichocarpa
  Intron number 1 from transcript POPTR_0008s11840.1 (locus POPTR_0008s11840) derived from phytozome v7.0 (chr-ID scaf fold_8; pos 7584318 to 7584840 reverse strand)
gtacttttgacatcgaagttaaacctgaagacacggttcgcatttcttttatagctattccaattcaatacgctagggttttttgaactgcgtttgtctttctgcttatgtcctgtaatcgaatagcctaattgtagaattgaattaagattttttctttattttaattatgatttttttatgtgtatcagttgttagtttaaatttaagctgctgtttgagctagtgtttttagtagtgactttgggaattatgtgaactgatgctcccattgtgtgaatttaggttttcttttcatagtttatgtcggaattatacaatctacgttgttttagtttctcctaaaaaataactgattgaacgcttctttttagagttagaacggggtatgggtcaattgtatgaagtggtccaatttactgaatcactgataacattataatttgaatttttttcctgtttgttcggttttattcctactatttggtttgtcatatgtattgctgttgtgttcaggttgctg

SEQ ID NO: 60473 - DNA, 563 bp, Populus trichocarpa
  Intron number 1 from transcript POPTR_0002s13720.1 (locus POPTR_0002s13720) derived from phytozome v7.0 (chr-ID scaf fold_2; pos 10187655 to 10188217)
aaggaactcagcaggttcaaggcaagccataccaggttttgtttcctctctttgtacatctaaatttcacttcactatttgaatataattctctgctgcctttttttttatttttcttttcaaatgaattatttagggtggcgagtgaaatgcttgtaaagatgtatcagaccacttttcatcttttttttttatttttgaaactatcatatcaaaattatacaaaaatataaaaattatttaaaaatattttttaaaataataataaaaaatatggttattgttcatggaaagagttaaaccgacccaggtgttttagacttttagtttaatttgtttattataactagtcccatccttctgctgtcctgaaaaaagcaagaagctgtgacacctctggctccaaaaacccaaccattttctacccttcttttcccattctgctttctcacaatcctgaataaaaacacagttatcccagttgaaaggcaaaagggagtgtttattttgatcggaaagattgaaactttggttttgttgtttgagagggagagagagagaag

SEQ ID NO: 60474 - DNA, 164 bp, Populus trichocarpa
  Intron number 2 from transcript POPTR_0002s13720.1 (locus POPTR_0002s13720) derived from phytozome v7.0 (chr-ID scaf fold_2; pos 10188343 to 10188506)
gaaaacttcctggactgacctctttcaatcaccaggtacctgatttgtttcttcttgtttttgggctctaaaaaaacaagctttcagtactgtctttgattcagatctgtgttttcggttaattacaggattcccattattgtttttgttattgcagatagaac

SEQ ID NO: 60475 - DNA, 656 bp, Populus trichocarpa
  Intron number 4 from transcript POPTR_0002s13720.1 (locus POPTR_0002s13720) derived from phytozome v7.0 (chr-ID scaf fold_2; pos 10188960 to 10189615)
caagtggaggtgtggtttcagaacagaagagcaaggtgagatatttccccactttgtcagggctatatttggcatttcaggagcgaatatcaaatgagttgataaggatataattttcttcttattttggagaaaatctgctgatgtggtgaatgaatttttttttttaaattattttaatatatttttaaatgaaatacttttaaaaaaataattgttacaatattatagaaaaaactgtttcctccaattttgaatgatctagaatttaatgccacttaggatggactattaattaattaattataattgcatccagggttttcaacaactgttcttctttgtaataatgcattaccatattcaggtgtcgtctacactttgagcaggcaaaagaaatggtgaattcatcaggactactaaagtttagtatccatacttaatgttgagtcagtcttcaatatgtacaagtagggtgtttggttgcctggtaaatggatgtttgcttttacattttagtgttttcagaattagcgtgattaatttaaatggattttgaactgtttttatgctgaggaaaatggagtgaaaactgaacatttccttgtcgaattgattcaggactaagttgaagcaaactgaagtagattgcgagt

SEQ ID NO: 60476 - DNA, 623 bp, Populus trichocarpa
  Intron number 1 from transcript POPTR_1651s00200.1 (locus POPTR_1651s00200) derived from phytozome v7.0 (chr-ID scaf fold_1651; pos 726 to 1348 reverse strand)
ttcttcccttttacggtaacttattattgttttgcttgcttcattttattttatagctagacttcattgtttttttccttctttcccttttcaagttagctagcaagggtagcactcacacttaaaattaacctccataacccttttggaatacgcaagactttcaagaatatgaattaaggcattgtttgacttgaaattttgtccaataaaaagaaaagttaattcccatcaggtgatttggatcatttacttgttttcctgcaactatcatttgacttggactaatcttttctcacttttttttatgacacaactctatcttctgttagtaattaatgatgttgtcggctattttttttttcttatttttttttgtgacacaactctatcttctgatatatcatccaaattaatgtcaccggtttggttttgaattaaattgatgtacatatatataatttaatagcaattggaattctaccattaatttaaataaattaaatatgtagtgatccatactctgcaaccttacaactatcgtctcagtataaattaattttcttcggagttgttaacttttagggattaacgtgcagggaatacacatactagtgacagtc

SEQ ID NO: 60477 - DNA, 998 bp, Populus trichocarpa
  Intron number 2 from transcript POPTR_0008s22080.3 (locus POPTR_0008s22080) derived from phytozome v7.0 (chr-ID scaf fold_8; pos 16460073 to 16461070)
taaccaaagcgtcaggtgctgacacgggcaaagaggtagggagttttatttttgttcagattatgtagttcctttttctttccatcctactgcatgcagtgaaaagggaaccgatcggggttttatattaagaaacattttttgcgttcctatcttatttcacttgctgagatagtgggattacttggaattcctcttacgtggttttatatgagtcatgagatatgcaaattgcaatatggcaatactcacatgcgaagagttattttcctacgcatttgactgttgattggtattgcatgattgatgaagcttttatgttcataatgttaacagtattactttttaccagaaatattcaacaggagtcactgtccaatttagaaatgaggaggagagcagggccttccattgtgcatttgaacaatggaagaaggaagtcactgttcaaggtgctgttttggaaattttgtcatggtttattatagatagttatctggtataatacggagatacccctttgtcacctatcctgattttttctctagaagttcatgtctttgactgcattgcttcaatagtggtttctagaagtttgcccataaatgcatatgtaatcatggaagttggaaccccaatatgaattaaaataattcatgtcgcattagccatacatggacaactatatccatatgaggaagaacttaacttttgttgaatgtgaaaatcttgaaatacttagtcctttggaaaaccttgcctttaaaaatggaaaagtaaaatccttttttccactttatgtctagattaggacttgtatttgactttccttcatctagctttttgaaagttttcttcaagaaaaatttaacagacaaagaactctttgttaactgctcttatgtttggtgaagttgtcaaaacatgtttcgtaatccactacccgcaatttgctcctggtatttacatatttccttttccaggaacattgctaactg

SEQ ID NO: 60478 - DNA, 577 bp, Populus trichocarpa
  Intron number 1 from transcript POPTR_0002s26260.1 (locus POPTR_0002s26260) derived from phytozome v7.0 (chr-ID scaf fold_2; pos 23241226 to 23241802)
gaaagcgaaacgttagttctatagaaatgctttgattacagttccagaaatgctttgggttgttcatagcaagcattttttcaattaacaaaaagcaagcaagcagtgatatgctgaatgaaggagctgtggtgctcggaggacttagttgttaatggttggagctggaaatgttgatgttgtaaagcaaaagagattctaagctgactttgagcccttgcaaagatgcgtggaccagtttcacagttgcagttaaatggagatgttagcaattaagtcaagtgtacttactgttaggaatagatgggtggaaactgggtgccgaattatgcccaaaaagagcaaattaaaacaaaatcgaaaaaaaaagttgcagttgtgaagatctagaaattgggatttgagattttgatactgtctttttatatatccagttcgtctgcatactgacatcgcacttctttgcatgttaatttcttctcttctatcattaaaaaagcttgaccttgttcttcttaatatgttttttgttctttgttcagctaatacatctgcttccaccatatctgccaacatt

SEQ ID NO: 60479 - DNA, 491 bp, Populus trichocarpa
  Intron number 1 from transcript POPTR_0016s02050.1 (locus POPTR_0016s02050) derived from phytozome v7.0 (chr-ID scaf fold_16; pos 978930 to 979420 reverse strand)
agtcagaatcaggctacaggtaataatccttaatctgaggttttcttccaacatgattgattgtagcattctaaaactagacttgcagaagaaaatagctttgatgtccagataatttagtgctaattagtacaaacttccatcttctttgctttcctgtctcaaaattcttgagctcttgacaaatcttagccaagtcttttactagaaacgacttagttggggtgttatcaagtcatgttaaaaggtttaactaggatcaaacccaaattcttttctaataactgtttttcctttgattatcttagaaaccaatcaagaatcaaccaccaattgctttacttgattctttttcacaataattgaatatttgtttttttttattggattatataatgctaattgagattaaaaaaaataaaattgaattggcagtggcatatcctcctccaccagcatcaactggtcctagtgcatattcagccccacca

SEQ ID NO: 60480 - DNA, 452 bp, Populus trichocarpa
  Intron number 1 from transcript POPTR_0002s10610.1 (locus POPTR_0002s10610) derived from phytozome v7.0 (chr-ID scaf fold_2; pos 7699256 to 7699707 reverse strand)
tagaaagtgcgaagaaagttaacagaaactttagggtatccaatttctttactccttccctctttattttcccactaattgtcccggaagatgtcatcgtttgtttcctgataaaagaactcaaagttgcagtttagattttgattaggttctgagttctttttgtgtttggttgttgagaaagtagtggagagaaggaaaatcgaagcctcttctaaaataattagcattaagtcaaagtcctgttacattaggcttaaaaagaaagttatattacaatattttagctccaagattcatgttcttaattgctgatgtagtttctgttttggttcatgcactgaaactttgatcttggcaggtttcaataattgtttgttctgtacactaatatacgtatttgatctgtgcactcagattttaaacatagtttaagctagagtttctaaggt

SEQ ID NO: 60481 - DNA, 1022 bp, Populus trichocarpa
  Intron number 2 from transcript POPTR_0002s12820.1 (locus POPTR_0002s12820) derived from phytozome v7.0 (chr-ID scaf fold_2; pos 9543832 to 9544853 reverse strand)
ttgattggaaagcccatagaatccagactgtagaggtacaatcaatctgccattgtcattgatgtcacacaccctgttgcattttcttgatgataattacttttcagcactattcgatcaagcacttgtcaatacttttgataaagagaagggcaacaatatttcttgtttccctatcttcttgtggattttgcagcaaagaaaatctccgtgtctgtgtttaatagaaatctacattgtaaatggcatatcggaaacaagaatgtgttgttgaattggtgtgtgttgaagcctatgggaattccggttgcaccagtggtttaggaaaggttggatatctatttgatggtttatttatttattttcataagaggttgtcatttgaggaggcttaagatgaatgtacccttgagtctgtgatgaaagctttagtgtgatgtaggaagccacttcgcatcattttgatacagcaatagaagagagtagaggatttgggtttagacattcaatgttgttagttttcgactaaaaacatcagcatattctcatgtatgatcgatcacttacgctgcttttggtgatgctccataaggaaaatccaaaatgttttcttatcaaagtagtgaatgcatcatcacttcagcaaagacttcccttttgcttccaaaaaatgatgttaagagttgctgctgcaaactgcttctttgctcattttattttcaaaaatattttcatatttgactgtttcttggaaatgaaagtggaaatgaagatattcatgcaaaagggaatcttatctgactgtgcatttgttgcatgtgtaagaatcggaagcttctcttcttggattaagtgctggcctagtgatttgagttcttttttatttgcttccaatcattgcatccgtttgatgactgtgctccaccagaaaacattttttccatctggataattattaacttgtaggccttttctctaactttgtagagacgcaaacttgtagaccaagaactagagacggt

SEQ ID NO: 60482 - DNA, 682 bp, Populus trichocarpa
  Intron number 1 from transcript POPTR_0002s12820.1 (locus POPTR_0002s12820) derived from phytozome v7.0 (chr-ID scaf fold_2; pos 9545534 to 9546215 reverse strand)
accaggtatgttttttcttcctctgttttctttttcttgtctctttttttttttatattttttttatattgaaccagtcagaccttccaaatccagaatcagcttgaaattttattattcgattgctctcagtttctcatttttatttagtttcttttcctatgttgacttcgttgagtaagtttttgtttttgttttgtttttggaaatcatttaatgaagctcggtttgatgattttcacattaaatttctcgagtcaaactgagctttcaatgatattgcataatcttaaccaatagtttagttagttttaaggttgctgttacagttctattaattattttactctctttagaacaattttcagcaaccaaatgaagaattcgcagaattattggtctaaattgtttacttgaaagtcggagattaattaaatccttgcttgaggatattagcctgatttctggctagaagattatatctctgctaggagggaaaaaaaatcatagagctttttgcattttgaatctggtcttgcattttgttttcaattctaaaatggttatgtatttttgctgctgaatttgttggagatatttggtgctggtgtttggctaattaattttttcttcttttttcatttcagacaccgttctggctctgattgctaattttttctct

SEQ ID NO: 60483 - DNA, 377 bp, Populus trichocarpa
  Intron number 1 from transcript POPTR_0035s00410.1 (locus POPTR_0035s00410) derived from phytozome v7.0 (chr-ID scaf fold_35; pos 248540 to 248916 reverse strand)
accactcaactcactgatttctcacactcctctctgtttttactcttctctttctcgagaacgttcactcctctctcttgatcagactcttttgttgaagctctgataccaattgttatttctaagtgattggttagcaattcacgatgaagagaaagaccacaccactttattgaatgaaagctggtttatataatcaaaccattacaacagaaataagaaaaacaagcaacccacgtttgactctcctacaaacgtggttaacaaacaaagaataaatcaaatctaatcctttgatcctattagctaggatattattgactgacttagtcctaacaaacccagttttgtttttttgagaaatagtggtagtacca

SEQ ID NO: 60484 - DNA, 732 bp, Populus trichocarpa
  Intron number 1 from transcript POPTR_0008s06430.1 (locus POPTR_0008s06430) derived from phytozome v7.0 (chr-ID scaf fold_8; pos 3817270 to 3818001)
atttcagggtaagtgctcattctctgctacgttcttacggtagtccacctctagcaacggacaagggctgccgttgccatttttgataattaaaaaagagaagatcatgcttaatgttgtatctgtgactaaaattaagcattaattcaaacaaaacattaaggaaaccttgctatctatcgaccatcaaatgtgagaatttcttttcagtggtataaaatttaattaaaagaggctcttgtggtccggaacaagcttatttccacttgctagtgtcgtagtgcagtcacataaaattattaattaaattaggtttctggggatcaaaattgtttgattagtttggtataatatatataattaaaccctcattaattatacatgattaatggctactaaaatgaattcttctaatgtgatctgtttgattcatagagactaaattagttcaataattccccccacgtcacatacacaccaatgtaaattaaaaaatcatcaataattaatgaaaaagtcaagcaagtctggcatggttacaatacaaattctttagagtagcgtgccattttagtatcaagttgattttccttctcttcttccctcttctatgaacttctactttacaaagacagcaagtctctttagaattagaagttgtgatcttgcttgtgaaaatcactgtttatattggcaggtagtcctgacgaacacaacaaagctctgctcaac

SEQ ID NO: 60485 - DNA, 825 bp, Populus trichocarpa; identical to SEQ ID NO: 59868
  Intron number 1 from transcript POPTR_0008s05560.2 (locus POPTR_0008s05560) derived from phytozome v7.0 (chr-ID scaf fold_8; pos 3229972 to 3230796)

SEQ ID NO: 60486 - DNA, 936 bp, Populus trichocarpa
  Intron number 4 from transcript POPTR_0008s18390.1 (locus POPTR_0008s18390) derived from phytozome v7.0 (chr-ID scaf fold_8; pos 12358630 to 12359565)
gaaagaaaacttgatactcactatcaacgcaaaatgtaagactgcatcttcttgttcttttatttctttatactcctatgtaagttgatagttagaaaatcctgtttcaatgattagatttctggcccattattctgttctattgtattgtattttgaattgcataagaaataatggagtcatgatactgttcttaattggcctacgccttacagtcatttctgtcgatttcttgttaacactgtgtgatcgacctacaatgaaaaaactggctgctgacagcttaatgcattattagtgaccatagtggatgcaatctccctggtttccaaaattcatattgttccttctcaatgtataattctgatagaaggaatttgaaattttcaatggagacagaaaccgagaaagaaaagagttgatatgctagaaggaaccaatgaattagggatctaagtgttatgaaattctagaggttttaaatgtttggttgtttgctattgtgttatttaagtacattcctactagacaatggcaggaaatacaagtggtggttgattaaagtagaaactcctgttgagattatgtttaagttataatcttaatttagtaaaaactagtgtacaaaagtataagtcatgtgtcaaaggggattctaattttgaggactgggcatgatgacatgttcaaagtaagtgcatgctaatcttgtgtatgcaattactcctctgttgtcatgtgtgtatctaaattgaatcgattgcacaccagtggcttggcttagcacaatgcacaatatataaggtctaaagtgaattgcacaccagtttgcctgggggctggggacaattcatctagagaaacctgaaatgatttatgacatttctttatgatgttatagtgcagaggcacttgacaatcatttaactgccattc

SEQ ID NO: 60487 - DNA, 899 bp, Populus trichocarpa
  Intron number 4 from transcript POPTR_0016s12090.1 (locus POPTR_0016s12090) derived from phytozome v7.0 (chr-ID scaf fold_16; pos 11353312 to 11354210 reverse strand)
ttcaaaactttttgtgaagcccaaaaccgtgaagggtgagatttcttacacacacgcctttattgcaatgttttattttttcctttcaatcaatattaagtcataatttttatccagttgctcttgaaagtttatctaccataagattcttgattatttatgttttggtttgttagaagtggcaaaagaattatatgtgtagattcaggtttttctttgttataattttttactcttacagctgagttcctatggtctcctgaattgtatataacttatttaaatggtcgtggatataaagtttgacaattttgaatactataccagttaagcaattagtttaataggtcttcatgagatggccatgtttcaggattggtctgtctgcttcccttgactgattatagaattaggatgaagtcctaaaaacttctgccatgacattgaagctgaaagatcattgactgttgaagaattggagccttgatttgctaatgtaattgatattaagtgccttcatgttgatcttgctgggtatttattggccagtttttttttttttttttggctttttaccttaagtcttatgtgatgcgaacctcgtgatcgcgtggtcacgcaacccacacgcaaagacatcaattcccggaaagccaagtaaatcaggtttgataggagtgcgacacaaagattacttgtacctaggcaccagcactattggaaacggaaactcccaccccacgaatattagcttctttgtcctagctcttgtgattggcccaattggcacctccaatgggtcgttggcatgattacgcttggtgttgagctgatccgtatcattatggcagttgcagaggattttgattgaccccataatgtttgtgcaggtgtttgag

SEQ ID NO: 60488 - DNA, 727 bp, Populus trichocarpa
  Intron number 2 from transcript POPTR_0008s20590.1 (locus POPTR_0008s20590) derived from phytozome v7.0 (chr-ID scaf fold_8; pos 14350048 to 14350774 reverse strand)
aagcgccgaacttgaggtatggttgatcatccttttcttttctatttttgatgtgtcataaccctcttgtttttagtacctagaaaacacaatttatttgagatgcttaatatttgttttgcaaattcttttgtatgtcaatcttgtgactcaaagctaaccttgatgctagttaaattattaaagttacagtggatctattgaagaagaagaaatattaaataaaacttcggaaaagaaaaggatatattatggattttctgtgtggtcatgattttccaaggccatttggtgtcaaaacattccaaatacagctgcgcgatgcattactcatctaacgtatttgatttgtgtttgcattttcttttcgttttctgagttagttcaatatgcatttctgaaaactataatctggttaaagatatttaagcatgcccattatcgacacctgcttctgtacttgacaatggcttgttggctaactagcaagtttcactaccaactgtattggaaggggaggttatactctgcgtggtgtgttaaggaaagaagcatttagctcttgttgttatatctttgtttagaatggtgatactgtggttcgttgtgtttctgggtatacctgtgtggcgtgctgtttgataattttgtacactagtgtgacctaatggcagcttcttcataccgtgaaggaaacttgcagacaagattgcagctgctggattct

SEQ ID NO: 60489 - DNA, 465 bp, Populus trichocarpa
  Intron number 3 from transcript POPTR_0008s03230.1 (locus POPTR_0008s03230) derived from phytozome v7.0 (chr-ID scaf fold_8; pos 1693748 to 1694212 reverse strand)
ttcttgacaatgttcttataattattgttcttttgatatccagtcaaactacgctttcctcacagtacttatggcctgaataatctcgaaagctttgccagctataactggagtgatgctattccttgatcatttcacaaattttagtacaatccttcaaataattactctcatacttgaatgttattctgtaatgataatttcatcatccttctttttccttctttttaagtgcttataacttctatttattctcaaactaaaagcaatatctaatttttctccaaggaccttgagttgaaattacagccgcatttatctcctgaactatcataatactttcttctgggtttctcccttccttttcgtgtctttttatacgtatcagtctagtagggagtatattgttgtgacaataattggcgtttaggaacgggtacgattccacaacagtggcccttcacg

SEQ ID NO: 60490 - DNA, 1033 bp, Populus trichocarpa
  Intron number 1 from transcript POPTR_0008s16760.1 (locus POPTR_0008s16760) derived from phytozome v7.0 (chr-ID scaf fold_8; pos 11279401 to 11280433)
gtctctctctctccttctctttgtaattacacaaggtccttttgtttccatctactcacttctttctaacttttattttgctttttttttttcttgttaaggaagttaatcttgtggtttgagtttgagggtttcaatttctgtatgcttagtaagaaaatgtaggaaacgccagtgcttttcgtcttagattttggatgtcattgctttattgatttttattaacttttagatttgtctggtttcgacattttgagttctgaattcctgcttgtataccaaaaaaatatgaatggtgagtgattagggattttaaggatctgaagtttttttttttgcttttttgaaacagtgttggaataatgtgtagtttatttgtatttctattttctgatggttgttgaatttgaattgcgatatctgtttttagttgtgttttatcggtgagagaattttaggaaggggctggcctaaaatattttgaatcagtgaagaaactcaagttggttggtatttcttagtaataccaattaggataatcatgtaggtagattgctgatttgaggattggcttgtatcttgcctagtggtgtgtaagttgttgagtgatgcagcatttgtttgctgctttgatgtttaaggtttagaactctatgggtggtttgttaatgaatcgagggctattctatactgattttgggaaacgaaaggagtgacgcagaaatttcagttgcaaggcaggcgtcttatgcttttgagataatgatccttgggagattttgagttatgttactttctaaagtttttaaatgtatgctggttacatttgatcgtcaatctctgaacggatctgcagtttatttcattacattacttttctctgctgccacccggtgcatttcttctaatgttcttttacatatgtttgcagttccaatttattgcaattgcttggagataagtctgagaataatgcaattatgattatgtcaagcttgtttaatgctgtttgcatttttttaatgcagaggaa

SEQ ID NO: 60491 - DNA, 376 bp, Populus trichocarpa
  Intron number 2 from transcript POPTR_0008s16760.1 (locus POPTR_0008s16760) derived from phytozome v7.0 (chr-ID scaf fold_8; pos 11280811 to 11281186)
aaggacctgcaagagaggcaggagcggtatgatttaatgcatcttttcatagcaatgatgttcgagtaaaattacttttctgttaatattcacacttcacccattggcttatctgcttggaattctcaattgatgggaagatgttatttatatgatactccaacattgtacaaccagtcatgtttccattatttatatgatactccattcttcaagaaatcatttttttctttaagtgcattaaattttttaaatttcttttccaagtagtcattggatgaataaaacacctgttttttcttagaccatctgatcttttgactttagtgcattgatgatggtggtgttttggtgcttatgatttcttgcagacgta

SEQ ID NO: 60492 - DNA, 663 bp, Populus trichocarpa
  Intron number 1 from transcript POPTR_0008s14060.1 (locus POPTR_0008s14060) derived from phytozome v7.0 (chr-ID scaf fold_8; pos 9292358 to 9293020 reverse strand)
cattggaaacagaccagctggaaagaagtgtggaagtaagtgacagtatttacaatttgtttcgaattgatttttattattattatcaaaatcactatttccccctaggcgtcttgccctcctcatgtttcgaaattggtagattaacactaaaatcaataaagcatttttctcctcgtctcaaatttttttccgttttgattctaagagaaagcctaatggtcatggactttcatcaacatgtcaagtagctttatcagtgaagtagctaacactagttaattttgaactaattttagtaattttcttacaaagaagagcttaaatctgaagtttctgggaagagaatactatcaactcagttacaagttagatcagagactcattttaatttttgcgcctcatgaatcactactgcttgattcatatcagcaaaatgggagtgtcattagtaaaattggcatgaaacgagcgtgcgtttaagaggacgctacaggaagttcttgagaaggacatgcatttcgacagggcccgttgctcgattccttgcgtgggctttatgcagcagcaggatcactggaaagccaagatatccgaaccatttgctcttgataaaaacaacggctaatcttgctgtcgtctctttgcagggtacacgctccc

SEQ ID NO: 60493 - DNA, 774 bp, Populus trichocarpa
  Intron number 2 from transcript POPTR_0008s13520.1 (locus POPTR_0008s13520) derived from phytozome v7.0 (chr-ID scaf fold_8; pos 8896132 to 8896905)
ctcggggacaagctaagaaatttctcattgtccaggtttgatagtttaaatttctctctagattctttattggaagtaatcaaatgttgtatactttgaatggtttgaatggtagactggcaatcaccatgggagccatgatccacaatactgcatattttttcttaggaagaattttgcaaccatctcacgcatgagtatctatgctaggcataagatacatcgagctgatgtttttctgaaatatttgagttttgttgaatcaatactggtttttggccgaacaaatctaactaatcataaccagaaattcttctccatgacaaacgaaaaaagaagtgagctaatactagcttagccaaaaaatgaagaaaaaactctattattgaaattagagactagatggaagctgattgaagtctcttttaacataaatctagtgttggtctctggctatgaaacgactcctccatggaagtgtttgttcttctgtagctcaaattttgtaagagattcatgtcctgattttgatattgtgaatctcgtgacaattttgtgaagttgtaaattccattttatgctggataactaatgaaagttcatagttcgcaaaattctgttgaataaattatgctatatgccgatagtttcctgcgtcgtatgagatatgaaagtaaactgtagaaagtccatgccttcatttcttgaaataaaatgcttattttgtttaatctgtgtcatagttgagtaacaccttcttctttcaattggtag

SEQ ID NO: 60494 - DNA, 801 bp, Populus trichocarpa
  Intron number 4 from transcript POPTR_0008s23040.1 (locus POPTR_0008s23040) derived from phytozome v7.0 (chr-ID scaf fold_8; pos 18254525 to 18255325 reverse strand)
tagcggatagaggtttgaagactcatcaaggacatgtgagtttttccattcagatatataactatgcatagttttctaatatataggatcattagcagcttcaataattacatcatacttttttatcagtttcatttttaaagaattggaaagttgatgaatttcttttttgagtagtggaagttgaggaaatttaatggggttggaaattatatatgtttaagtgacttcatggtgatgatggatgtcagtagtagtgaagatagttaaattgatgtgcattacacgaatgcacatcaatccaatttcgttccaaaacataaatagaagtggtggcattgccatgtttgaaggaggatatatcttcttatcagaaatttgccaactgttttggtatgcaaatgaattggattagcctccattagcagataggcttcacactaactttgtatttgttcatgtgaatgtggatttgttttgtgttgaactgaatgttaaacaaacattccaaatgcttttttgggattttttttttaacctaatgaaactgcatcttgggaagctggtaattgtttgggtttttgtttcaattactgttggaaaattagtttgctgttgtcactctggtgactttgcctctccttcctctctttctctttgagtggtccctttttcatggagaaccagctttagggagctggtggtatcttaattagctgtaatgtaattttgctgatgggagagtttcaatgtaattattgaatctacaagttaacctgaatattgttttcatttctgcag

SEQ ID NO: 60495 - DNA, 756 bp, Populus trichocarpa
  Intron number 4 from transcript POPTR_0008s03490.1 (locus POPTR_0008s03490) derived from phytozome v7.0 (chr-ID scaf fold_8; pos 1858345 to 1859100)
gtgaattcttaaaggtaatatagaatttctgtatttatcggttcatcctcatctaattcgattgtggatataataagaaatagctggaacatcatgaaatcagtgtctgaggcaaatccaagatatataactaaaaggttatttagtgtttgggataatgattaatcaatatattcaattgcttggatttctttttcttaatctaaggaactccaagcttatagtagaagcttgaatacctgcaaaaacagtctcaatcaggggatttaaagaccctctgaatataaaatcaatatatttatgaaaaatatattaaatgggtcaagacaataaatgatttaaaaaaaccttaaatgcaagaacaaaaatatttattcttaagtttgagttttatttaagaagatttttattttacagaaatcttaaccacaagttaacttaactcatcatgaggttttattttcttactgggttttagtatcacatcaatggatggaatagaataatagcacagaaataagtaatctaatcaagcagagtccatgaactttgtttgcgaaggggggctagaagaaagttaatcactatccttggtagttgtttttgtttttaagacttgaggctcgagacaacgtaaaaaggatgctatgatggatgctctacatgtaaccaagaatatggatacacttccgagtgttatttaactggtttgtgttttgatgttctccattgtaggttattttttgtaccgaagac

SEQ ID NO: 60496 - DNA, 1003 bp, Populus trichocarpa
  Intron number 1 from transcript POPTR_0016s03430.1 (locus POPTR_0016s03430) derived from phytozome v7.0 (chr-ID scaf fold_16; pos 1801571 to 1802573 reverse strand)
gcgtgggcgagaacttcctaggaatcccaatacttgttaaaaatgctcctagtgttattccagcctaattggcaacactgtttgtttgtttttggtaacgtgacctttaaaaatattttttaatttaaaatatattaaaatatattttttaatttttaatattagaccaaattaaataaatctctttaaaaaatcaaaagctatcccacgagctataatatcatctaaatattaagatggaaaacctcgcattaaattattgaattaacttgtaaaatatttttttctataaaataactttgtttttttttttattggtgttgatctagcttgatttaattgaattaatagataattaaaaattaacctaggtcaacttaaaacatgtaccgtgctttaccacatatttgaattatttattaattaaatatcttaaatcattcaaattttaaaatcaaacttaatcaatataattaagcataaaaacataaatatcttaccttagaaatccttatccccgactttcacctctcttctcctattcttcttcctctttccttcttcctcgcttcttctcttagggctctctctctcaagaaaactgatcttgtctctctcttttttttttaactttccatttctatttatataaaagacccaaaatatctttcaattatttatacccttaactacttatcaaagggtataaatatcttttccaattcaatgttttcaacatattacaacaagagaggcagtcccttggagtggacagacaagaagaatgtctcaaagagggtttcttgaatcactcatgttcaatattgtgttggaactttatggaaattgataagagttcatgttgctttgggggataatgcatcatccagtttcttcatttttaggttgctgtgactccaagagtccatgaacacagtgatattgaaccaaaactttgcaccttcaactaatcaataattacacagtgcatttcttttgtcag

SEQ ID NO: 60497 - DNA, 397 bp, Populus trichocarpa
  Intron number 1 from transcript POPTR_0008s18630.1 (locus POPTR_0008s18630) derived from phytozome v7.0 (chr-ID scaf fold_8; pos 12558379 to 12558775)
agataatcgtatagctggttgggttaagaacaaaggtttgctctcgtattacaaaatatttagaagttgaaatgcgattagttttttgaaattaatcatataaggtgttgtttaacagaagaaaatagaaaacatattttgattattaaaacaacgaaagttgatttgttgtttttcttttaattccttactttattaatataatcatacaaaaccagaccgtaacaattacttcttttattttcactctttcaccaacccaacctctttacatgaagtcaccgtagcaattacatgcctcttcatcaataataattaaattatttcaataatatcttttttcattctttacatgaagtcttagtcttaatttatttatttttttatataggtagtt

SEQ ID NO: 60498 - DNA, 591 bp, Populus trichocarpa
  Intron number 1 from transcript POPTR_0008s17290.2 (locus POPTR_0008s17290) derived from phytozome v7.0 (chr-ID scaf fold_8; pos 11605686 to 11606276 reverse strand)
ttaaaggtaatgttcttgataatatatttcaacatcttcatgtaactgaaatgcccaatatctgcaattagcattcccatgttcttccgattacaattttggtgttctgttttctgtcaggaacctaaaagggctgaataatctgtctcctagaaagcataataaacacctgatctctgtttcagtaaatcctacactacaggacttagtttttttttttcttcaggttacatgttttcatgtttagatctaaccaggaaaaattatatgaaccctgtccttatgtatttctaatgcactgctactataactatcaatatttgcattttataagttgaaattgtttaaaggtttagattttattttgttctaatattataaattttgtgctgcttttatatgggatcaatcaacatgttatgaataaatgaagttgattatatgcttaatgatttgatttccttattctgtaaatgttttttcgaaccttgaatgggtttcttttagtttctttttttataaacttggttcagttcctctagaaaattaacctattcattgtatgttagaaaaaagattttaaccgagaac

SEQ ID NO: 60499 - DNA, 424 bp, Populus trichocarpa
  Intron number 3 from transcript POPTR_0008s08310.1 (locus POPTR_0008s08310) derived from phytozome v7.0 (chr-ID scaf fold_8; pos 5165405 to 5165828 reverse strand)
caacctgtggtaggccttatttcctcagctgatcgtgaagttgtatatatatgaactcgtttctcattgttttgcagtgacttgaaagagggtgattatattaccaaaccaattaatgtccctggaattttgttttgtttcacataaaacacacttgcattggtgcatcgttaacagaaacactcaaaactaagcaatgcttcatttgctcacttttttctcgagtagctttaagaagatatgaactttaggtcattgaagatggtgcaagtgtgatacacgttggcaaaaaatctaatgagtttatatcgatcacaactgtgtatttgggttatcaattgttcaagtcgtcttatattttctgtgctttttcaccgattcagtgctcttttttttgcagggaattgttatttttgcatcagta

SEQ ID NO: 60500 - DNA, 787 bp, Populus trichocarpa
  Intron number 1 from transcript POPTR_0008s14250.1 (locus POPTR_0008s14250) derived from phytozome v7.0 (chr-ID scaf fold_8; pos 9426346 to 9427132)
aaaatcttttcaaggtttttaccttttctaccttccattttcatcattctctctttagttatttattttgtaaaattagattgctggtatgcgtttattatttgcagcttttggattattttactgagcagtgaattgacatttcctttattaaacaacttcttgatttaagaaaagtatttggtttttacatcgatagtgggttagacccttacaagtccattccattttgaattgcacattgcttgccctgaacgtaagctgaggcagagcagctccaacttaccataaaaatgaagagttttggaaattcttttaataatggagtttgttcttgcatgcatgcttggtgtcaaaacattttttaggagttgacaattcgtagctgtttagatgaatgtgttagtcttaatgctactacatgatagattaattgtgccaaaactcttgacatggatactcacttgtgtatttgttgagcatgtgatgtgatgcaatggcgcaacctgttaaataaatgtgtaatttgattatacaattaaatattgttcagtgttgtttatatttttgtgaaagctcctcaactttgaaactagccgctgtgttccctggaaataattttgttgcagttgagctgtcctcgcatcgtgtaaagagattagattattgtagcagccgaatatttaaagatagcatgttttgaggtgccttcatgtcctttgaatgacctcgtgttttgctttcctttataggtggaaaatattccagagtcatattactcggttga

SEQ ID NO: 60501 - DNA, 824 bp, Populus trichocarpa
  Intron number 3 from transcript POPTR_0008s09480.1 (locus POPTR_0008s09480) derived from phytozome v7.0 (chr-ID scaf fold_8; pos 5876113 to 5876936)
tccgggtgtacatatcctgcatcagcaacttcaaggtatgttttttaaaagaaagttggtaatcctgacatcctgtgttggtgatttctctgtcaattttggaatcatgttctcatcttgccagatattttggctattgtatttaaatgaagttttctctgggagtgtgtgaatctgttattagggctttggataccttttttttgtcttcagagaactttgtaactgtttagcgaaggcaatttttcttgcgaataggaatctataagctgatgaaatgctgttgctgttaattttgaatctaacttcctgcggtctcttttagactttctgcacttgcgtgtcaaacttgtacgatccacctggtagatttgaatttgatctgagtttgcttgcataagcagtataagaaaagtactctctttaataatgctggcttgagagaaattttagacagtggttgagaaaagtagatctatcattcactctttattattgcattggcatatctttataggtcaggggcctgcatctttcttacagtttgagctgtcatgatgttgatatttcataagttatttctcttattctacatttatgttttccacatgttaagtgccaatgatgcaacagttgtgcgtgttgtgtttttgttaagtttggtatccatttgctttcatgatgtggttgctcgaggacaatgggtgctctgagatttttttaattacgtgggtggtagtgggtactgagtctgagttatccttctggttttttcttttgtttttacagcaccggcaacacatcaaactcgggcacagcaccga

SEQ ID NO: 60502 - DNA, 561 bp, Populus trichocarpa
  Intron number 1 from transcript POPTR_0718s00200.1 (locus POPTR_0718s00200) derived from phytozome v7.0 (chr-ID scaf fold_718; pos 512 to 1072 reverse strand)
cggagctcaatacttcgcttgctggtctgaatacggtatgtatgtcatcgattatgaacaacacatgcatcaatgaatgggccatggttgattttgaattattgttaattttgtttttaagatttgatgtttaattggtaagcacattcaaggaataatcccccccccctcaaatctggtgttcttgactgagttttatttcttgttttaacaagaagggtatcctatcctaggcaagccgccaacatccaaggtcagtttgagtgtggatataattgtatttgtaatgataactcatcaagaaatgttaggtgaaaataattcgaagtggcaagtaattaatgcgaggaaaattaacaaaaactaaagctagttttagtgggtgaaattatgcagccagttttactgttcgcgggttgtaatattgtattttttttttaaatcttcattttgtgtcttaaacttcttattttttttcatgattgggctattttgagtccaattacttgttttttgttttttaaaggttgaattgtccggccacatcagtggctggattcc

SEQ ID NO: 60503 - DNA, 957 bp, Populus trichocarpa
  Intron number 1 from transcript POPTR_0016s13830.1 (locus POPTR_0016s13830) derived from phytozome v7.0 (chr-ID scaf fold_16; pos 12968377 to 12969333)
aaaggtgagcgaatgtggtgtggagtaggcatttatgggtggagcatttagagtgtgtttgatattgtggtagatgttgtagttatagtttgaaaaaaattattttataaaaggtatttttagttgaggttggtttgaaaaaataggtgtttggttaaaactgtgtttgaaattgaggttgaagaaaaattagtttaatatgtttggttaagaatgcttttgaaattgaggttataaaataatttaaaaatatatattaatattaatggttttcaatttaaatattgtagaattaattactcctattacatcatgaaataaaaaatactttataaaaaatactttttattattccattaaactatttataatttcattacatacaaaattcatccgataaaaactacagttttcataattttttgagcgtagataaaatattatcaggtataaaattgatattacagtgcgagtgaatttaatttactttatactagtgtttttttaaaaaaaatattaaaaaaattaacacactaaaaaaaaaaaaaaaaaagaatttcacgtgaacagtgcaatccttgcactgttcacatactccactgttcagtgaacagtggagtatgcctcccctgctcactgaacagtggacacatgcctccactattcagtgaacagtggaggtgacatgatatactgttcagtgaacagtgtatcatggttgaatttcccgaaagcaatatttttatgcttttcatcttcctgcattccgcacgcgatttgactgtgggaccatgtatagtaaataatttttaaaaaaaacgcaacttctaatgcgtagccaaacgggcatccttctcttcttgcttttcgattttttctttttcttttattttagaaaaatgaattgtgcttttcaatttaggtgtagggaaatcatacctgctcttgaaattcact

SEQ ID NO: 60504 - DNA, 925 bp, Populus trichocarpa
  Intron number 1 from transcript POPTR_0002s08420.1 (locus POPTR_0002s08420) derived from phytozome v7.0 (chr-ID scaf fold_2; pos 5864423 to 5865347)
tcagctacaggttctttctgtcccactaaatactgggtcctttttcttttcttttcttttcgtttccaatgaaggatcgagttttttgttattgggtttttctttttgttgattcaaattggttgactgtcctttgttttctgttctgtgttggaagttcaccgtattcaattcatgatcaaattgaggcatgtgcaggacatctgatttattttcttggcttgtccagtatatatataggttcttttcctggtgaaaggaaacttggcttcttaatgagcttgggagaattgttctaaatggatgtaaaataagagactaattgatatgtcaagtcaatttgtaagcttgggaactaaaagtcttgtgcttttttaagttttgaacaatgttatgggtagttagcactggtacagaacttaaacataattctggaatgggtgtcaggaaaattgttatggccaataaaattatttgaacacatctggtttaggaaaaggtgaattaagttttctattacgagaaggagttcttttctacattccatcattcgtaataacagctgttagttttaccctttatttactagactgtaattgtgaacgaggccattacagaaatggttttaataagattgtcagatgagattttgatcctctattcaccttgttttgaatcgcaaacgaactgatggaaaaatgacaagagaagcaaaagtgacatttacttttagttacattaacatataagacattatccatcaatggatgttttatgtgcttcccgttatccatcaattgttgttttatgagcttcccatacattctttattggatcgttgtggatttggttgtttctgcatgggctttgttttttaagcgtagaaaattaaatgaactttggtgcagctgcggtatttgcgggt

SEQ ID NO: 60505 - DNA, 404 bp, Populus trichocarpa
  Intron number 3 from transcript POPTR_0008s19410.1 (locus POPTR_0008s19410) derived from phytozome v7.0 (chr-ID scaf fold_8; pos 13357041 to 13357444)
tctttcccagacgacgggtcctcttctacgtacgtacttaagcattttgatcacattatatatatatatgatacatttaaattccatctgcatgaacacatgttctttcgtttgattgcttgcgagttgacttaataatttaaatacatgcatgccagtaaaagtgaagaaaacactcccaatattttggcttgccagtctgtcagaagttaaccaggcgatctccagcatgttactatctcactgattatggataattataataaaaaataatataatactatcgtcaaataaaataaaattaggtgcgagaaccaattattcttctgtttcttttttcttttttcctctctggtttatataaaaaagggacttcatagaaaattgggtgaagatctgctcag

SEQ ID NO: 60506 - DNA, 451 bp, Populus trichocarpa
  Intron number 2 from transcript POPTR_0002s18150.1 (locus POPTR_0002s18150) derived from phytozome v7.0 (chr-ID scaf fold_2; pos 14077670 to 14078120 reverse strand)
cgccggcctatcctggtatgttttgttcctcctctccttacgtttaattcatggtaattgttaaattttattctttctggttccgctgatacttgctcatgtttctgtcattgattaaggttaatcaaacactgtgggaaaattaaattgacaaattgagagaatttaggaaaacatgataacatgctccgtattcattaatgaatctgcctgaaacttcaaacctcgtatgaccaaaatctgaaatttgaggtgccacaatctaaaacatgacaagccacacatatactttacccataaaaatgttttcagtgaacccaaaagaaaagaagagaagtttgcagagaatcacaggctttacaggaaaaaggaaaagactagacaatgaaagacttggtcatagatgtgggaactggtttctcatgcaggtgtggagcacgtgggaggagat

SEQ ID NO: 60507 - DNA, 378 bp, Populus trichocarpa
  Intron number 1 from transcript POPTR_0303s00210.1 (locus POPTR_0303s00210) derived from phytozome v7.0 (chr-ID scaf fold_303; pos 7698 to 8075)
ccaaggtaatgaattgtaacgttattgtagagtttgttaagtttttgtatttgttgcactccatgatcattgcttggaaatgttagtgtttttttaatcgtaattggtcgcttattgattactcattgacaaacacaaattatttgatatgacttaatgatttatattatgatgtgtttatctcttcttagaattctgtttatctgagtgtcatctgcaaatcattgtctttagttaagggtgattcagttctcttaaaaaaagtttaagcgagatttaatactctatgttctaaaaaagaaaaccttgagaggtttttggtgctggatttttttgtgtaaatgccagctgaatcatttgatgtggcaggtgatacga

SEQ ID NO: 60508 - DNA, 934 bp, Populus trichocarpa
  Intron number 5 from transcript POPTR_0008s13840.1 (locus POPTR_0008s13840) derived from phytozome v7.0 (chr-ID scaf fold_8; pos 9122579 to 9123512)
aggtaaatcattttttctgtgattcatgagacgtggatgattattccattttgtttcaccatcctggagtttatgccctcggacaaatttactgcattttaaatttgtttctggaaggagtattatttttatcaacaaaaatacttttttagcttttacttgcttcactggctctacaagttctgtatcatttttcattctctatttcactatttttttttaatgttactatggtatttgcaacttaatcacctttagtgtagctttatcgttccgattgattttgatcagtggtagtttcagcattctggatgcatataacgaagtgatattacatgcatgttgtggcttatgcatgttgtggcttatgcatgtgggttctcttttcattttggttttagaatcaagtgttaggcgggtattgctatagggttgccaaaaagagaaccaaaaaaaattacaaaaagtatcgattgctattcacggaaagtgcaaatgaaaaattattggtgatgttggttcgagacataacttatgaattaattaaaaaaaaagaaagcgtgatatactatgctttatgcatctggtcaactggttatgaaattctgttagctgcaacaaaaagaaactgagttacgagcttgggaatttattctgatgacaaagttggactaaatgtactcgatgatgaagtggacttgcagtgccaggacactttgtatttcgttagtttgtgctaggacttgctttaattgtttcctaaaacaatatgcatttattctttacaaatctgtaatcttttcttctcctaccaatttatgccaagtaaagtccaagctatttgcctgttttctgattttcattgttttctactctaatttatcggtttcctttcacagataattgaaggagagagacttacgcttacactgtg

SEQ ID NO: 60509 - DNA, 451 bp, Populus trichocarpa
  Intron number 1 from transcript POPTR_0002s15310.1 (locus POPTR_0002s15310) derived from phytozome v7.0 (chr-ID scaf fold_2; pos 11439376 to 11439826 reverse strand)
aatttggaagctcaaggtatcatcttttgcacagctttccttccatggtttatacatatatatatgtagagttaattcatgtatcactctcttcttctttttttatcaaaccaccctcctctttccatgaaagcttttgagttcctgcattgtttttccttttcactttcatgtaccatgctggtatggttcctgcaccctagggttctatatgcaagatctcattagtgtgcctctctctcagaaacaaacaagtcagacacgtgtacacatagtagcacagaccttgatccttgcaggactttgggattctcttgttatcctcttctacgatcctagtgattccttttctcataccttttcctttctaattatttttctctctgggatttgaagtttttgtgtacgatatagaggcatatagagttagtgaaaatccgtattataaact

SEQ ID NO: 60510 - DNA, 807 bp, Populus trichocarpa
  Intron number 1 from transcript POPTR_0002s12160.1 (locus POPTR_0002s12160) derived from phytozome v7.0 (chr-ID scaf fold_2; pos 9016303 to 9017109 reverse strand)
ctaaaatatttgcagcagcggttacaaggtaagtctaacacagaacctacagaatgaaagaagtgatgaagaaaataaaaaatggattcactaaaatattttgagaagcataatacactgcgtggttttgtgcttaaaagtaatcagctagttgatatattcatagatcagatatcttctagttaaaaaagtaactgcagctttctttcttatccacaacacaccaaattaaattagaagttgaactgagcagtcaaggatgtagctccagattacaaattccaagaaaaccagagaaatctaagcgtttcttcttctcttctcatcgacacaagaaagccagagaaatctatatccccagtaattccaagaaagcaaacaaatcgtataaactaatcaaaataatacatttaatcacgaaagaggctattaaacaaaaaataaatcagtaaaaacacatatctaaaaaaacccataagcatttgcaagtgttattcttttcatgtcctcgtgatttttctccacctaaaaaaaccatttaaaattaacaaaaaaaagaaaacgaaaaggtagaaaattaactctttttttaatttttttttcaagacacaacaagaaaataaaaggaattattacagagagagagacagattcaagagggtgatattcaatgatgtcgactctcttggaatcagaggaagaatcctctttcgggaattgcaagtgtcgactctctttgcaagtgtcgactctctttcgggaattgcaatatcctgggttttctgttatgcagaggaagaatcctca

SEQ ID NO: 60511 - DNA, 682 bp, Populus trichocarpa
  Intron number 1 from transcript POPTR_0516s00220.1 (locus POPTR_0516s00220) derived from phytozome v7.0 (chr-ID scaf fold_516; pos 9892 to 10573)
ccatttggttttcaacaacactttccctgattcaggtattcttttttgggctcttattttcatttaatgttattcatgtttgtaagttgttgttctgggtttctgcttgttttttttgttgctgctagtttaccttgtgtttgttttctttgtttccattttgttgaagttttcttcttttatgtgttgataggcctgaatcactaagaaaacataactcatttctttagcagagttgttttcacagaatgaatgtgaatttgatcatgttaagatgggctgtgatcattttcagtttaactgagttcttttggatatctgaaagttggtattttgttgttcagtgggaattttagtgtgttttgggactcggtgtatggcgagtattcggaataaatgaggctaacatattgtcttaaagaaggccatggtcataaataatagggaaggagttagtaattagcattcaagattggatctgcatgaccaggactgttttttatggatattggttttttgattgacaagaaatggcagctggtttttaatgtgtgcatgctttgttcatgttgtcatatatgtttgttttctcaaatatataatgcaaatatcaaaattgtcttcaaaacacttatctgactttctgttggagatcaaattccatatagtgaatcaggcactt

SEQ ID NO: 60512 - DNA, 389 bp, Populus trichocarpa
  Intron number 1 from transcript POPTR_0008s03890.1 (locus POPTR_0008s03890) derived from phytozome v7.0 (chr-ID scaf fold_8; pos 2136830 to 2137218)
tttgaagcaaaacttagagacggtaagttgttctttgattttggttgagatttattagaatattctgcttttttttgttcagagtaaattaattttcatcaacatctcaaaatctttgttgtttttttcttcacaagttataactgattttttttcatatttaattgttgctaaaaattgttattattaaagcttgatctttttatttctcatcttcgtttccccctgcttttggatggttaagcatgaaaaaaaaaaccatgtgatagatatattatgcaattgatccgagcaataaagatgatgttcttttctctcatgtaatataatttgtttttctcttgcaaatttcaggttatacccaggttcttcaaatcccaaaactacat

SEQ ID NO: 60513 - DNA, 664 bp, Populus trichocarpa
  Intron number 1 from transcript POPTR_0016s11680.1 (locus POPTR_0016s11680) derived from phytozome v7.0 (chr-ID scaf fold_16; pos 10881356 to 10882019 reverse strand)
tagtatctggaagaaagagccgtttgggttaaaaggtgaagaatctctctctctccctccctccttctccatctatctatttattgttctgaacacaaacaaaaacagctctgttttgggttaaaaggcaccgattggtaatctctctctctctctctctctctccccttttgttttcttgttttagcttcgatgagattaaagcttatagtcgattctgagtaaataactgaaacagccccatgagatactagcgtctaataatttgatcaaagttgggatatttatcagaaattgtgattaagatggtttttttttttgcatcttgttgtaaattagtatatttctgaagctgttgattgaaatcttacatgtacttgagtggaatttagattgctttagctcagggaagcaaagaaaagaagatggttttcgcacatacgcttgtgttatttgcagagtgataggcactgtgagttttgccacatgaattttattggaaaacaagcagaagatacataaactcatcatacttgtttgatgctattgctgggaatcaaatttatgtttgccccacaagtgtatttaggataaacctgtgtaatcatagcagctaaaatgtgtttgtcctgaaaattagaaaatgaaccttggtatcttgcag

SEQ ID NO: 60514 - DNA, 908 bp, Populus trichocarpa
  Intron number 1 from transcript POPTR_0016s14530.1 (locus POPTR_0016s14530) derived from phytozome v7.0 (chr-ID scaf fold_16; pos 13733611 to 13734518)
ttccctaattcaatctcgctctgcatcctctctaggtaatcaaaatgctctctattttattttattttaatcaaatttgggtttttttgctccatttatttatgtattgtaattacagagaaacttgattttcttttgcttaatgttgtaggtttaggtttaatttgattaattttgtaggatttctttttggggtttgaatatgaattttttgggtttctttggtttgcttaatagaaaataatattgggaattatgtatgaaatacgttgattttatacataaaaaatggtcaagtttgcaaattttgttattgtggatcttaattgggctggtatttgatttaattgagttttattaataaaaaacagaaattgaatctgggtttttttttcctgatttggcatgtaagttttagtctttgtttgttttggattttgtaacctaatccggtttggagaagacttggagtattaattgtagaggaatttatctttcgtttccattctttagtattatattagtgattcctgttcagtgtaggttttttgggtttcaaaatatgatattttggagttttctatgattaagagaaattaatatatgaatgatgagtggatgtaattaaggtttaatttgaataattttataggattttttttagggtttgaatatgaatttttggggtttctttggtttgtttaatagataatattgggaattacgtgtgaaatatgttgatttttatacctaaaaaagtagatatgctaattttttttatatagaaacaataccgggaattgattaactaatagaataaatttgtggttgtggttattaaataattgatgttttttctttcttgtgggtgttgtgttgaattttgcagaattgactgactgatcttc

SEQ ID NO: 60515 - DNA, 816 bp, Populus trichocarpa
  Intron number 2 from transcript POPTR_0016s12200.2 (locus POPTR_0016s12200) derived from phytozome v7.0 (chr-ID scaf fold_16; pos 11528761 to 11529576 reverse strand)
agaaaaatattgttctaactcgcatcaatccagaggtatgatttgcttgatgttgtttgtttcttccggttttattacttttagtaatttgttccgtggaattctctacttgttattttttatgatatatattaaaagtgtgttctaatagagagtatttgatgtcaactgggcggaaaagagtatatttgcaatttgattacatcatttggaactattaatactattacacgctagtatgatttatgagagtttttccttgacctatgagaagatcaaaacaagtgcaattgttttcatattattttctttcatcttaatgatttcattggttccaatatatcataacacctgtatgttatttagtttcaaaagccttttgtttccaatacaaaaatggatgtatttgcatattctcgtttgatatttacatattttgattatatgcttgcatagctgttaaaattagacttttgtttagagagttctcaattttcatttaataatccttgattttggctaaatttggaccatcattcttttggatcagtttgaccttacttatgtgcttccttgaaagtttttggcttggaaggttccatacttcttaaggcgcttaattttactttttatctggcatttctgtgttggttttcttgcaatatagtaggagagtgacttctccttaatttgtcatcagccatgctttctgatacacaagacaacaaaaattttcttgtgattactggtaactttttgttttttttttttttttgtgtagattcgtgatacgagtgtgcttgtgagattaaggcc

SEQ ID NO: 60516 - DNA, 897 bp, Populus trichocarpa
  Intron number 1 from transcript POPTR_0008s19860.1 (locus POPTR_0008s19860) derived from phytozome v7.0 (chr-ID scaf fold_8; pos 13710333 to 13711229)
acttcgggttagcccctcccttgcttttcttttcttttcttttctgcagtttttccgcttttatatttatttatctctcgttaatctatgctttttttattattatttctattttcactttagttaattttatagaagaaaaaaatatgatcttgggaaacggcgtaaagggaacccaattagtattgtgatggagacttatattttttttccctctattatgagaagaaaaaaaaaggccctcattcgttggttgctgataaatttagctatgaggatataccgaggatgagagaatattgagaatcagtgtattgataaatgaatacctatttgcgaggttttcaataggatagcttggatgaaaatgcagcagagatcaagtaattttgggggataaaatagctaaatagtatgaacctccaaaacgtggattcatccattagtcctgttgatgacagccccataggttggctgttcttgagcagtgctatgcaagattgaaattctgaattggatggattgttgttggtttatgttaatcagagaaatctgttctttaaggctttgagcgagtcattcagggttgatatgcaaaaagttaaaattcagttgctgtggcacttaggttaaatgatgtcgctgccatacacagctttagacactgtgaaacgagctggaatggactgtagaggtttaatatcttttccaccgtcttggttacagatattcgaaatgtgtgaacattgaggattttatggcgcgctgatttctaccgatttgttgttctttttccttccccttttgattgccatttgctgtgcttctgctggtttgatgtgttcgtaactctctcttgcaggaagccgaaaacaatcgaggaaatcttaaagatag

SEQ ID NO: 60517 - DNA, 314 bp, Populus trichocarpa
  Intron number 3 from transcript POPTR_0091s00200.1 (locus POPTR_0091s00200) derived from phytozome v7.0 (chr-ID scaf fold_91; pos 4956 to 5269 reverse strand)
cttcaaaggatcaggtcttacattgtaagagcacatcacattgacatataggtaccatatttctatttttgattagtagttctgtttcttaaggcatattcatgctttctctacacacccaatgagtttcattaattacagtgtttattttcttttttattttatctctctctctgattttctgttttgcacattgaagattaagaagacacatatctttgatttatgatgaaaatgatttattattttttttttccaatttttgtgctgtccatatagacttttctggaaacaaggctcgagaaacttgctca

SEQ ID NO: 60518 - DNA, 455 bp, Populus trichocarpa
  Intron number 1 from transcript POPTR_0008s17770.1 (locus POPTR_0008s17770) derived from phytozome v7.0 (chr-ID scaf fold_8; pos 11932728 to 11933182)
gcatagtctctgctcacagattgcaagatccacaggtatcgaaatcgtttcttctccttctttgatctgatcatgcaagccaacacccccgcccctttctctcttctgctttgttgccgggaaaatgtgggtttagaactttgctttaattctctgtctgcttgttgaaggctgggtataacgctccctctcaattcattacattaattatgttgatggtgatagttgactttgatttggtatgtaacttgggttacacacatgaagaaaaataaactttttggagttgtattttgtgttattggcacaatctgagtaatttaactgattccgtttcgctggtgggtctgtatggaggttaaaacgcctccgggataaagtttctgaatttgaatggaaatttgcacactaactttatgatatgttctccacttgctttatcaggtcactatcag

SEQ ID NO: 60519 - DNA, 913 bp, Populus trichocarpa
  Intron number 1 from transcript POPTR_0008s12190.1 (locus POPTR_0008s12190) derived from phytozome v7.0 (chr-ID scaf fold_8; pos 7871632 to 7872544)
acaaagtgagaatttcaacccagcaatatcaacttgactgctgctatgactggaaaatttacagtcgcagccatcacgttattgcatttgttcattgtacattgctgggcatcaatttggtaaagatttgtggaatttcacattcttttggtcttggaatatttcttgattcttgctgaaatagaaggaaaatgcattctatggcaagttaaatatgctaatatagtaaaaagcttccatgattctgtgatttgaaagaacaaaaggtgtgtgaaatatattaagaactccagatcattttattttcggcatttgtttaaatttgagccattttttttttatcctccccaaaagaagcctttctttgtatatataactttttatggtttttgtgaatgaagtcttcttgtggagtattagataaatctctcctaatcgccaaaacctcaaataggcttgcaacacattcaaagagtgaaccactttttttttttggttaaattagtcaatgatgtgtacattttttcattgtacaaatgtatgatctctgccacaagaattcaagataagtttttgcccctagtccatggttctatgttaatgttccacatgattaaattggcatgaagtttactgcctcaacatcaagatttgccttgttctcccgttttcttataatttttcccaatgatttattttactacaggctttgttacaataatgatgatgttcaggtcactccttgtactattatgtatgtgtgtatttgttgtacgacgcagccatatagttgtatataaacatacatacatccatcaatgttatctccttttggctagtttcctgtataaaattcaccagtatctatgtctttgcagataattcgtcgggcaaataagcttggtgaagatcc

SEQ ID NO: 60520 - DNA, 861 bp, Populus trichocarpa
  Intron number 1 from transcript POPTR_0008s04170.1 (locus POPTR_0008s04170) derived from phytozome v7.0 (chr-ID scaf fold_8; pos 2337439 to 2338299 reverse strand)
tgatttctgggttaactgtaatatttgaataagaggtatggcatcataaatttttttgcgttctttcagttttagatctttgtttcttacggttttttttcttgcattgctccgtgttttgttttctttcattttaattgaactttgttgattttggaggtttaatagtttgctgaagtttgataatttaaaggtttaaagaaaaaacactgatgggtttttctggaagtcagatgggttccattatttttgggtgaagtcagtttttttttttaatgatgaatactctgtagctcttgtaataaaagctttgtgtagtgatctgtggagctgtcagatgatgtcaggttttgtttagttttattcttttccaagagttatgttctgtttttacgaatgtaatcggttgtagtgatggatgtttgatatgggattttgttgctatataatcgaacagtatctatgtgtatatggtcttgttcttgttcatgatttcaaatattggatgtcattgatgttttctctcttcgttaaattttatattttgcagctagaactggtgatttattgaattgtttgtgtttactgggcacatgatcgtacactttgcaatcacaatcttgtacatttttcttcagtttctggggctggtttacaatctcgatcattggtttatatgatcaatagttgctttgcgatattgctcgtggtcaatttttattctaacattgttttgagagtttgatttcatgtttagaggcttaacttttctagttccctttctagttcggaagacgatgaaggcatttatcttcatgctctttcctctttttgtgcagataaccttgatttctgataaag

SEQ ID NO: 60521 - DNA, 898 bp, Populus trichocarpa
  Intron number 3 from transcript POPTR_0008s14670.1 (locus POPTR_0008s14670) derived from phytozome v7.0 (chr-ID scaf fold_8; pos 9743474 to 9744371)
tcaagagagcatcacaaatgtaagatacctgccgcttcttttctcgttttttgtttcggaattccaatgtcccttttcgatttatacaactccattctctgtagtatattaattatggccgactggctttagggctaaggttattgcttttgctttctctgcgtgtttcttctagaaatttctttccattcgaataacttttggttggaatttaatgtcatggcaagcaattcagagctcataatgcgttctgctgtcttgacaattttcattattctttagaacttctggaacttgcttatattcatgcctggtatgcatcttgcttttcaaaaagaactgtattatggagctcgtgatgctgctttgtcaattatgcaaaattgtggccaattagcatgctaaactagcatttttcgggtacatctctagattagatactcaaaaagaagtgatgtgaaatgatgtgcttgatttgaaaattttctgcagtttagatgctcaataagaaaaaaataatgatgttgacatattcaaattgtaactgctaaaagtaaaaagttctaaaaatgtgattatcctatagaaaatgactaccataatttccaagtttgaaaagtagtccctttcatttttaagcacctgtgacaagatggatgttatatttcagtaatcttctggttggggggtggcaggggttttcttccatgtgatgaacaaaaactatggaattgagtccaaatttatgcttcattatacttcagttactcccattgttagtgcacgaggttgcttcttttttgtattcatactgctattatcattggtggcatggcatactgtaaatttcatgcctcttactgtggcattgcctgctgaaaaatcaataattttgcag

SEQ ID NO: 60522 - DNA, 579 bp, Populus trichocarpa
  Intron number 1 from transcript POPTR_0117s00220.1 (locus POPTR_0117s00220) derived from phytozome v7.0 (chr-ID scaf fold_117; pos 44679 to 45257)
gtggccaatctatctgggtgggacatacggaataggtaaatcatttatcaaggcatctttataaaaaaaattcaggctatgggaaaaaactagaaaattaatacatttaaagatttttttaaaattttatttgcaagataattgaaatttttgttaaaaataattataaaaataacttattggtcgacaaaaaataagatagaatttcatttgctttttggtctattaaaaccaaacttaatggatattttatttcctagcttttgtccttgtatgcatgcttctgtagtatctgtgtgattctataggcaataagataactattgtacggatcattcttagcataaacacaatcctagttccgttttcagtttgttctttcctttttttcctctctgttcttgaagctgtgtattgtgatcaggcccctatctttctcgaagattgatgtattcatttccggctaacagccatacaattttttagctagaatatgctaatatttattttctttttatcactatctgatttgatttctgcgcacagcatgattaatgttttccaccatcatatgcagga

SEQ ID NO: 60523 - DNA, 756 bp, Populus trichocarpa
  Intron number 2 from transcript POPTR_0008s03480.1 (locus POPTR_0008s03480) derived from phytozome v7.0 (chr-ID scaf fold_8; pos 1853326 to 1854081)
ggacaaggtaaggtgccattaaatcttcttcagtttatgcaatacttaattaatactggactgtaatttctttgttcttccttcataaaaaaataaacaaataaatgttttccatagtgtagcaaatgtaaattgtgaaatatcatataatgttatgccaaatggagcaaatatccaattttttacccaatgttattaaaagtgtgtttcgtattgtgtattatttacaaatcctggcccttaatcaacctagagtaggagttgatagccagatgttgatatgttctgtacttatcacgggcatgctgccgtcggcattgaacctgcaggctttatgtgatttctttgttccaactcttaagctagctgcttggccagtagttagttgtttatttgatttaagatccttgattgcattttgtgaatatctcccaacaaaatacttacacttgcactttagagttattttcttcattttggcacacggttgcactttatgcactggagttcacttgaacttggttcttagtgcattggtggtttgtttgtgatattgtgttagaagaaatatgaagcacaaattaaatagatgtgttctggaaaaaaatgaaggatcattactagtgctattgagtttggcttttgtttctctattccttttcattaatttggcagggaaaaactgcaacttccctgcttggtgacaagagaattaacatgttgctatgatgattttgcaggtgtcaaaccttctat

SEQ ID NO: 60524 - DNA, 568 bp, Populus trichocarpa
  Intron number 2 from transcript POPTR_0008s03680.1 (locus POPTR_0008s03680) derived from phytozome v7.0 (chr-ID scaf fold_8; pos 2000922 to 2001489)
ggaatattccagcaatatcgatacttccttggcaggtaaactccaagtgatttgttacattttcaggcgtttctgaagaaataatactctcagaaattttcaattcttttttcttttttgggcagaggtgtttctgtgcttctgcattaatatttataatatatgaaagatgagagttcttgtgtataaccctgataaggaagtcacgggcatgattctcttttgaaacatgtctaatgttgttgctcatccctttgaattatttctaagagaaatggtaggctactaggctctgatctcgaaacacccgagaagaatgttcccagaatgtgtagcaaaccataattgcttactaatttcgatgccaaaatgctacctgcagcttactttctattcaagcaaataccgagtgaataattaaagtgcagtagcccctggaaagggataatatgactcaaccttatgaaatgtatgtgattaactatttctgtggtctgtgatgttattcttactcttcattttcatatcaacagggtttctaaactgggactaagggaagctaagatcc

SEQ ID NO: 60525 - DNA, 458 bp, Populus trichocarpa
  Intron number 1 from transcript POPTR_0008s07780.1 (locus POPTR_0008s07780) derived from phytozome v7.0 (chr-ID scaf fold_8; pos 4777412 to 4777869)
ccaaaacagaagatcgtctttgtttggcaactcaggtaaaataaaaataaaaaaactccaattattaattcttcaatctttttcagctatgaaatgagggttttcttttcgttttattttacgggtaattccttgttacttcaaaaacactaccatgctaacattttattttattaattttagtattcgactatagaatttacaagaggtagtttgtagttacgattcatgtccagttttttcaaatctgactacttggaactgtaactacctgcttttacaagcgcaaaagggatttcaagtcgtcgtcttcttctatgtttcccatgtttttggcaaattgggattgtgttgaggatatgattcttcagcttttgtttttttttttttaagattttaaagtcaaatgtatgattctttcgttattgcccatgatgtgtaaatgcaggaaaaagaaa

SEQ ID NO: 60526 - DNA, 438 bp, Populus trichocarpa
  Intron number 1 from transcript POPTR_1896s00200.1 (locus POPTR_1896s00200) derived from phytozome v7.0 (chr-ID scaf fold_1896; pos 375 to 812)
accgcctgctgatcaagcagtaccacccttgccaagtaagtataaagaaaataattttttgatgttttgttgtttgtaagaagtaccatcacgtgattctggcgatcacgatcgaaggcagagatccaaaaatgttattccatcgaggacttgaaggttcttaattttatatgatccgaccattcgggtcctgattttaacaattatagtttccctcgaaaaaacaaggggaaaggatgatatacctaagattctatcagtaattcaaaaccattatattcggagaatcttaaacattagtttcctagtaataatatttttagtttgcaaacaattatggcatattttaattttcttttcttttctttttttcttacacacgattatgacatctatgttttccatttataaatgctttactttggacaagtttaagga

SEQ ID NO: 60527 - DNA, 439 bp, Populus trichocarpa; identical to SEQ ID NO: 59757
  Intron number 1 from transcript POPTR_0008s07770.3 (locus POPTR_0008s07770) derived from phytozome v7.0 (chr-ID scaf fold_8; pos 4766006 to 4766444)

SEQ ID NO: 60528 - DNA, 826 bp, Populus trichocarpa
  Intron number 1 from transcript POPTR_0002s16950.1 (locus POPTR_0002s16950) derived from phytozome v7.0 (chr-ID scaf fold_2; pos 12691793 to 12692618 reverse strand)
aagtctcttgttgccggtggtgttgctggtggagtgtgagttctcatatctgctttagcagctgctatttagatagtttgcttatttaaaaaaagaagaagatattttagtattttgaaggaatttaatattatctatgtaattattactttttaattctaaaggaattattgcagtaggtagcagatgaaattatggtgcttcattttcgtactactgatctataaaaaattcataatttcaagctattgttttgttcagtcttggagaaaagttttgaggaggattggaaatgatagggaaaaaaatcaaatcaaaatgaagttcctaatacaaaaagccgtgactttcgtgttagggtatgaaagtttggttttcaagaatgtgaagaaactagaaatattaaaaatttgaataatttgaggtgggttaatgactttccagagaacttgaacctgcacaaaacttacaatactttagatgcactagttttatgatactgttttccttcctctttgttttacttgtaattcagtgaatatagaaaattaagtgctaattagattgtttatttcaaattcatgatttgtttttaactcaggtgcttttacacttgcaagatgatttttgtttttaccatgtatggtagtctagatgttttgttcccaacgggatcactcttgaatgtgagtgcggatggcagaggttgtacaccttttaccttttatgatttttgttgttgtggtgatgctacatcgaattttctccaactaaaatggttgcatgcgtgttcaggtctcgcactgctgttgctcccctggagagg

SEQ ID NO: 60529 - DNA, 342 bp, Populus trichocarpa
  Intron number 3 from transcript POPTR_0016s12510.1 (locus POPTR_0016s12510) derived from phytozome v7.0 (chr-ID scaf fold_16; pos 11956849 to 11957190 reverse strand)
agaacaagctggtgcaaaggcaggaaaagcttggtgtaagattccaaggatagatctaaacatcttctgttttcgttgtttaatttccctagattcatttcgtgtcataatttatttgatcaaaactttctccagatgacctgcttaggcaaattacctgtttttggatttcttcagccttcatacattccttgacaatcacaattatattgctttctgaaatttgaattgttatacacaagcagagtattcttaccacctgcaatatgattttttattttatttttgtttgtataataattatcagaaaatcaacaatcaaactgaagagctggaaggtaa

SEQ ID NO: 60530 - DNA, 661 bp, Populus trichocarpa
  Intron number 1 from transcript POPTR_0008s07650.1 (locus POPTR_0008s07650) derived from phytozome v7.0 (chr-ID scaf fold_8; pos 4687316 to 4687976)
acccacctggatcctcagtttgaatccaaaattcagtaagtgtttctgttttttgtaaaataaattaccctttgtagaattgttcacttcctaaatgggtttaatttagacagttaacgaagatgaaaggaatcaactttgtcttttgggttctggtaattgtttagaaagtaacaaggaattacgttaaatagttatatatatgcatgcatatgtgtgaatgtaggttcaatgcctgtgaattttgttttgactaaaataaaatgagaataagattatgtcagcatacaaaaagaatgtaattcttatttgttttctgatctaataaaaatagactgtaacttggtggtgaaagagaagttatgggttttgatttttttaatcattcattttagttttaatgtagaatttatttagtgccacttactgctgagttttagctcaaatgtagacctattctattttttatattttatatttttagcttaattatgttttaatattactgttacctgaattcttttagcttcttttcttcattaactgcaaaaaaaatgctaaattttgagtgtggtgcacttttgttatctatgatggctgcaaattacctcattgtgcactggaaacttctgttctgcagtggatttggaacatagtcctg

SEQ ID NO: 60531 - DNA, 782 bp, Populus trichocarpa
  Intron number 1 from transcript POPTR_0002s16420.1 (locus POPTR_0002s16420) derived from phytozome v7.0 (chr-ID scaf fold_2; pos 12287730 to 12288511 reverse strand)
gaagctgtagttggtttgtcccccccccccccctcaacttaaatacattcttgcttctttttctttcaacgcttcgtttgttctcttcaaaattttcaattattttgcgattgccttcgattagggttttacatgccttacattcttattcatttcttcattttattttaatctgtttgttatacatatgtgtgacgccgatacctattaaaggttttattgcggatgtttgggatttttgtttttatgataaccggggtttatttatggagaaaagtctccgttttattagcgaaacagaataattttaggtttaaagggtgaaagtttctgtgttttcccccctcataggtcaacaaaaagaaaaaggagaccttttaggggggttttcatttctgggaacctgaagttacagacgactttcgatatttgaattttcggagtttttttagggataccaaattaagggtaaagaaggagcaagaaatttgaagtagtgctacccattttagggctaaatgattgagaatgcaccatatgtgaagctgtggtctgctgtcaaaactgattaagaactttcacatccgcctttgctgttagtatctttgatatttatcagccgagaatgtgacagttagaggcaattgaggcccatgccattcatattagttgtaattcgatgcttatttgttactctttcttcaaaccttctatgacatttggatgttttatgttatggagattctaactgctgcatggtttgtcctgattttccaggtttt

SEQ ID NO: 60532 - DNA, 321 bp, Populus trichocarpa
  Intron number 2 from transcript POPTR_0008s02920.1 (locus POPTR_0008s02920) derived from phytozome v7.0 (chr-ID scaf fold_8; pos 1503580 to 1503900)
caagtgagtttcttgattaataatttttcaaatttaattctctacaaattaatgcatcgaagaattttttaaaagaaaatcatggctctgctgtttttctgacattcaaaagattgtgacttggaagttaaaaatgcttgtttgaattccctcatctatcggaaagataatttctttttaagttgaatgagttcaaagagattctaatttgtgtgtgacttgaatgtgtatttgtctgttgaacaagtttttgtaacattgggttggtttgtgttgtgacatgcagattgtttgagttgcagtgtcaagaaacaaatttaa

SEQ ID NO: 60533 - DNA, 656 bp, Populus trichocarpa
  Intron number 1 from transcript POPTR_0008s03760.1 (locus POPTR_0008s03760) derived from phytozome v7.0 (chr-ID scaf fold_8; pos 2032073 to 2032728 reverse strand)
tcttttgtttcaaggtaagtggactattgagtattgactgtagctgtcctgtatgttgtagtttatgaaactttctctatgaaaattgtttgcccactctgttgaaagcttgtggcctgatggagcatagataaaatgctttgtaggtgaaaatcgacaatgaatgttctagtttttcaaattacttttgtggcatgtcctgttatggtgatcaatagaaaactttgagatctgtgatggattgttttaattcgcccatattgtatttcatgtttgcatggttcatttcaactagttttatatatatacgttttgatttctatttgaaatgatttgttttttcactagatgttcaggggattaaccaacttgcttttctgttgatcatttgacatgattttaaaattacatttgaactacttttgtaattttgaaatatatctggctagattctgtggagcttttgagccccatcaccacacaaatatttttctgttctgtagtactttatattcttatgtttgaatagtttgtgtgatcatcttctattttttattgcatttataaagttattattggtatgcttcattgattattgttgtggatttcttttgatgccagggtgccgagatccttactaccaggtgctcggagtt

SEQ ID NO: 60534 - DNA, 582 bp, Populus trichocarpa
  Intron number 2 from transcript POPTR_0002s21800.1 (locus POPTR_0002s21800) derived from phytozome v7.0 (chr-ID scaf fold_2; pos 18433318 to 18433899 reverse strand)
gaagtgagtgcacccatcatctcttcatttttgtttgtgtaaatgcaaaagtagttttcaaacatgatgtgtttataatttaatcacgcctgaagttgaggtgttagtgataacatcgaagcatttcatgaattctatgacccgtttatttcaatttaatgtatggaaaaattatgttgtctaagcctctattgcactgcctgtttttgaagcttgattgatatttatttgtagtattttggccttggtaaaatatctctgtggctttgtgttgaaggggtgcaattgcatgccttagttctgtaaaagaaacactactttttcttaatgtgcattaagaactattacttgctatagaaaaactcaaatcacctttcacattaacatttatttgacactcttcctttcactggatttttaccagtagaagaaaaaaaaacccaaagggaacccctagttaatcacccctgtttgtggatgtgctttatgttgatacaaatggttctctgtgcaattggaagcttcaattgtcaaattcacttacttatgatggattattgtaggtgattggtatattagact

SEQ ID NO: 60535 - DNA, 685 bp, Populus trichocarpa
  Intron number 1 from transcript POPTR_0002s16980.1 (locus POPTR_0002s16980) derived from phytozome v7.0 (chr-ID scaf fold_2; pos 12747599 to 12748283)
ttttgaagctaataaaagccaaaattcacaatcaggtatccaattctttattccctttcttttttctctacatgcttgaacaagaaagttctaatcaaaacgaggaattggttatattgtaagaaagatttgtcaaaatgaggatgtgggttttcttggatgcgaaaactggattcagtgtacagtctttgttttgtgattcaatgacaacttctcttttcccattttcattttcattttccgaatatttgaagattggatcgatccttttcttttgctattggttctgtattacatctgtttattctatttactgtcgcagttcttttgtcctgtcttttccggtgaacccgtcaacgcagatagatcattcaccatttaattcagccacttcctcttagtttcaatattttttaggtgctggctaacatgtctggtttttaaatctgaataatgcaaaatagcgtttagtattctgctatctgcacaatactttttttttttttaattattattattatttcacttaaaggcatgcgctcccatttcatagaatttagtttgctgtctagtctttgtattagcattcactttcagttaatactcctatgccactctttgtagtgtagtgatgtctcttccatgcacatgtaattgcaggaaagtgtgatttgtttactggaga

SEQ ID NO: 60536 - DNA, 594 bp, Populus trichocarpa
  Intron number 1 from transcript POPTR_0008s01620.1 (locus POPTR_0008s01620) derived from phytozome v7.0 (chr-ID scaf fold_8; pos 789100 to 789693)
aaccctcctcctgtaagagaacacaaactttacttaaaaacccttttggggttttgtttctctttaaaaagcaaaaccctttttctgttcttgcttttaaaggaaccccatgaagaatttagggttttagatagagaaatactcgcatatgttaggattgcttggattaaaaaataggaaaccaatctttgtttttttttttatgatttttgactacttctgttgtgtatgttaggttttgttgagtaaagtttgtggccttaggcaacttaaggaggtgaagtcaccttctactcgatgtttaatatatcgaggttacttacgcctatgtacatgcttgtatgtctgcttttgttgagtgaagtttgtgactatagggaatctagaaagctgagcttttgtttgtctatgtatgcatgcttaaatgtttgtttgtcaaattagaattatgcatgattttgtgcgttcaattgggcttaatgtgtatgaatacgtgagtgagagagtgtgagagatttttattggctaatgctatatcttgaacttgaatttgttgtagaaagtcaaccctccacctgccttttcaataataaa

SEQ ID NO: 60537 - DNA, 880 bp, Populus trichocarpa
  Intron number 2 from transcript POPTR_0002s13830.2 (locus POPTR_0002s13830) derived from phytozome v7.0 (chr-ID scaf fold_2; pos 10247069 to 10247948 reverse strand)
gttgtttgctcacggaacctggactgactacaaaagtaagcattcaagcttttccttttctttgtccctctatttgttttcgattagtttccgttttattttaattatgtatgtgaatccatattgggtttccaattgcagaagaaaataattttgatcaattctttttttttttatatctgcactgcacttgataatttgatatggagaacttgagctaactggttttgttgcggaaggagattcgtgaatcattgtatggggaagtgtattgaatgactgtagttactcggttttcttgttatcggtaatatgcgaaccaatgggcttcatttgaagatggactttgatttttgttggttcggatgaaccaaaagcaactttgattattccagccgtgggctctttagcttggaactggttatactaatgatgaatgggtcttactaggagcaactggaaatcaaatattctatgttcaactaacttgttttttccttgcacttgctgaactactgctgtacttaaaaatatttgtatttatcgcttttccttctttacgtgttcttgttcttgcttttggtatgcctcgtgaaagtctggttcttaactgtaattaggtagcttgaaatgagattcttgaagagccccccgacctcaacagctgtcaaaggagtttttctaatggagtacatgaaatgaatagaaattttgtgttgtcattactacaatatgcgatggtgtagataataacatgttcttgtattctggccgtattgttttaataacaaggtccttgctgttgttttttctttttatccccatttctgttgtttttgagactttaatggaatgggcaaaacttttttgcttatagata

SEQ ID NO: 60538 - DNA, 388 bp, Populus trichocarpa
  Intron number 2 from transcript POPTR_0016s07770.1 (locus POPTR_0016s07770) derived from phytozome v7.0 (chr-ID scaf fold_16; pos 5601180 to 5601567)
cccgagttctcattaaacagaagcacattaggtatgtataataattctatttcttatgttgattgagctgatgtatttgggttagataatcaatgcaattgtgtacatctcctattttttgaacagtagtttcttttcgtcttcttgtttttctggttataaaggttttgacttcttttcttcggaattcgcatccatgctaaaggtcctgtgatttcagagcttgagatttgcttgtcaaaactttcaattcatatatatataaaactattttgacctgatctgccttgtgttttggcatgctacagttggattctggatttttttcattgatatttcccttggtccttcagggttgggaggcaggtggtcaatattccatctttca

SEQ ID NO: 60539 - DNA, 997 bp, Populus trichocarpa
  Intron number 1 from transcript POPTR_0008s01610.1 (locus POPTR_0008s01610) derived from phytozome v7.0 (chr-ID scaf fold_8; pos 785676 to 786672 reverse strand)
tcacaatcaattgcctactcatattttcagtgaaggtgagtgaatactgtgtgtttcttgatgttattgtgtttgatggatgtttaattaagagagtgaaagtaatgtttgttagaagttaagggctttttggattgttgaaggtagtgaatttgatttgaacattgaaggaaagtgtgaactttctttgacgatataggaattaacgttaagcttttggagttatcagaacaatggtggaaggacaatgaggaattgggtgttaatgttaagaattggtaggtggaattgatggaagtgaaagttgtttttcataacctagtttacctcgagtcacaattcaaaagttgtttttcataaataatgtgacaaaaacaagttcagaaatatgtccggtaaaaatgattcaaaacgaatttttcggggaagagatatagtttaagtagaatccgagttaaaagttgaaaattttaacttttgattaaatcaaaatcttgactcacttttgtaacaaattttttatttcagtcagaagttgtctaatcaaatatatttataacatttctacaagtaaaaagtttaaaaaacaactcaaatcaatgcacaaaagtcataccaaacagaaccgtagttcatttgaagtaggagatatcttgacccttttgagcgtagtatagaatacagatgatcaaagaaagctatgaacttatttacaatgtagagctgtgagctgcgttgatgtgttaggattgaattatagtcaagatgcaattgggcactaaagtttaaaggtaaagaatcagaaagtggagattgatatttgtatgtaatttggatgctacgtgtgtgaacaagctttaggatgcatgcttgataaccaagaaaattgtggcttttctgggagaaaaaaaagctatgaacaagttttatgaatgtttgttcatatttgtttcattttgcaggtcaagtgggttctggggcaagatcttactaccat

SEQ ID NO: 60540 - DNA, 385 bp, Populus trichocarpa
  Intron number 5 from transcript POPTR_0008s10530.1 (locus POPTR_0008s10530) derived from phytozome v7.0 (chr-ID scaf fold_8; pos 6602461 to 6602845)
attgtggacaaattccttgacttgtggtaagcaacaacatatgttgggattctttgatctacttctactgtttcgttaaactgaaacatggtttacatgcaataacaagaatgcattgaatgtatttggctgtttttttaattttaaaaggacagttgcttagaagatccattctatttgctttagttttttttttttttgtgattttgtctaatagcagaagaccaattatttgctcagtttctgatttggtaatgtagttattatgatgctcttcttttcttcattttatttagttctatattcattagctttgttttactcttaaatcttcatatatggttttgcagtcaaaaggggtacttcaaagggattcctttccatc

SEQ ID NO: 60541 - DNA, 503 bp, Populus trichocarpa
  Intron number 2 from transcript POPTR_0008s00490.1 (locus POPTR_0008s00490) derived from phytozome v7.0 (chr-ID scaf fold_8; pos 201090 to 201592 reverse strand)
caggtcgacataagagtttggtggatctcattcaggtatgtggctgtcttctttcaggaaagtaacacttggagtttagtgaattggcataataagcatgatatgttattagccatctctcttatacatttttggtgattttttgctgctggtttagttggtttcttctgaggtctgatgctggtctagaattaacagtgaggagtctcaatttctggaacacgttaacttttcatgcttggttcatttcatgctcttgaaatttgttcgtctcttccttttaatttctgtcacattttatatgttgtatagcatttaatatatcaaaggatattgcatgtatatttgtacgtgtaactttttccagatcatataaatttcatcaactaatttctccctttttgatgtgtgtggctttgctctaaccattgccctcaaacccccaacattctctttgatgaattgtaggaagacttccctcgcactccttctcctgtatacag

SEQ ID NO: 60542 - DNA, 611 bp, Populus trichocarpa
  Intron number 1 from transcript POPTR_0008s00490.1 (locus POPTR_0008s00490) derived from phytozome v7.0 (chr-ID scaf fold_8; pos 202259 to 202869 reverse strand)
tcagactccccaggtctttttttttttatcagctggtaaggctctctcttcctcagtgctttttctcatctatggtttgtgatcagtgaatttgattgttgagtggtttggtttcatgtagagggagcctgtggctttaagaataaaagggtttcttttatttcctttaatttggcgattttgttcgacggtggagtcttaattgtctgttggggtttagtggatttcccaagttttcagtcggggttacaaagagaaaaaaatatcgagctttcatcatttttaatggtatagccacatatacggaggctgaccagaagaataaacttctgctgttcgtgtttggtttaaatattttgtcataattctgtttgaaattgggtatttttgaagcaccaggtatggactttatagaggaaactatttcagatagtggaattatacaagttataaatgttttggagttgcataaatttatcaactttaaagcatggagtactctgttcagctgtacctagtcacaggtcaggtgcctgctgtctgcagcctgcctgtgtcatctctataatggttagtaatttttacttcttgaattgcagtactggaccatc

SEQ ID NO: 60543 - DNA, 459 bp, Populus trichocarpa
  Intron number 3 from transcript POPTR_0008s13110.1 (locus POPTR_0008s13110) derived from phytozome v7.0 (chr-ID scaf fold_8; pos 8557142 to 8557600)
tgttcagggagaatactgtggccagacttgccgatgtgagttctaatttaaacgtttgttttggtttatttagagattttatgttaaattctgtcataggttcagcatagaaaatttcaaatctttaatttgattgaatttaagttgtcatgtatgcattgttttttcgtctacctgcactgcattgtcgttatgttagtttgtagagaacaattccatttatttgtaaacttatagcatttttatgaaattgatttcatcatcatgtatgacttgatgtacagttatgtttttttattatattcaccgcttgtctcacatgcattcttttgattatcatgtcctctacattgctgatattttaggaagttttttttcttccatttttcatgaaataatttttggctgttgtatgcttcaacagattccactgtctcatatttctgaagctgtttataa

SEQ ID NO: 60544 - DNA, 252 bp, Populus trichocarpa
  Intron number 1 from transcript POPTR_0002s10590.1 (locus POPTR_0002s10590) derived from phytozome v7.0 (chr-ID scaf fold_2; pos 7677178 to 7677429)
ctgtacttgcagccactttttatttccttttatggaaaattatagtaaaaatcatgtaattgaagaagaaattagttatgccgtagtactaatattctaaattgggagttcgaattattttgattatttagggatatttttcttttctgattgaagtaaaagtagaatttgcgcgtgtttattgttttaggagattaattttaggtttgatattactgatttttgttaaccgtgtgttccagttgcccagga

SEQ ID NO: 60545 - DNA, 639 bp, Populus trichocarpa
  Intron number 1 from transcript POPTR_0008s01870.1 (locus POPTR_0008s01870) derived from phytozome v7.0 (chr-ID scaf fold_8; pos 899904 to 900542 reverse strand)
cgtccaactcaggtgagtagataggggattctactttttttgtgattttctggatgggtttttatttggttcttgagaaagtgagggaaaagattgggactttggggtcttttgatgataaactgaagaacccagacgagataattgatcctagatgttagtgcttagtttattttgcaattgcattggcctgtacttgttgtctgatgttgatttattgtttgttttttggtttatgagaaaatcgaggaaagctgaaagattagaatttggggtgtttttgatcgttggttgaagaacccggatgagataaatgattagttgggtgatgatgagaaagttataagattcttgattggatcctggttgctagtatttagtttgatttgtgcttgcttgattggatcctggtgctagtgtttaatttgacttgtaattgaactgacttgttattcttgtttggtattgatttatgatttgctttttagttgaagggatttggatcttgagtattaaaatgatcactgttgaaggaccctagatggatggattgactggtttttagagaccattaaattatactgattgtttttattgaatttagctttgcttaatctggattttcgtagattagaacac

SEQ ID NO: 60546 - DNA, 747 bp, Populus trichocarpa
  Intron number 1 from transcript POPTR_0008s11330.1 (locus POPTR_0008s11330) derived from phytozome v7.0 (chr-ID scaf fold_8; pos 7176610 to 7177356 reverse strand)
tcgagaaacttgaacgcaatcgcactctcgctcaggtcttcttcttttttcttctacttctccttctttttcttagagagaagttactgtgatcgatgatcgtaactttaaactggtcttgattattttttttggtgttcattggatattttttggtgtgcggatgttgtcatcattgtttttgctagtttcgcgtattgtgtttttgcatggttttgttttgttgaggtgaaaacagtggaagcaaaattagttagtattaacattattattattattatttacttgtttgtttatttttgtgattgctagctttttgataaatattctttcggtgattacttattttttcttactacgtcttatgtgtttttctattttttttttaattttgcatgttatactaagaagtaatagctgcaatcaaagaaaaaaaaaagctaaaaaaattatgttcttttattatatatttgctaattaaaggtaaattttatttttttgaaatagcatttattttatactgttttacttcgtttagcctcaaagctgttgcagtcttgcagattgtgatgacaagaagaatcagtgatttatttattattttttactgggatatttttcctgcattttcatcgagtaatattcatttattgggagaaaatattaagggaagttatatatattttttttgggtgtgtgtacgcgtgtatagagtgcttgtaatttgagattggcggggatagaaga

SEQ ID NO: 60547 - DNA, 455 bp, Populus trichocarpa
  Intron number 2 from transcript POPTR_0016s14910.1 (locus POPTR_0016s14910) derived from phytozome v7.0 (chr-ID scaf fold_16; pos 13992973 to 13993427)
cttgcagagataagtatgtttttatttctgtgccaatcctgtttaattaattcaattgaattgaattgaaggttaggatgcaggcagcaatcaaacatttttttttccaatttttttttaaattgataaattaagaagtattcattgttaaagtaagaagaggagagaggtggatttttgtaatattaaattacttgttgagtattttctgccaaattttaattcctatagtatctgtctgtggaaatattggtggttaggaggctgtctgatgatttttactgcctgattgtgcttctgtaatgtgtttgtgtttttagtggcaatttagatttcttgttgtcattttctttctcctggttttgtggcactattcaatactctagctgagtaactatggacgtttctcaaagaatcatgctttgcttgccttttcaggataattaattctgttg

SEQ ID NO: 60548 - DNA, 594 bp, Populus trichocarpa
  Intron number 3 from transcript POPTR_0008s22640.1 (locus POPTR_0008s22640) derived from phytozome v7.0 (chr-ID scaf fold_8; pos 17301083 to 17301676)
atattacacctggtaatcatcaggtgcgttggttttgttgtggtttgatcaatttgaattgttgtacgtgtaattcaatttgatctattttaagaaatgttaagcaattattgtaggatgccatagtgtggtcaaagatatgttcatacttgtgacgtgcttcttgagttattacactcagagtgagattgctgaaaaaagaaaagaagaaagaataagtcctggatagcacataacttcttacgaatttcattagcactgaaatccccttgaatgctatttagacgggaggtatttgctgtatacaataactatcattagcttatcttgaaatgaaaaggtcttttttttcaaagtttgcttgtggaagtactctggaataggttggattcaagtgatgatagaaagtttaaaacttggctaaaaaatgctattatgaatatgttctgtgtcctcgaacggctctatgtctgcacggatatatatatatatatatatatatatatatatatatatatatatatatatatatatatatatatatatattgcacttcatgtgtttatatttacatgcagtacaagttttgtgttg

SEQ ID NO: 60549 - DNA, 803 bp, Populus trichocarpa
  Intron number 1 from transcript POPTR_0008s03880.1 (locus POPTR_0008s03880) derived from phytozome v7.0 (chr-ID scaf fold_8; pos 2122447 to 2123249)
ctcgtcgctcccactgtcctctctctttctctaaggtaatgtggtattcatcttgggttgtttacttctgctttgtttgagataatttgagtgattcttttgggttttaagttgaggtttcgctttccactaataatggcttagagcttaactgggttgtttaaactgtttttgaaattgattttcaagtgtccgcagaattacattttctttctttaacagaaattcagcattgttctgggttttgggcgggaattgattggtggttctggtttgactctgcattttcagtggttttaagctcaattccttggttcttttttctcaaatcgagtttgaaattgttttcgaaacgataattttttcaagtttcggcatggtttatgtgactaaaattagtagaggtttaatttgggtgaatgtcaaccttgtctggttgctgagaaactggagcaaagaaaagaaagaaaagaaagggaaaggaaaattccggaattcgtgaaagttcatcgcattctcccctctaaagcccaatctcagagccaaattccgtttcctgttttactttccccagtttcgttaacaatcaaatttagcattaaatgaatattatagcaataattccttgaacaaattccccaaattcgagaaaggttcattccattaattgtttctacaacttgacgacattttttttaaaatgcatttcatgaacaataattaagcactcggaattgcattaattaatttttttttgttctactgcaggtgtttaaaattacaaactcccaaaaaccccaaca

SEQ ID NO: 60550 - DNA, 714 bp, Populus trichocarpa
  Intron number 3 from transcript POPTR_0008s03880.1 (locus POPTR_0008s03880) derived from phytozome v7.0 (chr-ID scaf fold_8; pos 2123938 to 2124651)
ctgcctctgacctatctgccgagttgtccgttcctgtgagtgcatttaattatatttacacgcggcagttttgtatgatttggtgttttttttttttgtcatttgctcaatgttagccgtcgtattttctcgatgctgatgtcatcgattgccagcctgtcaatttgtgttagaattttaaaatattttggtttttaggggtgtttttgtcatttagtgggattgtcggcgacaagctggactttttttcttaaaaaaaaatggttcagttatggatcacgtgggctgtcatgtgatttactcaaagtgaattatgatcatgtgcaagttgttatatagccttataggcccaccaaaaaagcagaaagtgtttgatcttcttttttttttaaaaaaaaaaatatatattcatattaattgtgtgttaagcaagtgaaagattcaggttataatcactagtagttggataattaattatgtttaatgaaaagattaaggttgtcaaacatttcttagttgtcattgactaggataataatgttaaatagttgtgtattaatttaggatttttaggctttaattggaagcgatgtttgctgacttaaaaatggatgattttgaattggaaaactccatatggaatagtttaattatggtataaaatttagaatttttaattttgaaatctaaaaatatggaattttgtgttgcagt

SEQ ID NO: 60551 - DNA, 834 bp, Populus trichocarpa
  Intron number 1 from transcript POPTR_0016s14490.1 (locus POPTR_0016s14490) derived from phytozome v7.0 (chr-ID scaf fold_16; pos 13684058 to 13684891 reverse strand)
ttacaagagaaggtaattaattaattacaaataattaatatatgctgctgatcattattgataaaaaccgcattaataatattatttttcatttacaattccattagccaagtagagcttgttgaaatacggtcaaggagtagggatccatagttaaactataatctagccctctcatctgagtctagagagtctccgatttggatttttcttttccgactctatttttattttattttatttttttgaaaaaaatttaggaatcaaactaattaaggatgatctttattattctttttgttaaaaagaatttagatgcctatatattatttttcattaatctcctttcctaaaggtcatgatggatgtagatgggataaatttaccccatatgtgttgcttgtaattatattttcttttaggctcaggccccattcctcatgcttgaaaaaaaaaagaaaaaaaaagaagaaaccaacgaagaacttccaagttgctagttaggacaccaagaaacaagaaggtatctttgctttgagtggacaatgtttttggtcccctccttggcaagctcgaaattaatttactaaatatcatggttggatattgccgatttttctatgtttattcttcatataaaggtacttgtaatattatttttacttgatgatgtcataacttgattataagaataaataatatcaaaactaaaattaatctctaaattataattaattaatgcatttttctagcaattagtttttttttatttcatcccaattacactaaaattgaattttattacttgcagaaaaagttcccactcaagaacag

SEQ ID NO: 60552 - DNA, 452 bp, Populus trichocarpa
  Intron number 1 from transcript POPTR_0016s05740.1 (locus POPTR_0016s05740) derived from phytozome v7.0 (chr-ID scaf fold_16; pos 3678458 to 3678909 reverse strand)
gttagtactctcttttttttttttttttgtgtggtgttctattctttttgcctttcttcctctatttcttttttaaaaagttttattgaatcaaacagtactaggtattaattaacagccttgacgtttattgctttctgatatttagaatttccttgggctacgtaattacgtaaccaagaaagttagggagaattaatgatggaactgattttttcttttttcttcttttggagttttaagtggttactcaatcaacgtgagtgaatgatctagtttctgtaacaaaaaaagtagacacaaagttactgggttaaagtctctttcttaccttgtttttattttgtgaagtttgctcaaatgggaggctcgtatagtaatatgaattgatgttttactgttagtttccccaaatgttttacacatttttttgtggtaaattcaggaaccat

SEQ ID NO: 60553 - DNA, 986 bp, Populus trichocarpa
  Intron number 1 from transcript POPTR_0002s24180.1 (locus POPTR_0002s24180) derived from phytozome v7.0 (chr-ID scaf fold_2; pos 21609206 to 21610191)
ctcaggtctgttaattcccaccttcccatattcatactgttctttccctcatacatccatgcagatcgatgaagctctttacaacccatgagctcgagtccatctacccagcttggaaccctagctagctagattcaaaacattagcttattaaattgttccagtgatttgctatgcaattatatatataaatatattcgtgataagcattttgcactgttatggttgactagctacctgttctttttccattaattacccattaatccaatgataattatgataatcattaagaggtaataaatgggtaattacctaatcaagtcttaattatcacaagtaattaacttcaacactacaactcttttgattgtaattctagaccttcttctcacatgtataaaaccacaaaatttcaaactaaaattaatcaaacggtacagacaattagtcttaagatgtttaccagaaaatttttgtttacatcgtaaatatttagtaattccagcgtgaacaccataaaatttatcactatatagatgaaattaagcttgatgttttgttcttaatttggaggtgttttgtttcatgatcataggttaatctcccttgcttctccttcaaatttaatttgagagcaatctaattaattgagattaacagtgttaattaagtgttcactccttttttgttaattaaagtagataaaaaataacgaattagtggtttaatttcatatttaaattgattaatttgtataccatttaaagattttaattattggattaagttaattgaaaagtaaaataacacatttatactagaaggaattagagtgtgctttttctctcgacaatactagaagtaaaataacacattaattaaaaaaaattgttttcgaaaacattttaaaaaacagcatattgatacattaatatgtgtatatttcagctggtacaaaaagacccagaagcagccatagtttg

SEQ ID NO: 60554 - DNA, 1025 bp, Populus trichocarpa
  Intron number 2 from transcript POPTR_0016s03710.1 (locus POPTR_0016s03710) derived from phytozome v7.0 (chr-ID scaf fold_16; pos 2062933 to 2063957 reverse strand)
ggcagccttggggcagatctcgtctcaggtctgttcccttttctattttcccatttagaaggaattagttatgatatactgctgaattgctgtagcaaaataatgatagcaaagagattcatgagtcttttttattacgttgtgtttgttatactgattcattcagtgtcttcattgcatttccgtacattaagccaaataatgcagttaacaagttaggttctttggtaaccttctttccatttggcagatatattatacagattcaacatgtgtaacaaaatctagaattattttatgcaagtggctcgtaacttcagttgcatatcatgtccttgcaaatgattcgaatagacaaataatagtaattgtgctaagatctcatgcaaatttgctttgatgtattgttggcaatgttattgtactaggtaagggcttggcctgttttcatttttaaaaaaacttttttaggaatgatccctcgagattattatggaaataatgtcagtttggcttaaagcatttcatttttttagtgtgcagggcttggttcataagagtatttgatgttatatggacagactggactgttaaacaattataaatatccttaaatggattatggaataaattccaagaatgtgttccagaatgtgatccatggaatctcacgtttttttttttctttttcttttgaaggtctaataaagtcaaactgttttccagtcagtatcttcctaggatgtccctacctaggtgccatgtgcaaagtcatattgtctacatgagaatggacactggttgcacacggatgtgtatgcctgtcaaatattatcttggactccaaaatgaatacatataggaacaatggccatatcacagagttgtttttttttttcaggggtcctctgctcccaattaattcatctgtaaaaactcccaacaacttgtgtgctatgtttggaaacaatttgtttttcttgcggtctacagcttgatatttgtttttacattctattgcagat

SEQ ID NO: 60555 - DNA, 577 bp, Populus trichocarpa
  Intron number 1 from transcript POPTR_0016s03710.1 (locus POPTR_0016s03710) derived from phytozome v7.0 (chr-ID scaf fold_16; pos 2064025 to 2064601 reverse strand)
gctcaggtgctaatgtgtagagctgtcttcttttttcttcttttgtgatttttatttctgggtttggagtgtttgtgttgcgtggattgtgttttgttgtgggtttttcaagtggtggtgcttgtgttaaagttttgtttttttattagtggtctggttgatatgctgggttttgaattttgtagttgattagttaatttattctcttgactttctcagaaagattctgggtggtgttttgagagcttgttgattatcagtgaaatcagcttctagcttaatttcaatgctgccatctttctctatctctaaaagagtcgaaagattaactgttagataaggggaaagcctgaatttttatgtcattcatggattctgtatgtaactttgctctatatagtatatatggcgactaactcatgcctttccctttgtgtagtttgtcaatatttttggatgaattattctgggtggtattaacattttctcttttatggttctcttgtctatatgtgaacggattttaatatgaatacagtgataaattgttgttttgtttttgtagatatatagacag

SEQ ID NO: 60556 - DNA, 873 bp, Populus trichocarpa
  Intron number 1 from transcript POPTR_0016s06640.1 (locus POPTR_0016s06640) derived from phytozome v7.0 (chr-ID scaf fold_16; pos 4446175 to 4447047)
cagcagcagcagctgcgcaaaatattaagaaaagggtaccattttataatcttttcctgccatttcattcaggtttctttgattcagttccataataacagtcactgcaattttgtattagtactagtaatgatcatattctaaagctcttgtcttttcatttatttgcttatgtttcttttagatttttcagattctcttttctgggttctctttgctcttccattttgtgtatatttagtttggataggttgcttagaaagtgcgctgaagggaaaaaaacgaggtgaagttatggaagatgggacttttattttcagtttctactgatgtgggttttttttttatcagaaatagaattttatttctttcagtcatattagggacctttggtaatggaaatgtttattgttcctattattgattagtatttctttgatcctaatttctgctattttattcattcgctgtcttatgctttttaattattattttttttgggatttatcagttcgtttacagtgactctctctctctctctctcttttaatttttaattttcaatattatgtatccattctatccttaaaatcattgcctaagaaacaaattttaactagttgctatgctagtactcgtgcaaatcttatggatagccgaaattacgaaattttagtattcttacagtaccttcaataacaaacattagtgattctcttagaagatcattacctttgcataataccaagttaagattttttcttggatataatacctaaggcttgagttgacagtgaagaattgttattgatgcttgttgctgtagttaaaattgattcattttttgtatagggttgaggtttcgaataagaa

SEQ ID NO: 60557 - DNA, 499 bp, Populus trichocarpa
  Intron number 2 from transcript POPTR_0008s12350.1 (locus POPTR_0008s12350) derived from phytozome v7.0 (chr-ID scaf fold_8; pos 7972145 to 7972643 reverse strand)
ccgttggttacgatctctcacctggggtaatactctttctttgcaagtcatgtttaatgccatttcaagcaagatacatgtgaattacttgcagtaatttcttgatttttttggcaaaacattatctaggaaggcgaggcacggcgtgacatactcttggtttgtaatatacgttgtgtgtcatgtgaagtttatgaaaaaatgtctggttggttctagttatgaatgaccttcccaaatatctccaattcactcaagtttagcttaattttttactgcttcaaaatacttgatacagtgaaatcagattttaacttttaagcttgagtttgagtttccttttccaataaatgctgaatgattattttgttctgtcctcctttgtaacacgggggatcttaaaatcaattctgcgtattttctctgactgtgcaacactttacactttaccctctaactgatgcttgttatatggttgcagtcttcgtttgcacggtac

SEQ ID NO: 60558 - DNA, 745 bp, Populus trichocarpa
  Intron number 1 from transcript POPTR_0008s16670.1 (locus POPTR_0008s16670) derived from phytozome v7.0 (chr-ID scaf fold_8; pos 11214241 to 11214985 reverse strand)
ggaaccagttcgcgttctcgttaccggagctgcaggtactatcacaaaaccaaaagaagaaaaatatcagtctcactctttaagtttgcctcagatctataacggtttgacttgatttgatgctagactttgaaatatcatcgatcttgattttactgatatagatctagtgtacttggtcatgattaggagggattatcaagtttgtgatgctaatagattgagttttgaaagcgaaattagttgattcagttactattactcgctacgagatgatcgcttactgtttgatgcgaaactattttagagtttgttgttgttgaactgtacacttcatttaaatgatcttggcttgtagatctgagatttaactgaagaatatgtctctttgttttaagtttcaaatcatattattgattacgatcgctcaagtgcttgtaataatgtctagttcgaattgaattcataaaatcaaattattgatttttaatttttaattttcttatgaattgttgaatttggagaattatttttatttctcggtttattggttttagttcttgaatgtactcgtagttttatagctgttatatctgtaaaccacaatgtaacaatgcgaatatggaaaatgagttgtttttgtatttgtgcagttggtcatttgtgagttttataactggaactagcggaattactgatattggttgttaacaaaacgtaattgggtttgcaggacaaattggat

SEQ ID NO: 60559 - DNA, 314 bp, Populus trichocarpa
  Intron number 1 from transcript POPTR_0002s08030.1 (locus POPTR_0002s08030) derived from phytozome v7.0 (chr-ID scaf fold_2; pos 5554447 to 5554760)
gaactgcccctgtaagccccgcaattctttttcacaatctcacaaaccaacctaaaaggctaaaactactatattacttactgattattacggaggcggaggcaaggcgccattactgcagagcttacaaccatgggtggggaaataataactaaaagatctcttctttatttgatgtaatttaattaaatctgtgtttgttttcatgtttaaaatactgatttattattccttattttggcagtcgaccaaagcaagtaaaagatgcagctcatcaagacaccaagacgaggtggttcgcgtcctcactaaca

SEQ ID NO: 60560 - DNA, 660 bp, Populus trichocarpa
  Intron number 1 from transcript POPTR_0016s08770.1 (locus POPTR_0016s08770) derived from phytozome v7.0 (chr-ID scaf fold_16; pos 6566584 to 6567243 reverse strand)
gatctaggcttctttgacgagattagacaaattgagtatgttaatttttcttacctcctacttctttggtgcttcgcaagttgagctttaaaattgtcaatgctatgctttaggtaggggtcactaagaaattcaagaaagaacatgaaatagagataaaaataaaacaagaaatgcctggctggtgggtggaaattttagaacttgttaaacaaattccaatgggagacttgaagcgtgattgcttaggtgtaccaaatctatatattttaaagtttataaacagatttttctaccagaaaatgtatgattgggcaggggaaattaaacaataccattctaaagagtcccacatttttatttgatttttgactctttcaatgggtggttaggctaagtgatttgtctatcaagcaaaggggggcagcttgtgcttcatattcgtagttatgtagctttcatttgtagaaaaatgaggtctacgttaactaatcgctctgcaaaaacttaaaaaaagatgaatgatggaatggaatcaatagctgtgccagatattcaagtgccagaattcttctaatagcaccaacagattcataataattgctgattgattatcgacagaacttcctttcgatggataatatgcagggtgtttggaac

SEQ ID NO: 60561 - DNA, 418 bp, Populus trichocarpa
  Intron number 1 from transcript POPTR_0002s12710.1 (locus POPTR_0002s12710) derived from phytozome v7.0 (chr-ID scaf fold_2; pos 9473808 to 9474225 reverse strand)
agcataacagatagaaatacaagcgcaaaacagaggtatgttatttattattcatttgctctccagtctcctccccctcctctctctcttattacttcacttgtatttattttgtgttaattacagatataattgacaaggcaaggcagtatcaatttcttctgctttaacattttttattttatttttatgaagcagctttcattttgcatggtttagagtttttttgttttctttttgctacttttgtatcattattttttaaaaaaataaaaaattcttgaagtttttttttggttcataaatatcatcatgggattggaaatgcaatgaagttagggttctgaactttttttttcggatttagttatcaaattctttagctgttttgacactgttttatccagaaatttagaga

SEQ ID NO: 60562 - DNA, 498 bp, Populus trichocarpa
  Intron number 3 from transcript POPTR_0008s04260.1 (locus POPTR_0008s04260) derived from phytozome v7.0 (chr-ID scaf fold_8; pos 2382181 to 2382678)
cgccaattcggtacaatattgcgtcaagtaatgtatcaatcaatgctgttgttattgctgcccattttattattgatatcatttatgtttcttctgtctgagtggttacaacataatttcgtttttatctggagaaagagttgattatcttttctgttataagattttaaggtggattgagaaattgctgtctgagttttttcatatgttatggaaattggttcctgttacccctactacatcgcactttatggttaccaattagttgctctgtgtgcttggagagttggtcctaattttttgtctttgttagccatgcttattttgtgaactcatgctactaatgatttgtttttatctgatttgttctgccaaatcaaatctatatttggatcttgttcttggatgctagaaggttaaagaaaaaacaagtgtcgcaaggtaattttcagtatctaaagtaatttctttttgttgcgttcagattacacagcacaa

SEQ ID NO: 60563 - DNA, 697 bp, Populus trichocarpa
  Intron number 2 from transcript POPTR_0002s13650.1 (locus POPTR_0002s13650) derived from phytozome v7.0 (chr-ID scaf fold_2; pos 10131855 to 10132551 reverse strand)
taccttgaagatcgaactgttaggctgcaactctggtaagttttcgtcctaattatgtagttaattagctgtatgttctgtattgtccttttctgttttttcttcataactgtctgctttcgaaatgtgaatgcataatgttgttcatgtttgcttttataagtggacaatggatatgcaaaatcagtacaactacaaagtgtgccttacatgagttggcagtctccttttatctgtcacttacaactataggatttgaacctctgattcctccccttttcattgatgcccttctgttctttacctagtcagggtataactggtttgcaagttttacaaattcatttgaaacatggtaataggaaaacttttcatgtatttcttaataaaacgtgggtttattgcttcttgctagattagaagagctctttatgattgacgcaatttgatttgtgcaattaaaattgttagttaacgttttgctgtcaaaatttcaagggtgtacactctaggccctgttctttttctgatgcagatgaatatatcgagcagctcttatttgccttcgttcataagcataatcttgttgatgagattattgttctcgggtctctctacatagttcagcgtttacatgttctaactcatggagtcaattgcagggacactgcaggacaggaaaggttcaggagtctca

SEQ ID NO: 60564 - DNA, 413 bp, Populus trichocarpa
  Intron number 1 from transcript POPTR_0002s13650.1 (locus POPTR_0002s13650) derived from phytozome v7.0 (chr-ID scaf fold_2; pos 10132553 to 10132965 reverse strand)
tacgacaaattcgacaatacctatcaggtaggagtactgctagcatttcctttccttgccccattccattaacaagccaagctaagtttttcttcttttttttacgcattgattcgcctagtttcgaccgtgatccatttttacttattatgagatgagatttatggatttgttttcgtgttttcagctgatctgggtctcaatatatataaaagacgtagtaatactggatagttatttatttttatcaaatgtttgattcttggtgctggaaaatggaaatgatttcctaactaagcagtagtctggcttatattctgatggtcaagttgatgatctgctaagtgattatgtttcttttcgattgatgataatcaggctaccattggtattgattttttatcaaagacgat

SEQ ID NO: 60565 - DNA, 361 bp, Populus trichocarpa
  Intron number 2 from transcript POPTR_0002s00660.1 (locus POPTR_0002s00660) derived from phytozome v7.0 (chr-ID scaf fold_2; pos 294405 to 294765 reverse strand)
gccgaccttttaagtaagtaatctcttgcaagaaagcttactctgttgctctctaaattacttagtgtgtgattctaagtttatcctgggtaatatattgcctagtaccttgtaaagatttattcttctttttttgtatagagatagacttggtgtgaatcatgaactgatatagcagtcagatttttcttgaattttgaatgtaattggtcttgaaaatgaatgaacttaattagttttgctttattgatagcatctgacaatgttgaactagaaaaggggataggttggaatgcatgcaatcatattttcataataggaagagttatatgctttgtttcttcgctgtataggaagaaca

SEQ ID NO: 60566 - DNA, 373 bp, Populus trichocarpa
  Intron number 1 from transcript POPTR_0002s00660.1 (locus POPTR_0002s00660) derived from phytozome v7.0 (chr-ID scaf fold_2; pos 295075 to 295447 reverse strand)
gggttcgactcattcaaggttttcttttccttttttctctttctttattactgtatcaatttcctatttatttcttaaatctatttcttttgtatggaataagaatgtgctgatcaatccatcaagtggttgacttactgcagtaaattctaagaccatttccgtgaattcaaaaacacatcttgtttttgggtttctctgcttttgtttcttcactttataaattctttcattatctggtgatgattatggtttgaattggatttttattttttttcgttggaagactttgtcgttcactgctagttaatgtagattattggcttaagctactaagactgtgatgatataggggatcttactcgaaaaaaag

SEQ ID NO: 60567 - DNA, 599 bp, Populus trichocarpa
  Intron number 1 from transcript POPTR_0016s05200.1 (locus POPTR_0016s05200) derived from phytozome v7.0 (chr-ID scaf fold_16; pos 3157873 to 3158471)
gcattttttggaagctgagcaaacaagacgatacggtaacctcttctttcattacttttgttttttaaccgcgacaacagctgcttagctttccccagccgtttcgtacagtcctttgctgtcgtttttggagccattaattaaagaagacgaagtgcattgtgttttctcgatttgttgaaggttacagttacagattatttattgtttgtttgagaagttagtgatggtgtagtagatctggttttctgaaggtgattgattatagtgaatgcttgaaattggattggatttgatgctctttttacctgtgttttatttttattttcaatggagaacaactggtttttgtatgtgatgcaggatctattttaaaataaaataaaataaaaacggtgtcgttcttcttcagaaatatctattctcactttatcttactttgagccagctagttttattccttttttcttttttttttttgtgggtgggagtggtcagtgtactgagactaagttttatttatattagcttctaaaactatggaaacttgctttcttattgcaggctttgctctgcagaaactagaacgagtttccttc

SEQ ID NO: 60568 - DNA, 882 bp, Populus trichocarpa
  Intron number 5 from transcript POPTR_0016s00360.1 (locus POPTR_0016s00360) derived from phytozome v7.0 (chr-ID scaf fold_16; pos 78727 to 79608 reverse strand)
gtgatcaggaaagccaacagaaaactcaagttcaggtacatttgattttaattttaatttccattttcaattgttgtttgttttttttttaaaaaaaaaatgctatgagaacgtgggcatatgcaaaaagtctttggcagctcctttttttttattaaggtttgaattatattttgaggactaattcgtttttggtgatgctttgctaagtttgatgttctgtggccatgttcattagaacgtgagcatatgcaaaaagtctttggcagctcctttttatattaaggtttgaattatattttgaggactaattcgtttttggtgatgctttgctaagtttgatgttctgtggccatgttcattacttgtttttaaagcttggtctactctatatgtcaattacttcctgctgttggaaatagtcatctcaaaaggctctccgtcccttcccatattcaaataactacgaagtagaatattcttctattgcgtcacattcccttgcaatagaaggtgcatgcagaatttatctctagaaaaaagcgattctatcacttttcaagacttaaagaacacaccccattaacaatttggatggaactatcgaattggctacgaaccatactgattgtcaactcaatctgttactttttcttaataatttgaacagagttgcaatgcgacagctgtatggtttccaaaatgaatgccctgcttgctgaatttcttttaggcctcaaatacattatgggaaaacaaaagaatgaagaaagttttctatggtgaaagtaatttataatttacaggtgaactaaaattttgtaactttttggtccttttttgatagcttgaacaacaatctgctgtaaactcgggcgacga

SEQ ID NO: 60569 - DNA, 415 bp, Populus trichocarpa
  Intron number 1 from transcript POPTR_0016s03690.1 (locus POPTR_0016s03690) derived from phytozome v7.0 (chr-ID scaf fold_16; pos 2053595 to 2054009 reverse strand)
ctccaaaaagcaacgtccttctcgcaaagataaaagtactctctttttttctttttcttttttgctttgaattgttgttatttattagctttcaagtataagttttgcattgtatatgttaaaccctagcttaaaccctaagttctattattgatttacaatgaagattaagggtttatgcagcagagtgaataatttttttttaattagtttacaatttatgcagtttcagattcgaaaacaaaagaggacattgattttgttttcctaactgcttgaaaagtgaataaactggggcagtgagattatttttaattgatattggcacattattgatgacaagtgtttttcgatgctgagttttttgttttgtttgtaagattatcagcaaaagatagagttggttcaggattta

SEQ ID NO: 60570 - DNA, 837 bp, Populus trichocarpa
  Intron number 1 from transcript POPTR_0016s02910.1 (locus POPTR_0016s02910) derived from phytozome v7.0 (chr-ID scaf fold_16; pos 1455264 to 1456100 reverse strand)
atctttcctgttaaggtagcataaagttttgatctgtaagtaattcttgctttcttttcatatttatgtatgaatgtatttctgtcaattcttcctgtttaatcttgacatctttgtttccttatttgggtttgatctgttttttttttttttatttgtttgtgcgttcatggaattggttattttttgtgattgaatttagaaaacgaagtaaaaatggagtcttttttgtctcctgtttgattgagtgattgtggcttgttaagtagatataaaaattatgcaagaaataaacttttttttctgccgattctgttgtggtggatagtttattgtatatctgtatctgggttcattttgtttctttttctttttctggagattttaattgatttttttgtagacaatggattcattgaaaaattagcattcaataatgtgttagtgtgtgtattggtgtgtgcatgtccagctgatagagattgactttatttgagagttgattttagctcgatgagagggtgtttgtataagtttgagaaattgatagaatttgatgtgttttgcatagtattttcttagcaaacatcacctcgaggaaaatgattgagtaggaatgcaattattaggtttttgggtgagacaattttcatatggtgattgaatcttttgtcggattgctttgtcgataataaggagtttgtatttaatgtggtggtttcctcgttgtcaggcagtatgctgtagataattgttaaagtttaggtgctttgggactggaactgggttttgtgctgggaaccttttcagaggaggaagagtagacaagtggagagg

SEQ ID NO: 60571 - DNA, 689 bp, Populus trichocarpa
  Intron number 2 from transcript POPTR_0008s12280.1 (locus POPTR_0008s12280) derived from phytozome v7.0 (chr-ID scaf fold_8; pos 7932464 to 7933152)
gcttgccccccaattcagttcaaggaggtatggtagattctgtgcccttgattattattattattactagtagtagtagtagtattattattatatggtcaatggaaaaactgtgagttagtttgcttatgggaagcaaactatggggaggtgctttgagattgaattgccttttagatatttggatgagtaaagatttcagcctttagaaccagaaggctaaaccattttgacaagcaacttaataggaacacgggaccctgattttttgctcatgactaaactgggatcaatgctgtaatcttttattttattttattttctcacctctgtttgtctatcggtataaaaaatatatctggctttcggtactatcgaagcccatgctgggtttcaatggtaaacttgtaacttcatcttcttgacctttccccataaaaacgtatgcattttcttccctgtttgtgcgatgcagtaattatcaacttgtctgcatcagattacatgaagcgtaatgtcacagtatattcttttgccattgctcctgagatgaactagtaatatgatcattctcttgtatcaaatggataatgcagtttccttgcttattgattaataccattctttgtgcacttccgtttcctccatgctcaggtagtatcatcatctcaagtctacagcacattgtt

SEQ ID NO: 60572 - DNA, 386 bp, Populus trichocarpa
  Intron number 1 from transcript POPTR_0008s09090.1 (locus POPTR_0008s09090) derived from phytozome v7.0 (chr-ID scaf fold_8; pos 5637572 to 5637957 reverse strand)
aacaaaagctaaaccttggaaaaggtgagcaatttagttatttaacacacatataattcgtattttctcttggcttggcatcggactagttgtttaactcctttttctttgctaattatacttatcattattattcaactctattgcataatttgtttttcctgtctagcaacctgtgtgcgtaaagttgagcatgcggttatttgagtttgtgcagttaaactgttcgacaaaaagcctaaacgaaaagtttgcttgtttcctatttgattgaaatgctttaggtcaaccttttttatacatatattttatgtgcaagtttgcataagaagagtgacttctctagtaggacgtctaatgagctatattttgtaacagggataata

SEQ ID NO: 60573 - DNA, 1013 bp, Populus trichocarpa
  Intron number 2 from transcript POPTR_0016s14770.1 (locus POPTR_0016s14770) derived from phytozome v7.0 (chr-ID scaf fold_16; pos 13911089 to 13912101 reverse strand)
tagccgcctgttaaatcaaggttcacttcttagtctttcatttttggatctagtttttttctggattttttgttggtttattttctccttttaagctaacatgttctttgatttcatcactctggtttttcaatatgcttctgtgtgtttagatgtgtttgactgttctcaccatctgattttcactgttatctactttggttagtgtatcgaatgtgcatttttttatcatctcactctgattgtgagactgtgttagtaatcttgttggctggatggctaggaagtagttgttttcagttcatttggtaatagcaatttaacatctccagtctggttcaggcagcattgcagcatgaacttggacaccatctaaaagccttaaaggggctggattaatcttgagtgcatgaaaataggcatatacttatataaaagagttagtcttaactaattataggttgtttctctgaatcactaaacatgtacggttatgagaaggaagaaaaacaataaagaccgttgttgttcaatatttcatgtctgcagtttctgtcagcataaaatgtttatactagtttgtgtcagacattaaattgtgtgcacgatctgtgtttggcaaatttgagagcttttaagttcttgcgcaggaatttgtaactggtttgcagtgattctgtagaggaaattgttacaggcacatgaaatgtgtgaatagctgtcttctgttggccccctttctgatttgaagtttaattttttttaacttttcgaccaaaagttttcatggtattatcattgtatcagagatacaacttatgtgatgcattcattttgctcttcttcttcttcttcacttttgctttgtgttccagctatttttttggttaccttctttcccttttcttacggcctcaattcttcatttagtgatgtttcgttttaagatcaccctggatctctctcttaaataaatactctttttatgtgtagaaattttccgggtatcagga

SEQ ID NO: 60574 - DNA, 997 bp, Populus trichocarpa
  Intron number 1 from transcript POPTR_0002s13110.1 (locus POPTR_0002s13110) derived from phytozome v7.0 (chr-ID scaf fold_2; pos 9763846 to 9764842 reverse strand)
tgattgttctcaattcaactgaagttgcaaaggaggtgtgattttcagctttcattttcttcattttcaatacttttatctgtggatttcatctactccggtaccaagcaccaaaccgaactttattccctgtcagaaccaatccacttcgcatatagatatattgctgtcgctttgtttaaggtccaaacacaaaaacaacaattgaggcagtttaacccggtccgcatcaatcaaactcaaccttcctttgcttataacttagcctcgcattcgatgagtgaaaagttaatctacagaccggaaaatgggcaggggggtcaaatctgcttttttgtgtgccgatatttttaaagtgcgtgtctgagtttgagagcaattctggaaaattattactacaaaatatattaaaatattttttttattttttaaaaaaattatttttaatctaccatattaaaacgataaaatataaatttttttttttttaagatataaaaaatataattttaaccggattccaaacaccacaaaaatctaatcatcatcgataattattaaaaatgattttttataaaaaaaacttggaaattattttagttttttttaattaatttttaaattattacatattattttgatattaaaaataaattttaaaaaaataattttattttaatgtattttcattaaaaaataatcgctaatataatattaaacggttctattatgatttcagataactatgaagaaaagcccataaactttagcccccagcccaaactttggtcttggtctgactatccacaccgaattgcgaattttgttcaactttttcagatcaattgctaactttacagttgctaatttactttcaaattataagatgatcaaaaaaataaaaataaaaataaaactaacacctgagtcacaagcaaatagggtacttaagttctactggttgctataaccagtaacttcatgaatatttcaggcc

SEQ ID NO: 60575 - DNA, 819 bp, Populus trichocarpa
  Intron number 2 from transcript POPTR_0008s02540.1 (locus POPTR_0008s02540) derived from phytozome v7.0 (chr-ID scaf fold_8; pos 1240285 to 1241103)
aataattctgatcaagagaagcaagatcagaggtaaaatccatctgttttttttttttttttgcgtggttttggtctagtgaggtacaagtttgtgttttttgtggttctgggttattgggttagttttatttgcttttgttgtgtttattcagttggtttctgagctgattgtctttgaattggtagattcttgtgagtttttagagtagattgtattgctttccatcttgttttgtctacgagagaattgtggaagttaggggatggggattttggtagaatattcatgcttgtgtgtgcacattcatggctttagttatgagcaccaaggttttgattcatttgtttagggaggattagattgctgatgaaattgtacaaaaatggaagaacttttttagcttggagtgatatattgttcattgtttgtgaaacaagttgactgatcattatgctgcgcattagcttagttgatattgaagttggtgttttccagaagagcgacagaaaccataaggtttctttcttcccatcttcacccctttttaggcaattgaaaagagtgggttttagaagtttttctttaaaaaaaaaagtactttggattatgtctggtggagagggatagagtataccttgcccatgggtcagagaagctattagtttctgattgattagttaccagtcagctgaaaactgttctgtagttttggaaatggcagtggtcaaaatttttgcagtgaatttggtcggaagtttaccaattcttgtttgagttctcattggcttaccctcattcatcaggacccgttctagc

SEQ ID NO: 60576 - DNA, 472 bp, Populus trichocarpa
  Intron number 1 from transcript POPTR_0016s10010.1 (locus POPTR_0016s10010) derived from phytozome v7.0 (chr-ID scaf fold_16; pos 8138393 to 8138864)
aaaactcattgaagaaggcgaagttccattccaaggtatgtcaaacttgtttattcctcctaattattgttcggatttgagtaatctcaactataatctagtgggatcaataattgatttgtcaacctcaaataattaaaaaaacaattcttctacatgtgatgatgattcaagatgttcatgaaagtgactgaaaaattcacagggtagctataagaaaataatttttatagataaggttaagtgtgaataattcaattgaagatgaacagaaaaccatattaattaatttagagtaacatcaaactatcaatttctcaaatataaataaattatcacctctttttttttttttttccctgtttatgctcttgttaggaaaagaaaagttaatcccactttataagtagctcatgcatgaaattctttttttaaaaaaaacatgtcaatgctggtaatcatattccaggag

SEQ ID NO: 60577 - DNA, 974 bp, Populus trichocarpa
  Intron number 3 from transcript POPTR_0002s14830.1 (locus POPTR_0002s14830) derived from phytozome v7.0 (chr-ID scaf fold_2; pos 10990569 to 10991542 reverse strand)
gggccttaaattataagtatttccttctatttttggttagttggctttactgcctcaccccgcagaagcttcctatttcaaaattcttgtttaacttaaacaatgtgatttgcttctttctatgccttttggcaaaatgtcggtttttttaattgattgttgatgtatcccttgggttataagggagctgtttattgtaatgaagataggctcttgttttgtttaaatggtaagcataaatgtggtttgatgttctgtttcatgtcccaatgggtagcagagggagttatctatggttccatgttttcatccagggctcatcataagaagctgaaaatatgttgtcttaccatatcatattgtctaacatttaggaagtttgggacttaactagttgtctaaatgtcctcctggtgtcttgagttttgacaaagtttgaactgcctgcctatatatatattagcacacaatctatgcttatttagtgacaaattttgtgatcataccagcaacgtgctcctttcctgtatagcttggatgatatagcctaggctgtttgacaatgcgccaatttttggttgagagtttggtttaacctggctaagattttctgtggactgccaaacaccagcatcattaatctcagtgtctaccttttgaacctgatgactcagaggtcattatttatgagtgtgttgttttcatttttcacttcttcttactttctttctctttttttcatttgtaatccaaaggtgaagaaattgtcttgattttaaaacattgttcaccttttgaagctttgataaatatataatcagatagaaatgcttgctgtaagaaatagtttgttcctttttatttgtgaggttgtaccaaattgtcggtagtctgacttggaatatcctaattaattgcaatcttaaattttttatgcagttctatacatttcttgagacaagtcttgtaacttt

SEQ ID NO: 60578 - DNA, 692 bp, Populus trichocarpa
  Intron number 2 from transcript POPTR_0008s17220.1 (locus POPTR_0008s17220) derived from phytozome v7.0 (chr-ID scaf fold_8; pos 11569083 to 11569774)
agggtggatcccctactgctggcaggtggcgaccccattctttattttttgttaatattcttcaaatttctttcatttgctttgttcggttactagaaacagttagaaatttgaatattttgctactattttctttcctggtgattatatgtagtcgttatgtctgcaagtaccttttgtttcctggccgaagggggttctggattcctttattaactaagcatgattaacaattcttcttttttttaccaccttatcatagaactagacatacatgcataaagtttcaagtctaccttatcttttctccgttgcttgcttctatatcttgttaagcaagttgttctataaacggtttgattcttcattttgcagtattaaagcttgatgttttgtattatcccttgttttcccctgtatacgtttgtttgttgatcgatgataatttcttgaacatttatttgccaacgtttccttaatttatctatgttcagggacatgaaagaaaaatttgaaatttgtttctgtaagtatatcttgccttcttacagggaagtgatttatctgtgcgaactttatcttttctcatcttgattcattaatttctcctttgatggtttgattttctgattatatcaacttgctttctgggagcagtcaggttgtggggtggcctcctataagggcttatc

SEQ ID NO: 60579 - DNA, 324 bp, Populus trichocarpa
  Intron number 1 from transcript POPTR_0002s07240.1 (locus POPTR_0002s07240) derived from phytozome v7.0 (chr-ID scaf fold_2; pos 4946390 to 4946713 reverse strand)
aaggttctcattctcgattcccaaacggtaattacttttccttttgcaatttctcacttagtcattgaattctatcgttattttctctatcaattcgcttaatacacttaaaatttgtataattaccgttgattcctcgttgaagcccttggaatcaaagcaattgctaggcacaaagaagaaaccttacaatttttttcacgatccaaaactctagctgatgaactagtattagaatgaagaagatgagaaatgtgagttttgctaatctgtgaataatgtgttgcaggttaccattgtaagtgttgtgtattcacaaacaga

SEQ ID NO: 60580 - DNA, 799 bp, Populus trichocarpa
  Intron number 3 from transcript POPTR_0016s02950.1 (locus POPTR_0016s02950) derived from phytozome v7.0 (chr-ID scaf fold_16; pos 1490297 to 1491095 reverse strand)
ggagacttgatctgccaggtaattttacaggctatggcaacagatgttagcgaaatgtgcatctctcttccacgttttacttattttgggttttttctgttcatatatatgtcgtgagtgtttgttctttgtattgatttccattcatttgatctctaagatgagtggtttatgctttatttagcgacctatggatgtgtcatgaactgaaactgttggtctaagtattgatctataaactttatgatatctatatggtagttcaacttcatcaatttgtggaattttggcaactttggttttgcatttatggtttttgaatgatctatctcttttctgaatgcctccaaacaaggtgtgaacagtctttgagaaaacaattgatttccagcgcccacacccccccccccccccatataaaaaaaaattaatgatatgaaataaataaatgtcactgaattatcctttagggtggtctgaagtgcctgtaagaacatccgaactttttatttttttgaactgcagagtgttcaaactcaagttttactaacattggtgtcaccttgaattaggaaacgatggcccaatttttcatttatatgctctcatgtgtgtgtgtgtgtgtgtgtcctggttacgctatggcatcttctaagaactccttgccatgttcaattgtagtaattaagctatttttaatacatgctcttgttatagaccatttcatgtataacttttctaaatctttgccttttctgcctcagcttgtgattgatcaagttccatccctagaccttaa

SEQ ID NO: 60581 - DNA, 752 bp, Populus trichocarpa
  Intron number 1 from transcript POPTR_0002s11590.1 (locus POPTR_0002s11590) derived from phytozome v7.0 (chr-ID scaf fold_2; pos 8655977 to 8656728)
tcacctcacatcttctgcttgtaatagaaatacaggtaccatcattaaggattcaagtctacgtggggtatgcttcattatttgaggatatgattggtcccctttgtggtaacaagtggcttctataatcattatggctttatggggtgtgttgcgtggagccatggtttaattgtttatgtactcgtaggagatgggattaatgtctatttgatcaataaatgatattttgttagttatttcattcaaatctaggaatgttcttattttaaagtcctgtctagatgaagtagatttttttctcatgtgtcttccttcctgttttggggggtgatgggttttaggaattaatcgaacacagaagaccagcgtgctcaaaagaagaaacatttatgaagttgaaaataggaaggctagagcgacataaaagatccaatttttgtttgggattccgtctgtttctctttttcttcgctcccttcctacctttgcggtctgttttcttggcccatcaattgcagaaattcatggtttcttcagcctccttaaatgtttcaggcaaattttgattttgagttgccttctagacactttgcatgctttttttttttttttttggccttttgcacccagagagtataaccttttctatttaacattaaactttggattttattatctgcatttctacatagtttgacctgatctgttatttttttttgttttttcaggctacaactctggaatcttca

SEQ ID NO: 60582 - DNA, 660 bp, Populus trichocarpa
  Intron number 1 from transcript POPTR_0352s00200.1 (locus POPTR_0352s00200) derived from phytozome v7.0 (chr-ID scaf fold_352; pos 790 to 1449 reverse strand)
ttcttgtttgtctatttgtgttgcttttcatctacgttagtatgggtcactaacgctgccgagccgaaccatagtccaattatcgaaattggaaccacattgctttcgtgaaccacatgcgcatgtcattaattagaacagctttcctcgcaggggaacatgaaggtttaaaatgtttgattggcacggttttttagtcaaacaggattagattatattattcaggaaaaaaaatgattagattagattagattattggtcaataattcactgcaacaatttcctccattatagtattcttctttcatatcagcttcagatctctggggcaaggcagccagctagctgtaattctttagaataatttttggaatgctacgtatctccctgcgtttggcgccagcaccagcaccagcaccgtatatccttagaggactgcacgtctaatgacaatgactagtgatcatgcacaccatttcaacctcatgttatgcaaggtttccatatctccatcatcttgatcaattccttataaatagaaagcagaatgtgctttgtttccatatccaatattagtagttcgaaaaacaagaaaaaaaaatggaaatgccaagagtagctgctgctttggcactagcacttagcctcatctttgtgaac

SEQ ID NO: 60583 - DNA, 568 bp, Populus trichocarpa
  Intron number 1 from transcript POPTR_0002s17620.1 (locus POPTR_0002s17620) derived from phytozome v7.0 (chr-ID scaf fold_2; pos 13453341 to 13453908 reverse strand)
aaggctcagatctgggatactgctggccaagaaaggttggggcctcccatctctctgttttttcttttctctctcttcatatgcacatcaaacatgtatctttttgcttgacccctcttggtcgcctgatatatacatctaatctaattgtttcaagactgtaacttatggctcatgataaaagaaaaaagactataaagtatagctacttgcgcccgcttagcagaagataataattcttcttctaattgatgtttataattataaagaagagattatctttctttagtttttgtttttttttagaaatcttccccttattttataattttttgatggaatgttcgtattagaattattgaatagagtacaataattgtggaaatgagtgccttgaaggcaatagttgggcccattgcatatcggctcgtgaatagcaatgaaatactgatgctgctattaaaacatattccgaacttgcagtcaaattctgatatataaagttcaatttattgaaaaacaaaaatctgcaggtaccgagcagtgacgagtgcatattatagagggg

SEQ ID NO: 60584 - DNA, 1013 bp, Populus trichocarpa
  Intron number 1 from transcript POPTR_0008s08160.1 (locus POPTR_0008s08160) derived from phytozome v7.0 (chr-ID scaf fold_8; pos 5082063 to 5083075)
ctccaagaaggaattcaaagcgacccaaatgtgatttttttcttctttctcctgttttagttgttttgctatttttggataaattcatgaccgcccacctgtgattacatgattagtttttttcttacaaattttcgaaccttgacttatttttcttggtggtttgtttcagagaagcaagttttttttatattattattttgggatcattagtgaattttattggtacccaattatccaagtggaggtctatgtatattctttgatgggtttttgctatttgatttgctgttcgttttgttgcgtgagattagacgtgtgagctcttttgtttttatcatattgtttcatatcaagtattattgatattaggtctttctttttttggaatgagcattacatttttaattcctcaagaagatatgcttgaaaattctccttttgtaacaggaatatgcctattaaactttattagaaataaaataacctaaattgggtttgataaagcacaagataaaaatgctataacatgggatgagataatcaggccttttccacaaaatgaattggaaatctagtaatttcagatgtattaactattaatggttcatatatctgagttgacgcgcgtatgctcatgtaatccacattaagattgtcaaagagaatgtttccagtgttcaggatagttgcctgactgctttattgctatcctgcaaagcaagctaggtctttaaatcaaatgaagggataaatatttcaaaatctcagggatgtagctttttttccattttataaaatgcatttgttttcttattgtagtatttgtgttagagagagagagcaaaagctgtgcgcatcttctttgtctgatgttttctaagggcaacacaactcacaaattctctttcacggcataagcacacgtggatatacctgtgatttttaatgaactaaagatgttctgttttctttcagattcaaagtttacacaacaagaacttcctgcttgc

SEQ ID NO: 60585 - DNA, 500 bp, Populus trichocarpa
  Intron number 3 from transcript POPTR_0008s06230.1 (locus POPTR_0008s06230) derived from phytozome v7.0 (chr-ID scaf fold_8; pos 3667376 to 3667875 reverse strand)
gtagtaagcttgaggtaattctaattatagtcccaaatttggaaatgtaccatgggaatttgctcacaagaacaaggacaggataagaatattagaatagagcttaattaagcattttgtctgttggattttagtttgtcaactattctgatgttaaaccaacgtaccatgactgtaagatatgcttccctttccataattagataactgatattcgaatagcgtattgtttgtagctttagctttattttaagatgttattcccgaatttgtaattttcttacccttgttagacattaccaattgaagaaagattaagctagctgaagatcttacgtaatttgatttacttgtttcaatttcttaaaatgatcatccacattttaggatagaatactcgtaaaaaggataagtgatagaatttattcattagaaatcaacttagttttccctttcttttgtttgtcctcaatgtaattagtttctgcattttgcaggtt

SEQ ID NO: 60586 - DNA, 978 bp, Populus trichocarpa
  Intron number 1 from transcript POPTR_0008s09960.1 (locus POPTR_0008s09960) derived from phytozome v7.0 (chr-ID scaf fold_8; pos 6165884 to 6166861)
gctaggttcttctgctctctcttctctggtaataaatttaattaattatttcacactctttgcataacttcgcgtgttatttctctctattcactctgtgtccttcaagtttctattattttttgctcggatttactaagtaagctttttttttttttttataatccgagtaagcttaatggaagacttatctttgctagtatttgatttttggacattcacgagggtttttctttttagttcttattgaattgtatattcgatgggggagtagatattttggttttttttttttttttggggggggggatttttgtatgaatttgagattatttttttggtgtagttgtggattttagtattttgttgctgtgcacgtgtttaggcttttctcttaaattagtttgagtgggtttttttggtggacttaataatttagtccgcgtgaaggcttggctcttctttgttaattgtttagatatcctgattttttttgtgtcattgaactgctgaattggcttcttgttgtttcgaaattactgggttagctattttctgtgttgtccttattttttttgctggaagtgctaattgaaaaattgaagagtatattgctgcttgatattttctttataactgcaaagtattatttctgtgttcaagatatgctagtttagtctcgtttggattggttcctacctacttggtcaatgcttaagatttatgtatccatttcttcaggagtggcaatcttggaatggttatgaataatgtttctggacatgaaaatgcggaaacttattcggtatttatctttgctgttctacttttttaaaagaaacgaagtcaaattaagtttgaaaagctcttcatgaaaattggtttcttttttcttggctatttctgatcgtttgttgacattttctcatgtcttggatttcagattcaaggagctgaggtaaatcctattttgacaag

SEQ ID NO: 60587 - DNA, 895 bp, Populus trichocarpa
  Intron number 2 from transcript POPTR_0016s11750.1 (locus POPTR_0016s11750) derived from phytozome v7.0 (chr-ID scaf fold_16; pos 10932163 to 10933057 reverse strand)
tttctctgggccaaatctgctgcaattcttaatcggtaccttccaatcaaattttgattcttaaccatgattaaaggttatatggtgtcagttaattctgaccgatttgaatattcaacaattcaagaagatcgattgcaaaaaatgtggtatttagcatgcattaaaacattttttcagactttttccttgagctcttttacaatgccgcttctctgatgtccagttaagtgataagaagtcttaggattcactctgagcgatgaaagaactaggcttaataggtgattttcagtcatggccaaggttggcatcagtccagtggatagatggctataaatctttatatgttggatgctaactcataaattgactccagcattagtcgcccaaatacattttctctttgtcaatagcagaaagcatgtcagatgaaaccgattaggaattgtttttctcctaagcaattggcatatgtatgattttgcagaaatactttcgagggaatgccattgttgtttctggattaatgctggcctttgagtgtgattctctttataagctgcagtcacttctgccattcatttcggcaaattaacacatctataataaatttaccaccaaaatgaaataatgacactgccatttttttctatacaaataacaaaatcatgataattctgcatcctgatcctcttaacatctacaggtgaagttctcctaaatcatctcatatttttttttaatggaaggagaatgaggactatcagtttttcaattgagtaatagtgagtttcctagatttaattttgcagttttagaaaacttgatgctttaatggattttttcccattgaccagacctgctccacctttaccacggttgcatctgtccg

SEQ ID NO: 60588 - DNA, 958 bp, Populus trichocarpa
  Intron number 1 from transcript POPTR_0008s11490.1 (locus POPTR_0008s11490) derived from phytozome v7.0 (chr-ID scaf fold_8; pos 7307831 to 7308788)
ccaagctacgtagtttactacccagcacgaccaaagtaagtgtcatagtatatcatcaccaaattttgaaaacctacacagaagtgttaaattaacatatgaaatatcaaacccttaaataaaacagcatgctcttcttttatatattaaaaaatgcataattatgtagtgtcattttgttttgtggtaaaacaagtagttttttcttttaaagatgtctttcaatcttgctgaagattctagttagatggctggtctgataatatagatgccaccaaaacataatatattcactttttagatataagaaaggcagttacattttttcttggttagcttatccttttgttttcatcctttgaatactgctacgtcctattgttttttcttttcttaattttggtgtattctccttctgggacttgtgctagttccgaggaaagaaaagaaaaactaaaagggaataagcgttaatgtcgctaagttgatatgataaagaggaaccaaagagatgttgaaaagcttccatggaaatttcttgccggttaccagacaaagcaattaagtggagaatgaaaagatataaagacagacaaaactagcattcttgtcagtcacttatagataccccgtgccctaatcctctttcaaaaccccacaccattagtgaaacctactttcatgcctgcctgagtcatgcatcaaaagaacgaataaaaacttcatatccccaaagtatctcttcttttcaaacaccgaaagacagttaatttttacatgtaataatttatgtttgcttgcccttcaacctacaaaatgatcattatagcttgattccttttcttttaattcatgttttttatgagtaaagtacaaactttaacgtgcatgaaactgattcttttcctttgtttgtggcccagacagacaaagcttcactgctagcagaagtgatcca

SEQ ID NO: 60589 - DNA, 388 bp, Populus trichocarpa; identical to SEQ ID NO: 60538
  Intron number 2 from transcript POPTR_0016s07730.1 (locus POPTR_0016s07730) derived from phytozome v7.0 (chr-ID scaf fold_16; pos 5578610 to 5578997 reverse strand)

SEQ ID NO: 60590 - DNA, 315 bp, Populus trichocarpa
  Intron number 1 from transcript POPTR_0008s16210.1 (locus POPTR_0008s16210) derived from phytozome v7.0 (chr-ID scaf fold_8; pos 10849349 to 10849663 reverse strand)
actggcaaaaggcaacggaaccttgatccacattcgtatgttgggagaaaaagtatcaaaacaaaaattcaagaaattaagtcccggttcctcttcatttgttaaacatgatagttcattcatgaattgtgaaagagtttgaagagattaaaaagaaaaagtgaaaaacaaaatgcagattttgatttgtacagtggaagttttttactgttttattgaactgaaaaatatcgttgattgcttacttgtttcagcaatctttacacgtttaaatagacttgaaacaaactgaaattgctggtttgtagcactaca

SEQ ID NO: 60591 - DNA, 775 bp, Populus trichocarpa
  Intron number 1 from transcript POPTR_0016s02260.2 (locus POPTR_0016s02260) derived from phytozome v7.0 (chr-ID scaf fold_16; pos 1096078 to 1096852)
tgctctcagagagaaaggcttcacccccatcaaaggtatattcacatacttgtttaattacaagtgaacttccaagaaaagtggctttattactattatacaacttcattagtattttacagctttattcttttctaaattttcaaacaaatggttgagattatcctagaaatcaaatggttgagatccttctacaaataatttcaaaaattatacggtatgagagatttcagatcatttgttattctattattctagctagtactgggtaattataggtaaaattcttatgatggtggagagtatcctcatttttaacaaggtgaaactggattgagtttccggtttctcattaatcttgcatattgcatagattatttgtttggctaaagtgtaatgaatacaatttcagctataatgataatgatagtatttggatgtgaaaaaaatatgaatcactaacttgattgcttttttcttttatatttctttttgttctctctttatctcatttacggcgcattcattttattttactcaacattttagaaattatcttttaaatgatttcttttttattaatacactttattattattgaaaaaatattagaatttaattaatttggtatgcccgcgttccgacaaaaatttccaagcttaaatcacacaggcaagatcaatgattatgtgcaaaagaatttcattttgagcttggtctaataagattgtgttttgcagatttgagcaatctaagcaacggctatcttgagaca

SEQ ID NO: 60592 - DNA, 816 bp, Populus trichocarpa
  Intron number 2 from transcript POPTR_0002s17150.1 (locus POPTR_0002s17150) derived from phytozome v7.0 (chr-ID scaf fold_2; pos 12938894 to 12939709 reverse strand)
attctaaaaaaggtaacatttcttatctttatttctatttgttaagcaacgacttcataaccatctttacttgcaacttagaaaaagaaaaagcggaaataccacttagaaactgcttgactgggtcaaaactatggtatttgaggaacaaaagacgttggaaaattctcaacttggtgttggtcagtagattcagtacagtaatgcatgacataggaatcgtgcattagaggtgtagaggaattgacttaactagataattaaatatcaagctaccgtcattagctaagctacaaaaaaaaatattaattaggaagaatgtcaagtgggatatgactggataatcattcccagtaatatcatggatggttcacccccaccttggtatcgacctttgttcagtcaaacaggccatgataaagtgtcgtctaccttccattcagttgccccttctgctttttttattggtagaaggtgcaaaaatgggacactggttcaatagacatgattgttcagtgaattctaaccagtcaaaagggtagagtggcgtatgccaggaaagttgatttactggaaaatacgaaattttgggatcatcccaaaaatttcttgtttcttatattttaaaaaattgtcataaaagcaaagtaggctgaagaaatgcaatgaaatcttatgcaacactaacaaacagaatgagcctaatcaacttaaaaataaacaatagatgaagtgagaacatcaataatatggatcaaatattgacagcttctaatttcaggcaagtctgccagtgatctcagagtttttgggatc

SEQ ID NO: 60593 - DNA, 861 bp, Populus trichocarpa
  Intron number 1 from transcript POPTR_0008s02700.1 (locus POPTR_0008s02700) derived from phytozome v7.0 (chr-ID scaf fold_8; pos 1365398 to 1366258)
tgatcagtaagttctcttttctttactttcgttgttttttttaatattttttctgtgtaattgatggtactggctgctttgcatttcttctgttgtgttttttgatcggcccagatggagatgagtgtggatatgtttgtttttggatgtaatgttaagtcctttaaggtgtatagtgtttggatttgctggattttgggtggtctggatagtgtaaagtttttttctctggtgtagctatgtgtgaaggttgtcatttttgtttatgacttttccattttttttctgctgcaagtttctatttttagtctgtgtttcttgtgaaagcacttgatgctcttgcaatcccccccccctttttgctgattattactaaatttatggtcttgaattcattttttttatgatttgttgattttagtatttgagagagatttgttattaggagttaggtggatcctataaaatttaaaggagaattgtagaagatcaagttgtttaatttttctctgtctatcagctgcatgaaggttaaaatttattggtctcaggaaaatggaattctcagattcatgaccgggggaaaataattttaaaaaatatattctgtgacgccattgagagagcgagtgattgattcaatccttgttttttcagtagaaaatagttttttttccatttatttttgagttagtgtttactaaaagttattttgttattgttatcagctaataattgaattgatccatcaggacacgttggtagatattatctataaatccaattgatttggtgtgcgtttttggcttattgtcctttttttattgcgtttttttttttggcagactctctgggtaagag

SEQ ID NO: 60594 - DNA, 991 bp, Populus trichocarpa
  Intron number 1 from transcript POPTR_0002s21620.2 (locus POPTR_0002s21620) derived from phytozome v7.0 (chr-ID scaf fold_2; pos 18142997 to 18143987)
gttttttctctgagtagacgagcttggtacatcaggtaccttgctatttgattaattagatatatcttagtcattttcattagatttgcgtccaattaaacttgcaacggaaagtttgaaaagtgggattggtgaattttaaacaaacaaaagcagcgttcttttgttttagttggttctaagtatgcacgctatctgttcgatgcaatgccacagtgtgtgtgtgtgacacttctttggttaaggtgtactctgttaatttttgtactttggtttgagctttgccatgtcgtcgtggtctgtctttgtatagtatttcttctactctctgtttgtccctgtttcgttatcttggtattaactttgtagctagtttgggcccatgtgattccttttctgctaatactgtaatccattcataaactttgcacgccaacttttcgatgaatcgttggattctttctgtctatcttgaatactttgtttttctgaatcagatatttagcgagggggaaacaaatgttgggaagttactataagctgacaatttgtatattggctggaagttttatcaatttttggggttttgccctgatttttcataatggaattgagtaacagttgggacatccttaaatacctagatttgtaaatagtcttactgattcaatgtcttgatatttactgataaagtaggacaggatgtgggtatatttgtgatctctagagattttatgagagaataggtttcttcggccttcatcactcaataacagtcggttgacattgatgtgcctttttttgtgcttttcatataatataacagacaaggtattgttttcctgagtggtttgaatgcgttttctgtattttcattcctttacatggagtcttctcttctttaagtatctgtcactgtagaatttcattttatgtgcaaagtaccattgctaagatgttttttggacaattcaggtgcaaaagagaaaac

SEQ ID NO: 60595 - DNA, 856 bp, Populus trichocarpa
  Intron number 1 from transcript POPTR_0008s01630.1 (locus POPTR_0008s01630) derived from phytozome v7.0 (chr-ID scaf fold_8; pos 795504 to 796359)
ttcttccttgggagattgcattcgcagttttcagtgtaagtttcctattcttttctttttttctcctgctttggtattcgatgactatctgttggtagatttttgatcatatcgaaattgattattgtcattaggctttggctttggataattgagtgtcattgcatacgcttttttgacatcttactctctgtctgtcgcagaattattgatcaatactgatatatgttcttttcatgattttttggctttcttctttaacttctattcttttgaacaaagatgaataattaagggaaaacctagagctaatgaagaatattatgtgcttttccacagttccaggaaattggatattacaatacaggatatcaacggaggtttcccttttcgtgggtgtattattgaacttctattgactatggtttcagtcatcatataataaattcacattaattgtatttcttttgtttttgttaaatcaaagtttgcaatatgtataagaatacgcttctgcagattaatcggtggtcaatatgctaaattcttgagggattcagtatgcttttttagtacctgtagctttatattccaagacttctgaggccttcttttttggcctatatgtgtggtgattattttgaagtgattggcttcacacatagtggaagttattatcatgcttgatcatgttaaatggcatattcctagagtgttttctcaatttgttctgtttatgctacgggtcctttagcgactgatatcttaataatctctcggtattgattttacaataagacagttttgtttctaatggtcagggcttgaaacaagggccaaggaataaggttatttt

SEQ ID NO: 60596 - DNA, 947 bp, Populus trichocarpa
  Intron number 1 from transcript POPTR_0016s03460.1 (locus POPTR_0016s03460) derived from phytozome v7.0 (chr-ID scaf fold_16; pos 1831314 to 1832260)
ataagcttagaggcctccttctttgcaattccaaggtagttatctaaatattttatgtgtgtgtactatttgtcgtgttttctaagtctttttttgtgtgtgaattgatcatgtttttagtcatgaagtttaagggattatattaatattctatctctaaaattttcttgtgagagggttgtcttgattacgagagaaaaggatcacaatcaacttgcagcttcaaagttgttttcatggcaaagtttgtgattctttttttgatgaaaaaaagaaagtaatttttctcttccgggattcatcaagacttaaaaaacatgatgtatttcagggtattccacaatgttttgctttattaattttgactgtttggctgctgagaatctatgggaagtgaaaaaaaatcgaaactttgagttttagacttttcagttttcattacctttgacccgcaaagccgaaatccctgctgcctgacttgacgtttgcctaaccaaaatcagttggcatttgtattgtactccaatgtccatttttttttttaagatcaactaaacaatggttttcacgtttagtgcttcattcaatgatttttcttcttctatcagtttacctgctccttttacttggaaaccaaacgggaaggctctatacagggcttattgttgctacaatactaagattcagattctgaaatcttggatctattcaagtcttttgagactttcggattattgttcaaacagctagtacatatatatatctgcaaaagcaaaagaagcttcctttttcttcccctctcttcttatagggtgtaagttttttaagaaagttgctaatcgttttgcatttataatctactatagctagggtttctaatcaatcttttttactttgtttcaatttttacagacagacaaagcttcacttctagcaaaggttgtcca

SEQ ID NO: 60597 - DNA, 1046 bp, Populus trichocarpa
  Intron number 1 from transcript POPTR_0016s12270.1 (locus POPTR_0016s12270) derived from phytozome v7.0 (chr-ID scaf fold_16; pos 11613973 to 11615018 reverse strand)
gctcttgaagctgatattcactttgccaatactctgtaatttcttctctccttttctgttgttcgttttttcttttttttgtcttcaccgaatttggtgagatatttgggatttctgataaattgaattgatatttcttttagggttgatgcatttgttttgatttctggatcctcttagctgattttcaagttttaattttttttcctcatgacgtgtttgttcgtgtctgtcaggttcttttttttttttttttttcctgaatatttagtgggctgggcgggtagatatctgtttcagtgtgtataaggtatttattgagtggaacataatgcactttttacctctaatttaaacaattctggcgcatcccagaaaatcaaagtatataaaggttcaaagggtagtactagcagtggaagttgatattttacatgcggcccttttttatttgcttgtaattagttgttccttttttaggcatttatgtcaattacgctgtggagttgaaaaaataattctaaaataaaagttttggtttttgttgaatttctctcattgaaagttgagttcatgatgctaatttgtggcacaggcacttgatagttattggttattgagagcaaattgtttaaggcattaatgggacaatgaatcaaaaccgtgaatgttccttttttatctattttgtagccatgtgagagctcacatgatgccagtgtagatgggccagatgaatgatgccctgctagttgagttgccttctttttgaaaactgagtatgagatttttgtccaaactctgcttttggtaccattttccgttccagataggttgctcaatcaatggctgcctgtccttacccttgccaatgcagaaagtttaataagctcaagacatggttattaacatgtttgtggttatagaattttctgctttggataatctgttcctgtgtgtgtggtgttcgctatcattatgccttgaaatatgatatatttatgtgtttttgttgtgatgcagggcttctgattatcctagggaat

SEQ ID NO: 60598 - DNA, 599 bp, Populus trichocarpa
  Intron number 3 from transcript POPTR_0002s12830.1 (locus POPTR_0002s12830) derived from phytozome v7.0 (chr-ID scaf fold_2; pos 9551807 to 9552405 reverse strand)
cactagaggtcagttctgctgagtcattaaacatattgcttgttgacatggaataaaaaacaataacagaagggaaagttaaaatggcttttagccatgtaatgctgcaaaggccattttcttcttcttttggaatgaaagcattgacggggtatctctatttgtacagaatgagtaatcatttcatatgaactttcagtttttggtgtcataatataacattgttgaagttgcatgttcaagtgatttttgagttcattatcctttgataaatcttgtaagttctgatgggtcctggatgataatgttaatgtccttttgtgttcttaatcttatgggtttcttaagtcaaagagaagaggaagtgttgtttgtcatttagaataagtatggatggtgtttacttttcatgtgggttttgggcttttaggagggggggaagctttaatcagtagggtagcaattcaaaatttcaatcacattgtttgtacaagctgcatattgatatgattgtacaagctgaactgctttagactaatattcaataatagtctttcatgtttattagctcaaagctgttgatatcaggagtggctttg

SEQ ID NO: 60599 - DNA, 780 bp, Populus trichocarpa
  Intron number 3 from transcript POPTR_0008s04370.1 (locus POPTR_0008s04370) derived from phytozome v7.0 (chr-ID scaf fold_8; pos 2457462 to 2458241 reverse strand)
actcgggtgcgtgcctccagctgaaaaacagccaggttattctctttcaagtccatggttactaattctgtcaggtgatttttggatgctaatattattaaatagaagccaatgggaatgtgaaatttgtcctgttaaagaaaaagattaggctggatgctgagatatccaagctgccttcataagctgataattggtttatgctgtgtccgactggttacacgatgagtatgagaatatgaatgaaaaattccgatatggtaggaacctttgttaagtccctgctattaaaattgattgatgtcaaaggttgatgggtagtcagcatattagaatggaggaagcatatcaaagctgttgactgctagaaaatacattatctgtcaatccatttgaaaatttcttatgttttttgcctgcaactacatggatacacaaatgcatagcttccattaagttgggatgcaactttgcatactttagatgtaacttgtccaactgaattgggattagggatgttagcttaggattttctttccccggaaagcaatcttctacatttgaaagtcaggctatcattgttccatttcatttgctagatgatttactatttttgttttgtttcctgagttggatgtttgagtagcgtttacataatgtgtgcataatggaatatattgctggatttccagactattctcgtactcctagaattacaatttattccataacaaaccaatctcaggttacttgtgggtcggagcttgctgtgatctttgt

SEQ ID NO: 60600 - DNA, 333 bp, Populus trichocarpa
  Intron number 1 from transcript POPTR_0016s11610.1 (locus POPTR_0016s11610) derived from phytozome v7.0 (chr-ID scaf fold_16; pos 10841356 to 10841688)
aggtctgtacttaacaactaattatcttgcatcaaactaacagaacacttacatgagtcatcaaatttatgcaaattcattgtggggataaactaaaagcaaagtggaagctgactgggttttgcttataaatgaagtaggaaaagtagcaccgtatattttcctattttgtggtccaattgaggcaacttctctagtcttagataattctcttcttcatgaattagctagatgcgctctagttcgaaccattcagcgaaatgtttttttttttaaattagttagtttgcaactacaggtgttctctagctgcttgagatcaagtgggaggac

SEQ ID NO: 60601 - DNA, 484 bp, Populus trichocarpa
  Intron number 3 from transcript POPTR_0016s03750.1 (locus POPTR_0016s03750) derived from phytozome v7.0 (chr-ID scaf fold_16; pos 2103153 to 2103636)
atttgctcaagaaagtaaaggtataagcttttttcatttccattctcatgtcttcattttgagtaatcatatattcccttctttttcctcaatccccttaagatccatttctattactggcaaaatgggttccttgaaaattctttcccaggttgagaaatcttcagggtctaaatgatgttagttgattggttgtcaacatgtgttctattattgccacttgcttgagaatttcaaagaaaatctaataggaatattttgccacctattttgtatccaaacaaatctaggtcaagatattcaaagatttcctttgtttctgcgtgctaccttctcgtgtcatgtcacccatcaaagattttaatgcacatttatttaccatgaaatcaaacagtggttgttaaagagacttgttttttgtttttattccttttcctctgatcttgcaggaatcatcatctctcagaaacatacctgtagtgat

SEQ ID NO: 60602 - DNA, 809 bp, Populus trichocarpa
  Intron number 1 from transcript POPTR_0016s08710.1 (locus POPTR_0016s08710) derived from phytozome v7.0 (chr-ID scaf fold_16; pos 6503273 to 6504081 reverse strand)
gggtacgcttcctctcctcgattctcactctccttcagcatcactctgctactttactgttcttgactctgggatgtttagagctccctctatttgttttgcatcttgtattttttggtatcttaattaatgttttctcataataacggcatgcttggtagctgagaaagttgaagatgggaaaaagttgaaaaatctttttaagttttaaacattaagccatgctatcggcttatgaaaatattgccacgtgatgtttagtgtattccattgtatgttgaaacgagttttagtcatggtggatgccatctccttgttttgtttctgagaattaaatctggtatttgtaaattggattatgagtaggctatgtagtgattaaacagtaattttggttgaattagaaatttattaggctgttcaatgttttggtatttgaatctagtttaattaatccctttgacctgttaaatttgaatccatttctatcaacttgaaaatgcattggtgggatctttcctgccctcccaaaagggcgcgtcgttttgtttatttattttttgaatagaaacgaaattagcagatttgcaggttagggatggtgaggtttcatgccaaatcaaatttaatgaccataagtcatctagaactagcattacttgtattgtgtattgtttcctggtgagattactgatatggaaagttccctgcctctgtgcataacttgttagttatttaggacagtgtttgggtgttctccatttaaatttgatggggatttttttctgaattacagtaagacacgtggt

SEQ ID NO: 60603 - DNA, 1045 bp, Populus trichocarpa
  Intron number 1 from transcript POPTR_0016s02230.1 (locus POPTR_0016s02230) derived from phytozome v7.0 (chr-ID scaf fold_16; pos 1078746 to 1079790)
tgctctcagagagagaggcttcaccccaatcaaaggtaataattcacatgcttgtttattatttaagttatcatcaataacaagtgaacttccaagcaaagtggctttattacaccattatacaacttctttagtattttgcagctaatttattcttttctaaattttcaaacatccagattctcccttgcaagttgatggagaaatgattataaaacattatcacgacaacaatttattttatttataatatattatattatattatgttatatatactgtacgttcgacggcataattcaaatagcatgccatagaaccatgtaaattttatataatatccttttccaaatcacttctctaaaaatctggcaattattaaatcagattatcctagaaatcataaaaattttatgatggtgggagtatccggcgcattcctcctcctcttagatttttatttatttattagtagtcttttttagcggaagatatatttcggattcaggcttggaatctcatttttttcattctcacatggaatatttggctcataaaaataatttgatttataacaaggtgcagccggattgcgataccaatttctctttgattttgcatagattatcaatttgactaaagtataatgaattcaattttagttatacatcttattcgtagtgtaaatgatatttaaatgtggataaacacaaatcactaatttaattattatttccttttatttttttttaattttttttaatttttttttacatcgtattcattttattttattgtaaatgatgttttaaccttttagaaattatcttttaaataattttttttattaatactctctattattattaaaaacaatattacaatttaattaatttgatatgtccgcgttccgacaaaaattaccaagcctaaatcacacgggcaagatcaatgattatgtgcaataaattttcattttgagcttggtctaataagattgtgttttgcagatttgagcaatctaagcaacggctatcttgagaca

SEQ ID NO: 60604 - DNA, 351 bp, Populus trichocarpa
  Intron number 1 from transcript POPTR_0002s11250.1 (locus POPTR_0002s11250) derived from phytozome v7.0 (chr-ID scaf fold_2; pos 8325953 to 8326303)
gctgggagctttactgcctcgaacacggcattcaggtgtattttcgtttgcgttagagaatctatcagatctggatccagtcttttaactgttttttcttctttttttgtgggttttcttgttggcctgtgttggttacatccgtaatgcttaagttattctttctagtttttaccaattcctgatggagatgcagggctaatcgtttccatgtcttgctagatctagtgcttttttttttatcacagtatcaagattagtgagcgctaactgatattcattcatgtatcttaatcaaattatcgaacacgatgatctattattaaataattgtttttgtgtgtcagcctg

SEQ ID NO: 60605 - DNA, 1017 bp, Populus trichocarpa
  Intron number 2 from transcript POPTR_0016s14590.1 (locus POPTR_0016s14590) derived from phytozome v7.0 (chr-ID scaf fold_16; pos 13770439 to 13771455)
gagtagcaccacaatctgtaagtttttttttaatccaattcttattgtttttttgtgtttgtcttactaggtgggtttgatttgttcttagtttattaattgataaataaatggagaattaaccacttagttttgttaataaaaaatggaaaaagaaaaaaaaagagaaagaaattgttagatcatatgtatgatttgattattgatatgttagaggtgaaaattttgtgtttttttcataaattaagttaagttttgattaatagtgataacccgagaatcccattgtcatttgctacactctaccatgatcactgtagttttgctagcaaggggtctggaacaaagtttttatttatgtgtttcttgcactgattggtttgggtcactcagatgaacgttttggttaattcaatgtaagtgtggctggcatggtattactgctctattttgtgtacgattctcgtcttgaagctccccctcctttgtttttttttttgttggctttcagtgttgtgattataagaattggatccatgattctcttgatttgatgtgattgtaagaattggaaccatgattctcttgatttgatgttgcgggaacttctcataatgtcaacaaattcaaattcagaagcctggcagcttgcttaaatttttatggccctgtctaatttgtgaaatcattattattcagttttttctgtggaagatttgtgggagtaggcaagatgtgacaatttgtattttttgtatcccttaatgtaaacttctgagattttggttcatggtgtattttaatgtctttttgtttacattttttttttgtcttgtgctaaggaaagattggataatacgtgtgaccattttccagttgctacgtgttttcagattcttcttcattttgctacttgcatttagattttctgtaggattgactgctgctaatgatcccatcgttttaaaattctgttttgcagtccatcttggctgaagcagagaagcagtggtggct

SEQ ID NO: 60606 - DNA, 837 bp, Populus trichocarpa
  Intron number 4 from transcript POPTR_0016s07280.1 (locus POPTR_0016s07280) derived from phytozome v7.0 (chr-ID scaf fold_16; pos 5174495 to 5175331 reverse strand)
acacagaagtgttgggtgtttcaatcgacagtgtggtatatatcttcttttgtcaaaatcaagaaagaaaattctaggaatcctgtgacttcggcctgaaatcttagtggatcttatgttttcacttcaagttttcaacttttatttgatgagttggagcacatactcccgcagacaacacacacgtttaggattatataatatgtctctagatagtctaattgaatttttttgtttcagtggggtgggggggaaggattcttgtagccaacctaaagtagctggattatagcttgggttgacttgactttgacttgaatttgtgtgtattattcatatcggtttcctttatataaataatgtgagccatgcttgctagcacaattgataaaattgcgtggcctttgcatgtattttgaaaacgtatggttcaaatcacagcattctgagttgataagttgaagtgaatattgtaatggacaaaaagtaacttggctgtagaagaaactaggaactgaaaattactgtaaagaatctcaatttggttttcgttataaatccattgactttagctatagaagctatcgtctgcatataatgcaattgcaaccttgttggttgcaagtttggtcattgccaattttcattagcttttgtctgtactgataaaatacataaacatttgctttcaaaattggaaccatccactatctgtttgttgtatcagagctgattttggtattggactaaaaatcataaattgattattggtgttgagcgtgtcatgatattctctgtgtagttctcgcaccttgcctgggtccaaacggatagaaa

SEQ ID NO: 60607 - DNA, 328 bp, Populus trichocarpa
  Intron number 1 from transcript POPTR_0008s18150.1 (locus POPTR_0008s18150) derived from phytozome v7.0 (chr-ID scaf fold_8; pos 12165206 to 12165533)
ccaagttacaggtgagttcttcttgactctgcaaccttattgtttattttaaggatattttcttttcattttgtacactgtgctagctacgttgtaacacaaagatatagataccatcttgttttcttgttgggggatcttaagcatgttttcattctcttgcgatgatagcagtaatagcaatctctttcttaaagattggcgatgatccctttttctttttgtgctgtgaattggagtttgtaatatagatgaaaatccaagaaattaatataaccaatttcaaaatgcagaatttatcagtatagattgtggaggcacaagtaat

SEQ ID NO: 60608 - DNA, 436 bp, Populus trichocarpa
  Intron number 1 from transcript POPTR_0016s08250.1 (locus POPTR_0016s08250) derived from phytozome v7.0 (chr-ID scaf fold_16; pos 6087601 to 6088036)
ctctctctctctctcaaaaagttagggttttcaaggtacgaattgcttaatataattgattttattagaaagtagggtttatttaagtctttttcattgcagtttcaattcaatttggagtttgttttatttaataagtgattaatccatgtgaaaatgttgcaattttttgaatccagattttgttgtggtaaagatttaatcttttttcaatttggttgcctttatagttctgatttcttcttaccttgatgttcttacataaataaatgatgtgctgctataaagccaactataattgaaagatttgatctcttgtgaagtttctggccaattaatttgtttgtttgatttctgtggagctcaagagaatagactttccattttagtgggtttctaggtattaaggacttgttttgtttgttgcagtttgaaa

SEQ ID NO: 60609 - DNA, 699 bp, Populus trichocarpa
  Intron number 1 from transcript POPTR_0016s03070.1 (locus POPTR_0016s03070) derived from phytozome v7.0 (chr-ID scaf fold_16; pos 1539207 to 1539905)
ctcgttttgctgtccaggaacataacaagaaagaggttttttttcttgatcttttatcttttctttgttgcaattctttgaattcttaattttcttgttttctttttcttcttttttgttgtcaaatatgatgatgatttgagaggggtcatagagagatttgagtgcttatagttttgaatgtttttttagattatatatggtttctgattttcatttactagagttttgctttttcccctttttttgggtgatttatttgttgatttagtctttatcttatggcttgatatatttttctagtatttctaatatataaaccatttttgttcattttttttgtttctatgaaatatttgtcaagaaaacaggatgactttagaaattaagatgaaaaaaaaatctaattagttgaaaaaaattgtttaatttttataataatggggataatatattataatatatttgcatatatggctattctcaattgctccctttttagtattcaagtttctatggatccttgtgctcaagcttttttcttgagtactttccaaagtgtgctaactgagttcaacttgatctttaaatgaattcagaaaattatagctagtacaagtatttaatgtttgtcaatttgattacttttttggcaaggtcttaggtttcttagtatttactttggatattgtcgacaga

SEQ ID NO: 60610 - DNA, 854 bp, Populus trichocarpa
  Intron number 4 from transcript POPTR_0016s12740.1 (locus POPTR_0016s12740) derived from phytozome v7.0 (chr-ID scaf fold_16; pos 12120167 to 12121020 reverse strand)
tccaagattgctcgccttgattatccaagagagtatgtgtttgtggcattttatttctatatcatatgctttcatcggtggttgtttttctagttactggttttagatttttttaaaggatattttgttgcaagtacattttagtgtgggttgctaatacttgcctgatgtttcttttgtagaggttgactgttgtttctcttttggaagtttcactttgatattgaatgttaaatttagggtggaatactcgtttttttatactatttttagttttttactttatgcatgagcaggggattcggggttttagggggaggggtgggggttgaacaagatgcagttcttgcaaacaatgggagaatatagtctattgtaattctgtttcaatgtttgtcatccttatcattactgtcttgctatcaattgaaagttatgaaattatcttgatgaatacaaaggtgaaaatagggtaaaaaatgcagttgcttttcttacataagtttttgtgacaaaacatcacaatctttgactagcaactacaaatagatccaaagttgttatggatgctctgagctgaatgattttttttttaactaatggttatgcatttagtgatttagatattgttgaagattttttagtttggcaatcttgtactttctgtaattagtgctaactcctgtatttatattgcctgttgttgtagttactgatcttgtccctactagtagttctttcttcttttctgttctaaggtacctgagttacttcattcagctaactttatttcttgatctctcatttcaatatttttaggccagagctcttttcagttttagcgaacaaacttc

SEQ ID NO: 60611 - DNA, 509 bp, Populus trichocarpa
  Intron number 1 from transcript POPTR_0016s13350.1 (locus POPTR_0016s13350) derived from phytozome v7.0 (chr-ID scaf fold_16; pos 12540128 to 12540636 reverse strand)
gcaccatttgtagggtgaaccttttctttcatacctataatctaatcaatctgaactgcttaggaaattcttccagcttacatatttttgttttggtaatgatgctatttgttgctgctgagtttcttgtttcgtcaaataccgctgctttcctgttttgcctcttcaagcaatgtctgtttttgcttcttactctccttttacttggttcctgagcctcttctccttgtactgctttgatttcattaaatgttatgctctgttcctttatttagttttcccaggccacaaaattttctgaatcttattctgtgcttgtcgagtgcattttcttgtccatgggaatcttttgtttttctagtttggctttggcttggtttttatttgctgtgctcctcaggtgctaaaggagcagatcttctctaatctttagttctgatatgtttttgctctagtacattttcttcattccatttcttcttttggacaggttcttcataacccttatc

SEQ ID NO: 60612 - DNA, 348 bp, Populus trichocarpa
  Intron number 1 from transcript POPTR_0008s12840.1 (locus POPTR_0008s12840) derived from phytozome v7.0 (chr-ID scaf fold_8; pos 8346444 to 8346791 reverse strand)
tggcttctcttcttctcctccttgtccttcatctggtaagcccaaaatcccccctatctccttcttcccctcttacaagatcttttaccttttgtttttaaatgacgttctatgatctcttagctttgtttttgtttgcatggccggctttcttaataaagaattcttccttatgttttcttttctcaaatatgatgataagtactacatggttttactgatattgattgaatccaaggaattttgttttcttgatttatgaaaatgatggtgatgaattattaattgggtgaagaggtttgtgccgtgaaagatttggacataaaccaactaccatcaggaacagga

SEQ ID NO: 60613 - DNA, 386 bp, Populus trichocarpa
  Intron number 1 from transcript POPTR_0008s09500.1 (locus POPTR_0008s09500) derived from phytozome v7.0 (chr-ID scaf fold_8; pos 5883569 to 5883954)
gctcggttcttcagtgtttttagaatctgaatgtatgcattttctgttgccgctgtgtgttgactttcttgattcttatatatgcaggccttgttttgattctgtatattctttatgctttccaagtgtcattttgcttgcagattcctacacgctcttctattttataccttcttcttcgattttttatttcctgattttttacttctaaccactactactctttataggcaacccgacgattttttttttttaaaaaaaaacagaagaaatcatttcagatttgctcagtatggcctcctaagaggcaccacgcagaatgagtggctgaatttgtttctttgcttgaagggtttttcaggaataccttcatcgatcattctacc

SEQ ID NO: 60614 - DNA, 551 bp, Populus trichocarpa
  Intron number 3 from transcript POPTR_0008s08790.1 (locus POPTR_0008s08790) derived from phytozome v7.0 (chr-ID scaf fold_8; pos 5446683 to 5447233 reverse strand)
tacagtgctggtgttgtacctgtgtcctacagaaggtaagtctctagcttcctgagcttcaaatctaaacatggagggatatttggtcatgaataagggctttttaatgaaattaatctcaattttttccttaacgagtttctggtgagggttatttacgtctttaatcagtctcttcatgttcttaaatcctttcttcacggatcaggtccttttcataactctaatttgattgcagtcaacctttccctctctagactttcccttcctcagtgatttctgaggtttaataaaaaaaattcagattcatgtcccaagaccagtttttgaactaaacataaagggcagtttaagttcttagcaaggtccccgctttaccactttcttaccacgaactgtgagagagaaagttcaatttcctcttggaatttggaagcttacccttccctcataaggagttctcttctttctggctttagtagcagtgttaactgtcttggtggcgggtttttgtagggtaccctgcagaaggagaggaggcataagattca

SEQ ID NO: 60615 - DNA, 830 bp, Populus trichocarpa
  Intron number 1 from transcript POPTR_0008s18890.1 (locus POPTR_0008s18890) derived from phytozome v7.0 (chr-ID scaf fold_8; pos 12898285 to 12899114 reverse strand)
caaagaagtaagttttgtaaaatccatattcacgcataatcttgtttttcctcctgactaggttccgaaatataagattttccaaaaaaaaaaattcactatgagagattcctcatcacccatcattgtttgtggcaccactaagttttgagctatgtattcttttgtgtccaagttaccaagaatttcaatcattatgaacttggaatgggaatggggaatgacctgtcccagaacattgttcaatggggctaggattatatacagcattgaaggattgccttaatagaagccaaatgcagaaggtaggcataaataaagtttgtcacaagtgtcccttttaccaaaaccttgatactaagttttgatcaccaattccaaatcaacttcaccagactagttgcaagactttcaaggcatcctgtcttttcattgccaatttgagcacgcagccttccatagtcatgtctatttgttgttgagtggtgaatgatatgtaccttgatgaagttaactaggatcatttctgacctaaggaacatgctatccagagagaagaagattctaggtcttgtctagttcctataccacaatattcaatcgaaaactctattcatattttgaaatttatgatcgacttatctagaaacgtcagcacatgatatgatgattggtctcctcctatatgacattactatgcaaaaatattgcttgttcatgaggagatgcatcttcatagctcctgatgtcttcaattcttttccacattttcctttggtttactgaatatctctttgtcctgctttgtaggtcttgccagcctgaacaaa

SEQ ID NO: 60616 - DNA, 934 bp, Populus trichocarpa
  Intron number 2 from transcript POPTR_0008s08100.1 (locus POPTR_0008s08100) derived from phytozome v7.0 (chr-ID scaf fold_8; pos 5043135 to 5044068)
catcatcaattttaaaggtattgtactctcactaccggctcagtgtacaatttttatttgatcgtgaatctgtagtagtttaatcaagcaggggcacacatatagcctattgcatagtttcaaaattatatagaagtgaatgaattaagatcattgattcaccatgatgaagttggatctgccccatttcgtggttcagtggcattcatatttttagactagtattaagagactattagagtattagggtttacaaaatgtcacctagaatgtgtttgattgccagttctgcgtagaagacatacgctgatgaaatttgcaataggaacacgcgcatgtaagatagcaattggcctcacaaggaaacgctggtaacaatgacaggattaaactgagaggtttttcggggtatgttttgtttgtatatcttgtagatgcaaggagttgatcggtacttgtccatgcaatgagattcattgatattgattttagtaattcatgtagcgtctatcacttcaaattaaacgatataggaacacgttcagatgcattatgcagggagacgtgacagttcaaagccaggactttatgcagtcaagtgaggaaaaccgtcattgattatacttctttatgatagaagcaacgcatatgtcgatcagatcttatcgaatttaaccattgcacttgattttatacaccattatcttttttagatcttcccttcccttacactactaaatgttctgtctctttaataaagaataccttatcatcaacatgatgatgaaagagtctttgtttcaaaactttaggtgcacttgcactatccctgttttgtttcttgtttctttttttgctctttgtgatcttgcttttttagatctttgtacacctctttaacaaatttgattacttttttcaccgcaggattcct

SEQ ID NO: 60617 - DNA, 662 bp, Populus trichocarpa
  Intron number 2 from transcript POPTR_0008s16650.1 (locus POPTR_0008s16650) derived from phytozome v7.0 (chr-ID scaf fold_8; pos 11193800 to 11194461 reverse strand)
tggggcgacgacagtggcatttaaccatctttgtatgttttctttgtttccttaaatatgatttgtccccactacaattgaatacgtagagactcacttgaatcaacttgatgaagaatgtcaacttatgattctttccatatgttggtgaactgtatctaattgatggcttaagagttaattgaattgggctttgttttcttctactttttcatgctggggtgatggggattggggagtgtcaaattttatcgcaatggatttgagaagattataaatgttaatgattctatttctcagttgaagttgttgcatatcaaacaagggaaagcagcttctggtttgtcagaaaaaaataataaaaagagcgtggcttacgaaattcaaatctaaatattgtaaggaaatcctagcgcagcagcttaatgatccttaaagaggtggaagtttgtcttcccctattaagataactagtagatgatcagttttgttttggtctttttttcaaatgagaatggctttgctttataaatgatagttttgagtatgattcctagtttccttacaagaggtgtttatctaacggcaaattatcatgttttcctttcttttgtctccttctcccagatcctgtctctcttgttcgtgatcacaacatcaaa

SEQ ID NO: 60618 - DNA, 946 bp, Populus trichocarpa
  Intron number 1 from transcript POPTR_0016s12460.1 (locus POPTR_0016s12460) derived from phytozome v7.0 (chr-ID scaf fold_16; pos 11881818 to 11882763 reverse strand)
tattgattttggattgtctattttctttaagccaggtgaggaattaatttatgattaactgatgattataaaatgaagtggtagggatttatgcatggataattaagcaatgtacctttgtaatcgttaggtgaatatgaagaaggtgctgtgaattgaaacaggaatatgggggctcaaaaacggaaaaatctatgtagtttgttcctactttctagggtgatctagttttagtgaaaatgatggaatcttagttactaaaatgataagattatcacagtatcattctttgaaatgccgggaaattccttgtaatattctgttttatagtctacatttagcatcagaagccttgctaatatttttacatgccctttttgaagacactataattgttgctcaaataagaagaatgggatgttattttgttcaagcaccggtttattttagagttctcatgtaggatgtttaccgtgtttagtcatggttaggttttagatatgatcttgatgtttgcatcatgattgtcatggatatttttggtgctttcaggaagaaaactgctatttcaataaattgtcacttgctggctgtagatcatttaaagtttcatcgattttgattatttgtatatctagttactatatcatgctggtgtttctactgcctaactgctatttcaataaattgtcgcttgctggctgtagatcacttaaagcttcatcgattttgattatttgtatatctagttactatatcatgctggtgtttctactgcctaactgctatttcaataaattgtcgcttgctggctgtagatcacttaaagcttcatcgattttgattatttgtatatctagttactatatcatgctggtgttttctactgcctaatttttaaatactgctaggtgagaggttctctgaaattgttggaagcccttat

SEQ ID NO: 60619 - DNA, 831 bp, Populus trichocarpa
  Intron number 1 from transcript POPTR_0016s02730.1 (locus POPTR_0016s02730) derived from phytozome v7.0 (chr-ID scaf fold_16; pos 1350875 to 1351705)
atcaagcagaagaaacacgcgagcctcttggacaggtgctcttctatactgaattcttgtcatttttttcttgaagaatgagttgattgctattgtattttgtattggaacttttttttttaatttttaattttaaaatttgacttaatttaatttttatattaattttaattttaatttttataattattatttatttattttttataatttttttaattaaaattttttatctattatatttgatccttattttcattcaagattaattttaataaattttaataaaaataaaatattaataaattattttttatttttttttcatgacatagttaaatatcaaaaaatattttttaacttactttttatgacattataaaacactaaaaaataattcattttttaaaattttatttttttaattattttttagcaaataaataagttcgtgtcatttgctataacaaattctaacaatataattggattaaatcaaaacattttaaaaaaacctttaataagtttaaaattaaaaatcaaaccaaaaaaaaacattaacttgtgattcgctacaagaaattctagccagcagaattgggttcaaggttatttagaccccaaaactctaaatcatctgccttgtcagatgaacagaatagaccctctgttttggatggacacccatcatgtgtccaatcacagccttctatgtggcagatttcctttcgcagattgcgcaaggggtggactaattatcatgttgccaatatcctacttccctatctcttgacaggacgtccaagaacaatctgctatacccgcacctgc

SEQ ID NO: 60620 - DNA, 612 bp, Populus trichocarpa
  Intron number 1 from transcript POPTR_0016s06750.1 (locus POPTR_0016s06750) derived from phytozome v7.0 (chr-ID scaf fold_16; pos 4564146 to 4564757 reverse strand)
ggcacagcacaagttttcccatttactcagtgaaggtaaagtgtacaattcagaatcttttctttgcttacataatttgttgatgctatgctaaatgatttgtttctctaccgttttcggccatgtttaaaaattttagctccttttgttgcaaaatttagccccaaaatctccaatttcatcactctttaagtgcatcatcttcgctattagattcttgaagaagcaccgcacccattctcatttcacaacccagaattgaatcggtggattgactccgtaagtaaggttgatgagttggggaagtgtttgttgccctcagaatgcgactcagtgaattgactttatgctatttttccctttgtttgattggattggattattgcgttttagcatgtgagaagcatgactgtgcaatgcacatcaggtgctcgttattttgactcattgaaaagtgagtaatctttaactgtccaaatggggaaggaagacgaaacatttcttgttgagcattttatggccaaagtgaatatgttcccatttgtgcttggggatttgatcttttaatccttgagtccatacttacgtataataatactcttttaagcagcg

SEQ ID NO: 60621 - DNA, 585 bp, Populus trichocarpa
  Intron number 1 from transcript POPTR_0002s05280.1 (locus POPTR_0002s05280) derived from phytozome v7.0 (chr-ID scaf fold_2; pos 3424152 to 3424736)
agttcattctcgttgctactcttgatagcactcttgtaagttctcactttgttggtttggttaagttccatatcttacaataattcaagattatattatgattcttgaactgataaacgtttttaatgatgctagaagtgaagcaatcttgggggtttaggggttggtaggtttgtgattttgggtagatattattgtgcatttttactcactgtttttgctgttcaatgctgaggagttgtggagctttgtaattaggatttggttttgtgtgtttctactctctgcaaatggatgcatttattcctagtttccgtttgctttaactgttttgagtattatggttgtgtcacctggtagagtttttgttttggtagattccaagtattgagcacgagagcatgcatacataataagattcaaatttgagttcccttctgcattctggatgttagatgtgtagcagtgcaaactgggatagtaatcttcagaatccaagagaattttttgttgttttcatgcttgcttaatttcaattttctgtcgccagaaactttggaattactcgacggggaagttcttgaa

SEQ ID NO: 60622 - DNA, 893 bp, Populus trichocarpa
  Intron number 1 from transcript POPTR_0016s00420.1 (locus POPTR_0016s00420) derived from phytozome v7.0 (chr-ID scaf fold_16; pos 112433 to 113325)
gggggtttaagaatccctttagtctcacttttcaggtgtattttgctgctttctaagttgcccactttgtctgtttttttttttttggagcaaaatgccaagttggggtctgttatcgattgatttttagtttctatttagagcaatgaagcctaatgtgtatttgaaatgaaaagaagctgtggtttagtgattggtagtggcagcccgttgaagttgaaatcttttgtattgaggatttgctgctgagacttattaggaatgagagtacgattccttttgttttccagggatcataacacatgagattaatcattgattatgtgttaagttgaaagaatgttgaattagacgccagaagaattgttggtgtcatgttttgagtatataattgtggtactctgtactgtgttttagatgagtgtgccagttttatggatgctaggataaaaagtaggtaaaataagcggaattggcaatttgagttattgtgttgtgtgtgtgcgtgtttttttttttaatcttttcttcttaattcaacaaagctttgggggtttttgttctatttgtttttataagaagaatggagggatgtgaaatggaaaagacattttaccttgatggaatgcaatctgctgaaaatagttgtttttggctgagtcgattgatgggtttgtccctttatttttgtatcagataaagaaaaaaataatccgcaaacaagatttcaaacttaatttacttctttattacatgaacattgcaattgatttcaatccttcctgtaagtatattgttaatggtctctgttcttctgtgcattccttggatcatttactcctatggtttctctggcagccagtagggttgggaaagattgcaagacttattaa

SEQ ID NO: 60623 - DNA, 885 bp, Populus trichocarpa
  Intron number 1 from transcript POPTR_0034s00210.1 (locus POPTR_0034s00210) derived from phytozome v7.0 (chr-ID scaf fold_34; pos 104829 to 105713)
taccaccaccaccaatcagaacagtcctggctctggttagcttatcaattcatattgctgcttcttttaagagatttttatgataagatattgattcattccatgataaaatagcacagattgagctctatgctaggttttttagcctgaaccctgaagcaaaaatgcataaggacttttgggcgctatcgagatatcaaggaccaccaccacttatgtattggcattcattttcttggagtgttttaatttattgctttcttccccttttgtatgtttgatgctatcgactgctttgctgtgtaaaggcatggaagaaactgttgtaataacaacagggaaatcagtttgtgattttgtaattgaaataacctgctaagatttgagattgaattggatacgtgatgcgagtggtgtggaaacacttgcaaggtggtgtcttctcggttccttctttcggattattgataataatggcttgctaaagactatttgcttgaactattctgtcaatttgatcggattcagcacaaactgtaacttgtgcttactcacatgattcatatttgcagtgtatgttctgtagaaatatattacaactgaccagtcatgtgatcttttcaatgggtgcaagcagattgtgattcgtttatgttcttggccttagtttggtagtgtaaattggtaggcattgataattgatcaacttatcggattttacaaaatgatctatgtttgtgttctggatattgagttagtatttgtaaggtcttctgaacgttcttttttgtgagactacatgtttgtgggatgctattcttagaaatggaacttaccaactttatatttcttcaccttttgtgatctttccactcctcactgaag

SEQ ID NO: 60624 - DNA, 810 bp, Populus trichocarpa
  Intron number 2 from transcript POPTR_0002s10840.1 (locus POPTR_0002s10840) derived from phytozome v7.0 (chr-ID scaf fold_2; pos 7870038 to 7870847)
acggttcatttcaagccgctctgggctaaaaattggtatgttttaattaaattgaatcagtgttgggttgatggtttgattgatttatttgatattgtggattaaggatttatttgatattgtggattaagatttttttttgtttgttgaagaattattgaaaattgaaaacgaatgaagagatcaaacaatatgtattgttgagatgctaagagttgggattattagaatgtggaaactttacttttatatgcacaattcatagttgaattttcatttattaatgaaattggagaaatagcatggggagtcgaataagttagtctgctaaggttatcattatgttttttctttattaacggagctcatttgtcgattcttctcattttggaagctattttcccatggactcttacgacttacgaggagttttgttgttttgatatactttttttttctttgttgactcagtagttgcactacccctggctgtctgttttgtggtggttggtcttctttagggactctgaacattaatgttgtaatgttacattatgtatgaattgacatgagataatattgattttcagaggtgggcattcccatatttggtcaaaaatggatttatctcttggaactttttatgttgctgataccgttctgcttcttgaattgcattttatcttactagctttcatccaatctcaccttataatttcttttttatcctttccatttagtggaattatgaactgatataatattttgaattttgctcctgggtggccagtcctaggtttggcatagcac

SEQ ID NO: 60625 - DNA, 212 bp, Populus trichocarpa
  Intron number 2 from transcript POPTR_0008s12380.2 (locus POPTR_0008s12380) derived from phytozome v7.0 (chr-ID scaf fold_8; pos 7999297 to 7999508)
gagtgttcctgtaagttttcttcagaattagttcatctagttgtttgttacgtggatgggctttaagttttcagagagtcgattgtattatgtattgattgaccatccaaagtcaaattaagattggataatacttcatttttctgtttttgcttccttgcggtgttgaggagtaaataattcatcagggtctacacctttttgatattcag

SEQ ID NO: 60626 - DNA, 984 bp, Populus trichocarpa
  Intron number 1 from transcript POPTR_0002s08440.1 (locus POPTR_0002s08440) derived from phytozome v7.0 (chr-ID scaf fold_2; pos 5883229 to 5884212 reverse strand)
ctctgaccaagacgctgcctacaccagtcaagaaggtatttttgctgttcctattgttgttgtttgctgctaatgttttctgttgctgctgctgctgttgtgtgcattgtgattgcttgtactgtggttataagagtcccagttccttgatgttctcaattccctccaacacaagggaaactaaagcattgcttatttgtttgtctgtataagcaaaattattgtttgtgtagtgacaaatgtatggtcaaagcatacatataatatcctcacttaacagattggctgatgagatttagaatcttgttaattatcattattatttgtttcattatgttctaatcattctgctacgtcttacatttatccctaatttaacaaattagcatcactactgtaaagttgaaaattaatggaaagagcttgtgattcgtgagcctgtgcgcgcgcgctgtggaaactagctagcccacatcattggatcaatgaaaagatgaattttgaacaatgaaaattcaatcatagatatacaattatagatatataatttcattagtgcataatttagcagctgcgtttaccttcgattaattacatatatcatgttaatattcgacacacatatagatcatgcaaacaaaatctaacgagggacccctttggatatcatttccggcaaataatcatgtccttatagcgctttttttttttaaaaaaaaaattaggaacgggggcctaagctcaaatgtccttagcgtgttatgtatggttaatatatatagcgcatgagtctccatttatttgtatttatctattaccgatgcagttaaaatgtaacaatatgcttccaaacagattgtatacagaatatatatgctacttttttcttagcttttgatcctttttctcgttggaactccccgtctcactttaaattttcataagcttttgcagactcctttatatcgattaagtttgaagaca

SEQ ID NO: 60627 - DNA, 468 bp, Populus trichocarpa
  Intron number 6 from transcript POPTR_0002s20720.1 (locus POPTR_0002s20720) derived from phytozome v7.0 (chr-ID scaf fold_2; pos 16818002 to 16818469 reverse strand)
tgataaagttcaggaagaaatcaagagtcgctcaggtatgctttaccttttctaaatcatggtcttttactgtactctgtcaatgaataaagagatgttgatcttgaaatgcaataatttggaagaaacatagtgtcttcaagaacttggtcagttgaaaaccagtggaactgttatttttttattaaaatggatgaaagttagcttagcatgtgaagattcttgtaccgagtagtgctgtggttattttgtagttgtttatacaactttatgctctgcttcaagttctgttttctttgtgttttacaaattcagaaaagctgaaatttgcaatattgttggttggttgattgatttaattttctgccttctgctctgcacattgagaaatgcagaaccttgcaaatttatttgatttgtctttttttcttagatcggaagccacctggagtagggcgtggaagagga

SEQ ID NO: 60628 - DNA, 559 bp, Populus trichocarpa
  Intron number 1 from transcript POPTR_0008s01480.1 (locus POPTR_0008s01480) derived from phytozome v7.0 (chr-ID scaf fold_8; pos 716421 to 716979)
tcttaatcactggttcaacaaaaggttctttcttttcttggttctctaattactgtctgatcagtttgtggtgtttgctttgctgtgtgtattgctgtggtttctggtttggttttgctggttaattctatgccctttgatggatttatggaatatgatttctgggtttcttttttgtgggtttgctgcgaattaaggccccaattagtccaagagttaagggtgttgtgtctgtaccggatggtttgatttttggtcaacgagaaatagaagggaggtgctcaagtaggtacattgctactactgagtttattttagtttggttttgagtgctactttgttggggtcattttctttgttttcttttgcgagaaattgcattcttcagtccaagaatggctttgttccgtgtgtgaaatgagaatcattggatttttttatcagttttcgcatgaattgttttttacagtgtgcaatggctcgagagtttctaaagatgatatctttaatgtctcattttcttaagttggctggttctttatgtgaatagagcttgttg

SEQ ID NO: 60629 - DNA, 245 bp, Populus trichocarpa
  Intron number 1 from transcript POPTR_0907s00020.1 (locus POPTR_0907s00020) derived from phytozome v7.0 (chr-ID scaf fold_907; pos 6453 to 6697)
cagggtttagggcggccggtatgctaataccactaccataccctctctatgaactcatttcctttctcaacttgcattacccgcgcattttaatccatctctcaatcacttcaattccatttctttctttttttcatttcctttaattagagggccaactcccatatattttctaccaaaaattttgatcctttgattacttttgataagaaacccacaattctatctctaaaccatccacagtt

SEQ ID NO: 60630 - DNA, 883 bp, Populus trichocarpa
  Intron number 1 from transcript POPTR_0002s25450.1 (locus POPTR_0002s25450) derived from phytozome v7.0 (chr-ID scaf fold_2; pos 22514463 to 22515345 reverse strand)
gaggtttttcttacttttcacttttttttttcaaatttgaaatgtttttatacacgcgcacacacacaaatggttggatttttatttatttagttaaaagtttaaactgtaattaatttgatactttttatctagttaagagaattaattatgttttttttaatagtaaactgttagttatttttgttggttttaattaatctttcactttgaaagaaagatttactgaatttgttctgagtagaattaaataatttgaatcaaaagtcattacgattgattactctctttcattgatctcaattgaattactgttttatccttgggttgaaatcgtaatagcataataccatgcattaatttaggttgacattggaagaatatgaataatctgggatctaaaagcaccggttcattctctttgtggtagagatactttttcatcttgtccttgtagagcggctcgaatcttctctaaaaattagaccgagtttctttgtgcataacttatcttgataatggcctccgtatacattgttaattttagtgaaagaacacaaacactcagttgtagttgtagttgtagatggtcgcttgaattttgtagctcagcagggacaatagtacaggacttgtaaaatctttataatttagacacggggtagtggcaatgtatttgattggtgttgattgagtatatgtttgggtggaatttgttatatttttttcttgcctctaattcctttaggagtcaatgacaccatgctcatgagttgcatgtttgtgtgtgcaaagagaatggacaaacattaaatatggggttatatcaatatgtgtttgtgattcaggtttcttcgcctacaatcattgttgagagagctgg

SEQ ID NO: 60631 - DNA, 666 bp, Populus trichocarpa
  Intron number 1 from transcript POPTR_0008s03320.1 (locus POPTR_0008s03320) derived from phytozome v7.0 (chr-ID scaf fold_8; pos 1764264 to 1764929 reverse strand)
tatcttgctttttggattaagcatttgtaaaggaggtaagccttttttttttaccttgtaatgtttttggatttgttaattttgagttactctaattgggcctctgtgatttgtagcagaaggattactgagtgtttgctttttttcctttgtgggatttcttttactgttgggatcaaagatcattatggttgctgtggttttgtacatttgcttttatctgaatgattaatttgggttttgatccgttatttgaaggagaagagaataaaagggaaatggtatattttttgtttgcaccttgcctttatctctgcgttgaaggaggttgttgggatttacagttgagaaattaggtagttaattcttacaatttttttcgtgctgaaacatagtgtgtgtatactttttttttttatcatgatttaggttgtaggtgtttttttggataaccaagacaatcatgataaattgtgtatgcatctaactgttttttccctgctatttttccaatttcatatcattgtttgagttaggtttttttatgaaacattgtttgatatatagttcatgaaatatgagattgctcctcgagttttattatggtacacttagtttctctgaaactatagttgattagttttgaattgattttgcatggtgaag

SEQ ID NO: 60632 - DNA, 855 bp, Populus trichocarpa
  Intron number 2 from transcript POPTR_0008s09880.1 (locus POPTR_0008s09880) derived from phytozome v7.0 (chr-ID scaf fold_8; pos 6136076 to 6136930)
agaatatcattttcaaatacccagatcgagttcctgtaagtctcccctctctttctattattgttttgtattcctttgatttcgagctgtcattttgattggtttatgtaattgtttctttggttttcttgctgaaagttcaattttatttttgagaatttagtggtatatctgcttcttctttttttctctatctgggtagtttcaggggtcctgtcttatttgacaaatagaatgtgtagcccaagacctgatctaggaggggcgggtttagtcttggtgaatgaaagttaaccccaccaaagaaagaaaagataatacaattggaatatgaaaacaaacctgaaaattccaatatagttggaaattcctcattttgatctggatgtgcaagtttttctgcttatattgatgtttcctgtggaaaaatatgttttcttgattgcaactcgttatttcaagtgttaatgatggatttttcatagctaagctggctgttctcttaagggaatcaaaagcatcctttatgtttttggtgcagcacatttgttgaaggaatgtaatcattgctattgaatattgttggttttaattgtctagtgcaaaagaagtattttttaaattctggttagaatgatgtaccttatgcaagttacctaaccttgcaaactaagccaaagcatgattgttgggcaagctaggcaaaatctgacttcaccaatgtaatttaaatagaaatatcaatcttagagtcttcttatttctttttctttttttaaaaaaaacatcggagctcatcagtattttctctgatttttaggtgattattgaaagatattcaaggacggacctgcc

SEQ ID NO: 60633 - DNA, 516 bp, Populus trichocarpa
  Intron number 1 from transcript POPTR_0008s04720.1 (locus POPTR_0008s04720) derived from phytozome v7.0 (chr-ID scaf fold_8; pos 2712994 to 2713509)
tcacctcgagattcaattccaagtctgcagttcaggtatttctctcttcatgtattctcccctctcctttcttttataacgtcgtattctcgggtcaatttgattttactgtctgatatcgttttcgaaaatcgtttttgttcattttcgattaaaatgaaaatcaggttttcatgtgatttgcccgttagggtttcataggagcagctaaaataaattagcatcagctttccactaatgatgttgaattgcgtcttcaacaatctccgttcctgtcaattaatgttcgagaagtgttttttcttttcaatgcatttctgagaaaatgcaggtaacttacagaaagttttgactcaatttatcttattaatattccaattaattctcgaccgagtttttctgttttcccttctcctgtgctagatttcaatttctcgggcatcttaacttttatcaaagttgtaaccaattttgtgttggatttttccccacagatcctctcattaattgaagaaa

SEQ ID NO: 60634 - DNA, 526 bp, Populus trichocarpa
  Intron number 2 from transcript POPTR_0016s12240.1 (locus POPTR_0016s12240) derived from phytozome v7.0 (chr-ID scaf fold_16; pos 11598648 to 11599173 reverse strand)
tccaggaatagaagggcatatcttttctataacgtgtaagtgttcctgattatggaatccaatagaactttgacttcatattatgataattggctctgactgtttgctttttggtttggtattgatcgaactcgtgcacgcatcttgacaagacaaagtgcttaatattagtgttaaatcttctgcaaagttctttcatcttttgtggaacttccttgttgacttcaatggaaggccttttccgttcttgtttgttgttagatatgagagatctttaatgttagttattgtagcatgaaggagacagataaaagattatcctgttttgttagtgattaaagcttgatttatgagaaaatatagagtacaaggggaaaaaaaatgtataacgtagttgctatgtttaaagaaaacaaaaatacagtgcacatatgtatggtctcatgcttatatcattttataaattatgtgcgctgtaattgccacttctatgtctcattttgctttcacaatgatgacagtgaga

SEQ ID NO: 60635 - DNA, 716 bp, Populus trichocarpa
  Intron number 1 from transcript POPTR_0016s12240.1 (locus POPTR_0016s12240) derived from phytozome v7.0 (chr-ID scaf fold_16; pos 11599148 to 11599863 reverse strand)
ctcctcttgctctcaaagacgacatcatctctaaggttcttttctcttttcactgttacttggcatggttctgctatgtaatatgcaagttttatggtttatgagcttatgtcaagtgtcttcttcttgcgttacgctgtgaagttgacataaagaaatgtcaaagaagaccgattgctatgtattggtgaatcttggaaaagtaaattggctgaattacaagaactggaacagtgtgtgctttatgtattcgttttctggttgaagtaggagagagcaacaactatgattcagccttcttggattttccatttgcctgttacgtattttgggatatatttattgggttcttgctgttgaataatgtttgaattagtagggaattcttcctttatcgtatatgactgataaacagaatctgatgtatcagtatttgtcccctaagatcatgtgtagataatttttttgttaataattatctagggcctcgacatgtaaggtgattatgattgtaatcttggcttccttcttgcagttcccaaaatgaaaacccatcttttaattgttcttttttctcattttggcatctgatatgaagattgagtagccacatccaaatgtattattggattaactggcagcaccatatatatagattctaattctttgttttatttccagtatttctgctccaggaatagaagggcatatctttt

SEQ ID NO: 60636 - DNA, 679 bp, Populus trichocarpa
  Intron number 1 from transcript POPTR_0008s15590.1 (locus POPTR_0008s15590) derived from phytozome v7.0 (chr-ID scaf fold_8; pos 10367717 to 10368395)
agacccaggtcacctctcctctttctaagttcgaggtaattccttgcctctcttgttctgatctctctgacccttttgcattcgtgaatcgtgtttttggttgttttcattcaatgcatgcgcttgtgcttggtgtcttagtgggttgacttgcctgtgttttatcagaaaagactcacctgggtttttctgggatcagagtcctgtcttgttagttttctctgtctggattttgagtttcatgtggtttacatctctaatttaggttcaatctttacaatttggttcttcctcgtgctaccttcatgtcgcttgaaatgctatgaactgcgaagtagcatttcagtcttgagatcttaatttactgtcactttcgtgaaagaaataaaaaatttctcctgatttattaggatctatttggtgtttttaacgacttttgaaaaattctctcattttattttttatttttatggtcagtgtaagaaagatactgtattttttttttatctatcagtaatagtaacccttctgtctgaacgaatttacttatttgattctagatcagtaatttgggatcttgtattcgttccatctggttgcttctttgttcaatgattgacatggatttttgcttctgggtgcaggattcacctgttttcaactatatcaatagcctttc

SEQ ID NO: 60637 - DNA, 835 bp, Populus trichocarpa
  Intron number 1 from transcript POPTR_0008s01150.1 (locus POPTR_0008s01150) derived from phytozome v7.0 (chr-ID scaf fold_8; pos 552295 to 553129)
gtggtgataaatctgtaatagttggcaattagcatgttgtagaatgtagtcaagctggtgactacagtgctttaaacagcagtttaggtggttatactaatcacaatcaaagcatatagagctggcagtgacagtgaagaggattcttgttaaatcctttgtcgtatgcgaaggtaggagaggatggacacaaacaataagactggaatgatggtattgagtcaacttgtaaaatttatacactttaaccccaaaaccaatcccttgttgtttagaagagaaatttttggtttacttgcttaaccttgtcagacttcttttacccatccaaatttagagttatgtcttcatccacttatgctttcttttgttgatttttaatctaatctggatttctatgagtcctcgaatttgaatgatattggaaagaattctcttttttatgctattgtctcgaacttcgggaagaacaatccaaaatatgacagtgaacaatactgtgggagaactaattgcatctgagaggtttagattttggaacagactcgatttgagattgccagtgcatggcatgcttcctcgcccctcctgaatccttttatattttcctttttgagtgggggaattagctttccttaagaaagtgctttttttattggatttaatgtgaagacttttatctaattactcaattcgccatgactttgttgcaaaatgcaccaacaatccaaacactctcttttattagtagctgcactctttatgtgtgttttttctcaatatatcttgtgctccaactgactcttgtcgttgttatgtggacagagtgtggctt

SEQ ID NO: 60638 - DNA, 349 bp, Populus trichocarpa
  Intron number 1 from transcript POPTR_0002s13100.1 (locus POPTR_0002s13100) derived from phytozome v7.0 (chr-ID scaf fold_2; pos 9753940 to 9754288 reverse strand)
gcctggtcttgttatttctgctccagcagagaaaggtttgaactgatactggtttgatgtcttggggttctttttttgtttttttcttactgagcaagaccgtatagactatagggttaaggtattgaagaagaatcagttcaaagtgtacctcttgggtagtgctttcttcttattaacggctttgtaaagcttttgggttctttattgaagaaaatagagaaatttttctttttttaaatctgaatgcatgaatcttggtagttaattatatttattatcgtctgttattgatagtcgtgaataagtaacagaagtatctgatcataacgcattaaaactgagtttc

SEQ ID NO: 60639 - DNA, 615 bp, Populus trichocarpa
  Intron number 2 from transcript POPTR_0016s02320.1 (locus POPTR_0016s02320) derived from phytozome v7.0 (chr-ID scaf fold_16; pos 1129380 to 1129994 reverse strand)
atgtaaggattttatttttgttattattattgtttttttcagaaatttggagaatctaggcacgattacagattattcagtatgcttagagtcgtattacgggacctataggtagttatcatggtaggtcccatgagaaaaactgttaaatttttattccgatgatgtaagcaggaattagtccgtattttttgcgaagttatagttacaaagcacggcctggactggcgggtccatatggtgactcgctgaccagagtccggtcaagataagattttatttgaatagatgtttttactaaaatgatggtagtttttgttctttttaaaaaatcttgaaacgatgttgtttcatatatttttttttaaaatcatagcttagattgacccaccgacctgcgatttgtgctggattgatccctattttgagtcttataaatttctgtaatgatttaattttgtttccatgggcgggtagttgatatagtgggtcccacttatagcttcttcggtgtatagtttattagagattgtggatttgttgaattttagaaatgtggaatgtgtgtgattttatacagaaggtagaagttcagcatcatataagacgttcatt

SEQ ID NO: 60640 - DNA, 867 bp, Populus trichocarpa
  Intron number 1 from transcript POPTR_0008s01090.3 (locus POPTR_0008s01090) derived from phytozome v7.0 (chr-ID scaf fold_8; pos 510788 to 511654)
caaggaacgaagaaggtatgcttactttcagacattgttccctctttttaggtgtttgtgtagtaatgtttggctgtgaatacgactgcttcagctttaacattcaagtctgaatctttattgaataaagatcttaggatgatttctatggttctgttggatttgattaagaacttgagtgagtgttgaaaacaacaataacccatttaaatgtgaccgatttactctttttttgttggataattctctctccatgtcaagttaattaacttttctagtggtttaaggactggccagaggatgcaccatccatacctcatctaaatgccaactcctgaatcccctgctactaataacaatggtagctagatttgcccttttcatgtttttatcaaagcttccacgcttgaaattactactaaatacttaatttcagttgtctcaacccccctaatggctcattaatatgaggaatagctgcataaggactcgtctgctacaagatagctgctaaacattgttgcggatctgaaagcctctctctaatcagtgaaatagagaagcattttttggaatacagtttagcaccccatgacaatgagcacaagttttacatcattatacaagcattccatgaataaaaatacattttcacctcatcattctgtattgtcattatactttcttctaaccatatatgattgttgccagattgtcatcttccaggacaataattattgtgcaagcttcatcggctccaaccgttgaggtgtggggcggcttttgctgtttttataggattttagtgcatatgaacttgcacgttcttcttatttactaaatagaggaaatggtgttttaaacagg

SEQ ID NO: 60641 - DNA, 295 bp, Populus trichocarpa
  Intron number 1 from transcript POPTR_0008s18080.1 (locus POPTR_0008s18080) derived from phytozome v7.0 (chr-ID scaf fold_8; pos 12117905 to 12118199)
gggatccttccaggtatccacttggattaacttgcctgttctgttcatcaagcatataattaacatgaaaaaatcacattgattttgagttttatttactcatcaatttgtttttgttgattaatttactaattacaagttggttctgttctagtaacctggtaaaagattgtccaaaagttacaaaaatatatatagctaatcaatttggtgacattaagatttttcaatagctctcttctccttctgttttaatgaagtagtcttccctgacttggtattgatatcagaacag

SEQ ID NO: 60642 - DNA, 1009 bp, Populus trichocarpa
  Intron number 1 from transcript POPTR_0008s06590.1 (locus POPTR_0008s06590) derived from phytozome v7.0 (chr-ID scaf fold_8; pos 3928108 to 3929116)
cacagcgattctcttgatcagttccttcctccagggtgcgtacaacttattgctagtagcagtaacagttaaatacccatgctttccatttttaataagttaattaaattttgtttaactacgaatctttattcaaggtttattcagatttggtaaagaaatgattttagtaattttcacttattgttaattaagaatgtgtcaggaagattaatttggttactcggattgacaagaaagtttcttggtttggcttaaacggggtaatatcagcaataaagcttttaattttacttgtatatgtactgaattgggaaagctcatccctttggagtacaagtaaagaagtcaaagaattaaatttatattctttgctatgaatcagattaaagtgttaaacaatgagaaatgacagtttagatgtaagaaattggacctgtttttgttccaaataaacagcagatttgggaaagtggcactcctcgatgtttggatgcttggattttgaaaagtaaagaggaattggttgtgatggaactgaatggttatggaaaaatcaactttaggggttcaaagttcgaacctgaaccagctgggtttgatttggtcattgcttcaatagaatactgatttcccttatcattataataatttttccatttttaagcttggttgtttggtgtttatgttgaagtttaagtaagtttgcattccctgagatgatttatgcattattagatatatcccttcatgaatataagtataattttttgttgtggaaatgcataataatgtctcaaggagtgaaaacatctatctgtagattttttttctttattttctagtcagaggttagaatatgcttggaactgccttattgatatctttaatactccgtgattaaaatggaagaaagaaagaaaagataattttgatactctgcatcctggcagagcttgttagttcatcattttgtttttgattatacatcttgtatacaggaaaggat

SEQ ID NO: 60643 - DNA, 714 bp, Populus trichocarpa
  Intron number 1 from transcript POPTR_0008s00400.1 (locus POPTR_0008s00400) derived from phytozome v7.0 (chr-ID scaf fold_8; pos 149786 to 150499 reverse strand)
gagagagataaagctatctatagatagatagataggtagcgattccttttttattattattattgtttcttcatcaattaattagcttcacagtagtaatcaatcaggttaacaaaattctttaatatttttttttaaatatggaatcgaattacggatggggtgattctttctttgcttctttcgttccaggaaatttcaagtctttacctttaccaattaatcagtagattagatctattttatcattgttattcccttaacaaatctcgtttggtttctgtttattgaattaatctgttgataacaataacaatgattaagatttgatttgataatagtaatcctgtagtaggatagaactataatccttttatcatcatgctgctgttgtgttgtattagcacataactaattaacaagtttacaattaacttatcattaatatgcccttaaaaccctagtcagtccttgtctccccttaatgaatgctttcttgtaattcattgtttctttcctttctattttaagttcttctctgaacatactgtcagtctgtactgtgtttttttttatcaatgatttatgtgctcagatgttttcgttcttcattttggtttcgatacagctgcatcatttagcttttatggtagagattttgaaatagtactaaattattcattgcttttcttaccaggctaacccgctgctgca

SEQ ID NO: 60644 - DNA, 655 bp, Populus trichocarpa
  Intron number 2 from transcript POPTR_0008s02670.1 (locus POPTR_0008s02670) derived from phytozome v7.0 (chr-ID scaf fold_8; pos 1351605 to 1352259 reverse strand)
gatttatcagggttctcctttctggtaatgttttaagcttttatattaccagaacttttgttctaagtttatcatcatgctttctcatctctagattttacagatgaaataatcatacattttacacgcacattacattacaattctcctcttgaaagcttgcgctgctttgaattgatacattttctgtgattgactcaaaggttctgaaagttgtttacagatggtccttcatataatggacgtgagtcactttcttgtctccccttatttcttgcaactttggacctgtctgactggattacaaaatacagtagcatagcagtctagtaaggatggtggaatatgattgcactatgcatatctagtgtgttgagtgggtactgtgaagtagcatagcagtcctgtccagtaaggattatgaaatatggtggaactatgcatatcaagtgcgttgagtgggttctgtgtgctgcattttctgtgttttgagccattgtgatgatcagctgtttggaatttgatgatttcttatgtcttctatgctcaaataaatctcttaaaaaagatttttgggatctattgtttattcctgttttattgattttgtgataagataggttgttggtggagtggaatctctttataaaggcgg

SEQ ID NO: 60645 - DNA, 855 bp, Populus trichocarpa
  Intron number 2 from transcript POPTR_0016s08790.1 (locus POPTR_0016s08790) derived from phytozome v7.0 (chr-ID scaf fold_16; pos 6580822 to 6581676 reverse strand)
gcagttgaagagttgaagtctgctgtttcttttcagtatgttaaactttataccttttttgttttcagttagagaagaacctcttttttttttttttggtatgcagatgctcattcttgttatgttcctgtatcataactctgttggttaagatgagtataaaaaattggggattttaggggaatgttagtgaaatgaaaataaatgccctgcatgtgttcgtggattcgtgggggtaatctttgatagatttttcgcagcttacaccctcccaaaacctatacctgttttcatactcttgttatcaatgatatgctaatcaggactatgctatcagccaggttttcttgagtaatgcatatcaatttccttcggggaataatttaataaactgactactaagtttcatgcctgtatataattcatggttgctcaaaataaagtagaagctagctttccattttaagaggatatgagagattgggtatagaagtatgaactataaaactttgagatatactgatcagtgatgaatgataaccatgtttgattaaactttgggaagctcgatgccataaactgttgctactgggaactgaattttcatatggaaatgtatcataaggatcaggaaaatgtttgaagaacatttgcttaatgttattgctaatgaatatatacgtatagcttcctaactgttctggcattgagagacatgaatccaagctctgttttcttcttctgttttcagcccatacctctccttttcataaacatgttgtgtcatcgaatctctaagtccttttggaatttgttttatatttctatgcttgaaccttcaggggaaaaggtgca

SEQ ID NO: 60646 - DNA, 945 bp, Populus trichocarpa
  Intron number 1 from transcript POPTR_0016s03930.1 (locus POPTR_0016s03930) derived from phytozome v7.0 (chr-ID scaf fold_16; pos 2195665 to 2196609)
aatctgaattcataagattagaagggcttcctgatgttaccgagtgtcgcacgtcattaaatccgcgtggcatcggctgacgatttttctttatgcgttttgctttgattggttcgttggagtcgccacctagtaatttattgagggctactaggaaacctgatgtactggtcttgtcagagattcacgggaaagggactggttgtggttagggaaggtattagcacccctaacgcaccctacctgaggtaagctgcttcgtggactggttgtggttagggaaggtattagcacccctaacgcaccctacctgaggtaagctgcttcgtggacttgatgtgtttttaaaaataaaattttagcccaattctaaggctttgataaatcagttattagttcccaaaatatatgtagatacatgttctacattttcatggaaaatacaacatgattttatctgtcctttagatatttgtgcatataaattaaaatattaaattcatttttttttattcaataacatacataagaaaaaatacacaaacacacacacatctctttttctattattattttctctttcttttcttttcttttcttttctttttgtacatcacattacaaaattataaaaaatttaaacactaaacaaaaattacattacataatttaaaaattaccaaatagtccctaaactccagaaattgcagagggacacttctggaactgcctgaacagttctggaacaatggcggcgcgtggcttcacacgccgccgctgacagtgccggaaatgggcggatctgccctgctttctccttttctcttctctgtcgatggtgacctgcacaatcaaccaaaaacgcaacacaggcagttgattttagttgtttttctttgttgttttttagatctgctctcgggttcttctcccggatctgtcccg

SEQ ID NO: 60647 - DNA, 501 bp, Populus trichocarpa
  Intron number 3 from transcript POPTR_0008s04920.2 (locus POPTR_0008s04920) derived from phytozome v7.0 (chr-ID scaf fold_8; pos 2846653 to 2847153)
ccccctcttgccactcctccggaatttgcctctgtgtaagcatctttcaccttcctttactatctccagcagtttgaatgcggatgtgatattgtttgtaaatctctttctctctctatcatcaaccactgattcttttttgttttctgtgcttaaatttacggtgctttctcctcgccgtttatgtggaaatggcagtgtgcaaaaattcttcatgtctcttatatttgttctcatttcatgataaatcatcataaaaaatcttcttactcgtagctttttttattcttcttccagggatgcattattgcaggacatgttttctaattattataacaacaaactgatctatgcttgaggttgttttcggatgtattttgtgtggtcatgcttcttttctcattggctgccactagaaggttattaacagagattaatttgcaatataaaccatgtggaactacaggggttcgaagatattcccatcttttgttaagttct

SEQ ID NO: 60648 - DNA, 849 bp, Populus trichocarpa
  Intron number 3 from transcript POPTR_0008s02930.1 (locus POPTR_0008s02930) derived from phytozome v7.0 (chr-ID scaf fold_8; pos 1512147 to 1512995)
attctagtgatttgcggttacgtgtatctgtgaaggtaactaaaaagcagcttccgattcggttttttacatgaagttaaagcttcttcaatctctttgctttgctctacggcttactatttattacttcaaccttttctttttggttcatttcttttaattttccaatctttttttatagttgtctgttagaaattctgaataacgtaatgctagttttatcgaaaatctttcttgaaagatctcgagggagagtctcaaccattagattcgtgggacctactagtgggacccacgatgagatattcattgtgggatttttctgtgaatttttttttcccgggaagaaactttctgtagaatcttgtattactgacaagaattcacatattagatattttggagtttaagggtttttttggtacgtgtttaggagatatttttgaacttagtattgattaatattccttgtccttctttttgtcctttcttataaagtttgcgtttcttaatgatataatttttgttttttgattgtgacgttgaataattcctagagcaaattaaagtgatcccatgaatcaagaggcgggaattgattcgtgttgcaccttttgctgtgtgcgtggtttgacagccaaaagctaatataatcagtagtttcgatgataactaaatgattcgggcgataattgattaattgttttgtttctgataatgaatgcgttcttctgagtggttcatctgctgcagtttgttgagtttcaaaattaaaatcttttctaatagatgattgttatttgatgctgttgcctgtaggcaattcccagctcaccatccagtgctgag

SEQ ID NO: 60649 - DNA, 518 bp, Populus trichocarpa
  Intron number 2 from transcript POPTR_0016s02310.1 (locus POPTR_0016s02310) derived from phytozome v7.0 (chr-ID scaf fold_16; pos 1120729 to 1121246)
gcatttgttgcaaaagacacaatctggggctcttggtaaattaacgtttttgaattctttttgttttttacataatttgagataggaaattatcattttttcgctcagtggaggtgggttttaagcttggaatgtttgtattggcaatattgcagtcaattaaggttctagtggggtgtgtagattgagtggttgtggcgtggcgggtgatttatgatggacaaatgcaaagataactaattttcatgagaagtttgtaaatgggtttcgataaaagatgtgttaaattcatataaatgatcattcttagctttgtttgtggtggatcataatgtaagagaaattcttgaacttaaaccatttattgcaatcatgcatgcaatattgtatctaggaaacgaaaaggagtgtttattgaatctagattcagtgtttgtactgtcttttgagtgttagttttacaatgttggttttgcttcttcttgtttcttgtagtttccgtcattgggctagttata

SEQ ID NO: 60650 - DNA, 1010 bp, Populus trichocarpa
  Intron number 1 from transcript POPTR_0008s18190.1 (locus POPTR_0008s18190) derived from phytozome v7.0 (chr-ID scaf fold_8; pos 12189199 to 12190208)
ctgctactaaagggtgagcatatatgccataggcatcgataatccctcttctttttccagtactgattttcaattttaaacacaaaattttattttttctattctgtcttttgattttgataataagcattcaaggggaggggaaaaaaaacgagatttaaaagggaagccttgaattaatgtataaaacaagctcctatagataacaaaaaattaaagtttaattaagcgactaaatagttaattaagggcagcacataaaaaagaaaaaagacttttaggtgtacttttgaggttggccaaatttggaggtttggtaggttagtgtattaattaaaaagattattaatttacttcaaccacccacaattataatacaattaagaacacaattaaaattgtgcttaattaatgctcaattaatgctctaaaactacaaacatatttattagagaaatagaaaaataaacataataatttaaaaataaatttatatcattttaaaataaaaaatatatgaatatatatatatatagtaattaaatgctacttaaaatcaagtgcttggctgaaatcaaatgggttaccatccttggtattttttatttttttctcacgtggatttattatttgcttaaatcaaatgaagtatgattatatataccaagtaattatatttatggcaagtttataatgtctagtttattatttaatttaaaaatgtataatgtaattatttttactggaaaaaatatgtctatataattactcacatatatattccagcatgtaaattccagaaatattctaagtagttatgatataaaaaaaatattttgaaaaaaaaatattaataatgaaaatctaagtcaaatagatagattttttttatggataaagaaactagatttattagaatttaatgggccgttcaattattaataattaatgacctaactaatattatttgagctgctgagtccttgcagttacattgatcaattatcaag

SEQ ID NO: 60651 - DNA, 758 bp, Populus trichocarpa
  Intron number 1 from transcript POPTR_0008s18050.1 (locus POPTR_0008s18050) derived from phytozome v7.0 (chr-ID scaf fold_8; pos 12103138 to 12103895)
ctctggcagtagagatctgtatatgaagtgtcatttttgcttctgtttcctggcccttgtctggattttgccacatgtacttatttcaacagtgggccatgtgtgattataagttccatatcagtggtagccttgaaattagacttggcaaaaatgatggtatgtgtgccaattatggtatcatgagtgataacaatgacggacggtatcacatgggagtagttattaatttggtggctctacaggtgttgttagggtgattgagtggtgggtggcgactaggttatgtgctggcagttgcgtaggtgtgcagtaaagcagtcatggtgtgaaggtgataatttcagattgtgcttgcagcatttgttatttttaattcctaaatgtaacgcctgtggagattggttacattgtcatgtaaactagtttctgtggaactgtttttgatcctctcttcttagtttgggaattgctatatcagtggcagggtcacctttttttggaattaatttcttcattgctgaattaatttcctctcagctgaggcttcttcttgaggaggctctgtaatgatgtctgctcttattgtaaagtcatgattatcttctgttttaccattttcttctcaaaaaaaagtattctgattttggtcgacctcttataattcccgcatcattcacagcaattcctaactcaaaggtgagtttactgattcttgctcttacaggtggccgaaagggctttgtacttgtggaaca

SEQ ID NO: 60652 - DNA, 277 bp, Populus trichocarpa
  Intron number 2 from transcript POPTR_0008s19610.1 (locus POPTR_0008s19610) derived from phytozome v7.0 (chr-ID scaf fold_8; pos 13508683 to 13508959 reverse strand)
ggagatctagtctctttgatattaccactgatacagtaagctataatctcaactccaattagaactggttctttgtaccaagaaaaatcttgtacaaaaaaattgttcaaaaacttaatttattaatttggtttttttttaaacgattcttctctccatcaatttaaaaaagggaaagaacaaaattaaagactttgattttattctatctgctggtgatacattttttagactttatacaatattacaattaatttatcttttggatttacagttc

SEQ ID NO: 60653 - DNA, 618 bp, Populus trichocarpa
  Intron number 1 from transcript POPTR_0008s20750.1 (locus POPTR_0008s20750) derived from phytozome v7.0 (chr-ID scaf fold_8; pos 14728936 to 14729553)
gatctaaatcctgcacgcgtaagcaatccaactctccttgatatgcatgagcctagctagctacacttcttgcatcttgcataattccattgattcctgccaattaaattccaaaatcatttacaatctcgttatagactataagacatactgtcttagcagagaaactaaggtagcgttcggttgctgtctaaggatagaaaagatgaaaacaattaggacaaatgagacatatcctttctatccttccctatttcggaaggatataaattcactccacaaaaatatacaggtgatgggatataatcgaaacaaatacatctacaagaggatactaagaatacaccagatttcgacatattgatcctcacatttttctgtcagcaacattttcatgtaactgcttgaaacagtaaattatgctagtataaatcgcaagtccaagttcaagtacccaaaatgttgttaaaaacattattttcaactacaaatcttatgtccattttcgcagccgaccagtttgattgaaagctcttctttctgctgaccctgcattcggaatgttttgctgtatctaaaacgtgtaagctccattatgatctgcaggttttagcagag

SEQ ID NO: 60654 - DNA, 577 bp, Populus trichocarpa
  Intron number 1 from transcript POPTR_0016s00760.1 (locus POPTR_0016s00760) derived from phytozome v7.0 (chr-ID scaf fold_16; pos 280256 to 280832 reverse strand)
aatttaggtaaagtttagattttttttttgttagttaattattttttctttttttattttgctttctgcaaagttttttttcatttattattaatctttagtcattttgataatatttaagattgacccttttttgaagatattaagaaaagggttatggtaatttttaaggtatagtttgcttagaatgttaggtaatgcaatagtacattgagacagtttgatgtttctaattaaggtaaggaagtgggcaatttgtatgtttacgtaatagtgattagtttgacgtttcttattaaggtagggaagtgggcaatgtgtatgtttatgcaatagtgatcaggttgatgttttcggatgatcgtgatccaaatgcatatgctgtttgtgtggggttgaggattgctatgatggtagaaattattggctctttgataagttgagggacagattgattcaagagtgtaaaccaaaccacctgggattgtgttagtgcagtagtagtcgtagtagtagtctagatccaacaagtgttatttggaaactgagttaatgtggttttgtttgttttcagctt

SEQ ID NO: 60655 - DNA, 663 bp, Populus trichocarpa
  Intron number 1 from transcript POPTR_0008s15740.1 (locus POPTR_0008s15740) derived from phytozome v7.0 (chr-ID scaf fold_8; pos 10494179 to 10494841)
atttctctagctttgttaggcagcttaacacatatgtaagtactttttccttataaccttcagatttatcaacttaatttaagtaggaaaacaattaagggagtgatggatattggtttttttggattagtatcttcctgtaattttaagtgggctctctttctagatgtgactccttggtttgttcaagaacatgctagaaattcatagctttctcttttttttcaaaaaaaaaatattattcttttcagaaaagatctaatcggtcccttttttgtccaatttattaatttaatcggacattttgcttgtttgatatatagtttgaaaagggccactgctgagatcaaatacataaaataatatacaaagctattattaggttgttaagcatttgtagtgtttccacatttggtttgttcaaaaaattatgactgtttgatgaatggaatggaagttcattaaaaactcaacctctctaaacccctgataattgctcataaattttagttcatcccttgtagctcttgaaaactgttgttgagagtgcagatagtactagcttacaattcattttttggttatcttagccttttttttggaattgatcaaagaggatgggatttggattgtgtaggggtttagaaaggttgatccagatag

SEQ ID NO: 60656 - DNA, 580 bp, Populus trichocarpa
  Intron number 2 from transcript POPTR_0008s21180.1 (locus POPTR_0008s21180) derived from phytozome v7.0 (chr-ID scaf fold_8; pos 15349051 to 15349630 reverse strand)
ggtaaaggttttcaggtctatttctatttctcctttagtcatcttccttttgctttcattttagcctatacgttttccctttccttcttagtgtgttcttgttgcacctgtttaagcttgaaaatgagtttttactagaatcaggaagtttgaatgagattacccaacatttttctttgtagtagggtatcacttgattaacataatttaactatctgactatattgaaaattttacgaggtcgttgaggaattttcttaccttgttatttgtgcattgctattatcataatgacagccagtttgctttgttcaatggcattagaatgagtagttcatcggtttcttaggtccaaagcttatgcttgtgattatgtctgcgaaagcatgttctttttcatgttttttttttatattattattattacatgtgatgaattgtacacgttacaagaaaaatcccttttcacaagttcgaggaattctcttgtttaaaattcttgttaattcagagtgagaagaaaaggtttaggatttatttgtcatggatatttactgttttgttttctatatagggtggt

SEQ ID NO: 60657 - DNA, 997 bp, Populus trichocarpa
  Intron number 2 from transcript POPTR_0008s19940.1 (locus POPTR_0008s19940) derived from phytozome v7.0 (chr-ID scaf fold_8; pos 13777267 to 13778263 reverse strand)
agttcactgtcactacttatacctcaactggagttgtaattttctctccttttccttttattttttttattaattatatattttttttaaattgtggtattgatgttcttttttaattaacggactgcccagatgaatcctcatgtttttttccccctttatattccatgtagaagttgtaatgttaggcctaggaaaacagttaagttgaataatttttttattgatgagaaatgaattggtcaatctccattgttaagtgctggacgattaatttctttgcacttagagcctgtttttgtgtttcaaatgcatttttgaaaaaaattgaattttttttattttttttctttgcttcaaattgtttttcctgtgtttttttaaattgttttgatatgttgatataaaaaataaaaaaaatattttcatgcatttccaagcgaaaattattttgaaaaacaaccgttaccataataccaaactggctcttagcagcaggatttggattctatattattttgataattttatttgcatttatggattttttgctcagcatgtcgttttggctgatttaattgagctgtttgtacgattcacaaacagtaaaggaaaattaagcaacaaccatgtgtgtgtagccttgaaaataaaaggaaacactgccgcgattataattgcattgatttgtttagtttaccatgattaattctttcgcaattatggtatcggtgatatggcatatgggtttcgaattggcgcgagactctttaactcgttaaatattacacctgagaatggaccatctgttttggatgtgcagatgtgaaatcctttagattggatatttagtttcgatgtcttctatcaagttaattgcattgaagcatatgttcttgtttcttttgaaaacaaccttctataatattatcatctgacattatatttatttcgcattccaggcactcacttcaactgggatcaagaaaggtgagct

SEQ ID NO: 60658 - DNA, 608 bp, Populus trichocarpa
  Intron number 3 from transcript POPTR_0016s14240.1 (locus POPTR_0016s14240) derived from phytozome v7.0 (chr-ID scaf fold_16; pos 13494494 to 13495101)
ggattatacacagagatcttaagccaggtattgtaagaatatgttcaaggatttactttttaacgtttatgttggtgtcaaaatttagagttcaaagttcatttatggttagcattataatgtggatacatttgaatattactatgatcaggccttgcactagccttttatcaaaaagagcatgtatttggaatcatgcaacctttatttatcacctctatgattctgcgattgggaaagtgacattctattaaggtctgtgattttaaatttttgggataatgtcatcttgattgctgttttttagtcttatgactttgttctgcgtttaattcaattaggccatgggcactgcatgatatttgagtccagttcctttttaggtcttctaaattgttctgtaattgacctttgcatcttgagtcagggttaatgatgcttgtgactttcatgttgtttgtgctgtcaaaaaagaatttttttttcctggaccacattgcacccctcaagtaatttataatcactgtctatccctttcaccaaaatgattggaaagcctttttcctgatgcagacaatttgttgcttacggcaaatcagaagtctgtg

SEQ ID NO: 60659 - DNA, 542 bp, Populus trichocarpa
  Intron number 2 from transcript POPTR_0008s11020.1 (locus POPTR_0008s11020) derived from phytozome v7.0 (chr-ID scaf fold_8; pos 6952208 to 6952749)
cctctattgattgcagaatctcttgtggtataactgacaattccaactctggcttctgaggatagccgattttccaaatttacgtcatttaattaaagatataatataatgtcaccttttcttatcctcatttaaatctgcatatgcacttaccattaggactcgtatccatatttttgctctcgtgactcggaacatgatagttcacgcacaacacaagtacatttgacacttaatgtttcaattcctatgctgtttgaaatatgggccataaaagatcagtactagaagaaaagtaccctcaggcatcataatcaaaatttagcaaataggaattgttaaacttgtaaaactgtagcagagaaaaacaaatagaaatagcttaattaagtgggactggtattagcattaatgtgcaagagtttattttatttctttaacttaaaataatctgatatcagcaaaatcatgatctctattctgtatcaatttttttcttggctgcagaggaagattcagtgacagacagaatagaacaagaa

SEQ ID NO: 60660 - DNA, 681 bp, Populus trichocarpa
  Intron number 2 from transcript POPTR_0008s13980.1 (locus POPTR_0008s13980) derived from phytozome v7.0 (chr-ID scaf fold_8; pos 9223475 to 9224155)
ggtcattcttgtgactgtggccgtgtcttttccaggttctcttctatttgttcataattaaccctaacagaacacccctccccccctcccaagcataaaagggcatgccttacctttcaaggaatttcatgttatttttggttttatgatgatgatcccacaagagcaattcaagcctgtttttattttactaaataaatacatgtgtggatgtactaaatccaagaacgatttccattccagtactgcatgacttcatatttgcccatgtaagcgatctaggccaaccaatgtaagttgaaggagcagtgcatcactgctcaccaaaacagttttcattggctaaatataagtataacccaattacttataaaacagaaacaaactgtgcgcactcatttgcacacacagcccacatcccccccttttttaaggctacgtgtatttaatatatcaaacctagttagtcatatggtcaattgtacagatcctaaatcaattttataatgcttgtttcttagcatccctacacgttgaagccttaattatgcctagctgtaattgacaactttgtttatcaaaagacatcaagaataatcccacatcattaaacttaattatcactttgaatcattccaatttcttgtcttttcagggtggagagtttcattgagcaccaag

SEQ ID NO: 60661 - DNA, 749 bp, Populus trichocarpa
  Intron number 2 from transcript POPTR_0002s19150.1 (locus POPTR_0002s19150) derived from phytozome v7.0 (chr-ID scaf fold_2; pos 15076192 to 15076940 reverse strand)
tggattaacaattctgttaattattttataggtacgtagttggcaaagtatgagataataaaggaagtttgggatcatctgcaaaggtttttcatgcaatcaaattttgcaaatcaatatcaattagataatgacatacgagctcttcatgagaaaaatatcagttttcaagagttttattttgctatgaaggatctttggtattaattgactgttacagaatcggcaaaattaaaggcatgtggtgcctatattactaatagagagcagcaatgattggtataatttttaacggcacttcacagtgattttgaaggacttagaggttcaattttgcatcgttcttcattgccttctgtgaactctgttgtgagtgagttattgcttgaagaaatacgtcttcagtcttattctaaaaagaaaattctttttgcttttaatctttctatactagcaataccctttaagtcattctctaataatcaaaataagccttacacaagggttgcctttgacgagtgcagtttctgtattcacaaaagtcattagaaggcttaatgtcccaaattgaaacaatagaatcaagctttaaaatctagtagtcagtcacaatttaatgctcatggacaaccttacggttataaaccatcacactataatactgtatcaataatttcatcaagttctatcatagccctgatactttagctgaataattttagaaatttctctccttacagccacaagca

SEQ ID NO: 60662 - DNA, 808 bp, Populus trichocarpa
  Intron number 1 from transcript POPTR_0008s20690.1 (locus POPTR_0008s20690) derived from phytozome v7.0 (chr-ID scaf fold_8; pos 14599365 to 14600172)
ctgtttttgccttcttcactctccctgttgaaaaggtttcgatttttcttctcccctttctctctttaagctttctcttttcttttctgtgtccgatggcgcgtcttttgatgtgggtttctttgtttttgcgttggatttgtggggtttctttgatacatggcgtattggtttcttttagtggtgatgcaattgtggggggttttacttttagggaaagttgtggtctttcgtgtctgtttgtggaatttcttggaaattgaggttattagggtgtgtttctgtgcaatgtgattgtgtcccagattcatttttatgtaggcatatgtgattttgaactgaatctgattcttcgttcaatgtttgaactgctgggacactcaccggtttttttgccggctgatcagagacaaaagatggttgctttatcgaggtttataaatatgtgttctgttgttatggatagggttcggtattgattcagattagttcttacttagtatttaactgtaatgtgatctttattctctctgctatcatctcagtttggctgtttattttgatgtggggaaatgtggtgaggttcgattgcaggaactggactttgttctgaacaagtagattcattgtcttgcactagtggatatttttttcccaagtctcacattgagtgtctttggcctgtgatcatctcaccggttttgttaaattttgccgatgatgattgattatgctttatactgattatgcttgcatttgtgtatttaccggagagcttttccttgcagattttgaaggatttcttgtt

SEQ ID NO: 60663 - DNA, 496 bp, Populus trichocarpa
  Intron number 1 from transcript POPTR_0016s14630.1 (locus POPTR_0016s14630) derived from phytozome v7.0 (chr-ID scaf fold_16; pos 13803784 to 13804279 reverse strand)
aatcttctggtatgttttggatttttttttaccagttttgttcccggagatgccctcggtggttttctgcgtttcttgcaattcttccatggagatgctcgaatgaagaagatgatggtttggtcattttgttgatgaatgagagctttggaaatgaaaacgatgttatatttaatgaacactatacttataatcaaagaaacaggaaaagaaatgcaaacggtgccgtttcttttgctagcaaagaactatttccttttcttttgtgcctagatttaatggatttgattcattatttattggttttgaatttacatttatggtgattttcatctgggattttcttaaattcccattttgatttagccagctcagaatcttgcttgtctactttcttttttgtttgtggggacgaaaatatgtgatggccttatgatttgatgtggggttattggttacagtttcagtgaaattggggagactttcagttggatca

SEQ ID NO: 60664 - DNA, 637 bp, Populus trichocarpa
  Intron number 1 from transcript POPTR_0008s07930.1 (locus POPTR_0008s07930) derived from phytozome v7.0 (chr-ID scaf fold_8; pos 4889697 to 4890333 reverse strand)
aaaccagtaattataggggacagatcctgaaaagggtaacctttccaatttctaaagttctatatgcagaaactcttctcccagcacatttatttgaagttgtcagcttgccatttcttgtgttcttcttactttttttgtttccttaaatttcatttctttacttttttgagatcccatcttctaggtaagtcacccccaaaccctaatatcaggcatcgcagccgcatccccacttgtgcctgcagctttaagattgttttaatttgtatttcatcctctaacaattcattttattttttttgttaaccttaattgggttgtattttgtgcttcacctagctagatactaggcttgttattgattttccctttatgatctaattttatgtcaaaattaaggacaagctcctcaaatttctcttgttaagtcgaagttggggttagctgattattgctacctcaagccgcacgtacgttatggtatttaatatagcttgttgttcacacagaaaatcgacatctttattcttcatttattttttcattttatttatgcaatattagatttttattaatttgatggtgtttttttttctcggtttttcattgcatttcagaggaggagaaggtggaa

SEQ ID NO: 60665 - DNA, 599 bp, Populus trichocarpa
  Intron number 1 from transcript POPTR_0016s05480.1 (locus POPTR_0016s05480) derived from phytozome v7.0 (chr-ID scaf fold_16; pos 3404822 to 3405420)
ctcgacagaaacaacagtggtaaaaaagattatactattgatcttcccccgccctcaatttcacagaagacccaactgcttgactaataaaactatgtttatgcctcttggttgatatatatatatatatatatatatatatatatatatatatatatatatatatatatatatatatatataaaccttaattttgatctgcaacacgacaaccgaagaagaacttaattttgatctgcaacacgacaaccgaagaagaacctaattcctcatctgtctagcaaagtagattcaatagaccgtaggatctcttaggatcaatctttctatgtgacttcgcgagaagagatttttttcacattgcctttgcaagccttttaaaattatattttttcacattgcctttgcaagccttttaaaattatattttctgatatatataattaaaaccaattaacctatgtaaaaaacctcaagataaacgaaagtaatgtggaactcaaccacaaatatctgcatgtgaggttacacacgtatttacgtgtctattttattttacaaaaaatggcaagaaattgattttcaagttgcctttgagg

SEQ ID NO: 60666 - DNA, 573 bp, Populus trichocarpa
  Intron number 2 from transcript POPTR_0016s05480.1 (locus POPTR_0016s05480) derived from phytozome v7.0 (chr-ID scaf fold_16; pos 3405586 to 3406158)
tacgttcacataaagaacaaacaggtaagaagcaggttcagttcatagctgttttaactgccttacaaatctcccattttccttttcgacagtacattgaaagttgcaatattatcatattttctccagaaaatggattttttatagggttgatcatcagatgagatactgtggaaagagatccttttctttttagtactctctctctctctccattacttgaaatcaaactttttttggacttttttttatgtaaaaaacatttttagtcaaaataaagaatgaaggaaacaactccagatgatcgcatgcattcacctatagcctaggctacagttgtaaacttcatgccacaggagctttttttggacatattttcaatataagattcatttttagtcaaataaagaatgaaggaaaccactccagatgatcccgtgcattcacctataggctaatacaagatacaaggaagaattaatatcttgtcatgttactcctgtttacataacggcttccatttatctttttaatgcagtggttcttgatatccccttggattatagcctggat

SEQ ID NO: 60667 - DNA, 397 bp, Populus trichocarpa
  Intron number 2 from transcript POPTR_0008s06640.1 (locus POPTR_0008s06640) derived from phytozome v7.0 (chr-ID scaf fold_8; pos 3978769 to 3979165)
ataataaggttattgctacctcttttcttttcttctgtttatatatatacaaatacaataataacatgcaatgttagctagattctaccgtttatctggttaattagttagtttggtgcgtctttgatttgatttaaagttattgaatttaacttaggaggtgaagtaacatatgatccctttcacatgctttggttgagttatagatttagttttgaatcccatttcatgaaattggatatcttactttggatgtgtgggaattggaatacaaatccaagatcaataacttgagagttatagatttagtttcatgttaatgttttttttttgcattcacatacgtgggatttatttaactttgaatttgttaaatgtatctaggaaaaagaagtgc

SEQ ID NO: 60668 - DNA, 406 bp, Populus trichocarpa
  Intron number 1 from transcript POPTR_0002s12250.1 (locus POPTR_0002s12250) derived from phytozome v7.0 (chr-ID scaf fold_2; pos 9085884 to 9086289)
ttccattcatatcacagtaggcagtttaactcaaggttctcaattccgttccggtttacgttttgttttttcaattgaaatgacatgtttcgctttcaaagcatttcaacatgccgttttgggattgtactgtttatatgtgtgtataattcaaaatattaattcaacaaacataatttcaattcaaattgaaagataaactaacttgaaattatgcttttcaaattttaaacacaagtaaaaaaaatgggagttgaatcaatatgactcgatcaactaaatgagtttgaagatagtctgaacgattggtaaaaatatagtttgactaaaacaaattcaagattacatattttttcttaaaaaatattaagacgagaatatattggatcgattcaggttaaatttt

SEQ ID NO: 60669 - DNA, 729 bp, Populus trichocarpa
  Intron number 1 from transcript POPTR_0002s15910.1 (locus POPTR_0002s15910) derived from phytozome v7.0 (chr-ID scaf fold_2; pos 11857607 to 11858335)
tatcgagcaacgactcttactgcagctgaagtcaagtagctaattaatcttcctcaagacctcagagtatctccatccttgcctcctgtcctgttttgtgataataaaagttctatttttcttgttgtcaattctgtaacacttaaacgttctaaacacattgatctatattatcacgttgttagagaacgggtggctttgggaaaactacgggtttgctacgttccaactgatctttagattgtagacatgttctgttatagaaggaccaacaaaatcctattcagattatgtttgcaacaactccttgattatatgagataaccatagatagctagatttgaatgtgttttgctatatctataactctacaactccagtataaataaaactagagtaccacagaaaaggcagtgtggtgatttcataatcctttcagctacattctttgaactcttgctaccttttttcagctgactgttccccatatagatgtttgcgtatatatacaagctagggtgaatttatgtttctgttcatgcaaatgggataattgaatcctggaactcttctttcttcttagtgagtttggttgcttatatgcggtatagacccttgtgcactttgtaattaactcttgcaagtgttgcatcaatgacattcaggtgggcggccattgcttctcaactaccagggagaacagataacgagatcaagaacttgtggaat

SEQ ID NO: 60670 - DNA, 670 bp, Populus trichocarpa
  Intron number 3 from transcript POPTR_0002s24800.2 (locus POPTR_0002s24800) derived from phytozome v7.0 (chr-ID scaf fold_2; pos 22057659 to 22058328 reverse strand)
aatgtgagttctagcttgttttatacacatccatgtaaagttgtttaaggtagttggactgtgttttctttttgtcagatttgggaaacataatatttgtctcttgcttgcaaaatgaagcagaaaaatggctaatttctcatctcagttagatttgtttattgaacctgaagaaagagacagactgtcactttctgtcttaaatattgatttctattagaggatcagataaatgctatgagaatttctctgggacacaatagcttgtccagtgtttcatggagtacttttggggtatttgaaagagttgctttagccgataatcaataagattggaaagcctttcatctagatttgattttattccttggatgatgccttatctttcttttttttgtaattaaaactttttctcctttcaataatttctccctctccttttacacacacacatggtttatttcaattacctatttcagcaattaagaacattactgcagaattttttaactgaaatgtcctttaatgtcccctggatgtcatgcttaatgtttagccactcagcacccttctgtaactgcagaagttgaatgcccacaaacttctccctgctagttctcttgataatgagagttgaatttgttgtctgtaaatgtggggcaggctatta

SEQ ID NO: 60671 - DNA, 711 bp, Populus trichocarpa
  Intron number 3 from transcript POPTR_0002s00280.1 (locus POPTR_0002s00280) derived from phytozome v7.0 (chr-ID scaf fold_2; pos 45931 to 46641)
gtttagctgttttgtctacctctttgcaacagattgtgagtatttttttagcattcccttcgctttattattaaataccttgattcctttttccctataactcccatcctattcttcatgcaccctcttttaaaagcacaaattcatgacatttgaacttcgatgttttttagatcatgtaaattattttgatttagcctataactagatgcttcttgtgggaaatgaattcctggaatgcactagcttgtgagatagaggtcaaggattctaatgattagtaaatagggaatcaaaaccttttaatttttagatatgtttaacgtattggcttcggttatgataaagtgagaaagaggagcaggtacattctcatgaacaaatatgcatgggttgtctctaatgcactgtgggctaacaggaagagcttcaacaaaggtggaaatttttttttgcttaaggttctgaaagaaaatatgcacgatgtgcaagagtcatagccttctatattaactgttttcgagccatgatactgagtgtactgatactgaatgaaggtgtggaatgtagtctgatgagcacgatatcaaagcacattgtcccaaaatacagtgttacatcttgataatgtttgtggaacaaattttcattcatttcatttttctttgcggaacagactatcggttccttgcagaagaagtactcaattgg

SEQ ID NO: 60672 - DNA, 475 bp, Populus trichocarpa
  Intron number 1 from transcript POPTR_0008s15860.1 (locus POPTR_0008s15860) derived from phytozome v7.0 (chr-ID scaf fold_8; pos 10576692 to 10577166 reverse strand)
atgtaagctccattctttgaatgcaatgaaggaaagatgttgtcttttgtttcttttcttttttcctcccagttttttcttttgaatttgtgatattcaccatctgggcccttaatctgacactgagcctacagataattccgcccccccccacccaccgtttccgtctcttggatgggttcctacagtattgaacatggctgttaatatacgctgctttggaatatttaagtttataatttctttgctgaagaaaatttgtggccctaaatctgacagcggaagtgtttatacttttgttttttcttatcttttgctgctgcattgcagatgaaattgaataggttctgcttctacttctgttgtgttaaatttggccgttaacttgttctttttgcttgttgcctcttttcatcatctgttccttctgatgcttgcaggttaccataactcctgaagtggcatcaagaactat

SEQ ID NO: 60673 - DNA, 525 bp, Populus trichocarpa
  Intron number 1 from transcript POPTR_0025s00590.1 (locus POPTR_0025s00590) derived from phytozome v7.0 (chr-ID scaf fold_25; pos 286369 to 286893)
aatacaacgtatgtgatctgggttttgagttcgattctgtgcatgacatgatcttttttggtcttttgttgcctctgattttgatcttttattgctcttgttagaggtgttttgtttttttcatatatatgtaaaggtaaagaaggaaagtgctgatcttgtcaacatggtagcagccatcttgttcttcttgtatttatttgtttgttgtttttcttttttttttctctgtctctctgagttaccaatcatttctttttcatttttcatgtaaaatgatgaattctttaatttccactttcatttctgttttcttcttcttttttctttttcattcaatcattttttcctcttttcaaggccctttccctatctctcctctttgttttaatggtgattttttttctcttgacttggacaattcctctgctaaaaaaggcctctagttaattacatgtcattgcttttgtgattataatttaaacttaagaggttaggatttgtggttacagataatcgtgaagg

SEQ ID NO: 60674 - DNA, 926 bp, Populus trichocarpa
  Intron number 1 from transcript POPTR_0002s05780.1 (locus POPTR_0002s05780) derived from phytozome v7.0 (chr-ID scaf fold_2; pos 3793629 to 3794554 reverse strand)
ccaagaccttttacctgggtatttgctctctcgtgctatccctccctctctttctctcttcttcttgtttgtgtttgcttacaattcatagttatcagagggcttgcttaacttattgttttactaataaagacgaagtaaagtttttatttaaaaaatgaagtgaactggtttcaaggatataaatattgtcgtcaaacatgaaagttacaattctacagttagaatctgaccatgttagcctttcaaaacttagcagtttgcacatggcaagagatcaattgactattacaatataacactttttatctgtttaattatctatcttccatatctttttcatatttatactaaattttttatttccttgaagattagccctttgttgctacttgctaagataacgaaaggaaaataagaaaagttcaattgctttgcttttctactttccgtctgtgcttctttctcttgttgtggaaacgattgaaaaggctaatggcggagaaataaagaaggttgaaaagggctctatagagtgacaacattatcatgggattatactaaagataatgatttcagcacagataatgttcccttttattattttttatgggagctcattaaatctaaattgaatctaacatacatgatttattacatgataaaaataataatgacttaattcttacaattttatttctctcacaaacacacatgattcattgaattcaaaactaattgtgagatattgaatatgacgagtaatgctgccaagggggatttggatggggaacatgagagtgttcgaatcggcggggaattaggaactgaaatgtcaagttaataatgatggtcaaatgggaataaaattttgtgttataatcaagtttcttacctgcaatattccaatttcaggcacattactg

SEQ ID NO: 60675 - DNA, 602 bp, Populus trichocarpa
  Intron number 1 from transcript POPTR_0008s10610.1 (locus POPTR_0008s10610) derived from phytozome v7.0 (chr-ID scaf fold_8; pos 6643954 to 6644555)
gcttgtacgtactctatttactctcttttatctttgcacttaacagtccaatcgatcacaatgatgttctttttgtttgcagtggttagctgtagttatgggcatatggttgacagtctgtatggcaaatcttttaagtcttttacatcaaaatcaaaataagtttgtatattggtaggaatttgtatattggttagtggcaactttttcagtcagtagatcttattaatttggggtatttatagcgtcttccccatttatccatccttaatttggtctctagaaaaggtcctaagagaattcttttgtattggtatatgattggtcctataatagctgctacatagatttttgcatgcaatatctttaacagaaatatgatatatgcaatatctaatataccaaataaatcttattgtatataatgattcttgctgttggtttcttatgatcatgtctctaacaccttttaagcagagtgtttgttgttgagcaatttagatttattcttcttttatgcccatgcctaaacagtgttgacgtaactagacataaaattacgtacaggggcaagattacatatttgttagagagtttgttcc

SEQ ID NO: 60676 - DNA, 842 bp, Populus trichocarpa
  Intron number 1 from transcript POPTR_0002s16810.2 (locus POPTR_0002s16810) derived from phytozome v7.0 (chr-ID scaf fold_2; pos 12561665 to 12562506)
gctgggaagatagagtgttggtggccttaaacgaggtaaggggcttgatttcttggaagttctcttcttttttgtctgttcctggaaatctttaatgggtttatagtgatctatttgtgtgctttaattttagtttcgaagtggggttttgatgttttgattgatagataagcatggcctaatcttacctaacatcatttttgttttttattggctcaccacagcagttttagtagggtttgataaccatgaaaaaaggctgtttttgtgttgaaagaaacacaagttggtgtctttttttagatcaattgattcatttacatgttatcctctttaaatgccgttggccttttgaagcaacaatctttttttttattaatgtgggatacatccatccatggatgtcgtttcaaatccagaggattaaaatttgctctgcatttgatttggtaaccggtctgtcaggttttttaatttcactgtatttccttccgggtataaagtaacgtgttaagtaatctatatgggcctgcttggttctccgcaagctgagtaccatattgatcatgctaaaaatgtatgctttcatgttcacttgttccttgtatgacaaaatctaggcttttttttatcatatttgttgggccggtgatgctgggagttttgcagttttttttttcgtgagatttttgttaatagttggactttactctgggtctgtggttggatattttaaagatgaatttatataacctgaaatatgtggaaggatgacagcatatgatcctgttcctactaactttgcaggtgcccttaagaccatcactatagggtcttgtttt

SEQ ID NO: 60677 - DNA, 518 bp, Populus trichocarpa
  Intron number 2 from transcript POPTR_0002s16810.2 (locus POPTR_0002s16810) derived from phytozome v7.0 (chr-ID scaf fold_2; pos 12562529 to 12563046)
tagagcgacagtgaacttgaaggttgattcttgtcttcctgtaagttagttgaattatgttttgatttctgttctttgatgtcttatgtttgaggtttcagaatcattattctctcaacagtaggggaaacattggggttttgtatctctgaatctggaagtggtgttagttttagatactgttagctttctgcagcacatcaagacttgttcttttgttttttcatttgtgaattctagtatcgttcaacgttcataactttcagattgattgccatgtatttcaatctctagattttattctttatcatgtttggtggtttaactcaatgagctataattgggatctcccaaggtttagtgcatttttaggttatattaactcatatttggcaacaaggaggtttatcttttattcccattaatcttcatttcaaaattattttgtctctttcattttcatctctcgccatctttgttgtcccagatcttttttgatcgtgtcttctattttcatc

SEQ ID NO: 60678 - DNA, 755 bp, Populus trichocarpa
  Intron number 1 from transcript POPTR_0002s06340.1 (locus POPTR_0002s06340) derived from phytozome v7.0 (chr-ID scaf fold_2; pos 4225531 to 4226285)
tcaatttcagcaatcctcaaggtaattttcttcccatttatacgactgtttggcccttgttttgttgtttactctgtgatagcaatctgttttcacgtgttagtcaatgtgtgagtgcatgcatcagttttttcattaaattttatatatttttattgtcctgcagtttttctcgttgttaattcgagtgttttttgttgttgttttgatcagcttgtgtgttttttaatttttttgagtgtgtggtgccaatgtttttgtagtgtcctatttattaagatcaatctggttattttttttactgcaaagatggagagaagagattggagttcttcaattgatggttgcttccttttttttctagaagagattggagttcttcaattgatgcttgcttttttttttcttcttgtttcttagttttttttatccttcagaaactttttgtgcagagttgataaatgccagccaaagtgaataacaactccctttaaaaaaaaaaagatttttctgggatttatccaatgtttctgatactcttgtccgtcaccctccctcacaccctttgaatgtagcacatcttagttcaatgacattgaaaatgatgtcaattcaagtttgtgtgtgcatataatgtctttgcgactggaaatacgagggcagacaccatttttcctcaatcgttttgctaacaaaacaaacttcttagcattttgaccctgattgtcattttgcaaaccgcagctgcaaaagca

SEQ ID NO: 60679 - DNA, 820 bp, Populus trichocarpa
  Intron number 1 from transcript POPTR_0008s06420.1 (locus POPTR_0008s06420) derived from phytozome v7.0 (chr-ID scaf fold_8; pos 3811497 to 3812316)
aatcaaggctcaaggccgagggtgttcctgttggagctgctgcttaagagaaagtgctagcttctcatgccttaatttatttgttttgaccaaaatttaagctatcatgtatacggatttgtgcagtagtgcgtggaacattcaaataatggagacttctacaattaaaagattagatttgtgtgatcatgaaaatttagcaggaatgatgacttctctttccttggcatgttttcttctctgatacgtgtgattgaaagttgaaaatatataaccactctttaagggaagtatatataattttttttcccttttaaaggcaggtgatcataattttgtaccgggttatattgaagtttctgctgctgttaaggggaatttgcatcctttgtttcagctctacttgcttttctaatatttatttacgaattttggtaaattcagagtcaaatttttttgagtgtttgttttctcagaagtctatgtggaaaaatgagtaattacacgaagtagctatagtactgtcacatgagcggcaataaagatggttggtcttggaattatccctatttctttgtcttaattctcagaccatgccattctttactttggtacttcttaggattcctttacagcataccttggctttcttacagtaaacgtattctatttgtcagctcaagattatcataatcctaaggacattcgcatctactctatttagagcgaaccttaaaatttgatttcttgaaaattgcaaggtaaagggtttttgctgacacaagttgagacagagccctatacccaacaagatactggt

SEQ ID NO: 60680 - DNA, 785 bp, Populus trichocarpa
  Intron number 4 from transcript POPTR_0016s00580.1 (locus POPTR_0016s00580) derived from phytozome v7.0 (chr-ID scaf fold_16; pos 200972 to 201756)
tacagctcgcgggatatacaggtcttggtggccctgtaagtcctccaaatattcgcaattgatttcaatacatctttccattcttgggctgtcatctagcataacactaatgtttgaaattgaacaaaaagttcatcttacacacaactcagtggtcttttaaacactgtttcatcattgaagttgcttctctctattgtctcttaacagtgggctgcatacatgctctcagccttttatcatttctattagaatttgctttgtataatttgtaaccatctttctccttcccttcctcactttctctctgagttttcttatcagcagagtgaacaagctatattcttgtgtggttagctacttatcttatgctggagaatagtagcataacaaaagagttcacataacccaaccttcctcaccaaaagaacaatgaggaactattaggtcccttgaaaataatgacataatttttccaccatctataaaaattttgaaggtaccttttccttgttggaaggaggcttacctttttttcctcatagatggttcacttaccacacttttatcttcaacattgttctatcccttgccattgcagatgttcatcctcttatctaacatagaagtgttagccatcttgtctttgctgttacttccatatagcttacatttagtcttgaagggagcgacccttttaactttgttttttctttaaccagaaccacaatttaccatttgctcttgttttaaacaatattctgccactgatttatttcaggaag

SEQ ID NO: 60681 - DNA, 667 bp, Populus trichocarpa
  Intron number 2 from transcript POPTR_0710s00200.1 (locus POPTR_0710s00200) derived from phytozome v7.0 (chr-ID scaf fold_710; pos 6206 to 6872 reverse strand)
tcaagaaggctaactgtaatcttacttcatttggagttcaaagatctagaccttccaccccacaacatgatgcccacttttattctttattattcattaacttaatttctctatgatatttttgaattgatttatatgctttcaaaacaagaggtgcatgagacatgtcccctctatcttcattgtctttgttttttcttggtaactaaacactaccctaactatatttcatactttgttttggatattattagaagaatattgtgatcaaacctaaaggagtgtaaagtcaagaaactccacacaaataacatataaaaaaatacttccatccatcaatattgttaagatcattcacattttaatttgtttttgtgtgaaatattagtaaaactaattagcttaacaaaatactacacacacaatatttataactttattatatatgttgcctgatcattatttaatacatgattttgtactaagtactctccaaattacacatatctcatggttagtttacacatttctaccacgctttttcacttcaaaatgttctaaacaattgtaaatggcactgcttctagtgcaaattctacttatttctaccttttttttggcaatacgggcagggatttgattatcaatatcctcttcaacatctata

SEQ ID NO: 60682 - DNA, 435 bp, Populus trichocarpa
  Intron number 4 from transcript POPTR_0008s03180.1 (locus POPTR_0008s03180) derived from phytozome v7.0 (chr-ID scaf fold_8; pos 1666062 to 1666496 reverse strand)
tgggcatcttgtgcctcataccaccactgatcaaggtgagtttgatgagattctgaaagtaggaagagaatattatagctacgtttatagttcagctgtttcagctagattatagcattgaacaattgtaccatgtttgatggattagttttttgatatactcatgtgattttgtagacgtactgcaatgcaactctcgttggtatcataccatttacaatttccaataatttattattaacagttggacctgcaagcatctcatgtatggaagaaaatgtccttatgctcatgtttaataatatatgttcttttgatcacccacctgatagaagactttgaactctcggttatctgttggatatcttatgtactaattgttttatgtttctcattgaagaactccaacacttgagaaacagtctacctgatcaa

SEQ ID NO: 60683 - DNA, 833 bp, Populus trichocarpa
  Intron number 2 from transcript POPTR_0002s13180.1 (locus POPTR_0002s13180) derived from phytozome v7.0 (chr-ID scaf fold_2; pos 9816613 to 9817445)
gtgcttcagtttcataaccaaatcgaggttagcttgaatttacccatttgtccacttgcctgcttcccttttttttctttgtctatttggtattcctttctcttaaatttgtaaattatttttcctccttggttacttatgccattgtatagacccatattctatgaatctctcgtaaaggaaaaaaaaatgcatgtaatcatgtttctaggaatctggagtggtgtgagagaatagaaggttggtgtggatcccaaacaggcgtgttgtcaaatgcaaacaaattgagttaatgacaggaatagcatgtgcttggaaatgctagttctggagatcaattaaggacccccccgatcatgtgctatatttggacttgggtgcgtttttacttatttgtttatttataaattattagtcatagtgccccatatcaccatgcttcggggaacattttgtacaccccatgtgagaattgaaggtacttgaagcaataaattagtaataaaacttggagtactttattttggatccagaaattccaggagtgatacaaaatgctactgattgtcacaatcgtgttaaaaaggtgaaaagaaatccacatagataaagaaaaaaaatatatcaagtgttagattcgaggatagtgatgttaaaaaggtgaaaaattccaaacagataaaggaaaatcttaaagatcgagtttttgattcgaggataaagcacattcatttaatgaggattgtagctatatgcatgaactcgttaaggtagctaatgttgttttattgatcgtaggttggagtaaggattaaggtggtatcaagtacacc

SEQ ID NO: 60684 - DNA, 632 bp, Populus trichocarpa
  Intron number 3 from transcript POPTR_0002s22570.1 (locus POPTR_0002s22570) derived from phytozome v7.0 (chr-ID scaf fold_2; pos 19345303 to 19345934)
ttgtttggactttcttctccatttgtacaggatttgtatatttttaggaacatcaggttctctctctctctctctgtctctctctatatctatctatctatctataaacaaacacacacacacatgaacacacatctcggtgacatgtttgaattaatccaatttgtccattgatgctcccattaagggtggacctcacagagtttggcaaccattagaaaagcttgtcctttgtgatgtaaaaaaaaaaaactttgttctatgcattctagtgttgaattgagttataattatcttctccttcctcccttcattgcctggcacactgatcaacctgtttatcttggttttatttcttttttgagtacctttcaattggtacaagtcccatctattacatttaaggcactgatctgatacagaaggtgtctgccctcatctcctaatttgtagaatgcctgggagtttgatctgcgcgcagctagctagtcaatatacattgtgttttttatgtttatggaatgttgatatctccatcactggaggcttatttatcgaactggttccatgtagcctatattgtaggatttagttcaactggcaaacttatttgtactaggaatacgtatttg

SEQ ID NO: 60685 - DNA, 990 bp, Populus trichocarpa
  Intron number 2 from transcript POPTR_0025s00760.1 (locus POPTR_0025s00760) derived from phytozome v7.0 (chr-ID scaf fold_25; pos 416066 to 417055)
ggggtcatatacagaaatccttacgcttttcatcagttaagttttgctatcaaacattgcccttagcattacccttttttcttactttcaaattgtaactgtgataaccctccaagattgattatttctactcgtttaacatgaattaatgtgatatgcacagcacaaaatccgtcacccgttatatggattccaatttaccttctttttttttttcatatttcaatattttatggactccatcatataaaattccacgtacgttgagagcagctaccttgagatcaaattaaagatgaaggaagaaataatggcgtgagagattttttgggccactaggttgtgtgatgacactaatgttgattggagtaattaaataaatttcctttaagacattgagtggtgaatccactaatgtattaccttgtataatattcctcaaatttggttatttatgacgacgttcttgtaatgctataattttgcaactgtaacaatgtctattcattataggttgtgaattgatatgttatgcctgttaccctatcttggaagttaagttttgtgggagtaggtagagattaatttagaggacgagggatggtcctgttcctctttgcaaattttcttacaaattaattgtaccttggagtaggggctgggtttgaatgtgatactcatggccagtcgtaatccacaagacgtttacgacatgctatgatacttcgcaattttcaagtcttcaactgtggaagtcttgcctcttgcaaggtgaaaagaaaagaaaagaaataaatatatatatatatcatcctctatagggtcaaagaggtcgtctcctgaagcaaaaacatggttatgcaaaaccttaatacaatcgataaattaataatctttgttaaataatatttttatataatacgttgacttgcatagacaaacacatttattgacatcactggataatgtttattcaggagccatacagag

SEQ ID NO: 60686 - DNA, 754 bp, Populus trichocarpa
  Intron number 1 from transcript POPTR_0016s04910.1 (locus POPTR_0016s04910) derived from phytozome v7.0 (chr-ID scaf fold_16; pos 2956887 to 2957640)
tttgcaagcttgtgcttctactaatcctcctggtaaatcctgtcaatttcattgttaatctttccttttttagtgatctaatgagtgttcttgtgtggtttgtgagaatgttgtttttcgtttttctggacataattcacaggaatgcatgttctttctcgtctgtttggatgataagaaaatgcagggatttaagggcaggatttgtaatcagaactattatttagtgactcatcaacagggaataaatttttctttttatgctttttaattctttggaagaagaagaggatagactccagattcaattaagagtttaatgtcattttcttataaaaataaagatcttaattcaattttcttttcttcttcttggttttctcagaaaccaaacagaaggtcagatctacattcacatttttagcttcctttccttttagcgggaaaatgcaagggagaaaattggcggggaaaataagagaataggatgcgattcactataatctcgacgtttcccgttatttttaggcaatcatctagtgttttaaattaattctaaatagtgatgatttgggcttaattgcatcattttgactcgtttttatgtgtttgtttatcacccaataaactatcgactgattatcctggataaataatcacaaagttttattctattttaaagtgattttgtagaaccttatgatttcagttggttgaacattgctaatatttacattactgttctcgaaagaac

SEQ ID NO: 60687 - DNA, 785 bp, Populus trichocarpa
  Intron number 1 from transcript POPTR_0008s19950.1 (locus POPTR_0008s19950) derived from phytozome v7.0 (chr-ID scaf fold_8; pos 13781221 to 13782005 reverse strand)
tctctgcttgatcagtcaccctgtcatttgtgacggtaaccatttttcttttctttatttttgggattacttggtaattatctgctttcttttatttctttttacattatctaatttatcatgtgagatctgattactgattcttatgtttgtttgaatctgtcgttttagctgtagtcttgtagatccaattctataatatatatgtgcattacaattaatctggatacttttaattcatctgtattgcttacaactttccaaaacgctggaattggtaaatggtcttgaattgatttcatttctactcaaatctgatgtctccaaacgggctgttacattatgcagtgaatttgcctttgcaagattgcttgttatgacccagttaactaagaaatagctgtaatccaactagtattatagtttgctttcatgatttgcattggcaagctcgtcaagtctttgcttaattttttctctcccattaatctgtttttctgttaaaatcttttttatgcaatttgctgatacttgttcttcaggtcaagaaaatggttttaaaacttgttgtcctcttgctatcaaaaactagtttttgctgcttgtttagaatgcgcacgaagctggaaatgatcccagatcccaagtggtctgggctttcttttcagtacagtcccatgagtctattgctccatgttaatttgcccaagttaagattttcttcccggctgatatcttaacactaagcttctcattccaccacttatttgcaggtgatcaggagg

SEQ ID NO: 60688 - DNA, 614 bp, Populus trichocarpa
  Intron number 1 from transcript POPTR_0002s06500.1 (locus POPTR_0002s06500) derived from phytozome v7.0 (chr-ID scaf fold_2; pos 4344397 to 4345010)
gaggtctcattctccctcgctttctgtattgttctgtgtgaattttgtttttttgtgctcgctggttagattcttaattatagattagttatcgaatatcgtttaaggaaatacgttgatattggtttttttttattaacgtggatgtatggttagcttgcgtttacctcgactaatcccacggatcctgaagttaatgaccatgtaagttttcagttgccctgaggtttgtgaggctcgaattggtgacttttagggagcaaacccagatcctgaaaagttgagctatacccctcatgcttacgttgattttttttttttaaaattgattggaagtgtttgattttgctttgggggcattaatgacatgctagagggtaattagcataatgaaagatggtgtattttgaaatttgaggtgaaatatcagagatcatttgtcgttgctgcgtcaaagcaagagagaataattaattgatcaagatttgttgggcgttttaatttctgaaaaagtcatgatttgttatagtatcagtttttttctctccagaaaactaatttaattttcttcgttattgtcagggctggtgaactatccgcagcagagtaacctt

SEQ ID NO: 60689 - DNA, 880 bp, Populus trichocarpa
  Intron number 1 from transcript POPTR_0016s10910.1 (locus POPTR_0016s10910) derived from phytozome v7.0 (chr-ID scaf fold_16; pos 9298922 to 9299801 reverse strand)
gcagtggcacgtgagacccacgtgtcgataccaaggttgtcaaaatcatgatttgactcgcaaaatcatacgattttacgagtcaacatatatataacgtgtaaaattgggttaaaaacttgaaaaccagtaaactcgatcaaactcggttaaactcaatcaacttggtaaactcggaccgagtttatgagtctgaaaatagcaaaaatattaattgactccatttatgaaataaggatcaatgctctctagtaatgatgtaatatttattcctcttcctcacgtacgagtttttgcttcttttttctctgcaatgatcaatcaacatcattcttgccaatttctttctccggcaagtttactttgcctttaaattgttgcaccaactgctgttcagctgttgtgttaccgtgaaaactagcaaaaaccagagttattctactagatctcatcagtaatagatctaattgtttattgtcgttatgagatctcgtcagtaacaaatctaattgctttgattttagtactagttattctactagatctgctgctaaactgaatctttaatctcgccattccttcatctctattttctgggttgattttagttttcaattcatttgaatttctgggtttaactcatctgacctttcttggtttgattagttaatggttttgagtttctgggttgatttccaagctctgtggttccacgattcagatctagcaagctttgataatttccttgttcatataatctatataatgaataaaacatggcgatttctcaaaaatctcagcaaactccttctaaccattctttggagtatgttatttcaatccttttgtttggagctaataggaatagatacaacgggca

SEQ ID NO: 60690 - DNA, 1022 bp, Populus trichocarpa
  Intron number 1 from transcript POPTR_0008s10520.2 (locus POPTR_0008s10520) derived from phytozome v7.0 (chr-ID scaf fold_8; pos 6595982 to 6597003 reverse strand)
ggtggaaagcgataaataaaacggcagataaaaaggtaaatcgtttcttttcttttctttttttacttattagatatctaaagtatttagggtttgttactggaatggtgaggacatctttaattatttgatgcatttcttgctctcaagatagcattacatgataaaaaatggggagaggttaagaagaagctgtgtctttttattttggccaacaaaatcctctcttgctctgtcaaatgcttcttcaagtggcaactttttagtttgtatatatattcaaatcacgaagaagactttttattgtattatttgtgtgtttttaaataatttacacagaaagaacttataaaagacaccgaatctcattatttaagattttttgttttggaggaggaattatttatatggtagcaaaaatgtgaattttgttagcgaatatggctaaatgatgagttaagtgccgtgatgtaatgtaatacatatgctagtttaatactgtttcatcgagatttggttgagatggtaccagcatgatttcttatgcccttggacctttttgttcagctaattgaaatgaaagaatattgtcaatctatttctttagccaacactagagatcatagcggaattgcctgaattagtatggaggtttgattctttctgggttgctccaccaaatgaagagagtaaattttgaggagattatttttttttacggtaatttaaatgtgaaccatagagtagaataagggatgaagttgtaacacaatgcaagtatgcaatttgtgtgatacttaacgtttcattatcattctaaaaaaaagaaaaagaaaaaagaatttttttttgccattgagcagtggctggtacagttgggaacacaatgtagtttagttgcatatgtagttctgttttgctagtaataatcacagaaagcacgtgccactcaagctagttttataatttgtttgtgcactgcaacaggcttgcaagccattttgacatactgcttcaacagc

SEQ ID NO: 60691 - DNA, 343 bp, Populus trichocarpa
  Intron number 1 from transcript POPTR_0002s19350.1 (locus POPTR_0002s19350) derived from phytozome v7.0 (chr-ID scaf fold_2; pos 15309760 to 15310102 reverse strand)
gctctcttgatcatcctttattttcccattgcaaggtgagcttttctttttccgaacatcttcatatatatatcctttgttttttttttcttgagccgtaaaccaacattttcatgcatttgcattgtgtatataagcaattgagtcctttgttaagtactatttgcctatatatgcatgttttgagaatatattttagctagtaaaaattaacggaaagggacagtactgaattgtttctttgttcccttacatgactactctaaatttctcgtacttaatgctgctttcttgctttctcacaacaggagatttacttggtcagaagggtagacaagagaag

SEQ ID NO: 60692 - DNA, 651 bp, Populus trichocarpa
  Intron number 1 from transcript POPTR_0008s06840.1 (locus POPTR_0008s06840) derived from phytozome v7.0 (chr-ID scaf fold_8; pos 4099502 to 4100152)
gcgatactaaccctcctcttgatcttaaacttggggtaattttcctctctcttttttacccttctttgttgtggctaaattttgattcttcaatgacttatgctaatcgggtctttctttctggttaaatttggtacttatcatacacatagttagatggatttttttttggtttcaatatatatatattgctttggtagctaaaataggaagtgggcgggtttttgtgttccatgtctgtaaagaaagtgaaaaactcaagcttatgacttttgactgaatggttactaataagctgcattgatttaagtatttcatgattataataacttgtcaattaatgctattggattgtgtattgctaattatctttgaaacgtatgattagatgtagagagtctcatgggatgcttgaacttgtccatgtcgctaattaacttttgttatttacgtttctttaaaagtggaatgcctttcattttctaccaggaatgtaaaaatgaaagctttcaactattgtctctttgtcatggtttatttttctaattgattttttttggaattactgttctgtttcaatttcgtacggatatctgcatttttcttttttgtttttgcttatatattttattctttggtttcaggtgcatc

SEQ ID NO: 60693 - DNA, 993 bp, Populus trichocarpa
  Intron number 1 from transcript POPTR_0016s04190.1 (locus POPTR_0016s04190) derived from phytozome v7.0 (chr-ID scaf fold_16; pos 2394354 to 2395346)
aatcaccaggtgatgatattaatcctctctctaaagtagattttttacttattctcttttgaaatgtggctagcatagcttttaaattcagccgtccattggttaacttgatactccatcagtttagatagagatagtgattgttcagtcatttggtgtcatgtgtttttttttttttttttataaatgtattaaaattattttttttatattggtatattaaaatatattaatttgatatattttttataaaaaaatatttttaaaatgaatccaaatataactagaaatataatatcaaacaaacactaaattcaaactagatttaatagagtaaattttaatttaaattattttaaaagattaatatattattatttggtagtgagtgtttagtattgtggtataatatattttttaaaattatgtttttaaaaaatacatcaaaataatttttttatttttaatatcaacatattaaaattattaaaaattattaatttaatatcttttaaaataaatatatctttacaacgtaattaaatatatgtaaaattgcaacctcaaacaagtaataaatagggtaaattttaatttaaatcattttgagattaacatgtcagcggattcttagccgggttggatcctaggccgggtacaaagacaaatgtaagcatgcattgttgcttaataataataataataataataatataattgttagtaatatatccaacatttgatatacactgggtgtgttataaaatcccacttttttccatgttatgatcttgcctagaattaatttttttttcttgaatataatggttggcataacttgtttaagagtcaatcagaattaccacacaaataggctaattaatttagtaattttcttgtcacaatgtaattaatatgttctattttttcttaaatttgaattatagctgatataatacgagcatttagcagattttgtgatatatctcgggg

SEQ ID NO: 60694 - DNA, 867 bp, Populus trichocarpa
  Intron number 2 from transcript POPTR_0016s10700.1 (locus POPTR_0016s10700) derived from phytozome v7.0 (chr-ID scaf fold_16; pos 8998775 to 8999641)
tatcccagttgaaagaacagattgagaaggaaaaggtacaaaagctatagcagtactgtggttgacattgaaattgttctcaacatccactcaatgcaattagttagattcatataaagaatgcatcatgccatcatggctatcagacattgcctataccttcatacaaccttatactgctgttttcttagaaaactcaaaataaaagcaattcctatcataattttctgaattttttgaaagagttgtttaacattttccagttattttcaatttaaaatttccaaatttgatatgtgaaatttgaagagatattttctggtaaccgcttcttcatgtactatatgcatatttcttaatttttatgagggcactccacggcttatttaattgtggcctacagtttgctttgtctgcttcgcaaaccaaggctgaaagagagatcagcaaagcacaaaaacttatctgggaaaaagatgctgaactacttgctgctgaagaaagccgacatttttgaatgtgctaccaatataggattcgttagctggaacaaataatttataaagcatggagctaatcatttgaaattgtgttgctgcttatttctgggtaatgttatactgaggtgatataataatataaatctagaactcacgaagaaatatactttctgcaggataacttcttaaatgattaaatacttctttgattcccaatatatttggatccaccctgattctaccaacaatgcgagagataaggtagaaaaatattaggctccagtagaccataaaatcatgaacaattttataatccttgtaaaacatatcatacatgaactattacctgttatgtccacgagtaagg

SEQ ID NO: 60695 - DNA, 732 bp, Populus trichocarpa
  Intron number 1 from transcript POPTR_0008s23230.1 (locus POPTR_0008s23230) derived from phytozome v7.0 (chr-ID scaf fold_8; pos 18539304 to 18540035)
aacgacagcaacgacaccgtgagcagtggagagcaccatgccagtagcttctctcttgactgaaccaccaacgttgccagcaagaaggccagaccaccagttccagcgatatcttgtccaacagctctcttctttcccagcagtgacaacaccgtggacagcatcttgacccatctccttaaatagcagtatagcacctgagcagcggcagtattttgaaagaggagccccaccgtgcacttacgattatgaaaaatagaggaaccgggtctccggttgacaactaatcaatttactggaataagttgaattgattgaccagtttagaaatagtcgattgattcattcagcataatacaattcatattagaattagaataatatatattagtttaattctttgattttctaagactttatatctataaaaaaaacttgtaattcagcattatgaataaacacaaaaaaaaaagagaatatataagagaatttagagagaaacacttgataaaagtataccttcctatcaatctttttcttcttgatttttgactttgcattactatttttgatcttctataacactcatccttcttccaacaagaggtatcggagcttaggtttgattatttgatatgactaatccaaacttcccacttcaatgtcctaggttgacaaatgacaactatgaaacttaatgtatttgagtaaaagtttggttaagttcccaag

SEQ ID NO: 60696 - DNA, 832 bp, Populus trichocarpa
  Intron number 1 from transcript POPTR_0008s21150.1 (locus POPTR_0008s21150) derived from phytozome v7.0 (chr-ID scaf fold_8; pos 15311875 to 15312706 reverse strand)
gtgattttacttctaaatagggtaaactagcgctgctgctactactgctttccttgtcttctctcttttggttttggattcttggttatgatggatgatgttgctattgttgttagagatgattttcattttgtttagtttttggacaaatttctgtctctttttcactctgagtttcaatcatcatctttaataactttttacttgtatattttggtgtttaactcactaactacatatatcctttcatcttatcaatcattttgcaagttaaatttctttctttctttcttatgcatcttgaaaaggtattaattgattttttttatctcccaagctactaactactattaaaagaaggaattagcacaggcaattctgggattgggactttattgtgaagtatgccatgaaattgtaagttggagctgcggagtctttatggagttgattgagagtctgagtcgtagctgctgagtttttatgcagttgattgagttttggcaggggcactctaaagtagaggaagctaaataacaatttattgtgactataagtgagtgaattattacatcttcccatattgttttgattgaaaatggaaatgcaactgtctgtcttcttctccacctgccttgccttcctttatttgttttcgttgtgattccttcgtttctggtttctttatgcgtttcagttcacctgttttttttattgcttagaataatgccaaatgaaactttggagtttcaacaaaaacctttacacgctggctatgctattattaatttatcttctggctaaaatcagttcaagttgggtggtgctgctt

SEQ ID NO: 60697 - DNA, 609 bp, Populus trichocarpa
  Intron number 1 from transcript POPTR_0016s06010.1 (locus POPTR_0016s06010) derived from phytozome v7.0 (chr-ID scaf fold_16; pos 3929037 to 3929645)
atttctccaactttatcatacaattgaatagctacgtgagtcctctaaattcattttttttattttctaattccaagtttgactcaaattagtaatttattatttttaattgaaattcttgatgccatggtggtagtgaagattaaattttttaatcttaggttattctaactaaaatttccaagtcagattattaattgaaattcttgatggcatagtggattaaaaaaaaacaaaaaaacaaaaacaaaaacacttctaagtattaaattaaaagaaaactattttccgtagtacaacaaattcagttaacaaaacaaaataattctaaaatataaatttatcttcactacgacaaatcttccccgaaaaagcccaaaggcccaacgggcgagaaaccacgtgggtggctggccactacaaacaataaaaccctaacgaaacacaacagcattctagacctttccacaatcaccccccttattcttcttcttcttcttcctctttttttttcccctaaaaaattctagacctttctaaataaaaaaataataataattaaataaccctcaagaaaccacatcgccctctccatcattcccacccaga

SEQ ID NO: 60698 - DNA, 747 bp, Populus trichocarpa
  Intron number 1 from transcript POPTR_0008s09710.1 (locus POPTR_0008s09710) derived from phytozome v7.0 (chr-ID scaf fold_8; pos 5996315 to 5997061 reverse strand)
taagggtggtgaacaaggttgggctgcccagccaagtaagtatttctcctttatttttgttttaaaccctaattcttgattttgtgatgaaccatggttctaagagcaattcccatgccttttccttgaggtttagggttctgggggctgttggaaattttgtatttttaagtggatacaagtgtaggtacactttaggtttgtgaacaaaaagtaatgtgctctatacaagtaaaggggtgcaatgcgcggtgattttgattgagttagcctgaatctgatctgtattattggtgataatgatgggttgattattgattcctgattccaaatgttaattgcatgttctagcttgctactttatgttgatactggttggtgttattgtccagtttcagttcttgtgtttcaatttgaggtagggaaggaaaaatattgccgcaacaaccaaagaaggatagaggagtttaggactcttcaaaatagctataatagtagtggaaataatatctctttgatgtgaaaataatgaccgtgctgttgctttcctttgggatgaattcttgcaatttatgggtgatctacacctgtagggctacctagctgaattgtaacttgggattgggattagtcattctcataatgaaattttactattctaaatgtctttccgggtactataaagttcccagttggatcttatgtttgtgggattgacttggttcttgaattattcagtctgggctg

SEQ ID NO: 60699 - DNA, 921 bp, Populus trichocarpa
  Intron number 2 from transcript POPTR_0016s11080.1 (locus POPTR_0016s11080) derived from phytozome v7.0 (chr-ID scaf fold_16; pos 9658568 to 9659488 reverse strand)
ggtttcgtttcaaagtttaagttctccttccaaaggtaagacactaccgatttccgtatccatttttttcaggtcttcatcaacattttctttcatttgaagatattaatcatcgttgctttcgaagaaactgtctgaaatttgtctcgggcgtaaaaaaaacgcgtaggaccatttatgtgttttagctttcagtaaagttattcagcaacgctttgtgttatgctgttattgtggtttagtacttcagtgtatttttatttttaaattcaaaaccttgaatattaggaatctgattttgtgaaatggtggaaaaagatccatataacctgcctcaactggtgtggaattgtgtatttgttgtgaaccctaaaatataattagaatattaggaatctgattttatgaaacggtggaaaaagacccatataacctgccccatctggtgtggaattgagtatttgttgtgaaccctaaaatataattagaatagttaatttcttttccttctaactttcaattccagttgtggaatttaaattcattgagggttaatgtgcaccccattcctttatatattgagctatgcatcattaatttaacccatttttaaacaatctttggaaattgtaaatctctccacttttctcaaagaaaaggaaaaaggaaaaaaagaaagaaaaagatctccacttattgttaggagctttgggtggagagatttgaacagttgaactgaacccgggcaacatattgctttaaacctttaaaattgaaggctttcataaatttcttagaagttatttaacttttcttgagagatccaaggtttgttaaatcaagtgaattatacgttgagtttgaggaccttgtttgtagggtgatttgatatttacatgtaattaactcagaccaggtttg

SEQ ID NO: 60700 - DNA, 1025 bp, Populus trichocarpa
  Intron number 1 from transcript POPTR_0008s03270.1 (locus POPTR_0008s03270) derived from phytozome v7.0 (chr-ID scaf fold_8; pos 1735744 to 1736768 reverse strand)
atagtgatcttaattttgacattgaaggttaaaaaaaatcgtactttttcttttttttccccttgaaattcattttttttcttacctttctagggctccgagttggtaaaacgatggcgttttgaggtttttgaatttttgaagtttgaattttttgtgttttgactgaaaatgagagacacctgaaaatgagagacaccagtgactctggtggtggtttaacgtctttattattattattattattatgttttggtggtgcttgatggattttaggaaatcttctttttagttttgattttccaagtaaagtttattttagtggaaattgtgtgatgtagcagcgattctgagatggtcaaatggtgtgtttttacttttatgttttttccacttgtcttgtatcggtgctgcatgttgttttactaggcttttgtgtagggttttctgtgaggtatttttagttatggagttttaaagaaattttgggttattacatttgttatgtctgtgaggttttgttagtggaggttttttacatgctcacagcaagtggcaaggccctgtgttttcaaaaattctgtctgtgcaagtggatctgtgaagttgtttttgagcttgttgtgcggtaaaactgttcattgagggtatttgagtgcatttacttgttgtaactgaatttacttgttgtaactgaggttaattttgcggtggattcactggagattttatagaattactatttaggaaatcgatgttatggcagatttaatagaaatattggagcaattaggatttgttttgcattgtggaggttcttttttgtcttttgttatatagtttgggttttgagctaaatggaatgcctttgtataggatctgtttttcaggtcatgctcataccatgttccttttcttttttcaacagtacagtgttatctgggttcccttgcctctctgccttggatcaggaaagcttatttttactaatcttaatcttctcctaattgtggaaaacagatttt

SEQ ID NO: 60701 - DNA, 977 bp, Populus trichocarpa
  Intron number 1 from transcript POPTR_0002s05450.1 (locus POPTR_0002s05450) derived from phytozome v7.0 (chr-ID scaf fold_2; pos 3560734 to 3561710 reverse strand)
aactgccgcgtggcagctgcaacggttccccgtaagtacctccccaacatttccgagagcaacccgagattttacactgggttggatataaaaacaaaatatacgggcgctgatctgattcatttgattgggcccaaacaataagcccaagaagacaaagcgagtcctgattttaacggacgcgcgagataaatttgaaatctcaaatgcctagaatagtcgaaagttataatgataaaataaacttattccttaaactttattttttaaattttaaatattttaaattattttttaatgaaaaataaaccttttatctaattctttatcactatttatcttttttaaaatcaaatattttcaaaatgcgtattgtatttttaaaatattatttgtaatcaaaattaatgaaagaatttatttttagttaaaaatatttaaatcaaaaacaatttcaatttaaatcaaaattttaaaaagttttggtcattttaaatctttagctagaggattttatatgttatagatatattttaatatatatcaatacaatatattaaaattattaaagaaatattaaaaaatacattaacttaaaacatttttttaagacaaattaattttcaaaaaacatttaaaaatgaaagctacctcctcccagtcgaccagtgtccaagcataaaatgaattttttaaaaaagaatagtgaatataaattacaaattctcagatcttattactcttttctttattgattttttttccccgattccctcgttttccattggctctctctattgttttttattcttaaaatgattcaaagccaggcgaaattctgcggccaccggcgggaagacaggcgttagagttgtagtcgtcggagaccgtgcaacagaaaaatcgagtttgattgcggcagcatccaccgaatctttccaggaaaacgtatctccttccacccactcgccttcccg

SEQ ID NO: 60702 - DNA, 1032 bp, Populus trichocarpa
  Intron number 1 from transcript POPTR_0008s10570.1 (locus POPTR_0008s10570) derived from phytozome v7.0 (chr-ID scaf fold_8; pos 6620109 to 6621140)
tccttttctagggtttcagttggcttctttgctaggtaagtatccactacatttgatgggttcttgttgctatctgatctttttctttgctgctttgaaatgggtttgctttgaagttcgattttgatgtaaaaagaaggaagctatgttttttcttcctaaagaaagctgaaactaaaaagattagttcttcgatgtaaaagagagttgtttttaggtttggtaattcaacttaagattaaaagtaaaaaaaaaattaattgaaatttagatgtcactgtgaagaagagggaatctacttgtttgattgtttcttttttccctgtttggttgccgagaaaataaaggaaaatgagaagaaaacctggacttagtttcatggttgtgcttatttctgtaccagaaatggaaatgcgaggttctaagcaaaagggtttcaaggattgtctttgttttttgttttcccgctaaatatgtttgaagtgaagtacctagtctgtagggattttctttgatgagttacttcacttaggtttcgttcattatgctccaaaagtttttaatagcttataatgttgggccttacggaacagcttaaccttttgagttgagatgattccttaaaaatattttagtttagttccagcataccattggctattcttttcatgatttaagattttggagtttggatttgttctttgatatgttgtgttcttttttattttttattttttgggccgttgttcattaaaagaagtctctatttggtgtgtatgaattatctcaattcactttgcttgccactattttgaatcttactattccctttctctattattcaacaaagttctagtcgagcgtttcacatggttaaatgtttagtttatgctctgctggaagttaagtaatgcttctatgcatttaatcctcaggtgtggtgacttgttgctattgcaaccctgtgatcttcttgcttgctttctgctttttataggaagcaatccacagtaacagtttgcaaattttaag

SEQ ID NO: 60703 - DNA, 972 bp, Populus trichocarpa
  Intron number 1 from transcript POPTR_0016s03470.1 (locus POPTR_0016s03470) derived from phytozome v7.0 (chr-ID scaf fold_16; pos 1849073 to 1850044)
tggcagtcaaagttattccgaagtccaaggtttagttctaaacctctcattgattatgatcttttgattttgactagcttttatttgttagagtaattccttagattagcttaaaatttcggatgttttaattgttaggtgttgtactcatgtatagatgtgatttgtttttatgtttgtaggcgcatctttcttttgtggctgctatttagcatctatagaggtttaatgcaattttggctgctatttgtaattgtaactgatctgtctaccttcttttgtgatagtggaggagtgtaggattacattcagctgtgctatgtgttatgtataaaagggttttacttattatgttaaagttgttttacaattattgttctttgggtatgataagaatgatggatttgctcgaggtccttcctgagatacgcagtgcttctcttttgttaggacatttgtagcttaacattgcctttctttgttaattggtgtatcaacatttattaatggaggctcaatttaatgtttagccaatccaggctcaagataaacatgtcgcgggtcactatggctctaatttagttagtgataattgaatttaatgctctttttttgtctgattggccataaagtttaggtagttattgccccttcatgataatgatattataccatagcttaatccaatgcaaacaatgcattctgtaatattctccatgttgctaatatcaatctacttgtgacagcatatcctatttttgttctgaatttttgggcaaaggtacaaggatcactatttgtactatttgtctgtttggaaattgactgtggaaaccaatgacagtcgcatttgtcttagatggttgaggccttagtatgaggataccatgtcatgaatgataatccttttgaccattgactgtagaaaccaatgagttgttgttctcatgtatatcgggcaatgttttacag

SEQ ID NO: 60704 - DNA, 854 bp, Populus trichocarpa
  Intron number 2 from transcript POPTR_0008s13430.1 (locus POPTR_0008s13430) derived from phytozome v7.0 (chr-ID scaf fold_8; pos 8821368 to 8822221 reverse strand)
gcgtttcgataagtggtaagttctctttttaattctctaaaatgtattccttcatattagttttcaattagagaatgaaaacttgaatttccttgttattatgcatggagctctcgagcttaggtgaaaaaggttaagatcacgtctgtgcacctggttttgagaaaacccttaccacttactaagctggtcatagatgaaactgcattgatgctcatattcactttgcgacattgtttatgctcttatggcgtgctgcactgctaccctcattttggaaagatttctgtgttttagatatgaattttgtgcatctcaattttttccttttgagaatgctttttgctctgtttattccggattgaggtaaattcataagagttgttgatgggttgctcataacagttgtcattaatggctgaaataacacaaagatgctacttgatggtgcttatcttgcttgtgtgggtctttatcggcacactccctttccccatctttatcgcaatttctaatgtcatttaccttttggtgatctcctgaaacttcttgctcttgtcctgtgtcttataaaagcaatcctctctatggaagaaaaggtgaacaaaaatacttgatattgcagagcatcatcaaatatttcccaatctggttctattgtttataacagtcagagatattagtgggtactatctcagaggaaaaagatacaataaaagaaacccgatctgttgttaatatcaaagctggatcttttcgattccttcaccactgcttgttgttattagctgtttccattctcatttctctaatggttgctgttttgtctctgattttctccttttgtattaggg

SEQ ID NO: 60705 - DNA, 647 bp, Populus trichocarpa
  Intron number 1 from transcript POPTR_0008s11390.1 (locus POPTR_0008s11390) derived from phytozome v7.0 (chr-ID scaf fold_8; pos 7236668 to 7237314)
caacactgaagagtccagtattggattgaaaaacggtaccgtttttttgttgtccgccgagattttttggggtctttctcttctttttatttcagtgattctttgacgtgggttttgaatattctgctgatttggtaactggtttgacttagtttcactgtttgacttttttttttttgcattggatgcaaaaaactgagttcttacagtttctttattgactttatagtatgttagtagcggtacttcgatcaattaaattcatctagcagttattatctttgatgagtctttgttagtctagaaaaaaagaaaccgaagcttgcaatttgatgggtttttgtgtcatgtagttttttgtgaatcttgcattaaagcacaaatttttgatgtttgttactcaaaatgatgtgaatgttaggctacagagttctcgtgtacaccagagttacatggtaacagtgtatattagtatgttgttttcttaagtttaccgtggagatatgtttttgagtgatcaatttgatgttgcatcttgtttagtttatctctggttattttgaagttgctatgttgtggtaaatgtaaattgttttgttttaatgttggcagtgcggtcgtttggaacagaagggcggaaaaaggat

SEQ ID NO: 60706 - DNA, 996 bp, Populus trichocarpa
  Intron number 2 from transcript POPTR_0008s11390.1 (locus POPTR_0008s11390) derived from phytozome v7.0 (chr-ID scaf fold_8; pos 7237349 to 7238344)
aatacatattgttccgtggaagtgacatcaaggtatctaattttgtaaatacatactgtgagagtggccattgaaaaattccaatcaagtttgagaaagaaacttaacattttcttgtttgtggctgtcatttaatatatctgcctatactcttggtaaattaaaatcaaggcagcaaagtgcaccaaatctttatgctttgattatccatctggtgactgttcaaaccaagcagttctgcttcctgggtttttggtgatacctgcatataatgaaaaactcaggctcgtgttgaatgactattattgtaagcatcgttgcaccttgacccggtcactgatggcactagcagttcatggtgctttgtgcttgctatttctacctcaagtaatatggcttgatcatgggggacatgtaataattgatgggttggagtgggatttcaagttggcatctcatgtattaggaattgataatggattgaaggaggatgctaaggtcagtaggtactcaattttcttatgagttggttgcccaattctgttccactgagactgattcttcatccataattactgctgagtcaagatccttactgactcaaatagttactatcagatgaattgcgaaagctttctgtatttcaagtgtatcatgctcagtccttgtaattctggggttgatatgtgggtttccctttcacgaaaagagcatgttactcaaagattttcagttatctctcccgttgctattcacaactggccgtctctgcaattcagggaaatataaaaaacatggttttacattagcttatcctttatagatttgtggatcacttaaaggtgcacatgtttctttgattcgatagcttctgtatccctacatactgcattttagctcttgatgaacaatgttttgccatttttaatcctggatattgtgttttttacttccatcacaggacttgcaggttaagtcttctccaccagtccagtc

SEQ ID NO: 60707 - DNA, 191 bp, Populus trichocarpa; identical to SEQ ID NO: 60312
  Intron number 1 from transcript POPTR_0002s03780.2 (locus POPTR_0002s03780) derived from phytozome v7.0 (chr-ID scaf fold_2; pos 2346736 to 2346926)

SEQ ID NO: 60708 - DNA, 626 bp, Populus trichocarpa
  Intron number 1 from transcript POPTR_0008s02280.1 (locus POPTR_0008s02280) derived from phytozome v7.0 (chr-ID scaf fold_8; pos 1095840 to 1096465)
ccgaggctatttacatcagtggtctccaacaaacggtaaacataagaaatgcttgctctgcttattgttttttactattgtttgcttggtttgcgagaaaatgaaagaaaacggaaatagggttttttgaattttgtggttcttttatgagttttacggcttggagctgattaagcactaatttttataatttaagaagttttgctaattgggtttgtgggaaatgtcagtttctcagttttcatttattggaaaaaaaacaaaggtttgagaggaagggaatgtattcctcatgtatggatactaggtagtaggcaggatcattctagaattttgggatttaccctttttttcccaacaatcgagtcagatattattatttggtctgcacttcccatgtgaatcttttgagccaattagggcatgcctgggttcacatttgacggtgatcatgattttgtgtttcagtaatgctaaatagggtaattagaattcaagtgaagaaatttgcagtgtgtagttttcatgtttaaccagcactcaaaactgattgattacaaaacaggattaaaattcttcaagcaagagatgattccttttgcttgtaggtggttggaattttcaag

SEQ ID NO: 60709 - DNA, 993 bp, Populus trichocarpa
  Intron number 1 from transcript POPTR_0008s09680.1 (locus POPTR_0008s09680) derived from phytozome v7.0 (chr-ID scaf fold_8; pos 5983189 to 5984181)
cacgtggaaacccagaaggtaaaaattgctttgttgttctcttccaattctcttctagttctactgcaagtcgacaacaacttcttcttcttgcgcgtctacaattccttttcttatacatatatatatatatataatgtgatttatttcctgggtttatgtatgtgtatatatatatatatatatatatagagagagagagagagagagagagagagagagagagagattagagactgacatgcataataataatttcgtgtttctgtcgatatataaccctcattatcaccatcttccgtcttcttctctttgccaaatcatctctctctttctcctccttttttgtaagcattttttttctcttctcctttttctttctgtgtttcttttttgcacgtatgattgcaagaatcttgttttttctttttatttcgagaaatctgtatgtgtgtttgttgctttgatttattggtgtaacggggcatgggatttttaaatggtttttttttttttgtgatctgggtttggttaattactaggagaaatctctccttttcttttcctgtcacttatctttgaattataatgatcatgccatttatgttcggttaccattttattttgttattttcaatttggactgaatgtatcaagtaatttttctttctgtttatataagagaagtttgctgtttcttggattttctattggaagattattgaattatcctgttatgagtcagggatgttgtaaagtgaaaattgtctaatttcttgttgtcttagttgcttaattctatgccaaattgccaatgaactgtgacacttggtggctatttgatgttatagttctctctcgcttttttttttctttcacttgctgccactttgttgtttgtgatttgttgctcttttgaccattatatttttcttggcggtgtttcatttggtaaatatgttaatagttaagttgttaaacttgttgagtagg

SEQ ID NO: 60710 - DNA, 536 bp, Populus trichocarpa
  Intron number 2 from transcript POPTR_0035s00380.1 (locus POPTR_0035s00380) derived from phytozome v7.0 (chr-ID scaf fold_35; pos 218132 to 218667 reverse strand)
gacaacacagtgagtagctgatagagaacattatccataagatttcataaagtttgttttaatttatgctccatctctgctttgtatttgtttttttacttgtattgccttttggttgacagggaaaagaaaaaatagaagccattttcttggacatgcctgaaataaaagaggcacaatggaacatggaagccttctctaaaatgagcagactaagattgctcaaaatcgacaacgtgcagctttctgaaggacctgaagatctttccaataagttgcgatttcttgaatggcattcttacccttcaaaatcattgccagctggtttacaggtggatgagctagttgaacttcacatggctaacagtagtattgagcaattatggtatgggtgtaaggtgagatcaactaatttaagggcctttgtatttctttttatcgttttcctatatatgtataatagtagcatccacatttcttcacatttctgcctgattgcagagtgcagttaatttgaaaatcatcaatctcagcaa

SEQ ID NO: 60711 - DNA, 503 bp, Populus trichocarpa
  Intron number 1 from transcript POPTR_0008s22990.1 (locus POPTR_0008s22990) derived from phytozome v7.0 (chr-ID scaf fold_8; pos 18144938 to 18145440 reverse strand)
aaggtatttatggagatttatgtgaattctacttccaaaagataagtttagtttctttgaatttcatgtttttgttgtggaagacattattttgccttcattttgagtgtgttgtgatttttctgcgtgacttttataaatgatcttttcttttttcctattacttgagtgaattttatcgtggagatatgtggaagtgtttagatttgaggggtggtgtcacatctgtaatactttgtgctataatcatgttgtgaattgaagttctaaatttggttcaagatttctaggaatttggatgtatcttctgtcttggaaatttgcttgaatttatgatgtctgatgctttcctcttggtggctggttggtaaacttccttcacagcctgtgtgtgtgtgtgtgtgtgtgtttcagactcgttgttcgtgtaatttgattgatttagttagtctgtgtgggaattttcagttacaaagtgcaatcgagcagaaatcgcgttgtct

SEQ ID NO: 60712 - DNA, 403 bp, Populus trichocarpa
  Intron number 1 from transcript POPTR_0008s10870.2 (locus POPTR_0008s10870) derived from phytozome v7.0 (chr-ID scaf fold_8; pos 6844178 to 6844580 reverse strand)
tatcagtccagtctaatcgaacattatttcttcaggttttggagtggcattatcaaaagttgctgcgaacaaggaacttccttttggattgcgtcagatatcctctcttttgaaacctttttttttctcataattttttttttaaaatcttcttgttcctatatttgatttttttgggtgagaattaacaagataattacctagctgccgtactattgaagcaatttatcaagaaacattggcacgaaagcgaggagtctttcgagccgcctgctgttgcaactgaagagaaggtagttatggcctttttttagatcttgaaattcataaattgaggcctaattactagtttattgttctgttattaggaagttatacggagactacttttaccgtcgttgga

SEQ ID NO: 60713 - DNA, 714 bp, Populus trichocarpa
  Intron number 1 from transcript POPTR_0008s00500.1 (locus POPTR_0008s00500) derived from phytozome v7.0 (chr-ID scaf fold_8; pos 210893 to 211606 reverse strand)
tgatttcttacttttgctgtgatctgcacttgaaggtgtgtcttttggtgctctgcttccgttttttttttttttttatctttctttagtgatgtattgctgatgagtataatgctggttaatatttgtgattttttagctgtgaaatggtaaaaatacttctacttttgctttaaagttggtgtcttgattggcatgttgtaggggtcttgcttcattaacatatgttttaagcaccgattttggagagggttttgggatttttctgtctctgctaatgctgatttatttttgtggataccaataaatgttactatttcaagcttcaaaaaatatcaaaacttgaaagctttcaacttggttattagtgaagagagtgtgtttactgattagggttgattgctagaaatctggtgacagtagggttcttggagttaaaagctttacttttgttgccgtttaaaatttctgggttatttttacgtttgttcaaagtggttatttttttacgagggacacagagtttggagctgatggggtcacttgggttttagatcgctggttttttaagcaagcagtttagattctggaaagtttgttgagatctttggggaatctagcttatctgattctgcttggaacattttgacctgaggatctaactttggtgcgttttaagatttgagataatagaagatacgcaaaaagtcctgg

SEQ ID NO: 60714 - DNA, 987 bp, Populus trichocarpa
  Intron number 2 from transcript POPTR_0016s14940.2 (locus POPTR_0016s14940) derived from phytozome v7.0 (chr-ID scaf fold_16; pos 14014497 to 14015483 reverse strand)
caagctctgtttcctggagactccgagcttcaacagttgcttcatattttcaggcatgcttctctcttattcatctaatttaatttaattttgcgctttatagataaaagaataagtgttattaacccggtttaagttgatccaatcaagaggttggatcccgagttttatgagttaactcgaatcaacaaaaaaaaattaaaaaaaaaaaaaattttaatattttatataaaaaaattaagaaaaaatccatgtaaaaagaggctacacatattgtaaataataaagtttaaaagaatattttaaaaaaaaaaattatcccacattaaaaagatattatgttaagtttttaagttgaaatatttaaacaaaaattttttttatcccacatttaaaaaacacaatttttttcatgggaacatagaatatatatcttaatggatttcaaatttcacattgaaaaaacatagtttttttcttaggaacatagagtatatatactaatgggtttcaaatcctacattgaaaaaacatggtttttttcttgtaaacatagagtatatatattaatggatttcaaatcccacattaaaaagatattatgttatccttttaatttgaagtatttaactcaaaaggttttttatcccacattgaaaaaacataacttttttttaagaacatagagtatatatactaatgggttttaaatcctacatttgaagaaaaaaaaaacatcgggtctcggccgggtcacgggttgacctgctgggtcgaccgggtttggccggatcgttgcaccggctggttttttgacaaacccggaccggtccagctcccgggtcgacccgccagtccgggtttaatagctatgaaaagagtggcttttgcactttaccatacatttacttttataaattacgtaagctaatttctaccgattaattccaaggttgttaggaacaccaactgaagagcagtggccag

SEQ ID NO: 60715 - DNA, 549 bp, Populus trichocarpa
  Intron number 1 from transcript POPTR_0016s13450.1 (locus POPTR_0016s13450) derived from phytozome v7.0 (chr-ID scaf fold_16; pos 12609164 to 12609712 reverse strand)
ctgaagttgccaaggttataggcaaacctgagaaagtaagtgttgttttatatttgatctgaaaaatttgtctggcaggtgttgtctggtaggattgttagttttactgatcacttaaaatttggttgatgtcttggttggatcttagaagtttggttttttaattatttttttatgaatctaacatcacttgatgaagaatccacagctctgggatctggattattcaattctgatatggatagctatggttttgttcgcctgatttgtgatggtgtttactatggcctgtaccattagaaaattgaaatagattttgctacattacagtgatttctttactcatttatcaatacattggacaagaattatgttctttacacctcgaatttccaacctcctttctgtgctttgttagaatacaagccattgtaaacaatacctgggccagatactcattagttttttcttgtcagttattaatttgtttggtgaattctagctatggaatgtgcgttcttaactaatttatgtttgttgtcttgcagt

SEQ ID NO: 60716 - DNA, 299 bp, Populus trichocarpa
  Intron number 1 from transcript POPTR_0008s17700.1 (locus POPTR_0008s17700) derived from phytozome v7.0 (chr-ID scaf fold_8; pos 11885860 to 11886158 reverse strand)
agattcttctctctcgcaatctctctcttcctaaggtacattacattaatttcttagggctttgcactcctaatcacattttagcaacgttcaattcgataattcttagctttatatggttttgaattgataaaatctatcagatatgagagattaaggtttgtgatctcatgtttcataaattatgcggttacttttgacggattggtttttcaaaaccgaaattagggctaggttttcttcttttctttgctgttaaataaattattgaattgtcgtggtccttggttttttagata

SEQ ID NO: 60717 - DNA, 621 bp, Populus trichocarpa
  Intron number 2 from transcript POPTR_0002s26040.1 (locus POPTR_0002s26040) derived from phytozome v7.0 (chr-ID scaf fold_2; pos 23035580 to 23036200)
ggacttttgtcattgcatcaggaatttatctactggtaacaattaagtcttaatttctacaaaatcatcttactcttaatgtttcaattttcttgggacatcttcattacttgaattgaacaaccatgtagttgttcatgaagaatcagaaaccacatgcattatactgatatttctgcttgtggggaagagcagtctgacaatttctagacatgattttcgttttgatggaggcatgcacttttgctgtcgtatgtgacttgatgtttaaaatcttatccttcttaattacattgacttttgcaccttctttcagtttcatcatgtagtgccatctgggctccttaatgagatttttaaatgtttttaacatctttatatcaacaccatctaaaatcacctaaacaatcatcgattttgatgcttttacagtccaaacacactttcaatcgcaaaactaaaccaaggtttagccctcaatccatgttctcattaagtatgttcggattatgcatcatatacgccatcgtagaatcattgagtgtattatattccacaatgttctcatggcttcaaagtaactgatcatttgatcctcgaacatgtataaccaaacaggga

SEQ ID NO: 60718 - DNA, 638 bp, Populus trichocarpa
  Intron number 1 from transcript POPTR_0002s15990.1 (locus POPTR_0002s15990) derived from phytozome v7.0 (chr-ID scaf fold_2; pos 11919482 to 11920119 reverse strand)
ctattgtcaaagatatcagatcccattttcttgaggtacatttttagacacccatcattaaattttatgtctttggttttaatgtaggtttgaattcattgtttcttttttgttttgtgtgttcgaggtgattttatttctgggtttgagttataaatcattagtagtgctgaagttgtgttctatcataattattgcttcttggtatatggggttcctgtgatattatgatcgtgttttccattttgaaattacggggtgtttttaatttgttgatcttataaaaaaaaatatcttaatttaagattgaattatgatcttctggtacaaacttcactttatgcaagcccgtagtggagtttatttgcaaaaattctttatttttgcctgcatggtcaaatcttgagtactaatctttacatttctttgagactatgaaaaccttgtctgcgaatgtggctggagtgtggtaagtgacaaggtatacactagtgagtggttttttactaccatttggagagttgcaatgacttgcagttggtcactgcatgtcttcatttgttagtgcgtcaatcaatagtagttgaaattttgatgttaagatgtgaagggtttaaaattcttctgttttgttgaag

SEQ ID NO: 60719 - DNA, 821 bp, Populus trichocarpa
  Intron number 1 from transcript POPTR_0008s20610.1 (locus POPTR_0008s20610) derived from phytozome v7.0 (chr-ID scaf fold_8; pos 14370206 to 14371026)
gttcttgcacttctttctgacaggttttttttccttcttgttcctgttattgaatttgtctgtgcctctctttggttattgaatttgatgggatttcctttctttgaggtgattaaaagttggtaaagtttgagtcttttctgttgttgtttttttttttttgtcaagagtcaatattctgttatttactgtacttcaatgtcaaaagctcttgcttttatgttagcaatcgcacactcaatccagttttctgaacatagactatttcagtttgacctttactcctaaaatcggaggagtgggctttctttctttgttttttcatttcttttctttttttgggtggaaaaaacctatgatcagtgaaggctgggattcttctggcattctatttcttgaaaagttttctgctgttaagcaatgccaaaataagatcttgatgtggatttgatttcctgtttaattctggaatacaggtctatacattaggaatgctttgattcattatggatgtgtctggcatttagcatttagattagtgatgtagccctacattgccatcatatcttttttgttgcgttgtggttcttacagaaactagagattcaaattctaatcagctttgttttggattactcatgtattcatttgttgttctttgactgggaagtgccatataggatggatgtggatttgtctgttttatattagtgttgaattgtatgcaattcagtgaaaatttctggaatctcttctttatccggtatacatttttttttaatgtgaattcattgtattgcttgtttccacagggttgttcc

SEQ ID NO: 60720 - DNA, 1034 bp, Populus trichocarpa
  Intron number 2 from transcript POPTR_0008s13550.1 (locus POPTR_0008s13550) derived from phytozome v7.0 (chr-ID scaf fold_8; pos 8911258 to 8912291)
ctcgtggccaaactgtgaagtatcttctaattcaggttgtatttaaataccctaataccttcgttattgttgaaaatgctttgttattttctgttaacgttttgctgctagagaaaattggttttcctttgacatccatacctgttagactctggttatcgaggaagggtgaaatccctattctctctggtagtctggttcttgatttatctgattgttggaacaggatgacaaaattaactgttcaaaagagaatcctgtttaatctgttagatttcagaaaaatattgtgcatatgttcttaaagaatttatactgattggcatgtggagcggcacaactattcatggagtggaaattgtagttagagaggaattattattgattttgggggggggggggttgtttgacagcagagtcagattatcccttctccgtttcctttctgatggtttccactccatttaagttgtgatttttttttgagtttgtagatatttttcacctttgcatttagcttttcatgtatttatctttcttggtgttttgcattcatcaattttgtgtatatgagttgcaaattctttgaggggataaaaaaaattaaatgctcttgatatatacacttggaatagttttttttttttttcatgaaatttttaagtgttttatctaggttacttcttcagctgaggtgctgaccccagttttttttggtaatgtgattttgttgagttgagtcatgtgtgttgttaaagttgcttaaagagaaactgttagttaggctaaaatgcgatgcatatgttaattgaacaatttatgccgtaatgtgccagttgcttgcaagaatttataagggaattatggtttcaatgctatgaaaatttgagctgtttgctgatgtgtacaattgcatctagtagatcaggtcatgttagttgttgctttacaatgcatttcctcatttggtccattcatgaaattgacaaagaaatgtttttttttttttttgtttcttttcaacttatagttat

SEQ ID NO: 60721 - DNA, 846 bp, Populus trichocarpa
  Intron number 1 from transcript POPTR_0002s16710.1 (locus POPTR_0002s16710) derived from phytozome v7.0 (chr-ID scaf fold_2; pos 12489659 to 12490504 reverse strand)
gaacgagtgaaagtaacgaagatgagagcaaggagaatttaggctctgctgcagtgcgtggtccatctgaagaataaggacttaaaggtcaaatctttggcggagcatatgattctgtagaattctaccactatatattatcatggcaggaataatgatatgtgcacacttgtcgaggtgattttcagctacttcttcaactgatttcttacactttgcaggatacatcgtttcttatagaatgtaagatgagaaaataacccgtatgaagatatcagcatctggatgtcgtgatgcgtccatttttcttttaatcctattacatgttaacagtttactccaatctaagcttctttttggagaaaaattcctctccaacctttttctatccatgatccagagtcctcttagctttcacaagaatgacagatatgctctaacttagcctggccacttccgagagtagcaacggactttcctcaaggtggctatcattggatagcagataaagaaaaaaaaagttcggctcgccgtctgggtctcggcccaaacgctgccatacgatccaatctattttacaactcaccatcaaatatctttgcacatgattcaagcaggttggttgcaacgagatttttgattgagagatgtgatggttttattttataaaatctatataaaaaatatgtaatttttgtttttgcgaggtgtgatttgtgctcagaaaggattcaactgcacctccaaatctatattgatcttcatcaatttactcaataaatttactctaagtctatgttgtaccttttaaaaaaaccaaccacacctgttaaggaaagtatcttc

SEQ ID NO: 60722 - DNA, 299 bp, Populus trichocarpa
  Intron number 1 from transcript POPTR_0008s13360.1 (locus POPTR_0008s13360) derived from phytozome v7.0 (chr-ID scaf fold_8; pos 8769026 to 8769324 reverse strand)
ggccgccgccaagttgttgggtgagcttaatttgtttttttctgaatgcgtggtccccatgagtttttccttcttcattatggcggccttcctcttctttgtttgatatgaaggaaaagagttattttttcctctcttgggcgtggtccccatttatgcgcagttgttcttcatgggtctcatatatgttgttttttttttcttttgatttcttgatcagaacaagttaatcatgatttgtttatattaatttattagaattaactcctattaatcttactcaatgtttcgaattgcag

SEQ ID NO: 60723 - DNA, 998 bp, Populus trichocarpa
  Intron number 2 from transcript POPTR_0008s05550.1 (locus POPTR_0008s05550) derived from phytozome v7.0 (chr-ID scaf fold_8; pos 3225391 to 3226388)
agtggctgatctgcaagaggctattcataagcgaagtaagttctttattctgctcctctcgatatgtaaaaaagattgggaatttggttttaaattactttcaggatcttagtatggtttgagttttgattggagatgaaaaaccgaaactcttcctataatttaattcacaaattttgattagataggaaatccgaaggaattcaaagtatgccatgggtattgtttcttcgcagaagcgcatgaatcatgatgctttcttagagatatcagttcctttgttgcaaattcaacttttggaattggcaagctgcttttttctgctttatggtggtgtaagagtttgtagatttgcttagggtgctttatggtggagaaatatgcattttgcttctttttcctcactgtaacaagtgctgttggaattggttttcttgcccttgattgtgtcattataatggttattatacttgaagaaggttctgttgttggatttgagttttattatttatttatttattttctttgtacagtactcaattttgttctctatatcatgaaatcatgttgggttttgcattgattggtttctttaatgcaaaaagattctaaaagttttttgatttgatgtctcatacatcattgagatgaaactcacaagatcggggttgtgattttctttttttggttggctagggtggtggtagtagtgatgtggaaggggtttgatatgtgatccttaaaattgagaacaagagctcaaaagcataaaattagatctgaactttgaaatttttgttgacaaaattcaaatttatgtctgctttcatttgtacactagcccctactttttttgatccctcccccaaggagccacatgtacataggagtgttgtgtatgcagttggagcatcagatgcaattttgtttccataaccatttctgcatgtcttacatcaacagccaaaaaattctaccctgcaagacagcgactgacc

SEQ ID NO: 60724 - DNA, 427 bp, Populus trichocarpa
  Intron number 1 from transcript POPTR_0008s06060.1 (locus POPTR_0008s06060) derived from phytozome v7.0 (chr-ID scaf fold_8; pos 3581668 to 3582094 reverse strand)
acgttaagcgtctcattatcaaggtttttttttcttcccctgtgtcttattgctttcttagtctctgtattaactttgtaaatgtgtgaacaaaactaaagttgtatcgttatcatgtagatttgtttttggattaagatatggtgttcacgttgtttttatatatttgactagatgccatgcatcattttcttttagctggaaagactgacaatttcatgttcaattaatctgttctttttttttaatgatactatattatgtttgattaaaaaatgaaaatcttaaccgaatagaattaaacggacttcgacgtttgatatgattagtgattgttgtttccatttttttatcaaaaggtttgcgttatttgcttattttgagatttggttgctgaaggttgggaccgctgttgtaactcgagcgg

SEQ ID NO: 60725 - DNA, 792 bp, Populus trichocarpa
  Intron number 2 from transcript POPTR_0008s10010.2 (locus POPTR_0008s10010) derived from phytozome v7.0 (chr-ID scaf fold_8; pos 6241924 to 6242715)
attcgatttccacagaagtctcgcgttttgagacggtacgttctttaattctcaagatttattatcggtttctttattttttgcttgaagttactttctttttgtgggtttcaagattttcttttattagctaatagcagcttgtgattcccttttaaggaagaatctaaattgggcgtttgttttttaacttttttttttttgggtttctcgagataattggactgccaatttttattgattccgcgtgtgttctggtggaatttcggtccccgactgaaaatttactgttgtttgtgtttagggggcaatttgttcggtcctgaatggtgtcataaggcgattgattagtcaaggattacaagttagatactcgccttttactttatggttaaggataataggattagctttatttctttttggtataatttgtgggttttcagctataaattatgggttttcccttgatttatcagatgttgaatcctagctcatgaagtcaaaagggttgtacaatttaatatgcggggcttaatgaaaacagtgttagggagttggaatttgccttgaaatctctacaacctattgtgctttatgtgttagtgagtcattttgggtttgtcatcatctttttttcacatgctttcttgtccaaagtgcagtttatttattttaaacgctgtatcattgtattttctgctttacaattgatttctccgaacatgtacttacctctttatctcttgcattgtaggtcgtggagtcttctgctgccaagctttttcctcg

SEQ ID NO: 60726 - DNA, 524 bp, Populus trichocarpa
  Intron number 2 from transcript POPTR_0002s19770.1 (locus POPTR_0002s19770) derived from phytozome v7.0 (chr-ID scaf fold_2; pos 15694879 to 15695402 reverse strand)
tctccaggttttttgaaacttgaacgatttatctattaaggcatgtttagagctgcgcctgcatgttaaaaatgaactaaaaaataaaatacattttaaaaaacaatttctaacagcctctcaggagttcctctgctctcttatttgttttggtttcatggtttgtcttattgtttcatttttcctgtcagctgtgttgcagatacttttgattatatgaatcaagtatttgttctttattttacttatctgtttttcaaactttgaaaacatcagtttcggttttcttcgaattttcgagcctgcaatcttgtctttatccattttcttaatgtatgctgtaggttctctaattgtagcccatgaacacagaactttctgtattagaaggaaaaaggaaagctttctatgattttttttggatgaaattcgtaatttggtcttaaatgggtttagtcttctcaatttcaaagatatattagataattaattatatttgaatttttttatttttttccagaatt

SEQ ID NO: 60727 - DNA, 549 bp, Populus trichocarpa
  Intron number 1 from transcript POPTR_0016s03530.1 (locus POPTR_0016s03530) derived from phytozome v7.0 (chr-ID scaf fold_16; pos 1893478 to 1894026 reverse strand)
tggtatccatgtaatttcatagaattatttgatctaatgcttcatgaaaaacataagctaaacgatattttaaaaatggttcggattgatccatggactcatggattaacccaataaaccgtctgtccgtaccgtgggtgtgggtgtgggttcgggtcggctagtatgatttcttgactcttccccatatccttctgcatgcaacaaaaagaataggaaaaaacaaatatcacgacagagagggagagacgaagaaatgaaagaaaaaacactccctgagaaacaagccctggccctagaattggactagatagagaggggagaaaccctaattaattcatcacaggttcctttcttcttctttcggctggtttagttacgaattaacttggtgaaaataagtggtgatggttttagaacccaagattcatttctcttaatcctattctttcttgttaaaatttaataatggaataattatgttttatttgtttactaattttgttgttttgattaattaatttatgaaatacttgttgtttaggtttg

SEQ ID NO: 60728 - DNA, 453 bp, Populus trichocarpa
  Intron number 1 from transcript POPTR_0001s30320.1 (locus POPTR_0001s30320) derived from phytozome v7.0 (chr-ID scaf fold_1; pos 28837488 to 28837940 reverse strand)
ccaaaacatacccagctaacattgacactcctacagtccaacctgtagacattcttaacaagctaaccccatttactgtctcttcttagatcatcactaaccttcatcgaatttgaatttgagttcccaattatatatgtctggctggtttatatggaaaggatatcaaactcagcaaactgtttgacaaaagtcctgaatgggctattgtgtttttgacgatcagttttccagtataggtttcctctgcctgaattagactattaaaggtgaacgtcaagacttgtaaaatgtggacatggtatccagattagtatagaattccttaatctcatgcagttttagttggcattgcttttgcttcagccatttatataactaccatgtttgattaaacttctgttatccatttgtttagggaaagtctactgctgctgtaaccaaagaagagct

SEQ ID NO: 60729 - DNA, 876 bp, Populus trichocarpa
  Intron number 1 from transcript POPTR_0004s01870.1 (locus POPTR_0004s01870) derived from phytozome v7.0 (chr-ID scaf fold_4; pos 1144259 to 1145134)
ggtattctttacagtccatttgttttaatgggtttctcatattttagcttggtttggttaaagtttcaatcattaatgtttttgtttgaagtaagaggtaaattgctggtgccatggcttgctcttcgtatgatgataaaaaagttgaggcttaccaaatgtttgtgatggtgtattgtatttgagaattgtaatgtctttgaaaagtttcagtttttggtttagttgctatcagtggtgtaagtgaaggtactgaacaattttaagagcaaaaaatggcccctgcacattttggctttggggaaagttgacctgaaaatagcgagcatttgtggtttctgaagaaattatgatatttgagagttgtaatgtctttgaaaagttttgagttttagtttcattgagttgttgaggtattgtgagtattagttttatttgttttcttttgtaaggtttttgataaggtattagcaatggcccttaatgaagttgctgtttactcgaagaaggtatcgagttctactattgaaagttgattctatggaaggagtgagttggaatttagtgataacagagaagttgttcctacttgtagaaacgtgggatcttagccaaatttaatggaagataagaagagaggtttctacacaatttttctaccttcttattagccttcaattaaaacacttgatagccctttgaggccttatttaattcagcttgccattccttttttggtcttgttatccacatttaatttgaaattcatttgttgttgcaatttacatttgatgttgcctaatcttgtgaatagtgaatgtggagacgtaatttgtttcagttaccccgaatatactcgcttgcttccgtgcccct

SEQ ID NO: 60730 - DNA, 335 bp, Populus trichocarpa
  Intron number 2 from transcript POPTR_0015s05620.1 (locus POPTR_0015s05620) derived from phytozome v7.0 (chr-ID scaf fold_15; pos 5966227 to 5966561 reverse strand)
atgtaaaatttattattctttttttaaaatgttgtctatttttaaaattgattaaatttggaagtgaaattgcattatgttcagtggtatgatattatttgtcatttggaaatttgatattttggtattgttagtttattagtggtttcctgatgaattaaattttggtaaatatactgccttgtggttggtgttccgatcgatatgtagttgattactggctggctcggttattatgtttgctttgttttttctttgttcttctgaaagtgattttgagatgatgtttgttaatttcaggtacgtgtgaaggctgctctgaacaggcaaactaa

SEQ ID NO: 60731 - DNA, 487 bp, Populus trichocarpa
  Intron number 1 from transcript POPTR_0018s04900.3 (locus POPTR_0018s04900) derived from phytozome v7.0 (chr-ID scaf fold_18; pos 4332404 to 4332890 reverse strand)
atcttcggggtaataatctttaggctcctttattttttttgctttcaattaaagatttaaatagctatctttatagtaatttttttttggatctgggtctaggctgccagtgattgaaagctttgagattaatatcgttcatggtcactgctgtaggtctagacttaaagaatcagtttttgatacctgcacacacacacacacacgctctcatatatacacagagagagaagagattggttttcttttaatgtagtgccattaaagcttctctccaaattagttgttgattgaaaatgtgctgttgataagatgctcgtttcatttttcatgcgtgttgtttatatcatcaaactcttcttgtgtgatgaccttgctcttccaaggaatgcaccatttagatgcgtttagtatatatattttgattattgatgcttttgcttgattcataggcattaaagaatctgacaccggtttagcagcaccc

SEQ ID NO: 60732 - DNA, 498 bp, Populus trichocarpa
  Intron number 1 from transcript POPTR_0007s13630.1 (locus POPTR_0007s13630) derived from phytozome v7.0 (chr-ID scaf fold_7; pos 13669714 to 13670211 reverse strand)
aacaagatcgtcatcttctccaaatcttactgcccgtaaattctataattctctctcttaatttctgttttatgggattttttttcatgaatattaatttgtgttattagtattaatttatggcttggacgtggatgattttgttcttttagttctccttttatgattgatttgtgtttcctttttagattaaaaaagtgggtcttggttagaattttggaaagtagtttttgatattggaatttggttagtaaattattgaattgggatatgaatttaattttcatggaaagttctttgaattatatgaatttctgggaattctggtttacagccaatcgtctatgttttatgaattccgggaattaattttaatacacagctaactgtgcagtgcaaaaactgaatctcacttgagcattttgggaggaagaattgtgatttgttttctttttgttgataggtattgtttgcgtgccaagcgtgtgttcagtgaac

SEQ ID NO: 60733 - DNA, 519 bp, Populus trichocarpa
  Intron number 4 from transcript POPTR_0008s16860.1 (locus POPTR_0008s16860) derived from phytozome v7.0 (chr-ID scaf fold_8; pos 11335624 to 11336142)
tccagttgtaccaattgtcttctttggctaaccaggtacatgctgcagaaccttggcaacatattttgttttgtattttagcttgtcatttgcatgccattttggtataatggagagattgtttttctttaattttccagtgtgagaaattttgagcatgttgatcattgcaaagtttggtgcaaaagagttattgaggataaagatattttgaggctttatttatcttattttattcaaaccatgtcacatcagatttttgaatatgtcccactggaacagcctcagtgcatagttttcaagtcatgaaaggcatgcaagatgaaacgcagaacaaggaataggataaaagcagataattttaggcattgattcttcactagataagaatcttggcaaactagaaaaaaaatcttatttacactttgtgactgacagtcattgcctatcctcttaatattaaggaatttacaattttatgctctaacgtgttttatcactcttgcatgtcttagagca

SEQ ID NO: 60734 - DNA, 776 bp, Populus trichocarpa
  Intron number 2 from transcript POPTR_0006s06340.1 (locus POPTR_0006s06340) derived from phytozome v7.0 (chr-ID scaf fold_6; pos 4522620 to 4523395)
catttcatcagttaagttgcaacattcttttcttttcggatattaattaactagcggttgattgataaaagtggaactcgaattcaagatcccaccattctcggtttaggaagagtacatcttgaccattcgagctacaagccattcatgctttacaaaatttattttcattttttttgaaacgcaaaaggaagctgttagtatatttacagaattcattgttgctaatattttaattttgtttgtttatattttttatatttcataatattgagtttaattagctgaagctcgttagtcgtaaaaaaaatcattaattgccttatttttgaactgatcagaacttaaatttatggtaatcaagtgtttaaggctgtgctagctgccaggtgccagctgcctgtcaccattgtacatcgtacaccgtacgccaattatttccttcatgataatgatacttcatttattggttctcctttgctacgtacaatatatatgtggcatggctcttggttgtgcatgatttctggtttttcaaggctacagtggcaatacaatggaatattatttgaatttgtctgtgggggagagaagaatagggaagggagggtgctgagaaaaacatcagctccactaaggacacgtttttctcacagtattaattcgtactatgcatgttacatgttccaatgatcagttgttaagatcaacatgcactaattataattaattacataaccaaaattaatttatatttattcaggagttatacagag

SEQ ID NO: 60735 - DNA, 940 bp, Populus trichocarpa
  Intron number 1 from transcript POPTR_0003s01360.1 (locus POPTR_0003s01360) derived from phytozome v7.0 (chr-ID scaf fold_3; pos 1203317 to 1204256)
accattcccatatccccaccatctctgttaaggtaacccaatttttcttttttctttttaattgatacactttgatatgaatttcttacgatgagtcttaaattaattattttattagaatcaatttttccccttgtttttgttccctatgtgcaagatgtgttatacttagaaattcgtaggtattactggagtagaacctcgtataaaagtggtgcccatcacaatggcacactccttcgctcgcccattgtaataaacatgaattagtctcgatgatgttgataataatcatacagtatatcctcgataagctaataactttgattaaataatatttttgttcgtccccacttaaatttaaattttaaataatatattgatgaactaatatctctattaattaataaattttcatgaccccaatggtattaatttatagaggtttaactgtatatggatcgtgctttctcgacgtgagggagagaggagtgatgttagatattaagaaagtatgataaaaaaatttaagaatacacttgagttgttggattatgattttaaagtaggattcacttgtagggctgttgtgttagtgggactatgtgtgtttttgaagtattttcttgttttttttcttaacatttagcattacttgggagttagtatttaataattcttgttttataacttaaacttgcacttgtgcttacattttttttttaaaaaaaaaaattaggtccatgaataattttacagtagctgctgcatttatgtgacgtatgagagtattaattaactcttggtatatctaataatttctctttcatggaggtcttaattgttcgaacttgtatggctaaatatccattattcccttgttaagtttgcttaagcattgttctcaattgtttgtttcttctttaggtgacatcaccat

SEQ ID NO: 60736 - DNA, 542 bp, Populus trichocarpa
  Intron number 1 from transcript POPTR_0030s00390.2 (locus POPTR_0030s00390) derived from phytozome v7.0 (chr-ID scaf fold_30; pos 146494 to 147035 reverse strand)
catagattgataaggttttagtggtaagtcttttaaggctctcaaaactcctttttgcgtcaactttctttcatttccctgttttttcttgaaaaaaggttttagctttataaccacgttgcttcaagttcaagaatttcagggtttgttgcatcttttctcaaattttcctccttgatactatgggggttcatactggatttttttagaagctttagtttcctatgtcttcatggatttttggtggagggttttgattagaaggtttttcttttcttttcttttttattattattctgggttgatgctatatatattaatttcaaaacggtgttttttgtgggttcagtttagatatcgagtggcccaattgaaacctggaattcttgaaaccatttctttataatctaaattcggttttggtgaattgtttcaatggttgcactatgtgttaatttttcagtaaagttttgtcccttttagcttgtttttttagccgatcactcggtgttttctatgtttgtgcagtaacctgaacaaaa

SEQ ID NO: 60737 - DNA, 325 bp, Populus trichocarpa
  Intron number 1 from transcript POPTR_0014s14610.1 (locus POPTR_0014s14610) derived from phytozome v7.0 (chr-ID scaf fold_14; pos 10684510 to 10684834 reverse strand)
gcgctcttgtctgaaccaattttccatttaaaggggtaagtgcaattgcctcttctcttttattctctctccctgctttcttaattatacttggagcaaaactgggtatgcgaagacttccttgcttcaatcttgagttccaaattgcatgaaaaattgaatcttgagcttcttccatcaagaaagagaagaaaaaggaatgaactttgattatgcgtttcgtttcttggctttatgactgtttttgttctgcaatcttatttcattttcttcttcttttttgtttgcagggctgttgttacagttgttatagctgttgaatttg

SEQ ID NO: 60738 - DNA, 515 bp, Populus trichocarpa
  Intron number 1 from transcript POPTR_0001s05500.1 (locus POPTR_0001s05500) derived from phytozome v7.0 (chr-ID scaf fold_1; pos 4221042 to 4221556 reverse strand)
gcttttctccaacataaatagtgaatttgaaagtatgttgtttttttatacccttttgtttgatttcttggaaagaatgagaaaaatgagaagctagtgcttgatttgatgaattatttcaaggcttttgtttaaatagccaatgaatagaatgaaaggaaagcagaaaaaaataatagaaactgcagattttctgtgttgtgaattgacagtttcagttaagggaagtacgattaattttgattaaattctttgagtatttgctgataaccaatcatttgaaccagcaagtgggggttaaaaaattttgaaaagaagaaatagaagttttgaaagcaaaaccaacaggatctattatttttaatacactaaaatgtttgatttatggtcttatatgccaatatgagattgagttttctggttctttctttgatgtcacacagattcttgttttgaatcctgattgactagagttatgaaaaagggacaaaattaatgttagcatatggcaggct

SEQ ID NO: 60739 - DNA, 958 bp, Populus trichocarpa
  Intron number 2 from transcript POPTR_0001s20990.1 (locus POPTR_0001s20990) derived from phytozome v7.0 (chr-ID scaf fold_1; pos 19214803 to 19215760)
caaagcagtgtgattttgattgtttggggtgtctggtaatttagttgtttctttttttgcataagaaaaaatggaaggaagaaagagaagctgttcctagatgacttgcttgatgttcaacaggtgactggcgagggagatgacaagtatctaatagctacagctgaacacccgctgtgtgcatatcatttaaatgattggatccatcctacacagttaccaatcaggttataataattgtctagggactactgtttttttttctcacaataactgtgattgcctttgtctcactaatttcttgttttctcagatatgctgggtactcaacttgtttccgtaaataggctaggtgcacatggtcgtgatactcttggtatttttagggttcaacagtttgagaaagtggagtatttctgcattaccagcccgaatggcaatgaatcttgggaggcactcgaggaaatgattaaaaactccgaggagttttaccaagaggagtggtaacgtcttttttgtgtgtgtcatctgttatgcatattttcctcctatggtgtttgtgagacagaaatctaattacacgaggccattttttcaattccacatggtttagtgagttgctggatgtttacctttgactgaacgccatgattgcaaggcactgaagatactgacctggataattaaaaaggaagaaaagatactgattttgagacgaggaaagagaactacacggtccatgttctggaaattagagaaactgcccttttgaatttgtgtgctttgggtgtgatttatcgtgctggaagtttatttgctgggtgatgtgtgttgcattgtagaagaaaactatgggaacgttgtttcgctgctgctgcttatagtgctgtcctcttttatgtgtgtgctgctacttgactgtttgtgccagctcagtgtttacgatttgttgaccaac

SEQ ID NO: 60740 - DNA, 727 bp, Populus trichocarpa
  Intron number 1 from transcript POPTR_0003s06780.1 (locus POPTR_0003s06780) derived from phytozome v7.0 (chr-ID scaf fold_3; pos 8310236 to 8310962 reverse strand)
atctctttaaagtagaacccacttgatcatctcaggtattatccttttgtttctatcaatcttgtgtgaaatgatatatttacctatggatatgcttcagatcggtttggattcattgatgtcatctatgatttagctccttttttttctaatttttttccagaaacttttgttctatgtcagttactcacaagccatacttttggattcattttgctattatctattagaaatttgaagaaacttctgtagcttattccagtaaattcattttcatggagtctaaatggttccaggatgttcatgttgtagtattgcataagatataattggttagagataaatagctacatatatactgctaggagttgaaaaatattgcaaacaaaaagggttgaattagcctacgggtttaggctagtgaaaagatttcagcctgtgatgcacgctggctaaaggcgcatgtcacaggtttgaattaaatgctagccgaagaaacctgagtttacctggtgtaaaggcatcagggcatgggcttattcacatatccgtaggttacctgaaactgaaagggcttacagaacaacaaaaaaaagggagaacggatcgatagattcttaaaaccatatatggtacctgaaaattatgccgtagttcttcagcataattagtagtattgttgatctgacaccaaaatttggcgcattattcagctttacaaatttgg

SEQ ID NO: 60741 - DNA, 853 bp, Populus trichocarpa
  Intron number 1 from transcript POPTR_0007s00220.1 (locus POPTR_0007s00220) derived from phytozome v7.0 (chr-ID scaf fold_7; pos 20342 to 21194)
cgaaataaaaaatttcctcaaatatactctctcaggtattcaactctctctctctctctgtgtgtgtgtgtgtgtgtgtatatatatatatatatatatatatatatatatatatatatatatttgttgatagatactcataattgattgattaattaattaatttggaaaagaatgaattattacggtttgcttctctcttttcttgatttgctctgggtttagatttatctttatcttatatatgatgaattactctgagtttagtgtttttttcttgaatactctattataagattgattgtgtgtgccagctcagtcagagtcggtattatttggatgatggaattagctagctttgtttttgaatcaatcaatcgtagttttactaataaaaaaaactgaattataaacaacaatcaatcagataatttggtaaccaatgcattgcatgaaatcccaaacagaggagatgctcatttcttttcatataattgcccttttccttttaagctttcctatctacgaggtttagattagactcaggagggtatgattttcgggtgcttttttttggttttgacttttcatatcaaaattatccgaaagcactggaaaaggcatcgatttgatactttttctgcccaaacgcactttcaaaaggcttttcaaatgcatttccaaacacagccaaaattgtgtccttgattgagttgttcaaaagtttgcacatcatatggccgttgattgcatctaccttctcttcaattgtatgatgtgataacatttctcttcaattgcatgtttgtatggttcagctacacagtttctgtttctctttggattctcgaca

SEQ ID NO: 60742 - DNA, 605 bp, Populus trichocarpa
  Intron number 1 from transcript POPTR_0008s05690.1 (locus POPTR_0008s05690) derived from phytozome v7.0 (chr-ID scaf fold_8; pos 3301003 to 3301607)
caaaaggcctcagagacactgatttctttggtacaacatgtttttgcattcctatacgtatttatttcagtgtccaaagttatgtctatgatcatgttttctctctctctctctttttgatcttgtcgtcaccttttccttggtacttgctgttctgataacttaaatgcgtgtcatcattgatttcttctgattttatttcgttcatcatcctattttcttggttttccgccttttttggctcatttcttttattgaattgccatttccgtgtctagtttcaaccccagttcagatacagattgttgtgtaattttattaaatgggttgcaagcctgtaatttggtagacgatagtagtgaaattatgaacaaattccattcacggccgtggatcatgaacaattacatatatattccttaaataatgtgataatagacatgacatgcctttggtggacttgcagaggcagtaacaggggatgaatcctctcgttgagaaatgaaatacaatgagaaccgaactactgaattctttcgtttttttggttctgaatatgaactgaagattttaatttctttagtttcaatatgatgtcaggtgat

SEQ ID NO: 60743 - DNA, 571 bp, Populus trichocarpa
  Intron number 3 from transcript POPTR_0010s14560.1 (locus POPTR_0010s14560) derived from phytozome v7.0 (chr-ID scaf fold_10; pos 14115401 to 14115971)
taccgtgctccagaaaagctgaagaggatcagaaggttaatttcgttttttggtattcgtaacttctttttagtatgaatttttcgttttgatttcaaattgagcatagtgaactcattcgttttgcattttgattataattaccttttttggttgatgttatatatttagtaacgaagtcataagacaaaaatattatatttaaggagttggtttggcatccatccttgtgcaacataggcattatgaccctctttgttgaaagaggtatttagttggtctatgatgaatgtacttgagggaaaaggagggggctaaaatggatgtggaacaaaatagtgctaaattctctttatatcattcaaactttatgctaagaagttacttttaagaagatctgtaagcacctttttttttttatttgtgcttctactggaagtagaagttcttagctctggttgattttgattgattcatgtgccaacattgtttttcttaattcataaggaaaagctaaaggctgcccttatattttgtgtgcagatatctctcaagtgattccacccatata

SEQ ID NO: 60744 - DNA, 675 bp, Populus trichocarpa
  Intron number 2 from transcript POPTR_0011s04670.1 (locus POPTR_0011s04670) derived from phytozome v7.0 (chr-ID scaf fold_11; pos 4660512 to 4661186)
ctccttggttcaccaaaggcacttttgagaggtaatgaatctaacgtgttactctgttttttcttgctgggaaatttagatgttgggctttaattctattgagctatttgattgaattgctggatatcatggatttgtttttgaatttgaacaatgggtgaaatttgttcatttcatcatagttgttgcatattattgtttccacttctgtaaatagtgtgaaaggttgtggattcttcattgaatgaatggaactggaatttattatctacacaaatacagagttgctcttgaattgtgctcgaagtttttaaatttactatcggttctgattccatacgaatccccaaatcctaatctcttgttaatcttcttaacaaagaaattgcttttccatggatttggtttggtctttgtcatttgttggccatgttcaaagttaaaacaaactggaatttgattttggcactgaatttagcctatgtgattgagtgtaagctatgtgatgtttgtgtaaatttgaaactttacccgcactaaacccaggatattaccagagaaccgaggagttcaattgctattttgtttttctgttttgtggtggtgcactgaaagacgatttatcttttcttttgtctagatttgttcgctttgttagtacaccagcagtgctcg

SEQ ID NO: 60745 - DNA, 979 bp, Populus trichocarpa
  Intron number 3 from transcript POPTR_0008s19560.1 (locus POPTR_0008s19560) derived from phytozome v7.0 (chr-ID scaf fold_8; pos 13476789 to 13477767)
atctcgatcttatcaacgacaccaatcaggtatgtatcataattcaaacttgttctagatagacctgcattgctagtagcttgcgcaaagtctttcctgaaaatgccctaggcgaatatctttaaccaaattttaacttgtagttcgttcaggattacgcacataaatgcatgtctatagagatacaaagaaaggattttctcttagcgttttctgaattgtttcttactccttgttgttgtatgacttggcagatttttacttttaaacttgtagtgtgttattacttcatgggagttgtaaatttatggcctttgcttgatatgctccaagtggcatagtttagggagaaaaagagcaatagatcagcagaattagggctagaaacagtaggaaagaagctggaactgcaaattcaattcagggtttaataaaacccctagtttctcaagtttattgatgaataatagctttaaatatgatttacagattgtttatactaggttcgctattaaattttttaattctatccctagattaaactcctaaaaaaaactttctaatcctagccatccaatattttaaagtatgcacggttacaaacaattaaaataaaaaaaaatcacgaaaattataaataactataaaagctcctgcataaccaagcttctgaagcagttagcttacttcaattcagatgtgggacttttttcatttttctttgcacaagttttgatcctctgtccttagttatcatttcagctttttttgagtgttgtttttaatgtcattgaaagctgtttgtctttgttaagattctgcgtgtgctattgtatactgctgaggttgttgcactttttgataactatcctcaagatttttcttaatccttgcttttacattttctagtatctaatatgcatacacattgtacttaagtagtttttttgatggttcagtcctgttaatccagtgacaa

SEQ ID NO: 60746 - DNA, 470 bp, Populus trichocarpa
  Intron number 2 from transcript POPTR_0019s09740.1 (locus POPTR_0019s09740) derived from phytozome v7.0 (chr-ID scaf fold_19; pos 11338050 to 11338519 reverse strand)
tgtgcccattttactgctcgtattctggttataaggtaagattggctagtaaatgaggaaaacatttggtttatttctttttgttttccttttttttttttttttaaggtaaagaatatttcaactagaatcttttctagtgggcttgcctgctgcgtcttctgggtagactggtcatgcaaaacatattaggccaatagttggagaaagttgaataatattaggtaccagatttggcacaaatattgacaacttctatgtaaggtttttggtaaaaaagttaaattagattttttcttacaaaaccttatgcatagttgactttcgagcagaaaatggccagtgctgttctgggttcaaacttcgttatcaatgtccaaagtgaacttatttataaattattttaatctcagagtcaaaagacatgacagaatgaccttgttattttgtttttaatttcttttttcagg

SEQ ID NO: 60747 - DNA, 1020 bp, Populus trichocarpa; identical to SEQ ID NO: 56890
  Intron number 1 from transcript POPTR_0009s06240.1 (locus POPTR_0009s06240) derived from phytozome v7.0 (chr-ID scaf fold_9; pos 6064427 to 6065446)

SEQ ID NO: 60748 - DNA, 661 bp, Populus trichocarpa
  Intron number 2 from transcript POPTR_0001s33110.1 (locus POPTR_0001s33110) derived from phytozome v7.0 (chr-ID scaf fold_1; pos 31344304 to 31344964)
ctgtaaaagctcaaacacttgtactttctaggtctttctctttggcaatccattgtgttacaattgtttcttggaaatatataatctctgtgtaaatctgttgagatttttataatgttttgaaatagctcaagacaacaaaaacaccagaattcctctgtttcctgtttttttggtctgtaaaatgcttagttgtagatttattgactgtatctttattgaatagaagaaacctgaagtatcaaaaatctcagactacattaaattggtatcctcgctcactggtctctgatgctataaataaacagcttcgtttgtgaacgcctaaatagaggccataagttacccttatcatttgaattgcagaatgaacatccgcagttgtttttattcataaacagcaacatttctttatcattgcattgcattagaattcgagtcaatggaagtcaacagccatttgcatgaagaattacagcaggaacttccacacatacatttcttttttttctttaatgaatgtaaatgtcatgtttcctggatgtggtggtgctttttgtttttgccccttcaagtccgataattttcaaaatgatgaggttgtgttcattgtttgtcctttttagcggaagggatcagttgctaccaagtgaagaggaag

SEQ ID NO: 60749 - DNA, 750 bp, Populus trichocarpa
  Intron number 1 from transcript POPTR_0001s33870.1 (locus POPTR_0001s33870) derived from phytozome v7.0 (chr-ID scaf fold_1; pos 32027075 to 32027824 reverse strand)
tcggctcgccgatccctcgctcttgaatctgatcggtagtgtatttagttaaatttagtctccatgtttttgctcttgattgattgcttgtatgtgattgttagggtttcctggttttaaattagctgtatttagatgtggcatggtttatctttaagcttattttggatatattgaatacggatttaatcatggtgattagtataggtaaacatgattatttttttcaggaaaatagaaatgaagatggttataaaccgaattttctaggtttctaattttttcttcttttttattgatttgtttgaattgttcaattttcaattaagatgaattgaatgctgatttgtacttgaaaattggtaactgggaacctaaagtgaaggtatggatttaattgttgaagttttgatttaaattaattgaaagctaatttaattataaaactaaaattagaaaccaagaagtgataggactgacggagtgcgataatgcaattgaattctgaaaaaagatacttttgaagaggaatgttcactgtttatctccggactcaagtttcggcaccaaacgaggcaattggattttaactatatacatgaacttcagtatctttgctaggagctaaaattcatgtcttggatgttttttttttaacatcataaatattttgtggttctatgattgtaatgacttgtgatccttgcatggtcagtcgagcatttgagcaagcaggtagaggtcttggcc

SEQ ID NO: 60750 - DNA, 683 bp, Populus trichocarpa
  Intron number 1 from transcript POPTR_0002s19180.1 (locus POPTR_0002s19180) derived from phytozome v7.0 (chr-ID scaf fold_2; pos 15111306 to 15111988 reverse strand)
gacgattggtcattgatctcttatgtaagtccaacagaatcctttgcatttgtcaaccatctttccttgttattgacgagtttctgcttctttcagaatgttacgtagaataatgctaacatgccgcttcaaaattgccatccaatgcacggatttcggacatttagtactccaaaatttttataatcaggaccaagtccataaagaccatggaatttgtgcattctgaacttgcctccacaacctctaataaacagtactaatcagagaacaatcatcttctttacacccgacataaaatttattttgttcatcattttgtggctactgtggatctgtttagtagctgctgaaatatagttgaaattgtgttttgctcttatagcatttgattaattaatataaactatcattttgtgtattcttgaaaactctttcttgaaatcttaataccaaaaaaactataatttatatattttttaaactctaataataaaagctaccacaatccgaacacacgcatactcttgaatctcttttttctttttggaatctgcagaggctagaaactagacttgccccatgtttttggagaacaactgaccaaacaagctcctctctcgcaattgtattctgtgtatactgcaggcgaaagtttgaatacaagttacttgaccccttat

SEQ ID NO: 60751 - DNA, 712 bp, Populus trichocarpa
  Intron number 1 from transcript POPTR_0017s10480.2 (locus POPTR_0017s10480) derived from phytozome v7.0 (chr-ID scaf fold_17; pos 9912440 to 9913151)
tcaatctcacactccgtgttctctctcgtcccgaggtaattcataaaatcaaaatcattttatgtatgttttttcttttgattgaaatggatggaaatgggtattgcttgattcgatggtttttcaagggtacttttttgctgttttgctttgttttttcagatgagctttttcttcttttttttgttgggtttgtgttgatttaagctagtgaattagttttacttggtttcgagatgcatttaattggttttagctatgcagcaaagaaaggagatgcatttagtctgtgattttattattttctgttgggcaaagtgtgttccagtggtatttagagcggttttgtgctgtttttttaatgtgctgtatatgattctgttagctagcaaaacttggttttgagacgggtgtataatttagattgctagcaaaaagaaagaggagattaattcagcttgtcattttatttgctcagttgagcttttcaattatcgattgagattttggcttagaagcgaagcatgtggctgtggaaattgaggactgaagttttatatttttcactcatttcttcttcactatagtcagaattaagcagattcttaaatggtgagtgtgaatgcttgtattttcattttgtgaaaatttgatggaagaaaggttattttgagcaggtgtcacgtttgccccatatctttcaacgtcttgg

SEQ ID NO: 60752 - DNA, 557 bp, Populus trichocarpa
  Intron number 2 from transcript POPTR_0006s00650.1 (locus POPTR_0006s00650) derived from phytozome v7.0 (chr-ID scaf fold_6; pos 341558 to 342114 reverse strand)
tctcactcagagaacctgttggagttctaagtttggtgagtttctttaattcttatatggttatgctactaataccgttattatgttcaatttgcaaaaaggtagctcaatcaaataggtcctttgaagcaattcaatttggtcgtttcttcctggtcaatcttagatatggttccatgtggccaaagaataatgatccctaaataccaagttcaagctgcaacaagcagaagtcattctaaacaggcttcctagattctcacttagtcatgccattgagaaaaagaaaaaaacatgtagtaaggctaacaataatcgatgacttttcttcttttctttcctaaccaatagatggaacttttagcagtagtaaaactgagatagtgtccatctgagagctgcattttctctggggtttaattgctgatttataactggtgaagtagcttgagatgctaaatggtaatgttgtgaataaaacttgagatttcaatagcatatgattagttactttaactcattgcaggaagtatttgataaagaccgtttcaaggcag

SEQ ID NO: 60753 - DNA, 470 bp, Populus trichocarpa
  Intron number 1 from transcript POPTR_0006s00650.1 (locus POPTR_0006s00650) derived from phytozome v7.0 (chr-ID scaf fold_6; pos 342141 to 342610 reverse strand)
tagtactcaagctgggcaatcaggtgattctaagctctatgattcttttttgtttgtagtaagtggttgttctatgtttgatgatcataaatgcactggtattggttgctttgtgggacactattttgctgatgtgataaacttctgaaatctcaaacaaagaaagtttatggctttgtcctctgggcaactgaatttattgtcttaccaagtagatggttatggtcataggatccccagtcattacattgttgttgatctggtccctttttgtacttttcccattttgtttctcttctctgttctttggttgaagttggatcagcccattgtttcttgactggactgttttctcctcttcagtttgtgttttttgttttatcaatttgtcgacttcgttaagctaccttattgactatttccttcctgtatcagacagcaaagaccaaggttattaatagttgtcttaa

SEQ ID NO: 60754 - DNA, 631 bp, Populus trichocarpa
  Intron number 1 from transcript POPTR_0008s19260.1 (locus POPTR_0008s19260) derived from phytozome v7.0 (chr-ID scaf fold_8; pos 13221915 to 13222545)
tacgttggactctcctgttgtgaagttgggcgtatgttgtttgtaatcaaagcctattaatttaataatcagtttttaataaagacataaagcagcggatttctacgatgaaaattacataataagtggcgtggacctgaaagccttctcgcatatgaattcctgcctaacaagagtctcgatcgtttcatttttggcacctataaatctatatttacaccttaattttgatattgcgaaaaccctattgttaaacgagcataaaacctaattgctccactatcagtgaagcaattagaggatgtatctctactccaaattgtagagttaaaataagcttcgggatcttgctaatttacacatacactgtctcagacagttttcacagggagttcgcttctgttatattgattttagacttcggattgcccatcatgagagccccaattcatgtccaaatccaacagctatcaatacagtaacaacgaagaatacttaccttcttcatttctgattgttaccagtttttgtctgtgttcgtctgaatgctgagtgaaatggaacttgatggtgttttgcatatctaaacgtggcagatcaaaataaaggccagacgctgaactgggagaat

SEQ ID NO: 60755 - DNA, 524 bp, Populus trichocarpa
  Intron number 1 from transcript POPTR_0011s04530.1 (locus POPTR_0011s04530) derived from phytozome v7.0 (chr-ID scaf fold_11; pos 4500373 to 4500896 reverse strand)
gcgaagcgtggatataagctgcgtatcctttcttttctgtcttgatttctgcgtctcatctgtaatgtccatgtttttaagctttgaatcatctttaattttagcttcaagcgtgttttttagggtttttttagtgctgattttaatttgagcttgttttcgagttggattttagctgtttttagttttctaaaactttgatttttttaaaaaaatggtctttttttggttaactgtagaaatttcaggtttttatttttattttttaatttttctcgtgattttcttgaaatgctttctttctctgcttgaacgtaattcaatttctttttcttcatttcttgttttagttatagtttcaggtctgtacttttatttatttttttgttacaaataatttggcgagaagttgttttaatctaagctaagagagaagtattttggaatcttagatcagaatattttcagtatatttattttcttgactgagatgaaaatagaagaatttgtggctcattctacca

SEQ ID NO: 60756 - DNA, 640 bp, Populus trichocarpa
  Intron number 1 from transcript POPTR_0016s11520.1 (locus POPTR_0016s11520) derived from phytozome v7.0 (chr-ID scaf fold_16; pos 10711754 to 10712393)
tggcttctgctgcaattgtggaacgctcattctatgtaattgttcttctttcttgtattactactaagattttttgtcgacgttgagggagtccttgtatatagtttcccgttttggtaaattactcatgcaaaggttgcattaggattgttgtcgttaattaaacgatatatgagtggccaggatatataggatggtagccctgttataccttgaagtttcttacataggaaaaacattcatcaaattagccatacccttttgttttatcttgagctcctaattaagatcaaaatcatgttcacgcttaaatggaagcgatcgagagaaaagttactgcctttgatactgcaacgtcccaagattcaatatcctactagaaaagaaacgtgggtgtcaattgaactacgttctttagcaaattcaatacacttcttcccacgatcatctaattatggaattattttttttcatccactttggaccgacctagattgcatatcctagcaatattattctgtcggagagtgtatatatatatacaggcatgcaaagatattttctacttgcttttctacttgtttaatttgttgtgaatgttttaggtgaaaaaccttacagttcgtcggctgtgctccga

SEQ ID NO: 60757 - DNA, 564 bp, Populus trichocarpa; identical to SEQ ID NO: 60384
  Intron number 2 from transcript POPTR_0016s11520.1 (locus POPTR_0016s11520) derived from phytozome v7.0 (chr-ID scaf fold_16; pos 10712476 to 10713039)

SEQ ID NO: 60758 - DNA, 797 bp, Populus trichocarpa
  Intron number 1 from transcript POPTR_0006s19410.1 (locus POPTR_0006s19410) derived from phytozome v7.0 (chr-ID scaf fold_6; pos 18463879 to 18464675)
cgggcaaaaaagacacaccacgtcagcgcgtaaaggtaattttacatctttttttttttgaattaatataggtgttagagtcagcttgcacatacctcgactaatcccatgagccctgaaattatcgactatgtaagcctccactgatcctgagataattttacatcttctttcatggcgtcaataatttttttttttcatgaattaatcattttttttcttaacatagaagggagaaaagatatccaatatctagctttgttttggtctgtaaaagtaaaccatattgatttattattagtgattgattgattttaatgcttgcatgcataattaggccagaaatcatgaatgagagagatacttttagtataatgctctatttcaggcattacaagcattatcaatttagtacatgatatttggtcattacataaactgaatcatgttagtgttctgtcatttcttccgtacttttatttattcatttgctggattttgatgcaaagtggtgattgcgttgcatgttagttgacacaaatttagcttgcttagggttttaatccatagtttgccatttacataatctctatcattttcacacttgcaccatggaaccagaggatttcactgcccactcataagcaaccttgcggcatcgcgctctatgcattcatagcagtgcttattttagaaatcatacgcactgtcatgtgttgttaggtagaaagattgattttgcttcagtcacggtactggatttagccattgcacattatatgcaggttctcgacttg

SEQ ID NO: 60759 - DNA, 828 bp, Populus trichocarpa
  Intron number 1 from transcript POPTR_0008s13960.1 (locus POPTR_0008s13960) derived from phytozome v7.0 (chr-ID scaf fold_8; pos 9205923 to 9206750 reverse strand)
aagggcaaaaacctaaagagccgtttgcaccccaagtgagttatctctctcctctctctctctttttctaagatttgaatatatgggacctagtactatcaaacctgccatttattctcacacatctacatttctttgctgttttgcttgttttctatttcctgattgtagaaatctactactattcgaagtaaaaaaaaaaaactatcttattttcgagattttaatgtatattgcagatctggaaatggttttttggttgcattcacaggaaatcttggaaaatggaaagtgatttaaaaactagaaacgtttccattttttattgatgttttttttttaaatatataatttcccgtttttgtttatgggaatcttaaaaatcctcccatttttagatctggaggaagtgagattcttttactcagttattttcatttagtctttttttttctttggatgcaattaatgccaggcattgtgaattggaacttgctagctgctaatctctttgcatatgcttctgttttgttgattgttcattggatctattgattttgggaactatgcttcatgtaaaatgttgtctttgtgtatttattagcgttaaaggtaataatgtcttcacttgttgaggactctttaacagcctcagtgatctggatgacaatgctgctgatgggtcatcccaaacatatcaaaagttcatctttttaacgaaagctgatatagtgaagaattaaaatgtttttagtggttatgttaaaaactgtagagaaaagctgaatttttccccttttgctgtgttgttgacattgcttagctttc

SEQ ID NO: 60760 - DNA, 931 bp, Populus trichocarpa
  Intron number 2 from transcript POPTR_0006s19730.1 (locus POPTR_0006s19730) derived from phytozome v7.0 (chr-ID scaf fold_6; pos 18763600 to 18764530 reverse strand)
gatcgagcaatatttctccaccgtctctgttgcaggtatttctctccactttcttcttcttttatgtgtttgtttaattaatcaattgccttatatattattaggggttaatttttcatgcggtgataagatgtctttgctcctatttacttgtgctgaaatgggtctaaccacacgctttggctgttgcttctcttttgtctgatgattttctacttttttacatacatgttcttgattactgtgattttggggccagtcaaatagattaagcttttcaattgtaccaaaggggttgcgcccctcacattttgccttggctttgtttcgaagacacagtcatttgttagccttcagttcaacatgtatgaactgtcgttagtagcttcttgtgtttttttgtgactgctagattatagagtgttccagatggttcagtgagttgaaggggtttggattgtgttatcgcaatgtttagtagtgtcgtgttcatggtatgctacatatgcatccacggcttacaaattggggtttaatcaactagagatttgaagcattattctcctatcactttgtacacctacattccttattttccatacttttgatatattggtatgctcccctattttgggatttggtgttttatcagtaaagttcatcttttttttgcagattatgattttagatttcttcttctgggattttgcaaccccacctgcttcttctcactctacacactcttgtctctatctgtgcctttagcctgtctttctttctgtatgctgatttaaatttcatagatggagtttatgtattagaagaagttcctttgccctttcacactgttaaaactttgtttctggactttatttagtatgttttccttaatgcagttccgtgcttgtaaagaaccatttgttgggtgctc

SEQ ID NO: 60761 - DNA, 415 bp, Populus trichocarpa
  Intron number 2 from transcript POPTR_0009s12790.1 (locus POPTR_0009s12790) derived from phytozome v7.0 (chr-ID scaf fold_9; pos 10377160 to 10377574 reverse strand)
ctggtgtcaggtatgtttgctgtcctttttatgtagagtatatgtgatatgtgatttttgttattaactaatacagtatcggtatggttaatgtgtctcaacctttatatttttttttattagtgtcatactttgttagttagttttttactttgaactgttttccccttgatatgatgcagtggtttctaaattatatagatctgttgtctagttttgctgtgcaaactttgtaatgtctggtatttttctgtaaaattaagacaaaatgagaaatctctgatggaggctgcatacacaggagaattttccattgtgttgcaatatcttttgcacttgcaagaatgcaacttagggagaagaatctcttgacttgcgattcatactgatacattttctctctctcgcagagcta

SEQ ID NO: 60762 - DNA, 535 bp, Populus trichocarpa
  Intron number 1 from transcript POPTR_0009s12790.1 (locus POPTR_0009s12790) derived from phytozome v7.0 (chr-ID scaf fold_9; pos 10377849 to 10378383 reverse strand)
cttccttggggctgctgctgccctcgtcttctcatgtaaataattacatttcttttacttttattcgatcttttaattgttttatttattttcatgttcttgattggttccctagaaaattaaggaaaatagaattgctatatggatgattatcagatcgatcttgatgcaattatacatgtctaaagtgatttcattttagtttaatgttatattcgttgcaattatttctttgaatttgattattggccgtgcgtatgcgtaattaataatgggtttgtgttaattacgttgacttggatcttcaattagcttacttgtcaataaatgatattaattttgacatggaaaaagcattttgatttaaattttgatttgataatctttattttatagaaccattttacttaatcaagattagatttttaacaaattccttagatctgcagaaattttagttctaggaagaatttttgaaatgcttctgtgtgttttgtttttggtgtaatattggagttttggtgtttgtgtaggt

SEQ ID NO: 60763 - DNA, 731 bp, Populus trichocarpa
  Intron number 1 from transcript POPTR_0018s12480.1 (locus POPTR_0018s12480) derived from phytozome v7.0 (chr-ID scaf fold_18; pos 12954299 to 12955029 reverse strand)
tcgactttcattcagaagactctccttttcttcctgtaagtaagcgtagggtttttgccttttttttcctttctgtgctacatatatctttgtatcatgctagtctgttcattgtcgttgtcatcagctagattgcatgtccatgtttcaaaaatgcgccttttaacactgttatcgccacatgctctttgatcagttaaaatgagaatatgatgggaacctgggactcggggccggtaagtttgtgacttgaaaagagaaaaactgtcttggctaggatctggaagatgaatgtttctcaagaagtttgcatgcaacggagggttggtattatttgatagtcaagagagtttccttgttcattttctgcagcagatgggtattgagggattgaacagtgaccgtgttatgacattgcaaatgcttaactctgttgtaattttaaattgcttcagattctctattttaaagtcagtttttaagtttcagactcaaactgatataacaataagtttttttctcttttagtttctctacatcccatggagcctgtgagtttctttggtgtgaagaatgttcatgcaacaacctaatgaccattctttggctttctatgtgaatgtgataaccttaatttattttcctttttagttccctctgtgttggaatttggtttctgtaacttatatataaaaaaatgatttgcttttttaatccgacaactttgcagg

SEQ ID NO: 60764 - DNA, 707 bp, Populus trichocarpa
  Intron number 1 from transcript POPTR_0015s12950.1 (locus POPTR_0015s12950) derived from phytozome v7.0 (chr-ID scaf fold_15; pos 13100050 to 13100756 reverse strand)
tcctcttcttggcagtgtaagaaagcgcatgcttcaaattatttggatggatggaatggaatcttttctgtgttttccatggatgttgccctgtaaagttttcatctttcacctgctcaactaattctgctcaagggtatctcttacttttgtcgtgttttctcttcattttaattttacgagtatcaaaagctttgacctcgaaccttagtaatggagacccagatcatttttttttttcaaatagtcatcttctgggctctccattaaattgtaaagtttcatggcgagtggtgtttccactcctgtacatattcttcactgatcaagtttctctcgttatttgtattgcgttctagaatttccattgctgccactctattcttatttgatttgacaattgaaatactgtgccattttgttattggaaggaagcttctgctgtgtgattctgtttctactgctcataacattttggatgtcatgtggacttggtctttctgccactcatcttactttgtttatagccgtaccacattatctaggaatggaaaattcagcattttcaattctctttgaaatctctcctcacgtttagaatcgatttctaatatctaacacgtgtcttaaagtactcaaactggtgctcaattgaattctctcatcttgcagtgaggcacatttcgaaccatccatctacctgatat

SEQ ID NO: 60765 - DNA, 734 bp, Populus trichocarpa
  Intron number 2 from transcript POPTR_0001s37430.2 (locus POPTR_0001s37430) derived from phytozome v7.0 (chr-ID scaf fold_1; pos 36429205 to 36429938 reverse strand)
cagacaaggtaatatatttacatatttctatctgccttatcattttacctttcttacattatatagaggaaattaaagaattagcattgcaaaattatggagcttgtatctgttggggaattcttccatttactctatgagtaattttgtggtgttgtattaatatttggggtagccaagataatagaacacttagatatttgatttgattttctatttatttcgatcttcaattcaatgaatcaaatggtggctccttttcatgattccatgttttcgtaatcttattcgttgcttgtttccatggtgaaaattttttactcgcaacacatattattctgtgctaagtaagaaggaatgtctccatctggctgctcatggaagcttagatgatatggagtttctcttggctggtgtacatactgtagggaatattacgtgtactaaatagtgaatactaaactttggttatttctgggggttaattttatagactgttgttttcaaaagacttgagctttgcttcaaatggaagcctttctttgatatacatgcttccgagtaagaattcttgttcaaatatctatgtctggggtcaattgaagactgaatgaccctcattgtttttggtctattatttttccgtcctgcactatgtaatcactctataaaacttcatgcatatagttaagtgcggagttttcatttcgtctctatgttgcttgtgtttttag

SEQ ID NO: 60766 - DNA, 598 bp, Populus trichocarpa
  Intron number 2 from transcript POPTR_0004s23620.1 (locus POPTR_0004s23620) derived from phytozome v7.0 (chr-ID scaf fold_4; pos 22269292 to 22269889 reverse strand)
ggcattaaaggtaatagagtaaaaataatctctcttgtcgattaattacccatatcaccttgtattgcacatgtagtgcctttaagtttactttgaccagtccattaattgcccctctccttttcatattcacgggtgcaaaaagaatggggaggcagaggaatatagattctaaatagcaatactagttggatgtttggcaagggatagttgatgaggcatttgaaataactggccaaagaggttattgtaacattcacaaatacagattgagcacataaattaaggttctattttcttacccttttgactcatttttgaatgttaggggtatgccagacattcaccaacacatgctcgtcagattttccagtaaactcagttgagcttcttgatatgtgtcatttgccaactagtctggtctctgcaattatatcttccctgaatgatataactatggcttcactattgtcaatgattcgtggtcacgcacacactatcacaggcacacgtgttctttctcaaagagctttttttggtcccaaattaacattttttgtttttgtaatctttatgtcaaaaggcattcttaggattc

SEQ ID NO: 60767 - DNA, 946 bp, Populus trichocarpa
  Intron number 1 from transcript POPTR_0004s23620.1 (locus POPTR_0004s23620) derived from phytozome v7.0 (chr-ID scaf fold_4; pos 22270871 to 22271816 reverse strand)
tttccagaattgtagtttcacgccacaattgattggtaccctccttctcctctttaattttcttatgtgatttttgaaatgaaacacgaaacccatatttgttttagtgttgttgataatgggtagtgttcaagtttgagaatttattgctaatatgattggattttgttgtattgtattgtgctgcacatgtctgtattgcatttttcttgtagtgtagaagggagattgcaaggtggaatggaatgatggagtgatttggtgaattaggtagttgatatttttgattcatatgggttaaatgttgtgtaaatgcttgttgtgtaacatagggagtgaagaggggaaaaatggagatggaaccttttaatgcattcattttctaggttggaacatcttgaaattagtgttttttgttaggtgatgtggaaaaatgggaatcattttgtttgcatgtggagtaaataattcttgtacttgagatggctgtgatgctgaggaaaggagaaagagaaaatggctgaaatctctgaacttggaaataggcatccagtgttgagcactgtggaaggttgggaatttagagtgaatatgagtggatcttcttccctagctatgaccttgtcaagtttacaagttgcaccatattctatttttatcattggatgggataaaacattttcttgcttttcaatgcttgaaaggggcaggtttacttgtccagttcttacatcattttatggatgccccagaatttggttgtagaacatgagaatattgtaattttagttttcatcagtttgcctttgtgcttgcagccttgtgttggcacatgtatgttgttgctttctatactgtagtgtttatttgcacatcggaattgaattggttgtttatatttttggcatattggatgcaggcccttaagctgatctttcataggtta

SEQ ID NO: 60768 - DNA, 922 bp, Populus trichocarpa
  Intron number 1 from transcript POPTR_0011s09370.1 (locus POPTR_0011s09370) derived from phytozome v7.0 (chr-ID scaf fold_11; pos 11642545 to 11643466 reverse strand)
gacagacaggccttgctccatttgaggtttgcttctcttcttttgccttttcacttattttttttattcatctggataaacaatggcattattttaaatcttagtgtcttaatttatatcgtggaaaattttgtgtggctcaactctcatacatgataaagaaaagaggatgaaaactatgatggccaggccttggaatttagattacttttgggataataaaaagcatcccatttctcctttggaggttattttccatgcttttggcacccccatgtaaaaaagtatcaagaagcacctcaaagtatacaacccaaaactgctttacaagaacacctttgtctgcattgcaataataactgaaatggattgcaaaaatgtagtttcagcttgcaaacttcatatttattactgtaagttgcgataattagactcaaaaaaccattaaatccttttttttttcttctttttaatcctatgccctaggccacaatcacaggttaaaaaaacaggaatttaatttccctttggtattttcagcccaagtcaacaacaacaatattatgacgcttttccgattttttcttagtgtatgcctctgccatgatgtgttttcagccagtctgtatttggtttcgtgttctttttagtacgcaactgtatccttggtctcatgctgtttctcctttctcaagtaatttttttctggtttatttttcttatacatttgattagcagtagcatgtacatttaaatcatcactagattaagagtgggtgaggttaattagcagacgtaaggtatgatcctactttggtaagctaaagatgatgttcatagtcaaataatattcatttcatcttcttgtcgacagattggttccttgattattgaggcccttgcttggtgctccttgctggtt

SEQ ID NO: 60769 - DNA, 908 bp, Populus trichocarpa
  Intron number 2 from transcript POPTR_0242s00230.1 (locus POPTR_0242s00230) derived from phytozome v7.0 (chr-ID scaf fold_242; pos 22923 to 23830)
atagaagataccggtgagttcttctcttctccggcacaatttaaatactcttccatccataacagttatttaggttcttgttcatgaatataatgcttccatatatttattttttttttcagcagaaaaatcatatatttacaaattgatattgctatgaagggatacttccatgtacagccacgtgtatgttttaactgttgtgcatgactgctaattttaatttgaaacagaaataaatgaatgaaaacagcattagaaataattagaaagaattataattttactttgaatattgaagttcatgtgcatatgctagctgtaaaaaaataatttcttgtaaatatattaatttgttcgaaacttgattggaaataaattaagtctccacgcataaaaatatgctaaaatatactctcatttaaaaaagaaaaaataaacaacctcgggtttgtaaagatatcatttatatttatagatgagtgtgtaagaaattctaaaagtgataaattcatttttgtgccatattttaataaagttaatgcatcaataaatatatatactatattgatttaaatgggttttttttattattaacattgtgtggcttattatattcattgtattaaataaatccccaaaagacttgatatacgagacacgagtcatagtacattgagatgtgtccataaaaaaaattaagccaaaattaaggtaataaaacgaataaaagaaaattaatttaatgatttgtgacatgtaaaaatgctacaaatatatttatcttaattattttaccgaattattatataaatgattcgtgacaagaattaatttaatgttaatgttaatgttaatgttaatgagatgaaggtggtggcaaacgttccttgtggtgttggtggtgt

SEQ ID NO: 60770 - DNA, 665 bp, Populus trichocarpa
  Intron number 2 from transcript POPTR_0008s04120.1 (locus POPTR_0008s04120) derived from phytozome v7.0 (chr-ID scaf fold_8; pos 2295313 to 2295977 reverse strand)
ggattattactggtaagaaaacaacaaaccacttttttttttaattattattaggaggttcattgaatggctacacgacgaggatagaactcctttatttataataataataataataataaaataaattattggtgatcattaagatttgaatttgttttatataaaaaaaaaaccatcaggtgtgtttatattcactaacccatgccttagtttttttcgttttatttaaaggtaatattcatgtaaagagattctgatcaagggtttgagatttctcacaaaatcatggagattttggcaaaccccgtacaacacacactcataaacaaggttgaaatttcaaaaattaaatattatatacagaagggaaaaaataaaatagaaaaatctctttgtgagtaaaataaaagaacttaggagatttgataaacttgagtgtttgatttaatcaccaagagtttacattgaaatttctattttcattcaccaaattttctattttttgttttaattatgcaccaaattttcattttgcaaaagtctagctgtactccattctttttctcaagctacaattaggcccgcattaatgggcccagggtaagatggctagtgaagatccctctgctaagtcgtgcttttggtgtcctttacaggtggag

SEQ ID NO: 60771 - DNA, 653 bp, Populus trichocarpa
  Intron number 2 from transcript POPTR_0008s16950.1 (locus POPTR_0008s16950) derived from phytozome v7.0 (chr-ID scaf fold_8; pos 11395649 to 11396301)
aggtaaagaaataaggctttgttatcgtttttttttgctctgccagaatttaatgccaatagacttgataaactgtttaaattttcatattaaatctgtgaagaagacattgaaaaaagctatgcaatgaactatatctatatacaggatttagctgttatccaccttttaggtgtggataatggggatgccttgatatgttagggtgaccaaaaaaacttccattttgcagtgaatgaaaccacagcataaccatttgggggcagcattgtgggtgtgcgtgcgtgcgtgtgtaatttgagatgaagcatataatgttaaactcgtgatgttatttgagatggtctgatcccattcaaggtcaaactaatggatgcatcaataagaaaaaaatatcgaattaaagtattagaagagaagaaagggaaagtgtatttgaagcactcacctgcggcttgcatttttctttgggctcatttataagatttgacgctttgtttctgttttatttgacgcaccttactgcatttcctcatcattgaaattggtatttttgttgaattttataatgtaacctcacaatacttcatgaggctaagacgccatctaattttataggaagcaagagcattattgggaaggcttgagtatca

SEQ ID NO: 60772 - DNA, 611 bp, Populus trichocarpa
  Intron number 1 from transcript POPTR_0008s17530.2 (locus POPTR_0008s17530) derived from phytozome v7.0 (chr-ID scaf fold_8; pos 11802215 to 11802825)
gtgttgcttctagtgatcttctctggacctccaaggtgtttttcttctgtctttccttcttaattgatgtttgttccgatactgtgatgggtttgattatcatttatttaattggggaattttgaggtgttgtagctaagtctttaattaatcattatttgttagtttgcttgctttgatcttttcgtcaatgatttatgctaataaccaaaagattaatgtgttgttaagttagagtggaaggttgagagaatttaaagttaaggtaagtggaacgaatagtatacagaacgaagtcgttggtggtggagggggaggagggaaggaccttgaggttagcacctcgatgcaggtttgagaaggctaccatttccattgaaattttgatgggtctcggtgccttttgctaatcccgcaaactgaacatcctttcctttctgagcaaagaattttattgtgctatcagaagcttccattctagttatgtggtccatgtactgactgtgttcatgatgaaaaactgctgtattgtttgttgggaataatttatttgtccattatgaaatttgacttccacttttgctgtctgttttagtgtgaggaattgtggc

SEQ ID NO: 60773 - DNA, 654 bp, Populus trichocarpa
  Intron number 1 from transcript POPTR_0019s01330.1 (locus POPTR_0019s01330) derived from phytozome v7.0 (chr-ID scaf fold_19; pos 1172407 to 1173060)
gcatcgctgacgaagttcaagcaaacaaagtcatgtattgaatcatttcatttttatttttatttttattttaaatttctctgacgaagttcatggatttctactaatatcataaatggagcattaaatgattgaagatatttgtttttgaacattctcttcagtaattagataatgcaagaattaaataactattcagagtttatctatttgagttttaaatgattgaagatatttgttttgcaactttccccttgctttgctcaattttcagccatggatcccctgtctctaggcctgggcctctgacttgcccaagtaatacaatgaattttaaagcatattatgcctactttaattataaatgggtctcttattactcattaggttttcatttggcccaataaattactttcgaaatgttggtaaaaggctcgatctccaccttagcacctactctttcaccttaaaaatccatggtttgtatatttttttagtaaatatctagatcaattagttatttcagggtgtaattatttacgtctttcattttcataccggtaaaaatggctatttgtgatgggtttttttcttagtatttatactaattttttatttcttatttacaggataaattaaaaagagaaagagaag

SEQ ID NO: 60774 - DNA, 759 bp, Populus trichocarpa
  Intron number 1 from transcript POPTR_0016s06670.1 (locus POPTR_0016s06670) derived from phytozome v7.0 (chr-ID scaf fold_16; pos 4482112 to 4482870)
gaggtaaaaaaaatccaacctttatttattctttccccttttcccctctcttttgaagctttaattgtttttttttcctgttgaaatacttggattgatttgatgggtttgtaaagtttgaatcttttgattgtgttgatcaagttctcttctgggtttactttgtgagtccatgttctaactaatgaaatgattttaattttcctgtttttgaaatgaaatatataaaggagctgtttatagctatcttgtgaatctgttaagggagattatttgatgatggtaatgaaaataacataaatatcaaatgttcaaaaagaaaaccagtatttttttcttataaaaaagagagaacatggatgtttaattctatgttggcgctaaatttttgttcagccttattgggtttggaataaagtttcactattctggtagataagcctagctagtggggatttttgttttcggtgagtttggctattggatttatggtaagaatttatgaattcaacaggctttgtttgtttttctggtcagtttaacatgtaatatgtgttggcgatttcttattgatgcgaggaactaacgatttcaactgtttgacaatattactgcctgtgctctttggcacagaagctgcatttcagaaacactacacgcagtaaatttcacttgtttcacttgcgtgttgagtgatttagtaggctgactgtaaccgctttgaactttgtgggttttggtgttttgcaggttctggag

SEQ ID NO: 60775 - DNA, 513 bp, Populus trichocarpa
  Intron number 2 from transcript POPTR_0002s16810.1 (locus POPTR_0002s16810) derived from phytozome v7.0 (chr-ID scaf fold_2; pos 12562534 to 12563046)
cgacagtgaacttgaaggttgattcttgtcttcctgtaagttagttgaattatgttttgatttctgttctttgatgtcttatgtttgaggtttcagaatcattattctctcaacagtaggggaaacattggggttttgtatctctgaatctggaagtggtgttagttttagatactgttagctttctgcagcacatcaagacttgttcttttgttttttcatttgtgaattctagtatcgttcaacgttcataactttcagattgattgccatgtatttcaatctctagattttattctttatcatgtttggtggtttaactcaatgagctataattgggatctcccaaggtttagtgcatttttaggttatattaactcatatttggcaacaaggaggtttatcttttattcccattaatcttcatttcaaaattattttgtctctttcattttcatctctcgccatctttgttgtcccagatcttttttgatcgtgtcttctattttcatc

SEQ ID NO: 60776 - DNA, 853 bp, Populus trichocarpa
  Intron number 2 from transcript POPTR_0010s25080.1 (locus POPTR_0010s25080) derived from phytozome v7.0 (chr-ID scaf fold_10; pos 20939664 to 20940516 reverse strand)
gataagcaaaaaggagccttttccacagtaagtctgatttcttgtctttttctttgcttcttttcggtctttccttctattgattgttaattggttatacagttaatttttattatcaatggctttgggttgtgttgttggaagtgagggtttgggaagaatgtctattgctagttgagggaataagttcaaatctcgaagttcagtggttattatagagttccctattggttgataatcctggccgggttggtggttgcagaaatagctatgaagagagaatacatgcctgccttttcattatacagtagatataaatttactataaggttattgcatgtcatggatgcctttgctgctctgctttatatatgtgtgtgtgtgctgacacaagggatcaaggggattcttagaactgatgtagtgcactttgagactttaactagttaaaaaaggtaaacttgctgtatcttttttcaagtaccgttactgtttcaggtacacaatattactaggcatgaaatttgcaggattaaagagaggagcgacgggggagaaatgggcgtggttaattgtgtattccttttctttccttatgaatgtagaatcagctatctagaaattttctaatggatcaaagagtaaattaaatgtatatgctctactttgggttatgaaaacttcactttcatctattttcatggatgaatttgcaatatctacatatgtttgcactcctggttcatatatatttacaatatgatttacccagtggaaatttgattcatatgtttgtgctgtttgaaaaattctcctagaaggatcttttcgaaacacatagagcaaccaccaa

SEQ ID NO: 60777 - DNA, 801 bp, Populus trichocarpa
  Intron number 3 from transcript POPTR_0381s00200.1 (locus POPTR_0381s00200) derived from phytozome v7.0 (chr-ID scaf fold_381; pos 2544 to 3344 reverse strand)
caagtatgttcaagtctagctatttctcataaattccttctgggatatgagccaatagactttgaattccagtttattgcattatcataagcaagcttagagattttgttcctttttatttctcaattttaccattgcatccaatattatcagcagaattgcaaaactgagctccaggagatgattgtaatggatcactggagttacagatataaatgtgtgtgcatgtatgcttgcgaagttgtgccatggtttgactttgagtcagactgacttgagctgatatctacttgctcccccttaatgttttggatccagtggaggctctgtgatgtttgcaatgggtggatagatgtttggttactttagaatctaagacgagcatctctaaaggacttcacctctgcaagccatgagttctttgagtggcaggaaaatgtctcattgtggcacatataaaattgttttttgtcctagtactgtcaggagttcgtgttatttttagaaacatgtaggatcttgtcctcttcttctagtctcttgatcccatgctggcatcagactacaataatccagaataatctagtgagcatatttattgaaccttgattgccctgttttgtaggatatgcctggagattttttgcattacttaattgcacatgatcataacaattgcaaaccctatacttgttttgtttcgagagattctagatgttttggctgcattattgttggctaattttggtactgtgttttgtgtcagatttgaacaaacttggtggtcttgccatagtaatc

SEQ ID NO: 60778 - DNA, 791 bp, Populus trichocarpa
  Intron number 1 from transcript POPTR_0019s00600.1 (locus POPTR_0019s00600) derived from phytozome v7.0 (chr-ID scaf fold_19; pos 375177 to 375967)
aggtaagtgtttgcaatccctctgcgtgttcctgagtaggatgatatacttctttttaaatgaatttcattgaatgccttgttaggcactactaggctgtaggtatcaaacagcgtagttattatacttgtcaattgaagacaaccgagctagaacctatggggctgtgtagctcgactttatgttgtctgggttacatcaccttattctcttcatcatttaagtgcccatattgatattacctcgttattgttcccatgattatgatttaagattcataaaagtaaagcatttatcttgaaatgctttggtttgggaggagttgcttttgttatgatgatgtattgaactttaagaatggcaacacctgaaagtctcaaattttttattgaaaggatgtcatgtttgtaattaaaggatgtctcgttgtcaaaagtcacataggaaaagggggagggagatacggtttccactttgatagctattttgtaagctgtgtcaaaatactggaattatagagatagagtttctggtattttgaaggtatgatgagcattttgttttgaagctatgccatctcttattatattgaattatactaatacgtgaaatacattccttttatctgttggcatgttcttggtctttataatgttttagaaactcatggtctggaattgcctatgataagtatgtattatttgattttattaaggtcacattagattttaggaattctcaaaaccttccattgaacaggttagcatctcaacattccagggctgccacta

SEQ ID NO: 60779 - DNA, 751 bp, Populus trichocarpa
  Intron number 2 from transcript POPTR_0011s05590.1 (locus POPTR_0011s05590) derived from phytozome v7.0 (chr-ID scaf fold_11; pos 5577763 to 5578513)
ggatcctgttgcccttgctgagtacgttctcttaatctcaaagctgatcaacttgtgtaaaattattggtctacgtaattaggaaaaccagaagaaaacaagttagatacatgtttaattatttccaaatggttaaagtgttcttgcgcgcttgtgttggagtgggagttagatagttcaacctgaaaaaaggtgacaaaaactgatggtggcttagatttatttattttttcaatattatgaataacacagggatttcagggaagtaaatggttcatattacaaaaacaactcatagagctgtactagatttgaatttaacccgcatgtccaaaaaacaatttaaagaagaagctagtctgtcataggatttgattctattgatggttttatgaaattaatatgcattttcgtacatggttttttttttccctgctgagaacccattaattttagctccaaaaaatagcttattttgatgtttaataatagatgatcagcttagatgattcaaacactagacacttgaggatatcctgtggaagaaattattgaagaggaaagtttttatgtctaggaaaattctgaggtggaagcaatttgcttcaatttgcatgttcatgtattttctttccttcgtggtttctgtaagctaatgttctagtggaagttaagttattgagagcttttccattgagattgaatgagtgcagatcttgaataacatgatcttccaggtttattgagaaat

SEQ ID NO: 60780 - DNA, 603 bp, Populus trichocarpa
  Intron number 1 from transcript POPTR_0018s11530.1 (locus POPTR_0018s11530) derived from phytozome v7.0 (chr-ID scaf fold_18; pos 12241484 to 12242086 reverse strand)
ccttaattacctaaaccccaaacttccatttcactgtaagttactttcttcctctctcttcatttcttcctttctccctctctcttcctttcttcctctctccctctctcttgcaatttccttatttccgaattctcgtttagtgccaaatcgatcgatcgaattttatagtttaaaaaatcagtgctttacagttctaatttgatttcgtgtttaactttttttttccttgtattagtagattctcagtggaattctgttgcatgcctgctaccattagactttgatttagtttctatctttcgaaattggaggcttttgttttttaaaatctgtattcttcttgctttttgattgttacttctctctttttttttcttttttttttatcttaggaatctttcttgtaattcatgaatttagtggtcaacggtagctaattaaaatcagtgctgttattggagatctaatacatctaaagttactgctagcaattttttttttgttgattttttaatcaaggtagtgtaattttgatgtttgttgcaaattggaatgctttttaataaattatcattactccttctgggagctttgcaggtg

SEQ ID NO: 60781 - DNA, 459 bp, Populus trichocarpa
  Intron number 1 from transcript POPTR_0005s25420.1 (locus POPTR_0005s25420) derived from phytozome v7.0 (chr-ID scaf fold_5; pos 23693777 to 23694235 reverse strand)
agcatttcgagaagggaaaagggtctcagaaactggtatttgctagtctctttgaaccttttagtatatgtgtttgttaggattttacttgtgtggccattaaagagcacttgtgtttttttttttttttttatatgtaatcttttgtgggaaagttaggcctgttttttaattgtgagatctttaatttccagaatttaattgatggttttttttttgttgatttaattttattttacctgaaaatctcacctggttttgacggtagttttgatatgaaggacttgaatcttgattgattaattgggatttgaattatattaagtttttatgagtaaattgtttgagatttcttcatgaaatgtcttgttcgtctaatttctttccgtacgtttctgcttattctggatttgactaagaaaacatactttgacagattgtcgtggattttactgcttc

SEQ ID NO: 60782 - DNA, 1029 bp, Populus trichocarpa
  Intron number 1 from transcript POPTR_0005s12270.1 (locus POPTR_0005s12270) derived from phytozome v7.0 (chr-ID scaf fold_5; pos 9055165 to 9056193 reverse strand)
aagcttggtatggtcattttgtgcttttcaagtttttctgtgggttttcttcgagctaaaatgtaaaaaataatgtctgtgtttgtgtgagtttatgttttttttttttttttttgtcttgtttgtggatttttcttttggggtgggagggtgaaggggctggttacagtgtgtgaataatgtgtctagtcgttgtcttcttttccttctttttttagttgtcttgttcgtagtgtaatttctgttgttttagctttttttttttagctttttcaaagctaagtttaatatgtgggtcttttctatttctttttcattggtggtgtgtttgtcgatttaaagtgtaatattgtacattatggtatatgataagttaccatgaggtaaactatacgaggtataattttgaaattttagcttcactgatcatagattgtggtgtgatcacgcatacattggtgctctgtgaagcttaaggctggatgatcatagattgtgaaattttagctccagtgatcatagattgtggtgtgatcacgcatgcattggtgctctgcgaagcttaaggctggatgatctgatgttccgaggagaaatttgggttatttctaaaagtataaagttaattttttattttttgaattgagtatgacttttcaagtagacccgaaggcctttagtgtatgctggtgcaaggaggttgtgcccattgaaaaattaggtgtatggcatgtgtatataaaagggtttatctcttatgtttattttgcaagtgattagttagtcataaaaatattgatgctttgcttgcatgctgatgtggttgtccctatggggaactgctggccgtttattttatttaatttcttgtattgttttgtgtgttctgtctgtttgtgttcattgagtaaaaatcaatagcaccttaattggtaacacccagcaagatagaatctgacagtggaatgcgttttttctttttactcattcataggacaccggaagatcctgaatatctatcagaagagt

SEQ ID NO: 60783 - DNA, 1022 bp, Populus trichocarpa
  Intron number 1 from transcript POPTR_0019s04500.1 (locus POPTR_0019s04500) derived from phytozome v7.0 (chr-ID scaf fold_19; pos 4671775 to 4672796)
ggtgaccctgttgtcttggctactggacaggtagagaccatcaagatttgtcctctctactttatgtatgcatttgggattttttttctatatttcttttggatttgagtgttgtttgaagttgaatcgttcttggtttggatgctatttgaatgtgcatgcaaaaaattcatcatctttggggatttattttaagggtttaatgctaaatcttgtcctggaatttgagttgaatgtttttccatgcactagtaatcatagatttttcaagttttctgcacatatggattttggttcttctgcaaaattgttgaggctttggatttgcgtaaaattaatctgttggtatttctgcaagaactgagatttttcaaacactgggatttgcttttgaaattgtagaatgtgtagattttcccctttttctttggtttatgtgtatttaatttctattaacaaatttattggaacaaggaattgcagcacccaatgtaaaagattttttttcttttgagaaagttggcccaaaattaagaaaaggtattttgtgggcgaaaatctggttgttttttttttttttttttttttatcatttcctccatccataattttgagattagagctgaggtaactccatttttaattctttatacagacttgatatttcttgttcaacctcttgccatcattttccatatttgagataacttagtcagatggccaatctatctttgggatagtggcctcacagactaggacaaggaattgaccccgttcttaagcattaatgaatctgtcaccaacatagtgaagatgttcttgtgctatgattgatgctagaagagttatactgatttgtatttgtgatagtgaccttgccactagaacgaggaatgaacagtccatgttcattttacttgaattcctgtgctatttcaagctggtttcatccaaattcaatgatttgttggctatagtgtagagtcactcatttattgaaatgtttgttgatttctagactt

SEQ ID NO: 60784 - DNA, 821 bp, Populus trichocarpa
  Intron number 1 from transcript POPTR_0004s15470.1 (locus POPTR_0004s15470) derived from phytozome v7.0 (chr-ID scaf fold_4; pos 16095880 to 16096700)
ttgacactgatactgcaattaagggcacttgcttggtaagtgtcttcgatttctgccattaagttcaatgattttattcgtagaaaactaaaattattatttttaatattagcagattaaaatcatagaaaaatatataaaaactttaatttgatgttttttaaaaaaaaaataatatgaaaagcattttataaaagaaaaaccacaacaacgccaaacgggaaaagcaattgagcatatggcggtggggttcggcagaaaacccagaagaaggccattaattataatagtcacaacaaattcacagtaaagacagaaagaaggaaaacaaaggcaaagaaattaagagcacttcttggattgaatccggaagaaagtaaatgatcaagttagactaatcaccagaactctaataataaactcaagaaatgaaatttttgaagtcagtgtctgatgaaggacaagaaagcaacactatctttctatatgcaataatataaaaaaccaagttgagctaactaccatctagaaggcctgtttctaaatagtaggaggatagggccgggccaggcattttaggtgataaagaaaagccaactaaagctgctcactattacttcacaattgataacgaatctcagtgatcgactgtgtcctgtgcaaactaacagataatgtaacagaaatgctgtcagcagtgaattaaaatggtgatgagacaatactgtcaacgtctctttcttttatttcatggttttagattatcacgcaatctttatattgtagagcctcattttgggcggccacgacacgacatttgt

SEQ ID NO: 60785 - DNA, 601 bp, Populus trichocarpa
  Intron number 1 from transcript POPTR_0014s14660.1 (locus POPTR_0014s14660) derived from phytozome v7.0 (chr-ID scaf fold_14; pos 10731133 to 10731733 reverse strand)
tcccggagaattcgctctccgattctggcgtcaaggtaatttattattactaaataaataataccgcctaggtttttgtttctggtttggttactgagaaaattttcgtttcagttgaattaattgctatttttagattttaggtttctatacatatctgtttggaaactgaaactgaatataatttttttttatgtttctgttaattttatttaatttttttataaacaatactttacttgattccactaaatagaattttagctctctatttttttattgtgttcttaaggtatctatgattataaatctgagtgttttattgttaaaaacttgatttaagtttgatttcacttattttcaaaattttggctgatgagaaacggcttcaattcgcttccaaatcgtacaatggaacggattggactggaatttctgtagtataatctgttattagccaaaggaagagtaagaatatttgcattaggatcaccacactttattcttttcattttcttgggttacatgttgaatttgagatttaaacagttttcggtagcttagtgttacaatattaaaaatgtctcaggtagtggtacga

SEQ ID NO: 60786 - DNA, 536 bp, Populus trichocarpa
  Intron number 2 from transcript POPTR_0007s04900.1 (locus POPTR_0007s04900) derived from phytozome v7.0 (chr-ID scaf fold_7; pos 3087565 to 3088100 reverse strand)
ctacgcctccacagcaggtgtgtctttactttgtaataatgtctgtattttgctcatctggggaaaaaaaaattgtgcacaggagtggtttttattagctatgatttttatttgttattgatgcatgtcttatcagtttgatttaatgatgggaatttgagaatttagagtggccagtttttattaatattttcataacttggaatggaaacggccttcatattgtaatgcccggagtccatcaatacagtcttggaaatcccctgttacctgtgtccggagctaatagttagcatgcaaagaatcacttcggattcttctaaaaaattattattattcagagctacattctctggagttgatacaagctatgaatataaaactgccgaggttatgtttctgatctgagtagtatgtaacacagggggattaaagaaaatgaactcaacattctttttaaccacaactgactgattctttttggggaacacgaaaagcaaccttataaacacaacattgttttctgtccaaaggca

SEQ ID NO: 60787 - DNA, 571 bp, Populus trichocarpa
  Intron number 1 from transcript POPTR_0007s04900.1 (locus POPTR_0007s04900) derived from phytozome v7.0 (chr-ID scaf fold_7; pos 3088427 to 3088997 reverse strand)
caacaaaatacgattctcttgattgaataattcaggtttgtataatatttcttttcccaaataaaattagtcaacgctgatgtgtattcaatcaattcggaatggatgatctaattgattaggacttattagtgactcccttgaaattaaagattggtcttttctgattttagaattccaaatttaataaaaccactaaggttttatgaagtagcgtttcatgtccgcccactttatcttattctttaaaaagaagaaaaaggaaaatcgattacgaccccccaattaatcattatcatcgatggttttgaaaaatgttttacttatttgatgaagtatgatacagatgtgtaatggaatataatgatgggatggttagaatatattgatgaggtgtctcttttttattggtttcacaagtcaaatggtgctctttccgggatgtttctatgacatttcctagttggcttgccggaatctctgtctcaaatctcaatctttctttccttatttcttctctctctcaactttctcagcaaccaaacgtcggttaagctccagtagcggccac

SEQ ID NO: 60788 - DNA, 555 bp, Populus trichocarpa
  Intron number 1 from transcript POPTR_0003s11610.1 (locus POPTR_0003s11610) derived from phytozome v7.0 (chr-ID scaf fold_3; pos 12396083 to 12396637)
tccttatttccttaattgttatcgtcatctttcaggtcattcttctaacccctttacttatttttctctactttactttttattttggtcaaattaatacctttcaaaagttcataacttttggtgatttttgaatgttatctgttttaaaattaagtaaattagggttttgctgaaagttttgtgtctgtttctatcaattttgttcattctttgacttcgattgcttattgggtagtggataatgttaaatgctgatgggttgtttatcttattggttttgatcaattcactgtccaacttgataaggccctggaatttattgttttctgtggataatggcgaagacccattttattaaaaagcctcagctttaggtagagtaactgtaacaagtaagatgattttagagaatgtttgctaaagagattcaaagaaaaaatgtctgggaattgctacatgtatggataagtctggcatttgcttgcgtgtatgttttgaggtgtataatgttgaaaaatggaatttgacattttgaagaatttgttgcagctg

SEQ ID NO: 60789 - DNA, 794 bp, Populus trichocarpa
  Intron number 2 from transcript POPTR_0002s19890.1 (locus POPTR_0002s19890) derived from phytozome v7.0 (chr-ID scaf fold_2; pos 15830177 to 15830970)
accattgaggtataaattacattttgttcatattagttatgtgcgcttcaactctcgaagtgtattaaaattacccctttcctcgttaattattggaagtagaattttcctgccatgtgactacgtggaattcaaagtgaggtagagcttgtgttcactttcatatcaaattaaaattaaaattaaaaaacatcattatattaagacgatctaaaaatacaaaaaaaatgatgaaacaatggttcaaaaacaacactaaacatgccctatatctttatttcgttgtcttacgaaacttgatgattgttttgaattttcattgttgttttgcactttttttttataaaaaaaatagaaatagaaaaggtttgctgcctcttgttcattgttcaaatggttgaattggttaaataaacttggtcaaatgcttgaatttgttttgattgactggagattttcgttggtaaggtcacgaaaatccatcatgatttaattgtttaatctttttcattcttcccttgattctcaactacctcttttttgctttttttttccatcatgatttaattgtttaatcttttttattcttccttgattctcaactacctcttttttgttctttttttccctcaagaaacatgaccaaactaccagacacaaaaactggagttaataatattcaatcccctgaaaaatactgtttgaactccgaggctgccattgacttttatgtctgagtttatcgatgcgttcaggattgatttgtgaattcttttctttgtttggtggtttag

SEQ ID NO: 60790 - DNA, 879 bp, Populus trichocarpa
  Intron number 2 from transcript POPTR_0001s35580.1 (locus POPTR_0001s35580) derived from phytozome v7.0 (chr-ID scaf fold_1; pos 33908601 to 33909479 reverse strand)
cccccttttccctcggagattcccttacatccccggtgattcacttctttctttatgtggattttttgtgtacaatctaattcagacactatcttactgcttgttggggcttttaattgtacataaattccgccgtatagcctaatccacaaggaaattgttctttgtaatgttagttgattgcatgattttcttcctttaggtgcttaagcatgattttgattttgatttaagtttgtgacggtgtcgtgttgcatctaagaaactttggaaatgggctttgttgttccttcgcttaacattcagaatgcgggaacttggaaactgacatgtctttgtaattttttttatggtatatgacaacgcaatgcaataatctgtgcttaccatttcaaacgtttgccttcagttcagttatgtcaaagttttgggaatttgtgtttgggtgttgtttggcagaaggtttcctttccatagttactctttcagttcaaatggcttgtgggttctttacttgatctggtttaagcaatgtaaaggcttaaaaagaggggttccttgttaagattagatggttgttgcagtcactgctctaggacttgcaccattctctatgttcaatgaatttcctcatttgtcaactaagatctacaatttttaaaacaagttacaaatggagaaacaactgttctaaacttcatttccagctcccttctgaaacatagcttgtaatccatgtggttaacattctttcaatctaatgctgatatattaatttcatagttttagcaatactgtgtgtttgccaagcacgcattcacacacgcacacactgcgtttactttttggctgaagaaacctttgtcgcaacaggcactg

SEQ ID NO: 60791 - DNA, 401 bp, Populus trichocarpa
  Intron number 1 from transcript POPTR_0019s04980.1 (locus POPTR_0019s04980) derived from phytozome v7.0 (chr-ID scaf fold_19; pos 5170312 to 5170712 reverse strand)
gtctaccatcactcgcacttctctcggccctagtacttctatttctcgatccagaaagtaactttcttttttttttaataaaagaaaatcccatcttttttttcctgggtttctattgatttagggtttctgctactttttggtgttatttgttttgaaagagaacggaaaatctgtaagttagagtaagcaacaaatgtgcactactaatacattttggcactttgaattgagggctggaaagatttgggatttaggtctatagattagggattcaatggccaaattggaaaccaaatggctttactcacatctaggggtttttttttgttttcttttcggttcgtcccttcatggattaattattctgaagctaatgttttttgttgttgtgattaggt

SEQ ID NO: 60792 - DNA, 326 bp, Populus trichocarpa
  Intron number 1 from transcript POPTR_0010s18120.1 (locus POPTR_0010s18120) derived from phytozome v7.0 (chr-ID scaf fold_10; pos 16476859 to 16477184)
ccacgaatcgcacctctcctccactatctcgccacgtaaccgctactcatcttcttttacttgcgcataagcatcaatagctttcatccttgtgttgctaattgaatacagcgatcgcgattttgaattatctaaattttgtttaattcatgttttaatcgcttagaaataagtagtattttagtaattactggttcaattgataaataatttgtttcattaatgttcaatgtaagtataatctctgtttgaatgtatttttgttttctggtattgttagttgcgaattcagctaggtttaaaatttgttaatgtttttatggcag

SEQ ID NO: 60793 - DNA, 284 bp, Populus trichocarpa
  Intron number 2 from transcript POPTR_0005s05630.1 (locus POPTR_0005s05630) derived from phytozome v7.0 (chr-ID scaf fold_5; pos 3710292 to 3710575 reverse strand)
cttctttacaagcttaagaactcacctccagacaggtaaaaccactgaatcaaaaaatgataattacatggaacaatatgtataagtttgtaatgatgaaacattgctaagaaaggattttaagccctgagaatgtgaaatccatttttagcatgtgaaccattcaagccttgcaggtggttaaagaattaaaacctttctttaatttttcttttataggtcagattggtgctttggctgattgatcgccagaaaacatgatgactatcttaacattaacagat

SEQ ID NO: 60794 - DNA, 780 bp, Populus trichocarpa
  Intron number 1 from transcript POPTR_0003s14040.1 (locus POPTR_0003s14040) derived from phytozome v7.0 (chr-ID scaf fold_3; pos 14232289 to 14233068)
gtctctttctacgatagacaaaaggcatacatacggtaagtaaagcagtccactttgtctttaatcatctattcttaaattattatcttatctgtttgatgatcaaggaaattcttttttctttttatgtgagctgcagcaaggctatgtaattaagttcgctttttgtttcaaaagatttttgttgttatgagatttgattagattctttgagtatgacttgatgggtcggttgccttttcttttttatcctctggtgtcgtgtagttgttgattttagtgtagaaattggtgtgattttggtggagctttgtgctatctgggaaatctcaagcacttcttttattggtgatttgaggttgatgaggcttctttctaagggcttaatggagaagaacttatggggttggcgatttacgtgtttgtttattttggtagcttttattttagatttccatcggaatgcatccattgcaagaatgctccgattaatttttatgatttgctggaaatttagtttgatcgagtcctcttgagttttttggtggttttttgtttcccgtgtgattatatatatgtactgcccctaggcaatatattccaagcctttaaagcatattcaagcatgcattgattggagggattgatttttatgtgctgaactttataaagttaatcgtttgttcaagttgaattatctagtgcatatctctcattctgatctgtttttcttttcttgccataggttttgtatcaacttcttcaagtaaacacgtagct

SEQ ID NO: 60795 - DNA, 599 bp, Populus trichocarpa
  Intron number 1 from transcript POPTR_0005s11290.1 (locus POPTR_0005s11290) derived from phytozome v7.0 (chr-ID scaf fold_5; pos 8179700 to 8180298 reverse strand)
tcttgatttcatacaccagcaacaccttccctacggtaattcaaattccccctttctatttctctgtgtcttttgtgtgtctctctctgtttttttttttattatttctgtgaaaaattgggatgtgggttcttgagttctggtggaaatgataaatgggtttcgttttgtttgtaagtgtgatgctgaattgggatgtgggttttctgaattttggtggaatggaatccatttcatttccatttaagggtaatgtttcatttaagggtaatgttttgattcattttgctgataaacaatcatgggagattaagataactgtcgtgttgctgctctgtttccaataatggattgatcaaaactggatcttccaaaaaaagtgttaagattattattatgaaagttttgatttgtcaataaagaaatggggttatctatccaaattattcttcttatttttcctctccatttcacgtggcacaaaattctgttcttttggttttattttcatgggattcaatcaaaccctttgcaagtgggtattattgaatgtaatgcaattgccgtattttctttgcgttgttgtgataaacaggatt

SEQ ID NO: 60796 - DNA, 927 bp, Populus trichocarpa
  Intron number 1 from transcript POPTR_0010s23765.1 (locus POPTR_0010s23765) derived from phytozome v7.0 (chr-ID scaf fold_10; pos 20253131 to 20254057 reverse strand)
gcaaaagggtatagcttttttttggttctaagatgattaattagatctgctcttatacatcaataaggaataattttccttttcgatccaagcatgatacagtcccacttgacagtaaataattggtgttgaattatatttttgatactgaaaatcttgtttgagcatgttcaaattgatgatttgcttttgtgtatgcatagggacgaatcaaaatttatcgaagatgtgttgaataaattggattgcaaatgctttcatgtttccaagcacatgataggtgttgattccggtttgttactagaaattgctacgaaagatgtttacgttgtgggcatatatggaatggaaggagtgggcaagacacctacgacagagtctgtatttaacagactttgttaaatattacagggaagttgctttctttgaaatgttaaagaaatctcaaaacaatgggaagttatggttcaattacatgaatcacttctaaaaccaaatattctaaggatcaaaagagttgaaagagaaatcaatttgatcaaagaacgactttgttgcaaagaagttcttattgttcttgatgacgtgggctaatcagaacaattagatacattggttggagagcttggagagcgaagttggtttggtactggaatcattacaactagagatgaacatttgctaaaggaacttgaactggatatgaggctggaaagttggattgacatgcctccaagagcaccgcacccatccagtacaagattatgtgaagctttcaaatagtgtagtgatttaggacttcctttagctcttgaagttttgagttcttattcgttcaaaagaagcatccctgtatgttaatgtttagtgttattgaaaaacttagtatttagagaagacttgggataatttttgacacgctagatt

SEQ ID NO: 60797 - DNA, 998 bp, Populus trichocarpa
  Intron number 1 from transcript POPTR_0002s23230.1 (locus POPTR_0002s23230) derived from phytozome v7.0 (chr-ID scaf fold_2; pos 20671201 to 20672198)
tctcgcaggtaaaaagagttagtttgtttatatgttcttatagtgtttattattttttgtgaacaatatcagtagcaatgcttgtttctgcgctatttcatcattaccgtcactgtacttccatctgttaaatgttagctcaatcattgtaaacttctacaattctgaatctacatttgttggctcaagtatctgctgtagaaggtgttgaaaatctgatttttattgaaactcaagatgggaaatagaatctagagtggagcagagattaccggatcaggccctccaaaaggagattggctgataattagattgaagttatcaagatcagcctccacttgaattctaaggcttaaagtcaaagtaataaaaaaaatcaaggaaattgtttggagttcatgttagtttggctaagaaattggggaatgaatcattaaatgtagcaagaaattatgaagatccccctgcaccattctctccaaacttgaaggtaattcttcttatctgcactttttcagagcataaactagctatagagcgttttgctaccttgcaatggagttccacagctgataattgcagcattttgagcctttgttgagatttttggtggacctaggtggcagattatataggatttgatcatgtgaagaggcaatgatttggtctcacaatcagttaccatttagctttactaattttggagttgtgttattacgctgaatattttttgtttatggcattccatgtttatttcaatttatcatcattgaaagtttctatttaacttggattctgtttccatttagttagggaatatcggctataatgcacctatgaatttgttttccattagcctttttgatgaacaaactttggctcctgagttttctctcagattcaagggtttagcctagcagatgctagagtgcatgtctcttctcctgcaaaaatttgagttcttttgaaaaatgtttctaatgcagggacagcttcaa

SEQ ID NO: 60798 - DNA, 820 bp, Populus trichocarpa
  Intron number 1 from transcript POPTR_0005s09250.3 (locus POPTR_0005s09250) derived from phytozome v7.0 (chr-ID scaf fold_5; pos 6459970 to 6460789 reverse strand)
agttcaggaaggagagaggaggatcagcgttgaaggtggaaaaaattggatcttggtggtgttgttgtatggtatatattatgagtatgttgttatgttaaattgtgccctttttttttcgcttgtgtgtgaagaaggatgagaagaatttagtgaaaattagggttagggtttaggagttgggagaatttaagcaatggacgaatgatttaattagggggttcttttagtaagtttgtttggagattaattagggtttttagggttcaaattgtttagtttttgggggggtttgttggaggaggaagggagtgaagaattgtggttcagattctgtggctgaatctgcaaaggtgtttttttcttaatggatttagggagtctgctgcaaatctacatcaggctttgtgttcttatgttgagaaaaacttgtcaaagtttgtggctaatttgagaagtttgagtgctttatgcaattagtaagttcttcctaatttggaaaccatgtaggtttcttttctctggtgtgacacaatgcttgtaaatgtgggttggaagcattgttatgttatgtttcagtaaatgggtgcatgtaccttgaattgatcactgcaatcgaaagtggagttttccatgtgtcattctgcttgctttatatttaatctgacgatgcctgtgtgaatttggacttcagtctccccaaatttgttgaatttccctttgctgcaatggttgataaagagttgatattgattgatgcaatttgtgttccggtgagatgacaacagtgatggttttggtctgtagattgtgatttgcc

SEQ ID NO: 60799 - DNA, 342 bp, Populus trichocarpa
  Intron number 3 from transcript POPTR_0008s08130.1 (locus POPTR_0008s08130) derived from phytozome v7.0 (chr-ID scaf fold_8; pos 5066080 to 5066421 reverse strand)
atcattcaatcaagggtaagagagctagctatgccatccatctatctatctatctatctatctagggttttcgtttttgtttttatttttattctctcggttgttaaaggtggcaagggaagatagactcggatccgagtctttccttttgctttacgcagagtgagtaacattaatctaaatgacgccaacctgttccatttcttccctttgtttcacaaaattttgagtgttatacaagcacaatttaatgggatcaaaatgatcagattgattttgttcataattttccatggcatgcatgcagcttcggcgttagatcttcaacgaagcgcagcatct

SEQ ID NO: 60800 - DNA, 616 bp, Populus trichocarpa
  Intron number 1 from transcript POPTR_0001s15730.1 (locus POPTR_0001s15730) derived from phytozome v7.0 (chr-ID scaf fold_1; pos 12542562 to 12543177)
gaattccccacagctctcttaggaggttagccttgtttcataaggtagtgcacttttttgttttatgtcgaagtacaattggccattgacggaaatcaaattgatagactgatagtcatgtggcaatgttatcacagcagcattggcagcttaagcatgtgaaactgcactttgtaaagaagtccgtcacacagtcttgtttctgattatgctagtggtttgctcaaaaaaatctttcaagtaaattccagtggatgatcaccattggcggcagaagcaacaaaaaaatttctatgaaattccgttacatataaatctcttttgtggacagtgttcttgcatccattgtcgagttgtgggtgcatagaaattaaatgtcaaaccatgtccttttaatctagacctgttggagtaactagtagtgggatcaatgtaccaaagttctactttaggacatggagagaaactatgaagggttgtacatggtttctgtggcttcctcccatttcttcttcttcttttttccgaaattgttgtatgctctttatggggaatgaaaattgatgggcttttctgtatagtgcaggctgcatacaacattggcggccatatcatt

SEQ ID NO: 60801 - DNA, 783 bp, Populus trichocarpa
  Intron number 1 from transcript POPTR_0008s05420.1 (locus POPTR_0008s05420) derived from phytozome v7.0 (chr-ID scaf fold_8; pos 3140539 to 3141321 reverse strand)
aagcctctctttttaggtaatttccgaatctccttgattttatcttttaaattcttaatgttttttctttttctttttgggatcatagggttcgatttttggtggatttgattgctttgaatctgtgactttattttcttactattactggagaatttttattagattctagggcttatcaagtcgtttcttattttggattgttattcactttttgattactgggaaagtttagtaagttcgaaatttcatctgggttttctttgaatctgaagttttcgcctaatttcgctccatttttttattgaaaaataggagattgagtattggttcttctaggaattgtccttttcttttcttttttcttggcatccgggtagttgttttttttttaaataaaaaaaaaagatatcgtgcaagtgtagagagtgtggttagaagtgaaaaaaggtttaattttttgtttgttttgatttttccaggtcgctgatgagctaatgataccaatattaaaatttgctgacttgccgaatctttgatgaaactctgtgaactgatgtttcgggaatttgtagggatttgaaatcatgaagatatttatgagttgtttatttggttttgtcgattgagggcacggaggtctgcaatcatatatatatttttatctgagttattgtttgattgctcaataaagatgtttgtcgtcagcctttagcagttgtggtgctgggatttgcaaatcacaagcccagaagccagaaaaacagtgacggaaaacagaat

SEQ ID NO: 60802 - DNA, 603 bp, Populus trichocarpa
  Intron number 1 from transcript POPTR_0003s11400.1 (locus POPTR_0003s11400) derived from phytozome v7.0 (chr-ID scaf fold_3; pos 12219089 to 12219691 reverse strand)
ggcaagagacgtggtccatgatcggatttgttgcagattttcaggtctccggttgaatcgggatgaagaagaccacatggctgttccacgagcaccgacgatgtttcggcagaaagtgacattttcattttgacccctgctttctttggaaatttgacagttggacctcaattaaaatccctttcaattttacccttggattaatttcaattaagttcctgaatttatttaattaattaaatcaaagtttaattaagtccacaaacttattaattcttctaatttcattaattaaactaatccaaattttaattaaattttttgatcaatttactctcaaatctgataatttcatccctgaacttcgaatttgtgctcttttaatcttattttcaaatatatttttatacattcattttgtattatttatttaaaaattaggttatgagaaactgaatatgcattttcctctggatagcttagctggtggcatcattggacactggcccttggatgcaggatgtaacatggaagaagctttgagtcatccctgttggaagagtttaagagcaataaactaagtttcttcagaaattgccagcc

SEQ ID NO: 60803 - DNA, 864 bp, Populus trichocarpa
  Intron number 2 from transcript POPTR_0007s05100.1 (locus POPTR_0007s05100) derived from phytozome v7.0 (chr-ID scaf fold_7; pos 3292886 to 3293749 reverse strand)
gcctctagagctgctgttgtcctggtaataaatttgctcctgttatgtaagacttctgcgtttttttgctataattcttcacagaacaaaattataaccaaaaaagtcactagcaacttggccataagaagactgggtcttgtgttggctagccacctgcgcactaggcctatctcaccggatattctgcgaaatgggtcctttttgtccaacttttgtcctctactgctcatacaatatgaacagaacgacggcataattatggtctttacaaaaggtcgttttttgcccttttttcttgattcatttcggtggtgactatcgaggattgtatttgtacttgaatttgaggcctaccctctccccttcttagtggagtaatactatatccaacattctgctaacgttaaacatctggtcacaaacattgcatgtgtgggcgtggccctttaatctagtcttcttgtgaaaattatagaggggcaataattgtagctttttgaagctcgcagtttgacaataattgtatcctagaagaccatccctttgaatccagtactgggtctctttcactgttcaacatggaaatcttgcagtttaaggtttagctgataccagcatttttccggatatgccggtatctaggctttcccggatgctggaattatagacttcctctcaagacaatctcattgtttttaagtaataaagagaaaaatctcagaagattagacaagacttggtcagacagaactctttgctaaagaactgatttttagcctctcttttttatttgaaattttttgttctattcattgtattggattagagtggaggaccagattgggacgtgaagttagggag

SEQ ID NO: 60804 - DNA, 176 bp, Populus trichocarpa
  Intron number 1 from transcript POPTR_0003s15550.1 (locus POPTR_0003s15550) derived from phytozome v7.0 (chr-ID scaf fold_3; pos 15297671 to 15297846 reverse strand)
aagcacctcctcctagccctaaagaactccagtatgttctttcatttcctgtctactcaccactcttcttcttttctttgtttttcttatttatatattttaaaaaatgtttttagcaattaattatatctgtgtcttttgattaggtgttggagcttctcaggaaaaacagagac

SEQ ID NO: 60805 - DNA, 304 bp, Populus trichocarpa
  Intron number 1 from transcript POPTR_0003s09620.1 (locus POPTR_0003s09620) derived from phytozome v7.0 (chr-ID scaf fold_3; pos 10899941 to 10900244 reverse strand)
tgtcctttctctctcctccttcccatcttactaaagtaaaaaatcataaatctctccctctgttgtctgtactttcatattctttgttatgcttttcatgttgtaataatgggaaacaattgtttgtctctctgtgtgtgtttgttgttttttgatcattcatgtacttgatgttcttctcatgataattttttattctgtgttttctttttcgttcctcttcctcattatttcaatggaaagccagtctttgaatttggaatgcttgatatttgttcttacacaatctctttctcttctagag

SEQ ID NO: 60806 - DNA, 495 bp, Populus trichocarpa
  Intron number 2 from transcript POPTR_0010s02260.1 (locus POPTR_0010s02260) derived from phytozome v7.0 (chr-ID scaf fold_10; pos 2600952 to 2601446 reverse strand)
caatttatatttgtttgggctgagtggaaaagtagtgcacacgatgcaataatatttcctgaggcgattgacaatctaaatataagatttttgaagccactaaaagatattgagaaataaaaaatgggggtgttattaaatttgaataattttttttttggtcaaattaagttttgaacgaacattatcttgatgtagagaagtattatcttgttgatttaggatatccaaatgagtacaattacttgaggccatatagaggtgacagatatcatcttccaaaatttcatcgatgaggacaaccgtaatgtcgggaagaaatattcaatcgtgttcattcatcgttacgatgtgcaatagaacatacttttggagtttggaagaaaaggtggagaatcttgcaaaacatgcttgtgtttttttacaaaacacaagttcaaattgttgtcgcatcaatgacactacataattacattagaagaaagtcgatctaag

SEQ ID NO: 60807 - DNA, 645 bp, Populus trichocarpa
  Intron number 1 from transcript POPTR_0006s20310.1 (locus POPTR_0006s20310) derived from phytozome v7.0 (chr-ID scaf fold_6; pos 19363477 to 19364121 reverse strand)
gcaagaaagtaatgtcatttaattttgtttttcttttctttatttgtttttgttggtgggttttggttgtcctgttgtttcttctctttttcttccggtttcttggcgtgtttcttgttgggttttgtaagttcttgtgtttcaaatgatcaaagttggttattctcttgtttggttgttgagaaaacggacgacaacgaaagatgacttctttttctttaagagaattggttctttgttgctatttcattgaattattcgggtcatggttttttggttaaatttttgtgtttgaagtgatcaaagctcgttactttctgtttggctggtgagaaaatggaggaaaaaaaaggatgggttcttcttcttcttcttcttcttttaacgtatttggcttttgttggataccaaatggtatcaatattatgttaattgtgtgcgtgagtgaagtaacgaccgagagggtgcttttttttttttctttcttttaaaaaataaaataaaaaggctagacagtagaaactgaaaagttaattgagagaagcccattctgtggtttgcattttcagttgcaaatgcggctaattttccttttttttcttcttgtattttggtttttggaactttcaggtatcagttggaatt

SEQ ID NO: 60808 - DNA, 320 bp, Populus trichocarpa
  Intron number 2 from transcript POPTR_0017s01390.1 (locus POPTR_0017s01390) derived from phytozome v7.0 (chr-ID scaf fold_17; pos 968001 to 968320)
actggattcgtcaacctcgtttctcgctatctcaggtctttcatttttcttccgttattttgaaatttgttttgttccgttttgttgcttgaaaatgaaaaaaaaaagatttttttagctgttttagataattgtgatgtattagcgcgttcaatgtgatcaattttatttatttatttattttggggtctggatggagttttttttggttagatgatatgagatctgggatttgaaatttattgaattattgttattaattgttgggaatttgtgtggtaaaagtggggaagcgcagcaagttgagtggagtaagattc

SEQ ID NO: 60809 - DNA, 694 bp, Populus trichocarpa
  Intron number 1 from transcript POPTR_0009s06710.1 (locus POPTR_0009s06710) derived from phytozome v7.0 (chr-ID scaf fold_9; pos 6440389 to 6441082)
gccacaccacgggtatgtgccccacctcacctaaatgaattcccagtctctctctttttttttaatgcgagttttatgtttacaatgttttgtgtaggggagaaggggttatacgctttggctccaccacaccagggtattgacggagagtggagtgactgctctggagtgatagtgtataaatggaatgacaagaataatagaccaattactggaagtgtcaattggaagaaaagatggagttgctgtgctgagtatgatgaaaatgctccaccttgtagacgggggtggcatgtttcatatgacgatggcttcactctgtattaacccaaaaattgttttgttagctaaattcagaagcacaagtaacaattaaggatacaatttaggatgaggtggaaatgcaagcatcgataaagtttgcttgggtaatgtctgatgtttagacaaattaggcttggacattaaagtatatcctgtgtttttctatttatctacattttgattaacaaatatcattttcttggatattaagttccctgtcttgttttttcattcaagaggtatgtggctgaacattttcatttccttttggacaagcagagcaatttgatttattttcctttttgatgtgttcagcagcaacgattgcttgcaaggtgtatttggaattgatataatatcatctgagggt

SEQ ID NO: 60810 - DNA, 622 bp, Populus trichocarpa
  Intron number 2 from transcript POPTR_0014s05020.1 (locus POPTR_0014s05020) derived from phytozome v7.0 (chr-ID scaf fold_14; pos 3856102 to 3856723 reverse strand)
tgtggacttctggaattgtttttgggagaggagaggtacattacccagtgaaggtcttatggatgtttcagtgttctcctggtttctcatcgagcacagcagcacataatttcatgtgtgcattttcacagtttgccaaaggcaacagcttttggctactgctaagtagacatggtgtaaaaaaaaaagtggaaaacaatgatggttaagattctcagatatgatagtagctggacttcaatggaaactgctacatgattttcaaaaagtattttaacattcaattcttccttttgatttattttaataattgcaagagagttggattatgttgcatgtttgtttcctgaaaagtctctgggccttatttgagttttccttggataataatctaccattaagtatcagttggttacatggaggacctacatattctcatcactaacacacgattgaacttctgacacatttgtgaggccatgtttctagtttccatagcagtgagaattgagatatctactttctggtttgctgttttcctcgagttctcagttgctgatttgttgatcatctttcattttcccctttcctcattagggcatcattggattggaaacggaat

SEQ ID NO: 60811 - DNA, 877 bp, Populus trichocarpa
  Intron number 1 from transcript POPTR_0013s05690.1 (locus POPTR_0013s05690) derived from phytozome v7.0 (chr-ID scaf fold_13; pos 4102818 to 4103694)
ttggacaccaaggtatattttcctctttaatgcattagcgtctgtttatagattttctgttttcttttttttcctttgaattctgtgactttgttcgtttgccatgatatcactgattcgatgttattaaacttagtttaattagaaattaactaacggcaattctggatcccccaagcatgcagttcgacgaacaaattttattaatttgctctagatcaactagaaaattcttcgttcaattcatattgtttttccagaagatttccaagaaagatacaaaatattatgtttttaatggtttgggatttgattattaaatattaagaaaagcaatataaggtgcaaacactcttctttctgtggccatcatcaatttgttgtgcttctatctgtggaaaatattgatgttctctttaggccaacccggcctgtcccgggttggcctgtcccgtgtataggcataattccaagtataaacttccatttgctgttgttttagtacaatcaatgaattatggaaagagacaagggaattaatgttaagttccacagaatataagttctctacttttcgaagaataaaataaaattgttggtcatgtactgtgtaattgcatatgggggataggctgcctagggaatcaactttggtcttgcatggtattggatttggtttgcaaatattttcttcttccttatgtgctaccttattttattctcaatgatgagggtttcaagtatggcttaaagatcatgctgaatttttccatttgtttcggaattctagctgcaacacaaggaacttggctaacttttaatgttcttaaattgtgatatgctcagggaccggaaattcgaactggattcttgaagg

SEQ ID NO: 60812 - DNA, 365 bp, Populus trichocarpa
  Intron number 1 from transcript POPTR_0022s00600.1 (locus POPTR_0022s00600) derived from phytozome v7.0 (chr-ID scaf fold_22; pos 260361 to 260725)
ttctggttagtcaaatcaaactcttttttatgttgattcaatcatttaacttgtaaggaaacacatgatgtttttgttgttgtttattctttgtgattcactcacatttcttttggtatcatctcccctttcaatttcttaaatttcgttcattaaaaaacaacaaagagaaaccacaaacgatcaccttaagccacacgtttttcttcaacgatgagaatgtcgtgagattagtttgcatgtcaagattcttttaagcttcggctgtggatctatccaacaagtcatattcaagatagctcaaactaaaatcctaagtattttgtgcaggtgttgttgattgggggaacagagactgctgctac

SEQ ID NO: 60813 - DNA, 573 bp, Populus trichocarpa
  Intron number 2 from transcript POPTR_0017s08280.1 (locus POPTR_0017s08280) derived from phytozome v7.0 (chr-ID scaf fold_17; pos 6753842 to 6754414)
ggttacggatcttgtgtgtatccatcctctctaaggtacgcgtgatctgaatcatatgatcatcaatctatctttggccctttttactgaaaaaaaaggatttcctttgagttttatgacgttttttaggtgtttaagatggttcttaagctatttaaaatagggtaaattgtttgtattttaagttcatcaggcactggtgcttctttaagtattccacagtgggggagtgaccaggcaaagactaatacactgcttaagcccactaaaaacatggttaagacatgaattaacatgataattaaccacagcttcgtcttcacgtcaagggttctttctgtttatatatttatttagttagaacataaagattatgcccaaaatagtttattgtagtcttgtgtgcttctttttcgttttcttgaagcacctctccatgtcctcttgcagtttagtgtggtctctcgtttgtaaaggctgatgaatgaattacacgtgtcattttgcatgtggtcaagatttgatcaacaatctaaagatccaacggctcaaaaacttgtacagtttcttcat

SEQ ID NO: 60814 - DNA, 526 bp, Populus trichocarpa
  Intron number 1 from transcript POPTR_0011s16000.1 (locus POPTR_0011s16000) derived from phytozome v7.0 (chr-ID scaf fold_11; pos 17978793 to 17979318)
agtctcaattggcttcttttgccaggtcttctgaggtacaaacattcaactcttgttcctttcgttctgtatgctttgtttacttgatgagaaaatgttgtagtagaaaagaaaatgaagttaagtttttcaaatttagaagttttcagcattagggactggaaagaataatgatttgagataaactaagtagaatttatggttaatttatttagttttttttctagaaaacaaaatagatttaatttggcaatgtttaatgccgtcttgatattaaaagtttaattcttttggcattttttaatcctgtcttgacgatgacaagttagttctttgatccatgctgtagtctacatccattgttagttacttttttgtgatgggttcaagaatttaattggaaagcaaacagagggccaacgatgtcaaattgatggaattctcctttctttttgcttgatgagtctaagtttaacatagctagccaggattcattactaaactctctcttgaatttatcagagtg

SEQ ID NO: 60815 - DNA, 681 bp, Populus trichocarpa; identical to SEQ ID NO: 55623
  Intron number 3 from transcript POPTR_0018s03390.1 (locus POPTR_0018s03390) derived from phytozome v7.0 (chr-ID scaf fold_18; pos 2991598 to 2992278 reverse strand)

SEQ ID NO: 60816 - DNA, 514 bp, Populus trichocarpa
  Intron number 2 from transcript POPTR_0018s05280.1 (locus POPTR_0018s05280) derived from phytozome v7.0 (chr-ID scaf fold_18; pos 4796223 to 4796736 reverse strand)
taattgtggcactcttttctctaggcaagtactatatacaattcagtttccactccattccattccatgatcaaagtttagattcatttcttttagtcttaagtgatctataattaagcttactagctctccttaatgatgattagtatggacatgcctcctcctagtgtaagataaaagtatcttgagttcttgacttcatattcttatggtttcaaaatgcttcaagttcagagagcaagagagagagactgtattaagttaaattattatcgctatctttaaagttgcaaaggttaagaaactttaatggttagatctactatataattgtccttggttaagaaaaagaacgaaaatacaaaaagtagctagacacgagacagcgataaagaaaagaagcggtacttcactactgtttgcttcattttaatggtatacctttttgttttcttctgcttgtttttttgtgcttacaggagggacagtttcatcacccacagagccttctgtg

SEQ ID NO: 60817 - DNA, 402 bp, Populus trichocarpa
  Intron number 1 from transcript POPTR_0015s08920.1 (locus POPTR_0015s08920) derived from phytozome v7.0 (chr-ID scaf fold_15; pos 10269368 to 10269769)
gaggttgctgcacaatctgaggtaacattttttattattattagtattctttggaacaatttgaatttaattaaagccaatttctttctttttttaaaaaaaagtattctgatttggcattacttttttttaattgggtaaattacctgcttaatcactgtttggtttctaggaaaatgtagggaatatatattgtgggttcaaatttcttctttgggaaatatgtaagctttttctttcattttggtttgggttgtgttgagtataagcaaaatgaatgtggcatcaatggtcaggaagcatgatttttatttatttatttttatttttggcaataaaatgggttttgggatagtaatatctttgtaaatatatgagtttgtttgttctgatattaggact

SEQ ID NO: 60818 - DNA, 735 bp, Populus trichocarpa
  Intron number 1 from transcript POPTR_0496s00195.1 (locus POPTR_0496s00195) derived from phytozome v7.0 (chr-ID scaf fold_496; pos 639 to 1373)
ctacgagggagtgttttataattacttcagcataggtatgtcaatatgttctagaatggccgttaaagttgtgcacgtatggtcttaacttggttttagagatttataatgtttgtttgagttcaactagttgtcttgacgagtgtttcaactgatgaacttaaacaagaatgtttcattccaaagaatctgttactttgtttcattgtgctcacttgtccataatgattccaagtattttctgtgtaagaattgaactacttgaaagttgaaaattgtcttttttgactgagaaatgatttttttttctttgtttgttttcttttcttttgtatttttttaatccatcaaatggggtgttttctcattccattggttcttctggattgattctttcatttgcttcctttttgtgcccattggttcttcaacatgttatctcattggtttgtactttataattgtttgttcactagacagaaggcttaacacaacgattaactccccatctgaactaggcggtgcatgttgaactcaatttcgctaattaactcagacaagaatcctatggcatttaagaaagaaagatgtaaaacttcatttgcaaagacttgcttaatgacattaaaaattttgttccaaatgacaaccttgcaggttttagcttgtgatgaatatttgtatcctgttttactctttaggttgcttctaagtttattgtttgtttgcacagga

SEQ ID NO: 60819 - DNA, 746 bp, Populus trichocarpa
  Intron number 1 from transcript POPTR_0016s12440.1 (locus POPTR_0016s12440) derived from phytozome v7.0 (chr-ID scaf fold_16; pos 11794870 to 11795615 reverse strand)
caaaacaagtggcctgcaaccccagcttcttgccggtatgcatgcatcttcaattctcttagcagccctatgttatagtattccttcgtgtgtttgactgtttctcctttgtctgttatactatatacgagtacttttcttccatttaattaacactgaactttcttattttcttcaaatggccattggaaattgtctttcttgctactttcctacttattagtcgtctaccaaagttggcacggtaaaatatatccaattagttgcagaactgtagaagaaaaggaggtttggcagctggatctttatcatagaattgctttacaagtacagccaatagtaccatcctttacacgaggagataatatgatgaatatataattatctagtttgaccgtccaagaatatatgttggatgggcgcctttattttatagaatttggttatttgtttgaggtaatttaatttacctacagactccagctgataattcccttttgattgctggtgggtaaaggttctctattgaaaaagaaaagaaaagaaaaggcgtgaaaagggcaagggagagatagagttcgattaatctctgatactgcaattatttcatgaagtcttgcagaaatgattagtcacagatgtgatggttctaattaatttaacagctgctagttaagacgtaaattaactattttacaaccttttttgcagggaattggtagctgagtacggccgcgaggtggtta

SEQ ID NO: 60820 - DNA, 865 bp, Populus trichocarpa
  Intron number 2 from transcript POPTR_0017s07220.1 (locus POPTR_0017s07220) derived from phytozome v7.0 (chr-ID scaf fold_17; pos 5620280 to 5621144)
gagcagacccatttgagattgcggaataatttgaagtaagttgttgtgagtgccttggttttgtattgattttccttctcttgttgtcaaaagttactgttttatttgattttcttattgttgtttaatttctgtagctaaatcaataattaactcaaattttaattttaatgttgtactgttattttaaccagaggtttatcttgaactattttgtttttgatttattgagctgaattgatttcaaaatcaatcttgatatgactttgtattcataatttaatcatagaatatctgggatctgacactagcagactttacagggatcttcaaaatgaccagttaaagttgcaggtggatgcatgtggttgttttatacaaagaattattctttctgtacttcaaaaatgtatagtatagtgcaaggacataacttgcctcattattatttttatctgtctacgtttttcttgagctaaaaacatatattgtttcatcaattttcatttactctgccatcccttggttaaaatactgaggacttttcccctgctgatgatttatccggtgatgttggggatattactgcctggtgattttctgatgatttttttttcctataaacatctaagtctttttaatcatctactttatttataggagagattgtatagtataagacaatgactacaaccagcaacctttggtattgagcttaagaaagaaagataagcctgtctttgatttaatacaagttttttgccatctacttcattagtgtgttgcatatttgcatattctactaaattggctttcttcaacgatttcaggacaaattcagatttgagattacaggcttccaggg

SEQ ID NO: 60821 - DNA, 764 bp, Populus trichocarpa
  Intron number 1 from transcript POPTR_0003s17520.1 (locus POPTR_0003s17520) derived from phytozome v7.0 (chr-ID scaf fold_3; pos 16860096 to 16860859)
gcaacatctccattcccggctgtgataaaaatgtaagcttttctctttcttttttctaaagaagcaaaatttggaccttttggtttgtgggtttgagtgaaatgtgtgatttatgtgtatttattgagggtttaatcattggctattggtgtggttgattatgctgatgtttttttgtttttgaaaaacttgaaatggaattaagatcgccaaagttgaaccctgttatggcaatatgctagactcgtcaataacagaatattttttcgacattttagtaatattattctgttttcttttattccatcttattctgttttcatttcggtactcgagatttctgtaaatatccagcccatagtgttgaagctaatactattttttttcctggtacaaaaataaagctaattaatatattcttcctttttggctaaaaaaacatgttcttctttgctgtattggctgtaaagttactcgaagctgatatattttttcacaatcaaaatagctcctcgtatccaaaaagaatggtaagaaaaggcactgaacaacacacaaaaaaagaagaaaaaataatgacaataatagtgcaactttgtagtgtgtaactcgactctgtaaattatgttaccagccatgagaagatagaatagtgccatcattttggattatgtctgtccctttccttcacacaagagtcgatgtccaccgttcttacttccatcttcaaccatacacttattaagttgtttcattttttgtag

SEQ ID NO: 60822 - DNA, 603 bp, Populus trichocarpa
  Intron number 4 from transcript POPTR_0006s03080.1 (locus POPTR_0006s03080) derived from phytozome v7.0 (chr-ID scaf fold_6; pos 1948583 to 1949185 reverse strand)
tttgaagcgtgggaagcctgctggtgctgaagaaggttgataatgtattacaatctttctttttttatagtatatggttgcatctttattttgattttgtccgtcctgtttctgaatatagagagcttgttagtgtgtgtaaccgtagaggatttactcctggaatattgtgagactaaatttcctttctgaaaggaagatgaagactgttgatgaagtggaagctggtcgtgtcattagtgagagtgctggacgacaatggaaactaaaatgattgcagacctattaaggaaggtatcagatgatgaggaaaaactgggaatacttgtacagacatgtgcatgcaaagaggttgataaaaatctcaaagtttttgatggccactgaataagctcttgttggtttgaggaaatattttgacttgaaaataaaccatttaccaatgctctaactaatggaagtcaacgtgatttttgtttgagacaaccattcaattttgagttgcttatgcttctttttatagcacatcactgtgacaacaaagtgaataactctggatattttgtgggcagatggtctaatccgtttcttttctggcagatc

SEQ ID NO: 60823 - DNA, 792 bp, Populus trichocarpa
  Intron number 2 from transcript POPTR_0013s02400.1 (locus POPTR_0013s02400) derived from phytozome v7.0 (chr-ID scaf fold_13; pos 1435666 to 1436457 reverse strand)
cgcgttccaatcaccatcattgatacctcatctaagtaattcacacacacactcctccctatatgtatattttgaagtgtagaaatatggttttatgtgcttatggtaagcttaattagctaaaatagctaagtatccgtgtttttttctgataaataatcagggcttgtttatttgagttgctatagtgtatttggttttgggagtacggaaagaatggaagtttctggaatgctgttatagctggtgggaaactgtggagatgtttaaagcttgttgtgaactctgtttggtactagggctgctttttgtgtttttccgggtgaagtggaggtaatataattagtgggtattctcagtttttgaaaggtgctatgactagaaagagaaagccaacttttgaagcgtaaaaaggaaaaagagtcaagttttgtaatggtaaattgtgtccctgcatttctgtttggttattgataattatctgcgcaaaagagggaactgacatttgagttttgtataatttgttggccgagttaggaagaaccatatgttcattggggttggatatgtctgtgtgaatgaaccaaggagattttttttggaaggattgataaatgttggacatgaagttccacattcaagttttgttttcttttaaaatttttagattgcttgcagtccatttttcttggttgggaagaggaggtgcaatgccattttcattcattattcaaagtaacattctgaattaaataatgattgtgcaattgtctgtgtgtttcagagtagagg

SEQ ID NO: 60824 - DNA, 728 bp, Populus trichocarpa
  Intron number 4 from transcript POPTR_0006s19540.1 (locus POPTR_0006s19540) derived from phytozome v7.0 (chr-ID scaf fold_6; pos 18594036 to 18594763)
ttcggtattcaggagcacattgatcttggcatcaagtgagtttttctatgttgcttggttgttaattccataattaaatattgtgctgggtttattgaaattgctttatagtacttgttatgcatgtatgatggaatgaattcaatgggtatcaatggatttttagggctttaatggttgttggcttaagaacggtagcatctcaaatgctttgagttcaaattgaacacttctgtttattttgtaatgtcttttcgcacacgttactctatagtttttgtttgaaacctattctaacttaatagtttatggataatttttttgaagtaagaataatgctgttgtgattacaacaccttaggattgtcatattttgtaattgtgggtttagttataaattaggtgtacatgattcttcaaagcacaaatgctgaatgaccctatattggaggatgtattgtttagtgatgtagccttgcttaatttctcttatgttaaatataatgcttctaacaggactgcttattatgtgataatattggttcacattatatcttgcacggtggattccaacatgaagttttctgtcttaggcttttaatacccttgtaattctaccttgttgaagttgaatgtgccagggtttactttgactcaatacactgtttttgtaattaactttgctatttcatcctcgtctatcaggtacgacccttctacaggtattt

SEQ ID NO: 60825 - DNA, 902 bp, Populus trichocarpa
  Intron number 1 from transcript POPTR_0009s05620.1 (locus POPTR_0009s05620) derived from phytozome v7.0 (chr-ID scaf fold_9; pos 5677948 to 5678849)
gctcctagcaagctcaattccactgtaattcctcttctatctccctccctatcaataaataactatatactggattttgatttgttatgctccgttggttgatttttcatcatctatttgtttggatctctcttgttaattttcaatttccttttccttttctgttttttttttctcgcactacatgtgaattgttaaccaagctcaatcaggtagtagtgtttttacttgaaagctaagcatttgcctggattttttttttttattttcaaggtttagtagagacgtgttaatgttatcatttacaagtgtaatttggagaaaaattgagttgtggctcatgcaaatccatattatttgaagaaatgtcagtccttttccaggtgaaagcaataaaggaaatcttgtttcttttaatgttgatttattacatctattctatgatcatatctaaaaatttgttatcatgctattgatgcatttctaattataatctcaaatgtcagggtttcctttagttggaaaagcccacgagtttagttcttataattaatgattaaaaattaccaaatgggtggcttttgcaagttttgacttttgaatttggtatgtcgttgaaggattttgacaattacaagtttatttgaatttccagtgtagataatgcattcaatgactgaatacacttcattgatgcgttcacaatggaacgtaaccaaggatataataaggagggatttgcttggttgttgtggttgaaattcattaagtccttctcgaaccagcataaatgaaaaactttttatttacttctctttccattaactgtactcaacatcttgctttctcattgcatcacatcaattaaatcaagttgatgcctcctatctgataggatccac

SEQ ID NO: 60826 - DNA, 387 bp, Populus trichocarpa
  Intron number 1 from transcript POPTR_0011s15730.1 (locus POPTR_0011s15730) derived from phytozome v7.0 (chr-ID scaf fold_11; pos 17814154 to 17814540)
ttaatcaggctctctccacgcttaaattggtaattcttgtgtgcccttttgtttgttttagttggatttaagttgaatttgttagtatatttgctcgattgttgttttccgtatcgagtgaagttagaagtaactgataggaattaatgtatgaccctagattaggttaattaggctcttttggtgctttaatcggtaattagcattgcatattgtttgattaattcgaaatttgagagggaatgatgggcctattcatagataggtttgttatgaaaaatatgttatagaggtgttgctcttcggttttcttgatgatttgtaatggaagttaattttttgtggtatacagcttgttgcatctgcagattgtgccggagcattgga

SEQ ID NO: 60827 - DNA, 610 bp, Populus trichocarpa
  Intron number 1 from transcript POPTR_0013s14180.1 (locus POPTR_0013s14180) derived from phytozome v7.0 (chr-ID scaf fold_13; pos 14487890 to 14488499)
ctccctcttaactacattcaaactcttcaaacctagtaagtttttcttcttttatttcctcctttctgtggttctcttgtgtttaaagtttctaaaaaattactctaagcatctcccttttgttctatgtttatctcttcctatcaactctttgtggtgattattagatctgaaactgcttagagcaaaaccccactttttatttattgcatttcttgaatctaactgcttcttggttattaaagtttgagttttaagttgaaagttaatatttttgttgctttttttttttatcacctgtaaatacctttcttttattggaattgttatgggttttcagctttttccttgtaactgttattgccataaagatttcttttcgattttgctaatttgggaatttgagttcttaatctaggaatcttggtggggttttgttaataagcatgttaatgcaactttgcttcaaagccttgatagattagaagctattcatttatctgaaacggagggtttgcttctatttggctcttttctgtttactagattgatgggggttttgctttaattgatagcatttcttggtgtcctctgataatttggagagttt

SEQ ID NO: 60828 - DNA, 543 bp, Populus trichocarpa
  Intron number 1 from transcript POPTR_0010s23880.1 (locus POPTR_0010s23880) derived from phytozome v7.0 (chr-ID scaf fold_10; pos 20330030 to 20330572)
ctgctgcttctgaaagtgcactataacattcacaggtatcaacactaaccctagaaacagtttcttcgttaacttgtctgtgcactggcttgttttatacctgtttactctagcttggttttgtgtaatggcgtgttacaagttgcgcacataaagtttatttcctgggctagtattgatatctctgtttaacttttgatgtacccttttgtttgttttttgagaaaatttgaaacggtaatccaattagttgtgtttagctcatctgggttttatttttctagcttttattctgtggtttttcttgctttcacgttccaaagtttgtaaatgtaacgtttaatatggattttttggcattaattaacttgaaagttatgggtttgcgtattcaatgtatgtttgcttgatgttgaattcatgcaattctctggatgatattttttggctatttatgcagtatacgtattctgtgaataatgagtggttaattggtagctatcttgattctgcaggtttggaacataaaatttaagtggacag

SEQ ID NO: 60829 - DNA, 624 bp, Populus trichocarpa
  Intron number 5 from transcript POPTR_0010s23880.1 (locus POPTR_0010s23880) derived from phytozome v7.0 (chr-ID scaf fold_10; pos 20331430 to 20332053)
atatagtcttgccaggttcatgtctgctatgtgatttctttctaatggttggtttacaatcaaaaattgttttagccaggaatgtttatgaaggcaacttcattgcaactttcccagctcacttggtgaataacttagcaatgcatgtcatatgcatttgaatccatcatttcacatgtcaatttggattacataaaagaacaagcagagagaagaaatgctggaaatcatagtgcgacttttctgaatatctttcgggaaaacgttgcatattttcttatccatgctgtgctaggtctttcttacgaactctaattaatcctgaaactatcgttattccaagagcacaaaattctgtttgtaaaattcttgagccatatttcctcttaattaagtttgctttttttttctttaagaaaaaaaatccaaacctttttctttgactgtcagttatgtaacattcttgcctggaattaaactgtgcagattttgaaaaaaaaatccaatcctcttaacattcttgactgtcaggttaatgtcgtgaaaaaaaacttctgaaacttccttttattttcactgaaatgtgcagattttggtccatacactctggattttacttcaagt

SEQ ID NO: 60830 - DNA, 578 bp, Populus trichocarpa
  Intron number 1 from transcript POPTR_0014s08120.1 (locus POPTR_0014s08120) derived from phytozome v7.0 (chr-ID scaf fold_14; pos 6026503 to 6027080 reverse strand)
gctgttattaaacctgaggtttgtttccttttgcttttcttattatttttaatttcttaaaagaatttcaacattctaattaaatctctgcttttattagttttatctgcacttgttttctgccattttatggagaaaatatctgtttttttatgtgcaattatctcttcccgctaggacggcatatggtttgctttgagttgattggttagcagtcgtggaatgtaggccttaactgtccatgtagatgtaaattgtatgttctcttttggcagcaacatattcttggaatgatggtagtaaattttgcatgatcaatgctgaattggtgaataccgactcatttcattgattttttaagcttttgcaactaatattattcaagttagaaacaagagagttaaagcattgtgtattttctaacccctttctataacagaagattttatattgttgatccgtgatctcttgtttatttgagcttcttcttgaagtccctgttttattgtggggctctattctgtgttataatgaggaattattcaaaagactcaaaccatgctgctatctgttgtcag

SEQ ID NO: 60831 - DNA, 217 bp, Populus trichocarpa
  Intron number 1 from transcript POPTR_0010s04860.1 (locus POPTR_0010s04860) derived from phytozome v7.0 (chr-ID scaf fold_10; pos 6044338 to 6044554)
tcacgcctctggcagaagccgcgagcgcaaaagaggtgcgtacatatatacttattaatcatcctgctagatgtcatcctggattgatcttcatgcatatataattatatatataaagaaaaaaaaacatctttttatgatttttggttctggaatttgattagaaaaaaatatctgtgataactgggtttgatgggtgttgattaataggggttcc

SEQ ID NO: 60832 - DNA, 1023 bp, Populus trichocarpa
  Intron number 1 from transcript POPTR_0860s00200.1 (locus POPTR_0860s00200) derived from phytozome v7.0 (chr-ID scaf fold_860; pos 6226 to 7248 reverse strand)
aaacaatttccaagttcctcctgcagccacacgcagtatgtatacaagtacctaaaatctcgcgccaaatacgattgacaaaaactactcgtatccaaggtcactaatggattgacgtaaacacaccctgagttaaatggacatgggtaaatttttagaaatgttcgttcagtttctgaattttttgaaaaaattattttaatatctaaattttattttctttacaaattattctttattgtaattttttttgattttcatatatttattaattacaatccaatctcttattaaaaatatttttcaattatattttttattttaaattatgaaaatgactaagattaattaaataatctaaatatgtttgaggacaaggcaagtgttaaacgagtataagtggatatttatttaaaaaataaataaatcaataatagataaaataagacttatatctcttgtgaaagtaattgtttggtattgtattttcacttgtgtttaagagtattttaaaagagtatatttaaaaaaaaaatatcaaaattgatatttttaaagtattttttaatgattttaatgtacttatatataaaaaataattatatatatatatatatatatatatatatatatatatatatatatatatatacacatatatgattttaatgtactttttataaatcaccttccatcacaataacaaataccatgtgaattcatacccacctattggccacaggtttatttgatttaagaacggctattttcatataattttaggcgggagagtttaaattcctgaacctggaaaagaaaagagaaagaaaaaactaatgtaacagtctccaattgcagatggaatcgctaaataaggcagtaaacaaagactccatactggtggcatacttgcgcggcggcgtcggatctccaatgaaatcaccaggcggcgacagattctctcgcaattaccagcgcagaagcagcgggagttccagatcgccgttatcgccgcttgagaat

SEQ ID NO: 60833 - DNA, 650 bp, Populus trichocarpa
  Intron number 1 from transcript POPTR_0014s08480.1 (locus POPTR_0014s08480) derived from phytozome v7.0 (chr-ID scaf fold_14; pos 6296488 to 6297137 reverse strand)
actaaagttgctgttaaaaatttgttgaataacaggtaaagtttgttcttttaattgttttctttgttggtttattattattttcatgtgtttttttttagataatgagaaaaaaaaatggaatgaattgcatgtttgtctttgatttgttgctacttgctaggggaagatatggggaagagaagtggtaaaagtttggatcttatttgttatggattgaacttgggattgtttgagatgttttacgtttagaattactatggaaacttgaaatttatctgcttattttactgtatgctttaagtctccatggtagaagaaaattgctaagttttaattactgtgctgtgcttgagtggttatgattggtgtcttctttttttggttcttgtcttgcatgtggttggatatgtgctgtaaagtgacatgcttttgtgggattccttacttttccttgtcaaatgcctttgatcataattgaacctgaattgataattttggaatatgaatagaagttgctgcagcagacagcaatcttccatctacgtcttgactgcctttctactaaaattatgcatgcataggttagtagctcatgatactgaaaattctcaggggtcaagctgagagggaattcaaagtagaagtgg

SEQ ID NO: 60834 - DNA, 668 bp, Populus trichocarpa
  Intron number 1 from transcript POPTR_0004s24390.1 (locus POPTR_0004s24390) derived from phytozome v7.0 (chr-ID scaf fold_4; pos 23072611 to 23073278)
tcctcccattcctacaagtattgataatactcgtcgtaagccatctcttcttcctacttaaaaacactctttctttctatttcttctgtcactgcaaatcaaatcgaattaagtaattgtataattttctttcccttttctctgaattgcaattgcaattgcatgatgaacctagccagccaacgttgactttctcatcgttgagccatcctatgaataaatggaatgaatgaatagtagttagttttgtttcaatttcaaattcaaaggcaaaggcaaaatccactgaatgaatgaatgtataatactgtgaaagcatcttcctttcttttgcttctgctactaccagtagattgattgattacactataaacatcagagtgtgtatcaaatactattacatccataaaccctaacataatacaaattagtttccattttctattctccaacaatatcaatcattttaacatcaaagatttattattaattgtaaaaatcgattttttcattctcagttatttaattcccattttttatttcctatgcataatctacttatctcaaccattttatttgtttttttttcagatgtggatcaatcttccaatttttccaaaccaacaacattagctgcgggttcatcgccaccgacatccaaccctcaa

SEQ ID NO: 60835 - DNA, 742 bp, Populus trichocarpa
  Intron number 1 from transcript POPTR_0018s12970.1 (locus POPTR_0018s12970) derived from phytozome v7.0 (chr-ID scaf fold_18; pos 13433450 to 13434191)
acaaggagttattagctcagctaacaaggaaaaaggttatatccttttggattctttcatagccatgcatcaagaatgtgtataattttgattggacccgtgttttgttttttcttgattctgtttattattgatgaatttttggtgccttcattctaatttgattgtcatcttctcctctctatatataaatatatatggagcaatgattgaaaatgaagctcgactataatgtactgtttcagctactgttctttgtggctgtgtgagagacttgccttcttgcaagtctcgactgcatggatctttcaaattggggtgttatgcatctcatttctcatgaagaacgtggttaagattatcttattgcagtcaccacaattgaacccttttttttattgtttgttttgagcatatacttgttgatatcataatctggaggaagcatttatgcacttgagttattttctctctctctctctctgcagtaagcacattaactcagtctagtgattcaccgcggaccatgcatttatgcacttgagttattttttctatctctctgcagtaagcacattaactcagtttagtaattcaccgaggaccattttttaagatcttactcagcgcattgtcaatttctgattgaatgatgttttctgtgacatatatggtattaatttatggaataaaatgatctgttgcaggatatttgcaagatcttgtgtacaagctaagtaaa

SEQ ID NO: 60836 - DNA, 654 bp, Populus trichocarpa
  Intron number 3 from transcript POPTR_0005s14820.1 (locus POPTR_0005s14820) derived from phytozome v7.0 (chr-ID scaf fold_5; pos 11750269 to 11750922 reverse strand)
tgttagcctctggtggctccggcggtagcaaagaggttctaattttattttttttgtcttgttgttgatattaagcgatgatcttttgaagtagttcagttagcatgtgaagaaatgtagcaacctagcatgtaaacttgcttattataaggttttttgacaggtgattttttccagtgttattgttttgtaaaatctatttgctaggaacgctctgggacactttaaaccatgtttcatggagttgggttatctatacgttgaatatttatcaaaagttcattgacaattggagaattggcagaatatttgaaatggtcgtgggaattctcttaactattttacatatcagtctgaaaaccgtgtgttgttggggatagaatagtaaaatttatcttttaacatcctaattggtgaatagaatagtaaatcttggattcagttcttaccattgttaggcgtagaagatcaaagtatcaaggagatggttttgtaagtttagtcagattactcacttctcttcatgtgttgtcattttagtctctcctccatttctcctattacaaatgtttctcttcatgataatgatttctgagaacagctttcccctattttccagtttcttaaacagtcagctgcgaattacatcaaact

SEQ ID NO: 60837 - DNA, 737 bp, Populus trichocarpa
  Intron number 1 from transcript POPTR_1602s00200.1 (locus POPTR_1602s00200) derived from phytozome v7.0 (chr-ID scaf fold_1602; pos 4894 to 5630)
acacagttaaaggacaagttcaagagaatatgtaagcaatacacatgcatgcgcatgatttctcatcttcggatgggttttgatcattctttccattgccaatcacactgcttaatttcacgaagggaagaagagagctggagagtactgtacgtagagtgctaagagctccactccatgcatgcatgtctttctgccattaattatacatgatttgatttgatttgaggatgcaacttaagattcatataatgggatcgaagcccatttcatctcctattggaaaaaaagcactttgtctatcatatctgtgttttttagggtaccggggcattgcggtgagaattttgaattttttttaagagttttaaattaataatctttagtgtttttttattgttttaatgtattgatattaaaaattaaaaaaaaatattattttaatatattttcaaaataaaaacacagtattaattaataataataatatcatgcttctaagtgaaagtaaagaaaagcttcaagaaagaaagaaagaaagaaagagttcggtgtatttgcctaaatcctatgatcatatgtaaagaaagagttcggtgtatttgcctaaatcctatgatcatatgttttcatttttcttggctgatgcgcaggtgaaaaatccaaaataaggaaacgtacgttacatgtatatcaccgaagataccatcaagaagaacccaagcttaagcacctac

SEQ ID NO: 60838 - DNA, 822 bp, Populus trichocarpa
  Intron number 1 from transcript POPTR_0006s27050.1 (locus POPTR_0006s27050) derived from phytozome v7.0 (chr-ID scaf fold_6; pos 25068205 to 25069026 reverse strand)
gagttttgatttttttgctcgcatctcgaggtaaggaagttgttgaagtgttgttgtttctgtttggttgctgagaaaactttttcaacttctttctctcattgtggagtgagatttgagtagttagtgaacttgttgggtactgaacggagtgttgatttttgctgctaggattttttttttgctgtgagcagatcagtgttgaaggagcgatatgaaacttggaaatgtagagattcttttgatttgctacgaaatattcgtttggaagattttgtactgatttgattttttttaggattagagattcatttagcggaatctgtttttgtacaggtcttgtttggtttccgagaaagtggagggaaagaatggtagaaattaatcaaattatgaattgaattgattaggtttttgttttttgttcacttcgtcactgtaaatttggtgacgaaccgatgaagtctcgcggtttgtcaggcattttgtgtactattactgaaaattgtgtgttaagtgagtgccttttatggttttggagtataacgtaatgggtgcagggcgtggttatgttttggagaacgaagaagtatgagtttgaggactggtgtgcataattaggaacgaagttgaaatgttttcaatgtttaatagcattagtttctaaatataactcaattatcatatgaaaatagagaattggttttggcggtttgaatctcactgccaagtgtatgttttcatgtttcgtcaaaatcatttttagttgcaaatcttacatttgttttgtttatttatttatttattcttatttgcagagtg

SEQ ID NO: 60839 - DNA, 558 bp, Populus trichocarpa
  Intron number 1 from transcript POPTR_0006s09560.1 (locus POPTR_0006s09560) derived from phytozome v7.0 (chr-ID scaf fold_6; pos 7031228 to 7031785)
ggcttaaaagtaaaataaatctgtcgcggaaaggaagataagtgagagccctgtagcacacagacacacaagtacaccaatgtttgaggccattccaacttcctcttcacaaatcaccttttctccctctcgatcttccactattcctcacttttttcctgttaataacctctctaaccattagaggcaatcatttggcagcagtttttggaaggagttcaatgcaaagctgtggaaattacagcagctgaatcggacatcaaagaagagaagagaaagaagggcctgtacgcgcttcaaaacttgacaacttggctattgaagaaagaacaagctaatgtttgtgagttaaacattttgttagtgaaaccatagctaatgttttttaatgtctagctgttttgcaattgtttaaggtgaagtggccgcacggaaattgtagcaacagaggaagaagatatacctgttgcagttgaggaaacttactctgagaactatattgttgtgtttgatccaatatttatatagcattgactactggatctatctttggaattt

SEQ ID NO: 60840 - DNA, 913 bp, Populus trichocarpa
  Intron number 1 from transcript POPTR_0006s03550.1 (locus POPTR_0006s03550) derived from phytozome v7.0 (chr-ID scaf fold_6; pos 2318280 to 2319192)
ataagcttagaggcctccttccttgcaattccaaggtaatatatttatgatatatgatcttgcgtttccttttcttttcctttctgaattgatcatgtttctacttatgaagtttaagggattatattaatactctttccctaaaatttcttgtgagaggattgttttataagagaaagggatcacgaaaactaaaaagattgtaagctttaaaggggttttcatggaaaatattgtaattttgttcttgctgtttttacttttatttctcttttgggttcatacagaacttgaaacgaattggtattgatttcggggttttccatagtgttttgcttcaataattttgattgtttggttgctgagaatgcagtggaaaaagttgaaatttcgagttttagacttttcagtcattaattacctttgacccacaaagccgaaatccctgctgacagacttgacgcttgcccaactcaaatcgtttggcatttgttgtttacttgaatacccattttttgaagattaacaacaagggttttatgtgcttcactcattgaattttttttttatccgtttctatccctcattttcttggtaaccaaacgggaaggatctatacaaggcttatcgctgctacagtaaaaattcagattctgaaaccttggatctacacaaacaagtcttctgaaacttttgaattattgtttaaactgcaagtacatatacctgcaaaagcaaaagcagcgaacccttttctttgcttttctttacatagggtttgtgcttttaggaaagttgcaaggctttttacatttcgaatctactaaagctagctagggtttctaatcgatcctgttactttgtttcaatttttacagacagacaaagcttcacttctagcaaaggttgttca

SEQ ID NO: 60841 - DNA, 953 bp, Populus trichocarpa
  Intron number 1 from transcript POPTR_0008s20960.1 (locus POPTR_0008s20960) derived from phytozome v7.0 (chr-ID scaf fold_8; pos 15013406 to 15014358)
gtctctgcaaagtggcattacttgtctgcctttacgtaagttctctcttccaagttaattatgaaatatatatatatatatatatatttggtttatgtgtttttaattaccatgaccttgatttattatctatttttgctaacatgaaagaacaaaatcctcaacttacagaatctcagcggtatgttgggatgccatataaagtctacaaaaatcacataataatagataagagatatagatattgttttgaaatgaaaaataaaataaaatcaatgtagcgatgattgggttttaaaactcgtgaatcgtgttattaaattaactttttttttatatagaattaatcatgcttccatgccacccatcatttcactaaaatcattaagatttaatttcttgtctctctagaataaatttcctagctccgtcgtagaggactcaattgcataatgatcgtttgtcgagtgagatttgcgtaaaacagcctggatcttgagcaattcaagttgagtttctttatatatatatataaaaaagaggcctttttactgttttggagaattatgaggggctaggccttgccacttgcgagcctggtggtctgcctctcattaatgtgagcttcttaaccacctgtctgtcatttaaggtttatattatttttaaataacttcaagatatatattgttgatatttttttattttttaaaattatttttaatatcagtacatcaaaataatttaaaaacactaaaaacatattaatttaaaattaaaaaaaatttaaattcttttaaaaatacttttgaaatgatagatatatgagcactatatatacaaccaattgaagtgatagattttagttaacctctattaatcaaggatcgtcgtctacatgcaatatggtttacccgaccactttgtgtttgataggtattctgttgcatcaa

SEQ ID NO: 60842 - DNA, 975 bp, Populus trichocarpa
  Intron number 3 from transcript POPTR_0001s21360.1 (locus POPTR_0001s21360) derived from phytozome v7.0 (chr-ID scaf fold_1; pos 19770163 to 19771137 reverse strand)
gccccagtttcttagtcattttgtgggagagtgtgttggagctgattataatccgcatcagcaaaggaagcaccaaaagatatggagaaataacaataatcaatagaaggacaagaagaaaggtttgccttctagtaaattattgattttcccatttcaaatgcttttcacttgctgcatgtatttctcattagatcacaagtagcaagctgaatgccttctccacaatagtgaaaaggaaagagagatagaggattgattatctttttggtaccctacttatctttttggacaatttattgtcagcataaaagctgcattttggttctgtcaagggcttagtttatcagagagtttcgtcaggatgtttcacttatggagttcttgtaagctagttctgttacaagcgtttaagcttgaaacttggttttaatctatctagctctttatcttaatgctctacagtgtttaacagtcaagcttgatttgcttcctaaattcaataaaggaaatctcacactgatagtaaaaaaccaagcctaccttctttaaccatctatgccgtccatgtaattctgcggggaaactatcaagaggctcaaagcacaatgaccatctcaattaccaaatctcactatgatggaatcacatataactgaaatcatatcactttgaaattatgccaatagttaatatagcagtttaagagtgcgctctctgttactccattatgtctgccatgattaagttcccctcccattttgatcgcagttaagctattatacacgtcttcttattccatgacatacttgatttcgtgcgtttaccaattaccaacagcttgatgattgtttattttgattaaccatttatttgattagagctaatgttgttctacagggaagacataattttcttttgtgtgttgtgcgcaatgtaggagctgtagtggagctcaaacctctacttgttgga

SEQ ID NO: 60843 - DNA, 855 bp, Populus trichocarpa
  Intron number 1 from transcript POPTR_0008s09650.1 (locus POPTR_0008s09650) derived from phytozome v7.0 (chr-ID scaf fold_8; pos 5961764 to 5962618)
ctctgttaacaagacctgaccagcttgttaaccaggttgctgttatcttctttttctccttcttttaaattaatggtaaaaaatatttgattcatgaacatattatgagtttcaaattctcctttcatatattttccatttgatctccaattaatgattaaactacttatgtgcatgatcatgaaaccatgctaatgatgttcttggtcctcgtttgaagaggcaacaacttaaagggaaagtactgccggactaattagcattggtggttaaaatgcattttttttatcagtagttccagtagatttttcttatgaataaagttcctgtacataagctttacaacgacaaattaacatgactttgaatggtaataggcccctcgtcgaacattcttttgtgcttcaactccatacgttctacaaatagtgctggttaattgggttcgccaagtcttgtttcccacatggacctgcccctgccagtagcttgggcgccttctcagcttctctactaaaaagaatgtagaaaaaagaatgcctatttctccatttaaaacttccaggcatctcttcattttttaccatatttttcctttgaattcaagtatcattataagaatacaatcttaacaggtcaaattcatatcaggctgggttattttctattggatgtagagttattgttacttttatgaaagcacctcgttagaattgagtcccttgcttttccattttagcaaaaagattaccgttgacctggactttaaaatctcgataacactttctcctaattatactgactattcgttttttatctggtaggatcttgaaacgaaccgtgttgttctcgttc

SEQ ID NO: 60844 - DNA, 860 bp, Populus trichocarpa
  Intron number 1 from transcript POPTR_0005s25850.1 (locus POPTR_0005s25850) derived from phytozome v7.0 (chr-ID scaf fold_5; pos 24063418 to 24064277 reverse strand)
gtgatttgcttgctatccttcgaaggttagttaacccgttcttattttatttattcgtggtagcttttaaaaaaatgaatctttaatagaatattgtgcaaatacacatttctataatgtggtcaaccgtataaatttataagtagcagagtcaaacctggaatttgtattagggaatcccatctgttgtttaatagtcacgtgaaaatgaaatgcagtgtgttttgattggaattttaaataactcctgtggcggtttcgagtaaaaagctatgatagttgaactttcggaaaggataaagctagtttctttatgagtgaaatgaagccaagcaatgcactaggaagttcttttcgtttcggttaaactcttgatgttccagtagaagacaattccatgtctggaactcagaatttattgatggtgcgaacacccgttgtcatgtgtgactagagagcacatgtaaatgcacactagatgctcttgcttacatgtttgaagaaaatgtttgtgtaaaacagcttcagggaagccaccagctttacaatgtgtgtcaaacctaattgttggttctgtcttggttatgatcatcatgttagaaaccccatggactgaaatttcacgggagggtatgttttacgctgctggaaaatggactcctggttttgtactttgattttcctttgttgggtagccatgctgcattgccccttttttttaataattgcattcaacttatgcaagttgctccagacctgccaagttatttgaatttcttctcttagccaagagagaaatattctaaatttaattttttattgcagtactgagatatacaagcataacaaagaagaaagaa

SEQ ID NO: 60845 - DNA, 546 bp, Populus trichocarpa
  Intron number 2 from transcript POPTR_0009s14480.1 (locus POPTR_0009s14480) derived from phytozome v7.0 (chr-ID scaf fold_9; pos 11327882 to 11328427 reverse strand)
acaccctagctaagcatttattccattgtacgtgtttgtgtgtgtatgcttttcttgaatcttttgtttggtttgactacttttcttccattattgattgcttgttatagtcttattgtgttgaacttgaagtataatcatgattggcattatttatccatgaatgaaatgattgtttgattgacggtgaggaataaacttctctccctgttgctacatttctagtttgttgaaatcttgaattgttgttcaaggttcaagtaatgtattcaataatgccaattccgctcctaatcaatgcattattgaatttactcacatcaagtagcagttagaaaatgttttccatgtgttatgacagtgttggggttggtcctttcctttttatttcagaattgatttggttgcagttagaaaatgttttccatgtgttatgacattgttggggttggtccttgattcagttgatatgagctttatgctgagatatcaaagtctaaacttgagtcttctttcattcttcacaggggaaaatcaaaccattga

SEQ ID NO: 60846 - DNA, 661 bp, Populus trichocarpa
  Intron number 1 from transcript POPTR_0002s26030.1 (locus POPTR_0002s26030) derived from phytozome v7.0 (chr-ID scaf fold_2; pos 23021366 to 23022026)
cctctctctcttctttggggcttaagctgcattgggtttccgttaattcgttccctatttgatttgatttgaattgattatgcattttatttctcccgctttttcgttggatttctgggtttgttgtattttatttatttatttatttgttgtctaaaatgaaagttgctgcaaaaaaataaataaatctagtaatgctagctaaatgtcaagaagagaaaaactccaagaacacacatgagccgttggatcatgattttagagtgagacccacttgtaggtcctacttatccaacggttcatgtatattgttgaagttttttcttgttatattttcttaatatttagcgtcactcaaaaaaagaaattttttttatggagcagctcaccagtggttgatttgggatttatagtattgttttggtgtgcgggaatattgggatttaatctgtttctgtaaagtaaatggttttggactgtgagattgttttttaggagttttaattttgttagttggcgatataggtggaggcgaaaagggctttatcgagagaagaacagcatacatcatctagaaccgggagttttaatggtggtagaggctctggtggtgcaggggattttaggacgaaaaagatttttgttggtggcttgccttcca

SEQ ID NO: 60847 - DNA, 978 bp, Populus trichocarpa
  Intron number 1 from transcript POPTR_0012s15020.1 (locus POPTR_0012s15020) derived from phytozome v7.0 (chr-ID scaf fold_12; pos 14695458 to 14696435 reverse strand)
ttttggagcagttaaccacgatcgttgctcgacaggtactcttttttgtttctttcttttttttttgttttttttataatcaacaggtacttaattacttttctacaattttgcaattaacctaacatttatagttcattatacattgatttcattatcttatagaatatctgttaatttgtcagaagctaaatcagtagcttgatttatatattatcacattgcatgttatcaaataaaatacacacacagacacacaagatagcgggttcttacgattctctttctttatatcttttgtgctatacaaaatatggttattgtgatggctggttagaacaaatcaatatagtaaaatagtagtaaattcctttttcaataattccttatcatatttgaatgcataaatcattatatttgtaataaaattattatgataaaatgattaaaataaatatagtcaaatattcgattaattacaaacatgattatagaaattctaatatttcttttttattttgatatcaacctcacagaatttttaaaaaaatagactatgataattattaaaagtcacctaataatattgtgaaattgcaatgtattgcgctccacaattatatgattattataatatctatgaattctatcttttatctaaagaaatcctttattcaaataaaatatattttaattcacgcatctagtaaattttagtacaataattgtgcattagcattacattatttacgagtcattttattttagagagtttattatatataatttgaatataattaacaatataaatatattaattgctactgtgaaaaagtttaataaaaatgatttaatctattaattgctaaaaaataagaatttgtactgaaatcatagaaatgtttcctatgcttaacgtttcttttcctctgtacactaataggtacaagaacaggtgaacctagtagtgggtgtgaa

SEQ ID NO: 60848 - DNA, 561 bp, Populus trichocarpa
  Intron number 1 from transcript POPTR_0012s07280.1 (locus POPTR_0012s07280) derived from phytozome v7.0 (chr-ID scaf fold_12; pos 8132181 to 8132741 reverse strand)
tacacctttcagtgatattttttggccctctgcaggtcagtgactaattaatcactctgcttaagacgattaacaaagcctgtgactaagctgtaagatcattcaaaagcttgacctacaaagctcgaattattatttgagctagatatccaaactcaagcctagattgtgccttactatcagtttcagcacactaactagactagacctgtcttgttaaacttgtcatgtacaagttgttttcttggcaattcttgaaaactttattgttctttccaaatgattccatagatccttctaaaacatatcatctcttcatctataggatcaaattaaagccaggaagtacgtagcctaaccattaagatctttccctcttttgtttctatcaaagattttgtaatgttggctttaatttttactgctgtgaatagcatgatctttcttgtcttgagatgaacatttctaattcacttactctacaacttgcagaagtacaatatgttggctcagattggttgtgcagccataggtgttattgcattctcagtatttgggccc

SEQ ID NO: 60849 - DNA, 913 bp, Populus trichocarpa
  Intron number 1 from transcript POPTR_0001s34080.1 (locus POPTR_0001s34080) derived from phytozome v7.0 (chr-ID scaf fold_1; pos 32220486 to 32221398 reverse strand)
agtttctctaaatcctgcgaaatctctggtagtaggtgagtacatcaaaatgctaattttttttgtaatttcattttcatcagttccatatatacaaatttacaataatactaaggtttctttcttcttcttttttttgatacctgcattttaatgtttccctttcgtacttgctagttcttgttgaaagttgacatttcttttatggataagttttgggtatttgtttttatgtggatctagtagtgtaaccatgataaagtgactaagaaactggttgcattttggttttgttagattttcttaggattactcgacgtctctttgtagtattgttttatttatttattttcttcatgtttaatgttctttttacttgcagcagtttaatgagctaaaaatgagtttcaattttgttcagtaattgctttaattgttactatttttttcttccattatttggaaattttaccatgcagatattattcaaaattagttctttcaaggatgtgaagacatatcttgctctgctttttttgttaaaaaaaaattgtgaggaatttttgtttttgtcttcatagccttggagttgtgaatttttatctttaatgagactttaatttctgggttttaaactcaaataaggggaatagttaagctaatctaagcttgagtgagatttcacaattttctgtactaagaaataaaaaatggtataaaatgtttcagttccttttctttcctttcattagcaattgaatagaaaaattcttttgtgtaattaatctgtgcactgtctggttctgattttacccctatatttgtaaagctatgaaactctttaacatctgagttttatatgccttctggaattttaggatcttggagttctaggctgtataattaaacaacc

SEQ ID NO: 60850 - DNA, 443 bp, Populus trichocarpa
  Intron number 1 from transcript POPTR_0006s22980.1 (locus POPTR_0006s22980) derived from phytozome v7.0 (chr-ID scaf fold_6; pos 21823807 to 21824249 reverse strand)
ggatatcttcattttcagcaatatgtttgttatattcactcggctctcttttttagctgttttcagttttgatttcttttaagtttcttgcattggttatggacctgattttgtagttgttaggatctttaggggtggttctcataggctcgggtgctaataataagttagtgaaagatcaagacatggcaatgggaataaccaggttgtttgttcgtattcgctagtgactttgttgtttatattctagaggatatatatatttgggttgtattctgtatttttgtagtatgacatagtgaggtgttagagttttaagagtactataaatgagctttgtaataataggaaaggatgaaatgcttgatatatgaacatttggaattgaaatggtggtatacttgctctcttgggtcttcgttacctagatgcgaagaaggctg

SEQ ID NO: 60851 - DNA, 998 bp, Populus trichocarpa
  Intron number 1 from transcript POPTR_0010s21500.1 (locus POPTR_0010s21500) derived from phytozome v7.0 (chr-ID scaf fold_10; pos 18746833 to 18747830)
cccctagaacgcttcgtgtaagtgtttgatttttattggatcttgaagttgttgatttcttatttgagtttttttttttaattttgttttctatttttagctgttaatttgagatttatgtgttaaaacgagggaattgggtttttttaggcttagtgagtgaaaagattgttactttcttaagttacaagtgagagaaaatgtgcacttggttttaatttggatttgttttgtattttctttggagccaaacacggtattcatgtgcaaggtgagattcttaagagaaaagtgggttgcatttgcgtgcatttagttttttgcttggagagggagtggtaaatttggcgtattctaatttcagtaattttgcgtgattgactttatgaaaaatgctggcatttgttgtacctttttccatatttgttagctttcgattgctactttactaaagtgttgcctcttgtggtatttgacaattgatggtgcttgaattatttattgctttttgtagtttcaagtaacttttagtgtaagttggatcagattcattgacagttgctgggtgttttatttagtgtccaatgaaaaaacaatcattggtaggttgtgtctaacctgaatgcatttgattttcacattagacttacctttgttgaaatcctgtgaagaatcagagaaaggaaagggaattgcgaaaccatataactgaaatttatttcaagtgactctttggatttaatcattgtttctgcagcccagatgaagccttagatgtaccatcttttcttatacatatatatctgccatttgttaatatccatatttagattttcaaagcacttcctttaccttgttttgtccctcatggcactcttaagaataattcatcacagttagccatcaggcatgatgcacatgggatgcagttttgaatttactaccttaatgaacaaattgcaggattatctggcagcccctacaactaccgacctggc

SEQ ID NO: 60852 - DNA, 690 bp, Populus trichocarpa
  Intron number 1 from transcript POPTR_0003s17340.1 (locus POPTR_0003s17340) derived from phytozome v7.0 (chr-ID scaf fold_3; pos 16708459 to 16709148)
cttctttcaacgttttggaacatactttgttacctgtaagtctcttatctgggtgttccttttatgggtttttaagtccggaagtcgctgcctttggtggtatttgccctcttttaggcctgactcggtctggctctgtgtttttttggcctttttgtgcctgacccggcctgctttagcgtttgttattcgccgactcggcgactctgtccggggttagcggccgagtttaactgactcggcatgatggtgactcagctgagtcaaattggatggccttgaataacggtacaaattgaatttttaatttttgcaaaggacaattttgaccacatggtcacaacccctccgaagaggacggcagtttcaaggggggtgttttggacatttaatacaaagaacgtattgtctttatcgtcgtgagctgtctttcacgagggtgtagttggaccccataaattgtccttgtcacttccaggatttcatttcatgctcatgttaaaaagacaatactgcccccgacatcctttaaattgccctattatgtccaaacattattctgagttctcgagtgttgaccgtcgagttaactcagactcattgagaaaaaatttgaaggttttgacttttgagttgctgatcaattgttccctttttgttatctcaggaatttgcagaggaagaactgga

SEQ ID NO: 60853 - DNA, 531 bp, Populus trichocarpa
  Intron number 1 from transcript POPTR_0010s10670.1 (locus POPTR_0010s10670) derived from phytozome v7.0 (chr-ID scaf fold_10; pos 11135624 to 11136154 reverse strand)
atcccagtttgacccttcttctcaagctctcgaaggtctctctcattttctttctttattttcccatattttctcttggcttcttttttgtcaaatgtaatttaatccaatactccatgacaatataatgcataaacgaaggagatagtgtttcttgacgagattcggcgattttattttattgttgtgaatgatgcacttgatttttcacaatagtagattttgccattttttcgccttcagccctttgcttaccccctcctcatccgagtggtaaagaaacattaaaaacatctctccttgtctacatgataatgttttgatttactccccatcttgctaatactgttgctttgtgccttttttttcttttctattttggttattcaagcatatttttgctagcattcctgtaatagctagcattcatgaaagtgttggtggattatattgctagtttttggattgtttattttgtttctgtttgtcgaaacaggaggggatatcggacgactaagggataagagaggt

SEQ ID NO: 60854 - DNA, 886 bp, Populus trichocarpa
  Intron number 1 from transcript POPTR_0014s15220.1 (locus POPTR_0014s15220) derived from phytozome v7.0 (chr-ID scaf fold_14; pos 11311221 to 11312106 reverse strand)
agctgatttcactcctcacaaactctttccccaaggtactctctctgagattcttttgtgtgtttcaagggttagagtttcattttatggtttatgcccttcatttctcaatcttttctgttcttcatgtgatcgacgtttcatttttcatatatatatatgaactttgtaatcatagagtgtctgtcagtcatgctgcttggatgaactcttgttaattatacaaattgtttaaattactcatttccttttttatgctgtcgaattcatagtttgttcgtctagattcatgatgcctataagagtcttgaatatatttgtaactgcatctctcttaaaaattgaaattcttatccttgaattgtgattaaaattgttacaaatacttatcaatattgttgttctctattgacacgcacgtaaatatttcatgtttacacgatctacgcaaaatagagaactaaatcgctgttctttcttcttcttcttcttcttctttgatcattttgatgaattactgaattccatagttggttcaagattatatatttaaggtttttggatcggatctgttaatattaaaaaaataaaattgagagatgggatattggttctgttcgtaaagggaattgggctttgccaaaacataaatttaggctggagatgacttctgtattgactggtagatttggagtttcgttgtgttcataatgttatgggtctggaagcatacgatccatgtcagttctaaatgaaatgataccgagagcatgatgtgcagtgtcatgcaatttacgttactacagttccagttcattctttttttttcttcttcttggaattaaatccagttcttttttatgatacaactgcagaaaatacaagc

SEQ ID NO: 60855 - DNA, 230 bp, Populus trichocarpa
  Intron number 1 from transcript POPTR_0001s40650.1 (locus POPTR_0001s40650) derived from phytozome v7.0 (chr-ID scaf fold_1; pos 40226294 to 40226523)
cttggatttaaatattgtaagctttatctcccttttcttacttgttatttctttactgtactctgcttttttgtttatggtttgcttttgctcttgttgtggattcccatttcatgggagaagattctttttcttcttttgaatcattatttaataacctttttctctttaatttattgtatgctcaatgattgattctcgtctcatctaagttaaagcaactttgtgaa

SEQ ID NO: 60856 - DNA, 342 bp, Populus trichocarpa
  Intron number 3 from transcript POPTR_0009s16100.1 (locus POPTR_0009s16100) derived from phytozome v7.0 (chr-ID scaf fold_9; pos 12320015 to 12320356)
cggaagaagttccaggaggttagttttttttttttttcatttcatttcatttaaattcttttactctattttgatggttaatgaattgtgtatccctttaattgtggtgggactggatagttgctaacaatgtgatatgcttatttgtcaatagtttatgaattgtgtagtctggagctatgttttcttatatgttgcattgaaaatttgataaattgctaaatactactcacagcagaatgtttcaaaccgaggacatattttctgaagaattagaatttcagtcagttaatcatatgttctgcaggtcacaggtgtccctctcatatttggtctgagaaa

SEQ ID NO: 60857 - DNA, 442 bp, Populus trichocarpa
  Intron number 1 from transcript POPTR_0014s03320.1 (locus POPTR_0014s03320) derived from phytozome v7.0 (chr-ID scaf fold_14; pos 2663788 to 2664229)
gaactatccttgcctttttagagtccgagcttcaggtagtctagaaatcggtctcttcaaggacgtattgttgcatgtcagatagacctgcaagatgatgcattttcttatgcctgtgctagctcatgatgatatataaaatagagtagaataagaaactacagggaacgattccttggtccacttgaggtcttgcatgcagccttttcccaccttccacggaggctgtttgttttgtagttttatgtttttgctttgggctttttattaatagtttcatcaaaagaatacatcacacttgcatgcaggataataatttatttatatcggtatataattgtaatgtttaattactttctagtttctccaggcataaaatactccgtaatttcatctcccatcactgactagtatgttttgctattcaaattgtagaagctgg

SEQ ID NO: 60858 - DNA, 466 bp, Populus trichocarpa
  Intron number 2 from transcript POPTR_0008s22920.1 (locus POPTR_0008s22920) derived from phytozome v7.0 (chr-ID scaf fold_8; pos 17990926 to 17991391)
gaaggaacccagaggtatcatatcctttcttgttttctctgtatttggtaagaaaaatagatgttctttatcaaagtttctttatagaaagtttgcagtgaacatactgaatttcacagaactgcctctagtttgatgttttactagaaacataatgtagtattattacttttggattattgaaatttatttcatgaattaattttacataaatgacatttatcttatgaattagtttattatatttacaattttagtcaaaaattctttattatattgttttgtgttcttatcttgttgccatttgtaaaactacagaatatggaatgacttcccagttatgtctagtctcgagtgcatcaaactgcttataactatcttgaaactgatgatccagaatgtgcttgcttttatcatttcatttattctaccttttgcatttgctcattgctgcataaatttcagg

SEQ ID NO: 60859 - DNA, 368 bp, Populus trichocarpa
  Intron number 1 from transcript POPTR_0006s08800.2 (locus POPTR_0006s08800) derived from phytozome v7.0 (chr-ID scaf fold_6; pos 6480238 to 6480605 reverse strand)
gcaccacttacctaattgccggtgcggctgctgtagctctactcggaactgcttttcccatactcttctctcgcaaggacctgtaattacatccccgcccccctcctctctaaatattgaacttgcgtgcaattcttttttgtaattcaggctctgggttcattttagatgttattaaatagtaatagtagtcattgcaaggctaaattcaaaagttaacagaagttaagcctaaacatgtttttcccctaaattgcattaaactagaaaaccttggatttgtctatagggtttgttggctttgttagtcttcgcaccacttactgatttttaactaccttatgcctatcgtaggtgtcctgagtgcg

SEQ ID NO: 60860 - DNA, 1039 bp, Populus trichocarpa
  Intron number 3 from transcript POPTR_0063s00230.1 (locus POPTR_0063s00230) derived from phytozome v7.0 (chr-ID scaf fold_63; pos 45111 to 46149)
aaggaaagtttggagagatacaggtaatcaatcctctatgaattaactgttgtgagaattaatgcatccattaaccccaaccccccaccccccccaaaaaaaaaaaaatatatatatatatatatatatatatatataatttctcgatttctcaatttgggtgctgaatatctccttttttatttgaaatcaagtcattttattgatattgttaatgatgagatttgaccattgatgttgaaaggggtttttttttttaatatatgaccaccgattcttttagtccgcatcttaaccatatccgggtccacataactattgtatcttctatttttagttttgttttaaaaatgtattttatttaaaaaattaaattaattttttttaatttttttatagttttaataagttggtgtaaaaaaataataaaattttaaaaaaattattttaatatattttttaaaaaattacttttaaaaataatatgtactgcaatactaaacataaaaaaaagtcattgaataatttaataatctttttttatttggaatgaagtcattttattgattttgttaagtttttcatctacaataacagattatgcatataaatcgcatgtaactgctttaaaaaaacatatattattcaataaataaatggaaaggagtacaaatgaacgaaaaaaatacaataaattaaatttaaataatctgaaaattaaagttgaaaaatcaaatacaaacttaacataatcttacaaggagagtaacaataaacaataatatattggtttacccctcctaggaaattaattttttgaatgaaatgatgtaaaattaatgtatataaaactaagtccacatcttagttttctttttgggtataattgggctaatgtaaagcatgcggtctaatttcaaccaatttagttttttttacctcctaatatatgatatttgttaaatacctaaaaatgatgaatatctacgatattttaacctaaatattttgcagaaagaaatcctaaaatcccttgaag

SEQ ID NO: 60861 - DNA, 763 bp, Populus trichocarpa
  Intron number 1 from transcript POPTR_0001s27670.2 (locus POPTR_0001s27670) derived from phytozome v7.0 (chr-ID scaf fold_1; pos 26527207 to 26527969)
caaattgacatcaacgctcgaagtaaaccattcaggtactatttattcacttatttcagatttcatctttttttttgccagatttgatttctagggtttccgattctttgtttgaattgtttaattttttccgtttgaattatttttctctcatatctcccgtacctgaattgaattcatgtcagtttattagagttagtgattgattgtatccgtcaaaaggattgggaaaattcgtttttgtatcgattatagaatttctcaagtatttgggttttttccatgattgggagtcagattattttcttgcaatgagtgaaagtttttaatcaaaaaagctaagaatcctttttttttttttaaaaggatcataaagatgctaaaacaaatatgagagttaaaaaaaatgggatttgggcttgcaagtggttgaagttgaggggttttagaagcgacagagtggttgggcaggtttggtctagtttctgtggattgttaatttattgctagcagctttgtatgattagtaatttttagtcccaatggagtcgcagaagatatagtttttgtgaattaaggatatgggtggattatcagtaacatagttgtttatttttcctttttgtttattattattgtgatattaagaaacgcaagatttacagtcgcaaagatcaggcctaaaggtcgccatgtatgtctaaattgcttgaaagcttacttgtcagacagtaacttcctgtaaacaacctgaggataattg

SEQ ID NO: 60862 - DNA, 556 bp, Populus trichocarpa
  Intron number 1 from transcript POPTR_0010s15970.1 (locus POPTR_0010s15970) derived from phytozome v7.0 (chr-ID scaf fold_10; pos 15034330 to 15034885 reverse strand)
tgagggacgctggaattctctggctcgctgtgcaggtaaactatagtctctctctgtctcgaacgcttattccaatcaaaatatctataaacccaatacatggcaaagagccaaagtacaacttggccagcatgtcttaatttgttttcgtcatgtttctatcttcatgatcttcaatggtccttccgtgtccatattctttttaaaaagaggtgcaaagtcttaaactttcctttcagattatacttcttgttgataatgagaactttgcaacttcttatgtgggattttgatgatgtgaattatttttacaagaatgagataataatattgccatagatgatttttctttagccgtacagctttatatttatcagaacaactcaataaaaaagtttgagaaaaagcacaacaactataaaaagcagtatagtagtatagatcggaaattctcccttttctcttgcaattaattatctgttctcttattaactttaccaaaactcaattcaatgaaacaggcctcaaacgaactggaaagagttgcagattaaga

SEQ ID NO: 60863 - DNA, 496 bp, Populus trichocarpa
  Intron number 2 from transcript POPTR_0004s21940.1 (locus POPTR_0004s21940) derived from phytozome v7.0 (chr-ID scaf fold_4; pos 20896475 to 20896970 reverse strand)
ggctattcttcgaaagaagttatcggaaggaactggtgagctagccatccactactaaacatttcagttgaaaactgttaacctttcctctttaaattccgattccggttaaagcgtagtagtagtagtgggaggaggaggaggaggaggaggagttgtagcagtaggaggagttgtagacttgtagtagtaggaggagggaactggtatataaaacatcgttttttttttaaaaaaaagaataaattaggaaaaagtatataaaataaaataaatacaaagcatagaaacggtgagcagtagagggaaacggaggggaaggagtaagagacccgcctctaggactcgggctgtagctaggtatcgttgattaaaccgaagaattagttactgtgatttgatttttaaaacaaattaattgaatagtcgtctcgtcccgtcgtgtgtgtatgttgcaaatgcagccggtttctgcaaggcgcaggcacggaccaaa

SEQ ID NO: 60864 - DNA, 698 bp, Populus trichocarpa
  Intron number 1 from transcript POPTR_0004s21940.1 (locus POPTR_0004s21940) derived from phytozome v7.0 (chr-ID scaf fold_4; pos 20897664 to 20898361 reverse strand)
tctaattctgtactgttgctgttgatctgaattacgtgagaaccttctcaatgaattttccccgcgctctatgctattccatgcctttctttcttgttttcttaaggtccatttggcactatgctcccacctcattctccttaatttcccgctcagctcttctgttctatcagtattaaatgtactgatagagctatataaaatactgttatacgaatacatatggctgaattttaagggatgcttgtaataaacacactgtttcttattctttaagtagtcgatcaaatctttgtataatatccaactaaactgtacctttacagcatatcttacagtttccagtttcttgacgtagtcttttgatccctgctgtacctttcactgccatttttaattagcagcattttttccagaattttgtgatcttgattcatggacagcacaccgtgaattctacagcactgtttgcttgatgcttcctcaaattaattgcttttaaattcagaaatttcagcccgatgttttctgttggaatttggaaactcaattcttagttcatagcactagctagctagctttcaaattattttgatagagcatgtgccaggttactaacgtgtgtaacatttttctctgacttgtctttttccataattttggcacagaggtgatttctaaagatcagaaatttaaat

SEQ ID NO: 60865 - DNA, 672 bp, Populus trichocarpa
  Intron number 1 from transcript POPTR_0004s03130.1 (locus POPTR_0004s03130) derived from phytozome v7.0 (chr-ID scaf fold_4; pos 2106676 to 2107347 reverse strand)
caccaaacacattgcctctctgtgttagaaaaagggtggggcttattcattcgaagatcgcttgtcagccaaggaagaaaggtttttgatctcttctgtgctttgcttttagttttttttagtgtccataggcacaaataagattttttaaacagaattgtcttctacggtggtgtgtgccgtttcgctttctgttttaataacccagattttaaatgatgaattctgatgaaggaccacatgattgacaagacagccatgagcagtagatgaaggctacttttcaactcgaaagccctggggaagtttcttgcattcttgctgaaataatgggataggatattattataacagtgtgcttgcaaaagcttgaaactcatcccttaagaaggaaagatttagactatacatttgaagtttagtacctaatccaaccattgtgcagaatattgtgtttcaacgccctcagtacttccagcaacctgcaatgatgcttgagtaattgctatcacaataacatttgttcattttcattcatgtgcacctttatacatgaattttctatagttttttctttcttttctaaacatctatggtgctcaattatggagtattaagcgaaaattgaatttttcaggggcaaaattcttaaagcatcaaaggattgggcag

SEQ ID NO: 60866 - DNA, 799 bp, Populus trichocarpa
  Intron number 1 from transcript POPTR_0015s06970.1 (locus POPTR_0015s06970) derived from phytozome v7.0 (chr-ID scaf fold_15; pos 7976905 to 7977703 reverse strand)
tctccaaaccccaaatcagaatccaatccaatcaggtacctttgatctgttattgtctttgtactgtaatttcttgttgatccatctatttatgcatgtttaatcttatttatcttctttgagtacttttctctattttattttcactttcttgaattcccccctctttttttgctccttcccatcgctgtctgcatctctcttttttgtccttttcttttcggggtttgaagttaaattgggctttgtgcttcggattttcaattctggatcttgccatgctatttgactagtattggaatggactttgtcgctgatgctttgacattcttgtcattgctactgctacttttgcattcgctctgactgctgtatttgctattattgtttctcttttattcccatcaaagaccaccccttttcacaagctgttgaatcggaatttggccatcaataagctttaccatgccaaggacgagcttttagcatgcctgtctgttgagcatttggtcttgtgtggttggatcagctcgctgagtatttctattttagttagtcaatgctttgcttattcatgggtttgaatcctgtgtggacatatttgttgatggttttctctgcttgtttagatagtgccccatttgtttattttcttacatttttcccctctccagggttatgcttaactatattggttcctttatttttttggataaaagtcattgccttattagcttatccaattgatttcatttgtatgcttcctccattgaattgggttattgaatttcatttgcag

SEQ ID NO: 60867 - DNA, 677 bp, Populus trichocarpa
  Intron number 1 from transcript POPTR_0003s17135.1 (locus POPTR_0003s17135) derived from phytozome v7.0 (chr-ID scaf fold_3; pos 16590112 to 16590788)
aaggcttctgtacgtgaaggcttggacaaggccaggtagttccttgtatttcttgaatcttgtaaaaatcttgtatatttttactagagcaataattaatttgcattaaaaaaaataacagggaacgttcattcgtttataaagaagccttgtccgatttggataagtttttgtcaaaaagtttaccatcaaagacaactgatattgatgaatcaaagaaagaagacaatgggaatgcatttagtcattctggggaacaagctatggctgacgaagattacactcaacttgatccagaaatccataatctagttaagaaactagatgagtgcattgcaaagattgatcaaaagaggcaggttttagagaatgcaattgagtcagaaatcgaagcactcaagaaagatcaaaatgaaaccagggaactaaggttgaatcttcttcacgaatctggtgctacgagcagcaacattgaagctggaagccggaagattgctaatgtgaagcaatggctgaatcagaaggcactgatcagtggtgacactagtggagaccatgatcaggggtatgtggatttgctcttaaacaatgattgtttaccttgaattatattaaagatcataatattttctgtcttttctatgtttccagcaataattactctgtgcttattgttc

SEQ ID NO: 60868 - DNA, 478 bp, Populus trichocarpa
  Intron number 1 from transcript POPTR_0005s08750.1 (locus POPTR_0005s08750) derived from phytozome v7.0 (chr-ID scaf fold_5; pos 6097363 to 6097840)
ctttcagttatcgcctcttatccagatccaaacaggttttgcttttcttctctctatttcagatcatttacctcctttccaatcatccattcttttcttgacgtcctctttgatgcccgacatgttatcgaacaaagttaatcaaattctgaatccatctactctgatttttttttcattattttttgctttagtggacaggaagaaatattagggatttctttgggtcaatgtgatgccttttcttttcctataattatttttctgatgaaaatggaattatatgttggctggggttatttttatgggaaattccaaatatcgtgtgggtttctttagggatataattttggaattattatcaatttttataaagagaggtgcgggggtttttcgttcgatttttgggattttgtattcattaataatgattttgtggtttataatttttttgtgaatttcgggtttatgcagttgt

SEQ ID NO: 60869 - DNA, 818 bp, Populus trichocarpa
  Intron number 2 from transcript POPTR_0005s08750.1 (locus POPTR_0005s08750) derived from phytozome v7.0 (chr-ID scaf fold_5; pos 6097919 to 6098736)
ggttcaagggaggtcagtaaccctgtatacttctcttattaaatgggtttttgtcacacttgtgttctttgatgatgttgtgcaaaatgtagccttgtcacttgcaaggcacgatgctttggggagataagtgctggacctaaaagttgaatgttattggctattataactctacacattgtgctatgagcttgaaaaaatattttacgaagctcaggaaatattatacaatgtcactggcctactcactagcagtggcttctgtttgtttatatttgtattttgtaaattttaacagcacaataaagcattaacaaccttactacttttcaactctaatcttttgggctaacagccaaccccaactagttttggattgaggctttgttgttgatgtttttgttaggtttttcttttcctatagcatgttttgagcattgctcttggggaaaaaaagaatcctttgtgttgtacaattgattttacttcactttggttggtgcttgctcactttacttttgataccttggatctaatagattcaattgcaatattatgccttgcaacaacactgctatcacatacatgcttgtgcatctgttttgttcacaatgatttatgttgttgccctatattcttattaggatacttttacagttcagttaaaagtaaaatatgagataatcatcattgtttgttcccgaattgatgatttataataacatttttcactctaggtagacgcagttttatttgcaatgaacaccttgatgatttggtaacttgatgcaaattatgttgctttgaactaaacagag

SEQ ID NO: 60870 - DNA, 1038 bp, Populus trichocarpa
  Intron number 4 from transcript POPTR_0016s08500.1 (locus POPTR_0016s08500) derived from phytozome v7.0 (chr-ID scaf fold_16; pos 6312448 to 6313485 reverse strand)
gaaaagagtatcaacagaataaacctactgacattgtaagttttctatctcaaaaaatggaaagttgttttgttaatgagtatccataagtctagcatccttttcctttgtgtaatttgtccacatccacaaacttcatatttgttggttgaagttttcttttccttttattttggtgcatgcttgatgagaaccatgtcttcggcctatgatactgagaaatgcgatttcaatctgagacatcattagtagatatgaagtagagatgaatttttagaatttggaagttgcagagaaggggagttggggagtagattaagtgggttaaatagttatcactattttttagatccatcctgagaacttagggactctttctttgtggtgcagaggattctgacacttggaataaaaaacaagcactctttctcccccataggaaataagaaatgaactgtagttgtaaatttccaaaaactttattttttctttatttcattcaatatattgtattcttgctccttaccaaatctgttggtgggaagctttcgaaaagaaattgctgaagtatcattacaagaatgaaggtgaaattgagaattgtttcctagctagttcaatacgaaggatctggggatttggaaaggtaatcttgagtttgattatgaagtttagtgaaagttctttgtgcccatgttgtatttgatcaagggtggagagtagagaataggaacatgagtctcttaaaaaaggtaagtgggtcaggaaacttgttcttaattttgatatgatatgcacattaggtgcagttgcacacagacataaaagtgactaggtgaaggatatgtttcaaaggattttggttggcatcaagtaagaatttccaaaatatgatactccaaattatggcattaatttgggccaagtgaatgggataggatttatcttgtctagttgagcaattaggccaatgttttatatgcgacttacaatgcttgtgcaggtttgcaagtactttcttgaagcagtggagaagaa

SEQ ID NO: 60871 - DNA, 865 bp, Populus trichocarpa
  Intron number 1 from transcript POPTR_0003s01530.1 (locus POPTR_0003s01530) derived from phytozome v7.0 (chr-ID scaf fold_3; pos 1387251 to 1388115)
gctttacagcaatcatccatcaaaatcaacacaaggtacgtacgtacgtctacagttcacccattctttcaccttttctttgtcaatgcaacagtgtttaggtttctttcccttttgtcttggtgctaatgttgtgatgggttagggtaggtacgtttttttttttttttttgatttacgtgggggtgtccgggtcagcttacgcgcaccacgactattccccatggcccactggacatcctgcaagcccaggagcaggtaaggcatcgcgggggtgacagacgtgcacatagagggtcgaacccggaacgggggcgaaacaagtcacacgattgaccacagcagctaggccctcaagtgcagtgcagggtaggtacgtattgatggccttgtttgatttgtccaaaaactacattcccacatgctttaaggaaagaaagtgataatatggtatatgtaacttcgttgggattttttcttactttttttcttcttgcatgcaacccctttaaaggaaaggcaatgatattatgatatatgtaattttgttgggattttttttaattttttttcttcttgcatgcaacccctttaaaggaaagacaatgataatatggtatgtgtaactttcttgggatttgttttttactcctttattcttgttcatcaattacatgattcaatgcctgcttgaacaaaccccagttccccaaaaaagtattttgttttgtcaaagcacgaaaataagaaaagggtattgttcttttattgattcctttgttttgtctgagggtccattaattaacattatcaaattaatttttttttatttaaaaaaaagtgttaggaggagatctaggattgt

SEQ ID NO: 60872 - DNA, 506 bp, Populus trichocarpa
  Intron number 1 from transcript POPTR_0017s06250.1 (locus POPTR_0017s06250) derived from phytozome v7.0 (chr-ID scaf fold_17; pos 4821346 to 4821851)
agcacttcaacatcaaattattctttttgagagaggtgcagaaagatgggagtatcattcttatttactgcaaaactgaagaacaagcagctgatattttcaccaaaccactgccagttaacaaattcgaatttctgagaacaaagttgggagtttgcagctcctaaacaaggaggagtgttagaaataatgttcaggactgctgagctggaattttactctttctttaatttttgatttagtcaattctgttcctattcttttgttcttgctgctacttcgcagctctgttatttccattatcaattgatcatggcttgaatgtaggaccatgatcgtaggagtttgttatgtatcagctctataaattgagctgcagttatgaataaagtattcaagcttttcattcatcaatctcttcttaaacacaagcattatcctttgttatttctgttgttcagaatcactgcaacaacaacaggatctgttcatagacagatcagggc

SEQ ID NO: 60873 - DNA, 545 bp, Populus trichocarpa
  Intron number 1 from transcript POPTR_0004s14360.1 (locus POPTR_0004s14360) derived from phytozome v7.0 (chr-ID scaf fold_4; pos 14815183 to 14815727)
gcacaaacaaactcataatcactgcaaaggtgagttctttactctcccttttttgtttaattcttcaattcatgcttttctgactgaaatattctgttcccttagttgtttttattttatgtttttgtgacctttctctgaatgcgttgtttggttgctaagtaataattttgacattgatccagtatcagaaatgggaaaatagtgatgggttttattttattttttctccgagctttgatcaaatatcactttttggttggatgtatgaaaccagtgtaatatatttttaaaaaaatgagcaaaaagatgatccctttttgtattttgcattgtttagttacttttcaattcgttgaacgtgggttagaaaattaaatttataaggtttctttttttttttcctggatttattgagggcattttgagaaaatgcttagaattatcattgattgtcttattttttggttttattcaatttgagaaattgttgattatacgtgtattgagaattaaaaggcgcgtctgctcattctagtgtactt

SEQ ID NO: 60874 - DNA, 667 bp, Populus trichocarpa
  Intron number 4 from transcript POPTR_0001s13490.1 (locus POPTR_0001s13490) derived from phytozome v7.0 (chr-ID scaf fold_1; pos 10566947 to 10567613 reverse strand)
tggctgaaagaattcaacaggtagatttgctaaactgtcctccatttgttaccagaattggaaatcaaaatcatttccactatactttcgttgtcaatgtggaatcacaaatggagcccggatttgtttctcattataagagactttaaagcatataactttgattctgaccgcatttctaaatttgttatgccctaatggagccttagctccagcaactgcccctatttttttagtcttttcactccttgtccttaatttttgacaacaatcagagagcaaggcttcatttttcgtgcacatttttagactagagtaccactattctctttcagttccggttttactttataaaaggaggtggaaaaaatttaagtttagagaacggtaaatgtcacaggccaagttgtatatagaattccagatacagtgaagtcactgtgcacttcttctgtagatcaaaatcctttcaattaattattctccttagtttcgtttaagaagataatgaaaggaacagacatggaagaaatggtggttgttattttgtctgtacctttaagttttccaacaatatatttggagccttgtgattttcatgccatgctcatgaattaatttacatgtcacagtcattgggaccaagagggcgaagcttccggtcttt

SEQ ID NO: 60875 - DNA, 340 bp, Populus trichocarpa
  Intron number 2 from transcript POPTR_0002s13700.1 (locus POPTR_0002s13700) derived from phytozome v7.0 (chr-ID scaf fold_2; pos 10159192 to 10159531 reverse strand)
aagctccttcaaaggtctgatttgtattgatacttctgaatgttttagtgttcttttttacccttttcacttcctagttgctggctctgtgaaccaatgaaacaggaagaggaactgatggcttgctattgttgttttaagtaagataatgggaaaaaaatcatgtagtcaatatatggtttagtttgagtcatagcaagtggaaaatgatgtagaagagatgttttgttatattttaattattattttttttatataaagaacatgtgattattgaatttgattttttttttaaaaaaaatgggctaattcgtttatgctttgatctatacagttgaga

SEQ ID NO: 60876 - DNA, 850 bp, Populus trichocarpa
  Intron number 1 from transcript POPTR_0001s02260.1 (locus POPTR_0001s02260) derived from phytozome v7.0 (chr-ID scaf fold_1; pos 1719900 to 1720749)
ctccctcgcacccttgaagatcttcaaatcctcaggttttctttctttttattaccattcatgtctaccttttctgttgcatggaattgtttcaactttttcaggatttttgaaagagatgggcaaatctttgtcttactttttacataaatttcattcatttgtgttctgctggttgcttctttttttttttttttggggagggggggtgtttgatagtaaaggcagagctgactgttttatcaaagcaaaatcaagacccatgccttttaaagtgaaatgtggattccctttctacttgccgatatctattagtttaatttagtacatcaagggattgctctgctctgctctggttgatataaaaaatgggtgtaaattttatgacccaattggattattcaaatcaaggatttgtggaaggttcactgcatttagaccttcatatgcaggtggtctacatttgaacttctgttgctttgcaagttgagccaaagcttagaatttgtttaatggttattatataggaacttgaactaatgacaagtattgttggatttttcttgtaatgtactacttgatatacctgtcctcttgggataaatgaatctgtacatctcatgcgatctcaaggtgctaagacttggttaaaatattactggaaatttgtactgactctgtgattttttcatatcaaaagatattgcttctgtgtttcctttcacttgctactcatattttctttgcttcaaattactgcaattgtgtatttcctggccatatgtgtatagtataatgtggatgctattctgcagggatcaccttgaaacttatacaagtgactacactg

SEQ ID NO: 60877 - DNA, 970 bp, Populus trichocarpa
  Intron number 2 from transcript POPTR_0001s29880.1 (locus POPTR_0001s29880) derived from phytozome v7.0 (chr-ID scaf fold_1; pos 28468327 to 28469296 reverse strand)
aaattggtgtgtgcgtgtcttcatctttctaaccccataattcatgttttcagtaactacaatcttcttatcgtgcactttttaaaacagaaatttctctattgcctaattcgtttggcaaaaatccaagaaatttaaggctattaaaagttttacgatcatgtatacatctatgggtgggcgaatgatgaaactgttcgagatgctcttcatattcgcaaggtacgtatgcttgccctatcaagtatattaccttccagattcaaaataactctgctcatggcggaaaaataataaaactatcatgaccagggaaccataaaggattggagaagatgcaataagaccctggcctattcgtacaatgtcgaaagtactgttgattaccatcggaacttgaccaagaaaccatatcgatctctcatttacaggtaatgtttataattatatgaacacattataaattctgatgaattttcccatttattgcaatcttaaccattgttttaacatgtgtagtggcgatcatgacatgactatcccatacattggcacgcatgaatggatagaatctctgaatttgacgattaagtatgactgggaaccatggtttgttgatggtcaagttgcagggtcagtatccatcatttaatttacaccctttgattttatttttcaaaatccaaaccaatgggaatttatcataaaattaaaaaaaaaatagaatttagttacaaatattctgaaaaataatatattttttagtttgggtttcttttattttattttttagataatgatattattaattaatttacatatttttaacatgtgtcatgtccatttgaaacggtagagattattaaaaaaaaagaaaagtagaatgacagaatcccaaaaaacaaaggtacgtacaggaactggcattaactaatccttttttgtttgttgggtcatctttagatacgca

SEQ ID NO: 60878 - DNA, 729 bp, Populus trichocarpa
  Intron number 1 from transcript POPTR_0009s15480.1 (locus POPTR_0009s15480) derived from phytozome v7.0 (chr-ID scaf fold_9; pos 11960177 to 11960905)
tatctaagcccgtgagtagaaggccaagttaagatcattatttgggctttcggcccattatgcctgtggtactaaaagacaggcttcaaaatttcaggtcactcgtgcgtgatcgcgcccctttgctccgaccactgtagcaatatattataagcggcacgatgacttgacatcatttcatcctcaccgtattccagtattcctacttatcattgatagtctgctcaggattctcaactctactgcggcaactaggagggttacggtgacaaccaaacaacaccttatatcacggattaacgtcggcaaccgtgcacctcctgtgtccaaagggagaaaaatatgaaactcgaatggaataaggaatagcaaaacttgtcctccaaaggatttcttccttcctagctacttgggaaactgccatcaacaaccatgtataatgcgtcgcaaggtcaaagtcccaatttaaaaactcgaaatgatagaacaagatcatggcatgaaatgattttatattatattttctcaaatgaaagccacatgccagctcttatcctgtgtttaatatttaaactttgtcattaaatttatgatatcatatcaaatagtcatcttaattcagaaacttcaactatttgatgagccccaataatgtttttagtacgtgctgaagtccttgttatcttttatgcagcagcagggaattagcaaacagggagaagaaggtga

SEQ ID NO: 60879 - DNA, 703 bp, Populus trichocarpa
  Intron number 2 from transcript POPTR_0001s16690.1 (locus POPTR_0001s16690) derived from phytozome v7.0 (chr-ID scaf fold_1; pos 13464055 to 13464757 reverse strand)
cagtgatttcagctactcgtaagcctcctcctccccctcctcctcctcctcctcctccttcttcttcttcttcgaactctttttttttttctatgtttatttcagtattttgagtgagttcgagaaaaagagatcacaggtcaaattaagagtaaaaacaactttaaaaatgtgtgtataaaagagatcaccttttttgttttattacaaagaaaagggtcggacctcttgaaggaatggagagtggagacttcgccaaatttatcatttcattaatatgtaagcaacacagtcaatttagtcacatgccgaagaagaaatgtgatttatttagtctacatatattatattcataaatataacatttttctaattttagatacaaggataaaagttatggattctattaaaataattataattaaattatctatagttaatgtatttcctagatataatattttctaaataaatacattctataatataatggatcggatcggatcagatcagatggatagattgattgaagtcgacaaaaattatctatattcaatatgataaaaatcaaaacaaacataagtcaataaatcatatcaaaatacataacataagtcaataacttttttatttgttttacaatataacccagcaaatattttatttgcggtcaattaattttgttttgtcttttggacaggcc

SEQ ID NO: 60880 - DNA, 574 bp, Populus trichocarpa
  Intron number 1 from transcript POPTR_0005s07270.1 (locus POPTR_0005s07270) derived from phytozome v7.0 (chr-ID scaf fold_5; pos 4914730 to 4915303)
tgattttgattgtgttaaaaggtatttatacaagcaaaatttgtatttaaagtgtcatacggtagtgaagtctatttgttagtctgattggtttaaagcttaggtctctgtagaagcaactttaagtctactagataattccttttccaatctaaggacttgctggtatgtaccttacaaatttgtcctttttgctgatttgctcaagtaatatagctgtgagtggaatatgaagtattgataagatcctccaacacagtgcagaaagatgtaagtgtaacactcaaacaaacaatccacatatgtcaatcaactcacaacaccattaccaattcactaatttgcatgccaaggtcatggtaacggagaaaaaaaaatcagttacatgatatgatattttatttaattctaagagctcacatttttgcatagtaaaatcaaccacatggtatattcgatttaatctaaatactcactgaagaagtttcacattgaactcatgcctgctttaatgtttgttaattgctttctatttttgtactgctaaactgattaaataaaatttacagtggaa

SEQ ID NO: 60881 - DNA, 778 bp, Populus trichocarpa
  Intron number 1 from transcript POPTR_0009s17040.1 (locus POPTR_0009s17040) derived from phytozome v7.0 (chr-ID scaf fold_9; pos 12839718 to 12840495)
tctgatatctccgacctcttccacattaggtaaaaatatcaatttatatctattcttaatttaatttgataggtaattctcaatatttctttatcccccttttttattctattatttgatttatgtatgcacagaaccgcacgctttctttccatgtattttatttctttcttttttctggtcaatgtctaccataactacgttcggcattgagattcggtgcaaattatacggaggcgcgttgttgttgttgttcccctttggatttctcagagattttacttgtcatgcgaaacaaatggaatttgatcagttaaatcacgcaccgactgtttggtagctttattataatttccagtgaactattcaatgtaacggggtgtgtgtgtgttttggattatgttttttgaaaatattttctttgcgtcaacacataatttaatattttcttaagtaaaatgtattcttaaaatgtatttttaaagtaaaatgtatttttaaagtaatttttttaatttttatctttattttaaattaatatttttttttaatgttttcatataattaaaaatatattatttttatatatttttaatttctaaataattttttttaaaaaaataactaaataattttttttaaaaaaataacttcaaccaagtccgtaagacgctcacaatttcagtacaagttttaaattattggtcttgataatagcatgacaataaccagtgtagctataataacaggactccatattttttgattgtacaggggg

SEQ ID NO: 60882 - DNA, 533 bp, Populus trichocarpa
  Intron number 1 from transcript POPTR_0007s10550.1 (locus POPTR_0007s10550) derived from phytozome v7.0 (chr-ID scaf fold_7; pos 10561158 to 10561690)
gtttaccaggtatattacacccaattatagacaagcattgagaagtaacaaagaagtacatttatcttttattctatacatcttttatatacagctttcatttatacaatagtctacaataattaattataatatatctgcatcctgctagaaataatgttttaccttcacctcaagacacgtttgttaacttagaaaatcttccttcaaattcatagactttatacgtaacaaccaatttacacattctaagaaatattaagacataaaatctcttaaattcattattaaaaccagtcttttaacttaatgttctagtggtaccaatacctcacttccaatgtcatcaaaactcttctttaaataatttacaaaaccttgttacatattgcattaaaaattctaaaccttattgcatattgcattaaatcaatttgattgttggcatggtgaacaattattttttttcattccaacattaatcttttttttatatagggtggagctattcaagctttagctaaaacaaagga

SEQ ID NO: 60883 - DNA, 845 bp, Populus trichocarpa
  Intron number 1 from transcript POPTR_0013s11230.1 (locus POPTR_0013s11230) derived from phytozome v7.0 (chr-ID scaf fold_13; pos 11905626 to 11906470 reverse strand)
aaacccctatctcttccaagattcctggcactcaggtcctttctctctgtgtttaaatttatgcatgttcattatattttttctatgagtatgtgttggtcttattatgttttttttttccttaaaaaaaatgttgtcttggtccagacaatatatatcaagacttttggatgctcccataaccaggcaagttttatggttttctttcgaattctttaatcttttccatttagattttatgaagtggtttattgatgctttacaagagatatattacacggatttggcggatgcttaatttccagtagttaggaccttatcttggttttgggttggggggttgttgcatgaagaattctgttggaaatatcgagagcaatttttatggataccaagattttttattttgggatattaaactgaacttccaatttgtgaagaactaaagttttcaatctgttttggtggattttgttttgatctataagttactagtttgctatgattaatgaaggtcggatctgaaactatttaccatgggaaaggtgaagctttgctgtgttttgctatgaaaggcagtaccaggtgctgttgcgattgtaatcttatggcaattaagtcataaataaagtgttttagtagttatactgtaaaaaataccggcttgtcctagcattatggattattgagcttgaactataagttaagcacttctttgttggctatgcatataaccattccccagcagtttttgtgtatcagaatttgctagtgtgaactcctttttagttcttgttaattagttttctcacagttgataatggtggcagagtgatagtgaatat

SEQ ID NO: 60884 - DNA, 512 bp, Populus trichocarpa
  Intron number 2 from transcript POPTR_0019s09110.1 (locus POPTR_0019s09110) derived from phytozome v7.0 (chr-ID scaf fold_19; pos 10678923 to 10679434)
ttatcatcaaccctccctgcctgtaagtcaatttcttctcttctctctctctccttttttttttccctctttactgtgttatactatgttcaatgtggagggaggggtagatggagatcatttctcgtcattttaaattatgggtcatgctggaatgttgattgtggactttagagaatgagattaaagtggatgttgtaaagggaagttttttctttagcgggttctcaatttcttttcatagtgagcaaattgaaacttttacacagatgggtgaatccaattatactgatttcattagcttttttcgcttgatgtagttgttttatctttttgaatgctaatgattgatttatggtgaactgtggatgttgaaatgtgtaaagtataagattgacatgtttaacatgcttgtcatctgatgtggcagagccttacgtttgctattccaacgttgtataacttgtttcgtatggattcctacgacttttgattgcttcaggcaagtcttg

SEQ ID NO: 60885 - DNA, 519 bp, Populus trichocarpa
  Intron number 1 from transcript POPTR_0001s27370.1 (locus POPTR_0001s27370) derived from phytozome v7.0 (chr-ID scaf fold_1; pos 26265130 to 26265648)
tcgttgctatcatcaatcttgtagcttttagtttagtatggtttccttttctttctttgatttgtctttgttaatttttgttatatatgaattcgtttaatatttgaccacgttgttataaacagatagattttagtccttctaattatatacaagatgaagaagactcaaaaactttctcttcctccctttcttatttttttgattaatttatttctggtcagacaccatctatgcggtgagtctagctctgtggaggggagtagcttgtgttttttgggtttgtgaggagtagggaacttcactccattgaaggactcatgggtcttaaattttgttcaatactgggaaaaagggcttttttttttttaattttataaatctttatattgtctccttacttagctcatgttatgatgtgccttttgttttttaatggatggagtcgagtaaggtgaattttggattttgagtgaatctaagtgatgttattttgtttgaacttcaggtgattgaagc

SEQ ID NO: 60886 - DNA, 799 bp, Populus trichocarpa
  Intron number 2 from transcript POPTR_0003s09640.1 (locus POPTR_0003s09640) derived from phytozome v7.0 (chr-ID scaf fold_3; pos 10919006 to 10919804)
tgggatactattgctggtggcgattccgaggttctttttttttttatctgaattgagtttcttttttctaagatttttttttctttgatgctttgatgtgtttagttttgaattgattgtgttggattttttatgtttgtctatgtgattgattgagatttctgattaattgactcgaagaagagatcgagtgattttggtgacagtttgcggagctaaagttttccgggttatatagccttcatggtgctgatttcgtggttgctaatttttgtttttgttgtcggtatgttaatagcattctataggacattgctattctgatttatagtacaaatttttgttgggatgggattagcattgggtttgtcttttgagtttatatgggcaagtaattggttgatatctgattactagtactaggtggctaaatctgtttaaatggtcggcaccttcctttatcaacctctagggtacaatttctatcacagtttgatgttgatgtagttgtttacttgattctacatcgtcttttttcatgacaatatattagtaatcttgcaagttttgctatagttcttactaatttttgttatatgctagtctctcaaggttcaattatgtagttaattaacattaaaagtctgattcgtgctgcatgactatcgttgagtctatgatatagaataaatcctgttttattgacttgttttaagtgttgggtctttccttagtaactactatgttttttggtttgttattgaatatctaaatatatttcaatttcctttggaatagg

SEQ ID NO: 60887 - DNA, 549 bp, Populus trichocarpa; identical to SEQ ID NO: 58800
  Intron number 1 from transcript POPTR_0001s39530.2 (locus POPTR_0001s39530) derived from phytozome v7.0 (chr-ID scaf fold_1; pos 38755755 to 38756303 reverse strand)

SEQ ID NO: 60888 - DNA, 878 bp, Populus trichocarpa
  Intron number 1 from transcript POPTR_0010s23990.1 (locus POPTR_0010s23990) derived from phytozome v7.0 (chr-ID scaf fold_10; pos 20405400 to 20406277 reverse strand)
tgactagtaagtcattttttgtaattgactgcactgcatgctttgcatttcttgttttgtgttttctgatcggcccagatggagaaagtgtagatatgtttgtgtttgagtgtaaatttaagttctttaagttttatattgtgtggacttgttgaattttgagattttggttggtctggatgatgggtttttccttttcttttgttttaagctgaggttgatactgtaaagttcgtttcttttctttggtgtagctctgtgctaagattgtcatatttgtttatgatttttgcatttttaatttgctaaagcttctatttttagttcgtgttttttttttccggtggaagttcttgatgctcttgtgaatttttccaccctctttttgctgattattactaaattactggtcttgaattcaatttttatgatttatagattttccaatttgagagagattcattaataggagttaggaggattctataaaatttaaaggagaattgtagaagataaaagttgtttaatttgccttttttctttcagcttgcataaagtttaaagcttattagttttagagaaaatggaattttcagattcatgattagagaaagaagaaaaaattccgagaagccattgagtgtgtgagtgattcaatcctttgtttttttgtctgtagaaaatagtgttttcaattaatttttgagttagtgtttactaaaagttaatttgtttttcttaccatctattaattgaattgatccatcaggatttattggtagatattatctataaaaccaattgatttggtgtgagttttggcttttgtcccttattcttattgattttttctctcgcagacttgctggggtaaagag

SEQ ID NO: 60889 - DNA, 924 bp, Populus trichocarpa
  Intron number 1 from transcript POPTR_0017s09430.1 (locus POPTR_0017s09430) derived from phytozome v7.0 (chr-ID scaf fold_17; pos 8028064 to 8028987)
ttgttggtgcagctgcagcaggttccctctctcactctttccctttaaaaccatacttgatgtttagtgtcgaaaaacataaaaagagtctgataaacatatcatatttgattacgtagcaaataatcaagatcttttctatttgaattataaaatttgaatattgttcatatgaaccaataccttgctatcaaagtcacccacaaaagcattctaggaaagtcagagagtccacaattcaaagtactctagaattgttctaggaaaggcaaaattttcagcaaattgtatggtgtgctatagtaaacgttgtctagattgttacatttaggtcggttaagaaggctataaatagccacgcaaccatcatttataaaccaagccaaaacaactatgctaatcttaaaatctaagtcttaaaactctcctctgctgcctagtatgttgtaatttctattcacaaagttttgctttggttgtcccacattcttcaatcatttccaaagaatccaaactataaactaagtactttcaccagaccactacaactaaacatcttaactatcaaactattttcgtttcaatccttgatgattaacacctttaaactacctcctaaactaccatcatcttctaacaattttcggttgtcatgtgttttcttgatttgtggtgagggaggcagaggaaaagataagagcttacaaatccaaagacataactgtaaaacgactcaaaccaccattttttataattgaaactgagttcttaagaaagtttgataattgcacggtctttctctgctgcaaaactgccattttgtcattggtttttcccattgatctccattgattgtgaaagattattgcatgttcttaaattttcttatgctctatcaaaacacagccctggacttgataaaaa

SEQ ID NO: 60890 - DNA, 623 bp, Populus trichocarpa
  Intron number 1 from transcript POPTR_0001s18900.1 (locus POPTR_0001s18900) derived from phytozome v7.0 (chr-ID scaf fold_1; pos 16078965 to 16079587 reverse strand)
aaagcgcagaccagaaagcagaccagcatttcacggttgaagacctcatgatgatgatgatataatggcaggtggttttttcagtgatattgatggtatcaaaaccactacaaaaaactgcaccacctgcaccaccgccaatcattctttcaccaacactcacagcttcagctccgcctccgtcgaatatggccagacctttgccgattctcagttctccactgagctttgctttctggtaatttattacacacattctacttaatttaactagtttttttcttttaattaataagaaatatgaatgataattattttcctagaacggagtagttattagtctaaacggttctctataaattacaatgcttacgtgaatttgagtcttttcttttcttttcttgctccagtacgatgacatggctgagctagaatggctttcaaattttgtggaagactcattttcaactgatcagagcctccaaaccaacatccacatcctatccgggtccaaaccacccacacccgaatcctcctcatccgagacccaccaccctgaaccaataacctgtaaccccagcaacccagcgttccagcctgaaactccactgcctggcaaggcc

SEQ ID NO: 60891 - DNA, 452 bp, Populus trichocarpa
  Intron number 2 from transcript POPTR_0006s18400.1 (locus POPTR_0006s18400) derived from phytozome v7.0 (chr-ID scaf fold_6; pos 16811456 to 16811907 reverse strand)
gcaggtgtatttcgttcttcaaacctctaaatttattacgtgcctctcttaatccgtttctttgaactatttttcagtattttgaatgttaaacttcagttgaaggactattttcaattctatgttttctattatttacatctgacagatgaaaagctaacctcaactcatccaactttgaatcccttgcttagagtgtgtgctttttcctaagtttcacttatcaatattattaagtatcataatactttttccccttttactgcacaccctagccaaatgaactgagcactaagaaatcactataaattttgttttcaattcttacagttgactaatttctttttcgctagtagttctcttttcatttgtttctccatttttccctgtatcattgatctttgaaccatgaaacagttggaggagtttgagagggctgttcagttgagcca

SEQ ID NO: 60892 - DNA, 642 bp, Populus trichocarpa
  Intron number 1 from transcript POPTR_0006s18400.1 (locus POPTR_0006s18400) derived from phytozome v7.0 (chr-ID scaf fold_6; pos 16812018 to 16812659 reverse strand)
tgtacgtttttatttcatgctttacattctatatttgttcggtacaacaatttgtttggtttctccagtcttacgactatggattgtattttgaattgggttttgcatgctgcatactgatgtttattatatgttttgcttctgaggttgtctggatgtgtgtttattgctctgttttaaaggttgtcttgtagattttggggttttcttggttggaatttctgcctatttagttaaaggaatgtgtttgtagatgtgttgtgatgtcaagctcttcaatttaaagtttgacaccaaatatgcggatgcgtgccttatttctttgtttttcaggtcttgttgatgtgaaaatgtggggtttatgttgtttgttttgtaatgcatgactatatattcctatctttgaagttgttgatcttcaagtatcataaattctatttcctgtaattttggagagttttcaattttcactagcagaaagttattcttgtgctctttgaaggcaggcagctctgtattctaatcaaatcaacaagttattcttgtgctacaaacttgataatcattagaatgctcttatgctcttagacttctatggaactgaaattgaagcagtttttggttatttttgtttttggcaga

SEQ ID NO: 60893 - DNA, 536 bp, Populus trichocarpa
  Intron number 1 from transcript POPTR_0001s12950.1 (locus POPTR_0001s12950) derived from phytozome v7.0 (chr-ID scaf fold_1; pos 10047789 to 10048324)
gagcctttgttgaaagagaagatccctctgtcaaggttccttctttttttctctttttcttcttccgaagcaatatgcttagtgggtttttgtttttatgaggattaattattgataatatagctgtcttgtacttgatcatgtaacatttgttttgtttatgttttctaaattagatcagtgaaaattacatgctgagtgtgctttaaatctttgtactagttgaagaacagcgcacactgatagttaacttagaacctgaattgcttagtaataaaaattgtttcgaaaatatgatgtcaatcacataacatcagagcagcggctgcaaaatgcagtattaggcttagagttgcagtattaccaaattgcacaaaagaaaggtgtgagctttagcaaggctgcaactaattgttttttggcttgattctcaactttttttccttgattgaatttgtgtttgagtccagtcatccacaccacttgcgttctgggttatatgtgtttcttgtgattttcaggaagtagacgatttg

SEQ ID NO: 60894 - DNA, 674 bp, Populus trichocarpa
  Intron number 1 from transcript POPTR_0001s43620.1 (locus POPTR_0001s43620) derived from phytozome v7.0 (chr-ID scaf fold_1; pos 43824020 to 43824693 reverse strand)
ctgggtctggcaaaacactcgcttttattattcctgtgagttggttttatttttattttgagttttatgggtttggattgcttgcttttgttgccttttcatgcaaaaagtggggggggggaaacctagtgtggttcttattttgagcttgtgtggttcagtggcagatatttggcgttgcaaaataggaaaaaaaaagaactgggaatagaacggatttttagggtcgacagatgccttttctggtgatacggaatggaaaaaaattgataattgggaaatgaatgggtgttatatctttctcggctttaagtttgacgggttcggcttgttttggttgtttttgttatgattctcttattaaagttagtacagtttagttttgtgcttttgtactttgattgacagattaattatcgggaaaagaatggatttttaggaagtaattagtgtagtttagtttttcttttgtcagtttgaaatgagaagtaattgaacaatacagggatgcttaacttgagcgcttaaatctgaaggttagactattgcttgtttcgcagttcaatagagaatgtttttggatgattaaatgatggaattgatgtttttatgtttctacatatttattgatttatatctggaattcagattttggaaaaattatataaagaaag

SEQ ID NO: 60895 - DNA, 589 bp, Populus trichocarpa
  Intron number 1 from transcript POPTR_0011s07260.1 (locus POPTR_0011s07260) derived from phytozome v7.0 (chr-ID scaf fold_11; pos 8026108 to 8026696)
cgggttagtatccctcacccctgtccatttctctgtctcagatgatttttaattctttgtttaaacaatttcaaagacccttcttttcccttttccggtactgtcctccctctccttctacctgcccatgtatttgtttttgtgattttgatctgggattctgagatttggggttctttttatcgaatatttatgccgttatgttgattttggggggttgtttttgagcttagccatccttttttgtttgtttatattttgttgatttttatttgaatctaatttgggggttagctctttttagttgaattttgtttgatgggtttgatttttttttttgtgtggacaagttattttcgtactgaattttcacaccatttctgttctgttgcaaaaacatgtatgtaaaagagtagaatttaatggaatctgctgattttgttcttagatagttttgataattttttaggtttctcagggaacaaaaaataatattgtactaatatcggtttatgtaattgggacatcttgttttttaaatgttggttttctaggtgatataagctatctgagactgggcttgattaac

SEQ ID NO: 60896 - DNA, 720 bp, Populus trichocarpa
  Intron number 1 from transcript POPTR_0019s05190.1 (locus POPTR_0019s05190) derived from phytozome v7.0 (chr-ID scaf fold_19; pos 5410977 to 5411696)
ctcattcttaggcttcacaggttgcttggtaacaggtatctgtaatattccctgtgtaatgatcggattttatggtctcggggttgctgattcttttctctctattcccatcagctgggacatccataattaggttgatttggatctctctcttgtttttaatttatgctgtttttttttagggttttgttatgatcttccttaattcctcaaaaaactagaagcttgactttcgattaacactttaaattgtctcagaaacgtaattgttgggctttaacttaaaagggtttccccttgtttatttctcttacctttcgcttagcaatccgaggttctatcatcatcatgaatcatgatgatccgatctccatcttttttggaacagctatatatccatacatgcatgtacgtgtgtgcacgtatttatgttttctttttctttgataatcgtcgtatttatgttattgttctttttgtcttcttttctggttcctatagcaatagcgttcaaaaaccaactccaatgtattgtttactttatttgtcaacgtttttacacagttcgattaatagagagtataatgggcagatttagggctagtggaagtcgccttttggttttcgaatttgaaataacttagatcgatgcttgctagttagtaattttgtctgtcaatcttacttttgtttggttttccttcttggaacaggtggtct

SEQ ID NO: 60897 - DNA, 780 bp, Populus trichocarpa
  Intron number 1 from transcript POPTR_0017s02010.1 (locus POPTR_0017s02010) derived from phytozome v7.0 (chr-ID scaf fold_17; pos 1470387 to 1471166)
taactactgtcccttttgacagaactgttgagcaggtctctctcttctctatctatctttctaggttttgtttggtttggttacattttcttgattttgtgtttcatgtattttctgttacattctatggtgatttcctaaatggggtatcataaaggaggctatttatgtgtaattcttctgttatagatggaaaggagactaatttttgcctatttggcattcatgtcatttgttcttcttctcctctttctctgtgttagtcactgtaaaattttaagcagacacattgtttagatacaaatatgtttttgcagtttctgcagtgtttggccttaaggctctcaatggattttgattattcaccctcattttctttttcccactcaattcttgatttgatttttttttttaatgtggagtagttgatagcttataatcaatcaccttgctataaagtttcaatatttgttttaattttgctctttagctctttatcagtgtaagaattagaatttagaatcatatatttctttgaattcaccaaattatgcaaaaagggtgataccaaaataattttaaagatttccgatacattattgaaccgtgtaattatgaatttgatagacactgactcggactgtagtggttggtttcatcctttttctttatttttttttgtaactttcctttctttctttcttttttttttttttcatttttgattgggattcaagatcgttaatgattctatgcaatgacgtgcaggcaatcctggct

SEQ ID NO: 60898 - DNA, 892 bp, Populus trichocarpa
  Intron number 1 from transcript POPTR_0003s10000.1 (locus POPTR_0003s10000) derived from phytozome v7.0 (chr-ID scaf fold_3; pos 11144458 to 11145349)
gcttctttcccctggtttcttgcacccatcaaattgtaagctacaaaaacagaaaacctcttggctttacctcttttatgtttcgttattttgtcctttttgttagtgttaattaaagtttttttaagattgataaagtttggtacgctggggacttgtttgcttttaatgaacgaggaaataaaagaagttggggatgtcattttgatctgtgaggaatttttcatgtcctgtgccatggctgctactctaattgattgacctacatgtaataaagggctttcatcggaattgcatataaaatttttatttcaattgaagttggtgtctttaagattggaacggatcggtacgtctgtgacgtgcgtagcttttttttttaaattaaagttggcaaggtcagtctaagttttgagaatttttactgttcactcctcaaaattgtatatcgtcttaattgattcagctaattgcttgttctttcaattgtacgagactggttaaaaatgtatttttcttcttccctctttggaaattgtaatgtttgtttatctgttttatggggcttgttttcggattgttaaatgctataacagtgaggtgagaaatagtatacaattagacatacgagtaaccatcaagtaattgaaattaactctaggtaaatggtttggggaaattttactggaaattggcaatgcagttttctgacacgtgaaatcatcttaatttgcaaatgtcttgtgcgcgcacttgttttgttgaatgggttggtgatatccagttaatcaactaattttagagttgcatgttatatttttgtgttcattacatgttatatgtgtccttttttgcagtgagctactgttcctattttgggaagaagattgac

SEQ ID NO: 60899 - DNA, 539 bp, Populus trichocarpa
  Intron number 1 from transcript POPTR_0004s18400.1 (locus POPTR_0004s18400) derived from phytozome v7.0 (chr-ID scaf fold_4; pos 18307425 to 18307963)
tctcgctgtgtaccagagccagataaaaaaaaaaggtacgtctccatttcagatccaaaattttcatttctctcctttcactatcatttcataaataaatcaataaatcaataaaaatctctcatctattttttactgatagaatcggttgcagagaattggaattttcgtttttgatgctcttcaatatttcaatctagctggttagttagttagtctggttgggttttgatgctgagcagggagtgagttatttcggtgtctctgattgattaagctttgtttgtttgttggctaagaaattgtagggaagttttggatattttattagttttttatatttattgatccgttcctgctgtggatttcaaattttgaaattgaaaagcttttctttttaaatttttaggctaactggtatttatttgctgaatgttaatgacgttactgttttttatatggaaattaaatttgtggattttgattaatgtattggaattaatttgatttttttttttttttgtggatgaaggttgata

SEQ ID NO: 60900 - DNA, 713 bp, Populus trichocarpa
  Intron number 5 from transcript POPTR_0004s18400.1 (locus POPTR_0004s18400) derived from phytozome v7.0 (chr-ID scaf fold_4; pos 18308897 to 18309609)
acaacaagtttacaactgtgcaatttactggagaggtatgaagtcttatttattattattttatttttaaaaagttcttgatttttcgtatcaaagaaacaattgcaattgctcatgctaatggaccttgaacttgttaaacgctgaaaattaaatgttgaagattttagcaggtactttgagctgcttaaactatctgcacgctaacgtgtttgcatgccagcaaacaaacttttaccagataattagatctcattttgctagaaattcaattataacttgttcttctgggaaaaatctgcagaaaatagcttctggggtgaaatataagtagagaatgaattgcatttatatcttaaagaaacatggctgagccttaccactgaggcaagtacataaattcatgtatttcataattttcagcaggttaggagttaggagttgtaaatttcaaggataaagttcaaattgatattaatatttgatttgtttttctgatgtggaatattgcttgtgctggattttagtatatgcctcttaagtcattactaatagagaagttggtgtatggccatttacatctttgcataatgtaaccctttaaattttaaattttatcatagtagtttccttggagtctaggtctactctatcgatacacttactttccctggccttttttgtaggttttgaaaactccagtctccttggac

SEQ ID NO: 60901 - DNA, 865 bp, Populus trichocarpa
  Intron number 1 from transcript POPTR_0006s15440.1 (locus POPTR_0006s15440) derived from phytozome v7.0 (chr-ID scaf fold_6; pos 12827615 to 12828479 reverse strand)
tgctcttcaaggctcaagccttcagttcacagaaggttagcttcttctttttttcctgcttcccatttttataaacgtttaagcaaccgcttgttccacttcccaacgtgttatatatatatatatatatatatatttctgtgcagctgcaatccgggttgagccctatggtctggcattcttgctgtatatggtgcatgtcataggatcaaatgttgtagaaaagaagctagagtcccgtaattaatcaaaacgcgtgttcatatagctgatctgttcctatctagcttagcggaaggagcttagtagtatattatgacctgagaatactgcaattctatatagcatgtttaccatcagatttcaatgcccttgattagtagcagctagaaccaagtataagtcgaggaaactgatgatcaaggtctaattgtcagcatgcatgctcattcagtcttaggcttcgaggaccgatgaacacacaaagggatgggtaagcgtgtaatgtttcatatattgttggaacaacattttaggtccatgaggtcattactcatgaaacgcaagaaatcaagtagagttggtcgttcaattgtagtaataattcataaattaagtggtattgtgtgaattaccccctcatcgtcgtaaaaagaagtgacatcgtaaagtagttttctttcaccacaactaataattaagttgcattgtaaatggttgttaatttgtttcgcgaatggatttttcatcattaatggttgtttgtgtcgtacataattgtttgtactataatgttttataatttttatttcgcgctgtaatgcatgtctgattgtaacttgtgttttgtcctgtaggagataaa

SEQ ID NO: 60902 - DNA, 611 bp, Populus trichocarpa
  Intron number 1 from transcript POPTR_0007s15290.1 (locus POPTR_0007s15290) derived from phytozome v7.0 (chr-ID scaf fold_7; pos 14870869 to 14871479)
tctggttagtcacttagtgttgttcctttaaggatttattacgtagttttgctttttcttattgagaaaaaagtttggaacttttaatgttaaacgagaaagaacatgggttagtgtacttaattgtgcgattaatcgtgttttaattggtgggttattgttgtgttttgttgttttgtccatagataataaaaattttgtttcttgcccttgtttgtgaatctgagaagtagatatttgtaatttacttgctaaagaatttttttatgagatttcaggttgtttgttgaacttagcgaaagttggactttattcacattgagaaatctaatggatattgaaaaaaaaaatgagtgaaacgtgtgagtgttgttttttttagaacttgttatgtagtaaattgatgaatttgaagatttgaccttaagaaactttcattgctgagtttggcttatacggttagataagaatcaacttttatgtagtgatcatgaaagctaaatttgaaagttcattcaaattgaaaaagcgctttttgtagaaacaagaattaatggagtgtataatgtgttttaggaaccaagcaatttgaggatcagctattcaaagaa

SEQ ID NO: 60903 - DNA, 564 bp, Populus trichocarpa
  Intron number 1 from transcript POPTR_0016s12310.1 (locus POPTR_0016s12310) derived from phytozome v7.0 (chr-ID scaf fold_16; pos 11655621 to 11656184)
ggggtgccattcttgctgatacatacgctcgcaaggtatttcttcgatatatatatctatccttctttcagttgcccttcgttgatgattcttgtttcctttcctgtcagcaaacattcttcacggttccaaacgttagtcttactttgtttctgcgagtctgaaaatggcggtggacattttcatggtagcattttgattttttgttttgacgtttacatggtaatgataaaaaaaaagacaaagaaaacactagatgagccaacagctttaactagaagcctaaaacaccaggcaagtaaaggagtgtagaagttgaagctaaaagtagtaagatagaaatgacaaacacacttgcccactaaaccttcagattccagtcagaagatttgttcaagtcaaagtaaaaatgtagtctctagtctctagagcaggacaccaggtatctagactctggacatctggtgctcaaactccattaatcatacatttcagatcttataagatgttgggtctcttattattattattattattatgcaactggcacaggcagacatagtg

SEQ ID NO: 60904 - DNA, 961 bp, Populus trichocarpa
  Intron number 1 from transcript POPTR_0014s04100.1 (locus POPTR_0014s04100) derived from phytozome v7.0 (chr-ID scaf fold_14; pos 3266837 to 3267797)
ctaaaattctcattgattttaatttgctcgagcaggtctgattccttttttttaatgttcttaattataattttcggagtcctatgtatctgtaatcaattcccttgttttcttttcttgagtaattcttagtcttgaaatttgcttaaacttatcaggttgatcagacaaagcataatcaatagattttggaaacaaaataatgggtttactaatctttagctctcaatacaagaacagatattagttaatcaagccaggttgtttgagtttgaagatcaactcaggctatactcaagccactaaaccctcccaagtcctggctcaatggatccgattcttagatccataggttattttcctttctgggttattgttaattaattagcacgaagaatgttttgatacctaaggaaataagtgttttggttgtgtttgttgattaggataggtaaaatttagccaagaatttatgttatgctatcatgttaatcttcttttcatgataaattggctcaaataaggaaaaaaaagtattgaaatatatttttattgaccaattagaacctattcctaagattcatatgggtttaaaaaggttcaatatacaaacgttgtgaaactttttgaagaacaatcaagaaaaccttatgaaaattgaatgtttttgcatagaagatgtaaaacatatattaaatatagacatatatttctatttttttttcaaaatttgaaaaagtaatttgaatctttaacataatccatatattcgtaaaatataccaaaaatctaattgaataaatgttatctgcagtgaagcaactattcaaagagaaaatactaaaattattatttagtatagtttcattggaaataacttggtgcacgaggatacagagtcgttgaatcaagatgtcaatccattactaaattttctgctccttttcttctggcaggcata

SEQ ID NO: 60905 - DNA, 592 bp, Populus trichocarpa
  Intron number 2 from transcript POPTR_0013s04660.1 (locus POPTR_0013s04660) derived from phytozome v7.0 (chr-ID scaf fold_13; pos 3203581 to 3204172)
actaactacaaaaaaggtataatttctaccctttttgtttttaagtttcgactccaatcataatattgttgattgcttagattgtacttgcatttgttgtttggggtttatatttttataatgttaagtttttccaatgaaagtagggataaaagaagagtttttccccatccatctaaaacggtggtggattgtgatgggatcttttcaagtttgtgttttaccaccatttgtgtgttcttggagaataaatgctaaacattttttctgagtgttatctattataaacgtaaagtttcacaatctctcaggtccgctcatctccgaaaagagagaagcataattatatggtcatgttgttttagttgtctcaggttttgttaaaatttaaaaatctcaaatctgattttgttgcatggtaagaaatctcaggctttatacttatgcttttctgtgggctctgagaactcaaaattgtggttctggttttccccatttcttttcttttagattgacatgagccgaacaacatatattttagtaattgtgctgattacctcctggtgactttttcatgcagttgtatatcttg

SEQ ID NO: 60906 - DNA, 938 bp, Populus trichocarpa
  Intron number 1 from transcript POPTR_0007s15150.1 (locus POPTR_0007s15150) derived from phytozome v7.0 (chr-ID scaf fold_7; pos 14773859 to 14774796)
accatcacaacctgctccagatcgtgtccctgctggtacttttctccctaccccacctcttctctttatcataattatataaagttttgatctttatgttaattcaaactctcctttttgttggtttgaggggtctaagtcatttgcaggatgaattggcttgtgggttgtttttgtcttgttcgtttgaacatgaaaaaatcaatctttcttttgactttatgctgttttttttgccttgttttttgaggactcgtcttttttatatgcggagagattgaaacttgcatgtggtgataaatctgggctgtgcttggtgttttatcttgagatctgagatctaggttgtgtgaggtgaccttaattattgcgaattctcagttttgcttgtcatgtttagataattattcagtagagtattttggagtggaggttcaagaaacttaattgacttgttgatatggttgctttctggaatcatgaaccggtggtttcttgaattcatgaaaagaaaaaatgtttgatatgcttgagatttcaaggcgatgtcctgtttttatgagcttatttattattgtcaagctgatgagatctttgactgatcaaagcatacttgtagtgtatagaacctggttattaaatgagtggttgctcattgttttgtattatgtacgaaggtttcctgtttcattatagtatcgactagatctcaatggttttccattttgaaagtattttcatgttcttatatttatcatgtgtgcataggtgtgaatgtgtggatttgtgcgcacatattcatagcttcaagttttcatatccccaattttagctttggttggtcaataaatttgtactgcctgtgtttctaagactctactaagtcactgagcttactgatcatggatgcagaagagaaacctgccgaatcagataac

SEQ ID NO: 60907 - DNA, 806 bp, Populus trichocarpa
  Intron number 1 from transcript POPTR_0001s15520.1 (locus POPTR_0001s15520) derived from phytozome v7.0 (chr-ID scaf fold_1; pos 12350567 to 12351372)
ctccgcgtgcaagaagcaacaaaatacagcttctggtaaacttgcggcacaaccttaataaatggtggttcttactaaaaaaattatgatttttgcttaaccaaacaagaaaaattgtggctgcgggtgaacctcacccgcaatcacaataccaaaaaaccactagtattctctctctctctcatcccctcactattttcctattaattccctttttttttttttaaggtaaccccaaattcacttctctccaaaactcttaaaaaaataattatgctaaatcaaggagataaattcgtcttgtatttgatgatttttctcggttggtgagaaaactgtagtaggaaaaaggacattggatttattggatgtgtgaggattggaatgtctagttcagctactactgttaaaactgtgatagatttcagtagaatcccaaattgagatttctgagacttgcaatcatatcttatgaagataattcccaatggaaaaccagctaaggttgagtaatagccttattttttcatctcaattgttgagaaacgtaagcttgcttgatatttttgaaatcattttcatgctgtttcttgagtgccagggcattggagaatacctaacgagctttaatgtctctctgctttttaacatcaattaataaaggataccaaattgcttaaatttttttaatatgccttgcctttggttgttctggagaataggtgtatcatatttcttctattgaatactcactctttatttagcatgtctatttgagctatagacttcaggggttttgcatcact

SEQ ID NO: 60908 - DNA, 885 bp, Populus trichocarpa
  Intron number 1 from transcript POPTR_0015s02090.1 (locus POPTR_0015s02090) derived from phytozome v7.0 (chr-ID scaf fold_15; pos 1431631 to 1432515 reverse strand)
atttaagaaaaagtaagtctctttatcttcctttgatactaacaaacaaagccaaccttttgtttacaacaatcacttggatttcttcctctttagaggtaccattctccctttccctctcttaaaaaccctccctttttccttaaaaatccttgtctttctcttacatgtagtttaattttgcttctgttggttgagtttcagtttattctcttatggggtattttagttctgcttatctttttttttgtttttgaattttgcaacaagtactttaaagttgtcctgattctggttttctgtttaattttggaaaatatttttccatgaaacttaactttcacaaaaacaaaggtcatttattgtatatatttgttgtgtgcctgtctattggctgtcaaggtattatttttgtaaggattttagtgtcatatctgcaattgggtgtgtcctttggaaaatctctccaggtgtcacttttatgtaattctaaaaaaaaaagtctttgattaaccgtaccatttccgtgagtctataaaattttcaacaagtctgtgaagatagggtttctgagtttgttttatccaatgttttataatccattttgtgttttaacagtcagttttaactattagggttattgtttctataaattatgattccaaatgttcatgaactgcaaagggttgcatttgctggagtagggttgaacaggaatgcattaatacaagttttttttatttttattttacttactgtttttcttgcaggggttggcattttagtagattagtgcgcagtatatgaagaaggttcttggatttaattttttgattaaaggttgatttttttattgtggactaccacttaaattaagccagagtc

SEQ ID NO: 60909 - DNA, 931 bp, Populus trichocarpa
  Intron number 1 from transcript POPTR_0005s03680.1 (locus POPTR_0005s03680) derived from phytozome v7.0 (chr-ID scaf fold_5; pos 2454749 to 2455679)
gacagcaaaaatacaggtttttaagaatacccatctcgtaattttcttgtttttttttttggtttcttgatctgtgttttgtgtgatcttgtgattggtcaactggttttgttttattttaaaaaaatttgtgatggttgtgaattttatggactgtggtagttgaaagttttgaattttatggatggtgacatgtgtagactgtagttaggtggcggcggccatagaaagtcggtaacttttagctctgtaaagcatctgctttgaatgagaggtatctattattaatgtagtagatgagtttatggccattggctaattcttctgcagctacctgatcagtgtagctggaagctgacaatttttgttgtgctattgtgctacgaactacttggtctttattaggctatttatgttgtatctgttggtttcctgatcatgatgaatgttctttgatgaaataaatattttcatttcctctagattggtttcaccttttcatgtatgtgtgtgtgtgtattgattcttaatatcaatttagttttaatgtttaagagggtgggttatcatgtcatgttagtgatatcttcaaaggtgcctgcttgatgtattttctaattagcagagtgaagtcttaatgaaacatgttccggtcaatctctttaaggagcttgtagtatcaagcatgtgtattgaaattcttttaaattttctgttatgcccttttcaattgaaatgtagcattggcagatggtatgttatgtgcatttctagttgcgtggccttttactttatggaccatttgttagttctgcatcctctcacgtgattttcagattttcagatctttgggaatgtttaagttagttgcttttgtaaagcttgtactttatttggtgttgcttttatggctaattcaggaagcttactg

SEQ ID NO: 60910 - DNA, 469 bp, Populus trichocarpa
  Intron number 1 from transcript POPTR_0016s12820.1 (locus POPTR_0016s12820) derived from phytozome v7.0 (chr-ID scaf fold_16; pos 12185197 to 12185665)
atattggaattacaggtgtgtaattctctgctatttcaatactgaacatgttctttcttcaatgtcaacctgtaaattttgctctcgtggtcgtttttaggcactatagaactcaagttaccgtatttttcatgttttctggattgtaatttactagtttttttatgcagatcttaatataatgaagtaatcttacacttagagatagcatttaaattactaagtttactaaccaaaaaggaagaagaaatttatcttctctttgaagcttgccaccattcatttcacactaaaagttaatgttagacaatgtgcaaaagatttggtaacagctacgttataacttgcctgatcgaactcgtttgatcatactatccgttcgctgaatcattgatgttaagataaaaactaaaaaaaaacaaagagattaactagtgctagtttacattatgaaggtggtgttacctca

SEQ ID NO: 60911 - DNA, 833 bp, Populus trichocarpa
  Intron number 1 from transcript POPTR_0007s13270.1 (locus POPTR_0007s13270) derived from phytozome v7.0 (chr-ID scaf fold_7; pos 13395563 to 13396395)
gacaaaggtgctcaaagctgtgtctacacttgaaggtaagccctacgtacattttgttctccattacttttatcatgtctccctcctccttggattgattgatgctcgtccattcactgcatcatccgaatcaagaactgacccgttgattagatttgacatgacaacgcattcaagatgtgctatacaatgacaactcgtcctcgctcaatgaatacaaaacacgcatgctttagcacatggtgcaatccaataaatcagttctagtgctggattattaaagtggtacaagaagggagatgactaaatcttcaatcctatgttctggagagattggttttaagagattggatagttagttttggagaatttgattgcaaattagtggataatttcacacacgatatagattatttgtgttaaaaaaaatatataaattatatcttgatatatcacttaataatttaaattttttaattaaattggttttttgatatatcatcataatcttgatgatcaaacagttacgagtttgaattttatcatttctatttatttgataaaaattaaatataaaataatataaatatatatgaatttcaagttcaaattttttttcaaattctactaataatatataataataatataaatttttttataataatataaatataaattatatattaaaattttatttaataaccgaagcttttgacgagatggtcatgacaatactaacgtctcttcttcctccgacatcctattaatagtcttcaaattcgacgttatatgcaggtgtagatacgatcgaggctgaccaaggaaaggga

SEQ ID NO: 60912 - DNA, 769 bp, Populus trichocarpa
  Intron number 2 from transcript POPTR_0001s35570.1 (locus POPTR_0001s35570) derived from phytozome v7.0 (chr-ID scaf fold_1; pos 33905289 to 33906057)
tcactctgtgcagattttggaaaggctcttggaaggtaatgacttctgatgggttcatctctccttatattttgttggccaatggtctctttcatcatttatcctatggccagtagtttcaggggttctgaaatcttgtagtctttggcttcgaacttccagaaggaattccaaatcagttggctttgacagtttgtcattgatgaaacctatattataaatagaaaccctattgtttcaaattgcagcttcgcttatgctttgacattttaaatacatgaaaacttgcaaccatttgagcatccagaatcatccgaagtgcctgaacaaggacaatctcaatagctctatttttgtgaaatggtagcttatgaggactgtcttgaactacaaaatggctggtagcccttctacatcccaaaaactgtcctctccttgtgggatttgaacctagaacctcaaagttaggaatctaagctccaaggttttattgtcccttaagaacaggttctggatacctctgagcgcatggttggtgaaatttctaaattgataacgcctataaaatcagaatctgtgttttcaccctaatttcttgactttttttagaccatttaagctctcaagtgaagataatcagagttctccatcctctttcttagataaagaaatggcattatgaggaatatggtgctaacattagttatgtttctaacttaacctttcacttgcagttgtgctcatttaactgctcttcgaagagattcaa

SEQ ID NO: 60913 - DNA, 542 bp, Populus trichocarpa
  Intron number 6 from transcript POPTR_0001s06870.1 (locus POPTR_0001s06870) derived from phytozome v7.0 (chr-ID scaf fold_1; pos 5251592 to 5252133 reverse strand)
caagccaattttgtgcacttgagcattttaagcaggtggctgttgttccaattgcatttgctactgtgtttgctggtttatagatctatcttgtttgtggactgtagtgcaggaactatttggttacaaaaatagtacaggaactatgtttacaggaaacttgcggtatttgctggtttattttgctttccttctgatatctctaggataatagtaccttttgccctgtttgtttttgcgtttcaaaagcacttctgaaaaaaattgattttttttttctttgctttaaattaatatttttttagtgttttcagattcttttgatgtgctgatgtcaaaaataatttttaaaaaataaaaaaacaatattttataaaaaataatcatttcgagcgaaaaacactttgaaaagcaaccgctacctcactccccaacattccatgaagctgcttttctgattgcaattttgcttcttcatatcactattgaatctgaatagcattatatcttttttttcatggtacaaggcactacaagcgtgc

SEQ ID NO: 60914 - DNA, 808 bp, Populus trichocarpa
  Intron number 1 from transcript POPTR_0011s01070.1 (locus POPTR_0011s01070) derived from phytozome v7.0 (chr-ID scaf fold_11; pos 569280 to 570087)
attcacgggtaagggactggttgtggttagggaaggtattagcacccctaacgcaccctacctgaggtaagctgcttcgtgaatttgatatgtttaaagaagttttaataattgtttttttttcatcggatattagaaatacaacttacgtataagttaataattcttgaccgtgagcaaatcaaaatattaaattcttctttaatctttgcaattttatcataaataaaaacatccataaaaaaaaacatacaaacacacatacactttcactatattttttcttttttcttttccttttctttttgacatccacattacaaattataaaaattcaaaactaaacacaaaaaattacattaaacaatttaaaaattacaaaaacagcccctaaaaactccaggaattgcagggaagtccttctggaacgggatgaacagtggtggcgcgtcttcccacgcgccgtcgcaaactggacggaaattctcagcttcttctccctttcccttcctgcaccgacgttggcaacctctgtcacctgcaaaaggaacaaaacgcaacaacaagctattttaatcttctttcactgttttcggatctgactctctctcttctttagatctgcttcgctgcagatctgttcttctgtaagtttttgtctccctctccgcttcgtgtcattggtaggaggaaggatggctgctggtcggtaggcggcgccgtgttccagttgccggtggtggaggtgcctgctgctgtgtggcttggtggaggccggttctgcggagctgcttctccgttgttgttg

SEQ ID NO: 60915 - DNA, 432 bp, Populus trichocarpa
  Intron number 2 from transcript POPTR_0009s11590.1 (locus POPTR_0009s11590) derived from phytozome v7.0 (chr-ID scaf fold_9; pos 9602873 to 9603304)
gaaacaaagtgcaggagaattacgtcttcataaaggttgttctacctatgcatcttcatcactatcttttaattgccaattatgattgcttttatttaatcctgctcgaaaagcattatttttgttatatgggtcttgcttgctttgttaagatttatactttgacgaactttcagatgctttctagtgttttaactgggtagaagagaaagttttgatctttagccttttatggttggttaatgggctatccttcatgaattccgttgctgaaactaggatcagctacctggttgttattttcattaagaactccattgctattttaagtttcttggttatgacgcactggttttggatttttcataaatcttacgttagggtgtttctcttatagatatcagtgaactgaacttgcataaaacttgtaca

SEQ ID NO: 60916 - DNA, 187 bp, Populus trichocarpa
  Intron number 2 from transcript POPTR_0025s00700.1 (locus POPTR_0025s00700) derived from phytozome v7.0 (chr-ID scaf fold_25; pos 364738 to 364924)
ctgtggaagatgtatttattattatgtttttgagcctgggattttgtttctctcttccaacattggtttttatttctttttctgttgtttgttttgttaatattctttttggtgagaacttgatagctttttcttgacgtcttgattgataggatcgaattattttttctgaagaggctgtttttga

SEQ ID NO: 60917 - DNA, 617 bp, Populus trichocarpa
  Intron number 1 from transcript POPTR_0005s21640.1 (locus POPTR_0005s21640) derived from phytozome v7.0 (chr-ID scaf fold_5; pos 20747828 to 20748444)
aggggctaagctattttgcgtcgctgcagccggaggtatctcttctctgtctctgagatttttctctcctttacctgtttggatgccaagaaaatgtagaataacagagaatcaaatttaggtttccgaatctcattggtgtatgcatatagttataactatatttgcttctttggaaaatgtcgaaaccaagagttgtttttgttttgtttttcatactagtagctattactgttttgtttttctagtaattagcagatcattagcgtaaggtcataagaatcattatagtttcttttatcttgattccttgaatatgcttttttcttgtttttcatattcagtttcatgcctgtctgattttttttacacatgtttcattttatctttgcctgagtgctgcctaaaaccttttcttaagtaaatttctacgtttgaaagatcttgtattttatgtagttcgcaatcatgtttatcaaatttgggtttttgtcatgcgatgcactaatcattcagataccagattaaggggcaattggaaccttactatttatttaattagatttatttctagttggttaatcaataaatgtttgattttgtgttgaaggagaagg

SEQ ID NO: 60918 - DNA, 979 bp, Populus trichocarpa
  Intron number 1 from transcript POPTR_0012s14890.1 (locus POPTR_0012s14890) derived from phytozome v7.0 (chr-ID scaf fold_12; pos 14588518 to 14589496)
ccattattaactccactctctagttttccattcctgtaagcctttctctctcctcctcctctaaagactctgctccaattcttagagatgatagctgtggtttgcatttcgaaatttctagcttgtttttcatcattttttgcttattaaaaccttataagagtttgcgaagttactgattttgcactaattttgattcctgcctgcatttagctgttttgtttagtgtgtttgtgctttgtctggttgcttagattatttacacattcgttctttctttttatattttttttcaaaatctaagttggtaagagaaaatgtaaaatccattctttatttattttgctgttaatataacggtttttgggaattgctggtattattaattttggagaggtcatgtttggtttgaattaaaaaaagagtgaaaaatgctctctagtggattttatttctctactgaattaaaattttgaagggaaaaaaaaaagcgtaattgcgtagcatggaaggttaaaacagatagagaagtaaaataggagaatccatttctgtttttttctctttgtaaatgagatttttgttcttttaattttgtagttctcggataccaaactaaacttttttttttacgatatttaatgctgttactaattttggataggtcaggtcaggtttggttgcttgtgatataggagtaataatttgtatatctatttactctttatttaatttctgttttaaaaaagcgaagaataccttaaaagattttatttttatactgggtattaaatggtgattggtgagtacattaatattcaaaatttttaaataaaaaaatggataattttgtaatttggaagctaaaacctgatagggaaaaatgggcagaattcattactgttttagatgtttattgatggggttttaatcctaacctgcagggatttgtggtggagttgatatagttaattaatta

SEQ ID NO: 60919 - DNA, 865 bp, Populus trichocarpa
  Intron number 2 from transcript POPTR_0002s09970.1 (locus POPTR_0002s09970) derived from phytozome v7.0 (chr-ID scaf fold_2; pos 7157474 to 7158338 reverse strand)
accagaagctgtaagctcctcttttctctgtcaaattgtatttgcttttgttggtaaatcaccccttttttcttgtcaaagtttatttgattttgtcgattaaagagatagatgttcgcgtacttggacaaagatgctgtgtttgtgttgttaatttagtttctgtggatgaagataacaaattatgattttttgtctggatttttcgaattttttacacatttttagccttcatttagtgatagaagagtttttctttagaattttttttgtatatgtgtttgtttgggtccagaatatctactgcatccgttatttagaatagatttttttatcttttaatgcatgctgtagctagtttcgatattcaaaatgtaatgcattgcaatccaatacctttaataagaaaatagaacgaaaagatattataatctgatataaaaaaaggctttctcaatttctttatagcatacataagttccaacaaaacctttaagaacctgatgttgataaatgcccatttgcatgggttttctgtttgtttctgtaaatgtggaacttccgaagtgaagcttccatattgttataccttttcttgttggatggaaagtcttccttcaagtaaggaaccttagctacttgtctagtgcgatattctgtatcaaccaactcgtctgactcaattgtggtaaatctgttcaatattaaccattctttgatcgtagattcagcagcaagatctgattggctttttttttccctgtgtttttagttatcagttgcaattctaattctgagatttatctctttttccgtctttgaatctgcagtcgggcattttttgataagaggatctcacaggagg

SEQ ID NO: 60920 - DNA, 566 bp, Populus trichocarpa; identical to SEQ ID NO: 53964
  Intron number 1 from transcript POPTR_0006s27180.2 (locus POPTR_0006s27180) derived from phytozome v7.0 (chr-ID scaf fold_6; pos 25161626 to 25162191)

SEQ ID NO: 60921 - DNA, 258 bp, Populus trichocarpa
  Intron number 1 from transcript POPTR_0006s15740.1 (locus POPTR_0006s15740) derived from phytozome v7.0 (chr-ID scaf fold_6; pos 13339542 to 13339799)
gccctgggtgtggacacaagctggaaggaaagccggtaataatatggataatctcctgatattcattccttcgaaacagatttttttttttttttgttttttgcccatcttcccttttctttttgggcataaataaattaatttctttgggacaaattgttccttttagatttttaagttgagcttttgttttaactttgatttgagtggagttaatttgcaggattggttaggtctaccagcaggagtgaaatttga

SEQ ID NO: 60922 - DNA, 609 bp, Populus trichocarpa
  Intron number 1 from transcript POPTR_0007s14080.1 (locus POPTR_0007s14080) derived from phytozome v7.0 (chr-ID scaf fold_7; pos 13995099 to 13995707 reverse strand)
tcaatctctccacgaagcagcaccccggaaaagaggtctcatctttctcttaattctttactcttatttttcactctctgtcttttgtttcttccacattttgtattgtaccctttaaaaatctctgctttgtcttttaaaattgtctcttatttgtctcatttgatgcaagaatacccttttgtgattttgtcgtgatttgaggtttgatctgtgaatttttttgtgggtttttgtatcagggtcagtgagtggtaacccgtgttcaattggggttttgttaattaaggttcaaggtactgttttttttttggagaattaggagtgattttaatgtatggtgattttttaacaagaaaaaggcatgatcttgctgcttaatatccttgttatgagcttgaatttgcattgttgttcacaacgcttggtgcttgataattatcttcaacgtggttggtagttggtactagagtttgtggtttatcatgtgttgttatgcactaaagctgacgggtttggtttgtcgattggcatgaggtttatacaatctaaaatttgaatttctgtttttctggttttttgtttttttttttgcaactcagggaaggt

SEQ ID NO: 60923 - DNA, 569 bp, Populus trichocarpa
  Intron number 2 from transcript POPTR_0010s24320.1 (locus POPTR_0010s24320) derived from phytozome v7.0 (chr-ID scaf fold_10; pos 20594428 to 20594996)
gtcgtgtcctaactgaccatataggtgcttaatgacttttctctcttacgctaattttctttatttttctccttttcttttgctttagaattgagataatataaaattatagatattaaactcagcctaatcaagtcaatctagaatttatctaggccgggtttgctttcaaattacatagagagttaattgggttaaatcttgatgacccagcgagttaatccgtgaccgacaaaactcaagtgaggcttagagttgctccaatgatttctttttaaatttttatccaaaacattgttatttcttagaaaaagaagtttcgtttcattttagaagaactcaaacaacttgtttttgggacatgcccggttgatccaccgatttgaaggttgagcggccaaccagctgcaactcgactgggttagataactatgtatggaagtggttttgctaatacaattataagatttcagttattaaatcatattaacacattttttctcttttactttcatgaaatatatatatacgcagcttcgtttctgggaatagaatcacctacaccttac

SEQ ID NO: 60924 - DNA, 663 bp, Populus trichocarpa
  Intron number 2 from transcript POPTR_0018s07550.1 (locus POPTR_0018s07550) derived from phytozome v7.0 (chr-ID scaf fold_18; pos 7890943 to 7891605 reverse strand)
ctatcaggattcaaactgctttccgtggattcttggtaaatgggtttccctttttggtcttggatctcttttaactgtttgtttgctgagaaaatggagtaggagggagggaaagttgaatgttttttattttatgaattgggtttggcatttactgttctgtggaaaattaggaactttctccctctttcaaggaggaaaaaaatggaaccttttgaatataccttactgtttgattgctgagaaaatggcagaaaagaaagtttgaatgtttgatttggatttttgctttttctatccatggacagaataggaactttcttcaagctttgaaattgacaaaaattgaagacaccacacatctgagttaaatgcacacaaagtctgtgttaatgcgtaaccactaaccactaaacagtgcgaaaaaagcttaactttttttcttatgatcattgactcttttctttgcaatcttactgaatcttaagtgagcaaatgaaacactaatcgaacaaagaaaacaggtactataagagacgaatttccagatttaaagcaaaaactttgaacataatacttggcaaatcaattgacaatggttgttgaacaagtgagtgattggttctaggcaagaagggctctgagggctttgaaagcagtggt

SEQ ID NO: 60925 - DNA, 294 bp, Populus trichocarpa
  Intron number 2 from transcript POPTR_0009s06350.1 (locus POPTR_0009s06350) derived from phytozome v7.0 (chr-ID scaf fold_9; pos 6152396 to 6152689)
ggaggtcgtcgtgggtggaagttatcaatggctctcgatgaactcttaagaatcgcagaaacgtttctcagaattcaatgagatgtcaaaatgaaatttgaacatgcatgaagggtttacttgatgctggcaacatcatcatatataacagatcatcaattttcttcgacggacagttacagacaggggtgtttttcttcatatatttcttggaactaaacacttaacatcaaaaaataaaataatcgagaaccctgagtaactggcggagccgctaaagtagctaaggtggtg

SEQ ID NO: 60926 - DNA, 832 bp, Populus trichocarpa
  Intron number 6 from transcript POPTR_0009s16730.1 (locus POPTR_0009s16730) derived from phytozome v7.0 (chr-ID scaf fold_9; pos 12647521 to 12648352 reverse strand)
cctactacaagaaatctgaggtaatccagtctgcattaggaattcattccttaaacttgttcgcagcttttgtacattgagactaccttgttagtctcaatgttgagtaaaaatgccatcaatctaaaaactgtcactagagttgattgtatcagcaataaaagatgggatatattatcctcaatgtgtgatgggcataattgtatgaagacaatacacagaaaaagaaaaacctttcaactcataggatttacttttacgaaactcatgtgtgttggatgatcctttgcatatgttccaaatgaagtaaaaggtttttcttttatctggatccaaagcagcattaagcttgaattagctactgaaagtaccagtcaatttactagtgaggtttgcatatgttccaaatgactttgattagatatgctatgagtctaatccatttgttgatttattcaacaagggttctttctaaccgtggaaagtaacatctgattgattagttatgattgatatccacgctagaaatatgtaattgatgattcattctgtattggttttactttgtttcttaacaaatgcatctaaggcttatttgttttttcttgaatttttgaaagatgtgggttcttgagaaaaaaagatgaaattttaattaaaattctattgtgataccacttgatttccaaaaggctaagtatcctttcggcatgaatttcctccaaaacaagtagctcattggatgcagcaatcttctgtgggacatggatcaatcttgtttattgaatattattcatttatgcagagctctggctgtgtctctccaacttac

SEQ ID NO: 60927 - DNA, 227 bp, Populus trichocarpa
  Intron number 1 from transcript POPTR_0009s16730.1 (locus POPTR_0009s16730) derived from phytozome v7.0 (chr-ID scaf fold_9; pos 12649266 to 12649492 reverse strand)
tctttcttgttcttgcttggagattggaattaaaggtgaataagattaaatccatgccttttgactcggtttgatccaatgctgaactgggtttctttttgcttcttgaagtttagtatcataaaatctttggttttctttgctacatggtggatcatgaatgtgttttgattttctatgatctttaaagggatttttcttttattgttcattccagtttcttgaag

SEQ ID NO: 60928 - DNA, 940 bp, Populus trichocarpa
  Intron number 1 from transcript POPTR_0011s05720.1 (locus POPTR_0011s05720) derived from phytozome v7.0 (chr-ID scaf fold_11; pos 5698259 to 5699198 reverse strand)
caatgtatataatattacattttgtagagttttctggtcaaatttatggggctgaaataattgctgcgtgaatgaattatggtgaagttgttcgtatggagattcttagaataactttttcttagatggtttgggagaaaatagaaagggtcgaggatttggtattctttgtgggaatcaatttttgtgttcgttgtcctgcaatcaaagccaaacgaaggaaagtgagtgttttctaggattttttttaaaaaaaaaaaaaatagatcatttataatatttgtattgttttattagacttaatctatcaaagtcggataatataaatattacatataataatagataaagaatctaaaaataaatattacaagtaaggtgacaaatcaagattgtaaaacccgatcaacccgtataccttattttcatcttatttttatatttgataatttataaattgagtattttttttatttaaaaatattttagtttcaaaattcttattaatgagcttcatattaaatttctttaatataacaaaaaaaaaaaagcatgtttgtttgcatatattttcgtcggtaaagccatcggcaatttatcaatgaaaatatttcctcggtattttcgtttgcatatatttatcgattttctgatagtgcattgagtttttttataaaaaaaaaattaataaaacaaattaccaaaaaccgcataaggattgtaaacataggaataaaaacattattttaccaaagactaaacattaacacatcaccatttggactcttttttacgaagaaaagaagaagaagaatgaattctcttaaccatcataattctacaagtttgtgtttaaggcaatttctgtgatacctttaattcctgtttatgactcaaatattctacctatgtcaaaatagagtaaaacaagaagctgcaa

SEQ ID NO: 60929 - DNA, 773 bp, Populus trichocarpa
  Intron number 1 from transcript POPTR_0001s29920.1 (locus POPTR_0001s29920) derived from phytozome v7.0 (chr-ID scaf fold_1; pos 28502817 to 28503589)
tttcattaccacgctactaaagctcaggttttactgattctttttttttttctttaagctgtgggtttttggtttggtgtagagtaagtgaacttttgcgtttgtttaatgttgaatttaagattttaacgagtgttgatgtgagtttgtgttggtttcttaagaatccatttcttgttaatgttgctgctgctgctagttttattggatttcaaagaaaagcataaaatggatgctgtgctattttggctctttacctcttaactagaaaccaatgagggtatttagaatggtgatacttaaagttggatttcggattgtcggcgtagctaattgaaatgtacattgttagtaagatttgtaatttgtaattgaaattgtaaggtgggttaatattaagtaagtggtaagtggcttacacaggagttattttgactcgcacatgaaatacattgaaagtgctatttttgaagtttctgttaaagacacactttgaatatgtctctttattgctactctaaagtcatactcatacgtttctaatgtttgctattgtgtaattgcttttgcatatgtttcagattgtcacttgctttctttctttcttttttatattgttttggttcttgtataggagggcaatggtgatcattcaaaggcaaatccttatcacgtggaagagcctgagtcaaatggtttgagccctgaaaatttccagaaggcttttcacattatcaggattgcaacgagggagcaaaacagggtctcgagaa

SEQ ID NO: 60930 - DNA, 982 bp, Populus trichocarpa
  Intron number 2 from transcript POPTR_0005s06280.1 (locus POPTR_0005s06280) derived from phytozome v7.0 (chr-ID scaf fold_5; pos 4132245 to 4133226 reverse strand)
tcggttgagcctaggcataggctatctgcatcattgtaagttactataaaaaaaaaatttacagactaaggtacatactttcatcaatcagcatgcattatttgtcacagaaagttttcaaatatctgcttcttgatcttgttcgcataattaactcttgcttgtctccacaagtactgcaatatatttacatagtcattcgtattctgaaaaaattatggttgatggattctgtggactctgctgttgtaattcgtcaatgcaatggactttgtaatgtgattggtttagttcgcatgaactaggtctgcatcaactagtcttggagcccagttttacagattctcaacttcaggcatctcaagctcaaatctaaagtgcttatccgatgaatcaaagtagtggttgaagatattgcttctaaccgaatccaacaatgtatgaaacttgtgattttctttcaatgcaagtcgctcgaaagagaaaattcccagaaggaaaatgttttatataaatatagcaacagctctttcgatatagtaatggtgagcctaggccatggattggtgtctctgtatttatatgactgtgaagtaaaagcaagaaggaactaatcaacaaggaaaatgttaacgcaattctgtgtgatctccataattatgatgagatcagattgactgatttaagggaaagtttggtagagtgcaatgagattttttctgtagctaatcaagaaaatacagttgacctactgataaggaaaagataattatacaatctcgagataaatatattgtttccaacagcatttagtgcatttccatggacaatcagatcatttttttctgttcattagtacttttcatgcagttttcctgttttgcttattccgcctctctttttttcgatcgtaatgtttgtttgcaaatttatttctactcgaacagtgaagatttatacaaaagaaggttaacaagatata

SEQ ID NO: 60931 - DNA, 701 bp, Populus trichocarpa
  Intron number 1 from transcript POPTR_0018s11810.1 (locus POPTR_0018s11810) derived from phytozome v7.0 (chr-ID scaf fold_18; pos 12482814 to 12483514 reverse strand)
catcttctgtttcacagctccttcttttgcttgaggtacttctttatcatctcacacgttctccatttaattcatcttgaacaagctcaagctgcaattttttttttttttgtgaattgaatgatttaggtttaggacttaggtgtgactaaattaaattactttgattgccaccttctgaaagctttagagtggttgaaatgcttccgattctggtcaattctgtgctgcccttcttttaaatttacttgggtcttttaggtgctgtaggttgatgttgcatgttcttttgcttctgggttttaatgttcaacttgaattaaaagaaatttgttgaaatggaattggttgaagttcgtctcgtgtggttattcaatatcccatttgaatgaaatctagttagaattctttttgggcttctatcggtcatttgactgtcaatagtttttcttaacgtgaggatccttcttcttgattatctaatttgtacatggaatggcagtcaatacttcaagttaaatgtcacaacctctgaggtgaagatgttgattgaagtgttataatgtattatcctctattttctgtttgttaagctcaatttttcttgtctctctctgtttaaatgcagatgcaaatgcattgtctcattcctttccttttctttctttgttttctttccttagaaacttgagaattgtcta

SEQ ID NO: 60932 - DNA, 833 bp, Populus trichocarpa
  Intron number 2 from transcript POPTR_0012s02910.1 (locus POPTR_0012s02910) derived from phytozome v7.0 (chr-ID scaf fold_12; pos 2361233 to 2362065)
cctccctcacttctgaacaagcccgcactatcaaggtattgatctgggatcttcctatttcatgcaatcttgatcggattgttgttaaatcatgattctttacgttggtttcttccgtttgtcatgatcattgaccagtttcacaatctgggttttgcaaagatacctccatttgtaggttttctgatgtaatgaatgcttcgtttatttgactatgagtgtaagagtagaattactggatttctcctaaacttgtacaatgttggcaattgaagttaaagttttcaaatgttcttgctagttcattcattagggcactttctttgaccatttggagtaaaaaaaaagataactaattttgaatccaaatttctttggacaccaattttgaatccaaatttctttggacaccaaaatgtaactgtttacagatatttaacaaatgaagttatatgcaaaacgaaaatctttgctaatacatttgacacttgcatcatgggcttgcaacctgttggatcatgcctgtataaagcttttgtctagtgattgagatttcaagatagtgatgctggtttgctagtgtatacttacctcatatgcacaatcaacatgcatctagattttattactgggtaagtttataactagagttgattactactaggtttgtagcgtgctgtttgatactgtctttgtagcatgtgcaatcttttctcttgttgccttattgtctgagttttccttttctttttatcaaggcagcatcaaaatcatatacaggctatctgttgtgtgtaggttcttgaacaacgggtagagactttggaaagggg

SEQ ID NO: 60933 - DNA, 679 bp, Populus trichocarpa
  Intron number 2 from transcript POPTR_0005s11320.1 (locus POPTR_0005s11320) derived from phytozome v7.0 (chr-ID scaf fold_5; pos 8201512 to 8202190)
ataaagataacaggaatttgatttacagttaagtcttctctctctctctctctctctctctctcttttatcttaatcaagtcgtatttgcattcgtattgttttatttttttttcatttccagcagatattttatttatttgcatacttgattgagaggagaaaggatggatggcttactgtccatctagttttaaaaatttagaaactgggaggaagtacttttaagggagggatccctccattccctccttatccttcccgacagccaaacgatggatatacccaatccctcccctcttatccatccttcctccaatccctcctagcgaacacagtgtaaatctctattgctgtttactttcctattcctaatgtaaataaatgtagagggtgtactgtataactaactgttcctcatgctattgtattcaaatttgtgatttttatggagatttttagggatgtagcaaaagttactagaaaatagtttatttttagagcaatcttgatggcagttgcttaaaaatctcaatgttgtgaagcccatgcagtttcagttagtattgatccttggaattactctgttttgtattttttatatcaaaactaataaaaaagttaaatttcttgttttgagattggtatgtaatttaatatgctattacctgtgtgcagtg

SEQ ID NO: 60934 - DNA, 989 bp, Populus trichocarpa
  Intron number 2 from transcript POPTR_0013s12930.1 (locus POPTR_0013s12930) derived from phytozome v7.0 (chr-ID scaf fold_13; pos 13548703 to 13549691 reverse strand)
atcggtcatttatagagcttacttcaagcttttaggtatgtcatggtattggctgtttttttttttaatattcatgttgaattattttaccaatggaaaaattgaagtttaagttttgttgcggattgtttgattggttctaggaaattattgttacaccttttgaccaattgtattgtggtgtcatttgtatgtctgtctttgttttgtgatttttgtctgcaatgtcagagtttcatgtgccaggagggctattctatatttcaattagtttaactgcttatatgagattagactagatattacaatgacattagctaatagattaggtatttcaggatgcgttaggcagtcagattatattacattgactgggcaagtctgttgaatgtatagataaggactaatgattctatgggtttattgtctactctctactcaagtctcactgtctattgagcttagtaatgtgtttcggagatttgaagagaataatctgtaacatcattgcatactcactatctaagatttacactgtgtttcggaggtttgaagattatgatgatgtttgaacgtattgcctgcttactgtctcaatcatcattgcgtctcttgtccaataaaatattaggaattatttttgccttcataaattttgaaaattttcttggctggtctttacttcatggatctatgaagtttcttactcatacttcattgatgttgagaatttctccattttttgatgaattattgctcatagcgatatagaatacgcatcagattttagaatgaaagttgaaatatcagcatatgacttatctgtttctgaaatttggatttgtcgtgatcattggctatcttttaaactacaactacctttagtttcagggtgcaacctagatctagtatatttaaattggaccagtcttgtattttagcttatcatgactttgtcttcttttgattgtgagcagcaaaggtgcatc

SEQ ID NO: 60935 - DNA, 166 bp, Populus trichocarpa
  Intron number 1 from transcript POPTR_0007s10570.1 (locus POPTR_0007s10570) derived from phytozome v7.0 (chr-ID scaf fold_7; pos 10582691 to 10582856 reverse strand)
tgccacttcttttagacttgcaagtatgtgcaaaatttgcaatcttggtgtttgttaaaatgtcctcattgtgtgtttattgaaccaattatcaatgtttgattttgtgctttcttcagttattaatgatggggttttgtgttttctttgttttttcaggtggagg

SEQ ID NO: 60936 - DNA, 375 bp, Populus trichocarpa
  Intron number 1 from transcript POPTR_0018s12610.2 (locus POPTR_0018s12610) derived from phytozome v7.0 (chr-ID scaf fold_18; pos 13150791 to 13151165 reverse strand)
actgtctcagactcccgatttcaatacttgaggaggtaaacacttctaaaccataatttagaaagaaaaaaaaaagaagcaatttttacgtgcttttttttattaattaatttatgtttacacttctaaattgtgatttttgtttatattaattttattttttgatttatttagtgatttatgtttgattgggcattgattgagtttgttgttttggatcaggtttttgtaatggcgagatgtcagagagagttttcaaggttgttaggaatatttttttttttaagtgaagggttacggagggttgaggttgggataaggtattaaggtctcctttctgaagggtttttgaacacttgtgtgaagaagagaaaa

SEQ ID NO: 60937 - DNA, 699 bp, Populus trichocarpa
  Intron number 1 from transcript POPTR_0005s02670.1 (locus POPTR_0005s02670) derived from phytozome v7.0 (chr-ID scaf fold_5; pos 1707583 to 1708281 reverse strand)
gtactttgttgcaagaggtatggtaattggtaagctaattagtttgattatgtgacaatgtggttgtgattatggtgattagtaagctaattagctgtggtgtttttggagtctgttgtaatcttaattggtgttaaaattttgttgatgtgattgtaagtagaaaggaatgaactttttggatgcgagcacatgtctgcatgaggtagttttggcaaggatgattttcacagtgattaattaatgggtatgttaatgtgattttgccaattttgatcacattagacaagtgcgcagccactcttgttgattgaagatttagcttatttcttttataagaaaatgcagtgtagttgcataaatcaaagaattgtaaagtgattgataacggatttttaagcagtgagcatgtaatgtaatgagatcatgaggtttctataaaaaaaagaataagatctttaggtttgaatgttttatgagcttgaatttttaatttgtttttgttggaaacataattgaacatgtgtccaatttctgtttttggtcgattaagtaagcatgtgtttgtgctagattttcatccagctagaaacacccaatttcctgtctgtggtttgttgatgctatttgctaatgttcaatgatttcttgtgccccatgctaggttaggagaggtgcagatagagcagatatctacag

SEQ ID NO: 60938 - DNA, 742 bp, Populus trichocarpa
  Intron number 1 from transcript POPTR_0001s42600.1 (locus POPTR_0001s42600) derived from phytozome v7.0 (chr-ID scaf fold_1; pos 42649123 to 42649864)
aaagatccaaattcagctcacagatttgctaccaggtgcttggagaatttgaaaaatcagtcatgtcatattgagaaggtaattaagagacaaactactcaagaaattctaaataattgattgcgtatgaaagcttcaatagatattgttcgttggctcacatttcaagcatgtgctttagagggcatgatgaacgtccagagtcaaaaaaccaaggtaattttcttgaaatgatggaacttttagcatcttataatgagcaagtaggagctcttgttttgggtaatgctccacaaaatgcaaaatacacctcacatcaaattcaaaaagaaattttgcatgtctttgctagaaatgttcagtcttcaattcgtcatgagattggtgatgcaagattttgtttaattattgatgaagctcgagatgaatccagaagagagcaaatggcccttgttattaggtttgttgatagaagtggatttatacgagaatgatttttggatatagttcatgtcaaagatacaactgcttcaactcttaaggaagagatttcctttgttttatctcatcacaatcttaatgttcaaaatattagaggtcaagggtatgatggcgctagtactatgcgtgtagaatggaatggtttgcaagctttattcattaatgattgcccatatgcatattatgtacattgcttagctcatcagttacaattggctcttattgctgcagctagagaaat

SEQ ID NO: 60939 - DNA, 528 bp, Populus trichocarpa
  Intron number 1 from transcript POPTR_0101s00260.1 (locus POPTR_0101s00260) derived from phytozome v7.0 (chr-ID scaf fold_101; pos 48730 to 49257 reverse strand)
gaactcattcaggttttctttcttttttatcaatgtgaccagacaatgctgtttagtatgtttaatgttgcatgttttactttatatgttttatttgcccttgatccattctttctcttttaattttgtagtcgctgattgctttgctagtgattaaagttggaagctgcaaatttctgttgttttttgttttactgaattgaaaagctaagagtcaagttgagtcaatgactgtcttttctttttggctgtggctttcggtgaaaaaatgggttcttgttgtttttctaggtgaaatgaagtcatcaagctacctaattttgatcattcaaggtctttagcagttaataaaaatgaagaaggaatgaattgctatcatcataatttgttgaatttgataaaaaaaatattgtgcatttttcatgttaaaattttggatattttaatttttgtagcagttattttgatctgatataatatgcatagttcactatcctttgattccaaggtgaattttcctttcacaga

SEQ ID NO: 60940 - DNA, 204 bp, Populus trichocarpa
  Intron number 1 from transcript POPTR_0016s12220.1 (locus POPTR_0016s12220) derived from phytozome v7.0 (chr-ID scaf fold_16; pos 11561766 to 11561969 reverse strand)
ttcctattcacaaaattaaatccggagcctttcaggtcaggatttttttttgggttaattaagtattggatttttcaggttttttttgttttatactatggttgaatgtaaagtaattattaaaaaacaaagaagaagaaattgattagttcgtttttgatgtgtgtagagacagggagggctggggagaggcttgagctgagt

SEQ ID NO: 60941 - DNA, 513 bp, Populus trichocarpa
  Intron number 2 from transcript POPTR_0005s14580.1 (locus POPTR_0005s14580) derived from phytozome v7.0 (chr-ID scaf fold_5; pos 11612596 to 11613108)
cagttcgttttcgaccctgcattgatatacacaaggtatttgattcaatgtattgtaattctcttcatggttctcactgataatcttttcaatttttgggttttcttttctttcgttctctctttctttgtttaatcctgtaagatttactaagttgaatgcttgagggaattgcttaaaaagtgtgcaaactgtaatagataatttcatgaatgagagtgtgatatgactgctgttttaagtaccctttttgattttatatatcaaattatcaatcgtcaagtaggtgatttggtggcttatgctttcacttatagagtcaagaagtcacattttagcaaaattcagtttttattgcctattctattattgaattgagttttgggattgggttttaaatttcaaatatcggcgctatttctatgttaggttaaagagtgggtttagtttcgtgtttaaatcatgatttgtttttcaggggaaggtgaaacaaattgttgggtctacccttcg

SEQ ID NO: 60942 - DNA, 452 bp, Populus trichocarpa
  Intron number 1 from transcript POPTR_0019s05870.1 (locus POPTR_0019s05870) derived from phytozome v7.0 (chr-ID scaf fold_19; pos 6300230 to 6300681 reverse strand)
cagatcacaaacataatttttgtgcggaaagattgaagaagagttgtttaatttatcttcccgtaaacaaaacgtaattggatatcaataactcaaatttaattattatttttttgagatgtttattaagactttgatgagatttttttataattttataatttttgcttatttttttcaaatttgctagttctaacaattgttttttgaattcttgttatagtgatttttttctaattaattagatatattttattggtttgttttgattatgcatggattttttttttatgttttgtttttagcagagccaccaaaattatcaattttttctcacgatatatattttgattttaggttgaatcatgagcaaaataagaagaattgattcttttttttgaaaaaaaaaatatatattgatacctcacagcctagtgaaccaactccaagta

SEQ ID NO: 60943 - DNA, 600 bp, Populus trichocarpa
  Intron number 1 from transcript POPTR_0018s05060.1 (locus POPTR_0018s05060) derived from phytozome v7.0 (chr-ID scaf fold_18; pos 4490383 to 4490982)
gagacgccttctcttagtggaaaggtactttctgttgcctaggaaaggaatcctgacttttggtctggtttcttttcttttgaataaggtggagattaattcttgaagattccatttaaatttctatttgtgtttctttggttctagttttggttaacaatcaagaaatgtttttgatgtttgattcttgaattaataaataaaatggtatttaaggaatgcaaatatggtttagctatgtgaagatctgcatttggttagttgagtgatgattttttgccttgtcagtaaaggtttgtttgtcaaaaagaagtgctgcacatggaagtttttatctgcttgtagaatatacttgacttgggcaggcctaaaatatcccttttttttttcgttgagcaagcgagagagaggtaagaagaggtggtccttcttggatgaaaggtttaccttttgaatgcttggtttgtgcattgatcactttaccaacttagtagaccctgtaattacgatggtaatggtttttctttatttttgttcgagttgatttcttttgagtgtttatctgattgaaattcgattttgaaacgtgtttgcaggagt

SEQ ID NO: 60944 - DNA, 269 bp, Populus trichocarpa
  Intron number 1 from transcript POPTR_0015s15500.1 (locus POPTR_0015s15500) derived from phytozome v7.0 (chr-ID scaf fold_15; pos 14748139 to 14748407 reverse strand)
gggtgagattgctattatctttcatcggtgtttgttcatagattaggcctcctaattacaatccttcaactgaacaaccttgctaaattcaaaccaaaacgataatggaaatttagtttttcaagcatagtattttgaatgttaaccgttatacaaggcaactgtatctaaggctatcacattatttcaagttgaatgttttttcttgatgagaattcctcttcgtgtttacaggaaaaaaaccgctggacgtttaagccgagggggtt

SEQ ID NO: 60945 - DNA, 762 bp, Populus trichocarpa
  Intron number 2 from transcript POPTR_0007s13200.1 (locus POPTR_0007s13200) derived from phytozome v7.0 (chr-ID scaf fold_7; pos 13324543 to 13325304 reverse strand)
gcattcttggtatttgttccgctccagattaccaggtttcctatttttctttttctttttctttttttgagtgtctgtgttttgtatcgtgttatttggttgtgtaatgttgaataattgcggaaccattgtcagaaaattgaaacccagaattcccaaagctgtttaagttaatttccttttacagagggggacattagagtagaaagttgtgatttttagattgtaaatatgattttattcttcgctgtgtcttactttgctctacaattattgcctattggatttgtttgttttttgtgtttaacacgatataatgacaattttgccagcaggataagtaaaatcatctttcatgaattgatgttgagtgttgagcaatttttcctagggtaatctagttattgtagagtgttgcgttggttaatgccttttagcttgtgcatgttgtaatgagaagcttgcgttcctccttgttggaagacgtggtgaatggtctttagatatgtaggaaaacgatttgtaagaaaaccagaaccattgaaagaaaatttgaaatctctaggctaagcaattgaatgactgagttattttagatatgagctaatcatatttttcttataaattgtaagaaatattgtaatgatgcttttttcactgtttacgttaccgctttagacataaagaaaaattgatgatacttaaatacatgattgcttagttgctcaatgcggatcacctgactgaaaggtttgcttgtag

SEQ ID NO: 60946 - DNA, 796 bp, Populus trichocarpa
  Intron number 5 from transcript POPTR_0014s17410.1 (locus POPTR_0014s17410) derived from phytozome v7.0 (chr-ID scaf fold_14; pos 13542749 to 13543544)
gtttcccttcacaggtgagctctttcttcaagggctggtattgggaattcaattatctttatgcaacatgcatacttgttctctctccacactctcacttagaggacttgtgatttttcatacaatctcttggatgaacttgtgatagtgaatcgtgatatttcagtttggcttagcagcagctaagtgcctgtaggtgtttagtacaatgccttggtctaaaaactaaaggcactgccatttttgggacgacatttagatgtctctcacagaatgttttatgaccaaaactcagtcaagcatggctgaatttgtgattttcgctgaaaattcagccatatcataatgttttggattgttatatttatcattctataacttatgccatgtaattcaatgtgtattttcttctctttcgtttttctttcctcttgtatatttattgaatagcagtcatcaaaccatcaagaaagatctcataatgctcacgttcctaaaccatgctcaaatttgatatagaacagttcagttaatggtgtttgatgctggttaaatatctgcatttgttcatagtagaaatctatgtgaagctacatgatttttagaattattttatatatagctagctgatgtccatgttcttttcatctgatttcaaaccccattcactagcatattgtccttgatatgcatgtctgtcattgtcgtttttttgacttatagaagagtttgatgcatagtcttaatatattctgtcacaggcatattcataccgcaaagttcttcccactctgtc

SEQ ID NO: 60947 - DNA, 969 bp, Populus trichocarpa
  Intron number 2 from transcript POPTR_0014s13430.1 (locus POPTR_0014s13430) derived from phytozome v7.0 (chr-ID scaf fold_14; pos 9888962 to 9889930 reverse strand)
ttgtttttcaccaagatcagaaaagggttttcaaggtatgattgttattctgcccactgttgattgttttctggatgattcatctggaatggttcttgaaattggtttgttttgcttcagtttcatgcttgctttgaatctgtggttctattgtgtccgttgagagctgtgcttggaaactgttgttggctccagagataaaaatactttactatctgcccatctgcaaagtagataacacttaattttagctgtttaacgagagtgagggtttttgtcctgcaattccaggcttgagcagcctacagctacttcccttaatattcttcttcttagaaaagaattacgcggtacagattgtgatatacgcataataaattaagtaaaacctgttcttattaggtgagccagacccatctggagtaagagatgcaacgcctcgatttcttgcctccgccactgggctccattaagaacctgccacctatcgaaaaaaattgaaccctcaaattagcttgtaccaaattgcctctcctctttcatttccataattttttcagtttatctgtgacttggaaataatcatttcattttgttgttaattttagtgcaaattatgaaatcaatatactgatatctatttattattttactcaatgttttgattgttgacttatctgtatgtttctgttaaggttgtacttgtacaatagtggagatatcttagtctcctccacaatcgccttccaatctttcccagatccaataaaaaccaaaactattatatttagaagattttatcatcctaggaaaacattataattgggtgcttggttgatgataagccaatgctattattctcggtttttgttccatctcatgacagcttgtgtctgttcaacaataaatgacagttaacatttcattgatgcaggattgtcagccctatttacctagtcagggaacaag

SEQ ID NO: 60948 - DNA, 913 bp, Populus trichocarpa
  Intron number 1 from transcript POPTR_0001s26350.1 (locus POPTR_0001s26350) derived from phytozome v7.0 (chr-ID scaf fold_1; pos 25387334 to 25388246 reverse strand)
ttcactaaggtatagcattacaataccattatttttgtcgtacacaattagaaacgacaatgcatttaatcatttgaatgtgatgtaaaaggatatttgcctgggatggtcaattgggtagattttgctaaaaagagtttagaattcgatattttgatttctatttcatctgatgttgctttcgacaatgcatttggtcaattcgaatataatgcaaaatggctacttgttaaagcatgcttgtctataaatgtatgaagagaatagtatcatacttctttttctttttttggtcggtttatttccgtgatgagggactgattgactctaagagaagatacaaatggggtctaaaggtgtctcgaaaccagtcttttacttaggtggttgagttgtttgataaagtgaggttggagtatattgacattttttttttaatttgaagaagcatatgatggtgtttataggggtatagcaccctaaattggttggtaaaaagaaaaaagatgtatcgtgcagttattggctttcttgagggtaagtcagttttttagtagtacaaagataatcttgaataatggattgttatgcaatggtaattaaacttgcttatgccattacaactatttgactgatccaaccccaagctatcaagtttacaagcacctccatccccggaaagaagtgatgagtacaacaaaacttgaagcgggaaatttttggtcagctccatttgtaaagaataacgataacctgctatgcatgtaatttttttttggttttctggttttatgtcttccttctccgtcccttccagttcgcctcctctcctctgtttatgttttatactggcattataatttttatgttatcgtgacttttaagtttttgattttgtagactgctgctgagt

SEQ ID NO: 60949 - DNA, 523 bp, Populus trichocarpa
  Intron number 2 from transcript POPTR_0001s14480.1 (locus POPTR_0001s14480) derived from phytozome v7.0 (chr-ID scaf fold_1; pos 11360880 to 11361402)
gagctaaggtatactatcgtgttcgaggatattaaaaaaaaaaaataatcgaagaaaacctttcatgggtttttgatggggtttggggaaattcgtgttaattattttttttgcgaatatagtataatgaagttcaacgatatggatatactatagtgttaattattttatggtcactttatcagagaatagaagaaactagcttggtgggtttttgttcatcgggtttatgattttttttgttgtaaagaaggagttgtttttgatcttgtgagaacaaataattaattctgttgcttgattgatggaattaacataatatcgacttgtttggattcactcgggaaactttgtgtcaaactgatttagcaagttcttttttcttgttaagtgagaaactttagctttcagtgatgttaacaattcccttttctgtgaaagcatgatggttaactgctcactaatgatatccaacattgtgtttcaaggttggaatttgtgaacttccattccatcctatcag

SEQ ID NO: 60950 - DNA, 393 bp, Populus trichocarpa
  Intron number 2 from transcript POPTR_0015s08695.1 (locus POPTR_0015s08695) derived from phytozome v7.0 (chr-ID scaf fold_15; pos 10013818 to 10014210)
agtgccatctgcagcaggattaattgcacaaactggtatgattagtactgcacttagctctccttcctgtattaaaaatagtgaatggataattgacacaggtgctaatgatcatatgacttgtgattcttcaaactttagttttttatccccttcacattctatcttagctattactaatgccaatggtgtgtcatcccctgttactggtgttggtaatgttcctgtatcctccaccttttctctctctaatgtactgtatgttccatcccttacatgtaatctactttccattagtcaaataaccaaggcccttaactgtgttgctttgttttatcctacttattgtatttttcagaacatacataccaaggagaggattggcagtggtag

SEQ ID NO: 60951 - DNA, 690 bp, Populus trichocarpa
  Intron number 4 from transcript POPTR_0006s19530.1 (locus POPTR_0006s19530) derived from phytozome v7.0 (chr-ID scaf fold_6; pos 18579734 to 18580423)
ttcggtattcaggagcacattgatcttggcatcaagtgagtttttctatgttgcttggttgttaattccataattaaatattgtgctgggtttattgaaattgctttatagtacttgttatgcatgtatgatggaatgaattcaatgggtatcaatggatttttagggctttaatggttgttggcttaagaacggtagcatcgcaaatgctttgagttcaaattgaacacttctgtttattttgtaatgtcttttcgcacacgttactctatagtttttgtttgaaacctattctaacttaatagtttatggataattatgctgttgtgattacaacaccttaggattgtcatattttgtaattgtgggtttagttataaattagttgtacatgattcttcaaagcacaaatgctgaatgaccctatattggaggatgtattgtttagtgatgtagccttgcttattttctcttatgttaaatataaagcttctaacagtactgcttattatgtgataatatcggttcacattatatcttgcacggtgaattccaacaagaagctttttgtcttgggctttttatacccttgtaattctaccttgttgaagttgaatgtgccagggtttagtttgacttgttacactgtttttgtaattaactttgctatttcatcctcgtctaccaggt

SEQ ID NO: 60952 - DNA, 694 bp, Populus trichocarpa
  Intron number 3 from transcript POPTR_0007s02360.1 (locus POPTR_0007s02360) derived from phytozome v7.0 (chr-ID scaf fold_7; pos 1389816 to 1390509)
actgaccgcaaaagtgagtctaattctatcttctttcttacgacttgctatttgcatgaatgcgtattttttaatctttagaatttttgtttttagctaactgtgtttgttttggcttgagatttattgaaaggtgacaaaaagtctagtagttttcgcagtcgaggtgtttacttagttgaaaaggcatgttattgttactaatgaatttgaatttatttccttgtgaaaaaatgtatgaaatggttacttattgtagaagttgtattaggcttgtaacaactaactaggttggctgattttagaattgctctaagtagtcatgacaatggattcgaaccgaggaaccttatatgggaaatatatgttaaatatatacatttctgtggtttgatgaagatttgacaagcttgaactggttgaggagtcttaagcagtttctaaagctatgtgatagtcaatgtaccttgtgctcctagctattgccttctgttgattcaatgttctcgtgaataatggccttgtctatgtgactcttagcatggattatagggggcagaagaatagaagaaggaatgagtttttttattacgtatattcggtatgctatacgatctttcaaaattcttacacctcttgatttttgtgaaatgaatcagagattgggctgggcttgactggatttggcatattt

SEQ ID NO: 60953 - DNA, 422 bp, Populus trichocarpa
  Intron number 1 from transcript POPTR_0017s06540.1 (locus POPTR_0017s06540) derived from phytozome v7.0 (chr-ID scaf fold_17; pos 4979651 to 4980072)
tatcactcaattccactttcagcgatccaagaaaggtcttttgtcttttgtttttggttccatgttgatttagattcaaattttgtaacaaaaatgtttaaagttttgctctttgtatgaatctatgtagcaataacttatatataactagtttggtaaccagttaccttttttgggtcagtcaagttcaatgttttttcaactaggtttagcttaaattcacatcctttgatttagtagcttgtgatcatatatatcatgattcatgaatgtgttgtttttcttgtcttaatgagctttcaaataggctttgtttgttttttttattgaaatatattatcatttcatatgtttgtgattttgtgcttcttcggatttgttaatgttcatgtcataaaatttggttttgcaggagaaagaca

SEQ ID NO: 60954 - DNA, 759 bp, Populus trichocarpa
  Intron number 2 from transcript POPTR_0017s06540.1 (locus POPTR_0017s06540) derived from phytozome v7.0 (chr-ID scaf fold_17; pos 4980292 to 4981050)
gctttgcggctcaaaatccaaaattataggatttggtagcagtaaacggcactgaaatattggtttctaattgtgtgaattcatcgtggattatactgaaatacactgtatatcttgggaatcaattttagaagtctttggtgaagtgaagttttatctgctgttattttttagcatttgggatggataaaatatttattgcatacgaattacttcctaccctgattttttctgctggcttttgataatgaggtctttagattgggattgtggttttgcatataattaatcaattccactgtggttttcctagctcatgtcccatggtacatgggcggtgataaaaaagctctgtgcgattatctttgtggttgaattgtttgtggcaaatttagtgctttaaaatttttgaagatacagttttccttgactcgttgtcttctcgaatatgcactggattttctaacagagtatgccctctatatctccctgccatctttttctgttaaagctgataatgatcagttatatcatataggctatgtgaacttaaaagttttattttgtttgctttcttgtttttctcaaatgggttttaagggattctaaacttctgctgggtttgaattcatggtttagcttattttacttcatacaaaactagttcaatgtatgttggccatcgtgttttttttttttttttctgtttttcatctagtgagaaggcacattttctatcttttttgactcataggtggc

SEQ ID NO: 60955 - DNA, 528 bp, Populus trichocarpa
  Intron number 1 from transcript POPTR_0011s13080.1 (locus POPTR_0011s13080) derived from phytozome v7.0 (chr-ID scaf fold_11; pos 15798675 to 15799202)
acgataattggattctttctcgagcaggtaggttgttagtgaaaatttcgatctcccattttatcttctttattttaatgaaacacttgactagagatgtttcaattgcttttgaatgctcaattgccctcccctgcaatactaagttctgagaggtgtcttttatagagtaaatgtgctttcactgcaatagaaagatatcataaaacaatacttacatgatgagaaatgttcgcagctcagggaaaagatgaagatgggctgaacaagaggaacgtattggtaactattctggttacgattgctgtggtctttctcgtgttgggcaccataatttgttgttactttagaaggaaaaaactcggctcaaaaggtaacatcttcccgttgtgacaattttccaaatatattaaccaaaattttgagttggttcagcaattattacaacaggtttaagatacagttagttctttgatttgtttcatggtaccagaaattgctgggagtgtccaaaaatcactatctgct

SEQ ID NO: 60956 - DNA, 770 bp, Populus trichocarpa
  Intron number 1 from transcript POPTR_0007s08580.1 (locus POPTR_0007s08580) derived from phytozome v7.0 (chr-ID scaf fold_7; pos 7422663 to 7423432)
aattacaactccccaagctcacttttcatctgctggtaattttgttttctctgattatgtggattctgactgctgatttagtttttgtaagctttatttgattgggataaatattcaagaaatgaaaagaaaattcctttttttaattttttttctcattgtttgttaatttttagcatctaggctttcgttcttactgcatttcttcataggagttttattaaggcattaaagattggatttttatgcaccaagttatggcctttgagaactgggttttaaaggaaagtttgaaatgtgaaagatccaaaatatcatgttaattttggaagaactggtgatgtaatttcattttgtgtcaattttctcgaaattttaatttataatggagtctgatcatgtagcaaacaaattttttagccttttcaatctattgatataatggaggacattacctgatttacttctaattattgctaatactgaactggaaatattttttaatttgctttatgtttctagatgatatgctttgctgttcaggttacttaggaaggcactttgtgctcttatttacgaattattattgcatttgaagatgcctaattcatgatggatctcaattttgtatatgcatttctcttctttttcctatccagcattaccacttcactttgatggataatactgttttgttcattggtttccctgctttttctaatcattagttattatgaaattccaggctcttctttgaagccaaaagacca

SEQ ID NO: 60957 - DNA, 478 bp, Populus trichocarpa
  Intron number 1 from transcript POPTR_0001s31170.1 (locus POPTR_0001s31170) derived from phytozome v7.0 (chr-ID scaf fold_1; pos 29507355 to 29507832 reverse strand)
cgaggtttctctctcttgctatcttgtttcgtgcgtttcatttgataattagggattttgtgaggtaataattgaaatattgaaagattgatcggaagaggtttgattagggtttggcggttgtttaattaattcaatttggtgaaactaggatttaatcggagtctttataaataaaaacacatacaaactttcttccttttgctttaatctatgaagtttcggattgtactggatatgcttaggctcacagtatttttaattttagattcataagatagggatgaaaggtgtttgaggaaaattgatgaattgcgcgaattttttttttgtgtaatgggttaaacgcatgataaaagtggtatctctggcattttctttgttttataggaagcgaaatgcatttccttgtttcccaatgaatttcttcatgttttttgtaggtttgcaaacatccattttctttctctcctgttta

SEQ ID NO: 60958 - DNA, 301 bp, Populus trichocarpa
  Intron number 2 from transcript POPTR_0005s28100.1 (locus POPTR_0005s28100) derived from phytozome v7.0 (chr-ID scaf fold_5; pos 25477041 to 25477341)
gtcagaattcaagagcggccttgctcatctcttttgcaagtgaatcaaaatttttcctcacctctctctctctgttttatttttttattttttttattaatatagatattcggccaagattaattttacgggctctaaaataaaccgaagaatagttttattttattattgattgaattatatcatctcagtgcatcacacaatttttatttattgaattgatgaatgcagattgaattatatatgtttacatatatttatatcatctcagtgcatcaaacaagcgcctctctcactatca

SEQ ID NO: 60959 - DNA, 841 bp, Populus trichocarpa
  Intron number 1 from transcript POPTR_0004s14020.1 (locus POPTR_0004s14020) derived from phytozome v7.0 (chr-ID scaf fold_4; pos 14479719 to 14480559)
acccgctaaaaagctcgtaattaagctcgtcaagggtaacaactgctcaattcgcttgcatgatttaagggttttgcttatataaaccactaaattaatgtagataacatgttggttgtggagagtagaatttgtttggatattgggatctcggtactgcatagcttaatatggttgtttgatttcattttaggagtgagctaagcaattgtaaacagaaaaccctatgttttctttctattttggatctgggtaattaattgcagttcaattagcttctttcggaatttgttatttatacaaattgctgctgctaaggatttgcaccttggttacatgaattatttgtaacttggaatgattctatattctttaaggttggttttctacatgtatacatgttacgtcaaaagcttggaaatatccagtattgtttttttcattcgattatatgttggggtaacatcacttcttgttctcattaactaagctctccctctcaacactttttcttgagcccccactcatctagctcaattgtacgagctcattttcgtgcatgaaaataattgtagattgaatgaattttaaggaaataatttgtacacattaatgcaattgatgaattggcgtgtcattcttctttaatgagctcttttcttttacttctggtttttctgtgattatgaatgaatggggttggatttagtagcagtattgaaatctagattctggaattacaaatcgtaataaaattttgtgccaggtatgtttcacctttaactgattttatttttttcgtgaagctaaaccaactctgcctacaaattttgaggaggac

SEQ ID NO: 60960 - DNA, 689 bp, Populus trichocarpa
  Intron number 5 from transcript POPTR_0096s00210.1 (locus POPTR_0096s00210) derived from phytozome v7.0 (chr-ID scaf fold_96; pos 3477 to 4165 reverse strand)
caggtaaaaaactttgtatctagttttgtttgttgttgccttattaagtgtctctttcaagagctgacctcttaatatctttgctgtttctgtatttgttgattccaggctcctaataattaccccttcttatagattgatcaaggtgttatctttttcttggatattttctcgtagatgatttttggaatgatttgtatgcacataggataaagcatgctcataaagtgaaagaaagaaagtcatagctctataggagttttgaggctatgaagggcaaaggtagaaagaaatacattgcctcttagtttcatttcggacataaaaaaatatggcatgcgtgtgtaaagttgcaaattgtttaaggataacctttaagtcaatggctctaaactggttattattgttgaagaaacaccactcaattttctaatctgaaattgctgtctgttgtcgatagcgttgacctcttgttcttttatctcaaaaatgtgcctcccttgagtttctgaatgcttaataatccccacttgtatctgaaaatttgaacttgacattgctgttgaaggattccaatttccagccatttccttgtgacgaacgcaataagcacaggatatctcacttttttacattggctgcttttcccaacaggtattctttgccgtagttggtgctggtgggagtct

SEQ ID NO: 60961 - DNA, 1022 bp, Populus trichocarpa
  Intron number 1 from transcript POPTR_0010s16090.1 (locus POPTR_0010s16090) derived from phytozome v7.0 (chr-ID scaf fold_10; pos 15133060 to 15134081 reverse strand)
gccaaagtttgtcaaatgtgattactctgttcaatatgatttacatccgtttttacagcatgtattcatcaccaggaatgatttctcatgtctaacatcaacgttaaatcacatgagaagctatcaaagtttcaatttaaagactagatgcagtttcaatctaagctgttcatcttcttccagtgtcacaccacgagctatggtacctttaatcggccttgcttaatataccatttctgtccaagcctaggaatctctcaagagaagaacaatagatgcacaaatcttcatttgaaaaattaagccacgcagcatatggtgctggaattttctctctgaggtatctcaaagtaacaggttttgtttttccaacattatttggccatgcatgtcattttttggagaattttttatggtcctgcgtgcttaaagtctacaacccataaaatacttacattgcaagatccatcaacgtgactagcattatctagattggtttttttacttctatctctacttctatttgatataatctacagcttctatcaagatccatcaatgtgattcggtacttgaaaccacattaatggttgtatttatctcacatatttgaatctatgacctttaaattccagatttctcctctccatattagtgcattcaagtgcatagaaacaatgaaatagcataagctaggtgccaaaattattttctagatgaatctctcaaagaagctttcaattaatttgtcatgtgcagccaacatttctttatgttgttgttaagttcaagacatatgtcacacataaatatgagactctggtctctctccctgtaggaatcatcctccaagccatcattatctcaaaggtttgcttccttgccttcaccgaaaagcaaattatatggcttctaaatctcaagttcaagagagtgatatatgagcttgccctagaggatgccagtgggttaaggcttttccatttgaggcatccattaaggtagttgagctcgcgagaaag

SEQ ID NO: 60962 - DNA, 456 bp, Populus trichocarpa
  Intron number 1 from transcript POPTR_0010s13330.1 (locus POPTR_0010s13330) derived from phytozome v7.0 (chr-ID scaf fold_10; pos 13178327 to 13178782)
tactgctcggtttcagccagtaagtgctccttttttcctctatttgttatatgtacaaaatctgaagttacaggatttgatttctattggagttgtaattctgttttttgcggaaccaaagcatattgttgagaaatcaaaaggagattcgtatttcattcaaatccttagtgaaccaaaacatgtccaaggagtttgcagtgtccacataaaaagtttttttttcttctaaaactagaggtaaaggatccttcgaatctactattcctcggtcggtgtgtttttgtgtaaagatcctctattttctttttgttactaaaattttgattgactggtatagaatcttaggagaaatagaccaacatctggattctgtatgttggaaattgtacgctcaaattatttatgttgtgtgtgacagatccggagtatacttacactatccaagaccagaat

SEQ ID NO: 60963 - DNA, 789 bp, Populus trichocarpa
  Intron number 1 from transcript POPTR_0003s19680.1 (locus POPTR_0003s19680) derived from phytozome v7.0 (chr-ID scaf fold_3; pos 18342248 to 18343036)
tttaggtgaatatgcaatgtttttgtcccttaacgactcattttctttgttccagtatctgaacaagaatgatatatactttggtgatgacaatgaatcaaactgtgattggaaaaataaacaaatctggtgaaggcaaggatctaactggtgtattcaacttagatgatcacaacattgaaaggctcgatcttgattgatgattgcaaggggaagttttcctctccatcttctcgaataaactatgatgctaccacacctagttgatgcttccctcttgatgaataatagttattaaatcgggtgtgatgctacaaattgacttaataatctacaatttaaaatttaattaagattcatttaaaattattttggacattgactaggccaaatccaatgaaaaaatatcggatcaattccatgaatttcttttgaaactttgttttaagaaatttgttttcttaatttttatgattgaaaagaagattttaaggcaagggatgattgggtaataaatgttcagtttatagggactcaatagagaaatagttttgtttgggtatccaattgacaaatatgtgataatcgagggatagatatgtttttgatcaacttttcacggccgctaaatctaattgtaactgacccctgttttagcgggaacttttttatttatttccctccgactgtggatttgtaatccctgcaaaggctcacagatcatggaattttttttttgaggcaacagagcaaggtgtcgcagccattgtttcaagctcatcttccata

SEQ ID NO: 60964 - DNA, 471 bp, Populus trichocarpa
  Intron number 2 from transcript POPTR_0149s00220.1 (locus POPTR_0149s00220) derived from phytozome v7.0 (chr-ID scaf fold_149; pos 52656 to 53126)
cagttgaaacttgatcctgtcacagtggatcgttggtttctgttgaagtttgctttaagatactccagtcaaagatcctgtttttagtttatattttcctgcaataataatagcttgtcctagtcattaggaatttgttaatctgttagtttgttaacagatcatggctttattttagttttttcagttgtaatttgcttctataaatatgtacgagattgctgtaaaaaaaaaaaagcaattctattttaattcattcttaataaaagagtgcagtatcaatattgttttctcttttcttctcttgtttttcaaacacacttcaaacatgtcaaactccagcaactacaagaaacactttcgttagatttcttgctaataaaacagtaaaaaacagccactatacagattaaaatctggaaatcttatttactaattcactgtttttaattcaaacactttcagtttcgg

SEQ ID NO: 60965 - DNA, 675 bp, Populus trichocarpa
  Intron number 1 from transcript POPTR_0002s14470.1 (locus POPTR_0002s14470) derived from phytozome v7.0 (chr-ID scaf fold_2; pos 10761552 to 10762226)
aggtaagctcttctttctttaccagtttttcctcttcttgctttctttcaaactgaagtacgagagaagatataaagttggatattcaagctagttttggtgggtaattaggggaggcaaagtaagttgagtaaaaaactactaagctatcatgttagttatacttgtcaggttagataatgaaattgatcatcaactagagttctaaaatgaggtcaaaaggttttttgaaaaatggtgagtcaaccgagttgacccaatacaaacgttttatcttgatgaaatttagaaataacagcttcacgagcaattaaagaaggctatgaaattcatgagtttggatcctacataaaaaaaaactccatgtaatttttatgattggctgccgaacagcattcttccaagactagcgtattttgaacaatttttattacgccgcttgtcctctcgaatcttgataattctttaacattttatgtctcgaagaagatatttgatattcgaaaataaccttgtacatgggaatcctgaattatttttttataccaagataaaataaccttgtaagagtaaaatctatagcaacttttgaaaacccgcaacagtgggccagcgaagtaattacagaaaatctgtaaatgcaggagttaaagcagcggattcagaaagtgattg

SEQ ID NO: 60966 - DNA, 1025 bp, Populus trichocarpa
  Intron number 1 from transcript POPTR_0012s11250.1 (locus POPTR_0012s11250) derived from phytozome v7.0 (chr-ID scaf fold_12; pos 11776347 to 11777371)
ctcttgttaaggctggtatttattttcattttctcacttctttttatttgggttttttcgagctctttccgaattgggttttttattttgttgattttttatttttgtattagattttgagatttattgggattttttttgtagcttttggggataatgattaggtagtgatgacaatggttgattattgcagtgtttcaagtagtctaaatttgtaatcttagtagttagttaaaggatttccttctttaaaattgttttctaagcagtttggtggcttctagatgtctgctttagttatttgagggaaatatatggaagcaatcgagaagctttaagtgtggatttttttttgaagattgtagttgctatagggtatgtttgtagggcatgaagtgcttaagaattgggatataagttaggacatgctgtatttgtttgcttcaaacttgcggaggcacagcccctgtggttctttgcagtggaaagatgtctttggtggtactttacttaattcctgtatgagtttgcctgaaatttgctggaagcacaaaaaattatctggttttttttgttaaaatggtgttatcgattgtgaacaagtcaaatctttggtgaaccttccttaatcaagcagaagttgctatggcgctttacaaatcggagtttttcttgatttcaagtatcccttgttttcctcagtagttgccttgaattttttaacattgtaggattttagtcttggaatgttatagaacttggtatgccatatctgcccctatcctatgcgtgtaagtacaactgcgctatttcactgtgctgtttgtaattgtttcttaattcttgagttcagataattatgatgaaaattaatgtttatgcgttgtgagatttttctttcttgttctttttccccaagctttcagtgcaagcaaagaattcactagcccagttgccttgaattttatccttttcttttcatcttataagccccagcagtttcttgtttacagggattgaaattg

SEQ ID NO: 60967 - DNA, 1016 bp, Populus trichocarpa
  Intron number 2 from transcript POPTR_0018s00915.1 (locus POPTR_0018s00915) derived from phytozome v7.0 (chr-ID scaf fold_18; pos 850080 to 851095 reverse strand)
gacggtactcattcgtaatgctctagaaggaaacttagcagagttccatggacttgtttaggcagctagagagcggcattcaagtagataggtttgccgcttgttcattaaggcaagcaaatgcatgcacatgccattaaagtctcctctggcgcagacatctcagtatgcagggaagttttggatatctatctatctgaagtgtggaatgatagatgaagcagagagacttttcggtgaaatgcccgctagaaatgtaatttcctggacatttatgatcactggctatggaaagcatggttgtggcaaaaaggcaattcgtcgcttcaacgatgcgatgatgtagtacggagtgtctttttttaatttctacacaaattaataaaactcagtttaaatatcaaaaattaattaatatataaataaatcatcctaaaattttatgaaatatttaatattcaagagatagatttaaaatttaatggcttgaaagagaaggtcacatgtcatgaaagaaaagaaaaaagaaatggaaaaaaaagattattatagatatattagagttcttttcgaatcttgataatacaattctaactacgtcttataattttatttagtgattttttaagatttagttagaaatattttgtcaagatttttctaacgatatcaaatatataaaaaaaatttctcagtatgttcctagtctttcttttcattttatttcctttttatttatttattttatttattttctttcttaataattgaattttgaatcttgtttttatatcattaattttttataaaattttaaattaatttttattaaaattaattaatttataaaaggcatgtaacatgactaagcaaccattatttataaaataacagttattaacaaaatcaatattcaaaaacacaattatatcgtgtgatatttacaaataccttttcaacctaccattcattcttccaaagtttttactaaactgtgtaatttgttttataataaa

SEQ ID NO: 60968 - DNA, 696 bp, Populus trichocarpa
  Intron number 1 from transcript POPTR_0016s09930.1 (locus POPTR_0016s09930) derived from phytozome v7.0 (chr-ID scaf fold_16; pos 8014550 to 8015245 reverse strand)
tggcttctgctgcaattgtggaacactcattctatgtaattcttcttctttcttatattactactaagatgttttgttgacgttgaggaagttgaatcgtggtccttgtatatagtttcccgttttggtaaattatctcatgcaaagcttgcattaggattgttgtctttaattaaacgatatacgagtggccaggatatataggatggtagccctgttataccttgaagtttcttacataggaaaaacattcatcaaattagccatacccttttgttttatctcaagctcctcaaaatcatgttcacgcttaaatggaagggatcgagggaaaagatactgctacctttgatactgcaacgtcccaagattcaatatccacttcttttggtcacaaaagaggctcaaaccgagatatcctactagaaaagaaacgtgggtgtcaattgaactacgttctttggcaaattcaatacacttcttcccacgatgatcatctaagttacggaattttttcatccactttggaccgacctagattgcatatcctagcaatattagtctgacgtcggagtgtgtatatatagaggcatgcaaagatattttctacttgcttaaagctttgcagattgatgggtttaatttattgtgaatgttttaggtgcaaaaccttacagttcgtcggctgtgctccga

SEQ ID NO: 60969 - DNA, 732 bp, Populus trichocarpa
  Intron number 1 from transcript POPTR_0013s08490.1 (locus POPTR_0013s08490) derived from phytozome v7.0 (chr-ID scaf fold_13; pos 7665428 to 7666159)
tcaccgtctttaagcgaaggttctcgttttctttcttttctttctctctgttttttttttaataataataataatagtagtagtagtagtaaaaaaaatatatattaggaattaggtttgtgtggtatttcattgaaaataaaattcatgcagaaaagaagagagagaaaaaaaatgcaattcacgtgttgcttgccttggtggtgctagttgggaattctctgttttaccctctgtctgtcgtagattttgcttgatcgtgtctgaatttgttcaatttccagcttgtttctgtataaaaacataggtttcgtttttttttttttaaatcttgtaggtaggaagaaattctggtttttgtcggtgcttttactttgtttggttaaacggtcggaattcttacctctgttttaatcactgtaacattttttttttaatgttttgcatgtaatgaatgacaacaatttcaacttttcaagaatctaacaagtttgtttttctttattatgcaaaatcccaagtatttatccctcactgaaaacttttctcaatttttggaccctttactttctaattgaagcaactctacttattagagacagcgaaaacagaattctagagattataggaggagattatggagaaaatgattgttgggaaattattctccgtttctccttgattgatatttctcatagatgtttgaactcagttatccagtttcattttcag

SEQ ID NO: 60970 - DNA, 767 bp, Populus trichocarpa
  Intron number 2 from transcript POPTR_0013s08490.1 (locus POPTR_0013s08490) derived from phytozome v7.0 (chr-ID scaf fold_13; pos 7666287 to 7667053)
ccgatttaatcacccccctaatcggaagctggtatgagctgcagtgttcttggaacacaaacactactgtaattttactacattttcaattagattcttagcttgaatcaatgaaggcaattgaactgagcacctgagtctttgcagattgtgatttctggcttatttttatagaaatgttatacaattattacataaatttctatttggttgtttacaatcagcattaacaattatatatacttaactgtacttatgtactagatttcagtggttctattatcaaataatgtttctgaatgtagtctgcttgtaaaagataatttactggtaagttaaagcaaaatgcattgaactcccctattagggaagtatagtcaacatcctagagaaagctttctgaattttctattttcctttggggtgtatttgtttgcttttcccttgtcagtctatcacacatccacacacctagctgtgcatgtgtttctttgtctgattgaatgcagacatatccaataatgaatggttggatgtgggaatggggggattttttgtattgacaattgttttccatatgcatatatattggtgagaatgtaaatggtgacctgcatggagatgcacaatcgcaatgcatgttttggcatgctcattttcacttagcatttttaatatttacgtttccttgttatacaaaaaaaatcacataagattgatattttgaactatgatctgttgagttccaggcaattgcagcagccagg

SEQ ID NO: 60971 - DNA, 1025 bp, Populus trichocarpa
  Intron number 1 from transcript POPTR_0001s38660.1 (locus POPTR_0001s38660) derived from phytozome v7.0 (chr-ID scaf fold_1; pos 37851490 to 37852514)
acaacttccctaaaagggtactctttttttttttttgtctgatcgtttccattttgatcttgcatttctgttttttatatttttttaattggttctatttagttttgattggtgtttggtcaattcttcttcttcttcttcttcttcttcttcttctttctgtgttatttgggttttgtttgtgtttttgacaaatgggttttttggattctgccagattttggagttccctattttttgtactctttgaggttatatatctatctatcaaattttgaatttgatgactgatccatttgttttcggctataaaaattatgttgttgatttctaaaattagctaacaatttgttgtaatgttatcgttggattgaatatcataactgccattatgatttcaacgataactggggttttaggtttttatatatattttttttgttaatcattggtcaatatgattttagctgggtatgatagaagggctttgttatcttaatcagatcctaaattaatatggttggttgaattagaagataggtttccccattttacgtcttaattcgattttgtagttcttaccgtgtattaatccttctttataatattaatttatatgttatgaagcgggtttctgatatatggtatgttgtctttgagttaattcgattttataatattaattcgattttgtagttcttaccgtgcatttttttttcttaaccgtcggtaggatcactctgcatgtttgttagttctaagctgctcggcctttcattcaaccggggatggttttgttccctcttttttctgcgtgttttttttattaaagttttaagattttggcaatttcagcaaacatttctttttcggaattaatatggcaacgccactggaaaactatgagagaagcttttgtgtcatactactcttttttatctgttctttttcttggttatgtttgctgaaatcttacttgtgtttttacagaaaagaaataactttaaccaggggaggaggaagtt

SEQ ID NO: 60972 - DNA, 408 bp, Populus trichocarpa
  Intron number 1 from transcript POPTR_0004s18640.1 (locus POPTR_0004s18640) derived from phytozome v7.0 (chr-ID scaf fold_4; pos 18457511 to 18457918 reverse strand)
gaagaacgagaaacgaggagacgctgatttgtctggtaatatttttttcttcttatttttgtaggttttttattcttactccattttttgttaattttttttgccagagaagatatttttttattttcaattttttttaaaggaagataaagagatggattttgagattttaattttataattctggtccctcaaaagagagagagagagagattaaactctcatttattattgtaaaaaaaagaatcaaataatttttattgattttcttaataaagaattataatgcaaattgtcaagtgaaggcctaattgtgtgccagttgaagatttttttttatccattcaatatagttctcgatagttcaatattttggattttttttatgtgcgtactgcagaggttgaa

SEQ ID NO: 60973 - DNA, 666 bp, Populus trichocarpa
  Intron number 1 from transcript POPTR_0006s02570.1 (locus POPTR_0006s02570) derived from phytozome v7.0 (chr-ID scaf fold_6; pos 1660016 to 1660681 reverse strand)
gatttgggaggtcaaaattatccaacgccttgtctgtaagtgctctagtcccatcaagattttctctgccattgctcttatgcatggtatccatgcttctacttactaggtgttttccgtcatttccactcgtttgatagactgtggagctcttggtacatatggattgtgaaggatgtgaaaagagaatacgaagagcaatctcgaaaattgatggcaagtgtttgtagctttttttcagaatatcttgtttagtctttgcagttttgcatcttagtttcattcggtttttgtattttttttttcttacacaacaaagtataaggaagcatggagcccaactaagtttttaactctcttggcttggcttcccagaatgacaccaacttagctttactattagttcactcggtttaatctagtcgattcccatcagtttctttttcaaacttagctcggcttgtatctttggatcgatcaagtctcggtttgacttagcgagccgggttgattttaatagcaatgatctagctagttcgatttgattttgatcaaaatcaaactagctacttaaaagagaatataaattgccaatgttcttcttcttcgttttttttttttttttttactttgcatcatgcaggtgttgatagcttggaaatagac

SEQ ID NO: 60974 - DNA, 994 bp, Populus trichocarpa
  Intron number 2 from transcript POPTR_0017s02140.1 (locus POPTR_0017s02140) derived from phytozome v7.0 (chr-ID scaf fold_17; pos 1562157 to 1563150)
cattaattagacagagcaggttttgctatggttcgttgaatggagaaatacctcctcaggattcttttcttgtccctaccaattctatttgtcgtttggaatattactaacgtcccatttgtttgttgaaaaataattttttttgaaaagtaaattccagaaaagaaaattccaggaaaataaattatttttcgatgtttggtagtgtaatgaaaaataagttggaaaacactttccagtgtttggttatgtcatagaaaattagctggaaaataacttattaatgttttatttttttcaaatttattaaaataatgagggataaatgttacaaattaaaaagttgaatgggaatgaaattgaaaaaaaatataatttcataaattatctcaaataaaataaataataatcaaaataatagagatcaaatctaaaaaataaaaaaattgaaagatgaagaaattaaaataataataattaacatttcataaattatttcaaataaaataagtaaaaaatgataagggaaaagtaaataacaattataaaaataaggatcaaaattaatataaaaattatattctaagggatgaaattgaaaaataaatattcaaaacaaaatatatatagaaatcaaaagtttgaggaccaaatttgatataattaacaaataatatgacatttctaaatttttcacaactttaagaaagtgtttttcgcccaaaataaaaagaaaacactttcctggaaaccaagccaaatttttatttgactgtaaagtgttttccgttgaccagaaagtatttttcgttgaccaacttttctaatgacaaacaaacacagcctaactataacttaatattgctatatttttagttgcattactacttgtaccctttatcttaattccatgtgcttcctttctggtttatgaatttgctgattttatacatgatcattgaatttttaaaattttatcttttcatattctagt

SEQ ID NO: 60975 - DNA, 640 bp, Populus trichocarpa
  Intron number 2 from transcript POPTR_0019s04940.1 (locus POPTR_0019s04940) derived from phytozome v7.0 (chr-ID scaf fold_19; pos 5145981 to 5146620)
accgatcccaatgtaagaaaatcccacttccacatatacgtatacataaacgtattttttgtttacgtgcgtttcacttgtgtgtatacatacaatttacgagaatttatgcatgtatataaatgtgagtatctatacaattgatgaattttcatgcatgtatataagttttaactgttttacatttgcatgcatttatgcatataaactgtaaattttcttacttttagggttgcattagttgaaaataaaattctgttttaagattgggcattgtgccatggccaatatactcatggagtagtactggtatggttgtgaaagtttttttttttttgtagttttaatgcttaattattgcacattttcgtgcatgtatttatataaataagctgtagacttttttttttttttttttttacggtttcattagttggaaaaaatagaatttgagttgtcatgtcggatataaacgtgtgcatgcgtgggtatttgtgcatgttacatgttcttgtattgcggaaaactttggtattcttctgtctttaagcctgcatatagacagcttgtgtgtgtgtgtgaatgtgcatggttaatttttttcatcttttgatttgttggtgttttatgggtgaaagca

SEQ ID NO: 60976 - DNA, 488 bp, Populus trichocarpa
  Intron number 1 from transcript POPTR_0004s14320.1 (locus POPTR_0004s14320) derived from phytozome v7.0 (chr-ID scaf fold_4; pos 14773824 to 14774311 reverse strand)
gcagcccaaggcagggtgcaagtttccaaggtacacactgtttttttctctcattttatcatcgaagtgttaattatatccatatataatggccatggctgcttaattttgtgattggatttggtaactgtcgatctgtggccttgcttgctagctgatcacttcgcaatttacatacatcacgtgaaaaagacaatacaattgcaagtgaagacgatgacatatatcaacttgtataatttatctcaattttgaattttttttttttttgtagttaattaagtataattttatgttgaaaagtgacacttcaacgtattaggagagtcctttccgtggagagaagggctctgtctgctgtcaactaaatccatcctttgagctaattcttaatttgttgttctttagcaacacaagtaatttgacaagaatttgctttccctttaaaggaatttcgtgtttgctgatggatccatactgtaggtttg

SEQ ID NO: 60977 - DNA, 744 bp, Populus trichocarpa
  Intron number 1 from transcript POPTR_0011s12440.1 (locus POPTR_0011s12440) derived from phytozome v7.0 (chr-ID scaf fold_11; pos 15180977 to 15181720 reverse strand)
attactggcacgtaagtaaaagctcattattatgtgtctttagaacaaatcaaatcataattggttgctttatatgttgtttagagttttgtttttattgttgtcatgctacttatgaaatttgttcctgttggacaatacaagggtatctccatttcttcttatgttcttcatgcttagcttttcttgagaaataaaagtagcttcaagttaatttcccttttcttggctttgaagcaatatgattttcgtggctttcacctttagctttggatttgtgtccttttgctcaacttttgcaattcagatctgattttttatggaagctgaaggctttgtctaggaggctaagactgctagaaaattgtggttatggtgataaaagtttgggacttatgggtcaaacaaacatatgcagcttgatattaaggagttgagacttgagagaattcttggtttcttgtacagaagattcattaaaacccttaattgctattctggttgttttaattcatccatccaaaccttcttggtgtgttttaaatttaagatgttgcatgctattgatgttaacttttcttttttctcatttccgtaagcattgcagagtgacataattggatgtgttctattttcttgatgtctttttgtattcctaaattctgtagttgtttatccactagatcttcaagatctatttttcacttttctactaggggtggacactctttgaaatattaagat

SEQ ID NO: 60978 - DNA, 793 bp, Populus trichocarpa
  Intron number 2 from transcript POPTR_0003s02060.1 (locus POPTR_0003s02060) derived from phytozome v7.0 (chr-ID scaf fold_3; pos 2056968 to 2057760)
gatctagaaggtaataatgcagccaagcattggatttctaaacatcttaccttttctttttcttttcgcattgttatcaaactctcttacattttattgctgcatattgctatatatttcgccttgctggaaaaatctcatgatcaccttcatgatgctaattctgtaatgcatgtgaagtgtttcatccttaacttgttaaggaacaaggactgtgatgcatggctattttatattttatgattgagatggtagattttaaagattttcctgtttaggagataagacgtcactttcttgcttttcttccgagagagtatttgatccttttttcgtataaaataatgttgccatgcattgaatttccaaatatcttaccttatgttttttttgtcgcattgttatcaaactcttttacattttattgcggcatattgctatatgtatggcatgctttaatcaaaaagttgagtaatcgatgaatgttaggcaagaaaattactgattatttttgttttctgcctccttttctttctcccaccctgaaaattgtcatattatttttgttttcagccgcctcttcttcccccaaccctgaaaattgtcagaggacacttttatgctttgaatcaaatccatcctaattctttcactcataactttatatgtgaactgccgatgtttcatttgtcttccttgttcagtgccttctttttttctttgacatggttttcctttttgccttttatcttgaacagcatcccatagtatccccactcaagttcagaatcat

SEQ ID NO: 60979 - DNA, 624 bp, Populus trichocarpa
  Intron number 1 from transcript POPTR_0015s11400.1 (locus POPTR_0015s11400) derived from phytozome v7.0 (chr-ID scaf fold_15; pos 11975914 to 11976537)
gaaaggcagtaatgtaagctaaattcaagttttaaatgatgggtttttgttctttttggtttttgtttaggaaagtgtgaagctttgtgagattgaggataaagattggattttggggtgtttaacaattgaattaaggagaaaaaagacgggatttttctatttttttggttgaagttagtggtcaatttgagttatttttgcttgcaacttctggttatggttcacttggttaattattttgcaaatagcaggctgattgtgaaatgggtagggattagtttgttgaatgagtaactgaatttgggttgcttgcagctgttttttttttacttttgtgaatcaaattctagattcagttttgtatagaacttatgctggggttaatgaaaaaataactttcttatggtatcatggccttttctgtttgttgattcaaagatgtgaaagcataatgtagatattaccactatttttcgatttttttttttattattattacgcttcgctagtgttttttcttttctttgttcatgttggtaatgggttgataattgcgtaacgccacagttggttgttttgtttgcagacatttttgcttcaggggaggcttatatttggacc

SEQ ID NO: 60980 - DNA, 542 bp, Populus trichocarpa
  Intron number 2 from transcript POPTR_0015s01380.1 (locus POPTR_0015s01380) derived from phytozome v7.0 (chr-ID scaf fold_15; pos 848969 to 849510)
aggagttctgtgccgaccaaaaattctgaatattcgtgagtcttctcacactaatgttgtttaatggttaatttttttatgtgggttgattcaagtttgattcttttatgatgggtcatttgaattttgatgcatgaccctgtcttatgatttcttgtggaagttttggtgtgttttttgatctgggttttgtgtttttatttgatttatgatggtgttttgcttttttgaagtttgttgttgaatctccattttctttaaaactttcttttgaccttgatttttttgttggtttggttttcgagaaaaaatagggaagaaatggaattttatagtttaatagttgtgtagaattagaaaaagtagaagaattttgacttactcaactcggcttcaatagttcttgatgcttgtgttgcttagcaatgtaattgggtgtggatagaaaaacaagtagttgccttgaatttagaagcaaaggcgtgtgggttccattgaagatttttttattttattttattgctgagtgcagaacaaaaata

SEQ ID NO: 60981 - DNA, 476 bp, Populus trichocarpa
  Intron number 2 from transcript POPTR_0004s24330.1 (locus POPTR_0004s24330) derived from phytozome v7.0 (chr-ID scaf fold_4; pos 23013263 to 23013738 reverse strand)
aatatattctatttcgtggaagtgatattaaggtaagccggggataattatctgcctctcgtatggattttttttccggtggcctttttgtcgtagcttcatgttgttacttctgcgctttaagaattgaatggcttctttattcagttattttatatggaatttgagcaactgattagcatcatgaattctcattcgtattcctgttcggaatagaagatgttaggtttcagcttttctttcctttatttgttgtatgatttatagataacgatgcttttcatactcaccaagtagccatctaagtgtttctaagaattttgatatttcaaagcgatgctatcacacatagagtttctgtttcttgtgctaagtgtaggaacactgttttgtgctgtgcatgtaaatgtgcttgctgcaattaattactgctattatcaggatttgcaagtgcagtccccacctcctgaccaaac

SEQ ID NO: 60982 - DNA, 395 bp, Populus trichocarpa
  Intron number 1 from transcript POPTR_0001s47170.1 (locus POPTR_0001s47170) derived from phytozome v7.0 (chr-ID scaf fold_1; pos 47460161 to 47460555 reverse strand)
attcaccaaaggaaaggtcttcttcaacaccagggtttttccatgttataaatgcttggaaatatgagtagggagggtatggtcaatctttgattaaattgctgttctatacttcttctattagactattaagaaacatttctatgttcaaaaacaaagacaatcaactttccttcttcttttctttgtatgcttgtgttgttcgatcattgcagctgaaatcaaatcactagtgttgttaaatagtcgaaaaataaaagtttttcaggtagaaaagcatgagattttaggcagaaaaaatagaggctgaatctttgagctaaatgcctgccttttcttaccttttttgtttccacaaagttgtattttatttcgggtcacatttataaaacctg

SEQ ID NO: 60983 - DNA, 607 bp, Populus trichocarpa
  Intron number 3 from transcript POPTR_0003s12380.1 (locus POPTR_0003s12380) derived from phytozome v7.0 (chr-ID scaf fold_3; pos 12970979 to 12971585 reverse strand)
gcaaaatacaattgcaagaaggtatatcagtgtataagtttgtttaactatttttatttggtggtttctctctgtggagcctgccactcatttacatggaaaccaactgcaatgccagaagaattttgatattaaccaaaaccaatatggaagctactgttgctgattgaatttcaatggatcaatggcatagtgggactgctttatgtacttgtttttatttattgcataatatctctgggagagagcatttttacatataacaataatttcgtaaaggattgcatctggtgatattgctattggcttatctgcacaataatcggtggtcgagaatctaagagtttttgacaaacttatttcccttttttcttttcgttcttcatttagttttatctaggcttgattctaccacttttttcatcttaaatagaggtacttttacctttatttagccttaaatgtcatacatcaatttaagaaacattttatgattgtaaaggagctgtaactttcatttgttgttgactggttagaagactcatgctttttcatcactggaacaacgattttgatttttgttttaaactttttgttttgtttgtag

SEQ ID NO: 60984 - DNA, 637 bp, Populus trichocarpa
  Intron number 2 from transcript POPTR_0009s02370.1 (locus POPTR_0009s02370) derived from phytozome v7.0 (chr-ID scaf fold_9; pos 3119688 to 3120324)
ctgctgctcccgttgaagctgccccagccaaggaggtttgcgtcttttacttttttcaaaagttttgccttttaatatctgaatattgatttctagtttttgttttcaattgggtatctcaaagtttgaatacttgttgtgtaatttgattagcttttgctgcatataaaaccatttgcaattgggagtaaaatgatgttatcgatttaaaatcccattagcttattacccagtaaaggatgagtcagttctaacttaccacgttatggttgaaaattgaagactttggttgcaaccagcaagaactgttgctgtcgttagtttaaatcttcactagttttttttatctgatgtttctagaactgatataatgataggtacttacagtttttgactgttttcttacttgaataagaaaaatatttcatggtcacaatgataggtccaacgataatttactattgattcacaaatcacatgaatttgcagttttgtactgtgctttaacttagaattatgaacacccaatactttggttgcattggttcaagtcacgagcgaaaatatttagggaagcctggtgactttcttgcattgaacttggaagttttccttgttctgtttcaggctgctggtg

SEQ ID NO: 60985 - DNA, 930 bp, Populus trichocarpa
  Intron number 1 from transcript POPTR_0010s25100.1 (locus POPTR_0010s25100) derived from phytozome v7.0 (chr-ID scaf fold_10; pos 20952151 to 20953080 reverse strand)
ttgtaccaaaaggaaaacttcaaagaaggataaaggtgaagttcttattctgattctacttcaaatccatctaagaaattaagtttgatgtcattgttccttgtttagggtttcttaatctgcatcaacatatttcagcaatctaacaaccagtgaaaatcacatagcaaccattagtttaggtctcgtcacatatgtagggctattccatgtgtttaaaatcattttatatttgatcctcatttctccatgatctagactcattccaagctgacagcatgtgatgttgaggtcaaccccccagcagaatctagtgccttgcttccatccttcaactcctagacactgacaaaaagcacaataacttgttacaaaagtataaaaacttgatgactgcagcaatggtaaattaccattctgaaaaaataaaattgtgaagtaataaagtctattctcttgacaatctacttttaacctattttttgtttgagcttccatgtcaacaaatgcatgaggttatttatgtctaccagccattcaacttgtttcttgtcctaaacctgaaaagggtcataatttgctttcaatacaaatagatatagctttcacctcaagggaaaaggaatcacagcctaagaattgaagcttgactgtgaaattgtttatgctcattacagtgttacgtggcttgatgcaggtgagctactgagatcatgtaaagtccttgtatctgaattttcttctctgcgagcagggttctagtttatcacaggggaagcctacaaccaagagatgaagaggtgggattagtaaggaaaagcatttggattatggtgtgatgattatgtacttgatgtttttgtgttgctcaaattcgatgattgcatagaagggaagggtcactgtcttaagtttcagataccattaaga

SEQ ID NO: 60986 - DNA, 288 bp, Populus trichocarpa
  Intron number 2 from transcript POPTR_0001s38460.1 (locus POPTR_0001s38460) derived from phytozome v7.0 (chr-ID scaf fold_1; pos 37579511 to 37579798 reverse strand)
tacctgtttggatagaggaagagaaggtgatttaactcttctcttaatcagtgagttaatgaatgcaatagtacactttaactcattatatttttttctttagtttttagtataatcaattaagatttctctttaacaataatgcttaatacaattcaaagggggcaaaaaaaggaacacgccaatttgtaaatgtcctgatgggaaatttttatcggttttgaattgaatgaaaataatgggaagcatttcttgctgtttgtgaatttgtttcacatctaagtatag

SEQ ID NO: 60987 - DNA, 1022 bp, Populus trichocarpa
  Intron number 1 from transcript POPTR_0006s25530.1 (locus POPTR_0006s25530) derived from phytozome v7.0 (chr-ID scaf fold_6; pos 23927568 to 23928589 reverse strand)
cagcttccggtgatctcgtccttcttcttgttcatgtacgtctgatatcttcaaatctgcatattcccttttgtgtatggatttaatatgtcggctaatttctttaacatgatctgttggaattagacaatgccttttcatttcaccttttggatgttgtcggtggcacctcattttttttttcttctttctttgttggaattcttcttcttctgatgtatttattttctattacttttcctctgctgatgatgtcctgtgttggtttggttgctagttacatgatttagatttgtgtttctcatttacttcagtttgtttcactgctgtaaacttcatgaagttgacagtattgatggaagatatgcaagtagttttatctcaagtgcaatgctagattcagtttgcttgccatgtcttggtgatgactgatggcgtgattccaccagatataattaataaagttctgggaatattgcatatatttctgaagatctagttatagtgttctgtctttttttttggaattatttcattttgagcttttgaaagggaaaaattatctagggatcagtaatttgcatcttattagaataatgtattcaaactttggcgtgctaggttttctgggaggctatggcgatttatttgaatattgaattcaaataaatgtagtagaaagaaaaactaaaaaaaaaaaaaagacgaagtagtgcttaggataaatggcgattatgtggtgttatgcatataagaggacttggagtcttatctgtggaaaatcttttagcttaatttcaaattataaatttaggttctagctcatcatatcatatttttcaatatcaatgccaagacgtttttgctttggctctaagattggcatttattttctgacagagttggcatttggtatagtgtttacaattttcgtactaaagctagatttttggagcttctgcggtgctgacagaacttattttggtgacccttttgtttggatcagaagtcctttaaggttc

SEQ ID NO: 60988 - DNA, 379 bp, Populus trichocarpa
  Intron number 1 from transcript POPTR_0014s16510.1 (locus POPTR_0014s16510) derived from phytozome v7.0 (chr-ID scaf fold_14; pos 12583489 to 12583867 reverse strand)
attcaggttgaacatcacatatacttgtcactcgctagcttagttctgcagtttagtaagtagtctagtcatgaaattacttgttattctcaccagtttaagtttcctagaggaacgttctttattttgatcctctactttgttacaactttctgtttctcttcatcactgtttacagcctagtccactggatgaatcacagttcacctggtatcaccaggttaaaacaaataaatctgcttaatcatctcccatctcattcgcaagtacctaagatacttaaaagttttaaaggctattttagggcatcacgaattcatgatcaagtgaagtaacacgatatatatatatatatacccttgtgtttttttctgtccag

SEQ ID NO: 60989 - DNA, 687 bp, Populus trichocarpa
  Intron number 1 from transcript POPTR_0009s17200.1 (locus POPTR_0009s17200) derived from phytozome v7.0 (chr-ID scaf fold_9; pos 12936214 to 12936900)
ttcctattttaagctggcattaaattcaattcaaggtacggaaagggattcttccttcattctgatattattattattattatcatcatcatgtcttcttcaatttatcatcataatctatgctaccgcttctgcttcttcctttttttggggttttttttgtgattttctttaagttcgctgcatacttttattattattattattattatgtcttcttcaatttagtttgttaattaatccatgctaccgcttctgcttctttttgtttttcgtttttttttctttaagttcgatgcataaatttattattattattattattattattattattatgtcttcttcaatttagtttgttaattaatccatgctaccgcttctgcttctttttttttttcgttttttttttttattttctttaagttcgatgcataaatttattattattattattattattattattatatttgctttggtatctcatcttcaatgtgctccgctagttagtttcactaccatgcttatactggttactgatacttgagcatgagcatcattattcctttctttttaagggtttgatttttggcttcgcttttcaatttcaagcaccgtgctcttatgtattatctaattaattaattggtaagcaaatctcttaggttgtttcttttgatcaag

SEQ ID NO: 60990 - DNA, 1036 bp, Populus trichocarpa
  Intron number 1 from transcript POPTR_0005s19710.1 (locus POPTR_0005s19710) derived from phytozome v7.0 (chr-ID scaf fold_5; pos 18681691 to 18682726 reverse strand)
ggactcagaccggaactgcggagggttttgctaaggtaaataatgacaattgttttatctaaaatttagattgatctagaatcataatcataattaaaagctatatctaactgcttttagtcttaattaaaaaagaatggctgatggttatcctgttgtttttctgtaatcttgatcgtttgtctctgtttcatcctctctttttttgtttttgttttttgactagctgcgttaaagtgggtttttaatttattggttttcctcgagaaatgttgtcctgatattttctttgaacagcagtaagttattatttttttattgtgaatcagatagtagctggatatttttcagctaatatttggtacttagcttaatctctttgaattgtcagtagtttttgattgattggttttgatgatacattaacatttatgcttactgcttttctacgtctttgctgtcttgtggtaccaagggtggcatttttcatagttttagcaaagctttactgtttatgatatacaatcatagtagatgaacttttgtgatgttagacgtttcaatgggggcaacagctggtgccaaagcatggcagatcacatgcctgatttaaaaaataataaataaacagtgggcagatcacattcaaggtactttagctgataatgactccgtgagaaatttaaggactgagcttcatgagatgtcggagcctcacatcttatctacagtggtagtcacaagagagtgctggaattgaattctactcctagtggtcatgttttgtcttggggctattgccaagtcactgtgctaggtgttttcattagagatagacacttttctgtcctctacatgtgttatttgttccgatatattcaattctaaacaatcggagcaggcatgagcattcgatcttcattttgatgtggtttatttaatgtgttactttgcactattatgcttttatttaaagtagttttttactaattaatgctattatcataggctttagctgaagaggtcaaagcaagat

SEQ ID NO: 60991 - DNA, 915 bp, Populus trichocarpa
  Intron number 1 from transcript POPTR_0007s05540.1 (locus POPTR_0007s05540) derived from phytozome v7.0 (chr-ID scaf fold_7; pos 3611891 to 3612805 reverse strand)
accgagcgtggtcgtggtctcttggccaacagaaggtactgatttttattcacattcttgaataatttattgaagttattattctcaaccagcagtattattagcttaatttagctaatcaaatagaacctacaagtttctgtttcatcctgtttggagggaattttttaataagcacttattgcattatttcggcttcttttttttatttgtgaaaaacagtgatcgaaaaacggttctttttttttaaaaaaattttaaattgaggaagatgttacatttctgatgcttatttagatattactcaattactattttatttattgagaagtttgaaagtgaatagaaggatgtgcttaatgggtgccattgtctgttattcattgcactcgaaatctttggcagtctgaatgtgttaaattttggatcagacacagcgttattttggtttttgtttaaagaaatgaaattaaagagtgtattctctaggactttcatttaaagatttatactttttggccttttggatttttttttgggtttataggaaggaggttcttaaacatcataaattgtatattttatatgttgtcaatggacttaacgtgttgtttgctttcttaccagctggtaacttttccttacttgattgttagtttcttacaggtttacccatcaaatgaaaaaaaataaaaaaatcagctggtgtgtgaaattgcccgcgtaaaagataagataaaataatatagaagaaagttggtcagaagaatcataaatccgtttaaaccagtttataaaatgccattgctcttgatgcttttacaaaagaacttccatagcgatgaaactacattcatataaaactttgttgttgatgcaggaaatctctactgcttgcagctggtgtcttggctg

SEQ ID NO: 60992 - DNA, 644 bp, Populus trichocarpa
  Intron number 1 from transcript POPTR_0007s04860.1 (locus POPTR_0007s04860) derived from phytozome v7.0 (chr-ID scaf fold_7; pos 3041477 to 3042120)
ttaaaggttttcatttccatcttcaatcctgttcttgcttttgattgctatgattgatctttctgttttctgctaacacgggaatttgtagacgagttttaatgttttattgtctcagtattgagattcgtatactgttatatcattttgtaggcagagaattttgagtcaacggaacataacaatcaagtgaatcatgtttgtatgtcatttgctgttaagattctgactgttaatttgttgttctggtctggtacagaaattaatcgctctgtttagacagaaattctggcaagacaggttgcttgaatacaactttctgaagtacttttgtttgtttgattatacaatgttcgcaatttaagtctggaatcagtgatggtgaaaccacatactcttaattagagtctggactagtttcactacgcttcctgtcctttcttcatcatttaattaaaatcagaattaccacaagcagaaacatgctattttgaagtcttgattaacacacatacgtccttgtgcatatgcctatgcttgcctatatcaacgcatatactcgtgtttgagtttattttcatgttgttgataaatggtatgtgcactatatgctaaagtttgcgtttgtttcttaagctcctcgc

SEQ ID NO: 60993 - DNA, 790 bp, Populus trichocarpa
  Intron number 3 from transcript POPTR_0019s05340.2 (locus POPTR_0019s05340) derived from phytozome v7.0 (chr-ID scaf fold_19; pos 5644049 to 5644838 reverse strand)
ttgggcttggagctaccaggcaagtgaagattattcctcactcatactaaccatcagtttatgaactgaagtttttttcttctttttgcttcatgcaatcagtatagatatatttaagttctgtccaaattaatttgatatttcatctagaaagaaaatcttctatcagttaccatagggtatccagatcctgaaattttatctgaaagaagttcatgtggtcatatttgtctgccaagtaaccaagaaagaggacgggtcatctttgagataggatgattaaattctcagtttgagacagcaatcattatcgcgagtgtcatccattgaaaacttggaccccttttcatctccttggagatttcacaaggaaagtagtgatatgatgacatctgcatccatccacaataggctatgatgatgtgcatctctatcagcagatagaattatatattcacttgtccttgcagttttacggctggcttttagtctgctattgatgcctatttaggtttatagttttgatcaattctgtgatgtaatgctaatttagatgtttgacatgtaactaataattgaattttcttcttcttattattcccatctgctgaaactgtagcaagacattagggaccaagggaagaaaaggaaaatgtaatggattttatttttgatgtaacgatatgtctcagcatatatctggcattcatgactaaacctgcatgtcatcgagcagggaccctaacctagttaagaggattggagctgcaactgcacttgaagttagagc

SEQ ID NO: 60994 - DNA, 443 bp, Populus trichocarpa
  Intron number 1 from transcript POPTR_0003s14140.1 (locus POPTR_0003s14140) derived from phytozome v7.0 (chr-ID scaf fold_3; pos 14290418 to 14290860)
ctgtgctagacttagcattggtcttggaaatcaaggtgatatttattttcagggctgatcttttttgtttttggaagtttttcatgctccatttttctttctttctttttgttacaacccattattttgttttatatttctagcaaatccattttatttgtctttttatacacatattaattgcctagaaaattgatggaaaagatgaggcctttgagtttctgctgtttagtttctatgataatgaacctgctcatcacgacttgcttaattgaccacataattgtgcaggaacgtcaacttaagttctagcacttttatgtttagggtctgttccttcgaagatttgtttttctcaataggggtgctaaattggccatttattttatgcatgatattcaattgacatattgattatgcgttttcagggaatttgactcttg

SEQ ID NO: 60995 - DNA, 566 bp, Populus trichocarpa
  Intron number 3 from transcript POPTR_0013s15070.1 (locus POPTR_0013s15070) derived from phytozome v7.0 (chr-ID scaf fold_13; pos 15117822 to 15118387)
aggtttgtttgggcatgttcttttcattaagcgtttcttgcagaatatggaaaaataatgaggaaacaaattggagaggttgctttgagtccattcaaatttatttcaccccttcatgtatttagatgccttatctaacaggatatgtgacttatccttatgacgacaactccatcatagatgtggttactagggtttaagcattaccttttttttttactttaaattttcatcaactgcaagggtaaatgaagcatcgcacaacagaaattctgaacaagttttccttattcaattaatagtcatccatggtcatgattgtcttggcttctgaaaagcaatgaccttttgggcaatatatattgcttgagggcaatcagaatgcaaaattagccttatatgcatacacagcagcctgttccattaaatttgttatttcttttcttttgaacattggaatagttgctttttacaagatatatggatgtttttattgtcgttcaacattaagagctatcaagttaagtgtagattggccttgcagtttgaccttttccttttctagt

SEQ ID NO: 60996 - DNA, 786 bp, Populus trichocarpa
  Intron number 5 from transcript POPTR_0002s19850.1 (locus POPTR_0002s19850) derived from phytozome v7.0 (chr-ID scaf fold_2; pos 15777293 to 15778078 reverse strand)
cagagttactcatctcatctgctacaaatttgaaggtgtggttttgattttcacatactgaacaccattcttaatgaatgcatatatgcagttcctcttttccttgtattaatatgattttgcttgataccaaaagcatactaagcttgctgcagtcgctgcataatatatagcgtgttttagctgctgttagttgggtaatatgtttcaaaggcacgatagttttggaatgaggcttagttgactggaatatgcagtcatccatggattgctcagctatgcatgttatcatcttcccatagcatatggaagatattaactctagaaaggtacattagatggaaaaaacattgaaccaaacaagaagagatatttttgcttatgaatatttggttaaacctatctttatagggtttttctctttaatacactatggatattgtgctcctttgatgattttgaaatcctactcatacattagggttatcattgattattgttctgctttaagttcatatacttcttgtttttttttatggtgagacttaatctacagaagaaattttttgcaaagagagttactttcatttttcttgaacagttgacagtagccttcttcttcttcttctaatgcttttatttgcacgaacatcataattgcactgttacttgctgctattttatcatttgatcctatggaacttttcttacttcactctggtacaatgcgagtgctcagcttgactagatgttaattagagattttcacttgtctaggtgagaagt

SEQ ID NO: 60997 - DNA, 707 bp, Populus trichocarpa
  Intron number 2 from transcript POPTR_0005s23770.1 (locus POPTR_0005s23770) derived from phytozome v7.0 (chr-ID scaf fold_5; pos 22511283 to 22511989 reverse strand)
cctggcataataataattggtcggtgataggaaaggtatttgttttcctgcttatgcttatgctttggtttaccttcaatttctccttggctaaccctttccagctgttcaaaaatctgcctcctccctctgtataaatgctagtttatcatactttgaggttgaactgcattttgatctgcaaactgaatgtttgacattctctttctaatattgaattgcatgcaaaagttcttgaaaaatcagcttaatagtaagcttttcttgacttttctatatgagatcttgtgcatgtgtgctgctgcttgtgaacaccaccagtcttctgatatttctgatagtttatcatacttctggtcttaatgtattatgtcactgcaatgtttcatttaacctgttttcctctgttttaaatccatgtattttctagtcattcactatcatatggctagaagtcttcttctttgaacccagtgtgtcttgctgctcttgatagaagtctttgtttatttgcttttagttttcctctgctgtgcatccacacactcgtatgagaacaattacaatttattttgacgagaattgtgtcattttattcttctagtccaaatggtaaaggtttctaacaagttttgtagggagaagctgttactgatatccgaataacttcaattgcaggttactcaaaatatagaacactccaaaaa

SEQ ID NO: 60998 - DNA, 988 bp, Populus trichocarpa
  Intron number 1 from transcript POPTR_0003s21730.1 (locus POPTR_0003s21730) derived from phytozome v7.0 (chr-ID scaf fold_3; pos 19787382 to 19788369)
tcattggtctccttcttcctccctctctaattacttaaatgagtatatattttgatttctttttaatcctaatactaactataattatttctcttttcactaataatttacctgttaatatttgaaacatcaaatattcttagtaattaacgtttttgtacatctttgataataatttattattatttttagtttgttatccatacatatcttaaaattagttctgaaacctagaatgatttgaaacatcaaatattcttagtaattaacgcttttgtacatctttgataataatttattattatttttagtttgttatccacacataccttaaaattagttctgaaacctagaatgacttggtagttcgactcgttaacatgttgacacaggccacagggctcgattaattgtgtagcttacccatatgagagacaacctagctacttaatgggttggcacccattcggtgaattaattttagcagtaagcagcagaagagagccaatttgtgatagagagagagaggtgagacaattacaagagagtgaggatatatatgtaatttgctctcctttaaattgtggtctcccccctaattccaatccaataatattgatttatgcgttccgtgcacgcaagcaagcaagttagtagtcaaaccatattaaatttgttgtgatttagtctccgggcaaaaattaatggtcctaaaaagtgatatcgaagttttggagttattaacaaagttttcattttatttttttttatctaaaataatatttttttaaataaaaataaataataaattcaaatcaaccgctgatgtgtaaattaaccggtctagatttcagaactatgttttaaatcaataacctaggtatttaaattgatcgataccatgttgcatagcatgattatcatactaacccatcgatactattttgttacagctaagcttttgggatttgacgactatattccaacc

SEQ ID NO: 60999 - DNA, 932 bp, Populus trichocarpa
  Intron number 2 from transcript POPTR_0007s04370.1 (locus POPTR_0007s04370) derived from phytozome v7.0 (chr-ID scaf fold_7; pos 2703356 to 2704287)
cttacatagctgacaatttcaactcattggatcaggtatcatttatggttcctttattgaattgtagaagatgatatgtactactgtgtagtggtacttaattctttatcaacataatgtttctcttttcctttatcttctaagaaaatgaaaaggtgcatgactgtttgatggcaaggagtgtccgaagattatataatagacagcaaaatatgactgcgatgttgataatgcgtaatagttagtaatcaaaatataactggttggatagagaatcaaaggaaggacccctctatccttcttgatttgtaatttgctacctgtccaatgtaagcagattggcttctgtcctctccctccctcttaagccaaacaactagatggatgggttaatgtccctcctttttcctctctgtcctcgctcctttccgtccttcctacttaacagaaggatggtgatgatccaagattatgataaggcagggaaaggcaacagaggatttaggatgatggatgttcttggcactggattgcaaatctgtatagcagaagtatcagatcaattcatagtgcttgatttatgaagttcatactagaaagttataacaaaattcaatgatcataagcataatatgattggaaaaacttcttgaaaaattatataaataacaaatcagtaaaaaattaaggataacagatactgaaatatgttacaattcgtggggaaattgtcagaggttcacagtcatcacaggaaaaacatcgtcaaaaattgcacatggttacgagaataaatctcaagaaaaaaagtagattctgagtagcataccattctgcttaattattacctctcttggtgaaacaaacttaattaaaacgactttggtgtattctcaggttatttctgccctgagagaggctggtcttgaatc

SEQ ID NO: 61000 - DNA, 907 bp, Populus trichocarpa
  Intron number 2 from transcript POPTR_0014s05070.1 (locus POPTR_0014s05070) derived from phytozome v7.0 (chr-ID scaf fold_14; pos 3875780 to 3876686 reverse strand)
gcagactgtgaatctaggtctttgggacactgctggtactctttctctttctcattcttgatttgtgtatatcactagctaatctggctaaaagatgtgaatttgccctataattttcatggctatcagcttattaatagataaaatgctcttcaattgatcaaagtgatttaacaatgtcttcatgaggtttatttcatgaattttgaactgagagaaaatacttttatttttactgttttttctaatgatgtgttggtttactgcaaaatttggtgaatagttttagaaaatgggaatcttacaattatgactaccattaattaaacccccaacttcttgaaaagttttaagctttccacttcatgacatccaatcgacaacatcatagttactttaaatctgtttctctgctgaacagaatatcatctgcattgattgttcgaaacaaccctttatgctctatccaacccctttttcaatgaaagttggccttttggatgctctagactagacggcttggttggtagaacttactctcagttcactccagtttaaggttgtattttgatgtgaaattctgcaaaaaaaacatttgaatcacggagctattatttgaaatgattgattcaaggaaagagagatcgtcactggcttgacattgtgagactcacttattctgtcatgaaaagactttaacacagtttcatatgttttgaagatccctaaccttttcttctggcttgtctaccaaccataatcaacggtgacttttctcgtcagtgctgagaaattgttgtggtgtctcaaaagtggctcagaaaagtgaaacaatgaaatgacgctgctaagtttttaaataattcatgcaggtcaagaagactataacaggctgaggcctctaagt

SEQ ID NO: 61001 - DNA, 806 bp, Populus trichocarpa
  Intron number 1 from transcript POPTR_0010s16510.1 (locus POPTR_0010s16510) derived from phytozome v7.0 (chr-ID scaf fold_10; pos 15446597 to 15447402 reverse strand)
ctcttctcgcagatcagatccagatccctcgaaaggtagctctacgaaaccctgagtctttagatctcagattcacatgcaaaatcgatgctgccaatttcttccttctaaccactcgctctgtgacgtgacgtgacgtttttcttcactttttttttgtgattcgatgatgattggcttgttttgttaagatctgctgttcttttctccttttgattcaggcatttcgcttgtttttgctggcttctgtatcactgtttatatatatatatataaaattaaagttagtgttgttatatctaggttgatatgattgtagttgtgatataaatcaccacgcattttttttgagtttcataatgtatttatgaattgtgtctcttgtatgtatgcatgtatttgtgatcatgtttgttatgatgtcggtgttggcgagctatctaggaatggattgaaagggggtgctatacctattgtgttacccaaggatacaaatagaaagcataaataaactatttttttttataaaaaaaatatgatgtttgttaaatagagtgatggtgagcttgttgatttcaaatggctattcagaaattggttgacgggtctgtagatcttttaagttgccaagccgtgactagagtagtttgtgtgatttctgagtgttaaacgcaggtaattaatcatggttcttttcatccttattgtgactcatgccatttcatttccataagtttatttctttgtcaacttcattctttcttgggtgacatgttttaatttttgtgctaagtaaagttcagaat

SEQ ID NO: 61002 - DNA, 506 bp, Populus trichocarpa
  Intron number 3 from transcript POPTR_0006s14860.1 (locus POPTR_0006s14860) derived from phytozome v7.0 (chr-ID scaf fold_6; pos 12309194 to 12309699 reverse strand)
tgcgggtatgcaacttccttttattacccgttcatgattgttttatttaattaacttgtaaagttcagtatgatttgtcatgttggttattgattagacatcatcaccttttctgggttgcatttgtaaattagtagtaatacatttgaccctgttttgatatctcccacaatattacatggaagcctgcctgttttagctaatttgcctttttatttttttcctttgccttccagaatctcactggattcgaaccccttcttcttcttctcctttgaagtaggacaggatggtactatgttgtttaaattccacccctgttatttacaactaaagtacaagacttccttcttttattttttgtggcgccttggtttacaatgcctatttgtaatgctagtggtgctttccaggttttccaaatgtcatgaactttcccgtgtcttagtttccttaagatagatcacctcataagctctgactaataaagatggatgtgcagggta

SEQ ID NO: 61003 - DNA, 605 bp, Populus trichocarpa
  Intron number 2 from transcript POPTR_0017s09050.1 (locus POPTR_0017s09050) derived from phytozome v7.0 (chr-ID scaf fold_17; pos 7723905 to 7724509 reverse strand)
ttcaggtataattacttctttatatctctttctcttcttaatttgttctagactgaaatataaataaaaatcttgtttttaatgtttgttgggactttctctttgattttgagatatttggaacttgaatcttccaaactgggtgctgtttctttgacgttgtagacttgtcggttgttggacgccgcataccgtttggcagcgaaaacgctatttgtggaagattttttttttttcaagaaaaaaataatttttaaaattttttttagtctgtttttatattaaaaataaattttaaaaaataaaaaaaattattttaaatgcaatttctactgatctcttaatctttaaagaaataaataaaaatacttccggtggtttggtaaattgaattcgaaatcaatttgtttaatttttttttgttatttccttttctctcagtttttagttttatgaactgattgcgtttatttttgatgggtatgattttttgtttctgaagaaataaaatagaaatagaattgaaaataaaactatggagctgaatgaggcaaagacaggaaaaagtgaaaaaaacgaactgtcgtttttgtaggtgacaaaag

SEQ ID NO: 61004 - DNA, 629 bp, Populus trichocarpa
  Intron number 2 from transcript POPTR_0006s13650.3 (locus POPTR_0006s13650) derived from phytozome v7.0 (chr-ID scaf fold_6; pos 10874704 to 10875332 reverse strand)
tggagggactaagacttttgtgattaaaaggtggccttttctcatcccttctctttctttttatgaatcagcactacgattaattttttatatttattctctggttatattttcaggtttaagtgtaaagctgctggggatcactgtggggtttttgatcaataaagtttcaagtactgtgatccacctcaaatagtgccatggctattttttatatatgtataagaaaattgttcaaaatttatatttgttgatgtaatccatgcatgcattatttgttccagctcttaggaagaaataaaaaaatctggataatcattctttcactttcaagcatgtccgtcgtcatatatttatttattgatcgattctgttttttatcgagacgataattggaggctatgtttttaaataatttgtttgattgcgtttgcaagtgcaactggttttgttctactttaatattttattttgaaagttatcttgtttggaatggcataaatagtttcaaaatcaagcatattaaggaacagtttgtttcgtcatcttgcaacaaggttatcttaaattataatgctcagtgtatgattgctttattcaggaagaacagggaagaaggtacgtacacc

SEQ ID NO: 61005 - DNA, 471 bp, Populus trichocarpa
  Intron number 1 from transcript POPTR_0004s21620.1 (locus POPTR_0004s21620) derived from phytozome v7.0 (chr-ID scaf fold_4; pos 20658746 to 20659216 reverse strand)
gatctgagagtgaaaaggtaagtgaaaaatccgaactttttgataaaacaaagaaagtaacgttgggaaattaacgtaagaaagctccttgaaaagcgggcttgtgtaagtatttgacttggttctgaatatttctattttcgaaaaataataataataatgttgtctagtataaatctttttaaacaactcgaaaaaaaaagtcttttttttttcttttccgaatggaatttaatttgtcttttatgagaaaaataaataacagaaataacagtaagagtcataattgtttttatggtaactgtagtttccttttttggcggcttgcaagtcccttttaacacttactcatcgattacagcataaagttttgatagtagtttgttatttctgttaatttattgttgggttttttattttttatttttaatttcagggagatcagaagtctacaactggaacaaaccctac

SEQ ID NO: 61006 - DNA, 1021 bp, Populus trichocarpa
  Intron number 2 from transcript POPTR_0008s18260.1 (locus POPTR_0008s18260) derived from phytozome v7.0 (chr-ID scaf fold_8; pos 12227922 to 12228942 reverse strand)
actactttgtcctccaaaatgtaagtttggttctgctctgtttttgtggtattgcacttgtcaaacgatttgctgttatgttcattgtttcttctttattgttgtttatgttatgttattgctacactagactgtttctctttgtgcatacgtatttcttaaatttcttgcgtgtatgtgcaattcagtacatttgtgtatccggtgatgtaatctattataaaccacaagtttcttaatgaacctttggctctgcaccacgatacagagtcttataattttatgctagtagcttggatcttatctagaatacctttttgtgtgtttcctctgctgcctgttaataactctatcaaacttcaaactgcaaatatgcttagaaaggatgatttttttatttttataggcactgctctaaatgcctaaatcatctcatagagaccatggaaaactgaaaatatggcaaaccaaagtcacaagacgagatgttttagcatgtgtcaccataagcaaagagtagttgtttttagtatgcggatgtagtgcgatgactgtccagatgattcataaatattcctagttttgtagtaatgataattgccatatataaatcttcatagtttttcacacctatttatgtttcccttttccataaatattctaagctgtctttaggttttctttcctcatgcacatgtatggagcactgtcatagctgagtttagggtttttcaactttaaatctccactgaggtctgtggttttggtatcaaattagggattggaaagatgagtgtacagctgtgcattaactggatttttgagtagttgaatcaacccatttacattctgggaactcccattctctattaaaggtgttttgactttgaatttgggcatgctaggaagatgagtgctagttgaatgcctttactgctagacacatgctatgcactgtgattattacatgtctctttgttttgcagtgtgaatcggtgcaagcgcagtttagcagagattt

SEQ ID NO: 61007 - DNA, 402 bp, Populus trichocarpa
  Intron number 2 from transcript POPTR_0005s17180.1 (locus POPTR_0005s17180) derived from phytozome v7.0 (chr-ID scaf fold_5; pos 14351874 to 14352275 reverse strand)
gaatcaaaagtgattatcttacttttgaaatgtatttgctttgtttgtctttgaatctcaattgcctttcttttttttcctctcatgtgtttagtcttggaattaccaatgaagtctgttcctttagtagttgcagtttcttttcataggctctatttttttttttctgatgtttgttttagcgttgcctttttaaaaaataaaaaataaaataaaattttggagtggggttgattccttgcaataaggaaggtttcttgccttcttgggctctttgttctttgcttttttagctcatttgagaagaatttctctcgttttctattgggattcaggtaaaaaccttagtgagcttaactttatttcaaaaatttaattattgctggtttttcaggttataga

SEQ ID NO: 61008 - DNA, 824 bp, Populus trichocarpa
  Intron number 2 from transcript POPTR_0012s01900.1 (locus POPTR_0012s01900) derived from phytozome v7.0 (chr-ID scaf fold_12; pos 1485197 to 1486020 reverse strand)
tagctctaccttcattttcggttgtgccttcaaaggtttggttctgtcactaaaatcatttaatatgttagtcttcctggttagtgtgatatcgacccctcaaatttttttcttactaagattatttttactctggagtatacaggcggcaatgaaatggtctagtttttttttttctttaatgtcaataatacaattcattacatgtagaaagattgagagttactatatatttgtctgcatataaatcacaaatgttgtagtttaagattaaaagttgaattatctttaagttataagaaattgacattaaaccacgatgcactagagtaaacaaacaagtcaagaaaaccaaatgagagacaaataaatgggtcccaaataacaaaggcatccgggtaaaagagcatcaaacaaaattagaagtaattcctagcaataacaaggacataattgatcgaaatagaaaacttgggagactatgcatttaattatccaatatcgagggaatcatctccttagctactttgctctgacaatcctattaaatattttcagtatgttagttcttgattaaaaattctaacacatttcacaaacaaaaacagaaaccctgtacatatttcacaaaataaaaattacaacatattgtgatggcttctgaatgcctggaattctgattgagaacaaaattaattttgttgctatttctatcgtggagttcaaatacttaaaaatagattataggttttttgtgtttcttaaatcgatttccttgtgtaatgacagacttttattgtcatttgagcagtgaaattagacag

SEQ ID NO: 61009 - DNA, 560 bp, Populus trichocarpa
  Intron number 1 from transcript POPTR_1377s00200.1 (locus POPTR_1377s00200) derived from phytozome v7.0 (chr-ID scaf fold_1377; pos 219 to 778 reverse strand)
tccagtatttttggcttccgttgttgcgttgacttcagtgatcgcttgagtctgtcggagttgtcgcttttcgtgttttttttcccgctcctggcagctggatcgtttcgttgttatcggctatgctgtggtttggtggttatgttggtagctggttcaatggctatgttggtgttgggcgtgccatggcgaaattgcgctgggcagttgggtttttttttttttaagagggagatgagaattgccaggggagatgggttgcggtggcggtccgtgggttttggctttgttgagtacagaggcattaatcttctattacaaagaaaaaaaatagcaaccgcgacctggaggaagggagagacagaaggagattaaaattatcgaccctgactggtaattttctttgattttcttaaaaggatctttgaattaattgtttattattacctatattggttggttgatagttcctccccagtggagtgttgcagtgatggggcatgctaatatctatgttttaataactgatcgattggttgaatgaaatgaattggcagact

SEQ ID NO: 61010 - DNA, 839 bp, Populus trichocarpa
  Intron number 1 from transcript POPTR_0012s09280.1 (locus POPTR_0012s09280) derived from phytozome v7.0 (chr-ID scaf fold_12; pos 10323858 to 10324696)
aaatcagaagactggctgactttttaggcacagaggtacgtggtgaccggagcctgaagttaccacttccaaatttcaatatgatattgttcatttcagaagagtctagcaatgcatgaattcactttaaatagaaacagagatgcatggctgtcaaactgaatagtcaaagccttagagaaaagagtagtagtgctccatgattgattttcttactttgttatcatatgttctcctgataggtctcatcagctacaagaagacgaattggttctacaaaaggagaaattcagaatcacaagcaagcactagacttatcagctgccgtttttttttttgaataatctatgtaataataaacagaaatgatctcgtcagctagttgctggaaaaaacaaaataaattaattatcagctaccacttccctcatttaaagaatacttcactcaatttcataatctttttaacagttcaactctgaaaagcaaaaaaaaccgaaagaaacggagtgagcggagttcatatcaacgaaaagaactgaaattatatgatggtaattgctgtaattttatcggttattattattattattatagataatcgatgcccttaaggaacttgtaacttcttcatttatttttcatgttttttactatttctggtttgaagtttgatctacgtatctcccaccattcctttccttccattctttatgagaaagcaatcaatagttcctaatcatatcccatcttgtgttgcgtcctagtctagcaaattaatgaaaatgaagaaactcatacttgctgcatgcactttttttatctttggttttaggaat

SEQ ID NO: 61011 - DNA, 776 bp, Populus trichocarpa
  Intron number 1 from transcript POPTR_0002s17760.1 (locus POPTR_0002s17760) derived from phytozome v7.0 (chr-ID scaf fold_2; pos 13611160 to 13611935)
aagcttggactgatcaagaacacgagtacaattcctcatcttaatatatttaattactgatccatttatttttcaacaaataattattatgtttttatgcatctttagttttgtttgtttgttatagacatcttaaaccatgtgtgtgtttttgcatgtgcaatcttatgtatattttgccaatttcattttttgtcatagtttttatattattgaaaccttcgtttttcaaagtgatgaaaatcgtcacatgtatatgttgaaatcttttttaatattttctatttttatttattctattttttatatatactaattagttttttatggacaggtcgctctcggaatatacactcaaaaaactaaaggaataaaatgggatttgagtttagaataatcatatcttaatttaggtgatttaaataaataaataaatgataatgttgtttttacattatttatatgtctgtattctctagtactccagttatctttcgataagtcctatgcgaaaatttttcatttttcatattttttttttagaaaatcatatttacctttttaatgtttcttgaagagaaaaaaaccgaactcaaaattaattattgtggatctcacttgccaaacagtgaaacccaataaattcttcacattcattaattcgaaattactttgacgtcataatttcataatattattactttatgttgagttaatcgactgattaatttgataatcttttgttcattaacttgttgttttgcaggctattccta

SEQ ID NO: 61012 - DNA, 582 bp, Populus trichocarpa
  Intron number 1 from transcript POPTR_0015s14000.1 (locus POPTR_0015s14000) derived from phytozome v7.0 (chr-ID scaf fold_15; pos 13749335 to 13749916 reverse strand)
caagtctcgtttgtttcatttctcttaaaagttgttgctttcttgattgatcaatactgtgtttcttgtttctttgttttcgtgttcttttcaatgattttttatccgggcttgagcaggttttgtgtttttctctcccctttttttttaatctttgtgtgtatgattcttgatgttgggtttcttgttttatctttaatagatctttctttacgcctctttagtttgttctctatgtttttagtcttgtagaaagatcttcttttttatcttgttcaatgaagttggtatatactatcttatagtgctttacaggggccacctctgaaaatgataggattgaatttttgaatttatcaatgagtattgatttgtgatctaatcaagattgcaactttgtgttaaattacagctagttagaattatttcaatttgaatctgatttaaagagaacttcttttcatgggaatagcatagggagttatggtgttactattggctccaatttggtgagtgttattgcatttatttgtatgtggattgttctgatatcaagcaattggaaatgtgtaggtgattcta

SEQ ID NO: 61013 - DNA, 413 bp, Populus trichocarpa
  Intron number 1 from transcript POPTR_0013s02140.1 (locus POPTR_0013s02140) derived from phytozome v7.0 (chr-ID scaf fold_13; pos 1284734 to 1285146 reverse strand)
tgacttcagtttactaatcgagagggtaaaaacacgtaattcttgcaatcaattacgtgtttttgattgacatagaagtttgcacatcaaatatgacacattggttgacaatttaccatgaaagggcaagcaataacttcaaatttaagaaaacaaataattgggttgctcttcttattaggagtgggattaagattggtgaaaaaattgattgttaggcactatacaacgctgaaaaagatccaaatggtattttaaggttgctgattgaaaaggtaagtgaaaattttgtttagaatcaaattaattttgaaaattatattcatcaattttacgatactgagattgcagtcaaagtatttttataactaaattgtggattttgtttttgaaataggtttccacttaaaagg

SEQ ID NO: 61014 - DNA, 637 bp, Populus trichocarpa
  Intron number 2 from transcript POPTR_0016s00960.1 (locus POPTR_0016s00960) derived from phytozome v7.0 (chr-ID scaf fold_16; pos 379577 to 380213)
gtcaattgcaataccttgcagaggatcttgctgaggtattaacctgaaaagttttccatgttttagtgattttaagtgttttcattcaagttctactattctgagttgatgttttgaaatttttttttgtcaattgtggtttaaatgaaacctaaagtttttgcatgtacaagttccctgctttctagtgtatgggacagtcttatgaatgcagactttggttgcataaatgagcattgaggttctccagtaattcctatgctagctctatgtgattttccatcttaattagtatattcaatgttagtataaaatcagattcatcttgagattgctagaatcaatgctgttcaaattgtaaggttctttatttaatgtctagtatatctcttaatagaattagattatagatcattttacatgttgaacattattgcagctattgtgtttatgcacggtcaatagattgatttcgttttttggacaaaagttttgaattttgcactgtttttctcctttatctgccacatttgtgtagataatatcttcaaattcaaacaaggtgctgctttatgatggtatttggggtgtgcagttgttaatgattttcttcttgaaaaggtgaaggcagataaat

SEQ ID NO: 61015 - DNA, 1016 bp, Populus trichocarpa
  Intron number 1 from transcript POPTR_0013s00790.1 (locus POPTR_0013s00790) derived from phytozome v7.0 (chr-ID scaf fold_13; pos 405501 to 406516 reverse strand)
cttgcttcagctccattcctcacaacaaacaactggtatgtcttgtctttcaaaaaactataatttctcattcagacagttcctttcctttatgtctcttgcttttcccttccatggttacttctttgttcttgatatgaaacgtgaatttggtgtgatttccatggttaaatccccatttgtagctaggaacccaaatgtgaaatatgaaaaaagaagcaagagagtaggagtttgaatttatgggattattgtaaatgatttgagcggcatgatctttttagtatatttgcatatggtttctttatccagtaacttaggctggatttaaggtagtccagttgtattacagcaaacatgatctcttagtgaccaaatatatgtgaaagtaactagttactgaaagccagtagcaactattaggtgtcatgctgataaggaagaatgtaggattccaatgggttggaaactgaaatttcaaggattactatggtttgcagggaatgtttgtatgtgatttccctcctttagaaacgggatcctgatattctcaggcatcactttcttgtgtgtgtggggaggtgggggtctagaatgctgatgctccaagtataggcacaatgccgatgttcattagggcgccattggatttgaaagagatggtagaaagggacccattaaattcaaattgaatggcctaatggccattggcatggtgctgatgcgcaagcatcggctttgtaggaatcccacctagcaaacacatgctagcttaaaggtttttgatctcatgacgatgttacctctagtcttcttattaagtagctttgtgttatgaaatgggttatgtgttatgttgttgtaccctgaatgttttttggatgataaaatatccctgttttcttatctgatatgcatctttctgtcttatcattaagccacttcaaattgcttctcacaacatatttttttatgtaaacataatcagactaaagcttttgcagttccgaggagaa

SEQ ID NO: 61016 - DNA, 438 bp, Populus trichocarpa
  Intron number 1 from transcript POPTR_0008s10240.1 (locus POPTR_0008s10240) derived from phytozome v7.0 (chr-ID scaf fold_8; pos 6417793 to 6418230 reverse strand)
tctttgctcgttctccaggttaagaaaataactccctccctccctctctctctcccatcaaccttctgtttggttcccgagaaaatgaaggaaaagtcaaaactttgacgaaaacaaataaagacttggtgtttgtaatactcgataagattaacagatatatatacacgtatctcatttaattgaaccggtttcttcagttcagaatatcacacgctgccactcgatgtatatatatattttttttatctgtttggttcgctggaaaacgaatggacaagaaagaaagttaaatttctgaaagttatccagttaggtttatttgatcaatttaagaagattagttggttctgttaaaaataatacgcaaattatatatttttttaatttcgtgtttttgcagggagagtgaatttgattggagagcatattgattat

SEQ ID NO: 61017 - DNA, 1005 bp, Populus trichocarpa
  Intron number 2 from transcript POPTR_0011s10730.1 (locus POPTR_0011s10730) derived from phytozome v7.0 (chr-ID scaf fold_11; pos 13312571 to 13313575 reverse strand)
gcagaaagggaggcctctctacattttcagtagtaagcttctgatgcgccgtagctatatctttcacatatccattgttctcaatgccagcaataaaaagttcttgtgacgcttaataagaatttatgagaaataattcttaattttaaatcataactcaaaagttattctcataattaataaaaataagttcaaaatcactttagattaaaaatacatttaataagaaataaattatcaaaataatttttttaaaggaaatagtatacgtttaaaaaatttatctcaattttccaacaaattttttatttaagttaagaaaatcctgactaaacatatttgtaattttttttataagtttaaaattgaaaaaaaaaaaacttaaataaatttacaaattaagtgataccaaacataatctaaattataattccatatctgaacgagagttgtcatgtttgataaacaaaataactaaaaaagttatttaaaatctataattttcaattgcaaccattaaagatatattaaaaaatttcataatttttaccttttttcaggataagaaataaacctataatgaatgtaattattaaataaggaatataatcataaatgattgacttgattgtttaaatataagggtcagaatctatgagaatttaataaaaacaattctaaatgaatttaataaataatctatgagaatccgcatgcttcatagcctcaacatgaaattaagttgatccataaattatgctcagcgatggaaaaatacctttttttaaaaaaaaatatgattttttatgcataactgttaaataaaattttcataattttaataatttttttttaaaaatcgatgagaaggtattagcactaatgaggagtgcaaaataactgcaaattatgttaaccttttatgaaaaataggcagtaacttgtcttcgaatataagcgcggacaccatgaattacaagctaattattcatggtaatttgcagg

SEQ ID NO: 61018 - DNA, 884 bp, Populus trichocarpa
  Intron number 1 from transcript POPTR_0011s04360.1 (locus POPTR_0011s04360) derived from phytozome v7.0 (chr-ID scaf fold_11; pos 4362825 to 4363708 reverse strand)
ccttcacgttattcaaagccgcgtttcacttccctgtaggtacccctccactctctctcactctgtatgtatatatataataagtttatttgtctgtttctgtgatttaaagctttaaactttggttgtttcattgcttttttaacgatgatttaaggtaaagtttgagctttcttagtggtttctctcattttatgttctgggttttgattttggtttctgggctttcttaatggcttgtgatttcatgatctgctgtgcttatatggtgatttttttgtttggtttttggaaacttgaggaatcttgaaaagagggactttttgcgtttcctttataattgaaatgaaattttcttgactattgtttcaagggtggtagcattattattagttctcggatggttaggtaagtaaaagggtgtggtggaaatgggttttttatggtgatgaattttaagttttatgatttgggttttttttagcttgttgaagtctctagtcttttgtgtgttcattatttccttcaagcaaattgccttgcttgtttaggcatagatgagtgttattttgaatgatttgttttcgtttctagaaccgcgccatggaaaggacaatgtgtgtccagaatttgttttattgaaccgaagaaaagtaaaggagtctatgttgcttttagactcatgacttcatgtgttgcgttttagattcatgcgattgattatttttttcttatgttgtgtatgattgtttgcagtgaaggtcagtgctctttgcgcgtgtcccgttctcttctccagtcctccacagatatcctatttatcctacttcgaaagtgattttttttgttttttgcgtctttaagtctatactttgtgtaactaa

SEQ ID NO: 61019 - DNA, 517 bp, Populus trichocarpa
  Intron number 1 from transcript POPTR_0003s13590.1 (locus POPTR_0003s13590) derived from phytozome v7.0 (chr-ID scaf fold_3; pos 13939589 to 13940105)
ttggtttgttagtgttacagatctgaaaaattaaggtatgagtcaactgttaagtgtgtgtgtactatgttgcaagagagcgagtaagattgtttgtgctggcttaccttgtgttgggttttgtgatgtgtgtgttttttgagaaattgagcagaaaagttagggaagagaaaaacaaaaagagaagagcatgaatctggtgaagaaattcttgctttaaaaattgaaatgagtccactttttgaccaaaacccattattcaaagcctgcaaaagtttcgttctttaatgtgtaaaacaacccagagttcatctctacttttctagacaattatctcggaatttgcccttttcttttttgctctctctttccctcgtttattcacattctgtgttcagttttctttttttaaaaaattcgtacttgtttattttattcatttatttttgtcctggcttgaaaccatatacgccattttgcagggaaagagagagaaagaaagtgaaacaaaaccctc

SEQ ID NO: 61020 - DNA, 610 bp, Populus trichocarpa
  Intron number 1 from transcript POPTR_0004s11710.1 (locus POPTR_0004s11710) derived from phytozome v7.0 (chr-ID scaf fold_4; pos 10552273 to 10552882 reverse strand)
ttaaaaaccaagtgtttttcaacaaagcccaggttccaaaatcttgtcttttgttggttactttttgtaaattgtgtctaatgggcatgtaaagtatgaatctttgaaatatctaaggaagagaaaaggactgaaaatttgtgtattttggagaatgattgtgttgccttatcttttattgtacatgttaacatgatttttaatcatagctaagctttttctagcttgtaataaaaggggaatgattgttttacattcaatggtccacacttttgcctttttaaattttttatctttgatgacttttaatggagaaaccaaactgtaattggttgaagtgaaagctctcaaagaactgtaatcgatgtagccttctctattgtcaatcaatttgtggggttttgattgtcttttcagtgactgatttagaactgctactttcacatgacaatgtagtctactaatttttctttgcctgagttacaaatttttttctatttgttttactgtttctgtgcattgtgcctgccttgtgcaataagaggatcctcataatttggctctataattgccaggttaacaacagagatttgtccattgctgtcctgag

SEQ ID NO: 61021 - DNA, 574 bp, Populus trichocarpa
  Intron number 3 from transcript POPTR_0006s05290.1 (locus POPTR_0006s05290) derived from phytozome v7.0 (chr-ID scaf fold_6; pos 3739511 to 3740084)
gacagaaagagtaagtacatcatattgacctaatctgttctggtccagtttttttttttttttaattttgtttgtagaaaacatattattcaccatttattgggtaatttagttgattatgatcaggttgaattggtggaaatcaataaattcaatcaatcaaattttagttttatttttttaaaaattgataatattgaacaagttaaaaaaattatttatgatatataatgccagatattggttatggcaatttactctattcaatgctattagacttcaaattgcgggaagtgtcatttgattacaacttttatagctttcctgaagctagatcatctactttactaattattgcatgaaaccttgcctcatttaaatcatgtgtgaatctacttcaaacttagatggatgctctctccccctctccttttctttttgtttgtttgttttttaacaaagcttagatggatgttagaaaggacacaagcatacctatgatctcagtttttgatctgccatgatgatactatcttcctttgttgaatttatatgttttcctttgtcaggattg

SEQ ID NO: 61022 - DNA, 781 bp, Populus trichocarpa
  Intron number 1 from transcript POPTR_0015s10060.1 (locus POPTR_0015s10060) derived from phytozome v7.0 (chr-ID scaf fold_15; pos 11102125 to 11102905)
gcagcctgtgtaaaaattttgcatcaagctttgtagtgttctaggatcaacaaaacctaagacttttaaactttctcatcaaaacatggatgtgttatttcaacttttgttttttttgttgtactttactctttgagatgccacaaccttttcatacagtggcattatacatttatcttttttgcgtcaccacaagcaaaagtgaaaccaggatatgtaaatcatctctttttcacgcctataaccatctttattcattccaacactcggaattatagttgtcctgacgtttctgggttggcctggtggctttttctgtagcttctcttttgtttactttgggtcagagttgctttgctgataaaatcaaagactttgaaaaatcaagtagagaagtgctcaaatttatgaaaaaggaaaagaattctacggtaaactaaatattgtttttttatttttattttttataattaccttttccaagtttcttctttacattaaaacaaccgaccaaggagtaattagtaaaccaactactcctagtatacacggactccaaaattcgaaaactaaagcactaaagagtcaagaaccaatgtttcctcggtattgtggttttgtattgaattccaattccaagcagcaggggccagtcattggtatcaacagcaacagagacaagggagtcaaaggataatttattctttaactcaggtaattgctcccaaaataaactctctgggttccagagagttttctttcggagaaggtggaaggattt

SEQ ID NO: 61023 - DNA, 784 bp, Populus trichocarpa
  Intron number 3 from transcript POPTR_0005s02870.1 (locus POPTR_0005s02870) derived from phytozome v7.0 (chr-ID scaf fold_5; pos 1866417 to 1867200 reverse strand)
aatcgggtaccttgtgttcagctagtttaatcagtcactagtctcactgcttacacgtccttcttgttgtttctgtctttacagttttgtcatactgtgagaattttttatgtggttttgttattggaatcgggatcttcttaacctttggtgtcgagtgtccttaattgaacacaattcatatctaatttgtttatgctattgaacatttttactggaagaattacaattgggtgggcttccttagaatatggttaagaaccttagctcttggaattttgatgtgtccaaagtaggacataaagtcagctgtttctataattttggatttgtagtctaaagctattgaatagtttgtgaacttttgaatgttatataagttgcttcttattcgcatgtcattcaacgaggtaacaaaacccaaaatttcaagacaaaaggtggatgtcattgtaaaattttgggcattgccttagcagtgcaagaagagtgattccagacaacttgatactaccttttggcccctggttgggcctatgttatgggattgcagaggtaatataaaagcttaaaaaaaatgatggaatattttttaaaaagtttcttcaacttgcaaaaggaaaatatcgtcagaataagtaatatgtatcctgtgttaaatctcggttattatatggtagatgaagccttagttagtcttggtgtccttcgttaacattgtcgctcttccatgttctatattttttcaggcgtacttgtctcttccagagggaacagcttctgt

SEQ ID NO: 61024 - DNA, 882 bp, Populus trichocarpa
  Intron number 1 from transcript POPTR_0008s17710.1 (locus POPTR_0008s17710) derived from phytozome v7.0 (chr-ID scaf fold_8; pos 11905327 to 11906208)
ttataaagcctccctgactcgcccagattctcccggtatgcatcttcatctttttgtttttttaaaccaaacccttagtttgagctgtttgctagttgttattacttccctttttggatttcttctggtttgtgcaaatcgtgtttcaataagttgttttgtcgttgctacaattggtgggtgtttttttttattgccttttttagaaaatgaaaagagattgtgatgttcattctgtgtttcttatcctggtaaaggatctcaaagtcattctcgacaccagcctttcttttctttttaattttttcgattccgatttcatgtaattggaggcaacgtttttgtttttgttttctcctttagcttctctatgcaatgtctaaatcaatttatgtttgttctttctaaattctcttcttttgcttcaaaacttttttttttccctgtttttgaggtttggtgaaatgtgttaatcaaatggtgttgttagtgtttttccctttatagaatgatgctagatgcgtcaattattattattattatttgtttttttttttttacaaaaattgaatgttctcctgttcatttacataatgctgttttttcgtgtttggttgctgagcggtgttgagattagaagaaaatctattcaaaattttcaattagttggcattttattgtcttcaagctagatggtatttttttggcatttttttctatcccaagaaaattgtagcataaattttggcttcttattctatttaatgaagcttaattaagtttgtttgatttggaaaattaggagggtttgttttgtgttcactaatgtgttttgttcatgtttcagttgatataaatttgtactgtaattttccacggtgg

SEQ ID NO: 61025 - DNA, 604 bp, Populus trichocarpa
  Intron number 3 from transcript POPTR_0001s35640.1 (locus POPTR_0001s35640) derived from phytozome v7.0 (chr-ID scaf fold_1; pos 33972742 to 33973345)
gtccgagcacgaaagccaggaagaaaatccagcaggtgtgttgcaaaaaaaaagtattagttgtttagtgttatgattctgctttctatggtttttatgcaagcaatgaagcaatttttgggaccgaaatgtaaaagatcagaatgatggtgaacatacctaggtttaggaaatgattttttccagacattgacgagttaccctgatggtataaccacagttcttagcttagcacaaactcagactagctttaatacagcaacagcaacagcatatacagtacagtagtgatttgttacaaggtgagatgtgttcaagtgatggcactagctcgattttatgctgtcaattattttgcttaaccttggcaacttgcgcggtagcttcatcaaagtttactttgataatgatgtctttcgcttctattccttctgcgtgctcttttgaaagaatattgcttgcatacttcttctttttgagggaagccaaataatctcgatttaaatggttgcgaaacaacatttcagttctgccttgatgttgagttagcaaacttacgtagagctatatttgtattctctttaatttgattatattttcacag

SEQ ID NO: 61026 - DNA, 312 bp, Populus trichocarpa
  Intron number 2 from transcript POPTR_0008s13660.1 (locus POPTR_0008s13660) derived from phytozome v7.0 (chr-ID scaf fold_8; pos 8994827 to 8995138 reverse strand)
agattcaaaaacatctagattgctctaaaattcaggttttttatttatttattaatagttgtgattgaattatgtatctttcttgataaagagttagagagtaaagatttctgatatgtatagaagtctttaatgggattaaatttatcagattgttaatctttttctgtttttcttatctctcaatcctgccattctttcatccccccttttgatagaattttatttgcaaatgactgattatggtttctgaaggaaaactaatttgattcggcagacctataagatcaacggtgaaaaggctattcatct

SEQ ID NO: 61027 - DNA, 692 bp, Populus trichocarpa
  Intron number 1 from transcript POPTR_0006s29020.1 (locus POPTR_0006s29020) derived from phytozome v7.0 (chr-ID scaf fold_6; pos 26515757 to 26516448)
gcaccgttacaatcttaaacgaaaggtgggtttttttcttattcttttagtgttttctttgcttatttgtgtttttgttaatgttttttatacggggttttgttgctttagagtttagtttgagtttattgcatcactgggtttttgttgtttttttgaaagagatgcttataatggtggaaatttttgaggttttgagtgataataattgttctgttctcgtttttttttcagtctttagaattttaattgattgttgttgagtgaatgatttgattttgttttatttgttgatagctgtaatgatgttaagctaacgtactggtgtgcttttgtggtttgatggagattaagctaagtgttgattataagaaataacttggaagtatagcaaaagccattgtgtttgtaaataccatttcatgacagccactgtttttagtaatatagcatcgaaatgaagtgtgtaattcatgaattgctttagtggaagaatcaacattatcgtctagtcagagattaaaataacagactttgcttagggtttctctgcgattggtgatatcaataagaagactaatgatatagttttccttgaaaaaaatcatgaaaatttctcaaatttttacctttctctggggttctgttaaaatctaggttgctggtgttccgggagtgactgaagccctgtt

SEQ ID NO: 61028 - DNA, 396 bp, Populus trichocarpa
  Intron number 1 from transcript POPTR_0003s04540.1 (locus POPTR_0003s04540) derived from phytozome v7.0 (chr-ID scaf fold_3; pos 5249547 to 5249942 reverse strand)
ctactaatactgccacggggggtgatctctcaacttcatgtcacaaaagcaccattattattgtgaatttcttaacataatttgaattgagattaaaagttggatagatttgtattgtttttgtgcctcaaaactgctttattcattttgaaaaccaaacaatcaaaaaaagaagtaatacttggtgttctgtcagtacataaccaaacaagcaacatgatacataacactggatacaaaacattagatctctatgttaagtttctacttgaagtagaaacttgtcattgatcaatcttcagctctatctactaagttcccatttgggggttgggggtgtttgttatgtatcatgttgtaggtacaacttgtgcaactgtcctgactcaggctata

SEQ ID NO: 61029 - DNA, 865 bp, Populus trichocarpa
  Intron number 1 from transcript POPTR_0013s12470.1 (locus POPTR_0013s12470) derived from phytozome v7.0 (chr-ID scaf fold_13; pos 13133259 to 13134123 reverse strand)
tattgttggttcagttggtaagaactttgacaaaggtatgttctgaattctcagtatctttcaccacattgttaaattcatactatttgttagtttttattggtgcttggttatatatgtttctagtaattatcccatatcaagtccttaatttgagctttaattaaaagcactatgttcctctctagatcattcattctgctagtagtttttgcagaatgtgtttattgaacctagctagacacagtgctggaaatttctaaactgcgaagcatacagtaggttgtctttttatgagctcgtgttggagtgcttaatccttattcgaaatcgagaaagaagttccgggggatggataggagatgctcagtcatgattcagaccattactttattgtttcctcaaatttaatgattggctttagagaggttacagttgatctcagcttggggtgtagcttcttgctaatagggtaatctcataggtgttactgctgctttctgctactgctgtgtgattttatagttgatactatttctgttttctagtttggattgtagcttcttgctagcaggcctgatactttatgtgcactggttcaaaaaagatctcaaatgtagttttaatcaaacagggatggactcttttctgcatgtcaccctagaatctttttcataatccattctgaacatcataaataaatccaattttcttataaaattgcactattcttacactagttctataaggtgatgctgtataacataattgaatccccccccgccctcctcttctttcaagctcacagggccttaaatatgtttctgcagtcacacgtatagaagcgcggagcgagaggcttgag

SEQ ID NO: 61030 - DNA, 607 bp, Populus trichocarpa
  Intron number 2 from transcript POPTR_0005s09820.1 (locus POPTR_0005s09820) derived from phytozome v7.0 (chr-ID scaf fold_5; pos 6895142 to 6895748 reverse strand)
cgaaccttagggaacctaacctgaaggtacctgctatttcctttctatagaatggcttctgatcaaactttcaagaagcaggtcatgtatttccatttcaacagaagaattattttctcatttcaattgctcttgcttatgtaagagcacttctttcagccaaaaagatgtgcggacttgtattttatgcctttggtaatgttatttgttttgtggaaggagtgccaaaaaatagtccgttgtcttctctttttgagatcttatggttaaaactccacagttttgctaaatcagcaaacagttgttgctgctattttccgaagaagaataaaagcactgtatgagcttacttcattgttcttaagtttttgtagataggaattactccttggatgcctggatcaataaatttacgtacttgtcaaaagaaaacgcacctttcatctggttatgcgatattgcaaattgatacacttatcagtctatggtttcgttatggaatgtttttatggttgtccaattcatatgaaactggtttaatttgatattttacaccctaaacatggccctcatcattctgtcatacactgctatccacaggtgttgg

SEQ ID NO: 61031 - DNA, 530 bp, Populus trichocarpa
  Intron number 1 from transcript POPTR_0005s09820.1 (locus POPTR_0005s09820) derived from phytozome v7.0 (chr-ID scaf fold_5; pos 6895877 to 6896406 reverse strand)
agaagtaggctttttgaaccgtatgtcagcagttttatatttggtttggacaaagtttgtgactttattgtgataattagtttgaattacttgtgttgattttgattggtgaatcaagttgagaaaacttcaatctatgttcttgaatatatgaattgattttaagtttaaagtgtgctaaagttcaagcactggcatcaactatagttgtataattcttttagttttctaaacaccgtattttttcgacaatttgtctgctttgtaaaggtttaaatgaattgatgaactctgctgttctgaaaagaattgaacttcgttattgtcatgggattctttgccagttaggtgttttctgttatgtaattgtttgtgcacttagtaaaagtatttagctttatatattttgtttcttgtatttgctttgttgctcattactccgaacatgttgtctcagctttgatttgtgtttcttttgtttcactttactttcaggggagattatttcatccaagagctgacccctttca

SEQ ID NO: 61032 - DNA, 543 bp, Populus trichocarpa
  Intron number 1 from transcript POPTR_0018s13700.1 (locus POPTR_0018s13700) derived from phytozome v7.0 (chr-ID scaf fold_18; pos 13984233 to 13984775)
aagatagcagtcgccaccatcaagccgaacaacaagtaaatctctcagtctctcctatttctttttcttcagagctatcaatcatatctctttggttgctaaatccttatgtttaagtaattcttaatcacttctattggttttagaagccaaaaaggtagaaactctgcttctcattttgctgaaacagaaatcaacaatatgccctcttacaatgatttcaaaagggtttgcttagttttagattttgaaataatggtttttgatatcttctattgaatgatagtgtgattaagctattttgaaggccatctattgggtttagaagcaaaaaaagctagaactttgcttctcattctactgtaagcttagaagggttgcttagttttcatattttgatgtaaaggattgttgttatttttgcttcaaatgcagaatttgataggttacttttatttagtttggggtcatgctttgcttttggagtgctgggttattgacatctggttgattttgattattacgtcttgtgtttagagagag

SEQ ID NO: 61033 - DNA, 348 bp, Populus trichocarpa
  Intron number 1 from transcript POPTR_0011s09860.1 (locus POPTR_0011s09860) derived from phytozome v7.0 (chr-ID scaf fold_11; pos 12307367 to 12307714)
tcagccacatcaacaccagatctgaggtttatgtccttctatctatctctatcttttgatgctttcacatttattttcctcattttatacattatttatttatttattttgcatttctaataaaatttatttaatggatctatatttgattcaactgtcaatcacttgttttttggtctcacttagagcttaatccatcagtggtataatgttgttagactcattttgctcttcatgtttctgctgctttgatttcttttagtggtttttctttttagactcgttttttacttctttctttgtttgagtttaggtttctgggtattcaggtgaagctgaattggggaa

SEQ ID NO: 61034 - DNA, 886 bp, Populus trichocarpa
  Intron number 1 from transcript POPTR_0008s04350.1 (locus POPTR_0008s04350) derived from phytozome v7.0 (chr-ID scaf fold_8; pos 2441131 to 2442016 reverse strand)
tctttggagctagcaacatcatcaagtttttgcaggtaaccataagacattctttagttccatcagttttttttcatggcacaagtatccttcctccatgatgtttgagtctgagagatttgaatattaagagaagattgtttttatgtcttttcaacctccttttgctccacttaagacagaattgtataaacacaaagcaatacttacagtttggcttgaaacagttttaccaaaaattgatttttcctgaaattgtaagggctttttttaatggaaattaaagaatggatattctagggacaggtagctttagaattttatatggtttaaacttttcatccccgaccatttttagcttttctccaaataaagcgaagtagctcgctgcagtgcgcgcttcacctgctttatggaaaaaaatgatcatgacgttgaattggggcatcactatttcttgacagaacaaccataagaaaaaaaaaaaaaaaaagggaggggcatggccagattacttacaagtttagaaaggcagtcgcacactgcacaaagaagtcagaacccaaaaaaagtgtccatactagaggtcaatggatgcgctacctcctccaacacaatttgtttagtgttatagagaagtccttccacaccataacttgcacatgggtgcaatatgcatcaccaattccatgggcatggaagttggaacccattcaaagggcatgtatggaattccctctaaaggtcattgtgttgtcatgttaggaatcacatcaattactgttcaaaatattgcatttaccactttcaagattcaattccaaaactgaccattactgttaccaatgtaaaaaatcgcaggagctgccagagtctcagagagcag

SEQ ID NO: 61035 - DNA, 799 bp, Populus trichocarpa
  Intron number 1 from transcript POPTR_0004s11240.1 (locus POPTR_0004s11240) derived from phytozome v7.0 (chr-ID scaf fold_4; pos 9866132 to 9866930)
actgcaacaactgttttcccattttcttctctcaggtatatatcataagcacttgtgtcttttctacccattttccaattaacctttttgtcttattactgcattatttctccctattgaactcttaattttgatgttttgcttttagatcttatgcagtttttttgttggtttattgacaatattgaaatggttttctttttatttcctgattttgggatatgggattttttttttatataaaatgttgctgttatatctgttttgttgtctttttgtttggacaactttagatttggatccttgagagcctgataatttggattgttttggtgtgcttttgtaatgaattgaatcaatgaatcagattcaatggttatcaaggattgaagtttttttcgttttgatgttttgttcacccaacatgcaaaaatttattgattcattgattcaattcattacaaaagcacaccaaaacgatccaaattatcaggctctcaaggatccaacatgcaaaacaaaatccttgacttgaagtttttttcgttttcatcttttgatcacacaacatgcaaaaatttattgagtttctacaatgtgtggaaattttatgaattgttcccaattaaaacaaagtatcatgtttcattgctggatatgttttctagatatcattatagctacatttatcagcaaaacaaaaaactgaatctttaatttttatgagggacccccccccctcctctcactcgtcttctcaacagtcagaaatcttgagcacaaaaccctaatccaagac

SEQ ID NO: 61036 - DNA, 999 bp, Populus trichocarpa
  Intron number 5 from transcript POPTR_0003s06260.1 (locus POPTR_0003s06260) derived from phytozome v7.0 (chr-ID scaf fold_3; pos 7726130 to 7727128)
ctctgagaggtgttcgtgcaattatctgcccaaatgtacgtttttatgggaattctatgttttctccatttagttcactcatttttctgttcagtgacaatataatttcgccaatagaaatctgacttcttctctttatgtgtttctgtgccgactgtgatagtattgatttgcaatttaccatcgtagctgttaccttagtgttgagcatatcctcaatcaaattagagctcttacttatctctgcactttgctcattaaataaatttatcaggaatccgacattagtcacgcacttcatagtgtaaggtgcgcttcatcaatccaactgggctcgctatgcagattatgatgtcggcatcaatctagatgagtgcgttttgaatttcatgagaatgtatgaatatcctgtaatagtttcaaaagaagctattgatcaagatggttgcgctccagagcacaccctgtcaaatctttttgagttaatttggctttgaaatcctacttctaggcatatggttttggatagtttttcctactttattgaggccatatacagtattgaaatggttcaaatattggtgcaaaccagcagccaagtaactggactgccagtccacatctcagtgggatgtcaattgtcacccactcgcagcggatgagcacgtgggaatgagacagaaagttggtgttcaatccttgtacagaactgatatgtttgtacgcaggcacgctcatatcttagcgttcttgttgtttacttttaaccatttgtcttttcagtacaggcagccaagccgataaaattcttcagaaaattaagttaatagtgaaatcattacaagctggtatatacttctgtgtaaaattattaacattttattagataaataaaggcaatcacttgtaaatgactctctatacttcaaagtatgcgtagtaatgggcttccctgactacatgtaaatggctttccataccaggaaggcttcctgtcta

SEQ ID NO: 61037 - DNA, 762 bp, Populus trichocarpa
  Intron number 1 from transcript POPTR_0001s30270.1 (locus POPTR_0001s30270) derived from phytozome v7.0 (chr-ID scaf fold_1; pos 28801068 to 28801829)
ggaatagtattaggtgagatgctttgtagcttaatttgcattttgttttattccttgctgaaaatcttattttgattcttggagttgcttttatgtttgatacattttggtttcttttaagttaatcctctaattgatgaatttgcacagctgctgctttgtcatagatttgctacttggttgtatgactaccttctttaaagaaacaaaatttgggttctctactggaaggccatacaacatttgtattgctggaaaatgaagcaaatgaggatttattcagcctctgttggtagttgctaataccacagatgctttaacaaaatgaaataatctttaaaatgttttgccagtgtgtttagttccatttctccatgatctcactttcatgcatgagcccagtgtgcactgattatttctatcttctgtgaaattggagctgctttgaaatgccaagtggttcaaaaggagagattgttcagtttctgattatttgaggaattgaaatttgttctggtccgaagtcattgttggatgctcatgattatagtgttttttttccacccatggggtcatatttatgcacatgggcctcataaagtttggtcagcctgtgaagcttaatacattcaaagaaagtaaaagaatggtttagatatttggaatagcatgtggttatacttggcagtatgcgtattgccacatttaaaaatcttttgaactgttgctgacattaccgagactttatattcatgtgcaggt

SEQ ID NO: 61038 - DNA, 545 bp, Populus trichocarpa
  Intron number 1 from transcript POPTR_0002s09390.1 (locus POPTR_0002s09390) derived from phytozome v7.0 (chr-ID scaf fold_2; pos 6684986 to 6685530)
cattttggtttctgggctccttctcttcctgaaaggtaatttgttgcttcaaaataatctgtgttcttgctttgtaataatgtgtttctctattaattctgtcactaagtgattggttttaatttgagataatttgctcggacatggccgcccttccgcaatagatctgtatttgtgtgtgtgtatatatatatattttttttgttgccgcaacaacatgcggcttttgttgttggtcttttctttattcttgctctctccctctctattaacattggttatgttggatcttatttgagttacatatgtttgaatctttttggcgcttcttgagttcctaggcgtctattctgccttcttttattatcagtgttgatttaatttgctagttttgtgaaaaagaatacactatgtgctatttctgtaatgccttcaaagctactgtagattcgtgtatctttctactcactgtgttgaagtagatgttggtccttgaatggaagaaacccacttgtataattatttgtgggtcttggattttcagg

SEQ ID NO: 61039 - DNA, 320 bp, Populus trichocarpa
  Intron number 1 from transcript POPTR_0016s13920.1 (locus POPTR_0016s13920) derived from phytozome v7.0 (chr-ID scaf fold_16; pos 13147590 to 13147909 reverse strand)
cagccggtaacacccttgtcaatctcaggcagaaggtatgtttaattgctctgtcatttgctttcttctttttcaatctaaccatcacaacaatgataaattctaaatttggatgccttttacacgagagtaggtatgattcgtttaatataaacatcgaggattattattattttttaaatgtaatttaacgggtaaggaccacgcataaaataacaatgatgaaagttgaatacagtcaaataagtttattatcattactgtccatatatcaatgagatggcttacggcgtgtttaccattctctccagataaggacc

SEQ ID NO: 61040 - DNA, 481 bp, Populus trichocarpa
  Intron number 1 from transcript POPTR_0012s07530.1 (locus POPTR_0012s07530) derived from phytozome v7.0 (chr-ID scaf fold_12; pos 8436653 to 8437133 reverse strand)
ttctctcgttaccttctcaatattcttctccaaaggttattttcctcaatgtttttccttttcttttgtgaattttgtttgctcgtttggtttttgaagcaaatagttggattatgtgaacttttcctgttgaaagttctaaacttgttgcatttatggtcaaaattttggctttttaagctgtttgtttgctgcattgttttcttttttcttcttggcttgaattcgattattttggactattgggtattgtttacatatatcaaatttgtcttgtattttgttgtattctctattgggtgtgcttcgttgatcaaagatcaagtctttcttgaagataatttatgtttgctgacatatacttattctttgaatagtggagttaataaagcgtgtcaggagctgaatttcatgtttataggcgattgagaacagtttttttttttttgcagatataaaagggtaggttatttggatacag

SEQ ID NO: 61041 - DNA, 332 bp, Populus trichocarpa
  Intron number 1 from transcript POPTR_0007s11280.3 (locus POPTR_0007s11280) derived from phytozome v7.0 (chr-ID scaf fold_7; pos 11624568 to 11624899)
agtctagaagtaagtgtctgtctctcaaacgtatatatacattaaattattagtttttgtttgtttgttttgattaataataggaggagggttttgtttgtgtcctaaaatttgttacccttttcttggggattggatgaccagtttcaagattctcgtcgtcgttttctaccttcttctctgctctgtgtactcttttgtttgcttgctttctttctttcacactgtttgagataataataaaaaaaactactactaatactaaacaaatgcttctctccttactatgacgcctagctgcagccatttctgtttctgggcctctttgcttt

SEQ ID NO: 61042 - DNA, 686 bp, Populus trichocarpa
  Intron number 1 from transcript POPTR_0008s05410.1 (locus POPTR_0008s05410) derived from phytozome v7.0 (chr-ID scaf fold_8; pos 3133939 to 3134624)
aacccggtcaacaccgtgttcggtgagtatagttgttcaaagccttttattttgcagtagtagatatctattttgttaaggtttcgcctttactgtctggaaaattggaatgtgcttttaacttcttagtgtttaaacaacaagaatgagacagttacaactgcaatgtgcaattgatggactgatcatggaggattaggtgtagagcaacaagatttttagtacaaatcagcctgaaatggatgcctattttagtctccttttagagaaggattaaattaaatcacgtttcctaataacgtgcggttaattacttctatataatgagagatacgatctctgattgacttgaactgtaaattttgttctgatttgttagtgtttttttttttttgaccttgtgtaatacataaccaaaaaattaaatcatgtctggacaattgaaatttgattaggatttagtcttttggtttactagttgagagaaaagaagaagaagaagtgtgtttgaatagtgtgaaccaaaccgtcactagattgataaacttgtgcgaatccgaattatatataagtgaagataaaaaaaaaaatatccggttatcaactctacttgtcaattcggatggtgctcctgtattaaatctataaattattgatcactgatggagtatttgcatgattcacag

SEQ ID NO: 61043 - DNA, 755 bp, Populus trichocarpa
  Intron number 1 from transcript POPTR_0011s15920.2 (locus POPTR_0011s15920) derived from phytozome v7.0 (chr-ID scaf fold_11; pos 17930090 to 17930844 reverse strand)
ccaagagggctcctgtaaagagccagacttttcaggtttgccgttttcttttggttttttttctgatattatttttcagcagaagtttcgatttttgagaccctgttgtttgtgcattgtttagcttatttttggggttttatgttcgtatttcttgttttacgagatgggattttgttgttttatgtaatggatgagtggaaaatgaaacccagatttggttttgctgaaatctgggttttttaggtttattttttctgttttatttgatgggtttttcgttttttggatgatgggtggattggaatggtagttgtagtgaatttttatatttttggtgctggaattttggaatctaagagtaggataagtaatatgagaagcctttttttttgttttccaatgtgttaagtaattaaatgtttgaagagacaaaaggatgggttttcgtgaagaaaatgaaataatagcagtactatcgtgtcaaattaattaactaattttctggatttttgtatttagctaagaatgataggtgtgttgtttcagttaatgaatctctgtaaaactgaaagagggtttcttttgcttctctggtcttatcttgttcttgatgcaatatggttgtgtttggagctggcttttaaagatcttacttttggatttggcgatttgtgttcagaccagaactgttgatactttttaaactaatgcaagcagtatttggatatataaagacattttgctgaagaaac

SEQ ID NO: 61044 - DNA, 990 bp, Populus trichocarpa
  Intron number 2 from transcript POPTR_0007s10180.1 (locus POPTR_0007s10180) derived from phytozome v7.0 (chr-ID scaf fold_7; pos 9907287 to 9908276 reverse strand)
agaccctacgcttcttcaagcttatattctcaaaggtgctctaattctcttctccctccctccctccctctctctctctcttgtttagattagattagattgcatgagattgctgaagcaattattgcgtcttattttcctttttatcaattttatattaaggaatccaattatctgcttgcatgattgatttttattaccggaaaagaattttgattctgcgtttttgaagggagaaaaacagtgataactggtgttgcttgcttgttagatgtgcaaataattggtttataatgttgtcttctctgtctctcggaattggtaatgcgttttagtgtctttattcatcaggtttgtggatttctggctgagtggtgtaggagtcgctattaaatcatgtcatgaacagtttaatgtgaaaacaaaatttgaatttagttaatgaaaaaattagtgggctatggaagtggtaatggttttccaaattctgagtgaaaacaccagaatgacaattggttcattattgtggaagaaaataggtgtataattagcatttatcagatagaaaataaagagtggatgacacgcaggagtatgaacatcatgtatcgtcttcaaagaataatataatttggaatgtagattctcttttttctctcacatacccctgcttctctttcagaaatgtaaattgatcaaaagttaaaaacttactttgcttgcctgtttgaacaaggaaatcatcattttgttatcacatccttgtttggttgtttggtgtaagtgtgtaacttctgatccatgcgagaatagattggattgtcttaccttattatctttgaagaatgatagaaagtgatataaattggttttgtgactaccaaatttaattgagaaaatattatgcattgggctcatgtgttctattctgatgctagcctcctgctcattgtcatctaggtcgtgcattttcatccctaggaaggaaag

SEQ ID NO: 61045 - DNA, 544 bp, Populus trichocarpa
  Intron number 1 from transcript POPTR_0011s11520.1 (locus POPTR_0011s11520) derived from phytozome v7.0 (chr-ID scaf fold_11; pos 14267979 to 14268522 reverse strand)
ttgtctcttatcggtgctgttatttgggttattgggtgagtactcttctcttctttcctatctgtttttcttcttttttttcttttttttttatgaaatttactctgcatttgctgtgtaacccatgcaaatatacatttgatatatataaactaatcaagaatgcaaattcttgttaatttcctcaaccccaaaagagaaaaaaagaagaagaaagcaaattcattttccttttaataaggattgtacgttcttggttctcattcccataaatatatttcactgtcttgcgcaggaaaaatgcacagatttaattagtctgtgattcttttttttatcagaaaatacttcgtgtttcttgcctcaaatttccatgtttttattacatttagacttcttcatttccccggctctttagaacttgatcttcatcccagtcagttcgatattgtatttcttattgggagtatcgtcgatgattattgacaaaatgaataatttgatgacaggactgtgctgagctgcctctgcccttgttgcattt

SEQ ID NO: 61046 - DNA, 630 bp, Populus trichocarpa
  Intron number 2 from transcript POPTR_0015s04260.1 (locus POPTR_0015s04260) derived from phytozome v7.0 (chr-ID scaf fold_15; pos 4319001 to 4319630 reverse strand)
cagcacgaaagacatcaaattctaagcatccgaaggtaatcatcctgtttattttaggcatttaaatactgcttactgaagtatttcatttgattatcatactgcttagatccttttatttttatctagggatccatttctccattgtctgaatgagttttttggtgaaatatctttatacgagttatacagccaattacagtaactcagaaataaattattgtaaaaattcaccttgcatggaatatttccgttatgagtatgtaatggtgcttggtactattagaagcaagtaggtgttttcattgagttgaagggtcagtcttcgcgagcaccaatgtatgtgagcatgagcttttttatttactaatcatggccttttcaattttagaattcgtctgaagcctttcttttcccatttgtgcctcatatccctatctctataggtgtttcattatatgcccaaattttacaagtttaaggcattgaaattttgacaattctgaacccatgtaacattagtggcttgagttttatagaggtgtttgagttggattatattagttgtctttataatttgaagttgaatgctttttcttcaccaaggacacatcatgttgatgtaggtta

SEQ ID NO: 61047 - DNA, 464 bp, Populus trichocarpa
  Intron number 2 from transcript POPTR_0002s15980.1 (locus POPTR_0002s15980) derived from phytozome v7.0 (chr-ID scaf fold_2; pos 11912384 to 11912847)
ctcgacaatttttggtgcgctacttctacgccatccactaatgtacttggattctatgtttgcatttttaatttcattatgcagagtgccctttcggaaacatcaacaactcgacaaatttttttttccttcattcgagcaggtgccgtgttttaaattatactaagaggcatggactaccttcaacgaattagtatgactaggatcgaatcgctttatttacatcccctgtttagttagcaataagacaaattctggcatttctttgttcaatttgaggtctattcgtgaatcaagccttgcatataactgatgaatgccaatctgtttatgtattctcattgaggtcacaaagacctgcttgaagaaataccttggtttgagtttactgtgtcataacttgaaaataattttctgttacaataataggaggaagcgagatctgttggccagctacggagtca

SEQ ID NO: 61048 - DNA, 885 bp, Populus trichocarpa
  Intron number 2 from transcript POPTR_0005s02560.1 (locus POPTR_0005s02560) derived from phytozome v7.0 (chr-ID scaf fold_5; pos 1638039 to 1638923 reverse strand)
ttttcattgctgctgaaacaagacgactcggtatattataagttttgtgtggtagagattacaatttgttttttagatggattcttgtgtgacatttagtttgcattagtgcccttggggatgatgtggctttgctactagacattggaaactatgattgtgtggttaaacttgacaaaaaattagcgatgaagatgttatacaatcacatagttgatggttttctcatcttgaaggcatgagctggtgttgttcatcaatgcatgaggccttgaacacccatatagacttgtttatttgcggcagacagatatgtatccatgtacgaatcatttagagactgaactgtactcgcgtgtttatcaattggtaaaggaagtgcaaatagttcaataagatagctgtagtctttcgtcaatggatgggcatcaaactctgtgaaaaaaagagggtttttttttcccaacgacttgctgcttgttttattaacctttccttaatcattttgcaggttccatgccagagaatacccaacatatgataaagaaatatttccatacaacatgggatattgtcaaacaggtaaactggtaaaacttgcatggaaaaaagtccactggctgttacttgctaggaataacaacttcagccccttaatttctaaatgtactgtattaaatataaccaactcagaataacaatttttcatcccttcatttcttttgttcttagttttgaatagtgtttttttttctttgtcgactttttaacttgcacctggtgaagaaaatgatcaaagaaagagaaacaagatgttgtgaggttttcaaatctgttagtgcttgtgctaacgtcttttttccctctcaggttctactgtcgctt

SEQ ID NO: 61049 - DNA, 545 bp, Populus trichocarpa
  Intron number 1 from transcript POPTR_0013s01180.1 (locus POPTR_0013s01180) derived from phytozome v7.0 (chr-ID scaf fold_13; pos 645520 to 646064 reverse strand)
tcaggtaagatttttatttacatgttcgtttccttctgttttctttggttggctggagattattcattctagtgaaggttatatggctctacaatgcttgtgattttggcaatgctggttgtttaaagaaagaattgtctgatttacttggcagttagtgtaattgtttctgggctctctatctatttatgtgtaaacatctagcattttttagatttttgcttcctgagtgagcaatgtagctaatgttaggtgtgcttgtgatttaaaggtctaatcttttgggtcctagttgtgtttcaattcatctttggagcttcttcagttttaaaattggaacttgatggcaatctaatttggctgatggattctgtttgattattttgtgaaatgccatggtaaattttggtttttgatgagagaaacttgcttgtttgaatgtttctcatggttaagaaagaatgtgatagaatttattctgacttggtttttctgggtggtacttattgttgaaactgtatcgattatgatttgtagataataga

SEQ ID NO: 61050 - DNA, 430 bp, Populus trichocarpa
  Intron number 1 from transcript POPTR_0016s06280.1 (locus POPTR_0016s06280) derived from phytozome v7.0 (chr-ID scaf fold_16; pos 4216729 to 4217158)
atctctaaagcatcatatttggaaaataaatccaggtaaatgcaaattctagtgttttttattctttgaagtatcttactgtgtatgtggtaaaactcttgatgttttttcttcttaactcatcacgaaaagtacattaaggatttatgcatagattttaaagaaagaagaggtgatttgacaagagtgtgaaggttttttaatgggattttttttgtttttcaagtggtaaagtttgtatctttctcaaatgccaacaattttacaaggagatttgcagaaattcacatttgattgcttgaaattaaacatgatattgattctagcattttaacattcgtttggtactgattggtgggtgggtatgatagtttattggctttaattcatggtttgtggaatgaactttaatgtaggtgaaatcataagc

SEQ ID NO: 61051 - DNA, 627 bp, Populus trichocarpa
  Intron number 1 from transcript POPTR_0009s02380.1 (locus POPTR_0009s02380) derived from phytozome v7.0 (chr-ID scaf fold_9; pos 3126649 to 3127275 reverse strand)
atccttaaaccttgtcaaccttcacctgagtgcaggtaaaagagctctcaaccatatgccattttacttctttttttttatctgtttgtggtaatactatttaagtcttttttttatttgtttgtggtaataatgtgaatagccaattaaaggatagatatgttgaagtagtctaaataagtgagctttgtgctataatggacttggaattttctggaaattgaatagggtgaaacgggtggccaaatgtattaattccactcctcaacaaacgagggttttctgtagagaatcttcgcaaagttgtcttattagtgtagtcaacaatatctcataggctcggattaaagctttttggttttgactgaaagtgtttcgtaatctgcaaaaagttgcttggattgcatgtacatgtaattgtgttgaatcaagcttatcaataaatgtttattagtgtgcattattgtctgtacttcaccttatgttttatcctctacgttgcgtccaaaaacagcaatttattatcctctttgattcgctctttatggtagttgcctttttctgatttgaaatgacctgttttgagctttttttaaatcgtcattgttcatctgttcagacatattc

SEQ ID NO: 61052 - DNA, 295 bp, Populus trichocarpa
  Intron number 1 from transcript POPTR_0014s01170.1 (locus POPTR_0014s01170) derived from phytozome v7.0 (chr-ID scaf fold_14; pos 1118840 to 1119134 reverse strand)
gcaaatttgacagcagtggtttgtggaagatgctgccagctgccagctgccatcaatcaattacgtttttttttttaaaataaattttatttatttattttattttaaattaatattttttaatgtaaaaaatattaaaaaaaaaaaaaacgatatacttcttgctttcaagttgaacgcatctcatcattcaaagacactcttcatttcatctctatttcacaactgtcggaccattcttatctctcttttcctcaatctttcttctttgatttcccaaagaaaacaagagaat

SEQ ID NO: 61053 - DNA, 243 bp, Populus trichocarpa
  Intron number 1 from transcript POPTR_0017s07630.1 (locus POPTR_0017s07630) derived from phytozome v7.0 (chr-ID scaf fold_17; pos 5937469 to 5937711 reverse strand)
ttggcagagcctgtcaggactggggcttcttcgtatatctcatctcttttcatgtagcaaggaaagctcttcatgttatagaaatttgatcttctagttgacaagtgcatgtcatgctctgtatattgtcaaaaaatacaagtaaaagaaaaacatagcaagagaactaggttgtttttctttgatttataacgtaaaagaaactttcagccttcatatttcttaattattaggtgatcaatc

SEQ ID NO: 61054 - DNA, 656 bp, Populus trichocarpa
  Intron number 3 from transcript POPTR_0004s12450.1 (locus POPTR_0004s12450) derived from phytozome v7.0 (chr-ID scaf fold_4; pos 11549088 to 11549743)
acacttgcaactagggagaagctctcgacggacaggtatctccgtggccttctaagctgttgccttcatgcttcttgcaaacatattaggagtgcatctttatttttgtttgactatggaatataatctctctccataatgtattatatatggagataaattgtttttcattgactttatttatggaccagatttgtcaagatttattcataatgtgctagttcgtttctagattgagcgatgaaggggtcttttccttatgtggaatatttactacaatgttgattggaattcaatttcaccagcgaaactgagcatgacattcgtgtacgaggaaataatatgataatgcagcttgtataacatggtggtggttctttctatgtatcaggattgatgaatgaggatttatgtgctgcaacaaattcttttttcaatgcaaccatacaatatacatgttacaatatgcaatgagttttatttgtcagaatcatggccatgatcctcatcctgcagcttctttcctgtaacaaaaatatatagtgtgggctagtaaatctttttcatttgtgatagaagaaaaagagatatccttcatatcagggttggtaggtttatttggagtttttattaagttgtttcaggtgtttgcagaa

SEQ ID NO: 61055 - DNA, 1070 bp, Populus trichocarpa
  Intron number 2 from transcript POPTR_0003s01040.1 (locus POPTR_0003s01040) derived from phytozome v7.0 (chr-ID scaf fold_3; pos 918741 to 919810 reverse strand)
tctgcatcagatactgatacaaaacgtgctaaacagtatgtcctttgttactcttcttcattattcaatacctcacgcttactttgatatattacttggacatggagcatgaatgaaatcacgttattggtgtcatcatttaatcttactagtgccctcctctcctttctgtgctcaatgcatatttctttgatgcactggatggatcaagccccattaatggtgtccaaatgtgtattattgtaagatgcattacaaatagtaatgtaattatttcaattatttcattatgtggatcaattatttctgtaggttgtggatcaattatttctgtaggtagattgcatgacacaaccttaaagcataattactggagagctgattcatgaactctgattcttaatatgaagcattacaagtatgatatccatagactcaacgcactcgtgaccctactaaaataaagcaccaaataattcttacagtattaagctcaagaaggacaaaagtttccaaaaagaatagactaatacaaaaggaaaaaaaaaaaaaaaaattccatatcacagttcattctgtctactttatatgaacttgtgaccacctcttggtgcagaattgtgtactggtctagggtagattcagataagatcctattctttcctaaacataactctttaacattttttttcatcttgttgaggaggatgtgtttcttccttctgcattttctacttgacttccttggtaatcatatctgtgggcgacagatatctttctttctctgatctatgaatatgctgtggcttatgctatttttacatttctgatgtgtaaataaccaatctaaaatttggtatgatgtctgactgttagatgtttctgtttggtagttattttagagacctgtttgtagaagctagaatagctacttataatatgaatgatatgcagaaatgagaaagttcatgtactctacaatgagtcgaaaagcgatacttttgtctataacacataaaatgatatctaatgcaggcagtttgcccagcgctccagggtccgtaaacttc

SEQ ID NO: 61056 - DNA, 744 bp, Populus trichocarpa
  Intron number 4 from transcript POPTR_0001s44160.1 (locus POPTR_0001s44160) derived from phytozome v7.0 (chr-ID scaf fold_1; pos 44641764 to 44642507 reverse strand)
acctagaggaaccccctgctgaagaggtaatgctgttttttttcttcttttctgtcactctatgatcaacttatcagttgcctagctttcttttggttggtggtcctagctgtcttctttgtggcacttttttctgaagttgtaggggtgccaattctgtgcaatgatgggagttcgtattgcaaaattctaacatccttaactaagtatcttgcttgtattggagaaaatatagtaattaattgtcattttctccttgaatcttggtccatttctttgattatatggaattgttaggatgatacttgttatatgagtataattcagctagcacaactagttggtgtattaagatatattgctaacatgtacactctgggcatttgtttgtcaaccttgttttacttttatgaattaaaactagttttcctctatctgctttcactgatcagttcttgtatcatttgaatcatttcactgctcaaaattgttatgcttacatgatctttgcatattcagtgtgatatttgtcacatctattctttctaaatggtgttgagcgcatgtatgtcctgttcaaaattattgcttacatgagctttgaatattcagggtaccacatgtcacatttatctgttcatgttctaagttgctgggtaaatagatgtctttttctgcgaagcagttgtgctatgctttttttctgttgatgaagtactcattttttaatttgttcattagata

SEQ ID NO: 61057 - DNA, 1029 bp, Populus trichocarpa
  Intron number 1 from transcript POPTR_0001s26020.7 (locus POPTR_0001s26020) derived from phytozome v7.0 (chr-ID scaf fold_1; pos 25115356 to 25116384 reverse strand)
cacactctgccaaggaaaaagaaaaaagaaaagaggcaaagacacgtttctctactaacttttgatcaaaagtcaccacaatcaggcatgtaatccctgaaagcagtgctctctcctgttattcccatccttttgtgcctatgtttttgtgtatatctgttgtatatatcatcatatcttttatgtttctgttcttagcttagcagaggtatggttttgttttgattgctcgtgagttgcactaaatttagacactgacgcaagccacacaaccacacaaatacacccactatgttactgctttcaatcttgttttggttcctctacttccactgcaaaaaagaaaaaaaaagattgttttctttaagaagttgaaagctgattgagtaaaatattggcatgatatgttttcattaattgttataatatgtgatagcatgaacgtgttgatagaaattatctgtatttcttgatcattaagcacgcagcatgctttacatttccatgtgcaatcgaacttcttagaaaaaagaaacgcttgattaagacatgatgtgctgatgcactctctatttgaagaaaaactcaatttgtattggaagtagaagaactagaggtagatacaagatgtagttaagatcatgttgtgtttcaaatttaatgtagtgtctattttttaatgattttttttgttttttttatataagcaacctataagaagtagacaatgatatgccaaggagtcatgcgtgtggtttaacttgaaaaatctacttaatcgtctcaaatttaaattgttggatggctggctggaaatttagggaattagaatacggttattttcctattatttgtctagatatatttaatgtcttggagttaaaatcagaccattatgaatgaacttgcctattttgaagtcaacagcactgcatgaattgtccaaatgaaactgcctagaatgaaattctaaaattttagctcgttgacacaaaaatagtttgttggtgattttccataggggggaag

SEQ ID NO: 61058 - DNA, 528 bp, Populus trichocarpa
  Intron number 3 from transcript POPTR_0005s02570.1 (locus POPTR_0005s02570) derived from phytozome v7.0 (chr-ID scaf fold_5; pos 1639833 to 1640360 reverse strand)
ttcttatccgtgccaaagaggttcgttaaacccattttatagcttgaatggcaggatcatgattatttttcatcttggcaattttgctcttatttcatgttactgcccatcacattccaaaagcaatttctgtacttttctatctattctgtgctcattttcctagttctcttcggcagtcaaaatagggggccatcttaatgattgttgatttgtaattcgagttaggatctgaagaatgaggatttgttgtcttttcttaatttctttgcttttgttctccgaagactgattttagaactttgtgaggtcacctcttgtaattcaaattctaaacaccattctactgtcattatttttcaggcagtaataaacaaggacgtcctcacagaacttctggccaagcacactctctctctctttacaccggggtgttttgttcggctcaaatggatgttctagcaggttgacttatctcttcaatgccactactgtctccagattctttggcaaggtcaggaaaagata

SEQ ID NO: 61059 - DNA, 654 bp, Populus trichocarpa
  Intron number 2 from transcript POPTR_0017s08910.1 (locus POPTR_0017s08910) derived from phytozome v7.0 (chr-ID scaf fold_17; pos 7551990 to 7552643 reverse strand)
atgtaagggtgttgtttttctaatacatgaatataagcatgaggtacgacacagaaattagatgtcacctacctaattaaagtcattcaccaaatgttttattgttttaacgaatatcaaggcgaattttttttttttttaaaaaaaacattttcttttcaactgattttgttggagacttattatcatcttcatgctagagttattattctacaggagttctggtttaccgactcagcattgtttagttgaagttttccctcatgaacatagagattaattgattatggtcctatgaagtttacaaaagcttggtccccacccaatttaatgatatcaccaacattttaataaaatcactatagttttgttagaatgggggcctgcccccttccccgatgggttcccttgatccacgtcctgcattcatgcaattttgcttcacgagaaaagatttttaagacagaacgctataaaatgctgataacatggtatgtatttgattgaggaagtcatcacctttttctcttcttagttcattgtattccattatgcattattcactgtaccttctctcttggttttagtattcaactttgtactagttgtttctctgtttcttttttgcttatttgaaaaaatgcattgcaggtg

SEQ ID NO: 61060 - DNA, 750 bp, Populus trichocarpa
  Intron number 2 from transcript POPTR_0019s01550.1 (locus POPTR_0019s01550) derived from phytozome v7.0 (chr-ID scaf fold_19; pos 1368708 to 1369457)
caagatcaattcgcagacaagcagctgttgccaaggtgaagttttcaaagttttttttttcctgtttggtcaactgaatttgaatttctttttcttgcaatagtactttaagtttggcttttttaaaaacacgttcttttatgttttgtttgtaattaagaaagtttttggttaatttttggattcacccagaaaagaaattacttcagatgggaaactttacttggattgccgtgaaacatagataagagtagtttaaattgaagttaattgagtaaaaaattagcattagcccttaatcccagttattgatttcttattcgctaaactagttaatccttgaatcaagtcatttacatataattgtgagaattttaatgaggtgaaaggatacatgatagatggcttgttagactaaatattaaaagttataatatgttgagaaaggaataatgatgatggaatgttatttcaatctcattccatggtgttatgattgaaagttcttgtgtaataaaccagctccataagcatgatcacattgcattgataatccaatcggagcttttacaaaagcttattaatgtaataatcggtgatgttagccggttgaagtcactgctgaacgtgtaagaataatctactaaaattctatagtgttatagcaatttgattatattattgaaaacatttaacagagtgcaataatctgcaggtttcggaggttagttcacgtttaagtagagttgg

SEQ ID NO: 61061 - DNA, 905 bp, Populus trichocarpa
  Intron number 1 from transcript POPTR_0001s09370.1 (locus POPTR_0001s09370) derived from phytozome v7.0 (chr-ID scaf fold_1; pos 7149925 to 7150829)
gaaagagaaaatcttggacaaccctgaaggaaattgtggagaaaagaacacgataggagtcgaaacattgtaagtttgacaaagccaatgtttatttaaaaaaggaaaatcattttagcattttagactgctgctgatattttcatggccaatcttttttcattgctgtgtaaacaattctgaaggggaaaaaaagaagagtttcaagctttattccagaaagaagaaggtcacaaaatggggacccagttttggaaaataacaaatgtatataccccaccacctcaagcctcttctaccaaaacttgacgtttttagtgtgatccttgcacgattaatttaataactcgtagcaattactccttaaaaaaataataaaaatagctattgtctggtttgttttattgatcagacgcggtttttattctggacctattttgttgaggatttggagtttgtgtggggtaacagaattggggagtgaaaatgaggagcaaactctcctgagcttgaagcggcttctgggaaaatgtacatttacagggaaaggaactgaaatgattgatggaattcagagttcttgtttttcttctttcaattgttttcattccttgattgcttctagggttttcatgtttgagtaattccttgttatagggtgttgtggtaaagttaggttagctaattggacaattttgaaatttaagctgtcaactgtttgtgtgtttaaatttgacgtggagatgcatcacttgttttgaggacctttgtgtggaatcatggttgcatttgctttcttttttcctaaatgttcatgtcatcgtcagactcaggttataattttctgtttctggtttccttgtcttgcaggaggatcctgtgcttctagctcctgaaactaaaga

SEQ ID NO: 61062 - DNA, 897 bp, Populus trichocarpa
  Intron number 2 from transcript POPTR_0001s09370.1 (locus POPTR_0001s09370) derived from phytozome v7.0 (chr-ID scaf fold_1; pos 7150823 to 7151719)
ctaaagagcaaaagccgggcattgcagctatcaaggtaactacatggaattgctttatggtgttccataggctttttcattgatcatttttgtgttctatgtcccatctggcggacacacactcatgccattggtatttatatcagatgtttgtacattttgccattttcactttattcctcacatttgcttttgatgctaaatattctaagtggtgaagcaaaaacatgattctctatttttatggacaaagatgttattttagctgttaccatcagcataaatatcgcaattcctgtgttgatggctcaaaagtcgatcatctttactgatgtctttatctaatgatatgcaactgattgttaactgatctaaattcttccccagcctattcaattgaattaattgagattgccttcattttatgcttagcattaacatttggttcctgtttcaagacagaagagatgaggacagtgaaaatagaagggatattccctctttaaacaggagtaaagaaattcactccaaaatttttctagagataaacttattttatttctatgtcttcatccatccaactaaatacgtttctatctcttctgtgtttgtggacactaaccaaatgcaaactaaaaacttccatgtcatctctttcctttgagaccaacggacttggcattctatttacaggacgttactcagaccgttgatggtatggtgatgccgtgatgggcactggacaatgattatatcaccctgaagaggctgagaaaagtggtggtggaagctggcagatacgtgacactagggagctattctagggagctattctacagtacccatcatgttgaggtcccagcacaagtgtgtggtgcattttgtccctgtcaacaa

SEQ ID NO: 61063 - DNA, 580 bp, Populus trichocarpa
  Intron number 1 from transcript POPTR_0003s12350.1 (locus POPTR_0003s12350) derived from phytozome v7.0 (chr-ID scaf fold_3; pos 12952713 to 12953292)
gaactaggtatgtttgtggtgtccgctgctagatgtttgagattttagggtctttgatgaagtaatgtgaaatttatgattttaaaactgtttggcgttacttatttggccttttatttgaagggttttcaaaaatattacatgtttgattgttcctgatttgatttgccgcaggctggtgtgggttgtcatgaggttgagggtggtgttgtgatgatgcagttatgaaagatgaaatttaattatggatttaggataggattaagtaagccttatataggttcaccagaatgtgttttcattttctgatttaaaagtaagagtttttaatcatcatctggcatgcaatttattaccttttcatcttcattttttacgcactggcctcactttattaccttttttttcttctttgaatcgcttgttattattttgtaaatccactaaggaactgggacttgttgatttccatgctgtgtttgtgctgcaaatgaaatctgtggaattggagtcttttgttcattctttgtattttaactctatcagcagtgttgcgaagcatctggaatctgcaaacaca

SEQ ID NO: 61064 - DNA, 533 bp, Populus trichocarpa
  Intron number 2 from transcript POPTR_0015s15520.1 (locus POPTR_0015s15520) derived from phytozome v7.0 (chr-ID scaf fold_15; pos 14762518 to 14763050 reverse strand)
atcttcttagattctgttacgtaacaacatctgcttgttacttgcatttctgttttttcttgttgcttaaataagacctctaatgatcaataaacgtgtgtgaagtttcagaataagtgtgttaattgctagcctctgcattttattctgtcaaaatctaacaaattggtatcagagcctattcctttcttgagagatctgtaaggttgagagagcttaaacacttaccgtaaacacttatcatctttcctaaaaaacccaaccaacgcaaaatgagttcagaagcctctgtgaatgtgatgacaccaccagtgttttatggaataaattatcaagtgtgggttgtttgaatggaagcttaccttgatgctaatgatcagtaggaagccattgaaaatacatatgaggttcctcctttgcatgacaatgcaactatagctcaaatgaaaaatcacaaggagagtaggcaaaggaaatcaaaggcaaaagctagcttatttgcagctgtttcatcttcaattttcaccagaatt

SEQ ID NO: 61065 - DNA, 617 bp, Populus trichocarpa
  Intron number 1 from transcript POPTR_0019s08750.1 (locus POPTR_0019s08750) derived from phytozome v7.0 (chr-ID scaf fold_19; pos 10289942 to 10290558)
tgagaaagcccttaaaagagctttgtgaagaattggtactttgtttctatcattatctttcgtgttttttttttcttttttatttatgtagtatctaatcttgatgtgtatttgaattgtaatgccgtaaatttgggatttttctttttaattgtcttgttataggctgtagttgcttcgtagtttactttccaagtgaatgtggcatgaagaaagtggatctttgagattttaggaatcattgatgttgccaataaaagcaattttatttttattaagaaatgggagcgcattcaatcttaaatcttgcagtaattactgatactcgcttctttttagaaaaaaaaattttcttttaaaatggaagaataaacgaatctggaataggacatggtagccaaacctgtagtgtctgggactatcctttttttgctttgagtttagcagattttagatttttgttttctaggctggatagtatttacgtgtctgaccttgtaatttgcacttccctttacattgttcttctgctggtcaagttcatccattgtgttcgcaccttgccaagctgatgcttttcagcgtgtttcaggtgggatcattcttgcaccagaggg

SEQ ID NO: 61066 - DNA, 568 bp, Populus trichocarpa
  Intron number 2 from transcript POPTR_0014s13960.1 (locus POPTR_0014s13960) derived from phytozome v7.0 (chr-ID scaf fold_14; pos 10223655 to 10224222)
tgttcgcttgattcggtcagcatttgtttcaaaatatatatataacatcaatgtagtaaatcgacattttcatttgcttcgtttgatagttccgatcatcaagtgcatgccgtttagttctccccagaagctctaaactgaaaccaactcgctcagcagaacttgtttccttctcttgtctctgaattaggctgtgatactaatcctagaaaaagatggaatcaaattgacgaaacaaactattagtttttttctttttaattacagtataattgtttaatgtcgaacaatctcaaagctctaagaaacgcttcttgtatatgaaaaatgcaccactaattaaacattttcacactcacaaacgcctgtgtgtatccatgtttgatctatgatcggtttggacgatgccaagttacttttctaactaagataaagctatctcactaccacatgtcatgttatttcttcctttttttttttttttttaatttcaagtctcatgcagcacttttgcacatggattctttctctaggtggttaattggaactcaaattccgatcctgcatt

SEQ ID NO: 61067 - DNA, 1060 bp, Populus trichocarpa
  Intron number 2 from transcript POPTR_0328s00200.1 (locus POPTR_0328s00200) derived from phytozome v7.0 (chr-ID scaf fold_328; pos 7247 to 8306)
aaaagaagagaatctttttcactaataaggttagttacttttttataataaatttgttattgtaaaacaacttctcaatttaaaagtttaaattgttaggtgagatttaaaaatattatttatatttttctttaacacacctcttcaagtgaaagctctttagacttgaaacttgcataaactcacaatatcttatgcttaatttttttatcaaatagatgtgaatgatgagatttgaacttgtaaccgcttggtcatcaaaactttgatattatgtcaaaaaactatttcaacctaaaaagttataatttatattattctctaacagttacttacctctctcttgtgatccaagatctttttcttttgtttaatttgacattattattaattaattaccatgtttgataaacatttttcttaatatatatatatatatatatatatatatatatggtaatttatgtacaatttttttttcttaaaaatattttggtggcatttgtggatgttatgtgtgggctgatccaatccccttctgtcagtttgaatgttctgaaaatttcaactttatcacactaataatataaaataagaataaattgaggaaaattatatatataaaaaattaaatttacattaaacgttttgttgaaagagctagtgaataactagaaaaacaatacaaagataaaatcacaagatataatccattgggggagctgatatgtatactttatatgctttaactcaacgttcatgatttatagatatttatttttctcacgataatgtcaatattaccatgtgaagttttcaggtcatggatatggtaaaaataaaaaaaataatctcgactcatataaatatttataaattaaatatttgttttaaataaatttattagattgttttaatattttaatatcaaaaataaattttttaaaaaaattattttaatcttataaaatatcccacataacagaattttttatactgattgatttttgtgtttcatggaatagtcatacttgccatcagaaacaccaaacggattgac

SEQ ID NO: 61068 - DNA, 567 bp, Populus trichocarpa
  Intron number 1 from transcript POPTR_0004s15210.1 (locus POPTR_0004s15210) derived from phytozome v7.0 (chr-ID scaf fold_4; pos 15865169 to 15865735 reverse strand)
tcactgacgatcttcgggaaaagatcatcaaacaggttctcattctttgtttgaaaccgcatctctgcgtgtttttcgttggctctcagtttcatctttatttattcttgtatcgttgcgttataattatgtttattagatgattcgcatgttctttttaaagccttttacatgcatcaattggtgctgctagctaggtttttaattccttaaactagtgatataatatgacaagtttgattggttaatggcaaggttttttggtgcaaaatgtatttttacaaatgcatggtaagaatcttggcacaccaaatctttcttagcttctcagccatttccatcatgttttttcatttcttttgttgatttgtcatgccttttttttctcttcatcaggcctgcattttcgacatccattcataaacaacatgacaagtttttggcactcgagtcatcttgcttatgttgaccaacatatgctctgttcataatgaatcccgtattgaaatgctcttacagtccgcgaactatttgtgtctaaaataggtggagtaccaactcagtgac

SEQ ID NO: 61069 - DNA, 368 bp, Populus trichocarpa
  Intron number 2 from transcript POPTR_0006s28050.1 (locus POPTR_0006s28050) derived from phytozome v7.0 (chr-ID scaf fold_6; pos 25895599 to 25895966 reverse strand)
aacatcctatcaagacagagcttgtatgtgttcttgcaccctattatttttccttagagtttttaatttgggcatctgggtggtttggttttgatgtttactgtgtattttacttggtttttggattagggtaggggtactgtatgatgcgtctgaatttttttgattctcgcgtctggattatgaggttaaaatcaacggtttttatggttaatgttttatgaagttttttgttttttctccttcaatgtgttggtttattaatgtatgtcttgaagataatgttcatgagctttaccttacatatgcaatttggtggtttgtaatttgtaggagagattgagcttgtatcaagacaaactagagca

SEQ ID NO: 61070 - DNA, 480 bp, Populus trichocarpa
  Intron number 1 from transcript POPTR_0004s03000.1 (locus POPTR_0004s03000) derived from phytozome v7.0 (chr-ID scaf fold_4; pos 2021066 to 2021545 reverse strand)
ctcttctcagttcactttcatcaatcgcaaggtgttttttttttttaattattattaaagtaaaaattgaaccttttcaatctttttttatcttttcttcaatacccatgtcaccaaatgtcttctttcagttctctctttgtataatcgcttgatcatgatttgttcattctttgatttctatgttatgatgctcacttatagcttagttaggaatatttggatcataagttgaagttattcataattattagacttgtgcttgttgtagatatcaactgtcataagttttagcttttgatttaattttgtatgttaaaaatctataataagtttattattggttcttagtatcatgcaagcttgtttatcggattttataatgagatgactgttgatttccatatgggtttttatcttgcctagactttatgaaatattgattcatgtgtaattggatttgcagcattattgccgaag

SEQ ID NO: 61071 - DNA, 823 bp, Populus trichocarpa
  Intron number 1 from transcript POPTR_0005s00450.1 (locus POPTR_0005s00450) derived from phytozome v7.0 (chr-ID scaf fold_5; pos 153996 to 154818)
gtttctctgcttctaatccattgattaataatcaggtaaatataatttactttgagcaaatttaatgattttttcccgatattattgaacaaaagtttttttttttccaaggtattcatggtcttttcttttagcagacttcaaagattagaacttttaaatcttctgcacttgcataagaattggaggtgctaattattgtttctgttagatttgtgttggtgggtttaggtttcactacaaggagatcaatttgatttgtgataattaattagagtttgttagggcatgataggggtttggttcctttcctaggttgtaaaatgaatttatatgagaaacccattcgaggaatcagtttaaaactttgtggaaacagtaaaagaagctaactttgttgggttttttcattgtggaggggactctttggatgtttgaattttttttatggcgtatttggttgctgatagagtttaggatttcgaaaagggatgtccttcattgaattttagactttcttttctgcattttgcaaactaaatcaggttcgagcataaacatgtgaattcaattttgtgcggattgtttctggaaactgaaatcctcgattatttgtattatgcatcttgatatctcgtattcataattaatcagctaattgctggcatttgcagccttggataattttcatgaagggtgtcttttctgactatatttatactgtattggaatctaaaatggcattttttttttccactttcttctcctctgaaatgaaatgttttattactttaattcttgatttgtgctaaggtggttgaag

SEQ ID NO: 61072 - DNA, 711 bp, Populus trichocarpa
  Intron number 3 from transcript POPTR_0005s00450.1 (locus POPTR_0005s00450) derived from phytozome v7.0 (chr-ID scaf fold_5; pos 155403 to 156113)
gaaaggaaagggtcttggaaaggacgagcaaggtatgtaaatagttgagcctcattcatgggaggagttgtttgaggatggtctcctatccttcttcattttttaagtgattgctttgcttgaatctaccatcatgttttcactgctgtaccatcaatagttagttaagatgttttggaatatattttacttactctattgacacatgatcttgaaatcattgaagttgaatcatgctgctttatgtttgttacttgaagcctccattttctacggaacaaaacaatcacctcaaaaacctttcctcggctacggtgatcgatgaacccatatgtcctggccctgaatgctcttaaacctcctatttccaatatagttttgattgtcagaccacaagctttactcagataaataatgccgtaggttgcaaactgttaaacatgcagatatatctactcattattgcctattggcattgtttgctaactgttccttttgtacaattatttgtggtctgctatcttgttaagtagagtgaagtgggtagagtttccaatctatcatttgcctttagtctgaatgatatgagaaacatcaataggattgattcctgtggaatgttttatttgtttatgatgttgtaattttaacaataatttttggcttttatgttcaggaatcattgagcctataaaatctggaattagagat

SEQ ID NO: 61073 - DNA, 737 bp, Populus trichocarpa
  Intron number 1 from transcript POPTR_0002s13930.1 (locus POPTR_0002s13930) derived from phytozome v7.0 (chr-ID scaf fold_2; pos 10334850 to 10335586)
aatccagagtagtaagttacttttctaacaataatcaattacatcaaacacttgtcagtgtttttattatggactgtttagggtttttatttaatctcattatctgtttttggattggatgctgaaattcggtttccaaaccctagaatcacaagctctcgctgtagatccatggattttaataaaaatttatgtgttatgatcaactaatcggcccgataaagattaattaattggacataattgaatataggctcgatacattgtgtgtagcgtgattgatttgcatgtgttttccaatcataaatttgagctatgatgaaggttttgggctacagggaaaggcgcgaaagcattcaggatggaaattttgtagtgtgtatgttttagatgcgtgcaagattgcatagttgtggccaacgttgtgtgactggaaaggaggaagggctcttcttataaatatatttaaaattttgcatgattgttgtagatgaatttttcgatcttaatatgtcaacatgggatggaagaaacgacattgaatttatttatttatttttgacgtttttcattgacttagtctgtaattgtcgtcagcaacagtggttatggttcttgttgggggctcctggttcctgggctatttcacctttgcaacctacattttgatggagctctaatttttcttctgttcttttgcagtgattatttgttcaagctccttctcattggtgatt

SEQ ID NO: 61074 - DNA, 979 bp, Populus trichocarpa
  Intron number 1 from transcript POPTR_0009s04900.1 (locus POPTR_0009s04900) derived from phytozome v7.0 (chr-ID scaf fold_9; pos 5148731 to 5149709)
gcaattgcttcttcttgaggtcacatatatctcatctcttatattttccctttgcttatataatatttagattacgtagctgcaatttaattttatcaagtttcacgtagatgaaatgactttcctgtgcctatgtgctatacggttatttttttgtttgacacttgattgctggagttttatcattcaatagctgacctttttctatgttttttctttgtggaaaacaagaatccaactttgtgctcttgactgtttcatttttgaagataaatgtttattgcctggtggggtatagcatgtaattgtaattggaggaaaatctcatgaactagccaatccaattactaatagtcatcttcttaaatctttttttattgaaaatcggttcattcttaacagccgaaaaaaaaagatactggagtctgttcttccaaccgaatcgagtgattctattggtatacgatgatctggttgctgataaacaggattgacttggagctctggctctcaatttgattttttgaaacccgttctttaggtccctttcaccttgtttttaatggttgatgtgtttatgttgtcagttaaagctattgatttcggcatcaaccttgtaatgatcttgaccatcctcgtatgtgtgctataaaaccggtgtcttgggatagctagttgtgttctaatcacgttgaatttcgattagagtgaaagaatggaatttacagaatggtgggtatatgctttttggttttgtgagtgatgtgaggcagctcaagtcaaatattgatgaagtagatagactgcagtcccgatttcacctctctattccgattacaaatgggttccgtgcaattcatgagccattttattgtcattgtttgtgacagaagacatatttcaacttgttaacgtgttacaaaatgtgtgttgcctttatccagaggagtgggcgtggtagtagctggtaaattaggat

SEQ ID NO: 61075 - DNA, 694 bp, Populus trichocarpa
  Intron number 1 from transcript POPTR_0005s07710.1 (locus POPTR_0005s07710) derived from phytozome v7.0 (chr-ID scaf fold_5; pos 5279129 to 5279822 reverse strand)
ggagctcagcctctcatctccaaacgcttcaccgggtattttcctttttcttccccccttcgattttatgcctttcctatttattatttttccatgtaaatttggtactgctagaattcaattctcttgaaagaatttgatttaaaatgctgctttatttattacatcatcaattattgcgaattctggtcatagttgaggaagcaatgttagcgttttgcagtactgcaacaatcaatcagaaggacaccaaatatgatccgggtggttacaatctgtatacataaatacttttatgttttgacttgacgtggtttattacaaaatcatctgggtctattacagttgtttcagctcttccttttatttgaccccaagttaaaatcagctacattggacgtatcttatcaatatcaagacttctttccgtgtttgcttttgtttcttgactccctgattctgacgcccttgcggtccggaaaatctgtgaaattgtgcacaatctggctgttgttttgggttcttaatctagcccaagctttaatggatccgatgaatgtgatttgttatggtcttatctgtttcttatatgttgacaaatgttattggtatgtatttcctgtgaaatttcagtcactaattcattgagtttcatgcagacgtgaagtaatcgtgactacgtctgttttgacat

SEQ ID NO: 61076 - DNA, 741 bp, Populus trichocarpa
  Intron number 1 from transcript POPTR_0003s21380.1 (locus POPTR_0003s21380) derived from phytozome v7.0 (chr-ID scaf fold_3; pos 19563110 to 19563850 reverse strand)
cttgtggtggtggattgtggaagcagtttcttgaggtactaacttgctctattagatcaatatttgtttgataaaaaagctgttttggaatttgaggttgattattgtcgtttttgttgtctgtgtcctgttcttaattttgttagttggatttgtgttgtagttttgtagttcctctatttgatgcttatgaagtttgtcttggtttggttgggatttggttgggattgaattcatagaatatactgcaagatcgaaagactgatcttgagccgtccatccatagaattactatggaatttaccttctgtgattgaaagtcaacctcttttttattactatgttttggaattctatgtctgtttagtatatcaatcattatgtactagagagtttaatgatcatcgaggacgtcacattttgcaaaaacattactgttaatagatcatgacgttgtgccagtagggtttgttcgagagtgagggattcattttctggtagaattgatggttgtttgaattccgctcttttagtagttgataagttaagcttcctttgtggttcgtaagctaacgtcttccaatgttatcactattggtgtataaatgtggcattaatgcatatactttcttcttggtgtattaggaattatttgttggcgatttctgtttcccttcttagaacttatcctaagctgtttgctttcttttctcaacaatttgcagctcccagctccgaaca

SEQ ID NO: 61077 - DNA, 890 bp, Populus trichocarpa
  Intron number 3 from transcript POPTR_0014s01240.1 (locus POPTR_0014s01240) derived from phytozome v7.0 (chr-ID scaf fold_14; pos 1218701 to 1219590)
gtactcctaataaagctcgtttgctggctgaaagggtatgtagtggttcttgaattatccatcttgttttatttatggtgacaagctggaatattgatagtttggcagccatcaatcattaagctggtgacattttattaaataaagattgaaaattattataatggatccttggacacttcttgctttgctttctttctctaacaagttaagtttaaggtgagcggctcaatttagggtggtgctgttttgtttcgtgtttttttcgtgcaacagttgcaaaaatcgtaacacagaaaaggaaaaggaaacctgagcatgcgcggacatatttataaacctgccttcaattcaataatcgttcttttctgttttttttttctttatatgttgtagtgcctggttattggaatcacttgtgtgttacatccaatccatatagtaagaacctcaatttgtaaagtttccattcgtgaacttttgtcttttgatttggcgtattgctttctgctcaaaatttgcagcaaagcatcttctgtaaccatctttcctaaggttggagatgtttgctttcctgtaccactgtaccatatatatatatcgtcaatgagcaattatttaatacaacaggagatactccttctccctcacatattaatggggttcgcagtttgtgattatggtgggtcccacttgcatgtgagaggctgttagtatactgccggagtgttgaataatttccatcatcgacctttttttcaggaaattccaagccatcactgcatttctttcttttgttttttttgtaacccatgggctgtttttctttgggacattgcttgtaactgatcaatgtcttgttgatgttgcatgatcagttaccatttcca

SEQ ID NO: 61078 - DNA, 834 bp, Populus trichocarpa
  Intron number 1 from transcript POPTR_0002s24580.1 (locus POPTR_0002s24580) derived from phytozome v7.0 (chr-ID scaf fold_2; pos 21924526 to 21925359)
aagccagcttcgacttgtcagtaaatccctatacggtactcaaatgaagaaaatagtagggttgattatcattctctccagcttttgtggaaaagatacatgtttttccttccaaagacatgatatctctcctggtatgatggagatggttctgaagcttccttgttgtatgtaatcagcagctttgcattagagttcgataaggtaggcttagcacttcgatgctttcaagtttgagttgggacagtagagtgaattagtgaatgaattcaggtgtaataaaatgttataacatcctcagaaacaaacctgtggaaacagtggcaaacagcaaatagattataatttcccgtctgcaatgttactctcagcttttgcataattagcttgaaatgttgtcaattccttgcttggttatcgtttcttagttaacctgcaagttgcaatttaaagcacagagaaagatactaaaagtctagtggaatggaagaacatactgtcattaataacaacatgcacaggtacaggacataatgtttcttatacagccaaactgtgtttctcatctgctgtgtacgatatgtcaacagggttttttgcacatagccgaataacctccagatgctaatcaaggacctgatatcccgccagctgcaataagctttcccagcttccacgcaaccatgtttttccctagcgatgactctgtggggaaagtcacccttgctgtctaagtttcaggtgatatgatctctaaattctcatttctcgatgcgcttgatgaaaatccaagctatttgattgattatggatctgtgatgcaggaaaagaatc

SEQ ID NO: 61079 - DNA, 722 bp, Populus trichocarpa
  Intron number 2 from transcript POPTR_0005s04130.1 (locus POPTR_0005s04130) derived from phytozome v7.0 (chr-ID scaf fold_5; pos 2725212 to 2725933)
aaaggccatacagggaggagcttctgtccaaagtatgctaaatgttgtactgtcatccgttttcttcttctcttcctctcattttgataaatttgctgcttgacttgcattttttgcaccagtagttcttcgggtatcacttaattttacaagcagtgtagtttttgtgtagtcaataaataatttgggttaaaattaagtgaattggatcaatgtcgagagcaagcacttgagtagagaagactttatatagaatagccttcctatgagtgtgtttggcaggactaagttttcttgataatacgcagaaatagaacttcacctgagctctcttctttaggattggtctcttctttagatagttcttctttccccttttgcatataatgaaatattgcatatcaatgttaaattcctttttatctaaacccaaaaatgagttgtggacagtcacggccgaagttttgtgctttaggtagccttgcaacattggaggggttgtgtgggttcctgtcattggagaacctgaaaaatgacttcatgttttctgttgattgtagtcattttctttcccattgaaaacttgatgcattatcatctgatatcttatttggtcaccttcttttcctctttttttgatttgcataatcttctgtgtttttggtattcttttccttttcttaacatcaaaattttggttttcactctgaaataggaatctg

SEQ ID NO: 61080 - DNA, 742 bp, Populus trichocarpa
  Intron number 1 from transcript POPTR_0008s02030.1 (locus POPTR_0008s02030) derived from phytozome v7.0 (chr-ID scaf fold_8; pos 980316 to 981057)
tcaagaacaagtcttggactcccagcaaagtccaggttcccccttaatctctcttccttacttcatcttgacttggatcagattttttacgacaagagtaaaattcattccttttttttttgtaattaattagattatcaaaacctgtcatttaaaccgacccaagctgtttaattttgcaattaattctcagaatctcttatagattctgcttgcattacttctgtttggtttccgggaaaatcagggaaaactgggtggaaaatctgtagttaatgcatgcatcgaatctttatcttcttcacatggaaaacctaaatatgggtttcgaagtttctgttgttggattccgaattcctttgatttccttgctctttctcgttttttttttctttctttgtaaccgaagagatgattagggttgaatttctgtgaattgatatttgttttagcttgctttcgcttaagatttgatggatactttgttttctttctaaatctgacgttttgtttactgttggagctgtatttgtggctatctaaatatgtttgatactttaattttatggttaatctataatcatagactaatttgtgagctgggtttttgttttttcgactatttataatcttgacgagaattttgtgttttgttgctgaggtttgaaagttgtctgatttttggatccttgacttttttttgtcaggttcatattatttttgaggatcctgaggtgaaggg

SEQ ID NO: 61081 - DNA, 841 bp, Populus trichocarpa
  Intron number 2 from transcript POPTR_0014s17940.1 (locus POPTR_0014s17940) derived from phytozome v7.0 (chr-ID scaf fold_14; pos 14494258 to 14495098 reverse strand)
ggaatttcaaggtaaacacatgattgtcatttgtatgctttttggctagttgctggattttggttctaaattaacaaattaaataaggaaaatcaagaaatagaaatagaaaacagcactagttgagtttaccacaggttctcattctatttgatagtaactgtatgagactcgtaatggagttgagcataaatttagcaaactagtacatgctttaagaatttgatcctccattaaactggacaagattacagtttaggattttaaaggttctagttcattgatgggaactgtttttctagtgtgttcatggcctcacatgttgtatatccattttgtagctcctagatgcatcttattgattctgtaacacaagcatgtttgttttctctaggttttcaattgaattataactgagcttgttctggttttgcagagagcgtagttgttgtattttacttgcatttttcaatcatgaaaagaccctggcatgattgtgttcatttgaagagaaatctgaaccaatggattgagagttttcaataaaacacctctacttttatggcttgaagtaatacatgtctgggattgcatatgatattagaaaatgggtgattgcataactttcagctatttggatgctagattgatgcttgtgagctgcttaattttattcggtggttgtagtgtgccttgacctgtctggataagcctctttaagcatttctaggattccaaaaccttctaaatttcctgtattttaattcaaaaatgattttctaatctttgttccttctttatctcaggtttctgcatccatcaatttggctgaggagtcaaa

SEQ ID NO: 61082 - DNA, 613 bp, Populus trichocarpa
  Intron number 1 from transcript POPTR_0019s04640.1 (locus POPTR_0019s04640) derived from phytozome v7.0 (chr-ID scaf fold_19; pos 4809796 to 4810408)
gccctcagattccctgctcaggtatgtatttacaaacatcattggcttatcaaacacggttgaattgtacttgttattgcatgcatgcatgtctttcttttgttgttcatcagctgtattgatttctttgtgtttggtttctcctttttattgggatcgtgtttaaggatttaagtccttaattatcatgatttgttttgtttgtaaagcaagatgatgggatttgagtgttctagcttcctttgggtccctccttttcttcctttttggttgttttgtttcttttcttggaacttttcagttctctggttgcctttcatggtttatggcttctgtgtcttgatttctctgacggaagaacattatccacaaccatccatcttccaaaaagaagtagcatagttttgaaaagaacagccatgatttactgtccaaagaaattgaatagaattgttaaaggaaaacaatttggcagacactctgtcacaacaagaccagagcagttgtgccaaagctattcggaagcaggattgaatgggaatgattaaaatattaacaaccgaatgtctccttgacaggcagcaggggctgtgggaggtgcgttggctatcat

SEQ ID NO: 61083 - DNA, 163 bp, Populus trichocarpa
  Intron number 2 from transcript POPTR_0012s09480.1 (locus POPTR_0012s09480) derived from phytozome v7.0 (chr-ID scaf fold_12; pos 10499279 to 10499441)
cttattttaaccttttccacattgttgtatacaaggtcggtcagttgtttacctgcttattatgctttactctttcaaactaatcagtttattttttcttttcaagaatcaaaaaacagttctttaaatttggtgatctgaataattacttctgtttttaggt

SEQ ID NO: 61084 - DNA, 607 bp, Populus trichocarpa
  Intron number 1 from transcript POPTR_0015s07310.1 (locus POPTR_0015s07310) derived from phytozome v7.0 (chr-ID scaf fold_15; pos 8453208 to 8453814)
ggttttcactctccttttgaagtgctcttatcaaggtaatctttttttattttattttttttctttcacttttccttctcgtgaatgctatgaagatgtataaccagtgctattattttaagccataaggaggaaaatgatttatggccccttggtgatatttggtttttgctattttgggtgaaggatatgaaaaacatttgcttaaaattgatatgaaacattgtattttctttatttttttttccaagaattatttttaactctggtggaaatccaactacatatattgttgtttgctaaatagcttattttattatgtccgcattttcaatatcaattcttatctgcatacctacacttcattttgtgaagaaactttggtagaatgctaacaatttggcagttttgagactgtgatttcatttacatttttttttaatgattttttcaacatttatttattgtatccacatctgttttaagttcaataattccactactttgctatattggtttttgaagataatgtgtaatttgtgcactgaacctgtattccttttgcttcacagttacatcagtgagatcggctaggcaggtgattgat

SEQ ID NO: 61085 - DNA, 306 bp, Populus trichocarpa
  Intron number 1 from transcript POPTR_0001s44540.1 (locus POPTR_0001s44540) derived from phytozome v7.0 (chr-ID scaf fold_1; pos 44981895 to 44982200)
atactgaaaatacggagaggtgagttgttaatggagatgttgctacctgcaatttgatcattttattttgatggtaaagagtttcttcttcttcttcttctttttgatcagttcggttgaagggttagaggagatgaagagtactactgaagaggaattagggtttgatcatgaaataaatccacaggtaactagtcttgcaagatatacatgtgattaataacctatctggagatatttattatgactaattaagatttgcatgacattttctaaagtaacagaagaaagggtgtggcattttta

SEQ ID NO: 61086 - DNA, 626 bp, Populus trichocarpa
  Intron number 1 from transcript POPTR_0016s09170.1 (locus POPTR_0016s09170) derived from phytozome v7.0 (chr-ID scaf fold_16; pos 7120117 to 7120742)
gaaatacttggtaggcatttctttgttctttcttggtttgagttcttagctgaagaccggaaaatatgatcagatgggatttgattctacagaagttgtgtttatgttgctgtcgataaaaaataaaataaaatttctctcttatgatttgagtataattaagattgtgttgcagctggttctgcaatgattttaaaattgtgtttttatcattggcatgctttgtgtttgtacctcctttttctctgttttccacagctttaagcactttaattagaagttagaactatgtacatagctttttaatttaattcaagtgtggaggttgttcaagatctagtgcctctcctaaaagagaaaaatgtcgtttgatgccatgcacggtgcaccgtgataaaagttatttgatgaactgctagtgtaaaaatttcaaaccgaaggaagactactaaatctgtccataatccgaccagaaaaagagagattagttataagtttcttattagaatcactcactgttctattactaaagagctctgctttcgtactcaaaacttctactctacttttatggattttatatgttgtttttatctgcaggtattgcacaactgggcttccaagtg

SEQ ID NO: 61087 - DNA, 698 bp, Populus trichocarpa
  Intron number 1 from transcript POPTR_0013s05850.2 (locus POPTR_0013s05850) derived from phytozome v7.0 (chr-ID scaf fold_13; pos 4211804 to 4212501 reverse strand)
cagtctccctacccttgctgttgtatctccgtaaggtgtgctgatgtctgctcttccttttatctctcttcttccttcatttctcatgcatacaccaactaccccttttggtttcgctcttcttgggtttctttttctcattacgttgttctctttttcattaaaaagatctggtcagtgtactctgcttctactgattttgctctgtactatcatgtttgttgcagtgtctgatttcatcgtttttttttcgttctgttgatctgattctaactgagtcttttacttgttgcattggatctgatgagtagtagttagttagtggtgtttaagaagtaaagttaaaatgaatgtatgctctgcttattgtctacagagcaaatgataaaaaaacagacaagaaggttatacagttccaatctttgaggaaacctcacacacaattacagttaattgcatttgggtttctttgttgatgtgttctcttcatatgctgtgttaagtgttagatctgtcgtcttgcaagaaataggtgaaataagttcaaatcaaaactgctcatttgtgtaatggatctgattagtttttgctcctttattgttatttcagagcttaatctttatagatccgtttaagatttattgtttggatcaagaaaaactgaatcttgatttttgtgtggcataagaaacagaaaa

SEQ ID NO: 61088 - DNA, 721 bp, Populus trichocarpa
  Intron number 1 from transcript POPTR_0004s01390.1 (locus POPTR_0004s01390) derived from phytozome v7.0 (chr-ID scaf fold_4; pos 770830 to 771550 reverse strand)
gcttctctgctgggatattattcactaacaggcaagttttgattaatgcgttcctattgctttcttcaaagttgtaggctttggaggttgctttgattgtaggatgcatttttactctactgggtatcaattaattttgagaaatatgtgatttatgatagtgatattgaaaagggtcatttggattggtgtgtgctgttgaagtaagcctctttgactgatttcttggacttttaatttgaagtgttgccattgattcttgaagctaaatgtcgtaagacaagaagaacttgaatgttttaggaaaaaattgtgttgtgcttactattctgttcttgatttttggatattgtggaatcaaatgactgccatgttgatcttttttttttttgaattttttgttttcttttggcaaatatgtctccaccgacactatattaaccttggaaacagaagctgtaaacgtgtgctgtcgtttcttttttatttccttcgcttaaacttgtgtctgatgttgcagcctacaacttgtagggctggattaaattgcagagtgttattctatgctgttttgggccacatttttttataattctatattgcacaagttttggtgccaattgctagcaagcttcgtttgataaattttggcagtcatttgaagttatcattgttttttgtcaatggatttgggctactttaatttacaagtcaaggtgat

SEQ ID NO: 61089 - DNA, 1040 bp, Populus trichocarpa
  Intron number 1 from transcript POPTR_0012s02110.1 (locus POPTR_0012s02110) derived from phytozome v7.0 (chr-ID scaf fold_12; pos 1732752 to 1733791)
gagctgttgaagaacacaggtaactgcatatattttctaaattagtgaaaaaaaatgtgaggatgctgtatggataatctttccaaattgatattttatcatgtggaaattgtaaactttcagacatgtgctttatttctgcttcaaaagtagggtttatataagactaccagttcttgggttaagtcaatgatttcttaagtttatgagaactgcttctctgcttcacttggtacaaatctgaagatccatatattggtgatggattgcaggactattatttcagtcatattcatgtcactaatacatatgaaagaaatgcaaatgaaacaatataacaaatatattttgatctttctgtgaagtcctaggggtcatgctgtataggtgaatattttgttttcagtggcagtcatttgcttctcactttcagtagtaggtagattggttttgtgtatatcaaagaacccgtctctttgaatattatcctcttatcattttgagaaaccacatgactgggttgcgttcttcgatctactgtcattgttttttcatatggtattccttgcagcattgttaaggttgcatccttcttacaaaacatttataaatgtcttttcactgaagtctattcactgtctcttgcatgtacagttagattcatacttgtggggctgatatcatgaactatgaactatcaatattctttcctgtcccagtccagaagggaatataatacaagtagaaaggtcaaaacccaacgtattcagttaaaaatttcttatatcaacaggttttaactatgggaataatgttgttgtggttcagtgcacaagtgaccttgcattcatccattgacctatttctgaaattaatctcctaattaaatcatttttatatggaacctgcttcaatgttcaagatgaatttatattgctttttaatgcccttggtagtttcttgagttgaactggaagatgatgatggtttttattggttctattataggcatttcaaagcagaagatttgaagtacaggg

SEQ ID NO: 61090 - DNA, 678 bp, Populus trichocarpa
  Intron number 1 from transcript POPTR_0018s12470.1 (locus POPTR_0018s12470) derived from phytozome v7.0 (chr-ID scaf fold_18; pos 12941417 to 12942094)
tctgtccaaggttcctctgatccttacctcgtcgggtaattttatcgccacccctctttcctagttctaaggttcctttctatgattgaattgcattcttggaggtaaaaagtctcatttcagtgctatttaatgaactcacagttatgagtcttgtttagagttggtaaatttgtatttatgcatttcttgctcacaggcacacttaaaatgagattgtggtggatgttggttgtgattctttctaaaagtggaagaaaaggaaacgaaatgggatttttatgcatgttggtttaattatatttagtaaagattgattctttgcttttgtttgtatccaaaaaaattgatttttgttgttatttatattgtgtgcttaaattattatactattgactaattttgatgttctttccttttgggtttccattgcaatcagggtcacaggaacttcagagaccttgtaatgtatctgtcttggttctcttcagttttgcgtgctgttccacattgtggaatttgataactagtaattttttagtacttgatgattaaacgccttgatatactttgattcttgacttttttcttttgcttagactttaatttaaaaaagtgaaattgagttctcctcctagagaatttaatgtgcagattgatactagaagtgatatagtg

SEQ ID NO: 61091 - DNA, 473 bp, Populus trichocarpa
  Intron number 1 from transcript POPTR_0013s01870.1 (locus POPTR_0013s01870) derived from phytozome v7.0 (chr-ID scaf fold_13; pos 1080660 to 1081132)
agcagattttgcctttttgtttctctttgtttcaggtaagtagaaatgataaaggaaaggtttttggaatttctttttggttataagcttgttgggttttatggttagtgctctgtttttgctgatgagaaattagcttagaaggttgataaatcaacaaaatttgatagtttacgtacttgatcattgtagtttctttgttggggtgttgttttcatggaaaccaaacagggttttgagggaataataatatgagttgtttcaaagatagaaaatgcaagaaaatgtgagaaatattatgtgtgctttcatttctattgcttctatagaattgaaaagtaagatagaaagtatattgagtgttcttcattcacttcaacacaatctttcatcttcgaaatttgtcttaaaaggttccattttttgcttcttttgaagaatactactttctaggattagtagtggcagcagat

SEQ ID NO: 61092 - DNA, 396 bp, Populus trichocarpa
  Intron number 1 from transcript POPTR_0017s08470.1 (locus POPTR_0017s08470) derived from phytozome v7.0 (chr-ID scaf fold_17; pos 7058328 to 7058723 reverse strand)
ccgccggaatccactatcctcgcgccactcccgaggtatacaataaactgtctcttctctttcgctatgttgcttcaaaattctgtgtttcaacgaggttaattcttaattatacactgatgagataaattaaggctattttaatgctacctgacctagaatttgagaataaaaagtaattttataagagagtttggagattcttcgttttaatgttgaaagagagaaaaaaacaaaaaacaaatgtgcgttacaggagaaattgataaataaatgtgcgatgatgcgtgcgtgcgtacttctgttaattttttattagctaatttgttcttgtttaattgtttatttattcaagttatcagattattaaagtgtgtgtttttcgcgtaatatcag

SEQ ID NO: 61093 - DNA, 912 bp, Populus trichocarpa
  Intron number 1 from transcript POPTR_0005s21010.1 (locus POPTR_0005s21010) derived from phytozome v7.0 (chr-ID scaf fold_5; pos 20137173 to 20138084 reverse strand)
ggggtaatcagttcttctcttaaacaacaaattcttttttagagtgtttatgtttgctgtatagtttttaatacattttgaggaatgaaatctttgttcataaaaaaatacagtgcgctattatgtctggttaatggggttcaattttatatcattttttacctgtacttgatggtattgtgcttcaaatttgctttcttcattcaagatttattctctttccttccttcccttttgctcttttcaaaaaacctagactgttcaatgttatatttttattttatgtcctatacgtttatgattgtcgattctcttcagatgcagcttcgataatgcttcaccaacaaaactacaaaatttagattattctgtcacttgtcagtcaaatgcaatatgtataaacttccaagatatgctatgatgtatggaaaatttatgctttgcttgatcagcaagagatagcaaaagaaaataaagggattgaaatttttaccactaggactttatcaccaactgttgcaagattcacaattttcattcttttcttttgggtgaataagagacaaatcttataaattaaaaatgaagaacatattacaaattagccctgatataatttgtttaacttaaccattgcttctgcttgtggggctggaattaacgcgtgattagacattaatgaaaaatctgctgctgtgataaattgacaggattgttgtatattcaaatcaaaatcttcaatgatatttgaatcaaaattgttgcattttattttaggtccaacccaagctattttcttagcatgggtttagaattccataacatttcccgtgatgttgagagattcaagttattaatattaatattccatgttcaggcccaagttgttcctctattggtggaggagccttc

SEQ ID NO: 61094 - DNA, 955 bp, Populus trichocarpa
  Intron number 1 from transcript POPTR_0014s04790.1 (locus POPTR_0014s04790) derived from phytozome v7.0 (chr-ID scaf fold_14; pos 3694763 to 3695717)
gccaagatttcgtcaaaggtttgaggaaacaacaacaaaacatttgagcttcgaacaagcttatatttttggtgatgtgcagtcgaggaaagcaaactggcctctaaagaagaagagagtatgacaaggtatgactaaatagtcttaacagtaatgacatagtcgaactagttttcttacagccaaactaacagcctccattaattaaaccgtatttaagtaattactttggttttgttttctcttctttctttgaagaaaaaaaatcccttttaaaaatgaaaaaaagctattcacatccaagttaccacttgctaatgtgtttttctaccttgttttaccgatagctatttcattggtgaattaaatttttatcttatcaaacaataagatattatatattgattctttcttaagattttaaggagaattcgatagagattaagtgattgggagaattatatttttttaattaatatttggaggcattttaaaaatgtatttgttttgaaaaaaatatcaaattgattttttttccaataattttaatatattgatatgaaaaataaaataaaacaatatttcaatacgattttaaataaaaaaaacttttaaaaaacatcttatacaacaattaaaaaaaacacgtccaaaaagcaaacaatcggctcaaatctaactacagttaatgccatggtctaaacttcatatcatcccctatcggtcgtttttcgggcatcttcgctcggtttcgtggagatggctatctttcttcaaaaataaatattttgtctctctctctctctctcgctcactcttcctctcttaccctatttcatcaggtcctaaattctctctctctctctctctaattattgttgtgcctttactctggagttttcaatacttgtccttgatccaattgttttgtttcctgcagataccacgcaattca

SEQ ID NO: 61095 - DNA, 504 bp, Populus trichocarpa
  Intron number 2 from transcript POPTR_0015s00960.1 (locus POPTR_0015s00960) derived from phytozome v7.0 (chr-ID scaf fold_15; pos 559008 to 559511)
gtttcctctcaaaggtacatttatctttacttgttttgtaacattgtggttttttggctgaaaacattacattgatatcatcagttcatgttatgtggtcacacttcaagttatgttgttcttaatattatgatcttcccttaggaaattattgatgatggtttgattctctattgtcagtttgaatggtgtcatttctgttttttatcataagtttagaaatatgagtagatcatttaggtggcccaattgatctttctgagaagtttaaaaaagtcatgttttttattatttgttttgcattatattattagatattggagataggtattccaccaaatggagaaatgctgaaaatatctgatcatgaaagtacgaatgctcttgcaaatctagttcctttctgtcatggatatcagacttttgatgctagtttgtgtcctactttaaccagagaagccttttttctccttaattttttgcaggtaccaataccccctggta

SEQ ID NO: 61096 - DNA, 442 bp, Populus trichocarpa
  Intron number 1 from transcript POPTR_0006s14390.1 (locus POPTR_0006s14390) derived from phytozome v7.0 (chr-ID scaf fold_6; pos 11752816 to 11753257)
tctacggtgtggtccacagtgcaatgagtttatgtccgcaatacttttttaaaaaatatatttaaaaaaaatatatattgagataatattttttatttttaaaaatttattttttatattaccacatcaaaataatacaaaaatataaaaaaatattaatttgaagtaaagaaaaaaaataaaaaaataaatttttttaaagcatttttgaaacgtaaaaacaaacatgctttaataagaaaattcaacccaacctgaaataaaaaacaatcatcatcacccaattttcatacaatataaaaaaagtcacatcaatttattttctctttacagtatgaaaaaaaaatcaataagagaaaagaaaaaaaattaaagaggaaaaaaaatcaaattggaaatatcttaaaagataaaaaattaaagggaaagaaattggttgtcg

SEQ ID NO: 61097 - DNA, 661 bp, Populus trichocarpa
  Intron number 1 from transcript POPTR_0004s15350.1 (locus POPTR_0004s15350) derived from phytozome v7.0 (chr-ID scaf fold_4; pos 15997860 to 15998520 reverse strand)
gaaagtgagaccatgactacgtcaatataatgatcctacatccaatgacattggtggattagttgttggggatattggagatttattctttgaacgagacattattattgaatgcttttcaggctctttaaagaggatctcaaaattgcatccaaaattcatggcattgtagtatccctttttatttccttacgatgaagatggctactcctgcaatattatgtttgctgaccatggacatgaaaaaacaagaaaaaggtcaagagttcagatacaagcttattatgcttaccttataaatgaaaggcctgagtgcgataataccatcatcatagaaggttgtttgtaccgacaattcttggtcgatgcatttgttaatattgaagaatatcgtcttaattatattagagctaattaaaaataaattatgtgtagaagtttataaaggtatctatgaagatgtgcttaagggagatataaggctcctcaattggaaaatcattgttccatcttctttaactggtaacccatgttatatgatcattaattactaggatgcaatggctatatacaggtaccttatcttagaatatatcaaatttacaaacacgaagacaaacctgatatcattacatgtgtttttagatcaaaggttattgat

SEQ ID NO: 61098 - DNA, 451 bp, Populus trichocarpa
  Intron number 2 from transcript POPTR_0015s10530.1 (locus POPTR_0015s10530) derived from phytozome v7.0 (chr-ID scaf fold_15; pos 11424284 to 11424734 reverse strand)
gaattcctcgttcacggttacaagctgtaagtcttcattgtcaaaaactggattcttcaatttttagaggggtcaatatgaaaattagcaatattggatatttgaaaattttgggggagagggtgaggtggagccccctcatgactacattacataccgaccctgttcttgtaataaaagataattcacttgacattattgtcatttccatgctaagaagtacctttttcttggagtttttctttgggatagaggacatatagtttatgttgttgaggttagtattatagtcttttgcactttctgggatttgtttttaggtggatagctgcttatgaagtataaatctgctagagtcaacaccacctggtactgatttatctgatctattttcattttcttttgaatctgtgaaggagattcttgatcaacttgtggagattgatttggt

SEQ ID NO: 61099 - DNA, 679 bp, Populus trichocarpa
  Intron number 2 from transcript POPTR_0009s11870.1 (locus POPTR_0009s11870) derived from phytozome v7.0 (chr-ID scaf fold_9; pos 9778033 to 9778711 reverse strand)
tgttgattcttcctgctggagctggctctctcgaggtcagttgtttttatttctcaagtttctatctttttttttttatcattttagtttattgttgtttttatcattttgagaaataccaagtacagtctgtcgtgtcatttgtcaaatatatgttgaggccccacatgtttatgcactatgagggttctatagttgttattaggtgccttcttcagaggcaatgagaaggcaccgggatggcgttgaactggacttttcgatatctctggaagaatttactttattattaactcaattattatatttttaattaataaacactggtgtttgtttacctggatgtgttgtaggaattaggaaatggacgttgtagaaactgatgtgggttatttagtgtgtgtacagtacttgcttggtcttgcaagcatttattataatttctgtcttctcttattatatctacgaataaaaccagattgtgctgaaatggatatcttgccggtgttcaagttttatggcatttgattaatattgaaataaaattattttttaatgggttttatcttggcagtgtttttttagtactgtttcctttcaaccttttattctgcgttgatggttgcctctgactcgattcctctactatattgcaataggacttgcaacaccgttgtga

SEQ ID NO: 61100 - DNA, 667 bp, Populus trichocarpa
  Intron number 3 from transcript POPTR_0001s39560.1 (locus POPTR_0001s39560) derived from phytozome v7.0 (chr-ID scaf fold_1; pos 38773451 to 38774117)
ccatataaggcttgtttccggtcccaaacttgaaggtcaggtctttgaatggtgctaacatcattgtagttattgttggttagaaacgagagatacttgaaatcgcaaggatttccatctatcccattataatagatgagttttagggtggcattgctagctgctgctcttagatttgcaataatgtgtcctggaagaatcattaggtgacttgttagtatgccataaccataggtttgtgctttcgcctaagcaatttaagcatttttcacttagcttttttttttcccctggctcatctatgatccctcttcctggaagagagtttagcagttagaatttctttccttcgaattggccatggaaatgtagttggaattctttgaattctattgattagaacaaagaattatagaagtgcaacaagcatattatgcattcacatgaatatgtgcgatgaaagttgtttttgtctatttcaatacctcggctacttgattctggatcgatgctgttgcacccgttgctggtacataaatttcatgcattctttcgtggtttgttagtatcatccatacttgagtgttgtgcctgagacaaggatacagggatatgctgagatttcctttttcgattttttttcttgcagaagctaaacaagaattca

SEQ ID NO: 61101 - DNA, 273 bp, Populus trichocarpa
  Intron number 1 from transcript POPTR_0001s13920.1 (locus POPTR_0001s13920) derived from phytozome v7.0 (chr-ID scaf fold_1; pos 10980465 to 10980737)
gcagtgacgacacagaggggtaggtgttattttattatacttttgtttaatttaggctttagaatgtagtacttggattttaatcaactctgctctctttgatccaagaaacctgcataaagttccattaatattgtttttcttttagttttgaattatatcgtgggatttttttaaatatttcccagtttaaagttccaagattatgtgcaaagaattctaagaattgataaacattttcatacagaagccgaaaagggcagaaactagggc

SEQ ID NO: 61102 - DNA, 540 bp, Populus trichocarpa
  Intron number 1 from transcript POPTR_0006s01530.1 (locus POPTR_0006s01530) derived from phytozome v7.0 (chr-ID scaf fold_6; pos 922978 to 923517)
tactacaaataattgtatccttacaggttctgaaggtacgaattaatcgatctcctattctttcgaagatgctgaatatatgtttagttgttatctagaattgaaccccaccaagctttaattactaattgacgtaggatagagttaaagcatgggggtagaagattaaaaagtttctttgaattaagttgattgagaagataatataaaattaaagagagatataaatctaaaattttatttgatgatttaaattgttaagttaagatagttattttaatatgatatcagagactatttagcatagcttttaaaaatattttcattaaattataaaccctcatttcatataaacttttagattgaaatcattatttagaacactcaattcaaatttatgtggtcctcaaattttcttttcttgttcaatttattccatttatgtattaatgtagattaagtattttcatcttgaacatgtgaatatcttgttgcgatttaatcaaaagaacttttgtgtgttgaaacctttggcagaaa

SEQ ID NO: 61103 - DNA, 1006 bp, Populus trichocarpa
  Intron number 2 from transcript POPTR_0005s08170.3 (locus POPTR_0005s08170) derived from phytozome v7.0 (chr-ID scaf fold_5; pos 5621555 to 5622560 reverse strand)
gtgctcctttatctgctagtcactacagtagtttggtaagcctgaaattccattattttttcttacttaactttctctcgattgggtttttttagtagttttgtggtaattttagctgttttacatggtaattttctttcgggctatactatttttttttatggaatgagtgttttttttttttttttttttgggggcgggggagatgatgttgtttgttcgcatttgattctttgctaattggtaggaaatgcaatttggagttttcttttggcagcattctatgtgctgagtaaatgtaatttatgacaatgtttatttgtcgaggcggttttatgcgtggaattttgaatttcgttcatcgttatgccaacgaaattccaaatttcatttacataagtatataaacataattgttttgtgtacatgaggaaaggctgtctttatgcaacatattaacctataggacctatttgttctgaagcagattgtatgtttagttatttgttctttggtattactctgactaacttctgctggagaactcaggaaagttagatctagtcatgaagttaattggggttctggggagtaaaaaataggttattttattttctgaaatctttttgtagttgactgtgcttcttggaggtgctttgtacctatctctattgccatttgacccaatccacagtgttaatttcagccttttgtttttaatttctctcaagcgtgttgcaaatactatgggccaaattggagagtagtttgttatttggcattcatataactgtgccgcaatacgtgttggtggagttgtttatctcagtgaagatggtttcttacttagaataagaaaaataaaatgaccggaaaatcaagggaatcgctggttttatgctaagatatgataacaggtttagcacttattttccgattattgattggcaggtgctccctcgtatttggagcatctattgtgcaggatagagatcttagtgaatat

SEQ ID NO: 61104 - DNA, 820 bp, Populus trichocarpa
  Intron number 3 from transcript POPTR_0001s38630.1 (locus POPTR_0001s38630) derived from phytozome v7.0 (chr-ID scaf fold_1; pos 37810799 to 37811618)
aagcggggccagttcaaatctttgtttcaaaccatgtaagttttacatttttattagattttgatacctctttaaagtttgcaagggttttaaccattgctttctgttattgctttgtttgcttaatatattctatatgttccccatctgttattttcactgtaccaattgtatatccacatcaataattggatgtagaatgcatgcgcttttgttctttggacggaagaaaattgaaactaccatcttgttatccatggtcactgtctggcccagttgactatagctcattgttcttttggaagccaaaatgagagaaacatgggatttgtcttttccaaatccttacgttccatttgcttagtaatcaaagatcatgtttggttgaagaattgggatggaagacaatatttagttatggaatattgtctttgttattctgctttctgatctgtccctcaccgtagactaaattctagatttcttttcttttgcacttcatgtgatgagcagaacagatgttttcatgaaaaattgaagtattgctaaaagttgacattttgaaacaaagctgctttttggttgtcacttattttttttatcttgctttgttgatacatattctaattgcatgatagcaaacttctattatgctgtaagcttttccatcttgcttatttatgtttggttttctttcaagcctgtgtattttcttgcatccctgtatatctaatgcatatacatttgtgaactgtggctgtagtccccatctccctacttatgaacttgccttctcattttgtgtttcagttgataccgg

SEQ ID NO: 61105 - DNA, 804 bp, Populus trichocarpa
  Intron number 1 from transcript POPTR_0005s11600.1 (locus POPTR_0005s11600) derived from phytozome v7.0 (chr-ID scaf fold_5; pos 8410955 to 8411758 reverse strand)
aaaagggtggcttcattgtctccagccatttacaggtatatcttcttttacgttttgttttctaaatttaacaattacagacctttactgttaaattccctatcggagtgatctttttccaaatgaaaaatacatgtttccaactcaaaaaatataccatgcctcggcaacaagtagttggtgcccggctggctagcaagcaaatcaatcaaattatttaaaatattcataaaaacttgtgtgaaataattaaacaatttttttgagttctttttattatataatcttgattagaaactacaagaaaaattaattcagtttggtttcggattcttagaaactgaaaaaactaaaccatgaattattaggcatggcacgacagaattgactgaagagcaatacctaatatatccagttttgctagtaaatcatttcttgattacgcaagatcaagaaagccactattttggttcagaaattcctcttccccgcaatatgaatgtgtattctgttcttacatggagacgaaattataccttaagactacaaggtcaacaagggaatagttgtaatttaactgactgtcagcacccatggtggagctaagacttttatttttggttttttttttcttaatgagatagagtgagtgaattaaaagtacaatgcctcactttaggaatcaatatcatcaagtacttgatgctttgaagatagtagacagtactaatattaaatcaatatcctgatttattatcttataaaacagggagaggcagttcaagactggcgtgaaatagtgac

SEQ ID NO: 61106 - DNA, 547 bp, Populus trichocarpa
  Intron number 1 from transcript POPTR_1321s00200.1 (locus POPTR_1321s00200) derived from phytozome v7.0 (chr-ID scaf fold_1321; pos 667 to 1213 reverse strand)
cttatagccatctctggagccaaattctactgtaagttaatttcatagcaccaaaaataaaatactacgtacacacacacgtttcctggaagaatagacacatagtatcatttgtaatcttgatttatatttcgtgctcgaaatatatttgaataagatgagaggagagaagaatcttttagcaaaagaaatgggagaaactagtgctatatatatatatatatatatatatatatatatatatatatatatattaatggatatacgagtgggtgtactaaagagagagaggttcgtagtgaaattaagctctatttatatatattttttcaagtttctttttctttttgcgtgtttgatcatttgatgtttttgaaatgacaaattaaacttcatattacaagaatttccatcctacatcctaatatatgtttcatttcttttttgtcaaaaagaaaggtaaagtttatctgcatgctttccttggggaataccttaattttaatgctttgatttattttaaaccctaatagaggagttgggagca

SEQ ID NO: 61107 - DNA, 344 bp, Populus trichocarpa
  Intron number 3 from transcript POPTR_0010s25890.1 (locus POPTR_0010s25890) derived from phytozome v7.0 (chr-ID scaf fold_10; pos 21345908 to 21346251 reverse strand)
tgaaagtttctggggtatgtactggatgctttcattgttcatttttttatgtggatgtgtgtttgatatcattatgctacttttgcattcattgtagattgagatctacattcttgccagttcccactgattgccctgagtcttctttctccctcctctactcctgaagtcaacaatcctttaattgtcgttcattgtcctttctaatatttgtgtcttaaaggcatgtatggtatttctcaagtggaaatcaatcatatttgaattgttttttttctcattcatacttgaaattgataagaattttactgtcttgtaatcgctgaaggtggttacctgtggca

SEQ ID NO: 61108 - DNA, 1008 bp, Populus trichocarpa
  Intron number 2 from transcript POPTR_0010s25890.1 (locus POPTR_0010s25890) derived from phytozome v7.0 (chr-ID scaf fold_10; pos 21347164 to 21348171 reverse strand)
ttgaaatcctccacactcccattttcttccctcaggtatttaccataacactactgtcttttttcttaccattttgccatttccttttactgcttttctttgactgtgttgagttcttaaagattgatacttttgttctgtgttttttgccctccttggctggttgaagatgttgaaattagtatttcttattgtttccatgaagtggacaactttagatttatactaattgtctgaaacttcttggaggaattattaagaaagattaacaatttggagtgtttttacccgtttgtgaatccagggttgacttgttgtataggattgaagctctttccatacatgttttgagcatcgggattctgcgatgtggacatgtaggatagagtatcatgttttactgcttttatccccctttaagatccgggtattcttcttgttatcattgcttgtactattttcagccaaacaagaaacgatgtttcggaattttcacgaggttatggaaagaaatggaacaagaccaagatttcatgagctacgccatcaaaccaaaaaaccgtgtaggagagtgcattctaagtttgttattatttggaaccttttgctgatgagcttaacagtattgtgcgctgtaaaattgatgaacataccagttaatatttgatttataaatcacaataggagtacaatttccatgcctattggagaatcatatacaatacatgatttttctcatgcatcttttattgttgtggaaatgcactcaggaacagattcatacctagcatggattgcaaggactttagttgttgccttgtcactttttttttttcacttgccagtgcaaatacttaaattaaattcttatctcattgcaaacaaggttttaagtttatgctggttgtgatgcttgttttggtggttgataaagaactaagggctttattattattattttttgaaatttcagtgggacattgagaatcatatcagcaattttctagc

SEQ ID NO: 61109 - DNA, 915 bp, Populus trichocarpa
  Intron number 1 from transcript POPTR_0011s10720.1 (locus POPTR_0011s10720) derived from phytozome v7.0 (chr-ID scaf fold_11; pos 13298199 to 13299113)
gccctgtaacttcctctctttctttctcaagttcgactgctactaattaagttgagttcttttgatttataattgaatcggaataaacccaaagttatgtttatgaaatctaatgcaagttgagcaacacttccatcatgatttattgcaaacattctatgcggctaattttatgacaggtatttaaagaatctgagatgactgtaacttctttttatcttctaacctgctctaccatccactccgtcatatctcctgtattttttttccttaaatttttttcgatctcttcaattctgaaaggcaataacataaaataaattgtgagattgatgcatgatgggaatttgttagtagcaaggactaatgggaatttgtagtttggccagctatactatgtttgatcggcaaacatggttgtatttagcctgtgatgaagatcccagagtatgcactaattaatggctgctgggggtatttttagagattggaatattacaacagctctattctaccattcccagtaaatcgcatctgaaggggtgcgatttcaaagtgtacgaaaatctcagatttattaagttgtgaaatcaattctgaagtgaattgttggatccaaacgtgagatttgacaaaaattgtagaattgaaatcaattctagtcaaatcttaatctaccaaacagccttttgtttgatgtatgaacattttgtttcttttgtttatctgggtgttttatttttgtctattaaacgagaaaaaaaaactgttaatttggttttttttttcccagatttttactaaggtctgagtccattgtaaattttttatggtggttcttgatgtttgcttttgtttgattacaatgataattttgttttggttttatttcaaataggatatttggaatacgac

SEQ ID NO: 61110 - DNA, 632 bp, Populus trichocarpa
  Intron number 1 from transcript POPTR_0011s15990.1 (locus POPTR_0011s15990) derived from phytozome v7.0 (chr-ID scaf fold_11; pos 17974896 to 17975527)
tcctaaccagactttcttaagctccattcatcaaggtaatcccttttctctctcaatctatccatttcaatatctttctcaaaaccctaactttttggctttttaatagactgttcctcatcaggattctttgaattaatccttcatttaaaactttttgagattttattcagtttggtacttcagaattcggattataggctttgattatggtcttatgatgtttgtttgtatcttttttttttttttatctgaacgtagattattgaacgtttttagttgatgggtttcaattaaatctgatagtttccatgtaaatattttgtctttaaggcacccaattagtatctaattcatgtgaagattgtttttttaattacccaattagtatcttttcgtgtcaagatggtttccctgggtgccaaattagaattctatgactcttactgtgaattgggttgtttttttgcttctgcatttaatgactgaaactgggtttttttggctaggccctattgtttggttattgtgtttattcaatacttgttcgatgttgtttatgtgtaaacatgatggatttgtgcttgtgctttaaaagattgggattttttgttgtaatttgaaatttaagg

SEQ ID NO: 61111 - DNA, 482 bp, Populus trichocarpa
  Intron number 2 from transcript POPTR_0001s03920.1 (locus POPTR_0001s03920) derived from phytozome v7.0 (chr-ID scaf fold_1; pos 3134856 to 3135337)
tgaagaagttgtttttagggtttgttggtgacaaggtagatacatcttattatattttgatcttgttctcctcttttcttctttgatctgtctcaaatttaaaaatttggtgtgacgatgatgatggatgattaattgattgatggatgatgataaaaatcagacggattcccactgatttacactgtgattacacaaccagctacttctgacacgatctaatcttcatcatcatcttcaagcactgttttctgtttttaattattatgagcattaatatttgggggccggtgatgtaagaaaatatttgctactcttgatggagttatatataattccatttgatgattcctctccaccaagatctctgaggccctgatctgtttttctgttaatcttaaatactgaaactcgcagattttacttgattttgatttttgattgctcatgtaagggtggttttggtctaatcttgccaaggg

SEQ ID NO: 61112 - DNA, 1044 bp, Populus trichocarpa
  Intron number 1 from transcript POPTR_0017s04930.1 (locus POPTR_0017s04930) derived from phytozome v7.0 (chr-ID scaf fold_17; pos 3786521 to 3787564)
ggttcgtcattttcaggtgggtcgcttttattttctgtttatttccttaaagttgtgaactttatgtgtttggtttctgagaaaatagaagtcggggtcttagattttgctttcttgtggtttataggactgtttttagcttgatttagtgtgtggttgtttttcaatttttttttgggttaagaaatgtttgattcttctctttggtagctgagaaaattgaaataaaaaagtacaggagttaagatgttgacccttgagttctatttttttttttaataagcttgatgggtttttcttatttttttaggataagaacttgtgggttgttaagccttttttcattttagctaatattttttttaaaagtaatttagaccatagaagtggaaattttagctttgatcttgcatttgtttcagcaaaggctggcttagctgaggtggtgaaactgtctagctgaatcaaaaagacattttcattttttggcaactaaaatctgatggtattgtttagctgaagtaacgagatgattttgctcacacgtgttgaataattgaaaatatagtatgtactaggaccagtagtgtagtgaaatacattatgtactggaaccaatcttgtagattaagtttgattccatgtataataaacctaatagttagattgtgaagttaaatgctctgtagatataataagtttgtggttgaatccaaagatcattactttggtgttgaactaagcaaataagggattcttttaattgcacaattgaggagctttatgcttcgttagcaagctaataattgtcataatttagtatggttggagtaggtttgtatgtttctgaatttttttagtctcaagctactcagcatatggaaaaaacatgcatccagcttggttgctccttaatatgctgtggtatgtgtggagtgtgtcctaagctagtcttaattgttcggctttattttttaatttatgctgttcaatcttgtactttgtacaggtattcttgcttgctgcatcatcgtgaacaagttt

SEQ ID NO: 61113 - DNA, 647 bp, Populus trichocarpa
  Intron number 1 from transcript POPTR_0007s02460.1 (locus POPTR_0007s02460) derived from phytozome v7.0 (chr-ID scaf fold_7; pos 1459121 to 1459767 reverse strand)
atccctaaaattctctcaaatctctatctctcaaggtatgatctgatcctcaatttctgtttaatactctttgtacaatccttaatcgattcattatttcgtgatctgtttgttgattgatgttatcgatttcatgagttttttttttggatctctaaatttagtgagattaaaggatctgtctttgtttcggctaagcgtatagattttgttactttaggtatttattcttcttttattgaaaaaatatgatcttttatgatttattagttatcggtttttcttctctgtttttacaatcattattttttatttatttcttttattgattaaaaagttgtgatctttgagggttacttaattgatttgtgaaaggttttgttaagagtcctaaaataatcagtattttgaaaattctaaaatatttttttaggattgatcgatatgtgtttcatctgcttgattgacttgatcttctgattgattatatctgtgcaagattttgaaaatatgcttgatgggtctttttattttgtgatgagattatgagattgatcgataagtgatgcatttgtggggtgtgatgaagaagatttttcctatttttgaaattggctgatcttgtccgtgttttgttatgtgatcag

SEQ ID NO: 61114 - DNA, 959 bp, Populus trichocarpa
  Intron number 1 from transcript POPTR_0003s10560.1 (locus POPTR_0003s10560) derived from phytozome v7.0 (chr-ID scaf fold_3; pos 11500602 to 11501560 reverse strand)
tgaacgttgctcttgaattattcacctcgacaaaggtacgtttctctaccaaccatttacttttccttcgttgtaattgtcttttttgaagccacattagttattgtcaatattacaatgatttttaagaagggtttttatcctctcatctttctcttcctggatcatgtgatttcttcttctcttcttgtttcatccaaggcattgtttggttcatattttgggattttgaaggacaccttttttgctcttgtatggggctggtttcatacatataagtgtacaaaaagcaagcagagtgtttcccagattgcaatttgaagatttgaactgaactttgatttggatttgggtctttccttttcgatacccatagactttctgctcacttactgttttaagatcactggtaacagtgcagtgaatctagcttgagtcatacgttcatggcacttgtctttttttcttcttcaactttttgactgccagtccaaaagagcatacataatcatccaatccaaaaaagcatacataatcatctctgctttactcttcaacctctattgtaaccaaaattcacttaaaggttgcagctttttatttctctctctttccttcttttttttttccttcgttttttcccttaccttccattctactttctagctaacagtctaaacataaaactgaggctaagaagcttcggttttttattgtgaaatgaaacaaagaagaaggaaaggggcatcttggctttctctctctctctctcttaattcaaaactgttttagagattacaatgtcgaaagagcaatttccatctgccatggtgtgtcactaatcccagcaacatttatcacttctcttgagtacaaatgtctctgaatatgttacagaaacgtatttgatgtttattgtttcaggaagagggccttgtttgaagctttttggattgtgt

SEQ ID NO: 61115 - DNA, 815 bp, Populus trichocarpa
  Intron number 1 from transcript POPTR_0019s08090.1 (locus POPTR_0019s08090) derived from phytozome v7.0 (chr-ID scaf fold_19; pos 9508453 to 9509267)
ttcgaggacgagtctgtttcccatttttcctctcccttttctcttatttacattgctcccaatgcctctctttctttcttggttcttatcgtgctacttgctttaattgctgatctgggttatgtttttttttccctttcaaaaacaatttataaagaaatgggactttgaggttttattggtttgtgtatagagatgcataaagaaaatctctgtatttttcttttcttttcgcgctcctttttgctagcttcttgagttgactttttagttgagcgtgggattaaatgggatttaattaatttgttcaatatatataacgatttgatgggcttctttcatttcctcctgttgtacgatcattttcattagtgaagtcagttatatcccatgtgtaaattttcaatatatatgtttatttgtcaattttatttttatgttcaataatatgctcaatataattctagtttataattagagcttgtaaattgaaggatcagttctgtgtgaaataattgatgtcaaaacaatagtaagtagtgataataaaggaaaggatatttgatttgagatctcacctttctaatgttgggggctgcaagctcttgcattagaccatagactttgttagagatctggtttttttttttttaaaaaaaaaattgctttccgaactttttaattcttgttatttactacaattgattgcatacctaagttaggtttgattacctaagttaggtttgattatctttaattaattctaatacctaagttaggtttgattatctttaattaattctaattggctgcag

SEQ ID NO: 61116 - DNA, 561 bp, Populus trichocarpa
  Intron number 1 from transcript POPTR_0009s02090.1 (locus POPTR_0009s02090) derived from phytozome v7.0 (chr-ID scaf fold_9; pos 2705366 to 2705926)
ttaccttctggcttggcatcaccgatctcgttctagtactactactttcctttctttgacttcttgatttcttccctcttcttttcttgtaacaatctttgtatgtggaaaacaattctcatgtcttttgagttctttctcaatgactgtgatcatgtgattatggtttgaccaaaactttcttgtgattcgattagttcctggattttgatgaattttatgcttggaaatgataatctgttgaaaccctcgactcaattatgcagaatgtttaatggggcagtgctcaacttttctatactccttgcattggagttttagtggtaggaattaagcttggaatgaaagaaaaatggaaatttaagaaactttctcaatgagacagtcaagtttctctctagtactatcgattctgctgaatggtttagtaacactagattgaatggcattaaaattgattgtgcacgaaatcttgtattggtttgattaaggttttctgtgtctcttcgatgtgtttctgtttcaggtccagaatcgtcagtgaggcgcttctcatacaaa

SEQ ID NO: 61117 - DNA, 191 bp, Populus trichocarpa
  Intron number 1 from transcript POPTR_0018s13970.1 (locus POPTR_0018s13970) derived from phytozome v7.0 (chr-ID scaf fold_18; pos 14233334 to 14233524)
aagttggccttgcaaaggtcaatagtgaatacaaggtgagatttttgttttgtttttggattctttatccttttttgtttaatgggttcttttctttttatgtttaaatttttgttatggatttatttttatttttatttggtttttgaatggaaggaattggatatagccattgtaaaggctaccaatca

SEQ ID NO: 61118 - DNA, 614 bp, Populus trichocarpa
  Intron number 2 from transcript POPTR_0013s08380.1 (locus POPTR_0013s08380) derived from phytozome v7.0 (chr-ID scaf fold_13; pos 7459631 to 7460244)
aaagtgaaagtttgttgcgctgtggtgatggggagagggggagtaatgcaggtggtctctccttcaggttcagattcaagcatcttgggaattctcttccactctcagaaaatcaggtacctgtactttcatattgttgctcccactgttgttctgttatagtatcaatttaatatcagcaaattacatgtatccctcccttgctccattcatctgtatgtttataattatcgacctcttttgttttttgttttctatgcaaccaatctttacaacatgtgtcgagaaagctatagttccatgtttgtggagtttggttgggatgagccgtgtattggtattttcaatttgcgggttattcacataatcagattcagacttgtcagttttattttttcttcttgcacagggtaatgattttgactttgaagctactctcttgatggacccatcaatggattttcagcttccagtggaattttcaaagcaagttactccagataaatgcacaagtgattcacatactgatgtcaatgtcttagatagcgtgattggaaatgccaacattagtgacatgcaaatttgctcttctgatttggctagtaatcccattt

SEQ ID NO: 61119 - DNA, 744 bp, Populus trichocarpa
  Intron number 2 from transcript POPTR_0002s25060.1 (locus POPTR_0002s25060) derived from phytozome v7.0 (chr-ID scaf fold_2; pos 22257817 to 22258560)
agagctgctagtttggcttgtggtaactgttaaaactagtaccatttttcttttctgtcaaaatgcatgcttttttttttgtgtgcgtgtccttgtaaggatccaggtctttttaactatgatttctgagccataaagcattttctgaggtcaaatctgtctgttatgtcaatcatgcattcaatagaactgattttattgcatcatctaggaaggattttacaactggtagatcatgttagtggtatttcatatataaaggtggtactgtggttttcatctttttaaacagtgtagaagaggaaaatattcggtcgctaccagaaaatttcaaatagaaacggatatttcgtcgggacttttcgataataatatctgcggcatatgtttatcaaaaattttgaatttaattacagacagaatgatggaatcactgaaaaaataaaattaattaaaaaatcaagaaatattcggcatctatttttatcattaaagggtttacgctcaatgatagtctcccagaaaaataagggaagggatatagctagggcctgaaggtcaagttctgaaaataattgttatcaaataaaagtagctatgagatctagtttattgtcaattaaaacaaagaaatttagaaacatttaacacaactgaagtgtctacacaagaaagattgttaatcatctatgtaattttcttgtctcagttgtggaggtgttagagaacttggtattcttgtct

SEQ ID NO: 61120 - DNA, 899 bp, Populus trichocarpa
  Intron number 1 from transcript POPTR_0015s14780.1 (locus POPTR_0015s14780) derived from phytozome v7.0 (chr-ID scaf fold_15; pos 14257945 to 14258843 reverse strand)
acatcactgtctctcctcttggtgttcctcaaaaggttccccttgagtctctctgtagactttatcttttccattttttaaagctttgttcttggggtttttaggacttttagtggttgtttttggcttatgagatctggtcagtatggtgttttaggacattagcgttaatgggttttgtttacttcaaggtgctttgaagtagtttgtttctttcaaggtgctttgaagtagtttgaattctcgtagtctgtttattttgtttcaaaaaccttttttttttgaaaaaaatgatttttattttaaattatttttagtgtatttatattgttttgatatattgatttaaaaataaatttttaaaaaataaaaaaatattattttgatatatttttaaataaaacgtacatttcattaccggcgcgcgattacaataccaaacagtctctttactgttgctgaactagattaatacaatgattcttggctagctcaagatgatttctccatgtaggcttatttgctagttcttgttttctctatgcagtaaattgcattattttccaaaaaaaaaaattataccatgtttatctgttttgttgctgtatagtcaaacactgggcattatggtatatggctttacacagcttattttcaagtcatcgttattttgaggttaatgcttttagtgttttgttttttaccccctttacgtgtttttcttatgctcattctattcaaattgttaagatattgtggaaatgtgttggggataaaaaattgtgctctccttttcaagtaatccatggtctgcgttctgtattttgctgcattatttacttatttgttaacatataattgcaggttatagctgtcaacggacagtttcctggtcctct

SEQ ID NO: 61121 - DNA, 555 bp, Populus trichocarpa
  Intron number 1 from transcript POPTR_0008s02230.1 (locus POPTR_0008s02230) derived from phytozome v7.0 (chr-ID scaf fold_8; pos 1066100 to 1066654 reverse strand)
cccccacagggctgtttctcttgctcctgttattcgtaagtaataaccacttacagtgttggtatgtccaccctgaagtttacatgtctttagtaatgtttttgttcagcatatttttttttctgtttcgttaagtattttgatgatcttttctcaatgacattctatcttcaatctctgttggaagcagataatatagaattcattttgttacaagctgactattacccatttcttttctttcgaaacgtttttatgtgaaattaatggtatgtatatgagaattgcaatttattgtatttcccagaagttcaaggaggagattttttttttttccttattagacttggttttctttgttgaagttgataaaatatgcagggaaacgaagttttgtgcatttcatctttgtaaaatgaaaaattttatctataaattatggtatttgattgccattttttaacaatcaaattactttgggttgttatcagcgtgacaaaaaatactacaattttaagtagagtttgtgaaaaatctttctaaattttctcaggg

SEQ ID NO: 61122 - DNA, 743 bp, Populus trichocarpa
  Intron number 2 from transcript POPTR_0011s14400.1 (locus POPTR_0011s14400) derived from phytozome v7.0 (chr-ID scaf fold_11; pos 16822409 to 16823151 reverse strand)
ttctgggctgattttattgataaaaaggtatggacatatacctttaatcttgctaaatctttggcctcccttcgatacatgtatctatgcttgcgtgaggacaaatatatattccttggctactgctatatatgttactgtaatatcaattatgtgatgtaaaaatgaattctcagatattatttcaaaatatttttattttatattgaatttttttaaaaaagttaaagtatttaaagtaaaattttttttatatttcatattaaaaaaatataattatatatattctaccgtttattttctagctagctagctgttgcatattttaatttttctatttattttcttcttaatttgttgttatgggctataagtttatatatacacctgcatttttaaagataaaaacattatatatatatacacctgtatttttaaagacaaaacaaaatatcacctgacttaaaacacttaaacttgctggattttcttgttattatttaattttctagctgtttctgcatccctcctttcgaggaagaacctagctattgaatcctgatggacaattttatgtgggtaaatatctttaaggaaccttacgtgagtaaatatccttaaggacattggagggagatatggacaacaaaaggagaagaactagaggcggcaaagaagggtttctttgaatgacttaagttattagagggagaactaggagagaagccttattttgggggtga

SEQ ID NO: 61123 - DNA, 530 bp, Populus trichocarpa
  Intron number 2 from transcript POPTR_0017s06650.1 (locus POPTR_0017s06650) derived from phytozome v7.0 (chr-ID scaf fold_17; pos 5098209 to 5098738 reverse strand)
agcatttgagagggttctacaggtacgtactctttttctctctgtcctgtcttggatgaacttaattataaataagtgaacctgtgctgtaaatgattttcaccgagaagctagaagaagagaactgaagcctccactacacaaatatgcatcaagataattggaccttaactcctctatgcttgtcaacagtatgcaagaaagaaaagaacacccttttctgctagctccagatagcttcattgccaagaaggaagtagtcgcttcagttgagaactaaaacaattattttgtcactggctctgagttcccaaaatatgggaaataaaattagtggaatcacaacttgtcaattctatttactttatcttttgcagaaaaagcaaagagtataaaaggattataagtatataccacggtatctgaaacttctttccaacaaaaccaaaaaagagaagaagaagaagaagaagaggatttctatttactgtacatttctctgtttgatatttgatcttaatagtacttac

SEQ ID NO: 61124 - DNA, 822 bp, Populus trichocarpa
  Intron number 3 from transcript POPTR_0010s23850.1 (locus POPTR_0010s23850) derived from phytozome v7.0 (chr-ID scaf fold_10; pos 20318837 to 20319658 reverse strand)
atctgcagttacgtgtagctgtgaaggtaacttaaaagtagctcgagattcgatccttttgttttgttgtgtcaagttgaagcttctaatcttgttgctctgctctaatgtttgctatatattgttattcgttctgttttgattaccgcaactttctcttgttggttctttttctttaaatatttgactgttagaaattcagaataacataatactagttttaacgaaaacctttcttgaaatcacttggtgaagagtctcagccattagatttgtgggttccactagccggatccaccaggagattttcagggatgttttttttatataagaattcactagtgatattagatattttggagttttaaggggttttttgatgtgttaagaaaatattttttaaaattagatattcgggaatattccttccctttttttttgttataccctgtaaagtttggatttttcatgatatgattttttttaattgggatgttgaataatttcttgtgcaaattggagtgatcccacgaatccagggctgggaaatgagtcatgttagcattttcgccgtgtatgtggtttggaagcaaaaaattaatataaaaacgaaatcgggagcaccacggagagtggttttgatgataactgattaatttgggcgatcataatggttgcttgtttgtttctgataattaatttgatcctattagtgactactgctttactgtgttgaatttcgaagttcaaatcttctaatagaggcttgttatttgaatttgttgtctgtaggcagctcctggctcgccatctagtgctgag

SEQ ID NO: 61125 - DNA, 627 bp, Populus trichocarpa
  Intron number 1 from transcript POPTR_0011s09070.1 (locus POPTR_0011s09070) derived from phytozome v7.0 (chr-ID scaf fold_11; pos 11185659 to 11186285)
cgagattctttgcatcggttagtaaactctagtagggataatggactcaagacatgcttggtgaacgcatatgacctttcatgatagaggatagcctaattattcttcactggtttggagattgaactttatcttatgttttttcagattatttaaactcttatttttgctattagatttaattttattttaaggttttcatttagtttaaggccaaacaaaatagttcgttgttttaagaatttattgtttatatatatatatatatttgacattgtagtcaaattatgataaatcgataaaaagttgcatgcttttggttttccaatcccccagcttcagcttcagcttatttctttctttttttaagcttcttttaattcttagttttttacttctctcgtcttacttttcttaaatctcttattagtcccgtatcaaactcgctcatcaacttcgaaagacaaacaagacaattccccaaagattgtcaagagtttatcaactttgcaatgacctatttcaaattttatgcgactggagagcagataattagaacaagcctgcaatgaagtggaaataatatgatgagccttcccaagtgaagattccaccattgagaattcg

SEQ ID NO: 61126 - DNA, 813 bp, Populus trichocarpa
  Intron number 1 from transcript POPTR_0006s02950.1 (locus POPTR_0006s02950) derived from phytozome v7.0 (chr-ID scaf fold_6; pos 1863999 to 1864811)
ttacttataatgtaagtgaaaaaggttttttgtgggtttttggatttggggtttctaaaattggtgattttgtgatttgattagctaggtttggtaagtgggggtttagcgtagctttttctttgtttgctagagttcaattttttaaattagggtttgttttgaattgggattttgaggttagggtttgtgaatttggtttatgagtttctacatttagctagttgatgttagttacttaataatataaggttcacgtttaattttagttttggtgggttttgggatttatgagttactaatttggtgtttgagtagaggggttctgtagctagggttttgaaaatttggtttttttaggttttggggtttgggtgtttttagttactaatttggtgttcgagtagctaggggttctgtagttagggtttgaaaatttgtttttttagattgttttgttgtattcccaaagtggtgactaattagctaggggcttgaatttgaggttttgaaaaattatgctttattatttgtggttgttgcagcttagtttttttgtgctgacggggggggggggctccttaagttttctgatttttgattgttggttcgggatttttgtactactgagatctagagaactgcttgtattttgattcttagcatgttcttgcactagtgatcaagtgacataggctgcaagctgaatattaatattgttgtgttctttagtttcttgtttgagtttaagaactcaacctcaactcacacatgttccccttttcttctatggtattgccaggacattggagg

SEQ ID NO: 61127 - DNA, 850 bp, Populus trichocarpa
  Intron number 3 from transcript POPTR_0003s03270.1 (locus POPTR_0003s03270) derived from phytozome v7.0 (chr-ID scaf fold_3; pos 3670612 to 3671461)
gtcttggtcattaccatttcaggtaaattttgatctttgaatctttggatatcttgatttgatagctaacgttggattttatagttttattccctttggtatgttgtcactcgtctatgattgaatttagctgatttaaattgcatacatgctgggtgtttatgtggaatttaacttgagcaagcacatattatcggactgttgtgtttttgctctaggttatttttttgtttgatctttgagttgttcaattaaggagtttttggccgcttgttttattttgctgttatagaattttgaatctggtcctaaactctccttttgctcttctttggggttgctgtatctctgcttttggttttcttagatgcagaatccttaggcactaacaattagcttgctacatgtataggtgggacttaggggctaattaagaggatgtatctcaatttagatgattccattctcaaaatccatggatggactgaaggataattgaggttgaaagaacttgttttgttcagagctgcagaagtaggatgttaaagagttcaattcaaacaataaagttttcagaggctaaaaactagaatatgcgattcaatttaatttccatttcacggtcaaacaattcctttttcttgaatcctatactttccacaaaaatgattttgaaattctaaaatgaaaaataatttagttattagtgtaatgccttgatgtgtaactttttcctattgtttacaattgaacctacagccaccattgttgtattgcatgagagcaatcactggtttacatttaagaaatataataacctggtttctctgctcttttattacacacagaa

SEQ ID NO: 61128 - DNA, 708 bp, Populus trichocarpa
  Intron number 1 from transcript POPTR_0018s02850.1 (locus POPTR_0018s02850) derived from phytozome v7.0 (chr-ID scaf fold_18; pos 2507270 to 2507977)
ggagaaaggttaagttcctttttttttaattcagtttgtttcctttgaacgttttttttacaggtccatttgtgttttatttcttgaatagatttttatttgattaaaaaaattttcttgatccaatttactactagatcagttgataattaatatattcgttaatcaatttaaaatgatcaagcgcacttccattaagagtttttgctgggtaatttatttcttatcgttttttagtcaatatttgcagatgaattaaagttgtagttttagcagttacactaatgttttgttttataaaagtcatcagttacattagaaacgttgcttctctccttgagctcttagttgtctgtcattaatttctaacatatctgagcccccaaaagatcaaaaaagaatgttaattttgagggacttttcaaaataattttagcatgtacttgagtttcatgccatttaaatttcatttttttctgtggaaaaaaatacaagtaaaatgatgcaaatgaggggactagactagagaggattggaataatgagaagaagtcaggaaattatgcgtcttgtcccaaaagctacgtgactgatttgatttccttatgcagtggacttttatggttttattaggagtaataatttatctgatagtgtactaactttgtattgaatagagcttttcattggagaaaaagagtgggaagat

SEQ ID NO: 61129 - DNA, 859 bp, Populus trichocarpa
  Intron number 1 from transcript POPTR_0003s13770.1 (locus POPTR_0003s13770) derived from phytozome v7.0 (chr-ID scaf fold_3; pos 14064916 to 14065774)
cagttacccccattgaagtctgaaaaacaatccaagtaagtattttcttatctcccttctttgttttacacaatttcttgatttatatatgcttgtctgtacctgggtttttcttttattccttttcccattacctccttggtgttaacaaaccttaattagtcagaccgtgcataacttaactaagggttttgcttgtaatgttttttagttttggagtgacctaatataattgggattatgatttggaagtcttggtggtgttttttgggatgaaagattgagaatggccagggaattgttggttttggtatgaacatagtcgtaagcacttttatgaaggcagagctgtgggctgttgagattagcatgctaatgttgtttcaagaaggaagaggttgagctcaattttttctgctatttttaattcggttttgtggagtttgtaggagtggccttggtgatgtttatgtggcccagttagaggcttactggaaactgggaggttacttcgagttgtctgttctttgatgtgtgcatggtgccgactttttagcaaatgtgagtttatggcttcatttgggcttgcatgtagtgcaagtgcctcctaaaggtttaattccctttacttaggatatgagagcggtagctatacttttatttcatgaggtataatcttaaagaaaatgatatgagcaggctcattgctgttgcttttacatttaaatagtcatttcaggtaattattttgctaaattcaatgattgccttttcaatgtgacctgtgttttcacctgtgcatatttgtggcctgtccaacgattattctactttgttttggtcatcagaagatcaaggg

SEQ ID NO: 61130 - DNA, 647 bp, Populus trichocarpa
  Intron number 1 from transcript POPTR_0017s08050.1 (locus POPTR_0017s08050) derived from phytozome v7.0 (chr-ID scaf fold_17; pos 6455510 to 6456156)
tcatcaaaatctctccacagtctttcccttgtgaggtaataaagtttcattctttgtggtcatcactacataattatagcattcatgtataacatgtgcttttgattccaatttccaatcaaatcttttttaatgaatttcacttgatttgactagatattctctcgtttttctctatcaattatttgaggggattccgcatctgggttttgtgtgtttgattgtgggttggatttttttgggttaataatgttctgaaatgattggatttatagtcttagaggatagatatcatctgggtttggttaagtttttctttctttgtttcacgaaatattaaaatttgggattattttatcaataggttctttcgtttggtgcaaacaaatcaatgtcaaagtaaccttttttccctttttggttgcttatatcatttttttttttcctccaatgctgcttcttagcttcaattattcaattttggattcatgatgtgagtttgtccgtgtgttgtgacttatgagagcttgtatgtggatttttccaaacattcatgcaaatagcacacaatggtttttgtttgaatcttcctctactatatattaacgtttcatgctggttctgttataaatttcaggttgttgcta

SEQ ID NO: 61131 - DNA, 673 bp, Populus trichocarpa
  Intron number 1 from transcript POPTR_0013s01910.1 (locus POPTR_0013s01910) derived from phytozome v7.0 (chr-ID scaf fold_13; pos 1104384 to 1105056 reverse strand)
ggactttgttacaagaggtatggtaatcagtaagctgattagtgtgatcctagttttttattctgtaaatcttaatgtgtggtgattctggtgtttttggagcctgttttgatcctaattggtgttaaaactttgttgagttaagttaatgtgcctggaagtaggaaaggatttgactttttgtgtgcgggcatgtgtctgtttagcaaggtgattttctcagtgtttttgttaatggatatgttatagccaaattgatcgtgttggacaagtgagtgtctgttcatgcaagcactcctgtcgattgaaagatttagctcttctcttttataaggaaaggcgccgtcttgtgtaaattgaaggattgtgaagagattgataacagggtttttaagcaaagagcataataacatcttgaggtttaaagaaaaaagacaaaaggatctttaagtttaactgctttatgacatcaaatttcaaatttgtttctttttggatgcataatgaacattttgtgtgcaattttcaattttctttggttaagcatgtttttgtgtagctagaaaaacttaatttcctgtctgtggtttgttgatgctatttgctgatgttgaatgatttcttgtgtcccatgctaggttaggagaggtgcagatagagcagatatctacag

SEQ ID NO: 61132 - DNA, 501 bp, Populus trichocarpa
  Intron number 1 from transcript POPTR_0006s12060.1 (locus POPTR_0006s12060) derived from phytozome v7.0 (chr-ID scaf fold_6; pos 9215895 to 9216395)
tccttgacgaacctgaagactctagaatacaagccgtactatctccccccccactctctagacagtttttatctgataatgtgaaaattgagatcgaatatttactttcttattgtttcattgtttgattagggtttaaataaaacaaattagtgttttcttaactgtttgttcttctttttttgctgtgtaataattagggtttaataaaaaaattcagatgattaaatttttgaagtttttatgtgcttttgtttacggtgggtattaagatttttattaaattgattcatttgttttgtaattggtgcccaaacgagtgaatgggcttatatgatatggttttttgctggaaagcaataatcaatgttggttgagttttgattgtgacattggaagttggcaaccaattgtaaggttattttttagtcttgtttcttaaattttgcagttcaatttgatgtaggttacaacaggggatacaccatacacatcagcatc

SEQ ID NO: 61133 - DNA, 418 bp, Populus trichocarpa
  Intron number 2 from transcript POPTR_0006s12060.1 (locus POPTR_0006s12060) derived from phytozome v7.0 (chr-ID scaf fold_6; pos 9216620 to 9217037)
tctgcatttgccctacaagagagttatcgattcaggttggttcttgtgttccagttcttttttttccctttaccatttttttcaatgtttggtttggtcaatcaagtaaaataagagggaggaatatcaagtttcaaatattttggggaatttttgtatgagaaacacttgctttcataatggcttcaggttcatttttatttctaacatttattttgaaacccgatacaagcacattcttggatcttcatcatgtgaaatccttagaccctggctcgcacaagtttttgagttttaaatcttagattaatacactagtaataagtgatttagtagttcttcgttaaaaatataacttaacagttaaaataaagtgctagtttcagttttgatgataacaaattcgtcctttcagaat

SEQ ID NO: 61134 - DNA, 742 bp, Populus trichocarpa
  Intron number 2 from transcript POPTR_0017s11800.1 (locus POPTR_0017s11800) derived from phytozome v7.0 (chr-ID scaf fold_17; pos 11674035 to 11674776)
cagaggtaatcatttctagtctacaaaaacaaagtactgatcaaattaattacatcgtatctgtgttagttctgcttgcttagctaggtgacatagaattttcctacccatctggtttatattgggaaattaaggaaaattatttcttacgatacctatttgatctgaggatttttattaattttttccccagctaagattttcgtgatattgcacaaaagtaatctttcttaactgctctcttttcatggagtttttgtacatcgatccattctctagttgataggagttcgagagtggcacaccagctagccactgacaacgcatttatgttcatgttctgagagatatgagtttacatttctaggaattgattgatcatgttacctcggcaattccattattctatttttttgttataaaaaaataataatgactttcagaaaagtcatagcattcccttactttagcactagattaggtcatgatggatagctttttaggtgccagtagtatatatatgaagcacttggcaaaagttaaagctaatttcaattatactactagctttccagttgatagccatattggtttatgtaaattgaatcaaattagtattttcatgttctcatggacaatgcatcaagctgtatttttaatggttccatatctccatgtgcatcttctcaagtcttgactgtttccatgctgcagctactgtctctaaaaagtagagaatcaa

SEQ ID NO: 61135 - DNA, 624 bp, Populus trichocarpa
  Intron number 2 from transcript POPTR_0019s01980.1 (locus POPTR_0019s01980) derived from phytozome v7.0 (chr-ID scaf fold_19; pos 1777002 to 1777625 reverse strand)
aggttttaattgaccagtatagtcagcaaataaaggttggtattacagtccatttcactttctagtttgattcgaataattattagagaaattttatgatgctaaaattatataactattaatactttcttatagacatattggaaaaacaagtaagctagtagttcaactagtaataataaagtggtaagaaatgaattagggaaagagacatcattggtttgaatcctactacttgtattttttgatttacatgcaagtgtgcgatcaattaaggatctcgagttgacgaactctgttccattgcttggcttttaggacctgtgagtcgcgtccgtgaatatgtcaatggtgacaagaaaaaaaaaacatgagaaaaaatcacatctcatcttacaaaaaaaaaagtataagaatattttcagctattcaaaattctttttttatttctttttttcgtttttctctcctggaacattataatttttttttaataatcgtattatgtacatttgtttatgcatgatagtccacatatattgcattttgtttgtgatttttatgtctttttgtttctatttttcatcagcgtttgtacctcttcggagccaggaaaattgcctt

SEQ ID NO: 61136 - DNA, 515 bp, Populus trichocarpa
  Intron number 2 from transcript POPTR_0013s02250.1 (locus POPTR_0013s02250) derived from phytozome v7.0 (chr-ID scaf fold_13; pos 1343681 to 1344195)
ctgcatttagtttgtaccaaggactactgattgatgtataagattggtttggagctgacttcgatgaacaatgactacttcctaccatttcataaacagactgcttcaccaaccaaatagaactggagaataattgtcgtgatgattagatttcaggttctagatacttatctgttcttcttgaatcatctcatccctaattggtaacctaacaggaatttatctgccttcttgaaactgtcctcccaattagatgagctgattgcaaattgtgaatttgtccccagatatttcaacagccaaaataaaccttaacatatatagattgttagaagatatatcctatctttccatagatgctcagcactatacttaaaaatagaatttgataaggaacatgattcataaaattgtacatttgagtttctgttgatctttttactatcaccagggctagtgatgaattccttgtattctaagtctagttttcaatttgttttggtgatctcaggaaa

SEQ ID NO: 61137 - DNA, 474 bp, Populus trichocarpa
  Intron number 3 from transcript POPTR_0006s15430.1 (locus POPTR_0006s15430) derived from phytozome v7.0 (chr-ID scaf fold_6; pos 12798185 to 12798658)
attgtggcgcgtttgcccatcattgagtcgcagaagtatgcaatcctttcccaaatccagaataatttttatttttatttttcttaattctaatcctatgtaatgaaggatcctgtgtgttgatgctatcatccatcaaactttttctcttgctggttcgtagatgaaatgcagtcttacatgtctattgactattttgggatctttttttagagatggaatatgacctcttttgtggtgtggcatataaggattgtttgatctagatttctcttgcccctgccatcatcatacgatacctgctcttgattctttcttcatggatgatacttttttaatattttattcattcagccagactaaaatgttgtaccggtaaatcttgttggcttattatgatgactgcttacgtttgttgatcaattttgtatcatttcagaaactgtcccattgacttgaaggaagcggtctcaa

SEQ ID NO: 61138 - DNA, 787 bp, Populus trichocarpa
  Intron number 2 from transcript POPTR_0016s11630.1 (locus POPTR_0016s11630) derived from phytozome v7.0 (chr-ID scaf fold_16; pos 10847193 to 10847979 reverse strand)
agcagatccatttcgtggatctcctgcagctgtaggtgaggctaaccaacccttttccttgacatgattagctgatacaattttaacctaatttggggtttgattttatctggttgtgaattgtatgtttaattgcacaatctactgtggattataaaagggtttgttagtttcctaggatcttgtaatatcttggagaaatcagtgcatgaattagggattctcagaagaaaacgaaccacatattaggggctaatgcgttgatggattcctttattgttgttattataatattgggaataggctacttaacttgaagcttgctaaatcatgacaaacctttgataataaataaatagttcttgaataatcatcaatcaatataataacattactttcaatgttatataatctcaccattgtctcctatgaagccatctccccagaccatggtgtttggtatttatgagtgagttctgaatttggattagttgatcattctctttatcagatgttctttgcatttgtgaagggcatgctttagaaagacttctttgtaggctgtctgttttcagtagtattacgatcaatattcaatagaagttcccttctccaaaacaatgcaagtaaagggaaaaacttactctgatagttccagggttttccatcttagggatttccttgcatcttcttcccatatatgaagacaatctttaggcaaacattcagaaaaatggaatttatttattcaaagtactttattgatgttctctttctaggctgtccc

SEQ ID NO: 61139 - DNA, 506 bp, Populus trichocarpa
  Intron number 1 from transcript POPTR_0003s22290.1 (locus POPTR_0003s22290) derived from phytozome v7.0 (chr-ID scaf fold_3; pos 20113676 to 20114181 reverse strand)
gcttttctccaacataaatattgaatttgaaagtatgttaagtttgtctatttgttttgatacccttttgtttcagtcattagaagattgagaaaaatgataagaaagtgtttgatttgataaaaaaaaaattaaggctttgtgttagcttgtgcttttttaagtaaccaatgaatagaatggaaggaaagcagagaaataatagaaagtgtagaaagttgaaattttctgtgttatgaatggacagtttcagttaagtcaagtgctattagttttttgattaaattctttttctgataagcaatcatttgaactagcaagtgggagttaaaaaattttgaaatatcaacaggacttattatttttaatactccaagttgtttgattcatggtcttagagtgagttttctgtttccttctttgatgccactcagtttcttgttttgagttttgattgactggagttatgaaaatgggacaaaaataatcttaggatatggcaggct

SEQ ID NO: 61140 - DNA, 509 bp, Populus trichocarpa
  Intron number 4 from transcript POPTR_0006s22170.1 (locus POPTR_0006s22170) derived from phytozome v7.0 (chr-ID scaf fold_6; pos 21216393 to 21216901 reverse strand)
gatattgaagaaattagattctggtgtcaatattggtaagtccctatatgttcattcaacccagcagacatggtcttcatttttatgttgaaattgattctattcaaggtctcctcagaaagtttagtttgatgttctttcgcgatagcaaggtgaataatccattctgtttcagaaattattagaaaaaggaaagaaatggagaaagaaaaaagaaaagaaaaattgagattttgagttagaatggagaacagccaaatctttactggtggtgatggggatcatgtgttgggttctctattccctgatccatcctggtgtaacttcttaaaagcagtagtaacactgcataaatcatcattgcttaaattaaaagggtgttccagttccattcgtcgtctttatacatgaattttcttttatctttatgctctgcaattgaattattagtgtaattcttattaaaccttgcaggatcattattgcacttgtaacggtttgtgagagga

SEQ ID NO: 61141 - DNA, 149 bp, Populus trichocarpa
  Intron number 1 from transcript POPTR_0006s07400.1 (locus POPTR_0006s07400) derived from phytozome v7.0 (chr-ID scaf fold_6; pos 5334008 to 5334156 reverse strand)
gcaccttcaaaatccttcaggttcttttctgtttccttgacatccattcttttttattcttgttcatgttttagcagtaattttgattttctttcttgtactgtttcgtgatcaagaatggtctctgtgaaagttaacaggtggctgat

SEQ ID NO: 61142 - DNA, 956 bp, Populus trichocarpa
  Intron number 1 from transcript POPTR_0005s21550.1 (locus POPTR_0005s21550) derived from phytozome v7.0 (chr-ID scaf fold_5; pos 20675422 to 20676377)
tttcctcccactccaggcagcgaaatttgcccctggtaactcttttttctattttattttgttgaaattggtgagatttaaaggtttattggggactggtattaattgattgctgtttttatttatttatgttggttggaatttgtagttgttaggtttgggatttgggtaactaccactcaatacactaagacattgttttttaaaatattgcaataaaattgtagactcttttggttgctctttatgtggaactaattcaatgaaagattgacatttaggactctgtatctacatttgacatctttgttcttagtttctattgttactgatagttttggtagtcaactttatgaaattatctaatggtagttatcgcctgatgattgtaacaatgatgctaattatatttgttctggttcttatctccaatggtttttaactgtcattctcattgacctttaaccataattcttcaaacatagattgacgtggatcgttttgagtcaaacacatcctgggttattctatatctatgtagtgtagctcatatgcaagattttagaacttggatgtttgagagaaacttgtaagatatatgatgcagttcattatggaggtaatggaggtgagcattactcagatgcgcgccattactcaaaggctttaggcgtcattggcaaccatgggattcaattctttctcctactttggtttttcccaatatctgtctggttgtgtctgttataaatgtaagcaatgaacaagaacagtcaatctgactttgattgtattgtcgtcaatatgtataggctttatgtaatagttttgttgtgtgtctgagctatcaagttcaaactgctatttattccatatgcattgattccttttttttgtttgtttttcaaatgattatcacaggttgcagcaaagaagcaaactttttccacctttga

SEQ ID NO: 61143 - DNA, 944 bp, Populus trichocarpa
  Intron number 2 from transcript POPTR_0009s03540.1 (locus POPTR_0009s03540) derived from phytozome v7.0 (chr-ID scaf fold_9; pos 4164886 to 4165829 reverse strand)
cctcaacagattcctcatcagatttagacaccgaggtcagtaaaatgacaagactttactgtgaaatttttcttcagtacgttttttcatagtcttttctataaaaatgtacgtatttttttccccttttcttttcagtttggtttgttcacataccttaattttcttggtaattatggggtttgaaaaggagattttggtgtcctgatttttcttctccattttgaaatatagcaagtgaccttaatgaacaatgtcattgatttgaatgaagactggttagtgtttccttcgacattttctttgaatgagtaataatgcagcattgaaaatctctttcctccataccagaaagtatggtagtggttagggttggtgaccttgttcatcaatcttgtttgttaattcgctctcaaagtgccttttcctttctttttttagggtgcaatgactaacaattaggtacctttcataatcagtggtcagttcaatgcaccagcacttcataattgtcatatcaggcatcccttgtgatatatattacagaagagggcacaaatcaacgcctgccaattgatttccgttgtcctatttgtgttaacatcaatttcagatcctatgtagtattccatttttaggatcaaagcttgaattttttgctaataggagaaataaagtgcagaaaatacagtataaaaaatagaataagagactcctaagaaaggattcaatcaccttgtacatgtccatctgaaccaaaacccagctgcctagctttgcagtccttaatggacctcttctgtagaagctgctacctggtttgcagtttttcaatcttttgacttggccgtgtaattaaatagataaactgaatgtcttgtcaatctagagttaatattgctcatctattcatgattgattccagtctacaggatctttcttcc

SEQ ID NO: 61144 - DNA, 526 bp, Populus trichocarpa
  Intron number 1 from transcript POPTR_0005s16090.1 (locus POPTR_0005s16090) derived from phytozome v7.0 (chr-ID scaf fold_5; pos 12745744 to 12746269 reverse strand)
gttcttgtggagaaacattcggtaattttcttagttttaccattttgagtcatcattcttctcgtctttccttcctttaccttttggttacatcctaatcccactctttcaattattattattattatttcatatggatttgattatatatagcaaatcatactctttctttctctttggactggatctggcttcccttgtgtttctaaattttacaaaaccatcatctctgtattgtaaataaatgaattgcaagcccttcccaccccagtaattatcaaactgagttttctcttttttagatcgtacgagataccatgcccatgtcgtatcatgacacacaactacttcaccttaatacgatgcgggattctggcttcctggagtcattttagggcaagctaaccttaacagacctgctctatggacattttagggcaagatagtctcgccgacctgcctgcctttaaagagtgcaacgttaagcaatgattatctcagcattttttgttgttgtgtaaagcca

SEQ ID NO: 61145 - DNA, 277 bp, Populus trichocarpa
  Intron number 1 from transcript POPTR_0010s13320.1 (locus POPTR_0010s13320) derived from phytozome v7.0 (chr-ID scaf fold_10; pos 13171201 to 13171477)
tggcaccactgcgttgtattgtacagtctcacccagttagttttctttatcttctttgttcttcttctggtttacattcctgtttctaaatttggtagcttgctgtgttaatatttaattcttctcttttggtatatttagtattttgatctgaaaagtttgtttccaattttttttttatgtctgagttgtgtttttagtattgttttgactacgtagttacagattatttacaagcatgtattttttcaccgcagccctaggtttgatttgttcc

SEQ ID NO: 61146 - DNA, 605 bp, Populus trichocarpa
  Intron number 2 from transcript POPTR_0008s03460.1 (locus POPTR_0008s03460) derived from phytozome v7.0 (chr-ID scaf fold_8; pos 1839429 to 1840033)
aaaagagaagagtacatctgtatttgttaatcgtgagtctcttgccttggtcacgaatgccagcaatttctctaaatctgtcctcccttttgggatttctttaaagcaactcacttggtgattgtgcattacagcgatttttctagtcttacatctgctggtttttagggtcttaattttttaattagacgtgttcttagagatttcttttgctatataaaagatacacctaattccaattgaagtttcatgctttataaggagaagaggacaaaagaagtgtattattctaccattgacatcactggaataatctgaataaacgtcattgataatgttctgtacaaaataatgcctggaaacttttgactttttttaagtgttgcttcacatgggtttctaagtcatccattgaagtcggagtttcaaatagtaaatacttctttggttttgcttttgtgattgttatgcatctttctttccttgtgcaaatcccagtagcgagcctttgtctattcatattcattcttttctgtttctttcaacgtgtaattttcttttccatgagtataacgtgtccaaatgcactgtttagctgcaattgc

SEQ ID NO: 61147 - DNA, 707 bp, Populus trichocarpa
  Intron number 4 from transcript POPTR_0014s16020.1 (locus POPTR_0014s16020) derived from phytozome v7.0 (chr-ID scaf fold_14; pos 12094432 to 12095138 reverse strand)
tcgagggagtgcattcgtcatcagattgtggctaggtaagttatatgatttggatttttattttttattatttgactctgtgaaatcttatcagcaatggtcaatgatgaacgttttcattagctatgtgtttactggctaagttcagattttgttcctggtcagtttgttagtctttagagacaatggaaggttatattatagttgaaatgaaggccggattcttttgctgcagaaaactgaggtgctgatcttgttgttgcttattgtaggaaatttctaggcatagttgaccctcttaaatgaatattatcgttcagattaaattcaaactagtaattagtatttggttttgccttgcaatctaagacgtagtccagaaagatcatgaagatacgaaatgcatactgaacgatcgctaacttttcctgcgacatctattttttacctgtccgaaacttgtagcacaaagttgtaggcattttgtctttcttccctccctcaaatagagaaagtgaagtaaatttaggacatcataggtgtatgccaagggtagccgtgttaccatttttcatttttattctgtagctcgaccacactagcttcagaattgtctaatgtggcttactttctgcattagcacaattaacgtgatttatttcaataaatcttattgatttctcaggtacgtattgggatcagagtac

SEQ ID NO: 61148 - DNA, 942 bp, Populus trichocarpa
  Intron number 2 from transcript POPTR_0002s10280.1 (locus POPTR_0002s10280) derived from phytozome v7.0 (chr-ID scaf fold_2; pos 7375658 to 7376599 reverse strand)
ctggccttcgtagccaagttaggcaattaagaaacgtaagctcctctttatttttattttttatatatataaaaattgttgagcttgcttaatgaaggaaaagcaattcctctggaaaaaagcggacatgtttctgtattgttgaactaatattttgctcgagggctgtaaaatggagtgatttattaaagattagattttctaatactcaatcaaataaacaagcctggctgtgttgcaaatttgggcagctccacttgctgtttctccttgccatgtaagatgttgtttcggggtttgtttttatgacatctgttcctactggtttagtataggctggctttctagtgcatttgaaatgttaactgtgcatgccaggaagatgagtcgtggagtgagaaaaagaccgtcaaggttgtatcgaagaccctaagttctatgatctttggtcatagttgaagatgtctgtgattgatcaactctgggtttgtgaaattgttctttcatgggattttacaaaactgttgtcaatttgttattggatattttattatatttaataaaagaagaaacaagataaggtcctttcttggggtttttcccagtgaagaaggaattatggtggattgattgctttaaagactctgaggaagtacatgcatgccattcttggcaatcgaagccaggattggtctgtgtttgttgtcgtatggaatttgggcacatttcctgcaaaaataaaaactgctgttgatggtttttctgtgtttatattgttcgcatatttttatgatgaagatctttccatttgaaatttaacattaccatctgatgtggtcagtttgagtgcagaattgtttgaagtttcctctgttgtaatgttcaagctccaatttaatcatatggtgtaggtggctcaagtgatagaatcagaagcaaaat

SEQ ID NO: 61149 - DNA, 542 bp, Populus trichocarpa
  Intron number 1 from transcript POPTR_0001s03980.1 (locus POPTR_0001s03980) derived from phytozome v7.0 (chr-ID scaf fold_1; pos 3165118 to 3165659)
ccctgttccaccaccaccggccgttccacttctctgtaagttctcagacccgcttcttcttcttcccccgtctcctctgcctttagtgtgataaaagtttcaatctttaaactgttactcatcttccttttcttctttttgcatgccaatcatggtagcctatcaaaacttagttcctgctgttttgattcatgaagggaaatgagttattttaattatgctgtttcatgcttactgtaatgcaatttcgttagaaatccacctgttcctgcaggtcttattggttggtgattcaaattagttgaataaataaactttttgttgtttggttcttaatttgtgattctgtgagttatctagttcaccacatagctctattgcttcatgggaactttgttgctgtagtcacatgaatttagcctggaagagaattttagctggaaagtataacgattaaaacctatgtgagcttagaaaaaacaatccttatagaaattcattattcttttgtttgttttgctatcaggtattaaataataaaa

SEQ ID NO: 61150 - DNA, 974 bp, Populus trichocarpa
  Intron number 1 from transcript POPTR_0003s08060.1 (locus POPTR_0003s08060) derived from phytozome v7.0 (chr-ID scaf fold_3; pos 9509858 to 9510831)
tatgtaagaaaaattcaaatgcagaatcagattaaggctaatcttctacaatttgtagcgattactatctataaattataccgtccatttattaatctccatcaagaagtatttgaatatcatttgattgccagaatcctttattttgaggatgagagaaattgagaatgtttatttgtctggcatttgttatcagaattacaatttctgacatgaaaatggtccagtagattagaaaaggagtcaatgcaaatctcagatgatgtaatttaactttttgtttattttcgtactggtgaattgtagcaattggaaaaatttgtgaactctgttttgaactccacgaaacctgcaccgatgatcatagattaatgataataataggatttctcctgtgtggatcacggttgcaacccaggttacaaggctccttgttatctactatcataataaagtgaatcattgtggatgttgaaagcagtgcttctgagtacaaagttcatatgctcttattttccttgaaatagtttgaaatgtcaagttatcaccccactgaatggagttgattggggaatggaaatttggaaatctatatgctcctttacagcgtggagtatgcatttgtcgtactgtaaattgtttttctgttttcttctattcaagagcattttggcatcttgccttttataaattaaattttagtcagcaaccatattgttctatccaagttaatgtggaatttaaagcatgcaatactccaaggagttaacagctacatttatcatatagttgtaaacaagtgaagtaaatacgttagaaatactacttaatgcatttaattttaacctgcttatctaataaatgggaaatggcaagtcataccattcagcctaatttatatgttgcagggataatccaaaaacatttactgatatccagtccctttttttctggctctgcaggccctcacgaga

SEQ ID NO: 61151 - DNA, 996 bp, Populus trichocarpa
  Intron number 1 from transcript POPTR_0006s28180.1 (locus POPTR_0006s28180) derived from phytozome v7.0 (chr-ID scaf fold_6; pos 25962980 to 25963975 reverse strand)
tgggtaccggaggcggccttatttaatcttcgctggtagatttcacctctcattgcaccttaatgtaatattgcaaggatcttattttgtggtgttgctagtgccattctttgatgttagcctgtaaatgatgctttatagcttgacattaacttttgtatgcatctggtagattattcttgcatcttacattggtaaacaagcatgatatgatctcagttatgtgtcaacattatgccttacaaagtgaaaaaattaggcttctctctttaagttcaggatagagagttctctagtatcttaagtagcatgctacatgcagaagtgtttaaaggatttgtatgaaatagcatgctatagtgagagaatgaacgtagttagtgtaagcaactaacgtgcctgcgtaacaataggctgcaatgtattgtgttgcatacattgggtgaaatttggttgctgcttactcgaagagtgtttcaatgaagaaggaaaagactttatagcgtttctgaacttcagaggggatctttatgaagtttactgccttggctgatagagtagaacttacatgttttgtgcatattaggaaggaggccatactttaacaagttaggatgatctgcagttcctaaatcagcacagtttaagatgatcaatatctgttcaacagcacgatcgttttagaaaatctatttctccgttcacataactgagcatagcttgaagatacaagggtagtcgatggttaggattaggtgtttattctcaacaggttgaggatcatcattgagcagcataacctgtgcttgatgtagggcatttggtaacaggatgcttgttcttgtttgaccgaattaattcctgtcttgtgcagaacttgattttttaagttatgtatgaagcatcttttgtagccttatgaattagaatagtttttactcacagaatgaggccatttcaggattgcttggcaccttctccacgctcttgttgtcg

SEQ ID NO: 61152 - DNA, 383 bp, Populus trichocarpa
  Intron number 2 from transcript POPTR_0006s00410.1 (locus POPTR_0006s00410) derived from phytozome v7.0 (chr-ID scaf fold_6; pos 183892 to 184274)
ggtcaaggctcgcacggtggtggcaaaagcttgtggtatttattgaggaattttcttaacagatttttctttttcctactgtttctggtaaagaattaattacacaaattttcctctcaagattttctggaatggtaattatagtgtttattaaacaaattaagactcccttttgcactctttggatcttgcatctcaaggtttcaggtttttcttcttcttcttcttcttctttgtttttcaaagaaagcatttagggagggttcatgccttgattatgggatttggggccaggcatgtaatgggtagtaggcttggctgatcaatgttttcctctttgattcgcaggagtgaactctctggcattacaaggagacgacaga

SEQ ID NO: 61153 - DNA, 429 bp, Populus trichocarpa
  Intron number 3 from transcript POPTR_0006s00410.1 (locus POPTR_0006s00410) derived from phytozome v7.0 (chr-ID scaf fold_6; pos 184371 to 184799)
caccagtaaacatgtcaatgctacctacaaatggccatgtatatatcatgaccacatcattcattatagtatatatttagctttgattaacctctaagtctattctctggggaagctttaagatgttgatacagaaaatcagcaacagtaattaacttcctgcagccagtatttccttttcttttcaactatgtagtactctacttctaatcaatgaaaagtgtagctttgttagcaaaattacttccaatctccttacagggtgcatgggatcacaaatattcacattatgatcaatggtcaagttaatcaatctgtcacttgatgaagttatctgtttggtgttttacaaaccataatcttgattagttaaggattaattaattaatcttagattcttagtcaatctcaaaattaacctccaaaaac

SEQ ID NO: 61154 - DNA, 868 bp, Populus trichocarpa
  Intron number 1 from transcript POPTR_0006s22220.1 (locus POPTR_0006s22220) derived from phytozome v7.0 (chr-ID scaf fold_6; pos 21265836 to 21266703)
caacaattccttggttccttctctaatctccactggtatttatttcttactctattttactctctcttctgttttattttcatcttcttttttgcctaccagacgcttgatgaaatgcttcgcagcttgtttaatttctcctcgttattgtttccagaatgtctggttcgatatcctgtttgtatggttcagattgttttattgcttgtaaaaaaatatagtcttgtaaagttgtatttctcttgattttcacgtgtttatggaaatttaaaggaaaaaaaacacgattctgagctattaaaagacagtctacacaaaatttgtatgtaaagagatttttgcgacagggctgagatgaagtgcggagacagcgtgtgtttttatgtgttaaatattaaaaacttgggtttaagttacttgaaaaggaaaaaaaaaaggattcgtgtgttttttttttgacagtgttttgtaataaagctcattaaaatgatagaaagagagttgggttattatagggaataatattctgtttcgaggatagtaaggaatggttttttgagtaaagaaatgtagtttatttattttttaataaggcagatacattagttctgttattgatgttgccttacgctatacatgagctgatacatcatggtaatgtgtcatcaattaggagtacattgcttaagaaacaaggaaatggcataactttatttcgaggaacttgtagcttctgcttgtgcttttcttgtttttaatttttttttgaggggcggggggctttgaattcagcatgctgtgtcttcatgtgcatgtttaagttaatcaagtgtatatttctatctgagtttttaaaatttggctgcag

SEQ ID NO: 61155 - DNA, 703 bp, Populus trichocarpa
  Intron number 1 from transcript POPTR_0012s02830.2 (locus POPTR_0012s02830) derived from phytozome v7.0 (chr-ID scaf fold_12; pos 2307597 to 2308299)
tcatcgttgccatcttcaccttgtcgatttttgatgtctccattgaagagttttggttctttctcgcagtggaattcgttcttggtgaggtcttcaaattgtgaagcttcttgggttgtggacaacaacaacaatttagagcatcagaaaccatctcatgtgccacctacagaatatgaagattgcaggtacgagcccttatcacaaagtgtctagttttctgtatcaataaaagattaaatgaaatgagccttgcaatctttgaatgaatttagaagtttgtcagtagtatttgttttgtctattgttaaataacgggtaaagttctcaataattttgtggagttgaaattcgtaatcagtttgattaactgagggttgcttgtgccatcatgacaacttatggtatgaaagtatggtatctaatgggaaacttgaatctgtgcaaatactagaattggatggggcaagaaacagaaaatctatgattccttgtagtaatagtttccagtttagcaatgatctcgtcctttatgatttgtttagaattatcaattgttgggtttgacacacaatgggaaactttgtctctatgggatgaccataaaatggttttggataatatcaaagaaagttgtgaatgagcttaatttggggcaagtgaataatttattctttgtacttgtctagtagatcacagctga

SEQ ID NO: 61156 - DNA, 386 bp, Populus trichocarpa
  Intron number 2 from transcript POPTR_0005s24890.1 (locus POPTR_0005s24890) derived from phytozome v7.0 (chr-ID scaf fold_5; pos 23313383 to 23313768 reverse strand)
tcatcgatcaaaacagagtgcgtaatcttctctctacgtttgccttgaatgttcgtagataaagctaattgtttccaacacttgttaagcttcagatttttttttcttcttctaattttctgttgagggtgattaaaaataggatagattattgtagctcagtggactaaggatgttttgaatactttttaggctataagttagtgcatacgtgtaatgctcatataattaagtggatttgatattgggtttggttatttgggttttctgaaagtaattacttagcatttatttgcatttaataagtggtatcattgacaagatccagttatgttagttaatgaaagggtgaattttgtttttgatgttgctaaaggctctggtag

SEQ ID NO: 61157 - DNA, 925 bp, Populus trichocarpa
  Intron number 1 from transcript POPTR_0002s14270.1 (locus POPTR_0002s14270) derived from phytozome v7.0 (chr-ID scaf fold_2; pos 10564985 to 10565909)
aagctcacttaaggttttggttactggtgctgctggtaacgttttttattactcttgtcatagcattttctttctgatagcctttacttctaagacaacgtggacaaagttttgagtttctttaacgtgctatttcaaaacaaatggagaaagggaacccacaaaaccacttggaaagattgcttggtggatgttttcttcagactgtggagatctttatagtgcttttttgcattcttaattaattaataggccttgtcttttacttttttgccttgttttggaggtgtttgtgtagattctttctttcttcatcatactatatatttaagcatatcttggcaggtaggattgttaattctatcttcatttcaacaggaaacctgttgttctagagagatggatcatgctgtattgcttcagaaaattcttgttgtttcatttattgttgctcttttttggaagataattagatatatgtgcaacctccttaatgtagaaaaagaacctgtgagggttcttgtaactggtgctgcaggcaaggctcaaatattaaatatttcatttggattttattttattcaatttattttcttgtcattagttaaaattttgtagcaatctgactttacaattgattctcgggacattcagcctctttttaggccaagttcacgtatcatctttgaaacattcttacttttttctgtatagttacaagtaatttttaattctgcttgtttttgcgttttaaaagcgcttttaaaaaaaattatttatttttatttttttctttacttcaaattaatatttttttggtatttttagatcattttgatatactaatttcagaaataattttaaaaaaataaaaaaacatacccccaagtctcacactagtttcatctcacagggcaaataggct

SEQ ID NO: 61158 - DNA, 770 bp, Populus trichocarpa
  Intron number 1 from transcript POPTR_0002s24550.2 (locus POPTR_0002s24550) derived from phytozome v7.0 (chr-ID scaf fold_2; pos 21905914 to 21906683 reverse strand)
acaagtaaatttctatctttttaacttgttttcgttttctgggtttagttcaaaatgcattttttttccttttcttttagttttaatattattttttgttttagagtgatttaatgctggttttgtgagatgggttttcatggactttcatttttatttgatttttttttcttttcgtgtttttagttgtgttggaaaagaaaaaaaaagatttgatttgatttgctacattattttattttttataagcttttggatttgctagatttatcttgtaacattttgggtgatgatgataagggatgtgggctctgaatgttttggtgggtctttttttcttttttttgctttttgattatcgtgttatgctaaatttatgttgacaagcagatatacctaaaaaagattatgataaatgttatcatctgggctaagagatccaagcgatggttatgttcctttatcctgcactacaatttgatcccattgctgcaatttaatttttaccatttctgtttctttacagtatgttatctgctactgtttgctgttttgtttttatctagctggtgtgtgttttccattttgggtttgattttgcttggtgtggtttgtgattatgctttacctttactgcttttgctgttcttcctaacctctaatacattttaccaatcgttgaccccattttcttatgcttcttgttaagatcttagaaatgtatatgcataatccttaatcagtgttcttctttgcgttgtgaagtggaa

SEQ ID NO: 61159 - DNA, 135 bp, Populus trichocarpa
  Intron number 2 from transcript POPTR_0014s07610.1 (locus POPTR_0014s07610) derived from phytozome v7.0 (chr-ID scaf fold_14; pos 5711848 to 5711982)
acactctcactgctccaaggaaggtattaattaaaaaaaaaacattgtcagcgtaaaataagaataaatatcaaattagttcacccattgaaattgacttttcttcaattcaaattccaggcagccaccccaagt

SEQ ID NO: 61160 - DNA, 571 bp, Populus trichocarpa
  Intron number 1 from transcript POPTR_0018s00980.1 (locus POPTR_0018s00980) derived from phytozome v7.0 (chr-ID scaf fold_18; pos 905443 to 906013)
gtggtttattgaggaagaaaagaaaaagaaatctggtatgctttcttttcattcttttgaagatggtgatgaccatgatgcattgtgttttctttttcttgttttagttttaatgtttttttggtcaaagttgatgtcttgatgatgttcttatgcactgctggtattttttctcggaggcttttcaatggattaacgagtttttatcatctggggtttttgttttttgagtgattttgattgtgggagcacggttttgcgtagaaaatgttgtgtgatcttcaaggtgggattttgtcattccttctttaccctttttgcaattcttgatgtgggtattttgggatttttgaggtttcttaactggaaagatcttcctttgaaagttttgatccttttgtgtttgcaagttttccttttctgtttcttcaatgcagtttaataaatgatctttgtttagtcaacagtttcgtgttgattctaatttagttatgaatatagtagcaattcattgacatatacttatttgggtgcagataacgggaattttggtttttccaagaagggtttt

SEQ ID NO: 61161 - DNA, 993 bp, Populus trichocarpa
  Intron number 1 from transcript POPTR_0003s07300.1 (locus POPTR_0003s07300) derived from phytozome v7.0 (chr-ID scaf fold_3; pos 8860609 to 8861601 reverse strand)
tcagatttcctgcttctggtggaggcaacgttgtggttagactaatttgcttttcctttctctgaatatacacatgccaaatgctatcaatgatacaatgtgtttatttaattcattacaacgtatttaaatcctttagggcatatatttcttttctctattcactttttcatgtgcaaccgtaattatatgttcttggacttttacagtggtcggaacggtagaccttggaaagaaacttgaagatattgaggcaacttttgcatccttgcatgtgggtctgtgccacattacgattttgcagttttctgcatgagaagcattaaataagacagctcttgtgctgcatgatttttaattttattaatccttccaatatctcatcctctataaatgcttccaatgtaatccgagtgtacacttcaacaaaaggtactgctatatgcagagcagtggttgggttgggtagaaattttcaatgtagaaataaatgaacttaaaaaattggttactaccttttctcttgaatcaccgaaattctggtcataattttcatccattctaaaacaccagaaaaaaaaagtttgtataattatgatcataattttaattgatgtttttttaggggaggggggattttagtttcgtttttgtttagcaattagtgaatagttctctcacatggagaataaattctttcaggttgaattttaaaagaatcatacaaatatgaattggctttaaaccccaaaagatactgcaggaaccatagccactcatcatcgacattaaaccttccaaggttgcaatacttattggagctcctcattgaggttatggtcactctgcgggcgcctgattatcatagcacttaagaacatgttttaatattcatttatgctttccactttctcattcacaagcattctgagatatgttggtgtgctcaaattattaggtaaaaggaggaactttgcgagcatcggacatatt

SEQ ID NO: 61162 - DNA, 1029 bp, Populus trichocarpa
  Intron number 1 from transcript POPTR_0008s17865.1 (locus POPTR_0008s17865) derived from phytozome v7.0 (chr-ID scaf fold_8; pos 11999624 to 12000652 reverse strand)
caagagtgcacattaaagacaaactcaaagattcggtaagagaaaacatccatgaagcattgaccctttatcttttttcatgtacaatttatgttcttgtcggcaagcagagaaagctttttacgctattttatttttgtgttttaaatgtaattttaaaaattttaatttttttattttaaattaatattttttttatatttttgaatcattttaatgcgctatatcaaaattaatttttaaaaaataaaaatatatattattttaatatatttttaaataaaaaatacttttaaaaaacaacaataaccacacttccaaacaaactgataaatttccaactcagcagcttctcaagactgtctcaaactcagtgattccagcacctccatcagggatttttgtttaattaaatggtattagtgtttaatcatactggggttgtgtttaataaaatggtattagtatctaatcaagtatagaaacctaaaccctaacaatttgagtgttgaaaaagtaacgggtctctctttattttacacatcctttctcttttcttttcatatttttaaatttaatgctttaagttttcattttcactgttttttcttctccagcctcacttattattattttattttattttgtattttaagatatttatatgcatttaacggacaagtcaactagaacttgatcactacacttcggattaatacactttgattattattattattattattatttaactggtacatttaaataattaaagcaaaaactaatatatttaaatattttaaaaaaaatcatgcaaatattatcaactcaattagaatgagtaatcatgcaaacttgtcgccgtttcggattaaatcgaggagttcatatacaatttgattacaggctggacgccaagcagaggtttgatgcttctccatccatctttcacatttgaaacgctggctctctgtttctttgtttcatgtaattaaactggatttcttcaggtcttgaatcaaattgtat

SEQ ID NO: 61163 - DNA, 605 bp, Populus trichocarpa
  Intron number 1 from transcript POPTR_0015s11270.1 (locus POPTR_0015s11270) derived from phytozome v7.0 (chr-ID scaf fold_15; pos 11870717 to 11871321)
attaagcaagatacctcgacgacaagaacagacaggtgactgtcaagatacttcatgggcaagtctaagcaaccccacatttgattggtcgtgtgcatcaccatcttccctaaacgattccatctaatcttcttcttcttctttttatttacggttataacaagagccgcttcctaccctgactgttgctactgctacattttgtctcagttcttctataaatattcatcactaatgaactgaagatccaccttcacagcaccaaaaacaataatgggattccgcaaagcctcttgatcaccagcatcctgatccttttcttcaccacaggcaatggtaagtttatgccatagaagttccttataattctttcatgtacagtagcggagaataattggttccgtcaacagaagtagaatgtttttaatgtgtccagccgaattcatgcgaacagaactgtttaattagttgctgcattgaatttttatttaatcagatgtcctccatggattagtatcggtgaagttgactataaatgttgctgacagttcttttggttgttccttgtagctgccaactccaagctgtttagggagtacattggt

SEQ ID NO: 61164 - DNA, 838 bp, Populus trichocarpa
  Intron number 1 from transcript POPTR_0007s07440.1 (locus POPTR_0007s07440) derived from phytozome v7.0 (chr-ID scaf fold_7; pos 5797109 to 5797946)
tctctctctctctgagagcatcaacaccaacccaggtacgatacctatacacgtatacatgtatttacgccttttttcttcttctttctgttaatgaattctgggtcatgatctgaattggttactgtattacacttcctgtgtttgttcaatctttgtttagttcaactggttttcattatttccgtgttctgttcgtggtttggtcaaatttttgctttttcattgtctcaacatgtaaatcgccatgatgtttgtttagttcaattgggttttgatatttctacttgtatgttgtttggttggtcaaaagtttgcttctttttttatgaatctatagatagtgttacaacattcgctgtgtttgtttgattcaattgggttttgattattttacttttatgatgatggcttggtttaaagatagcttctttcattgtggaagtctctaaatctggatgacgatacactgttatgtgaattttttctctacagtaaaaaattgttgaaaaagtgagctgtctttactttgttgaattaaagtctgatctttacttttgttgttgtgagaaatttgtgtgaattgaagaagaaaacttgtgttgttgttgttgttttgattgagattgttaatgaaattgatttgaagtaaatggatgggaattcactacatcaaaggtgaatcgcaattatttcatctgttgctgatgtagattcatatagattgcattgggtatttagtatttatgtaactttgcatcaatttgattgttttcttatgtttgaattctgttgtgatgtctcatgaggaatttgatttatgtttctctgaagattt

SEQ ID NO: 61165 - DNA, 1062 bp, Populus trichocarpa
  Intron number 2 from transcript POPTR_0015s11330.1 (locus POPTR_0015s11330) derived from phytozome v7.0 (chr-ID scaf fold_15; pos 11922446 to 11923507 reverse strand)
gctcaagcagcgaattgtttctgattggcccagaggttttattttatttattcactttttatcactatttctttcaattttaatttttacttgttttaatatttatatgtctggttttttttaagattttagatttctttttagtgaatttacctaatttgggaggatttatttgattctaaaattgggttaatttgctttggttggaaacttttgggaccgtgtttgggaaattcaaagtgggtgctttgggttttatttgggaagtcattgaaaaagtggttcgaatagtttgatggaaatggtaattttttacccttcagttgaaaaatgggtaaacccaattaattacgctttatcattgctatggaaagtttgagtattaatctatctgataatgttgtcacaagttgatggtttagagatgttattaatgtttgaagttgtctgtgtttgtcatcgtggcttgcgtggttcgacttcaaagagtaggaggttttgtttgtggggtttgttgttttggctattatcagaaatgaatcatgggaaatttgctggacttttgttagtatttggttatggcttgtattgctgcttgattgagttcacctgtttggtgtggatcgggagcatacgattgcgttgcagtctagaactgttgcagttggagaatgtgctgtaaatttgaagttattgagctcaatctggggtatgtgacctaagatggtaagggtgagagcatgtgtggaatcaacaagataatacaagcctcctaaaatgcaaaagagatcctaagggatgatgttctagatgtgaacctgatcagccaattcttcttcttttccaggcaaagcgtcatcaaatatatcaaattccaaatttagaaatattaatagctaagctaagaaagataaagatctcttgtttgaaaaacctatctactttcaggacaggaatgtctttcatccaatgggattttcttttgtgctattttggttacatttttctgaaaaaaaaattttattattattttaggcaaaactatcactcccaaggtagtga

SEQ ID NO: 61166 - DNA, 1063 bp, Populus trichocarpa
  Intron number 2 from transcript POPTR_0004s13630.1 (locus POPTR_0004s13630) derived from phytozome v7.0 (chr-ID scaf fold_4; pos 13985254 to 13986316 reverse strand)
cccaagaaacctccaactgctttcttttacttcttgtaagtgagcttttatttatttataattcttaacgtttttgttatttttcttgtcatcatctttttaattaggcatggttaggagttggctgctcagcaactatatgagaatcctaacatgttggttgaagctggttgccaacattattggaatgagttaattgatggaagttttattttattttattttattttatttttcttttttggtaggattttgtttggttctcttgatgcttgtggttgtttcaaccccatcttttagtaggctcacaggctatggggctacttccaagtcttttattgcgtggaaaatgaaagatgcaattagacaccaaaatgttaatgtctgaataagctcttgtcttctgtttcatccttgcaatttgaacgggagtatttttagattcagtatagatatggattacaataaattgaatcatattaacaagaggagataaggaacacacatgcccatatttgcttggttttatatttcttctccagtcggttaccgcttaaatttactgctaatatgtggactttcatagtgatcctcttttgtgtcaatatgtttaactataagggtaaattccatgcagagtgatccaagtaaccatgaacataggtccatgatgttgcttgtaaatttattacttcattgtttttagtcttgcccaagctggacagatatttcagcagtatgaattaataccaatcctgccactttgatctttggatttcatctcacgtccctgtgaaaacctggaggttaatttgttattgttcactttacatcctattattactactactattttggtttttaaagcatgaaagtcacgttttattttaaagttatggaaaatgttctgtgttgcccacttgaacttgtttctataagctttataggatttgtctttgatctattttaaaaatgccaaaaattttcatgttccccctggtaattgaattttactttgattcctaaagagaggatttccgcaaggaattccaagagcagaatc

SEQ ID NO: 61167 - DNA, 661 bp, Populus trichocarpa
  Intron number 1 from transcript POPTR_0005s07340.1 (locus POPTR_0005s07340) derived from phytozome v7.0 (chr-ID scaf fold_5; pos 5012075 to 5012735)
agggagggagcgagagattctcgaagagattcaaagttgcctttttcggagtattctattttctcttgttcctaatttagggtttctgattaagttcttcgatcattagggttacttgttgtttgaaattaaagtctgctttgggggattttgggtattgaatttgtgtgttcttgattcggtgtttgaaattgttggatccttttcgaagtttacggtttatttatcattttcgtttcaattaattaatttttcttgcgttgttatgattgcaattattgatatcaactttcaaaccaatttaggattttttagacttataagttttgatggaactgtttttttatgtcactagttgtgtaatagtttcaaggtcattcatatttcgataacatttgttgaattgtggttatgtttgcttgctgagaaaatgtaaggaaaacacattttcgttcatggcctatgttataagcttgatcaaagatatgaattctgcataagacgtgtggttttgattatgttttcttctgtttctcaaatgttgcccaggaggcctaaagcgaggtggtcaatatctgcatgaagttgtgttaatgaatgttaaatgttgtcttttatttgttatttggatgattgtttctgatgaattggttgtgtatag

SEQ ID NO: 61168 - DNA, 903 bp, Populus trichocarpa
  Intron number 1 from transcript POPTR_0243s00200.1 (locus POPTR_0243s00200) derived from phytozome v7.0 (chr-ID scaf fold_243; pos 5956 to 6858 reverse strand)
gccgatgtgtgggacactttatatgatggttctgccgtcgtgtaagcctagcacatcagagaggatacaaatattatataacctttcttatcttagcggcggtgatcggaaacaggtggaacttttacttgatctcgaattagtggaaatcaggctggtctaattagaagcaacattcgtgtgcttgtatatgattagccagtcaaattcactctttttaaaaattaatgaagcaccaagtacctgtatttgtcttttaaaataattaataaataaaggcgaatgagtctataaataaatagatagaataaaaaccgagaatatcgtatacatcgatccacgtacacaccggcagcgtacatgtacatgtatatttaggaagactccaccatacttaaaagctaaaaaataaacataaatatactaactgtccaaaacattactcgatcatgaaattgcaggaagctccccttttatttttgaaatgtgaacgtccccactctcatccactttaaattcccaagcctttcaaaaccttcataagaacatgttggcagagaagccatcacatccggtggcggtttgatgattttccggcgaatcttggccactataactttcaagtggacgaagcatagaattgttagtacaagtgcaaaggatattttagaatgtgctgtcgagcatcggtacgagcacatcaatcatattccttttttttcccatcccataaataatgtgatcacgggctgccttcgaacacattctcaagtctcaacaaaactagctgcacaaaaaaacttcacctagttacgccctctttcaaacgtcagtgacaggctcgggtgagttgttaaggatggtgaagttttctaagcagtttgagggtcagcttgtgcctga

SEQ ID NO: 61169 - DNA, 999 bp, Populus trichocarpa
  Intron number 1 from transcript POPTR_0002s10710.1 (locus POPTR_0002s10710) derived from phytozome v7.0 (chr-ID scaf fold_2; pos 7791426 to 7792424)
gggtccttgtcgtgctcttctcgctgatcttactggtaactattataattcattttaaagctgttcattgctttgatttgattttatgcgaattagattaatttagttgaaatgagatcaaaccctaattgagaatatgattttgctacgattccttttcgttttcgttttccttgaactttttatgtggtggtgtgagatgtcctatctgacttacgtttggcatcttatttttatttattttttaaatgattaatcattagaggggtttttgatgatttttaattatttaagttttcattattggtgctgctttatctttttaagattccgttgttgtctgacgagtgctaaacggaactacttttgatcattttacggacgataatgtccatggcacatgatttcggattgctacacggcgtttagaatttttggtggggtcagatcggttggcggggccggactggttggtgagcaattggagtctctgttgtggtgggtattggccaatgtgggtttggcctagtatgtatggttgattgtgttgatcgtctaatagcatgattaaagatgtatcaattctaggtgggatccgcatactccatgttgtgtgatctgagtttgcttctttgtttctgtcttgtcttcttcttcttcttcttctttatttttccttccatttaaatagatatggagatgggggcaactaaaagcagtttataaaatattcactttctccatgtcgaccggggaaattggacagttgaatctcattctgattaaaaaactattttcttgagtataattccttaaatagtaggtttccgtaattagtatggaatttcaaatgaaacaattttacaatttgaaagtcatattggacgtggttcaggcagaggagctttcataattaaatcttcttcgagattagcaacagtaacaagtgttcattttgcattttgaagtcattttctggaatttgggatttgtggacaa

SEQ ID NO: 61170 - DNA, 453 bp, Populus trichocarpa
  Intron number 1 from transcript POPTR_0013s15300.1 (locus POPTR_0013s15300) derived from phytozome v7.0 (chr-ID scaf fold_13; pos 15305519 to 15305971 reverse strand)
ctacttacatctatatttttcgacatcgttgcttggtgaggactaaaactatcttttttttcttttaattaatccccaaattaattagatgaagagaaatgctttcaatagtgcttgaatccgatttgtttaaataatgtttcaactaaatttgctttcaattatattaaatatttttttataaactagatttgttttgaattccattgtctatctttattatattattattattactactactattatcatttcattttaaatcggtttatgggatttgatataagctcttatgagcaaggttaagtaaaatcttgatataattggaccacgttagtggatatacatgtaagtgtattgtagattcatattttttgcaataattaatggctataagagattataatgttatgtacaggtttgtggaagagttttttgcaggaattgtgtgag

SEQ ID NO: 61171 - DNA, 591 bp, Populus trichocarpa
  Intron number 2 from transcript POPTR_0016s01000.1 (locus POPTR_0016s01000) derived from phytozome v7.0 (chr-ID scaf fold_16; pos 397604 to 398194 reverse strand)
gttaaaatttcgcttaaggactgtttggcttgcaggttttatttttctacttttttattggctattttttttcattggtgtttgttgtaaataaaattaaaacaaaatatggttttattgaatcttggaaatattgggatgttaataaagggaaaatgaaatatgggattaattggagtgtggaaattttttgatgtttagggtttaaaatttgtacttattgatagttagttgggaatttggggttttgatatttatgatttaaattagagatacttggttattaatgaagatgtgaatattttgttaataatgaaggtgaaagaagatcattaatgagattttggaaaattgcgatatttattgtttagaatatgtttttgctgctagttagtgggtgataggtgggggttaggtatgaatgatttaatagatattttaagtatcagtaaagaactgaagataacatgttgggattagtggaaatttggaaattttgtgttgcttagggttaaaagatgtttttgctgttagttttttagtgattgagtagaggtttaggatttatggtttgttgtgatattgcagtgg

SEQ ID NO: 61172 - DNA, 563 bp, Populus trichocarpa
  Intron number 2 from transcript POPTR_0016s11580.1 (locus POPTR_0016s11580) derived from phytozome v7.0 (chr-ID scaf fold_16; pos 10808479 to 10809041)
gtttcattcactctaacatcacacttagccttcaggtatgagaaaataatgtttttacttactgatctaaacatatatgtgtttttctgctaaaattcttcctactgtaaaagtaagatcttcaaaagattgagtatattttgattaaatgttctggcaagagattggatcctgtaaccaacaagcaactgcctcatgtcaaaaacaaaacattacacttagcagctatagtacaagctcccatatcagccaaggtacaaagaaaagtctataactaaaaaaaaatgaagactaaaaggaaatgatgcaacacttattttccgggcatgcagcagagctaattagtgactgtagttgttggttttgtactccagtacgacaaaaccaacctatacactaatgacactatagagtagtgtgttctagaagcagcaaagaatacagtagctcctttaattattttttccttttactatctgaattcccatacaagtacttggggcacgtggttatgcttgtgcttctcaggtcactactattgcgtatagagtgctagagatcct

SEQ ID NO: 61173 - DNA, 357 bp, Populus trichocarpa
  Intron number 1 from transcript POPTR_0014s01690.1 (locus POPTR_0014s01690) derived from phytozome v7.0 (chr-ID scaf fold_14; pos 1576882 to 1577238)
gatttgaagctgaggctatccgtcgatccaatcaggtcttctcatcttcttttcaatctgatttttttccatctcttttttgtatttaggattcgtgtttgacaaaagttgagtcgctgaccaactcagatttctgtggattttgattttgattttttctgttaatatttgttttctaatttattggatattttttggttaatttatcgcttaaagatcatggcagattgatttttgatcagttgctgtttatttgaaggtttttgctaaagaaccaaagtaaaaattatgtgatccttctgacacattttcatgattgcaggagaagcttagagttgctgtcttggtttcaaaagc

SEQ ID NO: 61174 - DNA, 381 bp, Populus trichocarpa
  Intron number 1 from transcript POPTR_0019s12740.1 (locus POPTR_0019s12740) derived from phytozome v7.0 (chr-ID scaf fold_19; pos 13694793 to 13695173)
ccttcaagttgttggtttctacgaccacttagcaggtttcttctttttcttcttacccttctcttattattttcatatgctcagttcacatgaagacatttgtttctaattttaaagacctggactttgaaggcttactgggtttattgggtttaagtttttttatttttataatgtgaaccctctgtaataatgtgaaccctctgtaatgtactaagaaaatatttgggtttaagtttttttatttttatattattttaatgtattgatatcaaaaataaaattttaaaaataaaaatatattattttaatataatatattttaaaaaataatcatataaaaaaggttatcattgcccgagcatcaagaagaggattggc

SEQ ID NO: 61175 - DNA, 1034 bp, Populus trichocarpa
  Intron number 3 from transcript POPTR_0008s20010.1 (locus POPTR_0008s20010) derived from phytozome v7.0 (chr-ID scaf fold_8; pos 13821712 to 13822745 reverse strand)
cgagcaatttgatactgcttttgaagtgaattcttgaacccttttttttatatatatatttaagttggcagataagtcatctactcatttatcaaattcggtatccaagtaaaatgttcttttttttcctccttttaattttttgatgttcacattttattaggaatttgagattgattagttcatagtcagtggataatgatgcttttggttgttggttttcagggattaatgaaggtttttatggtttcttgtgtcttgttctggagataagatttatcctaggatttgttttttcagcttgagacgattgcatgtttgagacccttttgataaaaaggtggtagtaaaatctgaataaaaacaaaaatgctttaaaggcactcacagactgtcatattttgagattaaggagctatgtaatgtaggatgactttcgataagtgccccgcaaatgatttgtgatgttggagaattcggaatttttagaagaaattagagttttatgtacagtgaatagcaacagatgttaatgtgccggaatgctacatagaataggtggtccttttataggcgtcaaaagccctaggagttaaacagttagaggaaaatatacataatatgaactataatatgaactcctaattggtattcatgttcctaaagaagctaagtttcccaggtagactaggtttacaagaaatctcaaaataaaaattcagattaaaataatttataaatttctctttgcttggcatcattactattatggtttggcaatatattcaatggttttcatcaataagtcaaggctttgaaataggtagggcctgttcgatgggtcaaagcgtgtaaccaaactttaataaccaggtggaactgctttttttttccccttttagaatatcaggttgtgtctttaaccttttcgtaacaaatgttatttttgaacatgttaatgtattctaggatcctctgtgagctgtgatttttcatatcttctttgctttgttttctttgcagtcagttgaaag

SEQ ID NO: 61176 - DNA, 726 bp, Populus trichocarpa
  Intron number 1 from transcript POPTR_0008s16170.1 (locus POPTR_0008s16170) derived from phytozome v7.0 (chr-ID scaf fold_8; pos 10805546 to 10806271)
cctgatatccagcaatccttttcccttacaaacaggtaatttaaaataatctctttctttttaatttctccctgataattaattaattctgttttgattctataaaatggttttgtttagagtaggcgtgtttggattgtggattttttttctttttacgtgaaaaaccatggaataagccaataattcatggaggaggcattaacgcagagtaagaaattttctgaattgccattaagtgcgaaaataaaggttttatttaagggatgagaagcatagacgttatattcctgttttggatgagcttttagatcctgataatcaacttcatggttggtttcttttcatttaaatttttttcctttttaattccaaaattgttaccttttcttttgttttatgaatttaccgacaataaaatggaagcagtgattgattgtttgtttgtttgtttgtttttggatatattatatggtagtaggagactataaggagaggggtattacattggaattgaagtccccgaagatgatcctgaagctcccagtgtctggtctgccgatggtatttcaattcttttttttctttttaatccactaatttttattgaaaagatttttcttggtgtttttagaagaaaaaaaatgggttgttattagcaatttcctttttttggtggttggtgtctcagatattttgcctggtttgaggcgggctacgtagaag

SEQ ID NO: 61177 - DNA, 725 bp, Populus trichocarpa
  Intron number 3 from transcript POPTR_0002s03980.1 (locus POPTR_0002s03980) derived from phytozome v7.0 (chr-ID scaf fold_2; pos 2497315 to 2498039 reverse strand)
gaagggtttctatcttcatctaagaacactgcactgtatggagtggatattatgattttcatttatttcctccgctttgatacaaatagtttttccaccccttgtctctatttgtgaagttcctattttgatttttttccctccttgtatgttgatatttgaagtcatgcatacaaaaattcatgtgacatagatacttgtaatttgcagaaatttgattggtgcccttggttataggtcatgaaaatacttgttgctacaattactgatagcacaaaaaaatgacacagagggtggacactagcaattattagcatcttagttataatgaacgagtgctaagaaagcaaacagatttatcttagtgttaatgaaagcaatatgactgaggtataggtaatgatggatcacagctttttcttgtgaggttgattatgtgtaatagggaagctttgacatgtgaacctattatagacaaacgagaatagatgctttacattgtctggtcccttctatacagtaacattcataaaaaagtggaagataaaaacacagcaacaccgtgttgctgtgtttttatcttccttttatcttccacttttttatgaatgtatgcatatacattttggatttggattcaggtggatcaccatgcatattatgtaattgacttcaagcttataatcgcagcttaaagcggtctaggaagttccagcctgaagata

SEQ ID NO: 61178 - DNA, 602 bp, Populus trichocarpa
  Intron number 2 from transcript POPTR_0005s08010.1 (locus POPTR_0005s08010) derived from phytozome v7.0 (chr-ID scaf fold_5; pos 5506429 to 5507030 reverse strand)
ccctctctatattcctggtcttgcaaaaggtacatgctggtgttacattttgacaatctctgattgcttatgctaaattttccttatggtctacatttactgttttgattttcaattaggagctacaagaatgggtatgtttggaatgacttggcagaaaatgatatcatctatccatctgatggagctgaatacgttctcaaagggtctgaactcgttgaaggatgccctggtcagtctttctccattaaatgactgttacaacttacaagttgcacacagcactgtattggtgggctcatttgtaacatgcatttcttttgcagaaaggcttcaacaacttcatgtaagcaataatagacaagtaattcaggaacccaatctccatgcaaagagaaaacaacttctggaacctattcaacagcccagacaactcgaagaaacgcagggaaccaagtactatcaagaatatgatgatgaagaatcacaggaatcacaagaagaatatgaagatgaagagaaaacaagctatacaagctccacaacaccccactctcgttgttcaagaggggtatccacagacgaacttgaagagcaagtac

SEQ ID NO: 61179 - DNA, 779 bp, Populus trichocarpa
  Intron number 1 from transcript POPTR_0005s07800.2 (locus POPTR_0005s07800) derived from phytozome v7.0 (chr-ID scaf fold_5; pos 5349438 to 5350216)
taatttctcgtctcaaatctctcacccttttataggtctctcgctctcatctcaaatcccttttatttttttagaggctttatgtcgaacactttgtatatttctcttctcttcttttttccgggtttctcttatttttgctatttccagcgttaaaagaatcgttaagttgtgaagttcctttatttgtgaagtcttcggtttgcatatgttttcgtggttttttggttgttacaaagcattttaagctagccctttgtttccttgtttttgggtttctcttaattttatcagggatttacttctatttttttattaaactatttctttgattattttgggttttgtttgatttcttataatcaagaaacaagatactggcattgctcgttgacatgtaagttctttataaacaatgagattacaaattttgggttatcacatacaaaaaaggcaagaaatagggtttgtggtctttagaattttaataacttgttaatggtagtgttttatactgttcatatattcttaattagatctgaaagatgagatgtaatacccttctgaaaaaaaatagcatcacaggagtaattatcctgtcaaaaagtatttaattgaatttggtttgttggatatgaacctctagatatatcaacaatgtgatattcaatatatttgtatctgtggtactctgttctctattggcataacaatttgttatatgaagaagttttttgcttgtgaacaggttgttttgtttcttttaaatttgtgaagaa

SEQ ID NO: 61180 - DNA, 584 bp, Populus trichocarpa
  Intron number 3 from transcript POPTR_0012s04660.1 (locus POPTR_0012s04660) derived from phytozome v7.0 (chr-ID scaf fold_12; pos 4007729 to 4008312)
gtaaacaggtaagcctagcattaacttataatgaactttttgatgagcgcatctgcttggtggcgctcaaacttatatcatttgatgtgaccctttaaaattttttagttaattataagaagattttgaatgaggacattacactagaagtttgagtggaaaaatatacaacaccatctcttcatttgtgtttcgtttcttttaaaatgtgaagcaactattgagtattaaaatgaattcagtggtgtgtttagtttctttcttcagtggccatttttgataaacagagtctgcagctgactactcgcattttgtaattaaggaccaacttcttgctatgctcttacgcgctgaaagtaatttattttcaatcaatttgcatgaggactgtacaaacatgctcgatctctgttgcagatttttttctttgatattttgttatctcctttttatatttgcgttcatttattatcttctctttcccccctagtcagagcatgtctttttattcctgataattaaccaatttgtggttaaactaatttgcaggtgctgacagtatctgctgacaagtctgcaaaagt

SEQ ID NO: 61181 - DNA, 959 bp, Populus trichocarpa
  Intron number 1 from transcript POPTR_0006s13310.1 (locus POPTR_0006s13310) derived from phytozome v7.0 (chr-ID scaf fold_6; pos 10532662 to 10533620)
tattttttagattccctaaacttcctttcttcaaggttagatctcgtctctctctccccctttagtattctgttatgtttacttgtctgatctgatgcgattctcttttcttttatagcttttagcttttataattttgatggcatctgttataagcttttcttcttatttgtttatatgctactgatcgtgtttcatttcagatctaatgactcagtttttgttgattttgattgaaatcagataagaaaaataattcagactctgaattagtttttcttttcttaaattgtttactgttctgctatgaatataatcgggttttttctatcctgaaaatcagttgcttttagtgtttttatttaaagatcttaatttgaaactatctttttttattaatttgtgttttcttttttcccatcggaaacaaggaagaagcaaactgaaccttgataacatttggtcatgtttgttttgatgaaagtgcctgaatctgatgggaaaatgttttatttgactctgtagtgactgtactttaatggtaaattccatgccttagttgcgtggagacctgggctcgaatcccagcagtcacacctctgaaattattttttattaactaataagcggatctaggcttattgttgtatcaaaggtttgctggtttattcagacacatgtataagctgtgattgttttgcgggtggttttaacttgttatatacgaatgactatttggcttctgtctttggttcatgaaatgctatttttaagaacgtgtcatatgtatgtctttactgttgttgaaattatggtcacttgaaatttaagtataagactggttaattagtattattggaaatgttacttttgtatgtttttctgtccattcaatatgtttgtgtatttattaagtcttttttattttatcaattccagtttctctcccaaagttcatc

SEQ ID NO: 61182 - DNA, 759 bp, Populus trichocarpa
  Intron number 1 from transcript POPTR_0013s13780.1 (locus POPTR_0013s13780) derived from phytozome v7.0 (chr-ID scaf fold_13; pos 14171079 to 14171837)
gtagtaacggtaagagcttactatacccgctatatttttggtagtgtcagaattttaaatcttgttttctcggttttctcggtcaaactcataagatagttaatggaacaaatcctctttaccgtccacgtttttttttataacgaagagcacattagtctaaaacatagttattaaacccggcccggatattgacccggctaagagaccaggtttcgggtttcatgggtcaaagttcattatttttggcgtcttccctttgttcacaattaagccaataaattggctttttggaagaaatgctcttcttctaagctcaatttctactattttccttgcaatcgcataaaaccaagttgatttttttactctagtttggttcaaattacccaatttatagtacaaaaaatctggacctatatggcatatatattctaagcttagcaaatttgacattatgtttttaaaattcttaaatagtatttggtatgatggatgattatattttaatatatttttttttagaaatatattaaaatttttattttttaaaatttatttttaacatcaacatattaaaataaaaaaaatatataacaaacaattaatttaaaaacaaacaacttttttcaaaaaaacaaaaaacaataccttcgcagaaacaaacacacccagaacccaatatctgcatcaccaaggtatgtgacagcaggttatatcgatgtgcaggaggggcgtgtgggtacgggtcattagtgg

SEQ ID NO: 61183 - DNA, 857 bp, Populus trichocarpa
  Intron number 2 from transcript POPTR_0001s37930.1 (locus POPTR_0001s37930) derived from phytozome v7.0 (chr-ID scaf fold_1; pos 37009451 to 37010307)
agggatcttgctgctcataccactctaaaaccaaggtaggtctttctcagcttcccttgattaggaaattttgattcacttgaacctgcttgtaattggggtgttgttagtcatttatttaggtcttagcaacttatgcaaaattttaaactgtacttgttgctggattaatctgctagcttattttgtccacgtgattgtttcttgctaatgaataattgtaatttctgtagtagaaacattcacctaggagatttcccgtgaaatggtataaaaagcctttaaatacatccgtgtttgaacatttgaccaaatgaaattacaagattccttactgtgctgtttataactactttctccaaacagaagattgtggtacggggttctcttgccgtgcttcccttttttgatcccaagagaatctgtttgcagtaaagtagttgaagatgattttaggggatggggacttttgctcagatccagagaaaatatttgagtcctctcactctctctctatgagagagaggtggaagaaatgaaagtagttttcatttcgtgtcttcttttttgtttgggggttgggatattgaataagtcccttttatgttagatagttgtacacatgcacatctttctgcttttgtattgaatcttcatctgtatttgatcggcatgcatatgaagtgatattctgttaagtatcattccatgtagatctttatgctgtctctctctttttttttctttgtaaatgcccttagaatcttcccttttccacagaaaatcatgaccttatttctgattactgtgtgtgcatcacagaaaggaagggcaagacaccaaggaggaattgctga

SEQ ID NO: 61184 - DNA, 1021 bp, Populus trichocarpa
  Intron number 1 from transcript POPTR_0008s13440.1 (locus POPTR_0008s13440) derived from phytozome v7.0 (chr-ID scaf fold_8; pos 8833771 to 8834791 reverse strand)
acagggcttctttcatttctcctagatcaaggtataaaaatatttttttccattttttttgttgcaattgttggtttctgtgccaatttaattgggatttttttttattttttaaaggatggtttttgggtagggtttttgtgtcatttgtttttggggtaatgatgagagtaaaataataatgaaatgaagaggatgcttttcacttcatttgttgttggttttagttttgttttttgatatgcagtgctgctttacagctgggcttggttcctaagctcacttgtccttgagaattcatattccatcaaattcttttcattggaagaagactaacacaatatctaaagtgttaaaagttcaccagtgaaagtttcttgttggtgaaaatgttgaggattacagttttaccggatgatatcatccgcggcacacttaacctgccttttcacataaactagttggatttttttttagaaactcgaaggaaggagttgtttttaggattataaaatccagtgtgggatgattttgactaaacttaagatggtggaaggtggttttgcacgaaaatgggatggatttttttttttacttatttaattactttctcaatacaacaagtaatgttcacaagtttcttgatttttaagcatttgtggttataatgtttgtgaagagcttcatggtttctctagcataacagtatgggtatttcatccatgtaactgttggactctgaatatctataatctcatgcctgtgcccaactctgctcagctcacaaaagctttgaattatgtgatttcactgtgtatgcatttatgcacgtgggactgaagtgagctccaaaatgtgatatcctgctatttgttattgagtgactttcctcctacttactcttgtatgtctctccagtggtatcactcatagtatgttgtcttagtaactttaccgaaggttttatcaatttattgcactttttcttaatttaatgatatctgctcagcgttactaaaag

SEQ ID NO: 61185 - DNA, 1019 bp, Populus trichocarpa
  Intron number 1 from transcript POPTR_0013s05840.1 (locus POPTR_0013s05840) derived from phytozome v7.0 (chr-ID scaf fold_13; pos 4202999 to 4204017 reverse strand)
tcgcccctccccctccccctcccctcccgtctctggtgattatcagtaactctttttatttacagttttgttgaattcgttttgcaacggttcatttcttcctttttggtcgctttattttcaacgtgttagagagattaaagactttttagggttatttttcttaaggcttagagagatgaaggacctttgtaaattatagtatttggttaaaaatgaatgcttccatgataatgtttctagtttcttctgtaaattatagcattcaattattgttgttcgtatattttttttagattaattaattaattcccatggtaataggatggattgattggttgatgcccgtgaccttgaatcttacgataaatcattgatgtgatgtgattattatcattctagttctgcttatttacaccgcatgagttcaagaaactacccttatggtacaagggctaccttgcttatcgaagttgctgcaggttctttgagtgaaagggctggggcgattacttgtctctctcctggaggtacatcgcaattcaacacacaagatgcaaatcgaacttcccatataaatgaagctttggcagttgccaaaaatgacgagagtttcggaggtgagagcaaatttatacttgccctttttggatttactatgactttaacacaatcatgctccgtttctagagtcagttggatgtgcttgataattacaggtgcatttattattgcactctaaattgaaagatggaggcattgaagtaaaaacatatatatatatatatatatatatatatcaaatgtattggcaagtcaaattctccacactttagaaccaaatcgcattccaagttttgcaagcaatgtaatgttttaacacacatgagatttcttagtttaccaaattcaaaaatgatctctctctctcttttcattcaagaaactactgttgtgctacaagggctaccttgattactgaagttgctgcaggttctttgagtgtaagcactagggcg

SEQ ID NO: 61186 - DNA, 952 bp, Populus trichocarpa
  Intron number 1 from transcript POPTR_0007s13990.1 (locus POPTR_0007s13990) derived from phytozome v7.0 (chr-ID scaf fold_7; pos 13949692 to 13950643)
gggtttcgtgggcaccaggtctttatctttgtcaggtatacctgtaattattttattaatccttttcttctttcatttctcaagtagtccaaatttaaatctgatacagcaagcgattattatctggatgtgtataatagtgatatctgttattgatgtagttgggcattctgtctgaagtccttaaccaaagtcctttctttgatctacaaattgctcactcatttgcaccatttgaatctgaattgaatttccttgtagatcattagcaagcactattgagatgcttcataggaccattggaaatagttggaggcgtggaacctttttaaaatgctcttaatagataagtggattagttgctggagatttgatttctgatctatgatttttcaattatagtatgagagaagaactgcaaacaatataatcgggaattgattgtctagtgcatcgagtcatttatgttttcataattgagtgtgctcatttgtcaaaatagcaggagttgattggggtgaaaaagcgtccaggtttgtagtgtgtattcaggatcttgtgaatcaaattaatgttgctaatgcgattttattaggtggttcatttagttcggatttgtatgaacgttgcttgttcacactgccataatgcttttgttgacaattagattttcaccatgacagtgttcttttctaggtcatatcatagtcgtttgagaatttactggtgccctagtttttacttgtgctgattgagttgatagctgtctgcagtcttctaactaatttttaagcagtttatcttgctctcagttttttgagtgcccctagatgattcccttttatgttaatgtaagggtttctaaatgttactgggtatttatttcttgttatggacttgtttctgatgtttaataggtgaggctgtttctatccgaggattgtccttcaga

SEQ ID NO: 61187 - DNA, 305 bp, Populus trichocarpa
  Intron number 2 from transcript POPTR_0017s08330.1 (locus POPTR_0017s08330) derived from phytozome v7.0 (chr-ID scaf fold_17; pos 6823441 to 6823745)
aggtaaactatcttcttgtgtcccggatcattatcgttcaaaaagtaacttctttatcgtaaatgtggggttcatgtaggctatggatacggcgattcacctgctctatgtagttttgaatctcccaactcatctagctcagcttataaaaaagataccctaaagataggggttctacagccttcaaaagagttctaacaaagttatcatggaagaacctttgagttatactcgtacctctatcatgctcctacccgatgattgcctgtctattgtttttcagtttcttgtctgtagctttgatc

SEQ ID NO: 61188 - DNA, 1024 bp, Populus trichocarpa
  Intron number 1 from transcript POPTR_0005s08890.1 (locus POPTR_0005s08890) derived from phytozome v7.0 (chr-ID scaf fold_5; pos 6220942 to 6221965 reverse strand)
tcaattccttcccggaaagcctctttcttttccaggtacataccaattacttcattctggtccttgtaatgatcggcatgattggatttgtttgacctgaattgctttcctttttagtaatttttagcttgactttttgatctgtgattgaatttggttggatctgcttcaattttgtgattttgttttgcttcaatttggggttttatccactgaaattgaaaatgagatgatttaagtctctgggctgttatgattttgatctgtttttgttatgatattaaacatcgatgactttgtcgggttctcttcagtactctgcttgatttaacagtaaatttgacggatattggtctcttcagtactctgcttgattaaggcaccttagttcaaatgaaatctaaaatggtatatatagttttgaggcagatcatgataaaatttgatgtaatgtaatactacagtagatttgagtcgatgcgtgatttcttcttccattacattatgttgcgttacgttttattggacgtatatgacagcttgaaatggcaacattagtgtgctggatcagctgttagaaagagcatcacgttgtagtcgtgggcttatttatgcacaccttagtggttccttcgaattaacttgagagaaaaaaatttgtaaagcgaccaccttattcattgagtgtttggattggaaactccaaatggggtctcaatccaaaaacctatagttcatggattaatataggggtgtccatgaaaatgttttcgataactcacggaggctctgtacattttagctgtaattgaatgactaatttgattcacatcatttctttggatagttgtggggtgctcacacattcgttttgcatttttttgtcatctacaatttgcagtttcagttcaaactactggtttccattcttatgctattatgtcatggcataactaattaatttttctcttttttttccttgtgcacagatactgcacatagcttttaaccttccaattatagt

SEQ ID NO: 61189 - DNA, 281 bp, Populus trichocarpa
  Intron number 1 from transcript POPTR_0012s05100.1 (locus POPTR_0012s05100) derived from phytozome v7.0 (chr-ID scaf fold_12; pos 4588413 to 4588693 reverse strand)
ttgccgtgaccacccttatccttttgtgtgcaaaggtcagctaagaataccttttcctttttttttctcttcccagttatatgttttattattcattccagtgtgtttcgtgttatttgtgtgggcaattaagttagttgggtaattagggttgataattaggaagagggctttgttcggaactcaaaattaactttccaatggcattaatgaccgattagaagcccattaacccatctatcataggaaaattgttaagcaatagtttagtccctcgatcg

SEQ ID NO: 61190 - DNA, 794 bp, Populus trichocarpa
  Intron number 1 from transcript POPTR_0001s11160.1 (locus POPTR_0001s11160) derived from phytozome v7.0 (chr-ID scaf fold_1; pos 8650895 to 8651688 reverse strand)
actgagctgagtgtttatttaaaggtctgttccttttgtattgccaaatgaagaaaaagtttcacgagatttgataaactgctaaagagaatcgattctttaagcatggcggagcaatccaccaattcaatcaatttagaaaaacttaacggactttgattccactcttagtgctttgaaactgcatagaattccatctgttttgagaaacggggcagaaggtgtcttctttattttggccaaatgacttgtataaatgaatttgttgataggtggaagcaatcctggaattagacccgatacggtttagctgcaacaatcttctttattgctatagttgtttacttttttggatgtacaatggtatcacaagtagaggacatttacgagtcaaaattgttctttagtatgagtaggaaaatatgaactttgctttagtattaatttaaggacgtattggtgctttgacatcttgcttttcctttgtattttctttctctatcaagcatacacatacatgtgcacactcaattgtggacattagcatggtatattatggtggtattgactttgtggtatttatttgcatacatcatctttcactagtgatcttttcaatttttcttactcatttcagatcaagtgcttgcttgaaagattcaaactcggtctgtttttctggaatgtatgcattatatctcacaccccgaatctgttcacatcagtcccctcgatttgggtgtttgttctttcaattgcacaaagtatgaatttcttattccttcccttcatac

SEQ ID NO: 61191 - DNA, 1061 bp, Populus trichocarpa
  Intron number 1 from transcript POPTR_0018s02340.1 (locus POPTR_0018s02340) derived from phytozome v7.0 (chr-ID scaf fold_18; pos 2089579 to 2090639 reverse strand)
gtgacattgtgtttagttttcaatccggtaagcagaagtttcctgattttggtttgacccacaattgagtaaaacgaaatattttctgagagattttttattggaagaccaatattctccgtcataaccttaatgtcatgcacatagaaaagaacatgtttgagaatattttcaacacgattatagacgtgaaggggaagaaaaaaggacaacatcaagactagaatagctataactttgttttttcatcgtaaaaatatagagttggtttatgttgagtcatgggtcacaaagcctaaagtcagtttcatcttcaataagaatgcacagttacttgtctatcaatggcttaaaagtctatgttttcatgatggacatgccttgaacatattaaggttgatgaatttggaaattgcaaattgtatggaataaatagtcatgactgacacgtgtttatgcaaacactcattccattagcttatcgggatttattgttaaaagggatataggatgcactcacggagatcgatcacttctttagagatatattctccaacaagttacaaacacaacaaatgaagaagcttaaaatgaatatcattcgaacaatatacaaacttgagatgatactctccatcatttttcgactcgattgagcatctatccatacatttactatttgaggcaaaagttggaggcttattacaatatagatagatgtattcattcaaaaagttaaggtttatatgtgcatcataattaaaattttattatctttctttagatatttcaaaacattaatttaattccatgtacttgttcaacttaaaagaataatttgtaataatcaagaacaattatctgctttgtagtcctgtaatcatcatataatttaggcaaggaccaaggctttaggagtgaggaatgaaagaacggtgtgtttgcaatttgctatggacgcaaggaacaagaagacgcctccactgcctaatggtttcagtggcaatgcttatgtactcatttcagtagctttcacagctggagaattagaggaaggaagc

SEQ ID NO: 61192 - DNA, 1030 bp, Populus trichocarpa; identical to SEQ ID NO: 55114
  Intron number 1 from transcript POPTR_0014s11560.3 (locus POPTR_0014s11560) derived from phytozome v7.0 (chr-ID scaf fold_14; pos 8566621 to 8567650)

SEQ ID NO: 61193 - DNA, 695 bp, Populus trichocarpa
  Intron number 2 from transcript POPTR_0017s12230.1 (locus POPTR_0017s12230) derived from phytozome v7.0 (chr-ID scaf fold_17; pos 12433647 to 12434341)
ccctcttagggaacaggtatatctactatatctgctgtcacatgctttcttttcatgtgatgttactgttgttattcttttcttcacagtttttgaattttccacgcgcatgattttccaagaactcatttgttcacatgaattctggtctcatcaaacgcgactaattgctactgtgaagtttgttgaactttgtgtttctttgtttccatagtctttggttcacaaatacttgctgactggaacaaccactctcttcaactgtaacatgtttccgatgtaatagcctctcttaatcactctcaactacccactagctctaagtctataacctatcatcttgacaaatcctcttgaccaacattttgaacagtagtctctgcttactgttttcgccattcaatcaaagtatcattattggttgccattaaatgctgggtgcatgtatatctttaattttcttttcagcagcatgacacggaaaatgagattgatttctttttttctttttcatttggctttccaagttactttatttgtccatactgatccgttgaatattttagagcacagaaacgcttgtagtagtcgatggtaatttctaggtttttttttttttttttttttaaggtctgtctctatgttgtcttgtaccttcaggtggtcggctatagccactcacttgcctaagagga

SEQ ID NO: 61194 - DNA, 864 bp, Populus trichocarpa
  Intron number 4 from transcript POPTR_0005s15940.1 (locus POPTR_0005s15940) derived from phytozome v7.0 (chr-ID scaf fold_5; pos 12595936 to 12596799 reverse strand)
aagtagggaaaacaacgttggaaaagctttgcaaggtaataaaatgggtgcagcgagctagatctgctcttaacacaatcgggtcacacagttttgtggtaatgtctttgctctcttgttttgtagctttatttacattgcatttaactacgcctaatcttatatgttgcttggggaatttgaatccaataaactcatggtctctattgtttaaatcgaataaagactctttcaatgattgtgttgtggacgtgatatacaagttgtgtttaatgtcttttctttttcatgtactctaatcttcccattgtaagtgatctttttgctggtcatgccaagccattttattattaattgagaaaatgtcatggtcacagagttgttgttgctgtttatgccatttcagtcatttaggaatttttttttccatgttaattgcccctgtcatcctctattttggatgtcattacactttgcattttgttttttgaaaacttttcattctcgatttttcttatgattgcaatttccaccttctgttaaaaatctgttagttaaccttagaaatggagctgacttttggcaaaacaattccataaaatgaccaaataatccatgaggaacttgcaacaaagtcatcccttttcatctccttagattttgttgaaaaggaataagctgtacactaggtaatgaatctcataagcaccacatctataccattgcattcttatcacaacagttgcatctttaagcctttaagttgtattggtactgttggctagttgtatgctcatttgagtaattactgaaacaacttgcatggcagaaaccgaggaactggaaattgccaaaacagagtga

SEQ ID NO: 61195 - DNA, 913 bp, Populus trichocarpa
  Intron number 1 from transcript POPTR_0001s36690.1 (locus POPTR_0001s36690) derived from phytozome v7.0 (chr-ID scaf fold_1; pos 35387156 to 35388068)
ctacctcgatttaacctatccctcccttccacaaggtattctttccttaatttattatttatcttatattgtttaactcaaatacatgtattttttgtttgctccaaaatttaaattcagtatttagggtaaggtttggaaatttgtggtagatgatgagcttgagcttagaagaattggcaatggtaacttttattttaaattattgttttgctagtttggatgtgtgtgtgtgaaattagatctttgtgaaattatagaattataaatttaaaaaaaatatgtgactatataaatatatatcaccttctgcatgctagaagcttgtatctttgttaatagatgggagtgatttgcttctctctcaattgaagaacattgtagtttgtttttggtatccaaaaattaaagaaacaattcctccacttgatttgagttttagtgtgaaaaaaggttaattaagtggatgctatgtataagcacctctcctttaataaacgatgtctagttactagctctatatgtgctggctacagaacttctccgtttattcgaatacatgctactggtttcaattaaatatgaatttccttttaatattgtgttcagataaaaattgggaatttaggtaataggttgtcatttgcatgagtggtgtatgttttcaattacctttcctaagtttgcaggatcaaaatgattttgctaaagatgtatctttcagagagacaagtaagacatttcttgccttttcttttgagtgtctactgttttcagcactgatacccttttgatgtcatgtatatagttttgatttcatttttagtaagatgaccttgtgttcatttgattttgatctccttttctcttatttttagacttagatacagaggcagttcaggagattgctggt

SEQ ID NO: 61196 - DNA, 786 bp, Populus trichocarpa
  Intron number 1 from transcript POPTR_0009s15450.1 (locus POPTR_0009s15450) derived from phytozome v7.0 (chr-ID scaf fold_9; pos 11948802 to 11949587 reverse strand)
aagcccccaaacaatattactggaggcaaaaaaaggtacccctcagcttgagagattgaaaggcgcgaagaaaaccccgtgcataccacttcgggttcaataattttattgtttgttttaatgttttaaaaatatttttgaaaaaattaaaaaaaatttgtattattttaatataataatatattaaataatttttaatatattattttaatatattttcaatcaaaattcacttaaaaatactaagaatataattccgaacacctggattcctgtagctttttgcgtctcgtatatctcccttgtcttttaactttccttagagttcttttgttttctacgagagcaaaaaaaagagaggcacgagacgaaagtactgcgatgctatccagttgtgtacaataaaaaaaagaaaaaataagatgaaaaaaagctagagactgtgaaaactagtgatttgcctgcaaagagagagagttgactccatgtgacttttgagttctttatttcctcttttactgttgatagctaagctagtttgcatgccggagattgtcgtgctagtttgtgtctttcggggtcaaacgatcatgtcttgccgggttcctgtccgggtggactaatcttgtctcgtgtttgttattcactataaaataccagaattgcaataacatatgcttttgcttcccccaaattgaaatattttcatcttgttataccttgatttttatgttcatcattagatcttgaccaggagaaagcagatttgtcgctgccttttcaaga

SEQ ID NO: 61197 - DNA, 819 bp, Populus trichocarpa
  Intron number 2 from transcript POPTR_0008s19420.1 (locus POPTR_0008s19420) derived from phytozome v7.0 (chr-ID scaf fold_8; pos 13362734 to 13363552)
atcaaggtacttttcgttttttttttttttttggttcaggcactttgattgaatcagcaaaatggggtttaatcattatagtgtgtggcttgttggttccaagttgttgttctttgttcttggattcgaggagggcagacttccttgtgattaaatagttttatcttgaatttgttcaaatgccctctttctttgagtgcttgcagggttcaatattattctggcaatgcaattgtgtttagatttcccatcatttctcgatggctttttctttgtcagaactatttatctgataagatgtttgggtgacattttggatcaaattgataaatcttcatcagactaatttgtacatggcaccaaaaaagaaaaacctttaaccataccgattgacattgcagtggaggtgcttttcaaagcgttttttgtgtgaaaaaaacatcaaattgatacctttttaggtggtttttgatgattttgataagatgaaaaacactttgaaaaaaccactaaatcgcatttaccaaacacacgttagttcagattctagatgctgcaaccattttcactgtcactcccaactaaataaccgcaaccttgttttgagtttgtgttttggcaatttgtttgaggcttttcttctaaaatatttttttttcaaaagagcacaaggcatgtgtggttttggtttcttcatctgtcaagtgaggaattgatgatttgaatctggattatgcaatcctgcatctttatttttggattttcctagtcctgtttgttttgtttaactcatgttcttatcttttcttagtggacttg

SEQ ID NO: 61198 - DNA, 664 bp, Populus trichocarpa
  Intron number 1 from transcript POPTR_0001s46660.1 (locus POPTR_0001s46660) derived from phytozome v7.0 (chr-ID scaf fold_1; pos 47051917 to 47052580)
gttcttctgcttcatctcaattgccgcgtgtgcatgtgtggcgccagaagacatacataggctttttagaacatgcaaattgcccaccgtaccccataagaccaccctttaattgttccctttcatgtttcttccatgcaaatgatgattttccttcataatgcactacacaaatcacctttaatcgaatttgagatatctaatctcgaccccattttcttcttatgacctgaactgatctcaaggggaaaaaatatatagtttttttttaactcatgtaatcgtcaaggattctgaaatggcgtatgcatgacaatgaattagttctagataagaggaaaaaggaatctataaatttatttaatgatgctttatccaataagattgacatggaacatcttaattttaaatgtcaatggtggattaattacctagatttttaatttgtggcgtcctttgaatttttctagtcagatattcgggaggtgacttgcatgatcctctaacattgttttaatttgttattttaagcgaaatcaaacattataaattaaaccccatacaccaaggttagaagacaacctcaaattaatctcttgaacaagccaaaaatgttaaggtctaaaatgttcgcattgctttcagtgtttctcctatccatctc

SEQ ID NO: 61199 - DNA, 943 bp, Populus trichocarpa
  Intron number 3 from transcript POPTR_0008s11120.2 (locus POPTR_0008s11120) derived from phytozome v7.0 (chr-ID scaf fold_8; pos 7026673 to 7027615 reverse strand)
agaggtttgttggtttatttttttggatagacaattagtatttaaatatgtaagtaatgcaaatctgatttttttgctcacatgattctcttttctttgttcaagtcaccggcctttttgttgcgtacactttcatctcagtgaagggagatatgggtaaaaagttcggccagtctgaaaaatcagtggtatttagggcaatttttgtttacactggttcagttaatgaatcctgaacacaaggatgatttgatttaagaagggcattatttaggtagctttctttgcagtggttgtacaaatgtttagggaattaagtcaatgcattacataatgcaattgagctgagttgaatcacttcacttgctaattgttatttttaagtctcaaatacaccagtttccgatacaatacttattgtgcactcggattgttcccattgtctagttttcttggttttttaactaaagttttggagctttttctagaggttgtttcagattaggtacttactgattccaggattcttcatttgtcatgtgactattgctgacccatacattcaaatttgtgccctttttttttatcggcttttggtcatgctgtagtgttaaaaaatataaacgcacttgtttagcttgacataatcttaatactgattgcgaggcttgcatttttgtgtgtgtgactgctggcaaggcaactgtgtatcattgtggataccagtatctcaacaaatggtcacaagtgaaataataataaaaattaccggaaatttcaatgttagatgttgttttaccgtaaaatctaggatattgattgaacatttggttatcagtcaaaattttgttttctcataaactataaaatctgatatagctttatgaaccatggtatttttctttcagatttcagatattgagagatcttattcctcatagtg

SEQ ID NO: 61200 - DNA, 617 bp, Populus trichocarpa
  Intron number 1 from transcript POPTR_0001s24860.2 (locus POPTR_0001s24860) derived from phytozome v7.0 (chr-ID scaf fold_1; pos 24106360 to 24106976)
cttccttccttccccaggtgtctcttcgttccaaggtacatgcactactaatcaagtcttccttttactagttacgcgggttccactcgtggctacttttacctttcgttttatcaattcgctcccttgcaaattttatggatatctaaggtgaaataatctttcttgcttgctttagcttctttaatcatttgatatctgtatcttttcgtgagtgttttagctttacttgatcagtttccatttgctattttcttgagttcgtgtaggctaatgctttaagtagaaattaaggacttttaagtttagacctgaactttgtaggtttgaccttttcttttttgtttgtaggattttgagggatagatagacaggtgatcatggatcaaaattacacaggactccatgatcgtttccaaaatgattccaaatttgatgaaacgatcatgctcccaaattcagaacaatacccaaatatcgagcacggacttgaattcaatatcccttctcctgatcttagcttcatgaatcttcctttcgacccccctgatacagatcctgatcgttttggtctatcctttaactcgagtccaggggtagagtcatttgtcccctcg

SEQ ID NO: 61201 - DNA, 381 bp, Populus trichocarpa
  Intron number 2 from transcript POPTR_0012s13070.1 (locus POPTR_0012s13070) derived from phytozome v7.0 (chr-ID scaf fold_12; pos 13370619 to 13370999 reverse strand)
taagcaagcggagcacttccagtaagtggctgcctgtattcttagaagaatttaaatgaccagtgctgattaaaaaaaatatgaaaactttatatcatcagatgttatttttcctgctaaaaaaatgaaatgaaagaaagaacagatttccaattgtatgctatcacaatcttctggctactgttgcctaatctttgatctgaatgtcatgtgcttaataaacaaatgggcttcactagaatgtatgcatctcttgaatttctcttctccttggtgttcaaccaatccaatgcttaattataatgttacatacaggaccaaaacaagagatggaaccattcacaactcagcaggaagtttcattggtctctgacaaggagg

SEQ ID NO: 61202 - DNA, 683 bp, Populus trichocarpa
  Intron number 1 from transcript POPTR_0002s05990.1 (locus POPTR_0002s05990) derived from phytozome v7.0 (chr-ID scaf fold_2; pos 3972253 to 3972935)
actgcaaaggtaaatgccttccctttttttttcttcgaaggtttcacatctctttatctgtctcttacttggatcataagagatgctttttgagaacttattcctttttctcgtagttttgagatttgtgatttaactgttcgtgacttatgggtctgggattactttttcgttgaactttgattttgcactggtttcttgggtcagagagacttttctggaaatgggttttagttgatttgtcaaatacctggagcgtagaagttgttttcatgtttgtacgcactgcagaaaccttaaggaactgccaattgttatgcaatttaaattctttttatgtcccgtggactctctcctatcccttcttttgtttaatttttctttgtttggttccttttaaatagttgtagatgaagccaagaatttattctactcaatttccagtagattaattttcctttgttttcatttccttgaggttttagtgttaatcgggaaaataaagctcttttttaatcaatacgttgcttcagttgttaccttcagagagtgttggacaaaacattcatctcgtataagaagttcaaaacttcatcagttggtcatcttgatgtgtatttacatccatgacattttatctttgtccaggtggatatctgttaatctcttggtgtaaagtcaga

SEQ ID NO: 61203 - DNA, 304 bp, Populus trichocarpa
  Intron number 1 from transcript POPTR_0007s13390.1 (locus POPTR_0007s13390) derived from phytozome v7.0 (chr-ID scaf fold_7; pos 13500617 to 13500920)
aaagtgagaggaacgaggatttggatttgttaaacccattcattatggattctggtaatttacaataatttttttttggagttgtctgggttaagtattctgttgggtttgatttaaaagttcagttaaagttataattttgattgaagagaacacgtgaaaggttttaacttataattctttattttggcttaatgtgattgtctgtgttatgatttagagctgtgcattagtcgtgctggacttggtttttgattctgatgtgttttaattgtttggttcagatttaaagagcttatcctca

SEQ ID NO: 61204 - DNA, 917 bp, Populus trichocarpa
  Intron number 2 from transcript POPTR_0004s10240.1 (locus POPTR_0004s10240) derived from phytozome v7.0 (chr-ID scaf fold_4; pos 8792305 to 8793221 reverse strand)
attctcttggcgatcttgtgccttttagcaacaaagtaagtcatctccatgatctgagttttgcttgtttcccttgataatcttgcttttattttgggctgctgacttgccacttgttctcttttgaatttgttttcttgaaatatattttcctgcaaaattgcgacaaattcttggagattttctcgaccttcatcttcaatttctcaatgatcaaagcaagttccttggtttcaaaataatgggtggttattaatgtattgaaataatatatattttttatttttttaaatatatttatatattaaaatgatttaaaaaataaaaagaataatttgaaggaaaaaaaccaaaatttttgaaaattttaattgaaacgctacataccaaaccgacactaaatggccgttgcaaaacaagataaaaaaacattatttatttttgaaattaaaaaaatattaaaatctattcttgtaaatctatgctttgataatttatttttatgatttagaaaataaaaaagaattgatagctaccttcttatctggggtgaggaataaatttaataaaaaagacatcattataacgtgacactttataaaatgcactttcagacaagaagctaacatgatagtgatccattaagacattacaataacaatagattccttaaccacgttgtgattttaaataaataaatatatttgtttaaagaaataaaagatttaattttttgtgatcttaaaacataaaatacagaagaataatatgtttattctgctctcttcgttttttttaatcttaaaacaataattaaacattatattttgtgtttttttttttaaattgatggtggctatgtgctgtttctcattattacagctttacaccggagacctacagaaacgggtaggaat

SEQ ID NO: 61205 - DNA, 890 bp, Populus trichocarpa
  Intron number 1 from transcript POPTR_0013s15350.1 (locus POPTR_0013s15350) derived from phytozome v7.0 (chr-ID scaf fold_13; pos 15365095 to 15365984)
tattgaaaggttactcatcaactctgaatataaaggtatggtatggtatgaaaatgatgtaattccttgtggatgtgtctatataatctcttttctctatcttttcacttattagcatttctttttttagtaactttgttctttatctgttggtataatttgttaccaaagaacattctataacatattttatctcttttatattttagtttgtccatggggttttggtgaaccttgttataagtttcctagtttctacccatggttttgtaggagcaaagacagctgattctgataaaacggtactttctctttcataatctgatgtctaagcagagtaaatggcatcatttgcaaaagggaacagaaaagactcgaaaaattgatcacgctggctaggctttcactgctgcaaggactagctagtctaatggactgctgcaaggactagctagtctaatggagaacatgatttccacttcagaaggtggtcatgtcaccatggaagtacttaacagggtcacaaatgcaggactcatttccaaagtggacgatggtaaaagactagaccccacatcttctgttttgatttttttcattttgaggaaattgaaaaggaaaacaacaatttgatttgttgtcgtttcttctcgatttgtttggacgctagagaggtaggcagcaagggactagggctgtgtttgttccgtagctggtttcaaaatttgagttttttttttaattattttttttatgtttttgaattgttttgacatacaaatgtgaatttaaaaaaataaaaaaatatattattttaatatattttcaaataaaaatatcactaaatttatacagtgaccacagcagaaaataaaaagaaagcaattgaa

SEQ ID NO: 61206 - DNA, 948 bp, Populus trichocarpa
  Intron number 1 from transcript POPTR_0004s02210.1 (locus POPTR_0004s02210) derived from phytozome v7.0 (chr-ID scaf fold_4; pos 1373581 to 1374528)
gtgggtgtcctgtaaatactcatctgttttcaggggtaatcatgaactttcactttttctttttaagtttcttgattgacttgtcgtttaataatttcgtggaattctatatggcaacatgagagatgctagtttatagagttcagattttagaaatgcttatgttacttaagtgggccccactaccctgcagtgttgactcgggtaataagtttgtttgcacatagctattagacccggccagattgattaggttagcctatccaaggtttgtggatcaatatatattctaaaatagtgttgttttggaaaaaaaagttttaaaaaatcaaagtgttttgaaaaaaaattaaaagtataatttttagggttgactcgttggattttcttaggatctggcttggtcaaccaggtcaaaattaacctgttaaatctctctagtttgatcagattaatttttaaaatggctaaaaaaactcaacctgaatcaaaatttgaattagcaagtcatcaggtaaagtcgggtttgataactataatttgtaacccacgttatcatatgtgttttattactctttggaattcaaaacattagattttgttttttttttttttatcaatttgaatgtataaaaaatcagcaaaaactggttcaatttggacagaatgtgttaacattcattcaagttgaacaacaaattacatatgcataatacgtgctccaaggtgcaccggttgtatctaaatttttatacattcaatttgaataaagtcaatgcttttgtatcgaactgaatgttcaaaaatttatttgatattattacaggaaacaacagtcttctgctttttatcttctattttttggtgaagttcttgaacaacgatttgtttacaccttagcaacaacactaggattgaactaactatgttgtagtgatggttagattg

SEQ ID NO: 61207 - DNA, 523 bp, Populus trichocarpa
  Intron number 1 from transcript POPTR_0009s06370.1 (locus POPTR_0009s06370) derived from phytozome v7.0 (chr-ID scaf fold_9; pos 6170568 to 6171090 reverse strand)
gaaggtaatgctagctaagtactaatttctatgtttaatgttttgaccccatttaactggcttagacaaggaagatttagcataatagtgtcatagtgtgttcattgagttggggttttttgtgtttttgttctctcttttggcatatatacgtgcttatagtgcaaaatttttcttgtttgctgggcttttggcagttaatgtctcgtttgattttttagtctacaaggttgaatctttatgcttcatacttataaaaccctctttcagggcttcgctgtaagatttagtgatggattttctcttctccttttcacctttacttgctatttacagtttcacatccattttcaaagatttcccaaaagagaaagttaggttactcttagatttagagtggccatcaaagaaagagggatgcagatttggttctctactttctttagcacatttctttgctgactattaatttcactttctcattttgacttggtctgctctctgtctccaggctttctcaaaa

SEQ ID NO: 61208 - DNA, 1005 bp, Populus trichocarpa
  Intron number 1 from transcript POPTR_0013s03410.1 (locus POPTR_0013s03410) derived from phytozome v7.0 (chr-ID scaf fold_13; pos 2108324 to 2109328 reverse strand)
aagaggtacatgcggaaattaatacattctaatctctgaggccaaattccccaggtaaattttttgatttgttttaaattccaggcaaaaattggaaaatcaaggagcatcatgcaagcactgcaattgtaagagatcaaaatgccgaaagctgtaagttcagcagtttcctaaatttacttttagtattcacgtgtctgatttttagaggacctaactacttaaaattcatccgctaattctttcattttctgtagcatgataaatgctgctgtaatagtaataaatatgagaataggcagaacctgaaggctagttaatctcattgattccgatgctcgatgattctaaattggcctttgaaaacaggggtaagaatcttgattacagtggatttaaacagtatgccttggttttcatctcctagccatacttaacagcttatagtgtggttattgtatgtttacaagattttgttatctgtacagttattgtgaatgctttgctgctggtctctattgtatttagccttgttcatgtctatattgttttaacaatcctggtcatgaaggcactgttctggaaacacacggacagttgagtctcgcaaccctcttgcatttgctcccaaagtgataagaaacttggattctgcctctgaatttggggtaaggaattctcataaattatagtgctattttggtttatgaattgcgctggcatcataacatccacactcactgctctattttgttcgagtatggtctcatttgtaaggtaaaaagccacaatgatgcaaagccttcgcaaaaattaatgaagaggattgtatgttgaaggttgcgatgccattacaaatgatcaaaatgtattttgcctttgacagtttgtaatttcctcgaactatgtgcaatcaatttttgttcatgtaggagactaacaaaactccagcttcagccaggcattaaagagggtgcaactgtaaaaaatcaagctgtttaaaga

SEQ ID NO: 61209 - DNA, 607 bp, Populus trichocarpa
  Intron number 1 from transcript POPTR_0012s11820.2 (locus POPTR_0012s11820) derived from phytozome v7.0 (chr-ID scaf fold_12; pos 12197855 to 12198461 reverse strand)
ctcctccaatccaatttcctgagccatttcccacagtaggtgcacacactctctctccctccctctccctctctttgaatctccatctatgaaatcctccagcttgattctttccttttcttcttctcggcacatattctttctgatatcatgtgtactttcatgcacaaaagaagacatcttgctcctgtcatatcgaattccattttccttcataacagctctgtcttagctaaaacacagcaagagtttgagtgatcattgcagttctaaaacattgagattttaagatgtaatatacttgtcttcttatgcattaatgaacttgaacaccaaaaaatgttggcatatataatttgattagcgtaaactgccttttctgcaagaacccattacagtttttggtttgattgtgtggacagaaacgactgttgaatgatctcatcaacattgattggatagtatttatttatagcatagcatagcatatataattataactatacatattcagttagtattgattggtttggttccacattttcatgttttggagatgtgtgatagctcagattctgatacaagtgagtattcaaactccccagca

SEQ ID NO: 61210 - DNA, 623 bp, Populus trichocarpa
  Intron number 1 from transcript POPTR_0006s06250.1 (locus POPTR_0006s06250) derived from phytozome v7.0 (chr-ID scaf fold_6; pos 4445986 to 4446608)
ttctaaggtacgatttctcatcaattcaatggttaaaatgatgacgatgatgttgaaagttttttagctcaggttgttgtttttctctttgcctttgcagtccctttcgttgctggctgattttgatgtcttggtttttgttggttatgtttgaaatagacaaaacttgtcagccatttttcttgttgtaaagtaatgcttttgttctcttgttttgatgtttttggaagaatttcaaaacggcatgtatttgtttgattttagagttgaaaatcgattctacaaagaattggttggtgtgaattatttgagcttagagcttaaaaaaggttttgaaatcctggaatgaaaatatggttctagagtgaaatcacttgtccgaattgatagtagcgtttgtttttctttttttgttgatttgtccttgtgatcgattgatatattggcattgattttgtgtgcagctgttgaattatttgttttcggaaaatatggttttagaggagaattactagttgaacatggatagtaggctatttttgttgattttccgttgtgattgatatttttcattgattatgggagcagctattgaattgttattggctgattgatcaataatc

SEQ ID NO: 61211 - DNA, 398 bp, Populus trichocarpa
  Intron number 1 from transcript POPTR_0004s00510.1 (locus POPTR_0004s00510) derived from phytozome v7.0 (chr-ID scaf fold_4; pos 176517 to 176914)
cagtccgatattcagtggtttaaggtgccttattctctcacttgttgcttcaaaatttccatgtagactgctatcatagcttttttccccttcggtgtggcacgttctgctttgaagtagcttttcttcccatttacattgccttctagttacctagactgcagtttatatggccacatagggacgtacaaaacaaacaagaaaatgctgcaatagaaacgcaatatcaattagaagcagacatgctaaacagttgcaaacttttgctgtttgaaggcagaataacagatatggcctcagattttatgacaccagattgcataacaaactaacttctagttttcctttgtccaatttatttagagggtgaagaaaattgtgcctgcatatttcgtcaa

SEQ ID NO: 61212 - DNA, 397 bp, Populus trichocarpa
  Intron number 2 from transcript POPTR_0006s10870.1 (locus POPTR_0006s10870) derived from phytozome v7.0 (chr-ID scaf fold_6; pos 8251539 to 8251935)
aagctagtgttactcgccttcattcatcatctcaggtagtgtatgaattgacagtttatcattgcacagccacaaaacagctttcttttagatcttctagttgacaatggctgatagttgaactttgaggattccacacttgacactatgattttaagtcttagcttaagaatacaactagaacttagatgcgttatttgcttataatttttgtacttgagaagatatatggagtttatttatcatttgccttttcttttcaaacaattgaagtgtcttgatattttaaaagaaaaggcaaagatgctagagcattataatgtttgagtatttaagcaagacccttgtatttgatcttacagggtttaaaagagtttataaacgaggttaataccct

SEQ ID NO: 61213 - DNA, 807 bp, Populus trichocarpa
  Intron number 2 from transcript POPTR_0003s06910.1 (locus POPTR_0003s06910) derived from phytozome v7.0 (chr-ID scaf fold_3; pos 8475026 to 8475832 reverse strand)
gagccggtgctttagttgaaacatataaaggggatgtaagtatattgttacaagggaattactttcgctacatgccatatcttgcatatacttatctaaatacacatgttatttagggaagcctttccacgcatagacgtgctctgcttttcaaataatccaactcattgtgtggattgagaacttttctcttttcattgatttgtttcgactactttgtgtttcatgctttccatgagaaagcagagacctttaacctattctctgtttttttaataacttgcatgttagaagaactaaaaagaaggatagaatgaggtaaagactggagatctagaggcctttttctttctttcttttttgatccaaagatgtagagactttgatgttgtacctattagagacttgaaaattgaagtttttgttctgacccaaatattaagggcagtgtaagctcaacttacgacagtattacttttataggctggatgcacctaatttttctggtccacaagctcttaagtgcatccttgacatgtcaaaatcaaagagaaggccctcaaaacttaatggcaagctgacccattttcttaacttcgatgatcgacataaaatttctacagctttaatacgtttctgaagtcaacatggatatggtggaatgaccacacaccacacataaggcatgaaaatgaaaggatttcattacctaggtgaatagtggcaccaaaccagtcatatcatacgactattttttttcatctttttttaggtgattgatcttagaacacagttgagatattacaa

SEQ ID NO: 61214 - DNA, 913 bp, Populus trichocarpa
  Intron number 1 from transcript POPTR_0015s13280.1 (locus POPTR_0015s13280) derived from phytozome v7.0 (chr-ID scaf fold_15; pos 13304819 to 13305731 reverse strand)
gtagtgcacgccattaaagactcctgcaagtgcaggtagtccctcttcgcgtctttcttccttcttcctctttgcatgttattcgtctatttctagggtttttttttgctcgtttcagggtttgaatttcctattgattgttcaacttgaccattcacaatcgcttaatcttcattattgttatggattgtttggttgatgagaaagtaaataaagcttaataaatttgctaattgaagctgttattttctttatgatcacattaagttattgatgatcacaagtgattttagtcttattgagattgaggtgttagcaatcagagcaattattttattgttgtgaattgtgatagttcagcctacttgatctatcatctatcggtcagtcattgatcataggcgtgcatttacttataggaattgatgttcgaagagatgagttagggagtctgttgatttagaaagtttttggtggtaaggaatctgtggactaatttcatttctgtaattctagaattaaagtcgaaacagaaaagttctaaagattttcgtgtgcgtttacttgatatttgtgtatcaaacttcgttcgagtttcactttgcgattaatgtgatgcatgagatgtcttcatacatcaggtaatttcattgagatcaaagcaacagtgattgatctaacaacctgtcaccagtctaaaagatgctgcttttatacggaattttcatcttattaaaagaaatggtataaaattcactgtttatgcatagaatatgtttggcatccaaaatcctaagaggtttagcttatacgaggaacttctgtttatgtgatacaagcttctgtttcttttgttttgttttgttttttcaaaaaagagagctcgggtttttttgtatttattggttgcttt

SEQ ID NO: 61215 - DNA, 733 bp, Populus trichocarpa
  Intron number 2 from transcript POPTR_0014s00900.1 (locus POPTR_0014s00900) derived from phytozome v7.0 (chr-ID scaf fold_14; pos 819003 to 819735 reverse strand)
tttggacgtaagtttcccatcttatggcaacaaccccttatttagtgtttctcatggagttaattcaaagtctcttgttttggtgtttgtgcaaaaatctgctgtagatgttggccgtacgtggattgttgtggttctttactgtttagagaaagactggtcacatatgtttcttgcttgattttgtactaaaaggtttgcggttccttttgatttcatatttaggaagaaagtagtgtgctgcttgtctatgtgacagtggcacttccatttggaatgaggaagcgaagatacgaggacagaaatgaaatatggtttttattgctggctgatagcatacaatatttataaaatgagaggttcatattcaacaaatcttgtggtttcggtatagaaatgtttgagaaattgtctaaaatctcatgtgggtggattagatttacttttgagtctacaaagagggatgatatcaaatttaaattcctgaatttttagtcagtaactcagcttttggttgttcagtgaactaaaggtttgtgtcgtttcaatatgccagtcgtattttgttatcctgacttatttccaagatccatgaacttggtgatgccaatatttgaagtgcccttttcataagttttggttcagaagtcagatgttctgtttcgggtctttaatatcagattattgattcactgcaggcatttgatcgggtttttccttttcctgtccttga

SEQ ID NO: 61216 - DNA, 990 bp, Populus trichocarpa
  Intron number 1 from transcript POPTR_0011s04900.1 (locus POPTR_0011s04900) derived from phytozome v7.0 (chr-ID scaf fold_11; pos 4853956 to 4854945 reverse strand)
actcaacaacagagacggcttttgagggctcaagggtatgtgggttttgttttgtgatgtttaaagattgaatttggaattatttcgtgttttttaatttttgtaatggtcttggggattctgtgagttcttgaatttagaaaaaaaggcggatttgaatttagaaagattgaattgatggttattgctttagaaattgtcgggaccttttgagttcttgaaaggctgggtttgaatttagaaagactgaattgagggttgttgcgttagaaatttttgggattgttttggaaggtttttgatggggagaggttattggcatttcaaagagttgttttcggttgatgggttctcgagtcttcgttttgaatttttctagtgtagtttaaagggtatcgtgagttcttgaattatttttttgtttcttttacatgggtgttttgtagaatttcttgttgagttttgaaattcctgatcttcttatggcttcttggagagtgttctgtttgattttgagtgtagttgttggactgtttaaagttcttgaaattaaagagatgggttgtttcgtgggtgatcttgctttggtttcggaatttggtactttgttttactatgcgtatggaatttatgtcatttgttggtttttgtaatggtttatgggttttctgtttaagctttgaagtacctaatcaaggaatgagcggaatattttaaaattaaatttaatatgggagttcagtatgcatatccaaaagtaggaagatctctgagaagtgaaagttatgaattctacttattactccctataccatttggtgaatgaaaaacagcatgttgggttctcctgttagatgttttggtttatgcacacaaaatcactcctttgttggtctgctatcatgtatttactattctcattttaccggcctcaagtttcatgtcttatttctgttgcatgttaaaattctaaagttttgtgctttcagg

SEQ ID NO: 61217 - DNA, 776 bp, Populus trichocarpa; identical to SEQ ID NO: 53966
  Intron number 1 from transcript POPTR_0006s02250.2 (locus POPTR_0006s02250) derived from phytozome v7.0 (chr-ID scaf fold_6; pos 1473755 to 1474530)

SEQ ID NO: 61218 - DNA, 539 bp, Populus trichocarpa
  Intron number 3 from transcript POPTR_0009s06550.1 (locus POPTR_0009s06550) derived from phytozome v7.0 (chr-ID scaf fold_9; pos 6309974 to 6310512 reverse strand)
gacagaaacgccctaagagaaggataccggtatgttgattctcttatgatttttttttttatcttgttgcgtttgcctagttatcaatcatttcaaggaggtgagcgccagttaggaattatttggcacaagctggttggcatatcttttaatttctcatgtaataactggcaatcaggtgtgtaaataaggagtctgtggcccaatttagtgttagaacaagaaagggcagggaaaaaaacatagattcttattcaacaagagggcatccagtggccagttaagtgatggggatgatatgtttccatccagccacatgcgtttaagtttaattcactgttagttgtatttatcctgtgtttcctttcatgctcaatcaacactgaatcgttttcaatcatgaatcctattccatgacactcttgacggtggaaatttactcctatatggccaatctgtcctcttctgtaatgctagactctgcaattttcatctgtcacctctctttgattttttaaggctcgtacgttcagaggaag

SEQ ID NO: 61219 - DNA, 569 bp, Populus trichocarpa
  Intron number 1 from transcript POPTR_0007s03470.1 (locus POPTR_0007s03470) derived from phytozome v7.0 (chr-ID scaf fold_7; pos 1975909 to 1976477 reverse strand)
cttacaggtatgatgtgggagccttttatgatttttgaaaaccctaaaaaaaaaaaaccaaattgatttctattggttatagaaccctaattgaaaaggaaagggagggaaggaaagggaaaacattgggaaaaaaaaaattatataagaaggcaattctatctctaattttttttttaatttttgtttgacagtgttatttcttaaattatagcggaaaagttaaaatgcagtagtttttttttttcaattatcccaagaatcaataatgttaggctgatttgtggggtctagcatgttatcacaggcaggaaaaatttttctaacacaaggattgctagttgtttttattcaggggagaactaaactagatatcttccgctagggtttttattctttatgtttctggcatatgatagctgtaggtgtatattttgcatccaggaagaatacactttgagtttttcatgctgtatttttcatatagggttaagtatctgttttgcctttctttttctaatatctgatcattttcccttttaatatcattttataggggattgaagaca

SEQ ID NO: 61220 - DNA, 984 bp, Populus trichocarpa
  Intron number 1 from transcript POPTR_0017s04280.1 (locus POPTR_0017s04280) derived from phytozome v7.0 (chr-ID scaf fold_17; pos 3307667 to 3308650)
gggtttgtaccttttcatactgttctttaaattagaatgttcaatttccactcttttattaccctttttcttctagttttatgtttttcttctttgtattgatttttgttgctttggcttaatgtttgtggttctatgtttattgtttatcgaatcttttttgccaatggattgacagtattgtttctattgttgaatttttggtatggatttgagaacatagttattgaaattagtaagatgctaccgaaaagttggatgctttggggcagctaataatctgagttttctaagcttctaggttaatttatttgttgtatgttccttttgggttttgatttggtcgtgaatttatgtggtcatcacaaatggtgggctcctttaactgttttatcctcttggtgggttgttaaggttaaaagtgtgttttcgccattttacttggaatggtgtttgacggtgatggatgcttatcttgctgctgctgtatagttgagcttctttgatgcaatgctatacacgttgccctttgcatgttgaacagtggttccaagtgcttcataaacatttttgtttccttcttattgtaaaatcttttatctttgccactgttttattgctgtatcgatgaatttctttggtttcattgtttttaagactttttcaaagatgatcattagactttgatttcattagacaatagacattggctataactgttggaatacgcttatatgttgaagaaaaaagaataactgagacatgacagcacaactaagcatttttttttttatcttgtatcttttgcagcatgaatgcttatagtattaagtgcaaaatacttctccttttgtttttgggcgctgtaattgtgtgtgtaaagaaatatagagatatagatgtaaagttaagtttagtttttgtattttgaatgcttcatttttattttcatggaacatttctgatgaggcgagtcgcaggtgg

SEQ ID NO: 61221 - DNA, 1004 bp, Populus trichocarpa
  Intron number 1 from transcript POPTR_0008s02100.1 (locus POPTR_0008s02100) derived from phytozome v7.0 (chr-ID scaf fold_8; pos 1005698 to 1006701 reverse strand)
ccttctagccaggtctcatcaatcaatctctccttgtaagatctcttgccttttacccttctttacgtgatttattgctcttgtttttgtccttttcctgttcttgatctgttattatcagctttgctttgttgctttttatcttgatacatgttgtatggaagtttgctgcttcttttttgttttttacttcttactgatgttgtttgattaatttcgtatctcgggaactttatttttcatgttctgaatcaagaaatgtaattataaatcactgtgaaaacatcatagtaataatttgtttcaagtcagctgaggtggttcttaggtttgcggaagacaaaatccactgtctttaaagtgaataaaatcttaaaatcatcaatcgttgtgatgtttgaggtataatgtatgtttgaaatacaggtctatagttttgtgggtgattgattttgacttggttaaagcttcagttataaaatggtgatgaggacaagctgtaatggcagagcagatttctgcataaatgtaaatatatcacgcattatatattttggcagtgactgtaacaatatacggtaaaaaaatattttctgaattgcctgtagtctgtggtcacagcaaaaatagaggaaattttctgatggccaagaaattattgtctctaatacaaagcacaagtgtccttctccctctctctccctcttaactctcttccgcttggcttgatggtttgaagagaattgtcctcgttacaaatgatgttaagcggctacaaatcattgatctgaccacaaatttcctgttgggacattttttgatccatgaatcaataaattgaaccacagtggattcccttgcttcctttggcagtattgtctttatttcctgcaagtatcacacattttaagcatgagatgaagctaggaaaggaaagaaagctatgcttgacagtgattgatcatccacaaaatgtccctaattgctctggtgcaggtggaaac

SEQ ID NO: 61222 - DNA, 622 bp, Populus trichocarpa
  Intron number 1 from transcript POPTR_0008s09660.1 (locus POPTR_0008s09660) derived from phytozome v7.0 (chr-ID scaf fold_8; pos 5965832 to 5966453)
gttgcttggtcctagtggggcaggacccaacttcagtaagtcctgctatagctgggcccatcgcttctaagccttgctgggcacctatacccactatcattaggtttgatattgctgccagacccaataaatttgggtcttaacagaccatactgtgatgctgagatatttttcgataccaacccgaagctaggatatttttttgatattgcaataaccatataaaaaaattaaaatatattatctactctaaatttcaataaacacattatataaggattaaattaaaaaacaattaataacagaaaaaaatcaaaatacaaaaaaaaccaaatgatggatgtgaggaaacattgttcaccccggaccttttaactttatttataatattcaatttttttaaaaaagtcttttataaaattattcaaacctaaataataacttatagatcataaaaaagcttagcatcatttgtttttttttaaaataaaacgtccacttacataaagaaaagaaaaagtaataaacaggggcctatcaatatttaaattttgtctattagttcaaaaatcgaaacgtttatccagagtctataaatataacgtttacctatcgctttctc

SEQ ID NO: 61223 - DNA, 907 bp, Populus trichocarpa
  Intron number 2 from transcript POPTR_0008s09660.1 (locus POPTR_0008s09660) derived from phytozome v7.0 (chr-ID scaf fold_8; pos 5966502 to 5967408)
tctctccccgcagatcagatccaaatcgttcaaaggtatctccgcgaaaccctaactctttagatctcagatttacttacttacagaatcgatgctgccaagttttcctttttaaccactctcactttgatgccatgttattctcttctctaattttgaaaattcacttgttgattggttgataattgacttgttttgttaagatctgctatttttcttggcttttgattcagacatttctcttgttttagctggcttccgtatcactgtatttaaaaaaaaaatttcgaaattttggataggattttatggtctgtggtgttattcaacccgaatttagggggatctagattgatataaatcactacacattggtgttgaattgtttgtgatttctgctttcattaagttttgggtctggttgttgatttgtgaggtgtgcctatgcataattcttgtttgtttttttgttttgggtttttttgcgcactctagtttcctcgtgtatttatgtgtggtaagcaatcgcgtttgttatgacgtgagtgttagctagctacctaggaagggattgagaggggggggggtatacaaacaggaatgcataaataattgaagtatggtgtttgtttgtttaaaagagtgatggtgaacttgttgatttcaactggcaatttggaaattggttaatgggtctctagatgttttaagttaccaggctgcgatcagagtaggtgatgtgggttattcataatgcttttgttatcattctttttccatattgtgacacatgccatttcccagaatttatcttcttttttattttcattctttgttcattttggtgttttgcttttgttttgggcttgggaaacagggtttaaatttccttctgtaaagtttagat

SEQ ID NO: 61224 - DNA, 673 bp, Populus trichocarpa
  Intron number 1 from transcript POPTR_0009s10640.1 (locus POPTR_0009s10640) derived from phytozome v7.0 (chr-ID scaf fold_9; pos 9102458 to 9103130 reverse strand)
ttgtgaaggacagcttgaggtttatagatctggaggtgaatttgcaattcaaaaacttagaacatgagctaaattttggttatatttttgtttctgtttgttcgcagagaaagtagaggaaaataaacaaggtttaatttgagatgcttttcaagtctccatgctagtttagatttttctcagtttgcataaaacttttctcagcaaacaaactgaaccattcgttcaaaactttatcgtggaatttaagtgtcttgcagtttgattagtgagaaagcaaatgaaaataagctagaaaactctaggtttggagaagccttgtaaatcaagcgattgaagtttttctcagtccaagcagatttttctagccaaacataaacaaagatttcaaaaccggtgatgtgatttgattttgcagtttgttactgtttgtttaccgagaaaacgaaggaaaatgaagaaaacaagatttaatttcagactctctctttcaaaatcagtgaagtgttctttgttcgtggtcgttacatcgtgtttcttaatttattctttaaattgatgtttctcatgtttagagattaaaaatatagaagcattaattagtagtaataattaaggaattttatttatatttgcaggcgaagagttccgaaacggaaagctcgacgtgcaa

SEQ ID NO: 61225 - DNA, 751 bp, Populus trichocarpa
  Intron number 1 from transcript POPTR_0010s22570.1 (locus POPTR_0010s22570) derived from phytozome v7.0 (chr-ID scaf fold_10; pos 19438481 to 19439231)
cctcctcctccttactcgcggctagagtttaacaggttcgattcactatcgcctcttcgtctcattcctgtctttatctctaattggaaatcactgtggttatctagttaatgactggtattcttattcgtatgaagtctttgattgctttgtgatttcaatcagatttattagcttttaatccaattttgttttgagagcaagccttggatctagtttttagtgcctttttactttcttttaagattttatacacaggtcttttagattattatttttttttgcaggggaagtttttttttttaattgttatacagatataataagatagtaaattattttgttttgatttcctctttgttggttttggtactgaaaagaactcttaaacttattctatgttctctctagttgttgatttgatattattgtgattaatctgaatgtaagaattgccactcaaattaactgataatgatgtaactagattgattaatcatattgaatatttatacagattatcttttgtacgtgattttttatgttagaacagaatgttatgctgtgttaaaatatctcagaaatcgtgatgtattgaagttggattggacatgccatggtggatttgttattgttctggacacttcaactagatctagttgaatgtttaagaagtgattttcagtgttctagtattttgtttttaaattttagacttttatgtattgcagctcaaaactaagatttcata

SEQ ID NO: 61226 - DNA, 683 bp, Populus trichocarpa
  Intron number 1 from transcript POPTR_0006s03170.1 (locus POPTR_0006s03170) derived from phytozome v7.0 (chr-ID scaf fold_6; pos 1999670 to 2000352)
ctcgttttgctgtccaagaacataacacgaaagaggtcttttcttctattgatctttttttttttcattttttattgcggaaattcttgattttcttgttttgttttgtttttatatgataatgattcgagagggatcatagaaaaatttgcttagattggatatggtttttgattaaatttactattgattttttttccttttcttttggggtgatttatgtgttaatttagtctttatcttattgtttgatttatttttctactttgtttttttttttaatatataaatgattttttgttcataattcagggtttttttttctatgaaatatttgataacagaacaggatgattgatatttgactcatgattttagaaataaagatagcatagatgaatttttttagtaatttcaacaaaatgtataatttttaatctacatatatttgcttgaatggctattctctcaagtgttcacaaatcttctgtgaaaccctcgtgcataagctatgttcttgagtcctttcttctgtgtgcgaaacgggttcaattttgaaaattaaaagaattctcagaaaataacagcgataatttactcatcttcctgtttattgtatttgatgtgtctttttcggcaaggtcctagcatttttagtatttaccttggatattgtctacaga

SEQ ID NO: 61227 - DNA, 483 bp, Populus trichocarpa
  Intron number 1 from transcript POPTR_0001s02900.1 (locus POPTR_0001s02900) derived from phytozome v7.0 (chr-ID scaf fold_1; pos 2292613 to 2293095 reverse strand)
cccaaaaataatccaccggccaatattctaaaactgtaagttattattttcttaaaataatcctactatcgtaaacacgatccacgctaattttaccttaccttgatcttctttctatcaaataaattaattggtaaggcggattttagctctatcattttgatggttatgctttttttcattgacgtttctgtttggttgctgagaaaagaaaagaaaaaaaataacttttcttttctcaattttatatctggtagttgacagagcaaactggtttttgtatcctaaaatctcaagtattggatctaccttataatttcttttgatttctgaatttttttaatctgaattatttctataatctgtgattttttgaagatttttcttttctgatatattggcgaaaatatggtgtttagtctttttaagtaattgtgttgttaatgtgggtttcgatattgaagttagaaggtgagtgagctg

SEQ ID NO: 61228 - DNA, 779 bp, Populus trichocarpa
  Intron number 1 from transcript POPTR_0002s19330.4 (locus POPTR_0002s19330) derived from phytozome v7.0 (chr-ID scaf fold_2; pos 15286564 to 15287342)
tgaccacatcttgggatattttcaggtatgaaattgatcagcaagagtagtaggaatctcagcttgtattaagcaacatccttctgttatgctatcaagtattaatttaaagctagaccttaaggtaatggaagccaaagctagctacaaactacgttggttttgcaggtttagatggttaaagaaactatgtttggtacaattagacatgtttgcttttatatgtgagaattaatggagatagaacatagatgtttaggcagaatggcagcccatgtagcttgccaatgatgttggctggagtttaacttgaaagcttggatattgagatggttttgacttttttgcgcttgttataaaattcgtctcttgacaatgaaaatctttcgatgcatagttcatctgccaagaagtatcctgaatataaaatgcttggatggcgtaaatttgttgacgggaaggtaaatatctggttgaaagttctgtagattagaacagttggggcagtttttttgactttgatccttctttaggtggggccttatgtctggaaaacttacaaggaagtttatgatgaagttttgcaaattagctctgcattgcgggcatccggtgctgaaccagtaagcatagatatgtgcatttagcagggacttggattagagtgactttggatttgaagatttggcaattaaagctttctttcttttcttttccctttggtcatttttcctgtgccataattaattcctggtggcagggctaccgagttggtattt

SEQ ID NO: 61229 - DNA, 556 bp, Populus trichocarpa
  Intron number 1 from transcript POPTR_0007s09180.1 (locus POPTR_0007s09180) derived from phytozome v7.0 (chr-ID scaf fold_7; pos 8447108 to 8447663)
attctctgcgatcttcacctttttctttgcattaggtttgtttttgtctcttctatctcatttggtttcttgtaaatgaaagttcttttcttattttctcacttcttgattgaatggcatgtgttacccttatctattttatgctctctgatctgggatttgttgggtttttgttttgggttttatattcaatcattgattctctgtttcattttgtaaattttgattcaaggagtttagtttagataagatgatgctgaaaaacattggagctttatggtaaaaatgatcttgatttaaccatccatcagaaaaaaaacgatcttgatattattgttttatttgatataatgggaaaaaagttattgcacatagacaaaaggggtttggggttcatggtctttcagtttctgttcatgaagttgatgatgttgtctgacttttagaatttttaaggttatgaaaaggcttcatttttactaactgtttggtagtttggaagtttttgttaaaggaattggcattgtcgaatgcagtgggcgctttgttaggagcc

SEQ ID NO: 61230 - DNA, 775 bp, Populus trichocarpa
  Intron number 1 from transcript POPTR_0001s42760.1 (locus POPTR_0001s42760) derived from phytozome v7.0 (chr-ID scaf fold_1; pos 42773207 to 42773981 reverse strand)
agtctaggttctgggcagattttgttgacaaaaaggtatgttttttttgttcttaaatggttcatctatttggttttcgattttttattgttttgagctatgacttgattaaacccactttgcaatttgataagcttggaagaattagaatattatatcaccagtacaattagcccttgagactaatatataaaatcatggaagaaattcggcatcacattatggaatactgttcttgggcacgaattcttttttatataacaaattagccattaaggtttctgatcattattgtcattcttgtgagttcatgagaattaaagtagagtactttggcacgatgtttctgtacaaggattacctaattggtttggtccaacaaccatcaataaaaatattggattaaagataagattttggacttaggtgatgatgcttttgttatattggtgggcagtcaccttcaagtatccaaaaatatatcatcgatgctgacattatagaggttttcctattggtgaacttcccttggttaaaaataatgccatgatgagccttccatctattacttaattatcagtcactttcaacgcagcaaagtaaataagacgttacacacgatcttaatttgttgctacgttagctgtctttgaatttctaccctctgtaacagcgattggctagacagaaattgcatgtactggtacaaccgttgacctctgtgattccaaaaagtcagtaatttgttttacaatggtgtgatatgaatctgtag

SEQ ID NO: 61231 - DNA, 439 bp, Populus trichocarpa
  Intron number 3 from transcript POPTR_0010s25340.1 (locus POPTR_0010s25340) derived from phytozome v7.0 (chr-ID scaf fold_10; pos 21062657 to 21063095)
agtactgggggtcagagacaaccttgaattttccggtaacctcacattgtttctttgacttcttttcaagctttgaccagtatcaacatccatgtactttcttttggtgttttctttgaaatcgctaagttacattttaaattattacatggatccggcgcatgcatgtgggccataactttcaaactttgtgtttcggattttggtagctatgcggttataatttgaaataaaaagattatttttttcttataaattatagttttttctcaattaagttgtagtttttagtggtatttatgtaaaattttacgtttaatcaataaaagtaaacgggattaaaggagcaaaacacgatttcaaagcctattttgaatattaattggtgatgatgttgatgatgatgcagatagaaacatacactaaagagatcgaagag

SEQ ID NO: 61232 - DNA, 747 bp, Populus trichocarpa
  Intron number 1 from transcript POPTR_0008s04280.1 (locus POPTR_0008s04280) derived from phytozome v7.0 (chr-ID scaf fold_8; pos 2393941 to 2394687 reverse strand)
caaacttaattctgctattgatcgtcttactagaggtaaattcttcttcctttttaatctcattatggtcttgtaattctatgcttttagaaaaggtgcttgagataagataagtagtttcttcaccttggcttttttctacttgtaatgtttgcaagtcacctggttttgctataaatttttatttttagaccttcttaggttgctaaaatgagacccttttgatcattttggagatttcttttcttttggagaaatgcttttgatcatttagaaattgacccagtatcataaatggtcagtttaatctgtctctgtaacgtgattagcaaagattttgctatacatcagctgtttttttatgctactgaatacaccactgtgatttgatgctagcaacaagtgggatagttattagagtttctcattttctttattaatgataatttgatggatttaacatgagttttttcatgcccacatacctagttatcttttggagtatgtaatatttaataaacaaatatacaactacaacatttataattatattgaaagaatggagtatcaagcagttcaaataaagacggacaaagcttcccatagtggatgcaatttgaattggtctttattcttttttctacattgatccttaaggtgtttgattattccatgttattgagcatttgagcctggatcatcgataaaaaaaaattgtgttttcagagcttgatcagttgttggaag

SEQ ID NO: 61233 - DNA, 607 bp, Populus trichocarpa
  Intron number 1 from transcript POPTR_0006s26820.1 (locus POPTR_0006s26820) derived from phytozome v7.0 (chr-ID scaf fold_6; pos 24908173 to 24908779)
aaaaacctcttttcttctacgttaatctcgccaaggtattaccaaaccctcccccttttcgattttctaaattagtgttttttttttggctttctatttattagttgtagaggaaacaaaattcagctttgtgtttttttggatggtttaatgaattaattagatctctgctttttttcgttgggtttgtttagggtgttttaaattattttttcatgttttaactgattttagggatttgttgctgttatggacatgggtggctcctgttttattcttttgtcttgggtttttctatttaggatttttttcttggctctgttttgttgctggggaaattgtggatgagaaaataaatgaagggaagcttgtgtattagtcctattattgcgttagaattagttgtgtttttatgaaaatatggctggatcttttgattttgttactgattcgtgttcgtatgcttagtttggatgagggttttgtaattttagctcggtagagagaaggaaaatggattttatcaactgaagaagggtatgtattgtgtttgtgattttgtttagctgtttaatggttggtgatggttgaatttttgcagaggtac

SEQ ID NO: 61234 - DNA, 646 bp, Populus trichocarpa
  Intron number 1 from transcript POPTR_0002s23080.1 (locus POPTR_0002s23080) derived from phytozome v7.0 (chr-ID scaf fold_2; pos 20454115 to 20454760 reverse strand)
ggtttggatcatcctccggacttgctcttggtcaggtctgcacttgtgttcttttccatgactttcttctccactgtttgtgctttttaagctttatgatccagttttcttggatatttgtttggttaatgtacaggatttttcattttttaacgaccccatattgatttccttaccccttaacattttttttcacatcagatctcttcttcttctgctactgttcaggagtcaaaagttgtattatgtttgttatttggcttttaggcggactaatttgttttctttaagcaaaatcctcctcgatagttgcaaaacgcgtaaagggttttgctttactcatcacacaatcagagggagatggaaggttttgagaatctagtattttaacatgggccttttgtcctatccaagatctagtatttttctacattccaagaacaatttttcaaacgttgctttcccatacgtcctaggcttttgcacattataaaagtaccttttgcactacttcatatagatatatgttggcatgaacattttaatcacctttcttttttagtggaaatttccgctctgctgttagattaaaaaacaataaagcttgaggaatcttaaagatctgtagataatgttccagccaaac

SEQ ID NO: 61235 - DNA, 622 bp, Populus trichocarpa
  Intron number 1 from transcript POPTR_0003s05490.1 (locus POPTR_0003s05490) derived from phytozome v7.0 (chr-ID scaf fold_3; pos 6770165 to 6770786 reverse strand)
ctggtctaaccattgctagccttgcaatcccacaggttaggacaagcatacactgcacatgcatcacaatattcaccatctctgtgcaagcacatactaaatggtctcatttcctaagaaataaacataaaaatttattcatgatcatgattagtttttgttaccaaagaaaaatgaactgtgcaatatacatatatggaaatatatacacatgcatatatgtgtatatatggacatatgtatctacgcatgtgttgtgttgatagtgtctgtcattgtctgattttttggccttaatggacaaagcactctgagttggggcttaccgcatatattccattcccttttggatcattagaggggtcatttcttttctcaaacaattcaatgggaaagtggcattgtaaaatgggtttatcaattatttacttttttaatggaaaagaaattgtttttattcatagagtcaaggctttgttttgtcctacttagaacatgattttctgtttcaacatttcatgcaaatgatattcaataatattttagcgctgattttatatggtaatgtttcagcttttcttgtaatctgacaatttatcttttctactgcagggaatcagct

SEQ ID NO: 61236 - DNA, 430 bp, Populus trichocarpa
  Intron number 1 from transcript POPTR_0006s25500.1 (locus POPTR_0006s25500) derived from phytozome v7.0 (chr-ID scaf fold_6; pos 23908724 to 23909153 reverse strand)
aagcgtggagaatatctgtctcagcggtggtggtggtgggtatgcttgtgatgattttacactgcccaatgagagtactgttttatggaattattagtgtttttttttttttcctttctttctttcttccatatgaatgtctgtgtatgtatctgtgtgcgcgagtccgcccttcctccctcccttcctttctctttgttttattatattcttgtttttttatccgatcaagattttttggcccttgtttttctttgagggttggaatctctcttcttttgtgttttctcttctttttgttcctcttcttgtgggtatgtatatatgactttgaatctaactgtacagtttttggaaagagggaaaatgtgtgcataaatatcctttgcttttagttggtgaaaatacaacgacgactgctggtttaatc

SEQ ID NO: 61237 - DNA, 519 bp, Populus trichocarpa
  Intron number 1 from transcript POPTR_0004s02910.1 (locus POPTR_0004s02910) derived from phytozome v7.0 (chr-ID scaf fold_4; pos 1955629 to 1956147)
tctctttgaagttcctcctgtttgcaagcctcaaggtaattaattcatttatgggttttgctcttctttgatttctctttaatgggtttttcttaatttattttagttttgcttggattgacttgagttctgattagattttgatgagtatttttcttcaattctgctgtttttgtctcttttctgtttttttttaatctcactttagtccagagaaagatataaatggaaaaaaaatgctgtaatcctctcattctggatcatgaaaacaaatgaattatacacactcaagttgatatgttcaaacaattaattgttcatttcggtaaaaagaaaaggaagatcttatatctttataaatggagaaaatttttcttttttcggaatttagcaaatttgtttcttttaaaggaatttctagaaaacattttgaaattgaatattggaaagctaattgagaaattaattatgtgaaatattgcaggggctgcagatctattgaagaactttggaaggaaa

SEQ ID NO: 61238 - DNA, 371 bp, Populus trichocarpa
  Intron number 1 from transcript POPTR_0109s00220.1 (locus POPTR_0109s00220) derived from phytozome v7.0 (chr-ID scaf fold_109; pos 36626 to 36996)
cataatattgtccactcgcggtacgttttttaaggaaaagaatgcaattttttttttgtttttactttttgataattctcttctttcaaatcttgcgatttgtggttgtatcatgttaaatggttatgtttttacgacattaatatttttctttatagagaaactgtagaatatacagaaaaagatatgtttctttcatagaaatactactctcccttccttcttgtacctcctatcaatatagactatatttgagttttgttttataattatttctttctcttaatttctgacaatcttgtgatctctctggatttagactgaccatgttttttctctttcgcttacatataaatttcaggatatatatc

SEQ ID NO: 61239 - DNA, 1024 bp, Populus trichocarpa
  Intron number 2 from transcript POPTR_0017s05870.3 (locus POPTR_0017s05870) derived from phytozome v7.0 (chr-ID scaf fold_17; pos 4557266 to 4558289)
tcgcaaactttcgagaaaagaacttcaaagtttgtgtaagcaatgtagtttgcctgctagaaaatcaacttccgaaatggtcgaatcgcttgcgttttactttatggtaattattttatgaggaatctcaatttctgttattaatttgctaaatttgtagtgttgaggacgtaaattggaaaattaggcaatttttttagaagttttttaacttaatttttgttaatagcttgccaaatttgtagttttgttactattgtttggaattatctgtgtgttttatgaatatatggtatgtaattgatatgagttgtttaggaagaaagatttgtagttttgttaatattgtttggaattatctgtgtgttttatgaatatatggtatgtaattgatatgagttgttttggaagaaagtttttggagtaaatgctagttttggttggcatggaagtgcggtttgttctcgaagaagtatgattcggtttctttagtatgttgtagaaaatgtttttcgaggtttttgaacttatcggcatgctttatttgccaaattcgtagtttttgttttatttgaaaccatccacgtgttttatgaatagttggtatgttaatttgctatgagctttttgaggataaactttgaagtacttactagtttttgttaaataatgaattttggatctgattcgattgagtgcagttcattcttgaagaagttaccattttgttttttaatatgttttagaaattgcttttttgttatttttgaacttattcatgagttttatatgtatttgaggaggtagttgtgaaaattaggcaagttttagtattgttttgcatggtatgctaatggcatgagggtttgaatttttgttcttttttccgcgcacagacagattttgagttctgcatttgttttgatatcagttaaaatgtttttgcttgttaagtacactgaaacactgatgccttgacatatttgcagaggaagggtttgagtttggtatcatctagcacaag

SEQ ID NO: 61240 - DNA, 733 bp, Populus trichocarpa
  Intron number 1 from transcript POPTR_0007s11510.1 (locus POPTR_0007s11510) derived from phytozome v7.0 (chr-ID scaf fold_7; pos 11880098 to 11880830 reverse strand)
ttaaaggtacacatttactacttgagagttcttttgactacctccttttgtctttctacttcttctgcttatttttggtccggctatttgtatcccttttttatggtaagagagagttttagttagtacacctgttataaaggttctatgatcatgttaggcaaacaattttgcaaacagaatagggtatctgaacaaagttgagctttagtgcccgaaaaggcttccttatgttttcttctcttcagggtaattgccaggtacatccatttccttgttctgttagtatccgaggtaaattgctgctgttttcccttttgtttttctggtcttatgtgtatctctattaagcttcatgtacattctcttgttcaattattcattttcaagaaataaaaacggatgattttgtcatgttgaattgtaaccacacataaagacttgtgtttctgcagaattgtggggctgttattgattgaaataagcaaatgtatgatattttagacacagttcattacttggaactctttagcagagtaaatgaagcaattcccatattttgcttttagtttttctgaggattagaatttgggtttccacatgtaggctcttgtatcccttttcctttacctatatgtgaaaacataagaatttctgaagaaatttcattccagctttcttcttttccgaggtttcagataaattcaagagcaacatcttctttatcaacgtt

SEQ ID NO: 61241 - DNA, 589 bp, Populus trichocarpa
  Intron number 3 from transcript POPTR_0016s04430.1 (locus POPTR_0016s04430) derived from phytozome v7.0 (chr-ID scaf fold_16; pos 2605302 to 2605890 reverse strand)
ctgtaagtaacatgccaaattcctgtaggattttgtgtttttggtttttttttgggtgctattagagatatgataatccaaggtgttattgttgatatatatttggtgtattaatggtttgctttagttggataaattgggttttgtgttttatatgctttagcttgcggggttgaaacatcaggagtgtggtgcatagtgaacagttatgagtggcatgaaaacaataagatgttcaatatatagatgtatacataaatcttaaaaatgcattcagcacttgatgtttggtttgtttttgtctcggagaaatgagacctatgtcttggctcagatagtttaggaagagggtggggttttacctttgatactcaccaaataaaagagaggaagtaaagttttgcttccgagtcttatgattttttattgaccctggatgtttctttggcactgaatatgtgtatctgatgaagaattacttttactctcttcaattaattcctttataaaattaaaacttcttttctttgctctaacatctagatattcttgattttgctgcttgtgtagacagctgtttcttttgttc

SEQ ID NO: 61242 - DNA, 878 bp, Populus trichocarpa
  Intron number 2 from transcript POPTR_0004s05260.1 (locus POPTR_0004s05260) derived from phytozome v7.0 (chr-ID scaf fold_4; pos 3999833 to 4000710)
accagggtttgtgttgaatttctcaaattcagtttctattttgctattttgtgggaaagagatgatttatttgatccatacaattcagtaacacttgccaaagtagcttaagatggatgctttgaaatctaattttgtttatcatactgaatgaccctggtcaaatcagaaatcagaggtggttcaagataattggtcgattgcttgattaatctggagagggagaagaagatagaaatccgaaaaaactaagccattgtttagaatgaagtgtgacaaaataaaatcgtgggttttgagtcttcactcatcaaactgaggtttggatttaggttccttcacttttttgctgtcttaagccttaaatctggagattgtagccttaaatctggagattgtctgctgcacggtgaaagacaggaagaagttaataatctataacaacttgcaagccatctataactcatctagtaattctgtatcattacccatccttacctggaatggaaattttccaggcctctctgatatcctcgatgagtatcttcagatcattagatgaatctgcaagtagattttttgcttgttctctttgtttgtaaattccgtgttgtgtttggtaacgcattcgcattttgtttgaaagccttttacatagtgcgtttgagctgaaaaaagcatcaagttagtgtcttttcatatacttttggataattttgatagtagatgtcaaaaacatcaaatagcacttgaaaaacatcaaaaagcacatgaaaaggcatcaaaatcaaattcgacactcttgcaaaaacacttgcaccacattactaaacacacattttgtttttaaactagttcttgattctgtgtgcagtttc

SEQ ID NO: 61243 - DNA, 941 bp, Populus trichocarpa
  Intron number 1 from transcript POPTR_0017s02890.1 (locus POPTR_0017s02890) derived from phytozome v7.0 (chr-ID scaf fold_17; pos 2094450 to 2095390 reverse strand)
ctccagatctcaccccgatctttgattctctacaggtactcaccctctcctcctctctcggtgttgtgtttttagggtttcgaatattccagggatcttgacttgtgtttgttggctgagttattgacttctgtagctttttgctttaagggacttagaagttttcttttattttctgcttttttgggggttttttgttatttttcatttcagaggctctgtttgtttgtttagggatttgaagctgtgggattttgtgaattttttttgaaaatcttagatccgtaatagcaccaattgaggtttattttgttgcttcacgcatgattcggatctaatatttctcgacgaggaatctttgtatagtgacgagaaattggagtgaacaacaaaaaaccataatttaagggtttcttgtttgttcttgaatggtcaatgttttagtccgagtgtttgaacttctgaaattcattttaaaactatttaaagttgtttttcttgtttttttgttgttgtaaagttattttttctgtctcttttcctattagaaattggagtttcagcatgctagttagatttgtttgttttatgttgttgactgagcattttggtaaattgttgggttttttgtgacttttttcagagatcgagactgaattctattactctgagtgttaaagttacaatacttagtatctggcacaccattgcttgcctatatatagtttctgttgaaaatcttattggtgtggtggagacattaacaatatctattgttaatatgtgctctctaagggttgtgttgtaagggactgttggtgaatgttgactaagcatgtattatttcttatgccaatgttttgatactgatcattgcattgttttttcctttgtatcttcacatagcaggtttacctactgctcattttctcaaaaacgtt

SEQ ID NO: 61244 - DNA, 537 bp, Populus trichocarpa
  Intron number 1 from transcript POPTR_0006s24790.1 (locus POPTR_0006s24790) derived from phytozome v7.0 (chr-ID scaf fold_6; pos 23339044 to 23339580)
aaagtaagctagccgagaagcagccgggaattattctgatgaataatagattgtcttactttctagacaaagtgtttgcatgcaatcttataatctttaccttttttttttagcttctcaagaagaactgttgtggtgaatataaaattgcattccacagtaattctccaatgccttttagtttttttttttagatttttaattatggaacaagaagcggacacggaagttttgccgaaagaggcaacataataatccgataccgtgggcttggagaacagcttcgataggtcaccggatctttttcgagtaattaaggctttgatgggtgaatttttgttggagcatcgagcaagcgatacatgtggaagcaagtcgaggccgaaaaagtccttcagtgcttacaagaatagttcgctgggctttgattcgatgcaagctgccatgcagcatagaaaatctgtccagggcccaaaatgaaaattatataaaaaagaaaagtaagggaaataacatatggcaagagtatagtggtca

SEQ ID NO: 61245 - DNA, 624 bp, Populus trichocarpa
  Intron number 1 from transcript POPTR_0016s08760.1 (locus POPTR_0016s08760) derived from phytozome v7.0 (chr-ID scaf fold_16; pos 6551071 to 6551694 reverse strand)
ccatctgtgatttcaacaaagaaatctgcccactggtactttgcttgaaactgagtttttgtagatgggcttaaaatttttggatcttggtctcggggaaattgttgaaaaagtagacaaaatttctgaattggatgtttgtcggtggtcttaaaaatatattctttcttaaatttatttctctcttttgttgatgagaaaatgtgggaaaaacagcaaaatctaagttctttttctttttgctatctattttagtttcgatacttggtaatagtaaaatagttgcttaattgtgctactttgttggctgacttgacaaatattgtgggacagagagaaactggattaagtcaacaatcctgctattttcttttgtcatgaaaaagtaaagttgtatgcattgtatacatgattttcttaaatttcttcctttttttaccatcattagtcttgccaacgtagtttttcatctctgcttatggcaaaggttttttgttattaatcacacttgtaactttacttttctccgtttaaaacatgtgtgatctggtaatgcataagatgcacaatttatgtttccaacttgatcttttgatttgattctgaaaaaggttgttttgggga

SEQ ID NO: 61246 - DNA, 606 bp, Populus trichocarpa
  Intron number 1 from transcript POPTR_0001s46190.1 (locus POPTR_0001s46190) derived from phytozome v7.0 (chr-ID scaf fold_1; pos 46635756 to 46636361 reverse strand)
tgaacaagctcccaagattggagataactctacaggtttgttttcgttgttttatttatttattttgtaaagatctgttttgtttctttttgtgtttgtttctcgagaaaatagaataaaacatcatgggattttgtctaaatggtctgtttaagttgtttggttttgtgggtcaacgttaaaaaattgtaggttagctttgtatttgtgtaagaatttttttttgggtgtgtgataggatctgctttgttttgagcttagtagaatttaatgggtatatttgaagttaaatggaacagttgttttagctttaaatagttgagttggtccttgattcttcaaattctattgttgcttttgatgttaatggctgatatggtaacgtttcttgtcattttttagttaaaattagcttcaaagccgagcttagtgtaaatcgtaaccgcgttctcctttaagcacttgccatctagttgtgtgatgcatttttggttttgtaacgtgagtttagcttctctagacatggagcgggtgccattttacttggaattgacctggttttctctctcggatttttttttttgtgggcagaaggtgctgtatttg

SEQ ID NO: 61247 - DNA, 815 bp, Populus trichocarpa
  Intron number 2 from transcript POPTR_0010s13630.1 (locus POPTR_0010s13630) derived from phytozome v7.0 (chr-ID scaf fold_10; pos 13440520 to 13441334)
gttacaagtatgtgtggctggctgcatttaggaagaggaagctatggttttgtattatttgtccttttcttgcttatagtccagtgatatttgttttagttgcgataagatatcacaaactacaactcatgatcgaaccaaattagaatggattgagtcatggcatatatacacttacctaaccttttcgatcccttttccttacagtgaaaatcgatagatttagatcaccttgttgggcacaccacagtcccatcatctcttttaaattatagtggtgaatgacttcaaaacgtatacagatgagtatcatcacagcatcacctcaattgaaccatccaaaccatgaagaaagaaactattacagtgatatgtgtttagaatcaaaagtttattttccctgtaatatcagatgtgattactaatattaatgattattaaagatttatttgatcattaactttaaaatttataagaattagttaagatatacgcaaactgacccaaacaccttatataaataaaaaaaataaaccatcaagttagtgacatcatgtttttgtatcacaatatgcgtatggctcataagatttacacgcgtggttccaacttcatcctgcttcttctgtctggaaaatagaagacaaaacaaggaagaagcgttgattatgacatgaaagtatcaagttgcaatcaacaactaacagctttaatactgtgcagataaatttttttatcctcttaacaagttcgtacttgctgataatatgtaccaattcccagatttcttgataaggctgcaatcgtgactgaag

SEQ ID NO: 61248 - DNA, 1013 bp, Populus trichocarpa
  Intron number 3 from transcript POPTR_0005s00920.1 (locus POPTR_0005s00920) derived from phytozome v7.0 (chr-ID scaf fold_5; pos 436684 to 437696 reverse strand)
ttggtggtcaggacaaggtatgtaaatgctttaaattgtaatgagaacttcgggtataattacaatatcatgaaaatgcatcaaattgttttctcggcattgtaaatgtctcatctttagtcaatgactaaatatggcactattcatgtttgtgctttaatctggttttaaaatgtgcttattgacggtcttgtgctggtaagatattgctccctcagcgcataatcaaatcataagctacatggatttagccagttaatgttgcaatctttcctttttcggcatgaagggaaagataaccattgcatggctgaaattttactatttaagcatttgcacccttgcacatacccttgttgtctatttgcttatggacagtctagtgctgattatatgctttgtcattggcacacaagaaatacataagctataatgagtagagccatcttgtctttcatgtttttccccttgttggaatgaggaatgacaatccatgacatggcaacattttgttgtccatggttgtaaatgttgtctggtttgaagtttttggtcgtttaggtgcatgtgcttatcgacggtcttgtgctggctagttgtcttccaccagcacacaacatattcgtaagctacattaacaaatccacagttttattttagtttctcctgtctttgtgaggaaaagctttcaatgctgtggtgtacaccataaatcatatatcaatgtttgattatgttttgtgaaatgcattgatttggttgcattatctttaatgctgatcaactaaggatgtaattcaagttgaactggaagcatgtgtggaaaaaaccacctgctcatgtgcagtctatcgcctaggagataggagacatcttctgtcttatttccttgttattttgggtattgtattcttttcatatgttacatgtttcatgaaaaaggaattgtttttcaatttacttatctgatctgcacagattcgaccattgtggagacattatttccaaaacac

SEQ ID NO: 61249 - DNA, 604 bp, Populus trichocarpa
  Intron number 1 from transcript POPTR_0005s00920.1 (locus POPTR_0005s00920) derived from phytozome v7.0 (chr-ID scaf fold_5; pos 437993 to 438596 reverse strand)
tgctctgccctctctctatctctcgctcgctatctgtaagtattctctctctctatattacttttgttatcattgttgtagatcttgatctggatttggacgggattagtcttgttttggttctatagtttgtcttttttatttttctcttaaaggttcctagatctgacccttgttagattagatctgtttttggtgtttttgttaagtttttcaatgacccttttgcttgttttgtttgctgtattgacattgagaagattatgaatctataaatttggctttggtgtgaaataatgaaatgaaaatagaggaatttaaaggaacggacttcattgtgtatacaagcttggatctttgtgatttattgttgattctcaatgccctgatggattggaccttgtgtcgtatgtgagttgttaaaaaggaaagattttgtttgtgtttgtaagcaaatgtgttttaagatcttgcttgcttgcatggagtgtttgattttgattgtttccttggtgtgaatgagaaaatgttataatggattttaaagtgatcttttttaaagattgattgttgggttttatgatgcaggtgagatttaggaaag

SEQ ID NO: 61250 - DNA, 1065 bp, Populus trichocarpa
  Intron number 1 from transcript POPTR_0009s01580.1 (locus POPTR_0009s01580) derived from phytozome v7.0 (chr-ID scaf fold_9; pos 2051296 to 2052360)
gtcgtggtttccaccagtgccgacctgcttgtatatatatatttcccttttctctctttttactgtttattttttttatatataattttctaagtagtaattagcttttaaacatcttctttgattacactgaatggtcactttttttaagcgggttttcttttaatcttctggggtgttgtgatttgattgttttaacttatgctggcatgctttccctatctctgctttcttcttgtgctttcttttctctcccttataattatatgaagggctgtcagctttgatgtttcaatgttaatatgtgcttttgggtgtcaatgagtgtgaaagtttgtaaatttcagttttttggcttctttttgttaattattttttattttattatcttccatctttatgttccatcatccgttaaaaagatgctggttttttattgtgtaatggtgttatgcttagacaaaaaatgttgaattggttccttgttgctggttcttcatttgtttttttagataatttgaattctcttactgtaggcatgaagtttcgagaaattgaggtttctgtgtctttttttagaaatcttgtttaatttacttggcatgatatatttacatcggttagctatgccttttttaactgcctgcctgtctctgcctcttttgttgttgggtgcaaacttttcagtggtgggttgagcacacccgtggatgaaagtgattctcatgttcttctagtagagtcgttttgccatagatgctaaatcccatcaatttctacttcaaacggatgacctccgtctaaaatatgaatgtggttggtcagcactgaaatgaaaattttattttggatctgtaaggatgttgaggttgaaattttgattcttaatagagagaatgcagctcatatttcaaccttttcttttatctgcttgtatgtaccatacacataaattatctgttttgggattatgcaggcatgatatgattgttgtctaatttacttgaactgaaatgtttttcgtttgcagttttcaggactggtgcggtgaattctgctgcagga

SEQ ID NO: 61251 - DNA, 683 bp, Populus trichocarpa
  Intron number 4 from transcript POPTR_0003s16620.1 (locus POPTR_0003s16620) derived from phytozome v7.0 (chr-ID scaf fold_3; pos 16190125 to 16190807 reverse strand)
tggctgaaagaattcaacaggtaggtctgctaaactggcctccattttaaccaaaactggaaaatggaaatatttacatttatagtttccatgtgaaagtggaattaaagagactttaaagcatataactttggtgctgagtcctgacttcttttctaaatgttttatgccctaatggagccttagctccagcaagtgcctctgtgtttttagccttttcactcgtcattaaattttgacaagaatccgagagctaggcctcattttttgtgcacatttttagactatagtacttctattctctctgaattccaatttttctttcaaaaaggaggtagagaaattcatagagaagttcaaaactgttgaaaacccttggttagatatataaatgtcatggaaggaacagacaagtcaaattgtatagaattccagatgcagtgaggaagtcactgggcacttctttttgtggatccaagtcctttaaattaattattctccttagtttcgctcaaggagataaagaaaggagcagacgaggaagaaatggtggctgttgttgggtctctactatgaaagttttacaacaatatgtgtggagccatgtaagtctcaagtcatgttcatgaattaatttacatgtcacagtcactgggaccaagaggaccaagcttccgatcctt

SEQ ID NO: 61252 - DNA, 628 bp, Populus trichocarpa
  Intron number 2 from transcript POPTR_0005s09520.1 (locus POPTR_0005s09520) derived from phytozome v7.0 (chr-ID scaf fold_5; pos 6641139 to 6641766)
gaggtcagacaaaaccagtgtttcacaagaaggtttgttttcttattctttcccggaacttgacatacatgaagtcccgctaggacagggatcagtttttgagttttcttaccccatattgtaatttgtaatttgcttgtattcagtggtgggaaaaatattttatgatgtttgactgtgaaatcttgatagtgtatgtaaacaccaccagaaaacatatttttgtagttacagaatattctctctggaggcctgtgatgatttaaaatttgcctacattgtctgatcatctaactgatgacagagacatgaattcgttctgaggccttcctcccttttttccctgtccttgttggttgatattaaaatgaaaaatggttacgttgtacttgttataccaccctaaagctatctttttattgtatctgaattctctttagaggcctatgatgatttgaatttgcctacattgtctgattgtctagccaatgactgaaacatagactagctctgaggccttctcttccctccctttttccctccatcttacacgcatagttgagttgttatattgatttcttttctctgaacaggcaaagacaacaaagaaaattgtgttgaggctgca

SEQ ID NO: 61253 - DNA, 753 bp, Populus trichocarpa
  Intron number 1 from transcript POPTR_0012s14670.1 (locus POPTR_0012s14670) derived from phytozome v7.0 (chr-ID scaf fold_12; pos 14475571 to 14476323 reverse strand)
acatcactgtctctcctcttggtgttcctcaaaaggttccatttttattctctctgtagacttttttttttttttttcattttttaacgcttcgttcttggggtttttctggggttctttgtgcttgtttttggcttctgggatatgttaaagatgatgttttaggacatttatgttaatgggttttgtttctttcatggtactgaagtagtttgaggttttactgttattgaagtagattaagacaatgattcttggtttgtactagatgatttctcgatggggttttatttgttagttcctgttttgttgaagtaatctgttgcttatgttttcaatgccatcttcattttttccccacacattctctgcatcttcactgtccctggtgttaatgatttcagtgtgtttaagcaaaaatggtcttttgactgtttgtgtggtgttattgatagttatttggttgttgttgaatcaaatattggttcttgtagtttatggttttatactgctttgtaaatgatttatatttcaagtttttgtttttgggttagtacttttagtgttttattttcttacccattttttcacgttatttttttgttcattttattcaaactgttaagatacagtacaaaagtgtatttggatgaaaagttgtgtgttttctgaaagcagttattggtttatgttctgtattttactgtatattcctcttatttgttaggatatgattgcaggttatagctatca

SEQ ID NO: 61254 - DNA, 596 bp, Populus trichocarpa
  Intron number 1 from transcript POPTR_0017s05610.1 (locus POPTR_0017s05610) derived from phytozome v7.0 (chr-ID scaf fold_17; pos 4400857 to 4401452)
gaacttgcacttatagatcccaagcgtgcaaaaaggtatcccatctctctttctcttaaatttttctatttttcaaggtgtggtttgttaagttatgggattactcatgatgctaatttcagtagtagcaatatcatgtgtgtttcgcgtgaaattaaaaattcgtgcccgttccatgaaatttaatgtttttgaaacgttttgttatggggcatctttgagtttgttattgtctccataaaaatagtcttatgaagcactgaatgtaattgcactcactgttcataaggtacttcttgtagtgaacatacctggcatgtacaggacttcttttaggaatagtttgttatacagatagcatggaatttttgttaagctcaaatgaagttttctgcttgtataaaaatggtcttgaattcccctgctgcaaaggactcatctctctcctctttcatccctcttattttatttccttctatcaaaaaagagagagaagacatttccattgttttatttattttagattgacgtcagacatgttcatttctgttccatctataggatttgggccaacaggcaatctgctgcaaggtcca

SEQ ID NO: 61255 - DNA, 228 bp, Populus trichocarpa
  Intron number 1 from transcript POPTR_0007s03250.1 (locus POPTR_0007s03250) derived from phytozome v7.0 (chr-ID scaf fold_7; pos 1867582 to 1867809 reverse strand)
gactcaaagtaaatccttcttaattaattatgttttcatgtttataatttaaatttgatggaaatataggtagattagtgttgaaaacacattgaatttttaaattgttaatttgtctataaaaaaaaacatgttcttaatataaacttacatatataatttaattgattattcaatttttttcttggataaatccatttgaatcttcatttgaaacaggtattgcat

SEQ ID NO: 61256 - DNA, 528 bp, Populus trichocarpa
  Intron number 3 from transcript POPTR_0001s44880.1 (locus POPTR_0001s44880) derived from phytozome v7.0 (chr-ID scaf fold_1; pos 45253174 to 45253701 reverse strand)
aacttggttagtactgtttctttcttgattataatggtgctgtctgtatgaacagatacaccttctattatgaacttgtgtttgaggtttcgagtgtctttgatgcaagacaagaaggtgtatctgttgcttacaagaatgttataaatgcattctaagaacatttatttgcagtttgtattggaatcatttgacatgtttgcaggaatacatcacctaagaggctatttaactaaaattaattactttgttttgtaataagaccgttggtgggtctcaaattgagctctgatttaattattgaggattgaaaccttatggctttaaattcaaagatctttggtgcattatgtgattctttgttcttcgggtattaggttgtatctcggaaatctttttgctcctctagctcctgcattccactttcaagtctaatcttttcagtgtatagcatgttattcaatattgctctaaaatgtcattaatgataaatatatacttggctccaggagtgcaaattgtagagat

SEQ ID NO: 61257 - DNA, 989 bp, Populus trichocarpa
  Intron number 2 from transcript POPTR_0006s16320.1 (locus POPTR_0006s16320) derived from phytozome v7.0 (chr-ID scaf fold_6; pos 14232398 to 14233386 reverse strand)
acagggtgcactactctctcttccatctcctttattcccttgatttcatgaataaatgctgcatcttttcacaatgttagacagacagacatacacaaaaataaaaatactagggaataatttggcagtttttacatgtattgacattgttttgtgaaaattacaagaacaagataatgccatgctcttgactgcacccttagcaagatttttatctgtttgaatgtgtatttcttgtctgatctttggtggcattacactatgaattttgcaactatcgcagatttgtcatagcaatgagatcgcctaggatgtctctctgttatattattttctgattattgggggagttttgaaacacattatgatgcaactaaaatttgtactgatttgcttttaaaattttattttgacatcaattcatcttgttttttgggcagcggcaagtacttgagatttcacttaccattaaagattgtgtgaaagtagaaatttttcaaggtagtccttgttttgcttggtgcatgaggaattttctttttaccatgtaaattgattgggtgtgtgttacttgcgctgctgctcctgtcggttgtgatggaaaccaatgatccctttcatgtgaatggatgtagtcttttcctgccagatgaacactagaacagataccatggactgtagttgtacttggtgaacctagaacttcatttattcagaatactataacatataagatttcatgtatctcgtgcctttcttttggattagaaattcatttattcagaatactatataacatataagatttcatgtctgtttcgtgtctttcttttggcatgcttttaataattcatccaaatatgaagatatgaatttgatgattgaatttatttattgtcttgcatattgtgctcaatctattacagattttgctcacactaggctgttttgcagtgtcatactgtttcccattgcaatcactttctaca

SEQ ID NO: 61258 - DNA, 585 bp, Populus trichocarpa
  Intron number 1 from transcript POPTR_0006s16320.1 (locus POPTR_0006s16320) derived from phytozome v7.0 (chr-ID scaf fold_6; pos 14233400 to 14233984 reverse strand)
cttcttcctcatcatcgcatcactcaggacgcgaggtttaattaaattcctctccctctcgccttttgactttttagggcttttttttttttataaaaaaaaatcatctgtttagttttgttttgtggagttaattgttattatcattattattgttcttcttgtaattgaaactccaagtctgctaaatataagtttagtttgagcttaataataattcacttgattgctgatttttttaatttgatttttgaggaaataagttatcaattgtgtgtgtgtgtgtcacacacacacacacacacacacacacagctttaatggttaattcaaagggttacagttaattgagaaaattataattatggatttaattatgacattgcgaaatactaaattaaggttatcagtgaaaaatttcgcatatttgaggattacttcatgtgctgactgttggcaaattgctgctgcttcttcttcttcttttttccttacaaaaataaaataaaataaaaattaatctgacattttctgtcttttgtttgtgtagacgttttacaaagttgttaggagctgggcttcaaa

SEQ ID NO: 61259 - DNA, 1025 bp, Populus trichocarpa
  Intron number 3 from transcript POPTR_0001s04940.1 (locus POPTR_0001s04940) derived from phytozome v7.0 (chr-ID scaf fold_1; pos 3793165 to 3794189 reverse strand)
gggttattgcagcggtgagtgcacatgtttgtcacttctttccttaattcctttacatttaattgataagggacaatcacgatccagctactatccttctttctggatgttgctctcgttcacttggctcatgctgttaacttctttgttgtggtgttttatttttatatttatgttctttttaagtgctttaaatcaaaacaaagtttgttgatgtaacatggtaaatgtggcatgaatagttgcattagaaaaataggaatatagaaatgagtcaagtgagttcatgatttgataattgattgcattgccgtagaaaaataagaaaataaaatgagtttagtgagtgcatggtttgataagtctagaaaggaatttcgcagcagttccataacaatttataactgtttgtgtatattaattccaagtacacctaatagtaacttttcttttcccccctcgtacagtggcaagcactactaatgttgaaaagtttttaaatcacatcttttaagccatgttaatgatcggttatctttctctcagctaggaggcacacatttttcttcttttgttaacagatgaaggaatggcaaggaaaaaaggtcaatgtggaggactatttttggaaaatggtcctgtgaattataatactgcttatgtttgtcattccagagagaactggcacctaagcctagtgctggagtagttttgttgtcatgcatgaataatacttaaaactttggcagcaatttttcaccaatagagcacacataacatcatatctatgttatgtcatgcattggtgctaagtttgttgctttgggactgacttgttctattgtgatgccattatgatttaggctggtcgttttatttttacttgcagtcatttctgtacatgcatctcttccggggatgttatcttgtcataaaccgtgccaatttcttctctgctgtcctatgcattgtggttttgcttaagatttgacttccctgccactacacctaggaagcaggaaaca

SEQ ID NO: 61260 - DNA, 978 bp, Populus trichocarpa
  Intron number 1 from transcript POPTR_0009s14220.1 (locus POPTR_0009s14220) derived from phytozome v7.0 (chr-ID scaf fold_9; pos 11195585 to 11196562)
ggcatcctgagaggaggcttaaggcctcgtttaaggtgcgtcgttttattgttttttttttattgaaaactggaaactgaaaatttggcattgtatttggtgcttttgtctgttttgttgtagggtttattattgtaatgaatgtggtgcatagaaagtttttgaaattttgattgtgggaatttaggactggtgattttgtgctgggattgttgattggaatgttagcacatgcgtgttcggttgatgtgtacaattgtgttgttgaaatttgtaaatttgattgaaatttaggaggtacagtgtttatggatacgagcagagcgtgttggagtagagttatgaggttgttaagcagtgttaagtcgtataatgcaagtttggcctttaggatagagagcaggaatggaatgtgtgcggtatcaggagtgagaatgagaaaccagagaaatgaatcagaagcgtaatatgctaaatgtgctgttttgggaggaagtggtgatgtaaaatgccatttattttagtttttgggaagacatggatggttggatggtagctgttctgaagagtttgactattaagataatgtggggcacgtaaatgaatttagagtgtatattgaaatgagcttgtagtttgtggcatcacatgattatggtgtaaagaggtgaaaaagtaacactgtattgagttgtggtagcatgcatgcatcctctcactcatgctagatggtcacagatgtgtttaattactcattccttttcaaatcaacttctagtgatttgttccattggtaactggtgattgattcatcatggtacatctttctttaattgaatttctgtactcatataggtagtatcttttctatttcttttagcaatgctgggatattttcttcttcctgttcttctaatcatatatatgttttaaacattcttaggcttttgaagaagctgagctccccaagctcaagga

SEQ ID NO: 61261 - DNA, 775 bp, Populus trichocarpa
  Intron number 1 from transcript POPTR_0005s04780.1 (locus POPTR_0005s04780) derived from phytozome v7.0 (chr-ID scaf fold_5; pos 3198894 to 3199668)
cgtactagagctcaacagttacaagatcttatccagtaagtaactctcttttatgtttttatatggttttttgagtgctgggttttgtttgttttagatggttgtgtattgggtgttgataaagtttagattcttggatcttgggtggtgtttttacggatgattgtgctttgggtgttgaaaaagttgggatttttaagggtcatgtgcgtgttggtgtatttgggctgttatgaaacagtacttttatttggacatgtttgaagatgaaaggtgctgcgtttttatctgtttaatcctgcaaactcggaaccatgagagcctgtttgtgtggatgtgagtcaactttttgctgttgatggctcattgtgtcggtgctccattgctttgcttgcaaatgtattgttaattgtttcgttgcacttaacctatttttggtagaatggattggaaagtaattgatgaagtggaaggaggaaatgatgttcctgtgatggaaagaagtgggaatcatttgaacacatccaatgtgaagtattttatttgatctgagagtaaagagtttttcttcccgcaatttctaagtgcagtgttgtaactttttgttgttaatgttaccggctccctccggattcgaaactgacaatgtcttcgaatgttagtgcatgtattcgcaaacttagatattcgtatcttgttcattttaatttcagggcacatgaatgattttgaattgatctgtctccctttttcaggttcaagggcatatcacatt

SEQ ID NO: 61262 - DNA, 630 bp, Populus trichocarpa
  Intron number 1 from transcript POPTR_0005s26340.1 (locus POPTR_0005s26340) derived from phytozome v7.0 (chr-ID scaf fold_5; pos 24409527 to 24410156)
tgcttatttcctacaccagcaatactttccctacggtactctctctttctctctctccgtgtgtcctctatcgtaactttgcacattgtctatggacgttttcgtaatttcggtcttttttgggagatctttttatcttgcttgatcgtagaatttagtttgaagcatcattctctgagattatcttgttttgatctgtgaaaatacgttttagcaattttactgaatttttcttgttttttttttcttccagtttttagtgttcttttatctggtatagagttgaggctacaaaattagatttgaacttgaaatttagggcttctgttgtatacttttcatgataaatgcattgaattgattgtgtttgtaagaattagtcattttggttatctagattggtaattattcattgctgaatttcgaagaatccctgggcagatttcaatgtacattgatgttgttggtgaatttttagaaatgatttggagtttaaaatagtctagaggtctatatggtgtgtattgtagtgtgttttttgcttttcgttaaataatgtccggggacacataaccagttattaatgttgtcattatctggtttttggctattgtgatgcgaaacaggact

SEQ ID NO: 61263 - DNA, 469 bp, Populus trichocarpa
  Intron number 2 from transcript POPTR_0004s17030.1 (locus POPTR_0004s17030) derived from phytozome v7.0 (chr-ID scaf fold_4; pos 17404685 to 17405153 reverse strand)
ccggtgtcaggtatgttagccatgttttttgtctagaagatatgctacagcgtttgatttctgttgttagctaataaagtgttggtatggttaatgtgtctcaacctgtatttatttttgacaagcgtggtacattgttatttagttttgtagctggggtgctgtcctgttcttcagttttttaacttatgatctgggtgcaacttttatctccttgatatgatgcagtggttcttaaatctttgagatttgttgtctagttttgctgcgcaaaccttacaatgtctggatgtttttctgtaaatttaagaccatgagaattcttggatgagactgcatggtacttgcacaggcaaattttctgttcttgtgtaatatctcttgtacttgcaagattgctgtttagggagaataatcatttgattcacaatccattctgatacgttttgctgtttttttcacagagcta

SEQ ID NO: 61264 - DNA, 883 bp, Populus trichocarpa
  Intron number 1 from transcript POPTR_0001s08920.1 (locus POPTR_0001s08920) derived from phytozome v7.0 (chr-ID scaf fold_1; pos 6817928 to 6818810 reverse strand)
aaggagaaccctctgtttggcccgtcttctgctacgtaagttacttttgcttatttttgttcaaaattgtgagctttattggtgttttgatgtgggtttggatttgtttcttggttggggtcctgtgtttggtttgggtttgtgaggttttgtagtttatatttgtttgattttggattgggacgttgagagattgggtagtagtttcttataacttaattttagataatcctttttcttttgcctgttaaatggttctgatttggtattttcgatacttgttactagtgttaattgagacaagggcttaattgagctcatgacaacatatagtaccaggtgtttataagcaatatttgatgaaaagttctgtgttttaatcttgcttttaccgggaatcttcttttccactttatggacgacgaaatttgttcttgcgatcaggtatcaaggcagagtgaaaattacggtttttggacttggtatggagttttgagaacacgaggctatatcttgtatttggtttatagatcgaagactacaggataaattttaatctgtaattcatagagacatatctagtaatgcttatgatctcttgagtgctgtagactggtgtcttgatgggttggattgaggggtgtgatgacataaatagtattccatgtcaagttcttacttgagctgcaacaaaaattcttaaacactacaattgttggaatttgttgttgcgatttgttcaaatttatgtgcctttactgcttgtaggaaaggatctgtaagcagccttctaattcatgtggcagtagacaattgcttgacctctgttgaggaactttgatagttaatcttaatgtaatgatgattgtgcagattggaaaaa

SEQ ID NO: 61265 - DNA, 729 bp, Populus trichocarpa
  Intron number 1 from transcript POPTR_0008s05890.1 (locus POPTR_0008s05890) derived from phytozome v7.0 (chr-ID scaf fold_8; pos 3471078 to 3471806 reverse strand)
gagtcttagctaacttctgtgtacttcacagagctgtaaagttctttttttctttttctttatttctttgaccaatttcgcactatacagtactcaagtatacatgagagatgaggtgagtttcttccatacaggtgtttgctttccaaggcctttctttgagaaaggggagaattttctgcatgttttgcttcatttggagtgaggtctttacaagtttttgggttcagagaagtgggttttgtgttgctggatctgattcttatgaatttggaaggtaatgtttagggttttgattttcgcatgcaaaacaaaggaaacccatatctcttatgtctgattcattcaacatgggaagctattagtatttattaaccgggttagtgggtttgggttgaattcgattctttcttctggtgagaaggaataaaggataaggttatggattatatatgtttggacttgttagctgatttctctcaatctgcatctagcttgctgcaagcaaacaattaacaaagagggtaataaggccaagatactcttccatctttcattgttttggtcttgtcggttactgattcaagaaggaactgatatagagcgagacaagaacaccgaaaaagagttacaacacaaatataagctatccttagcttattgtctcctggattaattctttttgtgttcggaagcctaggcctttcttggttctatcaagaatcaaac

SEQ ID NO: 61266 - DNA, 499 bp, Populus trichocarpa
  Intron number 1 from transcript POPTR_0016s05880.1 (locus POPTR_0016s05880) derived from phytozome v7.0 (chr-ID scaf fold_16; pos 3818454 to 3818952)
taatttatcaagatcgtctgtttaagtatcatcaggtctttcaatcttcttcttttcacatttctcttcataatttgctccgttttagcttaaattatttgtaattttgttttttttttaatttttcctatttgattactctaaaatccattagttcaaagttgcagtgtcggtgaccttgaactagggtttccttggtgcaagtaaattgggattttttttttaatttggggtttttagttttgggtttttgattaattcatgggacttcttatctgggtttgtttaatttgtggtgaattgtggattttatgatatgcttctcgaaatttgtgggtttgattgttggtactgtgaagggagggattttatctgggtttgtggaattggtgatatagttaacttggttcttattttgtgagaaagttgatattttaatctgactctgtagtgtttttgttaattttagggtttttgatctggaattgttgaatttggg

SEQ ID NO: 61267 - DNA, 1060 bp, Populus trichocarpa
  Intron number 1 from transcript POPTR_0022s00800.1 (locus POPTR_0022s00800) derived from phytozome v7.0 (chr-ID scaf fold_22; pos 391795 to 392854)
ataaaaaacaagaagacacagcaactgattacaaggtatgcaccgtttcatttttcactgctctttctcttctgggtcttgctggaaagaatgaaatatttctactttctgcagaaacaaaacaatcacagttcctgctcatgaaaatttttggtttttatgctatcacagctgttacttctatgctgcagtgactattttgtgataaacacttgatgggctatggcttttttggttgtttgaattgttacttgttagtgttgtgtttgttggaatatatgtttttttctatgcgtaccgtatttatgttctggataacgttaatgaggtttgtgttacttttatatggtaggaattttccgaggatgattcttctaaggattataaatcagcagaggagtcagaagctggtgacagcgaaacctctggagatgaggtacatggtaattgcctgaatttgctttatttattagcatacactgtaaagaaaaatgtagtaataaattttggtgttatctagcattcgctgtttcagaacaatgcaagtagaagagaaggctggttatgtgtaaaagctagtctattcatcatgattggtttagtggtggttgtaatttgactggtgtctaatcaaaattagggttcaagatttgtttttagtgaaatccttttttctaaatttttggctattaaacaagggaaatatttgtctttccctctcctttgatattattaaatttcatgtttcacctggaaacttttccttgttattgtgatcatttgtactttaatatcctaataatgaccattgcagggctttcacaacaccggtagtaatgagggcttggccaatgaaggtcagagtgaagactctgaacctgatctgggaggtgaagagagcgactcttctgaggatgaggtacatttcttttttctcctttctttgatgctcgaaaaataattttaatttactcgggtttttacttaattccttgtcaaatgggatttatttgtttggttattttcattcaaaaggtggctcctagaaatacagtcggtg

SEQ ID NO: 61268 - DNA, 338 bp, Populus trichocarpa
  Intron number 1 from transcript POPTR_0017s01090.1 (locus POPTR_0017s01090) derived from phytozome v7.0 (chr-ID scaf fold_17; pos 789710 to 790047 reverse strand)
aaggtgagaatcagctctctctctctctatatatatattttctattagatatgacttgtatgcttgcatgaatgaatcatgcgtcaagttttcttttcttttccttactttcttttttcctgttgatttacttattttgatgaaaagcttgcttcttttacataattcattgagttttgttggcttcagtttgatttagtcattgttttaatgggattccttggtattaattttaagtgattactgtttcttgattatcttgatattgatttataacaaaattcacatgattatcttgattattttgttgcagaaagctgtgttgaaattggagttgc

SEQ ID NO: 61269 - DNA, 658 bp, Populus trichocarpa
  Intron number 1 from transcript POPTR_0016s04900.1 (locus POPTR_0016s04900) derived from phytozome v7.0 (chr-ID scaf fold_16; pos 2955541 to 2956198 reverse strand)
aaacaacaaacccttcaaaatcctctgccaaaaaggtcagtatctggttgtttccttgtaataatgaagtctctaaagcatttattttatattatcattctagaaacaaatttaagaaaatttttaaaatttatcgtatcaaggctttggtagagattttttatattcagaataggcattttgtatttcattgtatgattaaaaaaaaaaaccctaatgcaatttgattatcctgttagaaacttgaattgattcaaagcactgttggttgaagatttatatggtaaagctttctttttctagtggaaggagtgatatagaaaaaaataaaggtaaagaactttacttagatagctatgttaatgtagtttttgcatctaaaaaggggtgtaagtgtgttcttgtggttttgtttaggaaagtacatgggctttatttatgtaactggaactatatatttatggggagtgtttttcaaagaatatgcttgtaactttctcagttatatatttcccaagcatattatgtgttggaagtgaaaagttacaagctaatagtgttctatattttaactcatgtttttaatttgtggttttttggtgagattgtgatcatttgtgcagagcgtcaacaaggaaacaccaacttttcaatcatt

SEQ ID NO: 61270 - DNA, 467 bp, Populus trichocarpa
  Intron number 1 from transcript POPTR_0012s05140.1 (locus POPTR_0012s05140) derived from phytozome v7.0 (chr-ID scaf fold_12; pos 4636282 to 4636748)
ctgaagacgaggtctgccttttctgaatctttcttttcaatttttttttcgttttgtttgtgtttacagttattttgttttctgtttggaggattattttatgttttaaaataagaaagagagagcagagtaagagtattattttaatttttgcctttttcgtttttgcttttttatatatcctttgatttttttaataataactgtttaatgtttttgcttgcaggtatagtaattaattatgatttaaagaaagtactctgtgtgtgtgtgtgtgtgtgtgtgtgtgaataattgttataaggataataacttcaatttttttggaaaacttgtaatgtagtagtagtagttgttgttgttataataataataatatacaaatggttatataaaaaaaataaagaaaaagatattgattttgttttgcaggtcatctttccagctcttgataatcgtgtgaagaa

SEQ ID NO: 61271 - DNA, 532 bp, Populus trichocarpa
  Intron number 1 from transcript POPTR_0067s00250.1 (locus POPTR_0067s00250) derived from phytozome v7.0 (chr-ID scaf fold_67; pos 39978 to 40509 reverse strand)
aaggtacacacgatatacttttccatctacatatatatccttttcctactatatacaaaagaaggaagaaaatttgtttatctgttaaatatgagcttttccttcaataacttctgatccctatccaagcagatcctcttctctttcagatgacccaattaataataagttatgaacaaaaaggggcatttttttttgtggatttcatgcatgtcgcattgcaagctaaagtaatggctaagctttatcttaagctctttcctaagcttgtttcctctcttgccgttcttcttctttgtcaatttggctatgtagtctgtaaagcaacaaatttatatgacatgccttaattgcctgaagatgaaggtacacgcgatttcatgcttgttgttgacagttgaatttgcagtagttcaatttacatcattaatgagatttttaataacagcctaattaatgcatactacctgtttgaattttgctaaaaaaatgatgtttcattgttgaaaacgtttggcagaaaaggctttgg

SEQ ID NO: 61272 - DNA, 1019 bp, Populus trichocarpa
  Intron number 1 from transcript POPTR_0007s01500.1 (locus POPTR_0007s01500) derived from phytozome v7.0 (chr-ID scaf fold_7; pos 836225 to 837243)
ttgtgggccacttttattttttagtttattttcttaaaattgtgaactttgtgtttggtttatgagaaaatgcaagttggtgtcttggattttgcttagttgagctttataggagtgtttttggcttggtttgtgtgtggttttttttttttttttgttaagattgttgagtcttgagttctttctcttcctatccttattgttatttttccagcttgatgggatgttctaatattttaggataatataacttgtgggttgttaagctttttcattttagctaacattttcttacctatttggaaaatggaaattgaaattttaactttgaacttgcatttgtttgagcaaaggttcacttagttgaggtggtgaaactgtttagctaaatcatttttttggcaacttaaaccagatggtattggtgaataaatagaaaataggttttatattaacttgatttgggaatgtaagtttcgagagtgaaagtattgctaaaaagaaaggttgtttagctgaagtagctagataattttgctcacttgtgtcaaatgattgaaaatatagtatgtattggaaccagtagcgtagattaagtttgattccatgtataataaacctagtagttagtatggtgaggataaatgttaattagatgtaaaaaaattgtgggttgaagtatatgatcagttctttgaattgaaccaagcaaataagggaattttttaattgtgcagtttagaaactttaggttttcttagtaagctaataattatcataatttagcagggttggagtagcttgccatgtttctaaattgttgtaggctcaagtaactcaacatatgaaataaaacatgtatcaagctcaactgttcctttatatgcagtggtaatgtgtggagtggttttttttttttttttgctaatcttaattatctggctttaatttgatttatgttgttgaatttggtgctttgtacaggtattctggcttgctgcatcattgtgagcaagttc

SEQ ID NO: 61273 - DNA, 683 bp, Populus trichocarpa
  Intron number 3 from transcript POPTR_0007s01500.1 (locus POPTR_0007s01500) derived from phytozome v7.0 (chr-ID scaf fold_7; pos 838266 to 838948)
attccggacagtatctgcctgcaaagttaacaagggtacagtaattatcatttttcctttttttatgatttctttcccatttttttgctggactgaatttcataaatgtattgccaatgttacattaataaatttcctgtgcaaatatcgcatcttctttgaggttctcccatgttttggaacttttcatgatagaatgatgctaatctgagagaggacaaaagtgtgggcaatatgctatgagtctataccattggtttcatctgtttgtcaaatgatgctgcttctgaatctatctagatgccctgtgttggtttcaattaatcacactaacttagaccatgaaataaagccaaagttttcaagttttatgcaggagtggtaaaatgagacttagagcttcagggtatcatgcaaagtatttgaattaagggtaatcatgttttcaggatagaatcatggtagctgtgttgctctatagttgttcacaagcttaattgatcttattaatttgctttctttacctgcacgcatttctgtgtcagatagatttatcataaattggtggaactcaagaaggatatgttgcaagtgttttactgattctttgagttattacacttctgatgagtcaatgttgatgtgcagtttgccctttgaatttcacacggcctctagaagtt

SEQ ID NO: 61274 - DNA, 479 bp, Populus trichocarpa
  Intron number 1 from transcript POPTR_0012s09690.1 (locus POPTR_0012s09690) derived from phytozome v7.0 (chr-ID scaf fold_12; pos 10654504 to 10654982 reverse strand)
tttttctccgatcttcttcggcgatcgtctctctggtacgctttttaatgctcactcttataatttaaaatacatttataagatttatttattaattaattaatgattaatctccaatttgtcggcgtatgatgatgtttgttagttatttcgttttatgatgtttcttaatcatgggttgttgtctgatttatgccaaattatgattttatattgagattaaaagacaatctgatttaaggtattaaagtggaattcatgaattagcccgaagaaaaatttcagttacatatgtattttcttaatctcttgtatttttatgtaattttggtgatatttttaactttatttaggggagtagaatttgggttttttatccgattgattttgacttgacaacatgtgtaattatctccgactctggattcgttttatgttcgatttttacagaggtattcaagaggattcagttgttggca

SEQ ID NO: 61275 - DNA, 616 bp, Populus trichocarpa
  Intron number 3 from transcript POPTR_0005s09190.1 (locus POPTR_0005s09190) derived from phytozome v7.0 (chr-ID scaf fold_5; pos 6425590 to 6426205 reverse strand)
ctgcccaggtaatgtacaaggttttgtagcgtgttgtcataaatcttgaatgatttatcattgaaactgaatttatctatactagcttgtggttagaagagtcttcaaagtataggcggaacttgtcatttgaggttattacctctaaccttttgagtttaatttcttggaaaattcagaatgtattctaatattgattttcttatacaaaagcttgtgtacaatgtgttgttggtctttttcacaagaaattactgaaacaagttctcctttttcccttaattaagattttttgcaatgttcataacatttagaataaagatttaattttcagcatccagctagacttgtcatttgttttttatggatgacgagtcttgatcgtaaaatgggtgccttggtgattctttttctactgtagcgttctgatataaatttgctgcttatttgtgtagtcatattttgattggaagcctgaacttgtcttctggctgattctatgcatatgtagcttcttcggttcattttcaagcacaattcttgttaccaaaataaaaggtttgcaagactctaattaaaagctaacatctgatcctccaattgcaggtctggaatc

SEQ ID NO: 61276 - DNA, 589 bp, Populus trichocarpa
  Intron number 1 from transcript POPTR_0010s18560.1 (locus POPTR_0010s18560) derived from phytozome v7.0 (chr-ID scaf fold_10; pos 16767011 to 16767599 reverse strand)
gttgctgattctgtgcctaccgtgactcgctccaagtcagtctttaactctaactcaagctccatttttgttatctttcaatttttgtttctcttttgttctggccttgttttgctccttcatgtcaagattactttttttttttttttggggggggggggggtgtctatgtttgtgttactgtggttatatatataaagaagtttccttttcaattgggtttcagttgaaattgaaagggctgtcgtttttcccttgttttgtctcttcatttgttgaatttagtggggttcatgttctctatctggttaaaaatggtaatttaatcaaaatattaatctcctttgtgctttaagtgtttaagtcgttcattcttgctttcctggcactatactttattattgggatttgatttgcttattttggtcggtgagtagtagctgctgatcactagaccaatccagttcttcatttctttttatactaagaaattagaagctcgaaggcttggcagctatttgataatataggttagataatccaagatcgatggaaccttaaatcatgaattaacaagtctattttcagg

SEQ ID NO: 61277 - DNA, 455 bp, Populus trichocarpa
  Intron number 1 from transcript POPTR_0002s01880.1 (locus POPTR_0002s01880) derived from phytozome v7.0 (chr-ID scaf fold_2; pos 1000177 to 1000631)
accgtcaaaaaacacttgcatagcaatttaatgtaacatatctacaattcgacgaagaaaacgatgaaataaatcccattttatttattccaagagaaatatcaaaaacatgaaaataattggagattattcacctataattatgggaaagaaaataaaatgtgtcaaaaacaagaattggataagaatgaagcaagaaacaaagagcaccaacaaggaaacttatccaataggcaatgataacaaagaatccattctccaaaaagttcagcccagccaagctagaagccataaaaagaaatgaaaacaatgtgttcccaaattttgtgtgtacagtagttgagaaaagggacacgtgctgtgcctataatttgatgtaaggaagaagtgatcattaagttatgacacgtgtcctatcagctgggttgttaacggtcaaccattgtgtttgtgtg

SEQ ID NO: 61278 - DNA, 1005 bp, Populus trichocarpa
  Intron number 1 from transcript POPTR_0001s22450.1 (locus POPTR_0001s22450) derived from phytozome v7.0 (chr-ID scaf fold_1; pos 21198176 to 21199180)
ccagaatcctaagtaagttttttcttcttctttctttggtatggttggttgctaagaaaatggagttgaacgaagaaaaaaaaggggtgaaactttgaatttatttaaggctttctgttttctgggtttttacatttattctgagtttttttgtgtttgtcagctttgttgttaggaaaatagagggaacagtggaatttgtggtgtatcttttgctggggttttcttttattttttgttgtgcttttcctgtgttttccgagtgaccaaacaaagaggatctgatgagtgattttacctttgtctgttctggagttaacataggattctgggttttgttcttgaagtattttctcggtgaccaaacaataagagggtccagcatcagtattttttctgtttaggctattttggtctttgaatgatatgttaaagtctggttgttcttttttttttctttttctttttcggtcagaagtctgattggtcactgttgtcttatgtgggatgcgcaatctaatacaccctttcttttcctctgtttttggaaccttgtgttttggtttattctgttttgtctttaagaatctaagtaaaaagttgatttgtattggtttgactaaaccctttctgtattggaatgattttatgttcatcaaatctactgattccatttcgtcctagcttgcttgattccatttcgtcctgttatcttggttttgaatagaaagaaatagttacgattttatcagcaactgaagattctgctgaatggttgcgtttattttcttttgttatcttctgtttggatcctgagaagatgttaagaaaaggggaagaaaaatcataatagaaaatggtatctattttttttttcctttggcgttttggtaactaaacagaaggtgggattttttttttggtcttagttacttgctaaattttgttatagagctgaatgatctgagatattatgttaatttgcaggttgttaatctgggagga

SEQ ID NO: 61279 - DNA, 988 bp, Populus trichocarpa
  Intron number 1 from transcript POPTR_0013s05360.1 (locus POPTR_0013s05360) derived from phytozome v7.0 (chr-ID scaf fold_13; pos 3832877 to 3833864 reverse strand)
cacgcgaactcaaagctggtttgcatcctctcaaggttcccaatccctctctctctctctctctcacaccctctcttatgcgtttttgctatttttcttagattgttgcgatttggtagtttttctgcaatgggttttatgtgattgtcttttcttttttcgtataatttgtggttagtattttagcttttcaatttgattgtttacaattttttgcaaagtccggctgagttaggttttttttttaagtctacatttttcatttcatttgtttattttaaccaatcccaaatctccacgtgtgctttccagctccagttgcatttcttagctcaaaaattgagcttggaagctcatacatgctagcttaattatgtagataattgattaaaattcaaaacttgattataatgaatcgtgattcttagaaacaaggtgggggatgagccaatgtagtttttaaaaaaccatatggtccccaagtgattgaagcagaaagatactactctttatcacccctagctgtagttttcctgcttctcaaaactcagctcctggtgttgtttcaaagaagcattttgttttcctttcgaaaccattttcacgtggctctgcaaggaaaattgctgagggaaaaacctgttgtctgttgcatatcttctaaccttgccccacgtgacttgtgtttgtgctagtggaagcattttaacttctctccttgcacagtaaatagatccatgcttaccagtatggtacgaaggtgtaaggcctacacaaaccttgcagtcaaactagggttttatgttttattgattgtttgattgtacaatatgagggcatagttacctttgctgataattttaatattaccatatgtagctcttctcttgatataattcacaatgagtatgtttaagtactttcttattttgctctgacttgtttatgttcagaacaagttcatattttggtacactcgtcgaacgcc

SEQ ID NO: 61280 - DNA, 626 bp, Populus trichocarpa
  Intron number 1 from transcript POPTR_0005s08480.1 (locus POPTR_0005s08480) derived from phytozome v7.0 (chr-ID scaf fold_5; pos 5881364 to 5881989 reverse strand)
ttgagtttagccctgaagacgctggcaggtttgaacttttgggttttgagttttttgtttctgttttcaattttgtttgctcagtttctgatataattctttggggtttatggatacagagaagctacagaacatttttatgttattgatgagtgtaaatgaagcatagccactgtttttttaatcttatttctttagtttcgaaagctgtgaatggttttggggttttatttttgtgaacagcattttgttgcatacagacttgttttttggtcattggatgatctaatggctacgaattcagggtcgaattgtgtgtgtgtgtgtgtgtgttttttattattattattattattattattgttagatttgagatcctgctgttagaaaatggatgtgaaagtgagaatgcgattattagtgtacctgcccgtgttagaaatttcaatgaatctatattttgttatagagctggtttccttatttcttgtatggctgtttgaattgaatgctggtatttttattgttttgagttgaattttatgtttacatgaccgcatttaatcttcaagtattttgatcctaaaccagatcagagagagagtttttatatcatatattgggtg

SEQ ID NO: 61281 - DNA, 826 bp, Populus trichocarpa
  Intron number 1 from transcript POPTR_0012s13370.1 (locus POPTR_0012s13370) derived from phytozome v7.0 (chr-ID scaf fold_12; pos 13544830 to 13545655 reverse strand)
aaagataatcctctctttggtccttcttctgctacgtaagtaatttctcttattctttgcttcaccttttactctttgtatcatttttcttgttcttgtttttcttgtctcttttctgttttatggagggtttaaaacttcttcatgacttagcttttagattcctgggttgctgttgtttcagtagtttttgattgataaagtgagtttgaggaggaattttaatcctttttgatgtgtgtagaaatgaatttggaaatttggcattgctctgatgaattaagaatgcctcgtgcgtggcttccatggcgggggggggggggtgtttttgattgattagatgcttgaagagaacttagtgtgatctgctttagagaccgatgcccatatctcaattactgtatttcattgctgtgtttttaggctggtctgtgtcgtctttggagtcaaatgacatgaattttgagattattggtttgagatactatatgtttttatgatggatttaaggcttcaggggtggaaattctgtggatatgatgaaatagatcttttactttttctcttttttttctcaaacacttctaaccttgaaaatatgtttctaaccagaagcatttgtaagaaattaaatgtttttggatttttcaggaactaaattaacttattgaaaagttgacatctcttggttctcatcattgtcaataacattaagatatggaaaagaaggcaggagaaacattaagcaattacttgaagtttttttttttttttttgtggaactttcaaaggttagagagattcggagctcttgagtggaccaagg

SEQ ID NO: 61282 - DNA, 542 bp, Populus trichocarpa
  Intron number 2 from transcript POPTR_0007s04650.1 (locus POPTR_0007s04650) derived from phytozome v7.0 (chr-ID scaf fold_7; pos 2882453 to 2882994)
tggctgacaagcttatacaagctgaaaagaaaaaagtgagtgttgcttttaaatgtaatgtttgatggaaatcttctctatgcaatgctggttttggtaaatttactgaattttgatgcttttggttggaatctgtgttgaatttggtcgattttggtaaaaactgctaaaataaagttagaatgtcattgaaaattggataaatgaggatgagtagtagagaacgctactttttgatgtaaaaggttagaaatcaagcttctttgttgagattcgatagtccagtaacctgaaacttttatcttctgctattttatcatgtcttcttttttttgtcctgctgctattttcagggaagagattgatttttaagcaataatgttgtagttatgtgtggagaaacaattagaatacccgttgtctctttattgttgtgcttaggcatgttcatctattgctacaatttttcaactaaatgaattcgaggaagttcaaagctttggtgactataatttctcttgttctacaggaaagcacaaagg

SEQ ID NO: 61283 - DNA, 869 bp, Populus trichocarpa
  Intron number 1 from transcript POPTR_0005s19150.1 (locus POPTR_0005s19150) derived from phytozome v7.0 (chr-ID scaf fold_5; pos 17758518 to 17759386 reverse strand)
tatcggacgacctttttagtgtcaccttagatcaggtaatcaaaaccctgaattttttttcctggtttcatctatactgtattgatgatcggaattacttacaatttaatcttagagtaatgccattgtagactagggttgggaaaggaagggagtgtatgtttttccattgtattgtaggatggcggacgtgggagtgggggagttgtttatttgaaatggtttgtccttaaatggttcctccatttttagagattttggaggttaatctccactatcgataatgcatttgtggcacctgtaatttagagcaatccttgtgatgcaagggtttccttccgccatacagacacatccttttagttttgacttacgagaggaagctctttctctgactccgataaatgtcccttttacgaggaagagccgaattttcctttcatcaccattgacacacgtttccatctgaaacaagtttaattacgataagtgttgcatggctggcttaattaagaattttgttgatagtttttatataaatattatttgttagttaagaaagaatgttttgtttcatctaagaattaattgtaggcttctgtctaaatactatttgttaatcttaaggattaatagcgcatatctgctggggttcattcaaagccaaactataatgctggtataggatcataaaactgtgaaacagagagcagattatgtcatggttacatggtactataattgcagtgtggccttaagctgtgtttatctatctatttatttttgttttattctttcctgcctacatttctaattttatatcgtaaaaattatttggcattataggatctttctttctgctgtctgtc

SEQ ID NO: 61284 - DNA, 660 bp, Populus trichocarpa
  Intron number 1 from transcript POPTR_0016s05180.1 (locus POPTR_0016s05180) derived from phytozome v7.0 (chr-ID scaf fold_16; pos 3146150 to 3146809)
ttaagatcaggtgattttttcttttgtttcctggtgctttagatgaagttatggttagtaacaagtgatatgttttggggcgttgtataagttgtgattagtttagtattatattaagcttttattaatctcaaatgtgttctgtagcagaattgctataagattattggtgtatgggttgattatagtaacattcttttttgcatgtgttagaggaagatacagatctattgtttcaattttgagttataatgatggaaatgatcttatgcattttgtgagattaaaagttaaattgccatgatacataaaggatgacctcttaaaactgtataagctcacaatgaaacgttttcatatatatttgcatgataggagtcaggtaagcatgtttgattgtaatttgttttctatgtaaatgacccttgcaagctagtcagagcacgcattttttttttttttagtctgcgctacttgaacgacctggtggggagaccgttgactgaatatcccagctgacaaatagaagatcttgattcccatagagattcaggaactacagtccatggtgtccattatagtgaattaagttctttttctcgcagtgcttaattacattttactaataccgatatgcaatttgtgcagatacggagccaa

SEQ ID NO: 61285 - DNA, 658 bp, Populus trichocarpa
  Intron number 1 from transcript POPTR_0006s21580.1 (locus POPTR_0006s21580) derived from phytozome v7.0 (chr-ID scaf fold_6; pos 20629290 to 20629947)
ttcatccttgggagatctctttcactgtcttcaatgtgagttcttcttttcttttttgcttctctctccaaagaaatttatttttcttctcaagatgttttatgggtcttttgtgttattgtcatttatcatgtgggatgttgtcttcttgtctgttgagatagaaaaagaaaaattgtgggtttgctgtagaaactaggaaaattcatgtggactgtgaaattgatagcgtttatgaaacttgagatatgattttttttaaaaaaattcagggatgaatttaaaatttcttttttggtgtttggtttctgatagtttacgggttgcttgtaattgagatgaagaggtttcttaattgaagaatataagcatatgaaggggtgttctttatttttgttttgttttgtgggttattgtggtagtcaatttgggagaacaaaggattcttaattgatttttgaggatttggtggttggatttaatggagtattttttctctgatcattttgacttgacaaagcttgggtcttttggatatgtttgaggtttttttggctgatagttttgcgtttttaaacttgttaactttctggggaacttagctgttttgttttctgatccagggtgggaaccaagggcagaagaacaaggttcctgt

SEQ ID NO: 61286 - DNA, 368 bp, Populus trichocarpa
  Intron number 2 from transcript POPTR_0001s37540.1 (locus POPTR_0001s37540) derived from phytozome v7.0 (chr-ID scaf fold_1; pos 36509008 to 36509375 reverse strand)
tttagaaactactgcaccgatcccaattcaaactggtttgtttttatcaattttcttacaagttgcttaattaattgcaattttagcatgaaattactaatgcaatatatgggttctgtttgcattctcataaacaaaaattgcaaacaagttactctgagaattttagaattttgaatttttttttgaaaaaacgacaatagattgtgtactagtagaagataaggtgtatttaaatgtctactgtcttatgatcgacaatagattgggtttctagatatctcatgtgtaatgatgtgctagggtatgttacctttctatcggtttatgcagcttgtgcagctctgatttgccaaaggggcaacaag

SEQ ID NO: 61287 - DNA, 599 bp, Populus trichocarpa
  Intron number 1 from transcript POPTR_0323s00220.1 (locus POPTR_0323s00220) derived from phytozome v7.0 (chr-ID scaf fold_323; pos 12874 to 13472)
gatttaaatattgatttaatcggttcagttcagtttagttctctctctctctctctctatatatatatatatatatatatatatatatatatatatatatatatatatatatgaagcacatcatatatgatggcaaacattcaaagttatctttgtgcaagattcaactcttcagtccatagctggtactataattgacagagcacctgaagtgaaatcattggacgtgtcctcctttcttctgttttttaagaaaataagatagctttgcataaattatgtctatatataaatatatcacttataatctttaattttttattgtatttatatttttatattttttatattttttatttttaaaaagatatttatttaaatattagaaaatccaaatcttcattaatttttttttatatatagatgctaactacaaggcgtttgagctagttaagaatgaaatataaactattaattattttaattaaaaaaatttattaaaatcaattaattaactgattatatgttccaaaataatattcccaaactagtcgaattttggagagataccacctgtcaagtgtttggttcgtttcaag

SEQ ID NO: 61288 - DNA, 1036 bp, Populus trichocarpa
  Intron number 2 from transcript POPTR_0002s22500.1 (locus POPTR_0002s22500) derived from phytozome v7.0 (chr-ID scaf fold_2; pos 19243682 to 19244717)
ttttcagctctaatcgctgccccaaattatcaattgtgagttttttggatttctatgaagaacgacattggcctgattttccgttacttgtttctgctaattaattgtatgattttggaaatgctgacctttttctttaaaacttggtattgttgattggaataggcagatatagcaagtcttaaattttctagttatgcatggtggcttcttttctttttttggataaaacaaaaatgtaatgttgaaagagagacgatgacgagacggaataataagagatttagtaatagtaggcgccgttgttggatcatcaccactatgcgtggttttatctttcatttgggttaaaatatggaaaatgggaatgagagttgtttctaagccattctctttcacaaggagttggctgacttgggtgattgctgtggacagtggtagtttcattcaatctttgtagcctttgctcagatgttgcacgggtgttttcaccttcttcatgaccatggatggatataaggctgcaactcaaagaaataactgcagttttaagctgaaaaatactgttgctccttgttttttataccaaacttatgtgcatgggtcgctttgtggatgtatctcttaaaactgtaacacaatgcaatgatgtaaacatttaggatgctatacagaaacaattatgtagaaaattgtagtattgggattgttctgtgcttatgttgttaaacggatgcttcattaatgtttactcttggatccagactttgaatgcattcaatttggacactcttaggtcctagcaatcctgccaattgtgattgcctcatccgtggaatttaaaagttgtcttttttattttttctctgacagaatctgcagaaataacttttgtaataaagaatctttctttgcctgcttaaggactaacaaaaatcctgaaagacaatctgaatcctgccattttgtttttttttggtatactcttaaacttcaattatagatattaacatcttttagttgcaattacaggatc

SEQ ID NO: 61289 - DNA, 669 bp, Populus trichocarpa
  Intron number 2 from transcript POPTR_0043s00210.1 (locus POPTR_0043s00210) derived from phytozome v7.0 (chr-ID scaf fold_43; pos 8594 to 9262)
caattgagcaggaggtaagtaatttttaatgttttatttgcttatttttacttgcggtttgatttgtagacagaggataatgagtgcccatataaaactattgaaagataagggaaaacataaagtttcttaaatttacgtttagacaggaagaaagatgaaagttaccatgactctgaggtaagtgaccttcatctgaggtgatgaactaggaagaaagatgaaagttaccatgtacaattatgagatgaaagttaccatgtacaattatgagataaaaaagttaccatgaactaggatttatacttctgcatttccctgttggggacagcaattatctttatcatttcaattatgtgtgttcttgtttgtgcctttgttttaagttgtttaagtttttctcttagtttagactttaaaggcacgcgtcacactttgctgtactgtctcttctgactatgggagttgcttcctcttttcttttcctttttttctttttaaaaaagaactatacaatgaagagatatttaggtgtaccattcttaatccattttttggacctcctacctcttcagtcttgttctctttctttgaactgaggactgaatctgtaacagtttctgtgatgaaacagattagaatacacaatatcttggagaaaacaaggaa

SEQ ID NO: 61290 - DNA, 936 bp, Populus trichocarpa
  Intron number 1 from transcript POPTR_0002s13670.1 (locus POPTR_0002s13670) derived from phytozome v7.0 (chr-ID scaf fold_2; pos 10145175 to 10146110 reverse strand)
caagcgttcttctctctctcgactcaaactcgaaggtctctaattctctctctttacttctgtcttgaaaatttaatgtgcatactctttctttttcgctaaatttgttagggtgtatttgtttattaaaaagtgatttctgaaaaattattttttaaattttcatgtatttatttgtcattagaaaagttgatcaacggaaaacactttctagataaagaaaaatttggcttagtttccacgaaagtgttttccttttattttgggcggaaaacactttctgaaagttgtgaaaaatttaaaaatatcatattatttactgattatatcaaatttggtcctcaaacttttgattgctatatatattttgttttgaatatttgtttttcaatttcatcccttagaatttaatttttatattaactttggtcctcatttttataattattatttgcttttttcttattattttttaattgaaattttttatctattaaatttggtcttcattcttttgattgttacttattttatttgaaataatttataaaatggtaattattattattttaatttcttcatcttttaattttttaattttttagatttgatctctattattttgattattatttattttatttgagataatttataaaattatatatttttttcaatttcattctcattcaactttttaatttataagatttgttcctcattattttaataaacttgaaaaaaaaaacattaataagttattttccagcttattttccatgacataatgaaacattgaaaagtattttacaatatatttttcattacactaccaaacatcggaaaataattaacttttccggaattcactttaaaaaaaaaaaaaaaaatttccagtaaataaaccaatctaagaatcaacgcagtttccaagaa

SEQ ID NO: 61291 - DNA, 399 bp, Populus trichocarpa
  Intron number 1 from transcript POPTR_0005s00290.1 (locus POPTR_0005s00290) derived from phytozome v7.0 (chr-ID scaf fold_5; pos 51017 to 51415)
actgctgggttgcaggtttgcctccacagatagcttgcttaaatattaatggaattttaagccatgcaagcacgtatatgtatgttggattcagaataagtgagcaagctatcaggcagattgatttcttttgtttggtcaaattagacagagtaattggtgtgatttatttgacatcttttatatatatatatatatatatatatatatatatcgctttgtgttttacgtttgatttttacgggatgattattgtgggtgggcgtgtgtttaaagaattagatgtaaattgtaataaaaattgaaatattttccagctcactgacattaatgtttccaaatttcaaatttaagttttataattaaaaaaaaaaaaacatcttcttttccagcgaagct

SEQ ID NO: 61292 - DNA, 650 bp, Populus trichocarpa
  Intron number 1 from transcript POPTR_0019s07200.1 (locus POPTR_0019s07200) derived from phytozome v7.0 (chr-ID scaf fold_19; pos 8055596 to 8056245 reverse strand)
tcttccaaaaccaagtaagcagaaacaggatatgattttttttattattacagttattatctttacttcaatgaatgttacaaattttaaattttgattccagatatgggaatattgttttagattatgcgattaacaggtttgatctgctattcactaggggtttttttctcttttatctagtctttttttttcaaagtgcatatctttttcttttcttttttgttgtgtctctctgctttcgcactgcaacagtttccatgtttatcaagtttgaattttgaattcatatttaacatgggttttgcttcatttattcgttcttaatcctgatccatggtttattatttcttttctcgtgatctaattgctttcttgtttggatctgttcatgtatcatttctgccccaaaggttaaaatttaatttatgtatctctctatgtaatttctgtactgttgttatgttacaaaagagttcccaaatttgacacagatccatcctattgtgattcgggttgaattattttgcttacatatttcttgcattttgtgtttatatatataatggtttttctatgagatagtgtaatgttggtactttaaaacttgaacagatctggtttgtctgaaactcctcctagcaaaccat

SEQ ID NO: 61293 - DNA, 467 bp, Populus trichocarpa
  Intron number 1 from transcript POPTR_0013s06130.1 (locus POPTR_0013s06130) derived from phytozome v7.0 (chr-ID scaf fold_13; pos 4544495 to 4544961 reverse strand)
attcgaaagtcaattctcctcctcctcctccccctgtactctctttctctatctttctgatacagtcttgttgtgtatgttaaattgccaagttatccattggctttactcagtgttatgtttttttttttggcctgttattatttaagaaatagtgttgagcaattcactttataagcaaaaagaacaccattctcaatgaaattgaaagaaaaccattcatctcaattttaaatttgattttttattgcatttgatttaacaaaacctatatgggatttgttgaattatgaacctttttttttgtcaatgcatggataagatttggagcccatttacatttattaggagatgaactatgggttcattcattttatttattattaatagtgtttcttcttcttctcaataaaactcattaattaatatttgacaatttgctgtcaccaatagtttttggaggtcat

SEQ ID NO: 61294 - DNA, 625 bp, Populus trichocarpa
  Intron number 2 from transcript POPTR_0162s00250.1 (locus POPTR_0162s00250) derived from phytozome v7.0 (chr-ID scaf fold_162; pos 21588 to 22212)
cagtttgtttggctggtcgtgctaaacttcaggtctttcttttctttatcttgtaatcttttttcgggttcctttgtgttagtatcttgatttttgagtttaataaagaacccctttttgggtttcttgattttgtttattggaatcaagagatttttttgtcatggtgatgtgatgatgatttatgtttttctctaaataatcgacaaagacggtcttttattaattttttgctgttaatgaccttaaataaggtgatagcagattttgatggaacattaaccaaatattttgtgaatggtcgtcgagggcaaagtatgtaactgtcttaattatggttcttcagtttgtgtgagtgaaaaactgtaagaaagtttggttttttgagtttcgtgtgatggaaatgtgtaggcagtcacggaattttgaggcagggaaatgcagactatgataataaagacaggcattgtacgaatattatcaaatcttgcaggaggatctcttacttgtaataagagggtggggagagactagagagagtgatgcagagagataatttatgaaaaactgccccctcatttatggtggctactgcaaattttgatgtaaatttgtttcttgcagg

SEQ ID NO: 61295 - DNA, 572 bp, Populus trichocarpa
  Intron number 1 from transcript POPTR_0001s14760.1 (locus POPTR_0001s14760) derived from phytozome v7.0 (chr-ID scaf fold_1; pos 11625513 to 11626084)
ctcttcactgaccctccaaagaaaaagaaattcgggtattgctgcttttctttctttctcgtgcctttttatctatgtgaattgggtcaaggagtttgatagctattgcttattgggtttcttttaggtattttgtcgaacatgtgatcggcttgcgcttttcttatggggtgctaaacttgaaactttaagatgtaatttgtgtagttaatttagctcatagcatgacaagtagaacagtgagtggtcattttgataaggaccaagacattagtgttatgcactagaagacatcagaataagatcaatttctgggaactctgggtcctgggagacccatcagggagaattgcatttcaaaggacttttttttcgaaatgcattttgaagttttgattatgataatttgagtgaaatgcttgagattatttgtgtaatgtacgtatacactgatcaatgatatttctcgaacctgctgacatcttcattttagttttttcggtgatctgtacttacattcatgtcttttatgttcaggcttgatttccatctggtacaactcttcttcatct

SEQ ID NO: 61296 - DNA, 942 bp, Populus trichocarpa
  Intron number 1 from transcript POPTR_0016s10580.1 (locus POPTR_0016s10580) derived from phytozome v7.0 (chr-ID scaf fold_16; pos 8883733 to 8884674)
actccagtaacccagtccacgagatcaaacgcaaagtacagtaacgctgggaatttatgcccattgtttcttagatcctttggttctgtcaatctcatttagtcaggttgttagagtggtaagaaattaggtcatgcatcgatggtagaactttcttgattttgtaggtggatgaaagtaaatggttgactttggaatgttttctgttataattgaactgattttgatggttgtctcttgtcataatatatttctacacacatgcgtaattgaaggccacgcgaaggtgtcaacaatgtcttcctgatctgccaccacggcacggctcccagaagttgatgtttaggaactggcgggggttgggaaaaaattgttcaatttgattattttgttgtgctggttgaagtcatcaacatcgtagatacttcttttggtccattatctgagttgatggatgctttgacgttattgatttgtgaaaaatcttacatcatagctagggctcttcctaagttatacaggcataaataaaaatattagttgctttttcctacatcatttttgttgataactgcgataacgtcctagagaaacttcatttttatgtaattcagatgcatacttgtaagagaataagataaccctctgttcaaatgactaagtggcttcaagtttaattaatcatcatagccgtgtggttaaatgcctttcaaaatacatatggaaagagattggatatttgtaattagttttttctgtatttagacatgtgaatctgatcattttgatgcacaaatacgcataaaacctgaaatctcaatatttcttgaaagcaagtgattttctatctcagtgagaacttcaaatcttggcttcccatacatgacacttagttggatgtttgcagggaggagacttgagatattgccagaagtgttccca

SEQ ID NO: 61297 - DNA, 450 bp, Populus trichocarpa
  Intron number 2 from transcript POPTR_0013s11720.1 (locus POPTR_0013s11720) derived from phytozome v7.0 (chr-ID scaf fold_13; pos 12378763 to 12379212)
cacccaagcgtgaggagatttttgctgttgttgtgagtactgaatgacagtggaaattctaatttttgggccattaaagatgtgtttttgattgacgtgactgttttttgattgattttctgactacccagatggtttttagttatagtttttgtttcaagtgtgagtttatgattagctaagtgattttctggttttaagctataatcttgctgccatttctgcctcggcagactaatattttgctaatcaatgactctgattgttttcttttttccaatggtgaatgcaatgcggagtaatttagaggttttgagaagatttgttgttgttcttttatggtttccctgttagtgacttttgcataatttgtctgccttttgctctggggcttgtgtttcaattcttttttcaggtaggatctcgccagtacattgttatcccggggcg

SEQ ID NO: 61298 - DNA, 965 bp, Populus trichocarpa
  Intron number 1 from transcript POPTR_0010s17320.1 (locus POPTR_0010s17320) derived from phytozome v7.0 (chr-ID scaf fold_10; pos 15964473 to 15965437 reverse strand)
ctctccttggtggactttctggggtaattgctcaggtaaggacgaaaacctcacttctctgtcaagtttcctttctttcctttcctttccttttgtttttttttttaaaggagttcccttaaaagtttagatttttcagtaattgagatataaatgtgagtgtagtaattcataaagaagaagattaaaagatggggtgtacttgaatatgctgaattgattagaggggtgtatataatcattattgctcttagtgatttctttcagaccatgaaagaaagtgatcaaaagtataaaccaaaagctacaattttcaattagttttgagcgttagaattttttgcaattaattagcagatcaaacaaaaactgagagcttatggagctagcaaatggtatagttaatggatatccttgacaattagttatttatttattatagctaattgtaccaataggtttgatttttttacatttgtttggtattcacaacggtacttgtgctgctccaatgatttctagtattacaatccaaacagaagaatttccatccttgctgtcgagattaagacaatctctctcttatgtttggaaaaattggttttgctgttccacaggttccttggttggttatcagttgacaaaattagttgaggaaaggcaaccatattacctttcagtttgtctctgtagaaatataattgtttgtgtacagtttaacccttctcaaagattcaacatttccaagcattgactcagaattttaaatcattagcattgtggagagatgcatatagactaggattatctcaattaatctagcacccagctgtttaattccttaagttatactaatttaatgtgtaaacttctgcatactgttggacagtttcccgtcagtttttttttatttcaccattagttttacaggtggtggctagccctgctgatctggttaaggtgcg

SEQ ID NO: 61299 - DNA, 572 bp, Populus trichocarpa
  Intron number 1 from transcript POPTR_0015s01500.1 (locus POPTR_0015s01500) derived from phytozome v7.0 (chr-ID scaf fold_15; pos 929261 to 929832)
gtgccttattagctatatctaattgcctaggaaaagtaggtaaaactgtattagatgttacgtgctgattttttgatactatatgagctatttttttttttggaacttcttgttgttgcatggaaatatagattcttgttcatcttgtagttaaaataatcattgttgatagaaactttagtatggatgttgtttggctcctgctagtatcaatggccaatccatctgttgtcacagctgctgcttctaggccgagttaaatttttttttttttgatgaagtgttatctattgttcacctcaattgcatttgcgtacttctttaaatatctagttggtatgagagtgaaatttgagggaaaaactactttgtctgattacaagcaatgatttgagatttgatgaataaactgattcttggaactttaccatagagacttcagttgccttgtggattctccacaagttttgtcctgtcccttttttcatttctgcatcttagagtaatgtatatatccattgcagtaacaaatgtttcttctttctgtggcagtaagctatcgaacctgaaga

SEQ ID NO: 61300 - DNA, 919 bp, Populus trichocarpa
  Intron number 1 from transcript POPTR_0001s20410.1 (locus POPTR_0001s20410) derived from phytozome v7.0 (chr-ID scaf fold_1; pos 18376946 to 18377864 reverse strand)
ttgacaggtatttctcgatattctcaaaaaacacattattctgacgcttgatttttattttttatttttttggggtttatttttgaatttcatgaactgagtaatcgctgattttttttttggtttattttttctgatgattttttgggtagagagaaagaaagaatatcttatatagctatagctatagctatagtatttgtttttctggcaatttatgagaatcgtggaactctttgtaataagtgattaatttttgggttacgtttgtagttagtgattagtgtttgttgctagaaatctggcagtaggattaatgaaatggggagtttgtccaaaaaattgaggttacaacaagcagcttatagaaagtttggctctttaagcaaaatagaatgcaagaaaaggatcggcatagagaattccaaatagctttagatggagattcagtcgaattggttttgtgtagacgccatttgtgggtcccggttttgaatgttatcactcttagacaccgtttgctaacgcggtgcaaaccgctttccacgaaaattcaaaattttgtttttgcttaaatttaatttttttatatttttacatcgttttgatatattaatgttaaaaataattttttaaaaataaaaaatattattttgatacatttctagataaaaaatactttgaaaaacaactgctaccatactctcaaacacccgtatagttcttgcggcggatcttatacaatgacagtgtgtattctgttttcctttttgtctttttaattcatttttagaatgtctcaagctcagcagaaaaatcggagctgtcccttttcagttatcatttgtctaattgttttagaattttggtgcttcttcttcttttaacgattccaatgaattggcacagtgagtgtaaa

SEQ ID NO: 61301 - DNA, 575 bp, Populus trichocarpa
  Intron number 2 from transcript POPTR_0008s13780.1 (locus POPTR_0008s13780) derived from phytozome v7.0 (chr-ID scaf fold_8; pos 9088452 to 9089026)
cagattacactgctggagttgtggttgctttttatgtgagtagcaatactgattaagaactagtgtgtgtttcaaataaataaataaacggaggtttaatattttgatcatttgattggttatttctcagacccagattgattccttttctttcttttcaccgggagtgtacttcctagttttgtgccttggttgtgtcacagaaactctgattggtgtttctttgatttacagtttttgggcctcatgctaagtgttttctctgtcatgctaagctttaaaatctgatcaaaactcaaacaacctcattttcaggggtttgttgtcaactgattttaaggttcatgtctaagctttattttaggaaggctgaaaaattacaattactcatgattgccattttttccacaaaatgttaccgtttctttagtatctagcaaggaaagtaagctgatctcattagcatgctaattttcaataaatttcaaaaatttgatcaaatattgtaatccttaatccatcgaagaaaacttaggaaaaaaatatcttaaaatgttcgctacttatcttgacag

SEQ ID NO: 61302 - DNA, 569 bp, Populus trichocarpa
  Intron number 1 from transcript POPTR_0006s25840.1 (locus POPTR_0006s25840) derived from phytozome v7.0 (chr-ID scaf fold_6; pos 24194330 to 24194898 reverse strand)
atctctcttcttttctgtctttgaagctgtgtttggtaagtgcttgaaccccccccccccccaccctttcctttttagtttgaatttgaaggggttttttattttgatatttaaataggatgaaatatattttttttcttaaaactttttccattttaattcgattctattgagtttgaatggcaaaaaagattgaaacttcgtcactatgttcatgttttagggtttttgttttttaatttgaagaaattaagtctactgattgtagaactcattttcagttttattcttggaggaacttgaatgatttaaaaatttgaatttttttcagttaattaatttcacaaactgtagaattaaagtttcaatctcttctttttcgtgaagaattttaaatttgaaactctagtggagttcagttcaatccaactgcactcaaatagaaagccctaatttgtgatttaactaagtgaagattgctatttagaggttattctgatccgggtttctttttcttctcgtgtcttgtggtagcttgtgattttgagggaaattggaacgggctggta

SEQ ID NO: 61303 - DNA, 438 bp, Populus trichocarpa
  Intron number 1 from transcript POPTR_0016s00300.2 (locus POPTR_0016s00300) derived from phytozome v7.0 (chr-ID scaf fold_16; pos 39950 to 40387)
acgacccaaccacaacccttacagcaagcaacgaggtcaaaaaacttcctcctcctcctcctcttcttctttggctttcattagtctacatttttgtcattaaagacgacaacttgctctctctctctctctctctctctctctgaggtcttaaggaaaccattttcataaagatttcattttgtttcaacttttactcggtcaagtttctttttttagaataattcacaaatggctgtttgttgtttgaggtctttaatgttctaagatctgattattttttttcattctcctttgcaagcatgatagattggcttagctagttgaggaattgagattctaattttccttcctcttgagatcccctgataaatttttcctttccttttccttttgctttcaggcagtcacagacgtggtcacattctcttactctaa

SEQ ID NO: 61304 - DNA, 634 bp, Populus trichocarpa
  Intron number 2 from transcript POPTR_0002s22580.1 (locus POPTR_0002s22580) derived from phytozome v7.0 (chr-ID scaf fold_2; pos 19352149 to 19352782)
ccatttgcgggtaagtgagataatagcccgtttctgtctcatggaaattcaactcattaaatttctaacttattttataaaatatgtcattgagtaaatctgaatagaactgagtagtaatgctaggaactcaatttgatggttatctcatgttgagaagcggaattagagaaatagcggccctgttattggtgacttcagatgctccatctctatcttgcatgcattcctagtttacttggcagtgatgttgcatccatcgcttgaatgaagatacctgaatggcctgactttcgcaattgaagattgatattcaaagacttattcttggaaaattttgacccagtataaagctttaacttctcttctactcatctgacctatttgccaaaagcccctacaaaacatttgaaatcaggaaaaaaaaaaggaaaggaaaaatctgaaactaacaagaagctgatcgtttttccttgttatcacttgcctcatttggtcacctgtatgtttgtgagtccgaaattatctctctacctaggttatcatcacttgttctcgtggagatatcttctttgttggaaaagaacatccttaacgctccttactgttctattcagaactttgactacaggtc

SEQ ID NO: 61305 - DNA, 529 bp, Populus trichocarpa
  Intron number 1 from transcript POPTR_0006s23680.1 (locus POPTR_0006s23680) derived from phytozome v7.0 (chr-ID scaf fold_6; pos 22399415 to 22399943 reverse strand)
ctctttggttgttgattctgtgcattctggtgagccttgttcttgttggttattggggatatatagaaagcagcgtagaaagtagttgaatctgcattgctatttcaattgttttttgaaactaaagtacacagctttgttattattttaagcttttactctatttgtgtaattgtttataccagccagagagcctttttttaatgatacagatggtcttgtggacaatatgccacttcttttttatatcttgtccttttaaaaattcattcagttcgtggcattttcccccccaaaatcaagactttgatagtgagtttgtttaggttttattgtcgaaggttgagtttttaatgttaaagtgtggttccttttcttccaaaaaaccagggtttagcattttcagggctcaatcgtttttgtagtatgtgatgtatatttcttgctcttcagtgagattgacacttttgattctatttgttgaattattgaaggagctacgttattggagataaagaaatcattcagg

SEQ ID NO: 61306 - DNA, 744 bp, Populus trichocarpa
  Intron number 2 from transcript POPTR_0017s05790.1 (locus POPTR_0017s05790) derived from phytozome v7.0 (chr-ID scaf fold_17; pos 4521643 to 4522386)
accctgctcctggatataacattgagcaggtatattgatattagtgagttctttgagatttctgtttgagggtttgttacttccattttgtttttggtttcattaaagttttgcttggcttcatttgttttattcctattctgattaatccttgtgtgcattgaactgatacaaaaataaccctgattacaagttttatgtttcgttgaagtcctttttttttctggtcaagtcataattcttgttcttgtactttcatcaacaatttaaataaacatacaagtttgaagccttggttgtgaatgcataaataataggaaaactggtggctcatctatgttgtagttatgtttcttgaattcaagcttgatagtcatattgcactctttgtagctttcatgttcacataatatgaagcaattaaaacattatcaagaggatattggaattcatctttcgtggctttagttttcgaacaattaaacctgtcattttatttttatttatcggcttattattcttccttcttcccctgttttagtggaattcatatctcaagtttagtagctctctaccaggttttataaaatgccttttgataccagtggacctaaagttcagaatactaatgagctaattttcatgctcagtacttgaattactttgtgaagtgcttcaatagttacttacataatgttgttgcaaccagcttgctaagaaaggagagcaatttatagatcttcc

SEQ ID NO: 61307 - DNA, 764 bp, Populus trichocarpa
  Intron number 1 from transcript POPTR_0019s01530.1 (locus POPTR_0019s01530) derived from phytozome v7.0 (chr-ID scaf fold_19; pos 1347275 to 1348038)
aattggtaagtcgaattaatagcggaattgaaaatgctttcccaaattattcaagggagtgtattaggcttttcgacactaaagatgtaatggaattgaggcaatagtgagcttggaagaaaataaaatgcttctttttcaacaagatcctgatattctagcattcagtactcctaaaaattaagctgtatcatcatcaactacccctctcccttttgtgctccaagctggttatgtaatttaggctttattttcttgttatgtttggtgtgtgcaatcaaataaagaaatccagccggtttctgactgtgagatcgccaaattatgcgtgtggtttgagtgaaattgctgcacgtgaccacttagtttgtaaaaaaaaaaaaaaaaagtgtttttattgatttacagtttaattcataacctctgttgtaatggaaaggctataaatgctttctgctttgtctaaggtagagtttactagggtaaagaattgcaagacggcataagagatatggaagttgcttaaggttactcatgaaacattgagccaagttaggtctctagattaatatgcctcacttgagagtatggactttttaagatagaaccgggcaaagacataagaaaaatgcacactgggttcattagtattcttagtgagcttgcggctttaggtaaaacgttatcaataaagaaatggttggcaaaatctcgaggtcattacctcaggtttgggagataaaggtcacggcaatagagaattc

SEQ ID NO: 61308 - DNA, 861 bp, Populus trichocarpa
  Intron number 2 from transcript POPTR_0015s11780.1 (locus POPTR_0015s11780) derived from phytozome v7.0 (chr-ID scaf fold_15; pos 12318375 to 12319235 reverse strand)
ccaagtgcccagttactggcaagaggattcaaggggtattgtttttctatcatcttttttttttctttttatgcatctaactgggattttatttcgtagattgaatatgctgttattactacattggattgctaagtttatttgatcttgtatggagatttgtgtaccctggattattttgtccttctactaaggattttgtatgaaatgatacacagttggtgtagatgcatcagttttttagtttttttttctaaggagttggaaatataatacttcggatcattttgaattactttcagttctagccataggtctgttaatgcctgtatcgggagaggagtggtttgctgggagtttaggatttagatatgactttttttgtcgtgtgggctggtttcccccagaaatttggggttgcagattactgcggtccctatcttgcaagtgttaaaaattaaaggggtgagttttaactatactttgtggcgagcagtttccaagtcttcccttgaagccagccctgcttaaatgcacttcattgccattttccattccttgagaatttaagttacttagtctagttgtctaataagatgaattactgtaatcttgataatgatttttgctagtatataaatttgtttttgcttatttgatacaaggtttccatttatatgtgattggttgatggtttcctccatattgtgaaagatttatttctgagctatgaatgactgttggctgcagtgtttttaacttttcttttctttacaaagctcgatctggtggtgctggttttgatggaatctttacttcttttcagatccctcacttgagacctgccgaatacaagaggtc

SEQ ID NO: 61309 - DNA, 853 bp, Populus trichocarpa
  Intron number 2 from transcript POPTR_0007s13530.2 (locus POPTR_0007s13530) derived from phytozome v7.0 (chr-ID scaf fold_7; pos 13584684 to 13585536 reverse strand)
agaagcgcatcaggcaacgcaaggagtttatactggttcgtgttcattaatcctatagaaagttctttgcatgtgttcagagtaaattatttctgtcaattattttgctggtcttttctttgagtatcgtagggtagttgctgtttagactttaaaattgtgtttttttaaaggcagaataaaaaagaaatcaagcatggttgatgaaaaatatcatgtactacttgtgtcagttaatggacagagtatatcataaagaaagctagtgagggaatatatggtgaaagggaaattctagaattgattgctttgtgatctagtattccatggcattgtttgattttgcgaaaccaatcagagcttgaatggaattttatatccacagaattaacgagtttgtgcacattaatttgatgaagatgctaggatttatgcgttatagaaaaatgcagttaattttgtttgggaggagaaaacaatcatgtagccccccaccaacaccctcaacccccttttgagctaaattacattaacttgtaactgtctagggggatacctaaacctattgaggtaatgctgtagggagttcattttggaattgctttctagatgacagtctcatcaatgggcaattccttctagaggtgtcaaaaggattgatagattctgtttgtcaccaacccctgaaggcttggaaattaatttctgatagggtatttgcaccaatcagtttgtttttttatactccatcctcactttctcgtgagcttttacttgtttttgaccattttatgtttgactttgtgcattctgtgaaggcttcatttaaactttctcaagaattgtgggtggc

SEQ ID NO: 61310 - DNA, 375 bp, Populus trichocarpa
  Intron number 1 from transcript POPTR_0010s21000.1 (locus POPTR_0010s21000) derived from phytozome v7.0 (chr-ID scaf fold_10; pos 18439394 to 18439768)
ggtactgtcatcttgaaccgttcatgctaagtagttagcttcttgaatttttgatatgttcatgagttgtttctacattttgtataacccctcccatgttttcttcttgcatttcccatgacagaaccataaacacaaagcaagcccatacctttccctgctttttaacagcaccgaactctgttttaaccaaaatcagatttcaaaggcatttaaacgcaattagcacacgccaataccacgcattgcaaataaatattaaaattccatttgaagtattcaaaaaccaaaagtctaaatcccacataaggaaattaattgatcttatttttttttttaggcggtgcttgtgggtacggcaacttgtacagccaa

SEQ ID NO: 61311 - DNA, 796 bp, Populus trichocarpa
  Intron number 3 from transcript POPTR_0009s02590.1 (locus POPTR_0009s02590) derived from phytozome v7.0 (chr-ID scaf fold_9; pos 3367628 to 3368423)
ggagaattcacaccgttcatcgtcataccggcgtactgctttttcattttttatgtttgtgtaaaaagttgcagaaatttaagaaaaaaagatggggttttttctcattacagtgtttgcagctaattagagctcaatatgttgttttttattgttttggatgaagatttatattgaaaattaatgcaaatttgtggtcgtggataatatacatgacatcagtgtttttttttttttttttttctaatgggatttaatgctgatttatgtagctaaaatgtcagtttatatttgcatacctgataaaattgggtcttgtttagggtcagtaggcttcattctgatgctgtaatgggtcatccttgaaattaacgaagaaacaagttttaatttgaatggattgaagatgggtttttatgagacatggtcaaagcaaatgattattgtttggcagaaggtttacttagtctatgagttaagagtttggtaggtgtgatgctgggattttggcttctccaataaaactctatcgcagaggctaggtcaaacttaagtggaagaacatatagcatgtattcatgcattccttaacaagaagagagtgggagtagttcctttctagttatttcaagggaagatgtgctgtaggaggtatacggaaaggtttactgttctggtcttaaaatcaaacactttgatgaagaatattgtattgtttgtgcaactgtatgcaagcaaacattaactctctgtctctcatatttcaaatatcaggctgttgctggtttagcggctg

SEQ ID NO: 61312 - DNA, 754 bp, Populus trichocarpa
  Intron number 1 from transcript POPTR_0010s24440.1 (locus POPTR_0010s24440) derived from phytozome v7.0 (chr-ID scaf fold_10; pos 20652493 to 20653246 reverse strand)
gaaaggtagtcttttttctcatttttctgtttcaatttggttgctgaggaagttcttgaaatgggatttcagtgggtttaatgattcatttagatagtgaatttttgtgggttctctttgttttgtatgtttaatggttatttgggacctggaaagaagggaatttactggattaagctttacagtcagattttgttctcttaaactctttccttttcggaattggacgtcaacatagcagagaatttctttatttgaaaccgtactgtttaaacagattttggcattgcatgtcagcttacgtagttcataaagtcatgtggtagcgttgttgtagtgatgtacttgtgcatgtatttatatcaaggatgatgagcataagggaggaagagggctaacttgttgtgttgagaatcctgtgtggtttatcatcagggaaaactttgatgttttttcattgcatcctatttggttgttgagaaaatgcgaggaaaggaaaaaattgattgagaccagatacaagatttgatattgaaaagatggacatggatctagattggataaaatttaattgcatttcaattttcctgtaaatgagacaatttgctagttatggttctttgttgctaagcaatatgtaaatggttgctgggttcgtgttgaaattctctacctcactgctgactcatggcacatttggtttttgctggttagcgtaggagatttccctttctggaggcaggtaccaaaattg

SEQ ID NO: 61313 - DNA, 525 bp, Populus trichocarpa
  Intron number 1 from transcript POPTR_0001s30490.1 (locus POPTR_0001s30490) derived from phytozome v7.0 (chr-ID scaf fold_1; pos 28979089 to 28979613)
atcccatcctttaatatctcaaccctggaacaaatgtaagttgctcactttgcttttcaatttgatcactttttactttttagattttggattctatgataacataaaaattccttgaaccccatttggttgtataaaggagttttcctggtaaagatgaactgagggagattataaacgaggaccctgtttttagctgaaatggagaaattgattttaacccattaaacgttcttatgcccttttgtttcttcttttaattctgtgaattttagagcgaaagttgagaattggtgatcaaagaaccttggtaacattttcatgtggtgttatttcgaaatttggagaaaggttgcattgaaagaggaaaaggacggagagagcatagtcattgatatcaccttatggcttgttgaagtagttgttattttcctgtctatagctaatgaaaacacttgatttactttgattttttattttttcactttgattctggttgtaggtacattgattcttgcaagaggc

SEQ ID NO: 61314 - DNA, 578 bp, Populus trichocarpa
  Intron number 1 from transcript POPTR_0074s00220.1 (locus POPTR_0074s00220) derived from phytozome v7.0 (chr-ID scaf fold_74; pos 26121 to 26698)
atttatctctgcagtgtgagagagggcaaaaggccaaggcaagactaacatggaaagaaagcttgggggtagattagccagactataaaggagaaggacttatttgtacttgttccaagattttgagtcaaaataataccgcttcttttccttcaaacgcaatctcgtcctacgttccaggtagttccccattctttttacctaatctcttaatatatatgaacggcatctttgcttaagccccttcaattattgctttcgaatattctcatggtatttgctctttgtttttgaggatccaattagtaagcaaatcatggagacttggctgttgacctcaacactctcgtctgcattgaccgcagcattgacctcttcaatatcttggttgtgaaccagaattggaatattgggtgttcttgtttttgatacatgtaaagaggtaggctaagcatctctttcaagatctctctagctgctgcagcgatgccaaatcgctttctttcttcaagttccttagcaggagtattgtataccaaccaactttctttgcgttttgctacaggtttggggcaatt

SEQ ID NO: 61315 - DNA, 685 bp, Populus trichocarpa
  Intron number 4 from transcript POPTR_0001s00830.1 (locus POPTR_0001s00830) derived from phytozome v7.0 (chr-ID scaf fold_1; pos 688895 to 689579 reverse strand)
ttctgatccatacgcacaagctatcttgatcagtaagatgctataattgcctcgatcattaatgttgttgcaacatgattttctctttttgaactgttttctcatatcattctttattgccagcagcaagctcaacaaagttttaaacctcctgaacatgtttttcctaaacattagttagcttgtcaattgagactttcattttagtacctttggaagtagaaatgggtcataggaaagctagggaatactcaaaagttgcataatttacagcaagtttgagaaagcagtggctttgttgaatgaaattttaggagaggaatataagagtaaaaaaaaaaacatgtgaatcaattgtccaaatgcactgccctgtactttgctaatgtattgataaaccactagttttcattagtttcaccattcatgatccattatcagatcttcatgatactttgctgtagcaagtatatatcatgtctctcctcttcccacccaagggactctttcacatgcttctccatgcgctttgtgcattacatagcatcaattactagcttactagtccctttatagtaaacttgtttcttttattgcaattgaatgtactttatctcatcagcattatccttttccaaattacataaaaaatgattgttagctcactttatgtcacaggctgtgc

SEQ ID NO: 61316 - DNA, 679 bp, Populus trichocarpa
  Intron number 1 from transcript POPTR_0001s06470.1 (locus POPTR_0001s06470) derived from phytozome v7.0 (chr-ID scaf fold_1; pos 4987807 to 4988485)
aatctgttgaaggtaaagggagaaaaaaagcaaacttttagacaccctttatcttggaaattttggtagtatccgtagacagtgctctttttgttgcctttaatgttataattgattgataagttgaatatttttttgatgagattgattctatgatttaatcgagtggggtttaatttgaactgggttttgatattttggcttggttttcaatttgatttcccaaaattttggtaagactgattctggttcttgcatagacaatacttggtcttctcaggagttttttccatttttttacttcctggttttgattgatttcaagtttaatgaaatgattctcaaggtaaattgtaatgttgattttgagtttttttctatcttgtttctgtcttgtttatatatgattgtattctattctttgtgtttttaatttatttttcaagtttcggattttgtttagcatttattttgttgcttgaatggatcataaactgataattttggaattcttgtttcctctttcatgtattttgtttgagtttcattgattgtagaatggcttttatctgattttgctcaagtgcttttatctggtttaattctctcagttttatggaaatctggcatcatcttgtttgtaggatctcttagatactggtatcaacgcaacaaagtg

SEQ ID NO: 61317 - DNA, 872 bp, Populus trichocarpa
  Intron number 1 from transcript POPTR_0007s01710.1 (locus POPTR_0007s01710) derived from phytozome v7.0 (chr-ID scaf fold_7; pos 993100 to 993971)
ttcgcgatccctctcaaatcattaaaggtaacaaaaaattcggagatttcgagcgtttccttttggctgtatatgtgtgtgtgtttgtattatggttggttggtgagcaagtgtgagaaaggaaggggaaaagagagaaaaatggaatttttttttggattgctgtggtgatttctggcagtaccgtggtcaaaggaggctgtaaattatttgtttaactgtttaactcattgaaattttttaaagttactatcttttatacaattacttcttgaaatttaaaatattaaggaatatcatgtgcttttggctggtaaaaaggtaattgaaaagaaaaataaaaggaaagaaatggagagaaaattaccgtgatgaaataaatctgtgcaagtctatggctgttttaagttagagttcaatttgttttatagtttttgtaattgaagagagttactgaggtttagtttactgtagttttggggttttgaaacgagtgatggaaggtcatttgtgggattctgaagtgagtttcttttgtttggtttctaagaaaattgaacgaaagaaaagaaagttaagttttgaattatttattcaatatagtgtgagtgttagccctgtaaagttcatattatttcatgaaaatcttgagtgattttagcttcttaacaaatggttagatgctcatggtggtgggactctttgtttggttgctgagaaaatgggagaaatggatatctgaataatgtgaaaattcgtggctggaaatttgaatttggttaattttttctggatgatatgtaaatgaagagagcgaaatgtctgtgatctgtctttttgcagctgttgaaggatcatctgttgtattttac

SEQ ID NO: 61318 - DNA, 460 bp, Populus trichocarpa
  Intron number 3 from transcript POPTR_0007s10040.1 (locus POPTR_0007s10040) derived from phytozome v7.0 (chr-ID scaf fold_7; pos 9725806 to 9726265 reverse strand)
attgctctctcaggtatgacaatcatcatcgtaattgtcctaaattcacgtgctccaatcacagacattttatcttggtgggtcctgaaattggatctctcttggcaacatttatttatttatttttgtcaatggagctcctatcattaatcaaacccacaagcaaccatttaatttatactcctatttgtttttcatcaatgaaatgatgcatattataggtcttttttttttaatttaaagataggagtatctttagatgaatttataatttcattgagcttgatttttctttgcataattttgataatgtacctccaataatatattaaaaaatttaattatatgcaacttaaaaaatgtgcactatattgtttcaagatggatcaattgatgatttttttactctttttttttcccatcagcggcacacacgcttggattctctcattgtagcaaa

SEQ ID NO: 61319 - DNA, 517 bp, Populus trichocarpa
  Intron number 2 from transcript POPTR_1155s00200.1 (locus POPTR_1155s00200) derived from phytozome v7.0 (chr-ID scaf fold_1155; pos 495 to 1011)
cacttctatctctagcccgtgcctattctcttcttgtaagtgttcaattcccatgggactttgtgcaacaaaataaagataatctgactggttcagtttggtttttgagttaaagaatcaaggaaaatccacctggtcacaggaattcttacataactgttgggacctttgttttctccctcaacaaagtttacatgagagctgaaaagataaaagataaagttattacctcctataatgcaagtgatgaattatgtgattttttttttttttgtcaaaaatataaaattatgaagtcttgcttggagtcattaggaactttttggaaaccctcgtccttgatggagcaagggtgtgaagtgtgaaccccagggcctggttgactgcagtattatgtacttgcaatttgagtcatctacccccgcgttttctttgcctttgctatgtcttagtagttatttaggagctgattcactcatggttaatctaactccattaatcgtctgtctttgaaagg

SEQ ID NO: 61320 - DNA, 796 bp, Populus trichocarpa
  Intron number 1 from transcript POPTR_0011s17240.1 (locus POPTR_0011s17240) derived from phytozome v7.0 (chr-ID scaf fold_11; pos 18840588 to 18841383 reverse strand)
tctgtcacacgtcggtaatgctatctgtcaacaagtgacagccgacattactttctctctgcacatcgtacccctcccctcgcgcacaccctcttctgtcttcttccttaactgatcctgtgatttccttagacttaatttgtactctacaagcaaccatcacatcaccttcctctacttcataaccactccaggtaagtaaatttctcccccctcttcttctcttttttatttttctgggaaaaaggtttggaatttagtcccacttgattactacctctctgacggtgatttctaccatctctttcttttctgaagttattcttaattactactttattttcttttattttcagattttcaagcaacaagtcaaagtttggaaatttggtgaaatatgaaaccccagaaggagatttaattaacagcagatctctgaatgcgctgagaaaagatgcttctttgattgcaaggaagattcagagaaactaacagacagaagaagggagtgattaagctttcattttctcaagattgattcaactgcaattataatgcagagagagctttagagggctaagtgagaagcttgcatgttgaaccaaatctgaactctcagattaaccccaaaaggcaaaaaataaaaataaaatgaagaaacactggaggatatcatcacaaaggcaaccacccaaagccatgattagaatatttggttatgtatcgctgttgctgctgttatttatgccatcatcatcacaagccagagagttgtcttcacagcaaagtagcaata

SEQ ID NO: 61321 - DNA, 838 bp, Populus trichocarpa
  Intron number 3 from transcript POPTR_0019s05660.1 (locus POPTR_0019s05660) derived from phytozome v7.0 (chr-ID scaf fold_19; pos 6021942 to 6022779 reverse strand)
aggtgctaaccttctcttacaagtacaaaaatgcttaatttagcagatgctgaatcagttgtctttaactatcacctttcaatctaagatttttaacttcattcctttatagtgtgtattttgtttgcgtgagtttaatttgctcgcaagtcttagcataagtcagaaattctgcaagtctttgctttcatgttaatggatattacataatttgtctgataattggaaactacacgatgtaaatagctgctaaaatttttacataatgctgatgtcctgttttctacaatatcgtaaagaaaatgaaaatttgaatggtgatactgcatcattaatcaaaaacctcacactcttgtcagccaagaatttataattgatttatgaacacaagtgcaaggtacatgaacatgagtataaattcagattatgtagaccgtaacagttgtacgatataccatatatatgtctagttcataatatggtaaatatcttataccacaggtgccatttatgatgttatgtgtgcctacaatgtcaaactctttctctctgcctcatatcacatgaacctattaactaggattgtgaggcttgagctacactatatttttcttaaatattatttctctagccatttttacttggataacttgatgaagagcaaagataaaagaatttatgtagcttttgttactttccagaaacatattgcagtatttctcttacaaactctactctctctctacctttggaaaatgtttttgtcacatatcctttggaaaatgttctttggttgcttctaggttcttatttgtagattgatagacaggcctttgcg

SEQ ID NO: 61322 - DNA, 643 bp, Populus trichocarpa
  Intron number 3 from transcript POPTR_0018s11300.1 (locus POPTR_0018s11300) derived from phytozome v7.0 (chr-ID scaf fold_18; pos 12106705 to 12107347 reverse strand)
gctgaagataccgagcttaatttggtatatcattcattttattttatttttatttttttaaaattattgtgaatttacgaactttatttgtataaagatgtggtttctttactgatgactacattgcatgatatagtgtgaggaaaaaggttccatttcataactatcaattggtttagactgcattgtttcctcagttcatcatcgaaaagcattagcatccatgtataaatatattttcttgtggctggacttcggtgtatcaaatttacgtggatgatgaaaataaagattaacaatgttcaaattttattttttgtatatatccttattatgatcatcaatagtgaatttgaatgtgaaacacttaccatcttcttggttaaataccagaagggaattgtttgttttgttgtgatagtaacagagtaagtgttctactttatggtcctcaataagtatattcttttgtttaaaaagcattgatttcccccacagagccagcattcctttttggttggtgaattggatgcggcacgtatgctgttggtgttgcaactacatcctttgtctaacgcacatcaaacttctcgtcctgagcttctgatttgtttctgttttttgcaggtgatagtgtctccgg

SEQ ID NO: 61323 - DNA, 735 bp, Populus trichocarpa
  Intron number 1 from transcript POPTR_0012s13680.1 (locus POPTR_0012s13680) derived from phytozome v7.0 (chr-ID scaf fold_12; pos 13730264 to 13730998 reverse strand)
tctgcgtttcgctttatccagattgctgtttcaaggtcagtagaaaagtaatcttttgattttattatgtatttattttcctggaaaacaaattattatttgaagtatatttcttttttgattttttttgtttttttgatcttctgagctaaaaaaagcaaccttttttttgtgtctgttctattttttgatcttttgatttttaagcgacaattaagagcttgattttgattaaagtgaggatctttttgagttcttgattttgaatgtgagtaattaagtcgtggttaagcttgattagttgttaataacatataattagtgattataggggttttacgtgataaatttaagagtctttttgggttttagttaggtagtgtggttgttgtagctaaagcttagctaaaaaagttagggttttcttggggataatttaggaaattaggttttctgagttgtggttgaaggggggtttaataaaagatgattaaatttgggtttttttggggcttaggtagtgttgtaattgttactaaatttagccaaggattaggttttttgtgaggtaattagggttttttcagggataagctggttcttgaaattgtggtaattgaaattagtcttcattgttgttttctttttggtgttcttcctttttgctagtgctgatgtagagttatattgtttgttttagatccctacaagaaattgttgaaagctgaaacagat

SEQ ID NO: 61324 - DNA, 1032 bp, Populus trichocarpa
  Intron number 2 from transcript POPTR_0013s01680.1 (locus POPTR_0013s01680) derived from phytozome v7.0 (chr-ID scaf fold_13; pos 951582 to 952613 reverse strand)
attactgttacttctgatagtaacttctccaaaaggtaaaacccttttcttgctttgctgtatgtgttgtcatttttgggtttcttgggttgcttgagatgatataagtttgctagtgctgctttttgctagtgtttcttggtctcttgactttcttaaaacgttacgaatggaatcgtttggtatagttgtttttggtgaatggtgaatggtttctttgttgtctagatgatagtaatctgttggaggttaatcatatagacaattggaaatggcgggaatctgttttatagaagaagtcttgggtgatcaagaagcgaaacttttcggaggagactagtgttggttttagtttgtttatatggttttgtagcatttagagatcatgatgattaggttttcgtcttgctacactcaatttttgcatggaagtttataattcttgttttgcactgggaagcctgcttgtatttctcttggttgagtggcagatcatcaatattatgcgacctggcctggtttagtggagtggaaaaccagacaaccaaaaactctgaaacctagcttatcctgtttttttcagcttacttttccacttttaacatgtaaatattacattactgagaggattgtttttggaatatcgatgaatgcttagggctagaacacgacctcttgggtacttatttcacaattcgcatggtgtagaaatctacggtggttatatatatggtcttatttccctagttgcctcacctatttcttcctgttttgttcttgtcatttgccatttgattttgcatgaatcctgtctttttccctagaacatggactgttcggtttctatttcttgttcatttgctttgattgtagaaattgccataacaccattcaattcctatcctaactttttacccaagtcattgtagcctctgtccgcaacgctattttgttttgtgccccatctcaatgatttcccattttgatctgggtacaggtatctcaagtacttgacaaagaagtatttgaaga

SEQ ID NO: 61325 - DNA, 523 bp, Populus trichocarpa
  Intron number 1 from transcript POPTR_0010s16990.1 (locus POPTR_0010s16990) derived from phytozome v7.0 (chr-ID scaf fold_10; pos 15760807 to 15761329 reverse strand)
aagatccctgttaaagcatacttcctttgtaccaggtctgccacttcatttttttttttttgcttttcttttccttaatgggtttcgtttgttctgtgttttttgaaatgtgtatttttgctgtagagttttatgcgtatttaattaattattttttgggtggttttctattgactcaaattggtgggttattgtgtttacatgcaaaatttgagcaacttcttttgaaggattttcttttctcctgctgagtgacctttttgacgctagtaaaatgttgtcgagatagagacagtgtctgttgtattggctgtttgctcattaaaaggtgacgattttaattatttacgtttacttttgctggcatttattcttttaatgcaagagtctttcttcggttcgttacgtgctgtcttctccatgctctgtgttttcctttttctacctttgtggttctgtttttttccccttgatggtttggttttatcagattcatggttttggcagtattaatttgaagagc

SEQ ID NO: 61326 - DNA, 870 bp, Populus trichocarpa
  Intron number 1 from transcript POPTR_0013s06080.1 (locus POPTR_0013s06080) derived from phytozome v7.0 (chr-ID scaf fold_13; pos 4492266 to 4493135 reverse strand)
ctggtaatttcttctcccattaacaaaatatgattacttttgaacataaggaatcacgtttgccctaaaatatggatgttcttggcactcatattatgttactatgatgtttttctttttgttggactattggtgttagtctgttaggtaactgtttaaagaacaaacccctgcaatttacaaaatgcaagtgttagaaacatagggactatgtaagaagcgctgctcttgttgagagtgcaatataggctagattattaacgagaacacatttgagagaatagctgaaagagaaaaaacattattggtcatatttgtagattatgaactagcttgataatggaaatttaaataatcaaagacctatttgatgtttgtgtgttttatcatttggatatactttgacaaaatagaaactgcaaacatgttcacttgtcgtatgattgtgttgttcatctcataaaataatgatacatctatcccccttaaagctgccaatatctgtgtttgtgcaatttattgctcttgtatcttttaactggacaatatctatatcaaaatagcaaatgaaacacttcatttaaataactgaggtatcttctaatatccatcccattgaaatagctatcgtttttaaaaaatccttctcatattccttggttgtttttcattttgctgcacatacttttccatttactggtttttgtgtatgtttttggtaataactgattgcgtgagattctctctgctgtgctatggggtttaaatgtaatgtattaactgcatcgttcagacttaattgtgattttgatgaacttcctctgaatttgaacaggtgaacttttaacgactgaagaagcaagaaggcgg

SEQ ID NO: 61327 - DNA, 891 bp, Populus trichocarpa
  Intron number 4 from transcript POPTR_0001s33780.1 (locus POPTR_0001s33780) derived from phytozome v7.0 (chr-ID scaf fold_1; pos 31928760 to 31929650 reverse strand)
aactttatcgcaagtctttggaagtgtcttctaaggtacacctctttctttatcactcaatctaatgtgataatagaaaaatgggaaaagagaattagttagtatcaatatctggtcattggattttaccctgatgttagatgtaatttctgtataatatcatattagatatattctgggatctatttactaagctttttgctgggaaacaatacctttgagctggataccatcactacctgattagcagtgtggtgtcttgataaaagggataggtatctgcatagcacttgaactgaacttgtaaatcttctctctcgtgctgttttgaaagtgggttgtggagttcattttcccaggctgtggcatatttataccaaacctcattttactcacattgttaaaatggtataaaatgttaagagtaagtagtttgtgatgagtttttgggttgttttaaaacttgataattccattttgtcatttaaagtttgaacaaagcatacagttctgttttcttttaagttcttgtattctgaaactaagtaaaccattatgacccatcattattatgctgtgaaaaaaaactagaagcccctaagcaattgccgagtaagcattcaaccatgctgagatgtgtgctatatgcaccttgatctgcttgagttctattaaggtctgctgttgccagtaaatgatgagccttgatttcatgagaaatgtgaattttgactaatgagttattggtccattgaggagtgatatcttctgtagtttttctttgactgggttctattgttttttgtaatatattttgtatactttgattggtctaacatttgaatcttttgcattcataggctccagagttgcactcacagattcacaagc

SEQ ID NO: 61328 - DNA, 500 bp, Populus trichocarpa
  Intron number 1 from transcript POPTR_0017s00510.1 (locus POPTR_0017s00510) derived from phytozome v7.0 (chr-ID scaf fold_17; pos 190702 to 191201)
agaagagagaagatctgctctcttcgcttcccctggtaagccacaacacacacacacacacactcttgcctctcatattcctctccttcctcccttttctttatccattaaaacaaagcaatcttttcttcttcgcttgctgacaccacaccagatgagatctattcactaaaacattctctgtttggtaactggtttcctaagaattgaatcaaatgaattcactctttaaactgtccttccttgccttacgaacatcttttgtggactgagaaagaattcacagtgtctgttcctgctgtttgatttctaggtttttattttttccaactacgactcagttgattctgccttccaccctttgagaatctttacgcccatttccttttattatcatcaattcttttttatctctctctttttttttcaagtcttttcaatggatatctttggttgctgactcactgtaatatcccttatgattggtattctgcaagctt

SEQ ID NO: 61329 - DNA, 285 bp, Populus trichocarpa
  Intron number 2 from transcript POPTR_0018s02400.1 (locus POPTR_0018s02400) derived from phytozome v7.0 (chr-ID scaf fold_18; pos 2150458 to 2150742)
cagtcactgaagtatgaagaacaaagacttgttgaaatttgttgcctgactacttgtattgggatttcatttcttgtttaaatgcaaagcttaatgcttgtttagtgatttttagaagcaatcttattgtctataacacgtatgcaaattgcacccattattgtttttccaaatctaaatgtgatgaaggtgtgtgttttgcatcattgagtttctggggtgtgatttatgtggtttgattttgatacaggtggtgaggtcaggggatttggtgtcatactgtgc

SEQ ID NO: 61330 - DNA, 400 bp, Populus trichocarpa
  Intron number 2 from transcript POPTR_0002s05090.1 (locus POPTR_0002s05090) derived from phytozome v7.0 (chr-ID scaf fold_2; pos 3296983 to 3297382)
gaggtgattattggtcttttatcttattattggatttggggaatcttggccctttctgtccaagaaacttgttactgagttggatttggattcttctagaccctgaatacttagcattatttctattcctgcatcactatctgttttttgcaataaaaatgtttttggattaatggggtcctgctatttccatctgcagttcaagatctgccaatttgttcctttcctctacgaatttcaaaaatgttttggttttcttcatattaaagagtattcattttttgtgctgtttgaatatgtttgattgatgcatttggcagtggaaagagcacagctttaactactttattgcatttctttttcaggtggtggtgaggattggaggcgcagcttctcagag

SEQ ID NO: 61331 - DNA, 1015 bp, Populus trichocarpa
  Intron number 5 from transcript POPTR_0003s16770.1 (locus POPTR_0003s16770) derived from phytozome v7.0 (chr-ID scaf fold_3; pos 16296004 to 16297018)
ccactggtaagagcagattggttgcttgtttcattgtaatcccctcctttttttaattatctctgcagtaagcagtcgctgaccattttaaatgaccgcaagtaactggataaaatgtgttttgtttcaattgtggttctgttagtgcacccctgaatcattggctggttggtgaatggactatttcatatatattaagttctttgatattagtcttcttctcaatggtcgagagtgaaacagatcacataatgataacatttcattgcacaaccaaaatgctaaaacaattcatgcatgagaccaatttccatttaattcattttcttaattaattcagtgctcaacttcatttttctataatagccttattaccccacacgttcattcactaccacctctatgcaaactagactaagatccattcatagccaacaatacaccaatttctgatttgaggcataatttcaaaggaatatgctgctcacacccagttgaataatgaaaggcttttagatgttcacatagcttgcagtttcctgaatgagtagatgttgctactcttttgcccaaattcagcaatcttgaaagtacactggtgagataacaaagagtgatttctgttataatcatctccttgctgtcaaatacctattaataaggcaggctgtctatataattggtttacttcattttattctgttttggaattttaataaaaattaaccaatatttttggtggagaaaattatgtttcatcttaccttttgttttacatgtttagggcttaagaccatagcccatctctgacaatttgttttcatttcacatttacaattctaatccacatctttttttttactttatttcctttttgcagcatctgatgccatattctacaaggtttgtttgtttacctctgcttgattactttacttaatcaacacaagaactatagtcttagctattttgaactgaaggtaccatttgaagaagttcctgaacttgtggctgg

SEQ ID NO: 61332 - DNA, 680 bp, Populus trichocarpa
  Intron number 1 from transcript POPTR_0014s14770.1 (locus POPTR_0014s14770) derived from phytozome v7.0 (chr-ID scaf fold_14; pos 10844441 to 10845120)
catctgtctatttggtcctataccaagcgcaaacggtaaggagttcaagggtaaaaaagaagagtccctaatgaacaagtagcagaacctcagttgcaaattttgagctgtgtattattttaaactttactggatctccagtctcttccatgaaatgttataccagctttatcttctcagtactcagaactccaaattcccatcactctgaatatgaagtgaaagaaacttccctccatttagggtttgtttggcagtgtggttgcggttgtttttcaaatagcttttcgtgtcaaaatgcatgccaatgatgtttttttattttttaaaaattatttttgacatcagcacatcaaaatgatttgaaaacactaaaaacatattaatttgaagttaataaaaaaataaaaaaattttaaatcacagaaacaaacaggctcttaagctgatcagcacactgctgcctggtggggtgagacaacatggacacatcattctacataatgtccaaggtgggctatgacaagattcgaacccattttcatggtttttagcttatatatatatatatatatatatatatatgcttcgaaactaggatggcaaaaactgaaaagttttacgttagcattcccaaaaatatgtgggcaagtctgacgcgtgggagtatattttttcag

SEQ ID NO: 61333 - DNA, 378 bp, Populus trichocarpa
  Intron number 2 from transcript POPTR_0006s07960.1 (locus POPTR_0006s07960) derived from phytozome v7.0 (chr-ID scaf fold_6; pos 5820288 to 5820665 reverse strand)
ccaatactgccctttttgtttcttggttggtagcttcattgttaatatttatcttggttcagatttttttaattaatagtagaataattgtatcaaataaaaaaaaaggcgattgttttattagtcgagcatgtagttagaggagacgttggccaaatcatcaggatccaatttaattgctacagtaaacatacagtgttgatttattatttattatttatttttcttgcagcttaagatttcttttctcttcttttcctctgtttttttttctagcttaagatatttgatattattttgctagattttactaaaatatctgttaatttatttgatttttgtttgtcaaggctctgggaatttctttccaaaaattat

SEQ ID NO: 61334 - DNA, 932 bp, Populus trichocarpa
  Intron number 1 from transcript POPTR_0002s08120.1 (locus POPTR_0002s08120) derived from phytozome v7.0 (chr-ID scaf fold_2; pos 5618613 to 5619544 reverse strand)
ctggttcgattcactatcctcgtagcactcctcaggtacttttgtttccttctcttctatgcatctcttgttttaatctgttgataatttttgttgtggaggatgatgttacagaatcttggcctttcgtcaaacacaatcttaattaatttaaaagaatatattaattgttgttcaagaaaccttgttggtctgaggctttcaatttctagcgtgaatggttttttaccgaacaaccactgctgtttttcttgctagacctcctttgaattcaatccgaagactggaggatcagcaatttcttttttaattatgttttttatataatgttttgattattgttacttttttaattatgttttttataatatttgtgtgtttttgagaaaataattcattccttaagaaatctatttagttttatttaaattaatttattaaaaaaaactgatttagattatatattcaatgataattcaatttaaatgcgccgccttcaacataattaaaaaatttcatgagatacaatatttattttccttaatgcgccgagtttgttttattacttttccacattcttccctctttcatggatactcactctaatagtttcgcggtcaactcgtggaccaaaatctcttgaaccaatcccctaattacacattccataaatataacaaatggagatttgtcacggtcaaacaatagtagttaaaattccaacatgaacgtctgacttacagatggcgctcatctgttggattgcgaacaacagtcatatccacgtagacgacgagtcttacatgttggatcgttaagagcacgacctcacgtccgaattacaacgacatgtcacatgtcgtggaaaaatgaatttctcataaacgatctgtagtctacgttagtaatgttatgatgacgtggatttgcag

SEQ ID NO: 61335 - DNA, 815 bp, Populus trichocarpa
  Intron number 2 from transcript POPTR_0018s11500.1 (locus POPTR_0018s11500) derived from phytozome v7.0 (chr-ID scaf fold_18; pos 12211175 to 12211989)
ttccagaggtaaaacattgccatctaaatccttgttattcattgctttgattacaaccaatccattaagttgtgtatcattaaggtactggatatagagcatctcttcaaggtctattttttttacaaaaaaaaatgcagcctcttgtgacttttactagtgtttttggggtttgtcattgtggcatctgagttaaagactccagcaataactattatcatgggtttttggaatgtacagttagtttttgggtaattagatagttattacctttgctttatcaattgagcgtcgttacgtctcttagtgttctctggcaaatctattatgtagaaaagttcaagcttatgagatgtgtaactgttctatttataatttaacatcttatgagaagtttcttccttgggattgatgtgcatgtgagactttcttccttgggattgatgtgcatgtgagactggggtgatggcttgcccagttggcattttttcccttcaccatgaatgcatgcttccacaattgtttctgttgtctctcctgcgttatgagatgtgtaacaaactttatgcatgaatctttagacagaatgtgggaggctagcattagatatgcagggtttgactttgtcaaactgtctgttggtatatataatgggcatgatattcctttttcaagggttctcctactgaactcaatcaaagttgaatctcattatttggactaggcttttcttcctcatatgacccttaaatgaattttgttatgctttccttggctcagtattgctggtaaggcaaacttggagaaggcagacc

SEQ ID NO: 61336 - DNA, 530 bp, Populus trichocarpa
  Intron number 2 from transcript POPTR_0007s08870.1 (locus POPTR_0007s08870) derived from phytozome v7.0 (chr-ID scaf fold_7; pos 7888488 to 7889017 reverse strand)
ttcttgagaagtatgcacatggaaatctaccattgcaaagtaagattacaagtgagatgaagttttttaggaatgctgaacatgactttggtcgagcgtccgcaataaataatcgcacccttatgcctccaggtatataatttttatattttaaaaatattatttgacatagtcttacacttttacttattatttttttgtatagatgaatggtggattacatatggaaccagcgatccaaatctacaacagttggctatacgagtgttaagtcaaacttgtagttcttcgggatgtaagagaaattggagtatgtttgaatatattcattccaagaagagaaatagattggagcaccaaaggcttaatgaccttgtttacgtccactgcaatataagattgaaacaaaagtatttttcttttctctaattccttaaatattattttatcttgttttgtttcaattttaatacttatattgtgtttaccttcacttttaatatataggaattattggaaaggacgaaatt

SEQ ID NO: 61337 - DNA, 503 bp, Populus trichocarpa
  Intron number 1 from transcript POPTR_0008s05600.1 (locus POPTR_0008s05600) derived from phytozome v7.0 (chr-ID scaf fold_8; pos 3251965 to 3252467 reverse strand)
ttcaggtaggatgatttcttctttctattgtcacatgaacggctttcataaaaaaaaaaaagtcgatcttctttttgatatggtaataaatcggtaattttttccttttcccccccttcaaatagatttagttcatgatttgcgctcatttaaatgaattgatcataaaaataattttagaaagttcaagatagatatcattaaatataagctatagcttcaagtactatacaaatcaaataagatttaattatcattaagtaaggaaaaaaatgttccttttattgccaatttgttttttaaaatataccatgtcaaatgaatttatacacattgattttaagttcttattcaacaatttcgtgttgaatgcatcctcatttatttttaaatatcaataaacatttggatttgaacaacgactttgaaattagttttcaagtattgatttttcgtaaatttacgcaggtctcaactccccacacccttggaattttgcacaa

SEQ ID NO: 61338 - DNA, 293 bp, Populus trichocarpa
  Intron number 1 from transcript POPTR_0013s05880.1 (locus POPTR_0013s05880) derived from phytozome v7.0 (chr-ID scaf fold_13; pos 4247713 to 4248005 reverse strand)
cattaggtatatacacatatatttgttccgtactagcatggttttttgtcttgttttttcgttaattcttttcccattatttttctttatctttgttgcctctagatcataaactaattatatgtacgtaggccttgttgcatgctctgcttcttacattatgtcaaagtcaaagctcaaaaatggtgaatcgtttgttacactttctgttcttccatggttttgatttctaacgtacgtatccttctgtctttgcaggtgtggaggaggtcgaggtcctttctaccagtgtt

SEQ ID NO: 61339 - DNA, 358 bp, Populus trichocarpa
  Intron number 1 from transcript POPTR_0009s15410.1 (locus POPTR_0009s15410) derived from phytozome v7.0 (chr-ID scaf fold_9; pos 11927629 to 11927986 reverse strand)
cctgcctgtggtttgtgagcaaaaaaaaaaaaattagaaaaaaattaattaaaaatatatatataaaaaaacaaacaaaaggcatcagtctttttattatagactatactatacagtccatagtcaaaaacataaaaataacaaaaaaaaatctctaattagcccaatctaagataactaaatagagaaaaaaacatcaactgataactaaatagaaaaaaaatttatatcaatgaactaaattaaataaaaaaatattaattcaaaataaaaaataacagaaaaaaaaacttataagaagaaaaaaaatctaaattaactaggttaacccgttaaaccaagttaacccgtcaagtcc

SEQ ID NO: 61340 - DNA, 999 bp, Populus trichocarpa
  Intron number 1 from transcript POPTR_0015s10950.1 (locus POPTR_0015s10950) derived from phytozome v7.0 (chr-ID scaf fold_15; pos 11691055 to 11692053 reverse strand)
gggtctctttgattcaagtttctgataacgggtaatttttatttttctctgcttttgaattttttttttacatgttttgcttacattatgcttttgcacttacattatgctttatttgggattgctttgctagtttataacgtgttttaataatatgtgggtttctagtgagaatttaactttgaatgtgagttacttcttgttgttagaatttacgtacctcattgtgtgttaaatattgggtatgttttgtttttggtaaattcatgtcaatctgtgaagcgaatagtttttgcttgccttgattttagttgaatacttgtgtttgtgttcagttatggattgagggttgtgttgttttgaagaaacttgagtttctgagagagttgtttgaatgggatacttgttgacaccttgagttttgttctctcatttcttgttgtttcttatagatcaagcagattgttggtatttttttgtttgatctcccacctgttgatttgtttcatggtcctaccataattgagaatcgttcatggcgttgtgattatacatttttggaatgatgtgttttcgaatccgttttgcttatcttggaagttcgatgatgttttccggtaattccatgggatcatttatagaagttaagatcaacagatgttaaattaatgtaattgatggatcacaagaagcaatcatttgttattctgtttttgtcattgtggtctttattaatcatggccgtgttgttcggcgtgaatctcggtcattatttttcttcttttcagatagattcctagttttggattcatttttgatgcatcaggacttgccatttgaaggcagcaccctgatgatgcatgtggggaattcagactttttttttcccttctttacagggatagtttccttcttttttttgtatcatttttgccaaattgaaggcagtttcttgatgatgcaggtaggaacttcaggttttggatttgatatttgtga

SEQ ID NO: 61341 - DNA, 778 bp, Populus trichocarpa
  Intron number 3 from transcript POPTR_0010s04240.1 (locus POPTR_0010s04240) derived from phytozome v7.0 (chr-ID scaf fold_10; pos 5162980 to 5163757)
taaaagtggacacaaactccaatgtaagacatgaaagcttgcctgctctctttcttggacacatatgataatcatctgtgcttatggattatgtatctgaggtgcctgtttgtagacttcaagtaactctctgaggtgcctgtttgtttttttgcactctgggttggtcattggtgaactgcaaagtccactcatttcttgagtgctggccaaaattgtttgaatccctagataatgtgatatgatggaactcttatattcatcataaatctacacttcatttcataatgttgacaaattgaattatatgtagtctcttatcccaggtttggagaattgccgtatggaaattccatatacctgttaaatatgcttattaattctctagtatgccaccatgattcaatatcttcttttctgtttaaatacagtatttactttctgttgactgtagatgtgagatactatgatagcaaattattagttttatattacttgcattgctgtcttatttcttagattgttctttagaacaacaccccatgcctgtactgttaccaacgcccatatcaggttgtaaattagcttgcccatggtcttttcaaaatgtgaaattttcttatggcatttgtataagttaacagactaacattttttgatgcagtgaacattcgttggataattttatttctagtaatatgatgctttgattgcccagttgatagtggtgtgttcatctgtagcttctcacaactattactattgacgaacctgctcc

SEQ ID NO: 61342 - DNA, 896 bp, Populus trichocarpa
  Intron number 2 from transcript POPTR_0002s01080.1 (locus POPTR_0002s01080) derived from phytozome v7.0 (chr-ID scaf fold_2; pos 570147 to 571042 reverse strand)
gaacaacaactcgtctttgaccgttggatctagaggtattttttgtttcttaaatctatggttgctgagctagataattaattgctaggttaaggtgtatgtatgcttgtctggtttggatattgttctgatatgttaatgttttttaagactgttgctgtgtttatgttgataaagattgacttttcagtgtagtaatttgttgtccattttggaagaattattatttaatttgagttattatcagttttttttttggtttctcgctgtatctttgtgattggttatttgatgcttcctatgtttccgctgaattttaaatgtcaaggatgaattaagtagcatatttagagagttatggttaagattgatgcaagaaaaaggtaggagttattgtactgttgtcgaaatcattatgctggtggcaagcttatagcagaatgtgaagtttccgatcagatgcaaaatgatttgaggagcagggcctttttgggtctggttgatttttttatttgaggttggatattgtgattcaagtcgagcttatttatataatataaagtcagcttaatcgtgagccagggcaaacctcgtgctgaaaggcagaatgtattaaatgaacccagatcaagtactggcatgttgtttttagtcagaatcagtgttatgaatgtctatgcattgtagagtgaatttttagaagtgttttttccctcccttttttgctgtaagttttataatgattgtagtggtatgacttggagagtaactttgagttgttgggaatgtatttttgcttgtcatgtagagtgaggattaagacactgaggtttgatctgcatatacttttttctctgacaggtccaatcctccttgaggattaccatctggtggag

SEQ ID NO: 61343 - DNA, 1007 bp, Populus trichocarpa
  Intron number 1 from transcript POPTR_0012s09640.1 (locus POPTR_0012s09640) derived from phytozome v7.0 (chr-ID scaf fold_12; pos 10608598 to 10609604 reverse strand)
tgaagaagatcaatgtaaggaaaacctttttattttaatttctaaatctgttgtagttttttaagtgatcaaagctaagatttttttttgttaatttgtggtaattgatttggttgtggttgatttgttaagattcatacttgatgtgtgcaattactagtcatggcttgagcattaaaggcagtagagaagttgcagtgattttaatggggtcaggttttgacattcaataaatcaaactgtgctgtctgttaatttatctatctatctattatttatatcttttttagttggttccttgcccattgcttggagatgatgctttaaaaagaatccaaataagaagttagcaaaaaaaaatttgaagtataatattttctgttgtagattaacaatcagatacatgattcccttaacagcggatcccttttcctataatctcagattaattataatcatgcaataaaaagagtcatgctgtcaaatttagtttaccaaagttgaatgtttgtccttttatttgtacttgtgtcattccctgctgctctttttattgttttatttattattaatatccttttggatcgtttgattgcatggagatactgtttcaaaaacaaatccatcgaagaaactatcaataataggctattgaagaattgtgctgtggagtaagatactcgagtccattaacagagggatgttttctcctacaatttcagattaatcagtatcgtggaatagaatatcatgttgtccatttaatggacagagcttaaaactgccttttctttaatcatctgtattatgccatgcacttgagtggaagttttgattcctgcataacctggtaagaaaatagtgaagaaatcttcctctgttagaatatctctgttataatcattaaatttttgtatagttgtgattgtaatatattttattcatagatgtcaagccattgatttgaaaactctatatattcagggtttcttccgcttgttggcagt

SEQ ID NO: 61344 - DNA, 666 bp, Populus trichocarpa
  Intron number 4 from transcript POPTR_0004s17570.1 (locus POPTR_0004s17570) derived from phytozome v7.0 (chr-ID scaf fold_4; pos 17712979 to 17713644)
gcgaaaatagtaagaagttacattagttgacatactaagctatttaatctgtgtataagaatctggttttgtgttgggtgcattttgtggatattaccttttgctttgacgagagcattgtcaactagctaagcgctttatattctatttctgttttggaaacctgctgttaagctgtactacatcaaccatgtctgacttgttgtcgatggtcttattggtcttttggtgtccagttcgccttataatttcttgttagcttttttttatatataaaaaaaatatgttatttagattggctgaaaaggcttaagctgagttctcttcatgatcaaatcattctctgtacatatgttgaaagtggtttctcatggtttttaaattgtggcatggttagtatttttaggagagggaacatgaataataatattctggaataatagagtaggcactgttccttgtgcgtatccgagagtttcgaattgacttttctgtgcaggactcttgctttgtaaattcttccccgttgctatgaagtttgtttaactttatccaatcttggtagtgagaggaactggactacaacttttattttaacctaaacaattttctttatcaatgttatcttcagaaagcttagagccaaagagattagtgaacggtaaa

SEQ ID NO: 61345 - DNA, 884 bp, Populus trichocarpa
  Intron number 1 from transcript POPTR_0013s04620.1 (locus POPTR_0013s04620) derived from phytozome v7.0 (chr-ID scaf fold_13; pos 3172039 to 3172922)
aggcaaaagagtacagacaggtaactctataaatagatgcattttgagttttgctattattaaaattgattttattctaggaagaatcaagacagcaagaataagtgccatattaatgttctgattgaatgataatagtattctgctctatgttttggtgttccattccttttgtcttaagttaatggttctctcttggaatgctgcaggtatggtcactagaatgtgattgtagtaatcataagatgtaaaatctaccaaccaacttgtactgtaaatagtgacaagcttatattttgctaccaacaggcttaggggggaagttagatgaaagactatgcaatctttaatgcggttaggaagatgttaaattgcgtacttggatgtataatgcacttagatatactatggtcatatggattttggaaagaatgatgaaagggaaattgatatcttgttcatgatttttaaaaattaagttggtttgagcattatggtttgttaatgttttattcagcaatcgtattggtgcatgaccagaagaaactgtagtaatctccatgcatgaactctgttgactgagcattctttaacctatcttctgatatgttatgctgcatcccttatcacacattatcttggtttgttattttagagctggaaatagatatttcaacttacaagttaatgcaagtgtgcaactagattctccctctctgtccttcctcttttacattctgggactagtgtgttttcacgggcttcatatcacgtgtttgttaaattctctgtccataattatgttataaagttaattacttctttgagcaatgtttaacttgcttgcagtcagaaaaagagctctattaccaagcttccaagat

SEQ ID NO: 61346 - DNA, 495 bp, Populus trichocarpa
  Intron number 2 from transcript POPTR_0007s04790.1 (locus POPTR_0007s04790) derived from phytozome v7.0 (chr-ID scaf fold_7; pos 2993090 to 2993584 reverse strand)
cacagaggtaaacatcattatgacaggttttctctgttttgtccaaccagtttattaacagtttatgaaaaaaaaattaatttagcattcatttcatgatgttcatcacatgatcaaatggtcaaacctgcacggtcaccatggtgtctaagtatcttgtccttgggtttaagttaaacctgaaggatggaattattgtataatgctgcaacttgtttatccagatttgattgatgtggttagtttcaacatagttttgttacttgttttatggtaaatctgtaaacttctgctgctccgtcaaaggcaaatttcccagcgtttgctctatagtttgtcttcgatcttgcaactatcattgtatttcaaacttgcatgtgattctaagtagtttcgatatcctatgcttgattttatgctctttcaataactgagtaacgtgattacttttcatttacaggctcctcatccatattacaaacccagtaacaatct

SEQ ID NO: 61347 - DNA, 727 bp, Populus trichocarpa
  Intron number 1 from transcript POPTR_0017s10850.1 (locus POPTR_0017s10850) derived from phytozome v7.0 (chr-ID scaf fold_17; pos 10390308 to 10391034)
tctgtccaaggttcctccgatccttacctcgtcgggtaattttatcgccacccctctttcctagttgtaaggctcctttctatgattgaattgcattcttggaggtaaaaagtctcatttcagtgctatttaatgaactcacagtgatgagttttgtttagagttggtaaatttgtattcatgcatttcttgctcacaagcacacttaaaatgagattgtggtggatattgcttgtgattctttcaactcagatcaacgagaaatcttgggtctatgcaggggttgttttcttagcgattgtcccgcttcatggcagtaatgagctaaaaatggaagaaaaggatacgaaatgggatttttgtgcatgttggtttaattatatttagtaaagattgattctttgcttttgtttgtatccaaaaagattgatttttgttgttatttatattgtgtgcttaaattattatactattgactaattttgttgttctttccttttgggtttccattgcaatcacggtgggtcacaggaacttcagagaccttgtaatatatctgtcttggttctcttcagttttgtgtgctgttccacattctttttaggatggaatctgataactagtaattttttagtacttgatgattatacgccttgatattctttgattcttgtcttttttcttttgcttagactttattttacaaaagtgaaattgggctctcctc

SEQ ID NO: 61348 - DNA, 481 bp, Populus trichocarpa
  Intron number 1 from transcript POPTR_0001s20380.1 (locus POPTR_0001s20380) derived from phytozome v7.0 (chr-ID scaf fold_1; pos 18279345 to 18279825 reverse strand)
agccaaactgatctctccgagcaggcggaggtaatgtattagcttttacctttctttcttctatgtttcattttccttcattagaatacgatttaatacaagataatttaatctgaatcctgctattcttgaaattgtcagaaaggatggtgtgatagtccaggaacaatggatgaggttacggaaaagttacaaatgaggaaagaggagccattaagagagagagagcaattgcatattccctctctcgacaggtaatgaagctgggaaggctaaataaagcaaatacatttatttttcgttgttttggctagctagttgatggatgattatatatctagacaagcaaattaaagaagaaagtgttgctatcacaatctgctaagttaataagtctttgttgcaatcagtttgaataagtatgagtatatttttcttgctttcagaaatcaagatcttgcgcaagcccatattgtagaag

SEQ ID NO: 61349 - DNA, 713 bp, Populus trichocarpa
  Intron number 1 from transcript POPTR_0017s04750.1 (locus POPTR_0017s04750) derived from phytozome v7.0 (chr-ID scaf fold_17; pos 3649116 to 3649828)
atgtatgtacttaaaatttgactccaattgcttcaatattatattttgtgatctgggtttgttgtgaaattggaaaatcttgctgaaatatgtgggatttgattgttttatttcttgtgtagatttgtgtatgtattgcattgtagattttgtgatctgggtttttgttaaatttgataatcttactgaaatttgtatatatatatatattggcgtttttgtgatattttcctgtgttggattctagtagttttaggattctctatgtgtttttttgtcacaacttcaaagtttcaatctttcatggcttgaataatcattgaaccttgtgggttctttgtgttggatctgtagaccatccagttagaagcactgctgaagattctcaattcaccgaaatttgtagactgatggttttttttgttcatccttagataaaaaagaagttgctatcttttttgaatttcttgcgtaaagttctagaatttttagttttgttgtgtttattagtgttatcatgaggaattaactgtttcttgttagtcagatgtccaaagtttcagtctttaatgggcacaaggaattctttgtaatgcagttctagactgctcaaaattaaaatcaatagtaaagatttattctttgattgattttgtaccgattcaatgttttttttatgcaggttcttagcgatccacagaaaagagcagtgt

SEQ ID NO: 61350 - DNA, 846 bp, Populus trichocarpa
  Intron number 2 from transcript POPTR_0004s09820.1 (locus POPTR_0004s09820) derived from phytozome v7.0 (chr-ID scaf fold_4; pos 8344810 to 8345655)
agtttgaggccctctgtggttttatcagtattggggtgctcgattgatccctatctttcttgcatttatctaattcgcaaattcttcgagttgatttttgtgtattggtagtgttgtgaatcttggttggcattgaaggagttttaaaggtcattctgatgcatgagaagcacataggctccttaaattgtttatttttcattttatgagaaatctaaagattcaatcaaatggatgtgattctaccataacttaacccgtatctcttggtaattcctgttattaatatttctaatgggctagaacaatgtggctctcaactgtaataatcatcagtctggcgattcttaatatcatgtgaccacaacttgtctggattgcatcgctaagatgatgggatacttttgagttccttatcctttattgctgcccttttgggttccttaaagttgcgagagaattaccagtcatcaacaaacttctccttcgccttataaagcatgcatttttaaaagaagccttgaacaggaaatggttactgcagactgcaggcatattgaaaacccatgacttctcaatgttaattgggaacttattaatccaaagaaaatgagggtgaaatctatctatcttgtatcgattagatctgaataggcatcggtgtttttctcagtcgatcaaggtcaccattactttcttctaacaaccttgactttgtttattgcatctccacatgcatatttttaatatcttttttattaataaatctgttgaagccatatccattttttcattcaatcgaagcaaattgataaattttccaggagcttaaaggtgtgcttcgag

SEQ ID NO: 61351 - DNA, 584 bp, Populus trichocarpa
  Intron number 1 from transcript POPTR_0015s01050.1 (locus POPTR_0015s01050) derived from phytozome v7.0 (chr-ID scaf fold_15; pos 613214 to 613797)
ggtaagtgtgtgccttttcttttatttttccattaaaaatcctaacctttttagatctataatgtatttgcatggatctgatgtgatttacgtgtgtttgattgtttttggaggtgggcttattagcatttttgtgggatttgttttttctggtcttcaaagatggaaattttattagagaaatgagaagtgtgaggaatgcgggacttgggttgtgttttttatagggtggggaagtgggatctggatttagattggtcataaataagtgggtctgatatgggttcttgtttttcattttgtttgttttttctactacttagttgagggttagtatttggtgctgtaaaagtttgagcttccgttgtgttttgtactttccgtgctgtaaaactgataatggagactggatctggtttattttgttgaattttagttgagcagcttcttaaggctagctagatttggatattctatcttgccttcaatatcagactagaatttgttgattaagttgtttcagcaattctgttcctgataaattactgtttatatgacagctggtgattggttgcaaggtccat

SEQ ID NO: 61352 - DNA, 746 bp, Populus trichocarpa
  Intron number 4 from transcript POPTR_0012s02690.1 (locus POPTR_0012s02690) derived from phytozome v7.0 (chr-ID scaf fold_12; pos 2208484 to 2209229)
ctgctggtatgttttagggcattgttatttttgttgtggtagtcaagtgaaagtttgattttgttgaggggtttatgtaattgatataatatgattctatttatgtacatttgacatgtaatttggaggtgggcgtgaaaatgctaggattttttttttgttttttttttagttatatgggaataattttgaatatcaagttgtcttgtttttctaaccttcaaatgacgggatgcttatcaacaattttagtctcttataatttttcatcaaatcacactgagtttgaatttccaactactttctatatatgcaagtactaaagcttgttcttgtttgtagcctgacttgcatttctcaatgaaagatcaaatgtttgagtcctgctaagcatatttggactttaactctcagatttgaatccttgtgtctagcccacacatgacaactcacataggatttatggagtttcttcattttttcctaaactctttggagcatactttgaaaaaaagaattacaaaaataataataccctaattgacattttggcccatgaatttgtaatgcaactcgccgtgtagatggtgaaatcatatatgttaaatacccaccccaggcagcttggaaaagcattttttttacctttattatttttttttaaattacattagacagttttggaattttatattctatattttttttcaggatcttgtcttctttctctttggtgtagaagtcga

SEQ ID NO: 61353 - DNA, 604 bp, Populus trichocarpa
  Intron number 1 from transcript POPTR_0003s12570.1 (locus POPTR_0003s12570) derived from phytozome v7.0 (chr-ID scaf fold_3; pos 13099014 to 13099617)
aggctcaagttctgttctaccccagtttcgttaacgtaagttattaatcttttcttgatccaacttttttattttgtattatgcgtgaaggaaaagcaactggaattctttattaatgttcttagtttgaaattaagaaaagcgagaggcagaaggaacttttatcatttgctcttcttcttttgaatcttacactaatttgtaactaatttgtttgtaattttagatattaagttccttatttttagttaatgccacctgagagttcttgtttttgtgaaataggagagagttatttaaggttgagaccatgtcatgttcccaacacccaaccttcaaatatgtagataataacaaagtatgctcagttccttatcattagctagctatagatggaatacaaacatgtctagtgctccttctaagttgcaaaatctgacattgcatttcactaacctatattgccatgtcaatttgcccgagctgatagtttatagcagtacaccactcactaactgtcttaaggtgtattcccacttccatcaatttgttgacatattaatcggataatgataggaagagaccattcgtgagactattgaag

SEQ ID NO: 61354 - DNA, 383 bp, Populus trichocarpa
  Intron number 1 from transcript POPTR_0002s10890.1 (locus POPTR_0002s10890) derived from phytozome v7.0 (chr-ID scaf fold_2; pos 7942811 to 7943193 reverse strand)
tggtacatctctctttctctctcgcatctcgatgtttttttcttgaattaatttttgatatttaatttctgtggaaggaaagagatagaaaagaaaaggaagagacaagattaaaaactaaacaaggggaattcttgtacatgatcttatcttcccatatatgtaaagcatctcaggggatctaataacatcatcttttttttttgggtgttgattaattgatgagaatattattttttgacaaggagaaaaggaaatctcaggtttcttttgatgataacatgatcatatcgttgcttaattttgaagtactgaagtgctcatgtatgtatttgaacattcaaacagaagttgaagagaaatcaaggccagagccttccagt

SEQ ID NO: 61355 - DNA, 761 bp, Populus trichocarpa
  Intron number 1 from transcript POPTR_0008s14620.1 (locus POPTR_0008s14620) derived from phytozome v7.0 (chr-ID scaf fold_8; pos 9713226 to 9713986)
ctgtctgccatctctgccaccgaggtacacttacgcacctactacttatcggtttattatttctcacagtgtatatgctttctgcgcatttccattacccccaatcccagccccgatctctatttctttcctcattacagtgtactgtgtattatactgtatcgtatgtctcctaaatggatgtttgttttaatgctatccaatatctaatgggggtgtttgtgatgattatatttcaaagtttttcattttgaaataatcaaaataaaattttttattttttaaaaattatttttaatataatacattaaaacaatctaaaatatagaaaaaaaatttaattttaaataaaaaaaatttaatttttagaaaacctctttttcaatcgcttttcgaacactgcctaaatgtgccccaacagtctgcttttaatcacagttcaaaaatgtaagtaaagaaaacagtttggttttaatcagatcttactttccctttattataataagtaaagaaaacagtttggttttaatcagatcttactttccctttattataatattgacaaatacatgcttggacctttatgttcattaaatcaattgcttgtgctgtttttttttttattcttcttccagttttttggtgatcttgtaccaaaaatgcgggtcctaagtcccaagtaattaagttatttcatgctctctctcacaccttccagttttacaggggtgaagtgggtgattgaagcagacaaatacggg

SEQ ID NO: 61356 - DNA, 758 bp, Populus trichocarpa
  Intron number 2 from transcript POPTR_0008s06100.1 (locus POPTR_0008s06100) derived from phytozome v7.0 (chr-ID scaf fold_8; pos 3611123 to 3611880 reverse strand)
cagtttctgggacagatagtggggacagcattgaggtaattcttgtcgaaatccactgcttcattagtttagaaagaaaaaattgtttgtggtagattggagggatggtgcttaaaaaccatttcttgggatacgaaagttgttggttgaatttgaatgtgtgagttaccagaggtgaggtgtggtatcaatatgcatttgtgctctagctaaacgtgagttgccactccatgctacacaatgtttagtgcgttcctcccccaaatcatgcattagatactttgaaggaagtaaactcttgaattgatggaacaaaaacctgagaaagtaccttaatgtgtttctttctcttaaaaagtaatgaagatacaaaaaagctgttcatttcataagataactgttgtgtgcttcaagcaacaaaggtgtcaacctgtttaggacttaaatggagaaaaggcatgctcagatcaaccagaggggcagggtttccttaaattccttgatctgttggatgctgtaaagtacaatcctccacaggctccctgcatcatatcatatatgcgtgctcttttgtggtaaagcctctttagaattcctctagtggaaaaattatcattacattttgaaacaccatgcatccattgtatctagtttacttgtttacaaggtttgatccactgcaagaagtcattgttggttttttttttaaaatcttttttgtaggaatctatattggctattagctttagtaataaggg

SEQ ID NO: 61357 - DNA, 392 bp, Populus trichocarpa
  Intron number 1 from transcript POPTR_0008s06100.1 (locus POPTR_0008s06100) derived from phytozome v7.0 (chr-ID scaf fold_8; pos 3611924 to 3612315 reverse strand)
ttgccttgttaacgcagtcaagtggaatcacactagtgagtctttcactcactctctattctctttatttttgtttacctcttaatttgcaagagctttttttttcctccacggttgaatcttcatttcctggtttttggattaattagggtttttttggctgttcgagaaaagagagaacagaagtttgattttcttcttcttacatttcaccttttcttatttattaaattaacaaattaactctagtcgagggaggttgttgaattattgcgtaattaaataatattcatggtttagcactgcagtttttaggaagcagggattgatctgaatttgtgggttctgtttttgcagatttagtggtggctagtgctggagaagataagaag

SEQ ID NO: 61358 - DNA, 994 bp, Populus trichocarpa; identical to SEQ ID NO: 60437
  Intron number 1 from transcript POPTR_0008s13830.1 (locus POPTR_0008s13830) derived from phytozome v7.0 (chr-ID scaf fold_8; pos 9114865 to 9115858)

SEQ ID NO: 61359 - DNA, 365 bp, Populus trichocarpa
  Intron number 1 from transcript POPTR_0012s09030.1 (locus POPTR_0012s09030) derived from phytozome v7.0 (chr-ID scaf fold_12; pos 10101200 to 10101564)
tcctttgagaaagccaccttgtttggctttcacaggtaactcctgtgcccaagattcaagatcactttgaattttatatgcataatatctagtttgttgttttgatttcttagagaaaaggcgaattaagttagatggttttaagactttgttttggttggtatttttcacatctataataattcaaccagctagaaaagttaattttcctccagactcctggagctaccatttcttaaagctgatagctgctttatattttgtgactgctaaatcttcctttgagattctagttcatctgcttgatatcacctgttgttcttttatcaggttgtttcaatacatccagggtgccaatctaaact

SEQ ID NO: 61360 - DNA, 864 bp, Populus trichocarpa
  Intron number 2 from transcript POPTR_0006s21360.1 (locus POPTR_0006s21360) derived from phytozome v7.0 (chr-ID scaf fold_6; pos 20410618 to 20411481)
gggcgttactcaataccctcttgttcctgggtacgtatatatcctccttctttgcctcttttttttttaagcaatgtgtctgttttcatttgaattgattctgttttcatttgtaattctttacttggaattgaatatatggtcacaagaaaacaattaatttcttgtgattgaatctagttatagataatttgtttaaaactcgatttgaaagagataatcttggaaattgctagaggataacccgttgccaaaatataaaaaagaagaagaagaagaaaggcttttcagcgtatgaagttgaaaagctaaatacaagtcaatacacagctggttgttaaggaatgtttgttgtggtacagaggaaaagaaaagggtccacttctttccaaatgctgtgttcccatcgaaattgtcaggatcctatagcaacctgtttcaatgtaaaatggctattgctagcagactagtaccacttaggaacgtgtaatgggttgactttagagcatcagggaactcccagcttaaatttgtttttccttttcgtgaatgagatcagaaagttttactaaataagctaagcaacgagcaagacaacttaattaggcagtagctaggtttttgggaaggaaaatagagaaacatttaacagaatatacaagcctgatgatgcatgcatgtatgcagatgaagacaatgaagatgtttattaaatttgatgattctaatgaatttccatattgttttaggatcagattttcttctctttttttcaaattaatttcttcaatgaagttaatttaagtggctatagttcttaaaaatctgagtaattaatgagttaagtaatgtttcaatgcaggc

SEQ ID NO: 61361 - DNA, 600 bp, Populus trichocarpa
  Intron number 2 from transcript POPTR_0011s09190.1 (locus POPTR_0011s09190) derived from phytozome v7.0 (chr-ID scaf fold_11; pos 11355547 to 11356146 reverse strand)
gccatcggtaagaaatgtgcatgaagattagcctttttttaaaaaaataataataataaatgagttttaatttacggttgtgatttacttgtatagtagtttgtcaggaactgcttgatgctaggttttcattttttgaacttaaagcattttcttttttttatatgcagcaaaatagtaaagctattcagggtttttaacgttttaattgcctaaaggattcgtttcgagtctttttagtgtttttatttcactacatagataacaatcaagatactctatgtgtcctctgaatgcactgaagtttggaagtgttcatgactgattgatcttgttaaaaatagaaaacagagatcctgtaatataagaaactgtgtgggtgtggcaattttgaattctttatagcattggagttttaaaacggtgaaaagccaaagtgatcttgttgataaattaacgtactgataagggctagttattcaactcttcaatgaaaagtgtttagtctgcaatttttatttgtgttcggaaaattttatacaatttatataaaaaatggcattttcaccaaattcctgcacagggttgggatttcttact

SEQ ID NO: 61362 - DNA, 445 bp, Populus trichocarpa
  Intron number 1 from transcript POPTR_0014s18880.1 (locus POPTR_0014s18880) derived from phytozome v7.0 (chr-ID scaf fold_14; pos 16371938 to 16372382 reverse strand)
ggtacgatcctattcttttctttgggtccttttgtttgcttgcttctttgtgttttttgctttcagcttcttttgttgtgcttgatgatgctgttttggatggaaacttgtggtttgcaattattagttctgatagtagtgaaataaagaggaaattacactcttttttggagataaatgaacttaattatatcaagtccgtgccttatctgattactttactatattctaatgtttccataagcacataagaaaacgctataatcagtagaaatgtgtagactatataatgccccctgattatattgttgcttatgaatctagaaggtgaaaactcgtaccatttgaggtaactagtgagaagagatggcgagtttgagttaaggatgcatgaattgatcgcttacaatattgtggaaaaccatgcatttagtagaagagtaca

SEQ ID NO: 61363 - DNA, 171 bp, Populus trichocarpa
  Intron number 1 from transcript POPTR_0010s10210.1 (locus POPTR_0010s10210) derived from phytozome v7.0 (chr-ID scaf fold_10; pos 10783626 to 10783796 reverse strand)
atcttgattccggagaacttctcgctgttaaacaggttaataaattcatctgttttttcttttcttttctttttactaagttttttttttaataatttgatttagtattgattgtttattgtttatatatttgcaggttttgattgcagccagtagtgcttccaaggagaa

SEQ ID NO: 61364 - DNA, 828 bp, Populus trichocarpa
  Intron number 3 from transcript POPTR_0012s03880.1 (locus POPTR_0012s03880) derived from phytozome v7.0 (chr-ID scaf fold_12; pos 3108048 to 3108875)
atattgaattacgggcatctggagaccataaaaaggtaaactttagcaatccattctttctaaaaagatgtgcttgatggttggtaaatctttgttgctttgattgggtagtattcttagctcctgtattgtcaggcatcacatctacaaagatttcggacatgataggtttgcctttgtttccttgttcatgcaaaagcattgatcgacaataaagtccatctgggagcagttaattttttctgtagcaatttggggttctagtttttctacgcggtttagatatatatatataagtctatttgttgaaggccagcttcattctgatcgcacgatattttaatcggctacaaaaccttatgtagcatttgcctattgtcacgatgtaaaattttgtgagatgatcctgtatagttttatgcccataaaaagtaaaatgaaccttgaatctcaaaaacagatgtctattactgaacaatttgtccctgctcgcctttctaagatttgggaatagtgtggctgctgctttaagcatggaaaagttcagttggacttaccaaccgttagatttctttctacttacaatattggagtttcactgaataatttgggattttttgctaaaacagcattcgcccttgttatagaattgtgtccactctgtttttatgctgttaattgggatttctagtatgaccttccccatccaccaccttttctttttttccacccagaatatatgtcagcctttttattcaatattcattaaaggaaactgaaattcctgatgtgttatcataatatacttgatttagctcctgctagcat

SEQ ID NO: 61365 - DNA, 427 bp, Populus trichocarpa
  Intron number 2 from transcript POPTR_0003s21560.1 (locus POPTR_0003s21560) derived from phytozome v7.0 (chr-ID scaf fold_3; pos 19675278 to 19675704 reverse strand)
ttaactgtaagatatctctaatattaatacaatctgattctcttatgtgattgatctgttgaaattacaaacgattagactaaactgaatgatgagactaataagttataactccgaaaactttctatgactgcaacaattccttcccgtttcatcttttgtttctccagtaaactcattttcaaataactattttttgtaattaaaccataaggttatgtgcaaagttatcaggaacgatgctactgattggcattgtctgccattttccatctcccaacatgcttaggtaaaaccatttggtagagcaatagactttaaacatcttcgtagtctgctctgtctgaactgcactttgatctgtaaatcctaatgttctctttctccaacaggttttcaattgtttcggccgacagttttgcctgca

SEQ ID NO: 61366 - DNA, 904 bp, Populus trichocarpa
  Intron number 1 from transcript POPTR_0005s07180.1 (locus POPTR_0005s07180) derived from phytozome v7.0 (chr-ID scaf fold_5; pos 4827875 to 4828778 reverse strand)
gcctggagtctgcttgcaggtgccttgaacgtgaggtacatggtctgtctattatctgtgaccacttgtatttcatcatctgaattgtgaaacaaatggtttaaccgttatatattgcttattttttaaaacataaataatcaaacatcatttcaattagattaattatcgattcttttgaattctgataagctttgtgtgaggaaatggatcattttaactgcaatttttgctttcctgcgcgagtagatgctgttaaatgtatttgatttaaaatctatacatgctgtcaagtattactggtttatcctgtttgaatcccaacacccaggcgatttctcattgattgatttcacctatcggtgtaaaaacaaaaattaaacgaagggtttgtggctaaatggacgtcggagaaaggcactaaattgcaagataaatcttttcttcctagtagattctgcttttactttaattatccaagccatggccctcccagtaagaattgttaagccatcaaaatagttacaagatctttggcagatgcagccatcaaaatatcttctttttttcccctcatcgtgtactttatgctacaataaacttgtgaattacactggatgcattttatcggattccatctttctatcctgtgtatatcatcttcctgtaggtggatgctttctgcacgttgtttatacaggctatgaaagagagacaattttgcgtatttgttcttcatgattcatctgcgagtgtcactctgtctctagggaattctattgtttggattttgaaactgcattaaattgttcatcaaaaaggtatttatatataatttaatcttctagaagtttaacaaaatgtgatataaacaaagcagtctagcattgtaggattgtttgga

SEQ ID NO: 61367 - DNA, 478 bp, Populus trichocarpa
  Intron number 1 from transcript POPTR_0005s24640.1 (locus POPTR_0005s24640) derived from phytozome v7.0 (chr-ID scaf fold_5; pos 23113053 to 23113530 reverse strand)
ttcttgttaaggccaggaattttttggtgtttcaggtgagtttgttttccctggtttcttttttatttttgattctttaaattatcatagtattgtttaacagttattactagtgtctatttggtagatttggttcttctggcattcattttgtgtaacagaagtgttttttttgtaagatgttgtggtgacagtgtatgtcatccaatgtggagctgcgttgctaatgctgaataatatcggggagtaatctcgtttttattgaataggagagtcacatttgtctcggcctgaaggaatccgaatcttgaacttgaaaatattttgctcgattttgagagagaattgacatttttatgtcatactatattgacatggtgacttggcaattgaatttcctggaatcggagttacatctgacaaatgtgcatctttgtctgtagggcgacgtggagtccattgcatctaaaaacccaaa

SEQ ID NO: 61368 - DNA, 212 bp, Populus trichocarpa
  Intron number 1 from transcript POPTR_0014s07660.1 (locus POPTR_0014s07660) derived from phytozome v7.0 (chr-ID scaf fold_14; pos 5741242 to 5741453 reverse strand)
attgattttctcatagtttcgagtcctcttgaccggttagtttcgttttctcttcatttttatttgtatgcacaaatggggttttgctcttttttttatataagagttttttgctcttaattccattccttcttgtttttttttttaatgattgattctaggtgtttgattaaatgcttaagcgagtttgattgtttgttttacaataggga

SEQ ID NO: 61369 - DNA, 1041 bp, Populus trichocarpa
  Intron number 1 from transcript POPTR_0008s15630.1 (locus POPTR_0008s15630) derived from phytozome v7.0 (chr-ID scaf fold_8; pos 10398442 to 10399482)
atcaagcttgacccttcaaatcccactctttataggtaaaagaaaacatgacccccaaattagggtttgttcttttggttaatcgttgaatgtttatcaaaatgcaattttgttttatttttagtaaaaattgattcattttttcaattgggtttttgactggatttggttggtttgtggttgttgtggcttaagtttccttaggaattccagtttgatgctttgccatttttgagaactagttgaagtcaattgttttgaattgttttgtggccttcattcatcatatcaatgatgattatatgcgatgctgaacagtattttattgctctcatcattctatatgcatttgcttaatatttggaatatagggactttatgccgtatagctatgtttaatcgtacagtgttggagctgtgccttgttactttccaactaatttctttaggcctgctttatcgtgttaagacaggaggcgtgctattgaattttctttcttcttgcttaatggcattgctattccaataagttttatgcgttttatgaatacgtggcagcatcgtagagcacatttgtgccacccaaagtaagaacgcatgtagtttccttaatgctgtcatcataattctttcattttcattataattgtgcatgtttcatctgtctacatgaaatttagtttttgcgttcaatgcatttgaatcaagataatcttttaatcctgttatgataattgactggcttctttacacctattcatctactgcaattttctgttagaggtttagctgttatgctcaatgatctttcaaacactgaaattcctaaacggaagatttttcatgagaattagcatggtgagttataataatcatctattttcagagtttgcttggccatctacagctacattctttttttctatgaatcaatttgtgaataattatgcaagtaatgtatgttgaactcatgcatcttctcttttatgattctatcattggccagcaatcgtgctgcagcatttttgcaattggtcaagc

SEQ ID NO: 61370 - DNA, 429 bp, Populus trichocarpa
  Intron number 1 from transcript POPTR_0008s10350.1 (locus POPTR_0008s10350) derived from phytozome v7.0 (chr-ID scaf fold_8; pos 6485821 to 6486249)
tagttcaaagaatcaaagagcaaatcgaattagcggtaatttttctttttgaaatcggaaaccctaactttttatttgtttcctgagaaaaatcaaaatcgaagtagagaaattatttcttttgctgtctattcatttatattttttatttttaagtaattcttcctagagaagcttgctttagcgcagattttcgactgattatttaatttacgtttttttatttatatttagcttaattgtaaatccaattctacgaagctaagaaataagaagcttaaattggattgctgttgttttattttttgttttgcattgcgatttcgctacatgaattagtcaaatggaaataaagattatgtcgcgatttgattcataaattatttaaatggaacaaaatggatttggcgtgtgatttgtaggaacaaa

SEQ ID NO: 61371 - DNA, 686 bp, Populus trichocarpa
  Intron number 3 from transcript POPTR_0008s15660.1 (locus POPTR_0008s15660) derived from phytozome v7.0 (chr-ID scaf fold_8; pos 10430772 to 10431457)
tcatctccagtttcttccttgcgtagttcccaattgtgagttctctgtttcttcttttgccgcctgcccttaatcgtggtactacgtacacacctgttcaactatgagtcctctgtgttcattttgatgatttagctagctctggtttgtccatgctgggtaaaacatggtaaattgttacatttacaaattgtttgaaatccaagatcactacgagtaagaacagagtaaaatccgtgttaaaggtatgctgatttggaaggcaatgtacttagactaagactggttaagataatatttttttacgagggaatggaattaactcaaacaaaatctgaatttggaaaccaaatattattttatttgagttggtaacgtatgccaatcacaacctttcaaggacgtgctgagatgtctaaatcacttaagagagaaaaccaaatacttgtcaagggtttacggtgatatttaccaacatcgtcgagtcaaagatcagcttgttgtttaattatcttcaaaaaatgttagataaatagactgaaagattaatgtgacccgtaacattttcttgtgattcaatttcgtgaacaacttttttgcagctttgacacttcaaaattctgatcgattacttgattctgattttctcaggtaccgtgaacttctcgtgcacagcagcaccatca

SEQ ID NO: 61372 - DNA, 181 bp, Populus trichocarpa
  Intron number 3 from transcript POPTR_0015s11160.1 (locus POPTR_0015s11160) derived from phytozome v7.0 (chr-ID scaf fold_15; pos 11805523 to 11805703)
aggagaagaaggccgaggagaaggagaagcctaaagttgaagagaagaaagaagaggtatttaccaacactcttattttaacagctcttttgatttgtttttctttgcaatttcagtatttgattatttttcttgattaagtgcagcctccagtgatcagattggtggtgctaagggtatc

SEQ ID NO: 61373 - DNA, 467 bp, Populus trichocarpa
  Intron number 3 from transcript POPTR_0017s04420.1 (locus POPTR_0017s04420) derived from phytozome v7.0 (chr-ID scaf fold_17; pos 3403355 to 3403821 reverse strand)
ttacggcttctgaggctgctgtaggttttgcagaatttgattatttttttatgaggcttaatccatgcttgtaattgaaagaaccatgaatagattttacagtacatgatctttctgaacattttgaatactttattgtcatcctatacaaatgtgctccaaaatatttcattttagggtagctagtctgtaaagtgttcttttgatatggttagtttttgaaagaaagatacaggtgttgcatttgtgtgcattttattctaaacattacaacagcatcagtttttccattttctaccaatatctgtttggagcaaactcatagatttgcatgctattttttattccatttttagaacatgtgtatatgttctatgctacttgttaattgcttcttcttttttttttcttttttttcaatatgtgcaaaaggagggtcttgtggaaataagggaagattacgtgga

SEQ ID NO: 61374 - DNA, 540 bp, Populus trichocarpa
  Intron number 1 from transcript POPTR_0001s10830.1 (locus POPTR_0001s10830) derived from phytozome v7.0 (chr-ID scaf fold_1; pos 8414703 to 8415242)
ttaccattggatctccaccgtcatcgggcctccaggttatttcctctacttcacactacttttcttgtctttgtgagtaatgggttcttgttgcttttcttgttttttgttaatctttataaagttctcagctttagtttaactgagtatgtcttgaggattatgctttttgaaacttccatgcgttattgctgctgagcttaatttagacaaagctagctgtcactgatcaaactgtcttttttattttcctagtaatttggatgtagtttgtttggattataaataagtttcaacttttggttctagcaatgaaattggagaatataagattgaaggtcttatttgatataagattgaaggtcttatttgatcgtgttccttattaaacagccctctaggaactggtagcttgttcttcatcatactggggttctcttttcagttttgcctatttttccatgttatagggtttcattcctggtatgcttcatatgttttgtaggaacgccataccaaggcggaatatttttccttgac

SEQ ID NO: 61375 - DNA, 770 bp, Populus trichocarpa
  Intron number 1 from transcript POPTR_0010s17860.1 (locus POPTR_0010s17860) derived from phytozome v7.0 (chr-ID scaf fold_10; pos 16306383 to 16307152)
gggctaaagttattctttctagtcatctggtacgtgggttcttgttcaatttcagtttttcttttctggtttctgggaattttgtattggtcttgttgtgatttgggttttgtagcggttctgttatgttcatttcattgattctgttggtctgttgaatgtgttaattttttggttattgcactgaattttgatgttatgcgactagaattatagcattaaccttttagtttcacaacactctgttttctatttcttccttttatagaattttttttttggtgctggtttattggaattgtacttgtgtgctactgggttcgaaattcaagtagtgatctatgacatgcaaagttcttctgttgattttgagagagttagcgagaatgactgcaggtttgcaattgatagttcctggttgatagaatgctatagcttgtcttctactgattgagcgatattgttctccgagaattgcttttcagtaaagaattacatttaactgctggatttggtgtggaagcaggctcttgtatttataaatttagcctgtatggtgtttttatacaaggagctcgattctttgcagaaatatctctacaacaaataagtttgcagattcttgtacatctgatattaattggttatctgtgaaaataatttgggtttataatctccgcataatgttcattggtctacccatatgagctgaagtgttctttgattatttttcagggacgaccaaaaggtgttactccaaaattcagctt

SEQ ID NO: 61376 - DNA, 591 bp, Populus trichocarpa
  Intron number 1 from transcript POPTR_0008s18180.1 (locus POPTR_0008s18180) derived from phytozome v7.0 (chr-ID scaf fold_8; pos 12181213 to 12181803)
atagctatttccatagccatcctcgccttcttcttgttagtacccattacaccttctccttctttctttctttctttctttctttatattctctatatattaattgattcttccttctgttttcattattatttgatatggttttggacggtataattttgttatcattgtactccaaattatttacaaaagttgataattttgtctcttgtctgtttttttgaatatggggtttcttttttgtgattctcacctgtttgatgctttgcctcaatgaaatagagtttgataacaggaaggatgccaggattttaccctatctccccagttgccactttgaatcaattagagattacatagagtattattactgattggtaattagtgaatcaatacgattaatgagggagtacttcatcactaacagtatggtttctaccgggtgattagagatatgatcaaccgtgccagattaacgtcaagaatgttgtgggtcatgataatggttttgtttcctttactgagtgttttttttccccttcataattatttccaggcttctttcaaggttactttttccctttttgatcc

SEQ ID NO: 61377 - DNA, 314 bp, Populus trichocarpa; identical to SEQ ID NO: 60559
  Intron number 1 from transcript POPTR_0002s08060.1 (locus POPTR_0002s08060) derived from phytozome v7.0 (chr-ID scaf fold_2; pos 5573099 to 5573412)

SEQ ID NO: 61378 - DNA, 567 bp, Populus trichocarpa
  Intron number 2 from transcript POPTR_0012s12370.1 (locus POPTR_0012s12370) derived from phytozome v7.0 (chr-ID scaf fold_12; pos 12651404 to 12651970 reverse strand)
cacactcgcctgggtctgcaaacctgcgcaccggggtctgcagacacacgtgaatgggtagcaaacccgcacgcctagggtctgcagacccacgaggggttgcagacccgcgtgcttgggtttgttaacctgcgcatggggtcaacagacccccgcatagaagaataaaaaatatgaaaacaaataataataacaattattattattattattattataattattatcatcatcatcattaataaattttaaaaaatatatattattactgtcgaagaaaaaccataaattttgtttgaagagattaaaaactataaaaacttgggccggacaagtttaatattattattaatattataaatattattaaattcattaatattattaaatttgaaataaatattattactatcggaaaaaacatagatttgatttgaagggtaaaatcaattattattgttattgttattgttattgttattattattattattattattattattaacttgggtttgacatcctcttctagaccaccaaagaaacttggggtaggaaaggggtgtc

SEQ ID NO: 61379 - DNA, 794 bp, Populus trichocarpa
  Intron number 2 from transcript POPTR_0019s08560.1 (locus POPTR_0019s08560) derived from phytozome v7.0 (chr-ID scaf fold_19; pos 10067359 to 10068152)
ttactctcggcaaagattttagactctttttcaaggtcattgttgattgacttaataacgtgcttcttatgctcatgatattcccttttggaaaagtttttagagtccttttcaaggtcatgtatcttcttgaaaagggtcaaagatgttagattctatttttcaaggtaagtattggtttgcttaaagaggataaaagagttccactatgtgtaattgaagatttattaagctgtttgattttttctttgttgtagtagttttttatgtagtaaattgtaggcattcagtcttaaaggaaactaaaactctagaacaataaaaatttttaggaatttcaaaatttttaattactatatacatatgtatatggatggatatgtatgtttgaatttgtaattcaagaaaatgcatatcaaatatgagttaactaaattttctccagaagaattaattcgacactgcttgatttgattgggtaggggaaatgggcgagttgagttaaggggcagggtaaacagactagtcgggacttgcaagtatacttttaaatgctcttttccttgagcggacagtaggaatatttgattggcaaccttctgtacttttataagtgaagcgtgcaaaggttgccagtctacagcatccagtaggatctctagatggttgaatagagtcttgagagtctatcttaatgaagttacactgtcttctatttgtttattgtctcgcaaactaatttaattgttcatttgataggtggtggtctttctctggctcctgtctactgttgg

SEQ ID NO: 61380 - DNA, 416 bp, Populus trichocarpa
  Intron number 3 from transcript POPTR_0011s05380.1 (locus POPTR_0011s05380) derived from phytozome v7.0 (chr-ID scaf fold_11; pos 5308511 to 5308926 reverse strand)
ttgggtctcttgggagaattgtccttccaaaggtatggttctcttgatatgaatgatgttatttttagtcccttgtgattgtatgcatatttttttggttgctttgatttctgttcctttctttcatcatttcttttcttctaaaatgacagaaaacgaggcaaaataaccaaccattacccatgtttgacttgctgtcaatgaacactgctacatgaatgtgatttaagactgcccaataactaatctcctcctgacttctcgatttgagcacagaaacaagaaatgttaaagattgaaattatcctttctttttcattttcctgtgtttcttacagaaatggtaacctctaatatttaaatttcttcttgcatgtcaatccagagagaggtagaggaaaatcttcctcctctac

SEQ ID NO: 61381 - DNA, 594 bp, Populus trichocarpa
  Intron number 3 from transcript POPTR_0008s08590.1 (locus POPTR_0008s08590) derived from phytozome v7.0 (chr-ID scaf fold_8; pos 5324383 to 5324976 reverse strand)
ccatcaggtatgctcgcttaatattgttttctaggtgttctctgtgctcggctgcatgcttggttccttattgatttgtatagcatacaccatttcatgaatgtacatgcatttttaacatgaaaacatgcgaagcaatttttggatttcacttcctactagcaaagcagcggtatgctgtaatgatcaaattgcaactaaacaaacatccaagaagcttacaggtggtgttggagactctaggttttcattgtgttatatcaggattagtttatcaggggaggatgtggttgtgtatatggaaaagtaatgtaggcttctatacctttggtggaagttttttggattttgtggaactggatgaaagagtgtgtgaagaatgttgtctgaacttttcagaggatttttaggttaaaccttaatttttgatgtgttggataattgtctgcagtttgtttttgtatttattttgtatgtagttcaattcaattttttaattcttctacttacaacataatatacttgataatcctgctaatttttcatctatgatgtatagccttaccaacctgattacaccgctccacctcatcc

SEQ ID NO: 61382 - DNA, 1006 bp, Populus trichocarpa
  Intron number 1 from transcript POPTR_0012s12920.1 (locus POPTR_0012s12920) derived from phytozome v7.0 (chr-ID scaf fold_12; pos 13282186 to 13283191)
agtctcgtgtccagccatcctcttcttctgttcaagtacaactcttctttttctttttctttttctctctcgatctgtctgtgtgagtttggttaggaaatgaaactgatttctgaggttttgtttgggctctattcgtctaactgttatgtttttctttctttgtttgatagaaaattttgatcttgttctaaggaacaaaataacccctccttatccttggactgcgctttttagctgaggaacagtacagttccggggagatgaaaagattggatcttttttagactcctttgatgttcaagtaattgagattttagctttatttttagcttttaatttttctgggtcctgaaaagttgcaatcatataattgaattggatggactttttcacttgcttatgagcttcttcttctttttttcttctttttttccatgatggaaagttaaatctaagactaagaagataagacacatgagatgcttggctttagatgatgttcaatagctcctttactttttccatgattatttattttcttgctgcaaattgagggattggaagagacaacaaaaaggattcaaaacttttatgctattagaattaagatcttagaaccccttggaaaataatatgattccgtgaaatactttgagagtttggatttatccattctaccaattaggatttgctgtcaaacccaccttctttgactgtctttttttctagatgaattcagatctatgctaggaaagcagcagtcctggctctctctttccatggatgtctccaagtttcaaaatatgatttgcgtggtattggtcataagaaaaataccgtgtctgtctcgctttgatgccttttgctttgcgatcaataatgtattttatgcaatattacacaggaaatataagatttaatttgattcttctggaaccagtcatttacaatctcttttccttcaacagaaaagaaggtggggaggctgctggagtctctactg

SEQ ID NO: 61383 - DNA, 827 bp, Populus trichocarpa
  Intron number 1 from transcript POPTR_0011s16650.1 (locus POPTR_0011s16650) derived from phytozome v7.0 (chr-ID scaf fold_11; pos 18453558 to 18454384 reverse strand)
ccgagcaatctgcagcagatttggctttaaaaagggtacgcttcagcttccttcttaggaagcgtttgggaacgcggttcaacccgcgttcccaaaaaatttgaaattgttttttttttttgctaaaatttaatatggtttgtacgttttggatcgttttgatgtgctgatgtcaaaaatgatttttaaaaaatgaaaaaacatcattggcatgcattttggcatgaaaagttatttgaaaagcactcgcaaccacactgccaaacacgctcttaatattatcgttggcacttttcaaatttgattaaacttgccagctgaggatgagtatacagctttgtgattgaatgatatgccttttcttcatcatgattgaattttttattttattttattttattgaacattgttgctgataatgtggaatgaatgtcattaccaaattgggatggatatggaattgattatttattagttatgaagttgtgttggttatgtagtttgcctgtatccactcgtgttgtgtaactatgtgacgagattaatttgttctttgggtaatgcatttggttagagagcagctattgtatttttacaaggttgttgtttatttgttgtctttgctttgagattaatttatttatcatgcagttttcagctttgcttctgctaaagtttagttcattattatgaagacagatgtatatctttctttcatcctcaccctggttttttttttttttggcaatgccatttaattacttgactatttatttactgtttctcctgcagctaggccaccattccgttgctgaaaatccatctga

SEQ ID NO: 61384 - DNA, 680 bp, Populus trichocarpa
  Intron number 3 from transcript POPTR_0004s22210.1 (locus POPTR_0004s22210) derived from phytozome v7.0 (chr-ID scaf fold_4; pos 21132910 to 21133589 reverse strand)
cctagagaggtatctcttctcttactgaatagggcgtgaatctttgagacctgtgtgtgcatgtgagagtgacagagggggggagggagtgaaaagagaaatgatcttctttttttctaaatctttcttgaatgattttggtcgttctttgaaagtcttttgtggcagctactctcacatgaaattctacctctcttttgtcatctctgttttttattttttttcaagaaaagggaatttcatacgtgtctccttcgaggttcatgcgtgttcagacccagggagagactttttgtttgttcttcgcaacagttttataggctttcactttttttttttttttttgaacttgcctgtcaacgacctggtggaatctgggtcttcaccattttgctcctctctaaaatgaggattttcttttcatattctttccttcccttgttcgataaagcacaagactgaaaatgaggctttataatatagggtgtctattttttcttccatttcccttctctttcacctctctactgctttatgactgtggtctgaccccaccacctctgccactcatcattgcttctctttagataactctctgtcttaagaatttgttttatgttgacaagggcattgcatgttgtacagatcactggagaaacagtaggagaagtaaaggctgt

SEQ ID NO: 61385 - DNA, 189 bp, Populus trichocarpa
  Intron number 2 from transcript POPTR_0004s22210.1 (locus POPTR_0004s22210) derived from phytozome v7.0 (chr-ID scaf fold_4; pos 21133593 to 21133781 reverse strand)
tgattgggtaaagccttatcattcttgtttctccctctcttgtatacttttcttttcagctatcttcttccctcgtatattcaagaaggtgaagaaacatgcattgattgaaaaatgttttttgagtaaataattattactactaactgttctcatttgattgtgtgcagagttatccccaagacactc

SEQ ID NO: 61386 - DNA, 497 bp, Populus trichocarpa
  Intron number 2 from transcript POPTR_0013s08280.1 (locus POPTR_0013s08280) derived from phytozome v7.0 (chr-ID scaf fold_13; pos 7318283 to 7318779)
gctcaagatgttagttttcttggttcttctgctttaattattgaatatatcagagttattatgaatttgaattatttgttaagtaagagtaaaataaaaaaattactgcttgaattaacctatgtccagatttctattttttttttaattttttttatatcagatgttagataatgcatttttatgtggatgatggaaaaaagaaactttggggggtttttatattgaaatcctgaagaatagatgagcaaaaataggaacaggagataaaatttgtaagggaagaagaatttataattcaataagtgcaagattgctggcattgtattattgtgtttgcaaaataatgacggtcatcattattatttgatatgctatattgtattgcttaattatcactgtggcattaggaatctaattttttgatgtgttattatctgtggtaatcaactagttttattgtaaactcatgcggctgactgattttgcagcttaca

SEQ ID NO: 61387 - DNA, 825 bp, Populus trichocarpa
  Intron number 3 from transcript POPTR_0013s08280.1 (locus POPTR_0013s08280) derived from phytozome v7.0 (chr-ID scaf fold_13; pos 7318781 to 7319605)
tgtctggagagtaccgatctcgtctcataaagctggttagtattgataacttttaagtaaaggctttgtttgtgtgtttgatggtcatgtttctgtttgtttttgttgagtggaaataactgctctatgctgcagctgttatttattttcatgtttccattttttttttgtgttatccttgtgaatttcattgcgattaatgcaggatgtgctcttaaattttgtgttcgctttatcagctcaaaatcaatatttcttgtttgggaaccctcaaaatttagttttagtacatttgtgaacttatactactaaatgtttcccatgggtatgctagtgatgcttgcttatcttcctctcttactccaaagcattaactgctatgtactattagtatggcttgctatgatgtgtatttgactacatgttcttgcctgtgcttcatgttttgttttagatggaatatatatgagaatatttattgagacatgagaatctttattgagacacaagtgttgctcagattgtcctttttcattaagtagaattttgccttggggcttggagggtggtgccttttccatttagtttaacttgtgagtctaatactttgtttgtctagtctcttctgattgttaagtgtccatgtggcatttattcatgaacatatacttgcactatgccttagttctgaattatttatttatgtgtcggatgccttatgtcctcttcattggtctatatttggctctccatgctttttctcaatttgtgtgttactttgcagtcactcttcaatataaagtcgtttccttcttttcaggcaaa

SEQ ID NO: 61388 - DNA, 419 bp, Populus trichocarpa
  Intron number 3 from transcript POPTR_0001s18500.1 (locus POPTR_0001s18500) derived from phytozome v7.0 (chr-ID scaf fold_1; pos 15557448 to 15557866)
ttgggtaattatttacctttttttttttaaccttttcttcgtatcttctaaggattaaatatccagtctaaaaaatccaatcaaaaccgattttattttcaaatactgaaccaaaggaccaaatctatcaggtgcattctagttctattttttaaaaacagaataaatatctaaatgggttttctttatttgatttctcggttcgctctttttaatttctaatatctaaaactaaaatcaaactaaaccaatttttttaaaacttttctaatcaaatcttctgatttaatttctcaagttgatttttacaaatattctaaataattcagttattttactcaccggctgttatctgctgcaaagtcaaacaagctaattaaaaagacatttgattgaataaaccacaggagagtggttca

SEQ ID NO: 61389 - DNA, 933 bp, Populus trichocarpa
  Intron number 2 from transcript POPTR_0014s11530.1 (locus POPTR_0014s11530) derived from phytozome v7.0 (chr-ID scaf fold_14; pos 8556472 to 8557404 reverse strand)
gagaaagggaattatagcttcaagtttgtggtgagatctgatcttgcaatactaacaagttactttgttggatttgtagctgttttctgagtttggttttgcaggactataaatgtacagttgaataccgataaacttaaatttaacaggtttaaaaaattatgagaattatcctttcttgaattcagcaggaaataaccctctttctttggcaagaccaatagaatgagtatcctataaaaacaaaaataaaaataattatgcattttagttaggaaaagaaaataaaaaataaaaaaaattgatcattgacagaaatacaattattataagtctacatgcaccacatttgatcactgggtggtgttatgcatctagggagacagtggataaccaaatttgatcactgggtggtgttacatgcaccatctgcatggcgagaacacctcagtttttttttctaatcttttctaaggttaaaaacctgaaatacccttgtccaatagcctatttttatttttttatcttggagacgagaaaatatttttactgttatgaatattgtaaaacccttggtcaacagttttaaattttgttgactctagaggtgaaaatgtatttttactgtgttaaaaaattttaaaagacacgtatacctccaaataatcttttaatgaccatcgagttagagaaaaagatcaaaatacccctagatgaaaggcttaaatttaagtcacttaaggataaaagaataatttcactgtaaaaatccataataatttatgtgtagagctacagtaaaatccccatgcagtttagcttttgttaatatctttgcttctttgtgtctatactgtgtcgtttgtaacatctgctgaccttgaaacaggatcaactattaccaggaaggtaaccaagttcatccccagcttg

SEQ ID NO: 61390 - DNA, 694 bp, Populus trichocarpa
  Intron number 1 from transcript POPTR_0010s06770.1 (locus POPTR_0010s06770) derived from phytozome v7.0 (chr-ID scaf fold_10; pos 8039765 to 8040458 reverse strand)
ctctctgctaacagattgcaagatccacaccacaggtatcttttcttcctttccttcgttgatctgatcatgcacacccttttctcttctgctttgttgccgggaaaatgtggttttagaaatgtgctttaactccctgcctgtagcttgttgaaggctggttataagcttggcaattcaatacattaagtaaaaaacgagttgttcatcaaattggaattctgggttcattggctattggtgatttggagaaaatgttattaattacggagatataagattttgatttggtatgcctaaccagtttctgattcaatgtaacttgggttttattcatgttgacaaattgaagtttttggagttggatttttgtgttttatggctcaatttgaagtaatttgctgcttctttgcggaaacctagcccttttttgctgtctcttgttttttccccactctttctcgattttaactgaatttgtttccttgacggatctagatagaggttaaaagatggtgcttgttcaccttttctttgtgcgatgcaccataaaaatgtttaggtattctttttgttgttttgttaacatgaggccacctttgggataaaaatcctgaatttgaaggaatgggataaaaaattctgaagtaactttctgatttcttctccacttgcttgatcagtgttctctcag

SEQ ID NO: 61391 - DNA, 773 bp, Populus trichocarpa
  Intron number 1 from transcript POPTR_0015s12370.1 (locus POPTR_0015s12370) derived from phytozome v7.0 (chr-ID scaf fold_15; pos 12642097 to 12642869 reverse strand)
aaactgactactcctttattggattggaaagggtaagtataccaaaaatccttctcaagtacgtagatagatattctatttttttagacgtcagaataaaataacaaatcagattatttctatttgaatgttttcatttcgttttcttcattttattaataaagtgattttaattggatgtcatttaatttaaaacggttggatgatggtaagacggtaagaggttatactaattatatgtttccggcaacactcttctttaaattatagctcaaagtgttcttatgatattaattatagctcaaatattgagaacattttaattggatgattaattttatatatttgcttttattaactaagactaattgaatttcttacaataaattattgaatgatgtttcaccgctatcttcaacaaaaacaaggaggagcgacatgaatatctcgaggctagagacaaatatttgacaggtatgacggtcatgtcagcgtccagtcccgatgaggtatgttccacttccatatcaatactttaaaacctttcaatttattccattttttcctttttttaaataactatcaaaactttcaattttccttacatttctattttacttcctctcacatattcccatatatgttattatatgtcataaaaacattcccaaaaaagaaaaattcaaaaaccaattttaaacagtaagctttttaacaattagggtaacattggtaattttaaaaactagagggataatattgaaaaagtttaa

SEQ ID NO: 61392 - DNA, 954 bp, Populus trichocarpa
  Intron number 1 from transcript POPTR_0008s12470.1 (locus POPTR_0008s12470) derived from phytozome v7.0 (chr-ID scaf fold_8; pos 8065820 to 8066773 reverse strand)
tgactcgctactctcctcagggtgaacacactcgcgtatgcctcctccttcacttttttattatttatacaaattggatttatcgacacaagtatacttagatttcattcgttatctacaagtgatttagggaaacataaacaaatgttgctatatttgtagctcttttcggtttctcaatggcatgtctctctccaatagtctatggaaatgcgtgttctttatttccagtatgttgaaaattgaatttcagaaaattatttgtgtaatttgggagataatccgtttcttcatgcgtggagttgattattactagtatgagttggaattggattaagaccctgtttgtttgcttttcaaaaaaattgattttttctcttaaaattaatttttttagtgtttttttttatgatagttttgatgctgatgttaaaaatgaatttttaatttttagaaaacaaaaaaacattgtattgatgcattttcaagcgaaaaacactttgaaaaacaaacattaccacaatgccaaacactacctaagctgctagatttttcttgatgtcaccttgtttgtctgtctattttacagtcatcatgatgtggttgaagttgagctttgagatttttatttttcttttgatgagaaaccatcttttgggggcatactaatacttaaacattttgtaaaataaaggttgagatgataatcttctctcatcaatctttaattattacttaacatgattgtatccatgtaggttcacaacatcctgaactgctaacagtacagtgagaaacaatgcattgccagaaattttgatgcagctatctagttctagttatttgtcttatcatgtctgttccttttcttttctaaatggtcatactgttatcactgatttcttatgcaaactggcaggttcaaaagcatcgaaagtacagacagcagattct

SEQ ID NO: 61393 - DNA, 389 bp, Populus trichocarpa
  Intron number 2 from transcript POPTR_0009s11440.1 (locus POPTR_0009s11440) derived from phytozome v7.0 (chr-ID scaf fold_9; pos 9506521 to 9506909 reverse strand)
gtgtcttggctatacttggaccttgcctggcgtatcagttaaatcaccgttttgttgatttaaaaaacaaaaaatttacttcacattattttttgtttaaattgttttgaaatattatcatcaaaaataaatttttaaaaataaaaaaatattattttaacacatatctaaccaaaaacacctgaaaaaacttttatcaccgtctgttagtagcaaatgcctccattaacgaagttaaagctactgacagaggtggaagagaatttgatagaagagggattagatggcaacaaatggtgtttctgaagccattaccgggcagtgatggcaacaaatggtgtttttgcctcccaggtcccacagtacattcgggttactgagtggatctg

SEQ ID NO: 61394 - DNA, 762 bp, Populus trichocarpa
  Intron number 1 from transcript POPTR_0004s16140.1 (locus POPTR_0004s16140) derived from phytozome v7.0 (chr-ID scaf fold_4; pos 16582386 to 16583147 reverse strand)
tctgtcgttgctgtcaagaatttacttaataataagtgagttttcagttttgttttaattatttttaaggttctgtgtgttttgctttaattgttatagtttttgttttgctttttgttttttactgttttgtttatgatggcaattaaagttttggtcttttaattatgggattaaagtagagggttactttgttcttttattctttttcatttttattgtttaatgctttgttcttcttccttaacattatcctcatacctttgagcttaggtgggtttttttttgtttgacctttctctttctgtccccctttgatttatgaatgggaaggctttattttctttttgagatgtcgaaggattgatctcattaaactatatgtttagcttttaattctttttattattattattactgaattttcactggattttggagttgcaaaagcgaccctaaccccccccccccctccctactgttgggaaactggaaagataagaaatcctgaaaatgttacatggtttgtaatgaaatcaatgtttaaatacacactattgccctgattcgttacagaggacttttgagttttcttttacttattattgttacagcgtgctaggattaggttatgaaaattctcatcaaaagctcaagtcttcgaatatttgtgcactaaaatatttatctggatggacttaatatgctgcgaactttgtatttctaggggtcaggcggagaaggagtttaaggtagaagttg

SEQ ID NO: 61395 - DNA, 799 bp, Populus trichocarpa
  Intron number 1 from transcript POPTR_0006s18900.1 (locus POPTR_0006s18900) derived from phytozome v7.0 (chr-ID scaf fold_6; pos 17648414 to 17649212)
attttgtgacatttgtatcaaagcaattgagaaaggtatgcgattgaacacacatttcgacaaagctggttggaaatatgttatgaattgctttaaggagtagacttgacatgcattaacgaaagcacaattaaagaataagtgagatgaaataaaaaaggattggagaatatggaaaacgttgatttccaaaactggagtaggctggagtactaaacttggaacaatttcggcaactgacgagtggtgaaaatctaaaatcaaggtctgtttttttgtttttgttgtgtacaattactatgaacttttttattttttattcttacaatcattatgattcatttatatctttagtttcctttgttgtaggagatacaaggagctagaaagtttaggcattctggtatcgatctcgcattgtgttgtaaatatgatatcatgtttacaaacattatggctactgatcagtatgcttgggctccatcacagggtttgaattctgatgatgatggtttaggtgaaaggagaaagaatgcatctaatgaggatccacatctagaggaaggtagtggtgattcagaggagaatactttaccaaattttatagaagatgtcaataatatggttgctggtgtaaattttgtcaatagtagtagcaatcctagtagtagtagtgtgaagagaaaaggtgttcaacaatgtacacaaaagagtgagaaaaaaaaagggttcgggaatgggagcgcaattgtttttgcgtttagatcaattggttgatcgtgtatctactaggagtgaa

SEQ ID NO: 61396 - DNA, 963 bp, Populus trichocarpa
  Intron number 1 from transcript POPTR_0005s12490.1 (locus POPTR_0005s12490) derived from phytozome v7.0 (chr-ID scaf fold_5; pos 9253829 to 9254791 reverse strand)
gagacctctatttgtttttcttcatcattcaccaggtttgttaaagtctgcatttcatgaacaagtggctttttgttcacttcgggtttgttgtgtatgaatttggtggagatatgttgctcttgaaaggctgtatttgtggtctttttttgttgttttctatgtgatatggagctcaagattctagcttttttcgggaatgattaggttatttgagatctgctgaattattctttggtgggatttccatgttttgattagtcattgagtttggttgagttttaggttgtacattctgtgcttgataattcctaagattgcctgtgaagtttagatgtttggatatgctggactgtcaaataattcagagtttttggttcaaggaactgaagtaatctgaaatctctttgtgtttatgttaacacttatgtttagaaaaggtttggctggattggggggtcagccatcgtgtagtcttagtgatcagtttttgattgagtcatggattttgttctccctttgttttgctgatagataaaatagatcaatacaccgctaacaattttttacgagtaggataaaaataaacagaagaaaaagaagttttgaccaaagatttctgtcttgcctgccattaattagattgtgtgtggtggaatacagcctattgttcatgaaagtctttttgatgtcaagtttaatttttatgtatcaaataaagaaaaaatattcaatattgttggcctgcctatgagtttgctacaaatcctgcactttttaggtgttggttgtctttccattgcacttatggcctttcagtggttttttattcggcgtgcctaattgattatgatagaggccattatttctgctgcaaaatagactggctggtaataattttccttaacaaaacttttctgttgaagattacttaccataggttgaactctgttggcagtcaac

SEQ ID NO: 61397 - DNA, 606 bp, Populus trichocarpa
  Intron number 1 from transcript POPTR_0006s13340.1 (locus POPTR_0006s13340) derived from phytozome v7.0 (chr-ID scaf fold_6; pos 10549775 to 10550380)
cccttttcttccagctctcaatcatttcagaagtgagtctctctctcttcttctttgttttttcttcaagaattacaaatatttgtttcctgattcttatgtcaaatactgatgcttccctaatttcgccttttagggttctgattaaacctttatttattgaattagggttttcttttcttttttcttttttgatagatttagattaccacctgtttggttcccgataaatttgattgtgcttccctaatttatgcataaatcagttcaagaaaagaaaaatccagcagaaaaagaagtatttcaatcaggcactcgctttaacgcttagcgctcactcacgaggtgctcgcctaggcagtgcgtcattgaaattcattgcctgatgctaataaaagcattgtggcctcgccttgcctcgagcgcctcagcgcttcttgacaacactgctgtcagctagattaagtttagttttgagaatcacgtgacgatttggtctaatttctggagttatacggtggactgtcatttattagtttttattattgtagttgtgttgataatgaagttgaaatgaaaatttttcttcaggctacaccattgata

SEQ ID NO: 61398 - DNA, 363 bp, Populus trichocarpa
  Intron number 1 from transcript POPTR_0008s06240.1 (locus POPTR_0008s06240) derived from phytozome v7.0 (chr-ID scaf fold_8; pos 3674161 to 3674523)
taataaactcgaaaaggatcatcttttctgcaaaggtgcatttttcttttcctccttatccatgataaccgttacataatgtcatataattaattctctgcataatttagttgataatataatttatttcttattgaaaactcgattagatagtgtaatttggatctatcattttttataattctagatatcaacctttctgtttgaatcatccatcctttcttttatatttacatcgtcctgagttataattgttttagtgtatagctatttgagttttttttttttttcgagaaattgaatgacagcctcactttctcttatttttaatttacatcagggtgaagaaattattttccctta

SEQ ID NO: 61399 - DNA, 1009 bp, Populus trichocarpa
  Intron number 3 from transcript POPTR_0008s06240.1 (locus POPTR_0008s06240) derived from phytozome v7.0 (chr-ID scaf fold_8; pos 3674975 to 3675983)
ctgcactagtaggtttgttcttcttcacagaaatctgagctttatgtgttgttttttgttagcggttttgtgaaactctatgtagcctagattgatcactcggggttttctgctactggaaatcctggacgtgatttctatattatagccaacaagggcttagatattatttttgcaaccactgatgattggtttgagttatttggtagcaggccttttctagatcctttcagcttcgtttctaacatttgctatttagaaaactttggaggaagatttttgtgctaagcaatcaagacttcttttgagatttacttgattgtttgaaactcgttctgctattctataaaataggttttggagatagcattgaaaaggttatgattttagcatttattgtatatatcgtagtgtcctggtgtgactgtaataatatcttaagaactatggacgtgttatacttttagaatttctaaagtagattgcaagaataaaactcaacacctggaacatagttttttaacctcgtggagtgcagttgatgaatgtaggccaggttcttccttgctcttttaggggaaacttgatttcatttcttcctatgaacatagttatagctctatgcgtcttacatggaaatttacttgatcaccttggcaagttgctgactgcttttggacatcgtttttccaatatggaaattgctgctccagttctatttcttgacattcagaaaagaatgaaaatgaaatgactataatactgccaaattctagaaaatttggatcactatcacttagaaagtctaaggtatagataatattgtgttcaatgtaattggttatatcatgccatggcatacagataaagatatggttgcatggataacaatgaatcaagcacgcaacttctgtattcctgtgaatcaatgccaacatattgtcatgaattgttaaatcgatatcttgttgcagcatttggacggtggatctggcatatttactgcaga

SEQ ID NO: 61400 - DNA, 644 bp, Populus trichocarpa
  Intron number 2 from transcript POPTR_0004s05220.1 (locus POPTR_0004s05220) derived from phytozome v7.0 (chr-ID scaf fold_4; pos 3967679 to 3968322 reverse strand)
tggcatcatcttcttcaacaactccatcatccgtagtaatgtatcaaggtatagagcccccttcaaaccaaacgtcacaccaccataacaattctcatctatggccagatgaagacaaggcaagtttaaaatttgttcgtatcataactcatttcagccccttgtttgatcctccctcgatttttatttctttcttcttttgttgtttgcaattcatcgatcgtaagattaatttttgtagggttcatgatccgttgaagaagagtattatgtattagtccggatcttttggtatttgagtatccgaaatataaaaataaaaaataactattgcaatcatttaagcctaaatacttcactgattggctgtttttggcatcctcttataacaataaaagaattggaaaataataatcttttttttcctctaataattatgattagctcgatgcatttagtttgatttatttttatgtgttcttttctattgtttttaaaccaccaaatctctcattattatcaaattaatgaaatttaagacactatatttctgtataagttcatttttcataaattccatctatctttcttgcacttaatctccctttttaacttatttgattgtcaaatttattgatgcatag

SEQ ID NO: 61401 - DNA, 566 bp, Populus trichocarpa
  Intron number 2 from transcript POPTR_0001s28240.1 (locus POPTR_0001s28240) derived from phytozome v7.0 (chr-ID scaf fold_1; pos 27005325 to 27005890 reverse strand)
ttgttgttgatcctcttccggagggcttagatcgggtaagaattttttatttttgcttttgccgccgttgcttatattatttctcagcttttattctgttacatattgatttcaaagtttaaattattgtgaccttgaatttgctttaggaaatgcctcttagtcattttttattcttctccttggctcgtttacacattgttaccttgttaatttaaaagtgttcctagtgaattgatgatcctgcaagtattgtgtttcatcaataacatgaattatacagtttcaattttcattttactcaattatttctggggctatgagaaatcttgacatttctcaagcatcttggttttggattgatttctatcaataatgatgcagacatttaatgtgtttcccataccaaatctgtggctcttcctaatagtagtacaaaagaagtcaatgctcatggtttgcttctatcaaattatcaataattagttaattgcataatttgctcatatagccatttcatgctctatccagggctatattgtcttaaatagaccgtgggcttttgt

SEQ ID NO: 61402 - DNA, 898 bp, Populus trichocarpa
  Intron number 2 from transcript POPTR_0002s15960.1 (locus POPTR_0002s15960) derived from phytozome v7.0 (chr-ID scaf fold_2; pos 11897675 to 11898572 reverse strand)
agggactgggaggaagcaacaattagcttctcttggtaagatttctttggaaaatttgtcttctctatttcatttggatggacttaaaatgaattgatgactgtagctgagttcgaccagaaaggttattgccttttgtaagggattatgttatgtaagggattatgtagacatatatgagcgcaatattactgctttgtgtaagggatcgtgttcataggctttaatcgcatcttgatgcatctttgaaattgcacaggaagaattcaaaaactgttacatgcgttcaatgacattctaagctagatcaagtagggccaaacagagcctaaaacaggttaatttaactttaaaatgatggtttagtaatttagtgtcaaacaaaaagataaaaaggaagaaatgattagttagtaatgcaacctttagtcgactgtaaagcgcataagataagcagctaacacagcttaagtctataaacaagtctcaaagttaaccattaatatgatgaagcttaaacgagaagccagcagcagtgtgaaactactgaaaggaaaaattatgtccttgatgaaaaattactatctaattatagtgctcaaaggtcctgacaatctctcacatgtagccgtggtttctatatttatgtgtgtatgcacatgtattacaaaaaaagaagtgatattctcgtgtttaattatttttaacaaaggtatctagatttgtttaattcttggataatttcaagttcctttcaccttctgagattgtgaagtcaattaaaataagatcaagtaatggtggatttatccaagatctataatctgaacttaatttgttttttctgctcttctgttggtttttgaatgatgcaaactgtaattgttttgctaggcga

SEQ ID NO: 61403 - DNA, 847 bp, Populus trichocarpa
  Intron number 3 from transcript POPTR_0002s20710.1 (locus POPTR_0002s20710) derived from phytozome v7.0 (chr-ID scaf fold_2; pos 16811599 to 16812445)
tcactcaggtttctttctttctttctttctttaacttgataggaagtttgtttcatttcttattgctcaatttccagaaagtttaaatgcgaatttccagtagaacgttaacctaggtttggtacctaggtttggttttgcaacttctatggttgaagctgaagaatatgtgattacatgtaggaagctgctccaatattggttgcgttcactcagaatgtaatgcattattttcttcttaatcctaaggtgtttgcggttgtagttgtgtttggatcatcatttgtgacctggaatgtaggtttttttttacccaaaccgtgatgctctttttgactgcctgagatgcccaattagatagtttattttagtcgaacaaatcaaaaggtataaaatagaatgccttacaaaaagttataaaattagacttaaaaatacagtcatatgccaggatttccaggggaaaaaacatccatacagggagccatttatcactgcttggttacatagcactcacaagatatatctgcaacacacacacacacttgattatactgtcaacattctggcactgacatggtgttgttcaaaatggcttctatgcttttttctggtatgcattatattgccagttgacctgagctgaagtactctgttaactatcagtgatttgtctctaaagatttgccaagttcatattttctggactgctagtgttcctgtttactaactggagtaatttatggattcatattttcatccgtgaattttgtttttgttcttttttctcatgacttgctgacttttaacaggtccactttgtccctgataaccgaaacaagcttct

SEQ ID NO: 61404 - DNA, 764 bp, Populus trichocarpa
  Intron number 1 from transcript POPTR_0003s11360.1 (locus POPTR_0003s11360) derived from phytozome v7.0 (chr-ID scaf fold_3; pos 12200607 to 12201370)
ctcgtcttggcaataggttaaatctcttctccatgttacattcatatatacatgttggtgacgaacttgcatcaaagcatattgtttaaatattttggttgttttattaatggtgtctgggtggttgtcttcatggacatggttttctgctaacgtccgtggagtaggttaaaatgttactaatgtgaaggttaagcatgtcttgtatcgccgtgttgaaagatcagtataatgcgttttttgaattgaagtgtttgacaaggtaattaaataacttgtagtcgattgcatttgaggaaaaaatgcaagtaatcaagtctttagatttccgagtatgcgacgtgatagattgtgataacatatgattttgaaaaattaataatatttgaaacctgcagatatttcttcttgttcttatattcgatcatatgagcagatagaaaggtggggtataagacagggccataaaatttcaacaaaaagagtcatttggatctgcaagttgctataaagtgcaagaataactatgctatcgatcgtggttttataaattagtcgtcattttaatagttcattaattgcctgcttttcaaatgagctcacaaactaagtatatattattgctgcttgcttcagattcaagtgatgaataatttttaatgaattttcggcgtctgattttggaatgaaagtaaaacttagagttggatattttttcctttcacttaggtggtccaagattgctgctagattgccaggaagga

SEQ ID NO: 61405 - DNA, 987 bp, Populus trichocarpa
  Intron number 1 from transcript POPTR_0019s03640.1 (locus POPTR_0019s03640) derived from phytozome v7.0 (chr-ID scaf fold_19; pos 3712971 to 3713957)
atcagtggctctctcttcccgatcccaataagctggtgccgttttcgatatctcttcctatttcttttgcagttttgtgttcatttcgattcatttttttactttttagtttaataaattattatcacaattatttttattttgaattgtggagtgcgtgtgatagatatggaaacacacttgttgttgatttggtatttgatgaagtaattatgggttaacttgatgctttttcttttttagtgctacggaaaaaatgggtttttgatacccaaataactcttaaaacaatataattatttatttaattaattaacatgctaatgcttcgaattagtgctgtgctaggttgaaaaatcatggattggttcatttttattaacatttcgatgctgatagagttgctttgctttgttgttatggtcatataaatgtttgtgtatacgttgtatttttagaaagagattttttcctgtttaaggttaaggagagcagttcaacggtgatgcttgatacctatgtgtttgtcatcaacgcagaagtccgagtcttgtagaattgttagtctgcatgtgtaaatttgaacagggaattaatttagttttttgttttcttttttaatcccccttcttctctttgaatttatgttcattgcccacaatgcatttcattgccagtattgcttttttgtaatacttgtgtctgaactttgttccatggcttggatgacaaagtcatcgtaacattttttgtgtactttctgttcggaaaggaaacacaactgatgatttatttttatagagaccttttcttttatgtggttatagaagagaagttttaaaattcttgctttcatgatttttattttgccgatcagttcttttgtaagttcttataggtgatgttcctttgagtaaaattgtttatataatatgattgcttatttctcttctctcttcatatttgtccaggtgacatccctggtta

SEQ ID NO: 61406 - DNA, 990 bp, Populus trichocarpa
  Intron number 1 from transcript POPTR_0011s01260.1 (locus POPTR_0011s01260) derived from phytozome v7.0 (chr-ID scaf fold_11; pos 764038 to 765027)
aggagctgcaggtggcgtcctgttttggctttaaagcacgtgggaggaagagacaaggggaagaaaacaaaacttcccttcccctgctgcacgtccaagggaagaagaagaagaaacattgccgcctcaaaacggcaccgtttcatctctctctctttttttcaacgcatgaaacggcgttgtttttccaaaaacgcgccgtttcatttaaatgaaaactggcgccaaagcgccagactgcaagtcaattcttcaatttgcgcgcgttttgcattttggtccttggtctcggatttcttcaattaagtccctaattggccatcaaacttcaatatttatgcaattaagcccctgatttgacaaattaactctcaaaaattataatttgacctcaaaaatttaatttcttccaattaaagcccaaattaactccaaaatcaaaattaatatattagattccatcattgttatatttttataaaagaagtaaatagaactttagcttcattaattatattctcataatagttttactttataaactaaacaagcaacacgcagatcctcatttacctttttctgtaatataaagggttcccaagctacaagctaggtagaggagcgtttcgatcattttcatcactaaaaggtacgatatacaaacagttctctttgagtgcttacttcctaattttgttttccattatattaattaatgatcggtagtattatgagttaatataaatttatttttaggatttcacctaacaattttattttattttttgatgaagtcgagaatttcattaatatctcttgtagccagtaaaatagtgactatacaaagagagaaagaaaataacaaagaaagtatcatgtaatttacaaaacagagcagtactaaacatgatttcacctaacaatttaattagctttgagttgagattgttaattaacaatagttacttgcattttatgtagagagcaaat

SEQ ID NO: 61407 - DNA, 403 bp, Populus trichocarpa
  Intron number 1 from transcript POPTR_0001s16880.1 (locus POPTR_0001s16880) derived from phytozome v7.0 (chr-ID scaf fold_1; pos 13678207 to 13678609)
cttataaggcggttattcttcaaaaaactcaaactgtacgtactcttttatttatttaatgtttatttattgttattttttgcaacccagaatttgtagtctgctgcggctttcatttttttccttagaagaaaaaacagaacagaaattgggaggtgatagagactgatatttgtaagattctgtgtatataaggaaggtttagattgttacacaggcattacttgattattgggcaggactaaaagttttgcatttgtttagattgacaaggaactgaagtcgaaagctctgttttgggagtcttgttggctgtttctttgattatttcacaagttgcaagaaaggctaatatacatatgtacatgttttcggtttatgtttgtcagtgtatatacaacga

SEQ ID NO: 61408 - DNA, 609 bp, Populus trichocarpa
  Intron number 1 from transcript POPTR_0009s10330.1 (locus POPTR_0009s10330) derived from phytozome v7.0 (chr-ID scaf fold_9; pos 8896097 to 8896705)
atttattgcaaagcagctgccttcaacgacggcaggttattacctattaagtaatatttcttttctgttttagaaagatggaggctttgatatgtatgtaagaaaggaagttatttgcattttattgattgtttttttctttatggtttggaattattttgtgagaaaagggtggattcttggaagagagttttggtttttagcttgaattcttttagttgttattggttttgttaggttgttattggttttgttagtttgttattgctttgttttggcattaatgagcatttgcaatgtgtttaattcttgggacttctggaatttcatgaccaattttgtttgtaactgggttagtactatttaccatattacaactatagtgtcacaatgccataaaatttagagattgtctactttaatgtaccaaaaaggaaatatattgtcatgttagtatagaaattggtgaaatttgtagcttccaagtgaacaatcaaaagtctatgtttttggtaatgaattttttgtgaaaaatggtttgtttgattgataataacacctgttacttctgcagattgccccttggatttgagtggatcaaactttacc

SEQ ID NO: 61409 - DNA, 898 bp, Populus trichocarpa
  Intron number 2 from transcript POPTR_0008s14950.1 (locus POPTR_0008s14950) derived from phytozome v7.0 (chr-ID scaf fold_8; pos 9962236 to 9963133 reverse strand)
aaagtgcttttgcgcttggactgcttgctgtcaaggtgaaccagttcaattacttttatatctgtatgttgcatgtggtgtttgaataatagagtgaaaaagattttgatttcgaggtttccttttctgcatagttaacttgtaatttttttttatgttatgctgattttattaaaggaatatagttgtgttgttgatcatctactaattgaacagctagttatcttattctttataaagaaattcggcatacaagaagggaggttttaggataaactttctttttactggtttcaaagatttcaaagtacggccacgagttctatgatctgaattttaatgaataaagcagttagcatcgttcatttactttgtcgtatgaacattgtagctgtagtggcacgcatttagtccttgttaggagtatttgcaggatattatgtgaatattgtccccatcatgttatgactgaagccaagaaaggcaggcaaaggagcatacatcctgctgaagaaaagaatcatgtgacattgttaatatactcatgattgttttgaataaaaatataggttgcgcttggctatgcaatgacaactgaataattgcagaggttcttatggagttcgaggcaggaatctattgtctttgatggaactatttcaaaagaatatctaaaacatcattgaaatgaagcacggttaatttttgaagcattgagtgattcactaatcttttatgttgtaccccaaatacatatttggtgtaaggcatttgaagatttttgttgaaaaataatccagatataacattgaacctgtgttccctcctaaatcatgctcttatcttgtttctctttctgacagccagagcatcagcaaatcattgtcgacgctggggc

SEQ ID NO: 61410 - DNA, 189 bp, Populus trichocarpa
  Intron number 1 from transcript POPTR_0002s18930.1 (locus POPTR_0002s18930) derived from phytozome v7.0 (chr-ID scaf fold_2; pos 14815131 to 14815319 reverse strand)
tggaacaaagactatcacgaaggagtgcttgtcttgtgaatttcattaaccagataatttaatttatgtttttttttgtacagaagaaaatcgtgttttgttattctcgaatgatgtctcctctccgatctctttgtattttgattgaagacagccagaagcctcaccgactgaattttcgagggcgaa

SEQ ID NO: 61411 - DNA, 258 bp, Populus trichocarpa
  Intron number 1 from transcript POPTR_0008s04960.1 (locus POPTR_0008s04960) derived from phytozome v7.0 (chr-ID scaf fold_8; pos 2890692 to 2890949)
tttaatcacgtcctcctggcttttatagaatttttgtttccaacatctggcgttttctttgccctgtttgataaccatttattgcagaaacttgaaagttgcagggtcctgagttcaactgatttgcatgaaagatgaaaatattaaacaaagtgattggctctgctcagtattttgatgcttttaataaaaattaagttgtgtaattgtatcctattaatgtgctttgatgcgtttttagtatttgggtgatcttag

SEQ ID NO: 61412 - DNA, 309 bp, Populus trichocarpa
  Intron number 1 from transcript POPTR_0014s17220.1 (locus POPTR_0014s17220) derived from phytozome v7.0 (chr-ID scaf fold_14; pos 13360975 to 13361283)
gactccaattcccaacaaccaggttccttctctttcctttattttctccatctcatcaccgtaagaatcacagctttgaattggaggatcaagacaagaataaccctttatttatctgtttaattttcttctagaggaattaaattattttcaattgatgattctatttctagctcccttttatatagatttggagaatctgtaacttttgatttacttgctgttttttcttttcatgtcatgggtagtttgtaatctgtaattcttgttgcaggtagtagccctcctcctaaaccgtgggaacgagcg

SEQ ID NO: 61413 - DNA, 323 bp, Populus trichocarpa
  Intron number 1 from transcript POPTR_0010s18410.1 (locus POPTR_0010s18410) derived from phytozome v7.0 (chr-ID scaf fold_10; pos 16653051 to 16653373)
ttggctttgtaaagaccgtcattgataacaaggtggttttctcattattcacaccaaaacccactttgggtacaatatctatgtttcttatcaattctcctttgattaacctctctactttttattctcatttatccattggttttgtcagcaccaagacaccctttatttctttttttaagtttcgttttttcaccatttatccatacctgcatctgctgcatgctcgcttgctttctggtgcatttttgtgtgtctacttttgtgagtttttggtattgaactgtaaagttctgttctttgtatcagaaagagcattgaca

SEQ ID NO: 61414 - DNA, 611 bp, Populus trichocarpa
  Intron number 1 from transcript POPTR_0012s01520.1 (locus POPTR_0012s01520) derived from phytozome v7.0 (chr-ID scaf fold_12; pos 1142503 to 1143113 reverse strand)
ctttcgcttttgttttcgggggccttccgcctctggtggagttactagcagcgtgggcctggacggttgcgttggctgtcgtgattgtttgagtcttccggagttttcgcttttcgtgttctttttttttcctgctcctggaagctggatcgtttcgttgttgacggctatgttggtgttgggcgtgccatggcgaaattgcgctgggcagttgggtttttttttttttaagagggagatgagaattgccaggggagatgggttgcggtggcggtccgtgggttttggctttgttgagtacagaggcattaatcttctattacaaagaaaaacaatagcaaccgcgacctggaggaagggagagacagaagaagattaaaattatcgaccttgactggtaattttctttgattttcttaaatggatctttgaattaattgtttattattacctatatagttcctccccagtggaggagtgttgcagtgatggggcatgctaatttctatgttttaataactgattggttgactgaaatgaattggcagactatggaaaggtttgccattctcgcaggtctaacgaccatttcaaagctcaatccaggattg

SEQ ID NO: 61415 - DNA, 723 bp, Populus trichocarpa
  Intron number 3 from transcript POPTR_0995s00200.1 (locus POPTR_0995s00200) derived from phytozome v7.0 (chr-ID scaf fold_995; pos 793 to 1515)
atttgggcacatatacggtatgtacaatagcttattaatttgctagggtttttggtatatttgcggtttttgtttttggttaagcacataaacaaaggaaaaaaaatattctgtttaatttgaaaaagtaaaattagaaaagccaatactatgcttttgaaaaaccactttatttaactgatttttcacttttatttttctgaaaataggaaaaattataataatcaactaagtcatttaaaagtttgaaaacttgacacaaacctcattttttacccaaagtattcttcattattatttatagaaaaatagttaaattaaaaaaatctaaaaattaataaccgagattaaattgatcaaaactaaatagggaaattaatattcttcgtatactaaaaaaaataatcaattataatttttacattatttctctagtttttttttagtttttaatttaagaattcctcttaaaatagtaaataagagtattttgggtacaaatagagatctcaataatgttttctagaaaattcaagatattaaacatggagggagttttataaaatctttatatttttcaatggtctctgtaatttcacaataccttaagaaggttattaaaggatgcttattaaaatattttgttcttgatcacaaacactaatatttttatttccctctgtttccttttttcctgcttttaggctgagagtgagagaggtg

SEQ ID NO: 61416 - DNA, 936 bp, Populus trichocarpa
  Intron number 1 from transcript POPTR_0018s00840.1 (locus POPTR_0018s00840) derived from phytozome v7.0 (chr-ID scaf fold_18; pos 759536 to 760471 reverse strand)
cgatcatagtgctaagccttcacttgttgttagagatacagtaagtactgctcatcttaattagttaagcatattgttctctcttttttcttaaaacttcatagcaaaaaagaaaaaagaaaaaagaaccctttgaaaggttaatccttaagcctttggtctgttcaaatccaaatgttctgatggggaaaaaaacctcgttttgatgatagaacaataagatatacaggttttgtttttgaaaaatcaatataaatattcaaatccctggtttcgtattattttctccctttcagtcatttttcttaataaaaaatccaaatataaataacgaatggaaatgcttgcaaaatgatctgtttttatttatttataaaataaaactcattaaaaaccttttctgtcctggcatgtatgatgtatttcaggctcatttctctcatgggagtctaataacaatttcaaattggcctggtgtgcatagtgacttcaagttccaacagacgctttcttctctctgtttttttttttatttaaaaaatgacaaggaaaaaaaatagggatatgtaattttatacataaaaataaaaatccttgatctttcactttcttgggattcccaagcatgcgcatacaatggtaagaattgtaaggttttgcatgtatatcataacaatacatctcccttttgtgttcctataattaatttttctctgtaaagacctctaggcatattcagtcatgacctcgaacgaattagcccacatgtacacacacatcactcgggcaactagacgggtcacaccaatatcatcaaacttttagctcttttttgagtcattctataggctttctaagttgtagaagtagtaacttcttgtctttttctttttttataatttttgtgggaatgttatttgttttgattgaaggtgc

SEQ ID NO: 61417 - DNA, 823 bp, Populus trichocarpa
  Intron number 1 from transcript POPTR_0006s27800.1 (locus POPTR_0006s27800) derived from phytozome v7.0 (chr-ID scaf fold_6; pos 25657267 to 25658089)
ccagtatactggtttgtctctctttttttattgcttcattgagttgttcatgttttttggacatgggtttttgttttcatgttttgttgttaaggctttgatgttttcgttgtttgtcagatttacgttgttagttgtgtaaaatatgagtggttataagccattgacatgaataatctttgttcttggttttgattctccttgttgattgaaaagttttatgtaattggtttttgtaaacatgatgtttgtgtaaactgttgagttaaattaaagtatcttgtcttgtttcttggtttcttgagaaaagaagaaatctatattctctgcttgctttgatccggtttgttacttttgggtgataggcacttagatatgtatccactttaacaagattttgtaggttaaagtttacacttttgaatctttactgtctctaatgacattctgaggttttggctactggtgtgttatactgattggaactgttggatcttctaaattgattgcatttgtactcttgggtcattagttctttggagttagatttctgtagatttgttctgagtttaagcttccgaaatcttatgatttattggcatggcacacttctggatcttttcaaaataaatctaaatttattattgattttatgagtttcggttgattctgaatattttaacctgataaatctagattaatgattgattttctatggtttaactgatctatttttgtggaatttcacaatctggacttatacaatatatgggttgtggattgtgcagttactacgacgagtcaagcaatcacggcattgagt

SEQ ID NO: 61418 - DNA, 520 bp, Populus trichocarpa
  Intron number 1 from transcript POPTR_0008s11700.1 (locus POPTR_0008s11700) derived from phytozome v7.0 (chr-ID scaf fold_8; pos 7477567 to 7478086)
gctgccatcgatcaggttctccttttatccaattcttcaatttccactcgctctacaacagtttaattattcgctaatcttttcaattttttgatttcaaattacgaggcagtgatttcaaaattcatgtttaactgatcttcgatgtttcttatgttttttcttttcaaatttagaaatcttccaatgtttatgttttggtttcgagtcatttctgtatttgtgtgggtcccataaccactgcgtgggaccgccacgtatatgtacaacgttcgtaccggattttttcagttcagtggtcatttttagtatatgccgacacaaatgtttggattaaggaacaattaagtttgacgagtttttttattatatatatatatatatataattttcttgttacgttgatttaatttcacagttgcttaccggacaatttttttttatcatcatttttaccgttgcagtgattgagtatgctgaattcggaatttttttttctatgttttattgtggttttaga

SEQ ID NO: 61419 - DNA, 735 bp, Populus trichocarpa
  Intron number 2 from transcript POPTR_0005s11490.1 (locus POPTR_0005s11490) derived from phytozome v7.0 (chr-ID scaf fold_5; pos 8299326 to 8300060 reverse strand)
ttatcactttctgcccagctcctacaaccaggtaacattgccatttcagttcaattgaacttttttttatcacattaaggcccttctagtcggcttgacagtatatactcagctgtttttttcccccctagtcattaggaaattggagttgacatgtcggtctttcagacatcttgtagcatttattaatgtctttgttttcagttagaaaaatgaagactttgtttctgaatgcttcggatattttaggctagttgacctttaaaaggtcggctcttgtttagatattccaaggggggcttattcaagaacatgctctgcttcacactttttcttaaaaaaaaaaaaacaaaacaatcacgagtgctactccgcgttgtcgacaaaggaagctttgaatttatttttttattttaaattaatttttttatatttttaaattatttaatacactaatattaaaaataattttttttaaaaaaaatattattttaatatattttcaagtaaaaaacactttaaaaaacaattgttaccacccgtaatatctaattaatgggacaccactcatcctaaaatcctttcccttatttcttaattagaatttcttcttgttgaaattggtgatatgcatgttgtttctccttgtgtcaattcttttcatcgatggtatattaaagtgagtatttattgatgacgggtggttcatggctgtttgcagtcaaaagtcggcaa

SEQ ID NO: 61420 - DNA, 999 bp, Populus trichocarpa
  Intron number 2 from transcript POPTR_0019s07830.1 (locus POPTR_0019s07830) derived from phytozome v7.0 (chr-ID scaf fold_19; pos 9057018 to 9058016)
aggcaggcttcagtgtctctcttcttctcgtttgagtaagttaactatgcttatgccttttcccttttatttatcttctatttcatcacaattacattatgttcttacattcaactgccagaattgttgagccatctagatgtttcccttatatgtttttgtttatgctggctcttaatagcttgtaatctcataccggtcagctgcattaatgatctcgtattgagttgtgtggagtatattccaaggaaaaatagaataagaaaaagaaaccaaaaccagagcataagaacaaatggtatactcattgattttcaaattattcaaatggtatttagagaacacatggaagttaagtagaggcttgagagatacaatcttaaaatttagagaaacttgctcatatagcaatgcaattgatcattactgtgctacaaatagttatcttgcagcttaattgtttttaactttgtatcttcaactccagattggtcaatgtgggacaagttttggttaaaactggaaccatgacaatgatggagttgtggttggtttcaattttcaagttttggttaaatatgactgtttgcgacttactagttttcagcatgtgggggaagtgcttgtagatttgatcaaagctgcatgggagttttcagcttgaaagaaattttgatctgattttaatttgcactcatgctgccaaaagtgtggtcctggaaaaatcagcggcagccataaatgctgtgttctaattggtgtttattatcttttgtttggatgttatctagatgtcccttctcaggttacctggattcttgaaatcaattctagaaaacttgaatgttattgtaagaaaaccaagcaatatcgatttttgatctctccatgcttgtgaaattactcaattctacacttaggaacacacttgtttgcagttcgaaattcctgtgttcatttttgcattcattaatgtctaccattttgaatctcaggtac

SEQ ID NO: 61421 - DNA, 897 bp, Populus trichocarpa
  Intron number 1 from transcript POPTR_0002s18230.1 (locus POPTR_0002s18230) derived from phytozome v7.0 (chr-ID scaf fold_2; pos 14161869 to 14162765)
taacccttgtctctgtcccttctttatcgatcaaggtatgttctttttctttctttttgctcaaagaaagtttcttttctttcttttcctgattccttctaagtacaccccaatcgaactctttgatactcttcgattttgtagatatcgggacgcatttccaatcttaaatgggactttatgttatatcgtgatgcatttccaatcttaaatgggatttatgttgtgcctttttttctgggttcctgtcaatatgcacaaatcccaaaaaagaatttaatggggggaactttggttctgttttttgcttagacacaaagaactgtgggctaatgtcaagatcagagggatattcatctcgaacctcactaaagaaaaaggtgtttatttagatttatagtcctggaatcctgagaatgatataatagcaggagatccaattaaatgcaaacgcatgctaatctctatgatatatcaccttcacaacattcaagttctttctctttttctcctgatgttgatggtgttgattcattgtattagactacttagtaaccttacattgcaagaactggtttagattctcaatcgtctggctgtgtgttattgccaagtctttgatgacactagatcagtgttcattcatttagctatattacacccaaaaaaatgtgaggtaagcttaaagtgcatggatgaattgatccatgatctgcattttctcgggccctcttgggcagcttgcttataccatagagagacttgctttgaattgaattatttttttataccacatggagacttgccttgaattgagctttgtttctttgagaataatttcttgcaagttaaacaaacatcatcagacaatgaagtaatttcttcttctggttacag

SEQ ID NO: 61422 - DNA, 936 bp, Populus trichocarpa
  Intron number 3 from transcript POPTR_0010s05200.1 (locus POPTR_0010s05200) derived from phytozome v7.0 (chr-ID scaf fold_10; pos 6644279 to 6645214 reverse strand)
caaccccatcaaagtgggtctgtgtttattctcactaacataatggaagcagcattgtactaagagaaaaataaccctcgagcaattggttcagtggcaggaaggcttgattccctcgttatcatcttggattcaaatccaaggggttgtgaaaaagaaatttcgtgtgaatgcactgtttgacaatggggaagcccactcctgcaagaactcagccttgatgtgtgaaagcttccttgaagatatctgaccattagaaccaaaaaaataattgggcaacagtaacctaagaatagcatgagggattagtacactgctaaaatctaagatagagtgttgtgttatttatttaacgagtgatgtgatagattaagtcctgcaatgattgcaatgtgtgatgttagtaaaaagtttagtagaagtgttagcaccctaaaattactcttataacagccaagttttgtgcacaaattcctattgcatttgtgctggatgatacttgcatattgttgtctttttcaaactcttttcctttgagcactgcatcctatatatttgcttgtgttgcttctagaacctgtgcaagtgtctaacctgtttaaaaataattatgtcttatagcggtcatgtacttcatttgccctgtgtaacatggccacaagctttatatggttttaaaataccgtatccatgtgtttcagactcttgaaacaattgtgttgcctcaaatcctatacaccttgtcatctgtgcattcttatgaattgatgactatgctttatatacctcatatcttagtatgtattgtatctgtagtatgaagtatgcgccacctagctagcttaactggctgcggcattgactttgaactgttatgtgatgatgtttctatgttttcttacaggtatcaacaggcatccacatttccaggtttga

SEQ ID NO: 61423 - DNA, 948 bp, Populus trichocarpa
  Intron number 1 from transcript POPTR_0002s08020.1 (locus POPTR_0002s08020) derived from phytozome v7.0 (chr-ID scaf fold_2; pos 5549413 to 5550360 reverse strand)
aggggtcaagaaactccattccatcttctactttggtgggtttttcttaatacttgttttcttttcttctctctttctaaattttttcatgttctttttgcctggtttctgataaattaaagaacatttaatgggtcttctgtgtctttgtattctttttattgcttgttgcatattgacttcttttgttcttttgtttctaattcttcgggttctgtgttttcttgttaatctactagggttttgataattcttatgttccttgaaggcgaatttgtgggttttgaaaatgggaagttctttattgcatttattcttgatgtgcttgtttgccgaggagctttaattaaaaaagggagataataaatgttaaaagaattcatgattatttggaaccagaaaaaaaaaagattaaagaatttgcctaatatgaaaaattagaatttttattattattattatcattgcaggagcattaaaaatattcaattatgtcattcgttttattcggaaacattagactctgttgatcagaatcttgacaaaaactgctgcgttgttgtgatctgtgtaaagtgcaattaattttacttgactagataatatgaaatttgaagttgatgctttcgttgcatgcttagaaactgcattgctatctgatgctgataatgctatcctcatagtggcatgaaaacattaccaagcatggaagtttgatccctcgatggctctgcttttcgttataaagcagcattggttgaatcaccatagacactgaatttctgattgagttctcaagtgctaattgctaagtgaattttcacttccctctattctgatgtttgattgagctggtgaatttgttctaacattcagagaattagttgatcctaatcgaattttataaatgtaggcaccattctcaaataaaattgccaaggtgaagaa

SEQ ID NO: 61424 - DNA, 533 bp, Populus trichocarpa
  Intron number 1 from transcript POPTR_0007s00270.1 (locus POPTR_0007s00270) derived from phytozome v7.0 (chr-ID scaf fold_7; pos 63074 to 63606 reverse strand)
gcctcaaggtctttcttttttccatttttcttctcttcttcccaatttggtatctgatgcatctgtatcgtttcatttttcaacactcctatcccttttagagtagggttttgtttttctcacacagatcaagctaactgcttacgtttgatgatcatttaccgattcgcaaagacttttgctttactggagctatttattgattgattaaaaaaatgcaaactttatggatcttttcgaaaataaatggattgattcctggttcattagtttcttatgggaagtttttaaatgggttttcattgaattgcttgtcacttgcttattgggttttgtgtttcacctcaattatgatcatccttgccttgacttttgaggtgcacgtttagtaatggatctttttgcatggaattaatgcaagtaactacatattatctttgtgttctcctcttgacattcattctgatttatttggatcgtattggattttgtgcacttgtaagagttttgtctttgtgagccaggtcctgcat

SEQ ID NO: 61425 - DNA, 941 bp, Populus trichocarpa
  Intron number 4 from transcript POPTR_0016s07720.1 (locus POPTR_0016s07720) derived from phytozome v7.0 (chr-ID scaf fold_16; pos 5573918 to 5574858)
aagaggtgggtgagattctatcatttactgtttacccagtagcattctcctggtgctgattgtgagagtttatggatatgctcaattgaaattattatttgtttctatattatctttccctagttttcttgttaacccaagtatcaataattcatccaatattgtgaaataactgagttacttcttataaaggaatgagcatgtatgctcctaagttatctataatgtagcagcaagcacgcagtgaatgtcataaatcatttaatttctcatttcccgcggagtggatccttttgccagggtaaatattcttcctaattgataaaatgttttgagacatgtttagggaaaaagggatcaaacgataggataaaaaacatgggtaaaatggaatatggcttagttgccacgccttttcacttgaattcgtctccctagtaactttccagaaagcacagtgaatggcactggcaggttaaaggctttcatcaggagtcatgtggctgagactgcatatctgatgatcacctttgtatcattcccaaatttatcactctaccagaagcaaacactgttgcacacgtaccattttcacacaaatcatctgaagagttgcaatgctaacaagctatctgttttatcatgagttttttcttttcccttttttacatggagaaatggtttatttatagacaattgataaaaacattcttaagcaactacttacatgtgatgatgaattccttttgggttattaaaataggatgtagcagctccattgattcatataatgttagttccagcatgtaatttaaaaattaacctgtatgttgttgatgataaatttttgtgattcctgttctttcttgcatgttagatatctatagagtacaactgcgagtttttaatataatattagtttgttacctatttttcagaca

SEQ ID NO: 61426 - DNA, 627 bp, Populus trichocarpa
  Intron number 1 from transcript POPTR_0005s22380.1 (locus POPTR_0005s22380) derived from phytozome v7.0 (chr-ID scaf fold_5; pos 21337714 to 21338340 reverse strand)
tctgacctcatcaccctgcaatccatcaactggaggtcccttcctgtattctctcttttcttctcttgctgcacgtatttattattatgttcagtttattattctttacttttaattttcgttcttatctccattgatatgatgtgggtatttgctgttttagtcatctttctttgttccccgacaaagaatggcactcttctcttgattttgacttatgtggatgtgtttgtgtgtctatggaattatttttttgtcataaataaattctctttcacaattctaccaatagtaaacttactgtaagttcacgaccattatgaaaaatacaacaaatttataagctttttattttttttagtgttttgtgggactgctagaaagattacttccaaatttatcagtaaaaaaatataattcttgaatgtgagtcctgctctgtattctacttgaatatttccttttaaggtcttaactggttcaactccatattctattcaaacaagtcttcagttgaatggcaaatgaccttgagattgtggtgcaaggtttattgcatttctcggggttgaatgttatatgagtggaagaactgattggtttctttgttttttatcaggaattttg

SEQ ID NO: 61427 - DNA, 931 bp, Populus trichocarpa
  Intron number 2 from transcript POPTR_0019s10500.2 (locus POPTR_0019s10500) derived from phytozome v7.0 (chr-ID scaf fold_19; pos 12056069 to 12056999)
gagcttttttacgcgtatctttacgcagttctttggtgagtttgatttccttctttctttagggagattgcatattgaatcattcatcatttctagcccatgtattattagttattgctctactttttatttcattttgttgtaatcagactgtacacacacacgcactttcatacacaaaattgtttcctgcaatcgtcatgcctgtctcggtgttgtttatataatttgctagagttagttgatatttcatttctatgtattttggggctgttaatctatgtcgacacttgaaatggttggttattgtgcttaactccatgcatcttctatgcaaaaagaaataggtgcaggaatctgtttgccacgtaaatgcttaatgggcgagcatgattacctcaagatcaattaacaaatacaaagtcttgtagatccacaattgaattgtaggaaaccgcagcttcacaggaaaggagttgtcgactttgattccgccctagctatcgtcttaaaagaaatttctgtttatctttgatggcacttgatggttggttattgtgtttaactgcacgcaccttttatggaataagaaataggtgcaggaatctgtgcacctcacaaatgcttcatgtgcgagcatgaataagtcaagatcaattaacaaataaaaagtcttgtaaatccacagctgaatcgcgggagaccacagcttcacaggaagagttctcgactttgattctgccctggctattgtatttaaagaaattttatcctgtaattattttggtttatagtttcttccatgtaaattaggccaagtcatgattgattgtaatatccagttgattttcataccacgttaatattcattgtcaggtgtattgattgcttgttgggatttgatgtattgcagatcctgaaggtattgcaa

SEQ ID NO: 61428 - DNA, 712 bp, Populus trichocarpa
  Intron number 2 from transcript POPTR_0010s11070.1 (locus POPTR_0010s11070) derived from phytozome v7.0 (chr-ID scaf fold_10; pos 11445873 to 11446584)
gacgagtaccccgttaccactgagcttcaggtctcccaactctctctttttaaaaatcaacgtatatgtatttggtgttttcatgagctttgtacagattccttttagctctgatgccatcagcaaggattagaaagttcatgcatgcgatgcattatttccctctctctgagaataaaattaccactaagaaaacagtgtttttaattattattttttgggaggtagatctttgtttgtcttaaggaaacgatgcacgcgagtttgttttcgattttttttttcgttttcttggactattgagtcagaaagatgagatttgacttttcagctgaaggagttcccagtcctatggtgcttagtttggtcaatatcgtatcatttaataagcatagaggcagtcatcagacctggtatttctactttcagaagatgcgcaactatgagcattgggagaatttttaacagacctagtctatttctgtctagtcaatatatgtgtgattttgacgaattaaattaattaatcaattcaaacgagtttttctttttataatcaatcaaccagacattttttttagctaaattgtggggttggacaaatcaaaatatgtgtttaattagtagtattcattcgatcggctaacactaaattatcacttgatatttttgtgcagaatcgttgtgtgaatattatagcacacctattcaa

SEQ ID NO: 61429 - DNA, 560 bp, Populus trichocarpa
  Intron number 1 from transcript POPTR_0006s02830.1 (locus POPTR_0006s02830) derived from phytozome v7.0 (chr-ID scaf fold_6; pos 1783557 to 1784116 reverse strand)
ccaagaggctctatcaactttggaagggtaacaatgtaatcaatcctcttttcccaccttctgcatgtcctcattctttatctattgtgaattgcctgatttatttcttatgaattcaagaaattgtgatgatttggtgtttgcatcattttatttttgccatttatttgattattaatgattcttgaaggggatctaatcaatttgccttgcgttaatccaatgtttctttgcctttgaatatataaatgatggaatgtgaagaaatcagcaccgttttctgccttttcccgttttgcctgacagaaaatgtcagccatgattatcagtaagactttagttaatcagaggaaagagtcctggatttctaattggtaaatgtgttcgaaaatgagttttgtcggatcattatcgaaatcgatgagtattttgcagtagttggagatggatttgatgagaaaattgttgttacagattgttgtttttctagaccaggactaacaaaacttcccgttctaatatcagaaattcctctgtggtgggagagcagtctttggtcc

SEQ ID NO: 61430 - DNA, 895 bp, Populus trichocarpa
  Intron number 1 from transcript POPTR_0003s20790.1 (locus POPTR_0003s20790) derived from phytozome v7.0 (chr-ID scaf fold_3; pos 19212844 to 19213738)
ttatatttctgttgtttcccctggctcttctatctgtatgttatttccgaaactactttgaatggctcaatagttgcactggctttctttcccccaactgagtgaggggactcctttgaatcgctttctttagcccaatgaatgaatggcgtaacgtcaaggctattgctgtttgttaatgttgaaagtggagtttcttcttgcttgaattggtagtcacgataaggagggagccatatgatatagaccaggctctttgtagacagtatatttgatatcaaaagcatcaatttgttccggtgtccagtacatcaaacggggctaaagactttttgagatgggccatgtggcttgtgactcgcatgaatgaattacaagctgcttgcaaggcttgttggtttgatcacttgtgtaatcatgttggacttgacgaaatagataacaatttccctccattttcttaataatagagggctgagtgtgacttgttgaagatttatatacgaattacatcggtgtcagcgttgcttgagctgattgtgctaagcacgtagtaataaaataatggggtggattatcaggctggaaagatctggccgagacatggagttggtccaccacttcgattacacgcgtggaccattttcttttttcatacgtcaaacccatgtgaattgtcttttgctgaatattcttatattctgtttccatgtgacattaatgaacctctccagaatgtatagaaaaatcttcttttggggacggatcccaaagcaaatttgcagttaactcttgaaatattcagacacgccagcatgtcgtaataacttatgccaagatagataccaacttatagttcaaacactgaataaaacaacaaaaacaaggatttctt

SEQ ID NO: 61431 - DNA, 1017 bp, Populus trichocarpa
  Intron number 1 from transcript POPTR_0008s05330.1 (locus POPTR_0008s05330) derived from phytozome v7.0 (chr-ID scaf fold_8; pos 3098888 to 3099904)
ttctattgcctgaaattgctgacctgttgcaaaaggttacaatttgtttgactgaagcttgcatctctagtgtactatggaagtggtaaatgctgcttgagattgtcttggtttagcactgggtttgcattgatgtcattgcaggtttgatgtttgaaccttgtcgagttgatacatcttgagtttgtgcaacctgctgtgagcatatgaattagcatttacaggtcctattaacaacaggaagttatcagtgtgaatttagatgctgtagggtgattggaataagtcctgattaatggaggcagtacctctacatcaacatgggaaaacgtgttgtagtttgtcggagaaatgaaatgtgcgcacatctgaattgaagctaataaatctgggttcgagttgtacacaagtgactctgagtaacagaaaccatccttaatcttaactgaaagaatttgaaatgcattttgtctagtatttccatcaaccgataaggaatgtgtcatgttaccaaatagaccaagctaatggtgattgtgatggggtttgattttaagttgccaaatttgatttgcagggcgtaatcgaatgaaagtaaaatgatgaccgtgtcatttccactcatgcatgtgtgtatttttgtaatttgtagtttgtcttcagtgtttttttttgtgttgactatgatccctcttgttcaccatatgcttgcatttccaggcttccttagacttcgataggaaatataaggcttgaaaggcctttcttacatccattttctaacatatacagactccctttcagttttctttctagtagtaacacaataagctgagagggaatggaaccaaatagtgattactacatgtaggattttgaattcagtgtccttgaggttgtcaaccttgtaagcatagtatacagtctctttcgttaaagtcagataaaattgcaaacacattgttatcaattttgttgtgttactgataaatttgccctttatttgtgcttctgcag

SEQ ID NO: 61432 - DNA, 409 bp, Populus trichocarpa
  Intron number 1 from transcript POPTR_0001s05280.1 (locus POPTR_0001s05280) derived from phytozome v7.0 (chr-ID scaf fold_1; pos 4049790 to 4050198)
gtttcatttttggggcagcatcagcagcttaccaggtcatttctagtcttagcttgccatcaattatagtgattttttttttttgataatcatcgagagagtatattaagaagaccataaaaccaatagccaaagaaaaatacaagtgatatgaaaaaaaaaaaaaactgatctactacagtaaacaacaaaaaaactacctaagatttcttattacaccacaattatagtgattttacttcacgtttaattaattcatgagagcccatagatttataattgaattggcacctctatttcagtttcaagaaatctcgagttcgatttttttttttgattacgtacttcatagaatgttaaatcctactatgtcgtatattttttcagtacgaaggtgcagctttccaag

SEQ ID NO: 61433 - DNA, 616 bp, Populus trichocarpa
  Intron number 3 from transcript POPTR_0001s05280.1 (locus POPTR_0001s05280) derived from phytozome v7.0 (chr-ID scaf fold_1; pos 4050615 to 4051230)
atcaatatcatcgttacaaggtaactaaataattatagcttaataattaataaatatattaaaatagccattcagagaataatcaaagcagaagaatgaaaaattatttgttacatcacctggagattgctaaaaacagagtaaaaattgaaaaaaaaaaacataaaaaaacccaaatagctattaaatgactagccactaaaaatttaaacacaatgaatctgaataactccaatacacagattattagtgttcgtatacttttgaatactgtctaaacttctagtgaggttattgcctaaagttagtccagctagtattagtggtgtttctctttcaaattattttctttataattaattaaaagcacgtggttttttggtacaaattaaatataagatctagggttaaaactttgcataattaatttttttaatatattcatacattatggttcttgatatctgtttgataatttttttatgttataataactaaatattttttttaaatgttaagcacattgaaaatcatatataattgggaaaaaacaaatattttttagtgagatgggtgaaattcttatttattttccaatattaaatgtcacaggaag

SEQ ID NO: 61434 - DNA, 577 bp, Populus trichocarpa
  Intron number 1 from transcript POPTR_0002s13410.1 (locus POPTR_0002s13410) derived from phytozome v7.0 (chr-ID scaf fold_2; pos 9948786 to 9949362 reverse strand)
tttgactcaatcgatacgcatctctatccaaaaaggtcagtaatttctctctctcttaatctcttccgatcagattttcccttttgcacttttgttgatttgtgaatgtgtcgatcttctagaattattgtattagtctggatctagatgttgtttatggcgacccggaattattatattaagagagagagatatctgaggatttggtgtttttagtttattagatttcattttcttgtcatgaatctaatctggaggcttgaattgtatttaacttgctgtctggtttattgaaattgacgccatggtaaaattgccaattgcgtgaaaatctggaattgcaaaacaaaaccctcctgaccttctaaaaaaaatttcaccttttatcgtttgtgaatatagccctttaccatttatgatttgttcatttacttaggcatcgtgattttgctctattaaggtttcaaatttgtgaaaattgtgcttttgggggattttaagagctggtacggtattgattaatggttttttttttttttttgatgtgatttgtagggacttggctgggttttgagag

SEQ ID NO: 61435 - DNA, 981 bp, Populus trichocarpa
  Intron number 2 from transcript POPTR_0017s07850.1 (locus POPTR_0017s07850) derived from phytozome v7.0 (chr-ID scaf fold_17; pos 6145429 to 6146409)
ggttctgttcaaggttgtaactatatatatttatgcatatatttgtgtgtattttgggtgtttgcaattatgttcaaatgggtttttgttattttttaatgggtttatgatttattcttctatttttgtctttcattatcaaaaagggtttatgattttttttccctgcaatttttctgttgggatttttttcttttaattagtgttgtgatagatggggtttttttggagattggagaataatgaggtattgtggtttggatagacttgttagtgtgagcttagaagtcacacatttgtgtctttgtggttttagggtgaggtcgtttatgctcggtagatggcctttgattggtggatgttttgtaagatatgttggttactacttaatgttgtaatgagaagggttagaaatgtattgcctatgtcgataagattggctgcatgtacgtagatatctgaagaatacatatatgctagttaagataggtggttgaaacttgaaagttagaaatgcaacaaatttatgattttggaaaacttcccttcttgatatgagaatgttttatagacttttaagggcaagaaatattttcagagtattatgtcacgtttttttgcagtgattctttagctgctccactgaaaacttaacaatggtattccacattggtgatctggatcgaacactttctttttattgaatgggtctatttatttaccgttgtctattttctctattgataatattccaaagacctggctcttaagttcacaagagaggtgaactgtgtgataccgttccaaattccattgcttaagatattttattacgcctccttttattggttgaaggaaggtgagtgggaataataactgcaataattgataattgtttctgcatgtctttctccttcttcctcttactgtttctatgtgcaattagatcctagtgcttctgctactgcatctcaagcaaat

SEQ ID NO: 61436 - DNA, 602 bp, Populus trichocarpa
  Intron number 1 from transcript POPTR_0018s07650.1 (locus POPTR_0018s07650) derived from phytozome v7.0 (chr-ID scaf fold_18; pos 8255098 to 8255699 reverse strand)
ctcttttctctctaatcaaacgtcgttatttccaggtattcattcttttcattattttttctttaatcagctaacaatccatttgtttttttccccgtaacgttttgtgctctttttgtgcttgttcttttctttctgtaatcagatccgttggtttttgttccttttttcttcttttaataccttgtttttttgaattatccgataattaatgatggattaatgtacaaaatctgtttttgattgaatgaacaattgctgtttatcgtaattttattacgattttgtgggggcttaaggcatatggattgatgattatatttatgtttttgtaagtatatagagatgtttttattgggtttattggagaatttgatatggttttatttagattagtgtgtatgttttccggtttgataggggtgtggatttagtgcgaaaaagtattgacctttgcttttttgttatttctttttcttaatatgggaaagatgggcacggaatatgtggttttttgggtgaataattaatggggttttagtctctttgatgattacgttattgggttatggagagttatatgtcgtttactgtttgcagtt

SEQ ID NO: 61437 - DNA, 869 bp, Populus trichocarpa
  Intron number 1 from transcript POPTR_0013s10730.1 (locus POPTR_0013s10730) derived from phytozome v7.0 (chr-ID scaf fold_13; pos 11059896 to 11060764 reverse strand)
tacggaacaggtaaaccgtgttttcaaaaaaatttaatttttttttgttaaaatttaatatgttttatatgttttgtatcgttttgatgtactgatgtcaaaaattattttaaaaaaataaaaaaatatcattggcatgcatttcagcatgaaaaattatttgaaaagcaaccgcaacaacattaccaaacaatctcaagcctatttgtatttattttggaaggagttattactgtctcacgtcttagttggatatccttgtagattttattattgagtttatgcacttcctaaaagccttaatatccttgtggtgggtgatatttattagtaattgatcatttctttatttgatgtagaatatgttatctaataatatctttttatccttttcttcgaatatttactagcaaattgtttgttaaaaaaagaaaaatataatatcgaaaaactaatattgaaggcaagtgattgagttttcatggcgagcttgacaaatgacaatacacaaaagaaatgttatgtcgaataatcttttcgaaaaagaactcttaacaatttaaaatctaaaaagttcttttataaaagcatatcattgcaagataaattgatcaattgacatggcaatttaagaagtgatcgagctttttcttggaaaacaattagaggataacttagtggccaacaaaaattgatagtgattggttttttgcctgtcaaaaccatacttagtggctttttgtgttcttacatgcatgctattctatatttcaaataacaatatttcatgttttcgcacactgcatgcttaatgtttttgccccttttacgcagggacgagtcacaatcaattaaaaagattgttgaat

SEQ ID NO: 61438 - DNA, 167 bp, Populus trichocarpa
  Intron number 1 from transcript POPTR_0010s12270.1 (locus POPTR_0010s12270) derived from phytozome v7.0 (chr-ID scaf fold_10; pos 12307218 to 12307384)
ggatcgtttcgtattgtaagcataggaatgctatttccttatttgtttttctataaattgttattgaaataattatctaggttttttttttttacaaaaagaagaactacagttctttatttatttatctcttgatcaaagattccatttcagtgttgtagtggaaa

SEQ ID NO: 61439 - DNA, 746 bp, Populus trichocarpa
  Intron number 1 from transcript POPTR_0009s15130.1 (locus POPTR_0009s15130) derived from phytozome v7.0 (chr-ID scaf fold_9; pos 11745953 to 11746698)
gtagctcgtaagtgcttgtgaagcttgctcgttgttgtgttttttgttttttggttgtgttttgttacataggtttttgttcattttttgataatttgctttgtggttatagctgcgttggtgatattgagagcaattggatgaatggttggtgatttttgcttagtttatggtgggatttgatcttgtaatttttgtataaatgcgttaaaatctgcgttggtgttcttagaggaattggatgcacgattattccagttttttggacggggtttcgtgagtctatgttcaattcctgctgattatttttggtgcaaagaaaacggagtatgttgtttcgtgtactgctttgttacgcgtggtttataattcttcattcaatttaagttgttaaaggtgataaaaccatggtatgcttgctagcttgcaatgaaattacacaccacaaagcattcccttagttttgagatgatttcaatgggtgataatcagatgattcagtttgtttttcgattttgaactcttcatttgtttgtctagtagcttagggtgtgggtgtgactaatggactggattctatttatcacaattataatttatgaggttaatagaatatgcctttaattgctcatgtacagtctggtctgaatgtatatttgatcctttctatgatctctccatcctagttcatcacatgagaattcttttcacctacttgttatatcgtgttttggatttgtaaaggt

SEQ ID NO: 61440 - DNA, 359 bp, Populus trichocarpa
  Intron number 1 from transcript POPTR_0015s08110.1 (locus POPTR_0015s08110) derived from phytozome v7.0 (chr-ID scaf fold_15; pos 9379458 to 9379816)
cgtttccgtttattttgatcagatctaaaggtaatatttctttctaatccgaaccattggatctaatttctctaggtttttggattagaattcgatcccttaatgtgatctctccggttcccaatcagatctaacttaattatctctcatttctttgtgttttagtgaatcttagattcttgtagatctgttttggtttgattttatggaacagtgatgggattaggtttttgtttttcttttctattgtttcagtgagtgtgatgatgacaattggcgtgtgatttttttgattgattggctggtgatttgttgttgttgttgatgtgtgtagttgtagtgtttttgttggattgaag

SEQ ID NO: 61441 - DNA, 534 bp, Populus trichocarpa
  Intron number 1 from transcript POPTR_0006s01290.1 (locus POPTR_0006s01290) derived from phytozome v7.0 (chr-ID scaf fold_6; pos 738954 to 739487 reverse strand)
ctgggtaagatttgacttgtttcttaattgtgttaattaacttgttttccttgtttgcttatgtatgttaagtcaaatgcaacttggaaagataattattgagtgtatacatgtattaaagaaagaatttattttcttcttttcatgggcgccaaaaccacaaatagcattccccattatatgctggaaattaagtagatgtaaaaaattttcccaagttggatttaaattcaccttgtagcgggttggggccaacgaaacatggcttcacatataagcattgaagaattcaagaaatgacttgaggtatttgaatgaggctcaagtcccaggaattgatgttttaaagttttggatattctctagacactattcttcacaccagctgttgtgtgaggtgagagagatattgttgcttttcttatttgtttatacaattcaattagaaatagggacaaaagctaaaactgcttatggcactctattttaaataattaaattgaaagtttttctaatgcatatgtttgacagttg

SEQ ID NO: 61442 - DNA, 457 bp, Populus trichocarpa
  Intron number 1 from transcript POPTR_0006s19020.1 (locus POPTR_0006s19020) derived from phytozome v7.0 (chr-ID scaf fold_6; pos 17852894 to 17853350 reverse strand)
tctcaatacccgtctcgcccgcccacacttgtcaagtaagttaaaactcacacaacccaatctccctctcttctttcatttctgttctttttttcttttctttttttatattcattctctatgttctttgaatgttaaatatgaattgccatgttaatcttgaaataagtaggaaacactctatgttaaacaggatgtttaaactttaaaacgaagaaagccctcttcttttccatgttcttctataaattatggttattgtatacctgggcttttgttttcatgctggggagagtagagattttaacaccagatgattgtaataatcatgctaacagcgaatgaactttgtttttctattcagtagctggttgagttgctctctatttgtttatatatatatatatatatatattctgttgttaattttatgttcataaaaaatgatcattttcag

SEQ ID NO: 61443 - DNA, 989 bp, Populus trichocarpa
  Intron number 3 from transcript POPTR_0014s07260.1 (locus POPTR_0014s07260) derived from phytozome v7.0 (chr-ID scaf fold_14; pos 5484518 to 5485506 reverse strand)
ttgacgaaggtcaaggcaaattgaggtatatatttttgcatttattgatttggatttttttctaaataaaaacaaattcatagtgcggttggtctattgattataatatcttgaagaatttaaatacacttgatgtatatcacaactgtagatagagacttgtaccttctcttcaaaggaaagtctctttgttcactctctcaaccagctagctagctctatctatgaggataaaaatggcaatacacagccaagaatctactttctctgaaatcttgaccattggatatctatcaagatcaccttaacaaagcttagaagataaatctgatacccatgttctaccttcttcatggttgaaaagtaaagtttcagaatttttttcttcacttcccagtatacccttgacaaccactactactttcttccactcaatcacgcagtagttgtatagcttaaggtgatactcaaaagggtgttttggtatttgcataatgttatgtcttaaaaggacggctatattttttaatcgttaaaaagtaggttctttcattttcatgattcgatccataataaattagaacagttttgtgtttatcattttgcattaatttggtttagttttggttggcgtttaacgaccacttaaaaagctacggaaatgacttgctggagcatcttcaagggtactttgatttggttggtcaggtcttgttttcagtgaaacagactttgtgcgatcatacaagattctcaaggctcttgatgttggcttatttgtttttttatttgtggtttattttaaaaaaccagtagccttagtttataatttatgtatgatgattgtaactgctccactgcctttgaattttctatgcaaatatcatttcctttctcatttcgtaacacccaggtcatccatcgctttaaggtttggttttctttttaatccagttgttgcagctctggtaaccaatttgatccataca

SEQ ID NO: 61444 - DNA, 800 bp, Populus trichocarpa; identical to SEQ ID NO: 54235
  Intron number 1 from transcript POPTR_0003s10270.1 (locus POPTR_0003s10270) derived from phytozome v7.0 (chr-ID scaf fold_3; pos 11320010 to 11320809)

SEQ ID NO: 61445 - DNA, 846 bp, Populus trichocarpa
  Intron number 2 from transcript POPTR_0019s06140.1 (locus POPTR_0019s06140) derived from phytozome v7.0 (chr-ID scaf fold_19; pos 6709860 to 6710705)
tgctgtattttcaaggagccatataccggaaagatgtatgttctctccctcttgactacttctgctgttaattgtttcattaaaatttctactgtaactaaaaacttattttccacagaattttctttttgacatgttctacaactccaaaataagctctgattcgacaatattatgaataagtgatagtaacaacataaactgtcatgagcttcccagttctcaccacgttatttcctattctgtgagacagaagattagttagattaggattatttcatggattaggtgtcaaagtacatgccaattaaatgataagttattctatttcaaggcatctatttcaacgtactgggttcttaatgtgcatttcttatcatgtagctgttgaagtaaaatcgttgttgaaacttgaatttggctctgaaactagcatggacttgatgtctatgtagtctacttcccacgggtgtaatgaactagccatatgcacatgtatggaagttcattcaagtaaagtattgtgggctgctgttgaggatgggttgtggtcataaactcaaaaatcaccattccatctcatgaaactttcctgacataatctcttaatggatcttcataatttcatgcgatatatttgacttgctgaatgtttttcactaaaaacttcatattaattagattctgaaaaccatccaattaagatgatccattattttcctttaattcaactgttattctatgcctctcttttggttggctttacagtatctataccttgattcttcaattttgagtttcttgttttcagggtggcttcgctcggcaagaattattttatcttct

SEQ ID NO: 61446 - DNA, 453 bp, Populus trichocarpa
  Intron number 2 from transcript POPTR_0018s07010.1 (locus POPTR_0018s07010) derived from phytozome v7.0 (chr-ID scaf fold_18; pos 7139574 to 7140026)
ctttttctcgcaggaaacaattgctctcttttaaggtacaaacttttatcccagttctctattcttcttcttgtgttttcagtagaatttaagtcaattttcaaggaactttttttttttaaaaaattctatattggttagcattcatgctaattaaagagagaatttatgcaaattaaactgtatttattaggtgtttctatttgaagttcttaatggtgggtttgttgggaatttgtgttctaattgactttgcccgtgataaatttaatcccgggattgccaaatcacctgccttctgggtcctgagaacacatcatggtgtggggtttatcttccaaaagaagttcatcaagaattgtgtgcgaccgaaaatatttttcttttttatttcatttgaatctggttgatttccccatcaggcaattcaattattcattttgtttcaggtac

SEQ ID NO: 61447 - DNA, 932 bp, Populus trichocarpa
  Intron number 4 from transcript POPTR_0006s06220.1 (locus POPTR_0006s06220) derived from phytozome v7.0 (chr-ID scaf fold_6; pos 4428197 to 4429128)
tctttttgcggatcctcaatctcagaaggaagcaggtaaacttcctttttatgttttttttttcctggagttaaatttgtgtaacagatgtcatgttaggagcaagtttacttggtcaaatttgtaaaactatatgaattacgaaccaagttttagataacctaaatgatccatgagcaaatttatttgcatgctatattataattatatcaatgaagcattgaaatgcactagcagtctcttcaagctgcattatgttcaacctctagacttacaagtctgaggagtaatgcatcgatgcttgattgcaggctgatgtttatctagccgattgctgtaaccctgctagtaatctgaattaacttcttgtctcagtttgtgactggattatagggatcatgaaatcaattttgtttctgtttagctatcaataagacatgggcattaccgccttttactcttgttcctcgctactgttctgctgatgaaaattttgtgtgacagactttgttattcacatttcaaaccatggagactttgtcattttactctcatagttctttgccatttcaatactatatcattagggcagtttaatatccttgagcctggtgatattgtattattccaatggctttagctatataagtttttgaattgagacactgcatagtaaataaaattcaataatagtttcagttggctgcaagttctccattacggctcactgtattaactgttctacagaatttttgatttgagccaaaattctgaaatcttggacttttaagctcttcggttttgaatgttggtttgtttgcagtatgattgtgactactctgctatttttattccaattttttttcttatttatacttttgaattcttaaaatgcagagctcttcagaaagtatcttaaacagacaagggag

SEQ ID NO: 61448 - DNA, 745 bp, Populus trichocarpa
  Intron number 1 from transcript POPTR_1640s00200.1 (locus POPTR_1640s00200) derived from phytozome v7.0 (chr-ID scaf fold_1640; pos 630 to 1374)
gaaagggaggttaggctaattttagcgagtttcatgtgagtggtggatgtgtttatttttctacttggatctgagtggtttttgtcatttagtaatggattgtgcattagttttaattttcactctacgcgtattttgttgctattgttgtggtctatgctaaatttgaagttttataaagatccaggactttgaataaaaaaagagagagggagagagcgattgggtgaattggtgttatcactgtgaatgagttggtgttttttcatcaagtgattgggacattatcaatgttttatacgatacattctctgcatatacatgtgattgacgatagttgctaagcattttcttcacatgtgcatatagtcattccttattatgttggcatagtaactgagccattgttttgaaatgctattgccctttaacatgctttgccttactaactggcagcgttcttcaagtacattaaatggatggaaggatcaaattcagtttaaatattgtgatttttgtatatttagataggcgatctcttctagctcaacttggttaaaaaacatgcaaatgctattgtgttttcatagaaaatctcaatttcatgatgaactgggagggatacagaatttaagtagcagttctttttaagaaaaaaattgctgctcttatcattcaaatctctttattcatattctctctcctaacattctgtatattatacgatagaattggctagaaaaac

SEQ ID NO: 61449 - DNA, 347 bp, Populus trichocarpa
  Intron number 1 from transcript POPTR_0007s15280.1 (locus POPTR_0007s15280) derived from phytozome v7.0 (chr-ID scaf fold_7; pos 14868231 to 14868577)
ctctgaagtctcttttgttttgttaagatttagaggttagtcgggagattttcatttttgttttcagtttttgaatcttaaattattgttctaattttcttttttcatttaattttttccataactggtctatttgttttgcatctttttaatagtgtctattacaaatatcaatattcaaggtcttgactgtgcatgtatttttatagtgattaagaagaatttagtcacaaatgaagcattttggtaacagggtttgattaattattaccaataaatgatttattaattttatttcttgtgttttgatcttgagcaggaaggaattaatttgaaaggggcattat

SEQ ID NO: 61450 - DNA, 567 bp, Populus trichocarpa
  Intron number 2 from transcript POPTR_1509s00200.1 (locus POPTR_1509s00200) derived from phytozome v7.0 (chr-ID scaf fold_1509; pos 299 to 865 reverse strand)
gatatcaggtcccccccttccttgtatttattaatttgttattatataaatatccatttcatgattgttaacgaaaacaagcatgtgagtatgtcagtctctagatattagtggacaaaacccattgtgttaggcaaatcttcttggattaaagaagatttcaaatataagattttgatttttctaaaaccaattagagggtttttctgattaattgcttgtcatgtgatatggatgctggaggtggaggtagtaatgttggtgttaatgctggctccgatggcagtggaggaatgtaatagtgatgatcttggtgatgatagtggtcgtggtgagactgatagtgataatgattccatgatcgtattacattcatgatgtgtctagcgagctccctttttgataaaaaccgtgttttgaacttctgacaaacttggtgggtgtagcccaactgatcaaataaagtacatccataatatggccattcatttccttagttctgatgtgtttgttcgaactttacttgctgtagacttatactgagaagcctgggcacaactttagtct

SEQ ID NO: 61451 - DNA, 634 bp, Populus trichocarpa
  Intron number 2 from transcript POPTR_0004s07610.1 (locus POPTR_0004s07610) derived from phytozome v7.0 (chr-ID scaf fold_4; pos 6252418 to 6253051)
aatacaaaacattggaggtacctaagcatggatgatgctctgagacatttgctacactttttgctgccttgcatgcttaagtcgttctcatctcttttctgatcacttctgggaagcttgcatggtggctcctctgatcaaaattcttgcagttctttttttttattcattttagttttacaagtctggcattgcatgtgttgcctgtgatacaatgattaatgtctgttttcttcatcaatcagcattggttttttactgtttaatatctttgacgatgctgttttcccaccaataacatctttgttaggctctcaaaataataaaaaagaagaagaaaaaggacatctctgacaccacagaaaacaagcccttctgtccccatcgaattcagatatgatataactccaaataagtcccttcaactcctgcatgaattgcaaaagcaactccagtcatgccagtaagctcaccaggaaccggtgcgtgcgtgcgtgatcagctggtataaagtatggacaaagcagatacaggccctgttttgatgaaatccaatcttgttggtgcataactttgttgcgaataattcaaacaagcagacaatcttcaagaaacagaaagactgtcaccatcc

SEQ ID NO: 61452 - DNA, 593 bp, Populus trichocarpa
  Intron number 1 from transcript POPTR_0001s00470.1 (locus POPTR_0001s00470) derived from phytozome v7.0 (chr-ID scaf fold_1; pos 362735 to 363327 reverse strand)
cagctcttttttctcttttggcttcgtattcataggttcgcacctattgattcactgtacttgattttcctaacttagcattgtaatttcttcgtctccttcttgaattatgcagttgggtttgatttttcttttattcttttcaagtggcgggttattgatgttgacaagatggctcagttaaaagtttgttctttttgtttcagtgaagtcttagattattgttgtttaggtttaaacatgggcttttgatgtttttgaatagatggttgttattgttgtctgaaactattagtttagggttcgtgttgtttaattttgggtttttttttttaatttacttttggggtttatttttggataattcatttttgttaatagtatgtcatgtaccgtgatcatttagcgccccccccccctgtttttttacttgggaaatgaaaggggaaaagttaaatattgtgtaagtttagttattgattgaagctgatattctcatggaccttacattttgaagaattgaaaaaagggctttagttgctatgttgttgatcggattaatggatgcaagttctcattttcttagaggggtg

SEQ ID NO: 61453 - DNA, 695 bp, Populus trichocarpa
  Intron number 1 from transcript POPTR_0016s11500.1 (locus POPTR_0016s11500) derived from phytozome v7.0 (chr-ID scaf fold_16; pos 10624290 to 10624984)
tggcttctgctgcaattgtggaacactcattctatgtaattcttcttctttcttatattactaccaagatgttttgtcgacgttgaggaagttgaatcgtggtccttgtatatagtttctcgttttggtaaattatctcatgcaaaggttgcattaggattgttgtcgttaattaaacgatatacgagtggccaggatatataggatggtagccctgttataccttgaagtttcttacataggaaaaacattcatcaaattagccatacccttttgttttatctcgagctcctcaaaatcatgttcacgcttaaatggaagggatcgagggaaaagatactgctacctttgatactgcaacgtcccaagattcaatatatccacttcttttggtcacaaaagaggctcaaaccgagatatcctactagaaaagaaacgtgggtgtcaattgaactacgttctttggcaaattcaatacacttcttcccacgatcatctaagttatggaattttttcatccactttggaccgacctagattgcatatcctagcaatattagtctgacgtcggagtgtgtatatatataggcatgcaaagatattttctacttgcttaaagctttgcagattgatgggtttaatttattgtgaatgttttaggtgcaaaaccttacagttcgtcggctgtgctccga

SEQ ID NO: 61454 - DNA, 257 bp, Populus trichocarpa
  Intron number 1 from transcript POPTR_0018s13450.1 (locus POPTR_0018s13450) derived from phytozome v7.0 (chr-ID scaf fold_18; pos 13775197 to 13775453 reverse strand)
cagtttacaaaggtacgtgttgttcataactccatgctcttccttacaaatcatccatcaagtttctcttaatagcttaatattctatgttgagatcttatttgatcatctaacaatttaattttttaaaataagatgattttcccctcacagtagagtctctttgattaaatattgatgggctttcattgattgatgtgtaatggtgagcaaaatattgtttaactgtttttttctctctcttgtcaatagagcaa

SEQ ID NO: 61455 - DNA, 390 bp, Populus trichocarpa
  Intron number 1 from transcript POPTR_0014s00532.1 (locus POPTR_0014s00532) derived from phytozome v7.0 (chr-ID scaf fold_14; pos 479271 to 479660)
ggaaagactactgtagcaaaaaagtttgtgaagtagtgcgggagagaaaacactttgatttaacaatctgggtttgtgtttctaatgattttagtaaggggaggattttaggagagatgttgcaaaatgttgatgaaactacaagtaggttgagcaacctaaatgcaattatggaaaaccttaagaaaaagctggaaaataagacattttttcttgttcttgatgatgtgtggaatgaagaccgtgataagtgggatgatttgagggagcaactgttaaaaattaacagcatgaatgggaatggtgttgttgttacatcccgcaaaaagcaagtcgcagacatgatggagacttctcctggtattcagcacgagccaggaaaactatcag

SEQ ID NO: 61456 - DNA, 729 bp, Populus trichocarpa
  Intron number 1 from transcript POPTR_0516s00230.1 (locus POPTR_0516s00230) derived from phytozome v7.0 (chr-ID scaf fold_516; pos 12900 to 13628)
aagagagctgtttgcaactgacattcctgcacaaagtaccttcatgggaatttcagccattttgtctgtagtcattacatcttctacttcatcaacctccaccatttccatacttctgcctcattcaactgacaacactgctccaaatctctttgaacggattgggaccctttgtgtatcgcctcttagctgctgtgcatagataaaacccattccagcagcaaaaataaatacattgaaattctatgctataatcatggccttgaaaactagggacgctcagaatgcatcattcaaaaagttatgcagaagatttgagatctaccctgacttcttggtagagtttcttctcccgggcatataatctgtcaaatgttgattggtgactacatgagaacatgcaagaaatcaaattggtgttgcaagaaaaaacctttttttaaatcaaaacaatgatggtaactatctatgcaatgcctgttgtgtccgaagacagtacaggacaagacctgcctcttttctaccaccctaccacctccctctttccaacctcaacttccaaacccaaaaagaacatcatcaaaccctaactgaaaagcttttatctctgataaaacaatgcaaatcgaaaaacctatgaattttgtgttgaattgtattacaagctgaagtctttaggcctaaaagcaaataatttcacatacccttttttgtttatagcgtgaggga

SEQ ID NO: 61457 - DNA, 418 bp, Populus trichocarpa
  Intron number 1 from transcript POPTR_0010s26010.1 (locus POPTR_0010s26010) derived from phytozome v7.0 (chr-ID scaf fold_10; pos 21402386 to 21402803)
gatttcatcttcctgatctcaagcttgctgttagagtatgtgcctccttttcatcatcatcatcagcttttcattccctttttaaattaaattatttttcttttcttcttttattttctcctcgagttgagactaaaagtagtggggaaaaggaaagttatgcagaaaataaatgaacttcggatggaatattctgaattttgcttttattttctctctttaacaaagaaaacccagttctttttaaactcggaatttaagtaaatctcttacctttttttatccaattcagcgagtggaatggattgttcctgttttgcggggttttttttttttaatttttttaaaaattattttgaattgaatttgatgtaaaaactcaggatttcacgaagaccagagaagtcggtgagttcct

SEQ ID NO: 61458 - DNA, 440 bp, Populus trichocarpa
  Intron number 1 from transcript POPTR_0001s11820.1 (locus POPTR_0001s11820) derived from phytozome v7.0 (chr-ID scaf fold_1; pos 9162162 to 9162601 reverse strand)
gtccacggtatccttggaaggtatgctcttttttttcttcttattaatcaccgattatcatgttttgtttatttaatttagtgaatttttttacctggtcttggtttaattttgtcgaccacgagagcaaaatgttaaaactttattttaaaagtttttgttttattaattgaattttcaccctcaattactgaattcggaattcaattgagttgttgtttgcttaatctagtgaaatattttttttatctgggtttggtttaattttgtaaattatgagagcaaaatctcaactttcttttaaagtttcctttcgagtttaactgaattttcgggcataattattgaatttggaattcgattagttatgctgtttgctaattgtgggtgtatttgagtgatcagtaacgcagattggaagttcggagcagagcagtttg

SEQ ID NO: 61459 - DNA, 754 bp, Populus trichocarpa
  Intron number 2 from transcript POPTR_0010s03520.1 (locus POPTR_0010s03520) derived from phytozome v7.0 (chr-ID scaf fold_10; pos 4221253 to 4222006)
gaggttactaatctcaatcgccagtttcttttcaggttcttgctttctcaaccttaacccacgtgtttatgtgcttttaccttttcttttctctgttcaattcgtggctgtttttattggtatatgccctttcgtggcttgtcggttaaattgcactttgaagtattttttttttcctatatcaactgcgaagagaaaagaaacaatgtgaaacctagtcaaagggttattacttaaactgcggacctaatttaggtataagtgcatttaggtaaatctgtttcaagggagaaatatggctgtttggatgataattgacaaataaaagttcatcttgcaagaaggctaaggagaagtagtacctttagtgtggactagtgataacctagtattcttgtgaataaaggattacttttaagaacctgttggtaaaaggagaaaataaacaccttgtttacttgacaatgtgaaatggctgcaagagggtggttgataattcttaattttctcaggaccagtatggactatcaagcaggtgcttcattgttttatcaaatatgactagatctatgtgtattattaagtgcatattttttcctctccttgtttgcaagtattagtgttttcatttattatacaccttaacataacagaaagtgtaacttatctgctttgatgtttcaacattgtcatagctctttagttctgattagaaagtcactcatgatatagtgttcttattgtaggctcgaag

SEQ ID NO: 61460 - DNA, 522 bp, Populus trichocarpa
  Intron number 1 from transcript POPTR_0018s03440.1 (locus POPTR_0018s03440) derived from phytozome v7.0 (chr-ID scaf fold_18; pos 3023550 to 3024071 reverse strand)
gccgtaccgatctgctcgccgctggtcgtaaaaaggtacttcttcttcttcttattgttaacattatttgtcattgccattcattcacttatttttattattgattgattgattcggtgttttttacaatttgattggttggcgctgaattagagggaaatggattttatttttatttttttaataaatagagtaggagaaaatgtataacagaatgttgtgaattttgcttttggttttaatcttaggaacgctgcggaagctaaatccgaagggaaaaataaaaatccactgttgtggttttgtaaagaagaaaaattagaatcggatatgattagctgtaactataggagattcgacattgtgtgatgtgtagtctctttgaagtttaaaccttttgtttttcttttctctttctttgggttagaaaagaggtaaagattgaatgcaattggttggaatctgagtctttgttttgaattatcagcttcagcaatttcgccagaagaaggacagtaaagg

SEQ ID NO: 61461 - DNA, 238 bp, Populus trichocarpa
  Intron number 1 from transcript POPTR_0007s13060.1 (locus POPTR_0007s13060) derived from phytozome v7.0 (chr-ID scaf fold_7; pos 13241478 to 13241715)
tctcttcctaaccttaacctacgccgagtcaaccggtgagaaatttatctctctattcctccctcttctccttaaatctctcatcattcttttcacttcttgcaaaattaattaatccactttggctttatacttgaagggtagcttaattttcttgatttttgtgtttatttgtttgatttattaatcaagttctgatgggttttttgttaaattcatgcgacacagatactctgga

SEQ ID NO: 61462 - DNA, 1026 bp, Populus trichocarpa
  Intron number 2 from transcript POPTR_0001s09690.1 (locus POPTR_0001s09690) derived from phytozome v7.0 (chr-ID scaf fold_1; pos 7409865 to 7410890)
tgcagattgctgcttggcttgttggtggtgagtgctctttgatctagttatttatttgctttgaaatgtaaatctgattgttttgtgggttcttaacttggtataacatggcgttgactctgatagagtgtcatggctttgttcaaatttgggcgatttagattaatttttattctttggcagaaaagatttatccaatagttgtgtttttttgctagtcgtgctgtacttcagcctaccattaatggtttttccctttagaagtgaggaaatatggttgaatgagatcactctttggaactccttcactgttttgaagaatttaattcactcttatactcattctcctttggtgactcaagttattgttcccttgttcaataagttttcggattttaataaattggcacggattgcctggaatttgattgtccacatcgcatcattccaccttctttgaaatgaatagtgtttgcgaaatacatgaactcattagatggtgccttccaacatgtccaggaattgtacttcctaacagtatagctcaatatatgaggcttgaattcatttcgattgaaaattactatcccttttattttgattcatacccacattctgtatccttctttcattcttccctttgtgttggttttcttttatgtaccagagactccttcgtggacatatcaagttagcatcaaaatgcattttcaagattgaaatgtcaaaactaacttgctttgctctgttcttttgaattccttcaaaagcgttgtttgaaattcacttcttgctctttcctgattgcagaaaagcaaattaattgttttgaagtactttttttctcaaaaatatcgagcttgaaaagtgctgttctataataacacctatgtttttttttttttcatgatatatttaagaattgttatataaccatttaatttgtgttttatttgtcatattttgcatagattttttcttaaattatgaagcacccaattctcctcctttcttttgtagtgggcc

SEQ ID NO: 61463 - DNA, 1033 bp, Populus trichocarpa
  Intron number 1 from transcript POPTR_0017s02770.1 (locus POPTR_0017s02770) derived from phytozome v7.0 (chr-ID scaf fold_17; pos 1972480 to 1973512)
gactctactgagaaaattattgctgagtacatgtactgccttctttactttcttacacacttcttcttcatctgaacatgaatgtatagatatttgtatgcatatatgtgtagttacacgtttttgttagagggtttgcttttttatggtttacttctttgatgctgtcttgaaatctatcccttctggggctacaggatttctctgttttcttgttcttgtaacttttttaccatgaatgatcaaagatattattttgttacttaaagagtcatttttttggttctcaagtttagaagaaccctcctgagaagcttaattcacttttccttctgcacttactgccattcccctgcttctgctgctgcccatagttttatagtcttggatggttttgctttattcttgtgttttttgattgtaatattgaactattacccttacaagtaaggtcactaattcagccatctgacatgaaccaacacttgtgtgtcatccacacgtagctcactagatcatttaaaaaaaaaacagagcacaagactatgccctgctccagtttttcatgtcgtgatggatgaccgacacaataagatcttcaatcttacggttagcttaagcaaatattttctaatggaggaactttcatagttcgaggcaaattgctttaaatagtttcagttttttctggtcattaacaatgaaagccaagcttgatatttaattgaactctgtttgtttctagtcagtaaatttatctttgatttgtcgattaaaaacaaaagggactaatgtagttcctgaaatgatcctgtgttcttgatttttccttggaggctggggtcgtgtcaagtttttattgcagttaaacatggcatagctctgttcttgtttttattgtagttaaacatggcacagctctgttcttgttgctttttgctaatggatatggtttggtttgccttgttttataaccaagcaagcaagtaatctatgcttttgtttaattctgaacagggttggagggtctgga

SEQ ID NO: 61464 - DNA, 505 bp, Populus trichocarpa
  Intron number 2 from transcript POPTR_0009s15910.1 (locus POPTR_0009s15910) derived from phytozome v7.0 (chr-ID scaf fold_9; pos 12216429 to 12216933 reverse strand)
tccttgttgatatcgccaagtctcaggattctgaggtcattaattaatatatatctataattttgttgattatttttgtaaatttctgttattgttttcttttgatagtggagatgcgaaatgttttgcttgtgttttttttttatgtcggtttgaattgattgttaatgtgaattttcaagcaaatgtgatactcgaatatatattgggatgaggctactggcgttttcagccagggggagagtatgttcttggagaattagagtggcttaactgttttgcaaagaatgagaagttgtgaaggttcaggaggggcgtagaggaggttgattttgaaatttattgtgtttgctaatgggaggaagatttttccgacattctttgttattatatggatggttactttgctaatgggagcattgtatgaaaaaaaaaaaaatacatgtgccgtttattgttgaagataaaagttaaaccatttcttttgttgcgctacaggttggtg

SEQ ID NO: 61465 - DNA, 667 bp, Populus trichocarpa
  Intron number 1 from transcript POPTR_0011s13370.1 (locus POPTR_0011s13370) derived from phytozome v7.0 (chr-ID scaf fold_11; pos 16133800 to 16134466 reverse strand)
cccaccgaaatccagattgaaatacacccctgaaggtgattctattttcacacaagcttaaatgccttttttttatttcttgtcttttttggatttgtttttgtttctttgacatgggttttcgttgtttagaaactttaaaattttttttgctaattttcagttacagtggatttaattgctagtcatttggttcttgttgttgttttgggacttgggttttgtatgccactagcttttacttttattttcttggaaatggagatgattaaatattgaattttagttctatgctagtattttgtttttctgttagagtcagagcaaaaatgagaatgcaattgctttatggggttcgacttttgattgtgttatattttttatgggtttgatttgtaaattcttcgctgtttcagttaaggtattgattttgggaactgggattgggtttttggttctgtgttcttttggtatagaaaaccggagagattttttaatttttttaaaaaaaattctaatgtcattcgtggttgtgtctggtttaagagagtaagaatctaggattgtaatggtttcttaataaacttccttttactttcctgctttgtttaggattctgaaagttgagggctaaattttgtgattgcaggtgaggcggatttttcta

SEQ ID NO: 61466 - DNA, 788 bp, Populus trichocarpa
  Intron number 1 from transcript POPTR_0010s11850.1 (locus POPTR_0010s11850) derived from phytozome v7.0 (chr-ID scaf fold_10; pos 12003075 to 12003862)
ggtgtaaagatataggtatcttcttcttcttgtcataaaaaagttatttttttttggtttcttttgtgattcttgcattaatattaacttgtgtatgttgtttttgtttgatgtattttgagttagttttgaaatgaaattgtggctttgcttttgtttttcatttggaaaattctccttttcttgtaccttgctaattatgagtgcatggctggtgcagctgtgactgtgatgtttgaattgaataaaaggaaagaaagagtagttggttcatactattaacaaattatggagcttttttgcttaaaaactcgataagaattcttgtttgatatcattaagaaatctcttgcttctttgctaaatttattttttcgatactgtagtatttacctgtttaaccaatatatatgcatatatgtaagtgtgtagccatttatttgttgttgatgggattatatctgtgagataaagattcaatctggtatcagtgactgtttatattgatctttaataaatggtatatgcttacctgtttattgcaacaagaaaatttggagtatacacaaagcttaagcttgatttttccaatttaactctaaagagtgtccatctggagtctgattcagacagtttgaattttctttcctaatttattgatttctaatttgatatctgaccaaagttgagtgttagagaaaaggttcctggatttgttttgaattaaaaggttgcgtgggtttctaatctttttgttgatattcataggatttactaagggttcaggg

SEQ ID NO: 61467 - DNA, 514 bp, Populus trichocarpa
  Intron number 2 from transcript POPTR_0006s10180.1 (locus POPTR_0006s10180) derived from phytozome v7.0 (chr-ID scaf fold_6; pos 7546796 to 7547309)
gactctgtgatccaggtaatgtgtagtggtgtaaatgtagatttgaattattattgatttttttttcttgtggaatcttggttctagtttagggtgaaatttagagaaattgtttggttctcgagaaactatgaggtggagtgatttgaagttttgcacgtgatctccgctgctgtattttttaggattagtgggttttatttcagaatttgtggtagattttatgaaaatttaagctttgagagtggaaattgagggcatcactgttgaaacttcaatgttttgttgactctgtaaacagaaaattgaaattaaaatggatattaaaagctggaagaagagaatttgaaataactagtacttgtaaattggtaatgtttttatttatgaagaaacaagaattgtaagatttgcattttgctgttactctgcttttcctctgatttctcaaggaatattagctttactcttttttttctttttttggtgttagataaggagaatttgtgtctgt

SEQ ID NO: 61468 - DNA, 763 bp, Populus trichocarpa
  Intron number 3 from transcript POPTR_0006s10180.1 (locus POPTR_0006s10180) derived from phytozome v7.0 (chr-ID scaf fold_6; pos 7547508 to 7548270)
aaaggtaatttagtgcacaattgcagggacatgtggtattctcattctagtacatttttcttttgttattcattctccaattttgatgtgattaaaatgttgatgaagttaggaaagttaaccttgggaaaatttacatcagatttgttggatgattaaatagatggtaccaccatgtcccaccaatcaatgacccgatcatctttcttaattgccttccagttggtgagattcagaatcatggtagcgttatcaattggtttgcttgaacaagatttattacatatattggatcttcttgataatatcctcattttttaacagttattcctttacaaaggacaatttatgaaattgtttattattttttagcaccttataaaatcttgttataaaggattccagaaacttcaaaaaatacttgacagaaagtaatgtcaagatatgctttcaattgaatacatggcagcatgcagtggtagtatatttattcttcttggcaaattatgatttgtttgaattggtcaggactggataggccaccacagataatataaaaactttaaaagatcaaccatctattttggcatgtaatgtttgtcttgcagacctgaaacataattattttcaatttgcatagtgggatgttttcaggtttatttttattgtgttgttcagtttttcagtgtgatgttatgttgagcatggctttagaaactaaagtacatttttattgacaggaaaaggctgttcagcctgatca

SEQ ID NO: 61469 - DNA, 986 bp, Populus trichocarpa
  Intron number 1 from transcript POPTR_0018s09210.1 (locus POPTR_0018s09210) derived from phytozome v7.0 (chr-ID scaf fold_18; pos 10087988 to 10088973 reverse strand)
taaggtctgatcttctcgctcgattctcgattcaggtactggctttctttttttacgagttttttatatatatatatatatttacagttgtgacttatgtatggattctttataattcttgacacgagttgcatctggatttttaaaaaaaaattaagcttggtttaggagataattttgaatcctaattttgggttttcttttctttgcgtgctttagtttaatgggttcttgtgaatttccttaatgtttggactttgcttgcatgatttgatgatatacagatctgggcattcgtttttcgttgctgagaaactaatagaaagaatatgggcataaagacttagttgcttgaggtggctgagccaaaaaaatttttatggactgttgcttagtgtgttttgttttgtgggctcgttcatgagaactgggaattttaaggttttgatctgtgtatcttttgtattttgttggtttataaaatttcaaagaggggtgtgtgtgtgtgtgttatggttttcgtgtgtggggcactcaaacattttgctcaagtcttatcatgttccatttcttttagttctggctatgtttagattcagtgtttcttggtgatgtgaaattaattcccttttctggagttgtctatttaaattaaaaaaggcacagctttcaatgctgttcaaaagtatgaaatagaagaatttgaatagtttctatatgaagttcttgtgtttttgccagttcaccattttgatcccataatgcgtactttgcaatatgaacttggtgctggtgggacttaagtggctgttaaattgagttggattgatcaatagtgttccatattcaacttcatgtcttattattagtgatttttatatttcttctctccttttcatacctttcagtctcattgaaactgatttctctttcctgttttgtttccttgagcaagatcaactttcactgaggcagggcaggtcatt

SEQ ID NO: 61470 - DNA, 333 bp, Populus trichocarpa
  Intron number 1 from transcript POPTR_0014s12480.1 (locus POPTR_0014s12480) derived from phytozome v7.0 (chr-ID scaf fold_14; pos 9190426 to 9190758)
gccagtcctgtcctcaccattgtcccggtactcaattctattgcaaatgattgttatccactgtttcttatttatttgtagcattggttagtttgtagggatatgatagtttctgtttctttctattcctaggatattggtgtctcttagcaggtttgtctgattttacagaagaacgtgaagttttgttcttattggagtgatgtttacatcgatttaaatttttctttttgaagtggcatcttatgttttttgttataatgatttttttttataggtttgttctttgtatctgctattccttctttaactcaaattcacttgcagtgtgcg

SEQ ID NO: 61471 - DNA, 830 bp, Populus trichocarpa
  Intron number 2 from transcript POPTR_0005s27210.1 (locus POPTR_0005s27210) derived from phytozome v7.0 (chr-ID scaf fold_5; pos 24963954 to 24964783 reverse strand)
tggtaactactagctgctactctgtttctatcttcttttatttttttctctcgttttaaagcgtttttgttctgatttgctgacaatttttggatttgtatctcaaaatattggaaaatttataatttttttctttttgaaatggaaattcgaggcatgaaattggcttctggttgaattttatgtttaatttaatctgaattaattgttaaacttgatagaatttgtctattttgccatttgtgattcaccatgatttttgtttggatgtatatatttggcccagaacttgaataaatcgcggctgcttgtcaatgtctaccaccttacagaatgccagagatcatgattgataagggaagaaagggataatttttttgtttcaacatctaattcggtgaatgctaaatgaagaattttagacatgcatagcttacactgctctttaatggaccacataggattccctttctgggttcactttgatacaagaagttgccatgatgtatccagggtttgtttcaccagatggttgctagtgtttggtctaaaacccaatagaacaattcaacatttgatacttaaattatgggaatttcaagagacttgggatattgtcttgaaataatatatcctcttcgatggtaaaaaagtggtgcgtttctgcaaaagaaattacattacttgttcttgtatgtttcttcttaatctattcaaggttattagtttctttaatctctgcacattaatgaaaataatgtaaatatctgccaaacattaatgtctagaaatctgagcaggttgctgcattggccccaaatattccagca

SEQ ID NO: 61472 - DNA, 576 bp, Populus trichocarpa
  Intron number 1 from transcript POPTR_0018s04685.1 (locus POPTR_0018s04685) derived from phytozome v7.0 (chr-ID scaf fold_18; pos 3975782 to 3976357)
atcgatcgtgctgccaaaagcaaaaactataaaatgtacttgaaaacattacaaaataaactaatttgctcagatgtttcaatgtagttttcggtactgtggtgtctctagtagttcaccatggatttcaacggtgaattttttttagtcatcattttttttttaattgcatctttgcttttggcttgatggtctctttcccttaatatgggtgtcatttgttcagctcttatgctaggagttaggaatgaattcttatttggtcagtttagcttcactaaggtagttagtaaactttgagcgtctctctgctagagtttcttgaataatgcatgagcttcacagttttatgattgaaaagctggagaatgtttttgtcagttgcaattgctgggggtgcattatctttgctcagaattcaatgctttcttcttgtttgtgaccgcttttgcagactgaggttgatctgttcgcttcccaacctgccaacccttctgcagttccttctacgtttgactttttttttccggtgatgaaccagttgtgcaacccgagatcaagactccaaatctgatc

SEQ ID NO: 61473 - DNA, 549 bp, Populus trichocarpa
  Intron number 2 from transcript POPTR_0018s04685.1 (locus POPTR_0018s04685) derived from phytozome v7.0 (chr-ID scaf fold_18; pos 3976581 to 3977129)
aagccgtgggctgattgatcttaatatatctgctcgttagcgtatctttcccacttgctattgttacctttcagaaactttctccatatgcatgctaattaaatgcgatttacctcaattttattgtttctattttatgctttaattcatggggtgagaggttttttcttcttaaaacacccatgaactaatggataggttctcaagagtggctcactaagaatcttgtttcatcacatagataggcatcaccagaactggttggaagaggcaataatttctcctcagaactttacctgtatacaatgacatattgaaacttttgttttaacttttaacttcaccgatgtttgatgcgagtgttttagcgagctaccatttttctgtagatttctggatatgaactttgattctgcatctcctgtctggcatttctctttgtcagtctgcaatacttcatcaacactgcacttcttgctttaaggccgcccagtcataactgtcttgccacttgaactctacttgcagccaagaaggtgtccctggtag

SEQ ID NO: 61474 - DNA, 679 bp, Populus trichocarpa; identical to SEQ ID NO: 57804
  Intron number 1 from transcript POPTR_0010s21580.2 (locus POPTR_0010s21580) derived from phytozome v7.0 (chr-ID scaf fold_10; pos 18802975 to 18803653)

SEQ ID NO: 61475 - DNA, 741 bp, Populus trichocarpa
  Intron number 2 from transcript POPTR_0008s14760.1 (locus POPTR_0008s14760) derived from phytozome v7.0 (chr-ID scaf fold_8; pos 9785688 to 9786428)
tcatttggctctgcggtcctattacaggccttgtggtaggttttgccaaatcatcttctgtttgattgaaatctgatgaatctggaatctacttcttctattttttgccgcatcatgtataaatctcgattatctagctgttgttattttaactggtggatgaatatacatatttatatttgcatttggaatgaatatgcatgagatagatgaatttgatttgacgacatggcatcttggagagttttaattaattaattaattaattatcctaaaataaagggttattaattacatggtggtgatcacaccaggaaaccttcctgcatttttcttctttttgaaatttccactctcatgtcttgaacctgtaccctccaaggacttttaccattgtgctagttaattggccttcaagattatcttgaaacaatgtgccaactttttttttttatctggtactagtagcttgcatcttcatttgcaaccagtagctattattgattttgcaactcttaactctttagtcctgacttttacttgattttggtagttttcttggcatttgaagagaaaacaccatgcttatactgtcaccattgatgatatcatttacttgaaaatgatgctagtataagtaattaattgtttcttcaatttcatgaaattaatttaggcttgaattagctattggggttttggcttttaggttcaaccttgcgttggtatttggagtgataa

SEQ ID NO: 61476 - DNA, 926 bp, Populus trichocarpa
  Intron number 1 from transcript POPTR_0001s29060.1 (locus POPTR_0001s29060) derived from phytozome v7.0 (chr-ID scaf fold_1; pos 27796869 to 27797794 reverse strand)
agaaattttcttaagggtaaaaagatgtggggatatgttagtggaacttctgtgatacctaggaatatcgataagagttatattgctttgatatatacatgagaagcaaacaatgcaaagattattacttagattaacaattctgttgagcattctatagatacacagttgataaagtataagacatcaaaagaggtttgagatcatttgcaaaggttatttacgaaatcaaattttgaaaagcagtatcaattagagaatgatatatgagctcttcacaaaaaaaaaaagagtattcaggagtttattatactatgacatatctttaggatcaattatctcttgtagaatcaacataattaaaggcatgtggtacctaaattacttgtagaaaggagcaacgattgatacagtttttaacggcattttgcaatgattttgaaggacttagacattcaactttgcatcgttctccactatcttttgttgatttagttgtcagtgagttattagatgaagaaatacgtcttcaatcttattctgaaaagagaattctttatacttcttatctttctatgctagtagtaccttctaagctagtctctaatagttagaataagtcttacacaagggttgcttttgatgagtgcaatttttgtaaatataaaggtcattggaagacttagtgtcccaagttgagacaacaaaatcaagcttgaaagcctaacagctaatcacaatctaatgctcatagaccatttcaggacaataaactaccataccacaatactacaacaatagtttcattaggttctttcaccgattttagtactctaactgagcaatttcataagtttctctctttacaacctcaagttatgttcatttttttttctataggtcagttgcctcatagttctttaggt

SEQ ID NO: 61477 - DNA, 935 bp, Populus trichocarpa
  Intron number 3 from transcript POPTR_0001s00580.1 (locus POPTR_0001s00580) derived from phytozome v7.0 (chr-ID scaf fold_1; pos 475683 to 476617 reverse strand)
gccaaggtaaatcattaacttgtttttattgaaattcaattatagcagtaaaaagagatgaaaaaatttgcttacattacaatattgactttagtatagaatgcaatgacaggatatttttggaactttgaatatggtcccggcttgtgtatatagtggaaatgatcattaataaaaataaaagtacttttatttggtatatctctttatttagctggaggagtgttgatcttttaccaccattttagaaattggtggcgattgccttcctggtaactctaaccccagacagttcaaggaaaccttagtttgaggaagaaagaaagtggagggacacagtcgaagatgtgaaacttaacatgctcaaacatgtcgacatgcaatttaaaaccaaatgcacatgattaatcaatacagggtgctttagacttccgcttgtatgtatgtactaaaacgaaaagaataatctccaaccagccatcttgaaggcaatgatattctcacatattttttttctggttatgtaaataaaatgtatagaatattagatgacttttgaaaatcttaatgtaaaggaaagttaagtatcttctcttacacaagttggaaaaaaacatggatttatttgttatggagtgtcatatacatcttgctgtgatctgacaaaagttccaattttccagactggttggactgattttcatttttattctaatatgtaaaaggtgatttatgttctttaactttctattttctctgatattaccatgtattcaatgatttcacttcctgcctaaaaagttaagcataatgtagcagtatccttcttttagcgaggaatgtatttgtatctgaagccagtaaagaactagtaagtttcttggaacttatcccattcatcatgcaggtgggacatttgctctttattcgctact

SEQ ID NO: 61478 - DNA, 740 bp, Populus trichocarpa
  Intron number 1 from transcript POPTR_0010s24250.1 (locus POPTR_0010s24250) derived from phytozome v7.0 (chr-ID scaf fold_10; pos 20557101 to 20557840)
caactaatttattcattagctacaattttttattggtaagcacttgtttgataattgtctgtgcatgttctgctatctgggtttgtatttttgccttgttctcttacttgtttttgtatttcttgatcataaactgctaaaaaggcgaagacccattaaagttcaagcttgttttgtggttgttgagattgattacgtttaaatattgatcattttgcatgaattttgattcaagtttgaatctttatatgagttttgtggagatggttttgtttgagttatgggtgaggtagaattatttttttttttggtggattttagagaggttcattgtgatttttttttattattattattgtaatggacaaatggaatgcttgaaaggactcccttttttaatttacatggtgggctccttagaaaacttggggaagaaacaagataatgaaactttcctcggatcactatgtctgggtttcaaaatgaaaaaaagaaaaagaaaaagaatattaagccgagcttggtttaagtttgtaggatactttttgctattgaggataaggtactgatgccatgtaaagttcaagtcttttcctttgtatgatgcatgtgttttaagattttgatgctagttttgaattgacgatggctgaaatgataactattgcatcaccagaacactttccaacttagtttattatccaggtatctcgagtcaaagctgggttctgagactcatc

SEQ ID NO: 61479 - DNA, 317 bp, Populus trichocarpa
  Intron number 1 from transcript POPTR_0005s02660.1 (locus POPTR_0005s02660) derived from phytozome v7.0 (chr-ID scaf fold_5; pos 1704543 to 1704859)
gctgccgttcttgaatacctcgctgctgaggtacatcccgtgttgccgttttgaaccatccctgtttcctttgtttttgagaaatgtctaatgtttcgatctttttttatttaaaaatttcagatctatttttttttcggtgttcctatggaagaacaatcgtttttcctttttaaatcaaaattagtagtctgtctttgttttaatttctttggttctaatccatagataaccctttttttttttcaatacaatcatctatttttgtattttaatttgtttcatttcatgtttctaggtgctggagttggctggaa

SEQ ID NO: 61480 - DNA, 786 bp, Populus trichocarpa
  Intron number 4 from transcript POPTR_0014s01060.2 (locus POPTR_0014s01060) derived from phytozome v7.0 (chr-ID scaf fold_14; pos 994233 to 995018 reverse strand)
ggtggctcctcagcccccctgaacgtagacaaaaggtaatatttcatgcaaaacctaagaaacaaatgcagtttgcagacaattttcaagtgtctagaattatatttatctgtctttggtaattggttcaagttctttttcttcttgcagaagatagaactcatttgattgaaaaaaagaaaaagggaaatcaatgccttctcaaagttgtttataggccatttcagaaatcccaccatcaatcccagtagagtaaactcactggagatcaaactaacgggcccttagttttttttaaaaaaaaatgttaaaaatatattgttttatacattggcaattatgacctgcttattgaaaatattaattagagaaaaaatatgactactaaatatataataaacttgcaaataaattttatgaatggattttacatagcaagaaacttcagatatcaattaatgtagtacttggaatacaataacattgtgagttgcagaatttatcaattgttcttgtagttaacccaaaaattattttatgctcatattaaaaaaaaatgttactcaatttttgcatgaaataatttaatttcatgctccatacaattttatttcttgttaaatacatgaaagtatttattgtgttggttttaagagtataataaacctaaaatttgataaatttcaaaataatgatcgaaaatttactattatatactgcgtaacatgaacaatatgcatattgtttaggtattaatgttaatatttttaacattttaggtatata

SEQ ID NO: 61481 - DNA, 718 bp, Populus trichocarpa
  Intron number 1 from transcript POPTR_0014s01060.2 (locus POPTR_0014s01060) derived from phytozome v7.0 (chr-ID scaf fold_14; pos 995507 to 996224 reverse strand)
ctcttggggtgcggctgcataagcatcatcatcgggtatgtatggtaacatgcactgatcaccgtatatatctaaaccattatctattcaaattgaatgatatagttgatattgatattttctgatttcgtcattgtagactagctgtaaaattatgcattctaatccaaggatcaatactgtttaatggagatctacccaagttttgttttattttttttattttaataaaaaaacctaggtttttccactaactcaacccggatcagcccttgaatctcaaggttgatcagccaagttttataaatagggttaaatttcacccgactcaacaaattaattcaataaatttatgacccaaaacctaatttcaagttgaacttaaaaaatattaactcaaactcaatctagaatctatcaagtcaacaccatgaatatttaaaaaaaatgtaattaaatatcattttaataaaaaaaaaaaaattgacccaaatttgtcgcgtgatcaacatcattttctagttcaatcttcataacatgtcttacaactattttgcaattaagtcatattaaaataaataattaattaattacatcattattaaaacttttttcttagtaaaaataagttttaaatattgtcaatttaaatttggcacagccataatcctctatcttttcatatgcttttaattactgaagttacagtaactttcag

SEQ ID NO: 61482 - DNA, 890 bp, Populus trichocarpa
  Intron number 1 from transcript POPTR_0005s10940.1 (locus POPTR_0005s10940) derived from phytozome v7.0 (chr-ID scaf fold_5; pos 7872949 to 7873838 reverse strand)
tggttcagtttggcattctcagccccgacgagatagtaaatcttcccgacctctacttctgcttctttttttctcgttttctttgcactctgtttggttgctgagaaaaagagaaggaaaaaaaaattgaaactacaattgtttaattacaaatgttagctcaaactgtcacggcttaaattgaacacgaatgaatgttagggtttcatgagcatgcttccctgtgtgtgcataagttttttcagataaagtcattaggaattgctatttcactcaataagaaaataacaatgaattctaggttttctgagctgtgttctgtttggttgctgagaaaatctttggagatttttaattcgtagtactagttcactggtttgatgatttttcagcagggaagaaaccactgtctgttctaggttttgtgatattgcaccgtgtgccctaacttttcagctagggaaaaaagtgaatcctagggttttgattctgtgttgctgtgtgtgaaattttgttttttttagcatgtttggttgttgagaaggagaaaataaatggaattgtttgtaggtagaagtacttgttgttgtgaatcttacttcatggagtaattgagtcctagggtttttggtattgtttgtatgttttagagatattttgttgatggtattggttacacaatggatttgtcagaaggagatgaatcaatgcccagtttgttctttatttactaagagtaaaaaatgattgctgagaaaagtatttgatgtgttgaattagcagtactagttaactatttgctattctaagctgggaaatgaatgaatgtagggttatgtaattttgcttgctcatgtgaactccttttttgtttttgcgtgcagaggcaa

SEQ ID NO: 61483 - DNA, 761 bp, Populus trichocarpa
  Intron number 1 from transcript POPTR_0019s14200.1 (locus POPTR_0019s14200) derived from phytozome v7.0 (chr-ID scaf fold_19; pos 14945735 to 14946495 reverse strand)
ggccgttgtctttatcaaaacctggctaaagaaaggtaacatctttctccttctccctttgttttttgggtgttgattacttttatttttgttttctcaaaatggattttttttttttgtatatttcttggttttgattcatgtaatttacttgtttgtggagtgggtttgttttttttgtttgagagaatgaattctctccgcttgttttcgagctaaaagctcatcgtgattgatatccttgtattcctgtttctttgtttattgcatagattggtctcttgtgtctttgaatagcagcaatgtgcctctccttcataaagttctgccttttgatcttgggttaacattggaatttgctatggttggttctagtttatttgctgctgcattggctatatgtggtagctatttccttaataatttctaaggaatgatggctgtacagtgtacatgaatgatggttaattgcttttggttcttgtttatgatccatgctcgagaaagaaaggttcttcagatgctatttttcgttttctaattgcatcaagtagttattttgtctcatgcttagttctctttattggaccaatccaatgcggatctgcatgtgttactgataccatggttatcagttgcaaccctacaagctgtatattgtttccttttcttttggttttcttgctttatgtttcttgggtgaaattgcagttaaatttatctcaaccttttttttccttattttcaggccagcatctctt

SEQ ID NO: 61484 - DNA, 1041 bp, Populus trichocarpa
  Intron number 1 from transcript POPTR_0013s15290.1 (locus POPTR_0013s15290) derived from phytozome v7.0 (chr-ID scaf fold_13; pos 15301507 to 15302547)
ccgacaagcattagtactgccgtagaagaggcgaataagagatcagtccgggcgccagaaaatgggcctgtggataacttagggctgtaaagagacgatcaaactcaataatggagctgtgagctggttgttggcaccaaagttttaagaggaggtcaagtcttggttctatggaactttgtatcattatagtaggatgtaggacaagcattgatatatatatttaggatgtgtaagggtcagcttttgttacaactgttactatacttataaaaaatgtttggtaacatatatgttaaaaaagtgtttttatatttcaacatattcaaaagttttccagttttcggaatgtttaaaatactttttttttctttttttttaatttatcgtaaacgctttctgatttgtttgccaaaattctgaactctaaatagatcaagccatcaaggtataggtaaaactcatggttagagcgggggctgtgcacattttttgctcttgacaacaatatgataattcatgcaggttctgcaatgatttgatgagcctaaactgttgatcaaatgatcaaacaaattaaatctgaactaaccagtttttttttcattaccaagttctttgctggccatgtatcctttactgtggccttaaacttaattccgagtagatttgtataaatcttttccagttagttgagattggattgatgcaatcatgcacaaattagtgcctaagactgattccgaactgtttcatttggagaaattgaacccagtaaattaatttaactatgaaatttttgcaagaaataaattcccacaaaaacctgatctcacattggtttgatcgatggtgtgggcttttgcctctggctaatatttggttacagcaatacaggagggtgagaagaaagtggtggttgcagatctcattattgattctcgaacttggaatgtaagcgaccttgagatggttctccttcctgtcactattgatgccatcaaagctactccactgcctagctaggtggttaaatctcga

SEQ ID NO: 61485 - DNA, 516 bp, Populus trichocarpa
  Intron number 2 from transcript POPTR_0002s18200.1 (locus POPTR_0002s18200) derived from phytozome v7.0 (chr-ID scaf fold_2; pos 14135367 to 14135882 reverse strand)
aggcaattgggtattccacacaatcaattattaatcttccttttatagatatattggtggttctattttcatgaaatatgaactttgcagatagtttttgaatggttaaacttagaaagatgctgttttgggtgcttaactataatgggtttcatgcttttagtgtttctgcaattgggttcctgcaaatatttcttttgctgtctgtttaattactgttatactataatagtgagcaattgagtgtctgtttacatttaaaaagcgttgctatttgttttaaggatgattaattcagattaaatgggaaaagaggacatttaacgcaaggttataataaatcgatattcttaattggaaagtcgtgaggtttttctcaaaatagattgttggtactatatccatcccttcctttcaccgcggttcatgagggaaataaacaaactttttttttttgttttttgtttttgtttttttgcagctgcagggttgcaagcgcttcaagaaaaacatctt

SEQ ID NO: 61486 - DNA, 647 bp, Populus trichocarpa
  Intron number 2 from transcript POPTR_0002s16750.1 (locus POPTR_0002s16750) derived from phytozome v7.0 (chr-ID scaf fold_2; pos 12515350 to 12515996)
gagaagtcttatcttcatagcgagcagaaacagacgtaaggatttatgcatttcgtgctttcttgatttaattgatgttctcgctactcgttgcatgacttagctccttctgcaaggtattatgaaacctaatttttccgacttgagatttatttggagagacgacagtcgatatctattctttactagatttatattgagttctgtgtggactattgagtatgaaagcttgatttgattgtgttgtgtatgttgcagagcttatgaaattgtagaatttgatgcataaattattttagagcagaatgttttgaagactacgtttgctgttgaatgtgaggtgaagaatttatgtagccagccacgaatcacatttttagggtacagaacgtaaggatttagtgaaccttatattttgaaggaatatggaattgtttcttcagaattaacaaccagaaagtaacataggtctgcatttctggagcaattaaccattgattgcgtctgacagtgcatggtcaaggcattgacatttaatgctgtgtgaattaggtcaaagttaaaaaaatcaaatgcatccattctctgctcatgttcacatatactcttattgccatggaatagggtactggacaacctgaaagatt

SEQ ID NO: 61487 - DNA, 384 bp, Populus trichocarpa
  Intron number 2 from transcript POPTR_0019s04690.1 (locus POPTR_0019s04690) derived from phytozome v7.0 (chr-ID scaf fold_19; pos 4884670 to 4885053)
agggtaggcttcattaacaattatatgccaacttttactcttattagcgtctgcaaacaagtaatattaagatatttctcagagccatagcttttgtgctcctaaacttcaaaaaattggttggtgacgaagacaaggttaagtttttcttttttcttttttcttttttcttcaactcactgtaaatgaagtgagcataaatataacatgcacccacttggatctgatgtattaattagatcataatttattaattatgtcatttaatttcattgactttaaacatgtatcgtctgttttaatatttaattccctttggatagaaaaatggagtttgttttgaattaattggtcctaatagcttgcttttgtcttctcagttgg

SEQ ID NO: 61488 - DNA, 628 bp, Populus trichocarpa
  Intron number 1 from transcript POPTR_0013s07620.1 (locus POPTR_0013s07620) derived from phytozome v7.0 (chr-ID scaf fold_13; pos 6454035 to 6454662 reverse strand)
ttttgggtcttggtcaagctgtatttgtttctttctttccttccttttgattttcttggattttatttctttttagtttgtactccttgtttagttgctcagtagatgttggtggatagacaaagatatgattttttttaaggttatgcttcgagttatttgttaaacaaattttgttttgcttatatatcaaacaattgatgaatgcaaatggaagagaagagaaaacatagttgcgtggtaggtagaatatgaatttttggggtggttgaggttttatacgggatgactctgtatttctattagtaaagcatgctttgccattttcttgctattactgaatataccgcattgataagagatgatggaagcaaccacattaccaggattctgaaacaagttaatttgtgtatctttgctgtagttatggtgtttttttttagctataatatgcatcggcattgttgttgtattatttcatggcaatatggagtagttcgtgacttcctaaatgtttgattctttgatttctactttaactttcctatatgcttttctgttctctatattctgggatgagagaatctattatttctgtatctttaggtggatttctctggcactgttg

SEQ ID NO: 61489 - DNA, 903 bp, Populus trichocarpa
  Intron number 1 from transcript POPTR_0011s12610.1 (locus POPTR_0011s12610) derived from phytozome v7.0 (chr-ID scaf fold_11; pos 15309291 to 15310193)
aaagtccttttgttccagaggtaatgaacccaaaaacctatcactccaatttgctctcttctctgtttagctcgatagaaaatgcggcaaagtagtacaataaaactgaaagtttagcccttttctgctaggactagagaacctttactttctttgactcgaaatgttagttttcaataacccagtagtttaatctggttgttgctctgtttggttgcatagaaagtgctgggaaatgaatgacttggattaaattatgttgtggttgtagttatctcattgttttaaaatgttatgtttgatgagacaaagactgtgtctttggtttatgagagattggaaaaaaggaagaaagatcaatacaaataaatttattggtttactattttcaatataatgattggttattggtcttttctgaggacaacgatttttgttgctgggatatgtaggaaatgactagaaattaatatcttcaatcaatttcatggtattttggatatggagggaaaggttttctgcctgcgggcttatcatcaagtggtaaaacggtgggtaggttcaagctgcggattgtgttctggctttcaaaagatgagaaaaacttcccattagatgcataagatattggcttagttgagacttgggatgagctacgtttatttttctcatgtgattcccacaatttactcagtagtcaagcattcatactaaaatcctctactacactttctgatttggtatacttattacaccatccatgaactagaataatttcattgtagttttagacattctatttgctttcaatgtactgcttactgtatgtgttgaccactgaatcttgatccatatgactaatatgcaggttgtgaaagcagtagactccttgcattcagagtt

SEQ ID NO: 61490 - DNA, 341 bp, Populus trichocarpa
  Intron number 3 from transcript POPTR_0009s06310.1 (locus POPTR_0009s06310) derived from phytozome v7.0 (chr-ID scaf fold_9; pos 6100307 to 6100647 reverse strand)
tcgtccagttaatcgttgttcagcgactattgctggtatgattgcgggtttcttcttctcgagttattgtatgaacattttatgacaatttttaactgctggcttaactacgttatgaatggtgggaatgttgcttgctttcttttgatatattggtttcgagtagctaatgctgttcatctcctatgaaactcttcttgctctacctctgaagaattttttacccctatacatgcatgtgatggtttcattttttgtttagttaaattaccaccacacaggttaatgatgttgtgtgtttttcttacacgtgctgcctctgttttttgtcaccccaggtc

SEQ ID NO: 61491 - DNA, 1042 bp, Populus trichocarpa
  Intron number 1 from transcript POPTR_0019s12080.1 (locus POPTR_0019s12080) derived from phytozome v7.0 (chr-ID scaf fold_19; pos 13231470 to 13232511 reverse strand)
accttagaagaaggcagtcgatattcctcggatcatgacgccccaagaatccaaatttctgtgtaggaaaagtaccgtacgtgagaggaattctaagttgatttatcctcttttattcgaattttttttttagtttgatgtggttgtccggaccagcttgcgcgcgccttgactaatctcacgggtcctgaagttaacgaccatgtaagcttccagtaaccatcatataagcaaccacaggattcgaaacttaagaccacagagggagcaaatctcttggtcccaaactcttatcactgggccaccacctagatggtttcttttattcgactttatgtgttcaagaagatgctattttttaattttatgaaataatcttttattataatatttgtttaatcgttaagatttacaagaactcctttagtttataaatcataaagttaattgtgaaaaatacctctagtatcttataatttataatttagttgaaattacatatatttaattatcgagttttgaaaaattataatttgtattctaagttaaaaaaattcaaattaaaagaaaagattaaactaccttcatatataatatatcaataacttaaataaaagataaataaaattttttctctaaatattactggaatctcttctttttaatttattaaaaaacaattagttatatgataccaaacacgcctttagtttttgaaaatgattctctactgaaaaaaaaaaggcatttaaaaagaacaatattgaacatttaaaaacaaaataacgagttgagactaatttataattttcaaaatcaaaaggatgaataaataaatttgtaaaatacacaaggtttaaattatatatattaccaaagatttagcctgccaaatctcaagcccaaacgaaatccaataaaatcatgggctaaaaccgaaaccacataaaacttcaaagccacgtacactttccaaatctttccctcctttatgagcttccatggagatttcctcaaataccaatatcgtctcctccaactt

SEQ ID NO: 61492 - DNA, 974 bp, Populus trichocarpa
  Intron number 3 from transcript POPTR_0014s06480.1 (locus POPTR_0014s06480) derived from phytozome v7.0 (chr-ID scaf fold_14; pos 4913673 to 4914646 reverse strand)
gggccttgaattataagtattttcttctatttttggtaagtttgccttcccgcttcatcccacgaaggtttcctatttcaaaattcttgttcagctgaaataatgtgatgcacctcttctgtaccttttggtttaatgttggtttttgatgtatctcttagcttttaaaagagatgtttattgtaatgcgaataggcttttgttttgtttaaagggtaagcataattgtggttggtagttgattgatgtttcttgtttcatgtcccagtgggtaggcagagggaggtatatgtggttcaaagtttccatccagggctcatgtcatgtgaagttgagaatacgttgtcttaccatatttatgttgtccaacatgttggaagtttgggactgaactagttgtctaatgtgcctgtggtgcgttgaattttgacaaatgttgagctgcctgcctgtatattagcatacaacctttccttatttcagtaataaattacgttatcaaatcagcaggtacttctttcttgtataacttggaagatacagcctaggctgtttaacaaagctccaattttcagtttagagtgtggtttaacctggaaaagattttttgtggatggtcagacaccagcatcattaatttcggtgtctaccttttgaatctgatgactcagaggtcatatttttcatgagtttgtgttgtttttgtttctctcgtctttcttctttttttcttttagaacaagttgtctggattttagaacattgttctacataatcaaatagaacttgctataagaaatagttgctagcactaggaaaacagacttggcttttagtatatgctcttttttatttggggtttctacgtaatcgtgggtcgcttgacgtataatatttttcttgatgtctaattacttgcaatcttatattttgatgcagttctacacatttcttgagacaagtcttgtaacttt

SEQ ID NO: 61493 - DNA, 749 bp, Populus trichocarpa
  Intron number 1 from transcript POPTR_0018s09330.1 (locus POPTR_0018s09330) derived from phytozome v7.0 (chr-ID scaf fold_18; pos 10205458 to 10206206)
tgtgcgaacggctctgcgccgagttcccttccgaggtatcccaaaaagcgccgatttttttttaacttcgacccattttgtttggtctctgagaaatcgcaagaaaattgaagggataatcttttacaggttgcaaacacagtgtctgtaatttttattggtttctcaagaacagttaggggtcttactatttactggcaagatcggttatttttctttttgataattttatggcgattcgggactgattggagctccacgtggctttagtttttcctattatttttctgggaaacactgggacaaaaacgtccgaaattctgatgtgttatgtgaatttgacattttaaaataactaaatatgtagaatttatctaaaaaagggctaaggttttgatacctgtcagttatggaattttgggctaatcgaaggaggatttttattggatttgtttattcactgcttgcttcaatgctgctgtagaatcaaactacgaagatagctagatgaaacctggagtctttgtttacgaaatatcttaactagttgcatgttcattttgacaatgtttcctcaaaatttgaggatatgctttctcactcatcccttaacagttcctctatcttcataatctattttgatacaaatgttatatgtttatttatttttctttttgttgtactaaattttacctgacttcaaaataattgcatttgtttatgcagacaaatttgcaattgttagcagg

SEQ ID NO: 61494 - DNA, 634 bp, Populus trichocarpa
  Intron number 1 from transcript POPTR_0001s21680.1 (locus POPTR_0001s21680) derived from phytozome v7.0 (chr-ID scaf fold_1; pos 20231578 to 20232211 reverse strand)
ttgctcacttgcttattgaaaagggttatatcaaggtaggtccatttctctctttccttttcaattctggttctttcttgtttaatcaagtactatgcgcatcatattttgaattttctcacttggttttgattattgtccattttcgtttagttttcttttttttttcttctctggaattggaaatgtttgtgacattgactgggttctagttttcttttatttatattgtttacccaattttgagttttctgtatataacttttgaatgttccagttgcggaaattcgtcaatttggacagttctatttgctttattctcgttttattccctaagaaaattagatgtaattaatccatgtattgtattgacatgatcaaattcgctcaagatgttgtcgtatttgaaacttgtgcataatccaagaaataaagtagaaatagaaagcggaaaagaatccacttctctttatatccttggatatgatttttctttgacgttgtatttaggttgtttagccaaactggagatcaatagttctaatctttagcttaagcctctgttttttgtttttgtattttcttaatgttccaaacaggaaaccacaccattagctggttcctccgctggcgc

SEQ ID NO: 61495 - DNA, 537 bp, Populus trichocarpa
  Intron number 2 from transcript POPTR_0018s10110.1 (locus POPTR_0018s10110) derived from phytozome v7.0 (chr-ID scaf fold_18; pos 11099836 to 11100372 reverse strand)
agctccaaactgctttaggaactgccaagtggcaggtataatttcacatcttgaatctttaatttttttacatgtgtccctaaattcatttctttaaactgcttaccagtttattgaacgttgcttatagtttctgtttgtgaacttcacttgattggtctgtaagaaacatcaggtgaaggaaatactattgtcaattctatgttttctattttttacatttctgacaattgaaaagcgaacgccaactcatccaactttgaatcccttgcttataaggatattatgctttttgctaaatttcacttatcatcagtattaatcaaaatattttcccccttttactgcactctctagccaaccaatctgagcataaagaaatcattataggttgtgctttcaattcttatagttggctcattttattttattttttgcaaatagttctcttctttttcctctctttttttcttgtatcattgatctatgaactctaaaacagttggaagagtttgagagggctgtttggttgagcca

SEQ ID NO: 61496 - DNA, 662 bp, Populus trichocarpa
  Intron number 1 from transcript POPTR_0018s10110.1 (locus POPTR_0018s10110) derived from phytozome v7.0 (chr-ID scaf fold_18; pos 11100452 to 11101113 reverse strand)
cgtacgttttgcatttctcttcaattcatgctttacattctgtatgcagttcggtacaagaatttggcagctgggcttgtttgatttctccatttttatggggtttcgttatgatttgggtgtgactgaattttcttgaattgggttttgcatgctgcacactgatgtttatgatatgttttgcttgtgaggttttcaagacgtgtatttattgctttgttttaaaaggtttgtctagtggatcttgggtttgttttctggttggaatttctgcttaattgatggagtgtgtttgtacatgtgttatgatgtcaggttcttcaatttaaagtttggcataaaatacgaggacttgtgcattagcttttttattttcaggtcctgatgatatgaagtaagaaggaaatgtgtggtttgtttagcagtgcatgactatatctgcctgtcttggtaatagttgatcttccaggatcatgaaatctactttgtgtaattctcgtgctgcaaacttgacaattatacgggttttctgttgaaggcagggagctgtatattctaggaaatcagcaagttattcttgtgctacaaatttgatagtaattcatagacttttagtgaattgaaatttgaggtttttattggttgtttttgtgtttggcaga

SEQ ID NO: 61497 - DNA, 828 bp, Populus trichocarpa
  Intron number 2 from transcript POPTR_0002s26350.1 (locus POPTR_0002s26350) derived from phytozome v7.0 (chr-ID scaf fold_2; pos 23335516 to 23336343)
ggaacttcaaggtaatctcttgaattaatatgcttattggcaagttgctggaacttggtttctaaattgataagtaaaatcaagaagtagaagttgaaaaaagcaccagttgaaattactgtaggttcttattctaattgatagtaacttgtatgagcctcatcttggaattgagcataaatttagcaatctattgcatgctttaagaatttgatcctccattaaactgggcatggttatagttttggatcttaaaggtatcggttcattgataggaattgtgtttctagagtactcttggtttgcatgttgtatctccattttataattcctagatgcatcttattgattctgcaacacaagcatgtttgttttttctaggttttcaattgaattataactgacaatgttctgttcgtggaaagcataatgtttatattttgcttccatttttcaatcacgaaaaggcactggcatgttgatgttcttttaaagagaattctgaatcaatgactctatagttttccaataaaatacctatactttttatggcttgaagcaatacatgtctgggattgctggtgatatcacaaaatgggtggttgcttaactttcagctatttggatgctaggttgatgcttttgagctgcttaattttatctggtggttgtcgtgtgctttgacctgtttggataagcctctttaagcatttctaggattccaaaatcttctctattttatgtgattttaactcaaaaatgatattctaatcttggcccttctttatcccagttttctgcatccgtcaatttggctgaggagtcaaa

SEQ ID NO: 61498 - DNA, 431 bp, Populus trichocarpa
  Intron number 2 from transcript POPTR_0011s02050.1 (locus POPTR_0011s02050) derived from phytozome v7.0 (chr-ID scaf fold_11; pos 1722437 to 1722867 reverse strand)
tgatccatttctatttttgtaggtaaagtgcgtgggtgggtcatgtgactggatggattgttaagttttttgaaaaaaattttttttttttacttaatgcattttcagcccctgaagataaaaaaataaaaaacctttgttacttaaatgcttttttttttttaattccacatgcatgtcatgttttttctttattttttgattttttttgttgtgtaattaaatacaaaataatttaagagaaaaaaaagttattaaatctagtgaaatactcgggtttgcttgttttttatttttaatttttttaattaagtaattaaattttaaattttattcttcgaattgttttttgattgaacatatttattttaaatttctcatcttctacatcccgagactccttaaagacgaaccagaccattaaagaaggt

SEQ ID NO: 61499 - DNA, 637 bp, Populus trichocarpa
  Intron number 1 from transcript POPTR_0011s02050.1 (locus POPTR_0011s02050) derived from phytozome v7.0 (chr-ID scaf fold_11; pos 1722826 to 1723462 reverse strand)
gtgaacccacagttggatcaagaacggtcagtatttttttatttctacttttattgttttgacaatttatttttaagatgttttttttttattttattcttcaacattgaattaaatttttttattgagtttaaatctaggatttaataagttataaatttgagagattaatttaaatttagaaaatttacttccattcattttgtttttttaagctctcgggtttttttttattcctctttgttaaatttattttttcttaaaacaaaaagttttttgttttttagttagattaaatgaattgcttagatataaatataatatactcacttcatgatattttatttggtatgagttaattgcttaggcaatgcatacaactttttttattttttatttttaattagcttatagaaaactattttttcttatttaacaaaaaaataaataggccattgttttgtcccatgcgcctgttttgttttgtttttttttcatttgatacagaaaagcatcttgattgcgggtataacaagttaactaaggttcattcctatcatttttaaattttttttttcattgaatatttttgttttgatccatttctatttttgtaggtaaagtgcgtgggtgggtc

SEQ ID NO: 61500 - DNA, 507 bp, Populus trichocarpa
  Intron number 2 from transcript POPTR_0007s10890.1 (locus POPTR_0007s10890) derived from phytozome v7.0 (chr-ID scaf fold_7; pos 11081789 to 11082295 reverse strand)
gaaatcaagaagacacggttactagacagcttaaggtaagagactcggtctctgcatttggtttttaacatttttaattcactgaaaagcaaaaaaaacacttctcttttgactttttaggtcagtttgcttttttcttactcgggtatgaggtcgcatattgatatatgtgtcatatttaggtgcaaagagggcatgtgttagttttgtacggaaagtggtttggtatttaagaatcaaaataaaggcaagcattattgacaattgctgcattgcattgcctagttggcctgtctatgattattgtcctttgcttgaaaattaagcgtcgaggctgtggtgttgttttggcgtcttggactaaaataataagcgttccagctaactaaagtaacaagctaatgcttaactaagctaaatttgatcttaacacttcttctttttttcccttttaaagctcatataattggcattatttttcggctaagaatggtactttcttgtaga

SEQ ID NO: 61501 - DNA, 698 bp, Populus trichocarpa
  Intron number 2 from transcript POPTR_0009s12390.1 (locus POPTR_0009s12390) derived from phytozome v7.0 (chr-ID scaf fold_9; pos 10127265 to 10127962 reverse strand)
atttgttcgaggtggacagctggacttccagccaggtatgcgcccgtttcttctggattttcttttggtacttagaagtcttatttgtacctctgactgtgctgtgtgcttctgccatcaattttaatgggtttccaggagttgaaatccttacaactgagaaatcttcttttaaagccagcaatgcacttgttcaaggaacctaccacatcattggcaccttcccctatcaccacctgtttctaacatgtttaaaatttgacattggtctgatctgacaatttatgcgtttcactttcatgataactcatcagccttagatttaattgctgaaagcagtgtttttacctgagagaaagtaaaagttacgtgataaaatagaggtaaagccttttttctggtttacgagggaaaaaatgcaaaaaaaaaattaaataaaaataaccatgtatgagtataactactaactatattctcccagcttattccaccccttctcttcttgttctactttagcttccattctgttccaagaaccagctaattaatttcttgtgattttttagttgattataaatttaaggctccttgcatgacaagaacagcaaagctctgcatctttgatttggcattcttgcatgtaattatgaacttcatttgcagaacctgcgaagtatcaatccatcttctactcgcag

SEQ ID NO: 61502 - DNA, 644 bp, Populus trichocarpa
  Intron number 1 from transcript POPTR_0011s16880.1 (locus POPTR_0011s16880) derived from phytozome v7.0 (chr-ID scaf fold_11; pos 18614321 to 18614964)
gggaaaaggttgcaaggagactgcgtttaaagggtaaactctcttcttctagtttttccgtgctgttttttaaatgggattttctttaaaaaaaactgaggagtttggatttttcttatgctttttatcagtatggttgttggggaaaatctgaactttctatggaattgaaaggatcttaaatgtgtttttgaggctttttatgttcattgtttctattcttctggttgaggattgtttatgtttctttaccagtcagtctggttgatgggaaaagtctaaaatttctatggaaagatgaaaactttatttgaggggtttgtttgtcggattcctatcatagatttttttaggtcttttctgttaattggctctatttttattttatttttcttgtgatttaatggttaatactagttatcccttgtgtattgtttctgtttcttcaagattctgtctgaacttgctttgtatctaatatctcaagttttgatgttctgtgaattcaatgtttttgtccatgtgaatgttacaaattgtggtgttatagcaaattgaatgattttgtttatgcttattgactttgttttcaaaaatcaaacttttatgtattttattttgaagcaggattaggtgcagtcaga

SEQ ID NO: 61503 - DNA, 1010 bp, Populus trichocarpa
  Intron number 1 from transcript POPTR_0001s43300.1 (locus POPTR_0001s43300) derived from phytozome v7.0 (chr-ID scaf fold_1; pos 43341921 to 43342930 reverse strand)
tagtactgttacttccattccttctcctggtatataattcaattccctctctttttgcttgtcagttgaacccgttaatgtttatgttgttatgtcaatgtttttagctttttttaatgttcaccgcaggcacaatgaatgttggttattttgaaaatttgggtttttgggttttgttgttgtttgttaattggtagcgctatgttaaatttttttccccttctttctgaaattttgttttagtgtgtgtgttctaggagatggttgttttgaagaattgttgatcgaaaaggtgggagtcacgttttagacgagatagttgatatgggttggttttgcagtcgatgtttttgaaggctgattcagatttgagttgatgattaactttggagtttagagtttcgtcgaagttgttgcacttaatgtagtttgccacagtgtggcggacaaattggattgtttctgcatggtggagtgccatctaagatccgccatggatttgagaataggaatgcataatcctggtgttacccacagggcattgaaatttcatgctaaattccttatccgccttccatgaattatactgagtgccaatttcgtgcttttctgaaaatgaagacactagcttgtttttagacttgtaatggagaatacacatttgtatctaagttagacagtatgaaaagctttggtaatttaaatcatcagaaccttcttccctgattcttgatatgaacagacaaccatattattagaattagttatgaaaaacaaccaatcccccaaaatgtccacattccatatgtaaaaattaaaatagttataatagttatgatccccccccctcttttttcatgagaaaatgcctcagtctttcattctcttttgggacaaatcaaaaaaagaaatgtaaacaaatcaagatgtggagagaattttaatttggcctggatataatcaaaatgcatggtaataagatatttgggtccaactgcaatcttgcaggg

SEQ ID NO: 61504 - DNA, 624 bp, Populus trichocarpa
  Intron number 1 from transcript POPTR_0006s27740.1 (locus POPTR_0006s27740) derived from phytozome v7.0 (chr-ID scaf fold_6; pos 25617811 to 25618434 reverse strand)
ggttggtctcggggtctatcattctggtgtacaaggttagttgtaactcttaaagttttgattttttcatagtttgtgtttctgggttcttttgtttttccatgtttcagtttttggtttcgattttaacgatgtttttgttagggaaatggtgggtttgttttttttaaccgtttagatccaaggagggaaaaagaacatcttttagtatagtttggttgctgagaaagtggaaggaaaagaaaggaaagagggtaatattatttatggaattaatatataatattccattttttgtcaggtttttctagttttctttatgttatttttctggtgagtgaggaaagaaattttttttgcagtagtgaaatgctatccaatcactataaaaatgaaatcttggtgttgaaaggagagtttactaatctatttatttatagtgatctcatgttagtcaaacaagtaaaacttagtctggtttgttgagatttggtggtagaaaaaaatgaatttgggccattgactattaagagtgtttttaattagttctgacatgagctaaatttttaacttttttttttggttgtaatgtagttcacggtgttgaatatagttttggagcac

SEQ ID NO: 61505 - DNA, 783 bp, Populus trichocarpa
  Intron number 1 from transcript POPTR_0001s08020.1 (locus POPTR_0001s08020) derived from phytozome v7.0 (chr-ID scaf fold_1; pos 6072335 to 6073117)
cgactacaagaatcttaggcaaatcagccgtgaacgtaagttcaatctctccttctctactcgaatttttataggttcagtttgatagagtcaaaagcaagcagtttgatgtgatcttgtttccttttctctctgtccaatggagtttataatttggtttgtcttaagagtaatcatttagttttttttttctttttcttaaagcttcattgtgtaatgtaacgatgacattgtgttcctagtaattttgtaatatttctggtaactaattaatagagttattggccaaacttagttagtattagttgctaggaatttcttcaatttctatgctatatcgaagtttcgtggtggtggagattgcagttttaagattgtgaggattattattaatggaaatatttgtatcagtgtttggattctagaatttgtgaagtggatgataggagttgaaatgcttggggttggatatcttattttactaagaagaatggcttttgcacgaaacaatttctgtccattggaataagctacttgctaaagagaccaaagctaaagagaccaaagctaattagaccatcttgaattgattgatgctgttatcttcttttgttgagtctatcagaaaaataggaagggaatgttatggaagtgaatgttctcgcatttattgctagtgcactgttcattcttgatccgaatactttttttttcttattaaataggtgctttttatgaactttgtttgtcattctaaatttacccattgttcaggtttgttgc

SEQ ID NO: 61506 - DNA, 1004 bp, Populus trichocarpa
  Intron number 3 from transcript POPTR_0007s02420.1 (locus POPTR_0007s02420) derived from phytozome v7.0 (chr-ID scaf fold_7; pos 1422503 to 1423506 reverse strand)
gaagcggtgaagccaaaggtgagttaattgcaattgacccacccacccacatagactagcgttttacctttttttttcttttttcgcattatttttcaagatctttaatttaacctaggccatattatatattaaaccagatttaatggtcaatctcacacaaaacccgtcggattgatatatccacgttaactataaatcttaaaaaaagagtcaaaacagtattattttaaaaaaatagcataattccttagaaacagtagaagatttggaaaattacgtgttaaactgcgatctataaatacattgaagaaacatgtaaaacaacgcttcttttgaccggaaaattaagatctataatcgtcgagacattaattatattattgtgtcgtacagacagttttttcttgtgagttttatgaatttttgtcaagattttctttagttaaaatcctatatttctatttgtgcatttcttttttgtttttataaaaattatctcttttattaataataataaaaacttattccggtatgaaaaacatgtttagattaaaaaaaaaatcacgtttcgattacttttatgtggttgtatattaacttttatatatgtggttgtatgaaaaaataaaggaataattaatttgataagattatataagaaaaactataattaaaaaataataaatatatattttattctcattgaatatttataagaaatgttttttttaaaaaaacacataattattcataaagtaataaagtaattgtttatattatcataaaatctctaatcttatttaagaagtatggtattaattattggatgatttttaaattgtacgttaaggattttctttgaaaatcaataagattaacatgatgggaattatattattatcatagcatttgcccactcccttaatttgaaaagcatttgcctaatttatttattttttcttttcttttgtcacttgaagctgtgttgaattacgaagagg

SEQ ID NO: 61507 - DNA, 573 bp, Populus trichocarpa
  Intron number 2 from transcript POPTR_0006s25800.1 (locus POPTR_0006s25800) derived from phytozome v7.0 (chr-ID scaf fold_6; pos 24166780 to 24167352)
agcaagagattgcccttttgaggcaatttgatccggtaaagatttcgttgcttgtaatttggggatggcttttttatataatgttaatttgatttttttattgtttcaatgttgggtgctgttgtggaaggaaagggaaataaatcagtgaattgtaggacgcattcttcccagaagttgtgatgcgagaaacaatgcttaagtctagtgttatttgtggcttttatttgttgggaattggtgtttagtttttcaacagagatgagatattggaatttaccccataaaaattgatgagacaataacagaaaagaggaaaaattagaactaggaaggttgttttttattgcttgaatggaatactgcaccttttatcttgactttgggaaacatggggtgagcaatgaaatttgagccaagaaggaattccaaacgagcccttctgttgcttatgttgatggatgctataatgtgataattactagactcatgctattttacagatgttttttgttggatttaattttggattattggattagaattaaagggttgtgtacgtacaggcttgga

SEQ ID NO: 61508 - DNA, 749 bp, Populus trichocarpa
  Intron number 1 from transcript POPTR_0006s17730.1 (locus POPTR_0006s17730) derived from phytozome v7.0 (chr-ID scaf fold_6; pos 15874205 to 15874953)
tgtgtgaacgactctgcgctgagtttccttccgaggtaaccccaaaagctccaatatatttatttaatttcgaggcattttgtttggtctctgagagacagctagaaaattgaagggataaactcttagaattctcaaacacagtggctgtatttttattgattttgtattggtttctcaagaacagttaggagcattactatttactggcaagatcattttttctcttagcgttttttattttattttataattttatggcgattcggtactgattggagctctacgtggctccaacttttcttcttcttcttcatttcttggggaattttgggaaaaagtctgaaattctgatgtattttgtgaatttgacatcttaaaagaaaaaaaaggggggctgaggtttttgatacttgtaagtcatggaatcttgggcgaatcaaaagagggctttactctccacgtgcttcaacactgctattgaatgaaacagatttggtaaacaaactacgtagatgactagatgtaacctgaagtcttatttttgacaagataccttaactagctacttgtctactctgacaatgttatgtttcctcatccatccctctatagttcgggtgtttttgttatcaatttgagacaaatgttatgggtttatttatttttctttttgttgtactttgttttactggacttcaaaataattgcattttgtttatgcagacaaatttacaattgttagccgg

SEQ ID NO: 61509 - DNA, 591 bp, Populus trichocarpa
  Intron number 1 from transcript POPTR_0004s20730.1 (locus POPTR_0004s20730) derived from phytozome v7.0 (chr-ID scaf fold_4; pos 20161128 to 20161718 reverse strand)
agtcctagaggtggatttggaggtggtgatcgaaggtgagtgggttagggttttgtgtcatttagagaattttactagttatttagttaatcgagggagtttaaatattcataatgtcaactgaaaagaaaagagaagaaaatacggtagccatttagttaattgtgctgtctatgtgggttttatcttaaattctatgtaatgaaataatgttctgatttaagttcagtgtggttgaacctgagcttaaatttgaatttgaaagtaacttcataattttaattggcagcgatgaactgactgccgttagactattagatttcatacgtggacaaggtgaatcttgaattttttatctgggtggttgaatttgccttctcattcttttattcgtgctgttttgtttatggctgcagttcgtgtttgctatagttatgactgttttgcttgtagttaatcaagcctgaactctttatctgtgcataggaagtgtttgcaatatttgcttatgattgtaaatatttggcttagcaaattcttttatgcaatatttgctcacaaattggaaacctgtttgatgtaggtttggat

SEQ ID NO: 61510 - DNA, 880 bp, Populus trichocarpa
  Intron number 1 from transcript POPTR_0014s02000.1 (locus POPTR_0014s02000) derived from phytozome v7.0 (chr-ID scaf fold_14; pos 1771595 to 1772474 reverse strand)
ctttgcctcaccttagtataaaagatactcccattgtgagtcccttctcttgcaatttttctctgcgttagtttttatactgaattatttgattgcttaaaaataacacaaaaaagaagttttttttctggatttctgctatttttttaattggttttcagcattaatttactttacagtaatgtcactgcttcagttgagtaaagttactgtgttcttatgcaaaaagttgattcctttgatgaaatgttgagatcaaagtgggtttctttgttttcatttcatgcttgtttaggagcaacatttttttaagaaaaaaagatgtttgttgatagaatcactcggaaaattttgcggtactcggagctgtaactatcaatatttacagcattggaaaaaagatagaaacaagaacaagagagaaaatcatattctgactcactaaaagtgagaagaatatctctctaattctcaaaaatattttcttgtatcagtctccctcctatgctataagttttagtagttacagcttcagcattatagagtttctcgagacaatcactcacattttttgtgatgtaagattctattccttgggtttgtgtatctggaaatattcgcaatacgatatgattactctttaattcgttgcttgtgcttttagttaaaacaaagggggaaatgtgtttggaattatctttttttttctttttttacttcaaaaaaataataataaagatggtgttgattagttgactctttgctattgttagattgatcgatggggtatgctcatttattttaataatatacatgctaaggtggttttatgttggtgattgcaggaaacttcatctgcacagtacatattacagcagta

SEQ ID NO: 61511 - DNA, 480 bp, Populus trichocarpa
  Intron number 2 from transcript POPTR_0018s01230.1 (locus POPTR_0018s01230) derived from phytozome v7.0 (chr-ID scaf fold_18; pos 1200241 to 1200720)
gggtactagtttctttctcttaattcctcatatgattccttgtgtgggacattcaagaaactgttggctgttctgtggttaaaatgatgtgcgagatatttgtgatttccttgaagcattggccctttttgtttatttataaattttctcgtatcaaaattcttaaaatatgcaattcacaccataaaatcatttcagttaagtgaatagcaggctgttaggcaaaacttgaggccttgaaaaatatagcctttttgtttttgcttgatattcaagaaacgcaatagctttacgttttcttcaattctgctggttcgaaccatagttgaaagcatcttttttgtgattatggctatgggaaaaaaatatgttttatgtatggttgatcgcgagtgcgttgctggttatagcattgatatcagctatcgtgatgacaagtattagttgaagtcagttctgtttttgatggttaggtgtttg

SEQ ID NO: 61512 - DNA, 477 bp, Populus trichocarpa
  Intron number 1 from transcript POPTR_0013s11840.1 (locus POPTR_0013s11840) derived from phytozome v7.0 (chr-ID scaf fold_13; pos 12473534 to 12474010 reverse strand)
ataacaagtaggtgtccttattttctaatggctgataattcgtagaaatgattgcatttgatatcattgtccatgcattgtgtggtacaaaataaatagtctaatttttttactatttagataaatggtccatattttttcacaacaaaataaatagtctgtataaatttaatatattcttctgattagctaatgatctccaagtatgccaaaagtgcatagtctttcacatatacctcaaagaattatgttaactttttgtttcatatatcttgcaccttttccaattctgtggtttggatctctcttttttttaatggtatttgttttttctctttcgatgtaagttactcttgtttgtttaacattatgaagcgtgttggaagtttgagtgcagttcacattgtatgcattctaagatggataattgtcattgtggcagtgattgttggggaaatcgctaattttgcagcctat

SEQ ID NO: 61513 - DNA, 411 bp, Populus trichocarpa
  Intron number 1 from transcript POPTR_0001s07720.1 (locus POPTR_0001s07720) derived from phytozome v7.0 (chr-ID scaf fold_1; pos 5846189 to 5846599 reverse strand)
gaaattacaggcatcaggtgaaactcactaaaattagctggctaagctagcctgctagcccccccaccttaccttttcttcttttataaaagaccaggtggctaatccatcttcacggacttgattagttaaccaataagcttataaactgttcgggaactgtttgaaatgatgtttttttttttttaatataatgataattgtttttttttaaaatatattattttatatattttaaaataaaaaatattcaaaaaatagtcattactattttcttgaagattcttctaatattataattaaaagacagtagcgattacttttattacaggagtgcatgtgtttgttttttgttggatgtgaaattcttattgatgattgattgtggatatacatatgttatgtaggcgg

SEQ ID NO: 61514 - DNA, 1025 bp, Populus trichocarpa
  Intron number 2 from transcript POPTR_0014s17120.1 (locus POPTR_0014s17120) derived from phytozome v7.0 (chr-ID scaf fold_14; pos 13268224 to 13269248 reverse strand)
tagggtattataggagagcacggtttctgttggaggtaaacctctggttaattggttttgtattttttgagtttttgcttgtatttctcttcttctgttgctttaccattacgtaatttcagttgatattagatttgtgggaactttgattttttagcttaatttctatttgtaagcgcatgtcttagagtttctatgttccattcatttagatggttaaaaagctttcttcaatgcttaatgtaattggctaattatggaaaatctttgttccccagacaccctcaggttctaaaaacttgtgtgaagttttatttgctccatgttgtgggcctttgtaaggaaactgaattatttgaggagagagttcttctgaatcctgatacactcttaattgtttagggtaggaattttagagtttatccgtggaggtcctgtagaaatagagtggtgccttttcattctgagctgcagtgggaagttagatatcatggtcatgtttgtgatcatgtttactggtgatcattacctgttgagtttctctggtatagttgatgtcattgctccaatggtccatgaagctgtattcaggataatgggatgacacctgggatttgatataccctggattaaactttatagctattaatttccattatgatttttatttgccttattttttgttggcatgtctattggctttttagattgccttcttttgcaatttaggagcttttatgactacattggtggttggtcctagttctctatgcgagtttttaataagaaatgaaacctcgatctgatttttttcaattggtgggatattgaaatggaaatgaaaaaaaaaaaagaagagttgagatagaaaaggacatgtgttttctcttaaatagaatgtggatggctaacttaaatagaagaaaaacgattttatgctttacacttagaaatcatttatatagcctctgtagcaatagtgaacaatttttagcttcattttgttatggctttagggagccaag

SEQ ID NO: 61515 - DNA, 749 bp, Populus trichocarpa
  Intron number 2 from transcript POPTR_0002s06850.1 (locus POPTR_0002s06850) derived from phytozome v7.0 (chr-ID scaf fold_2; pos 4607527 to 4608275 reverse strand)
acattgcctctggttgtcacgtgtacaaactcctggtagagatagttaataacttgcattttgccttgatttttctttaataatcttcttctttaatatttattgaattcaataggagccagtacttgattgtcttcttctttgttatgtcctatttggtttaggaattaccaattaggggagtgagttttttgtgggttataaatagtttctttccgactcttgttttttaatattcccatgtatggaaacagtgcctttgctatgcgctatgattactccagcgtggtggtttttgaaactcccaagagtagtgacaagtgaagttatgtggaatatgattagaaccaaactgtgcctttgtatagggtctgtttgcattttcaatttagaaaaagtgctttctttaaaaaatgaaagatgggaacaattgtgaggatctgctgttaaatgaaagttcgatatgagtcgtcaaaagaatcaacttgtgaaaaggggtaaaagagccaaattgtgaagaggatcttccaaaacaagaaagtgtagaacttaaaatgtgttggaaagggcctttttatgctataagtgattttgattagaccagtacaacaatgactttggatgaacgagtactaaaactagcaaggtcccatcatccatgtcattagtgtttgttttggatgctcatgttagatctgtttaagaaaattaaggagcggttcactgtctcatctttttgatagattcct

SEQ ID NO: 61516 - DNA, 448 bp, Populus trichocarpa
  Intron number 2 from transcript POPTR_0013s11940.1 (locus POPTR_0013s11940) derived from phytozome v7.0 (chr-ID scaf fold_13; pos 12575368 to 12575815 reverse strand)
ttttgtgggaggtctccggtttttagctatagaaggtaatgatgagcagttgcttaatttgattctgtcatttgaccgtttgcgatttttatagaaaatgggttattcttgtgctatctgtcgttctagagtttttattaatgagcagttgcttaatttgattctgtcatttgaccgtttgcgatttttatagaaaatgggttattcttgtgctatctgtcgttctagagtttttatttatttttgaatactaatgtttttataaaaaaactggactgcttcatgacttgtgacaagaattacgcattcttgttcatggaatttgccataacatttgttaattggctgtggcacttgcttttatctgtggttttcaaatttggttcaagattttgatctaacaaaaacctatgtacctgcacttttaggcacttgtttcgtacttctg

SEQ ID NO: 61517 - DNA, 891 bp, Populus trichocarpa
  Intron number 1 from transcript POPTR_0001s28420.1 (locus POPTR_0001s28420) derived from phytozome v7.0 (chr-ID scaf fold_1; pos 27213142 to 27214032 reverse strand)
aacatcttcagctcgaaacaccatttcattctcaggtatgtttcttctgttttattggttatagagcgtacatactacgggtcatcgatcgttacaacgctcctggttaaaatcaaagatatatattgtctccggttggagagtttctttccacatctggtccaaactttcttgacaattgcatgatcctgtcatcgctttacctgatatcacgatatcaggatatgacccttttggctagctagctaaggtttcttcactctttagctatgaaagtccttacagaagcaagattttctgttgctacactaaagggtccagtttgtagtgtcaagtgtggtgatgcgtgtatacatgcgcatataagatttagagccatgaatcgaattgctgttccttagcatgcagagaagctcccaagactttccttgtgtttaagttgaacagaggagttaatcaagtccagtgcaactcagattccaggaaattaaatcaatgggatgcctgttttttacgtcttaatctatggttaataagattgttattattgtaatgtgtgcaataggccagctagattctgtgtgcatggtctgctctgcatcgatacatgttcctgcttaatatttattagctattatcattatattacttcacttatctcacagcacttccgtaagagacaacatcattagtttttttcttaccgcaccacacagaggacacatgataataacaactattatagtattattataacaagttgatttcatttaggccgatacaagtctgggaaatgaagagaatttgtttttagtgatttaaaccatgggtctggtgttgacttaaaggtttccaataattaaatgtgttattgtgcatgcagataacgaa

SEQ ID NO: 61518 - DNA, 715 bp, Populus trichocarpa
  Intron number 2 from transcript POPTR_0001s28660.1 (locus POPTR_0001s28660) derived from phytozome v7.0 (chr-ID scaf fold_1; pos 27435556 to 27436270 reverse strand)
caggtattcatttttcttgaaaaaaactctcgatttttttttactgaagtagaccattcgtttatcggtgattttaatgttaaggtaatctgtcagtgattattttacgagttcttgttaaatacaagatattgtgtctgaagagctgtgttattattgatgggatttgatcattgcgtctttcttttgttccaagtgaaattctatacagagacgctgctggtacaattgtctggttgttaatagttaatactcgctatcgtgtgataatgtgagaccgtagaggcatataatacatcgcaccttcgtgattgcaatgcagctttgcattatattgctccttgttaaaaatgattccgagttaaaacctttttaagaaatggaagtaaggaaggaacttgtggtgtaagttgaattctcaccattctctgtggagaattatttagttaaaacaatggaggaataagatgtggatgtctcctggttaaagatgttgagatttattccctcctgctctgctggttctttgctaaggaatcatgtgttccacttggaaatgaactgtccatgacctatcactcttaccgcttatatggctcttctcatatgttctttctgacatgctttttcttataaaattctagtctatgtttttgatggttgtgatgtttttatcacagctttcatcccatttttttggggatctcctcgattc

SEQ ID NO: 61519 - DNA, 441 bp, Populus trichocarpa
  Intron number 3 from transcript POPTR_0002s01690.1 (locus POPTR_0002s01690) derived from phytozome v7.0 (chr-ID scaf fold_2; pos 904946 to 905386 reverse strand)
gacaggcctgaaattgtgcgaggtagtaattcttttttaaaaaaaattatttcaagacattaagtgaaattaatcatatttataaagacatgaagatgggggttgacccttgagtccatttaaactatgatattttttttataaaaaaaattaaaacgttgttttaataataaaaaagttcaaaattaaacctaactcatgataagctctaaattaataggtaattaagttgattcatcaattcgaaccggattttataactataacattgacaagatgggatgggactggtatagtgattgtaaattttcttgtttttttttaatttgatattaagtattatttttccaataaatagtagttgttattgaactcggtgtgaaaattttgagaatttaatgtgcagacattgatacctccttcgccggaagacaggagcca

SEQ ID NO: 61520 - DNA, 946 bp, Populus trichocarpa
  Intron number 1 from transcript POPTR_0002s06320.1 (locus POPTR_0002s06320) derived from phytozome v7.0 (chr-ID scaf fold_2; pos 4215749 to 4216694 reverse strand)
gcgacaccatcgacaacgtcaaagccaagattcaggtaccttaactcggttttttttcaattaaattattcctccttttttttttactattatttcgtctaaaattcttgtgggtctgtttattttgacggaaagattttatttatttatttttttttggtttcgcattttccgttttaattatcagtagagattggaataatgcttggtgtttctcatgagttaaaataaggcttggactcgtttcagccttgaatttttatgggtttggcttccctttgtggtctctagtaaaatcttgtactgttattatatgctttaagtaactgcagttttgggattagtgatcatgtaactgatagattagaagagttgtgaactctagaatattcaatggaaattatctgaagcccgacttaggtttttgcgtttttgcaaaaaattgattttttttctttaaattaatatttttttttaatatttttagtttgataagttgatattaaaaatgaattttaaaaaataaaaaaaattattatttcaatgtatttgtgagtgaaaatcattttaaaaagtaatagtaccaaaacaccaaacaggctcttaatacctgttgccatcaattgtttgtgtgtttcttcatagcgtgaatgagagccatgacactttcttggttagacaagtgaatggtagctgttgtgcagttaatttatctgcaacaatagtcaactatattttgtattgttcgattcccacaaattgataaagctttggtcaagaatattcaactaatgcagcagtaacaagttggtgttcttttgcgtttagtttgtttggttttgatgattgatgttcctttaccttgagtagctgaaactcgtgtctgactttgttggatgtacctttttcaggacaaggaaggcatccctcctgatcagcaaagatt

SEQ ID NO: 61521 - DNA, 624 bp, Populus trichocarpa
  Intron number 3 from transcript POPTR_0006s13030.1 (locus POPTR_0006s13030) derived from phytozome v7.0 (chr-ID scaf fold_6; pos 10256587 to 10257210)
ttgagtcttctgctttggctttgctgttgatatcagttagcgggtgtattcttccatgtttgtttgcctcttgaaataaagaaagatcaacaaaacagtttagttcttgtataggcaaaccagagttggaaactgacattacttctgagtcataccatcctcaatccatccttgtcctgggatggcgcaagttttctgactatcagagctaaaagaggccaccaatggattcaaagagttcaatgagcttaggcctctggttcaaccatgtttttgaaattttttaactttaaattaatatttttttgatgtttttgaatcgttttgatgtattaatatcaaaaataaatttgaaaaaataaaaaaaatattattttaatacatttcaaaaaaaaaaaaaacactttgaaaagcaatttttgctatattttcaaacaagccctcaagaaagctatggctttgtttataaagcagttttagcagatgggagacaggttgcaatcaagagggaaaatgctgcccactataattcactctaacagcagagattttgacatggaattggagatcctctgcaacgtttgacattgcaatattgtgaatttgttagattacgtctcagaa

SEQ ID NO: 61522 - DNA, 304 bp, Populus trichocarpa
  Intron number 4 from transcript POPTR_0002s03430.1 (locus POPTR_0002s03430) derived from phytozome v7.0 (chr-ID scaf fold_2; pos 2121032 to 2121335 reverse strand)
tctgatcattctctattccctggaggtaatcactgtcatttcgaagtgttttttttatatacaatgtgactttctagctatgatatgttttatttgttgcatttagatagaatacagttagtggcggggagatttggtgtgaccgaaaatcccctgaaatcagaagaaaaatcaatttgaattgtagcagcaaggaccaaagtttctgtcatctatgattagaaagtggattgagctgttttatgtggttcctgtaatcatgaatgtttactttaatttcttaaaatgtcaggtgttcttaaag

SEQ ID NO: 61523 - DNA, 670 bp, Populus trichocarpa
  Intron number 1 from transcript POPTR_0009s11150.1 (locus POPTR_0009s11150) derived from phytozome v7.0 (chr-ID scaf fold_9; pos 9357504 to 9358173)
tctctgtatcttttgcgtcacttacttcttatctcgtaagttcgcgctttcttaagctattttgatcctgttaactcctaataaagttcgttttgaaggtttaatttttaggtttttttgatcaataagtgaatttgtgttccggtgtcgtgtcaattgagctagggttagaattttatggaatttcctgttgacacggcattggttgcttttcagtgattattttacttttctttcaaggtgaaatgcttttattttatttggtactcagttttaatttaagccagggtttttacaaatttttctgtgattttttgaaactaattattttattttattatatttttcctacctgattatgttttggttgcctgtggaaattaaggacttggtagaaaattaaattttcgagtcctcgctgttttcttttctttttgttaaaaaatgatgaaattaaatcagctgaggttaactataaaaagcaggttgagtggcatggagttgattcataggttagatttattacttaaataaatgtttttggttatttgcgtgcgtgtgatgcattttttcggtgtcctttgcctaacagaatagtgatgataaataatcaatttaatgtgtttttcggtgacgatcattgccattcattacagatacaagttcatca

SEQ ID NO: 61524 - DNA, 829 bp, Populus trichocarpa
  Intron number 1 from transcript POPTR_0008s16850.1 (locus POPTR_0008s16850) derived from phytozome v7.0 (chr-ID scaf fold_8; pos 11330716 to 11331544)
agtaccatagtccaaggaatcttcttcttgcagtaatgccctgtctttcttaaatttgatcacagtaatcatgtggagatcttttatgcatgtgccatgtaatgtttcttctttgctacatagttgaatgtccctgtgtatggcagtatggctctctcgatatgttcgtttgatcaatgtcttcaatttattatgatgatcagttgaatctagggacaacttttcttctagtttaatcatctatgtcaaagccgaaacgtgacgagtcactgacgggaaggacaacattaaccacgataaactttatttttttgagcaggacgaaaggattcacaaattggttgggcgtttactactgtgagattgttttttttttgtcacaaactgtgttttatttcataatttcagaaagaagttccacaaagactgttaacagaacaaatatgtagctgaaggaggtttcaatggctacttgagacgatttcagacaccaattttatggcagaataaggttggggaggggggggggggtcagaggaatctcttcagccaaattgctcaagtttggaattgtacttgaggaatttctgaagatgcccttgtccttccatttgtgaagcttgaaccactggctaataaagggtgtataaatatgcttctttatgtcttgtagctgtgatggtgacaatatacataggttattataggctaaaatcttcctgatgatggactgagtttttacaccatctaatatttgattgactcccttttcccctctggtatttgatgtgtaggttggtgaggtaggagagctatcggaaatattcca

SEQ ID NO: 61525 - DNA, 924 bp, Populus trichocarpa
  Intron number 1 from transcript POPTR_0017s02120.1 (locus POPTR_0017s02120) derived from phytozome v7.0 (chr-ID scaf fold_17; pos 1538969 to 1539892)
ttttttctgatcaaatcgcatccacggtttgcctggtatgcactgatcttattcagcttcaaaaattacaattttttttttgcaatctgaactgtactagagagacacgcacatgtgtttagctgatgggtttctgttatcttaagatttttttttattgatacagagatttttgcaatgcaagttgacagttttgaattttttgaattatgatgtttagctgacctgtctgtgatattcaatgacaaataatgctgctttctcaatgttttgttgtgtttcgagggagattttggtggtgatatgcacaattttgaggattttttttttatgatttgggtgtaagttttggaagatatttggtcaatgggtttggtttttgatcataaagatctttgcttttatatttgttgagatgattttggagaaatggcaaaatgggttttgtttgtttcttggttttgtgtaggagttttggtttttgtttgaggattttgttctttttgaattttgcaaagtgaattgtaatagaagattttgagacatttttagctgatcactatctgtaattcacaattcaaggagatttttttttcttttatatttgttttgtttgtataattttattcggttgaatttggatgtgaggtttggtttctgctaattaaagatcattgctgttatacttgttttgttgtttttgagagaattttggaggaatggccaagcgggtcatggttatatcttggtttgtgaagtgggtttgatttcatttgaagatttacgaaggtcaaggctaataagaactcggtgtgttggggaattattgatttaaggttgactcatgggcgtaactgttgtgtctgtttcatttgtgcatatattacagggaataaaaggaattagatcattcaatcatcgaga

SEQ ID NO: 61526 - DNA, 312 bp, Populus trichocarpa
  Intron number 3 from transcript POPTR_0017s02120.1 (locus POPTR_0017s02120) derived from phytozome v7.0 (chr-ID scaf fold_17; pos 1540214 to 1540525)
agcctaactaccggtaagtactgcctgatgcttcctgtcagggcattcatggtaaaacattttatttgacaatttatgcaacattttcctttgagtttcattggttatgatattatttcatgcaagacctttcaaaggcctcttatgcttgatattttctaattgtctcctttgttgtggttgctgtaatcttattgtcatttatttctttttcaagctttggctcatgatgttattttcatgtctattcttccattgaattattttattttagcagggttggtggttcatataataataggaggtttatca

SEQ ID NO: 61527 - DNA, 812 bp, Populus trichocarpa; identical to SEQ ID NO: 56451
  Intron number 1 from transcript POPTR_0009s08380.1 (locus POPTR_0009s08380) derived from phytozome v7.0 (chr-ID scaf fold_9; pos 7695720 to 7696531 reverse strand)

SEQ ID NO: 61528 - DNA, 382 bp, Populus trichocarpa
  Intron number 3 from transcript POPTR_0017s05950.1 (locus POPTR_0017s05950) derived from phytozome v7.0 (chr-ID scaf fold_17; pos 4592108 to 4592489)
cttataatatcactttgctttccacacgatctaaggtgagaggatgcatttacttcaatctcctcacagttataatatttcttaatttatcaaagtatatctggcaattccttttgaatcttttgaacttgcaatgatacttcaagccagcaacattttttctcagtttactatttatcaacctttttatcttttgcaatgatactgacattgaatctggagaagaaaattgctgtgaggggattccgcatagccagaaaaaaagtttaatgtcttgccatttctttcaaatcacccagtttaagataactgaagaattttatgctttctatttgatgattatatttagcctgtttgttgatggatacaggcctcaagtcac

SEQ ID NO: 61529 - DNA, 721 bp, Populus trichocarpa
  Intron number 1 from transcript POPTR_0009s13870.1 (locus POPTR_0009s13870) derived from phytozome v7.0 (chr-ID scaf fold_9; pos 10965830 to 10966550)
ttattattgaaggtgcaaaggcctctgtatctttggtaaagcttcactctttctctctatctctgtgttcattttcttttagtggtagtgtcaatttgtatggtttgaggttcttgggtggtttgttttttcttgtttgatggtgttttgtgtttggtttctgagaaaaagatgagaaagattggaaaaggtaaggaaagtagaggggattgttgtaaagaacctgtatttttgataagttatgtaagaacggaatcttgggttgttcttaaggatgctaatttctcatggaaatatgtttttcttttctaagaggattgttcttaatcatgactatcactctaaccaggtgtccttttaccctctggaattctctggttggatgccaagaaaaagatcttgtttctcaataaccttaaagttttgtattcctcgcagctttcttcttttgcttatttggtgacatggaatcttgggttgttctaagggatgttaatttctcatggaaatatatattttttccttcctacaaggattgttttggaattctatgtttagatgccaagtaaaagatcttgtttttcaatgttcttaaagttcctgtacaaacaaaagtttttcctttttcttttgtggtgatctgggtaagaatgttttgtgttcaatataactgattgttattaaaaattcttagtctgtggtgttaaaggtggagaaagag

SEQ ID NO: 61530 - DNA, 1004 bp, Populus trichocarpa
  Intron number 1 from transcript POPTR_0007s05550.1 (locus POPTR_0007s05550) derived from phytozome v7.0 (chr-ID scaf fold_7; pos 3625712 to 3626715 reverse strand)
ccataaggtaaattgaatatctattaatttatttttgactttggtgctgcatgagatgttcttttctttttctattaaaatattatttgtgcattgaaagtgcattcatggactagggtgacttgacatcttgtatttaagatttctctaggatgaataattacatccttggtctgcacatgcttttttagttagttctgtttgcacaacattttttcagcatctttgaagattgttataatcttgttggagaccctggcaaagatgttttactgctttgtttgaaatatatggataaattgggatggttaagtttttgaagaggagtcgtcttcctctcttgggctattagctgcatatttgcgcatatttatttttacataatcaatatagccgacccaactatttgggattgagggttgttgttgtttgaatattctacagctccctgtccttttctctctgtggatttcattgattcttgaaatcttcagttttgactcttttcccttgttggggtttctcctactgcttatccagttcttggattgtgttcctttgcatctgtaatgaattttctttatcaaaggaaaacaaaactgaaaagaaaataatttctttcatcaatttattgactagagaacatgtccacagagcttttctgattttttaagttctgtaatcagacttgctgcgtaaatgtgaagtataacaatgtgctgtaaatattaatgcatgttcctatttgctttgtttatatggatttttttattgaaaatctcacggtgttttctcttaatgtaaatctaccaatcatccagcttaaattgttgtgtagaaatacatttcaaatatgtgatacaaagtctctgttgtcctatatacttacctcttttgttgcaatgggtgttatatttgtaaatacaatgtgtgctatttgttgctcaattcttcttgacctgttaataggtcattgataaggcagtacctgcacttgtagacct

SEQ ID NO: 61531 - DNA, 147 bp, Populus trichocarpa
  Intron number 1 from transcript POPTR_0010s03070.3 (locus POPTR_0010s03070) derived from phytozome v7.0 (chr-ID scaf fold_10; pos 3682090 to 3682236 reverse strand)
gggttggaatactctttaaataatattgcaagtcggtttgattgttattataaatttcttcttgagtgtttttttttcttgtccatgatttggcgcatttgaacgtggtattgcagtcatccgtggatatagactttttcacagaat

SEQ ID NO: 61532 - DNA, 740 bp, Populus trichocarpa
  Intron number 3 from transcript POPTR_0011s15180.1 (locus POPTR_0011s15180) derived from phytozome v7.0 (chr-ID scaf fold_11; pos 17318393 to 17319132 reverse strand)
tgcttttggtgcttcatcgtcatcagcatttggtggtaagtttttatttttatttccttttccaccggttatctattcctgggttatgattttgctatgtagaagtaagattgttgtgcttgtacagtaaatgcatatggattgttgactaactcagagatgtcgtaaacttttgtcttggaagtcttatagcagacaagttttcaattccttagaaaagcaagtgttctaggaggtgatttggttacacagcatgttggttatttttctaaaatctgaatgcttgttgttgtttggccctagtttttgagctcattgtttcattattgtttgttttcttcaatgaaattggtagatgttgagatttaattaattatgatacataatgtttactatttcattttttacctgtgcatttgttttgactactctctgctctctgtagcagacttatactcacttgtttttcttcttaacttggtgattttcttgcctttgtgttcttcctcatcaagattttactggctaacttcatctgccttccctactagcatctgtatatcaagacaaacacatgcatgtgctcaaacactcatgcatgcacacactttaagtttgtgttagtatcctttatctgattggttttttttcctggttttacaaatggacagcactttctcactctttctatatatttatttgcaggttcttctgtttttggtcagaagccttttggaggc

SEQ ID NO: 61533 - DNA, 378 bp, Populus trichocarpa
  Intron number 1 from transcript POPTR_0009s13370.1 (locus POPTR_0009s13370) derived from phytozome v7.0 (chr-ID scaf fold_9; pos 10655756 to 10656133 reverse strand)
tgaaattcactcactctatctctatagaaaacaaggtaagcaaaatggataaaaaggttttccttttctcttatgttttagtttattaattatgattttgtattgatttaatagcatttttatgtttgtttttcatttttgtgcaaagccctattggaaacatgttaaagttgcttattgagatctgaaagtttcaattttggtttttgtatggattggttgttatataaagttatggtttttgtgtggaagatggaaactttgtaatgggttttttttttaattattggttatgcgattggctgtgatgattttgaaattggttttgtgttttgatgttgtgggttttatgtgatttaaggttttgaaggaaaaaaa

SEQ ID NO: 61534 - DNA, 809 bp, Populus trichocarpa
  Intron number 1 from transcript POPTR_0004s09240.1 (locus POPTR_0004s09240) derived from phytozome v7.0 (chr-ID scaf fold_4; pos 7777896 to 7778704)
agagggtgattgaagaaaattccatttccatttctgtaagcttctttctctttcttaaatgttacatttataagcttcacatgctgtcaatcattttttgtgcctttcaaaagttgtattcattgtcgaaggtgatagcttttttaacctctcaaagaagcttttctctctctctctctctctctctctctctctctctctcttttatcatttgagtcatgcctgctattcttaatcattttagtcatttttggtttctgggttctctcttctttaacctggttctatgttgttttcagttttaatctgcattattgtatttttgtatccttttgtttttgttggtctttttgtggttttggttgctgggatttcttcattggaggcaaatctatcatgtctttccaatttgtaaataaaggtgcctctattttcaatccgtttacctctttaaaatatatcacatctttttcttttttcttttttcttttttcttttttcttctttggtttcatgctcataaaacaagggaaatgcagagtaatagtatcgtgaatgcaggtttctgtatgttttaaaagttgaggagctagtaaaaatgttttaggttttacctttggtcactttgtttagttaaatgtattgtcaagcatgttgcaatttgaactgccagggctttgttagtgtttaagttctacacttttggtgagggaaagggaattccacacaggggtggcttgatttaatgtatgttcttttttcttttttttgaacttttttaagtcctttcgttttttgcaatttgaagg

SEQ ID NO: 61535 - DNA, 540 bp, Populus trichocarpa
  Intron number 1 from transcript POPTR_0016s13300.1 (locus POPTR_0016s13300) derived from phytozome v7.0 (chr-ID scaf fold_16; pos 12500869 to 12501408)
ctctcgacgttgttaaaacgcaattgcagtgtcaggtaaaaagcttcttgcttcgattgctattgtgattagtgcttaactgctttaaacaaaccttcgcttcttttcttttctttttccttttattaatgatgctgtgtgataagctatagaagcaatcaatttggtttaggagttaatcaaagattgcttgatcatatcctgccagcaattggtattatatgtttcgtctggcatggttctactgttcttagtttgatcttagcaagtaaagttcagttttataggtaaagtctgagaaatcaatgttgttttggattgaattgggtgcatggttgaaatcgtgaacgaatacgaaaagagcttctctttagacttgactggggtgttaaattgattaactcttatcttgaacttgaaaacataaatgaatttgatcagaggttgaaagcagattcagataggcccagctgatttaacaccaagtttcttgtttcttacacagggggtctgtggctgtgatagattttctagtagctc

SEQ ID NO: 61536 - DNA, 481 bp, Populus trichocarpa
  Intron number 1 from transcript POPTR_0005s06910.1 (locus POPTR_0005s06910) derived from phytozome v7.0 (chr-ID scaf fold_5; pos 4638814 to 4639294 reverse strand)
ttgatcttgttgtcaagagcttgcaaacaaacagtgtaagttgttatcatttgctttgtcttcgaatcccactattcttttttccattcttacatcttcctttgatttgttagtttcaatgttgtttcttttctgttcatggaaatgtctggtttctttcgagtctttaggaattcttatcagtttcctaccattttgttggattctttcacaaaacacggttgtggctctcttaatagtttgcttagctgattgatgttcagcagaacgcaagaaaatgcaatgtaaaaattggtggtgatccattgacacaaattcttgccatgaacaactaattttgagtattgcgataagaaacttgcatgtacttgtgaaaattgcatgattgagaggcttcttgaaggatcagtttcatcatggttttataactacaattttattctgtcagtcattgatttttttggtagtcaggttgttgcca

SEQ ID NO: 61537 - DNA, 664 bp, Populus trichocarpa
  Intron number 2 from transcript POPTR_0003s07550.1 (locus POPTR_0003s07550) derived from phytozome v7.0 (chr-ID scaf fold_3; pos 9121457 to 9122120)
cctcctcctcaaagtcgttactagcgctgaggtaaaacaccagaattatatatcatgcatcctgaaaagccatatgcataaaaaaagaaaaaaaagattttgaccttagtttttagttaattagtggtaaccatttgaaaccttgaaccctaagagaataaataaattaccagtaaaaatccccttcattgctaaaggaatattttcagttgacaagcgatgttacttgggaaattagcatcgggatgacagaatatgttggtaagatcttacttggcaaaactgtggtggtaagatttcaaatatttcagctgcttctgtttttagtactcttcgagtggattagttaatttccggcttgactaatcactgcttatccaataattaaggcggatcgttttatcatttgcgcaaagcaagagagaagtcctgaactaatcatttaaattatcaaagagaaaactaaatcatttctccacttaaagtccctgccacagttaatggatatatccctttgtgcaaggaaatccatctgcgtttaattaccagtattttgaactgttcatctgttaaccatgcaattctaataaatcgccaattaatcatctttgattgtatcaaagctcaaaattgttttgctggacttcatagggcatcccaaccc

SEQ ID NO: 61538 - DNA, 445 bp, Populus trichocarpa
  Intron number 2 from transcript POPTR_0007s12000.1 (locus POPTR_0007s12000) derived from phytozome v7.0 (chr-ID scaf fold_7; pos 12343756 to 12344200 reverse strand)
aagaggtttgctttattggattaaagttggaattcttgtcaaataggttacaattgagagggagttctagttctttttaataatgggttttaagtaaagctatcctttgtggagtttttattattattcgccattagttttgatgttaattagtaaaaagtgggttttctgtttatgaattggaatgtaatttgtttatatccttggaattgaaagcaattgaaggatttctcttggttgttaatggggtgtctaagtgaatttactagttttagtagaaaagttttgattggtttatattagttttgatgtcaaattcgaagtggatttgctttctgaaaataatgttccatttgaatgtaaatggttaatgccatgttctgtacttatactttgtttgttgcttattgggttttttctggtgtctttatttaggccctctcaa

SEQ ID NO: 61539 - DNA, 913 bp, Populus trichocarpa
  Intron number 2 from transcript POPTR_0010s22450.1 (locus POPTR_0010s22450) derived from phytozome v7.0 (chr-ID scaf fold_10; pos 19361574 to 19362486 reverse strand)
tggacttctacaacttggaattgagcgacaccaatgtgagcctctttctcttttcaagcaattttttatgtatttttttcactcatcttctatggatgttcgtttgcttctcattgtttttgtgagaattgtttgtgtttgtgcatgcacggtgtgtctgctaatcgaagttgagttgttttgagtttagctgttgaaagaatgaatcaaaactaaatggcctattgccaacttatctggtttagctacttgggatagaacgagtcaaaaaggaaagttagaaacctcaattgattccgatgattcaatatcgacagggtttctgtcattttcactaatcagaatctgttttaacagagctcaacgccgattctaatgatcataaattttcatagttgcatgtttcttcttatcttgcattcacatatgactttgccccttccttcagctccactctgccctcctttttctttctccctctgtgtggctcccgtgcctcataaatcgttgtgtgccagtgctcaaatttaaacacatgtgattcattgagatcctttgagttaaaggtaagagttgagcttatttatctgcttccttaaaactttagttaaactagggcatggtaatccattcagtgcttggatttgaaaatcttcccttcaactcattccattatcttctgaagggaaaatttgtgttttatacttctgagattggttttactatctttaatccattcctagtgtaccttgtagaacaccttccaggagtccccctttagcatttaggcatgtcaacaatttatgaattttactctgtaaatacgaaagtatatgaatcaaggacgttttgtgactttaatcgttctttctttgcaggtggtggatcacacaacacacaacttaaagcagca

SEQ ID NO: 61540 - DNA, 584 bp, Populus trichocarpa
  Intron number 2 from transcript POPTR_0016s00840.1 (locus POPTR_0016s00840) derived from phytozome v7.0 (chr-ID scaf fold_16; pos 316353 to 316936 reverse strand)
taggaaagttgcaagagctttgaaaggatttgaaggtgttctttctttaccacctttaactgatcaaccatattattgaatgctccaccctcaaaatttagaaatttttcttaattaggagagagacatagagggattttcttaaaacaaatttatacacctaattaaggttaaattgaatattataaattaattaattgatgcagtatagatgttttctttcctgtgacatcaagtactgattttctttgtttgtttttataaaaaagagctttgaagagagggaaaaaagagtcaattcatattaactaacacctttatgagcatctctatcctaattaaagaaaatctagaatataattagtgagttttctttaaaaaatcagtgcatattgtgttcttaatacttgcatatccagtccatttagaaacgcgggtttcaccgcatgcctgtttggaaaccggtttcacctgcagtgtaattacttgcatttcccagtctaaaagcatggagtttctaacgtttcctgagtgaatgttgggtcacaggagtggaggaagtaaccacagatagcaaagcaagc

SEQ ID NO: 61541 - DNA, 922 bp, Populus trichocarpa
  Intron number 1 from transcript POPTR_0008s07940.1 (locus POPTR_0008s07940) derived from phytozome v7.0 (chr-ID scaf fold_8; pos 4895132 to 4896053)
ggttctggtatttaattctggccctttctcttctatctaattgaagaaccatagtagactctagtatagttccattatgctcatttagcagttatatggatgaatttacagtccttgctcgtgggttcttcttcgaagttacaaatttaacaaaatgttttgttcattgtgtatttgttgcgagagttttctcttttgagaaaatggaagttcttagagttgtaaattttgttgagtgtgctcaggaagaagctagccattttccatttctaagacagcagcatagtatatttaccaagtttgattctttcctgtgattttcccttaaaaggtctatagcacatttgaaaaaaaattacaaactagtagtgttgtttttaaggttttgctttctctctttttctacttgaggtcttaattcttctttctatttgtagcaaacaaacttgcattattatttttaattgtgatcggattcgaggtattgttaaataatgataaatgactctattcttattcgccaaatccacagaatccctgattagcccaattcttttcatttcaaatatgaaccgtaatctcttgtcgacactgctctaatttggagatataagctctgctttggcatcaagattaatatgatcctttgaatataatttctcttatgtggttaggattgatggttattcttaacgtcactaattttttttagctttgagtatggccatttgatttcgaatcagcaattctcataataaaccatgaaacatccatggtagaacttggaagctgataaaaacagctttattttcataatcaaatgttataggaagtttgtctttgaccacccaatcacatttcttttattcctcatttttctcttgtaggatttgttattactggaaaaaaaattcttacaaat

SEQ ID NO: 61542 - DNA, 331 bp, Populus trichocarpa
  Intron number 1 from transcript POPTR_0017s09040.1 (locus POPTR_0017s09040) derived from phytozome v7.0 (chr-ID scaf fold_17; pos 7693936 to 7694266 reverse strand)
ttcattacccgagttataaattttacgtgtctcaggttagtatagtgtattgctatttttttatttcactcccttttttgtttttacaatttaatcatctgatataatgttatttcaaattgaagttaggactagtttgatgttaaaatgatgatggtgaaaatttattttatttattttattctatttcaaatttatttttttaaaatgaattttatctaggtctccattgatcttcttaactttttaacccatattcaaatagaacgctatagggttgtaggttgaaaacaaatcgcataccattcctttttgttgatctttgcagcag

SEQ ID NO: 61543 - DNA, 865 bp, Populus trichocarpa
  Intron number 2 from transcript POPTR_0001s41660.1 (locus POPTR_0001s41660) derived from phytozome v7.0 (chr-ID scaf fold_1; pos 41366561 to 41367425)
ttggttggatcttggacacgctaatttctatctgggtgtgtttgtctttcccagttttttgtttatttttctgttggatgattgtctctttgaatttgaatatgtttattgtatgctttattggacatttatagaggagcttgtggtgagttgtgtggtttcactttcaaattgatgcctttctaccttctggaaatttggagctttggttttgttccttaatatctactatctgttaattgtttactgaatattgcaatataggggtatttaattcacaatattattctgttcataaattttattcggatttgtacagtattatgattttctaggtagtagttgagcttcctgttgttccttttggcatttgagaagcaccggtttttatattttgagatgcataatattctaatatgataagttcattgtactctctggagtatgcagaagcttctctgatatgatctgtgttcttcatacttcaatttaaacatgatttgtttttgtccaagttgtcttcatgtggtaaagctgattttatttcaatgttcttgtattggttataattgtttatagtggttttgctaccatctggttcgaaatattttctggttcttaatattttttgtccaagttacacgtatactggaatgtcccatgagtttcttccccctaatgagcggtgttttgttatattgaaactaatagtagcttttccatgttatgttgaataacttttgtgtttgggctattacctcatagcattatattcgaatgagatcggtttgtgcaatgagatctaactgattggtgacttctatgtgcagctccttgctgtatttattcccattgtaggcttggg

SEQ ID NO: 61544 - DNA, 914 bp, Populus trichocarpa
  Intron number 4 from transcript POPTR_0006s11750.1 (locus POPTR_0006s11750) derived from phytozome v7.0 (chr-ID scaf fold_6; pos 8948885 to 8949798 reverse strand)
agctcctatcggcaacattcattttcagttttctagtaagttatattttaattagatttctagttttatagctttcagggtataaacgaatatccattttaatattcttgagtgcaagtctagctcttcttccttttttcatatgaaagggtttcgcaggtcaacatacatcatgaattagacatgtttaagcattgctgaacttgtctactacttttcaactttgttctcaattctcaaattgtcgagcttcatgcggcactgcctcgaccatgcatagataatgaccatgatctatttctcaaatgcaaacagtggtcaatgtttgataccagaatgatgtgatatgatgtgggcaattctctacacctatcgatttctaaagaagccctttcagaaaaagaaaaaaaacagagatttagattcagaaaagcaggtggttaggagggcagtgccatcctttggcttattgagttcaaccccatgagactagatcttatgttataattaaaggcaaacatacattaattattcaatcattatgctgaaacagaaaatctttatccatatgaaatgctttggttatgcactgtcattgttgtccattactgattgtaatactactttgcctttttatcttcaagccttcagattttccttaatatattttccaccagactaaaaaaatacactctctgttgtccaatcaaactaaaagaagtacacgtgccaattcaagctcaatgtgttctagtgattagtttttggatgcttcagcatgaaccataccttgctattgacagaattatagttgctgctcattaccttttctttatttttgaagtaacaattttcgttgctttctaattgttcctctaactctctgttttcattttaggtgacgttagcactct

SEQ ID NO: 61545 - DNA, 630 bp, Populus trichocarpa
  Intron number 1 from transcript POPTR_0017s10430.1 (locus POPTR_0017s10430) derived from phytozome v7.0 (chr-ID scaf fold_17; pos 9744828 to 9745457)
acaaccgcttcctccaagaatacaagtatgttttttttttgtttttttttacttggttagtttgtttgtgttgtaatgttatcttatgtgtgatgtaatttagcacttttaattaatagggaaaagatcatctatttgtttgtgttttggattttgttggttatgtgaatgatagtttcatgtttccattgggtgaaccttttttattttatttagaatgtctttgatttttatgggtccacaagttaagtttgaggaaaaaaaaagaaatcagtggatatacatctattgattcaatcgcataatttttgaattattgggtttcttctttcatagttattggctcatctttttcttaatataacatccaactatagcagttgccttatggtttcacctatcttgatttaataacaaaataacaatgtttggcttatctggattgttgatgccattctacaccataagttatcatgtactagttcttgtcatccataagccgagcaatttgtaattagtggtttggttacaccccaagctttgactttgactgcttgttgctgaattaaataaaacgttaataaatttgctgaagctttttcgttcttgttttttcccataagaagagat

SEQ ID NO: 61546 - DNA, 785 bp, Populus trichocarpa
  Intron number 1 from transcript POPTR_0010s15880.1 (locus POPTR_0010s15880) derived from phytozome v7.0 (chr-ID scaf fold_10; pos 14967160 to 14967944 reverse strand)
ttgtaagctgtggacttgagggtttgctgctaaaggtacgccttttactactgatcggatcatctttttgtcgtgttatttttaaagctctcatttttcttaacatcgttaaggatagtaggctactgggtttcttgcttttgttaaatttgtgggcttggctctctagtgggtgttcatttttttcccttgattttcagttgaagtcaccaaatttgtttgttctttgaattctaggtttcttttttttttcttctttaagtttttgatgatgtttgcatctgaaattcttggaatgtttttttttggcttgatttcaatctcccacatgcggggcgtgttaccatttctgtcattagatctcattttgttggtgatagtagcctgtgtgcaaggttaatgttattgctagttttcttattaagctcaaagggttttttgttgcttgttgtggttctgtttccctgtttctaaagtcgattggggtttcctttcatgcaacacaaaactacaaccacattcacctgtttgagcaaaattcccattgtagtttgggggagaacttttagaaagtagaaaatttggacttgcaaagataaaagattcttttgcatgtgcttttcattgatgtataaatattttaagtgttgagatattatgtgatgctgtttggattttgcatcatctaattttttggtgttgagatatctgctagaagcttttgttgccttttcttgtataaaaagttcgcagacttaacttttcatgttccttggtgacaggat

SEQ ID NO: 61547 - DNA, 1012 bp, Populus trichocarpa
  Intron number 1 from transcript POPTR_0014s08980.1 (locus POPTR_0014s08980) derived from phytozome v7.0 (chr-ID scaf fold_14; pos 6628752 to 6629763 reverse strand)
gttgatttcttaggtaatctctcttctatcatttttaggccttgtttgttttatcttatcatatcttcgatatcttggaaagacaatttgaatataaaccacatggtagacaaacaataccccatgtatgggtgtcgcttaggacttgtttggttgattgtctcaaacaatttgaaatcagagctcatccattttgagatgaaaaagaacaagttagaagaaggattgtttctgtcgcgtaatccagcagcccaagatttttcctttttttttcctttttgaaggagccttcaagttcaaggctacagtcgcttgcgcggaactggaatttttaaagttgaggtgtcaatgtttagaaaataaaaattaagacgagtatgaaaataacataataaattaaaaattatagagataatacataatttcttgaaatgaaaaatacatatttcttaagaaataagtcttaattttaagggaataattaaaaaataaaatgttttagaactaaaatgtgaagtttctcaaatgttgagagtgcagtggcacccttagctctaattcctagctccgctccagacagaacccgtttgcgcgatgatctttatttggcaatttctcaccacaagacaaaacaacaacgtgggagattttggattcctcaagttgccgacaataacagccaccaataatataccgacggctacatgatatcacttctccgtttcttttccttgggatcttcggcccatggtatatggctctaggagtctagatctccaggtaacacgggccaaaccagaatgagctttaaaagtatattactgtataattattttgaagttaaattaaatgattgttctaaaaagaaactggaagatataattatcaattcactagctatgttatggtacataatcataatattaaaaactcggtgcattacgtcgtgaaatgacttgcgatatttcacttgacagcacaagctctgggattgccatttctgagcccgtat

SEQ ID NO: 61548 - DNA, 499 bp, Populus trichocarpa
  Intron number 1 from transcript POPTR_0005s25050.1 (locus POPTR_0005s25050) derived from phytozome v7.0 (chr-ID scaf fold_5; pos 23404629 to 23405127 reverse strand)
tccttgttgcgtttcaaaaccctaactctcaagaggttagctttcaagatttctttttctgtacgctattattatgtttatttatagtaattcatttactcaatttaaataaaatcttaacggttcttaattttctttgcttaagttctgtttggttgcctggaaagcatgcaaaaggaaatgttgagctatagattgattttgttttttgcctaaattgattttgttttttgcctaatatttgatttgttttttgcctaatatttgatttgttcatgtcgtacacgagtgtatttgtaaagtataatttacttacaaaattaaaaaaagaaagaaatttagcgaatattgattttctttttggttattaaagttgtgttgtaaataactgaactgattaaactcaagataattcatgagcttgagccctaattgatgccgatttgtcaaatgtttgattagtttttggatctgcaggagaaatagaatataataactg

SEQ ID NO: 61549 - DNA, 733 bp, Populus trichocarpa
  Intron number 3 from transcript POPTR_0011s02570.1 (locus POPTR_0011s02570) derived from phytozome v7.0 (chr-ID scaf fold_11; pos 2489534 to 2490266 reverse strand)
gacccctgctgaaggtcagattttgtaatcttcaactgctttatctgtcaacattacaatacatatctgaggacattcaaattatcaaaactaaaagctgttgcttagggagttgcattgatctatcaagcaaaaattatgatgggttttaggaggatgcattggccaaggaactctgttttctctcagtctttaatgtaaaagggagatcaaagaagtgaaagatagtttgggtaaaaggggaagagtaattagggggtcggtgctacttctggttttacttgttatgaccaattggtctgaaaatggagcatttcaggatacgtcaataaatgtgttcaccttatgacttgacatgtgttgtatcatgagaaaacaggtaatttggtaacataaaataagtaatttgatgaagctcgtagtgatcaaatttttgttctacaatgctcaagaaaattggggtggtcttttcaatactaggtctagctttggaatgccatggtttgcatgtgatccacatgttgcatctttccatgtttcttttacatttaattgcaatacctgttgatgtctccatttcatttttcctgtttgaacaatgcttatttgatcattaattaaggattagagcaactgtctgttgctgacataatggtattctttgttttctcttttattttgcaattttggggatgaagttgaaagtgctgctgaagcctttgccaagcagctg

SEQ ID NO: 61550 - DNA, 1030 bp, Populus trichocarpa
  Intron number 1 from transcript POPTR_0008s05310.1 (locus POPTR_0008s05310) derived from phytozome v7.0 (chr-ID scaf fold_8; pos 3086666 to 3087695)
cgctctcatcaccaaattctctctcagcctcaccggtaaacccccttgcctttcctctctattaagatttcagatctggcgtagtgattcgtgttttaatcactgccttaagctatcttattgcaatttactcactcgattagaattaataaacataaatgttacaaaatctttatatttctgtcttgggtataaataactgaagactgatttagatgacatttctacagaattaatgttttaatttcctgttctgtagaggaggatgcgaagaattctcctttcgtgcaaaggcacaaaaagtaagtgttcctccgaaaccctagattacgatgatgttgccatttcttcactttcatttgttaaagtttgaataataaaagatgtagctatactgtgtgtagatttgcattcttatccttctcggttagtgaaagattgctcgccagttttgagggtttgctttgtatagcttacaacattccgaacggggtcattgctagttttagttttctagatgtgcgattcatgcgccgatgaatctgtatagttttttttttatcagtctacttcaatgtatgaatctaaagcaaattcagccttcaaaagcttgttatgaagaaggcctgcgagggtgaggaaatgcatctctctgttgcctaagtatttgaacggcaactatttggttttagaacgtggggaacaatactttgtcgatgttgtttgttaagatttttcatttttagcgtataggaaaaaatgccctgtcaatttttatttttgtggttatggatttattagatgcctcctctgtacatgagtttcttgcatgcatgagagaagaagacaagaatcaagtggatgattttgtaaaagtttttttcaagcctaaagttcttaacctggacaatgcggattgcgttcattattttgtggagactacctgcatttctttacgtcctttcttagctttaccttttaattttatccggtttatgattgctgctaacgtgttgtctttcaggcactg

SEQ ID NO: 61551 - DNA, 769 bp, Populus trichocarpa
  Intron number 1 from transcript POPTR_0016s00800.2 (locus POPTR_0016s00800) derived from phytozome v7.0 (chr-ID scaf fold_16; pos 295923 to 296691 reverse strand)
aactcgaaagtcaatacccacagacacaaaatctcgtgagtaagcagttgatagctttttctgtcagaatttgttgctttgacgttagtgtttttaaacattagatttgaaaaaagaaaagggcctggaaagcgtgtgaattaatatatgtaggaatcatgtttgcatgagattggttcttgtgttactttccactgtggtttccttgtcaattttgaatgtgatatcatgcatttaactatgaataatgtcttttttctgaaagctgtaaactttgaatgatttgacagattttgctcttgagggtcttttcctgttcagtttttagccacaatgccaaggtagacttcccttttgtaaaaattgtgtgttttatagatacttgatttctttaatctggctagtagtgcaagatgatgaattatgagaagtaagcagtaaaatttttaaaacatttctggggtttcttttgaattgtggatgcttgtatttgtttgtacattcaggccttagtgctttcttttcactctagaaatgttcctggtttacattttattgattaaaattagctcctgctagccaggacgctacctgcaattctggtttgttgatgtaatgcttccctattggttatacaagtgtgttcttgaattttgattatggttcagctgtcaatcatgcatacgtgctgtcttggcactgcttttatgtgatttgatttgcacattctgatttgagtgacttatgttgatttccagcttgtctaaaa

SEQ ID NO: 61552 - DNA, 509 bp, Populus trichocarpa
  Intron number 1 from transcript POPTR_0081s00220.1 (locus POPTR_0081s00220) derived from phytozome v7.0 (chr-ID scaf fold_81; pos 34582 to 35090 reverse strand)
tagattcttctccaaatcctcctctccttacctcggtaacattttcgtttgagttctttctttttgtgtaatcgttaactaagttcatgttcttgaattaatttcttaatcgattttagttgtttggatcgaaaatgggaatagattggtgggttttgctttaattttcatgtctcccttttgttgctcataaagttttcattttttatggcgtgcatgtgtaaaatgaagaaaatttgattttcatgtaaatagtgactggaaaaggatatttctttttgtgtgattttctgtgagagattaaaatagatttgagttttgaaagattgaatctttggtggatgcattgtttttcattgttggaacaatgatgttcttatagattttctgttgtaagtttctttttctttgattttaatctttgcaattaataagaggctgagcttgaagaatgttgttactttttgttattttttttgcagtgaaagttggaattccagagtttctaa

SEQ ID NO: 61553 - DNA, 1054 bp, Populus trichocarpa
  Intron number 1 from transcript POPTR_0007s10050.1 (locus POPTR_0007s10050) derived from phytozome v7.0 (chr-ID scaf fold_7; pos 9793237 to 9794290)
agatttgatcttcctcttggaaactctacacacaggtcagaagatcatatcaatctttaaccctttttggtgcttaattctataaacgacatatatatatatagttcttttttcttttctttttacaaataagttgttgaaatcttcgtttcaatcatattcttgattatggctacgtaaactaggaatagttttcttctccagtttcccttatctaactagcaacaaggctacacacacacagatatatacgttactatctagtcctaatattgtcaaagaatggcttctgcgttagtcattacacacacacacatagagagagagagagagggagagggagagattgttagcttaatgatgtgtatattgagttttaatcttggataacacagagaaatggtttaatattgcaattaatatgaaagtataatacttaaatccattgcttgctgcatactaatttcttgttgaaagaggggcttcgatcatccccataaatctaaacattgcatgcatacccttctctccttgatctactcaaattctggaaacataggtctcagctcagctcaattcaaattatttttatggatcgaaattctccattcagatatatatgcaatgatgatgagctaaattgtctgtatgttatggtggtcttattctaggttagaaccattatattcttcttttgattgaaaaatagtaataaaaaataattaatgtttaatattttcatagaacgtgatgtaaccctgtggttcttgattgggagatgtgtgtatggaaattatgattgtggcccaggaaggatgaatggaagaaaacacaagctagcaaacagacaaatcatacaagtagctgatgttattataatgcatttatatttattactatttggaagtaaaaatgaatgctcctatcctacaccacttctttgttgttattgttaagcaatctatcatcaatcaaggagcttcttagctttaaattgtttcgtttttatcttctttttacagattcaagcagggaatacatcgccaaactggaa

SEQ ID NO: 61554 - DNA, 868 bp, Populus trichocarpa
  Intron number 1 from transcript POPTR_0007s06240.1 (locus POPTR_0007s06240) derived from phytozome v7.0 (chr-ID scaf fold_7; pos 4399810 to 4400677)
gcaaagcaatagctagtggaaattaagttgatcaggttcctgctgctatttagtttatttatttgtttatttattttaattttagttatgccatgtgctagatgagatcagtagtgagggtttctttcttatttccgtattatacacgagggaagaataattttaggtttttattttattctattttatttttcttttcattttccgtgactaaatagtataaataaataatacactaccttgactcaatagtataaatgaaatgaaatgataaaaaaaacccagatgttttagttttcgttggcctataattccaggggtttgacttgatttgatagtatatagaaaaacaaagaaaacaattctgtatgtggttttcatcaatctatagatccagggattttccttgatcaaattatatatatatatatatatatatatatatatatatatatataattttattttattttatttgtttcttacttttttttatatgtactaatattaaaaataaattttaaaaataaaaaattattttaatatatatatttttaaaatattttaaaaaaaccactattacattaattataaatgtaaatataagtatatactgtcacattaattataaatataaatataagtatcatataattaagtatatactgtccgtgataacacaattaacttgaattaagcaaatcatgcttttgcgtttttactttttatagtatgtcacgatcgatcttaattacacaattagtcaaagttcgatcaaaacaacaaattaacaacaacattgaacctacctctcctgtttgtttttccttcaggcttcgattcctaagtcacaatatccaagtaaata

SEQ ID NO: 61555 - DNA, 567 bp, Populus trichocarpa
  Intron number 1 from transcript POPTR_0005s24310.1 (locus POPTR_0005s24310) derived from phytozome v7.0 (chr-ID scaf fold_5; pos 22906865 to 22907431)
caaaggccctggaccccgcaacgccctcattcgttcctctctcttcctcttgtttttttattaattttacctgtgtttcggattttgttgcttagttaaccattgaaaggtgtcttatgagtcgcttggctgggctttctggaaacaaattttgttgatttatgttagaagaaaacatctgattttggaatttgatttttggagcgtgtcattgtttaggtggcttcgttttgctcaacaattgctcgacgaaagaaagttactgtccttgtttttctagttgaactctatgtttgtgcgtgtgagtgtgtagattatgcttaaattggttctcccttactacttgataatgtatgagtgatggacggaataaattatgggcgagaaagtttgataatttctacttgttaacttgctaattttctatctaaatctgaagttttccttcttttttttccctgaagaagtagaattttttatttttaagttaaatttgtggttaaataatttttttttcttttttacttgcatcttcagcaacaagggattcttcaaatttgctggcac

SEQ ID NO: 61556 - DNA, 350 bp, Populus trichocarpa
  Intron number 1 from transcript POPTR_0002s14560.1 (locus POPTR_0002s14560) derived from phytozome v7.0 (chr-ID scaf fold_2; pos 10822344 to 10822693 reverse strand)
tcttaatattcacccaatagagcttaaattcccatgtaagttcctttcttccttttccttttcatgtttggtttccgagaaaattaggaaaacaaaagaaaatatctgaatttcatgattttgtttcgaagttacataagaatgatccttactcctaactaggagccaaattgttagtcacactgtgctctcgtaaatttctgtttggttgctgagaaaatcatggtaaaggaaaatcaaaatctgaaattagttttcggtgcattattatagatctaaaactctagtttaattgttgggattaatagtcttttttttattgataaagttgaattgaagaagcagagttc

SEQ ID NO: 61557 - DNA, 548 bp, Populus trichocarpa
  Intron number 1 from transcript POPTR_0003s20870.1 (locus POPTR_0003s20870) derived from phytozome v7.0 (chr-ID scaf fold_3; pos 19255252 to 19255799)
ccccattcccccagcaccggccgtttcatttcccggtaagctctaacacccccttcttctttcttatttgttttgcctttactgtgataaagtttcaatctttacactgtttcttatcctttttgtggcatgctaatcatactaacttgtgaaaaaatccctaaagtttgctgctttatatagtttctgttattctggtttttgtatggaaatgaattctttcatttggaatatacttgttcctgtaggccttattagttggtgattgaaacgagttggacaaagaagcttttctttttcctggtttttgatttgtgtttcttgtgaattatttagtttcgcactctattgcttcgagggaaccgtgttactgtaaaatattgaattgtgcttggaagagaattttgtgattggattctcttttattgggaattttagctagaaactataaacatgaagttctcagtgagcttaaaataaatcaaatcatacggagactcaaaccttttttttttttttttaatgttaccaggtattaaagaataaaa

SEQ ID NO: 61558 - DNA, 604 bp, Populus trichocarpa
  Intron number 1 from transcript POPTR_0001s27300.1 (locus POPTR_0001s27300) derived from phytozome v7.0 (chr-ID scaf fold_1; pos 26195811 to 26196414 reverse strand)
aaaatccaagcttctttagtgtttctaatttcacagtaagcaattctctcttcatctctccccatgcttggatctatacttagttgtgggcttttaattgagtctttaatctgtgtttttcatgataaggtcatgttcttaggggaatttctgtttttgggctgctagaaaacttgtgggaaaggagaaaattggaaattttttttatctttggttcttcaaatagaaagggtagttagaactggactttggcttggcttgatttgattgctttttgctgtgaaacttaaaggatggagtggatttaggatttcttgatgagaatcataccgtaattgagctaaaatttgctgtttttaggtctatataagtgagtttggtattgaagctattgaattttgaataaactttgtttttggttaagcttgaaacgaagctctttattttccgtgacactccgtttatttttttggcggtggctgcgatgatgagaaattcaaaggagattggattttgcatagaagtgttatatatataaagttttattttgaataaattattgagaaattaggatttctgaatcttttctaggaggacgacgtga

SEQ ID NO: 61559 - DNA, 695 bp, Populus trichocarpa
  Intron number 1 from transcript POPTR_0005s10000.1 (locus POPTR_0005s10000) derived from phytozome v7.0 (chr-ID scaf fold_5; pos 7091207 to 7091901)
atttcaaaaaggtatcaactattatatttttttaataatttcgaaataaagggttcttgttattttatgccaaggaagtggtttgtgatgtacagtttggatttttggattctgatttttgatgggctggcgtcttttttatgcaagcaagtgttatgttatgtgaagattggatattttagttctgggtttcgattgtttaccactgaagtttgatgtagaatagctatattgatgatcttttttatagagattttttaactgggcttatgggaattaggaggagactatagattttaaaagtgtttttgtgattttttgaaaccaaatttcgatctagaatggcctttaatatgtctaagaggcataaaatgcctggattcatcaatatcaaaataattaaaaaatcgcttggtctctgccaaaatttcttgtatctgctatccatattggaggtgaatttattagagaaataggaaagaaagggaggaattcgtgtgtgtggactattattgggagaacttaataatgaaaaatgttttttcagatggaatagtatggctgtggtaagaggttggaagattggatagggattttattctgttgtatggaagtgcttccttgaaacttgctttttggtgaatattaaccaacatttactgttgtttgatgattttattttaggcagctgaaga

SEQ ID NO: 61560 - DNA, 444 bp, Populus trichocarpa
  Intron number 1 from transcript POPTR_0018s10010.1 (locus POPTR_0018s10010) derived from phytozome v7.0 (chr-ID scaf fold_18; pos 11062245 to 11062688 reverse strand)
cagttgctggtggtggacatcatcggcaagggagagtctgtgttgtcagtttggagagggaaaattgtcagctcaatacccaagctataggggagggagagagcaaaagaccatgttgaggcaaatggacaggacacaaaatcaaaacaaaaaaatataatttttttttaaatattttaaaacgtaaaaacaaacaaccctttaaaaatataatcaaacactacctcgtatccacacaagtcgaaccagagcaaccatacatttatggaggcctgccctctctgggctaaaaccaagaagacaacactgttattagcagttgaatctgccgaaaactgaacaaaattgaattgaaaatggttctgggagtcatacaaagcccacctcctcagatcgtgacctccaagcccaccaatcattacaaccttcttctgcagcatttga

SEQ ID NO: 61561 - DNA, 668 bp, Populus trichocarpa
  Intron number 3 from transcript POPTR_0010s14040.1 (locus POPTR_0010s14040) derived from phytozome v7.0 (chr-ID scaf fold_10; pos 13753118 to 13753785 reverse strand)
gcaagaaagctggaccagggtattttgattataaggtatgcattgtggttttgtctcgaattttcatattttatgcaaacatttagcagaggaagtttccgattctagtacgggttaggattgaagaaattccatcagtaaaagatgtaatttgactggaaaatggagaatatgtatgctaaatcaaatgttagttgtttctctgctctagtaacagatcatggggttaactgaataactgaggaaaatatggatatagagcttttcaggttaaagaaataatcttgattggaaaatccccttttttgtgttgttatcgcaatatattcaagattttttcttagtctaaattcatctaacttgatgaaagtttgacaatgtttcatatgaaatacggaatttttgtaaccgtgaaaagtaataaatatatggtgatgtttgatttgggtttatggtgatgactggagagggtgaaaatgagagcaaaacataaaaaaagatactgttgccgaagttctttttcaacagtttttaactgctgatcacaaattgatcactatgcagatgaaaagcctatataagaggtatttcaaatgtttcttaactagctgcccaatttccactacctttaattgtatggcgtaattttcttgcttttcaggtttgaa

SEQ ID NO: 61562 - DNA, 768 bp, Populus trichocarpa
  Intron number 2 from transcript POPTR_0014s04870.6 (locus POPTR_0014s04870) derived from phytozome v7.0 (chr-ID scaf fold_14; pos 3760776 to 3761543)
cgagcgaggaaataatacttgccattcaagttctggtaatcttgttttaaccttttctctctctgttaacgtgctattcttattattcttccgtgtatttttttgattactggatctgtggcttgaattgaattaatttatttactattaattaggttttgagtaacaacaaaattcttcacgctaccttcatgtttcctgatattcaaatttgttgtggtaggttacttactttgtttctaatactgtaattttatgccttttactactttgatttgcattagttgcttttttgttttagttcatggttaaagctataggtgatttatggttactcatcatgttagaaatcgtttttttttccttttaaaacacttcaatctgaagtcgatgcatcaatttttttgtttggatgttaatttcatgctacaatcacattttgctttcatttaattgtcaataatttggatctattactttaatgaagcatatttatgtttctgtggtttagaagaaagattgtaggataatgagcttgaagcatgctcattaagaagtttgatgttctttcctgattgtatggaggattagtaatgaagcatgtggatcgttttctgcttgttgaacttggaatatggttgcatagtggactgtgaagcttcactgttgaagttgtagaaatttcatctttcaaccgtaagtttttattttgtcacagctgaggttgtggcaggatcagcagcctggcttggccgtggtctttcctgt

SEQ ID NO: 61563 - DNA, 750 bp, Populus trichocarpa
  Intron number 1 from transcript POPTR_0006s22820.1 (locus POPTR_0006s22820) derived from phytozome v7.0 (chr-ID scaf fold_6; pos 21716040 to 21716789)
catcagatattgccacctcaaaggagactcggcaggtacttttgaagtttgcactcaattcaaccaatctttacacgcagtacaggaggaaatagacatcgatcaaaactgtggttgttcttctttttttgaccatttattatttgaatttctatatggactcgtacatttttaggttctgatattgaaaattagcatgtccagaaaggctacgcaaatcttgatttattttatgctcatctgatgataaaaagggatctgcaaatcgtatgttcatgcatacagaaaaccattagtcccttcagtccccctttaatatatatatatatttgttgtgaaatgacatctgaagatttgaaactcatctgcttgaaaagaaacaaaaggggtgtcagactttcatacttgctcttaatttatacttaaattgaacatttagaattcacttgttaaggtgagagggaatatgatatttggtttggtaatataagctttcaaggtatgaacataccggcaaaaatgcattccattgcatgttgatatgcccaaaaacatgatcttttttctcatagcagtccaaaagtctcattgggaaatgatataatcatgaacatgtgaaaaatcctgaaggacacgtcacttctcttgaatatttaagaaaaccttcattatgcctgcttgttttccctctccttgctctggtatctttcttccgtctccaactaacttgcattgcattgcaggaacaag

SEQ ID NO: 61564 - DNA, 865 bp, Populus trichocarpa
  Intron number 2 from transcript POPTR_0014s01920.1 (locus POPTR_0014s01920) derived from phytozome v7.0 (chr-ID scaf fold_14; pos 1739325 to 1740189 reverse strand)
ttctttctcaacttggaacttgtaaatccacgatgcccgttttaaacatgattgtgtttgtatttatatttttgcaaaagggtgtggcatatcgtgatatgcattgttattgttgtcatttcaaagtaacaatgtatagcttctgtgatttgagtttgttagagaaacctacattgctggctaacagtttgttcataagttcatcgtattgtttgatgagaaattgagaatgcatgcttttgcactgcttgtttaactcacaatagagtagtaatttattgtttagctcttaagcagattctctttgcgaagatgcactgtatatctgaatttatgttcatacgaggaatataatatgctgtattcttttgtggtgtgtgcacgagacaggtactcagaaatggtgcttcttttgaatttaaaccccatcaacttcctaaagaaaataacccactcctcattgtagatcttcatttaatgtcagcattgaaaaagtcatacaatgaatcattgggagcatgcagtgcaaatggattcatgtttggtcatgaagtatactaacttgagtttcaacttctcatattgctccaccttccttataaatctatcttgaataattcttatctaccggtagtttgagtgtggatattattttggtcattctgtaaagtcttagcagtgttgcagacataaggaaaagtttcaagaagttttgtaatgtcaccaaactattttgtccttgcagggactgaaaattatagttatataatgaagtgtgttctttgaaatgacagcagagcaattgcgtattgtataactttctgaaatatgggctaaatttgtgcaggtattttctttgacactt

SEQ ID NO: 61565 - DNA, 703 bp, Populus trichocarpa
  Intron number 1 from transcript POPTR_0013s05310.1 (locus POPTR_0013s05310) derived from phytozome v7.0 (chr-ID scaf fold_13; pos 3782277 to 3782979 reverse strand)
ctcattcttaggcttcataggttgcttggtaacaggtatatatttataattggattttatggacttaattaggaatgatgataattctgtttttcccctatcatcagctggggaatgtttatggagtaattaggtttggatgtcatttattttaatttgtttgatcgctttttaggttttcactgtgctctacctctccctccctcccgaaataccagcatatatgagcttcgagtttcaattaacaaatatttcaaattgttttcttcagaaaaaataattcaaattgtatcagatcacatatgtaactttaaggcctttccctcgtaattaaagttttcatggtctctccgtatatccatgtatggatgtatgcatgttctctcgcacttctttgccatagcttttcatcttgattttggattcttgaatctatcagattatcgaaagctctaaaacaaagttttatcatagtgcatcaacttgtttgtcaacattttactatgttgcaccctcttctctctctcacaatagagaccagaagtaccttttgttccgaatttcaaattaactttgaattttttttttataataatcgagataacttagattaattataacaacttggaatttgagaatatgaatcttcatgtttttatttttattttttggattatcgtgatctcgtacattcacttttcag

SEQ ID NO: 61566 - DNA, 918 bp, Populus trichocarpa
  Intron number 1 from transcript POPTR_0011s11075.1 (locus POPTR_0011s11075) derived from phytozome v7.0 (chr-ID scaf fold_11; pos 13742795 to 13743712 reverse strand)
gaaaaccagtaagtaagactagaacatagtttgcaactcaaagtttacaaacatcagtgaacactgcataccaaatctagccattcattattagctttatcattcggtattgcttttttgctgttcagtattgcttacttgcacctcaaattgtgtatctttccatacatggcttacaacatccttcaaatgattatttccataattaccaaaagcaagaacaataatgtgaaccactgctgtaacagaaaaaaattgaaaccagtatcattaaagaaatctgactacaattccaatctaattttctccaaccaaacattttcatgatttactttccatatgtgcttgagaaaccagtacctgacagaaaaattatactttgtttttttactttacattttgcttgagcaccaactcttcgtggtggaagttccagaatttttcaatagagcagcaatgaaatttctaatacaaaacccgtgttgattgatacaatctaaacatgtctttgcacgcaacagtttctgctatgacagagtctgtcacaaactgccccttaaaagtacacaacttgccagattgctacatcctatcacatgatgatgaacacagaaggaatatttcaagttagagatcctatgatgcagacaacaaaagaagccagattaatgtatttttatatacagtggtatttctgtaattttcagatttgctagaaaatctggaaaaattatctagatctatgccttgtttgtttccaggaaaatgaattcctggaaaccattttcctcactttcccatgtttggtgaacataaggaaaatgggtcaaaggaaactcaattctggtcaaaggaaaaaaagaagctttatgataggaaagtgttttcctttttttattctaaggaaaacactttccc

SEQ ID NO: 61567 - DNA, 572 bp, Populus trichocarpa
  Intron number 1 from transcript POPTR_0010s16470.1 (locus POPTR_0010s16470) derived from phytozome v7.0 (chr-ID scaf fold_10; pos 15417661 to 15418232 reverse strand)
attttcttttctttctctctttctccttcttccttgtaagcacttgtttccatgtattactgcgagagtctttttctttttcctttccttttcatttattttgagaaatccgtatgcgtgtttgtgttgctttggtttattggtgtaatggggcttggtataattttttaatggtttttctgatctgggtttggttaatttttgagaaatctctctgtttaatgtatcttccttttattttctggcactgatatttgaattataatgatcatgccatttatagttggatttccattttatatttgtcaatttggactgaatgtatcaagtgatttttcttgcttgctgtttatatgagagaattttgctgtttcatgaattttgtattggatgagttgccaacaaactgcgacacttggtggatatttgacgttatggttctctctatgttttttctttaattgttgccattaagttgtttatgttttgttgctcctttgaccataaatttgtttcctggtgttcatttgttaaatatgttaatgattgagttgttaaacttgttgtgtagg

SEQ ID NO: 61568 - DNA, 853 bp, Populus trichocarpa
  Intron number 1 from transcript POPTR_0006s08710.1 (locus POPTR_0006s08710) derived from phytozome v7.0 (chr-ID scaf fold_6; pos 6387091 to 6387943 reverse strand)
cattgtccttgtcactggagctggtggcagaactggtacggtccctctcgctctctgtttacttatatatgttctctgtttggttactgggatagctctggaaatgcaaagggataaggataattgtatttaaaagaaaaaagaatcgggtgcattttctgggaacttttgaaattcaggagtttctaagagttggaaaatttaggaattgtgtgtggtgggtggttttgggatctgcggtttcctaggttttgttttgaaggttaataaaataaagattatgcttttcttcactgttacattattattattattattattattattattattattattattttcagtttgtggcttagaggtaaagatatgttttggtataatttatatattgaattctctaatattttacaggaaagattttgcgttcaaaatgaatgaggtgatgcttctgtataacattttaggcgattgaagttttttaggttttattatggagtgcgatcatctataagtgctcttaaattaatttagttttgtatgaagattttactctgttccccttttccatgctgtgttgaatgacatttgtgattttcaaatctccaaatgcaatgtctatgaaatatttgcaaagaaagcagaaccacaaatatttttccctaatgttaaacaacatgaaatcgacaaagcctattgggttagtggaaatctggattcctgcaattatgttttggaaaacagttaactgctatgaattgtttgtcactatatgaatgtgtgtagttcgcttggtttgatctagacacctgtggcaggttccatagtttataagaaactgaaggagaggtct

SEQ ID NO: 61569 - DNA, 834 bp, Populus trichocarpa; identical to SEQ ID NO: 54273
  Intron number 1 from transcript POPTR_0162s00200.3 (locus POPTR_0162s00200) derived from phytozome v7.0 (chr-ID scaf fold_162; pos 1598 to 2431 reverse strand)

SEQ ID NO: 61570 - DNA, 976 bp, Populus trichocarpa
  Intron number 1 from transcript POPTR_0019s00705.1 (locus POPTR_0019s00705) derived from phytozome v7.0 (chr-ID scaf fold_19; pos 458147 to 459122)
catcttgtattggaagttagaggtactcgagaaaagccccttgttgataaaatcttgtgtaattttgatggtggtgtttttgggttgcaatcggaaatggctcttgcattatttgttcttatttgtgctctgctccaatggaacgtagagattattgttgtttgacctgataaagagcgtgaaacttctgacctaaaacaaaataagcataagaaaatcctaaataaaataatctgagaagaaaaatgaaagaaaaagtaaaactagaatcggatacgtctgcggcacctttataatggtcacacctcggttgggccatggaatcccaattgctccatttgatttgttttatgctgactcttggaagcaaatttaattaaccaggtcattttaagagtatattgcggctttcttcttaaaataaataaataaaagtttttattaaaagcataatgatatccgctgttgctgcagttgtgagataaatgatagtaaaatttattttttaaagtatttttatttaaaaatgtattattttttttatttttaacattaccatatcaaaataatttaaaaacataaaaaataataatttaaaactaaaaaattcaaaaaatttaaaactagctgaacaaaccaacattgcccaagtgcttatttttgggtgtaacctgtctgtggcatttttttaacgaggttgaatacagccaattttacgtgcataactataagaacatgaatcgaaagtgggggtaaaaaggtaagagaaaggctagcttggggacaggcaagccaagctgaggaaattgagaaagacaagaaaagaaagcataagagagcgaggaaagcgtcgtgtaccagtcctccacatgaagactgcaaaaccaggccaggcaggcacatcagaactagcacatgccctcgccagtgctttccatttacctccttatagagtattatatttatagagtttgga

SEQ ID NO: 61571 - DNA, 361 bp, Populus trichocarpa
  Intron number 1 from transcript POPTR_0012s10990.1 (locus POPTR_0012s10990) derived from phytozome v7.0 (chr-ID scaf fold_12; pos 11617950 to 11618310)
atcttaagcaacgcctttcttattataaaactcaggttccttcttcttcttcttctttaattttcaaatctcttcatttcgtatttttttcaataaaatattgtttatttttggtcttttttttattgttataattaaattttgggtttttatctgatttttctaattatcgattggaagttaacagaataaatcaattctcgaatattaagtaggtttttgattgtttgatagattgattgaaatagaaagaaaaatgctgaaattagtggtttaattaacaaaattaaatcggtgcttgattatttgcttggaaaggtgtgcagcttgttgaagcggagaagaggttagaggattctca

SEQ ID NO: 61572 - DNA, 789 bp, Populus trichocarpa
  Intron number 4 from transcript POPTR_0018s05340.1 (locus POPTR_0018s05340) derived from phytozome v7.0 (chr-ID scaf fold_18; pos 4863083 to 4863871)
ataggcgcaaactcttgtcatcttacagggatttggtatgtacactttggtatacttaattttttttagtaattgtgaatgtgtcttagcatgtaactaaaaaaaaaaaacaaaaaacattttattgataagaaactattttgcagtaatattgagttatggtacggagccaaccttctgcttgatttttgtagatccccaaattgtgaggaagaatcatataatgaaaaatattttatagcattataagacttttccatatgttcagtaatgcatgtcctttgtacataggcctgatcatacttagtattatagaggaggaatttctgatacctttaaaatgtttcaagtaaaatactcaagctgctaaaattttgtatttagtaggataaagtaagctcttgatatattctctattctttactaagctaagctaaatacagaacgaaggcctcttttagcactatgacctaaaatttgacaataggattttagattccaaccgcagtatgcatgtgttcttcaatgtcttggagaatgatccttatttccactcttgatattaagaaaggaaataaggatgacatctgatttagttgtcatcataacaaggatcaaactacacaattgaatgagcattgaaatcttttctaagacccaacgttgagcattttttgctgagagtaaatatcttagattaaaatctcaagaacttttctaaataatttggtttggttgtatttattgtatttgttgtgagattttctgtaggttgctgttgtaacttac

SEQ ID NO: 61573 - DNA, 567 bp, Populus trichocarpa
  Intron number 2 from transcript POPTR_0001s24700.1 (locus POPTR_0001s24700) derived from phytozome v7.0 (chr-ID scaf fold_1; pos 23944276 to 23944842 reverse strand)
ctttcatctcccaccagatcggagtccaatacaaagtaaaagctctaaatccttttccgttacttgaactttttatttgcaattaaagtattagcatgtgattgctcgcgagatcaaaataatactagatgttcatctatttggtgggcctagctagcactatccgtggtttgttttgcaatatttacagttgggatttgtgtgaaatcatcaattaaagccatgtctacccttcaatttcaaggaaatatgttgtaaaattgttggttattttatgcttgactctttaagcaaatttagggattgaagttttgattttttttttaaaactaaatgtagcgtgtcattgaattgtttgcttgcttattagtagtatccatctctggcccttttgtgatattcttttggactcagaacaatcctttggtatagatggagatgcccacaatggatctgtgacaaattttagttggagctcttgtcaaattgttggccaatggtgttaatgcgagtgggagtgggttccgtttcttctgaatctatatattttttcctttgcagagaatc

SEQ ID NO: 61574 - DNA, 436 bp, Populus trichocarpa
  Intron number 1 from transcript POPTR_0003s10260.1 (locus POPTR_0003s10260) derived from phytozome v7.0 (chr-ID scaf fold_3; pos 11314336 to 11314771 reverse strand)
tcttttcttctttcttcgtatgtttttatatccccgctatccgttctctctcttctctctccctcaaccgctctctttacaactttccttcttttgtttctcatcagtctttttgttcattattatccacttgaaaaggtcgagattcccttttctttgttatgtttagttttatggatttgatagggtatatttcatgttagaaaacccattttctgttttcttgaatgatgctcatttcgttgctcaattttgaaactttgtgcttatgttttgccgttatttagctgcgttgatgagtctgtttcgtcttgattttgtcttgctttgattacctacttgataaatcatagagatcccaacttttttttaatgaagttagaaccttatgttaagtgcagaaactgaggaacacagcagcaaataagcaacaacc

SEQ ID NO: 61575 - DNA, 949 bp, Populus trichocarpa
  Intron number 1 from transcript POPTR_0009s01140.1 (locus POPTR_0009s01140) derived from phytozome v7.0 (chr-ID scaf fold_9; pos 1280545 to 1281493)
tattagccttgaaagagttcaaagttgatagcactgtatccaattataattgcaattgttccacctctattctaatcctttgtatttcttcattggtgcgtttattgtgctcttctagagcttttatctattattgtcttccatggtgagttagaagtatttgtgtggatcttctagagctttgacaccaaattgtcaaggaaggtccttgacaatggaggttgttagtgagaaaagagattaataaatagaaaaatagagggaagaagaagttctgcaattacagaaaaagattcttattcaatgacttggtttacatgttttctacaccatgtatttataccttgaaactaaccattgctctgcttattatcggcagtaactaacttccctaactgtctctaactacctctaactgaattaactaactattcatcacatgttaaatgcttgtggattgctgctgcaatggctcctgctgctttgttcctgctgctgagattgtaacttcttgattacgtaacactattatacaataaaggctttgatttcttggaggagtttatcttgctgatattcagcgatttgtgagcacttgttttttaagatgttgtcttttcatgaggatgccttattcttctcttttgtaaatttgtttcgatctttcttaataaatttattcgtattctgttttcagtttgtttctactgggatcttgtgtataagatgtaaaagtttccagtcattgtttgtgttgagtagttatgacttttaagaggtatctggagtaattgctggaatccattttaggatatgtaaccaatggttgaaacttgacagtttttctatatcttttattttattttattttatttttccttgactttggtgctatataactgtgtatgtaacaggctgcaaagattgttaaacaagtttactctgtgct

SEQ ID NO: 61576 - DNA, 426 bp, Populus trichocarpa
  Intron number 1 from transcript POPTR_0008s06340.1 (locus POPTR_0008s06340) derived from phytozome v7.0 (chr-ID scaf fold_8; pos 3761396 to 3761821)
tgtgattcctgagactgcccatcagattagcagtggtttgtttccttttcttctggcataatgaatctgtcttttccatttcttgggattttgtgtctggttttgtgtttttttggtatcttctatcgcttaatatgaaagcggttgtctgagtaaaaacataacacgtcagttcggtttcgattccttggaatgttagtaaggttgttacttttttgaaaaagaaattctgggttggatagagttctatgttcttaatggtttctgattaatttataattggtattttcttttatgatacccttttttctgattgatttttcaacgtttggaaaatggatttttgatgagagggtgtttcattgtctgagtactaaattgtacttttaaggtcgtttgatcttctgtgttggaatttacagattc

SEQ ID NO: 61577 - DNA, 817 bp, Populus trichocarpa
  Intron number 1 from transcript POPTR_0001s20820.1 (locus POPTR_0001s20820) derived from phytozome v7.0 (chr-ID scaf fold_1; pos 19052900 to 19053716 reverse strand)
agtaatctatcaatctctctctctatccattttatttgatcacacaccgtcaatctccctaacgtttttgtcttttaatttttttttcggtttctgcttgttgctgttacatatgttgaatttagttaacgtgctttttttttaatttttttttgaagaggtgaattcgatccaatttgattcagtttctggagttttaagagacgttgtgattacagattgataactatgagtttttgggtagctatggagcttggatcatgattttatggtttggctgatgacagaaaatgtgggaaaagaggataattttgagattctgaaagtgttgatttttttttttaatttgaggatgaggaccataagttataggactaacgttaagtgagtgtttttgatatgaaattgaatctgaaaatgccatttaatacaagattgtaactctttatttttcccctgcctgtttgtcttctcaccttttcttggcaactgaaccaaggactgataaattctctgaactaggtggtttagaatgacctttatataaaaaacctcagcttgatgtctttaagaattcttggttttgaattgtatgaagattcatgtatgctatccttgttatcatcattaactggcatagaaaacttgcgcagattgatatggcgtgggacttttgagcctagcttgtgctgttagttagtaatcctgttttaaaggttttatctgcatgtgtatttaaattaagatatgtaatctggagtctataattttcatttccaaactaatgtgtgtaacttttgatttccagaaaagagtg

SEQ ID NO: 61578 - DNA, 619 bp, Populus trichocarpa
  Intron number 2 from transcript POPTR_0001s06140.1 (locus POPTR_0001s06140) derived from phytozome v7.0 (chr-ID scaf fold_1; pos 4755301 to 4755919)
aagtgctgaattgggttctgagccaattgcctttggtacgtagagagatttttatgatatgggttttggtctattatttgtttgctttacatgtttgtgattatggttgctttgtatgcccttttaaatatagttgagttaatggtctgtggttgattgctctttctctgtttctgtttttcagttctttattgttattttctgcttggaaaattagtttctttttagtaatttggagctgaatgatgatcgttgttggatttactatgtcaagcaacaaccaggaattagtgaaggaaaacaaaaagaaaaaggctgcaaattgatactctttcgtcttgcatgtggatgcatgtacatatgcaatttccatgtgggttgattgaagaacaaaactaaatgattttcaattgtatagtgttccttaaaaactacttttctgcttcatgtgccacttttggtttgtgtttgtgtaacaattgacttaaccattttggcatactttcctttgtttctcacatgtctgaaatttctaatttatgtgaatgaatcatgacattttatttggtggttcttaaataaagttagttttggatttggtatgaaggtgacttgcaag

SEQ ID NO: 61579 - DNA, 597 bp, Populus trichocarpa
  Intron number 1 from transcript POPTR_0005s19550.1 (locus POPTR_0005s19550) derived from phytozome v7.0 (chr-ID scaf fold_5; pos 18426524 to 18427120 reverse strand)
aagtttacgttttccctgctgttaccccagaaaaggtctctccttgttttgttctccatgattttaacttcaaaaatgggaattttgtatgcatatgatgcttgtgtgcgtatttgttaattttttgcacggaatcctatatatgcgcgcgcgcgcgcgcgcgtgtcctttcgaattttgtgtaaaaatttatgttctcttttcaacttcatatactttggaaattagcatcgtactttgatgctttcaattttgagcaacaccatatttgtgcattgatacgcgaatgtagatgctttcagttcttagggaaactactgcatgtgctatgtatattgtttctgtggttttttgggaactgcggaagcaacaattgcatcttcggctattgcattggatacatgtatgcttgctacatctacttatttggaaaaatgtaattaaatgcaattatttgtttttgttcctttcatctttccatctgttttccacaattgctgtgtagttgtctgtctgggtatgtttcctttaaaagaatgaaattattggttttgattgtcaggtgcaagcagtactcttgcttctgggaggaagaga

SEQ ID NO: 61580 - DNA, 895 bp, Populus trichocarpa
  Intron number 1 from transcript POPTR_0015s04460.1 (locus POPTR_0015s04460) derived from phytozome v7.0 (chr-ID scaf fold_15; pos 4601502 to 4602396 reverse strand)
gggggcaagatgcatataagaaaagaacataattataaataacaaaaaatctctagaaattcctagatagtttttaaataaggaaagaatatgaagttagctttttttttcataaaaaatagttttgacatcaaacatgagcaactatataatttattctttaaatacactaggttaatgtgaataatacactcttaaaataattaaatcttgattaacatataaactagtttaaaaatatatattaatcatgaaaaaaaagcaattatatatagatcacaactgatttagacgggtaaccggttatgccataatttggtttgatcatacacaagacatcgggtacatgaaaatagtggtgcctttggatttttccaaagcacccaagatttcaagtagccaccgagcatatacttttaagcaactttttttccagtctatatataattgctctaaaactaataatttagagaaaaaagctacaaattaaaatatattaagaagaaaagaaaaaaattatgaacctagtatttaaaaaacattcacgaaatatttataactcataaatcttattttttttatacaaagaagggttcagatattatttttctctataatatttaatgaataataaatattttttatttatcatcaatattattaataaaaagtaaataaatctattttctagatcacaactgaatatatatatatatatatatatatatatatatatatatattgttattgtttcacgtacgtgattattttggtatcaaagaagcaaactaaacttcattaatcattctgtaatttggtctgtttaaacaaaaaagaaaaagaaaaatgataaagtctcctcgttttgagagaataagggtttgaagagaggatc

SEQ ID NO: 61581 - DNA, 590 bp, Populus trichocarpa
  Intron number 1 from transcript POPTR_0002s16620.1 (locus POPTR_0002s16620) derived from phytozome v7.0 (chr-ID scaf fold_2; pos 12435909 to 12436498)
taaaatctccgttttcgctcgcgaagtcgtttccggtacttaagacttatctcaattagaaaaactactgattgatggttgatcatgaatttgatttatttgagatgcatttataatttatacaagtactaaagcactgaagtcaaccgaaccatataacacgtttttataggattagaggatttaatcatgctgcatgcattttctctgcaagaaaacaggaatggggtattttgtaaaaatggaagtgcattgttgttgttgttcttgttcagatgcttaattttaattgacttgcatcttcttgttagaaaatctagacaaccttgttgtcagtttcaactgcaaaactgatcttttaatctgagatcagtttatgccagcacttaaactgtgtccgatgacctcgatacatgaactttcgggctgattgtgaaaatgtggctttcttgaatcgtttacgagttcttattagattatgtaccatcttgttttcttttttactccatgtaccataaattactttcagttatgcattcaaaatgtttgctgtagttgggaaagaagaacaactgctgccatacctatta

SEQ ID NO: 61582 - DNA, 728 bp, Populus trichocarpa
  Intron number 3 from transcript POPTR_0015s10460.1 (locus POPTR_0015s10460) derived from phytozome v7.0 (chr-ID scaf fold_15; pos 11384993 to 11385720 reverse strand)
ctctatcaattgtcccgttgggcaaagggtcaggggtgagtaactttgcttgtgatttctactgaattaatctgttcttaatagcaatgtatcttcccatgttctagtattgcgtggagtcaggagtcatattagaaaaaacgaatacaacgattccctcaattatggtctggcaggagcagggcctttgagggggaaatttagtaattttttttctcctttttggctatagcattttttcaagaagtggagtcaaaatatgtttcctggtctaataagtaaagacatttaccgctccatgaaacaatgaccctttcaagaaattgacagtttttctattttaataaaagattttcttaaattgagatcagatgatgcaatactattgactttgcatattatactaccaatggtagtttgatctgccatgtcaaccttgtgttggaggagaggagcctcacgggacaaagaagggatggtttaaattcagacttgatgatactttcatttctctgtactgaactgatatacctttcgaaattgtcctatgcttaacacttttatagtgctatattgtatgaactggatttctcaccagtaggcgtttattcttatcttcattttccatctttagctggtacatgtagatattccaagatataacactatttgtttctttattttttcttgtaggtacttgccatcggagaaaaaggaggaaaccagat

SEQ ID NO: 61583 - DNA, 954 bp, Populus trichocarpa
  Intron number 1 from transcript POPTR_0004s07790.1 (locus POPTR_0004s07790) derived from phytozome v7.0 (chr-ID scaf fold_4; pos 6396376 to 6397329)
ttggtctcggtggcatcttccacagcgccgttcaggtccatttctttctgtttttcatttgtttatttgcagcagttatggtggagttagtgtaaattaaagagagatctagggttttatttttaattgtttaattttatgttttttttcagtggagtgtgagatctagggttttggtttcagtttcagttgaatcgttgcgtaataaaatttattagtatgcgttttttttttactgtattggaacttttattgtggattaagagggataattactgttgctgggtcccaatcattgacatggcgaattgatggtggttctagggttttggttttgatagacatttaatttggtttgtctttcaagaaccggaactttcaactgtgctataaactgggttggctttgaacatagaactgtattgaagagattgtaatcacacaggtaagggggaggagatttgttttgacatggaatatgcagagggggcatttttgtgtaattaagttttttgcagttccctttcaatttatttagttttttgacctagcatttttaaagggtttgttttgttgattgagttttgagtaaagtttcctagcattagtgagaacttatttgtggaaaattgaacttgtgtacagactgagtcgatggatgtcttgtgcaagcagcgtgttgaaaaactgtcatcataaatcctaatctgtcatctatagttagtttctaagtgctaaattatgcaataacgtggctagatgcaggcaaatgaatgcgtatcttaaaacttgacaccgagctcttgtatgttactactatattacaccttttactgattctttgggatttatttatggtcttcatgtctctgttactcttgaaatcaagttatattgaattggaatgtatgaattaagggtagtaaatctgtttgttttatgtgtgacagatac

SEQ ID NO: 61584 - DNA, 516 bp, Populus trichocarpa
  Intron number 1 from transcript POPTR_0001s10880.1 (locus POPTR_0001s10880) derived from phytozome v7.0 (chr-ID scaf fold_1; pos 8435137 to 8435652 reverse strand)
gcagagaatctcaagagagagctttttggtatgtttgtcagatttcatttcttcttgtttctgttttgcctggaatgttttgatcttttaattttctctgttttcttttactaagttctggtctttttaaggtttcgatcttacttctttgcttttgtaaacaggtcatagattgtaatatcatgcagactagtctaggtttttaggtgcaaagcttttagttgggaattctgtgccgtaattaattttaggtgcgaaatttgtggttcttctaagcaatctgggttgtcaataatgagaggcataatttgatctgctctacaaaataataagatatgaaatcattgcttaatcgttgtctgaacctagttgattttttttgataaatctcttcctataacttttttattcctctgtgcatctttgatatgagctttttgctggtattgaattctaaattgttgcttggatttttttgaaggcttgcctccccgataccgcgattccgtgaggcag

SEQ ID NO: 61585 - DNA, 570 bp, Populus trichocarpa
  Intron number 1 from transcript POPTR_0001s15310.1 (locus POPTR_0001s15310) derived from phytozome v7.0 (chr-ID scaf fold_1; pos 12150204 to 12150773 reverse strand)
gggttggaagtaagtaaattttcttgacatgataagtttttttcgaagaagtaaaaatcattgctcctctgtttttaatgtaaatttttcaattttttattaattgcgcagaggattccccaaggagattggatttgtccctactgtgtgtgcaagcactgtaataaaaacgacaaagacctgcaaacttgcgttcaatgtgataaaaaatgtatttactttcctatcatttcctggttattatttttttaaagattctcaattcttgtagtcactaatgaagctgtatcctttgctgtcatagatcattgccagtgtttagttagcaataaggagttggatcttaatgccagtggcgaaaccttagcatgtgattctcactgcggagaggtatatatttcaacacaattagctttctttcaatttccttaacaattaccattttactgttaagaatatgtaagattaacccaacacattaacatttaagacttgtcaacttgagatttgaattgatcttgagctttattcataggtttacgagaagcttcagagcctcgtaggtgtgaa

SEQ ID NO: 61586 - DNA, 376 bp, Populus trichocarpa
  Intron number 3 from transcript POPTR_0009s00980.1 (locus POPTR_0009s00980) derived from phytozome v7.0 (chr-ID scaf fold_9; pos 1097110 to 1097485)
gctgctcaagggttaagtaaaaaggtattttgtttttgttatttaattattaatttgcctttgctttttctatacaatctgtatcaattgattttgttcgattgggtttagttatcggatcaaaaccaatgctctagaaatagtttagtttagtttagtttaatttgttgtggggaataaatgagaaaatggttaaggtggagttgattaactgaattttttttttgattgaattgtctggctctctgctactttctgtaaatgtcttctttagatattttggtatgtttttgctttcataaattgtttaaattaatcaataaatatcatattatatgtagtgttcctttctgtctgtcaacagacttaaaaggag

SEQ ID NO: 61587 - DNA, 819 bp, Populus trichocarpa
  Intron number 1 from transcript POPTR_0014s18950.1 (locus POPTR_0014s18950) derived from phytozome v7.0 (chr-ID scaf fold_14; pos 16560884 to 16561702 reverse strand)
agagggaggtaagcaaatgtaggtttcttatcctcgaaacttttttcagtttcatcactctgtttcttggtggattaattagttattagtacaagtttatttcgcttcaattattggaaatgtttaatttgttgattttttcagtgtgttgtgtattgataattagggatggtagtagctctttttaaaaaaaaaaaaaataggattaaatgtgattgcagttttgattttgcttcaacaacaagtgataaattgtgttagttttaatgaacatttgaagtttagcattgtggtatatgactagctacctcataacaggattaagtcttaaagatgccaacttgattgcacttcatagattaacatttctcgacaattagtgctaatttttggtagtttatatggtaggctgtgtaagtaatgctgcattatggtttcatttatcttcttgttttgtcaatgaatttcaacacaaatggtgggagaagtgactggtgagctctgcttcgcttccaaggatgttctaatttgtttaatcattatgctttatttgtgaagcacatatccaaacatagcagaaatgagatgcaacaaattagagagaagaaaaacacgaaacattttgttagaaaacctctcaagtctttccttggtttgattttgtgctctccacaaagtagtttgttttagtttcacttcacagggattgtttttgccttgtttttatcttttcattttctcctatcaaccagaactttcgaaataatcataatttagcatgcaggtttaccaacaatctattgcagcctgctgtatcca

SEQ ID NO: 61588 - DNA, 730 bp, Populus trichocarpa
  Intron number 2 from transcript POPTR_0014s00840.1 (locus POPTR_0014s00840) derived from phytozome v7.0 (chr-ID scaf fold_14; pos 782309 to 783038)
aaacataccaagattgcactcttattaaggtcattactcccattatcattatattatttacactttatttgcaatcccaattgattttagacctatatgtatttaactgatatatttttcttgttggtttacataatatttataaaactctgttcggcttgacatgttaattgagtgatctacctaccgatccagagcttgaccctgcgagttttacttcggactagtcttttttttttcctatacattcaaaaatatattattttagattgattcatcaaactcataagtcaactcacccattggatcttataaccatagtttacacaacttgttgtcttgatattgacagtttctagttcgtggataacttataatgggaccctagttgtaggtgtagaagatcccatcaatctcacttgccctacataagagatggagatcccttttggtttctctctgattgacccaccgagtgtatagccactggaactcaaattgttattttcaaaaagaaaaagaaaagcttcttctgctgtcattaagctttaatgtcagagaagcagttttctacctgtcatcccaaattgcactattgatcttttcataaattgttaaccccaaggtttcattaaaattgagaaacatatacatttatatgtcttgctatgtatttcgctttctttgtgttgcaggttgacagtgcaaacaagcaggggattctattaga

SEQ ID NO: 61589 - DNA, 872 bp, Populus trichocarpa
  Intron number 3 from transcript POPTR_0005s05650.1 (locus POPTR_0005s05650) derived from phytozome v7.0 (chr-ID scaf fold_5; pos 3720838 to 3721709 reverse strand)
aaggtatatatttttttttatccaaattgttcctcctcacggtgttgagaatactccttccttattgttcgtgagaatcccttaatcttatttaattgagcaaccagggcactgttttgcttgagataaatgaagctggactggtaggcattagggagaccagcttttgatttgactggccatgtaattgagtaatatgaggattcatatgtttttttttagatatcaactttgcagggacaagtttttgaatatcctgttgctaggagaaaatttataaaaattcttaccaatcctgatcctagtctattagtttcgtatgggtatcactgttggtggatgttcgtttagatagtggaacatagtgagctggcagcttggctgtttgactgggtgcttagtgaatttaattctcttggttgtattgtttattgtttatgtatattcagaagtattacatgaactcattttcaaagctctacaagttttaccattttcatcattggacacagtaaagctatgaaaggaattaggtcttgaaaagtgctgttagattaacttctctgtgattggacacctaaaagaaactgaagagaagaagagcaccatatgtatcagggacactgaaaaaatgtatgacaataaattggggcatggacaaaaagttgaaatctttctcctttcatctgctcatttgaaaactaaagtgaaaccatgttcctatgatttacatttatgcttgcatctctttacaggtttttttttcaaaaatttagatggcatgcatttgtcagttgcagttaccagtatcttgctgttatagatcatctcaaggaacttgttaccatatgcaggtgagactcctcttgttc

SEQ ID NO: 61590 - DNA, 324 bp, Populus trichocarpa
  Intron number 2 from transcript POPTR_0005s12040.1 (locus POPTR_0005s12040) derived from phytozome v7.0 (chr-ID scaf fold_5; pos 8840451 to 8840774 reverse strand)
ggcttttggaggtaattttttgttttgttttttaaaattccacgatagcaaataaaatttggctcaattttatgatgtgcatgatatgattagttaagtttaaatcaagattattttaaggggaaagaaaggatcttttagccgcattaattgtgaaggtgaagatttcttgcgtgtattagagtgtttccactattgtatgctaataaagtgaaaaactagacagtattttattttttctgttgttatttttttctttatcataatgttttgatgttggtgtttgtaaatttttgatggcagcaattgctgagcttttggata

SEQ ID NO: 61591 - DNA, 782 bp, Populus trichocarpa
  Intron number 1 from transcript POPTR_0014s10560.1 (locus POPTR_0014s10560) derived from phytozome v7.0 (chr-ID scaf fold_14; pos 7873292 to 7874073)
tgatttgctctctgtaattattccaattttattattgtttcttcttctagattgatggaatttattttgtattgataataatataaaaaaacgtgtacgattatttgcatgagcacatgtagatgctagcagtcttgaaacaaaaaccccaagaagagggagtcggctctccctgctatgttcttcctttccttaaaacgtgtatgaaacacatggggctggctttagttctaagctggctgcgaatctcgaaaacttggtcttagtttcaagatatctagactagagaaccctttttcttaaaaaaatagataataaatagctgtagacaaaaaagtgattgtcaactgttaacgatatcggaccgccattccttgctccattttgaggcaactcaagaaactgctgctactcatttagttccaaaaatataataaaggtataatcccatttcttgattcatcataattattccccttttctatttaaatatgtgtttgcaagtactttaggcaatcctttccttttaatccttgctttgttttttacaacgaggtgcattacattggttgagagccagttattaatagattgtggtgggtgcctattagtctgtcctgttttttgctttatagaacctgtgatttcccaatcccaacaggaataagtgtagttgtggaatttgttcgtattgattatctgatttgaagtaactttttttctttgacttccttttcacttgtgcagtccaagaacagagaagatctcagttaggtcttagt

SEQ ID NO: 61592 - DNA, 355 bp, Populus trichocarpa
  Intron number 1 from transcript POPTR_0010s06940.1 (locus POPTR_0010s06940) derived from phytozome v7.0 (chr-ID scaf fold_10; pos 8165446 to 8165800 reverse strand)
gtgatcaggtactgcttttagcatatgagtttctctgatcttattcaattctacttcttcttgtcttattataagttgacgtctttttttatatgaacttgtaggtttttctagtaattaagatgcatatcatgtttaaattagactgcaaagccttgctgaagaacaaatttatgaccaatttctgaagcttttatgattaagaaaaagctctttttttttgttgcatctctcactggcaagagaaagaaaccatgaataagattttgattcgttaagggctgattttttttctgataattttcgaaattaatttttaggttaaggtcagcaatttggttgggaagattgtggg

SEQ ID NO: 61593 - DNA, 891 bp, Populus trichocarpa
  Intron number 3 from transcript POPTR_0005s25870.1 (locus POPTR_0005s25870) derived from phytozome v7.0 (chr-ID scaf fold_5; pos 24077749 to 24078639)
cggtatgtgcgtaccttaaaaatggcttgctcctccatttgtatgcagctggagagtgacactgattattggttcttgatcagcaaaacctactttagtttttctgttaaaattgctgtgttagttatgttttatactaggtgaaattatttggtagagtttatatatggatgcaatggctgacagtggttgcttagaaatctgaaagccaattgaagtaacacgagttttgtggataaaacacataggctagcttaacaactacttatagaagaaggaaaaatattcataaagatatagaaacaactcttgaagggacgcccattagataaagaactaaagaattcttaaggaatatttacagttcattgaatgaaaatcaccgttcttcttcctctggaaagttgatggttttcaaatttatcaatttgtttgtttgaaatgagagcactagagcctatgattctgatacctgctttatagtccctgttaattagttgcatcttgtaaactgcatttatccttggtgaactttttgattgctcaatacataaattcctggttatggaaacatcatgctctaaccatatatggaatatacggaagttcactggttttgaaaccttaaagattctgttaatgaacatatatttaaccactagggatatctgaggctgtatttttcttagatttcttaatgccttttgggattttctaggttttcagcattcattatggtttctttttcatatcactttgttattatttttcctcaattcttctaaaggaggaaaactgaacacggcaggaaatacaccattttaatattatcagtcattcaacatttgtatcgcaggccgctgaagaagaaaggctaagagaggagtttga

SEQ ID NO: 61594 - DNA, 513 bp, Populus trichocarpa
  Intron number 1 from transcript POPTR_0001s29170.1 (locus POPTR_0001s29170) derived from phytozome v7.0 (chr-ID scaf fold_1; pos 27934428 to 27934940)
cgtacgtctctgaacatttctgctccctctcttcttcagttttactgatttggttatttgttaaaggagctcaaaccgagacttggatttgatgattgagtgataaatcatggattaggttattggttacggtagtttagaaagttgggcccttctagggcttacctgtgttgggttttttcatttgatttttttacatgatcatgcatctctgtttttaattttaagatattaaagcttttgttttgtatttgtttttgtgtttaattcctaatgatcaactaagacgttttttaaatgtaagtttttaaatacgaaggctttagacgttgatttaatcgtttttacctacattcgtgaacaaatatgtaaataatgatcgtaaattgtaataattgtgggttttttatgagtccatagctgttgttggtcattaaaagctgtttgagaattgaagttgagattgtgaaatggctgagttttggtgttcatctgctgtgcaggtgactaata

SEQ ID NO: 61595 - DNA, 805 bp, Populus trichocarpa
  Intron number 1 from transcript POPTR_0013s14800.1 (locus POPTR_0013s14800) derived from phytozome v7.0 (chr-ID scaf fold_13; pos 14923074 to 14923878 reverse strand)
gatttctgctactgaggttgtttctggtgtttcaggtacggagttttataagggaagttttttgatgtgggttttgaaggaaatttgctgttttggtgtttgaatgtgctctgtttcttgagtctcgtggatgtcattaaatttgttatcatgttgcaattatgacgttgaggagtctgtgagtactcaattttataaatgcaaaatcatgatggtatttgtttgtttttctttactggtagttctaatcttctagattgcctatgatttgtagaaacgtagggttttagcggtctacaatgtggttatcatgctgtttgttgggatgtcttccactttattaacactaaattgtggtgttatttgttctttttaaatggtttgtgtaaatagaggctttttagtgatggaaatttgattataatgttttgtgatgcggtgttgagtgcttgaattagttttgtggttgttgctcgtggatgccattcgtttgtttattttcttgaactaaagaagtctggcagttcacaggtgcagtatcagaaatgcaaaaccagagtgttttttatgcctcttttccccttaatgatctgtcaagtgaagtgatttttggtttgcagaaattaggcctttggctggttataattccattatcatgctgtttgttatgatcttggctttttttaactacctatgagtgagtcccgcgatggaaaagcttcaagtgaagctactaccgtgactgacattggttcattgggtaatctcaggtgcatcggaagaaaatatccgagatcttttctct

SEQ ID NO: 61596 - DNA, 750 bp, Populus trichocarpa
  Intron number 3 from transcript POPTR_0011s14870.1 (locus POPTR_0011s14870) derived from phytozome v7.0 (chr-ID scaf fold_11; pos 17125652 to 17126401 reverse strand)
cctgcggggcctcatcttgggctgttgtgctgctggtgggtttcattatttctggctgaaggaagatacatgcacagcttttgagtgttcctttctgatttataaattttcacaaaatatttgttgattaaccgaagtcttcatgaaataagagagaaggtctgagcaatttaattcactggcatcggtatcaatagtaaatcagtttctgatgatgtgcccttttactgatgattgtgatttgaagtataggtttttacatcttttagttgctctttaagatttcttgtcagatattaattccatgtcaaggaggcctctgctttgttaactgatcatcatccttccaactaaaagaaacaagtttttaagatttctgctgttgattcctctccttctttctttcctgccatccaacccgtgcagaccaaccgccttagaaaagaggctgatgtgccatttcctgcaagtgaattaagcagaaatgaaagtctattaattttgctatccttggtctagttactgtacgctgtgatgaaacactttagacactctaatctaattatatattcctgtcacacatcaatatttgtttttttttttttcccagctatttaggcccctcttgacagtaatatcatgtattgttaatatattgaagctgtggcacaagcttcattacattcgaccttttgtacctgatttctagtttacatgggcggttgaatgtgagcagggaatctgggcaac

SEQ ID NO: 61597 - DNA, 715 bp, Populus trichocarpa
  Intron number 1 from transcript POPTR_0011s13480.1 (locus POPTR_0011s13480) derived from phytozome v7.0 (chr-ID scaf fold_11; pos 16226195 to 16226909 reverse strand)
ctggtaagaatctcctattttgaaattatttgttaatttagacatcttccatctaatttttcatcccccttttgtgcatatatttagttttgaatttaaaccctttttgcagtttcttttgtctctttcttgttctcttatcctcacagcagcagtcacacacttgattctgacctcagaattgagtgggcacttttcccttgcaacttttgagatcaccaagtgctccgagatagcggtgaaggtttctttcaagacatggatatactttgcaggctttgtggcaattggaccgagttttccatttcaattcctgttaatgtgaacccagattctaaccaccagcaaaatgttctttttaatttaaactcttattttatttttataatttatcagatattactttgcaacaagccgtttcttttttcctgcaatatcttcgtctgagatatccatttgttttttttttattgtgatgctcaagagaggcatagttattagttggttttgatgacttttaactttataaattatagctgtgctcgaaacaatttattctgatctttcattttgatgttagtctttgaaaaccaaagtcaaatattaaagtggtttgctgttcctgagactttagagtagctttccttatcagcagctcattatatttctcttcttggcagtcactgaacttgtggaaggggactcatcaagaaaa

SEQ ID NO: 61598 - DNA, 676 bp, Populus trichocarpa
  Intron number 2 from transcript POPTR_0003s16170.1 (locus POPTR_0003s16170) derived from phytozome v7.0 (chr-ID scaf fold_3; pos 15779856 to 15780531)
tagaaaatacacgtatgttctctacgttttggtttttgctttgattggcattataaaaagaaaagcctctattcatagtatttagctaattaaacgatgttggaatttctttgcaatgttttatattcttatttttttagatcagttgacactataataaaagctagcagctgttggcagtcactcaagtatttgtaaactacccaccactcttttagacttctagttgcaagttgcatgtggacctgaattgaaggacctatgcattacagggctcaggattcctggatttgattttcttgcttcagaacccagttattttgacatagacaggagtgcgggatatgattcccaaaattaagaaagcaaattcatagctgaaacctgaaaccgcgtcccttttcttattcttcatagcaccccaagtactgaaattcatcactaagagtccctgcttaaagataaaacagtttttatattaatttatgtttttttaaggtggtcaagtttgttcaaatattccaagttagtcaagactgtgaacctgtttggcattatatgcagttgcattttctttctttctctcacttatctatgttacaagcaatgggtttgtgaagaatttacctatgtgctctttttttccttacttgcagtgaagggctgggggaggcat

SEQ ID NO: 61599 - DNA, 682 bp, Populus trichocarpa
  Intron number 1 from transcript POPTR_0012s09940.1 (locus POPTR_0012s09940) derived from phytozome v7.0 (chr-ID scaf fold_12; pos 10824086 to 10824767 reverse strand)
tcatcaccgcctaccctcgcattcttggctctctggtaatgactctgaccctttgatcctaatctacctctcacagctttggctatgttgtcataaatatttttaatccaacatggatgccctgccatcttttcgactggatatatagatttaatcttgctgcctgaaagctgcactttctatctatattttgtctcattttttagtaatggtggaagtgttgtgttatcccctcatttttttggaggaagaaaaccttcaaacgtgaaatctgctctaaaaaagtataataactggaccaatctgttcaaagatgttcttgtacaacagtactcgactgttgctggatttttatttcgtattaaaaggcggtattttgaattagggagcgggaaaaaaaattgaagaaccaatttaactgagaaaaagaaaaacccgtaaaattaaaccttagagacctaaaatattgtttttaaacttggcatcatgtatgataaccccaagcattcatcatattttgttaatataattttattttcagccagaatctagttattatacaacatactgtatggaacacattgaaggtaacgttgtttaagaatattttcttaacaaacatggcaagtaattcttaggttttttcccctttatttatgtgattgcagggtgaggattctga

SEQ ID NO: 61600 - DNA, 894 bp, Populus trichocarpa
  Intron number 2 from transcript POPTR_0002s22990.1 (locus POPTR_0002s22990) derived from phytozome v7.0 (chr-ID scaf fold_2; pos 20254155 to 20255048)
ctttggatttcctttctcaaaaaaggtaccttttatgcctattttgttgggttttgattgtttgtcaagttccttttcgatgcaaaattgatttcttttaagaatttgtgtgtaaattacattttttgtgagtttatttgatagctaaaggtgattgtcatttggtttttaaattgtaatacagttgaaatataaaatttggtggttttgttgctttgaaacctacatttttcaggataagtatttcataattttgttgctgtgattgatagctgttacaagttcaaggagagtttgtgtatgatatgtatagttgccaaattcaattttctgttttgagtgattttccactacttgaaatggagatagataatggggctactggttaagacatgacaggtgatgtattcaactgtcatcttcttaatcgagctgggatattcaagttaagtttgtgtaactatatgttgttatcttttaataaagaattgctaggatgtactgtgtattcagttaatttccatgaattttataaatagatttggaacagtcaattacagaacactgatcattttgtcagggaaatatcaattgttgtggaacacagtgatcattagaaattcacaaattagaggtgatttaatatactcttcccaataaattctcaaaccaaaccaacccatgaaagctcaactatggattataaacaaggtcaatatcatgaagaaaaaagagacatcatctatacccaaataaaaacttatattctcacaagaaagccattgaacgctttataatgagtagccttgaagcccaaatgaaatggtgttcagattggttttataaatttttgaaacaggcagcaggagcaatcagagggcgcgtcagtccagc

SEQ ID NO: 61601 - DNA, 747 bp, Populus trichocarpa
  Intron number 1 from transcript POPTR_0005s02800.1 (locus POPTR_0005s02800) derived from phytozome v7.0 (chr-ID scaf fold_5; pos 1795748 to 1796494)
caattgattcttgtttcacttttttgcttaaccaggtagttcttgaacgtattttaattgtttttggccattgatcacgtgggttttagtgaatattacaattacaatttgtaattttgatggtcaaaaggtgcaaaatttgtgatcgggttttgcgtgcaacgtaggaaaagaaattagtttctaatttgtaatctcataagatttccaaccagcttgatagtgtttctttctgtgttggggcatgtggggtgatgtaaatttccatgctttgagtacttttttgcgatttttctgtctggcagtgaatgtccaattattaatctctccaaacatgcttgacactgctggttgtatgttttttggtatatggggtcacctaaagtttcatgctttatggatattgattgaatcttgaattagactttctggaatgtgtgcttgtataatgtctcctatggcagtagtctcttgatatttttcgctacaagtgtactcccttttcaggtcttaattagaacaggaccttggatgtaatttgtttggtataaagtttaattgtcaacgccagaaactttctagcctgttcaaagggttttggatgctattgtagactttagaaattctatttttaaaaggaaagtgagaaatagtcggatgagtgtgcaatacagatatgcatgctatctctttctttgattttgaactgcaatcattacaattttaaatattttcgaccgcagctaa

SEQ ID NO: 61602 - DNA, 431 bp, Populus trichocarpa
  Intron number 3 from transcript POPTR_0013s03330.1 (locus POPTR_0013s03330) derived from phytozome v7.0 (chr-ID scaf fold_13; pos 2040559 to 2040989 reverse strand)
ttgggacttgctttgcaccataaagctcttgggaagtaagttcttttatttctacctccattacaagtattgaagaatgaacttgaaatatgtgcataccttccttgaaaatttgggttttctctgaatatacttttcaaaacattctttcctgttgccagaataatttgccagttgacagttcacattaagatggtatagtttctgcttgtcaaagctgcttgagctacttatgattttctgcactcgttatttataacaaagggattcaacttttaaagaattgttatggatcttaatctttcaatttcattgttctatcccgcgtaattgaattcttggggattcttatttgttctgtcattttcagtgcagttaaataaatgattttacatttgatttttggaaaattgcagggcatttgaagttcg

SEQ ID NO: 61603 - DNA, 430 bp, Populus trichocarpa
  Intron number 6 from transcript POPTR_0004s09400.1 (locus POPTR_0004s09400) derived from phytozome v7.0 (chr-ID scaf fold_4; pos 7950906 to 7951335)
tattaaggtgactatgtttcatgtctttctgtgtctatttttaaaggttatgatgatttagaatggacaaagcttttatttcctcttgcatcttagtcttttctattgtagcctctgtagttatctggattatgccctcacaatacatgcctcttgcaatttgctgtttcctgtttcctatttatcctattttcttaactaattattttgtcaaaatgtaatcgttttgctacaatgaaccttctagtatttgttggatgagaatgtcctgagcttggataggaccagatttttttcataatcttttgcgcatcatcacattctgtgattcccctaatcttactcttcattgaactctttgaagtcttcacatcttacattgcaaatccttcattttgattctttcagtcatttgttcttcattgcaggt

SEQ ID NO: 61604 - DNA, 711 bp, Populus trichocarpa
  Intron number 1 from transcript POPTR_0004s07310.1 (locus POPTR_0004s07310) derived from phytozome v7.0 (chr-ID scaf fold_4; pos 6040047 to 6040757 reverse strand)
cgccattctaatcaacagattcatcagcttgaaaagtacaaaactagcatcactctcttttcaaggactttgttttatgttctttaagcaaaatataaaaacaagattttgatctttatatgttgcatttgttgttgttttttatatggtttttgtttggctattttgatatgttcttccgattgattcatagtttcaccatccattgattactgtgaagcttctgttgatgttcacgaggaaatctataaattttggtgtttcactcttggcttgctctttgttggtaaggtcttcattattgagcggcttttggataaagtcatttcactcgacatgagaggtctattttatttatctgtgaatggaagaggattttcccatttccccccgttttcagattgctgatggtgtttttgatggagattgtttacttcttctgttgatgcattcatttttgtcttgataaatcaattttcctatgtgctagttcggtccttgattgtgttgtttggattgcttgcttccttaattcattcacttggcttattaatgtcacaacttttttcatggatttttaatatgcatcctgtaagaatatttgatgtttcttcaaaaaggtccgtccttccacacccccccccccccccaccttcattttctgcgtttgaagtttgtggttttgttactctgatgaagatttttcaagga

SEQ ID NO: 61605 - DNA, 723 bp, Populus trichocarpa
  Intron number 2 from transcript POPTR_0003s17960.1 (locus POPTR_0003s17960) derived from phytozome v7.0 (chr-ID scaf fold_3; pos 17185761 to 17186483)
tcagggtatgtatctgttttaataaattataatttcaacccatgcttgtttgtgatttcctgtttactagctattattgtgtgtttaacccatgctgttagaggttagtttgtagtttatgattttgggtttttcttattggttataatgaagttgcacatttgatatgctaggtgcttcttcttcttcttctttttgctgttacttgtggtgattgttgacatggtgaattgatttatttcgcttaagaattgcgaatggtttttatgcctagagtttaggcacgtttcaacccatcatcttgcaagtgcatcttgatttcttggaatttttgagcttccattcaatgattccaagtctttgaatgttaggcttttgccagaggcctctgacatttttattcaagaaaaaaactagtgatagaaaggacaatgtggtaactatcgtattttgatagaaaggcctttgatgcgaattttgatgcaccaatcaaaatgtattatagattgttacttatggcccacttaagggtggtgcattttgtatcctcttccttccccaaaataaaaaaacagaaagtatctatcgtatttatctgatgtggggtttttgttgtttgattcttgaactggaaatgatggtttgtgccatcattatttattgtatttgaatctcctcatctttgcagtgaagagactcccgctcctgctgagactcctgctc

SEQ ID NO: 61606 - DNA, 626 bp, Populus trichocarpa
  Intron number 2 from transcript POPTR_0005s02040.1 (locus POPTR_0005s02040) derived from phytozome v7.0 (chr-ID scaf fold_5; pos 1330800 to 1331425)
ccccattgtggagaggtggaccagctggccccaaggtgtgtatgtttgtttgtttttggtccattacaatcttgttatcttccctgttctgttcattttgcttatgggtttatgatttttttatctgggtcagtagttttcacatatgggttttaggtgtttgaggttgtctaacctttgtgctttttgtaaaatacaatctaatcttctttctctcttccttttcttcttgggcttttgattttttgatctgggtaatttatattttcaaatgggttttggtagtttttgttggagtatgtatttgggtcactatatgtgattgctagtgcttaccttgtttatttatttatgtttactcggtcaaagtttgtgatatattttgactggatggtcttggtatcttcaatggggccttttattggtcaccatttttgtgttttaaagttgtctgttctagctgcgtgtcattttgacttgtgggtcttggcattttcaatttgagctatatagtgaccactctctgttttctcgcctttatggtttttcttgtctaggttaatggtttttcttgtctaggttaatggtttttgacttgtgggttttttttttccagtcattgtgta

SEQ ID NO: 61607 - DNA, 859 bp, Populus trichocarpa
  Intron number 1 from transcript POPTR_0004s12480.1 (locus POPTR_0004s12480) derived from phytozome v7.0 (chr-ID scaf fold_4; pos 11628114 to 11628972)
aaggctacaaccgaggtgctttcaaaggacttatgaagatttgcagcagatacctaggatttcactatctaattcccttcaatggctcaagggaattagcttagatatgtccataatcatccacttagaatgacatcctagaggtgtatgtttatatataaattgttatgtatgaaatgtatatctgttatgtcatgttatgtataagacctaattagatgataataaatccctcattaatatattaagtacatgttgagaacatgaatagttgtttttcaattttatatgcataaaaccagagttttattcatggataatttgttgagttactcaaggttaccgttaatcgaatatgtttaatgctataaaattgagttcttcttaactaacctatatgatttatatgagtcactcatgatcatatgaggttagaggaatgggttagggaaatatataagatatgtttagacaaagagttgtcacctaactgatctaggagtcacatagagatgtaattgataaatgatgttatctacctaatttaatttattttgatttgtgaagtcattcaatgttggataaattaaatcctagcccactaggaaaatctaagccagatttcctgaattaatagggagggttattaattttcaagaaaatagtggaagaccaaatcaaaattaaaatatgcatgcatgaaactaatactctctttctttatatataggttggtagattaaaatgagtagtaacatatccctacaaagcatacttgatgctaacaaattgactggaccaaatatcttggattggtgttgaaatgtgagaattgttctcaagtaaaaaaagaggttta

SEQ ID NO: 61608 - DNA, 702 bp, Populus trichocarpa
  Intron number 1 from transcript POPTR_0003s07460.2 (locus POPTR_0003s07460) derived from phytozome v7.0 (chr-ID scaf fold_3; pos 9017896 to 9018597)
ccagcaacaagaataagtatatctcacacctctaattaaaccttttctttaaattcagtgacgggttaactcagaaatctgatgatcaacgtatctcttgggtttcataacaggacagtgttcttcggagtgtataaatgctgggggccaggagctgcagcagtacagggtgtttcatgggcaagagagctagactatgaatccgcccacaagttccttgctaagagttttgtcaacggaaggcattggatagccccttctgatgcttagccatggcattgctacagagattctctttcgtgctgcctttaacccattctttttgtaaacagcaaacattcttctctttgatttcttgcccttacaaaatccattcatttgtaataaaagaaaaaaaacatgcatgcatagatacatacatacatacattcaaattctagttaaaacctcgcacaattattcctttgcttacttgtaaaattccgactcttattctttgatttgtcaagtaaaatgttggaagttgtgttcgaaggctggattaagtaaatgcttttcatttcttgtttgtatccgaaccaatgttagtggtatggagggaggcattttccctgtcaaactcatttgagttgccaaaacaaagaccctgacaaattcaaacgcgcagagagagtggtactaaaacctctcgtctaaccctcc

SEQ ID NO: 61609 - DNA, 743 bp, Populus trichocarpa
  Intron number 1 from transcript POPTR_0002s05410.1 (locus POPTR_0002s05410) derived from phytozome v7.0 (chr-ID scaf fold_2; pos 3522645 to 3523387 reverse strand)
tcgtaagtttaaccaccatcaacaacatgcttgccctttccccccttttaacaattgtccgtagaccaagtgattctatttcttttctttatattgtttttcggcctgttcgtcctgtctttcacttgttttttttttttttttccaaaagactggtttttctcttttataaattgtttttttcttccttctttcagttcgtattttgtatgtcctggtttattttactcatttttctatgtagtcaatgtttttggttaaagttttcatcttttaaattggatattgagaagtagcttggaaacaacaaagtttgttaatatgcaatgacccttcgtcttctctgctttttagcatcttgcgattgcttgataatcatcctatgtaatcatggttcggggttacaaagtcgctattccaaaaggtggtttttatagtttagttttgcgcttgttttattctatgattttcctttgttaatgtttgtggttttgaattacaaatgtcgtatatgtggcatagaggaaatttcaaattctagcctcgttatcgatgtgcaaggcttgaagtgtccacccttttagtgttgttttttggaaatatcaccatttagcatttattgtattaccattcttacagttccttgaaatgcttagttgtttgatttgattcagttttgaactgatagttgtttgattttgatggaaggctgagagtacagttcctactgttacagaggtgca

SEQ ID NO: 61610 - DNA, 947 bp, Populus trichocarpa
  Intron number 2 from transcript POPTR_0019s08370.1 (locus POPTR_0019s08370) derived from phytozome v7.0 (chr-ID scaf fold_19; pos 9911368 to 9912314 reverse strand)
agtttcgctcctgcacctaacactgaattcgcctggtaaatttctttcactattttttttaccccttcaagactgagtcgttaacatgaagtagaataacaatgatgaagacacagaaagagattgttatgttagggatactaacaaccagctaattacaccattcctatgacgaacgagtcagcaatttagcgaggcttgtatttagaagagctggcaaagtgtagtatttgtttggcagcgtctaaccagactttcattattaggaaacgcaactactcccctctcaaatgaaatgagtgatggaattgttactactgattcacttctgagaatgttgatgggtggtggcttcgtgggatttagtatttaatgtgaactgacatcttttaaactggctagctgcttgtttcctagagctatgtggtcttctggcaatatggtttccagtaatttgaaacactgaaaaaagtggaggggtaaaatgggtcaaaaaggctgaaaatgttttttttttttaacacgggttgatgatgagagaggaattcctctctcctacttgtattcaggcagatgttgaaggtgtagtaaacaacatatgctaatacatggtataacttagctctgttttcctttgactttgatattggtcggctacagtgtggtaagccttgaagtcagaattcatggcttcccatgaactaaaatcttagcaaatgtaatagcaattgctgcttaaactaagaaaatcttttcgttgttgcataaaaatattgctagttagtttatttgcttgtggtattcctctattgtgatttttcgtatgtacacctatgcatattagagatctttcagattgatgagaaccaaatgctctgttataacttcatcctttcttaaccttgtttgaaatcttcattaacaaaagccttcattgtagggataca

SEQ ID NO: 61611 - DNA, 724 bp, Populus trichocarpa
  Intron number 1 from transcript POPTR_0006s11580.1 (locus POPTR_0006s11580) derived from phytozome v7.0 (chr-ID scaf fold_6; pos 8789566 to 8790289 reverse strand)
atctaattcctcatcgccatatttctctctctcaggttttcttcattatacctccatctctctttacatttttgcttgtgctactactttttctctctctctttttattttttattttttttattgcacatatatgtaaattatttctcttctctttgcttgcctgcctttcctttttgccttcgatcttacagttatgtatggaatctgattcatgaaaaaccaaataaaaaaaatagttcaagttttgataatcttggagctgagcattttctttctaaacttgaatgttagctagctcgatccacatttatcattattatttgaaattatgaacaatgtaagaggagatttgaatcttattctcacataaatcaaagtaaataaaaagaaaaaaaactactacataaaagtaatcgaatacacaaagtaacttcgtaatttttttctaattttcaaatgcacctttgttagtaattgtatgcgtccgtgtggatttgagagcgttgaattttagaaatctggtgaaatggacaataattagttttaattgtatagcaagttgaatttatcagtattctgttgcattgcgtgtccccattttgttgtggttgtgggaattattggattgtattataggaattccatttctgattaatttctgttatttgaactttggtgaacatcagggctttggatattgcagtttgaagtgagagaaagg

SEQ ID NO: 61612 - DNA, 443 bp, Populus trichocarpa
  Intron number 2 from transcript POPTR_0001s12550.1 (locus POPTR_0001s12550) derived from phytozome v7.0 (chr-ID scaf fold_1; pos 9732701 to 9733143 reverse strand)
ctcctggtttgtcttttttttgtaaatttttaatggttgacttctagttacaatgacattatttatctctacattgatccatttctatgatgttatcatactcataaactagcttgtaatttgttctcccgcgcttgttttcgcttattagatcaaatgccatttccagcctaataactcttatgtgtatcattagtttccaaacccatttctattgagagaaacattgattccttgctaaagaaagagagcttaattccttgatgcctttctcactggagttttataggataccagggacgttaggatctattagttgaaatacatggcacaactactgctagaaggttacgattgagttgcttgtttcatggatagtacaacttgatatacacgactggtcttctttgaacaaatagtctattttaatcctttttggcagg

SEQ ID NO: 61613 - DNA, 990 bp, Populus trichocarpa
  Intron number 1 from transcript POPTR_0002s00370.1 (locus POPTR_0002s00370) derived from phytozome v7.0 (chr-ID scaf fold_2; pos 98577 to 99566)
aactacacactcaagcacggatacgaaacttcacggtggccaaccagtggcggagccacaatggagattaagggggcaattcccccttaattttttttttttttaaatattttttatattagaattttaatataataacttaataagtttaatttattttattaactactaaaacaagtttttttaaaaaaaaaaattattgttcctgcctctctttcttctgtaaaacttctcttcaagtcctaaactattaattaattaagtaacttctttatgctttatattttaggtgagtttcctttgttttttctatttatttcattgtttaattttagttttattccttaataattagttattaaaaatgttagagtttatgataatttatggatttgttaaattaatatgtgtatggataatattatatgcatataaatatgaattaaaatgagttttgatgaattaatatgtattttgttatgaatttcatatgaaaaatgatggtgatcaacttactagtgattaaaaatgaagtactgaacaactcaaaaaattaggaacacaataaaaaaattaaaaaaatatatattaatatttatatttaactcacctgtataaaacaacaagtcaacaaagaattgttgtgaataatttcactaatccctggaagatttagaaatagataaatgaaagtttaattgtatatattgagaaagaatatctttaataaaattaaaaatgaagtcattatgaagcagttttaaaataaaaaaactcgaaaaaaataattataatgtaagtttttttattttaaaaatattcttaaattaattttgcttgagatgagttagaatatgcattttaaattaatttctctatatataacaaatgtctatataatatataatattaaatatttgttaataatttactttctaattacaaatttttttagctccgccactgtggccaacaacacctaccaaggcc

SEQ ID NO: 61614 - DNA, 623 bp, Populus trichocarpa
  Intron number 1 from transcript POPTR_1072s00200.1 (locus POPTR_1072s00200) derived from phytozome v7.0 (chr-ID scaf fold_1072; pos 685 to 1307 reverse strand)
aagttgttgagactgctgctaagactggtgctgaggtttggtttctccccttttagcttttcttgtgtagattttttaactttgacagaggcgctttgatggtgtttctctgtgtttaattcgaacttgatttgtttatttataagctgattggaatgtgaaatttatgagcttttgttgtatttttgttcaattcatagcaataataactttatttcttctgaaaattatttgttgttttaattaatctggaatgcctgagttatattctactaaaattaaggctctttatatatatatatatatatatatgttcatcatgctttatatctctcaaggatgtgttgagtaaattttattgaaaattaaggttttttattttgttttattattcgcatgtattagacattaaacatctatggctcaatgattgactattgtacatatatcatgtatgagtaaactgaaccaagactattatggctccgttagcagtttgttgaacataagttcttttgctttagaggccctctgtgtccctgttaatttagaggtggctgtggacaagtatgttagttttcctgtagtttcctaaacgttcttttttatctatccaggtagtg

SEQ ID NO: 61615 - DNA, 729 bp, Populus trichocarpa
  Intron number 3 from transcript POPTR_0012s06210.1 (locus POPTR_0012s06210) derived from phytozome v7.0 (chr-ID scaf fold_12; pos 6236644 to 6237372 reverse strand)
tctatatttgaggatttgactcagggtatgaacatacttccattttttactctaatcaagttctatgtttgtgttaactagttgattttgctttcattattgtgttggctgattttgattctgactagggaatatgcatttaagcctttaaaactaaggaatgcatttcaggtattggaataaaactattccaggaaatgaattcttttgcttttgattccattctgtgcctcttgatgtatgttttgtagaacattaaagtgcaataacgaaattgaattccagcttttatctttatcaattttgttttctacattctgtcttctatatatttatgaacatttgctttttctaaatggtctaggataaagtgcctcccaattgtgtttttgttagattgaaaatccataaaatcttggttaacctatccgataggccatgtcattgattattgttattctttgtaatttttgtacttctctgagtcctttctctcttcatctttttaaaaatacagcaaaacctaggaaactttaatcgattaaaaatcataaacaggttctgacctgtactcttttcttctgaatagaaatgaaaccttttatgtttatccaatttcataattggcatcagtattctctttctttgtcatggagtgcaaatataaccatgtctccatttgtctttgtttcagatcaagattctgttcgattattggctgttgagggt

SEQ ID NO: 61616 - DNA, 556 bp, Populus trichocarpa
  Intron number 1 from transcript POPTR_0007s04580.1 (locus POPTR_0007s04580) derived from phytozome v7.0 (chr-ID scaf fold_7; pos 2842395 to 2842950 reverse strand)
ctcaaagacgcaagcttgcccaatatcaacaacaggttgatccctttctttttctattttaattcaattttatgactttttgggatattatatttaatggggttttcgtgttttttttgttaattataatcaaaattttgattaccctggaatttgaaaataaaatatctgtcttttggtgccttaaatgtttatttctcagtaaaattatgtaacaacaaaagggtaagggaaagtttggattttttcttggttattttaagacccattttttgttgttggtttgctatattaaaaactataaaaaattaaaactttttttgctatgcgctgcttaggagaatgtgtatttttaggtttatagaagtgggtcagttttaaaattttgaaatggacaagtgtgttctggaggattgtgatgttttcttgttgatgaaatgtgttatttttcttctgctgaatttgaggaagtgatcgcttatttgaggttgttactttgctttgtgattgaaatgttccagcttgaaactgtgattgaagcggaaaagctagctgc

SEQ ID NO: 61617 - DNA, 483 bp, Populus trichocarpa
  Intron number 1 from transcript POPTR_0005s07060.1 (locus POPTR_0005s07060) derived from phytozome v7.0 (chr-ID scaf fold_5; pos 4730650 to 4731132)
atccttggcagcttccaggtaattttttgggatttttcaatgatttctttagagtttcaattgtggttttaagattagatttgagagattgatttaacttggagaaaagggttttagctcagcttgtttgatttcttggtttttttttttaaagatttcaactcgatttttaaattttaatattcagaaaagaaaaggtttttttttcttttttggatgagatcttctttaccattcgtttttttagagttacagtcaaatggatatttccgtaccttcacacaattaagttttagagataataaaaacccagaaacccagaaatatttcatgaattttcttagccatttgttcatcaatttgatacatagatctatgatctaaacaagtggacgagaaagatttcaaaattctcgatttggtttcctgattttttttggacgactaataattatttggtaaatttctttttgtttttcagaa

SEQ ID NO: 61618 - DNA, 566 bp, Populus trichocarpa
  Intron number 1 from transcript POPTR_0008s12760.1 (locus POPTR_0008s12760) derived from phytozome v7.0 (chr-ID scaf fold_8; pos 8241386 to 8241951)
cgcttgctgggtcttttcaatccactaataattctgtatgttttcttcccgtttctttcttttttttttccttttaattgttgctgcatttttattattattactgggagcttgaaagaaatgagatgggatggcctagaatgttagctgggcattttcattttattcctcccacttggttgatctattgatttttgtcttttaaattgacaagtgcttgaattaaataatgttttaagtcaattatccgggcgattaaaaagttaaacaacaagcatcaaatatttttgaggtatatttatgaatttgatcacagaattttcttattatgtaatgattctagcactaaattttgtgttctttcctctgatgatgaagaagaaggagcattgggggttgttgtatgtgctaattctttagaaagaaatgctttgtccctcacgctagattttggtcttggaaaacttttttttttttgccaaaatatcgtcgtgttcatgcacattctcttgaaaatgtggtgaggtatctcttctgaagttttctataccttgatctaattaagg

SEQ ID NO: 61619 - DNA, 213 bp, Populus trichocarpa
  Intron number 3 from transcript POPTR_0010s04820.1 (locus POPTR_0010s04820) derived from phytozome v7.0 (chr-ID scaf fold_10; pos 5985498 to 5985710 reverse strand)
aggaaaataagtccatcagtgaggtctaccaggaggtaatacctgtcgtatcttctcacctcaatactcttccctttgtttgaatgcttcattttctgtttctaccatgtttagttataacttttttttttgtctgtctttgggacctttgaatttcaagcaggattaatcgaactacttctttgcaggtggcttcactttttcgagaccacc

SEQ ID NO: 61620 - DNA, 762 bp, Populus trichocarpa
  Intron number 1 from transcript POPTR_0015s10380.1 (locus POPTR_0015s10380) derived from phytozome v7.0 (chr-ID scaf fold_15; pos 11326032 to 11326793 reverse strand)
tttgttggaatcaaaggcgaaagcgggagatccaggttttgaattggtttgattaataagccttgatttttctctctcgctctagggtgtctgtgtgtatgtccgtcacattgtgttcgtgtcgatgcgtttatttctagcttcgatttcgatctatctagggtttgcgatttcatgggggttttttttgctcaaaggagcttattaggtttttttgagtgagtattttgtattgtttctcaaataaagttccttaatttcttaaaattctctttttgtttgaattttagagagagagagagagagagataataagattggtttcttagtttttttttttaatttttgtttttgggtttttggagggttgcatcagatcagtgaagtgtcggttttgaagctcgtttgttgaagatttacttcagatgaatttaggtttggggacacatgcaattagtgtgtaatttgatgaggatctgttattgctgctcataaataaaggaggactactgtaaattgtagtggaagacttgaaactttcagtacaattgcgagaaaaaggacataaaacaagagtaattatttatttattaaacctgattccttgaagttaaaagaaattgaataaatgtgtgtatggtagaggaattgtgaactggaagcggatcattggcatgaattttttgaaattgaattcagaggaaacataagaagttaaacagctgaagttgatgatatgtgcagttattggaagataatcct

SEQ ID NO: 61621 - DNA, 211 bp, Populus trichocarpa
  Intron number 1 from transcript POPTR_0016s13330.1 (locus POPTR_0016s13330) derived from phytozome v7.0 (chr-ID scaf fold_16; pos 12529640 to 12529850)
tggaggtggcaaccacaccagtgtgaccttcctaggtataaattactatatctctctactatcaacctacaaattaatcaaatagctagtatattactcttctttgcggtgactgataagattcattctgcaggctgtgatgtttggctatggtttttgagttttgtgtggaatgtttttttctttgtgtcatgttaataaggtaggttca

SEQ ID NO: 61622 - DNA, 637 bp, Populus trichocarpa
  Intron number 2 from transcript POPTR_0016s13330.1 (locus POPTR_0016s13330) derived from phytozome v7.0 (chr-ID scaf fold_16; pos 12529998 to 12530634)
gttcattgcacatctacaaagccactgtaagtaaaacatgatagttatataaaatacatgagaaagcgttaacaagagttgagatggccgagttggtctaaggcgccagattaaggttctggtccgaaagggcgtgggttcaaatcccactctcaacaaatcatttttaccttttgttttgatagcccaatcagtttatgggcttgggcggaactcaaaaaagcagtcttcgtgggcttggtctggacttaaaacttttttgttttgggattggggtaggaaaattcttttgttttaaaaaaacaaataaaaatctaaagagtttggttttattatttagcggtctggtttaaattgttttcttagaagtgttataaaatttggcttggcgttaatctagtgagtgcctcgtttatgtgtagcttgcttcggctaggtttttctttgaatattttttttattaaaatgatattaatttaaatttttttaaaaaaacttataattaaggttaactcattaacccgtaaattaacccatcctgatcttaagtgactcgatccccgagtattataattatatttatgagattttgcagatttagctaatgtgattgttattaatgtgattcaggaatata

SEQ ID NO: 61623 - DNA, 726 bp, Populus trichocarpa; identical to SEQ ID NO: 55912
  Intron number 1 from transcript POPTR_0018s11650.1 (locus POPTR_0018s11650) derived from phytozome v7.0 (chr-ID scaf fold_18; pos 12299230 to 12299955)

SEQ ID NO: 61624 - DNA, 591 bp, Populus trichocarpa
  Intron number 1 from transcript POPTR_0002s04380.1 (locus POPTR_0002s04380) derived from phytozome v7.0 (chr-ID scaf fold_2; pos 2731492 to 2732082)
caagagctgtccaagtctccacctgatagggtaccgtttgctcttcttttagctaattttaattacttaatttttggattcagtcagtgcccagtataaattccattggaaaacataaagtttgagtatcgtattagtagcttttaatttgtttccttgttgattaatatggtttttgcagaatatattttgattattatatgctgaaaggaatgaggtttagttccttttatctatattagcttttcatttgttttttgattgattcttatgtgatttttgcaagttgaggtaatgatgttagtatttaatatgaggaaatgatttgcatccaaataataacaacaaggaaaagaaataaagtttgagtctttcattaagtaacccatttgtttatgtttgctgttgatttggtttagggttgattaatgttacttttggaaaataaattagcatttaactcgttatcttaagaatgacatgggaaagcaattgcattagtgacccatttgtctatattggttgtagtttgttcttaaaagtgatttcttttgcaagtagaaatactgggaagctggcggtaactgcaat

SEQ ID NO: 61625 - DNA, 474 bp, Populus trichocarpa
  Intron number 1 from transcript POPTR_0005s08860.1 (locus POPTR_0005s08860) derived from phytozome v7.0 (chr-ID scaf fold_5; pos 6189045 to 6189518)
cttctttccttgcaaagatctagtgcaaatctctggtaagaagatcatacttttaagaagaaaatcatgcaaatctccttttgagtggatttgttttgttttttggcttccccctcctttaactgttaaagaagcaaatatattgtatgagtatactctaggttaggattatcatttaacatccttgtttagtacttgtatagatcgcatattatttattatagaagttaaatattgttaaaatgacaagaagaagggattttgtttaagccatgcatagtaattaggtggtcctttaatccatagaactttgttaatttcacccaacgaaagtaggtatatatatatatatatatatatatatatatatatatatatatatatatatatatatatattcattcaggcagtactctttccctaatgaactagggtctgtgttttaaatggtttccagggcttggggagaggtta

SEQ ID NO: 61626 - DNA, 719 bp, Populus trichocarpa
  Intron number 1 from transcript POPTR_0005s05270.1 (locus POPTR_0005s05270) derived from phytozome v7.0 (chr-ID scaf fold_5; pos 3486010 to 3486728)
aaatccccgctaccaaccctctctctcaatttgaggtctgctttctctaaccctctttaatttttcatttcttttttgtattacatgcttaattctatgtgagtttttattttttggtattttgggtgtttcttctttctcagagcgagggtagaatcatgggttgtggttttttttttgtgtgtttttctctaggctttagctgggttttgggttgttttgcttaaaaattgagattttggttgcttttttgctgttcctgaggtttgcatggtgctttatgtttgtgtctgcgtatacttgtgtgaattgaatttttgtgggtttgggtccttcattgtttttttttcactgttaatgtaattgggtttttggagtttttgtttatatatgttaacttgaaggatattggtattattttttaccaatttatgagaatggagatcgcaattttgggttccagctgaattataagaagaagataagttggaaaagaaaaatgaaagatttaccctttgcatattttttccacggtttggtcagtatgcaaattttacgattctagcttttgtctttttgattagttggaaattgtaatttccttttcttgtcttagctcttgatcattcgtcaatagccgggtgttaaggctgctacttaagtaatcatttggtaaccttgcaggattctcctgtgtttaattacatcaacaatctctc

SEQ ID NO: 61627 - DNA, 899 bp, Populus trichocarpa
  Intron number 1 from transcript POPTR_0004s10660.1 (locus POPTR_0004s10660) derived from phytozome v7.0 (chr-ID scaf fold_4; pos 9177341 to 9178239)
tataaaaaaccaatcttgatttgtttcttgaacaggtatatacatatccttttgttatctttttatttattttttcttatcttgttttgtaatttgttgattttgttttgatttgtagagtttagtttggagtttgagaaagagggagtttttgaaggagattagtttttcaagatttcatataatttattggtaaatgttctgattttgttatctttatctattaactgcatagattcttgttaatagattgattgagattgtgtaattatcttgtgtcttttatttgcaaggatcgtgaatctggtttatgctgcttggaattaattttggttttggacggaattgttttttttttaattgctgataagatttaggaatagagttgcgagttttcttagaatacatcaatcaaatttttattatgatgtcatttatagctatttatccattggtattagggatgctaatttattttatttcgtgaatctgtttaaacctcataatgcaaatggtcttcaggggtttcctttcccttaagccatgattgatcaataccttgtgcccacataaacatggtctgttgaatggatttggttttctaatcgcctacgtgtctgtattttgaatatatgaacacagttgtttgctaatgccctctactttgttttgctccctttttttgatgaattgctctgttgtcctccatgtcttattgctctgttttttttcgaaattaagatttatgtattgcatttggaattctgctgttatgctaatgcttacttatggtttcttctcattctatatgactgtagacctgtttcctttgttgctattttgcaagattgtgtctcgtgctaattataatcctgtgtggttcttgcagacaagactga

SEQ ID NO: 61628 - DNA, 927 bp, Populus trichocarpa
  Intron number 1 from transcript POPTR_0013s04350.1 (locus POPTR_0013s04350) derived from phytozome v7.0 (chr-ID scaf fold_13; pos 2958754 to 2959680)
tgtgatagctgaaagattatcgagttgatttgctggtaatttagtgctttttgttgtagcttttgtctgttcatgctgacatgcaagttagattggcttctctgaatttatatacgcaaatataccagcttagagtgtataatacaagtactctctgttgaaattctcatatttcttgcatgtgtgcagaatttaaggaagtgggtagtcagtccaatcgagaaactttcttgatatcaagtttaaaggttcaaaatttttaggggttaagaacagaaaagaataggaagttgcacgggtagtccatctctctctccctctgccttttatcaaattctttcgtcggttttagctaaaaaatttctccagtttcccttaagactagttcaagatgctttggactcgctgtgctgagccctcgcagtttttgctttgaccagggcatctcaacaatattaccagtgactaggacaaatcccacttcaattaaggatcaaatttagttgaatttggtttctgaccaggtctttaacttcggttctgtattaaataaatttctacgttgttacttgtaaaaatgactgttggggtagaaattgtcatgacttgtgagttttgtggttaccttatttttggttacgagggggttaaaagttaaaacccagcagtcttgtgattaatttaatttttcttcacaatagataatttcaagcattgctctatattttcaaactttgttaacgattacaaggatattttcgtggatcaaccaaaatggttgcagaaagtcgacactgtaagaattaatctgtttggaattattcatttgaagtcatgaattcacatttttgtagatgtatgtgaagatatgaatctcgtagcatagactgacatattttttttgtaacattgtacttcttagcaaga

SEQ ID NO: 61629 - DNA, 794 bp, Populus trichocarpa
  Intron number 1 from transcript POPTR_0017s12450.1 (locus POPTR_0017s12450) derived from phytozome v7.0 (chr-ID scaf fold_17; pos 12620080 to 12620873 reverse strand)
agcatttctacgttggtgattggcttcgtatgtaaatttctctctttctttctttctcgccagcgtgtaattccatttttcttcctaccactttccttttcaaacatgttagatgtccgaggattatctgtaaggggttcctcccattgaattaaacaaatgattgagattgtttttgacttgaattggatgtaaattggagatttctctgtctttttcatgagataggaaggggtatttgagccaatgaagtcatgaagattgggaattaagatcattaattcactcaatttgttcaactctaatccatctatactatcaaacagatattagaaagttggtgattagatagaattaaaattttggaactttcattttatcaggaacttcgagaattttgataacagtaataattgatgttgaatcagaaaattgacctagcttttcattttctctgttttgctgtttatgttaattttctaaatagaaatgctgtctggttactaaatacaaaagcttgcctgtgaacaaaattttggaactgtatctgattttttaactagcaatcattggtggtatcaccaacccaaccctgatgaagaaaaaaagttttcaactagctggccaacgtgtagcatcaaattggttcatacggaagcgtttactaaggttgtgttaatttgataattgggatgtgctggtgttttctcaagatgttgctcaaaacaaggtaaaaaacatggatttttcttttttccttctttcagtttttgtgtttgacaagcactcctaca

SEQ ID NO: 61630 - DNA, 493 bp, Populus trichocarpa
  Intron number 2 from transcript POPTR_0005s03010.1 (locus POPTR_0005s03010) derived from phytozome v7.0 (chr-ID scaf fold_5; pos 1974434 to 1974926 reverse strand)
ttcagattccagcccttttctctcttcgaccacaggttagaagaagtagcttactttgtttaattaatatttctctgaaattgatttttttaaaaaaattcagttgaatccgtagaagatacgaaattcgatacaggttcgtgtttttataaaaaatatatattagaaattatttgtttaagtaatgattatcagtttatttttttatattttttgcttctgcttagacttagaaattgtaattttgaattatttaattttatttgttattgaatttaatttttcatttatcttttttaattctagggtttctaaaatttttaaagtcgtttttaatcaagagaaaaaaaaagagttaaattgagtcaaattcggtgctgtagaactgtagacatttgtattttatattgaaattgttttgactgaacaaggttattttgattttaatgaattttcaggagaaactattaattcggaggaggagagcgtatca

SEQ ID NO: 61631 - DNA, 867 bp, Populus trichocarpa
  Intron number 1 from transcript POPTR_0003s09280.1 (locus POPTR_0003s09280) derived from phytozome v7.0 (chr-ID scaf fold_3; pos 10580698 to 10581564 reverse strand)
cttcctcgtaccctcgaagatcttcaaatcctcaggttttctttctctttatttttcattttaattgatatctacctttgctgttgcctggaattgttttaacattttcatatttttttagggttaaaaagaaaattgctttacattttaaattatttaatttcatttgttttgttctactcattgcatttggggtctgaattctgaaattacaggcagagctgactgtgttttaccaatcgtgttcttgccataaaaacaaaaacaaaagcaaaatcaagatccatgctttttaagtgaaatggggatttttccccacttgcctgtatcaaggtattgctttgcttggcttgatatgaaaaaggggtataattcgtcatgtggatacaacccaattggattattcaaatcaggatctgtggaaggttcattacattcagaccttcatatgcaggctgtctacttatgaacttctgttgctttgcatgttgggccaaagcttagaatttgtataatatctattatataggaacttgagctggtgagaagtattgttggattttgtttgtaatgttcttgacatagctgttcacttggggtaaatgagtctttgaaacctcaacctctgtggtacatctcatgcgatctaaaggcgccaaggcttggttaaaatattactggaaatctgcactggctctgtcattttttcttaccgaaagataatatttatatttcctttgacttgctcatcgcatttacttttcttcaaattactggaattccatgtttcctggccttatgttaatagtatgatgtggatgctattttgcagggatcaccttgagacctatacaattgactacaccg

SEQ ID NO: 61632 - DNA, 877 bp, Populus trichocarpa
  Intron number 1 from transcript POPTR_0009s11300.1 (locus POPTR_0009s11300) derived from phytozome v7.0 (chr-ID scaf fold_9; pos 9445605 to 9446481 reverse strand)
cctgcaggactagagtctccttggcagttctttaggtataaatcatcacccttttgtttctcatttatgttaaagagatgttcaattatggtattgctagctgtctgttaagcatacagattgacattgccagattctcttcttctatggttcttgaaaatgaatatgctttggaaaactgaagaaagagaggcgtttttcatgcattttggtttcggttatgcattcccagactcagatcgaatgttttttttaacgtctcttaggcacacgatgataacttgaagtgagctttttcatgtaacgaattggttttttttttttattattcacatatgcccctttgcttgttgagaattgtgctgttataattccaggtccatggtaaaagggacaaaatttgaaggaaaaaaaaaaaaagcttaaaaatcatgcatgaaccctctaactaagggcgatttgatcatatcaaatcatgtaattttaaattgtcagctaagggcgattgttttgtgacaaaattgagtggaggatatcaaatcgcctttaattgcaagaaaaagggtcaatttttttggacctaaataaatagagggtttgatagatctaactttgaaaagtagggggggcatttgatcaattataaaataataaaaatgattggcccatgcaggtttcgaacctgcgaccttcgcgttattagcacgacgctctaaccaactgagctaataggccatttgatatcgtgtttacttcttataaaattggactacaaataactctgtcctgtgaagaacatattcaatcattttgaatttgatgaatttttttgttgatggtgtgaagtgattctgctctcaagaaccctgaaaacaaa

SEQ ID NO: 61633 - DNA, 839 bp, Populus trichocarpa
  Intron number 1 from transcript POPTR_0019s12350.1 (locus POPTR_0019s12350) derived from phytozome v7.0 (chr-ID scaf fold_19; pos 13393905 to 13394743 reverse strand)
agactggacgtaagatttctctccttatctgtcgtctgaagttttgtcgatatttttagatataattataatttatacctcgtagtttaaccgaactaactgacacctttataattaaagttttcctttgtaattatttttattttatttcttattattttctatttttatttattttatgtccctttttttctggatttttctatcaaatatgtttctatcttttcttttctgtattaacattttaaaaactaaaaaaatattaaaataaataactatttaaataatgatgttcaaggatgtacgtataaaatatattggggaagtgagattttggtgaactagtaacggagctacgagtagtgattaacgatatcctaaaactcatatatttcgaagattcaatttttcctttttacactaggatttgatttattttttttttaattctgatatctggaaacttattaaaccctaactaattcggttgagtcggatcagcccaataaaaggtaacacttttacaataataatgtattttattcacaaaactcaaactcaaagttttgctcgaagataataaatgtcgaatcatttaaattaatcaccgttgatacactgaaacttgatttaacatgataaatcttattaaaccatatacttctatataataaattaaaatttatgagaaaagttaatttaactttgtatagcaaatccatagcgaaggtaacaattctagggtcagatacaactggtagtaaacaagttaatttctattagttagtaattaacaaatagaatattttctgcagatttttgttccatagaagagatca

SEQ ID NO: 61634 - DNA, 906 bp, Populus trichocarpa
  Intron number 1 from transcript POPTR_0016s14090.1 (locus POPTR_0016s14090) derived from phytozome v7.0 (chr-ID scaf fold_16; pos 13324413 to 13325318)
aagaggaggaatcagtttcctctctgcttgttaaggtaaataaactctctcgatttctattatatatcttgtttggttcctggtaatccgtatttctgtttccaaacaatctttttgcgtttaattttcgtctatttctttaatttttattagatatttttcgatttctttttcttcaattaatatttatttatttatttgatgaaaaatctgaattaatccatttttgacttaattatgcttatttttaattttaattttcttgtttgagttctgattatcggttattgtcaggttaaaacaagccaattattattaaatttccaacctaaccctagctttgaagcatctaatctacagttaattatccagcaaaagatgcaaattaattaattgtattaaagaagaaacagatttttagctaattgttaatcgcatcgatgtgaggggcaagtgacttcattgattagggcattgctatgtcgtgttgttgttgactctgtcaaagtgttgtgtttagatgtctgatggtgactttaaatgctcgaagttgttgcgaaggagaatgcttggggttgtgaggattttcgtttagtgaataggttatgtggagctgtgttcatgtaatgcttgatgttgggctatgataatagagataattatgagttttaattggatggttagattgtggaagaaggaatatcattttcccggggaactgtaaatgtatatggataggatgtatttacttgccatgtaaaactcacttctcagcaattgtcatgaatccagattttaagtaattatgttcttctgttttgtttccattgattttgtttgcatatttgtttgtaaatggctgggaagaatttgtttggttttaacttgatgtgagttcagggtatt

SEQ ID NO: 61635 - DNA, 854 bp, Populus trichocarpa
  Intron number 2 from transcript POPTR_0016s14090.1 (locus POPTR_0016s14090) derived from phytozome v7.0 (chr-ID scaf fold_16; pos 13325431 to 13326284)
aaatatcaggttatctattaacccttttcatatactaattatcagtctgcaatttcaggcctatagagccgttgcaattgcatgttttaaatttatgctggtgcacgcggcttcttgtattgcttgcccaggaaaattgattaaagttatgttttgtttaatcagatgttatattatagcccagagatatctgaacttattatgtaacagttttattggttaagccctttagcagcttcatgttaacactctgcagagcacgccaatggaacatatttaatttggtgatgtcctgtcaccgatccacttgcattttcgctgcttatgttgtgtttttcttcatctttttttttttttccttttttttttgtcgatgtttgggttagtggggtggggtttagattgtatattgcgagttttagattgtatattgcactgcctcagaaagacatgatcaatgttactgtctcactgtctccaaagtgggggaaaaacacttggggtgatgggtgctggcagtaattatagccattttttggctggaggctgacaggtccctcgtgaaacataagcacaaaatcatctgttactttatctaaatgtgatcactttttgggaccttattctcaatcatatctagaaacaaaattgtctcatctttgaaatctgatattttccaaagcatgtccttgtatgatctctcccatttaaacatgcttcaaatatgtggcttccaatcagctgtcctttctgaatggaaaggaaatttgctttttctaggattgttgatatgaagtttaattctgaaaaatgttcgaaataatgataatttgcttctttgttcagttgaaata

SEQ ID NO: 61636 - DNA, 346 bp, Populus trichocarpa
  Intron number 1 from transcript POPTR_0003s10580.1 (locus POPTR_0003s10580) derived from phytozome v7.0 (chr-ID scaf fold_3; pos 11519591 to 11519936 reverse strand)
cttgtggatctcgcgatagtaccagtggtgaccgtgtcagtcgctctatcattgctccatctttgacttatttggttgtcttacttttagttttctcaattttaatgcagtttagttcttctgtttattcactcactcgtatgcaatgtcaatggaaaatgcatgttttcttttctcgaatcgtggaaaatgtgttaacgtaactttttaggacttgtgtttattaagtatcatcattgttattgttatgatgctatcattgatttgtaagaatgatgtgagagtttattggttataggtttttgaaggactaaagttgttttacccatgctcttttaggtttgtg

SEQ ID NO: 61637 - DNA, 733 bp, Populus trichocarpa
  Intron number 1 from transcript POPTR_0015s14480.1 (locus POPTR_0015s14480) derived from phytozome v7.0 (chr-ID scaf fold_15; pos 14054043 to 14054775 reverse strand)
gccaatttgcaaggttagtttgtttattttgtggaaatagttgggctttactatgtttttagctagtttttctttgagaaagcctccttggttactctcttgtttgaaaaaatttgaaagttatttgttatgttctgctcctaactgccattatctctttgttatattcttttctattactatctgtctctgtccatgacatagattttctttccctttaactgaatatatgcagtttataagtttttgaaggtgtttcaagaaacataaaagatagataataatgcctctcaatttttcctcatacagctatccttgtcttgaactaattatgaaatgccccatttcttggaaatcaaaaccatgtgaacttaagattcaattttttttctgttcaaatttctgatttagagcttatttactagaaaagttccatttttttatttcccttttcctatgactccaaaagcttggaactctttttacatttatgcttctgcaagttcactcatatgagttcatgaaaagcttgaacatattacttgattgtgtgttggcttctgcaactatactaacatctttcttctagcaaaatatcaaaacttggtgatcattcttatgttgtcttatattggataatagtcttttgtcttatcaactgtgtctttgcttatcaattctttgtgttgtctttgtagttttgcagctttgttataaccagttcacaggaagt

SEQ ID NO: 61638 - DNA, 745 bp, Populus trichocarpa
  Intron number 1 from transcript POPTR_0009s00640.1 (locus POPTR_0009s00640) derived from phytozome v7.0 (chr-ID scaf fold_9; pos 680198 to 680942 reverse strand)
gtcttttggcaagtctgttacgtaaagagggtgaggtagataatagtgagaataatatgggcaatgacaactttcattcatcatgcattcattatgtttttcaatacccttctctgttacagctgtgtcatatatatacacagcattccttctagattactggctataactgattccttttattctggcatgagagcacacacaagtcgtgtgcttgaagtcaataatttagaatagtgccaattaaatgaaacggagcgtttaacaatgattataacgactttttaacaattgaaatctacccgcctttccttggcttaagttgtgcatgtaacaggtagcatgtgtaactcgtttgttgggcttaaggttttttattttttatgtatatatggtttggtactataagtatccatcaatttggatatttgttgattgttgcgttgtttccttaattgtttgatttgataactgattcgatttctattgttttttttttcctttctatcatggcttgaaccaagatgattgttggagtactgtgatcattcaaggtttaatgttcgtaaccagttgaatttcctagattcaagtgagatgggatgttttaggattgggtaatttttttgtttttgcatttagaataattatttgtgtttccagggaatggaagagaccaagaaggctgagacacatttgacatctgctgctgctttcgtggaagggggagtccaggaagcttgtg

SEQ ID NO: 61639 - DNA, 580 bp, Populus trichocarpa
  Intron number 2 from transcript POPTR_0014s18500.1 (locus POPTR_0014s18500) derived from phytozome v7.0 (chr-ID scaf fold_14; pos 15713905 to 15714484 reverse strand)
tcgcgttgccaaagcgcttcgagaaggaaccaaaggttgttttcccttacaaattctaattttgctttcacttgttgtttgtttaataatcactcctctctgaatcagggacgcaagtgcccaactgttttctcttcgtatatgaacttggataggaaacttccatacttgcattccagccctaaacaatatttgtcattacatggttgtgttttgcttttggcctatagtgtctttgcttggttctttgcctctctttttttaacctcctggcctgtgcaatgaccgaattatcttttctcaatgagtttgaggcttccctttgaggcattctttcatgtggttcagtgtaagttaccaaagctgccttgtaggctctaaacggctcagagtatagtgtaaaacatcttttgaaattgtgtaatgtttctgatacagaatgaagagaaagaaatgagtttatggttcaaatatcatttgatttataaagggaagtttgactctgctaagtactcactgtggcaaatcatttatcaatttttcaggttataaacaaagggtaaaggaaattgtgcaaggt

SEQ ID NO: 61640 - DNA, 970 bp, Populus trichocarpa
  Intron number 2 from transcript POPTR_0003s09030.1 (locus POPTR_0003s09030) derived from phytozome v7.0 (chr-ID scaf fold_3; pos 10360519 to 10361488)
tttatttgcatccttttctcgtcaaatcaagtttggtatgattcttaatattattcagttttcggagcgtaactgaatcatttgtggaattgacaaattcatttgttgcatttataataatagatggcatactttcgtttttcactttgatggtaatgcttacccatcacctcccttatttatggattgtgaagaaactgcttttgggtttttgttttcttcttcactctatttcttagagctgattcaatccttgagctcaagttaatgttgatttgtggtcggaaatgactggggaatgaaaaattgagaagcaaatacatatatttaatgggaaatcgcattcctcatatttgatgtgttgcagtgctactatgagtatttgatcgtatcttttactattgaattacattgttcaaaattgtatatggacttggtaagagaatccagtggttggctcggattacaaattgtctctaccaagtagaagataaatgactcattttcaggggcgcttgaaatgaaaattgaaagaagagagttgtgggagctcatacttgtgtcctctttcgttgtcctggatttagaacacgtgcacctgaatgtagttagaaacatcagtagttggtgaggatattttttactagtttttgttttcacgatgctatttgttctacaaacctggaatagtccgccctccacattttgcctgacaacttgtatttctcttctgcattttgtgaaaaatttgtctgttaacctgcaaagaaacaatgaaggatgtagcatggcatctgttttgcacttcagctatattttgcctgaatatttatgtggaaatttaataagcaaacaatacttccattgctgttgtttcccttggcttcaaatcaaacattatgaaagtaattcaagtctttcccttttatcccttgaataactcgaattcatatttccagctatcttgcag

SEQ ID NO: 61641 - DNA, 975 bp, Populus trichocarpa
  Intron number 1 from transcript POPTR_0008s12070.1 (locus POPTR_0008s12070) derived from phytozome v7.0 (chr-ID scaf fold_8; pos 7798108 to 7799082 reverse strand)
ccaagacactttaatattcgcacggtgtgtttaacagcttgctacacacacaaacttaaaaacaaagtctgatttttcagtttcagttatttctcactttaattttatatacatcgaattgaacagtaaattgcatcatcagcttaatcatctagtaggtgattcagtggtaagagtttagaactaagaggtttgctcccctgtggtatcaggttcgagccctgtgattactaatataatggcaactaagagacttacatagttgttaatttcagggctcataggattaatcgaggtgcgcgtaagctggcccgaacacccatgttaataaaaaaaaatttgatttctcagtttcattctaatgttattttaatttcttcaatgtagttttaagttgttttcttataaacacatccatgtggaaggataagtggccgtgggaacccaaattttttaaaagttgacattttagtccatatacaatctttaaaatgttttcaattacacccttgtattataggaaatacatgtatatcatcttcaaatcacgtatcacctatgtggctttccctttgttatttactttcaagttcacctaatttctttcatgcaaattatcaagcacacaaatgtgtgtgcatatataactctagcccgaacatgttagattaagcttacaaggcaaacaaagaaaagacaacaatatttaatcttttttgtattgttaccctgtccgttgtccggtcaaacaaagtcaatgcaggtgcattctaggtgatttattaattagtcgtgattaatagaaaacgtggcttgcaaaaaacccatgcacattgtcatcattgtgcttctgaattactcacaacagtccatgaaactttgggcagtgacctccaccttcaactcggaacatggagtgatcaaattgtctgctagtgctataaaaatacaagctcgtattaatttatagggcat

SEQ ID NO: 61642 - DNA, 609 bp, Populus trichocarpa
  Intron number 1 from transcript POPTR_0007s02940.1 (locus POPTR_0007s02940) derived from phytozome v7.0 (chr-ID scaf fold_7; pos 1719874 to 1720482 reverse strand)
cagactaacagctgagtggagtattgaggcacaccgtaaaaggggtgatgcaaatcaaattaatacttcttgaattttccatcctggactgcaagatggtgcagtcagtattccaaagagatctccgcgacatctcatgaagctctgacaaaaaagtaacacgttaaagatgctatttttttgtcaattttcttgccattgactatctacaactaaaatgaaccttgtgctcaccataatatgtaaactaactgtggttcttctgtctcatttagttggtggaggaacgttggtctcttaaccaagttgaacttttccagatcagacagataaatggaatgcttctactgggcatgcagttagagtggtatatatttgaacgtcaatatagtaattaatttccggcaagtgctgacaaaagtagcatcatttgtaaccattatgtatgatgtttattgtactccacatgagttggagctatttacacatactgttgaaaggtttgtgctatgaaagaattccctccttgaccattacgtttgatcctgtcgttaaattgctgaatcatagagtttttgctcttgttaattggttactatctcaaatgag

SEQ ID NO: 61643 - DNA, 759 bp, Populus trichocarpa
  Intron number 1 from transcript POPTR_0001s35510.2 (locus POPTR_0001s35510) derived from phytozome v7.0 (chr-ID scaf fold_1; pos 33853805 to 33854563 reverse strand)
tttgtggccaggtaatttattcttcttattcttccattaaagttttgatttttttttcatttggagtaatggatgtcttgttgtttttagataatacgctaaatttgtaatcatttatgactcttaaacttttgaagttggctgctttctttttgatatttgaattgttgattttaagattttgaatttgtttttgttctttataaaaaaaggaattccccttctctccttcaatcctctttcagagatttgtggtttcttatactttggggtgaaaatgcgttggaatgaatatcagagttagtgattttgggttttctttttacttcatttttttttcctgtataattggaagtgaaggtacgttgagcaatggatacgaaaaataatgatgtgggttctaatcaaaaggttttagattttgtaacttttggattcatagagggtaatatttggctgttttgttacttttagtaacagtgacaatttattttttgtttttgtttttttgacattcaatgaactggttctaattctctatgcacctgcaatctgttaaacaacaaccacaggttcaaatgaagttcttgcgcttgaactgccttttttaatctatggttgttgtttttgtgttcttgctgtggataatgttctactatcacaggcatagtgggtagatgttgctatttattctgcaaaatcttgacatcttagttttacctagaaagttttgttttaatttgcagcagtcgtctcgag

SEQ ID NO: 61644 - DNA, 772 bp, Populus trichocarpa
  Intron number 1 from transcript POPTR_0010s03970.1 (locus POPTR_0010s03970) derived from phytozome v7.0 (chr-ID scaf fold_10; pos 4769871 to 4770642 reverse strand)
acaatcaggtcagtgtgtgtgtgttttcttttatttattattattattttttttgccatttattggaaatgaatttaaacatgttgttatgtttgttgatttatttagcagtaaatttgaataattgatttgtgttttccttgaacttggtttggaaaaaatggcaatgctattagcttagcttataaattcagtctaatgttgcaagtctacaactattttggtaagtttagatgtttcaaaatcaatgtaataattttcaccataataaatacatgaaaaagaaaaaaaaaggcaatatagaaggtataaattcactgcttctgtctgaaaactcatttggtttgcccaaggctatggcttgcgattttgtgttctaaacccaacatagaacttattggcagtgttttctatgcttgtgattagtactgattcttaaacttttctttcatctaataagactttgcacagtccaaccttgtttcctacagcaagataacatggaaagtatgttgaccaacacataatattgcgttactcaaaatatcactggagactacattcatccattgccatttcatgtactggaagtttggaaatgttactgatttctaatctgggccagcaacctttgtgatgcatttaggacaagcctatgttgttgtttttcaatgtttattcttatctacatagtgtgcttaaagttgttttgagtttggattttgatgaaatgctcttgtttaggattttattgggattttcctttccgatc

SEQ ID NO: 61645 - DNA, 697 bp, Populus trichocarpa
  Intron number 2 from transcript POPTR_0008s06490.1 (locus POPTR_0008s06490) derived from phytozome v7.0 (chr-ID scaf fold_8; pos 3859642 to 3860338 reverse strand)
catcgtattatatcctttttaatcagtgattttattatactttagtttgatttttttttatttgtgtttggtggcttacaattgtgtggaatggagttgtgaaattcagtaatttatgtttctcaggtttgatagttgaaaaaattggtgttttctttttattgttcaatgaaataaattctttgctgatttatgctctccagtgcctctgtctggtctagttggggttgagtttttgttaattttttaaacgagggtggcgtgaattgcgagatttacaatctcaaactcctttcttaaatgaaaattaaacaataacggggtgaattattggttagcatattcttaatgtttgtgaaagtggatgttttaaactaaatttcaatcttattgataatcctcccaccatcacttttctatgaatctcagccattggatttttgggatccactcattcaatggatgggatttttcagaaagagatttcgagaagcaccgttttgtgaaaataagcattaccctcgtatgcctatagggtgtatcttttactactgttccctgaaaatcactggtttaaaagttcttattttaatttttatggcaaacaaatgcgtggttgtgtttgaaaggaattgattggtaacatgttaaaatctgatttgtttaatccttgaccctggcaagtatatagtcttca

SEQ ID NO: 61646 - DNA, 792 bp, Populus trichocarpa
  Intron number 2 from transcript POPTR_0011s08720.2 (locus POPTR_0011s08720) derived from phytozome v7.0 (chr-ID scaf fold_11; pos 10719327 to 10720118 reverse strand)
ggaattcttttggtactattgctgcactcattcaggtatgcctaataaacttgtttttgtttttattttagaagagagaattatttcaagatttggctccattgttgtggaattcttttggtacaattgctgcattgttacaggtatgccatttgaagttgatactttaatatcagttccttgttaaattatctcccctcttgctcatgttagcatgaagtcatccatgttgcgttgtgatatattttatcttgtagaatttcctttataacttcgatatatatatatatagaaaagctcatactagtttcccttgatcctaatgcattctgctaacagaaaaagaaataaacatagatcatattgaggacatagtgtgggaattaaaatgttttgtactctaaggacaaaagggatatgcctgttacttctctatgatctctttaaattgggctgaattgatgatgttttctttcataccgttcatgtttgagttaatatttattgtgtgtttattttggagctccttttattccaacttgtcaaccgaacatatgttactggtttgcatgattttttcgtgattttggttggagcttaataagcaaaataaacaccactggtgttgtgttgttctcatgtcctctacatgccttttagttttccagagattgtagataagtgtaaaaattttcaattctcaaagtgcttgatgtatgttatttccatgatttttgagttttcctcttatttgcaggagattgtttcgatatacccagttttatcaccacc

SEQ ID NO: 61647 - DNA, 815 bp, Populus trichocarpa
  Intron number 1 from transcript POPTR_0011s08720.2 (locus POPTR_0011s08720) derived from phytozome v7.0 (chr-ID scaf fold_11; pos 10720121 to 10720935 reverse strand)
atcttcgtgaaaacgcccttcttgagctctctaaggtaacgacaaaattaccacttactttttagaaaagaaattgagaattgagaaattaggggttttggttgaaaccctaataataatgaggggtctctcgctatattttattttatttgtttttgtttacaagaagacgaatagataatttcgtgagaattattgttttgtaaaacatctttaataaattacgatagacagttgaatgtatgattattggcttaataaatgggaaggaaatgtatgattattggcttaaaacagatccaccacctgctgggcaccacccattttggcagttgaggaagaaaaaggctgccctgaactagtgaaacttagaattcaaggcatattcaaacttttcttgcaataaaacattgtatacttaaacacgaggtattttttcgttttaaatcggaggccattaaagtcgtaaactggctgtcaaaacgcttcttcgattttgcatgcaaaggaatctttaccttggctggttgcatacatgtgagggggagaaactatttcattttcattgtaaatcagttctctttatatgcttaaacatgaagagatacatgcacgcatgcacagctggacatagtttcatgtgcaatagctgcatgtaatcaacttgttatatgtggaccttgccaaattttttccttttaagtgattgtgccatttagctgttgaacattcattttctgccatcataaaccagtgtctacctttgctttcattttttagaacaaggatttatttcaagatttggctcctttcgt

SEQ ID NO: 61648 - DNA, 618 bp, Populus trichocarpa
  Intron number 2 from transcript POPTR_0013s04220.1 (locus POPTR_0013s04220) derived from phytozome v7.0 (chr-ID scaf fold_13; pos 2810253 to 2810870)
tctccacgtcctgaagaacttccagttgtctgcaggtaacatttcttttttttttaatttaaggtggagtcagtaatcagataccctgctatgaagttttagagtaacactcttattcataattagtagttagtagaatacttaatactttttgacacaagtgattcattgcgatgtaacgttctgaaccttccaaacaaatcaaaggagagaagacgggcatttcttttgcagaaatctcttggaaaaatcaagttcttactcctttcaccaagaactcctgaaacatcatacttgcatttaaagaaactgctgcatcataagcaactccaactgaatggttgaaagggagagcctataagatgccaattatcccaccaaaagaaaaaattgatcaaactccaagttaattcgtagtatatcctttgtaggctctgtgattgctataaaatgcatgaattctgataaaagtaacatataagagcattttgttttcttaccacagttaaacacactaaatagaaagatatcttgggatgcatgatgttgggatacagttctgaactagtttcacatgttgcagggagacaacaatcaagtattcggcatatataaggg

SEQ ID NO: 61649 - DNA, 749 bp, Populus trichocarpa
  Intron number 1 from transcript POPTR_0010s06360.1 (locus POPTR_0010s06360) derived from phytozome v7.0 (chr-ID scaf fold_10; pos 7739879 to 7740627 reverse strand)
gagatacttccaggtactcattttgtttcttttttatcaaaaaaaaaaaattctataaagattgagtttgcttgttaactaagcatcgtgtgcaaatgggtatgttttgaattcatttaataattatattgtttatgcattggtttgttgcttgagagtatgccagctctgcattggaataagggatgtggtattgttaaattgctgaagaggtttgcaagttttacaggatacagtggtcttattgtaacatcattaaaagatcttctttcattcaattgtacatagctccatgatacaatgtagacctatttttatactggagaatattgtagaatgtggatctgattttatcgacgagggaaaaaattatggggtattagatggatctggtgactgtactacttctgtacctgaaatacatgtgaactgtctgagtgtctttggggccttggtgtttttggcagaattttcccaagaatcaaaaactcttgatcatgcttaacatatcattgttgttgtaagaagagtttctagaagctacttgatcattgtttgctagacgaatccatcctgatatctaatataagttgttcactattgtgctcgttcagcaaaatcacactggctagacaatactaattatcaccaaatatcattttggtcgctcaaaattttttcaatggctgtccttttccttctgttttaatgaagcagtctcccctgactttgttttggtaccagaacag

SEQ ID NO: 61650 - DNA, 392 bp, Populus trichocarpa
  Intron number 1 from transcript POPTR_0007s14200.1 (locus POPTR_0007s14200) derived from phytozome v7.0 (chr-ID scaf fold_7; pos 14052130 to 14052521)
gctttggaaggtgagctcttctcattttcctgggaatttctctttttgtaattctgtttctttggttgtggagacaatgaaggtgagaaacgaatgatgatagctttattcggttcgggcttttgcctttccttaccaaaaagcaagcttttattctctatctctccctccctgcctttcttttcttcttccccgtctgttttcacaggaaccaaacgaaaggggtcaaaggtttttgttttcttttttaaatttaatgttcttgtatgttggcttttccatttccttctgtttcttattagttacaaagacagggttcctcttctgaaaagttgtcgtttcatgttgttgcatataatgagccagagagtgaaaccgaagaaagcccagaa

SEQ ID NO: 61651 - DNA, 309 bp, Populus trichocarpa
  Intron number 2 from transcript POPTR_0011s07740.1 (locus POPTR_0011s07740) derived from phytozome v7.0 (chr-ID scaf fold_11; pos 8548635 to 8548943 reverse strand)
acagctcaaaacaagcaaaggtattgaatcatccaaagttaatctgctgtaaatatattttgctccttatttatattttcataatgaattcagattccttactctattgaggtttattgtaatctggccattcaattctttaattgtaaacaactgctgattcaagattatttcaaggcagatatgttcattgttggaattgttgttgttaggatgatggcaaagaagttttttcttttttgatctattagatgttaccacatctgttcctgcaatctgaacaggggtcttcaacttctgaaaaatcaa

SEQ ID NO: 61652 - DNA, 673 bp, Populus trichocarpa
  Intron number 1 from transcript POPTR_0011s07740.1 (locus POPTR_0011s07740) derived from phytozome v7.0 (chr-ID scaf fold_11; pos 8549033 to 8549705 reverse strand)
tgactgcccatttccatacagtactggcttctcaggtatgccttacatgccaatattttatgtttctgttttctctttctgaaacaactcttctttgggctttgacttttagattgaccaatgtgatttgacaattccatttgttgacaatgaaaaatggggtgaaatctggatgttgtagtttctgttgaattcatttgtctcaatcagatttgttttgaatctagttgttgcttaatgtgattaagtattaaaaattaatgagttttgttgttgaatagagggattgtttctgggattctacttctttgttggttgggagagaagaggaattgaatgtttaatgcaagctgatgagatgaactaagctataatattttggaaatctgcagttagtttccatgatcaattggttgtttaactatatgaactcaaatttccttttgagaggtagaacagtcagtcagatgctaacattttcaatactgcagtattttatacaattttgtttcctttattgttttttatggctttgtatgtctcccagttcagtttcactcatgactgtttatttggttaaccaagaaatggaagaaatggatgttttgaatgctatgtaacttttgcaaaatgtacaaaatgctgatgctgtttatattttaccgccaggttt

SEQ ID NO: 61653 - DNA, 884 bp, Populus trichocarpa
  Intron number 1 from transcript POPTR_0016s03540.1 (locus POPTR_0016s03540) derived from phytozome v7.0 (chr-ID scaf fold_16; pos 1895893 to 1896776)
ctggctcttcgtcgagcttgcaatcctctcaagtaactctctctttctctctctaactttgttatttatttagttgttatttgaagaattatctatcacaattgatatttgagtatgggggagaaatgggtttgttttacttattcattttgtcctgtaaaggtttgatcttcttggttactgtaaaagcgtttttttttccattgcctttttaagtaatgagaagggaaaaggaaggagagtaagattttagtttttaatggccttaatgttaatgaggtacttagaaggaagaagaatgaaacccctttgacttaatttagccggttgttagattagttgtagttaaacagttttgtttcctaggtggtttctgggattttgtaatttcaatgagtgaaagctgtgaaatagggttattctatatagttagttttgtaaacgaaccccatttgtgtatgatttccagactgagaaaagagatggtgaaaattaccacaagagttaagatatggtatagatcatatgaagaatgaatctgtacaggttgcatcgggactttaatgttctcgagacttacaggaatggaggattgcgggctcaactgcgaccatcacccccacagtcagaacacaaatatccgatctctgtccataacagtcccattctccgtgcttgctgtcctgttttcatgagaagcttacatctgcatttcttgtagtagaaagaagtttcatttaaactatttttctgctctggtggttttccattgattgcatcctttaggcagttttaatttttcccttccagatatttttgagtgataatcttttgttgttctgttaccaggtttcgtggattcagtgttggaacttcccgtgcct

SEQ ID NO: 61654 - DNA, 506 bp, Populus trichocarpa
  Intron number 2 from transcript POPTR_0008s06400.1 (locus POPTR_0008s06400) derived from phytozome v7.0 (chr-ID scaf fold_8; pos 3799394 to 3799899 reverse strand)
gcttcaagtgttttcactgcaaaggcacgttaaaggtgcttataccgtcttaatatttgccgtaccctattttcttctcctgttctgttaatccagtcaagaatgtagctggcaatgcttaaatttgcaactgttagggttgtcgttcacttgttagacatggcatcaaagacaaatttacccaagtggttcgtcttagctgttaggtaatggattgtttaacaaattgacctgttaaatatgttttccttcaattggagtgtatgataagcagcatttgttaggactctttcatataaaaaccagtagtatattagagagtgattttagggataatcgctcgtgatcaacagatgattttatatgtattttcccggattttattagagggaaatatccgcagtatgttcccagattttaatggatggctagtagattatgtgtttttggtttgtgctgattagattgtgcaatttatgtttttccagctaagcaattattcatca

SEQ ID NO: 61655 - DNA, 565 bp, Populus trichocarpa
  Intron number 2 from transcript POPTR_0001s10090.1 (locus POPTR_0001s10090) derived from phytozome v7.0 (chr-ID scaf fold_1; pos 7818494 to 7819058 reverse strand)
ttggtctctgcttttcttctggggtgttcagagaggtttgcttaaatttttgaagtgtactgtcccatttggttagcatttcagaaaaaaaatatgttctgtttgagatcaaattcattgcttttactgagtaatttttatttattgactgaataatttataatagttacagcactagaattgtcttcttatgttatttttctcatcataagagtccctgatatattcctagcctgatggatgtaaagactctttattgaatttgggagtatttgcattcatgggctctgatgttgattcttattaccttcttagtgctgtatttcacgatgtctgcaaaagtacctccgaagcaacttgttttgctttagtttctttcttttttcttttcacttttgttttgttttagtgggagttaattgttgcaagcttcaatagatacaaacatttacttaatctcatgagatgatgttgaatctggttgcatttactttttggtaatgctttcatgtattttttctaaccataggacttgtgaaacaggaaggttgactagcatactgtt

SEQ ID NO: 61656 - DNA, 836 bp, Populus trichocarpa
  Intron number 1 from transcript POPTR_0001s10090.1 (locus POPTR_0001s10090) derived from phytozome v7.0 (chr-ID scaf fold_1; pos 7819052 to 7819887 reverse strand)
acacctgattccgtcgattccaatcaaatctcgaggtacttacagttaacatcttaaatttggattttgttttttcgaatcggaattcttgtgattcacggcctgtctggttgctgagaaactgaaggaaagcatgaagaatcagagggttttttttgcttcttaattagttgggctgagaagttcttgcttcagatagttaaatagttgagctttatcggttttggctttgttttcagttttttggattttttaagcagtcaaacggggtagaattttgatttcttttatcatgtcccatgtttttttagtgtgtttagcaaagctgcttaaaacttgtagtaaatttttgttttttattggtttgcttgattggcaatcaaggaagactgataagccttttttggcttaaactgctaaagccctttctctgtttcattcttagctttatagatctcagttcgaatatttgatttttgttatgttttcctccgtttatgtgattaacttttgtttttttgtttttttttaattgagattctggatagataatcagtgagtgtgctccatttgaattatggcaagaaccaatgtgtctggtttcgttttgtgaaagatgtttggattcttttaatggattatatttgaactgatatgatgtttccgtaataattgatgtttctttctcttcttattctcaagaataattattaaggtttgacctgctgtcaaccttgcagcttttttatacttgttcattgttgattatcttatcgaattctgctctttttttcctcgtagatctgctggtggcacctggttgttgcgtttggtct

SEQ ID NO: 61657 - DNA, 883 bp, Populus trichocarpa
  Intron number 1 from transcript POPTR_0001s43920.1 (locus POPTR_0001s43920) derived from phytozome v7.0 (chr-ID scaf fold_1; pos 44320672 to 44321554 reverse strand)
acatacaacctcaaaaataaatctttaatcacgaggttagttatgaaccaaactaccggttttttacggcagcgttacacctggaatgaaatcagtcagacatgggaactctatgcatatgtgccgagagattactgtgacaattacaatctttgtggtgcctatggaaattgcatcattagccagtcgccagtttgtgaatgtttagaaaaattcacgcctaaatcacctgagagttggaattcaatgaactggtctcaagggtgtgtacgaaataagccactagattgccagaagggagatggattcgttaaatatgttggtttgaaattgccagatgctacaaattcttgggtaaacaaaactatgaatctcaaggaatgcaggtcaaaatgcttacaaaactgttcttgtatggcatatacagctacagatattaaggaacgcagtggctgtgctatttggtttggcgatctgatagatattagacagtttccagatggcgggcaggaaatatacattcgcatgaatgcttcagaatcaagtgaatgcttatccttagtcttagttaatccatgagtatatagattattatttaaacatcattttgtagcttctctatttttttagctgcatggtaactgtatttctttctttctttcttctttcttatcgaccatgtagaggctaaagctgcatctaagataaaaatggaaatgggaattgcactatctattttcgtggcctgcgggatgcttttggtcgcctattacatcttcaaaagaacggaaaaactcaaaggtaaagttactttgattgctttcagtaaatgagcatcttgtttttagcgagtttaatagaaaggaacagctttttaactggc

SEQ ID NO: 61658 - DNA, 983 bp, Populus trichocarpa
  Intron number 1 from transcript POPTR_0005s03090.1 (locus POPTR_0005s03090) derived from phytozome v7.0 (chr-ID scaf fold_5; pos 2029687 to 2030669 reverse strand)
gctccggtggaggcaaggggagagatcggttgcgggttggaaggaaaatgagcggctgagagggaagaagaggaacagggggaaccgcgtggatgggggagctggaacggcggagctgcttggtgagggagatggtgagcggcggagagggagaagaacgggaccgcggctggaaaagaagaaggaaatggggaaacggcgtggaggatgaaaggaaatggagcgccggtttgagggaaaaatggaaggggagaggccttggttctggccaaaaaaaaatcaacagggggggcggcggctgctgccaaagatggagaagaaagtgatggttttaggtttaggttttttttttgtatttttttactgatgttgtcaaaattgccccccctacttagctgaaaatgaaggctatttataggcaaaatagttttttcgggctttcaaattggtccctcaagttttgtgtttggcccctaatttcaatcaattcacttggtaaaaattaaattgggtctcttaaaattctgatttttcaattaagtccaaattaagctctcaaacttaatttttcaccaattaagccctcaaattaatttgacccgcttaaagtataattaagtccttgcacttaattaaatccttcaattggacccaaattaattcttgaacataattaaaattcaatttggcccatgattaaatcaaattggcccattaaaaatttaattatgtcattggacttaattcttatgcaaattcgtccaataatcatttaatttgacttttgaatttgcatttttctatttttgggcctaacagcgtacacttgggccttgaaattcctctgaaaattgcagcttgatttccgcctatttttgcagcctttcttggtcggctttctccgcattgccagcctttattttatttttttgatttttattttgaaaaaaagtgacttttggggaatcacccaaaattgggtg

SEQ ID NO: 61659 - DNA, 913 bp, Populus trichocarpa
  Intron number 2 from transcript POPTR_0013s03740.1 (locus POPTR_0013s03740) derived from phytozome v7.0 (chr-ID scaf fold_13; pos 2392657 to 2393569 reverse strand)
aaatcgtggttgggaaggtaagtttcgaaatgttttttctaaggttctttcataatatgctttcatgtaaaagaattggccagtataatatggtatctagttttttataataataataacaaccaagccgcaatcacaaactagttggctggtatatagttttgatgatagtgaaattcttgcctgcagagttccatcttcaataccttatttctttccttatatttgcctcagcatcagaattgaaaatatatggactctcttgatgaagctagtccctttctgtttttctatttatatgtcatattggcatggaactgatgcaattctttagatggatatgactttcttttcatgctattatttctcataaatgttctagttgttgaaggccgtaaatatattgcatttgtagggctatgtgtcactatcatttcatcaattcttggacatgctcgagtttctcaaactcaggggtactgaagtgcttttatcttcttgcaataaaaggttttccccactcatcaaatcaccggttaagtaattccctgcaaaggagtggtcatggcttgaaaagcttaaagattaaaagggtatatggtcatcaccatttgaagaattgaaacagtgtttgtaaatgagaagctagcatgtccaacaatggactcccaaaacaaaaaatatgtcgctgaagcaagcaattaacatatgaagatcatgcctaatatatttaatgaacagttggccaatgagcctttgtttcaaatggcatgtgtctctcctcccctaaaagagcttttgggatgagaggaatttctgatatagcatcaggtggtatttttctttgtttatttatcgccaagacttgcattttgcaggcattgaagcatttgcctagagaaaagatccagtt

SEQ ID NO: 61660 - DNA, 714 bp, Populus trichocarpa
  Intron number 3 from transcript POPTR_0005s17430.1 (locus POPTR_0005s17430) derived from phytozome v7.0 (chr-ID scaf fold_5; pos 14783573 to 14784286 reverse strand)
gtactgctcgttttggcacagctcttgtaccagaggtgatgttttctttttcttaaaatatgtgaactgaatttcgaaaacactgtgaagaccaaatcttcacactgttcaagttgctgctgctttgatgcgctataaccatatattttaatggacttgttttgtaatggtgtctggctttaatcaaatagtactttctattttctttttgtactggattttcctgtctttcagttattatatacgggtgaacctgggccattgggtttaagaggccatttgaattgtgtatgctgtattctattccttttgttttggcagaatctttgcctcgtctactacgctgaatttgtttgagtgatttgtttatatatattcttccaaatttttcttgtttctgtttgaccctgttagtgaattttgtttcaccttgtcttttgaaacaaatgtaaatcgtatctgtgcactcttcatgctttggagtcgtatgtatctaatatcttgcagctttataagcagtgtttgcttcactaggaaatgacttcatgttaccacattatgaactttttataaaataattacagtggacttactttaacagtattttgctgtaaatgtccgttctaatcaattaaaaaataaacccagttttagttgaagcttctgacatcgaagcacttcatgcagggattgctgaaacttaagcacaaatca

SEQ ID NO: 61661 - DNA, 372 bp, Populus trichocarpa
  Intron number 4 from transcript POPTR_0007s06650.1 (locus POPTR_0007s06650) derived from phytozome v7.0 (chr-ID scaf fold_7; pos 5047872 to 5048243)
gaaacgcctggtaaagtgttttttacgggattagtcttgacatgtcatcaaaaatccgtaggcgtgttgcgtgattatgatatgttaattgtagattcataactttgcatcagcctcattcattctaaccgaggtaactttgtttggaatgggtctgacaagagagtgattgccatggttgttaagggtacttacatcttttctttcttcctcatgcctagagtctgttaagcatttgcttcttttcaatatttggcgacttcttgtctaacttttgcttttatcttccccccttaagtaatgacactttgattattaactttctccttggttcatttttgtttggtaattgcagtggttccttgcttttat

SEQ ID NO: 61662 - DNA, 749 bp, Populus trichocarpa
  Intron number 2 from transcript POPTR_0006s21180.1 (locus POPTR_0006s21180) derived from phytozome v7.0 (chr-ID scaf fold_6; pos 20265778 to 20266526)
agtctttgttgattacatattatcttacttatacaattattgaacattaatggtggtttgtggtagcttcccatgtttttgttttgttattaattcaaaaggtatgatcaagaacctttgctaatcctttttctcactaatacaaatcttgtgtgaccatatatactaacttaccactagttgcaattttacttatggaacacacgtttttaagcaaagtcttgctcgttctggtcttgtgaatatgaacatattagaggtgtgcatactcacacctattgaagggcatccctcatacataattttgaacttgtcggatcactacatagagcttttaagaagtgtttgtttttgttcgttaaaacttttccatgtaggggtagggtcccattacatatgttgttattctcacaccttatttggtagatgggttttgttgtgtgttgttcattaacaagtttgattagtttcggtggaactgtggtatgaaatttattttaatcattgaacatctactgtattgcagtacataatttgtttggtcttattgtatctgtcaaacgtggcatgtgaatttcttggcaatgcttaaccactagcaaaaaatctcacgctttatcacaattatcttctggtagaccatccgccactagggatgtgagataggggtgagcaaagttaaggatcttgaagcaaagcttggaccattataagttaaagttgctgaaaaggttagtgaagaatctaac

SEQ ID NO: 61663 - DNA, 584 bp, Populus trichocarpa
  Intron number 1 from transcript POPTR_0002s06060.1 (locus POPTR_0002s06060) derived from phytozome v7.0 (chr-ID scaf fold_2; pos 4038897 to 4039480)
tctgaactcatcacactccaatccatcaactggaggtccctccctatctccctttccctctcgtactgctcatattcattatgttctgttctttcttctttctttacttttattttcgttcttcatccatgaatatgatgtgggtatttgctgttttagtcatttttctttgttccctgataaagaataccccccttttcttgaattgttcgagtgcatatggaattttttttgtcataaataaattctctttcacatttctagaaatagagagtttactgtataaattcacaaccattatgaaaaacactacaacattatctactactgtggaattataagtttttttttagtgttccgggggactgctggaaatattacttctgaatgtgagtcattctatctattctgtttgaatatttcccttaacttattgttcagttttcatatcccattcaaacaagtctttgattgagtggcaagtgacctcgaggttgtggtgttcggtttattgcattatcttgtggttgaatgttatttaagcggaaaaacttaatgattctttgttgttatcaggaatttcg

SEQ ID NO: 61664 - DNA, 399 bp, Populus trichocarpa
  Intron number 1 from transcript POPTR_0003s10880.1 (locus POPTR_0003s10880) derived from phytozome v7.0 (chr-ID scaf fold_3; pos 11734697 to 11735095)
tcttctccttctctgatcgagtcgaatcaaatcaggttctttttttatatttccctaaccattcaaatgacttcttattttaattgtatttttacaattcaaaatctagggtttttttgttgcctattttgggctgtaaatcagatttgttgtaactgatcttttcattcttcatcattttttaacgtttctgtttaattaaaaacggggttcttaatttcttatcaatcaaattgccatggtgctgaaaactgaaaaagttacctgaattgagttaatatataacgatttttttttgtgctttagttttttgttcttctgcttcgaattattttctgattgctgattatttgtttttctgcaggtttttctgggggggggggtttgtagtttggtaat

SEQ ID NO: 61665 - DNA, 465 bp, Populus trichocarpa
  Intron number 5 from transcript POPTR_0002s22810.1 (locus POPTR_0002s22810) derived from phytozome v7.0 (chr-ID scaf fold_2; pos 19772641 to 19773105 reverse strand)
ccaaaggtaccttgttattgtcagtggcagtaagcaaatttttctgttctgctttttttctttaagatcttttggttcttcaaggactggatcctttttagaagtccagtgctaaaaactgtgtttcatggttgttttctgtttgattattggcattgaatatgcttagcttccatttgtaaaattcagcatcttggcacttgtttttagatatgggtttgggctgttgtttctttatgcttaagtgaggttatcatgataagctgtaggattcttgaatttggagtagcttgccctatggatggacaattgtcttaaatgtttaattttgaatatttttatgttatttcatgccaggagaatggacgttgatgttttgtgctgatgattatgcatttttccatgctttataactacgtaatagtgatttttcccataatattctaggtaaaagagctctatctg

SEQ ID NO: 61666 - DNA, 816 bp, Populus trichocarpa
  Intron number 1 from transcript POPTR_0010s13150.1 (locus POPTR_0010s13150) derived from phytozome v7.0 (chr-ID scaf fold_10; pos 13028103 to 13028918 reverse strand)
gcagaagaattcccagcaaggttagttaatttatcgcataatttcgtgtggcttaatcatgtgaatttagcatttcttatccaattgttttgatccttagcatccatgtcctacatctattgcacaaattattaattaatgattgatattttttttcttaatagcaatacttgattgattaaagccctttttgatttctatcaaaaaagaaaaggattagaagccttaggatatatatatatacatatagccatacgcgcgtgagaaactacctaggttgtttcctagaagagataaaatgaatgccttttgtatcacacagtagactggagatcaatagagatccatttctccactcaatgcaggtgtatgagaaattgccatttagctaaaaaacaaaggaggtcatgccaatctcaagcaccgctcctctctaaacaaaatctctaccgccacaaatatgtactcgtttacatatcaaatttagcacagtaataaataagcacgcgcacacagcatgtacattaaggttctatatatgatgacccattcctagccattttaagttgaagtggaatttgttcagtgacatgttgtttgttgtccatgggattcatgaaggtcttgacataagaatattaatgaaggtctaaaagatctaatcaacagaaaaacagcgtaaaagaaagatctagttgtctgcgtgaattattagactgctttttcttgatattctatagcacagtttctacggttcttttttgttaattatggttgctcaatttcctgcttacgtgccatgatgcaggttgttca

SEQ ID NO: 61667 - DNA, 674 bp, Populus trichocarpa
  Intron number 2 from transcript POPTR_0013s04430.1 (locus POPTR_0013s04430) derived from phytozome v7.0 (chr-ID scaf fold_13; pos 3031916 to 3032589)
gagaggaagttggcataaagctggtatttgaataacgttcattttttgtttgaaattttaccttattttcatcttctttattggaatttaatgtattgggcattgactgctaaagaggggtatgcaatgtaagaaatttaggactgatgattctctctgatcaatgagatgtgcaatgtgccttgaattggaatatttttcctttttctttttctgaaagagtatgcttggttcagtttgatttgagtttattttggtagtgccattactacttgaatgcaagaattatgtaaaagaaaaaaatgcatacaaacgcaagaattcttgcatggaaggtgatgtagctgcataagttcttgctatggcatgaacaaacttttgaactgtgacatgcattaatttggtagagaatttcagccagtcctaacctttataagattcttctttaccgtcatcaagaaggcattgttttttaaaggaaaaattaagtcacgtaattgtattgatgaagtgtatgtaattgaatatcaagaaaacaaattgagatccatctattgatttatcttaagttttatctaagaacacatttttctttctcaagctctcagcatatatttcctttttcctgttaattttaaggaacctgtaaggagcaagcaccctcagcttcacta

SEQ ID NO: 61668 - DNA, 825 bp, Populus trichocarpa
  Intron number 1 from transcript POPTR_0014s09380.1 (locus POPTR_0014s09380) derived from phytozome v7.0 (chr-ID scaf fold_14; pos 6964624 to 6965448 reverse strand)
ctagtcaagaaattctttgctctaacaattctcatagaggtaatatttcttctctttttcttttttttttctatttgtcatcttcatcaccatctttacttgtaaattagaaaaagaaaaggggggaaaggagctcatagaaactgtctgactggatcaaaatattatttgggtagctaatggtaattgaggaacaaaagatatcaggaattcttaatttggtatgggtcggtggactttgtaaagtaatgcatgacataggaatcgtgtagtagaggggtagaggaattgacttgactagataattaaatattaaactagcatcattagctaagctataaaaaatatgaagaagaatatgtcaggtgggataatcatttccagttataatatggttctcacccaccttggcatcattcagttttccaagtattaccattcgcagcagccaaaagtcgaattctaaatgaacttgtttcagctcttcagtccccatcatttctaattcaccaacctatgttcagtcaaacaggccacgataatgtatcatcactataaaccttccattcagtttccccttttgcttttattggtagaaggtacgacgaccagacctggttcaacagacatatttgttgtttggtgatttccggccagtcatttgaggatagtaacgtatgccaggaaagttattttactggacataacgagactctaggatcgtcaaaaaaaaattctaaattgagaacatcaatgatctggatcaaatattgacagcatgtcgtttcaggcaatagtcgccaagttgggatccttttcgtgtcg

SEQ ID NO: 61669 - DNA, 589 bp, Populus trichocarpa
  Intron number 2 from transcript POPTR_0004s18590.1 (locus POPTR_0004s18590) derived from phytozome v7.0 (chr-ID scaf fold_4; pos 18434247 to 18434835 reverse strand)
ctaatcgaccggcgattgaaattcgccttgttcaggtaacgtctatttactgatttgttatgttttttatattaattaccgatgcttcttgatattaatttgtgaagatttgattatgaatagaatttgcgattgattaggctgtagattttaagactacgcgaggatgtgttcatgatacaagttttcggcaggtgtttttaggttttgaaggatcctatcttttgtggagaatttggagttcgaagttttgtgtttttgtgttcatcaaaattgattttttgttccacattgttgatgtagaagtaaatgtgatataactataaatatacgagtataatactggtttagttactagccatgaaaggaatcttctgtaaacatgtctttgaatgagtgctgcacttcacactgtgaggctggtttgatctgtttgagttcaataaacgcagctgaatttctgtcaaatgtggattacaaacctcgtttgcatttgctatcttcttttcttgcattgagtcttgtaaactttttaatttatcaagtgcaatcaactgcatctcccacatgcaggttcatcctacttctg

SEQ ID NO: 61670 - DNA, 237 bp, Populus trichocarpa
  Intron number 1 from transcript POPTR_0004s18590.1 (locus POPTR_0004s18590) derived from phytozome v7.0 (chr-ID scaf fold_4; pos 18434914 to 18435150 reverse strand)
caactctggactcacttcaatcgcctccctaccaggtatgtgtgtgtgtgttagtttccgcacatgtacgtgcatctatacgatatatgtgtatgtatgtgacttggtgttgcctcttcgttacggaaatgaaaattttgagttttttttttaatttgaattattagttttttctgtctttttttttttaatcttttggaggacaattctgattttggtaccttttgtggtgtagat

SEQ ID NO: 61671 - DNA, 272 bp, Populus trichocarpa
  Intron number 2 from transcript POPTR_0002s03290.1 (locus POPTR_0002s03290) derived from phytozome v7.0 (chr-ID scaf fold_2; pos 2018172 to 2018443)
caaatcagccagagtgtgtttttgctttattttttattttctttaattttttgttgacttttatttaaaatgaagtgattggagaaaaaaacttattaatttttttttttactgctgggattatttatttcttgagtgaagatttcttgtcatgaattagttgtctaagtcattatgtggaatttttattaacgttgagatttcttgcttcaaaagttgttgaaattttgctcttcattatttatttatttatttcagattgagcactctaa

SEQ ID NO: 61672 - DNA, 395 bp, Populus trichocarpa
  Intron number 2 from transcript POPTR_0005s06140.1 (locus POPTR_0005s06140) derived from phytozome v7.0 (chr-ID scaf fold_5; pos 4044075 to 4044469)
ggcaagcactgctggtcaggtcatacgttgtaaaggtaatagacaaactgctattacaaagcatgtttccttctgccttcttaaatcttgggaatgagattgtttttgcgtgtttaacagtgctagattcttttttgtttatgggaaatcttgttttcaaccagacggtgagatcaaattgtgtggagaattagagaactcactcataattactatttttttcaaaaaaaaaaaaaaaaaaaaagaagaagaaaactagattatgaatttgattgatttaactgtaattttggcctttaaaatatgatataatttttttgaactatgctttaataggtcaatgtatttaaattttttttttaatgattggatggttgtattgtagctgctgtagc

SEQ ID NO: 61673 - DNA, 608 bp, Populus trichocarpa
  Intron number 1 from transcript POPTR_0010s19740.1 (locus POPTR_0010s19740) derived from phytozome v7.0 (chr-ID scaf fold_10; pos 17578222 to 17578829 reverse strand)
ttgcaaatccacttctcgcactagcgtctctcacggtttgtgctttctttcttcttcttttttcaatcaatcgatcggcgaattattgattctcttgcattgcctggattctaattttcattattattgtgattaattcaggttgttttcatatttttaatctttttctggatatagttaatcaactaattcgttgatcaatgtttctgttttgctttacagctgagcaaatactagctcagttcagattacagcgacgaggaggtcaaacttggaactagaaaggactgtttgttaactaatttaggcttatggttaaaagttgtgatttgctatattcttttgcgtgtggggaaaaagagaggctacattacgcagaattatggatttctgttttgaattcgtgtaatgatagctctaattcgtatttataaaagtgacaaatggatttgctatatgtatataaaccagagcagttccatgtttaatttattattattatttttactttttgcatctgaatataattgatggaaaatcaaacttacaattttcttcctgtattttccatattgttgtaggtttgtgggcacacagcataacggttg

SEQ ID NO: 61674 - DNA, 320 bp, Populus trichocarpa
  Intron number 1 from transcript POPTR_0005s25550.1 (locus POPTR_0005s25550) derived from phytozome v7.0 (chr-ID scaf fold_5; pos 23782820 to 23783139 reverse strand)
atgtaagcattttttttgttttgagatttttctgttgttcggttcaattgcttacctaaccataataatattaggatttgttttagttaataatccgcgtaatgtgatttctctgatattaatttggattgaactcgatcggatttgttttagtttgaatgatttcggtattctgtgtttacggttacgaaattgaatatgaagaactggagtttcttttgtggttttcgttatcacattaccgttttgatgaagtaatggtgtgttttttactgttttatccagcttaacgcggaaaagagcccgttccagcggacgta

SEQ ID NO: 61675 - DNA, 814 bp, Populus trichocarpa
  Intron number 2 from transcript POPTR_0009s09970.1 (locus POPTR_0009s09970) derived from phytozome v7.0 (chr-ID scaf fold_9; pos 8700264 to 8701077)
ggactgctttcgctactgggtctccactctgtaaggatttcattcgtttcatgtctcttgtcatcaattacttgctttgcatttgttccttaatttgcaccctattttagctagctgtgtgttcaaagttccagtcttctatcttcatcatttagtataaaaggcagcatttttttatttatttttattgatgtccatcgcagtgagtacaaaatgggttttaaatttaattgggcaagagattgaaaaaaaagaaaaaagaaagttaaagagtacttatggaagcacacctggtgttgttggtttagattcacagctttgtgggaattaacagccaggtagagttatcattgtcttgtgtttgtgaccgagtcaagaaattggtgctttcttgatgtattgcttctacctgtatgttcaagataatctgaaataattcacccagtcagcgaaattatcctgacatccacaagatgtgagctttgagctttaaatttgaacgaacctcagtagatgcaatgaggtttttgttgtgttattaagggtggatgcgaagttagtggctgtctgaatttaaatcgtaatgtggtctgtttttgccatttttcttgttgtgttttttttgccaagaagtcgttccgcaagagtagtttttaacttttaatcgaactgctgaatgtacctatgcagttccaaatgttcctttcttatcctttatcttattggcaaccaaagaaactttaaaagtgtagggaactaatactcaatttctattttagtgatatcaagaacttctcgtcagaaaaaggctgca

SEQ ID NO: 61676 - DNA, 992 bp, Populus trichocarpa
  Intron number 3 from transcript POPTR_0025s00290.1 (locus POPTR_0025s00290) derived from phytozome v7.0 (chr-ID scaf fold_25; pos 80677 to 81668)
agatccaagattttgtaaccttaacaggtatcaattaattaagggtcgtttgataactttttgatttctcttttttactttttttttgtgtgtttgtctttgatttttaaattacggaacgcacttggtctcaatcatatatttaaattagtgggaatccaaagctgggaggtgtcattggaacctttactcagtaccgacttgattctcaaccagttcattctaccattcacaattaacctccggtgactttgggtgcatagtcttgtaaaagggctctcctgtcatctgcttgttgttatcctataaatatattaactccgaatggtttgataaattaactaaatgggattgtgaaagtacaataaatgttattttttattttgaaatgtataaaaatatatattttttatttttttaaatttattttttacatcaacacatcaaaacaatttaaaaataatataaaaaattaatttgatgcaaaaaccaataatcaaattttgatgaaaaacatattaaatctcaatgccaaacaggcactacgagcttatttggtgttgcggttgaaccgccgtttctctattgttttttttttttttaatgttttaatatcaaaaaacaattaaaaaaaattattttaatacatttctaaacaacaaacattctttaaaatataatttctactacacttttaaatatgctctaattaggtgatgaatcataattgttaaatttagtttaataccaaaccattggattaacctataatttttttctcaatatttcaaataattaacgattttgacgtgagtgataattatgtagttggttttcaaatcaaagattcgtctcttaattaaattctttgaagacaaaaatgaatatttaggatttgaaatgcaattgattttgaaattaatcactaattgcatgttataaattaatatcatgcaggctctgaaggaacatcaagacttaacaaattggag

SEQ ID NO: 61677 - DNA, 746 bp, Populus trichocarpa
  Intron number 1 from transcript POPTR_0019s05240.1 (locus POPTR_0019s05240) derived from phytozome v7.0 (chr-ID scaf fold_19; pos 5515277 to 5516022 reverse strand)
accttttgtcggtaaacatatgttctctatcttcttctttttagtttgtatcgatgttaatgttgtttttgtttgtcttgtctttgtcttgatctaacttgtttttgatggtgacagctattataatttgtttttattgtttttatctgcattcatttcgttggatctgtttgggaaactgaggattcaattatgggttccttttgttgtttaaaaagttgggatcttattttcttttttgatgtttggatggtgagaaagaggaggaagatgaaggaaattcaaaattttaaatcacgggatctattatttttggggaccccagaagatgaaaaattaaaaagtcagtaaatggagcctgacacgaccgattcgcttagtttagctgacatattatcgaagtttactcttcgaatctagttatgtaatgacttatattgtcaaaggagatgcttccttctactgctcaaatttgctgttttgattcttaacgctctaggctttgggatgctaatggatatgttactaacatgggaagccaaattgaattgctttgaacacaagaaattagtcgttccttgtcagtaattgtagcaaaccaccatttgactgtaatgtttgtgtgcatgtaaaatttaattgttagaattatttatggctgggttaagatgagttacatgttaattttaatgacttgattgaaaattgcaggagtcctttgagatccctcggggtcagggttccag

SEQ ID NO: 61678 - DNA, 854 bp, Populus trichocarpa
  Intron number 1 from transcript POPTR_0002s01270.1 (locus POPTR_0002s01270) derived from phytozome v7.0 (chr-ID scaf fold_2; pos 666863 to 667716)
gcatacaggtctgcttccccttttacctttccttgatttgctttatattttgctttgaattccattctcgaagttggtttttgttttaattcattttctgtatgttaatgatggattaactctcttttttattcttttttttttttcgtataattacattatttatctaatttgtttccacaaattacaatttatggaaatttttttggtctcttcttatgttttctcttcaaatttatgataaagttgtgagaattttctgacttttatttttgtttttataaatagttccatagcctttggactgttgtaattgctgaaatttcaaggaaagaaacaaattttcgaatacgtccatcaccctatatataaatttccaggaacagttcatatctatatatatatatatatatatatatatatatgaactattactgaaaacgtgttagtaaagttcaatcaccatgcagtgttttacactccgttagaaagtgattttaaaaatttttgaaaatttatttatttattcatttattattttaaattaatatatttttgatgattttgttcttagacgacgagagggaacagctgcatctaatttcattgattcgggaacatgtattatatattgatataaaaaataatttttaaaaacaaaaaatattattttaatatattttaaaataaaaaatattttaaaaaaacatccttataatacagtaaaacatccttataacacagtacttgtcgttttggtactcgaataacggacaaaacgaagttgaattcatgagtgtgtgtcgtttataattgtttcagggcctgcttcaatattttaatctcgtagaagg

SEQ ID NO: 61679 - DNA, 813 bp, Populus trichocarpa
  Intron number 1 from transcript POPTR_0012s04740.1 (locus POPTR_0012s04740) derived from phytozome v7.0 (chr-ID scaf fold_12; pos 4086138 to 4086950 reverse strand)
cccggttcgtcttatacttgtagccggtggctttaagaatgaagaaaacatgcgatctacgtttagatactaagtcgaaactgttttgtgtttctttctctttgaatccttttcttcttgtttccttttctttttattttcaatggattcaatactaattagtgaacataacttggccctcgcctctgcacttctcttattttctcttatctgcttttcctttaagatgtcgtcttttctagggttaggatagatgtacagtgaggtcaatcagatctataaatatatttgtagtataactgatatatagaggcgaatatggtgttagggttgttgtttatgcacgagtttctttgtctgttcttggttagtcgtgtcaatgtgttagggttttgctgggtactgtaaatctttaaagctgagatgggtgatggattagggagtggagctccttgaagtccaatagaggttcttgctgggtagattaagctgctaagctatggatccacagtcctatctatcaaccgaaggataggtttgcggcttgcatatctcaggagctttattgcctaatgttagatccctttttggattgaagggagctctaaacccataaccccttcaaccttctctatctcaagtctttttctaatggtttttgtttctcgtatactgttttgcctgggactaatcctttaatcgttgtttgaatctcttttgtgctgtttgtagtagttagttttcaattctttccctttaccatgcctgttcttcgcagggaactgacttacctcggttgaagcacttatcttt

SEQ ID NO: 61680 - DNA, 892 bp, Populus trichocarpa
  Intron number 1 from transcript POPTR_0009s05500.1 (locus POPTR_0009s05500) derived from phytozome v7.0 (chr-ID scaf fold_9; pos 5592632 to 5593523 reverse strand)
gctctttgcttggataacacagtgacacctccaaggtcagtctatataacatcaatgaagaagcttttcactgttttgctgaaatattgaagctctacgtataaaaccaaagatcaaacaccttctttttaatttcttccccaccctctaaataataattcttcttcttcttcttcttgttcatacacttgttatgacttccgagtaatggttccaaatgaaggcctttgggttgataaatgggctatgtgtctaacaggagaatcctgtctcgacacgctggggacatgccccagttaggtcactagatgggccgagtcttaagaatcgatgagttttcttctcttaacacacactcagtccattcattaacaggcaatttcatatgatctcttattagtagtaatgatcataccatttgctttaatttttgagacgaaaggaatttctcatcttttatcgcaatactctaagaaactgcgtttaaattttcttttgagcaatgacagataaaattagcaccattacgatggaaaaacagggttgaaaactaaacacaaaaaacaggtacatagatcaagaaattggaggaaaccattagtcaggctgagatctttcttttatgtccatctaacttagccacattctacgaggagtttctggcttgataattggaacctggtcgacacacagaatttttggaggcagagagcttaatatacatgtattaagaaacaatattaaagatatgatggagaaagttgaaaaaaagtaatttaaggaacatttacagggtgacaaatcctgggaaacattttatatcacgctatttttctactagtagtaaatttctttcagtttgttccttcaggaattagcttagttctagagc

SEQ ID NO: 61681 - DNA, 754 bp, Populus trichocarpa
  Intron number 1 from transcript POPTR_0009s15080.1 (locus POPTR_0009s15080) derived from phytozome v7.0 (chr-ID scaf fold_9; pos 11685588 to 11686341)
agttaagagacactcccggtcttggtgagtgtttttttccccgactgattggtttacatactgactttagttgcttcttaattggtaacaatgatgtttgagggaagtggaagtagtgtgcttttgttgttttttaattggtaatttgaaccgggttttatttggtttcatagtttgtatggttccttttggattttttgctagtttggattaagttttcgtaggttattagattttgcgagtaaaacaaagtgcttttaattcatttttagcaatgtttttaaattgggttgtgctgattttgagcgtggaggtttgacttcgttaggaattgcaagtaaacaaaatattgtattggcttgctggtagtctgaaattattgggtgattctttgaacggatatatgatgtatggggcttgtttatttattggtgacggttagatactatggggcaataaaaaatgtcaccttctctgttgattttagttgtcattttaatgtattcatgatttgtttttggtatagtgcttcaggttctttttgtttactggatatgatggaagaactctttttgttgttggatttgttggaaatttagaagagttttgatttttggtttgatatttgaagtttttgttgtttattgattcaaagtatagattgtaatggttaacatgtgttttttaatcggtttttgtggttagttttattggcttatggttttgtgtaatgtttcagttcccattggtctat

SEQ ID NO: 61682 - DNA, 459 bp, Populus trichocarpa
  Intron number 2 from transcript POPTR_0008s12570.1 (locus POPTR_0008s12570) derived from phytozome v7.0 (chr-ID scaf fold_8; pos 8141218 to 8141676 reverse strand)
gggtttgaaggaggcattccttttctgcgcataaggtaagaaagttcaatcaaatttgcctgatggtatacattgttttgggttattatctttcataattcttaatatatattgcttgtttctaagcaccaataatctgctaacagcgtatttttttttttcttgaacatgcattaattattggtccttttctacaaacattcagttcatatgcttttagttcttaacaattgcatgggtaactacaaattgttataatcgctgtttcatcgtttacagtcttgtagcagccctgtactgaaaacaaaaacagtcccatttgcttttctggccatcgcgttttccttttaagcttatgttggtgatggaagaactaacattgttttttctcttctttgagatgtacttctggtcatcatcgtaccgggatgcagatattgaattggtttttataaataa

SEQ ID NO: 61683 - DNA, 959 bp, Populus trichocarpa
  Intron number 1 from transcript POPTR_0008s12570.1 (locus POPTR_0008s12570) derived from phytozome v7.0 (chr-ID scaf fold_8; pos 8141680 to 8142638 reverse strand)
gcgattcattctctctgatcttaatatttctcaaggtacggattcagcgattcatttttctttcatttctagggcttaggttttggtcttggttgttttatctttccccatgatcttttcccttctctatttttcttttatttgctagttgaacccatttgtttgatcttgcaaatctagtattatttgttctttttgtcgaatttctatgatccagggttcttacagccgataaaaatgttagctgtcgatcttgattacttagtttctaaagattcatgtaggttgatgatgaacaattaatttaggcttctgaggtagtcccctgttgaacagtcatttcctttgcagaaaagtgaacatatgtgtgtaaaaggggaaaaggagcagactgggtatatgggaaataaactattgagcggactgggtgaatgggaaatgaactatcgatggttgttttaacttggcccaggaatgtatcgttctggcttcagcatttagttttaagtaatctatgatgatagcattctttgctccatttgtaatggctataaccatcacatttcagtttcaaatgtggttttcttttttttttatttaatttaaatggatagggatcattagaacacttctttaataactacaatatacaataattggtttcattgctgtaattttcttgattcggtcagaaatgtattgaaatctgttgaaggtttatgttcttgtgtgtacatgtgtatttgtgctcaggaaatgtctttccatgaaaaaaagaaataactacgtattgctaggatcactttttttgaatgtttaaaaatttgaaactctcccattctctttctgcaatttgagtcttaagtctgcttctaaagtttagttttctgttactgatttagttgttttttggtaaccatgtagacttgcttttcttactgttgtggagagctaatagc

SEQ ID NO: 61684 - DNA, 859 bp, Populus trichocarpa
  Intron number 1 from transcript POPTR_0001s03880.1 (locus POPTR_0001s03880) derived from phytozome v7.0 (chr-ID scaf fold_1; pos 3118628 to 3119486)
aattttaccattcaacaataaagaattaattttgggtacaaatcgctaatctttctttgattctctcattcatacatgaatgtaatataatgtgttgtgtgtttgcgtgtcgaagtcgaccagttccatgttttgaaagttcgttatgttgttgggtcaatactatgtacataatattttgtgttccttcttcctgctcgatctttccagatccttgtgctgcctcgtaaatttgcgggcttcttataaatcctccctcttaccggcctttttttattttattttttttccctcatagaagctttgctcataaaaaaaacaaactatcatttcttcttgaagaggaggaggaggaatacagaccacgtgtgattttggtgtttttcttgtttggttggttggagatttctgagttttcctttgatttttcattggtaaggagatctctttaataatctcctttttgtttgacttgtttgctttgtggggatcttgtcccaacaattttgttttcaaagatgaaccctttatcttttaatttcaaattttttaatgggttctttcaaacttttcatttggcagagatcagttttattaccagtgttttgtagatcttgaaatttgtgctttggttttgctaaaccatgagctttatcctaagaatgaataatgtcatatggtggtgtttctgtattacatctgtgcgtccctgaaagaaatttttttttttcatttaatttgtcctgtgaaaatgggctactgatttggttgcttgcttgtgcatagctttacttgtatttgatgtattgctttggttgtggcagagacattaagagaaggttgtggttattggtgaagg

SEQ ID NO: 61685 - DNA, 825 bp, Populus trichocarpa
  Intron number 2 from transcript POPTR_0009s07900.1 (locus POPTR_0009s07900) derived from phytozome v7.0 (chr-ID scaf fold_9; pos 7318818 to 7319642)
gaaggtaagcttctgtcataatcaattcttaccactttgttcagattatctttatagaattggctagctgctgttgtttgcctttcccttttgtgctcatgttttggactacataaaagatgtagatatacgatggttttaagtgaaagaagtgttgtccttatctttatcacattgaattgccaggatataaaccgtggaatatactgacctctttattgattgattttctagaatacaatggtggaatgtactcaagcttggttgtaacttgttagtccaatttgctatttatgaatgtttgaattttcctttgtcgtgttattgatgttgtgtagcaactttctatagcaatgtgaatttatcttaatggcatggccgtgtttgtgagtagttttttctttgttgtggtacttcaaatctacgtttagatgctttattgtgcaaacaaaagttatgctataaagctgagagttaaattattaagcatcaaatgtgtagatttaaattgtttattaatgtcatgtatattgttctgctttacttccaagaaggctgagctatatagaagttgaagtgctgaacttgtggacagaagtcttcttttgtttctcaacaatgaaggccaagcttatgagattataatcacctgcctgcttttatttatgtctccatgtcgcatttacttgttgtttaggctgattgtctgtcatatatgtgggtaattaagccagttattgatctttctacgtttattttttccagtatgctataaaaacccataaatttttatgtgaatgacaacttggaatctatttcaggttg

SEQ ID NO: 61686 - DNA, 919 bp, Populus trichocarpa
  Intron number 1 from transcript POPTR_0013s04900.1 (locus POPTR_0013s04900) derived from phytozome v7.0 (chr-ID scaf fold_13; pos 3415679 to 3416597)
accctgttgtcctggctactggacaggttagaccaagaaaatttgtcttctttactttatttatgcatttgggatttcttttcctatatttcttttggattttgagagttgtatgaagttgaattgttattggtttggatgctattcgaatgtgcatgcaagaaattctttatctctggggatttattttaagggtttaatgctaaatttgatgttggaatttgagtgtaatagatttttcaagtattctgcacatacggattcttttttgggttctgcttcaaaattgctgaggctttggatttgcatgattttattttgatggaatttctgcaagtactgaatttttcaaacaatggggttggttcttgttttcttgttttcttttcttctttggttttttgtatatttgatttcagttaacaaatttattggaaaaagaaagaaatttatgggcgaaaatctggttgattattgatcattgtctgcatccaagattttgagataagagctaaaggaaattccagttttgattctttatacagccttgataattttggttaaaccgtttgcaatcgttttccatattagagataacttcgtctgatggccaattaattttcgatagagacctcaaagactaggactaggaattgaaccctgctctcgagcattaatgaacctgtcaccaacaaagtggagatgctcttgtgctatgactgatttgtatttgtgatagtgaccttgcagaagtagaaagaggaatgtacatgtccatgttcattttacttgaatttctgtggtatagtagttggtttcatatttgttctatgatttgatggctaccgagttactcatttactaaaatgtttgatgatttctagacttacgatcgaccattcatccaaagattgctaaa

SEQ ID NO: 61687 - DNA, 773 bp, Populus trichocarpa
  Intron number 2 from transcript POPTR_0003s08490.1 (locus POPTR_0003s08490) derived from phytozome v7.0 (chr-ID scaf fold_3; pos 9908155 to 9908927 reverse strand)
tacctcgaagacagaactattcgtttgcagttgtggttagatccatcacctcacggaactgattttttgtttttgtgttagaaatgcaatatgcatgttgcttttgtgcgtgaatcctgcactgaactcttttcttgagaggggctttatctattcagttctcggtggacaggattaatattgaatggcttgcgtaactatatcagtaccatgatttatttagcaatgtgttattgcgttcagttgcaagggaatttctagtgctcattcatgtccgcacggacaacaaaatgctgtaaaacagagaaaataaataatgttgtgggctttaaaggagtgctatttcttttccaaaaaatatgcacaaattttatgattgcagaagctttgtattgaatcaaaatgaatggcaatccattaaggaagataaatcaagagttgacatagcactgccttgtgagggataggcattcttaaagaactaggaatggagatttgcacattagtagatgtgagggaccatattactatcactatcttcataaatctgattgcagtattttgtataggccaatgtatatgtgtatgcacagacctatctttttgtatatatagttacacaaatgcacatgcatgtattatcgatcctcattcttattgatttttgtgcggcttactatttcttatggaaactcctcctttgtggatgatcgaccttttgcttctgtatgcttgcagggatacagctggacaagaaagattcagaagcctca

SEQ ID NO: 61688 - DNA, 488 bp, Populus trichocarpa
  Intron number 3 from transcript POPTR_0008s06770.1 (locus POPTR_0008s06770) derived from phytozome v7.0 (chr-ID scaf fold_8; pos 4063830 to 4064317)
tgtcaatactcaggtacaatatcattatgctttgctgttatcataggccatggatattctctagctttgtgatgggctttgattatgcaagtagacatgcacagaggattacatgcacagatacacatcaagaggggccacctatggacataaccctacgacctgtttggttaaggcatgtttgactcaattgttggccttgaaatagtttaattccttttaaatcaacagcaccagcaccagcaccagcaccaccaccaccatatatactcttattcatctaaatacgcaagttcaattgtttcttctcttgaaagttccatatagaatagcaactcaatttgcaaatgtttgtttgatcaagaacttgggtcattccaaagaccctgtaccattttgtttatcatcatagcgtcagggttgcatggttctgttgttttttcttttccacaggttcccgtgattcttgaggcaacagcattctcaat

SEQ ID NO: 61689 - DNA, 585 bp, Populus trichocarpa
  Intron number 1 from transcript POPTR_0006s08750.1 (locus POPTR_0006s08750) derived from phytozome v7.0 (chr-ID scaf fold_6; pos 6445031 to 6445615)
ttactctgttaacacgactgttagacctcacccaggtaagttctctatttatttatttcctcttatgttaggacagatgaaaaatttcaatatcataaaattaatccattgagaaatagaaggattttgcatgcttgtaataaaataaattaataatatattaattgataaatcataaaaagagttgtttatgttaattaaagataaaagtaaaaaattaatcttccttgttgtaagaagtaaaagatagatctatatgtatgttctatcttgttttttcttttacttttatatgttttttttatttatctcggaagttaatttttatttctaagctcatatgattttcattctaatcaatacatcatgtaaaaacaacttatctatatataatttaatataaaagatttaaagataaattataatattctctttgaagtattatgaaattatcaaaataatttaaagaccaatcactatttaaaaaaataaaataataatttaaagattttcaatatatatattaactttgtgttgtctatgtgaccagaacacaagagggacgttagcttcctgacgagtcta

SEQ ID NO: 61690 - DNA, 713 bp, Populus trichocarpa
  Intron number 1 from transcript POPTR_0016s07690.1 (locus POPTR_0016s07690) derived from phytozome v7.0 (chr-ID scaf fold_16; pos 5535821 to 5536533 reverse strand)
ggatcttccacgtaaaagatctctcctttcagtctgggtctcgtttattttttcttttttttttctttttcaccccatctttctgttcttgatatagtttttgctgaactgggtatgaagggaagtgatctgtgggaaatggtttaatctaatttctaatttttttctataatggcaatttttactacttacacataccatatagcattgataacaccataactggccatagattggttgcacatatatgaaagctatcaaacatggcatttcttgttaagctttcctctggttgtcaatctgaaagtgtttttcatcaacacaatttctattctatatttgtttttgacgcagaggaaaatttttccccatgaaatatacatattcattgtgatattttttgtactcttccatgcaattctaggccaacaaagacgtatattttgattcctatgtatgaaagatgatgctctaaatttttcccaataattaaatattaacaaagaaaaaaaaaacacgtttgtaatttaagggatggattaacgtattctgcaagtaaattcgagggcaggtgttaccaagattaatacaagagattcttaatcatggaatcccatgaaattttatttatttatttttggcttcgtgctagtcactagatatctttgttttgaacagaattttcaggaggcttgcaccatattaaagatcct

SEQ ID NO: 61691 - DNA, 761 bp, Populus trichocarpa
  Intron number 1 from transcript POPTR_0018s06370.1 (locus POPTR_0018s06370) derived from phytozome v7.0 (chr-ID scaf fold_18; pos 6187538 to 6188298)
cgtacgtaaaatcttcttctcttgtaacggttttcagaaaacatcagtgaaaagaattgaagaggttttcttttttatttgattttgatgagttgtaggttttggtaattagttgatcagttttggatatatggtcttttggtagttgaaacgaacttacaataagaccttaagtgagctaagcgagtccacctaacctaattcatacgagtcagattttaattatgcttcactgcatggattttttttataagaaaatatatatatctagaatattaattacttttcagttttcacatttgttaattagagatctatggccggggatgcatattctataatggtaaattgtgtggagaaggcgagaaaggtttgcaacttagaataagataaatacattttcaggattatatatataaaaataccaagaattttgttgatcatagagatacaagagactactaaaagaaatcgaggaatttgatatatatagaaaatgagtgaaatgaatgtgttttttgaggatataaaccattgctttcactcgtctaaaactctcaaaaaaaaaaaaaaaaacaaaaaagtaagccaatattaattgcttattgggtttgattcttctgaactaaactgatcataactgattgttttaacttcaacataaattatcttaattttttgggtggacacttgctatcttcgattaatttgttatgattttcacagagtacgtttggaatttccaaagattgaggttcgtg

SEQ ID NO: 61692 - DNA, 879 bp, Populus trichocarpa
  Intron number 1 from transcript POPTR_0007s04830.1 (locus POPTR_0007s04830) derived from phytozome v7.0 (chr-ID scaf fold_7; pos 3020022 to 3020900 reverse strand)
acttcttacttcccttcaaagcgaaaccaagaaaggtacttttttttttcctttcaagttccttgctttttgggcacttgttgatgtgtcgagtaatgacttcattaacttagttcatctgggccaggcttggatttttcgatttggctatgtagaattgtggattgttgtcaaatacttaagtttgtttgtgggtttttggttatttttccatctctgagttgagcttgtcttctttgatctttccaatttggaaatgtatttttttttttatcttcgccagttcagttctttattttgtctaagccaataaacgctgtcagcaatgtgtttgacgatttttattttgcatgaatccgtcattcatcagcttcttggattgttgtatgtttgagttgcctgagattttacgttggtatcattgttgacgctcgtggcaggttaagaattggtctcatgagtgacaatcaagaagagagaagattgtttcttgtttacttttgtttatagtattctagttttgagcatcccaaaacaagctcatggtaaaattttgcttcgtctcactgtgcttcatcacccattcacatgcattaggaagttgaaaaggtctttttttcttcttgcttggcctgtgaaagaacatcgttttgcttgtgttatgcgtaaactgctatcatgctctttgtatttttgtaattttttgttctgttcttcaactggatactgccaaatgccttgtcttagttgtttgtgctttgctgttgttttcactcatcaatgcataatgattgtgccatgaagaattgatcatgcctcgattctaataagaattatttttcagtttccagttatacactggttgaattggtagcatag

SEQ ID NO: 61693 - DNA, 901 bp, Populus trichocarpa
  Intron number 1 from transcript POPTR_0001s27330.1 (locus POPTR_0001s27330) derived from phytozome v7.0 (chr-ID scaf fold_1; pos 26234216 to 26235116)
caattctctctaggttggaccgtttagacaacgtaagcttatcaactgttgattttgaatcttttgagatgtatagtattaattacattgggtgatttttggcctttcgtatcttttcctttatgctttttcccccttctttttggttcttaggtttgagtgtttttaatctcgttctggggtaattctgttctttctaatcttatcgtataagtaaattgcttgcattaaaaagaaaaaagaaaggtcgattgtactttgcaatccttttttcggggagccatggtgctaaatgcggatgtggcctgcaagatgttaatttcattatcagaaaactagtaaaggttgatgatcttcgtacaagctgctatgccatcaataacctaattaataagcttactgaacattttgaatactcccatgtcttcttcatctctactagtcggtgctaaaaggccagaaaagagggtgtttttctccctcctcttgataaaaggggaagacatttggtaaacaaaatgactaaataaaactagctagtagacatgggaggaaacaaggcatgcccatgtaagggtttctccgcttgtgaaggtctagtcccagcacgcacggccaaattagcagtaacagctagcatctactgcatattccttctttactaggaatcgatgcgacaagacaaatcacttagttaaacaagtaccattagctgtttgatcaattagttttgtaattgccttccttttccacactgattaattaaagcctgactaacaataatcgagctatcaaactttctgtggctaggcggtcttcacttttgctcttttatcaagagaacttttttcgtttgggcccatatatgtttttaaaacgcgtgtgtgcatatgatcaccag

SEQ ID NO: 61694 - DNA, 868 bp, Populus trichocarpa
  Intron number 1 from transcript POPTR_0012s10840.1 (locus POPTR_0012s10840) derived from phytozome v7.0 (chr-ID scaf fold_12; pos 11538900 to 11539767)
gtggctgaggctgagaaacaggtgagttagcggtggttgttggctctttgttctgttctgtttttttcttttcttggctggttgtgttagtgtgtaactgttttaaacggtttcttgaaatgctgctttacattggaaatgtgggtttgtgtctctttaatgatgtttggttttgtggataacattatggttttgttgtcatgaatgtgatttgatttagtggggtttttaggctgtatgggatttgatttagtggggtttttaggctgtattagaaaatttaattggggattttacagaactgattctagtgaattcaattcgaagaatggtgaggacagtcgccggtgtggcgagtgcaatcatggttgttgcactgttacatgctgaattgaagaggttcttgctggaatctctttgcagtatttgggtgaattttgagagttcattgtcaaggctagccatggctggtaggggttagtgcccatagaagaagaagagaggggaaaagagggagagagaccttcactaaacagcctcctgagcttaacgaaatagcaacacatgtacttcttattacaaactaaagattgaaagaaactgacaattgcctaatttcagaaacgcttgtgacatgcgcttacacatgcacgatcatggtaggacagaggccacaaccgtggcagtctgaagtatttgtgaccatatgtgaaattagcagttcggaaccatgatttcgattcttgaacagcataaagttaaaaggaaacattatattgattaattcccgaagatgttattgaaacctaacttggttttgaatttttgtgcaggcaaaagagcagcttcaagcaggaagtgaaaagga

SEQ ID NO: 61695 - DNA, 666 bp, Populus trichocarpa
  Intron number 2 from transcript POPTR_0011s09410.1 (locus POPTR_0011s09410) derived from phytozome v7.0 (chr-ID scaf fold_11; pos 11653804 to 11654469 reverse strand)
ccttgtctatctggaaattattgctttgttcttctgtgttcttttgaaggggtatgcttatcaattttagtattaattttttattttttggacctaattaagtttcttcatggcttcaactccatgttatacgttgtgtcgcatgtatagaggacagaattcttgattcaaaacaaaagataaattgttcttgcaaagaatatttcttagaaagtttactgtaccaaacaaaccaagaaatttttatcattactcctatgccattcatttgatgtttgttgggttctaatcctgctttgatgggaccaaaattacgtaactgacttattattataaacagtgaaaatgaaactcaccaattcattatttgggtttcacattggtttggtttttaccccgtggaggagggtggtgattttgaatgtttataatttctttattcgaacatctcatttgttcctcgtcagatattatatttttttttgggattaaagtaggtgttcgggccagcttgcatgtaccttaactaatcctacggaccctgaaattaacgaccatagaagcctctagtggctctgagaggactcaaacttgtaactattggggagcaaactcaaaacttgaccagttgagctacccctcaggtcatcaaatatcatacttgtt

SEQ ID NO: 61696 - DNA, 907 bp, Populus trichocarpa
  Intron number 1 from transcript POPTR_0004s05240.1 (locus POPTR_0004s05240) derived from phytozome v7.0 (chr-ID scaf fold_4; pos 3990286 to 3991192)
gactaagagatcctccaaattgtctactcattcaggttagtggtttttttccttctttctctctctctctctctctcttcttatgagaattggagattttgaatgctgattgtttgcagatattctttccttaactctgggaatctgttgttaattcagttgaatgaatggttattgcggctggctgacttttggatgctctttgtttggttggtgatgcatgtgccaaaattttcatttctgtagtaattcatgatgaaaaatagagtttaaggcaattcagtaagataatttatcccaatgtttaagtttttgcataatgtagttaatagtaattgctcttaaattataagtctcaacttgagtgatgagactggataaagatacgagtaaggctgtagaagataaaaagaattgaatcttattgctctcttttgagttttacccctaaggtcaaattttttgaactcagctcaactgaattgttatacgcttaaacaaatgttcaagcaaggtttaaaattggaatcattttgtctttttgtcatgcattgttgaagtgatcagatagagcaaaagttgttgaacttaagagaatttgaaaagaattggagaaaggaaataaaatttcaaagacttgacgattcgcttgagtggttaaggtagttgtctgaggttcaattagttggacaatttgagtcttgtataatacaaagcttttggttagcatttgttaatgaagacttgaggttgaaatttgctgttcttttctctttttgtggccaagcagtgaaaatgtaatggcaacaccgatgactaagatatagggagcggttgttgattgttcactccactaagtgggtgtttttggttgcaggtgaagtttccttacctgggggaaaagcag

SEQ ID NO: 61697 - DNA, 789 bp, Populus trichocarpa
  Intron number 1 from transcript POPTR_0006s04320.1 (locus POPTR_0006s04320) derived from phytozome v7.0 (chr-ID scaf fold_6; pos 2947373 to 2948161)
agaaacatatattttgttcttcgtcctcgcctaaggtaagaagaaaaaaaaaaacaatcaggcttttaattacccggatctgttttgattcgctttttttttgctttctatagtattttttgtttgtttgctgagaaagctgaaggaaaatgaaagataaagtaaaacagaaggaaatgagaggctaatcggttttggaaatttaagattttgaatttccgtagaggaaaaacagtttttattttcctcggtaatcaaatagagctttgcctggttcatctgtaagatcttgtggttgattgatgtgatgtgattataaagtttgaattttttttcttgttaattagtgttttattgcgtgattaacatttctaattttgataaatcttgattgagctgggtgttaattagtcaatttaacgttggcttgacttgaattactagaacagattaataatggtttttgttaattctgagcggactgtaaaggttttaactcgttcattgctgctggataacgttttttttttttttttttgctgggttatcattgattatgacaattttctgtataaatgttgaatcttggcttggattttgaatgatttgaacttatcaataagtaaacaattttgaatgattctcaaatagaaaaagaagttggttaatgagttgattagtgttaataacaagttcgaacttgcttacaataggataatttgagagcttgcattgaaatgaatctcattttttttatcttaatttggagtagagagctgcagattttgg

SEQ ID NO: 61698 - DNA, 896 bp, Populus trichocarpa
  Intron number 2 from transcript POPTR_0013s11710.1 (locus POPTR_0013s11710) derived from phytozome v7.0 (chr-ID scaf fold_13; pos 12374077 to 12374972 reverse strand)
caagctgacaccagaacaagttgaacaaatctcaagtatgcatctttttcttaatttctgattgaaatgctttcataggttaatgggtttttttttttaatttagaatgttgttgttagaattggaattgagcttgtatgttttgagattagaagagtgtgaaggctttttaaaattttcacttctgaaaatcttgaagtttgttaatcttcttttgtcttcttcatagattgatcgtcttgttttgactatcgtgttccttaatccttaggttaaaggggaagaactaattgaggtttctttctttttaaggtagaattagatccttgacatgggagcctttatttgtttatcttcaagttgatggatttattatttaggctctctacataagaattttgcatgaatttattgatggataatggatttcatgaagtctgcttttcattggctgttgtggtatgctatatactttgaattatacttggagttttgataaatcagcaattgctttttcatgatattacttttcaatatcataagctaatacttgagaaaatcctgtttaactgtgtgtaattctttgtttgcaaaacaaccaatttcaaatgcatatgatgcctctcttgctgaacgaaaggaggcgtgaaatatgaggtgcatgatggctgttattgtaggtggtgcttttggttcatgtttaagacagtctgtatgctcccgacactgttgaatgttttcgacttttgaattaccatttagaattgtgcattggatatattttcaaatgtccttttctgccattagctatgtattgacaaatctttaatctcataatcatgtgcttgcttttcattgcagaactaccaggtgttcttcaggttgtccccagcaag

SEQ ID NO: 61699 - DNA, 553 bp, Populus trichocarpa
  Intron number 4 from transcript POPTR_0008s17140.1 (locus POPTR_0008s17140) derived from phytozome v7.0 (chr-ID scaf fold_8; pos 11517629 to 11518181)
ttccagaatgtatgtttatcaaccatatgataccctttttgttgactttctaacttctagcttcacatgataataatagtgtggcattaagataggtgtcactgtaaagttgtaaactcttctctgtatttcttcacttttcaagttataaggcttcaaataattaactgttttacttgtaacatatatgagagggatgcttgcctccatctagttctcctcaaattattgctatgacgttgataagcctccattcctggttctatcaaatgtcatgttctttatcctttacagtatagattttaagcttccctagagttcaatcatgtacgactgccatatttgttctccttgaaatgttttaatttcctcatctactccattcttagatgactaaattttttcactagggaatcctttagtgcctttaatttgttcattaacaagtgctaattatcatggtggcttagttacactctttaattgagcttattttactaatatgttttcatttgattttgtttgtaaattctttcttgatctaattgcagga

SEQ ID NO: 61700 - DNA, 645 bp, Populus trichocarpa
  Intron number 1 from transcript POPTR_0011s02660.1 (locus POPTR_0011s02660) derived from phytozome v7.0 (chr-ID scaf fold_11; pos 2574693 to 2575337)
gaaaccaatctcaatctcacttcttcgcagccgtaagccgatccttctttttccttgattcgttttatgatgttcagatagtactgttcttgttaaccattgatccgcacattgatttatgaaaagatcagggtatttagttatcttgatttgagagatttattttgttgaggaactcaaattttacgataccccttttgttgtagaatcactgtcaagtagcatgtaattattgattttgtttgcttttaggagtttaaagattgaaccttggtgagggagaatttgaacgactaacgtttttttttttttacttaaaacttatcctgggaagaaaaaattgagaaaaatgtatgatgttggttaattaacagcctgttttattaagtgggcagagttgaatatatttcggcatgttgtgttattctaaagaagtttgcagttatggtttttttttttttttttgcattatggtctgatgttggaacattacagtatgttaattgctgtggtttgtttagacagacagtaagctttgcttagcatttggaagatgtcttgaattttaatgtacttggctttttatgttatggtatgagggattttgtagtcaaagagaaggactagagaaccaaaggaagaaaa

SEQ ID NO: 61701 - DNA, 539 bp, Populus trichocarpa
  Intron number 2 from transcript POPTR_0008s20200.1 (locus POPTR_0008s20200) derived from phytozome v7.0 (chr-ID scaf fold_8; pos 13991193 to 13991731)
tcttgaagcttaacagatcagaatttgaattggaggtgagtccttttgcttttcttgtatctgttgtacattcattttccggcttttggatctgttgcataaaagttaagctgcatatgatcaatggaaaagttgttagctcagggttgagttttgccttgattctagaatcattaaatagttttcttccctagaatcatcaaatagttttcttccctctttgatcacatcagaattattagatagttggatcagagaattcttttcattctctgaaatggccaggtagtcgaagcaccttttaatcctaaatagagctcatctggatgcttaaaatatgactttagagcctagtttcctggaattacaacagaattattatatatcttttagttacaatgcagtttctgatatctttgacaaggcctgcatttttccttttcaagattttttgcctgctccaagatacatataggttcatgaacacttgataacattggcagttattgccttagtccaggcagtcactatcaacacaa

SEQ ID NO: 61702 - DNA, 647 bp, Populus trichocarpa
  Intron number 2 from transcript POPTR_0001s23320.1 (locus POPTR_0001s23320) derived from phytozome v7.0 (chr-ID scaf fold_1; pos 22638258 to 22638904)
ggacacttttactcaagaattcccaggtatttgtctcgcccattctctgtgtgcatgcgtgcgttattaattaagatgaagatgatgatgatgaagaaagaccaaaaatagcttgttgtctttctacactatatgtcaaaataggtctggttcgggttcattaaattttgatttcagtgataaattttcaaattttagtgtttcaattacttgcgatttctccctttggcttttgcctctttgtatcgggtaatttgctaaggacaagtgattcaactttttttaaatctatattctcttacagatattttcaacgaaagcttgttgtctgtctacactatatatcaaaatatagttttgattttacgaatgaagaagctaaattaaacagtaactaaatagaactttactccaccatgtttctgattaatttcttaattttttattttatttaaatgatgttaattaatacagtagcatgatcattaaatgatcatattctgatcatttcaagggaatttaaacaaaaagactttatattactattacatttagaccaaaagtatatatatatacacacacacacaaacacattaatgtacagctccatcaatcatttttatgaaaacattcagaaagaatagctg

SEQ ID NO: 61703 - DNA, 329 bp, Populus trichocarpa
  Intron number 1 from transcript POPTR_0009s06640.1 (locus POPTR_0009s06640) derived from phytozome v7.0 (chr-ID scaf fold_9; pos 6381603 to 6381931 reverse strand)
gctccgtcttgacccctgctttcaccgcatctcaggtaacaaaattatccaattcaaatacagaaattttttcgtagaaaccaaacggagcgttattttgatttgtttttggagttcgatgcctaattttatttcttttcaataaatatctcattttctcggaaacgaaacgaagcattatcggcctctgacaggcgttgttctcgaaatttttgatcactctatacctagtaatgattaatttactcgatgcaatgaggcatctaaatttgttgggccattttgttgttgcagccctcaaaaaatctcagcacttcaactgcgcagaa

SEQ ID NO: 61704 - DNA, 747 bp, Populus trichocarpa
  Intron number 2 from transcript POPTR_0011s01500.1 (locus POPTR_0011s01500) derived from phytozome v7.0 (chr-ID scaf fold_11; pos 1058910 to 1059656 reverse strand)
gaaaagttgggtgagtttttctagacaagcgatctttgaatttacttttgtttgattttgttcgaaggaaaatacatcgaggctcgtcctgcccacataaaatatatataggcagcaaagagagctaaaatttaacttttcggactgctgagagaaggcaacaactatactaatgcaattattgaaaatcttagtccattttcttataattctttttctgaatttgatcctcacaccaccatttttgtgcttttacaagctatattttcttgatttcctttcttccaaccattataaacccgattcctaaaacgcatggttacctgatatggagtctggcttggctcaagacttgagtaatgagtttactcaattcagatttatcttaaatatgtattgttttaaataaaaaataaaaaaaataaaaagatattattttaaacaaataacaaataaatttcttgaaattaactgggccaagtaacatagatttgaccaaggtaatatatatttcggttcaataaaaagctcggtttaggttaagctcttgatcaacaagtcaccgtgttgatatgtcaggataagttcaatactaagataaaaaaaaaattccaaaaacatatctatttagttgataactgaagaagtcacttatactccttgatacagattttgcaattcttgatccagatttacaacactagctaggttcttgaagttgatgctatatattgtatgttacagatc

SEQ ID NO: 61705 - DNA, 536 bp, Populus trichocarpa
  Intron number 1 from transcript POPTR_0010s12310.1 (locus POPTR_0010s12310) derived from phytozome v7.0 (chr-ID scaf fold_10; pos 12341572 to 12342107 reverse strand)
cccctgcagggtacagcccctaaaggcgtcataagcaaaatcctttttctaattttgatttaaccttttcttatctcttcttttttgaaaagaaaactagcgatgtttatttataattacaaataaagggttaatgaataaattaattaattaattatcaatgtttcggtggctgaatcggtggaatcaacctggaaaacccggatctgataattttggcttcagtagattctccgagcacttggactcgcaaatcaacaatcagacttgagtaatattttagggttgaaaaaaaaaatggcaagcgagggaagaaaaggtaacagtccaagtctgagtggttcaaactaagctctcatttttttgcagtgagaacgtgcataataaatatagtatagaggcatatgcgagtcaaaaaggtgtaagcctgtaggcccattgggcctctcccccacaaccacaacttttctccatgcggttgcatcaccatccttaaaggagccactcccgcccccagccccatctttcctttccct

SEQ ID NO: 61706 - DNA, 834 bp, Populus trichocarpa
  Intron number 1 from transcript POPTR_0005s19010.1 (locus POPTR_0005s19010) derived from phytozome v7.0 (chr-ID scaf fold_5; pos 17578245 to 17579078)
gttttttgggttttgttgggtgcattttgtggtatgtggggtttcttcctttccttttcttttctttcagtctctctcatgcactgactgttgtgtgtttaagcacttgtttttaccaagcttatatttgatattttgattcttgtttttggtcctcgaccacaagctaataaataagaaacacggaaggtgcatgtatgcttgtgacagttttttattgggagattggtctctagagagacatttcccaatatgtaaaagtgtcgaaaatatgacgtactctcatgctttgattctgcttttttgtgttgatgatcttctcaatcaagtattgctgtttgttattttttatattaagttcttacaaatttcttggtttgcttcttcctttttacgttttcctgtttgtttatccttttatgagcattaattgaagctggttcccatcaaaattctactgtaattgaaacagtttttgtttatatttaaattatgagatatggtccttgtgttgggaagttttcaaattcttgaagctgaatttatgacttgttgtggtaattcatgaggtttgattggtatttatttattttggtgttaaattatgaacacagattctgtgtcactttcttgacttgattctgaaaactcttacgtattcacctccactttgaaacaactttgttggtagtgatgctctctcttgtataatccaattcccctcaaaattgatgctttttgtccactgttttggtggctccctgaactaataccaagatatgctgtcttctcgttgcaggtgttgtgtagcttaaattgaaaggtgacggtagg

SEQ ID NO: 61707 - DNA, 181 bp, Populus trichocarpa
  Intron number 3 from transcript POPTR_0017s13850.1 (locus POPTR_0017s13850) derived from phytozome v7.0 (chr-ID scaf fold_17; pos 14059243 to 14059423)
tcaacattgttcaggtaatagtttttctttgttttattattattagttttttgaaaccattgtaactatgctttcctttggttatgcgaggactggtctgtatgtgtgtttgtgaatgttaatcatttttcttctaatatttggtttttgggtttcttgatttttaggcggctattggtgg

SEQ ID NO: 61708 - DNA, 594 bp, Populus trichocarpa
  Intron number 2 from transcript POPTR_0001s35090.1 (locus POPTR_0001s35090) derived from phytozome v7.0 (chr-ID scaf fold_1; pos 33369766 to 33370359)
agccaaatacactactgtggaattggataccgagagtgagttttcccatagacatgcccgtgctcttgacaaaatgattaatacttttggaaattactttgatttttgttctgtttcactgtttattaaatttatttaaaagaaattgtgattcggtcatattcatcgtagaactctatcggttaaggaaacggagggttttcgtagaattgatagaggcagtcttgccatttagaatataatcttcttgcccctaaacagttttaagaaagaaggcacatggattcaatcataagagatggggtggtatgggatccaatcaatcatgaattatatggtcttgctactattgttatgatgatgagatccatatccaatcaatcaatcatacctattgttatgaaatatatgatcatatgctatgcctatgtgtgattttttgcgtgtctcacgtgcttgtttgtctttttgaatattttcagaaggttgaatatacgtatgtattcccttgaaagggtgtgaatttatgtgctgttaatcagggatttgattaattgattatggtacatgcatgttctttgtgttcttaagagg

SEQ ID NO: 61709 - DNA, 425 bp, Populus trichocarpa
  Intron number 3 from transcript POPTR_0005s26230.1 (locus POPTR_0005s26230) derived from phytozome v7.0 (chr-ID scaf fold_5; pos 24298442 to 24298866)
tcgggaaggaaagcggaggcaatataattatattggtattggtcggactccgtatcttttaaacattagtgtttagtaacttgtctcttaaacattatggtttcatagctacgcttttcgatttcctccctgagaaacattgacatcatgcgtgcaagtactctttgttttggacttgtggtccgtgctaatacatttgatgttacttatcatggagcaaggctcgttgcttattttaatgagaaagattttattttcatgacgtggattttatttctcttaataacccagtaaactgtgcgccatgctaggtgtatattttgtcatgcagagaatctttgagatcaatgtttcaggcattataaatgtgttcttgagtcttcattgttatgtgaaatgtattggtagggaaattgttgcgggag

SEQ ID NO: 61710 - DNA, 727 bp, Populus trichocarpa
  Intron number 2 from transcript POPTR_0003s06040.1 (locus POPTR_0003s06040) derived from phytozome v7.0 (chr-ID scaf fold_3; pos 7417116 to 7417842 reverse strand)
ttctttatcataatctttcaagtgcccgttttcaggtaatctatcattatattactttcttttgtatttaaggatgtttatcgcggtaaagttgttttttaaaatattttgtgtttaaaaatatattaaaatattttttttattttttaaaattaatttttgatacgaatatatcaaaattatataaatatatatatataaattaattttaaaaaatatttaaaatttttaaaaacaaggctttgcaaatcatccacttaattagtcttcgttcaatgtccttgtcacccgctcaatcaagaccctttctccatccagtagtatcacacctttcaagatgggaacgatttttattataattaattctcagatattttcaataattcaatggattttcagtgcaattccttttctgccccataaaaaaaaaatataaaaatagttaggctatcatttctgagttttctgcaatactttttttcttcgtgttagacgaacaaccacatattaaaggcgttcttgtttcctaaccgaaaaatcaagctctagatattgttttcatgaagtttcgtgaattagggttaactataatttttcgattcctgtactgaagaattgaaagaagttctttgcttgtcatggtgccaatttcacccacaaaagatatctctcaaggggggaaaaaaaaacttatgtcttggtttcttgttttttctgacagggtacc

SEQ ID NO: 61711 - DNA, 951 bp, Populus trichocarpa
  Intron number 1 from transcript POPTR_0002s02060.1 (locus POPTR_0002s02060) derived from phytozome v7.0 (chr-ID scaf fold_2; pos 1110253 to 1111203 reverse strand)
tttaccagtacgaagcttaccctttctacaacaaggttaaagacactctattttcagctttgtagtggagcatcaaggaaattttttaccttttttcgttaccttgaaatcaattttgaggtaaaattaagtgggaattccaagaaaatgaagaattttgaaatggaggaaggtttagaaaataaagttgaagaatttgcttcttttttcgtttgactctgtgtttctgattctacgagatttttcactaaaaactaaacttgtttggttgataagagtgaacgaagatgagaaatttgctatattatccaatttttcaggttgtattatgctctattgtcacattggggatggaattttaatggggtagaaccaaattttccagtgtatttttttttgttatcctaaaaggcattcattttagggcgggggaatttttttgttgttggaagtatcttcttacagacaatgtattttaacaaatgtgtgtagctgcttttctatgaaggtatttgaataggtatatgactatgctctctaggattcataacctatcaattaagatggatgcaagtttaaaaggttgatgagggttgttgttttcagtcctgttgcaggctgtagagttggtttgagggaggtttagtttgagatgttaagttacgggtccatatctacgaccttcagtatgttcgatccttcaggtatttgggcattttcctcgccaattaccattttgttttttccttcgagtttctatgatgcaaatcaggaggtttgggaagagaccccgtaatttatgaatcctactaaataacgaaaacgtggggaaatcaaagaaacccgattaaaactcattagctgtagttattactttcctagttagctggtagtttcctagtcaaattagtatttagtttcaattatgtattagatcgtttccttagctgg

SEQ ID NO: 61712 - DNA, 857 bp, Populus trichocarpa
  Intron number 2 from transcript POPTR_0014s02980.1 (locus POPTR_0014s02980) derived from phytozome v7.0 (chr-ID scaf fold_14; pos 2448311 to 2449167 reverse strand)
gtcttgcaaactggctttgcctctgtggacacaaggtatgttttgctccttaaacaatcctagtatcaagtgatgctttccttgacttttcttgtatgaatgcttctagacaaagttataaaatatggcctgactcataatcactgtaagtccctggttgcacctgtgaattcaaattaatatcatttttaaaaaaattaaaattaaaatgtttgatgttagtttttattttttaaaaaatagttaaagtagattttacttgaattttaatcaagttgcaagttcattcactaaattaaccggaccaactctcaactttatatattcgacacaaaacctgacctgaccaggtgtcatgattgggttgtgctaatcttccgaacaaaacctgggttcgtttaaaggaaaaggaataatgattatgacgcgtcaggtaggggtcgaacctacgactttctgcttaggaaacagacgctctatccactgagctacagacgcttcgatgctcttcggtgctttttatataaagatccaatgagtaaagctaagtctgtcgtccgccgaagaaatgaagttacaaaggctagatatatagtgcaacgacgtgcaaatatttctttagttatattggcagctggtaggcgccatgtggacgtgccaacaacttgctagaaaaatattcttgtttggtgaattataagatagtgatgtggtagttgtgttttagttgccttaaagtatatatagtggagccgaagctattatttcttaattgtgtttattggctaattaactctatgataaagcgtttttaacttgcaggtattaacgaagtctacgatctctccaagattcaa

SEQ ID NO: 61713 - DNA, 544 bp, Populus trichocarpa
  Intron number 1 from transcript POPTR_0003s17880.1 (locus POPTR_0003s17880) derived from phytozome v7.0 (chr-ID scaf fold_3; pos 17128973 to 17129516 reverse strand)
gcttggactcggagtttatcattctggggttcaaggttagtgctacatggaagagtactagtgttggcatcttcttttgaatctttgtcaagttgcatacctttcaagcttttctattattgaatatgatacattgctagttggatctgttgttatgttttaatttagatcgtttacagtgttggtgcattgaatcttcaaggaaaagcggtgttctttgaagttcaacctttgagtgttaatttgtagctttagaacaggttgcttggttaatgagaatctgcaagaatttttgaatttagaaatttgggttttcttttctgagatccatggaaacaagacacttggtaaagtttaggcacagtgaggttcttttctttaggaaatgtttaaagattccttctttcatctccacggctcttatcaaaggctgaatacttttttcattgttcttaatttttttccctttaatgttttcaatctgtttatatgaaaagtacaatattagtgagattaaaacggggaacatattatgctgcagttc

SEQ ID NO: 61714 - DNA, 433 bp, Populus trichocarpa
  Intron number 2 from transcript POPTR_0001s33750.1 (locus POPTR_0001s33750) derived from phytozome v7.0 (chr-ID scaf fold_1; pos 31913856 to 31914288)
atagctctgtgggggttatcattcttactggcaaggttttcctcttcttcgtgcctttttcaagccttacgaattagtatagtagtaattaatttggttttgtaggcaatgttaaggatgtagaacagcttaaagcttttggtaggttggttctaagttaagaagcaaaactggttttcttgcaacttttctatcgcattttattctgcttgcaagaaagtcatgccattttccttggatacgattgacatgcttgttgtttgctattgcaattttcaatttgtatataaaccttgaatcgagcatactgagattcaagagtgaaatttataagatttcgagatgtttgtttctataaggaggcttgatttgattgtgaaaaaacaatgttgctgtagggaaccaaggccttttgtagcggtggcgatcaggc

SEQ ID NO: 61715 - DNA, 666 bp, Populus trichocarpa
  Intron number 1 from transcript POPTR_0018s02880.1 (locus POPTR_0018s02880) derived from phytozome v7.0 (chr-ID scaf fold_18; pos 2527278 to 2527943)
gtgagaagcccttgattatcgagggtggcaaaaaggtatatttcttgtcaccctttttcttgtttttttatcaacttggatgtgtggttagcttttttttaaatagttatttttatttaaaaatatattaaaatatttttttttattttttaaaaattatttttaatattaacgtattaaaataatataaaaataaaaaagttattaatttaaaataaaacaaataaattttttttaaatttttttaaataaaaaacaaacagtgatgtatagtaatggaagtgtacaggataagacgaagacaagatcatttcacatcttggattgagaaaataaattatatttgatggtaatttgaaattatgaaaggaaaaatctatggagaattatctggatggaagaagattgttctgacataagaatttggatatgaaaatgagaaaagaaaaaataaattttgtagtcccttcttcaattggatcaaaatggacttagcataacaagaacaaattttggttcgtcagagagaattttgtaagatggacaaaaaatttacattggataagtgggatgaaatttagattggagaagagataagaaattatgttctttttttgttctttttttggaatagagcatttcattggaaaaaaagagtgggaagaa

SEQ ID NO: 61716 - DNA, 752 bp, Populus trichocarpa
  Intron number 1 from transcript POPTR_0004s15430.1 (locus POPTR_0004s15430) derived from phytozome v7.0 (chr-ID scaf fold_4; pos 16067053 to 16067804)
taatcactcagagtaccttaaaagataagaagctggtaattttgattgcatgcatgtgatagttagggattcctgttcacttgatgcataaaatctatagctaactagtagattgtcttttatatttattcttcccgatgaacatttttttatgtgttgcatgattgaagtttgaaatgagataacttggaatttggctttgcatgaagcaaaaagaaaagtctgtcattcttgaaaagctttgtccttttcatgaaagttccagatttaagttaatttctagcaaattatcttggtcactgctgggccagaaaggatctgtttttcattttcttttgtgtagagtggaagaaatgttctttctattgaaaaaaggccttctcagggccaataagttgtgctgataaagattgaatgtaagtgacaagccaggatgcatgtgacttttgaacttcgatttcagtgactttaatgttgttgatactataaaagctatagaggggcaacgatgaaaggctagatgtttcaactttaagtgaaacatctacagaataatagttaccactcctgtttttccaatcagtatcagtcatctattttatctgaaatgagataattcttggtttatgaaaatgaaagtaatgactgtgttgcaattatatagaaaaaaaattgtacatggaacatttgatctaactttaatttgagtatctgcagaggattccaaataagtttgcgaggaaatttgggga

SEQ ID NO: 61717 - DNA, 577 bp, Populus trichocarpa
  Intron number 5 from transcript POPTR_0005s22620.1 (locus POPTR_0005s22620) derived from phytozome v7.0 (chr-ID scaf fold_5; pos 21527460 to 21528036)
aaattgagctgcatcgaccttttgtattgagaaaggtatgcttgcttatgctcggttgagctgctttgactttttttaaaatttatggatgctttggaattttgcagcttattttttttcctactatttatgaaggaaaaacagctatttctttcgtagtcttgcatgtaatttgcttgcttacaagcaatctctcagttttttcaagcttttctagcctgcactactactgaatgagtgatgtccaaatgagctatgaccatataaaattctgtaatgtaggtttttcaagcttcatgttatcttatatgctgtttgcagtgtaaatatttgacgttgagctttcaaaactcgggaacataaaatcatatttacgatttgatattcttccaaaaatatgtgaaccatgtttcatggttaatacagataataattatcccaaatgagtgttataataacttgttttcaagagatacaatttggtaactttccatgcgtgtatccttgttatctatgtcactggcttattgacttgtagcttgtgaactgcaatatattgtaggaactttgggactcg

SEQ ID NO: 61718 - DNA, 751 bp, Populus trichocarpa
  Intron number 1 from transcript POPTR_0006s13560.1 (locus POPTR_0006s13560) derived from phytozome v7.0 (chr-ID scaf fold_6; pos 10781586 to 10782336)
ccagaaaccacttgatcagaccaaaacctctccaggtttgtctataaatcttatacttcaggtttttcttatgattttctgaatatactaggatttggttatttttttattgattatgaattttttttttgccttttcttatctgggtgtcttcttaattgatcagagattttgtctccttgttctgaccaaagtcaaagaacgttcggtgattgactattcactcgtttgttcgataatgttactttgtttttcattctaaagattttactttgttttataattgcaagtatttctagccaataaactaaatcttaatgataactttcagacagctcttaatagcttaacttgttttagcaatcactaattcattatccttctttgtgttttcccatacctccgaagtactatggtttcatggatcctcgcgttttttattctacatggacttgattttattttagatcacaaattacgagttccattgtgaggatgagtgggtgctataagattgtttgctgttgccttgtgaacagggacagtaatgtttataaatttttgttttctttggatcattacaagaattcatttgcttgttggtgtttgtcctaatacgtgtttgcttttgagctgttgatggttgtggtttggtttcctctattggtggaaaccctactttgacactttccaaatcatttattgtcttcatccttttctcccccgtttgtgtttgcagagagactgagga

SEQ ID NO: 61719 - DNA, 528 bp, Populus trichocarpa
  Intron number 1 from transcript POPTR_0001s46980.1 (locus POPTR_0001s46980) derived from phytozome v7.0 (chr-ID scaf fold_1; pos 47316579 to 47317106 reverse strand)
ctttagcttccttcttaagatttttgtcagcatttttccaatttgattgaacttgccagccatggatgagtatgtagcctcgtgatgaatgacattatttttcttccccatgattgaattttctaattttttcgatttaacaatgtttttgataacgggcaacaaactcagatggatatagaattgattatttgttaattttaaagttttgttggttatttcggctgcctgaatgtagaatacttattctgtgtgactatgtgaggagattaagttgttctttggacaatgcaattgcttatagagaagcaattgtatttttacacatttgctcttttattcatcatgttttctttgagattaatttgtcatgcagttttcagcttttcttctgctatagtttagttcattaatctgaagacagatgtagatctttcttttgtccctaccttctttttttggcaatgtaatttaactacttaactgtttatttactatttatcctgcagctaggcaacaatcccgcag

SEQ ID NO: 61720 - DNA, 794 bp, Populus trichocarpa
  Intron number 1 from transcript POPTR_0017s00970.1 (locus POPTR_0017s00970) derived from phytozome v7.0 (chr-ID scaf fold_17; pos 723508 to 724301 reverse strand)
ttcccttcatttccaaaaggtctctcctttcttctcatttcacactgtttttggactgctatctcctttttagcttagctgattgaattttttaaacttggtttgcattttttttttatcttggactggataatttggatgaatttgaacatgggcacttgagaagtttcaggcttgagttgttatagtaatttaccaagccgaggagtatagtacttgcattaaaattaggtagaattggacctggctggtgtaaatgaggaatttttcgttttgtttatggtggtctagtagaaccctgtccatgctagcttaggttggaatagctggtccgaagcctggataaaggaggagggttgttgtaggttgactgccattgaaacaacgtgacatttctatggtatggatccttttcatatgaatggttcaagaggatttgtatagctgatgcctaactactttgggattgaggtttggttgttattttttatagtctggtagttttcagaaacatggttatcgagaaaccaaattggatgttggattcggggtttttaatgaaacgaccagattttagcttggtttgtcaattttttttgttagtaagttgtagaatgataaattgttgatcagatgatacgtgtgtttggtgttagcttggtgctggctttcgcactttctttcttgaaatgaggtcagttttgcaagattcggtttgtgcttctatacgatatttgattgctattctttgcttttcaggacacccgagtggcttaagaagatatttgcaacgg

SEQ ID NO: 61721 - DNA, 941 bp, Populus trichocarpa
  Intron number 3 from transcript POPTR_0005s00860.1 (locus POPTR_0005s00860) derived from phytozome v7.0 (chr-ID scaf fold_5; pos 395555 to 396495 reverse strand)
agaagatcttcggtgtacgttgcttatgtaaggttgaaagaaattcaatgtttactgaatatacatgtacaagcagaacttgttttggtcctaccataattccacattctctcgcattcaattatctgatataatttctccaccgtttcttttctgctctattaggtcccagaggtattgaagaggccaatggattgtgtaaattcaattttattccgtctctcatgatgatgttcaagatggttcagggatcaagattgtggaagccatgagatcaatatggtttatctggagaaaactcaaattggacagaagattccagggggagattaagcattgacctctgaaaacagaagcttgcaaaatgacttgtgagccttcatggtcccaacgaagaatcagccagtcccataactgtacactctcaaatatatattatatccaaaatataaataagatatgaatatataaatttctactcattgtcatttatacttgaacttccactgcccctctcccagttattacttattaagtagggaaggggaaggatccacccagccgacctattaattattgagaaattacttgcttgattaaaaaaaataattatatatatatatgttcatcaaaattatcacaatcttgtttcggcaccattttctttgaataagatttaaacttaaaattaataagagggcaagaaaaatatttattcatataaatgaataatttttgtagtaaaaaattggaattaccaactttctttccaatgccttacgcactacttgtgtgaaagatagttctagaaaagtttctgaaaggtattttatatttttcttttattgttcgttgaactttaatacatcttgactatttaagcataatatatatattaccttgtagaacacttcctctttcttccttttcgattgctgcaa

SEQ ID NO: 61722 - DNA, 995 bp, Populus trichocarpa
  Intron number 1 from transcript POPTR_0010s26150.6 (locus POPTR_0010s26150) derived from phytozome v7.0 (chr-ID scaf fold_10; pos 21481395 to 21482389 reverse strand)
ggagcagcagcagctacccccagcacttgaattgggtaaacttaccgccatttcttgtcctttccttcttcttctgatttcatattcataattaattaatttccttcttgttctctcacagtaagttgttgaagctcaatcaatcaatcatctcttcttcttcttcttcttcatcttcagttggatctgccggtttcaaacaccgaatgaatggatgataattgatctacttgcatacatggatagataggtagataaatgtctttttttttatgatagaaatatacaaatattaatttgtttttgtggcagaagttaaagtaaaaatcaaatggccaacatagacatagaaggactcctaaaggagcacctggatgatgaagaggggcgtgtccccaagactaagatcgtttgcactctgggacctgcttctcgatccgtccccatgctcgagaagcttctcagagctggcatgaacgttgctcgcttcaatttctcccatggcacccacgagtaccaccaggagaccttgaacaatctcaggattgctatgcaaaacaccaacatcctctctgctgtcatgctcgataccaaggtctctactcttttttccatctcccactctccccattaattactcctactattaacctcaatttttatttttattttattactgctaatcttaatcaccgtaattcttccatccatccatccatctaccactctctgcttgcctttctattctgtattatacgctgtttatgatgcatttttccttgtcaattaggcatctacaatcacatcagtttctctcttgatgagatcgatatccaagtccctttttttggacagataatgaagcatttgcacctaattaagcagagcacttatttgtcctgtctttcttcttctttgtactcacaaacacatgtttatgtacctccataaccttttgtcttagggacctgagattcgtaccggtttcctgaaag

SEQ ID NO: 61723 - DNA, 544 bp, Populus trichocarpa
  Intron number 1 from transcript POPTR_0011s15130.3 (locus POPTR_0011s15130) derived from phytozome v7.0 (chr-ID scaf fold_11; pos 17292490 to 17293033)
ctttggtaagatcttagctgacgaccatgctttggtaagacctggcagaaccttagcttatttaagagtcgcacttcaacgcttatttttcgtacggacaaacagaacacaatcaatttaccactcttgcttctcaactgcttcacagcactacatctttgcagtaataacagaatctctttcaatttgatatctagtatttctctgcgaatttgttatttatggcgttcactttgattgcccttttatctaaatcttgcttagaattacatttcaatcccatcttagattcatatgttgctgtatgtcttcaaacattagttacaatcaaatctagaggcaagttccattcaaaagcatttcaatctttcttttttttttttcaatttactgtgcaatttattagttatgtccctagacggtgatgatgtttgaagattattattttatttattactgttaccatatctttttcttgttttccataccttgggaaactgatgtgccatggcttttatggtgatttagttaattctacttggca

SEQ ID NO: 61724 - DNA, 863 bp, Populus trichocarpa
  Intron number 4 from transcript POPTR_0015s06020.1 (locus POPTR_0015s06020) derived from phytozome v7.0 (chr-ID scaf fold_15; pos 6322935 to 6323797)
ggaactggtaggatattgtgtggtctcatggttttgcttttgttgtacgtattggttcagtgagatttcgtttgcttaggttggaaaatggaagtcatcttgctcaaagttcttttgaagaattatgggtttttggggtgcactgcagaaaatgaataagagaggaatgatgggaagaattttcatagtgatgctgcagtgctaggattcatggtaattatataagtagctattctttttaaccaaataaataaaaccctaaaatggtgtaaaataattttgtatattcatggcagcaatcaaccggagacatgtttccaaatatgtaaatggcatttgaaatggaccaaattgtgaactgtagatggagtcccagagagtctaactataacctttgaatgtactgtgggcatcatttggaaagtagatatgtagggaaaaaacaataataacaacaaaagtggcagccatagtttgggtagttgaggactcaaaatgagaaatggaggtatgtaggaaaggtataatgcagcaggaaagcaagtaatagacatgtcccaataagaagtacagtacccttgcagaataatagtggatgttcatggacctctgactgcattagtgaatgcattagtgaattttgccacggccaccgtcattaaattatttgattaaccttctcttcttaagattgatatattttactaggatttattaacctctgaatcatattcgtataatacagtatgctctttctaacttggttttcttttcatttatcgttgcatgaaacatgcaatggtgtttttgtattttgattttctttgggaatctcaaagtcaacctccatcctttcaggtgca

SEQ ID NO: 61725 - DNA, 266 bp, Populus trichocarpa
  Intron number 1 from transcript POPTR_0014s09690.1 (locus POPTR_0014s09690) derived from phytozome v7.0 (chr-ID scaf fold_14; pos 7233149 to 7233414 reverse strand)
aggtctccggttcgagtccgggcgacgccattttggtttttttgaattattttaacttttgttctcctggagtatattttccttcatcttgatatgcgacgccgtattctgaattcttatctctgttttttttttttacttgaaaccccgacagtcggcattctatttctctgcgttaataaatcttttcctttccctctcttttcttccctctgacttactgcctatcccctccttctcttccctcgaaccaggaagagagagaa

SEQ ID NO: 61726 - DNA, 455 bp, Populus trichocarpa
  Intron number 4 from transcript POPTR_0006s22010.3 (locus POPTR_0006s22010) derived from phytozome v7.0 (chr-ID scaf fold_6; pos 21031279 to 21031733 reverse strand)
tggggtaccaattacaaaggtcaaacacagaagtggtaaggatacattctcacaaagagaaacaaaaacaatcagatggatcatatcatggaagctaatttgattgacccagatgtgtgtttgttactcctgactacagtttttggttgcttttagttttgctttcatgataaccactgccttgccttttgccgccgttaattcataaataggagtgattccatgtaatggttttgcaaacaatggtttctttgagcatcctttgttatttcggtaacataaatgttgctaaaggggggcatgtctctgtttctgcctttgtgtacttatcatgattgagtctttttctctctacaaattgtcctcgcttaatctcaaaatctacctgctttcttcacgatctcctttaaataattgcagaaagtataggatctgcccctttctgattctaagac

SEQ ID NO: 61727 - DNA, 888 bp, Populus trichocarpa
  Intron number 1 from transcript POPTR_0001s47110.1 (locus POPTR_0001s47110) derived from phytozome v7.0 (chr-ID scaf fold_1; pos 47427335 to 47428222 reverse strand)
tgtttctggttgctccaatcataacagtgttggaggtaatttctttttcgctttttggtgacccttttgatcatttggtgttttttgaatggtgggtttattggttggtgttttagttaaattttgaatctctggttgttttttatgtgaggtgtttttgaattttgattatggtgatcattaggttattgatttttggtgaattgttgtgatttgaactgacccagataggaatttggttgagttttggctcgtttccatttaatctgactcaaagttctgtactttataaaataaaaatatggaattagacctccagctgataatcttaggagatctgctattaaaatttgagtttttaatttcttaattgctttgagttttacaaatgggagctgattttttggtaccaaaaagtatgctttatgttttggtccctgattgaatctgatcgtgtcattatatggagaagtttttagagtaattaagcagctgtagagtggacttttccttctgattggatgcttatttgaacttcataagctggtagctttttggatttctaatgaataatgtttatgctcttctatgtgtcagctcctttacagaccttaataatcaatattttctgataaaccatctgcttcacttattatagtatgaatgataatatattgttaattaggtccttttctgttctttatatcattgttgaatactaattattatatcagctctcctctctctctcctctctctcatattgtcaatgttgaaaattcaaaataccatacaaggcaaaacatcatgtcattatttttgtcttttagttactgttcatgtatcatatcctacagaaactgctgccagggacacgttagaagaggtt

SEQ ID NO: 61728 - DNA, 449 bp, Populus trichocarpa
  Intron number 1 from transcript POPTR_0113s00270.1 (locus POPTR_0113s00270) derived from phytozome v7.0 (chr-ID scaf fold_113; pos 58551 to 58999 reverse strand)
agaagattggtgctgatattgttgcaaaggtctgttctcggttcctttcttttttcaaaagttattttcttcacactttcgcctcactaggatttgatctaaggtgattttcttttcttttgtgagatgtcccttttatgctcatttctttatttggattggtgaattttgcgtctcaaatagaaataagcagcgtttgtgaatgagttaccatgcacaagtgctatatgggctggtgctaaagcagattattgcacaagacttgtaaaacggaccaaggttcctttcataattagtgataaagttggacatccttgtgaaatggttataaatgcagggcgtagtggtttctaaatgactataatgggaaatttcttctccgatttagtaacacataccaatgatgcattacaggcacttcttgcacctgcaaaaacaattgcaactaa

SEQ ID NO: 61729 - DNA, 572 bp, Populus trichocarpa
  Intron number 1 from transcript POPTR_0006s06770.1 (locus POPTR_0006s06770) derived from phytozome v7.0 (chr-ID scaf fold_6; pos 4905122 to 4905693 reverse strand)
cctactcttgttaactacagtggtaagttttaccttttctattcttgggtgtttttggatttcgcttatacgttttgaggtttaaaagtggattaatgtttgttagatttgaggtatattttaatatgctggtttggattggagtcttgtttcagtatgaaaatagtaggtaaagaaataaccttgaagtgcttttttattggttttgtgttctgttgtggcaaaaacatgacctgtctgcaaattagttggatttaattttgtctttgaacaaaagtaatacgaggatagatggaaattcaggaaaggaagaaactttaggagattcgttagattattggtggcttaattgtgaattcttatttgagaggcctagatccttgaagggtttgtcttctgttggaaattcttaagaggctgcaattttttgaaataaaaatcaaagcttgaattttgttgagtctgcttgcttctaatattgtctgcatgaatattttctggcctctgtttactacatagaatcttttagagagctttagcttattggtgtttgttgatgggtttttcaggag

SEQ ID NO: 61730 - DNA, 706 bp, Populus trichocarpa
  Intron number 3 from transcript POPTR_0006s12920.1 (locus POPTR_0006s12920) derived from phytozome v7.0 (chr-ID scaf fold_6; pos 10140649 to 10141354)
cctcgagaggtatgtctgctatacccagaaagaaaaaaagaaaaaaaaaagagtctcccaccttttctttttattttcccaaagaaaaaaagcctccaactttattgttcttctcttattttttctttgactggatttgagtaaaatacagttttggcttttcattttcttttctattggttttttttctctctcgctttttgctactttcttttatcaactggggacttccctcttccctttatcagctagttgctgttatttttttttttggtcatttttgtttgtttctcaaggtttctgttcctctgatgaatacttgatagccttatccacagaatacttgggtagttggcacgtagcactacacctttttcatatataattttggtttctactttctactgccatctctggtttgtagtagagtatttactacttgtgtttttcctgcttggattcttctaaatttcgaatttcattttcttttaagctaaagaattactggctacgaacttgcgtgagttgaactctatgaatcaagcccaccaccttctgcaaaaactcatcattgcttctctgcacaacactccaaacttcactctctctctcacacacaaaattttgatctttttactttctttcactgtgcctgttgtatcctttttcagttaactggcgaaacagtaggggaagtgaaggcagt

SEQ ID NO: 61731 - DNA, 864 bp, Populus trichocarpa
  Intron number 2 from transcript POPTR_0005s01890.1 (locus POPTR_0005s01890) derived from phytozome v7.0 (chr-ID scaf fold_5; pos 1242251 to 1243114)
ccaaggttgtttatttattctctcgcataatgtttttgtatatatatgaggtttgtgtgcaatgaagtttagcatgttagttgtttgtaatgtgtggattgaagttactttcgttgtgcttgcaagttgcaatcatatttggatacttgtcatctaggtttaccttttagacaaatacatgcagattcaggaagttgaaagtggtttccactttttttgcagctagtgtctgatgttgtggtgtagtagttttggatttgtagaacttagcttggattgcaatacgaagtttttgttccttccttgcttggttgttaggacttcttggaacttgaatatgttaactgagcaagtgctaacaatgtttgattggattgcttcataatcccagataatgttgcctttgtgattatctgattcatgggaggcaaatacctaatgggagttcgctgataacacttctggtctttgttagtgttttactagctagtacctcaccgtacatgtttcttcaatttttttggctacttttatgtaggctttatcttccttgcaagtagagatgaaatgcaatctgatttctccttttgtgctagcctctgaataatggaaaattcgacatcagccacctttccttaagaataatatctatgtatgctttacatgttctcctgagcactcgttgtctttctctccctgtttttcacatgatttctcatttttttatttttgatgttgtaacatttagtgtaactgttttttactgtgttcttgttggcttttttcctgaacaattttgtactgccgagttttgacatcaaaatccttttcatgtcaaggtggacgcagttgtttacttggtag

SEQ ID NO: 61732 - DNA, 646 bp, Populus trichocarpa
  Intron number 2 from transcript POPTR_0009s07050.1 (locus POPTR_0009s07050) derived from phytozome v7.0 (chr-ID scaf fold_9; pos 6687374 to 6688019)
agattaaactgcttcgccatttggatcacgaaaacgtgagtgcctgggctctttcctttgacttctctgcttatactgttttctgtttgtttccttaatttagcaccatagtagaaaggaaatataaatttattattattattactgctgctgctgctgctgctgctgattgttgtagttgttgttgttttcacattactaagtcgccaattaatatgttaaaacttatataaaaatgcctttttgtgtaaatttaggaatcatgatggaatttcttccgctactaattttaataagcttgattatatcctacaatttctactataatctttctcccagccaacatttcatgcattttgctgcttataacttcgtaaatttgtctgtgcaacaattcaaaagatcatttacattttggcaattttaaaataatggaaaatttaattagtcccaacaaaagaaaataaattgcattatggattctcactatccatacctgtagcaaaagttgaaggtccaattttattaataacgtgcttatccttgcccagtttctggatttggaatgtaaaatgttatcttgtactagaatcagttttcgtgtgctctaaccttttgaatgcaaaacaggttattggtatcagag

SEQ ID NO: 61733 - DNA, 461 bp, Populus trichocarpa
  Intron number 1 from transcript POPTR_0014s10550.1 (locus POPTR_0014s10550) derived from phytozome v7.0 (chr-ID scaf fold_14; pos 7859010 to 7859470)
ctcctcaaatcgacggcgctcctaattaccgtcaggttctctctctctttccatttttcttctcagcagtttccttttccctttcttttcttttttgattaaagcatttgaaatcccccgatttagatgcataccagccttttcttttttcagattagggattttttccccttcgccggaaacaaagaaactgaaatcatgttcccgctttatctttttgcctgtagaattagaagttgaccatgaccatttttaagagcctcatttgtcttattctgcttctaatcttgtaaacgaaaaaaaaaaaagtcaatggccaaaagcattgatcactgtaaattaataattattaaactaatgaattgtcattaattgcatcttatttacttattattattattcacttatttgtggtggctttgataggcggattcgttacctgttcacggtgttgcgattcc

SEQ ID NO: 61734 - DNA, 512 bp, Populus trichocarpa
  Intron number 2 from transcript POPTR_0016s02960.1 (locus POPTR_0016s02960) derived from phytozome v7.0 (chr-ID scaf fold_16; pos 1493049 to 1493560 reverse strand)
agcctaaagagattggtgaaagaatccttgcctgattctgtaattgacattgtagatagcaacatgcagaatagaagagatggatattcagtaaataaggagcactgtgtcacatctacaatggaagttggctttgcaatgtacttatgaatcacctgaagaaaggatcaacacactcgatatcctggcaaggcttcagaagatcaaagtggagttcttgagagaacctgagagacgattgacataagaaacattaactcctagtaccttccagtacctcactgccccttccattttccggctgtgtaagttatattttcttgtcaataatctaaactttaaccgttgcatgaccatttgaagaggcgttaatcccaactttatttcaaaaatattgctatcggagctcctgtcaagaccctctaacctagaatggattaacctgaatttactagagttaactcaagttttgaattaaaaaaagaaaacgctataagcgacataagattctt

SEQ ID NO: 61735 - DNA, 701 bp, Populus trichocarpa
  Intron number 1 from transcript POPTR_0006s24220.1 (locus POPTR_0006s24220) derived from phytozome v7.0 (chr-ID scaf fold_6; pos 22885383 to 22886083)
tctcttttctcttatcaatcatcactttttttcaggtaaccaatccttatactcttgtttgtttcttgatttaatgtttcgatcaactgataatctaattgtttttcttttaacttttcttgctgcttttgttctttattgtttgtaatcagatccgtaagtttttgttcttttaagactttgtttatcgagttttgcgattgttaaagatgaatcagtgttcaaaatctgtacttgattgatgaataatcgctgattatcgtatttttattatgattttgtgggggcctagcgatttgggtttggtggaaaattggatgtgtttttcggtttgatagggatgtgaatttggtgcgagaaaggatttacttttttcccccttgttatgggaaagatgggcatgatttttgtagtgaattatcatatgggctctactcggtgtgtgctttgtattgtggtgcagggtctttttctaaagtgttttttcttgaaaaatgatttctttcagattttttattttatttttgatattggtacatcaaattcttcgaaaaacacttataaaaaacatcactttgatgttttttcaagtaaaatgcacctaaaagtaaaagctaccacactcccaaacacccactaaaatctttttgatgagtttgttattgggttactgagttatttgttggctactgtttgcagtc

SEQ ID NO: 61736 - DNA, 241 bp, Populus trichocarpa
  Intron number 1 from transcript POPTR_0010s09770.1 (locus POPTR_0010s09770) derived from phytozome v7.0 (chr-ID scaf fold_10; pos 10421071 to 10421311 reverse strand)
aagcaagggcggcttcagtgtgtggcttgtggcaggtttgttacttttcaattttattttcttcttctttcttcttcttcttcttcttcttccttttcttgtgagtgatttattgaatattttcttcattttactatacaaatgttggtgtggaagttatagaatgttttctttgagtttaatgggagcgaaaagggtggttttttcatgtgttttcagaggtggctccaggtttggttaa
